United States Patent Application Publication US 2021/0199660 A1 - sequence listing, part 33

SEQ ID NO: 466534 - DNA, 120 bp, Artificial Sequence
  ENSG00000158457_11 (sequence is synthesized)
tcccccatcccagccctcagcattgtgccagagtgatacccttaagtgtttgggtttatgttttcagttttgtttgggaaacagcagttgcacagagagttgggggtactgctgctgcct

SEQ ID NO: 466535 - DNA, 120 bp, Artificial Sequence
  ENSG00000158457_12 (sequence is synthesized)
aacgtgccagtgagacctggctgtggagagtagcactggcagccctgcctggactccacttggcatgataccagctccagaagggaagggagtggagcaggcagtgaggagagagcctgg

SEQ ID NO: 466536 - DNA, 120 bp, Artificial Sequence
  ENSG00000158457_13 (sequence is synthesized)
gggtcggctggggacagccgtatgtgctaggtaggagtggagggagatatgtttaccaaatgcctgtcctgccatcctcccaggtagtcagagtgagctacatcctgccccgccttcatt

SEQ ID NO: 466537 - DNA, 120 bp, Artificial Sequence
  ENSG00000158457_14 (sequence is synthesized)
tccatggaaacatggcagctaggacacggggtacaacagcagccaaattcttccccacctcccttacttcgaaaaaaagtttggaaccctggtccctatactctgcagtcagaagtggga

SEQ ID NO: 466538 - DNA, 120 bp, Artificial Sequence
  ENSG00000158457_15 (sequence is synthesized)
ctgagccatacatgcccttgaattcctccctgtctggccctccctctccagcaagcagggttttctttaacttggcagtgtgcagaggagaagtggtaacacccccaccccattcccctg

SEQ ID NO: 466539 - DNA, 120 bp, Artificial Sequence
  ENSG00000158457_16 (sequence is synthesized)
catcggagctcagtattcctacagggtaagaggtaggaatcttgctgggacgaggggagccagaagtggcaataaaagcgtgttgacctgggctacgcgggactccatgaattttccatt

SEQ ID NO: 466540 - DNA, 120 bp, Artificial Sequence
  ENSG00000158457_17 (sequence is synthesized)
ctggcaactggaaggggaggtgtagaagggccctgcagaggacggcactggagactctcctaaacgccacacacctcccccttgctgcccgccacacgcgcgtctccttcaaccgatgca

SEQ ID NO: 466541 - DNA, 120 bp, Artificial Sequence
  ENSG00000158457_18 (sequence is synthesized)
ttgccaccctcccacagcctcgccctctgctctaaattaggtcgaaagagtcccagttccaatctaggaacagcataattttgttccaaaacctgatctgtgtttttctaattaaaatta

SEQ ID NO: 466542 - DNA, 120 bp, Artificial Sequence
  ENSG00000158457_19 (sequence is synthesized)
atttgtcacccaaaacaggagggggatggggaggagggacatgagcactccgctggggccgggacggggaatgaggaggaagaaggccctctcttcccctacccgggccctccaggacct

SEQ ID NO: 466543 - DNA, 120 bp, Artificial Sequence
  ENSG00000158457_20 (sequence is synthesized)
caggaccttctccctgagtcggctgtagggaggactccgaggaagctcggcgcggtgcgctgggcctcctggcgccgggaggagcgcgcgaggcaggcggggcgggcgcgtccggggcgg

SEQ ID NO: 466544 - DNA, 120 bp, Artificial Sequence
  ENSG00000158457_21 (sequence is synthesized)
acttcgtgggtggtccccgcccccgcggcggcctaggcccgcgcctgcgtcccccaacccggaggagatggggggctgtgctagctgcttgcccagcgagtgttcccggagtctcctcgc

SEQ ID NO: 466545 - DNA, 120 bp, Artificial Sequence
  ENSG00000158457_22 (sequence is synthesized)
cgcaccccgctatcgggcgctcagaccaggggctcggcctggcgggaaatagcctcgaccgaactgctgcggggacaaagagccgcgagttcgctccctgcccccagtgtctcctaagcg

SEQ ID NO: 466546 - DNA, 120 bp, Artificial Sequence
  ENSG00000158457_23 (sequence is synthesized)
agccttctgctcctaggaaggcgcctttccagcagccgctgggaccctggccagtgtttagctcccaactagtaacagacggaaagaaaaaataaaattatccagaatctagaataaaaa

SEQ ID NO: 466547 - DNA, 120 bp, Artificial Sequence
  ENSG00000158457_24 (sequence is synthesized)
tatgggtcagccagtggtctgggggactgtgggtaaaagtgaatgtcatcccaagagatgcctcaccctctatgcctgtggggctcttcattacctgccaggtaatggcttctgggaagg

SEQ ID NO: 466548 - DNA, 120 bp, Artificial Sequence
  ENSG00000158457_25 (sequence is synthesized)
ggtttggcaaaaaagcacacgtagcagagtgctttaaatgtacttttaaagacacagaacagtatatatagtaatctactgtgttataaatggttacctacagggggtgaggaactgggc

SEQ ID NO: 466549 - DNA, 120 bp, Artificial Sequence
  ENSG00000158457_26 (sequence is synthesized)
aatacttttgatcacttccatttgcctgcaaagccagaaacttctctcaagaagattatagctgagtatgtaaaacaaaatatatgtacaactgtaataccaacaagcacagtggtaagt

SEQ ID NO: 466550 - DNA, 120 bp, Artificial Sequence
  ENSG00000158457_27 (sequence is synthesized)
tataacaagatatacgaagtaatagaaattaagaagtgagaatatcttcaggcgaaggcaactgggaagctggagctcaaagtttaaggctgtgttaaaacacaacctaaagttcccagt

SEQ ID NO: 466551 - DNA, 120 bp, Artificial Sequence
  ENSG00000158458_0 (sequence is synthesized)
gcacagggtgggagcgctgcgctgcgccgcgctgcgcatcgcggcccgcttgccgcctgccccctgccctagctgggccacctccccgggctgccggtggagggctaagaggcgctaacg

SEQ ID NO: 466552 - DNA, 120 bp, Artificial Sequence
  ENSG00000158458_1 (sequence is synthesized)
agggctaagaggcgctaacgttacgctgtttccggttttccagcgggctctgtttcccctcccaaggcggcggcggctgagcggcggagccccccaaatggcctggccagatgcggcagg

SEQ ID NO: 466553 - DNA, 120 bp, Artificial Sequence
  ENSG00000158458_2 (sequence is synthesized)
tttgctgctcagcgctgccgccgccgccactggagaagggtcggtgcagcagctacagcgacagcagcagcagcagcagcgagaggagcagcagcagcagcagcagcagcagcgagagcg

SEQ ID NO: 466554 - DNA, 120 bp, Artificial Sequence
  ENSG00000158458_3 (sequence is synthesized)
gcagcagcagcaggagcagcagcaacaacagcagcatctctcgtcccgctgcgcccccagagccgcggccgcagcaacagccgcagccccgcagccccgcagcccggagagccgccgccc

SEQ ID NO: 466555 - DNA, 120 bp, Artificial Sequence
  ENSG00000158458_4 (sequence is synthesized)
gttcgcgagccgcagccgccggcggcatgaggcgcgacccggcccccggcttctccatgctgctcttcggtgtgtcgctcgcctgctactcgcccagcctcaagtcagtgcaggaccagg

SEQ ID NO: 466556 - DNA, 120 bp, Artificial Sequence
  ENSG00000158458_5 (sequence is synthesized)
cgtacaaggcacccgtggtggtggagggcaaggtacaggggctggtcccagccggcggctccagctccaacagcacccgagagccgcccgcctcgggtcgggtggcgttggtaaaggtgc

SEQ ID NO: 466557 - DNA, 120 bp, Artificial Sequence
  ENSG00000158458_6 (sequence is synthesized)
tggacaagtggccgctccggagcggggggctgcagcgcgagcaggtgatcagcgtgggctcctgtgtgccgctcgaaaggaaccagcgctacatctttttcctggagcccacggaacagc

SEQ ID NO: 466558 - DNA, 120 bp, Artificial Sequence
  ENSG00000158458_7 (sequence is synthesized)
ccttagtctttaagacggcctttgcccccctcgataccaacggcaaaaatctcaagaaagaggtgggcaagatcctgtgcactgactgcgccacccggcccaagttgaagaagatgaaga

SEQ ID NO: 466559 - DNA, 120 bp, Artificial Sequence
  ENSG00000158458_8 (sequence is synthesized)
gccagacgggacaggtgggtgagaagcaatcgctgaagtgtgaggcagcagccggtaatccccagccttcctaccgttggttcaaggatggcaaggagctcaaccgcagccgagacattc

SEQ ID NO: 466560 - DNA, 120 bp, Artificial Sequence
  ENSG00000158458_9 (sequence is synthesized)
gcatcaaatatggcaacggcagaaagaactcacgactacagttcaacaaggtgaaggtggaggacgctggggagtatgtctgcgaggccgagaacatcctggggaaggacaccgtccggg

SEQ ID NO: 466561 - DNA, 120 bp, Artificial Sequence
  ENSG00000158458_10 (sequence is synthesized)
gccggctttacgtcaacagcgtgagcaccaccctgtcatcctggtcggggcacgcccggaagtgcaacgagacagccaagtcctattgcgtcaatggaggcgtctgctactacatcgagg

SEQ ID NO: 466562 - DNA, 120 bp, Artificial Sequence
  ENSG00000158458_11 (sequence is synthesized)
gcatcaaccagctctcctgcaaatgtccaaatggattcttcggacagagatgtttggagaaactgcctttgcgattgtacatgccagatcctaagcaaaaagccgaggagctgtaccaga

SEQ ID NO: 466563 - DNA, 120 bp, Artificial Sequence
  ENSG00000158458_12 (sequence is synthesized)
agagggtcctgaccatcacgggcatctgcgtggctctgctggtcgtgggcatcgtctgtgtggtggcctactgcaagaccaaaaaacagcggaagcagatgcacaaccacctccggcaga

SEQ ID NO: 466564 - DNA, 120 bp, Artificial Sequence
  ENSG00000158458_13 (sequence is synthesized)
acatgtgcccggcccatcagaaccggagcttggccaatgggcccagccacccccggctggacccagaggagatccagatggcagattatatttccaagaacgtgccagccacagaccatg

SEQ ID NO: 466565 - DNA, 120 bp, Artificial Sequence
  ENSG00000158458_14 (sequence is synthesized)
tcatcaggagagaaactgagaccaccttctctgggagccactcctgttctccttctcaccactgctccacagccacacccacctccagccacagacacgagagccacacgtggagcctgg

SEQ ID NO: 466566 - DNA, 120 bp, Artificial Sequence
  ENSG00000158458_15 (sequence is synthesized)
aacgttctgagagcctgacttctgactcccagtcggggatcatgctatcatcagtgggtaccagcaaatgcaacagcccagcatgtgtggaggcccgggcaaggcgggcagcagcctaca

SEQ ID NO: 466567 - DNA, 120 bp, Artificial Sequence
  ENSG00000158458_16 (sequence is synthesized)
gaggtacgtgtcggccctgaccacgcccgcgcgcctctcgcccgtggacttccactactcgctggccacgcaggtgccaactttcgagatcacgtcccccaactcggcgcacgccgtgtc

SEQ ID NO: 466568 - DNA, 120 bp, Artificial Sequence
  ENSG00000158458_17 (sequence is synthesized)
cccatcagttaccgcctggccgagcagcagccgttactgcggcacccggcgccccccggcccgggacccggacccgggcccgggcccgggcccggcgcagacatgcagcgcagctatgac

SEQ ID NO: 466569 - DNA, 120 bp, Artificial Sequence
  ENSG00000158458_18 (sequence is synthesized)
gcagcgcagctatgacagctactattaccccgcggcggggcccggaccgcggcgcgggacctgcgcgctcggcggcagcctgggcagcctgcctgccagccccttccgcatccccgagga

SEQ ID NO: 466570 - DNA, 80 bp, Artificial Sequence
  ENSG00000158458_19 (sequence is synthesized)
cgacgagtacgagaccacgcaggagtgcgcgcccccgccgccgccgcggccgcgcgcgcgcggtgcgtcccgcaggacgt

SEQ ID NO: 466571 - DNA, 120 bp, Artificial Sequence
  ENSG00000158458_20 (sequence is synthesized)
ctcaacgggctggcggcgcagcgcgcacgggcggcgagggactcgctgtcgctgagcagcggctcgggcggcggctcagcctcggcgtcggacgacgacgcggacgacgcggacggggcg

SEQ ID NO: 466572 - DNA, 120 bp, Artificial Sequence
  ENSG00000158458_21 (sequence is synthesized)
cgagagcacacctttcctgggcctgcgtggggcgcacgacgcgctgcgctcggactcgccgccactgtgcccggcggccgacagcaggacttactactcactggacagccacagcacgcg

SEQ ID NO: 466573 - DNA, 120 bp, Artificial Sequence
  ENSG00000158458_22 (sequence is synthesized)
ggccagcagcagacacagccgcgggccgcccccgcgggccaagcaggactcggcgccactctagggccccgccgcgcgcccctccgccccgcccgccccactatctttaaggagaccaga

SEQ ID NO: 466574 - DNA, 120 bp, Artificial Sequence
  ENSG00000158458_23 (sequence is synthesized)
gaccgcctactggagagaaaggaggaaaaaagaaataaaaatatttttattttctataaaaggaaaaaagtataacaaaatgttttattttcattttagcaaaaattgtcttataatact

SEQ ID NO: 466575 - DNA, 120 bp, Artificial Sequence
  ENSG00000158458_24 (sequence is synthesized)
attttagcaaaaattgtcttataatactagctaacggcaaaggcgtttttatagggaaactatttatatgtaacatcctgatttacagcttcggaaaaaaaaaagaaacaacaaaaaaaa

SEQ ID NO: 466576 - DNA, 120 bp, Artificial Sequence
  ENSG00000158458_25 (sequence is synthesized)
ttaatagaaacctattttgtggtgccttttgctgtatgctcatctggggctccgggggacaggtctgggttgtggggtgctgagagtgacagctgggagagaagaggtgcgggttctgtt

SEQ ID NO: 466577 - DNA, 120 bp, Artificial Sequence
  ENSG00000158458_26 (sequence is synthesized)
gggggcgagggtggggggcggtggggggttggccctaaggaagaactgaggacggaagtagctttgctcccaggcaagagctgaagttcccgacccctgggaggagagggccaggaccct

SEQ ID NO: 466578 - DNA, 120 bp, Artificial Sequence
  ENSG00000158458_27 (sequence is synthesized)
aggcttggagctggagctggggtaacttccagggggagataaagacacagctacccgaatggggaagccctggctactcacagctgttaaaggagggggggcagagaaacgtttccccaa

SEQ ID NO: 466579 - DNA, 120 bp, Artificial Sequence
  ENSG00000158458_28 (sequence is synthesized)
gagcctgagcccagggaggtggcagctctgccaggggcccaatgttggcggctcctgtcccccacagcctccaggacgcccctccgtcctctgcagcaccttcgtttacaggtcgtcttt

SEQ ID NO: 466580 - DNA, 120 bp, Artificial Sequence
  ENSG00000158458_29 (sequence is synthesized)
tctattttacacctgcatgtcctttgcatttcagattctttagattggatgcatggtcacgctgggaccgagaagagccactcgacagtgtattccccttttagcaataaagtaacacca

SEQ ID NO: 466581 - DNA, 120 bp, Artificial Sequence
  ENSG00000158458_30 (sequence is synthesized)
tttccttctcacaggctgcctcctagcccccaacccacctatgacatccactcgtctccagtcctgccctcccacccccaaaaactgggtccactgctaatttgtcaaaaaggtaattgt

SEQ ID NO: 466582 - DNA, 120 bp, Artificial Sequence
  ENSG00000158458_31 (sequence is synthesized)
ttaaaaaaaaaaaaaatcccaaacagaaacagatgggaatcctgtcctgaaatgtctgaacacctgactgttgacacttgaacatttttatattataaataaaatcagaaataactcctg

SEQ ID NO: 466583 - DNA, 120 bp, Artificial Sequence
  ENSG00000158458_32 (sequence is synthesized)
atgtcggagtccaggaggaggggccgcggccgcggcaagaagcacccagaggggaggaagcgggagagggagcccgatcccggggagaaagccacccggcccaagttgaagaagatgaag

SEQ ID NO: 466584 - DNA, 120 bp, Artificial Sequence
  ENSG00000158458_33 (sequence is synthesized)
aagtgcaacgagacagccaagtcctattgcgtcaatggaggcgtctgctactacatcgagggcatcaaccagctctcctgcaagaccccattgtacaaagatgccatccctgggtgctgc

SEQ ID NO: 466585 - DNA, 120 bp, Artificial Sequence
  ENSG00000158458_34 (sequence is synthesized)
ctgtgtcccttcagcccctagcccccactccatgggatgaggggataccagcaaggacactactctagggcacctgggctgcactgcttagaacttggtacccagagccaccacttcccc

SEQ ID NO: 466586 - DNA, 120 bp, Artificial Sequence
  ENSG00000158458_35 (sequence is synthesized)
gttcctggaaccaacttccccaacaccctttgtcagccctcgggggagagggcagccctggtggagatgcggtcagaacaccaggtcctcagagctgtgctggagaagggcaggggggtg

SEQ ID NO: 466587 - DNA, 120 bp, Artificial Sequence
  ENSG00000158458_36 (sequence is synthesized)
gggggcagggcagagcccagaggccattctgcgggtggacgagctgggagggaaggtgggcaggcctcttggggttcctgatgacacctgaatggaataaaaaggaaagaacttaggaaa

SEQ ID NO: 466588 - DNA, 120 bp, Artificial Sequence
  ENSG00000158467_0 (sequence is synthesized)
gccgaccaagagcaggagctggagtctgagccggtggttgcagcggaggcggtgatgtcggtgcaggttgtgtcagccgcggctgccgccaaggtgcctgaggtggagctgaaggacctg

SEQ ID NO: 466589 - DNA, 120 bp, Artificial Sequence
  ENSG00000158467_1 (sequence is synthesized)
cctgagcccctccgaggcggagtcgcaactaggactgagcacggccgccgtgggcgccatggcccccccggcgggcggtggagaccctgaggctccagctcccgccgcggagcggccccc

SEQ ID NO: 466590 - DNA, 120 bp, Artificial Sequence
  ENSG00000158467_2 (sequence is synthesized)
tcggggcccgccgccgctctcagccccgccgccgggaaggtgcctcaggcgtcggccatgaagcggagcgacccacatcaccagcaccagcggcaccgcgacggcggcgaggccctggtc

SEQ ID NO: 466591 - DNA, 120 bp, Artificial Sequence
  ENSG00000158467_3 (sequence is synthesized)
gaggccctggtcagccccgacggcaccgtcaccgaggcgccgcgcacagtcaagaagcagatccagtttgctgaccagaagcaagaattcaacaaacgtcccaccaaaattggacgtcgc

SEQ ID NO: 466592 - DNA, 120 bp, Artificial Sequence
  ENSG00000158467_4 (sequence is synthesized)
tctttgtctcgttccatttctcagtcatctactgacagctacagctcagcggcttcatatacagatagctctgatgatgagacatcgcccagggacaagcagcaaaagaactctaaggga

SEQ ID NO: 466593 - DNA, 120 bp, Artificial Sequence
  ENSG00000158467_5 (sequence is synthesized)
agcagtgacttctgtgttaagaacatcaaacaggcagagtttggacgaagagaaattgaaattgctgaacaagaaatgcctgcattgatggctttgaggaagagagctcaaggagaaaag

SEQ ID NO: 466594 - DNA, 120 bp, Artificial Sequence
  ENSG00000158467_6 (sequence is synthesized)
cctttggctggagccaaaatcgtgggttgcacacacatcactgctcagactgctgtgcttatggaaactctgggtgctctgggggcccagtgccgatgggctgcctgcaacatctattcc

SEQ ID NO: 466595 - DNA, 120 bp, Artificial Sequence
  ENSG00000158467_7 (sequence is synthesized)
actctcaatgaagtggctgctgctctagcagaaagtggatttcctgtttttgcctggaagggagagtcagaagatgacttttggtggtgtatcgatagatgtgtgaatgtggagggctgg

SEQ ID NO: 466596 - DNA, 120 bp, Artificial Sequence
  ENSG00000158467_8 (sequence is synthesized)
cagccaaacatgatcttggatgatggaggggatcttacccactggatttataaaaagtatcccaacatgtttaagaaaatcaagggcatagtagaggagagtgttactggagttcacagg

SEQ ID NO: 466597 - DNA, 120 bp, Artificial Sequence
  ENSG00000158467_9 (sequence is synthesized)
ctgtaccaactgtccaaagctgggaagctgtgtgttccagccatgaatgtcaatgactcagtcaccaaacagaaatttgacaacctctactgttgccgtgaatcaattcttgatggactt

SEQ ID NO: 466598 - DNA, 120 bp, Artificial Sequence
  ENSG00000158467_10 (sequence is synthesized)
aaaaggacaacagacatgatgtttggtggaaagcaagtggtagtctgtggctatggagaggtggggaaagggtgctgtgctgccctgaaagccatgggctccattgtgtatgtaactgaa

SEQ ID NO: 466599 - DNA, 120 bp, Artificial Sequence
  ENSG00000158467_11 (sequence is synthesized)
attgaccccatctgtgccctgcaagcctgtatggatggatttcgactggtgaaattaaatgaggtcatccgacaagtggacattgttattacctgtacaggtaacaagaatgtggtaacc

SEQ ID NO: 466600 - DNA, 120 bp, Artificial Sequence
  ENSG00000158467_12 (sequence is synthesized)
agagagcacttggaccgtatgaagaatagctgcatcgtttgtaacatgggacattccaacacagagattgacgtggcgagtctgcggacaccagaactgacctgggagcgagtgagatct

SEQ ID NO: 466601 - DNA, 120 bp, Artificial Sequence
  ENSG00000158467_13 (sequence is synthesized)
caagttgaccatgtgatatggcctgatggcaagaggatagtactgctggcagagggccgcctgctgaaccttagctgctccacagtgcctacatttgtgctctcaatcactgctactact

SEQ ID NO: 466602 - DNA, 120 bp, Artificial Sequence
  ENSG00000158467_14 (sequence is synthesized)
caggctcttgccttgatagagctttacaatgctcctgagggtcgctataagcaggatgtctacctgttgcccaagaagatggatgagtatgtggccagcctacacctgcctacctttgat

SEQ ID NO: 466603 - DNA, 120 bp, Artificial Sequence
  ENSG00000158467_15 (sequence is synthesized)
gcccacttgacagagctgacagatgaacaggccaagtatctgggactcaacaagaatgggcccttcaagcctaattactacaggtattaagttcctgtaactcaaaccagaatttttaag

SEQ ID NO: 466604 - DNA, 120 bp, Artificial Sequence
  ENSG00000158467_16 (sequence is synthesized)
gaatagaactccaagccttttctccactactatacaagaaagaattcagcaagctgcttctccaatcaaagctgcctgccgtgctcaccctgtgtgttaggttatttatttattaaaatc

SEQ ID NO: 466605 - DNA, 120 bp, Artificial Sequence
  ENSG00000158467_17 (sequence is synthesized)
aagaatcctgtgcctgtagtgttggcccagagtgtggttactgccctgagggccatgaaagccacagaggatgggctgaggaaggaaagaaatggggttactgctcccagtgcatcattt

SEQ ID NO: 466606 - DNA, 120 bp, Artificial Sequence
  ENSG00000158467_18 (sequence is synthesized)
gcatcattccccattgactgaatcctcagcagtggccgtttttcctcttgtccaggctcacgagttagtccagggattccatactccctattccctggagttttctggaataaattttca

SEQ ID NO: 466607 - DNA, 120 bp, Artificial Sequence
  ENSG00000158467_19 (sequence is synthesized)
gcacctgcttttctcagcttggcccttccccgggtgaggccgtttggaattaacatggccagtgtttcacacaagattgggttcccaatcttgaccatcactatcactgccttctttata

SEQ ID NO: 466608 - DNA, 120 bp, Artificial Sequence
  ENSG00000158467_20 (sequence is synthesized)
taaaggctaataaggaaggagtgttatttatggctttgccaagctacatcaagaactcagctgtgctgtgcctaccaggggtctcctttcttacccaggactcctttcttctccttgaat

SEQ ID NO: 466609 - DNA, 120 bp, Artificial Sequence
  ENSG00000158467_21 (sequence is synthesized)
acacttcctggttgcaagagggatgtgcctccattatttcctccacagttttggtatttgtcagacatttgttctgctgtctttctaatccagccaacgtctgctcaggaagtggggcca

SEQ ID NO: 466610 - DNA, 120 bp, Artificial Sequence
  ENSG00000158467_22 (sequence is synthesized)
gctccactgggacccatagttttacttccttgtcatttgattggatagtttccaaggaagcccctccagattggcactatctcagaaaaggagagcttgttgtgaaacactgcttcctga

SEQ ID NO: 466611 - DNA, 120 bp, Artificial Sequence
  ENSG00000158467_23 (sequence is synthesized)
aacttcctgctattgcctaaagctacgtctgaaactgagtagggaaaggcatacttttccagggacttagggggataggctttggaaatgggacaggtctttcagactcacagcttgata

SEQ ID NO: 466612 - DNA, 120 bp, Artificial Sequence
  ENSG00000158467_24 (sequence is synthesized)
ccctaacaaagcagagtatatttatttgtttcccaggaaggccattgcagtttgactggctgagggatacagagatgaaattgtaaactgtatccagattatcaaagctaatttgactag

SEQ ID NO: 466613 - DNA, 120 bp, Artificial Sequence
  ENSG00000158467_25 (sequence is synthesized)
tttgaacctcgtcagacattcattcctttggccattgccatggatgaaaccgagatctgcagtctgatctgtggacttctctgctggcatatcttttatgatttaacctcttccatttga

SEQ ID NO: 466614 - DNA, 120 bp, Artificial Sequence
  ENSG00000158467_26 (sequence is synthesized)
tgattctgtatttcagagtcagtttcttgagtaactccagtgctacaaaaagaattagtaatgtggtgtgggcagcgtgacattttatgtcccacccaaaaattggattccttttggaga

SEQ ID NO: 466615 - DNA, 120 bp, Artificial Sequence
  ENSG00000158467_27 (sequence is synthesized)
ctgatctgttggtctcaggcatttcattaggaccagattggttctaagagttagtctggactggccctaggaaacttgaattaaataagcctcttccccttaccgatcctttttaacact

SEQ ID NO: 466616 - DNA, 120 bp, Artificial Sequence
  ENSG00000158467_28 (sequence is synthesized)
ctcaggtttgtttgtttcccacttttttcctatgctggtctgcctcaaagtctcaagaccaaggtgactcaagataacaccagaccacgcatgatcaccaaaaccttcccatcctgattc

SEQ ID NO: 466617 - DNA, 120 bp, Artificial Sequence
  ENSG00000158467_29 (sequence is synthesized)
tcttcttctacctctaccctctccaacttctcctggtcttcacatatactctcaaagctagtctgaaagtgaccttactttcggaagtagggaagtggaactttggtaaatgactgtttg

SEQ ID NO: 466618 - DNA, 120 bp, Artificial Sequence
  ENSG00000158467_30 (sequence is synthesized)
cctcatttaatagtatacaggctcagcccatagactacagttcttcagaggccatatgtctcagcaagtactggttatattctttttttgtaaggaagatcataaatgctaaaaattcca

SEQ ID NO: 466619 - DNA, 120 bp, Artificial Sequence
  ENSG00000158467_31 (sequence is synthesized)
ctaagccattcagttcttccttttgcctacctagtcctgatttttgtattaattggttccctttagcaagggattcagatctttgtaccttatcttatatccagagcagattccatttgg

SEQ ID NO: 466620 - DNA, 120 bp, Artificial Sequence
  ENSG00000158467_32 (sequence is synthesized)
cagatagatggtctctagcctattgtattcttagaccaaaaatcataacctgctgtttctcagcaaagccttgctctctggagcttactatgtgctggtacttaaagagtacattctgcc

SEQ ID NO: 466621 - DNA, 120 bp, Artificial Sequence
  ENSG00000158467_33 (sequence is synthesized)
ttgctgtagtgaagagacccactccaaataaaaaaggggccacacggggcttctaagttaggttgccagtgttgctgcccatgatgagttatttgcctctgagtttcagatgacctctct

SEQ ID NO: 466622 - DNA, 120 bp, Artificial Sequence
  ENSG00000158467_34 (sequence is synthesized)
gtagggacactgtgttatcaaccattaagaagaaagaaccacaagcctcccaagtatttgggttctatcttagggttgaaatctggtcattattccctctacccttggaatcagagcaat

SEQ ID NO: 466623 - DNA, 120 bp, Artificial Sequence
  ENSG00000158467_35 (sequence is synthesized)
gtgtcttctttcctccaacctcttaccttagatgcatcctggttatctggaagcatgggaaagaaggctacttatctctttgtatgtggctccagtctgtgaggatacataacattttct

SEQ ID NO: 466624 - DNA, 120 bp, Artificial Sequence
  ENSG00000158467_36 (sequence is synthesized)
tgtatgtggctccagtctgtgaggatacataacattttctctacaatgaatctgtgctaatattttgccttctttctttcttttcttttcacccttagagacagggtttcactatgttgc

SEQ ID NO: 466625 - DNA, 120 bp, Artificial Sequence
  ENSG00000158467_37 (sequence is synthesized)
gcctcagcttcctgagtagctggaaccacaggtgtgtgctaccgtgcctggcacttttttgccttcttaatggagatattcagttttctttttttcatttaaacaaagaaaaaaaatgta

SEQ ID NO: 466626 - DNA, 120 bp, Artificial Sequence
  ENSG00000158467_38 (sequence is synthesized)
tctactctaccttccctctgctctcctccctccctatcctacttgcccatatgagcacggctccccatggccacatactcctgcaaagcttttatgctgcttcgcttttctctaaacaga

SEQ ID NO: 466627 - DNA, 120 bp, Artificial Sequence
  ENSG00000158467_39 (sequence is synthesized)
tctgatattgctgctcctgtggttttctcaaaattaactttgccgtggtttttaaaaaggaatcaaaatgcattgttgcattaagctttttcaataaaggaaaattacggaaggaaaata

SEQ ID NO: 466628 - DNA, 120 bp, Artificial Sequence
  ENSG00000158467_40 (sequence is synthesized)
ggcaacaccagcaaattatatgtggacaggttctaaactctatatatacatatatatatatatatctatatatctatatacgtaatcatctagttctgtcatcttactgaaaggaataac

SEQ ID NO: 466629 - DNA, 120 bp, Artificial Sequence
  ENSG00000158467_41 (sequence is synthesized)
acttctaaagatcaccatttctgagaagttcttggaaatctttatgtctaagtgattgtattagatcagcaataatgactatgtaatctcaaaaaacaaataaaatattcttaacatgga

SEQ ID NO: 466630 - DNA, 120 bp, Artificial Sequence
  ENSG00000158467_42 (sequence is synthesized)
attgctgcagaaagtccccactggggaggtgcgggtagagtgtttgggtagcattaaaacagtgagtgccctgtgagaagcacagtgcctgggtgcagcactttgcatcagctctgattt

SEQ ID NO: 466631 - DNA, 120 bp, Artificial Sequence
  ENSG00000158467_43 (sequence is synthesized)
tgaaatcagacacagaaggctttgaagccggccagtaaggggttgtcaggcagttgactaatgctcttgatttgaatcggaggctgctgtgaaaagggatgcagcttctgctagccactg

SEQ ID NO: 466632 - DNA, 120 bp, Artificial Sequence
  ENSG00000158467_44 (sequence is synthesized)
tgaacttctgaatctcactagggttgggtctgctttggggcactcagataaccccagtatttccaaaccagctttcccttttgcttcaggacatatcttacccaagcctgcactatggag

SEQ ID NO: 466633 - DNA, 120 bp, Artificial Sequence
  ENSG00000158467_45 (sequence is synthesized)
aatggctgttgagccactaacagaaatgccttattaaattggggctgtactgctgaaggggttgttggagctgcttcagggattccaaggaagagtagtcccccactccccagcccaaaa

SEQ ID NO: 466634 - DNA, 120 bp, Artificial Sequence
  ENSG00000158467_46 (sequence is synthesized)
agctggctggaaccagagccaacagaattgctgatgaggaaagtttaaaggcctgatcacaagggtccctggaccacagaggtggcagtggggctggtaatgtcactatgctgggcagca

SEQ ID NO: 466635 - DNA, 120 bp, Artificial Sequence
  ENSG00000158467_47 (sequence is synthesized)
agttcttatatattgaatagctgctttttttccagcagtgttagtcaggaagtgtttggaaaatggtggtcatgcttctcttccctcacttctcaaaggccagcgactttgtcctaatcc

SEQ ID NO: 466636 - DNA, 120 bp, Artificial Sequence
  ENSG00000158467_48 (sequence is synthesized)
gcaggaagtggagccgtcagttcctgctttcattctggtgtactgtatgttctgcccatcaaggaaccatctttttatcattaaagatccagtttgctgaccagaagcaagaattcaaca

SEQ ID NO: 466637 - DNA, 120 bp, Artificial Sequence
  ENSG00000158467_49 (sequence is synthesized)
aaggacctctgcgtgttctgaagataaagttagccctacatttcaagttaaggctatccaggaagaatgtctttggcaatctctttcagcttccctcttctggcatgtgtatagcctgca

SEQ ID NO: 466638 - DNA, 120 bp, Artificial Sequence
  ENSG00000158467_50 (sequence is synthesized)
ggtacttaacagaggtaaaaaaatttatatggtgctaggtggctagagaagcttcagtttgctccatggtttggaattttagaggaagcatttttttttttccgagtgttttttattctg

SEQ ID NO: 466639 - DNA, 120 bp, Artificial Sequence
  ENSG00000158467_51 (sequence is synthesized)
attatgaaaatgcttttgacctcaaaagcccctgaatcaaagggaaaggtgaaaaggaaatcgccattggcaatggtagaggctatggaagattgggtcttgcaaaatttattagaagac

SEQ ID NO: 466640 - DNA, 120 bp, Artificial Sequence
  ENSG00000158467_52 (sequence is synthesized)
ttttggctttggttatttctggaaaggattcatgtagcacctctggataatgtctccataaagccagagctttgtcacctcataaattaaaattacattatttttattttctcctttgta

SEQ ID NO: 466641 - DNA, 120 bp, Artificial Sequence
  ENSG00000158467_53 (sequence is synthesized)
tcttttctatttctaaatattatattttcaaaatattatctaataaatgtatgttgcttttatgtttaaaagttactgtgttatctacatcttcttcctttctgcaccacttgcaagaaa

SEQ ID NO: 466642 - DNA, 120 bp, Artificial Sequence
  ENSG00000158467_54 (sequence is synthesized)
aaaagtgatggcagtacttattccattgagagatacaaagcgttttctagagagtgtttcttaaccccccaaaaaacttgggggttaagaactatcttcagaagctcaaacacaaatcag

SEQ ID NO: 466643 - DNA, 120 bp, Artificial Sequence
  ENSG00000158467_55 (sequence is synthesized)
cacagaggtggcagtggggctggtaatgtcactatgctgggcagcaagaagaaatacattgttaatggcaactctgggattaaggcccagcagatccagtttgctgaccagaagcaagaa

SEQ ID NO: 466644 - DNA, 120 bp, Artificial Sequence
  ENSG00000158470_0 (sequence is synthesized)
gagctgcgggagcaggcccggcctggctctctagcggccgcctggctgcagcatgcgcgcccgccgggggctgctgcggctgccgcgccgctcgctgctcgccgcgctcttcttcttttc

SEQ ID NO: 466645 - DNA, 120 bp, Artificial Sequence
  ENSG00000158470_1 (sequence is synthesized)
cgctcttcttcttttctctctcgtcctcgctgctgtacttcgtctatgtggcgcccggcatagtgaacacctacctcttcatgatgcaagcccaaggcattctgatccgggacaacgtga

SEQ ID NO: 466646 - DNA, 120 bp, Artificial Sequence
  ENSG00000158470_2 (sequence is synthesized)
gaacaatcggtgctcaggtttatgagcaggtgcttcggagtgcttatgccaagaggaacagcagtgtaaatgactcagattatcctcttgacttgaaccacagtgaaaccttcctgcaaa

SEQ ID NO: 466647 - DNA, 120 bp, Artificial Sequence
  ENSG00000158470_3 (sequence is synthesized)
ctacaacatttcttcctgaagacttcacctactttgcaaaccatacctgccctgaaagactcccttccatgaagggcccaatagacataaacatgagtgaaattggaatggattacattc

SEQ ID NO: 466648 - DNA, 120 bp, Artificial Sequence
  ENSG00000158470_4 (sequence is synthesized)
atgaactcttctccaaagacccaaccatcaagctcggaggtcactggaagccttctgattgcatgcctcggtggaaggtggcgatccttatccccttccggaaccgccacgagcacctcc

SEQ ID NO: 466649 - DNA, 120 bp, Artificial Sequence
  ENSG00000158470_5 (sequence is synthesized)
cagtcctgttcagacacctgcttcccatgctccagcgccagcgcttgcagtttgcattttatgtggttgaacaagttggtacccaaccctttaatcgagccatgcttttcaacgttggct

SEQ ID NO: 466650 - DNA, 120 bp, Artificial Sequence
  ENSG00000158470_6 (sequence is synthesized)
ttcaagaggcaatgaaagacttggattgggactgtttgatttttcatgatgtagatcacataccggaaagtgatcgcaactattatggatgtggacagatgccgaggcattttgcaacca

SEQ ID NO: 466651 - DNA, 120 bp, Artificial Sequence
  ENSG00000158470_7 (sequence is synthesized)
aattggataagtatatgtatctgcttccttataccgagttctttggcggagtgagtggcttaacagtggaacaatttcggaaaatcaatggctttcctaatgctttctggggttggggtg

SEQ ID NO: 466652 - DNA, 120 bp, Artificial Sequence
  ENSG00000158470_8 (sequence is synthesized)
gagaagatgacgacctctggaacagagtacagaatgcaggctattctgtgagccggccagagggtgacacaggaaagtacaagtccattcctcatcaccatcgaggagaagtccagtttc

SEQ ID NO: 466653 - DNA, 120 bp, Artificial Sequence
  ENSG00000158470_9 (sequence is synthesized)
ttggaaggtatgctctgctgaggaagtcaaaagaacggcaagggctggatggcctcaacaacctgaactactttgcaaacatcacatacgacgccttgtataaaaacataactgtcaacc

SEQ ID NO: 466654 - DNA, 120 bp, Artificial Sequence
  ENSG00000158470_10 (sequence is synthesized)
tgacacccgagctggctcaggtgaacgagtactgagaggagagaatgtacgtttgctttacccaccgccaccaagaaagcagtccgatgagatttttttttggaggggggagggtctaca

SEQ ID NO: 466655 - DNA, 120 bp, Artificial Sequence
  ENSG00000158470_11 (sequence is synthesized)
cagcaagagaacagaaatactgtgtctcatgaaggatcacagagttcagggggaaaatgtgacagcacacgcacaaacgccttcactggatcagccgctggaactgagggagtgagcttg

SEQ ID NO: 466656 - DNA, 120 bp, Artificial Sequence
  ENSG00000158470_12 (sequence is synthesized)
gggacttccttcgtcagcactggctttctgttttcacaagacagacgtctgtcccgctgctctctccccatctcctaccccacatcctgtcttagccgcagtctccagaacccatgatga

SEQ ID NO: 466657 - DNA, 120 bp, Artificial Sequence
  ENSG00000158470_13 (sequence is synthesized)
actgtgatctgccgtggtcctgccgtggtcctgccgtggagcctgtccctacacatgaccttggagcctcttggccttcagagcagaggcaaacccaccacagggcagctgcgttttagg

SEQ ID NO: 466658 - DNA, 120 bp, Artificial Sequence
  ENSG00000158470_14 (sequence is synthesized)
aagagcaaatgaaactccacaccattcttctagatctctggtgttctctttggtttcatttttttaaaaaattaccttctttgggtggggattgagggtggaggggagggtgtttgggaa

SEQ ID NO: 466659 - DNA, 120 bp, Artificial Sequence
  ENSG00000158470_15 (sequence is synthesized)
agataaatagacataaatatataacaatcacttcttgaagaagtataattgtaaataagccatgtaaaatgcctttttaaaatttaattttctagctggctccaattcaaattgaggatt

SEQ ID NO: 466660 - DNA, 120 bp, Artificial Sequence
  ENSG00000158470_16 (sequence is synthesized)
tatgtattaggccacttacttggttggcaagtgcaggaactcagttaaaatgcagttgaagaatgtcatctcccgaattgctgtcactttggcgagggagtggatatagggcatgtcaca

SEQ ID NO: 466661 - DNA, 120 bp, Artificial Sequence
  ENSG00000158470_17 (sequence is synthesized)
aaagaacaaaataacccgacctttattgctgggagctggcttctgtccctttcttcccccccccacgagtcttgcccttgacttctgctctggattcactcttccctgtcggccgcgcat

SEQ ID NO: 466662 - DNA, 120 bp, Artificial Sequence
  ENSG00000158470_18 (sequence is synthesized)
gcaggctgcttcctgcctaaagcaggcccttcggggctcgctgcacacacatctctggctctccaggcttcgtgttctgtcttttcatcagcatggcggggcggggggcggggggcgggg

SEQ ID NO: 466663 - DNA, 120 bp, Artificial Sequence
  ENSG00000158470_19 (sequence is synthesized)
gtgtgtatgggaatccctccccctcttactttttctcttgtggaacttggccacagtttctgaacaatgtgcctacattaccagctggcttcagtgattcctctgtgtccctttttggtt

SEQ ID NO: 466664 - DNA, 120 bp, Artificial Sequence
  ENSG00000158470_20 (sequence is synthesized)
tctggaaagattctttgtcaacattagtaactgatacatagaaccaaggagcactcaaatagggagccaggagccagggagctggtgacacttgtgtgctgtggggcagctgggatccag

SEQ ID NO: 466665 - DNA, 120 bp, Artificial Sequence
  ENSG00000158470_21 (sequence is synthesized)
gtaagaccggattgaagctttgaaattagactaacaaagctccagacagcaagagcccaggtgcactgctcacacccccacctgcattttgaagtcatattattttttgttttgtttttt

SEQ ID NO: 466666 - DNA, 90 bp, Artificial Sequence
  ENSG00000158470_22 (sequence is synthesized)
cctgcattttgaagtcatattattttttgttttgttttttaagacggtctggctctgtcgcctaagctggagtgtgatctcctaggctca

SEQ ID NO: 466667 - DNA, 74 bp, Artificial Sequence
  ENSG00000158470_23 (sequence is synthesized)
tagtagagacaggggtttctgcccaccttgacttcccaaagtgctgggattatgggcgggtgtgagccattgcg

SEQ ID NO: 466668 - DNA, 120 bp, Artificial Sequence
  ENSG00000158470_24 (sequence is synthesized)
cccaaagtgctgggattatgggcgggtgtgagccattgcgcccagccttgaagtcatgttctaaattgtatttgaatttgtgcctctttgtttttccccaaaccaaagccctcaaattgt

SEQ ID NO: 466669 - DNA, 120 bp, Artificial Sequence
  ENSG00000158470_25 (sequence is synthesized)
agtctctgtcggcttctgcagaattctggaaaatgccagttttcctcccccgcccttgttttccataaaacatatttatatattgtgatgaggagtactttctgaagagtacttcgtatt

SEQ ID NO: 466670 - DNA, 120 bp, Artificial Sequence
  ENSG00000158470_26 (sequence is synthesized)
tttttttaattgccttgtttgccttcaacttccttgattttcatagtttacatgggtgtgtgtaggggtgtgtgtgtgtatgtgtgtgggttagggcttttttcgttgcatgtgatggtt

SEQ ID NO: 466671 - DNA, 120 bp, Artificial Sequence
  ENSG00000158470_27 (sequence is synthesized)
ctgtggacatatgatccccacaaactgtgggagtgattggccaggccttgttttgtttgtttgtttgtttgtgtttttgttcttttgaagaatagagtggtatttagaaaataaattgca

SEQ ID NO: 466672 - DNA, 120 bp, Artificial Sequence
  ENSG00000158470_28 (sequence is synthesized)
ttgcaaagctcttatcggctcatatgagagagcaggttcctgcccttgaaaatgccggtaagctatagcatatgttttttaagacttaagcatttcatgctttaaaataccttcacaagt

SEQ ID NO: 466673 - DNA, 120 bp, Artificial Sequence
  ENSG00000158470_29 (sequence is synthesized)
gaacattacacacagaagttcatttggttttcctttgttttatggtgcatatagcaataaagacccccctccaccctgcaacccccatcccccaccgggcctttgtccctgccttggctt

SEQ ID NO: 466674 - DNA, 120 bp, Artificial Sequence
  ENSG00000158470_30 (sequence is synthesized)
ttctccccttctcattctcctctcccctttcctcactgaaggctgtgagttgctttcaatgtgacaacactatgatgtcatttggaaggatttgccaggacagactgattctgagtcctg

SEQ ID NO: 466675 - DNA, 120 bp, Artificial Sequence
  ENSG00000158470_31 (sequence is synthesized)
ggtgccgtatgtgtatgcggcagtgttgtcaggcgatcttgtttgaagctctatgttgccataattaccatcaagtacacactgttggcaaaaggctaacacctgactttagaaaatgct

SEQ ID NO: 466676 - DNA, 120 bp, Artificial Sequence
  ENSG00000158470_32 (sequence is synthesized)
gatttgagaacaaaaggaaaggtcttttttcactgcttaaagtggggtcactttgatacctttgcggtcatgtctgtgtctgatgagtgtagaatctctggatgtgcactgtcagtcatg

SEQ ID NO: 466677 - DNA, 120 bp, Artificial Sequence
  ENSG00000158470_33 (sequence is synthesized)
tgtccaccaggcctcgaatatcatatgggaaatgtcatagttaaaaacgtacagccaggcccgtgtgctgttaatagtgtgaaattgtcatgttaaaaaaaaaaacaggaaccaaatgtg

SEQ ID NO: 466678 - DNA, 120 bp, Artificial Sequence
  ENSG00000158470_34 (sequence is synthesized)
accttgtgcatatattggtagctgaaaatcttcaaggctactgatgggtggccccttaatcttgtctttgattgctgtgtgcagggaaaggtgtccccgtttgttcatgctgttttgggg

SEQ ID NO: 466679 - DNA, 120 bp, Artificial Sequence
  ENSG00000158470_35 (sequence is synthesized)
ggtgggggggtatttgcaagaatactcattttgacataataggtcctcttgtcagagatcctctaccacagacattaatagctgagcaggagccacatggattgattgtatccactcacc

SEQ ID NO: 466680 - DNA, 120 bp, Artificial Sequence
  ENSG00000158470_36 (sequence is synthesized)
attgacgatggcattgagcgtagctagcttatttccatcactacgtgtttttgagcttgctcttacgttttaagaggtgccaggggtacatttttgcactgaaatctaaagatgttttaa

SEQ ID NO: 466681 - DNA, 120 bp, Artificial Sequence
  ENSG00000158470_37 (sequence is synthesized)
aaaacacttttcacaaaaatagtcctttgtcattacattatttactcatgtgtttgtacatttttgtatgttaatttatgaatgattttttcagtaaaaaatacatattcaagaaccaaa

SEQ ID NO: 466682 - DNA, 120 bp, Artificial Sequence
  ENSG00000158473_0 (sequence is synthesized)
gttttctacccaagaatgctacttcaggagatcagtcaaaaggttagggtgatggtgacggtggaaatatagaaaaaggaatttattcaagaggtattcaaaaagaagtgaaatagagat

SEQ ID NO: 466683 - DNA, 120 bp, Artificial Sequence
  ENSG00000158473_1 (sequence is synthesized)
gagttggagatagattggataaaaagagtgagggagagggaggtgtcaggctgcagcccaggttctgagttgccaaagaggagtcttttcctccaggaaattgagacacgccggttgtga

SEQ ID NO: 466684 - DNA, 120 bp, Artificial Sequence
  ENSG00000158473_2 (sequence is synthesized)
aacctactgaagtgagcggcggcgccaggattcctgggaccccgacctctttgcagctcgcacagctaagggcgagggcgcccttcggcagaagcagcaaaccgccggcaagcccagcga

SEQ ID NO: 466685 - DNA, 120 bp, Artificial Sequence
  ENSG00000158473_3 (sequence is synthesized)
ggagggctgccggggtctgggcttgggaattggctggcacccagcggaaagggacgtgagctgagcggcgggggagaagagtgcgcaggtcagagggcggcgcgcagcggcgctccgcga

SEQ ID NO: 466686 - DNA, 120 bp, Artificial Sequence
  ENSG00000158473_4 (sequence is synthesized)
ggtccccacgccgggcgatatggggtgcctgctgtttctgctgctctgggcgctcctccaggcttggggaagcgctgaagtcccgcaaaggcttttccccctccgctgcctccagatctc

SEQ ID NO: 466687 - DNA, 120 bp, Artificial Sequence
  ENSG00000158473_5 (sequence is synthesized)
gtccttcgccaatagcagctggacgcgcaccgacggcttggcgtggctgggggagctgcagacgcacagctggagcaacgactcggacaccgtccgctctctgaagccttggtcccaggg

SEQ ID NO: 466688 - DNA, 120 bp, Artificial Sequence
  ENSG00000158473_6 (sequence is synthesized)
cacgttcagcgaccagcagtgggagacgctgcagcatatatttcgggtttatcgaagcagcttcaccagggacgtgaaggaattcgccaaaatgctacgcttatcctatcccttggagct

SEQ ID NO: 466689 - DNA, 120 bp, Artificial Sequence
  ENSG00000158473_7 (sequence is synthesized)
ccaggtgtccgctggctgtgaggtgcaccctgggaacgcctcaaataacttcttccatgtagcatttcaaggaaaagatatcctgagtttccaaggaacttcttgggagccaacccaaga

SEQ ID NO: 466690 - DNA, 120 bp, Artificial Sequence
  ENSG00000158473_8 (sequence is synthesized)
ggccccactttgggtaaacttggccattcaagtgctcaaccaggacaagtggacgagggaaacagtgcagtggctccttaatggcacctgcccccaatttgtcagtggcctccttgagtc

SEQ ID NO: 466691 - DNA, 120 bp, Artificial Sequence
  ENSG00000158473_9 (sequence is synthesized)
tgtctcaggattctacccaaagcctgtatgggtgaagtggatgcggggtgagcaggagcagcagggcactcagccaggggacatcctgcccaatgctgacgagacatggtatctccgagc

SEQ ID NO: 466692 - DNA, 120 bp, Artificial Sequence
  ENSG00000158473_10 (sequence is synthesized)
aaccctggatgtggtggctggggaggcagctggcctgtcctgtcgggtgaagcacagcagtctagagggccaggacatcgtcctctactggggtgggagctacacctccatgggcttgat

SEQ ID NO: 466693 - DNA, 120 bp, Artificial Sequence
  ENSG00000158473_11 (sequence is synthesized)
tgccttggcagtcctggcgtgcttgctgttcctcctcattgtgggctttacctcccggtttaagaggcaaacttcctatcagggcgtcctgtgactcgccttgccacatctgtgtctctg

SEQ ID NO: 466694 - DNA, 120 bp, Artificial Sequence
  ENSG00000158473_12 (sequence is synthesized)
gaacccaggacctctggacctcaggttcctaagacttcagtcctggtctgctcaggaattgaagatgtaaggaattgaagataggagagataccttgaaaaagtagagaacagtcatgag

SEQ ID NO: 466695 - DNA, 120 bp, Artificial Sequence
  ENSG00000158473_13 (sequence is synthesized)
gcagctttcatcacacccttttaacatttatctaaaagaatttaaattctttttcaaaaattacactacaagtttataagcccaaatggctctgtgaaatcagaagtgcaaaggtgtgca

SEQ ID NO: 466696 - DNA, 120 bp, Artificial Sequence
  ENSG00000158473_14 (sequence is synthesized)
aacttgtatctgaagacctaccagggacaagcaggtaagagctgatgtgagtgtgtgtgatgggatctgtaaggaactggaacacacatgtcctatccaaaggaatcagctgcagctgct

SEQ ID NO: 466697 - DNA, 120 bp, Artificial Sequence
  ENSG00000158473_15 (sequence is synthesized)
tgttgtcaagtataaagtcaggacctggcttggctttaaccgtttttcaagaaaactggaaatctggattttcagcgaacatgcctgattttaaaaggttgactcaagtttttacaaaat

SEQ ID NO: 466698 - DNA, 120 bp, Artificial Sequence
  ENSG00000158473_16 (sequence is synthesized)
actatgtgggacacctcaaatacatacctactgactgatgacaaacccaggagtttgtgtgtcttttataaaaagtttgccctggatgtcatattggcagttggaggacacagtttctat

SEQ ID NO: 466699 - DNA, 120 bp, Artificial Sequence
  ENSG00000158473_17 (sequence is synthesized)
tgtaaatttggatttacgactgaagaaggacattttctctttaaaagaaagttaggttataagaaacagaggcgtctcacatttttacttggtgtaattaataaacgaagataaatcata

SEQ ID NO: 466700 - DNA, 120 bp, Artificial Sequence
  ENSG00000158477_0 (sequence is synthesized)
aagttggaggttggtgacaaggagagaagctggaacagagaggagagtcagaaccagagggaaatgagagactgagtaggcatctcagggtttttgaaggagtggattttctttgttgca

SEQ ID NO: 466701 - DNA, 120 bp, Artificial Sequence
  ENSG00000158477_1 (sequence is synthesized)
gtcaggggaggtttgtctgttggctgcagaaagaagtcagaatagagatatcgtggggtaggtttgtttggaacagaaatcaaagaccaatttttctgagagaaggaaataacatctgca

SEQ ID NO: 466702 - DNA, 120 bp, Artificial Sequence
  ENSG00000158477_2 (sequence is synthesized)
aatgatatgctgtttttgctacttccattgttagctgttctcccaggtgatggcaatgcagacgggctcaaggagcctctctccttccatgtcacctggatcgcatccttttacaaccat

SEQ ID NO: 466703 - DNA, 120 bp, Artificial Sequence
  ENSG00000158477_3 (sequence is synthesized)
tcctggaaacaaaatctggtctcaggttggctgagtgatttgcagactcatacctgggacagcaattccagcaccatcgttttcctgtgcccctggtccaggggaaacttcagcaatgag

SEQ ID NO: 466704 - DNA, 120 bp, Artificial Sequence
  ENSG00000158477_4 (sequence is synthesized)
gagtggaaggaactggaaacattattccgtatacgcaccattcggtcatttgagggaattcgtagatacgcccatgaattgcagtttgaatatccttttgagatacaggtgacaggaggc

SEQ ID NO: 466705 - DNA, 120 bp, Artificial Sequence
  ENSG00000158477_5 (sequence is synthesized)
tgtgagctgcactctggaaaggtctcaggaagcttcttgcagttagcttatcaaggatcagactttgtgagcttccagaacaattcatggttgccatatccagtggctgggaatatggcc

SEQ ID NO: 466706 - DNA, 120 bp, Artificial Sequence
  ENSG00000158477_6 (sequence is synthesized)
aagcatttctgcaaagtgctcaatcagaatcagcatgaaaatgacataacacacaatcttctcagtgacacctgcccacgtttcatcttgggtcttcttgatgcaggaaaggcacatctc

SEQ ID NO: 466707 - DNA, 120 bp, Artificial Sequence
  ENSG00000158477_7 (sequence is synthesized)
gtgaagcccgaggcctggctgtcccatggccccagtcctggccctggccatctgcagcttgtgtgccatgtctcaggattctacccaaagcccgtgtgggtgatgtggatgcggggtgag

SEQ ID NO: 466708 - DNA, 120 bp, Artificial Sequence
  ENSG00000158477_8 (sequence is synthesized)
caggagcagcagggcactcagcgaggggacatcttgcccagtgctgatgggacatggtatctccgcgcaaccctggaggtggccgctggggaggcagctgacctgtcctgtcgggtgaag

SEQ ID NO: 466709 - DNA, 120 bp, Artificial Sequence
  ENSG00000158477_9 (sequence is synthesized)
cacagcagtctagagggccaggacatcgtcctctactgggagcatcacagttccgtgggcttcatcatcttggcggtgatagtgcctttacttcttctgataggtcttgcgctttggttc

SEQ ID NO: 466710 - DNA, 120 bp, Artificial Sequence
  ENSG00000158477_10 (sequence is synthesized)
aggaaacgctgtttctgttaagacacaccatgagcctcctcgtcacccttctccttttggggtgagagaccagcagcccaagggctccagacacacctgaacacatcgtgatgatgacgt

SEQ ID NO: 466711 - DNA, 120 bp, Artificial Sequence
  ENSG00000158477_11 (sequence is synthesized)
cctctcaactctctttgtaaaaattttgttatttttgcttgtttctgattaatgattgtttgtcaatataagctcaatttaattttgcaggatttgttgttctgacctgggttctgggac

SEQ ID NO: 466712 - DNA, 120 bp, Artificial Sequence
  ENSG00000158477_12 (sequence is synthesized)
ttttaaattcaaattttatctccagatggaatggggtcctagcaacctccacatgttcaactattaatggatcatcaggcctgttttagatatcccttactccagagggccttccctgac

SEQ ID NO: 466713 - DNA, 120 bp, Artificial Sequence
  ENSG00000158477_13 (sequence is synthesized)
ttacaagtgggaagcagtctcttcctggtctgaactcccgccacattttagccgtactttgctaactgtgctcctcacttcctcttcttcattgcagttatttagatcccccctttcctt

SEQ ID NO: 466714 - DNA, 120 bp, Artificial Sequence
  ENSG00000158477_14 (sequence is synthesized)
ctaatttttcagctccttcaatgcaaagtacatgtatttttaatatatgcatccctggtgaaggatcttgcctgcatgaaacatgttctcaataaaactctgtgttgaatttatgccaaa

SEQ ID NO: 466715 - DNA, 120 bp, Artificial Sequence
  ENSG00000158480_0 (sequence is synthesized)
gtttccgggtcgctgctggcccccgggtactggtctcagtacccctgcagccggccggagaggctagagcccgacggggcccggctccggcggcagccgcgcctctcgcttgcttccctc

SEQ ID NO: 466716 - DNA, 120 bp, Artificial Sequence
  ENSG00000158480_1 (sequence is synthesized)
ggccgggccgtcctcggcggcagtgtcaggagcactccgctggtccaggcggcaacatgtccatgcttttagtgatgtccctgcctctaatccagaagccatggaggagataaggtagcc

SEQ ID NO: 466717 - DNA, 120 bp, Artificial Sequence
  ENSG00000158480_2 (sequence is synthesized)
cccctcgatcggatggggaagcccagttcaatggatactaaattcaaggatgacttatttcggaagtacgtgcagttccatgagagcaaagtggataccaccaccagcaggcagcggcct

SEQ ID NO: 466718 - DNA, 120 bp, Artificial Sequence
  ENSG00000158480_3 (sequence is synthesized)
ggcagcgatgagtgcctgcgggtggcagcctcaaccctgctcagcctgcacaaggtggatcccttttatcgattccggctgatccagttctatgaggtggtggagagctccttgcgctcg

SEQ ID NO: 466719 - DNA, 120 bp, Artificial Sequence
  ENSG00000158480_4 (sequence is synthesized)
ctcagctcctctagcctgcgggctctgcacggcgccttcagcatgctggagacggtgggcatcaacctcttcctctacccgtggaagaaggaattcagaagcatcaagacctacacgggc

SEQ ID NO: 466720 - DNA, 120 bp, Artificial Sequence
  ENSG00000158480_5 (sequence is synthesized)
ccttttgtttattatgtcaagtcgacattactggaagaggacatccgagccatcctgagctgcatgggctacacacctgagctgggcactgcatacaagctcagagagctcgtggagacc

SEQ ID NO: 466721 - DNA, 120 bp, Artificial Sequence
  ENSG00000158480_6 (sequence is synthesized)
ctccaggtgaagatggtctcctttgagctctttctggccaaagtcgagtgtgagcagatgctagaaatccactcacaagtgaaggacaagggctactccgagctggacattgtgagcgag

SEQ ID NO: 466722 - DNA, 120 bp, Artificial Sequence
  ENSG00000158480_7 (sequence is synthesized)
cgcaagagcagtgcagaggatgtgcgcggctgctcggacgccctgcggcggcgggcagagggccgggagcacctgacggcctccatgtcacgagtggcactccagaagtcggccagcgag

SEQ ID NO: 466723 - DNA, 120 bp, Artificial Sequence
  ENSG00000158480_8 (sequence is synthesized)
cgggcggccaaggactactacaagccccgcgtgaccaagccctcgaggtcagtggatgcctatgacagctactgggagagccggaagccacccctgaaggcctcattgagtcttcggaag

SEQ ID NO: 466724 - DNA, 120 bp, Artificial Sequence
  ENSG00000158480_9 (sequence is synthesized)
gagcctgtggcaacggatgtgggggacgacctcaaggatgagatcatccgcccatccccttcgctgctgaccatggccagctccccccacggcagcccggatgtgcttccacccgcctcc

SEQ ID NO: 466725 - DNA, 120 bp, Artificial Sequence
  ENSG00000158480_10 (sequence is synthesized)
cccagcaacggcccggccctgctgcgcggtacctacttctccactcaggatgacgtggatctgtacacagactctgaacccagggccacctaccgtcggcaggatgctctgcggccggat

SEQ ID NO: 466726 - DNA, 120 bp, Artificial Sequence
  ENSG00000158480_11 (sequence is synthesized)
gtgtggctgctcagaaacgatgcccactccctctaccacaagcgctcgccccctgccaaagagtccgccctctccaagtgccaaagctgcgggctgtcctgcagctcctccctctgccag

SEQ ID NO: 466727 - DNA, 120 bp, Artificial Sequence
  ENSG00000158480_12 (sequence is synthesized)
cgctgtgacagcctgctcacctgtcctccagcttccaagcccagcgccttccccagcaaggcctcgactcatgacagcctggcccacggggcatctctgcgggagaagtacccaggccag

SEQ ID NO: 466728 - DNA, 120 bp, Artificial Sequence
  ENSG00000158480_13 (sequence is synthesized)
actcagggcctcgaccgcctcccgcaccttcactccaaatccaagccctccaccacgcccacttcccgctgtggcttctgcaaccgcccaggcgccaccaacacctgcacccagtgttca

SEQ ID NO: 466729 - DNA, 120 bp, Artificial Sequence
  ENSG00000158480_14 (sequence is synthesized)
aaagtctcatgtgacgcctgcctcagcgcttaccattatgacccctgctacaaaaagagtgagctgcacaagttcatgcccaacaaccagctgaactacaagtccacccagctctcccat

SEQ ID NO: 466730 - DNA, 120 bp, Artificial Sequence
  ENSG00000158480_15 (sequence is synthesized)
ctcgtgtacagatagaccggcctcgccccttccagctccaagggctacatcaaccgacctttcgggtttcacggtgaagaagtactaacgcattgatctcagaggcggaggcctgcactt

SEQ ID NO: 466731 - DNA, 120 bp, Artificial Sequence
  ENSG00000158480_16 (sequence is synthesized)
gctttgttgtctgacaagggagaaggtggcacttccgttcagattcattttgctaatctctccactccctgttcagttggttctttttttggggttttgttttgttttgttttgttgttt

SEQ ID NO: 466732 - DNA, 120 bp, Artificial Sequence
  ENSG00000158480_17 (sequence is synthesized)
tgttttttcctttaaagaggatttctgtctctgggaccctcgctgcacctacccctcccattgcaaagccaacttggactgggaagggcccttcaggtcaccaaacatccacctggagcg

SEQ ID NO: 466733 - DNA, 120 bp, Artificial Sequence
  ENSG00000158480_18 (sequence is synthesized)
gcgagctagaggcctgttggcttgtgaaatgagccctcctgccacacggggcctctcccaaaggctcatcccttggccgcccccttcctaaacacaaggatccccagctggactccccac

SEQ ID NO: 466734 - DNA, 120 bp, Artificial Sequence
  ENSG00000158480_19 (sequence is synthesized)
cccctggcttccccacctctccaggtgtcaaaggtgaaccgagtccagtattagctgaatgtcatttcgtacaccacagctcagtcagcccatggccttcgtgaactttgctccaacaca

SEQ ID NO: 466735 - DNA, 120 bp, Artificial Sequence
  ENSG00000158480_20 (sequence is synthesized)
ctgatgtgtgggcttcccacagcaggactgacttccccctttctgttgtttgcacatgcccctcttactgtactgtcaatagatatttttgagatttatttttaaataaatattcaactt

SEQ ID NO: 466736 - DNA, 120 bp, Artificial Sequence
  ENSG00000158480_21 (sequence is synthesized)
gctgtgtgtttcaacgtggttaaaaaaatgaattatgtagctatttattaaatgccctgggttctttagtcttccaagggagggcctcgcgcccattcgtgttgtatcctccactcacta

SEQ ID NO: 466737 - DNA, 120 bp, Artificial Sequence
  ENSG00000158480_22 (sequence is synthesized)
tggcccgaggggagaggagagtttggggcagggaggaacagacatgaagcctccttttcttgagctggtggagagccactgtcttccctgcagtaactatctatacacctacctccagtg

SEQ ID NO: 466738 - DNA, 120 bp, Artificial Sequence
  ENSG00000158480_23 (sequence is synthesized)
tgcacttagggggtgagcgcgggtgtcgaggtctgtgtgtctgcagactgctaacctatgacaattcagggacctcacctgtcggacctatagcttgctgagcaggaaccttgcacttca

SEQ ID NO: 466739 - DNA, 120 bp, Artificial Sequence
  ENSG00000158480_24 (sequence is synthesized)
cacttcttgagtctcgtttcagaaggaaaatcatttgggattcctactgcccctccatctcaatcctcttctcttcaccagtttccaggactcatctgcaacatttgcaatctttttgca

SEQ ID NO: 466740 - DNA, 120 bp, Artificial Sequence
  ENSG00000158480_25 (sequence is synthesized)
ctaaaagtgggcaggagtcggcatgtgcccatcagagagacggctcctcagatgctcagctaagcctaagcgcttccaagcctgaaggccccttcagcttctcatgtgaattaccaaccc

SEQ ID NO: 466741 - DNA, 120 bp, Artificial Sequence
  ENSG00000158480_26 (sequence is synthesized)
ctggattttccttgtgggggtacaagagcaggagtggggcaagagtttgaaaataaagccgcttccttgtgaactaactatattttagccataactgtttgtgatgtacacaatgttaag

SEQ ID NO: 466742 - DNA, 120 bp, Artificial Sequence
  ENSG00000158480_27 (sequence is synthesized)
ggatttatatgcagtgggcttttctgggagaaagttattcagctcttgagcaagtttaagtctggctgaatcctgaggccactgtgaatttgctgatgttcttccaactcagttgagtga

SEQ ID NO: 466743 - DNA, 80 bp, Artificial Sequence
  ENSG00000158480_28 (sequence is synthesized)
ctgatgttcttccaactcagttgagtgattttaaggttttccaaatcttctatggctctctttttaatatatatatatat

SEQ ID NO: 466744 - DNA, 120 bp, Artificial Sequence
  ENSG00000158480_29 (sequence is synthesized)
tgtatattaagctgaatttcaaccaactttattactaagaccagcctagcagggcattcatctttgatgttcttccttttcacatttcagaatcggcaatgcctggcccactcctgagag

SEQ ID NO: 466745 - DNA, 120 bp, Artificial Sequence
  ENSG00000158480_30 (sequence is synthesized)
ctctagttttctagttttccatttccagattgcgccagcattacagtaactaactctttctaaccaaccgtgatgccacgtaacttaccctatggacaaaagcaggaatgactaacacat

SEQ ID NO: 466746 - DNA, 120 bp, Artificial Sequence
  ENSG00000158480_31 (sequence is synthesized)
cctaggagggaaagtccagtgtacctgtcatcacggacgcactgtggtcacagactggaatacgaaatactacagccctgctcccaggtgtgcatcttactggatgaggttgctgtgatt

SEQ ID NO: 466747 - DNA, 120 bp, Artificial Sequence
  ENSG00000158480_32 (sequence is synthesized)
gagatagttaaatacatgctaatttaaaaatgcagatgttttacatttgatttctaccaagagttgaaatgttgagagatgattaaaaataataataataaagtgtcttccattgttaaa

SEQ ID NO: 466748 - DNA, 120 bp, Artificial Sequence
  ENSG00000158480_33 (sequence is synthesized)
gagcttacatcatatagagattagctctcctagccccattcggtgtgggaagatgggaattttgctactacaggaatttttgtaactcaactctgctcgcgccgccataaggcattctaa

SEQ ID NO: 466749 - DNA, 120 bp, Artificial Sequence
  ENSG00000158480_34 (sequence is synthesized)
cttagccaaacactttcgagtagagctgtccagcagatgcagcaggatggctttgcaagagtcggagttttggcgttagacctaggttcagagctcagatccacttcttcctagccttac

SEQ ID NO: 466750 - DNA, 120 bp, Artificial Sequence
  ENSG00000158481_0 (sequence is synthesized)
agatcttcttagttgctgtcagcggctgatggggaagattgttggtagaaggaagtcagaatataggtacagagggataagtttgctaagaacagagatcagcaaacagcttttctgaga

SEQ ID NO: 466751 - DNA, 120 bp, Artificial Sequence
  ENSG00000158481_1 (sequence is synthesized)
gaaagaaacatctgcaaatgacatgctgtttctgcagtttctgctgctagctcttcttctcccaggtggtgacaatgcagacgcatcccaggaacacgtctccttccatgtcatccagat

SEQ ID NO: 466752 - DNA, 120 bp, Artificial Sequence
  ENSG00000158481_2 (sequence is synthesized)
cttctcatttgtcaaccaatcctgggcacgaggtcagggctcaggatggctggacgagttgcagactcatggctgggacagtgaatcaggcacaataattttcctgcataactggtccaa

SEQ ID NO: 466753 - DNA, 120 bp, Artificial Sequence
  ENSG00000158481_3 (sequence is synthesized)
gggcaacttcagcaatgaagagttgtcagacctagagttgttatttcgtttctacctctttggattaactcgggagattcaagaccatgcaagtcaagattactcgaaatatccctttga

SEQ ID NO: 466754 - DNA, 120 bp, Artificial Sequence
  ENSG00000158481_4 (sequence is synthesized)
agtacaggtgaaagcgggctgtgagctgcattctggaaagagcccagaaggcttctttcaggtagctttcaacggattagatttactgagtttccagaatacaacatgggtgccatctcc

SEQ ID NO: 466755 - DNA, 120 bp, Artificial Sequence
  ENSG00000158481_5 (sequence is synthesized)
aggctgtggaagtttggcccaaagtgtctgtcatctactcaatcatcagtatgaaggcgtcacagaaacagtgtataatctcataagaagcacttgcccccgatttctcttgggtctcct

SEQ ID NO: 466756 - DNA, 120 bp, Artificial Sequence
  ENSG00000158481_6 (sequence is synthesized)
ggatgcagggaagatgtatgtacacaggcaagtgaggccagaagcctggctgtccagtcgccccagccttgggtctggccagctgttgctggtttgtcatgcctccggcttctacccaaa

SEQ ID NO: 466757 - DNA, 120 bp, Artificial Sequence
  ENSG00000158481_7 (sequence is synthesized)
gcctgtttgggtgacatggatgcggaatgaacaggagcaactgggcactaaacatggtgatattcttcctaatgctgatgggacatggtatcttcaggtgatcctggaggtggcatctga

SEQ ID NO: 466758 - DNA, 120 bp, Artificial Sequence
  ENSG00000158481_8 (sequence is synthesized)
ggagcctgctggcctgtcttgtcgagtgagacacagcagtctaggaggccaggacatcatcctctactggggacaccacttttccatgaattggattgccttggtagtgatagtgccctt

SEQ ID NO: 466759 - DNA, 120 bp, Artificial Sequence
  ENSG00000158481_9 (sequence is synthesized)
ggtgattctaatagtccttgtgttatggtttaagaagcactgctcatatcaggacatcctgtgagactcttccccctgactcccccattgtgttaagaacccagcaacccaggagcctag

SEQ ID NO: 466760 - DNA, 120 bp, Artificial Sequence
  ENSG00000158481_10 (sequence is synthesized)
gtttctctttctgcataataaacatttgttaataaaaaccaaattctaatttggaatgtttttcttggaatctccactttttatatagcactcaaccttcaaagcccatttctgatgtca

SEQ ID NO: 466761 - DNA, 120 bp, Artificial Sequence
  ENSG00000158481_11 (sequence is synthesized)
tttcctccaacgatcttccttgacccatactgaacccagagagcccctcaactgttatgtgcatgcaacacttcctaccctgtgttgcagctacttgagtctttcatttcacatttttaa

SEQ ID NO: 466762 - DNA, 120 bp, Artificial Sequence
  ENSG00000158481_12 (sequence is synthesized)
gcttttaggaggcaaggatcatgataaatgtgcctttcctgcatatgataggctcagtgaaacacaaaacaaaacatcatatctaagttggattaactgtcatgttgacaatttttctca

SEQ ID NO: 466763 - DNA, 120 bp, Artificial Sequence
  ENSG00000158481_13 (sequence is synthesized)
ttatattccttcccaatgttgttgtagcattggaaatattcatgcttctctttttgtttaaatgcttcatacctagcagataaattccactctcctttagctccctcattttctccttaa

SEQ ID NO: 466764 - DNA, 120 bp, Artificial Sequence
  ENSG00000158481_14 (sequence is synthesized)
acatttaaggaaaagtgcagccttgtgccttgatacacttattttctaaacacagagaattacaaatgcaaatagacagagagtgtgcaagttacatgtgatgatcagtggtgcagatat

SEQ ID NO: 466765 - DNA, 120 bp, Artificial Sequence
  ENSG00000158481_15 (sequence is synthesized)
gtcacagaatacttaagaaaaggaacaagagatttggtcctcagggttggagtgggatcaaggcaaccgttgtgctgtatatggaagacaaatttcctaaaggactgtgttatctgagat

SEQ ID NO: 466766 - DNA, 120 bp, Artificial Sequence
  ENSG00000158481_16 (sequence is synthesized)
agccttggctaaactttagtccctttaggtttcattcactaattcaactaatattttttgggtactgagttgagacaggcacatacagcttctaaactggtggtggataaaacaaatgag

SEQ ID NO: 466767 - DNA, 120 bp, Artificial Sequence
  ENSG00000158481_17 (sequence is synthesized)
attgtgtccactctcctgaagttgcaatgtttgcttcctcaatctgtccatgtttcttttctattgttttcatgtttttatttatttcaaaaaattttaaatagattttattgatgtata

SEQ ID NO: 466768 - DNA, 120 bp, Artificial Sequence
  ENSG00000158481_18 (sequence is synthesized)
atttatagtaaaatttgaatctttaagtgtacagttctatttattttgataattatataagcccatgtaaacaaaatcacaatcaagatattaaatgtcataacccctcatacctgtttg

SEQ ID NO: 466769 - DNA, 120 bp, Artificial Sequence
  ENSG00000158481_19 (sequence is synthesized)
tagtcaagcacaccaacaacctggcattcttgcaactactgatatactttatgtcacttaagcttaaacttgtattttctatgattttattaagatggaaataaacatatctacttggta

SEQ ID NO: 466770 - DNA, 120 bp, Artificial Sequence
  ENSG00000158483_0 (sequence is synthesized)
ctgaggccccgcccccgtcatggcgcccgaggagaacgcggggagcgaactcttgctgcagagtttcaagcgccgcttcctggcagcgcgcgccctgcgctccttccgctggcagagctt

SEQ ID NO: 466771 - DNA, 120 bp, Artificial Sequence
  ENSG00000158483_1 (sequence is synthesized)
agaagcaaagttaagagactcatcagattctgagctgctgcgggatattttgcagaagactgtgaagcatcctgtgtgtgtgaagcacccgccgtcagtcaagtatgcccggtgctttct

SEQ ID NO: 466772 - DNA, 120 bp, Artificial Sequence
  ENSG00000158483_2 (sequence is synthesized)
ctcagaactcatcaaaaagacgtgctgtattgcccagaagccatcgtgtcgctggtcggggtcctgcggaggctggctgcctgccgggagcaccagcgggctcctcaattctacatggcc

SEQ ID NO: 466773 - DNA, 120 bp, Artificial Sequence
  ENSG00000158483_3 (sequence is synthesized)
agcacttggagatggcaaagctgaacctcacactgtaggactcacacatgactccaacgggattgtgagaattaagtcactctcgtgggaagaatttttatatgggaaagcggataaaac

SEQ ID NO: 466774 - DNA, 120 bp, Artificial Sequence
  ENSG00000158483_4 (sequence is synthesized)
tttcattggactggaatgtttggagaatgttaaattccaaatcaggaaccacaaactgcgctctaataagacatcggctatctaagcatgtgggttccccctttctgccagcagttctgg

SEQ ID NO: 466775 - DNA, 120 bp, Artificial Sequence
  ENSG00000158483_5 (sequence is synthesized)
ttcttaagaaaatcaccataaatcagacatgaaaattctggctccaaaaatagcattttcattgtgcaaataaaaacgtgtgtatcaagtatgacattcccccaacgtggacacacttgg

SEQ ID NO: 466776 - DNA, 65 bp, Artificial Sequence
  ENSG00000158483_6 (sequence is synthesized)
tgtatcaagtatgacattcccccaacgtggacacactttcctcacaaagccaagcccgctgcagc

SEQ ID NO: 466777 - DNA, 66 bp, Artificial Sequence
  ENSG00000158483_7 (sequence is synthesized)
aaagccaagccggctgcagctgccacatccctgggtttatgatgcagcaggtgcttttttcaagac

SEQ ID NO: 466778 - DNA, 120 bp, Artificial Sequence
  ENSG00000158483_8 (sequence is synthesized)
atccctgggtttatgatgcagcaggtgcttttttcaagacaggaatcaaagtgttaggaacatggcagaaaggtgacacctggagaccaaatgcagggtaaggagtactgcagaggtcac

SEQ ID NO: 466779 - DNA, 120 bp, Artificial Sequence
  ENSG00000158483_9 (sequence is synthesized)
agggaagtcacagaacagtaatacgctagcaggggcatggggcgtgaagaacagaagacaggaagcgtttcagagactccaaagaagaaatcagggccaaccacagcttcccgagtcatt

SEQ ID NO: 466780 - DNA, 120 bp, Artificial Sequence
  ENSG00000158483_10 (sequence is synthesized)
caccaggtggcaccactgccttcatttcagcttccggccactgggaggcgctgctcgaaagggtttgccctgagacaccaagaagaagctgcgggaaggacagcaggggccctggggttt

SEQ ID NO: 466781 - DNA, 120 bp, Artificial Sequence
  ENSG00000158483_11 (sequence is synthesized)
agggagcacagtctgcacccagctctcatcccatcagagctgctgcgactcccgcaggttcttccagaactggtttagcttgcctgcaggatcaggaaagtttgagaaaagcatctgcaa

SEQ ID NO: 466782 - DNA, 120 bp, Artificial Sequence
  ENSG00000158483_12 (sequence is synthesized)
tgcaggatcaggaaagtttgagaaaagcatctgcaaaatactaaagagcagagcttacttcattgcctgtccccaccccatcccaggtcaccacctggctgaacccaggtccccgaccca

SEQ ID NO: 466783 - DNA, 120 bp, Artificial Sequence
  ENSG00000158483_13 (sequence is synthesized)
acaacaacccctcccaagtccctaactccctcacttggacttgagacccttcacaacccagcagcgctccgcctccaacttgacatcatgctttctggaaacttccccgtgtgtcccact

SEQ ID NO: 466784 - DNA, 120 bp, Artificial Sequence
  ENSG00000158483_14 (sequence is synthesized)
ttcccacacttggtgcgctggagcaccttccggcctctacatgctgtacgttcccctgtgagcaccctcctctcagcctctggccaacacagtcccacccatctgtgggtaacaaggggg

SEQ ID NO: 466785 - DNA, 120 bp, Artificial Sequence
  ENSG00000158483_15 (sequence is synthesized)
ggactccagtggaagtgaaagaactgggggccggggaaaagctaggatgccccacactcccacaccatgcggggaactagggcagaggccggctggactgggatcagatgggaagcggaa

SEQ ID NO: 466786 - DNA, 120 bp, Artificial Sequence
  ENSG00000158483_16 (sequence is synthesized)
ggtgctttctctcagaactcatcaaaaagcacgaggctgtccacacagagcctttggatgagctgtacgaggtgctggtggagaccctgatggccaaggagtccacccagggccaccgga

SEQ ID NO: 466787 - DNA, 120 bp, Artificial Sequence
  ENSG00000158483_17 (sequence is synthesized)
cgggtcgtggggggattgtggcaggaggagggcagctcagcacagggagggaggatctgagcccagcagccctactgtgtgcttcagagcagggttccctaagcccttgggcctcggttt

SEQ ID NO: 466788 - DNA, 120 bp, Artificial Sequence
  ENSG00000158483_18 (sequence is synthesized)
gaggtggcaggaggggcagtcggggtcaggtttggacacagctgtggcctgcaggacgctggagcacaggctgtacaggcggatccaccacgccactgtcctgagcacccagtcaatgga

SEQ ID NO: 466789 - DNA, 120 bp, Artificial Sequence
  ENSG00000158483_19 (sequence is synthesized)
agatgagcagggtgactatagagaaggggaactggccccgtagtgggccagccactgtcctcagacctgacatttgtcagcccccgcacctgtgagagtgtgatatcattgtcccatctc

SEQ ID NO: 466790 - DNA, 120 bp, Artificial Sequence
  ENSG00000158483_20 (sequence is synthesized)
accgacaaagacactaggacacacagaggacaagcaacccccgagctcccacagactgctgcccggccacctggctcttgtgcctccactctacacccaagccccccattgccaccagcc

SEQ ID NO: 466791 - DNA, 120 bp, Artificial Sequence
  ENSG00000158483_21 (sequence is synthesized)
tttgccccagctccccctgagcacagcccctcctggcagccatgtgcacagatgtacccgcagcagcctctgcctgcacacagagacacggacaagccagtgcctgtccacgtggggcag

SEQ ID NO: 466792 - DNA, 120 bp, Artificial Sequence
  ENSG00000158485_0 (sequence is synthesized)
ggcagttggaagagagaagaagtcactacagggtactgaggaaaagctttgctgaaattggagatcaaataccagctctgccagtaagaagttgcatctcccagtgaaatgctgctgctg

SEQ ID NO: 466793 - DNA, 120 bp, Artificial Sequence
  ENSG00000158485_1 (sequence is synthesized)
ccatttcaactgttagctgttctctttcctggtggtaacagtgaacatgccttccaggggccgacctcctttcatgttatccagacctcgtcctttaccaatagtacctgggcacaaact

SEQ ID NO: 466794 - DNA, 120 bp, Artificial Sequence
  ENSG00000158485_2 (sequence is synthesized)
caaggctcaggctggttggatgatttgcagattcatggctgggatagcgactcaggcactgccatattcctgaagccttggtctaaaggtaactttagtgataaggaggttgctgagtta

SEQ ID NO: 466795 - DNA, 120 bp, Artificial Sequence
  ENSG00000158485_3 (sequence is synthesized)
gaggagatattccgagtctacatctttggattcgctcgagaagtacaagactttgccggtgatttccagatgaaatacccctttgagatccagggcatagcaggctgtgagctacattct

SEQ ID NO: 466796 - DNA, 120 bp, Artificial Sequence
  ENSG00000158485_4 (sequence is synthesized)
ggaggtgccatagtaagcttcctgaggggagctctaggaggattggatttcctgagtgtcaagaatgcttcatgtgtgccttccccagaaggtggcagcagggcacagaaattctgtgca

SEQ ID NO: 466797 - DNA, 120 bp, Artificial Sequence
  ENSG00000158485_5 (sequence is synthesized)
cttgggcgtcctcaatgcaggaaaagcagatctgcaaagacaagtgaagcctgaggcctggctgtccagtggccccagtcctggacctggccgtctgcagcttgtgtgccatgtctcagg

SEQ ID NO: 466798 - DNA, 120 bp, Artificial Sequence
  ENSG00000158485_6 (sequence is synthesized)
attctacccaaagcccgtgtgggtgatgtggatgcggggtgagcaggagcagcagggcactcagctaggggacatcctgcccaatgctaactggacatggtatctccgagcaaccctgga

SEQ ID NO: 466799 - DNA, 120 bp, Artificial Sequence
  ENSG00000158485_7 (sequence is synthesized)
tgtggcagatggggaggcggctggcctgtcctgtcgggtgaagcacagcagtttagagggccaggacatcatcctctactggagaaaccccacctccattggctcaattgttttggcaat

SEQ ID NO: 466800 - DNA, 120 bp, Artificial Sequence
  ENSG00000158485_8 (sequence is synthesized)
aatagtgccttccttgctccttttgctatgccttgcattatggtatatgaggcgccggtcatatcagaatatcccatgagccatcatcatgtctcctctcccattcgcaataagtaccaa

SEQ ID NO: 466801 - DNA, 120 bp, Artificial Sequence
  ENSG00000158485_9 (sequence is synthesized)
gaagcccaagatatcagcccaaaagtcaatcttatcatatttcaaatgattttcaaatttgatgaaatcagagttttcatgtattttaaaataaattattatttaaacatcagcaaaaaa

SEQ ID NO: 466802 - DNA, 120 bp, Artificial Sequence
  ENSG00000158485_10 (sequence is synthesized)
gtacttaaaactgtaaatttattatgagactgtactaacagtgtgattcaccctgattttacacacattaaaatgttagaaaaaatgtgtctcaaaataaatgaaatataatacatatga

SEQ ID NO: 466803 - DNA, 120 bp, Artificial Sequence
  ENSG00000158486_0 (sequence is synthesized)
atgggagctacagggcgcctcgagctcacactggccgcccctccccatccgggcccagcctttcagcgttcaaaagccagggagacccaaggagaggaggaagggagtgaaatgcagatc

SEQ ID NO: 466804 - DNA, 120 bp, Artificial Sequence
  ENSG00000158486_1 (sequence is synthesized)
gccaaaagtgactccatacatcacatgagccactcccaggggcagccagagctgcctcctctgcctgcttctgctaatgaggaaccgtctggactctatcagactgtcatgtcacacagc

SEQ ID NO: 466805 - DNA, 120 bp, Artificial Sequence
  ENSG00000158486_2 (sequence is synthesized)
ttttacccgcccttgatgcaacgcacgtcatggaccttggctgcacccttcaaagaacagcatcaccaccgtggacccagtgattccatcgccaacaactactccttgatggcccaggac

SEQ ID NO: 466806 - DNA, 120 bp, Artificial Sequence
  ENSG00000158486_3 (sequence is synthesized)
ctgaagctgaaagatctgctgaaggtctaccaaccggccaccatcagtgtccctagggacaggaccggtcaggggctgccatcatcaggaaatagaagctcatcagagcccatgaggaaa

SEQ ID NO: 466807 - DNA, 120 bp, Artificial Sequence
  ENSG00000158486_4 (sequence is synthesized)
aaaacgaagttttcctccagaaacaaagaggattccactaggatcaagttggccttcaagacgtcaatcttctcacccatgaagaaggaggtaaagacatctttgacgttcccaggaagc

SEQ ID NO: 466808 - DNA, 120 bp, Artificial Sequence
  ENSG00000158486_5 (sequence is synthesized)
agaccaatgagtccagaacagcagctcgatgtcatgttacagcaggagatggaaatggaaagtaaagaaaagaagccatctgaatcggacctggagagatactattactatctgaccaat

SEQ ID NO: 466809 - DNA, 120 bp, Artificial Sequence
  ENSG00000158486_6 (sequence is synthesized)
ggaattcgcaaagacatgattgcccctgaggagggtgaagtgatggttcggatttcaaagctgatttctaacacgctgctgacgagtcccttcctggagcccctgatggtggtcctcgtg

SEQ ID NO: 466810 - DNA, 120 bp, Artificial Sequence
  ENSG00000158486_7 (sequence is synthesized)
caggagaaggagaatgactattactgtagcctcatgaaaagcatcgttgattacatcctcatggacccaatggagagaaaacggctctttattgagagcatcccccgcttgtttcctcaa

SEQ ID NO: 466811 - DNA, 120 bp, Artificial Sequence
  ENSG00000158486_8 (sequence is synthesized)
agagtgatccgggcccctgtgccctggcacagtgtctacaggagcgccaagaagtggaacgaggagcatctgcacacggtgaaccccatgatgctcaggctgaaagaactgtggtttgca

SEQ ID NO: 466812 - DNA, 120 bp, Artificial Sequence
  ENSG00000158486_9 (sequence is synthesized)
gaattcagagacctcaggtttgttcgaacagcagaaatactagcgggaaaattgcctctgcagcctcaggaattttgggatgtgatccagaaacactgcctggaggcacaccagactctt

SEQ ID NO: 466813 - DNA, 120 bp, Artificial Sequence
  ENSG00000158486_10 (sequence is synthesized)
ctcaacaagtggatccccacctgcgcccagctttttacctcacggaaggagcactggattcattttgctcccaagagcaactatgactcaagtcgaaacattgaggaatattttgcttct

SEQ ID NO: 466814 - DNA, 120 bp, Artificial Sequence
  ENSG00000158486_11 (sequence is synthesized)
gtggcatcattcatgtcgctgcagcttagggagctggtcattaagtcacttgaggacctcgtttcccttttcatgatacacaaagatgggaatgattttaaggagccctaccaagagatg

SEQ ID NO: 466815 - DNA, 120 bp, Artificial Sequence
  ENSG00000158486_12 (sequence is synthesized)
aagtttttcatacctcagctaatcatgatcaaacttgaagtcagtgaacccattattgtcttcaatccatcttttgatggctgctgggaattaatacgtgactctttcctggaaattatt

SEQ ID NO: 466816 - DNA, 120 bp, Artificial Sequence
  ENSG00000158486_13 (sequence is synthesized)
aagaactctaatgggatccccaagctgaaatacataccacttaagttctccttcactgctgctgctgctgatcggcaatgtgtgaaagcagctgagccaggagagcccagcatgcacgcg

SEQ ID NO: 466817 - DNA, 120 bp, Artificial Sequence
  ENSG00000158486_14 (sequence is synthesized)
gctgccactgcaatggcagagctgaaaggatataatctgctccttggaactgttaacgcagaagaaaaacttgtttctgattttttgattcaaactttcaaggtatttcagaaaaatcaa

SEQ ID NO: 466818 - DNA, 120 bp, Artificial Sequence
  ENSG00000158486_15 (sequence is synthesized)
gttggcccctgcaaatatttaaatgtctacaaaaagtatgttgacttattggataacacggcagagcaaaacatcgctgcgttcctgaaagaaaatcatgacattgatgattttgtgacg

SEQ ID NO: 466819 - DNA, 120 bp, Artificial Sequence
  ENSG00000158486_16 (sequence is synthesized)
aagatcaatgccataaagaaacggagaaatgaaattgcatccatgaacatcaccgtgcctttagccatgttctgccttgatgctacggccctaaatcatgatctctgtgagcgagctcaa

SEQ ID NO: 466820 - DNA, 120 bp, Artificial Sequence
  ENSG00000158486_17 (sequence is synthesized)
aatcttaaagaccatctgattcaattccaagtggatgtaaaccgagacaccaataccagcatttgtaatcagtacagccacatcgcagacaaagtcagtgaggttcctgccaacactaag

SEQ ID NO: 466821 - DNA, 120 bp, Artificial Sequence
  ENSG00000158486_18 (sequence is synthesized)
gagctggtatccctcattgaattcctaaagaaatccagtgctgtcactgtgttcaaactcaggaggcaacttagagatgcaagtgaacggctggagttcctgatggactatgcagacttg

SEQ ID NO: 466822 - DNA, 120 bp, Artificial Sequence
  ENSG00000158486_19 (sequence is synthesized)
ccgtaccagattgaagatatctttgacaacagccggaacttgctccttcacaagagggatcaggcagaaatggatctgattaaaagatgctcagaatttgagttgagacttgagggctac

SEQ ID NO: 466823 - DNA, 120 bp, Artificial Sequence
  ENSG00000158486_20 (sequence is synthesized)
cacagagaactggaaagttttaggaagcgcgaagtgatgactacagaagaaatgaagcacaatgttgaaaagcttaatgagctttcaaagaacctaaatcgggcgtttgcagagtttgag

SEQ ID NO: 466824 - DNA, 120 bp, Artificial Sequence
  ENSG00000158486_21 (sequence is synthesized)
ttgatcaataaggaggaagagctattggaaaaggagaagagtacttaccctcttctgcaggccatgctgaagaacaaagtaccttatgagcagctgtggtcgacagcctatgagttcagc

SEQ ID NO: 466825 - DNA, 120 bp, Artificial Sequence
  ENSG00000158486_22 (sequence is synthesized)
atcaagtcagaggaatggatgaatggacccctcttcttactgaatgctgagcaaattgcggaggagatagggaatatgtggaggacaacgtataaactgatcaagaccttgtctgatgtg

SEQ ID NO: 466826 - DNA, 120 bp, Artificial Sequence
  ENSG00000158486_23 (sequence is synthesized)
cctgcacccaggcgcttagcagagaatgtgaagatcaagatcgataagttcaagcagtacattcccatcctcagtatttcctgcaacccaggaatgaaagaccgacactggcagcagatc

SEQ ID NO: 466827 - DNA, 120 bp, Artificial Sequence
  ENSG00000158486_24 (sequence is synthesized)
agtgagattgttggctatgagataaagcccaccgaaacgacctgcctctcaaatatgctcgaatttggattcggcaaattcgttgaaaaattggagcccattggtgcagctgccagcaag

SEQ ID NO: 466828 - DNA, 120 bp, Artificial Sequence
  ENSG00000158486_25 (sequence is synthesized)
gaatactctctggagaaaaacttggatagaatgaagttggattgggttaacgtgacgttcagcttcgtgaaatacagggacactgatacaaacatcttgtgtgcaattgatgacattcaa

SEQ ID NO: 466829 - DNA, 120 bp, Artificial Sequence
  ENSG00000158486_26 (sequence is synthesized)
atgctacttgatgatcacgtgataaagacccagaccatgtgtggctccccattcatcaaaccaatagaagcagaatgccggaaatgggaagaaaagctaattcgcatacaagacaatttg

SEQ ID NO: 466830 - DNA, 120 bp, Artificial Sequence
  ENSG00000158486_27 (sequence is synthesized)
gatgcctggttgaaatgccaagccacctggctgtacctggaaccaatcttcagttcagaggacatcatagcccagatgccagaagaggggaggaaatttggcattgttgatagttactgg

SEQ ID NO: 466831 - DNA, 120 bp, Artificial Sequence
  ENSG00000158486_28 (sequence is synthesized)
aaatcacttatgtcccaagcggtgaaagataacaggattctggtggcagccgaccagccacggatggcagagaagcttcaagaagccaactttctcttggaggacatccagaaagggctg

SEQ ID NO: 466832 - DNA, 120 bp, Artificial Sequence
  ENSG00000158486_29 (sequence is synthesized)
aatgattacttggagaagaagagactattcttccccagattcttcttcctatcaaacgatgagctgctggaaatcttgtccgagacaaaggaccctctccgagtgcagccgcacttgaag

SEQ ID NO: 466833 - DNA, 120 bp, Artificial Sequence
  ENSG00000158486_30 (sequence is synthesized)
aagtgctttgaaggaattgccaagcttgagtttacagacaatctggaaattgtgggcatgatcagctcggaaaaagaaactgttccattcatacagaaaatctacccagctaatgccaag

SEQ ID NO: 466834 - DNA, 120 bp, Artificial Sequence
  ENSG00000158486_31 (sequence is synthesized)
ggcatggtggaaaagtggctccagcaggtggagcagatgatgctggccagtatgcgagaagtcattggacttgggattgaagcatatgtcaaggtccctcgaaatcactgggtcttacag

SEQ ID NO: 466835 - DNA, 120 bp, Artificial Sequence
  ENSG00000158486_32 (sequence is synthesized)
tggcctggacaggtggttatctgtgtctcctccatcttttggacccaggaggtgtcccaagccctggcggaaaataccttactggattttctgaaaaagagcaatgatcagattgcgcag

SEQ ID NO: 466836 - DNA, 120 bp, Artificial Sequence
  ENSG00000158486_33 (sequence is synthesized)
attgtccagctggtgcgagggaagctgagcagtggagctcgactcactctcggggccctcacggtcatcgatgtccacgcccgcgacgtggtggccaagttatctgaggacagggtctcc

SEQ ID NO: 466837 - DNA, 120 bp, Artificial Sequence
  ENSG00000158486_34 (sequence is synthesized)
gatctgaatgatttccaatggatctcacagctgcgctactactgggtggccaaggatgtgcaggtgcagattatcaccacagaagccttgtatggctatgagtacctgggaaactccccc

SEQ ID NO: 466838 - DNA, 120 bp, Artificial Sequence
  ENSG00000158486_35 (sequence is synthesized)
cggctggtgatcacacccctcaccgaccgctgctacaggacactgatgggagctttgaagctgaaccttgggggtgctccagagggtccagctgggactggcaagacagaaaccaccaaa

SEQ ID NO: 466839 - DNA, 120 bp, Artificial Sequence
  ENSG00000158486_36 (sequence is synthesized)
gatttggccaaagccttggctaagcagtgtgtggtcttcaactgctccgatggtttggattacaaagctatggggaagttcttcaaggggctggcacaggctggagcatgggcgtgcttt

SEQ ID NO: 466840 - DNA, 120 bp, Artificial Sequence
  ENSG00000158486_37 (sequence is synthesized)
gatgagttcaacaggatcgaggtagaagtgctgtctgtggtcgctcagcagatcctcagcatccaacaagccatcattcggaagctaaagacattcatctttgaagggactgagctctct

SEQ ID NO: 466841 - DNA, 120 bp, Artificial Sequence
  ENSG00000158486_38 (sequence is synthesized)
ctgaacccaacctgcgctgtgttcatcaccatgaaccccgggtatgctggcagggctgaactgcccgacaatctcaaggccttgttccggacagtggccatgatggtcccagattacgcc

SEQ ID NO: 466842 - DNA, 120 bp, Artificial Sequence
  ENSG00000158486_39 (sequence is synthesized)
ctcattggagaaatctccctctactccatggggtttctggactccagaagtctcgcccagaagatcgttgcgacctaccgcctgtgctcggaacaactgtcctctcagcatcactatgac

SEQ ID NO: 466843 - DNA, 120 bp, Artificial Sequence
  ENSG00000158486_40 (sequence is synthesized)
tacggtatgcgcgctgtcaagtctgtgcttactgccgcaggaaacctgaagctcaagtatccagaggagaatgaaagtgtcctgctgctccgggcattgcttgatgtcaatctggccaag

SEQ ID NO: 466844 - DNA, 120 bp, Artificial Sequence
  ENSG00000158486_41 (sequence is synthesized)
ttcttagcgcaagatgtccctctgtttcagggaattatatctgatttatttcctggagttgttcttccaaagccagactatgaagtttttctgaaagtgctgaatgataacatcaaaaag

SEQ ID NO: 466845 - DNA, 120 bp, Artificial Sequence
  ENSG00000158486_42 (sequence is synthesized)
atgaaactccagccagtaccttggtttatagggaaaattatccagatctacgaaatgatgctggtgagacatggctatatgattgtaggagaccccatgggcggcaagacctctgcttat

SEQ ID NO: 466846 - DNA, 120 bp, Artificial Sequence
  ENSG00000158486_43 (sequence is synthesized)
aaagtgttggctgcagctctcggcgatttacacgcagccaatcagatggaggagtttgctgtggagtacaagatcatcaaccccaaggctatcacgatggggcagctgtatgggtgcttt

SEQ ID NO: 466847 - DNA, 120 bp, Artificial Sequence
  ENSG00000158486_44 (sequence is synthesized)
gaccaagtgagccacgagtggatggatggtgtccttgccaatgctttccgggagcaagcgtcttcactctctgatgatcgcaagtggattatatttgatgggccagtggatgctatttgg

SEQ ID NO: 466848 - DNA, 120 bp, Artificial Sequence
  ENSG00000158486_45 (sequence is synthesized)
attgaaaatatgaacactgttctggatgacaataaaaagctgtgtctcatgagtggggaaattatccagatgaactccaagatgagcctgatcttcgagcccgccgacctcgagcaagcc

SEQ ID NO: 466849 - DNA, 120 bp, Artificial Sequence
  ENSG00000158486_46 (sequence is synthesized)
tctccagccactgtgagcaggtgtgggatgatctacatggagccccatcaactaggctggaagcccctgaaggattcctacatggacaccctgccctccagtctcaccaaggagcacaaa

SEQ ID NO: 466850 - DNA, 120 bp, Artificial Sequence
  ENSG00000158486_47 (sequence is synthesized)
gaattggtcaatgacatgttcatgtggcttgtccagccctgcctggaatttggtcgccttcattgtaaatttgttgtccagacatctcccatccaccttgccttctcaatgatgagactg

SEQ ID NO: 466851 - DNA, 120 bp, Artificial Sequence
  ENSG00000158486_48 (sequence is synthesized)
tactcttctctgcttgatgaaatcagggcagtagaagaggaggaaatggaattaggtgaaggcctgtcaagtcaacagatctttctctggctccaaggactgtttctcttttccttggtg

SEQ ID NO: 466852 - DNA, 120 bp, Artificial Sequence
  ENSG00000158486_49 (sequence is synthesized)
tggaccgtggctggcaccatcaacgcagacagcagaaagaaatttgatgtgtttttccgcaacctgatcatgggcatggatgataaccacccaaggcccaaaagcgtcaaactcaccaaa

SEQ ID NO: 466853 - DNA, 120 bp, Artificial Sequence
  ENSG00000158486_50 (sequence is synthesized)
aacaacatctttccagaaagaggaagcatctatgatttttattttatcaaacaagctagtggacattgggaaacgtggacacagtatatcaccaaagaggaggaaaaagttccagctggt

SEQ ID NO: 466854 - DNA, 120 bp, Artificial Sequence
  ENSG00000158486_51 (sequence is synthesized)
agacagcccggcagtccttcttcttgaaaacctacttagaccatgagattccaatgctgttcgtgggtcccacaggcactggcaaatcagccatcaccaacaacttccttctccaccttc

SEQ ID NO: 466855 - DNA, 120 bp, Artificial Sequence
  ENSG00000158486_52 (sequence is synthesized)
ccaaaaatacgtacctacccaactgcatcaatttctctgccagaacctcagccaatcagacccaggatatcatcatgtccaagctggatcgacgacggaagggccttttcgggcctccca

SEQ ID NO: 466856 - DNA, 120 bp, Artificial Sequence
  ENSG00000158486_53 (sequence is synthesized)
tagggaagaaagcagtggtgtttgtggatgacctcaacatgccagccaaagaggtgtatggggcccagccacccatcgagctcctgaggcagtggattgaccatggttactggtttgaca

SEQ ID NO: 466857 - DNA, 120 bp, Artificial Sequence
  ENSG00000158486_54 (sequence is synthesized)
aaaaagacacaaccaggctggacatcgtggacatgctgctcgtgacagccatggggccccccgggggaggaaggaatgacattactggacgattcactcgccatctgaatatcatttcca

SEQ ID NO: 466858 - DNA, 120 bp, Artificial Sequence
  ENSG00000158486_55 (sequence is synthesized)
tcaatgcctttgaggatgacattttaaccaagattttcagttcgattgttgactggcacttcgggaaagggtttgatgtgatgtttttaaggtacggaaagatgctggtccaagctacta

SEQ ID NO: 466859 - DNA, 120 bp, Artificial Sequence
  ENSG00000158486_56 (sequence is synthesized)
agacaatttatagagatgcagtggagaacttcttgccaactccctcgaagtcacattacgtctttaacctgcgggacttctcacgagtgattcaaggggtcctgctgtgccctcacacac

SEQ ID NO: 466860 - DNA, 120 bp, Artificial Sequence
  ENSG00000158486_57 (sequence is synthesized)
acctgcaggatgtagaaaaatgtatccggctttggatccatgaggtttatcgggtcttctatgatcgtctgattgacaaggaggacagacaggtctttttcaacatggtgaaggaaacca

SEQ ID NO: 466861 - DNA, 120 bp, Artificial Sequence
  ENSG00000158486_58 (sequence is synthesized)
cctccaattgcttcaagcagaccatagagaaggtgcttatccacttgtcacccactggaaagatagtcgatgataacattcgaagcctcttctttggagattatttcaagccagaaagtg

SEQ ID NO: 466862 - DNA, 120 bp, Artificial Sequence
  ENSG00000158486_59 (sequence is synthesized)
accaaaaaatctacgatgagatcactgacctgaaacagctgactgtggtcatggagcactatctggaagaattcaacaacatcagcaaggcccccatgtccctggtcatgttcaggtttg

SEQ ID NO: 466863 - DNA, 120 bp, Artificial Sequence
  ENSG00000158486_60 (sequence is synthesized)
ccattgagcacatctctaggatctgccgtgtcctgaagcaggacaaaggccacctgctcctggtgggcatagggggcagcgggcggcaaagtgccgccaaactgtccacattcatgaacg

SEQ ID NO: 466864 - DNA, 120 bp, Artificial Sequence
  ENSG00000158486_61 (sequence is synthesized)
catacgagctataccagattgagatcaccaagaactacgcaggcaatgactggcgagaagatcttaagaagatcatactgcaggtcggtgtggccaccaagagcaccgtgttcctcttcg

SEQ ID NO: 466865 - DNA, 120 bp, Artificial Sequence
  ENSG00000158486_62 (sequence is synthesized)
ccgacaaccagatcaaggatgaatcattcgtggaggacatcaacatgcttctgaacacaggtgacgtgcctaacatcttccctgctgacgagaaggctgacatcgtggagaagatgcaga

SEQ ID NO: 466866 - DNA, 120 bp, Artificial Sequence
  ENSG00000158486_63 (sequence is synthesized)
ctgcagccaggacccaaggagagaaggttgaagtcactcctctttctatgtataacttctttattgagagggtaattaacaaaatctccttttcattagccatgagtccaataggggatg

SEQ ID NO: 466867 - DNA, 120 bp, Artificial Sequence
  ENSG00000158486_64 (sequence is synthesized)
ccttcaggaaccgcctgcggatgttcccttcgctgatcaattgctgtacgattgattggttccagtcctggcccacagatgccctagagttggtggctaacaaatttctagaggatgtgg

SEQ ID NO: 466868 - DNA, 120 bp, Artificial Sequence
  ENSG00000158486_65 (sequence is synthesized)
agcttgatgacaacattcgggtagaggtcgtgtccatgtgcaaatatttccaagagagcgtcaagaagctgtcactcgattattacaacaaacttcgaagacacaactatgttaccccca

SEQ ID NO: 466869 - DNA, 120 bp, Artificial Sequence
  ENSG00000158486_66 (sequence is synthesized)
cctcctaccttgaattgattctaaccttcaagacgctcctgaatagcaagaggcaagaggtggctatgatgaggaaccgctacctgacaggcttgcagaaactcgactttgcagcttctc

SEQ ID NO: 466870 - DNA, 120 bp, Artificial Sequence
  ENSG00000158486_67 (sequence is synthesized)
aggtagcggttatgcaaagagaactgacagctcttcaacctcaactcatcctcacctccgaggaaactgccaagatgatggtgaaaattgaagcggagacgagagaagctgatggaaaga

SEQ ID NO: 466871 - DNA, 120 bp, Artificial Sequence
  ENSG00000158486_68 (sequence is synthesized)
aacttctggtgcaggcagatgaaaaagaagccaatgttgctgctgccattgcccaaggaatcaagaacgaatgtgagggggacctagctgaggcaatgcctgcactcgaggctgcactag

SEQ ID NO: 466872 - DNA, 120 bp, Artificial Sequence
  ENSG00000158486_69 (sequence is synthesized)
ctgctctggacaccctgaacccggccgacatctcgctggtgaagtcgatgcagaacccaccaggccctgtcaaactggtcatggagagcatctgcatcatgaaagggatgaagccagaga

SEQ ID NO: 466873 - DNA, 120 bp, Artificial Sequence
  ENSG00000158486_70 (sequence is synthesized)
ggaagccagaccccagtggctccggtaagatgatagaagattactggggggtatccaaaaagattcttggggatctgaaattcttggagagtcttaagacatatgacaaagacaacatcc

SEQ ID NO: 466874 - DNA, 120 bp, Artificial Sequence
  ENSG00000158486_71 (sequence is synthesized)
ccccactgaccatgaagcggatccgggaaaggtttatcaatcacccggaattccagccagctgtcattaaaaatgtatcgtcggcctgcgagggtctgtgcaagtgggtgagggccatgg

SEQ ID NO: 466875 - DNA, 120 bp, Artificial Sequence
  ENSG00000158486_72 (sequence is synthesized)
aggtgtacgatcgcgtggccaaggtggtggctcccaaacgggagcgactgagggaggcagaggggaagctggctgcacagatgcagaagctgaaccagaaaagagcagagctgaagctgg

SEQ ID NO: 466876 - DNA, 120 bp, Artificial Sequence
  ENSG00000158486_73 (sequence is synthesized)
tggtagatcggctccaggccctgaatgacgactttgaagagatgaacaccaagaaaaaggacttggaggaaaacattgaaatctgctcccaaaagctggtcagggcagagaaactgatca

SEQ ID NO: 466877 - DNA, 120 bp, Artificial Sequence
  ENSG00000158486_74 (sequence is synthesized)
gtggtcttgggggagagaaggacagatggaccgaagctgcccgacagctggggatccgctatactaatctgactggtgacgtgttgctgtcctcaggaactgtggcttacctgggcgctt

SEQ ID NO: 466878 - DNA, 120 bp, Artificial Sequence
  ENSG00000158486_75 (sequence is synthesized)
ttacagtggattatcgggtccagtgccaaaatcagtggttggctgaatgtaaggacaaggtcatccctggcttcagtgacttcagtctcagccacacgttaggggatcccataaaaatcc

SEQ ID NO: 466879 - DNA, 120 bp, Artificial Sequence
  ENSG00000158486_76 (sequence is synthesized)
gtgcctggcagattgctgggcttcccgttgactccttctccatcgacaatggcatcattgtatccaattccagacgctgggccttaatgattgaccctcacgggcaggccaataaatgga

SEQ ID NO: 466880 - DNA, 120 bp, Artificial Sequence
  ENSG00000158486_77 (sequence is synthesized)
ttaagaacatggagaaggcgaataaactggctgtcatcaagttctctgatagcaactacatgaggatgctggaaaacgcgctgcagttaggcacccctgtcttgattgaaaacattggag

SEQ ID NO: 466881 - DNA, 120 bp, Artificial Sequence
  ENSG00000158486_78 (sequence is synthesized)
aagagctggatgcttctatcgaacctatcttgctcaaggcaacattcaaacagcaaggagttgagtacatgaggctgggtgaaaacatcattgaatattccagggattttaagttataca

SEQ ID NO: 466882 - DNA, 120 bp, Artificial Sequence
  ENSG00000158486_79 (sequence is synthesized)
tcacaacccgtttgaggaatccacattacctcccagaagttgccgtgaaggtctgtctcctcaacttcatgatcacccccttgggtctccaagatcaactccttggcatcgtggctgcga

SEQ ID NO: 466883 - DNA, 120 bp, Artificial Sequence
  ENSG00000158486_80 (sequence is synthesized)
aggagaagccagagctggaagagaaaaagaaccagttgattgtggaaagtgccaagaacaagaagcatctcaaggaaattgaagataagatcttggaggttctctccatgtccaagggta

SEQ ID NO: 466884 - DNA, 120 bp, Artificial Sequence
  ENSG00000158486_81 (sequence is synthesized)
acatcctggaggatgaaaccgccatcaaagttctgtcctcctccaaagtgctatctgaagagatctcagagaaacagaaagttgcttccatgacagaaacgcagattgacgagactcgga

SEQ ID NO: 466885 - DNA, 120 bp, Artificial Sequence
  ENSG00000158486_82 (sequence is synthesized)
tgggctacaagccagtggctgtgcattctgccaccatcttcttttgtatctcggacctggccaacatcgagccgatgtaccagtactccctgacttggttcataaatctctacatgcatt

SEQ ID NO: 466886 - DNA, 120 bp, Artificial Sequence
  ENSG00000158486_83 (sequence is synthesized)
ccttgacccacagcacgaagagcgaggaactgaatctgcgcatcaagtacatcattgaccatttcaccctgagcatctacaacaacgtgtgccgttctctgtttgagaaggacaagctac

SEQ ID NO: 466887 - DNA, 120 bp, Artificial Sequence
  ENSG00000158486_84 (sequence is synthesized)
tcttctctctcctcctgaccatcggcatcatgaaacagaagaaggaaattacggaggaggtgtggtacttccttctcactggaggcatcgcactggataacccctaccccaatccagctc

SEQ ID NO: 466888 - DNA, 120 bp, Artificial Sequence
  ENSG00000158486_85 (sequence is synthesized)
cccaatggctgtctgagaaggcatgggcagagattgtccgtgcatctgccttacccaaactgcatggcctgatggagcatttggaacagaacctgggtgaatggaagctgatctatgact

SEQ ID NO: 466889 - DNA, 120 bp, Artificial Sequence
  ENSG00000158486_86 (sequence is synthesized)
cggcctggccccatgaggagcaactccctgggtcttggaagttctctcaaggattggagaagatggtgatccttcgatgtttgcggcctgacaaaatggtgccagcggtccgggagttca

SEQ ID NO: 466890 - DNA, 120 bp, Artificial Sequence
  ENSG00000158486_87 (sequence is synthesized)
ttgctgaacatatgggaaagctgtatatcgaagcccctacgttcgatctccagggatcctacaatgattccagctgctgtgcgcctttgatttttgtgttgtctccaagtgcagacccaa

SEQ ID NO: 466891 - DNA, 120 bp, Artificial Sequence
  ENSG00000158486_88 (sequence is synthesized)
tggcaggcctgctgaagtttgctgatgatcttggtatgggaggtaccagaacacagaccatctcccttggccaaggccaaggccctattgctgccaaaatgatcaacaatgccatcaaag

SEQ ID NO: 466892 - DNA, 120 bp, Artificial Sequence
  ENSG00000158486_89 (sequence is synthesized)
acgggacctgggtggtcttacagaactgccacctggccgcaagctggatgcctaccctggagaagatttgtgaggaggtgattgttcctgagagcaccaatgccagattcagactctggc

SEQ ID NO: 466893 - DNA, 120 bp, Artificial Sequence
  ENSG00000158486_90 (sequence is synthesized)
taaccagctatccatcagagaagtttccagtcagcattctccagaatggaatcaaaatgaccaatgagccccccaaagggctccgggccaacctgttgcgctcctacctcaatgacccca

SEQ ID NO: 466894 - DNA, 120 bp, Artificial Sequence
  ENSG00000158486_91 (sequence is synthesized)
tctcagatcctgtgttcttccaaagctgtgcaaaggcggtgatgtggcaaaagatgttatttggcctttgtttcttccacgccgttgttcaagagagaagaaacttcggccccctagggt

SEQ ID NO: 466895 - DNA, 120 bp, Artificial Sequence
  ENSG00000158486_92 (sequence is synthesized)
ggaatattccctatgaattcaacgaatctgacctgaggattagtatgtggcagatccagatgtttctcaatgactacaaggaggtgccctttgatgctctgacctacctgacaggggaat

SEQ ID NO: 466896 - DNA, 120 bp, Artificial Sequence
  ENSG00000158486_93 (sequence is synthesized)
gtaattacggaggcagagtgactgatgacaaagaccggcgtctcctgctgtcacttctgtccatgttctactgtaaggaaattgaggaggactattactccctcgctcctggagacactt

SEQ ID NO: 466897 - DNA, 120 bp, Artificial Sequence
  ENSG00000158486_94 (sequence is synthesized)
actacatccctcctcatggctcctaccagtcctatatcgactatctcaggaatctccccatcacagcccacccagaagtgttcggcctccatgagaacgcagacatcaccaaagacaacc

SEQ ID NO: 466898 - DNA, 120 bp, Artificial Sequence
  ENSG00000158486_95 (sequence is synthesized)
aggaaaccaaccagctgtttgagggggtcctgctgaccctccctagacagtcaggaggaagtggcaagtcccctcaggaagtggttgaggagttggcacaagacattctctccaagcttc

SEQ ID NO: 466899 - DNA, 120 bp, Artificial Sequence
  ENSG00000158486_96 (sequence is synthesized)
ccagagactttgacctggaagaggtcatgaagttgtaccccgtggtctatgaagaatccatgaataccgtcctaaggcaggagctcatcagattcaacaggctgaccaaagtggttcgga

SEQ ID NO: 466900 - DNA, 120 bp, Artificial Sequence
  ENSG00000158486_97 (sequence is synthesized)
ggagcctcatcaatcttggccgagccatcaaaggacaggtcctgatgtcctcggagctagaggaagtctttaacagcatgcttgtgggtaaagtgccagccatgtgggcagccaagtctt

SEQ ID NO: 466901 - DNA, 120 bp, Artificial Sequence
  ENSG00000158486_98 (sequence is synthesized)
acccatcactgaagcctctggggggctacgtggctgacctgctggcccgcctgaccttcttccaggaatggattgacaaggggccccctgtggtattttggatctctggattctacttca

SEQ ID NO: 466902 - DNA, 120 bp, Artificial Sequence
  ENSG00000158486_99 (sequence is synthesized)
cacagtcttttttgactggcgtctctcaaaattatgcccggaaatataccatccccattgaccacattggatttgagtttgaggtaaccccacaagaaacagtgatggagaataaccccg

SEQ ID NO: 466903 - DNA, 120 bp, Artificial Sequence
  ENSG00000158486_100 (sequence is synthesized)
aagatggggcctacatcaaagggctcttcttagaaggtgcccgttgggacaggaaaacgatgcagattggggaatctctccccaaaatcctctatgacccactgcccatcatttggctga

SEQ ID NO: 466904 - DNA, 120 bp, Artificial Sequence
  ENSG00000158486_101 (sequence is synthesized)
aacctggggagagcgcaatgtttctgcatcaggacatctatgtgtgtccagtctacaaaacaagtgcccgcagaggaaccctctccaccacaggccactctaccaactatgtcctctcca

SEQ ID NO: 466905 - DNA, 120 bp, Artificial Sequence
  ENSG00000158486_102 (sequence is synthesized)
ttgagcttccaacagacatgccccagaagcactggataaaccgaggggtggcctcactgtgccagctggataactgatggcatttgtctcaagacagaaaataaaaagcatttcattctt

SEQ ID NO: 466906 - DNA, 120 bp, Artificial Sequence
  ENSG00000158486_103 (sequence is synthesized)
gaggtaatttagaacctgtttgttatgttctagtataatagttggaattacgtgttctaaacacaaccagaatgtgcagacaggtgagccctttacaaaagccacagaaggccaggcacg

SEQ ID NO: 466907 - DNA, 120 bp, Artificial Sequence
  ENSG00000158486_104 (sequence is synthesized)
ccctttacaaaagccacagaaggccaggcacggtggctaataaatatgtaaggaattacagaattaaaatatcatcattggctggttgtggtgtctcacactggtaatcccagcactttg

SEQ ID NO: 466908 - DNA, 120 bp, Artificial Sequence
  ENSG00000158486_105 (sequence is synthesized)
agagtccagggaggaggagggagaacagttcgggctgccaggatgttgtttggagggggaactcctcagcgggccaaagtctatgacctcagagaggcaacctcatgaacagagctttca

SEQ ID NO: 466909 - DNA, 120 bp, Artificial Sequence
  ENSG00000158486_106 (sequence is synthesized)
gaacatctggaaagttccattgttggtgtcatccccattatgctataaggaagtgtgaatttcagaccaactggataggagaggcacatccctggagaagctgaaagctctttattcatt

SEQ ID NO: 466910 - DNA, 120 bp, Artificial Sequence
  ENSG00000158486_107 (sequence is synthesized)
cacctgggaaatgtttgaaaaacaccaaagtctagacccaagacaggctactgaagagggcgcatgtttgtgtgcttgtgcgagtgagagagaaggagagagagtgtgtgtacatgttct

SEQ ID NO: 466911 - DNA, 120 bp, Artificial Sequence
  ENSG00000158486_108 (sequence is synthesized)
ctgccctagtaagtgatggaaattgataccttgagtccttttagaatataagttgcaaaaatagtggcccataggctgggggtgccagattttgcaagacaaaaaatgggacacatagtt

SEQ ID NO: 466912 - DNA, 120 bp, Artificial Sequence
  ENSG00000158486_109 (sequence is synthesized)
gggatcaggcagaaatggatctgattaaaaggtaccgggagagtctgggattgtcttggaaatgagacctgacttcttcacccatgctgcaggttcctggttctgtctaagccatccccc

SEQ ID NO: 466913 - DNA, 120 bp, Artificial Sequence
  ENSG00000158486_110 (sequence is synthesized)
agctcactccatggcaacgtgtgggcgaagtctgaaaacaattggtggagaaggcatttcctttggtttcccactgagggatgttttctttaagactgcttcactgtaataacctctgct

SEQ ID NO: 466914 - DNA, 120 bp, Artificial Sequence
  ENSG00000158486_111 (sequence is synthesized)
aatgtcttcccttcctgccttgaataattggaatttggtggtgcagagagaaaaacgcaaaactagtggcatgttataacggcctccccaataataatagtgaaattgtcagccttacat

SEQ ID NO: 466915 - DNA, 120 bp, Artificial Sequence
  ENSG00000158486_112 (sequence is synthesized)
tggagaccacagatctgtaagatatcaagatatcaagataataaaggcatggcaggggggctgagaaattgcctattttgcagctggtcttattcagagctaatgtggctgtaatcactt

SEQ ID NO: 466916 - DNA, 120 bp, Artificial Sequence
  ENSG00000158486_113 (sequence is synthesized)
attcattcattatttgtcaattcagttggtatttattgcggattttcatgatgtgctatgctctgttctagacatctatgtgtgtttggctgctaaataaagattttaatccagcgacat

SEQ ID NO: 466917 - DNA, 120 bp, Artificial Sequence
  ENSG00000158486_114 (sequence is synthesized)
atcccagctactcaggaggctgaggagagaggattgcttgagcccaggagttcaagtctagcctgggcaatatggcaagacctcatctcttaagaaaagcaaaactccaccttccatgcc

SEQ ID NO: 466918 - DNA, 120 bp, Artificial Sequence
  ENSG00000158486_115 (sequence is synthesized)
cctcatctcttaagaaaagcaaaactccaccttccatgccccagatgaaaagtgataaaagagagtgggcctttgtgaagaccgcaagacataactggtattcacgtagattcttcttcc

SEQ ID NO: 466919 - DNA, 120 bp, Artificial Sequence
  ENSG00000158486_116 (sequence is synthesized)
gaaaggtgggttggtgtgccacagtctgtcctgccaaaccacgtggcaggagcatggagcagaagcatgtgtaggctacaggcttcatgttggaaattgtgtgaaatagaaggggacgat

SEQ ID NO: 466920 - DNA, 120 bp, Artificial Sequence
  ENSG00000158486_117 (sequence is synthesized)
ggcaagaagatgtgaggagtgtttggctaggccctagagaaacagagagtctcataggaaaaggagagttcagtgtggccagcatgtgttccgggagggaggctccatccagaagcctca

SEQ ID NO: 466921 - DNA, 120 bp, Artificial Sequence
  ENSG00000158486_118 (sequence is synthesized)
actaggggtgcatgacagtcatccattgtattcgttataattctttaggttgccagagacagaatgcctaacccaaagtgccctaagcaaaattaataacaataaaaatagcaaataaat

SEQ ID NO: 466922 - DNA, 120 bp, Artificial Sequence
  ENSG00000158488_0 (sequence is synthesized)
agacgagagtgcaagagggtgtggagaggggtactgatatctgaattattagggcaggtgtcctgccaaggaatccctcctttaacagagcttcaatgctgctcctgttcctcctcttcg

SEQ ID NO: 466923 - DNA, 120 bp, Artificial Sequence
  ENSG00000158488_1 (sequence is synthesized)
agggtctctgctgtcctggggaaaatacagcagctccccaggctctacaatcctatcatctagcagcagaggagcagctgtccttccgcatgctccaaacttcctcctttgccaaccaca

SEQ ID NO: 466924 - DNA, 120 bp, Artificial Sequence
  ENSG00000158488_2 (sequence is synthesized)
gctgggcacacagtgagggctcaggatggctgggtgacctgcagactcatggctgggacactgtcttgggcaccatccgctttctgaagccctggtcccatggaaacttcagcaagcagg

SEQ ID NO: 466925 - DNA, 120 bp, Artificial Sequence
  ENSG00000158488_3 (sequence is synthesized)
agctgaaaaacttacagtcactgttccagttatacttccatagttttatccagatagtgcaagcttctgctggtcaatttcagcttgaataccccttcgagatccagatattagctggct

SEQ ID NO: 466926 - DNA, 120 bp, Artificial Sequence
  ENSG00000158488_4 (sequence is synthesized)
gtagaatgaatgccccacaaatcttcttaaatatggcatatcaagggtcagatttcctgagtttccaaggaatttcctgggagccatctccaggagcagggatccgggcccagaacatct

SEQ ID NO: 466927 - DNA, 120 bp, Artificial Sequence
  ENSG00000158488_5 (sequence is synthesized)
gtaaagtgctcaatcgctacctagatattaaggaaatactgcaaagccttcttggtcacacctgccctcgatttctagcggggctcatggaagcaggggagtcagaactgaaacggaaag

SEQ ID NO: 466928 - DNA, 120 bp, Artificial Sequence
  ENSG00000158488_6 (sequence is synthesized)
tgaagccagaggcctggctgtcctgtggccccagtcctggccctggccgtctgcagcttgtgtgccatgtctcaggattctacccaaagcccgtgtgggtgatgtggatgcggggtgagc

SEQ ID NO: 466929 - DNA, 120 bp, Artificial Sequence
  ENSG00000158488_7 (sequence is synthesized)
cacagcagtctagggggccatgatctaatcatccattggggtggatattccatctttctcatcctgatctgtttgactgtgatagttaccctggtcatattggttgtagttgactcacgg

SEQ ID NO: 466930 - DNA, 120 bp, Artificial Sequence
  ENSG00000158488_8 (sequence is synthesized)
ttaaaaaaacagagttcaaataagaacattctttctccccacacacccagccctgtctttctcatgggagccaacactcaggacaccaagaattcaagacatcagttctgcttggcacaa

SEQ ID NO: 466931 - DNA, 120 bp, Artificial Sequence
  ENSG00000158488_9 (sequence is synthesized)
gtatcgtggatcaaaaacagagtattgaagaagtggaagacacgcctaaaccaactctggtgacatttgctttaccttatacataaaatccttgtctgcatcttcttaaacaccgtccat

SEQ ID NO: 466932 - DNA, 120 bp, Artificial Sequence
  ENSG00000158488_10 (sequence is synthesized)
gtcccataagggaagcatgcttttatttaaacagtttatactagcaaagatactgacccctttaggaatactttttccccatcttccagagattttttttttcctgctttggctacatat

SEQ ID NO: 466933 - DNA, 120 bp, Artificial Sequence
  ENSG00000158488_11 (sequence is synthesized)
ccatcattgtttatttttgaaactataatccagatacttctttttcatggattcccgagatcacccaattgatagctcttctgtactccccaaattgaactgatcttcacaagcacattc

SEQ ID NO: 466934 - DNA, 120 bp, Artificial Sequence
  ENSG00000158488_12 (sequence is synthesized)
atctcttcctactctgaacagtagttatttaggtttttgctctttttttttttttaatctcagttgcttgaaagtaggatttaggtatttgtgtctgtattcatgaccaaaaatcttatc

SEQ ID NO: 466935 - DNA, 120 bp, Artificial Sequence
  ENSG00000158488_13 (sequence is synthesized)
tgaattcagggccagcttcataagcatgtgacctgtgcagacacatggaatcgtatgctctgcaagaacccatgctagatttaatgctctgctgttgtcatcttggaatccttagtcatt

SEQ ID NO: 466936 - DNA, 120 bp, Artificial Sequence
  ENSG00000158488_14 (sequence is synthesized)
ttcaaacaagagatattgtattttcatttttcactgaccccacaaattatatagctgattcagtgtgaatgtaatatttctcaataaatgctgactgaaataaatttgttgttagatcaa

SEQ ID NO: 466937 - DNA, 120 bp, Artificial Sequence
  ENSG00000158488_15 (sequence is synthesized)
ttccagcagttagtgcaattagggaggttgggaggatgtacacaagagcagggagaaaatctggagccagacagtgagagaggcagaggggaaatgaaaaaccccgtgggaggctgcagc

SEQ ID NO: 466938 - DNA, 120 bp, Artificial Sequence
  ENSG00000158488_16 (sequence is synthesized)
agagaattcttgctctcagtctcagtttttgtctctgattttggagaaaggaagctggccccacaggaaaagggtattggaaccccttcgagatccagatattagctggctgtagaatga

SEQ ID NO: 466939 - DNA, 120 bp, Artificial Sequence
  ENSG00000158497_0 (sequence is synthesized)
ccacatcccaggaggccgaggcggcttgccccgcatctcagaagccgggcaggccctgagccttctgacctcacatcctctgccacaccacagtggagaaaccagaactggaggagcagc

SEQ ID NO: 466940 - DNA, 120 bp, Artificial Sequence
  ENSG00000158497_1 (sequence is synthesized)
gttctctgcatgtttggaagtcggaattggttgaagttgaagatgatgtgtatctgaggcacagctcttccctgacttataggctttgacactgctgttgaggtttgactcgaagcccag

SEQ ID NO: 466941 - DNA, 120 bp, Artificial Sequence
  ENSG00000158497_2 (sequence is synthesized)
agttttggtgtggatgagcagggacaaattgctgagcatgaagaagagtaaaattaagcaagtggaacatatgccctttgcctctgctctgcacagtgaaatgaaaagtcaacctttgaa

SEQ ID NO: 466942 - DNA, 120 bp, Artificial Sequence
  ENSG00000158516_0 (sequence is synthesized)
ctggactccaggaaaacccatggccatgaggttgatcctgttttttggtgccctttttgggcatatctactgtctagaaacatttgtgggagaccaagttcttgagattgtaccaagcaa

SEQ ID NO: 466943 - DNA, 120 bp, Artificial Sequence
  ENSG00000158516_1 (sequence is synthesized)
tgaagaacaaattaaaaatctgctacaattggaggctcaagaacatctccagcttgatttttggaaatcacccaccaccccaggggagacagcccacgtccgagttcccttcgtcaacgt

SEQ ID NO: 466944 - DNA, 120 bp, Artificial Sequence
  ENSG00000158516_2 (sequence is synthesized)
ccaggcagtcaaagtgttcttggagtcccagggaattgcctattccatcatgattgaagacgtgcaggtcctgttggacaaagagaatgaagaaatgctttttaataggagaagagaacg

SEQ ID NO: 466945 - DNA, 120 bp, Artificial Sequence
  ENSG00000158516_3 (sequence is synthesized)
gagtggtaacttcaattttggggcctaccataccctggaagagatttcccaagaaatggataacctcgtggctgagcaccctggtctagtgagcaaagtgaatattggctcttcttttga

SEQ ID NO: 466946 - DNA, 120 bp, Artificial Sequence
  ENSG00000158516_4 (sequence is synthesized)
gaaccggcctatgaacgtgctcaagttcagcaccggaggagacaagccagctatctggctggatgctgggatccatgctcgagagtgggttacacaagctacggcactttggacagcaaa

SEQ ID NO: 466947 - DNA, 120 bp, Artificial Sequence
  ENSG00000158516_5 (sequence is synthesized)
tctgattatggaaaggacccatccatcacttccattctggatgccctggatatcttcctcctgccagtcacaaaccctgatggatacgtgttctctcaaaccaaaaatcgtatgtggcgg

SEQ ID NO: 466948 - DNA, 120 bp, Artificial Sequence
  ENSG00000158516_6 (sequence is synthesized)
aagacccggtccaaggtatctggaagcctctgtgttggtgtggatcctaaccggaactgggatgcaggttttggaggacctggagccagcagcaacccttgctctgattcataccacgga

SEQ ID NO: 466949 - DNA, 120 bp, Artificial Sequence
  ENSG00000158516_7 (sequence is synthesized)
cccagtgccaactctgaagttgaagtgaaatccatagtggacttcatcaagagtcatggaaaagtcaaggccttcattaccctccacagctattcccagctgctgatgttcccctatggg

SEQ ID NO: 466950 - DNA, 120 bp, Artificial Sequence
  ENSG00000158516_8 (sequence is synthesized)
tacaaatgtaccaagttagatgactttgatgagctgagtgaagtggcccaaaaggctgcccaatctctgagaagcctgcatggcaccaagtacaaagtgggaccaatctgctctgtcatc

SEQ ID NO: 466951 - DNA, 120 bp, Artificial Sequence
  ENSG00000158516_9 (sequence is synthesized)
taccaagccagtggaggaagcattgactggtcctatgattatggcatcaagtactcatttgcctttgaactgagagacacagggcgctacggcttcctcttgccagcccgtcagatcctg

SEQ ID NO: 466952 - DNA, 120 bp, Artificial Sequence
  ENSG00000158516_10 (sequence is synthesized)
cccacagccgaggagacctggcttggcttgaaggcaatcatggagcatgtgcgagaccacccctattagggccctggggaagaaacaagagccattaaaatctctttggtttgaagcaaa

SEQ ID NO: 466953 - DNA, 120 bp, Artificial Sequence
  ENSG00000158516_11 (sequence is synthesized)
acttcaaaagcaaaataaaaatactcattcttttcttgatttactctaaatggaatgtctaatttctcagtagtcacccggaaatgagggttagagaagtggttataatcacttcttatt

SEQ ID NO: 466954 - DNA, 120 bp, Artificial Sequence
  ENSG00000158516_12 (sequence is synthesized)
ccaacacatgatgtctttatatgttgcctcagccagagcccatttcagctgttaggctgggctattagagctcagtgttcaccatgagtcatctaggagatttgttccaattatctctgc

SEQ ID NO: 466955 - DNA, 120 bp, Artificial Sequence
  ENSG00000158517_0 (sequence is synthesized)
cgacttcctctttccagtgcatttaaggcgcagcctggaagtgccagggagcactggaggccacccagtcatgggggacaccttcatccgtcacatcgccctgctgggctttgagaagcg

SEQ ID NO: 466956 - DNA, 120 bp, Artificial Sequence
  ENSG00000158517_1 (sequence is synthesized)
cttcgtacccagccagcactatgtgtacatgttcctggtgaaatggcaggacctgtcggagaaggtggtctaccggcgcttcaccgagatctacgagttccataaaaccttaaaagaaat

SEQ ID NO: 466957 - DNA, 120 bp, Artificial Sequence
  ENSG00000158517_2 (sequence is synthesized)
gttccctattgaggcaggggcgatcaatccagagaacaggatcatcccccacctcccagctcccaagtggtttgacgggcagcgggccgccgagaaccgccagggcacacttaccgagta

SEQ ID NO: 466958 - DNA, 120 bp, Artificial Sequence
  ENSG00000158517_3 (sequence is synthesized)
ctgcagcacgctcatgagcctgcccaccaagatctcccgctgtccccacctcctcgacttcttcaaggtgcgccctgatgacctcaagctccccacggacaaccagacaaaaaagccaga

SEQ ID NO: 466959 - DNA, 120 bp, Artificial Sequence
  ENSG00000158517_4 (sequence is synthesized)
gacatacttgatgcccaaagatggcaagagtaccgcgacagacatcaccggccccatcatcctgcagacgtaccgcgccattgccaactacgagaagacctcgggctccgagatggctct

SEQ ID NO: 466960 - DNA, 120 bp, Artificial Sequence
  ENSG00000158517_5 (sequence is synthesized)
gtccacgggggacgtggtggaggtcgtagagaagagcgagagcggttggtggttctgtcagatgaaagcaaagcgaggctggatcccagcgtccttcctcgagcccctggacagtcctga

SEQ ID NO: 466961 - DNA, 120 bp, Artificial Sequence
  ENSG00000158517_6 (sequence is synthesized)
cccaactatgcaggtgagccatacgtcgccatcaaggcctacactgctgtggagggggacgaggtgtccctgctcgagggtgaagctgttgaggtcattcacaagctcctggacggctgg

SEQ ID NO: 466962 - DNA, 120 bp, Artificial Sequence
  ENSG00000158517_7 (sequence is synthesized)
tgggtcatcaggaaagacgacgtcacaggctacttcccgtccatgtacctgcaaaagtcagggcaagacgtgtcccaggcccaacgccagatcaagcggggggcgccgccccgcaggtcg

SEQ ID NO: 466963 - DNA, 120 bp, Artificial Sequence
  ENSG00000158517_8 (sequence is synthesized)
tccatccgcaacgcgcacagcatccaccagcggtcgcggaagcgcctcagccaggacgcctatcgccgcaacagcgtccgttttctgcagcagcgacgccgccaggcgcggccgggaccg

SEQ ID NO: 466964 - DNA, 120 bp, Artificial Sequence
  ENSG00000158517_9 (sequence is synthesized)
cagagccccgggagcccgctcgaggaggagcggcagacgcagcgctctaaaccgcagccggcggtgcccccgcggccgagcgccgacctcatcctgaaccgctgcagcgagagcaccaag

SEQ ID NO: 466965 - DNA, 120 bp, Artificial Sequence
  ENSG00000158517_10 (sequence is synthesized)
cggaagctggcgtctgccgtctgaggctggagcgcagtccccagctagcgtctcggcccttgccgccccgtgcctgtatatacgtgttctatagagcctggcgtctggacgccgagggca

SEQ ID NO: 466966 - DNA, 120 bp, Artificial Sequence
  ENSG00000158517_11 (sequence is synthesized)
gccccgacccctgtccagcgcggctcccgccaccctcaataaatgttgcttggagtggaccgaggctctgcaggaatgcagggagggccgggctccgccccagggttatttctaagttga

SEQ ID NO: 466967 - DNA, 120 bp, Artificial Sequence
  ENSG00000158517_12 (sequence is synthesized)
acctccaagtctcaagcaattctcctgcctcacctggggccacaggtgtacatgttcctggtgaaatggcaggacctgtcggagaaggtggtctaccggcgcttcaccgagatctacgag

SEQ ID NO: 466968 - DNA, 120 bp, Artificial Sequence
  ENSG00000158517_13 (sequence is synthesized)
gcttcaccgagatctacgagttccatgcatgagcccccacgctcggccttttaggtggttttgagaggtatttaggtttgcagtgcaggggcgcaatcatagctcactgcagcctcgacc

SEQ ID NO: 466969 - DNA, 120 bp, Artificial Sequence
  ENSG00000158517_14 (sequence is synthesized)
cccagcactttggaaggtcgaggacaaaaaagccagagacatacttgatgcccaaagatggcaagagtaccgcgacagacatcaccggccccatcatcctgcagacgtaccgcgccattg

SEQ ID NO: 466970 - DNA, 120 bp, Artificial Sequence
  ENSG00000158517_15 (sequence is synthesized)
gccacaagccccctgccaaggctcaggcagccttgcccctgggaggactccggctctgttaggggccctaaatgtcctccccacactgtgggtcgccttctgtcttagtgtgcaccctgt

SEQ ID NO: 466971 - DNA, 120 bp, Artificial Sequence
  ENSG00000158517_16 (sequence is synthesized)
ggtggctgtgggcatctgtgcatggcaggccggggcggggcatgtctgcgtgttctgtctggatgggtatgggaccgtctgttcattatgaagtgggctcagagctgtgattctgtgagc

SEQ ID NO: 466972 - DNA, 120 bp, Artificial Sequence
  ENSG00000158517_17 (sequence is synthesized)
atgtgtgcatgcatgcatgtgacctcattgtccagtgtggtgaaggtgacatttccaaatctgagcattggacatcagtgtgtctgtgtccctgtgtcctcaccatccctgatggctgca

SEQ ID NO: 466973 - DNA, 120 bp, Artificial Sequence
  ENSG00000158517_18 (sequence is synthesized)
tcgctctgtctaggccatagcttggcagtgccggggcgggggctctcagcctggcaggagaggcaggaccctcacgggggaaaggggctggacgcgcctggccgcggtgtggggctggca

SEQ ID NO: 466974 - DNA, 120 bp, Artificial Sequence
  ENSG00000158517_19 (sequence is synthesized)
cgggggcggaaggaaagcggcgatgcccgggggctttggggatgggcagtccagggggggtccccggagagggggacgacagaccgaaggctggtgaggggcgtggaaaaccgcccaggc

SEQ ID NO: 466975 - DNA, 120 bp, Artificial Sequence
  ENSG00000158517_20 (sequence is synthesized)
tctgctgcagggcaagggtccttgtcgtgacgggggcagccgcctcttgtcccgccggggtcgtgcagactaccggccccctactgccccccacttcctcggaccaggggtgcccatctg

SEQ ID NO: 466976 - DNA, 120 bp, Artificial Sequence
  ENSG00000158517_21 (sequence is synthesized)
gtacatgttcctggtgaaatggcaggacctgtcggagaaggtggtctaccggcgcttcaccgagatctacgagttccatagatgggatttcgctatgttgcccaggctggtctctaactc

SEQ ID NO: 466977 - DNA, 120 bp, Artificial Sequence
  ENSG00000158517_22 (sequence is synthesized)
ggcccctctccatccagagcacccatctgagtcagccccagccaggacggggtgtttagggatctggggtgacttgtccctgggactctgggtaagccactgcccctctctgggcttagt

SEQ ID NO: 466978 - DNA, 120 bp, Artificial Sequence
  ENSG00000158517_23 (sequence is synthesized)
ttccatctcagtagcagggaggaatgagcccacccttgcctgtcttgtggggatccaatgtccttgtccaagtgggtgcatttctcctttgtgatttagggtctcttcccaaccatctat

SEQ ID NO: 466979 - DNA, 120 bp, Artificial Sequence
  ENSG00000158517_24 (sequence is synthesized)
ctgggtgacagagcgagactctgtctaagaaaaaaaaaagaaaagaagaaagaagatggcctgggagcccgcaagagcattttccaggcttagggcatcctttgggtctgcagaaggcta

SEQ ID NO: 466980 - DNA, 120 bp, Artificial Sequence
  ENSG00000158517_25 (sequence is synthesized)
caggcttagggcatcctttgggtctgcagaaggctatgcagtgtcctcctcatgtccctcccttgggctgcccgagcagatccgcccgcccccatcacttcctgaagcccttcctcagcc

SEQ ID NO: 466981 - DNA, 120 bp, Artificial Sequence
  ENSG00000158517_26 (sequence is synthesized)
agtccagttgctgtcttctctccgcagtgccccttccctttcccgggtccctcttctcttgggaagttcttctgcaggtctacccagtgcctcttcttcctccatgggaagccaagggtc

SEQ ID NO: 466982 - DNA, 120 bp, Artificial Sequence
  ENSG00000158517_27 (sequence is synthesized)
gtacatgttcctggtgaaatggcaggacctgtcggagaaggtggtctaccggcgcttcaccgagatctacgagttccatctcccaagtggtttgacgggcagcgggccgccgagaaccgc

SEQ ID NO: 466983 - DNA, 120 bp, Artificial Sequence
  ENSG00000158525_0 (sequence is synthesized)
atgcagggcacccctggaggcgggacgcgccctgggccatcccccgtggacaggcggacactcctggtcttcagctttatcctggcagcagctttgggccaaatgaatttcacaggggac

SEQ ID NO: 466984 - DNA, 120 bp, Artificial Sequence
  ENSG00000158525_1 (sequence is synthesized)
caggttcttcgagtcctggccaaagatgagaagcagctttcacttctcggggatctggagggcctgaaaccccagaaggtggacttctggcgtggcccagccaggcccagcctccctgtg

SEQ ID NO: 466985 - DNA, 120 bp, Artificial Sequence
  ENSG00000158525_2 (sequence is synthesized)
gatatgagagttcctttctctgaactgaaagacatcaaagcttatctggagtctcatggacttgcttacagcatcatgataaaggacatccaggtgctgctggatgaggaaagacaggcc

SEQ ID NO: 466986 - DNA, 120 bp, Artificial Sequence
  ENSG00000158525_3 (sequence is synthesized)
atggcgaaatcccgccggctggagcgcagcaccaacagcttcagttactcatcataccacaccctggaggagatatatagctggattgacaactttgtaatggagcattccgatattgtc

SEQ ID NO: 466987 - DNA, 120 bp, Artificial Sequence
  ENSG00000158525_4 (sequence is synthesized)
tcaaaaattcagattggcaacagctttgaaaaccagtccattcttgtcctgaagttcagcactggaggttctcggcacccagccatctggattgacactggaattcactcccgggagtgg

SEQ ID NO: 466988 - DNA, 120 bp, Artificial Sequence
  ENSG00000158525_5 (sequence is synthesized)
atcacccatgccaccggcatctggactgccaataagattgtcagtgattatggcaaagaccgtgtcctgacagacatactgaatgccatggacatcttcatagagctcgtcacaaaccct

SEQ ID NO: 466989 - DNA, 120 bp, Artificial Sequence
  ENSG00000158525_6 (sequence is synthesized)
ggtttgcttttacccacagcatgaaccgcttatggcggaagaacaagtccatcagacctggaatcttctgcatcggcgtggatctcaacaggaactggaagtcgggttttggaggaaatg

SEQ ID NO: 466990 - DNA, 120 bp, Artificial Sequence
  ENSG00000158525_7 (sequence is synthesized)
gttctaacagcaacccctgctcagaaacttatcacgggccctcccctcagtcggagccggaggtggctgccatagtgaacttcatcacagcccatggcaacttcaaggctctgatctcca

SEQ ID NO: 466991 - DNA, 120 bp, Artificial Sequence
  ENSG00000158525_8 (sequence is synthesized)
tccacagctactctcagatgcttatgtacccttacggccgattgctggagcccgtttcaaatcagagggagttgtacgatcttgccaaggatgcggtggaggccttgtataaggtccatg

SEQ ID NO: 466992 - DNA, 120 bp, Artificial Sequence
  ENSG00000158525_9 (sequence is synthesized)
ggatcgagtacatttttggcagcatcagcaccaccctctatgtggccagtgggatcaccgtcgactgggcctatgacagtggcatcaagtacgccttcagctttgagctccgggacactg

SEQ ID NO: 466993 - DNA, 120 bp, Artificial Sequence
  ENSG00000158525_10 (sequence is synthesized)
ggcagtatggcttcctgctgccggccacacagatcatccccacggcccaggagacgtggatggcgcttcggaccatcatggagcacaccctgaatcacccctactagcagcacgactgag

SEQ ID NO: 466994 - DNA, 120 bp, Artificial Sequence
  ENSG00000158525_11 (sequence is synthesized)
ggcaggaggctccatccttctccccaaggtctgtggctcctcccgaaacccaagttatgcatccccatccccatgccctcatcccgacctcttagaaaataaatacaagtttgaacaggc

SEQ ID NO: 466995 - DNA, 120 bp, Artificial Sequence
  ENSG00000158525_12 (sequence is synthesized)
aactgcttctctctctctcttttactcttattctttctctctcactctctctcttttcccacccttaagccaagtacagggatagttgtctcatcattggtggcttaaaatgatgttttt

SEQ ID NO: 466996 - DNA, 120 bp, Artificial Sequence
  ENSG00000158525_13 (sequence is synthesized)
gaacaagaagacgccccatgggtacttttggtgactagcactatctctgtttttttccttttaaattcctgagctattgtttagcagtacacccttttatctccattgctactgaagctg

SEQ ID NO: 466997 - DNA, 120 bp, Artificial Sequence
  ENSG00000158525_14 (sequence is synthesized)
aatgttacttgggtggaaagcataactgctttcttttctatgtccttaaaccctttgataatgttactgtttgagagtccctgaagccaggatactagaagagtctggcttgtctgaaca

SEQ ID NO: 466998 - DNA, 120 bp, Artificial Sequence
  ENSG00000158525_15 (sequence is synthesized)
gctgaactacgaaataatggagtagggcaggctgggctttccagcctctaggtgctgtgctgtcctgaggcctgggccatggtgcccaaggaaagcccctgaagctcaccaggaggaaga

SEQ ID NO: 466999 - DNA, 120 bp, Artificial Sequence
  ENSG00000158525_16 (sequence is synthesized)
gaaataatggagtagggcaggtgggtgggggagcagggcgttctgtcgataaacgagctcccttctttgcacacatagccagttaatcggccattctgagatagtttggatggggagggg

SEQ ID NO: 467000 - DNA, 120 bp, Artificial Sequence
  ENSG00000158525_17 (sequence is synthesized)
gagcttctgagaatcgccagtgacagctttaccaagccaattcactcaagttgtctcatctataccccttcaaaccctgtgaggtagggaggggagcctctaggtgctgtgctgtcctga

SEQ ID NO: 467001 - DNA, 120 bp, Artificial Sequence
  ENSG00000158525_18 (sequence is synthesized)
gacagttaagtggcctattgttgacgtcctctgctgaacgacttggttggattcagcttctgccttacccccaccccctgtggattttctgttagattcatcatttgccattcaggcatc

SEQ ID NO: 467002 - DNA, 120 bp, Artificial Sequence
  ENSG00000158525_19 (sequence is synthesized)
atctttcactttctccttccaacatgactgctttgtgtgctggcccctgctttactcctgctattcccaaactataaagggaactgtgtggggcttcagcaggactgagaaattgactct

SEQ ID NO: 467003 - DNA, 120 bp, Artificial Sequence
  ENSG00000158525_20 (sequence is synthesized)
gctgtctgttgagaactctaataatgactgcggtgaccttcatgtctagcagaaaacccactgtctgtgctagcacaatgatgaccacctgaagacagagaaaagggaatcttgattgaa

SEQ ID NO: 467004 - DNA, 120 bp, Artificial Sequence
  ENSG00000158525_21 (sequence is synthesized)
ttccttctcatacaatatatagttatttcctttgttctcctctccattctcttctcttccccttctccccatcgccactggaggactgatctcaaatgcagctgtgactaaaagttaatg

SEQ ID NO: 467005 - DNA, 120 bp, Artificial Sequence
  ENSG00000158525_22 (sequence is synthesized)
ccttttgaataataatacattgcattttgcaggctttaccaagccaattcactcaagttgtctcatctataccccttcaaaccctgtgagcctctaggtgctgtgctgtcctgaggcctg

SEQ ID NO: 467006 - DNA, 120 bp, Artificial Sequence
  ENSG00000158525_23 (sequence is synthesized)
cctggggagaagagaccgcttcacaggaaaatccatatctgtcatactcccagagggctcaggttgttactctgaatgcaggggtctgggctgattgaccccatggtgcgggggtggggt

SEQ ID NO: 467007 - DNA, 120 bp, Artificial Sequence
  ENSG00000158525_24 (sequence is synthesized)
agggggagcttgctgttctcacgtgtgatcaagttcaaagctggaaatgctgtgctcccttctcacaagggccatctccaccttcaacttccaggactgctaaatccatgcttctcacca

SEQ ID NO: 467008 - DNA, 120 bp, Artificial Sequence
  ENSG00000158525_25 (sequence is synthesized)
gctggtgagggtgggggagtgtgtgggagccccggggagcccctgcctttcaccccgccaatgtcatcttgcagtacgatcttgccaaggatgcggtggaggccttgtataaggtccatg

SEQ ID NO: 467009 - DNA, 120 bp, Artificial Sequence
  ENSG00000158526_0 (sequence is synthesized)
gtggactggggccggataatggcgggcgctgcagaagatgcgcgagctcttttccgggctggggtctgcgcggccctggaggcctggccggccttgcagatcgctgtggagaatggcttc

SEQ ID NO: 467010 - DNA, 120 bp, Artificial Sequence
  ENSG00000158526_1 (sequence is synthesized)
gggggtgtgcacagccaggagaaggccaagtggctggggggtgcagtggaggattacttcatgcgcaatgctgacttggagctagatgaggtggaagacttccttggagagctgttgacc

SEQ ID NO: 467011 - DNA, 120 bp, Artificial Sequence
  ENSG00000158526_2 (sequence is synthesized)
aacgagtttgatacagttgtggaagacgggagtctgccccaggtgagccagcaactgcagaccatgttccaccacttccagaggggtgatggggctgctctgagggagatggcctcctgc

SEQ ID NO: 467012 - DNA, 120 bp, Artificial Sequence
  ENSG00000158526_3 (sequence is synthesized)
atcactcagagaaaatgcaaggtcacagccactgcacttaagacagctagagagactgatgaggatgaagatgatgtggacagtgtggaagagatggaggtcacagctacgaatgatggg

SEQ ID NO: 467013 - DNA, 120 bp, Artificial Sequence
  ENSG00000158526_4 (sequence is synthesized)
gctgctacagatggggtctgcccccagcctgaaccctctgatccagacgctcagactattaaggaagaggatatagtggaagatggctggaccattgtccggagaaaaaaatgagtgggg

SEQ ID NO: 467014 - DNA, 120 bp, Artificial Sequence
  ENSG00000158526_5 (sequence is synthesized)
atgattggaaatggctttgggcccttatttgctgttctaagagttgtctgtaggggttttttttttgaggattgcagacctgtggactggttaccccatctccaccctctcccctgttcc

SEQ ID NO: 467015 - DNA, 120 bp, Artificial Sequence
  ENSG00000158526_6 (sequence is synthesized)
tctgtctggctccctccagggcaaggaaaacctagggtccttggtcttgggggtggggggaccttttccagcatattcccctgggcctttagttaacatccgagtgacgaagccgggttc

SEQ ID NO: 467016 - DNA, 120 bp, Artificial Sequence
  ENSG00000158526_7 (sequence is synthesized)
cccagtacagtgtcttttgggtgcggtcattgtgaggaaggggatgagtgagtgtgggtgtggctggaggaggagctagatgccggtggacagtgggcaggtggatttggggaggagagg

SEQ ID NO: 467017 - DNA, 120 bp, Artificial Sequence
  ENSG00000158526_8 (sequence is synthesized)
atcagcagcagcagcagtactcagtgatagggggctggctgggtcaggaatggtgagatgaacatgcaagtggaagagagaatagttgaaaatgtgaatgaaagtagctctggagcctct

SEQ ID NO: 467018 - DNA, 120 bp, Artificial Sequence
  ENSG00000158526_9 (sequence is synthesized)
cccttaccccaccccacacacacgcaacagctctgtacccctgcccagaacttggaacctcccaggaatgctgccttccttcagcccagcctccagtcctgggttccctcaggaattcga

SEQ ID NO: 467019 - DNA, 120 bp, Artificial Sequence
  ENSG00000158526_10 (sequence is synthesized)
agaccttggctaggtggtgagcttggaagagctgggctttgttttctgtctcctctaacctctttccttactccttatcccatcccatttgagttcaggggtgaggcttaagatcttaat

SEQ ID NO: 467020 - DNA, 120 bp, Artificial Sequence
  ENSG00000158526_11 (sequence is synthesized)
aaataataccttactgcttaatctgtggcttgacctgtgagtagtagccttagaatcagccttctgggagctcagcttcagagtttacaagggagcagtttctgggcccaccctagcagc

SEQ ID NO: 467021 - DNA, 120 bp, Artificial Sequence
  ENSG00000158526_12 (sequence is synthesized)
ctggtactttggacaaccaaacagatgaacgaacggagcacagcagtgctatgaaagttactgtaagcctgaaataaactgtatttttcttaaaaaaaaaaaaacacacaaaaaaacaca

SEQ ID NO: 467022 - DNA, 120 bp, Artificial Sequence
  ENSG00000158526_13 (sequence is synthesized)
aaaaactgagtatccattgtcctcccccctgtttccctgtcctgcccgctggccctgccatgggtctggacgataaaatactgggtagccttggggccgggtagaagctgtaagccatgg

SEQ ID NO: 467023 - DNA, 120 bp, Artificial Sequence
  ENSG00000158526_14 (sequence is synthesized)
gagaggcaggagaggtctagttgccaccccacgtggagttgtacgtgtgaagacactggctgaggaggcagggctgggtcggggccccagggtcagtggcagagctggcacttgaatcca

SEQ ID NO: 467024 - DNA, 120 bp, Artificial Sequence
  ENSG00000158526_15 (sequence is synthesized)
ggtctcctacctctggtgctttgtggggaactgggtggaggcaggatctgtggtagggtattgagggatgagggagaaaaacgacctaattcaggtaggactggcaacggctcccaccct

SEQ ID NO: 467025 - DNA, 120 bp, Artificial Sequence
  ENSG00000158526_16 (sequence is synthesized)
gtgcccgtgatgggagttcaagtattgactgagctgggagggaaggggctagagcccccaatcagacatgggcaactagagtgtggggtgggggctcccagtttgtcccaaaccctctag

SEQ ID NO: 467026 - DNA, 120 bp, Artificial Sequence
  ENSG00000158526_17 (sequence is synthesized)
gtcttgtctcgggtctggggggattcggggggttcagcagtggctcctaaagcagccaccggtgcctcctccatctccctgtcctcagacagtgtgggccccgggcagaacgtgtcccct

SEQ ID NO: 467027 - DNA, 120 bp, Artificial Sequence
  ENSG00000158526_18 (sequence is synthesized)
cggcccgcccggccaagcacagccatccagcgtcgctgtagttcctctgtctcagggctgaagtaccagctgaggtggctctgggtgatcttgaagacatgccttctgtcaggccgctcc

SEQ ID NO: 467028 - DNA, 120 bp, Artificial Sequence
  ENSG00000158526_19 (sequence is synthesized)
cctgcctcgggcggtcccacctcgaagccaatgaggggcaggctgcgctgggctttcacatcctggcgggaggagggacagagctggggccaccttggggctagacctttcccccgcccc

SEQ ID NO: 467029 - DNA, 120 bp, Artificial Sequence
  ENSG00000158526_20 (sequence is synthesized)
agcttctaactggttttgcatatgctctgtcttcagtcccctactcaggaactcccctactcaggaaccttccgtggctccagtgttatcaacaggaacatgtcagaactggggctaaaa

SEQ ID NO: 467030 - DNA, 120 bp, Artificial Sequence
  ENSG00000158526_21 (sequence is synthesized)
tgcaggctggtttaaatacctgtctccccccacccccgcctcttctcacaaaactgctgggctagtctctttagcataccaaataatgttttcaggcctttgtctatgctattgccccta

SEQ ID NO: 467031 - DNA, 120 bp, Artificial Sequence
  ENSG00000158526_22 (sequence is synthesized)
ggattacaggcgtgagccactgcgctcggtcccatctgcatactcttacccactccaaattggacctagcagttccccatctctactccttccaggaagccaggcccacaactcatcctg

SEQ ID NO: 467032 - DNA, 120 bp, Artificial Sequence
  ENSG00000158526_23 (sequence is synthesized)
ctctactccttccaggaagccaggcccacaactcatcctggttttccctacataccacaaccactccttgtctctagccagtctttgtctctcaagggttggggttctgatttcctctta

SEQ ID NO: 467033 - DNA, 120 bp, Artificial Sequence
  ENSG00000158526_24 (sequence is synthesized)
gagataggctcaccttatcttccaaggctcaccttatcttccaaggccaaggagaggtcaaggactggatctggctttgccaggtggctgaaaggacccgaaggagtaggatgcatacct

SEQ ID NO: 467034 - DNA, 120 bp, Artificial Sequence
  ENSG00000158526_25 (sequence is synthesized)
gaggggctccgtagatatacagcaccaagggttcattttcagggaccacgaaccatgccttgtgccatcctttgccacccttctccatgtagtgcaggaagctgcagatgacgctgttct

SEQ ID NO: 467035 - DNA, 120 bp, Artificial Sequence
  ENSG00000158526_26 (sequence is synthesized)
ctgcagccactgaggcctgtttctgtggccagagacaccgggcatcaatgttgacagaaggcctagcctggctcctcctagctttaatacctcctcagtgtagggactgctattcctatc

SEQ ID NO: 467036 - DNA, 120 bp, Artificial Sequence
  ENSG00000158526_27 (sequence is synthesized)
tcagatgaagacgctcaagctcaggtggcaggagtgatttgtccagtgccacccagtgaatcagctagagctgagattcaaagctaggttcgtctgcctcatttgggcaacggctgctgc

SEQ ID NO: 467037 - DNA, 120 bp, Artificial Sequence
  ENSG00000158526_28 (sequence is synthesized)
ctctacaggccagtggaaggagtgtgcggatctcaggcattctttcttcagtcagagcattcattcctcaagccattcacacatttaggcctcatgcttttttctgtctttcatcacatc

SEQ ID NO: 467038 - DNA, 120 bp, Artificial Sequence
  ENSG00000158526_29 (sequence is synthesized)
catttcctacactcattgagaggtaatctagcattgtggttttaagggggtatgtgggtggttaatgaagtctggcttagaatcccagctctagatgaaaatgtattgacttggagagca

SEQ ID NO: 467039 - DNA, 120 bp, Artificial Sequence
  ENSG00000158526_30 (sequence is synthesized)
aagagagctgatgtgagaattaaatgaattaatatatgcaaagtgcttagaatagttcctggcacagagtaagtactcttttaagtgttaaataaatacctagatttgtttttaaaaaaa

SEQ ID NO: 467040 - DNA, 120 bp, Artificial Sequence
  ENSG00000158528_0 (sequence is synthesized)
ctctcccgggattttgctgccgggctccctctctctgcggccctagagttaatcccatcagccgagatgaacctctagtcttgctttgaaaaaatcattctgtgtaactcttgactgtga

SEQ ID NO: 467041 - DNA, 120 bp, Artificial Sequence
  ENSG00000158528_1 (sequence is synthesized)
ctaagttcctaatacacctgttgggacgatcactgacaccgtataccatttgagaggtacttttcttgacccaatactggtgattagagaagagaggtatcttggtttttggtttttttc

SEQ ID NO: 467042 - DNA, 120 bp, Artificial Sequence
  ENSG00000158528_2 (sequence is synthesized)
tttgatcattatgaacattggcttttcacccctgaagtgaaaatgttgaaaactgagtcttcaggtgaacgaaccactctcagaagtgcctctcctcacaggaatgcatatcgaactgag

SEQ ID NO: 467043 - DNA, 120 bp, Artificial Sequence
  ENSG00000158528_3 (sequence is synthesized)
tttcaggcactgaaaagtacctttgacaaacccaagtcagatggggaacaaaaaacaaaagaaggtgagggctcccagcagagcagggggaggaaatatggctccaatgtcaacagaatt

SEQ ID NO: 467044 - DNA, 120 bp, Artificial Sequence
  ENSG00000158528_4 (sequence is synthesized)
aaaaacctatttatgcagatgggtatggaacccaacgagaatgctgcagtcattgccaaaacaagggggaaaggtggacattcatctcctcagagaagaatgaagcccaaagaatttctg

SEQ ID NO: 467045 - DNA, 120 bp, Artificial Sequence
  ENSG00000158528_5 (sequence is synthesized)
gaaaaaacagatggctcagttgttaagttggagtcttctgtttctgaacgaattagtagatttgacactatgtacgatggcccttcatattccaagttcactgagactcgaaagatgttt

SEQ ID NO: 467046 - DNA, 120 bp, Artificial Sequence
  ENSG00000158528_6 (sequence is synthesized)
gagagaagtgtgcatgaatcaggacagaacaaccgctattccccaaagaaagagaaagctggagggagtgaacctcaggatgaatggggaggttccaagtccaacagaggcagtactgat

SEQ ID NO: 467047 - DNA, 120 bp, Artificial Sequence
  ENSG00000158528_7 (sequence is synthesized)
tccttggacagccttagctcccgaactgaggctgtctccccaactgtgagtcaactgagtgcagtatttgagaacactgattctcccagtgccatcatttctgagaaggctgaaaacaat

SEQ ID NO: 467048 - DNA, 120 bp, Artificial Sequence
  ENSG00000158528_8 (sequence is synthesized)
gaatactcagtgactgggcattatcccttgaatttaccatctgttactgttacaaatcttgacacatttggtcacctgaaggattctaattcctggcctccttcaaacaagcgaggtgtt

SEQ ID NO: 467049 - DNA, 120 bp, Artificial Sequence
  ENSG00000158528_9 (sequence is synthesized)
gatacagaggatgctcacaagagtaatgcaactccagtaccagaagtggcttctaaaagtacctctctagcttcgatacctggtgaagagatccagcagagcaaggaacccgaggactcc

SEQ ID NO: 467050 - DNA, 120 bp, Artificial Sequence
  ENSG00000158528_10 (sequence is synthesized)
acatctaatcaacagactcccgacagcattgacaaagatggtcctgaagaaccttgtgctgaaagtaaggcaatgccaaagtccgaaatcccttcaccacaaagccaactgttagaagat

SEQ ID NO: 467051 - DNA, 120 bp, Artificial Sequence
  ENSG00000158528_11 (sequence is synthesized)
gctgaagctaatttggttggaagggaggcagcaaagcaacagaggaaagaacttgcaggtggtgatttcacctctcctgatgcttctgcatccagttgtggaaaagaagtacctgaagat

SEQ ID NO: 467052 - DNA, 120 bp, Artificial Sequence
  ENSG00000158528_12 (sequence is synthesized)
tcaaataattttgatggttcccatgtgtacatgcacagtgactataatgtgtatagggtgagatccaggtataattcagactggggagagacaggcactgagcaggatgaggaggaagat

SEQ ID NO: 467053 - DNA, 120 bp, Artificial Sequence
  ENSG00000158528_13 (sequence is synthesized)
agtgatgagaacagttactatcagcctgatatggagtactcggaaattgttggattgccagaagaagaagaaatcccagcaaataggaaaattaagtttagtagtgctcctattaaggtt

SEQ ID NO: 467054 - DNA, 120 bp, Artificial Sequence
  ENSG00000158528_14 (sequence is synthesized)
ttcaacacatactccaatgaagactatgacaggagaaatgacgaagttgaccctgtggctgcttcagctgagtatgaacttgaaaaacgtgtagaaaagctggaacttttcccagtggag

SEQ ID NO: 467055 - DNA, 120 bp, Artificial Sequence
  ENSG00000158528_15 (sequence is synthesized)
ctagagaaagatgaggatggtcttggtataagtattattggaatgggtgttggagcagatgctggacttgaaaagctgggaatattcgtcaagacagtaacagaaggtggtgctgctcaa

SEQ ID NO: 467056 - DNA, 120 bp, Artificial Sequence
  ENSG00000158528_16 (sequence is synthesized)
cgggatggcagaatacaagtcaatgaccagattgtggaagtggatggaatcagcttggtgggtgtgacacagaattttgcagcaacagttctcagaaacaccaagggcaacgtcagattt

SEQ ID NO: 467057 - DNA, 120 bp, Artificial Sequence
  ENSG00000158528_17 (sequence is synthesized)
gttattgggcgggaaaaaccaggacaagtgagcgaggttgcccagttgataagccagacactggaacaggagaggcgccagagagagctgctggaacagcactatgcccagtatgatgcc

SEQ ID NO: 467058 - DNA, 120 bp, Artificial Sequence
  ENSG00000158528_18 (sequence is synthesized)
gacgatgacgagacaggagaatatgccacagatgaagaagaagatgaggtaggacctgtccttcctggcagcgacatggccattgaagtctttgagctgcctgagaatgaggacatgttt

SEQ ID NO: 467059 - DNA, 120 bp, Artificial Sequence
  ENSG00000158528_19 (sequence is synthesized)
tccccatcagaactggacacaagcaagctcagtcacaagttcaaagagttgcaaatcaaacatgcagttacagaagcagagattcaaaaattgaagaccaagctgcaggcagcagaaaat

SEQ ID NO: 467060 - DNA, 120 bp, Artificial Sequence
  ENSG00000158528_20 (sequence is synthesized)
gagaaagtgaggtgggaactagaaaaaacccaactccaacaaaacatagaagagaataaggaaagaatgttgaagttggaaagctactggattgaggcccaaacattatgccacacagtg

SEQ ID NO: 467061 - DNA, 120 bp, Artificial Sequence
  ENSG00000158528_21 (sequence is synthesized)
aatgagcatctcaaagagactcaaagccagtatcaggccttggaaaagaaatacaacaaggcaaagaagttgatcaaggattttcaacaaaaagagcttgatttcatcaaaagacaggaa

SEQ ID NO: 467062 - DNA, 120 bp, Artificial Sequence
  ENSG00000158528_22 (sequence is synthesized)
gcagaaagaaagaaaatagaagatttggaaaaagctcatcttgtggaagtgcaaggcctccaagtgcggattagagatttggaagctgaggtattcaggctactgaagcaaaatgggact

SEQ ID NO: 467063 - DNA, 120 bp, Artificial Sequence
  ENSG00000158528_23 (sequence is synthesized)
caagttaacaataataacaacatctttgagagaagaacatctcttggtgaagtctctaaaggggataccatggagaacttggatggcaagcagacatcttgccaagatggcctaagtcaa

SEQ ID NO: 467064 - DNA, 120 bp, Artificial Sequence
  ENSG00000158528_24 (sequence is synthesized)
gacttgaatgaagcagtcccagagacagagcgcctggattcaaaagcactgaaaactcgagcccagctctctgtgaagaacagacgccagagaccctctaggacaagactgtatgatagt

SEQ ID NO: 467065 - DNA, 120 bp, Artificial Sequence
  ENSG00000158528_25 (sequence is synthesized)
gttagttccacagatggggaggacagtctagagagaaagaattttaccttcaatgatgacttcagtcccagcagtaccagttcagcagacctcagcggcttaggagcagaacctaaaaca

SEQ ID NO: 467066 - DNA, 120 bp, Artificial Sequence
  ENSG00000158528_26 (sequence is synthesized)
ccagggctctctcagtccttagcactgtcatcagatgagagcctggatatgatagatgacgagatccttgatgatggacagtctcccaaacacagtcagtgtcagaatcgggccgttcag

SEQ ID NO: 467067 - DNA, 120 bp, Artificial Sequence
  ENSG00000158528_27 (sequence is synthesized)
gaatggagtgtgcagcaggtttctcactggttaatgagcctaaatctggagcagtatgtatctgaattcagtgcccaaaacatcactggagaacagctcctgcagttggatggaaataaa

SEQ ID NO: 467068 - DNA, 120 bp, Artificial Sequence
  ENSG00000158528_28 (sequence is synthesized)
cttaaggctcttggaatgacagcatcccaggaccgagcagtggtcaaaaagaaactcaaggaaatgaagatgtctctagagaaggctcggaaggcccaagagaaaatggaaaaacaaaga

SEQ ID NO: 467069 - DNA, 120 bp, Artificial Sequence
  ENSG00000158528_29 (sequence is synthesized)
gaaaagctaaggagaaaggagcaagagcaaatgcagaggaagtccaaaaagacagaaaagatgacgtcaactacagccgagggtgctggtgagcagtaacacataccctcttacagatga

SEQ ID NO: 467070 - DNA, 120 bp, Artificial Sequence
  ENSG00000158528_30 (sequence is synthesized)
tggagatgctccaagagaagtccccacctcttcctgccctgctctcctccagaggatgaaaaagaaactaaatgataagggtaatgcggctctaggccggctgaggaactgtgtgttgaa

SEQ ID NO: 467071 - DNA, 120 bp, Artificial Sequence
  ENSG00000158528_31 (sequence is synthesized)
taactgcattttctgcaatagaatgcactcttaattttaactactaaaataatcccaagccacctttggttcattaacaaaccagagatttcatttaagtagctgtgttttgctcttctc

SEQ ID NO: 467072 - DNA, 120 bp, Artificial Sequence
  ENSG00000158528_32 (sequence is synthesized)
taacttaccaacatcttgtgttgtgttgggtgtgttttgtcacttggagaactagtgtgaccccacccaagagcatgacacaccctggtgttgttaatggagcgccgtgaattttcagtg

SEQ ID NO: 467073 - DNA, 120 bp, Artificial Sequence
  ENSG00000158528_33 (sequence is synthesized)
tgggatcctgaaatggcaattgcacatgtctgcatggcagagagcaccctgccatgagatctgagaccagtacttaacttctaggactgcaacacctactccaatgtgtgggaaagattt

SEQ ID NO: 467074 - DNA, 120 bp, Artificial Sequence
  ENSG00000158528_34 (sequence is synthesized)
gctcttaattctcagtctggacagtgagaccaccccgctgtggaaacatgggtgctctgctctgtagttacctactaagggaaaaggcaagcaagtcattctgcttgctaggcatcaaaa

SEQ ID NO: 467075 - DNA, 120 bp, Artificial Sequence
  ENSG00000158528_35 (sequence is synthesized)
agaaagaaaataaattatagctatttgttaaccactgaaaaaagcaaaagccttaagaatgtggatgtgggtattaccttggggttctgagggtaatatttatcctctagatacggctga

SEQ ID NO: 467076 - DNA, 120 bp, Artificial Sequence
  ENSG00000158528_36 (sequence is synthesized)
acaagaaagaaaaaaatcagacattaatgcagccatgggatattgggatctgttgaccttgctactgctgtgtgttcagcatttcagcaacactggcaaacacaacacagttcctcttcc

SEQ ID NO: 467077 - DNA, 120 bp, Artificial Sequence
  ENSG00000158528_37 (sequence is synthesized)
ccctacctaacccaagaaattgaacaggaaattgatttttaaggaaaccaccattttcaggtttcctctcctggggaacattctggctggtcttcagcctgcctatgtcacaatcaggaa

SEQ ID NO: 467078 - DNA, 120 bp, Artificial Sequence
  ENSG00000158528_38 (sequence is synthesized)
ctcatcacatattttctactcaagatttcccaggtgggctcagttagtattttaacaaatgtacttttaagaaaaatagaaataccagttagaggaaactgtcagttaacattttagaga

SEQ ID NO: 467079 - DNA, 120 bp, Artificial Sequence
  ENSG00000158528_39 (sequence is synthesized)
gattttgaatggtttttccgaaccattcctttccatacttcaaagattctcaattttacagaaaaagtttgtttaaggcagtgcataggtatactttagtagtggaggaacttatactaa

SEQ ID NO: 467080 - DNA, 120 bp, Artificial Sequence
  ENSG00000158528_40 (sequence is synthesized)
ttgagaaatttcatgtgatgagggttttttgttttttatgctcatgtatctggttctctttgctgcgttgactctaaaaatgaggttatccactttccaaaggacaagtttcagaataag

SEQ ID NO: 467081 - DNA, 120 bp, Artificial Sequence
  ENSG00000158528_41 (sequence is synthesized)
acttgaggccacatgaattcttggacagtattttacttcttttactttatgggaatctctgctctgttcccagcatctcgtatcttccactagaagtattccatatttagagcctcggca

SEQ ID NO: 467082 - DNA, 120 bp, Artificial Sequence
  ENSG00000158528_42 (sequence is synthesized)
aggcttttgagtgtaacagattaagggaactcccttgtagccccatcttgtattttaataacagtgtgatttttttttatctgaaaatctgaattcagaaattatctaaactggacattt

SEQ ID NO: 467083 - DNA, 120 bp, Artificial Sequence
  ENSG00000158528_43 (sequence is synthesized)
ttaattctgttttacccccaaggcctgttttcttttcattgccagagtattgtcggttatgcgtcagctcttttgtcattaggtacagacccttcattcaatcctcagaaacgttgacat

SEQ ID NO: 467084 - DNA, 120 bp, Artificial Sequence
  ENSG00000158528_44 (sequence is synthesized)
gaagtaacattgtgttttacagttatcaaagtcaccattatgtttttctgtctgtcttcattaggggtatgataatgaaactgccgtattggatactctattaatgtcttgagatgtctg

SEQ ID NO: 467085 - DNA, 120 bp, Artificial Sequence
  ENSG00000158528_45 (sequence is synthesized)
gtgctttgttattttttcacatcatgagaaataagaagccactattaatgagtgatacaatttggcaaaacttttcaaatactaaaacactaaattagtaaaaatctggtaatattagtg

SEQ ID NO: 467086 - DNA, 120 bp, Artificial Sequence
  ENSG00000158528_46 (sequence is synthesized)
cttgctattgtaaatttttgccatttttgcttatctttgggaaaaaagtgacctggatcacactggaagtttcactgtattcaagagtagaaatagaaggatgattatcttaagttatgt

SEQ ID NO: 467087 - DNA, 120 bp, Artificial Sequence
  ENSG00000158528_47 (sequence is synthesized)
ttacactttggtaatatttgaaaatggatgtatatactggaaatgtctgtaagtgtcttgtttttgcacctaatttatgatctattatattgcattttcttaaatatcttagaagtattt

SEQ ID NO: 467088 - DNA, 120 bp, Artificial Sequence
  ENSG00000158528_48 (sequence is synthesized)
tgtttagataaatgtccaactgacaatgttataaatcaaattcttattcctaaaatcatttagtattataagtattttgattttttaagttaaattatagtaattttaggccgaagtgag

SEQ ID NO: 467089 - DNA, 120 bp, Artificial Sequence
  ENSG00000158528_49 (sequence is synthesized)
atagtaattttaggccgaagtgagttattttaacattaccacttaaaacggatgaaattgtaaaagtcatttggtttgattgccccacaaagcataagatgtaaactgattaagggtatg

SEQ ID NO: 467090 - DNA, 120 bp, Artificial Sequence
  ENSG00000158528_50 (sequence is synthesized)
aaagcaaagtgaaagacctcagatcttgtgcacattttgttttcctattatttcttttattgactgtagtgcatgatacctaatcaaggctccaatgtcttgcacaattcctactttaat

SEQ ID NO: 467091 - DNA, 120 bp, Artificial Sequence
  ENSG00000158528_51 (sequence is synthesized)
gctagtggttttcagtgtccttacaatttaacacagaattgttatttcatcaaccttaaaaactgcagtttttattatcagaaaatgaacaaaaagggaatatctggttgctatgaactg

SEQ ID NO: 467092 - DNA, 120 bp, Artificial Sequence
  ENSG00000158528_52 (sequence is synthesized)
attccctaaaggagagctcagtatgattctaacaatagccaaaagtgttttggggtataggttatgctttgttgggagggaatgtgtggtgaggaggccaagctgcagacagaaagcatt

SEQ ID NO: 467093 - DNA, 120 bp, Artificial Sequence
  ENSG00000158528_53 (sequence is synthesized)
gtatgagctgtatctgggtcagggtttcccattaaaggatgttagttttataacagattactttgtttaagaccatctcccttcaagtaactcacagtttatgtaatactaatctcattc

SEQ ID NO: 467094 - DNA, 120 bp, Artificial Sequence
  ENSG00000158528_54 (sequence is synthesized)
tttttttacctgaatcaggaattttctgcagaatgttaagttagggaagaaacctcatttcatccattctaacactcctgatgaagtccccctttagtttcatgacaataaagctgttct

SEQ ID NO: 467095 - DNA, 120 bp, Artificial Sequence
  ENSG00000158528_55 (sequence is synthesized)
gtggctatcatcctttagctgggattgacaattgatttcacaccctcaacatcacaagctttttttaacccacagcagttcatgattgcagtatgataggtactaaagccaaactcagct

SEQ ID NO: 467096 - DNA, 120 bp, Artificial Sequence
  ENSG00000158528_56 (sequence is synthesized)
ttcaactggcacaaaatgggactgtcaccttttgctccattgttgttggaaacaaagtggcaagagggaaaatgaggaaccagatttacctttgccactatctgtgaccctgtaatcatc

SEQ ID NO: 467097 - DNA, 120 bp, Artificial Sequence
  ENSG00000158528_57 (sequence is synthesized)
actagcctgaaatcttaaaatatcccagtcccaagctacaaaaatggtcacaggtggtttgatctagcacctcggccgttagagtttgtgctgaagacaaatttgtctgggttcattgtg

SEQ ID NO: 467098 - DNA, 120 bp, Artificial Sequence
  ENSG00000158528_58 (sequence is synthesized)
caccagaattagcatgtgcttgaaaattgcattttataaaagggaaatgaaaatttgcatttatatagatactctgattcatgtttaagtgttaaaggttatgcagactaaacttcaaga

SEQ ID NO: 467099 - DNA, 120 bp, Artificial Sequence
  ENSG00000158528_59 (sequence is synthesized)
ggagatccagtgtttaacaatagtgttctagaggattctaaaggaagctgccccagcagccctgagagaaccatctatactttggatatgttgtagccccatcattacactgagatattt

SEQ ID NO: 467100 - DNA, 120 bp, Artificial Sequence
  ENSG00000158528_60 (sequence is synthesized)
ccatttgagtaactaaaggtactcctgacagagctggagatgaggggcattttggtgggcagtggtcactagggttcacgtcacctacttaatgcaaagaccttagtggtctcagaatga

SEQ ID NO: 467101 - DNA, 120 bp, Artificial Sequence
  ENSG00000158528_61 (sequence is synthesized)
aaaggtaaaatggaagagaaaagcacagtcctttcctgtcttttcaaatttactttttattaaggatgtacctgtgcactattctaaagctaagcatttaaggataaagtccagaaataa

SEQ ID NO: 467102 - DNA, 90 bp, Artificial Sequence
  ENSG00000158528_62 (sequence is synthesized)
ttttctttttttttttttttttctgtcatctgtcacccagactggactgcagtggtgccatcatgtcttgtcctcctgcttcagcttccc

SEQ ID NO: 467103 - DNA, 120 bp, Artificial Sequence
  ENSG00000158528_63 (sequence is synthesized)
agctgggactacaggcatgtgccaccacccccagccaaaacatccatattttctattagaatggtttacattatgatgggggatggggagctgggggagggctgtacattcccaaaagaa

SEQ ID NO: 467104 - DNA, 120 bp, Artificial Sequence
  ENSG00000158528_64 (sequence is synthesized)
gagggctgtacattcccaaaagaaagtagtgttataggaaatccaaatgcgcttcagtgattcactcctgaaaagcagcctgggtatgttggcagattttgtttgcatttgtcttgcgta

SEQ ID NO: 467105 - DNA, 120 bp, Artificial Sequence
  ENSG00000158528_65 (sequence is synthesized)
tttaaagtctcaggaaatctagtcttggtccaaaacactggagaaaaaaataacaccagacaaaacacatttgagtaacttgaagtagcagcatagaataggcccaactaagaagttgga

SEQ ID NO: 467106 - DNA, 120 bp, Artificial Sequence
  ENSG00000158528_66 (sequence is synthesized)
ggggcaaagagaaagccgacagaatcagcttctcctggaaagtgaaagcatcaagttctatttatggtagacagagggtccttatttgcttgtccgtggtgtctatgtgggcctattgag

SEQ ID NO: 467107 - DNA, 120 bp, Artificial Sequence
  ENSG00000158528_67 (sequence is synthesized)
ggaatggtagttacttgaaggttcacatatgtaagcgtgtggacccagcacagtctgtgacctgattccagatcctcaagagtggagaaggaaagaaatatgatgatttcctatgcttga

SEQ ID NO: 467108 - DNA, 120 bp, Artificial Sequence
  ENSG00000158528_68 (sequence is synthesized)
ccctaacccaaccccaaaactgctagggattcaacagtgagtaagatgtatgcaataagagaacagataacttctcaacaatgtgcatgccgtttgtgtagatgttcagaactacatatg

SEQ ID NO: 467109 - DNA, 120 bp, Artificial Sequence
  ENSG00000158528_69 (sequence is synthesized)
tgtgaatatcactcccaccttacacacgcacacacactgcaatcacatggcattaaaaaatatattgtgtatggaacttggcgaggtcagtcaggacctggagctgtaatcatagcctta

SEQ ID NO: 467110 - DNA, 120 bp, Artificial Sequence
  ENSG00000158528_70 (sequence is synthesized)
ttgccacttcttgcgttgtgtatacattgaatggctcatagattttaagagatttttttattgtaagtatttctactaaatgcacttatccttctatatgtttatatattttggtaaaat

SEQ ID NO: 467111 - DNA, 120 bp, Artificial Sequence
  ENSG00000158528_71 (sequence is synthesized)
tgatttatcagatacttggtattttagtaagaaaatttcctcaaatatttggctaatgctttgatgtcaagattgcatattgctgagttggagctcagaagaaatgtatgcagctaaaaa

SEQ ID NO: 467112 - DNA, 120 bp, Artificial Sequence
  ENSG00000158528_72 (sequence is synthesized)
ttgcactgtgtgttcttgtgaatttgctcacaattctaaaatgacataattggtggctgtgatgcttacagtcactgcctactggctctcttatgatgaatgttgccatcatatgatcat

SEQ ID NO: 467113 - DNA, 120 bp, Artificial Sequence
  ENSG00000158528_73 (sequence is synthesized)
ttatttactttttgtgcaagcaatggcattttggttgttgccaaaaacaacacaagtggttgggagtgtatgttgttggaaggtgtacacttctgtttctttcagctgtattatttatac

SEQ ID NO: 467114 - DNA, 120 bp, Artificial Sequence
  ENSG00000158528_74 (sequence is synthesized)
acccaggttttctgttaaggatgtaatcattcattcaagaaagaacaattggcaagaaataattaaattaccttaaaaagaattaagaggcactccagccagataacacctcccaacaac

SEQ ID NO: 467115 - DNA, 120 bp, Artificial Sequence
  ENSG00000158528_75 (sequence is synthesized)
atgaaatttagttagtgcttagtgaaattccttaaatatatatgtatatgttttcttcaacattatttaatataactactgcttttatattttttaatggtgttgcaaccacttgtacac

SEQ ID NO: 467116 - DNA, 120 bp, Artificial Sequence
  ENSG00000158528_76 (sequence is synthesized)
ctgctacaccttactgacaaaactgggcagctgaaaataaaagagaataaattctattccactgtaagaagttgatttcttttcagctttctttgtatatcagtaaagaacacgaattgt

SEQ ID NO: 467117 - DNA, 120 bp, Artificial Sequence
  ENSG00000158528_77 (sequence is synthesized)
ttgaaaataattttaagtctgataagtatggatagcatgttacctaagcttttaatttgtacattttgatgtctgatcatttgcatggaagagacaatagtgccacgtctgaattgttct

SEQ ID NO: 467118 - DNA, 120 bp, Artificial Sequence
  ENSG00000158528_78 (sequence is synthesized)
cttgtgcttggttaatatgtacttctctagattgttcaaaaagtttcaaatgacattccttactctttggttttcagaggcattcaagcaaaatatcacagtggtcttttgttttctgac

SEQ ID NO: 467119 - DNA, 120 bp, Artificial Sequence
  ENSG00000158528_79 (sequence is synthesized)
caatctaacaatacctgtgattaaatttaatttgttagtgtaaataaatttcttgccaatgagtattattgttgttagacaacgaatgcaataaaaagaaatactgaggtctgttgaagc

SEQ ID NO: 467120 - DNA, 120 bp, Artificial Sequence
  ENSG00000158528_80 (sequence is synthesized)
attatcagtgggatctattgtttcctggcacattgggaggaaaaacaaagggatttattttcattaccctgtaattttttttcttttctatttttttaaatgtggccagggagctcgtct

SEQ ID NO: 467121 - DNA, 120 bp, Artificial Sequence
  ENSG00000158528_81 (sequence is synthesized)
ctctccgtgtcacagtgggatccgcctggcagccgccgggagctgcagccaatgtgttaggacttcaggtgcttcttggcacaaagctagactgcgacctcctaccatagcgcttggcgt

SEQ ID NO: 467122 - DNA, 120 bp, Artificial Sequence
  ENSG00000158528_82 (sequence is synthesized)
cacctgctctcccggtcctgccccagggccgagggattgcgtcccgaaccgggcttgggaatcggctgcctctcaaatgaacctctagtcttgctttgaaaaaatcattctgtgtaactc

SEQ ID NO: 467123 - DNA, 120 bp, Artificial Sequence
  ENSG00000158528_83 (sequence is synthesized)
agatggggaggacagtctagagagaaagccatcaaacagtttctataaccacatgcatattaccaaattacttccacctaagggtttgagaacgtcttctccagaatcagattctggtgt

SEQ ID NO: 467124 - DNA, 120 bp, Artificial Sequence
  ENSG00000158528_84 (sequence is synthesized)
tccacccctcaccccggtggatagcaatgtgcccttctcgtctgaccacatagctgaatttcaagaagaaccactggacccagaaatggggcctctctcctctatgtggggagacacttc

SEQ ID NO: 467125 - DNA, 120 bp, Artificial Sequence
  ENSG00000158528_85 (sequence is synthesized)
actgttttctacttcaaagtctgatcatgatgtggaagaatctccttgccatcaccaaaccaccaacaagaaaatattacgagaaaaagatgatgccaaagatcccaaatcactaagggc

SEQ ID NO: 467126 - DNA, 120 bp, Artificial Sequence
  ENSG00000158528_86 (sequence is synthesized)
atccagttcattggcggtgcaaggaggaaaaattaagcggaagtttgtggatctgggggcgcctttgcgaaggaattccagcaagggaaagaagtggaaagaaaaagaaaaagaagccag

SEQ ID NO: 467127 - DNA, 120 bp, Artificial Sequence
  ENSG00000158528_87 (sequence is synthesized)
taggttttctgcaggtagcaggatcttcagaggcagactggaaaactggacacccaagccatgttcaacagctcagacctccactcgttccccttgcatgcctttctcatggtttaatga

SEQ ID NO: 467128 - DNA, 120 bp, Artificial Sequence
  ENSG00000158528_88 (sequence is synthesized)
cagccggaaaggatcctattccttcaggaacctgcctgcgcctacaagttcccttcagccttctcctgagactctaatttcagataaaaaggggtccaaggtagaaaacacatggattac

SEQ ID NO: 467129 - DNA, 120 bp, Artificial Sequence
  ENSG00000158528_89 (sequence is synthesized)
aaaagcaaacaagagaaacccaaatccctcctcttcttcaatctttggaaggcattctcaacttatgtctgtagtctggatccaagaaaccaataattttaccttcaatgatgacttcag

SEQ ID NO: 467130 - DNA, 80 bp, Artificial Sequence
  ENSG00000158528_90 (sequence is synthesized)
gcggccgccgcagccgccctacgcgctgcgccgtgaggagcgggttgcggtgtacccagcgggccggcgccgagccgagc

SEQ ID NO: 467131 - DNA, 120 bp, Artificial Sequence
  ENSG00000158528_91 (sequence is synthesized)
actgagcctttagaaaagggcggggttcgggggggagtgagctgaaaaactctccctagacaggaaaggtagaagacctcctcatccctttctctttggcagtgagatcttaaggtcaag

SEQ ID NO: 467132 - DNA, 120 bp, Artificial Sequence
  ENSG00000158545_0 (sequence is synthesized)
aggactaccgtcgcggcctgatgacgtcgcacaatggccggcccccgcgggtagtggagcccgtttgttccgcccgtgtcgagcctggagccagaacctgtgaagagcggaagggccaag

SEQ ID NO: 467133 - DNA, 120 bp, Artificial Sequence
  ENSG00000158545_1 (sequence is synthesized)
ggacgtcttctccacgccgctccgactccaggggagccgtggcctcctctccgccctagcgctgagaaccgtgggtaccgatggatgtggccgagagccctgaacgggatcctcactctc

SEQ ID NO: 467134 - DNA, 120 bp, Artificial Sequence
  ENSG00000158545_2 (sequence is synthesized)
cagaggatgaagagcagccacagggactctcggacgatgacattctgagggacagcgggtccgatcaggatttggacggggcgggggtgagggcttctgatctggaggatgaggaaagtg

SEQ ID NO: 467135 - DNA, 120 bp, Artificial Sequence
  ENSG00000158545_3 (sequence is synthesized)
cagccagggggccgagccaggaggaggaagataatcactccgacgaggaggaccgggcaagtgagcctaaatcccaagaccaggactcagaggtgaatgagctgagccggggcccgacca

SEQ ID NO: 467136 - DNA, 120 bp, Artificial Sequence
  ENSG00000158545_4 (sequence is synthesized)
gctccccctgcgaggaggagggggacgaaggggaggaagaccggacaagcgaccttagggatgaggcctcctcagtcaccagggagctggatgagcatgagctagactacgatgaggagg

SEQ ID NO: 467137 - DNA, 120 bp, Artificial Sequence
  ENSG00000158545_5 (sequence is synthesized)
ttcctgaggagccagctcccgccgtccaggaggacgaggctgagaaagcgggggctgaggatgatgaggagaaaggcgaaggcactcccagggaggaggggaaggctggtgttcagagtg

SEQ ID NO: 467138 - DNA, 120 bp, Artificial Sequence
  ENSG00000158545_6 (sequence is synthesized)
tgggagaaaaggaatccctggaggctgccaaggagaaaaagaaagaggacgatgatggagaaatcgatgatggggaaatagacgatgatgacctggaagaaggtgaagtgaaggacccca

SEQ ID NO: 467139 - DNA, 120 bp, Artificial Sequence
  ENSG00000158545_7 (sequence is synthesized)
gtgacaggaaggtgaggcctcgtcccacctgccggttcttcatgaaagggaactgtacctggggaatgaattgtaggtttatacaccctggagtgaacgacaaggggaactactccctaa

SEQ ID NO: 467140 - DNA, 120 bp, Artificial Sequence
  ENSG00000158545_8 (sequence is synthesized)
tcaccaaagccgaccccttcccgcctaatggtgccccgcctctcggacctcacccgctgatgcccgccaacccttggggtgggccggtagttgatgaaattttgcctccaccccctccag

SEQ ID NO: 467141 - DNA, 120 bp, Artificial Sequence
  ENSG00000158545_9 (sequence is synthesized)
agcccccaacagagagtgcctgggaacgaggactccggcatgcaaaggaggttttaaaaaaagcaactattcgaaaagaacaggagcctgattttgaagagaaaaggtttacggtgacca

SEQ ID NO: 467142 - DNA, 120 bp, Artificial Sequence
  ENSG00000158545_10 (sequence is synthesized)
ttggcgaagacgaacgggaatttgacaaagaaaatgaagtttttcgagattggaattctcggatcccgagagatgtcagagacacagtactcgagccttacgcagacccttattatgact

SEQ ID NO: 467143 - DNA, 120 bp, Artificial Sequence
  ENSG00000158545_11 (sequence is synthesized)
atgaaattgagcggttttggcgtggcggacagtatgagaatttcagggtgcagtatacagaaacagagccgtatcataattaccgagaaagggagcgggagcgagagagagagaacagac

SEQ ID NO: 467144 - DNA, 120 bp, Artificial Sequence
  ENSG00000158545_12 (sequence is synthesized)
agcgcgagcgcgagcgggagcgggagcgggaccgagagcgggagcgccggcagagggagcgcgagcgagagcgggagcgcgagcgcgacaaggagcggcagcggaggaaggaggagtggg

SEQ ID NO: 467145 - DNA, 120 bp, Artificial Sequence
  ENSG00000158545_13 (sequence is synthesized)
agcgtgagcgagccaagcgggacgagaaggaccggcagcaccgtgaccgcgaccgggagaaggagcgggagaaggagaaggggaagcccaagccccgctccccgcagccgccaagccgcc

SEQ ID NO: 467146 - DNA, 120 bp, Artificial Sequence
  ENSG00000158545_14 (sequence is synthesized)
aagctgagccaccaaagaaggaggctgccaccacggggccgcaggtgaagagagcagatgagtggaaggacccttggcgccgatccaagtctcccaagaagaaactcggggtgtcggtct

SEQ ID NO: 467147 - DNA, 120 bp, Artificial Sequence
  ENSG00000158545_15 (sequence is synthesized)
gggctcgaaggcgtcggaaaacatcagcctcgtcagcctctgcctctaattcctccaggtcgtcttcgcggtcatcgtcctactctggctccggctcctcccggtcgcgatcccggtctt

SEQ ID NO: 467148 - DNA, 120 bp, Artificial Sequence
  ENSG00000158545_16 (sequence is synthesized)
catcctacagctcctactccagccgctcttccagacacagctcgttctcaggaagccggtccaggtcccggtccttctcttcgtccccgtccccgtccccaacaccttccccacatagac

SEQ ID NO: 467149 - DNA, 120 bp, Artificial Sequence
  ENSG00000158545_17 (sequence is synthesized)
cttccatcagaaccaagggagagccggccccgccgcccgggaaagcaggagagaagtcagtgaagaagccggccccgcctccagccccaccacaggccaccaaaaccactgctcctgtcc

SEQ ID NO: 467150 - DNA, 120 bp, Artificial Sequence
  ENSG00000158545_18 (sequence is synthesized)
ccgagcccaccaagccaggagaccctcgggaagccaggaggaaggagcggccagccaggaccccccccaggaggcggacgctaagcggcagcggcagtggcagtggtagcagctatagtg

SEQ ID NO: 467151 - DNA, 120 bp, Artificial Sequence
  ENSG00000158545_19 (sequence is synthesized)
gttccagctcccgatccaggtccctgagcgtgagcagcgtctcctcagtgtccagtgctacgtcgagcagcagctctgcacacagcgtggactcggaggacatgtacgcagacctggcta

SEQ ID NO: 467152 - DNA, 120 bp, Artificial Sequence
  ENSG00000158545_20 (sequence is synthesized)
gccccgtgtcctcagccagctctcggtccccggccccagcccagaccaggaaggagaaaggaaaatctaagaaagaagacggtgttaaagaggaaaagcggaaaagggattcgtccacac

SEQ ID NO: 467153 - DNA, 120 bp, Artificial Sequence
  ENSG00000158545_21 (sequence is synthesized)
aaccacccaaatctgcaaaacctccagcaggggggaagtcctcccagcagccctcgacaccccagcaggcaccccccgggcagccccagcagggcacatttgtggcccacaaggagatca

SEQ ID NO: 467154 - DNA, 120 bp, Artificial Sequence
  ENSG00000158545_22 (sequence is synthesized)
agttgacactgttgaataaggcggctgataaaggaagcaggaagcgctatgaaccatcagacaaggacaggcagagccctcctccagccaagcggcccaacacatccccagaccgaggtt

SEQ ID NO: 467155 - DNA, 120 bp, Artificial Sequence
  ENSG00000158545_23 (sequence is synthesized)
ctcgggaccggaagtcaggtgggagactgggctccccgaagccagagcggcagagaggccagaactccaaagcccctgcagccccggctgacaggaagcgccagctgtcaccccagtcca

SEQ ID NO: 467156 - DNA, 120 bp, Artificial Sequence
  ENSG00000158545_24 (sequence is synthesized)
agagctccagcaaggtcacgagcgtgcccggcaaagcctcggatcccggcgccgccagcaccaaatcagggaaggccagcacgctgtctcggcgggaggagctgctgaaacagctgaagg

SEQ ID NO: 467157 - DNA, 120 bp, Artificial Sequence
  ENSG00000158545_25 (sequence is synthesized)
ccgtggaggatgctattgcacgcaagcgggccaagatccccgggaaagcataggccgtgccccgaccggactggacgcatttttatacatagggtaagcgcagccattttggattttgca

SEQ ID NO: 467158 - DNA, 120 bp, Artificial Sequence
  ENSG00000158545_26 (sequence is synthesized)
gttaatgtcttattttggctgtgattctttttaaaaagtaaaaaagaaaaaaaagtttctcagctggaaaagaagccacacaggaaatgacaacgacgctgaatcccagcctccctcccc

SEQ ID NO: 467159 - DNA, 120 bp, Artificial Sequence
  ENSG00000158545_27 (sequence is synthesized)
agagcagaagtcccgcaggacagacagacacagacagcgctagtgaccagcacggttctcatgtaaattacaagccccagccgccagccccgccttctcttcctcctcctccgtcttctt

SEQ ID NO: 467160 - DNA, 120 bp, Artificial Sequence
  ENSG00000158545_28 (sequence is synthesized)
ccctggccctggtcaggcctgtggagccccagctctgggtccctagcccgggtccaggcagccaggctccctcctgagctgagaaacggaacctcgcgaaccactggtggcacatccttc

SEQ ID NO: 467161 - DNA, 120 bp, Artificial Sequence
  ENSG00000158545_29 (sequence is synthesized)
tcctcccccgcccctgatcacccgcccccggatcagaaatatatctatattctcgactaaagtctcatcaggaaatatttcctgtcttttattttaagcatcaaattgttttagttgatt

SEQ ID NO: 467162 - DNA, 120 bp, Artificial Sequence
  ENSG00000158545_30 (sequence is synthesized)
taaaaaggaaaaaatacagaaaagaccaaaaaaaggccaagggtgttgttggggcgtctgtctaatgtggtgggtctttttttgaggggtctcctaaaataaaatattttgataagcagc

SEQ ID NO: 467163 - DNA, 120 bp, Artificial Sequence
  ENSG00000158545_31 (sequence is synthesized)
acctttgggagcagagcaggttgctggcaaggaacccatgtcctctggggcgaggacacggcttctggctcctggccctgctgtcctcactggcctctctcttgtcccaggcggctgata

SEQ ID NO: 467164 - DNA, 120 bp, Artificial Sequence
  ENSG00000158545_32 (sequence is synthesized)
taccatgttggccaagctggtcccgaactcctgacatcagttcagctgggtctcagaccccattgctcgtgacgagatctgcccatctcagtctcccagagtgctgggattacaggcgtg

SEQ ID NO: 467165 - DNA, 120 bp, Artificial Sequence
  ENSG00000158545_33 (sequence is synthesized)
tgaaatggggccctggcctagccatggggacgtcccttactttgtaaccctgaaactgcccagtgtccccccaaaatcacacattccgtgggtacatgatccataaatggacactgcgta

SEQ ID NO: 467166 - DNA, 120 bp, Artificial Sequence
  ENSG00000158545_34 (sequence is synthesized)
acaggcatgagccaccacacctggccctcacttcctattttcttgagtattttttatcaaaaaggctattgaatttttgttagacatttttatcatctgtgaatagaaccctttgacttc

SEQ ID NO: 467167 - DNA, 120 bp, Artificial Sequence
  ENSG00000158545_35 (sequence is synthesized)
tggcctgctcttagatgtagtttgtgaacagatttcctaaccttgagccaaccttgcgctcctggagtaaaccccactgcgtcacggtctgttactttctgtccctaatgtttcgtgtgg

SEQ ID NO: 467168 - DNA, 120 bp, Artificial Sequence
  ENSG00000158545_36 (sequence is synthesized)
atcagcctcgtcagcctctgcctctaattcctccaggtaaggagggctcgtgggacggctggggtgtcagcaccttggagccgtcagctgacaccatgtacctcactgggtcaggtgggg

SEQ ID NO: 467169 - DNA, 120 bp, Artificial Sequence
  ENSG00000158545_37 (sequence is synthesized)
aacaccccagccccactgtttgctgtggcgtcgttacctgcagaccagtcagtgggactaacccggcgtttataccttcagcaaagagcatcaatgccaagtaggactgacgcagtgacc

SEQ ID NO: 467170 - DNA, 120 bp, Artificial Sequence
  ENSG00000158545_38 (sequence is synthesized)
ccaaatggggcacagaccccggcgactgagcctgactgctcccagggagtcacaggccacactggagggaggggcacctggatgcgggaggacgcacagacctggggcccagtgagtcca

SEQ ID NO: 467171 - DNA, 120 bp, Artificial Sequence
  ENSG00000158545_39 (sequence is synthesized)
tctgttcctccagactggacctgaaactgttgcccctccacctacggtcctggtctcagcacacaggagcccggctcccgagtgagggatgatggaaagcagggggccggggtagacccc

SEQ ID NO: 467172 - DNA, 120 bp, Artificial Sequence
  ENSG00000158545_40 (sequence is synthesized)
atcatgctcggcaggaacaggaggtgtgggtgggaggccaggcttcactgaaagtggatgcagatgaacagatagacacacacacggacccacgtgagctgggtctgcccactcaggcag

SEQ ID NO: 467173 - DNA, 120 bp, Artificial Sequence
  ENSG00000158545_41 (sequence is synthesized)
cgccacccggtaacagcaggcacaccccacgcccaggtcttgatttctaaatgccgttctgcaccaaggagggatggcactgaagagtgtctgggggaggctgtatgcgtctgtgcgcgc

SEQ ID NO: 467174 - DNA, 120 bp, Artificial Sequence
  ENSG00000158545_42 (sequence is synthesized)
gtctgcagctgtgcgcgcgtgcgcagctgtgcgcttgtgtgtagctgtgcgtctgtgggtgtgtagctgtgcatgtgtgcgtcagggcgtgtggggcagggagggcccttctcacttctc

SEQ ID NO: 467175 - DNA, 120 bp, Artificial Sequence
  ENSG00000158545_43 (sequence is synthesized)
agacacagctcgttctcaggaagccggtccagatgcgtgctgtcactgagggccacagcctgagatcctcgagttgaggcactccagtcctccgcagacaggccgaggaaggggccagac

SEQ ID NO: 467176 - DNA, 120 bp, Artificial Sequence
  ENSG00000158545_44 (sequence is synthesized)
ccagccctgtcctgtgggtgtttctatgggagctgtgctgctgccccactgccaaggagcctgtctcctcctgtcctgcacacacatgaacgtgacactcgcctcccggaggacccgcca

SEQ ID NO: 467177 - DNA, 120 bp, Artificial Sequence
  ENSG00000158545_45 (sequence is synthesized)
gtggatgctgacaccttccacgctctctggtctactctgggcctgtgtttttagcagatgacagaacagtccagaactgaagttaaaactgaggcacataaatggaaattcgtggccttc

SEQ ID NO: 467178 - DNA, 120 bp, Artificial Sequence
  ENSG00000158545_46 (sequence is synthesized)
gtccttctcttcgtccccgtccccgtccccaacaccttccccacatagaccttccatcagaaccaagggagagccggccccgccgcccgggaaagcagggtgagtgcccagcctgtgggc

SEQ ID NO: 467179 - DNA, 120 bp, Artificial Sequence
  ENSG00000158545_47 (sequence is synthesized)
aagtcctggccggccaggcctccacaggctgcagcctcctccctccgtctctatctctcatttgtgtttgggaccaaagaggtgaggatgcctcagggggctggccccagggggtgactg

SEQ ID NO: 467180 - DNA, 120 bp, Artificial Sequence
  ENSG00000158545_48 (sequence is synthesized)
ggctgggaggcactgggcacagctcctgttctcacgggccacccttacacagcagcactccctcgggaaccctggggacagagcacagccctggggacacggcagcagccgggtgttctt

SEQ ID NO: 467181 - DNA, 120 bp, Artificial Sequence
  ENSG00000158545_49 (sequence is synthesized)
aaggggtcttcctattagcctgctctccccactgcctggcggtgcctgtagctcttgcctgttagaggggagcctggaagggctgctgggggctttgaagccgttcccaagcactctgac

SEQ ID NO: 467182 - DNA, 120 bp, Artificial Sequence
  ENSG00000158545_50 (sequence is synthesized)
accgatgggtggggagccgtgtccaggcacgagcgtgctcaccgagcgtcacaggcatgcagtgtcgttccccgagctgtgggtccattgaaaggggatgtaggccagcggggccccgtc

SEQ ID NO: 467183 - DNA, 120 bp, Artificial Sequence
  ENSG00000158545_51 (sequence is synthesized)
cgatccaggtcatccccatcaccctgtgcctctgtttctccctccccgtcggggccaggaagtcccagaagcagccagtgtgggttgggctgtctcccacaggtgggctggggcccttct

SEQ ID NO: 467184 - DNA, 120 bp, Artificial Sequence
  ENSG00000158545_52 (sequence is synthesized)
ggatctgagtcaccctggggctgtggaaggctgcggttgaagctttgacacaggagaaaatgggccaggactcgtgataggaagaccccctccccccaccaaaaaaagattcacaaactc

SEQ ID NO: 467185 - DNA, 120 bp, Artificial Sequence
  ENSG00000158545_53 (sequence is synthesized)
gggggcactcaggtcaggaggaggtgcctctgccctgctgacttgatgcccagcaccctgagagagcacctgcacctggggaggagccggcagcttccagcccagcagggcagaggctgg

SEQ ID NO: 467186 - DNA, 120 bp, Artificial Sequence
  ENSG00000158545_54 (sequence is synthesized)
gcctgcgtgacctatcacacctgtcgagggaaccggcctgagggggtggggaagccgataaaaacatctgagaagagaatacatggaaaagctttgtgggccaggtgcggcggctcacac

SEQ ID NO: 467187 - DNA, 83 bp, Artificial Sequence
  ENSG00000158545_55 (sequence is synthesized)
gatcccagcaccgcttgaccagcctgagcaacatagaccccatctccacagaaaaagatttttttttttttttttttttttga

SEQ ID NO: 467188 - DNA, 120 bp, Artificial Sequence
  ENSG00000158545_56 (sequence is synthesized)
ccaggctggagtgcaatggcgcgatctcgctacctccgcctcccggattcaacctcagccccctgagtagctgagactacaggcgcacactgccacgcccagctaattttctgtatttta

SEQ ID NO: 467189 - DNA, 120 bp, Artificial Sequence
  ENSG00000158545_57 (sequence is synthesized)
aggtgtgagccactgcacccagcccagaaattttttttaattagctgggtatagtggtgtgtgcctatgatcccagctacttgggaggtcaaggttgaatgagctgtgatcacgacattg

SEQ ID NO: 467190 - DNA, 120 bp, Artificial Sequence
  ENSG00000158545_58 (sequence is synthesized)
cgacattgcattccagcctggacaacagagatcctgtctcaaaacaaaaaaaaaggatttttgctatttagttgttttaaaagaaagtattaaatcagtccttagattccttgcatagaa

SEQ ID NO: 467191 - DNA, 120 bp, Artificial Sequence
  ENSG00000158545_59 (sequence is synthesized)
gcatagaactctttcatttccaggcagcaggtcgtttatatatttgtcacagttctttgtttcttttgtttgttttgtttctggagagacatggtcttgctgtgttgcccaggctggtct

SEQ ID NO: 467192 - DNA, 86 bp, Artificial Sequence
  ENSG00000158545_60 (sequence is synthesized)
tgggctcaagtgatcctcccaccgtggtctcccaaactcgaaatgtttcttaataagtctgaaatgttttaaagacctgacttttg

SEQ ID NO: 467193 - DNA, 120 bp, Artificial Sequence
  ENSG00000158545_61 (sequence is synthesized)
ctgccatgtctttcttgttgttccgtatttgaagacccatgtgataaatttcttcaaagctaggaaggagttttgtctctctgcgtgagatattggctgcttgctggaacctggggccca

SEQ ID NO: 467194 - DNA, 120 bp, Artificial Sequence
  ENSG00000158545_62 (sequence is synthesized)
ggtttggcctcagcctcatttccagatgccttggtgcccacatctctcttctcctacttggctctcccctttttatttctttataaaaatgaaggtggtgaactaagcagcctcaggctt

SEQ ID NO: 467195 - DNA, 120 bp, Artificial Sequence
  ENSG00000158545_63 (sequence is synthesized)
gaaacagagccgtatcataattaccgagtaagtatgacttcaatatccacatatgaacttcatgatctgttcattcaagttatccctttttatttacagtaaaaaatacagggctttata

SEQ ID NO: 467196 - DNA, 120 bp, Artificial Sequence
  ENSG00000158545_64 (sequence is synthesized)
tgagcttatagagccagcacaatgtaccaatttgaaaaccaaattgattgttacggagaacgaattcagaggcagcgattacattaatggtcatttgaacaaagacttgcctgaaaactg

SEQ ID NO: 467197 - DNA, 120 bp, Artificial Sequence
  ENSG00000158545_65 (sequence is synthesized)
tcccacctgccggttcttcatgaaagatgttgtgacaccattatccactcttcttccaccaatatccaattccataccattcagaggccaggttaaagggaactgtacctggggaatgaa

SEQ ID NO: 467198 - DNA, 120 bp, Artificial Sequence
  ENSG00000158552_0 (sequence is synthesized)
gggccggctggcgcgggggctccggtaacccgggctgggcgggggagaggaaggggcggggcagggagcccgccagagtgcggggtcgcggtgcggacttcgagcacgagccctaaagac

SEQ ID NO: 467199 - DNA, 120 bp, Artificial Sequence
  ENSG00000158552_1 (sequence is synthesized)
cggggtcgcggtgcggacttcgagcacgagccctaaagacgctcagcactcgtcgcttctcctagcagaccctgcccggcttggcgatggagtttccggacctcggcgctcactgttcgg

SEQ ID NO: 467200 - DNA, 120 bp, Artificial Sequence
  ENSG00000158552_2 (sequence is synthesized)
agccgagctgtcagcgcttggattttctgccgcttaagtgtgatgcctgctcaggcatcttctgcgcagaccatgtggcctacgcccagcatcactgtggatctgcttaccaaaaggata

SEQ ID NO: 467201 - DNA, 120 bp, Artificial Sequence
  ENSG00000158552_3 (sequence is synthesized)
tccaggtacctgtgtgccctctctgtaatgtgcctgtgcctgtggccagaggggagccccctgaccgtgctgtgggagagcacattgacagagactgtcgctctgatccagcacagcaaa

SEQ ID NO: 467202 - DNA, 120 bp, Artificial Sequence
  ENSG00000158552_4 (sequence is synthesized)
aacgtaagatcttcaccaataagtgtgaacgcgctggctgccggcagcgagaaatgatgaaactgacctgtgaacgctgtagccgaaacttctgcatcaagcaccggcatccactggacc

SEQ ID NO: 467203 - DNA, 120 bp, Artificial Sequence
  ENSG00000158552_5 (sequence is synthesized)
gattgctctggggaggggcacccaaccagccgggcaggacttgctgccatctccagagcacaagctgtggcttctacaagcactgtccccagcccaagtcaaaccatgccttcctgtacc

SEQ ID NO: 467204 - DNA, 120 bp, Artificial Sequence
  ENSG00000158552_6 (sequence is synthesized)
tctcccagcagagccacaacccgatctccgtcctggacagcccctccagtgattgctttgcagaatggcctgagtgaggatgaagctctgcagcgggccctggaaatgtccctggcagaa

SEQ ID NO: 467205 - DNA, 120 bp, Artificial Sequence
  ENSG00000158552_7 (sequence is synthesized)
accaaaccccaggttccaagttgtcaggaggaagaagacctagctttagcacaagcactgtcagccagtgaggcagaataccagcggcagcaggcccagagccgcagctcgaagccgtcc

SEQ ID NO: 467206 - DNA, 120 bp, Artificial Sequence
  ENSG00000158552_8 (sequence is synthesized)
aactgcagcctgtgctagggccctgggcttggggagggaggttcacctgaggaggactgtggccctcacacctctagggtacacagggagaggaggcccggagcaccctggagggcagag

SEQ ID NO: 467207 - DNA, 120 bp, Artificial Sequence
  ENSG00000158552_9 (sequence is synthesized)
acaagcgggagtgatgtggaggtcgccctgggagcctctggaaggccttgctagtgctccagctgcatggaagagagcggctagcaactgttccctggttgggccctcagtggatgctgg

SEQ ID NO: 467208 - DNA, 120 bp, Artificial Sequence
  ENSG00000158552_10 (sequence is synthesized)
ccaggccctactcttagccccttcatcatgtcatctcccttatgctggagctgccccgatgtggagtgggcaggaaggggcctggaaaaaataaaggatcttggcagttgataaaacgta

SEQ ID NO: 467209 - DNA, 120 bp, Artificial Sequence
  ENSG00000158552_11 (sequence is synthesized)
ctccagtgattgctttgcagaatggcctgagtgaggatgaagctctgcagcgggccctggaaatgtccctggcagaaaccaaaccccaggttccaaggcccagagccgcagctcgaagcc

SEQ ID NO: 467210 - DNA, 120 bp, Artificial Sequence
  ENSG00000158552_12 (sequence is synthesized)
gcggtgtgtcgaaaatagggtggcgttttccttcccgagtggaagacttgagtgagagagaaggacatcgaggtcccgctggacctgcaatccgaccaactctttgcagattttctgccg

SEQ ID NO: 467211 - DNA, 120 bp, Artificial Sequence
  ENSG00000158552_13 (sequence is synthesized)
caaggtaccttaccctcttgtgaaagagagcgcaagctgtgggcaagggcttggtctggaggcaggtaggtgggaccactctgacacaatgcaagataatcgctggcaacttggtctcaa

SEQ ID NO: 467212 - DNA, 120 bp, Artificial Sequence
  ENSG00000158552_14 (sequence is synthesized)
aattaagatgaactatatgatctttgacaagttatttaacccatggagccttcatttcctctataaaacggggacaatactaatacccaccttgtagtgttgctatgaagattgagataa

SEQ ID NO: 467213 - DNA, 120 bp, Artificial Sequence
  ENSG00000158552_15 (sequence is synthesized)
gttggatggacagaaacaaacacacagagagtgaagtccaaggacgctggtcttctttctccctttgtagagtgaggatgaagctctgcagcgggccctggaaatgtccctggcagaaac

SEQ ID NO: 467214 - DNA, 120 bp, Artificial Sequence
  ENSG00000158552_16 (sequence is synthesized)
aaatttcagatcttaccatcatccaacttaaactgtttctccctcccagttgtcaggaggaagaagacctagctttagcacaagcactgtcagccagtgaggcagaataccagcggcagc

SEQ ID NO: 467215 - DNA, 120 bp, Artificial Sequence
  ENSG00000158552_17 (sequence is synthesized)
aggtatgaggctgggctgaagatatatgctgcagtggaagggaggaagaagtcagggatgggggttcttcctagtggtgcagagttttggaatggtggttatcgtctggttttcagtatg

SEQ ID NO: 467216 - DNA, 120 bp, Artificial Sequence
  ENSG00000158552_18 (sequence is synthesized)
actccagcccatgctgagctctgaaatgagggctgtccctcatttccttgacgttgcactgtgtcttcccctccttcccctctctttgctctaggcccagagccgcagctcgaagccgtc

SEQ ID NO: 467217 - DNA, 120 bp, Artificial Sequence
  ENSG00000158552_19 (sequence is synthesized)
caaccagccgggcagggtaatggcagccaagtcctccacttgcttttgggaagcattcttttggaactgactcaagctctgttgttataaattggggagcttcaaccctaccctgtcggc

SEQ ID NO: 467218 - DNA, 120 bp, Artificial Sequence
  ENSG00000158552_20 (sequence is synthesized)
taggggagtcttttagcttccttttcaagtgcatgtttttccagaactcccctcctgacttcctgggtaaggctagttcttggagacatgccaaaaatctctcttccctacagacttgct

SEQ ID NO: 467219 - DNA, 120 bp, Artificial Sequence
  ENSG00000158552_21 (sequence is synthesized)
aaagacacccccctcctacctccccaccccccaaatatcccctggaggcaaaattgccctggtggatcaccactgatctaactgatagtaccctctggttatatgggaaaactgctaaac

SEQ ID NO: 467220 - DNA, 78 bp, Artificial Sequence
  ENSG00000158552_22 (sequence is synthesized)
actgatagtaccctctggttatatgggaaaactgctaaacttggaagcaggaggcatctaaaatgagcttgtgtccgc

SEQ ID NO: 467221 - DNA, 79 bp, Artificial Sequence
  ENSG00000158552_23 (sequence is synthesized)
aagtgaagctgccgaccttcacggaagcaaggaggctacattggggaatggtgactttggtttgtgcgggcactctttt

SEQ ID NO: 467222 - DNA, 120 bp, Artificial Sequence
  ENSG00000158552_24 (sequence is synthesized)
tttgtgcgggcactctttttaaatcgtgggatgagaacatcacccagtgagaaagcccctgggctggtaatcagcacagagagcttagtcaggactataacccatcagtcagaaaaatat

SEQ ID NO: 467223 - DNA, 120 bp, Artificial Sequence
  ENSG00000158552_25 (sequence is synthesized)
ttgcctgggaagagagatactaccgtgagagcttcattcacttttatcgtggtcgctggggtctctgagcagaccctgcccggcttggcgatggagtttccggacctcggcgctcactgt

SEQ ID NO: 467224 - DNA, 120 bp, Artificial Sequence
  ENSG00000158552_26 (sequence is synthesized)
gactttgaaccgcaggttgggagggaagggtgggctcccaggctggcaatgccggggggcggggcttgaagctgggggggggtggtcagcggcagagggggcgtggccaaggaggtaatg

SEQ ID NO: 467225 - DNA, 120 bp, Artificial Sequence
  ENSG00000158553_0 (sequence is synthesized)
atgggcagtttcctgagcaaactggaactttcgccctcgtccccagcccaggtgcgcaccgacttgcccgagaggcccacgaaacgccggccacctcagccccttcaccaagttcatcgg

SEQ ID NO: 467226 - DNA, 120 bp, Artificial Sequence
  ENSG00000158553_1 (sequence is synthesized)
gttcagttcgtccaccgcgcccaccctgccccacggtatagacctgtgaggaggcggccaaacctggatcctgccaatccaaccacgtggctggccaacgaggcctggaggcgctttccc

SEQ ID NO: 467227 - DNA, 120 bp, Artificial Sequence
  ENSG00000158553_2 (sequence is synthesized)
atgaagaagtcccagaattcccccctggggcctctcccttcagactggtgggaaagttacttaaagcggactatttggtctcttcgacatcccaggccaatttggagcccagtgaccatc

SEQ ID NO: 467228 - DNA, 120 bp, Artificial Sequence
  ENSG00000158553_3 (sequence is synthesized)
aggatcactcctcctgaccagagagtgcccccttccacttctcctgaagatgtaattgcccttgcaggactcccgccctctgaggagctcgcagatccatgttcaaaggagacagtgttg

SEQ ID NO: 467229 - DNA, 120 bp, Artificial Sequence
  ENSG00000158553_4 (sequence is synthesized)
agggccctcagagagtgcagaaaagggaaagggaggttggaagaaccactattccctgagagtctggacagtaagagaaggagtccagagaccagaccatcggcatttaagcccctgatg

SEQ ID NO: 467230 - DNA, 120 bp, Artificial Sequence
  ENSG00000158553_5 (sequence is synthesized)
aaaaatggaaccctcacttcttttgtgcccaggcctgggccgctgaagagaagtctccactcctggggctcagatcacagcttgactaagaggcccaattgctcctccatgagctccttg

SEQ ID NO: 467231 - DNA, 120 bp, Artificial Sequence
  ENSG00000158553_6 (sequence is synthesized)
gccagcatatacagaggtggcaccctcagctccaaaaggaatgctattggcagctcttacagctcttgcagaaatttctcagacccttggaagagaagtgttcccagtgtatcattcgag

SEQ ID NO: 467232 - DNA, 120 bp, Artificial Sequence
  ENSG00000158553_7 (sequence is synthesized)
acaccagagtggccaataaaaaaggaaaaaagttgtcatcggccttcctctccagtcccactggtatcagattttgagtccctaggaggatctgaaagttctgggcagcaaaaccagaag

SEQ ID NO: 467233 - DNA, 120 bp, Artificial Sequence
  ENSG00000158553_8 (sequence is synthesized)
attccacagctgccgtctagccctgagaacctggtgtcagagatcccacctccccagcttggttatgcagtctctgatgagaacttgactttggggaagaaagctgagctacaggtaagc

SEQ ID NO: 467234 - DNA, 120 bp, Artificial Sequence
  ENSG00000158553_9 (sequence is synthesized)
aacaacgcaggagaagatacaactgaggtcaacacagaccctttccctgagacttggcttgctattcagccttccttgtctcttgctctgccttcttcagaaacagatctaacccaggga

SEQ ID NO: 467235 - DNA, 120 bp, Artificial Sequence
  ENSG00000158553_10 (sequence is synthesized)
gcaaatcctcagttggaaaacttaagaaaaatgcagaagtctctaggtccactggcctctccacagtccacgggagaggcaaccagtgtggcccattctcctttgaagacacccagccta

SEQ ID NO: 467236 - DNA, 120 bp, Artificial Sequence
  ENSG00000158553_11 (sequence is synthesized)
ccgaccccacctgggtgctcacagtcagagctccttccaggcacctctccagactcaaagcccacagctactttcatcctgctgacccccacctctcccacattaccagttactgacacc

SEQ ID NO: 467237 - DNA, 120 bp, Artificial Sequence
  ENSG00000158553_12 (sequence is synthesized)
tcccatctttctgcatctgcacctcctgatgcaacttctgctcacctcatgttaaaaccgattttggggcccctgcacaacagcgagattggaagctcctcatattccagaatttcagtc

SEQ ID NO: 467238 - DNA, 120 bp, Artificial Sequence
  ENSG00000158553_13 (sequence is synthesized)
acagctgcagcatcttcaatctcttccctttccacaattcagggtaccttaactcctaccttcaagcctatctttggcagcatagatccacttaaaactacgcccatgatagctcctttc

SEQ ID NO: 467239 - DNA, 120 bp, Artificial Sequence
  ENSG00000158553_14 (sequence is synthesized)
tcctccaagcagacccctcctccatttactcatgcttctacccatcatttccatggcctggtcaaggccacctctgtggtcatgtccaccaccctagccagcacatctaaagactctgtt

SEQ ID NO: 467240 - DNA, 120 bp, Artificial Sequence
  ENSG00000158553_15 (sequence is synthesized)
tttaagccacctttggattttggtgtagtgaatgtcaccagtgccgtaggcaacacttattctgtcccttccacttgcgacactttcctgcttgggactgctcaggccttcagggccgac

SEQ ID NO: 467241 - DNA, 120 bp, Artificial Sequence
  ENSG00000158553_16 (sequence is synthesized)
ttcaccccagccacaggattcattttcccaccacaccaccatcctacaattcctactgtgcatacagtcaccatgtttacccaggtcctttccagtgttgtacagatatcccctagaagc

SEQ ID NO: 467242 - DNA, 120 bp, Artificial Sequence
  ENSG00000158553_17 (sequence is synthesized)
agcactgctaatttcaggggtatgggcagccctctgcctgcctctgccctagtatccacaaactggcttgcatcaacccccagcatctccaacctgactccagcaatcacaagtcccttg

SEQ ID NO: 467243 - DNA, 120 bp, Artificial Sequence
  ENSG00000158553_18 (sequence is synthesized)
ggatcaagctcaaggccacctttcccactatcccaaggagctaatccccagcctgcatttggtgccacaaatggacagaaacaagggccttcccagccagcccttatgccaagtgtcagt

SEQ ID NO: 467244 - DNA, 120 bp, Artificial Sequence
  ENSG00000158553_19 (sequence is synthesized)
agttcttttctttttgggagctcagcagtggcattgccaacccccatgccaactccagctcagccagccttcattagtaccacacagtcagccttggggtgtttgacaccctcagcctcc

SEQ ID NO: 467245 - DNA, 120 bp, Artificial Sequence
  ENSG00000158553_20 (sequence is synthesized)
acctctcaaacccctgccagcacctggtcaggcattggcggcattccagcaggttttcccattagtcaagctagtacaactgggtttagaattgtaattcagacccaccaaagtggggct

SEQ ID NO: 467246 - DNA, 120 bp, Artificial Sequence
  ENSG00000158553_21 (sequence is synthesized)
tttggctcagtgtttggcagcagagctccacaacctttcacttttgggggattcgtgacccctatggactgtgatgagtctgggatcataatgactggtccagacatgagccccacctct

SEQ ID NO: 467247 - DNA, 120 bp, Artificial Sequence
  ENSG00000158553_22 (sequence is synthesized)
ggagctttcagcattggagcattgcctagtgggaccactaacaccatgatcccctttggaaaaggctggagccagaacactgaaggcctgcccagccaccgcacagctttttccttgggg

SEQ ID NO: 467248 - DNA, 120 bp, Artificial Sequence
  ENSG00000158553_23 (sequence is synthesized)
agaggcagcatttctgcaagaaagactatggcccccattgctcaaaacaccccagtccctggacaagctaaggcaggcagcagtgttggctttgggatgccttttccacctgcccagggc

SEQ ID NO: 467249 - DNA, 120 bp, Artificial Sequence
  ENSG00000158553_24 (sequence is synthesized)
tctgttgggagaggaccttttagatcatcagcctcttcattttccattggcgcaaaatcaaaaaccccaaagaatcgggagaaagggcattcccgaaggcatcatgcctacaagaagtag

SEQ ID NO: 467250 - DNA, 120 bp, Artificial Sequence
  ENSG00000158553_25 (sequence is synthesized)
ccgggtatctggaaggtgctcaacagtgagatggtgctcttcctccaaatctgttgacatgacaggacagtgccgcttatgaatctctgacaaatagcaaagtggaaaattcctgctctt

SEQ ID NO: 467251 - DNA, 120 bp, Artificial Sequence
  ENSG00000158553_26 (sequence is synthesized)
ggcagctaaaacttggattgatcacaatatttcaggaaacagagaagaaagacagtatttcccagttagcaagatcttgagtcttatgatttttttctgacattaaatctgcagcataaa

SEQ ID NO: 467252 - DNA, 120 bp, Artificial Sequence
  ENSG00000158555_0 (sequence is synthesized)
ggctgagctcgggctgcggctccggtgggggtgggtggcggggatgacagcggaggtggcagcggcgcggcgctgagcgagcggcgagggagcaggggaagaggaggaagtggagccgcg

SEQ ID NO: 467253 - DNA, 120 bp, Artificial Sequence
  ENSG00000158555_1 (sequence is synthesized)
gccgggagctcgggagtcggccgccgcgccgaggttcgccccgttttgcagagagagccgagtcgggacctggaaagacttccccgcggggctccggccgccgcgcctccccgccggcgc

SEQ ID NO: 467254 - DNA, 120 bp, Artificial Sequence
  ENSG00000158555_2 (sequence is synthesized)
cggttcggggcgtgcggccgggacgcgcggagccccggccctgacccgctgcgccgggacgggacgctcctaacgccgccgtaccggtccgtggttgcagggtcgctccgcgcctttccg

SEQ ID NO: 467255 - DNA, 120 bp, Artificial Sequence
  ENSG00000158555_3 (sequence is synthesized)
ggttgcagggtcgctccgcgcctttccgtcagtgagggtcggaaccccagctccagggctagcgcagtgtggccccaggccctcgcctccggtgcacgggaccccggacccccccagcct

SEQ ID NO: 467256 - DNA, 120 bp, Artificial Sequence
  ENSG00000158555_4 (sequence is synthesized)
ctggcttcacgagaccccaaccttcagttggaacagcttggaacagcgcgagcgcccgggaagccctggccgggtcgtgcgctcggtgaggggtcctaggcgggcaggacagtcggaccg

SEQ ID NO: 467257 - DNA, 120 bp, Artificial Sequence
  ENSG00000158555_5 (sequence is synthesized)
aaccgccgggctggtgccgcgagcccaggctgtcaccttcgtcccgcctcaggtgaggggttcagcgcctgccccgaagataacacaggggtccccttctgtcccggcggcctgcgagag

SEQ ID NO: 467258 - DNA, 120 bp, Artificial Sequence
  ENSG00000158555_6 (sequence is synthesized)
ccaaggctgcagctctcccagtgaagtgatatcactgcctctgtggacaagacacctccaggagcccagctcacagccaccggtaccttcttccaggacaagctgggggcctccatgggc

SEQ ID NO: 467259 - DNA, 120 bp, Artificial Sequence
  ENSG00000158555_7 (sequence is synthesized)
gcctgagggccaggcgccagggccgtgggcacgagtatggtgagacaccagcccctgcagtactacgagccacagctgtgcctctcctgcctcacgggcatctacggctgccgttggaag

SEQ ID NO: 467260 - DNA, 120 bp, Artificial Sequence
  ENSG00000158555_8 (sequence is synthesized)
cgctaccagcgctcccatgatgataccacaccgtgggagcgcctctggttcctgctcctcaccttcacctttggcctcacgctcacctggctttacttctggtgggaagtccacaatgac

SEQ ID NO: 467261 - DNA, 120 bp, Artificial Sequence
  ENSG00000158555_9 (sequence is synthesized)
tatgatgaattcaactggtacctctacaaccgcatgggctactggagcgactggcccgtacccatccttgtgaccacagctgctgccttcgcatacatcgctggcctcctggtcctggca

SEQ ID NO: 467262 - DNA, 120 bp, Artificial Sequence
  ENSG00000158555_10 (sequence is synthesized)
ctatgtcacattgccgtggggcagcagatgaacctgcactggctgcacaagatcgggctggtggtcatcctggcttccacggtggtggccatgtcggccgtggcccagctgtgggaggac

SEQ ID NO: 467263 - DNA, 120 bp, Artificial Sequence
  ENSG00000158555_11 (sequence is synthesized)
gagtgggaggtgctgctgatctccctgcagggcacagcgccattcctgcatgtgggggctgtggcagcagtcaccatgctctcctggatcgtggcaggacagttcgcccgcgcagagcgg

SEQ ID NO: 467264 - DNA, 120 bp, Artificial Sequence
  ENSG00000158555_12 (sequence is synthesized)
acctcctcccaggtgaccattctctgtaccttcttcaccgtggtgtttgccctctacctggcccctctcaccatctcctctccctgcatcatggagaagaaagacctcggccccaagcct

SEQ ID NO: 467265 - DNA, 120 bp, Artificial Sequence
  ENSG00000158555_13 (sequence is synthesized)
gctctcattggccaccgcggggcccccatgctggctccagagcacacgctcatgtccttccggaaggccctcgagcagaagctgtacgggctccaggctgacattaccatcagcctggac

SEQ ID NO: 467266 - DNA, 120 bp, Artificial Sequence
  ENSG00000158555_14 (sequence is synthesized)
cctgcctccatgcttaactggaccaccctgcagagactcaacgctggccagtggttcctgaagactgaccccttctggacagccagctccctgtcaccctccgaccacagagaggcccag

SEQ ID NO: 467267 - DNA, 120 bp, Artificial Sequence
  ENSG00000158555_15 (sequence is synthesized)
aaccagtccatctgcagcctggcagagctcctggagctggccaagggcaatgccacactgctgctcaacctgcgtgacccgccccgggagcacccctaccgcagcagttttatcaacgtg

SEQ ID NO: 467268 - DNA, 120 bp, Artificial Sequence
  ENSG00000158555_16 (sequence is synthesized)
actctggaggccgtgctgcactccggcttcccccagcaccaggtcatgtggctgcctagcaggcagaggcccctggtgcggaaggtggctcccggcttccaacagacatcaggctccaag

SEQ ID NO: 467269 - DNA, 120 bp, Artificial Sequence
  ENSG00000158555_17 (sequence is synthesized)
gaggcagtcgccagcctgcggagaggccacatccagcggctgaacctgcgctacactcaggtgtcccgccaggagctcagggactacgcgtcctggaacctgagtgtgaacctctacaca

SEQ ID NO: 467270 - DNA, 120 bp, Artificial Sequence
  ENSG00000158555_18 (sequence is synthesized)
gtcaacgcaccgtggctcttctccctgctgtggtgtgcgggggtcccatccgtcacctctgacaactcccacgccctgtcccaggtgccttcccccctctggatcatgcccccggacgag

SEQ ID NO: 467271 - DNA, 120 bp, Artificial Sequence
  ENSG00000158555_19 (sequence is synthesized)
tactgtctcatgtgggtcactgccgacctggtctccttcaccctcatcgtgggcatcttcgtgctccagaagtggcgcctgggtggcatacggagctacaaccctgagcagatcatgctg

SEQ ID NO: 467272 - DNA, 120 bp, Artificial Sequence
  ENSG00000158555_20 (sequence is synthesized)
agtgctgcggtgcgccggaccagccgggacgtcagcatcatgaaggagaagcttattttctcagagatcagcgatggtgtagaggtctccgatgtgctctccgtatgttcagacaacagt

SEQ ID NO: 467273 - DNA, 120 bp, Artificial Sequence
  ENSG00000158555_21 (sequence is synthesized)
tatgacacatatgccaacagcaccgccacccctgtgggcccccgagggggtggcagccacaccaagaccctcatagagcggagtgggcgttagctgaagacatgtctgtcccacctgtac

SEQ ID NO: 467274 - DNA, 120 bp, Artificial Sequence
  ENSG00000158555_22 (sequence is synthesized)
ctgacacagaagctggggagcctaggagagctggtggaagtgtgtctgaactcggagtgctctgggagcgggctccacagcctccttgtgggctccagccccttgtcagccgcagcctct

SEQ ID NO: 467275 - DNA, 120 bp, Artificial Sequence
  ENSG00000158555_23 (sequence is synthesized)
cttgagggggactccctgtctcctgaggcccagctgggccaggactccatcctttcagatgcccctgcaggcctggggctccttctgggaagtatggggcctagggcttggtccccctct

SEQ ID NO: 467276 - DNA, 120 bp, Artificial Sequence
  ENSG00000158555_24 (sequence is synthesized)
tctgaggccctctcctgtatcccgacctggaagctttgatgggtcatgggccatgccataccccctgtggcaatggagtgtgtggatgctcacctgtgccatctgtcctcctgtctgtgc

SEQ ID NO: 467277 - DNA, 120 bp, Artificial Sequence
  ENSG00000158555_25 (sequence is synthesized)
caggaggcacctgagttctctgctgttatcctgccccaagggcctgggccgagcctctacctgaagcaactctgctcttcctgtcagtctcaaagcacaaggaggttcagcccaggagga

SEQ ID NO: 467278 - DNA, 120 bp, Artificial Sequence
  ENSG00000158555_26 (sequence is synthesized)
agccagctgcaatgtggagacacgtcctcctccccaacccacctcatgccaccgccaaccccctgccccaggagcgggcctgagccacgtcctctaggagcagctggagatggccaaaag

SEQ ID NO: 467279 - DNA, 120 bp, Artificial Sequence
  ENSG00000158555_27 (sequence is synthesized)
agtgagctcaggactactggatcccatgcccaggtgtccagcagacctcaaggcagaagggtcacctaacccaggagtccacagactgatgtgacctcaggttcccacatcagtggccac

SEQ ID NO: 467280 - DNA, 120 bp, Artificial Sequence
  ENSG00000158555_28 (sequence is synthesized)
agggcagggcccacctggtagaagtgttctggatatggccagggtgggtgtgtggctaagtgggcctgaacagagggaacctagggcccttggccaatgtgattaaagctgccatcttga

SEQ ID NO: 467281 - DNA, 120 bp, Artificial Sequence
  ENSG00000158555_29 (sequence is synthesized)
ggctgctttagaagaacaagctggtttggcagctacctcagagaagcaggaccctgggcagcgtgaaagggcctctgcccccagggtggctgggctttggatcctggatccgtgggtcct

SEQ ID NO: 467282 - DNA, 120 bp, Artificial Sequence
  ENSG00000158555_30 (sequence is synthesized)
ttatagtttctgcatggaaagcacttggaacaatgcctggctgttcccctctttggccctctcagggccctaggagcctttgtgtgtcctgctcacattgtctccagggcctcggacagg

SEQ ID NO: 467283 - DNA, 120 bp, Artificial Sequence
  ENSG00000158555_31 (sequence is synthesized)
gcctggtacagaacatatgactgagtttctggagtcccacaggccagcgttggagtcctgacacctcagtatagctgtgcacctctgggcaaatagtttctctgctctgagccccaggac

SEQ ID NO: 467284 - DNA, 120 bp, Artificial Sequence
  ENSG00000158555_32 (sequence is synthesized)
aggtcagttcccagggccccaaacaaggtagagagtggctctggagaagcaaaccaaagacacttcctcactctgtccatcaaaagcccgggagtccactgaatacactgtccttaggac

SEQ ID NO: 467285 - DNA, 120 bp, Artificial Sequence
  ENSG00000158555_33 (sequence is synthesized)
ctgatcccaatcttaggcatggaaaacaccagcagggactgcaaggagtgagaggtgcaagggtggccatcagcttcgagacccccactctcagagctttcgcgacctccacccaagctg

SEQ ID NO: 467286 - DNA, 120 bp, Artificial Sequence
  ENSG00000158555_34 (sequence is synthesized)
cttagtggcctcctaggctcctgccactgctgccagactcatggttgtcactgcttgttctgggtccatttccctcactagaaaaggttgacagggatgagagcagtgaatagaattctt

SEQ ID NO: 467287 - DNA, 120 bp, Artificial Sequence
  ENSG00000158555_35 (sequence is synthesized)
aactctgtaaaactctagagaggggttggctctctgatctgaaatgctctagaaggagaaatgctgtgggtctgggagcgattccaagcaagccgtcctccgtcctcttggtaagcaggg

SEQ ID NO: 467288 - DNA, 120 bp, Artificial Sequence
  ENSG00000158555_36 (sequence is synthesized)
ctgaccccagcagactctggcagcccaggggtctccacgcttggttgccagaagggtatgtgggggcccccaaagggctgatgatgcagccatgtgtgtgtccctgtccctgccagactg

SEQ ID NO: 467289 - DNA, 120 bp, Artificial Sequence
  ENSG00000158555_37 (sequence is synthesized)
ctcccaagtagctgggattacagtcccccatttatgcttcctgttgggtgtacctctctgaaagccagcagcatggagcccattacattccacagagggcctcaggtaccccctctggga

SEQ ID NO: 467290 - DNA, 120 bp, Artificial Sequence
  ENSG00000158555_38 (sequence is synthesized)
ggcctgcagcctgtcacagcatgctgagccaaagccacctgcccaggttcccaaatcttggaagcactggatcatggaaccatagaatctcggtgatatgaaatccagacttggaggagg

SEQ ID NO: 467291 - DNA, 120 bp, Artificial Sequence
  ENSG00000158555_39 (sequence is synthesized)
cctaaggggtcacaatccaaaccttcatccagcccaggcagcccctctgcaggctccgtgaacactctggcaactggggagtcatctgtagccccctcagcttccactactaagccatct

SEQ ID NO: 467292 - DNA, 120 bp, Artificial Sequence
  ENSG00000158555_40 (sequence is synthesized)
ctccagggcactgggggatcctgcaggggttttctgcttgaagagccacttcctgtttggggccgagcacttccttcagctctcccagtgaagtgatatcactgcctctgtggacaagac

SEQ ID NO: 467293 - DNA, 120 bp, Artificial Sequence
  ENSG00000158555_41 (sequence is synthesized)
acctccaggagcccagctcacagccaccggtaccttcttccagttatacagatgctgcagctggcattgacgtggaaggtgatagaaacgtgaacaggcccgccctgtggggctgcaacc

SEQ ID NO: 467294 - DNA, 120 bp, Artificial Sequence
  ENSG00000158555_42 (sequence is synthesized)
atggagagtctggactttagagtcaacagccccgggttcaaatcctccctcctccatgattagctgtttggccttgggtgaattacctaacctcttgggtgcgggtgcacacgtgtgtgt

SEQ ID NO: 467295 - DNA, 120 bp, Artificial Sequence
  ENSG00000158555_43 (sequence is synthesized)
gtgtgtgtgtgtgtgtgtgtgtatttaatacactttttcaaaagcagttttaggtttacagtaaaattgattggaaagtacggagagtttccatataccctcctctgcctttctcctccc

SEQ ID NO: 467296 - DNA, 120 bp, Artificial Sequence
  ENSG00000158555_44 (sequence is synthesized)
ctttctcctccccatagtctggcttattctttacatcttatattaatatggtacatttattacaactgatgaactaatattggttaattatgattgactaaagtccatgtttgcgctata

SEQ ID NO: 467297 - DNA, 120 bp, Artificial Sequence
  ENSG00000158555_45 (sequence is synthesized)
ggctgcacaaggcctcctctgggcttccactatcccctctgtgagggagtttcttctcctggctgcaaagctggcatttgaaagaactgcaccagctggcaccccgggtggggctggcac

SEQ ID NO: 467298 - DNA, 120 bp, Artificial Sequence
  ENSG00000158555_46 (sequence is synthesized)
atgctgtggtcaccttctggggccatgcctggctctcagcaggctgccctgagcacactgcactgctcttctgtcctcgcctgactcccctgcctcagtggcagcagcccccagcccagg

SEQ ID NO: 467299 - DNA, 120 bp, Artificial Sequence
  ENSG00000158555_47 (sequence is synthesized)
acctgcacagaggaggcgtctgtcagcgacccaacctgagccccagagaggagcactgggtaccacacagccccaagatcgggctggtggtcatcctggcttccacggtggtggccatgt

SEQ ID NO: 467300 - DNA, 120 bp, Artificial Sequence
  ENSG00000158555_48 (sequence is synthesized)
gctgaaccgacgtgagttggagaaagacgaagggatcaaagtcagcgccgcattctgccaccagtgcactccatagccctgcaggagagcttcgctggctccagagcacacgctcatgtc

SEQ ID NO: 467301 - DNA, 120 bp, Artificial Sequence
  ENSG00000158555_49 (sequence is synthesized)
ctttacattctatctctaacacccatccctgctttgctccccgcaacacacagccttttcctcattcccctcagaggaccccacagtggctgagcttcctgttctggatatgcctggccg

SEQ ID NO: 467302 - DNA, 120 bp, Artificial Sequence
  ENSG00000158555_50 (sequence is synthesized)
agagaccctggcctgacactgtccttctgggtttcaacatgaatttccaggatgggacctagagcttagggacccacgtctccctccgtctagtgccttagcccctcctgggtcaggcag

SEQ ID NO: 467303 - DNA, 120 bp, Artificial Sequence
  ENSG00000158555_51 (sequence is synthesized)
cttcaccaatcagcttctaggaggagatgctgtccctggctatgggacattccttgagtcattcctgtgtccgcccagttgaccaacatccacatacactggttgctgatgctgtctgca

SEQ ID NO: 467304 - DNA, 120 bp, Artificial Sequence
  ENSG00000158555_52 (sequence is synthesized)
gcaggagttgggccttctcacatggagccccagggtgctggggaggccaccccatggtgattcagtggctggcacagacacgctgggtctgctcagacacagccagggcagtgtcattgt

SEQ ID NO: 467305 - DNA, 120 bp, Artificial Sequence
  ENSG00000158555_53 (sequence is synthesized)
ctcctggggatcaggagaggcctggtggaggaaggtaccctgggggacaaggccgggggaggatactctttccctgtgggccttattcttccattcattcactcaacaagtacaggtcag

SEQ ID NO: 467306 - DNA, 120 bp, Artificial Sequence
  ENSG00000158555_54 (sequence is synthesized)
gctcccgggacacggcaggcactgatggtactggggcacagcgatgaacagagagagatttgctcactgccctcaatgattcatagggcagccagcctcgccagggtgtccgtgccaccc

SEQ ID NO: 467307 - DNA, 120 bp, Artificial Sequence
  ENSG00000158555_55 (sequence is synthesized)
cccgcctcctgctttccccttgtctgcctgctctgttcatccatccatccgcctgtccatctgtctgtccacttctgctgcgctgaccccatctagtaactcacagttggtttcttgtgg

SEQ ID NO: 467308 - DNA, 120 bp, Artificial Sequence
  ENSG00000158555_56 (sequence is synthesized)
agtcttggctctctccatcccccaagcagggttcagtccctgaggcagttgggttcttgttcccaagttgatcaccccctcctcctggtggggacaggggtgagagtccagtgatccttc

SEQ ID NO: 467309 - DNA, 120 bp, Artificial Sequence
  ENSG00000158555_57 (sequence is synthesized)
tgcctagatcccaggaaaggtctaagttcagaggccagggactggggctagttcagaggaatgacaatagtgaagacagtggcctgggctgggcacagaaacctgagtcctttccactta

SEQ ID NO: 467310 - DNA, 120 bp, Artificial Sequence
  ENSG00000158555_58 (sequence is synthesized)
gtgcctggtcccttcatgccctgtgcatgctccacctcccagcccactcttgagtaattttacccccaccttgcacctgtctcagccatcagagggattcatgctctgacctccctccgc

SEQ ID NO: 467311 - DNA, 120 bp, Artificial Sequence
  ENSG00000158555_59 (sequence is synthesized)
cacccccctgctttccttccctccctctcaaggggtctccccaatggcttcacttagtctggtcatgatggtggagctataagagacatcagctgggactccctgagattggtgtgtgcc

SEQ ID NO: 467312 - DNA, 120 bp, Artificial Sequence
  ENSG00000158555_60 (sequence is synthesized)
ccagcttaggtcaacagagtcgtgcctactaagctcctcctgctcccaaatctgtcccattcaaagagagccaggtgcattactggggacacctgagacagaactaaccaaccctagtcc

SEQ ID NO: 467313 - DNA, 120 bp, Artificial Sequence
  ENSG00000158555_61 (sequence is synthesized)
tgggccagggctgctgactggcggctctggaggtaagagggaggccagggagccctggccgagagtcagtaggctctgattcaagccccaactctgccctctctgggcctatttccccat

SEQ ID NO: 467314 - DNA, 120 bp, Artificial Sequence
  ENSG00000158555_62 (sequence is synthesized)
tgtacagtgggacaagagtcctgctggtctcttgggccacatccagagaggctctggaagtaggcagggtctctgctccaagggagggctgaggagagacctgatgcccacggggccatc

SEQ ID NO: 467315 - DNA, 120 bp, Artificial Sequence
  ENSG00000158555_63 (sequence is synthesized)
tctgcaggtggcgcctgggtggcatacggagctacaaccctgagcagatcatgctgagtgctgcggtgcgccggaccagccgggacgtcagcatcatgaaggagaagcttattttctcag

SEQ ID NO: 467316 - DNA, 120 bp, Artificial Sequence
  ENSG00000158555_64 (sequence is synthesized)
gatgaacctgcactggctgcacaaggtaagggccgcctcggccggggctgggagagagcaagggaagctggaggcagcagcagcagaggaagggcctggccaccatgtccctcccctgga

SEQ ID NO: 467317 - DNA, 120 bp, Artificial Sequence
  ENSG00000158555_65 (sequence is synthesized)
tcaccgttagaattgttctcatagctaaggctgagcactcactatgcgccaagcacttttctcacaacctcacccgtcttcattcacttaacccttacagcaaccttgtgatgtaggtac

SEQ ID NO: 467318 - DNA, 120 bp, Artificial Sequence
  ENSG00000158555_66 (sequence is synthesized)
tcacagctctggaaaggtccctggagaggatgtggaaagatccccagtaggtagcagagccaggattcgactgaagaccgtgattcaagtgaggctcttaaccctgggccagctgtctgc

SEQ ID NO: 467319 - DNA, 120 bp, Artificial Sequence
  ENSG00000158555_67 (sequence is synthesized)
catttggactgcaaaacccagaggccagatacccctaagaggccagctgttgcacctctgcaaggcggggttccacctcctctcgggtcccggcacctaggccagactcatcgaatgaat

SEQ ID NO: 467320 - DNA, 120 bp, Artificial Sequence
  ENSG00000158555_68 (sequence is synthesized)
gaaagactctgttgtatcccctgtacccaccatggctatcacaagccacagtcccatgaagacagagaacccaaggccactttctcagaggaggacggtgatctgtctctgggcctctag

SEQ ID NO: 467321 - DNA, 120 bp, Artificial Sequence
  ENSG00000158555_69 (sequence is synthesized)
ggtgggattcatccttctcagtcagatttcaggagcgatggtggttgcgtttttgggtgtcagtgctattgctataacttaatgatgcaaggtagggaagtcccacagacactgaacatg

SEQ ID NO: 467322 - DNA, 120 bp, Artificial Sequence
  ENSG00000158555_70 (sequence is synthesized)
cagtgatgctgctgagtgtgttgattagcaccaaagcaactgtggaactcagagataataacatttttaattgtattagggtttggggaatcagttttattgcaagtcgtttccattaat

SEQ ID NO: 467323 - DNA, 120 bp, Artificial Sequence
  ENSG00000158555_71 (sequence is synthesized)
aggtattgtgatgagatgctcctggaaaccatccttaactcactgtgtgcagggccacctcccacgatggccacaagggggagctgcgcgccgggggcagccgggagaaggggcctgagt

SEQ ID NO: 467324 - DNA, 120 bp, Artificial Sequence
  ENSG00000158555_72 (sequence is synthesized)
gccgagggcggggttctcaggggttcggaggcgcagctgggcctcccagagactgcgcagcctctctgacaccagcgtgctgtctgtccgagaaagcgcacacccccttaccccctgaga

SEQ ID NO: 467325 - DNA, 120 bp, Artificial Sequence
  ENSG00000158555_73 (sequence is synthesized)
tgggcagaaggtgttcgtttctggttctgccccttcaaagctccgtgacccagccagctgttcctctccccgaacctcgcttcccgtgtgtgagatgaggatgctcgtgcctccgcggaa

SEQ ID NO: 467326 - DNA, 120 bp, Artificial Sequence
  ENSG00000158555_74 (sequence is synthesized)
ccaacctggggaccacgcgaagcgcccccacaggcccaggctgatgggctggaatgaaaagcctccaaagggaaacttcatcccaggcgagactcagcattccccgccggcgagtgaagg

SEQ ID NO: 467327 - DNA, 120 bp, Artificial Sequence
  ENSG00000158555_75 (sequence is synthesized)
tccctgggtagggagcggagatgctggccaccgccccaccctcatcgtctagaaatgccactgtccctgctcggcatcagagggccctggccgctgctgcctctgggaaaggttgcctcg

SEQ ID NO: 467328 - DNA, 120 bp, Artificial Sequence
  ENSG00000158555_76 (sequence is synthesized)
ggagaaagggggtgaaggccctgccagcagctagaacggctccagggaggcagggcggccggcagtgctgtgggagaaggacaggcctttggagggagatgggagacgagtctggagaaa

SEQ ID NO: 467329 - DNA, 120 bp, Artificial Sequence
  ENSG00000158555_77 (sequence is synthesized)
ctagggggacggaggtggcggctttgactgacccttccagagactgggatctgcgggaggctttggaggagagccacaacctgggcttcggggaggcacgcctgggggtgtggagggggg

SEQ ID NO: 467330 - DNA, 120 bp, Artificial Sequence
  ENSG00000158555_78 (sequence is synthesized)
tgggtggagtgagatccacggctaggggcgaggggctgggggccgaggagccgaaaacctctgccgagcttcacgtggttaaagatttcaggtcttacctgtcaccagagatctctgtcc

SEQ ID NO: 467331 - DNA, 120 bp, Artificial Sequence
  ENSG00000158555_79 (sequence is synthesized)
cgtagaggtgccacctcatcctccatgagagctgtgctttgctttcttctggaggctgcaaggaggatggcccccatcacggcggacctagatgctgggagtccgggagagggcaggccg

SEQ ID NO: 467332 - DNA, 120 bp, Artificial Sequence
  ENSG00000158555_80 (sequence is synthesized)
tggagatggggcaggtggcgatgtgtttcaccacccactcccgcctgaagtgccactgtgagcccagcccagggtgccaggctgggctgcactccaggctcctgcagcagacccagttcc

SEQ ID NO: 467333 - DNA, 120 bp, Artificial Sequence
  ENSG00000158560_0 (sequence is synthesized)
ctgggagagaggaagtgatcgctcccggaggagcgcgagccgagcggccggcgcagcgtgagacagcacatcctgcccgcgccggccccgccaccttcgggagccgcctgcaccaacgct

SEQ ID NO: 467334 - DNA, 120 bp, Artificial Sequence
  ENSG00000158560_1 (sequence is synthesized)
gccgccgcccaggagccgccgccggctcggggagcccagttccgccgctgccgagcgcgtccaggaaaccaacatgtctgacaaaagtgacttaaaagctgagctagagcgcaaaaagca

SEQ ID NO: 467335 - DNA, 120 bp, Artificial Sequence
  ENSG00000158560_2 (sequence is synthesized)
gcgcttagcacagataagagaagagaagaaacggaaggaagaggagaggaaaaagaaagaggctgatatgcagcagaagaaagaacccgttcaggacgactctgatctggatcgcaaacg

SEQ ID NO: 467336 - DNA, 120 bp, Artificial Sequence
  ENSG00000158560_3 (sequence is synthesized)
acgagagacagaggctttgctgcaaagcattggtatctcaccggagccgcctctagtgcagccgctgcattttttaacatgggatacctgttattttcattatttagtcccaacccctat

SEQ ID NO: 467337 - DNA, 120 bp, Artificial Sequence
  ENSG00000158560_4 (sequence is synthesized)
gtctccctcctcgaaatcagtgagcactcccagtgaagctggaagccaagactcaggcgatctggggccattaacaaggaccctgcagtgggacacagacccctcagtgctccagctgca

SEQ ID NO: 467338 - DNA, 120 bp, Artificial Sequence
  ENSG00000158560_5 (sequence is synthesized)
gtcagactcagaacttggaagaagactgcataaactgggcgtgtcaaaggtcacccaagtggatttcctgccaagggaagtagtgtcctactcaaaggagacccagactcctcttgccac

SEQ ID NO: 467339 - DNA, 120 bp, Artificial Sequence
  ENSG00000158560_6 (sequence is synthesized)
gcatcagtctgaagaggatgaggaagatgaggaaatggtggaatctaaagttggccaggactcagaactggaaaatcaggacaaaaaacaggaagtgaaggaagcccctccaagagagtt

SEQ ID NO: 467340 - DNA, 120 bp, Artificial Sequence
  ENSG00000158560_7 (sequence is synthesized)
gacagaggaagaaaaacagcagatccttcattcagaggaatttctcatcttttttgaccggacaatacgggtaattgaaagagccctggctgaagattccgacatcttttttgactacag

SEQ ID NO: 467341 - DNA, 120 bp, Artificial Sequence
  ENSG00000158560_8 (sequence is synthesized)
cggccgagagttagaggaaaaagatggggatgttcaggctggagccaatctttctttcaatcgtcagttctatgatgaacattggtccaagcatcgagtggtcacttgtatggactggtc

SEQ ID NO: 467342 - DNA, 120 bp, Artificial Sequence
  ENSG00000158560_9 (sequence is synthesized)
cctccagtaccctgagctgatggtggcttcttacaacaacaatgaagatgctccccatgaaccagatggagtggccttggtttggaacatgaagtttaagaaaaccacaccagaatacgt

SEQ ID NO: 467343 - DNA, 120 bp, Artificial Sequence
  ENSG00000158560_10 (sequence is synthesized)
cttccactgtcagtcctctgtgatgtcggtctgcttcgcccgtttccatcctaacttggtggttggtgggacttactcgggccagattgtcctctgggacaatcgcagtcatcgaaggac

SEQ ID NO: 467344 - DNA, 120 bp, Artificial Sequence
  ENSG00000158560_11 (sequence is synthesized)
tccagtgcagcggacacccttatcagctgctgcacacacgcatcccgtgtactgtgtaaatgttgttgggacccagaatgctcataacctcatcactgtctccactgatggcaaaatgtg

SEQ ID NO: 467345 - DNA, 120 bp, Artificial Sequence
  ENSG00000158560_12 (sequence is synthesized)
gtcgctgttaccggaatggctttcccaacgggagacgtcaataacttcgtggttggcagtgaggaaggtacagtctacacggcttgtcgtcatggaagcaaagcaggtattggtgaggtc

SEQ ID NO: 467346 - DNA, 120 bp, Artificial Sequence
  ENSG00000158560_13 (sequence is synthesized)
tttgaaggtcaccaagggccagtgacaggaattaactgccacatggcagtgggcccaatcgacttttctcacctgtttgtcacatcatcatttgactggactgtcaaactgtggaccacc

SEQ ID NO: 467347 - DNA, 120 bp, Artificial Sequence
  ENSG00000158560_14 (sequence is synthesized)
aagcacaacaagccgctctactcctttgaagacaatgcagactatgtgtacgatgtcatgtggtcccccgtgcatcctgcgctttttgcctgcgtggacgggatggggcgcttggacctc

SEQ ID NO: 467348 - DNA, 120 bp, Artificial Sequence
  ENSG00000158560_15 (sequence is synthesized)
tggaacctcaacaatgacaccgaggttccaacagcaagtgtggccattgagggggcatccgccctaaaccgtgttcgttgggcccaagctggcaaagaagttgctgttggggactcggaa

SEQ ID NO: 467349 - DNA, 120 bp, Artificial Sequence
  ENSG00000158560_16 (sequence is synthesized)
ggccgtatttgggtctatgacgttggagagcttgcagttccccacaatgatgaatggacccgatttgccaggacccttgtggaaattcgtgctaacagagctgatagcgaggaggaaggc

SEQ ID NO: 467350 - DNA, 120 bp, Artificial Sequence
  ENSG00000158560_17 (sequence is synthesized)
actgttgagttatctgcctagtggaaatgagccacccccactgcagcccccacctttgtgtcctagagctcagcgtctgcagtcaagtctcttgtattcggtgtccattcagtatcagta

SEQ ID NO: 467351 - DNA, 120 bp, Artificial Sequence
  ENSG00000158560_18 (sequence is synthesized)
ttgctgtgatattttgggtgccatattgtgccagctttgctccaagtattctaaatgtgtcccatcatgctttccactgacccaaaattcaccacagcatttctatctttatatttctgt

SEQ ID NO: 467352 - DNA, 120 bp, Artificial Sequence
  ENSG00000158560_19 (sequence is synthesized)
ctcaaaaatgaagagaagggggttatgggttaagttgctgccttttaactactttgtagctgtatttaatagctggaaacctctggttaaatttgtgcttacatgcactcctggcatagt

SEQ ID NO: 467353 - DNA, 120 bp, Artificial Sequence
  ENSG00000158560_20 (sequence is synthesized)
cctattaaatccatatgaagccagatatgattgggtgcagatgtggtgttcctcatattatggtacagggccaaagacttgagacgtggtgttttacatggtgactcacattatgaatgg

SEQ ID NO: 467354 - DNA, 120 bp, Artificial Sequence
  ENSG00000158560_21 (sequence is synthesized)
atttactagaagaacattgctgctccttatttattgtagtgtgctgcatggaacgtatttatttgaaagcattaaaataaatgatcctagagcatgtgcataatgagaggactgtattct

SEQ ID NO: 467355 - DNA, 120 bp, Artificial Sequence
  ENSG00000158560_22 (sequence is synthesized)
ctctgctgctgttgaggttatattaagttccacatagcaattacagtatgccagttccactgaagacatgaaatctttagaggtttcttgcagtgaacgaaatgaattttaatgcctatt

SEQ ID NO: 467356 - DNA, 120 bp, Artificial Sequence
  ENSG00000158560_23 (sequence is synthesized)
atttctgggtactttaacaatatttcaaatatcattgaccactaatacttctcactgaagctaacacagtctgacaaaagtctatggttcctaaatatgacatcagtgttgccaataaaa

SEQ ID NO: 467357 - DNA, 120 bp, Artificial Sequence
  ENSG00000158560_24 (sequence is synthesized)
atatctctaggggtttatgacaggctgttttcttttctcagtgtggggatgaattgctccattatcatctaaattggaagtcatgatgatggaaaccaacatgtctgacaaaagtgactt

SEQ ID NO: 467358 - DNA, 120 bp, Artificial Sequence
  ENSG00000158560_25 (sequence is synthesized)
cggaaggccgtatttgggtctatgacgttggagagggtcttgctatgttgccaggctggtctcaaaattcctggactcaagcaatcctcctatgttggcctcccaaagtgctgggattac

SEQ ID NO: 467359 - DNA, 120 bp, Artificial Sequence
  ENSG00000158560_26 (sequence is synthesized)
cagctatgcctgcttgttatatcagctactgagagatgagtaccaaaatctggaagtataattgtggatatcttttagttctttcagttctatcagcttttgttttctgtatccaaagct

SEQ ID NO: 467360 - DNA, 120 bp, Artificial Sequence
  ENSG00000158560_27 (sequence is synthesized)
ttgttattaggtgcctacatattgaggatttcatgtgtttgcgatgaactgacccttttatcaatatgaaatgttgctgtttattcctagtaataatcctttttcttaaatctactttga

SEQ ID NO: 467361 - DNA, 89 bp, Artificial Sequence
  ENSG00000158560_28 (sequence is synthesized)
attgctatattctgattctcctccctcttcatcccaaagtggtgggatcctcctgcctctccctcccaaagtgctgagattacaggcag

SEQ ID NO: 467362 - DNA, 120 bp, Artificial Sequence
  ENSG00000158560_29 (sequence is synthesized)
ccaaagtgctgagattacaggcaggacccattgtgcccagcctaaaaatctcttactattatagaaacaacacctgtgtattttatacaactagaaaatataaatgagcaaaaataacaa

SEQ ID NO: 467363 - DNA, 120 bp, Artificial Sequence
  ENSG00000158560_30 (sequence is synthesized)
aataaaaacatcatgtttccaccaccagagtagcactcttagcaccttagtgcttattcttttatattatatgtatgtcatcatatataatgataaatgacatcttactgtgaaaactgt

SEQ ID NO: 467364 - DNA, 120 bp, Artificial Sequence
  ENSG00000158560_31 (sequence is synthesized)
tgaacctgctttttcaatcaagtgtatttttatatttcaatgtattttcaccttatctagtatctacactatcttcaaatttccccaattggccccaataaaatcctgtagtatttaaaa

SEQ ID NO: 467365 - DNA, 120 bp, Artificial Sequence
  ENSG00000158560_32 (sequence is synthesized)
gaaatctccatgcatccgagctcagtggaggaatgtttattgagtccatagaaatttgagcagggcatatctctaggggtttatgacaggctgttttcttttctcagtgtggggatgaat

SEQ ID NO: 467366 - DNA, 120 bp, Artificial Sequence
  ENSG00000158560_33 (sequence is synthesized)
caggcctcagtgtttattactggaaatgcaccagctttgtggaagtttctggaaaggaatgttgtggaattggtgattaagtggaatagctttctcttctgtcccctggttcattgactt

SEQ ID NO: 467367 - DNA, 120 bp, Artificial Sequence
  ENSG00000158560_34 (sequence is synthesized)
gatctaagcccaaggcaaaagtaagaggaggtctcttataatctgtcagcttccttctcacttaggaccttccttaaggattaaaaacttaacttttaaaccagagttcctctttacctc

SEQ ID NO: 467368 - DNA, 120 bp, Artificial Sequence
  ENSG00000158560_35 (sequence is synthesized)
tctgccagacccaactacattaagggatttgacgggtcaccaatccaggagggttatgcatgagacacttggcttccacccacctatggaatttaatttatgcctggttggtttgatttt

SEQ ID NO: 467369 - DNA, 120 bp, Artificial Sequence
  ENSG00000158571_0 (sequence is synthesized)
agaggaaagaagagaggggactgaagacagactttgagagggctcagaaacccagtacaccccctgtcccagccctgtccacctgctgctgtggccacagcgagagaaaagacagctagt

SEQ ID NO: 467370 - DNA, 120 bp, Artificial Sequence
  ENSG00000158571_1 (sequence is synthesized)
aagataggaagtgaggccaggtaccttgtgggcagtgatgtcattcggtgcgactcctaagatgtctccagagatgggagagctcacccaaaccaggttgcagaagatctggattccaca

SEQ ID NO: 467371 - DNA, 120 bp, Artificial Sequence
  ENSG00000158571_2 (sequence is synthesized)
cagcagcggcagcagcaggctgcaacggagaaggggctcatccataccccagtttaccaattcccccacaatggtgatcatggtgggtttaccagctcgaggcaagacctatatctccac

SEQ ID NO: 467372 - DNA, 120 bp, Artificial Sequence
  ENSG00000158571_3 (sequence is synthesized)
aaagctcacacgatatctcaactggataggaacaccaactaaagtgtttaatttaggccagtatcgacgagaggcagtgagctacaagaactatgaattctttcttccagacaacatgga

SEQ ID NO: 467373 - DNA, 120 bp, Artificial Sequence
  ENSG00000158571_4 (sequence is synthesized)
agccctgcaaatcaggaagcagtgcgccctggcagccctgaaggatgttcacaactatctcagccatgaggaaggtcatgttgcggtttttgatgccaccaacactaccagagaacgacg

SEQ ID NO: 467374 - DNA, 120 bp, Artificial Sequence
  ENSG00000158571_5 (sequence is synthesized)
gtcactgatcctgcagtttgcaaaagaacatggttacaaggtgtttttcattgagtccatttgtaatgaccctggcataattgcagaaaacatcaggcaagtgaaacttggcagccctga

SEQ ID NO: 467375 - DNA, 120 bp, Artificial Sequence
  ENSG00000158571_6 (sequence is synthesized)
ttatatagactgtgaccgggaaaaggttctggaagactttctaaagagaattgagtgctatgaggtcaactaccaacccttggatgaggaactggacagccacctgtcctacatcaagat

SEQ ID NO: 467376 - DNA, 120 bp, Artificial Sequence
  ENSG00000158571_7 (sequence is synthesized)
cttcgacgtgggcacacgctacatggtgaaccgagtgcaggatcacatccagagccgcacagtctactacctcatgaatatccatgtcacacctcgctccatctacctttgccgacatgg

SEQ ID NO: 467377 - DNA, 120 bp, Artificial Sequence
  ENSG00000158571_8 (sequence is synthesized)
aggtgtggaccagtcacatgaagaggaccatccagacagctgaggccctgggtgtcccctatgagcagtggaaggccctgaatgagattgatgcgggtgtctgtgaggagatgacctatg

SEQ ID NO: 467378 - DNA, 120 bp, Artificial Sequence
  ENSG00000158571_9 (sequence is synthesized)
aagaaatccaggaacattaccctgaagaatttgcactgcgagaccaagataaatatcgctaccgctatcccaagggagagtcctatgaggatctggttcagcgtctggagccagtgataa

SEQ ID NO: 467379 - DNA, 120 bp, Artificial Sequence
  ENSG00000158571_10 (sequence is synthesized)
tggagctagaacgacaggagaatgtactggtgatctgccaccaggctgtcatgcggtgcctcctggcctatttcctggataaaagttcagatgagcttccatatctcaagtgccctctgc

SEQ ID NO: 467380 - DNA, 120 bp, Artificial Sequence
  ENSG00000158571_11 (sequence is synthesized)
acacagtgctcaaactcactcctgtggcttatggctgcaaagtggaatccatctacctgaatgtggaggccgtgaacacacaccgggagaagcctgagaatgtggacatcacccgggaac

SEQ ID NO: 467381 - DNA, 120 bp, Artificial Sequence
  ENSG00000158571_12 (sequence is synthesized)
ctgaggaagccctggatactgtcccagcccactactgagccctttccaagaagtcaaactgcctgtgtcctcatcgccttccacctttaggaaatgctatctttgctcttctcctactct

SEQ ID NO: 467382 - DNA, 120 bp, Artificial Sequence
  ENSG00000158571_13 (sequence is synthesized)
gccttggcctcactgaggcaccccacttccagtgaagaagtcctccgcaactcccaaacaagcctcgcttgctggccgcaaccaaggagctatctagctctggaggaaactttctttctt

SEQ ID NO: 467383 - DNA, 120 bp, Artificial Sequence
  ENSG00000158571_14 (sequence is synthesized)
aattcctattctctgacgaataaagacttactgcctacaagaggagaggaggaggtcatggcgaggcttttccagttgttctcaaggtactgaccctaatcctgacccagctctgctgct

SEQ ID NO: 467384 - DNA, 120 bp, Artificial Sequence
  ENSG00000158571_15 (sequence is synthesized)
gtgagggcatggaatgggtgaggatttcctggagggaaaagttctacagtagcacctccaaagatgggggagaagataggtgcctgtgagttcctgtgggccttgttccagcaaggtggc

SEQ ID NO: 467385 - DNA, 120 bp, Artificial Sequence
  ENSG00000158571_16 (sequence is synthesized)
gggaaccaacgaacacctccaggcttcctctttgatgccacccactggacctgccttgggggtctgtaaatgcaagagaaccgagtgttggataattagcgatggaagaaaaaacctcta

SEQ ID NO: 467386 - DNA, 120 bp, Artificial Sequence
  ENSG00000158578_0 (sequence is synthesized)
acctgtcattcgttcgtcctcagtgcagggcaacaggactttaggttcaagatggtgactgcagccatgctgctacagtgctgcccagtgcttgcccggggccccacaagcctcctaggc

SEQ ID NO: 467387 - DNA, 120 bp, Artificial Sequence
  ENSG00000158578_1 (sequence is synthesized)
aaggtggttaagactcaccagttcctgtttggtattggacgctgtcccatcctggctacccaaggaccaaactgttctcaaatccaccttaaggcaacaaaggctggaggagattctcca

SEQ ID NO: 467388 - DNA, 120 bp, Artificial Sequence
  ENSG00000158578_2 (sequence is synthesized)
tcttgggcgaagggccactgtcccttcatgctgtcggaactccaggatgggaagagcaagattgtgcagaaggcagccccagaagtccaggaagatgtgaaggctttcaagacagatctg

SEQ ID NO: 467389 - DNA, 120 bp, Artificial Sequence
  ENSG00000158578_3 (sequence is synthesized)
cctagctccctggtctcagtcagcctaaggaagccattttccggtccccaggagcaggagcagatctctgggaaggtcacacacctgattcagaacaatatgcctggaaactatgtcttc

SEQ ID NO: 467390 - DNA, 120 bp, Artificial Sequence
  ENSG00000158578_4 (sequence is synthesized)
agttatgaccagtttttcagggacaagatcatggagaagaaacaggatcacacctaccgtgtgttcaagactgtgaaccgctgggctgatgcatatccctttgcccaacatttctctgag

SEQ ID NO: 467391 - DNA, 120 bp, Artificial Sequence
  ENSG00000158578_5 (sequence is synthesized)
gcatctgtggcctcaaaggatgtgtccgtctggtgtagtaatgattacctgggcatgagccgacaccctcaggtcttgcaagccacacaggagaccctgcagcgtcatggtgctggagct

SEQ ID NO: 467392 - DNA, 120 bp, Artificial Sequence
  ENSG00000158578_6 (sequence is synthesized)
ggtggcacccgcaacatctcaggcaccagtaagtttcatgtggagcttgagcaggagctggctgagctgcaccagaaggactcagccctgctcttctcctcctgctttgttgccaatgac

SEQ ID NO: 467393 - DNA, 120 bp, Artificial Sequence
  ENSG00000158578_7 (sequence is synthesized)
tctactctcttcaccttggccaagatcctgccagggtgcgagatttactcagacgcaggcaaccatgcttccatgatccaaggtatccgtaacagtggagcagccaagtttgtcttcagg

SEQ ID NO: 467394 - DNA, 120 bp, Artificial Sequence
  ENSG00000158578_8 (sequence is synthesized)
aaagaaacttctagagaagtctaaccctaagatacccaaaattgtggcctttgagactgtccactccatggatggtgccatctgtcccctcgaggagttgtgtgatgtgtcccaccagta

SEQ ID NO: 467395 - DNA, 120 bp, Artificial Sequence
  ENSG00000158578_9 (sequence is synthesized)
tggggccctgaccttcgtggatgaggtccatgctgtaggactgtatgggtcccggggcgctgggattggggagcgtgatggaattatgcataagattgacatcatctctggaactcttgg

SEQ ID NO: 467396 - DNA, 120 bp, Artificial Sequence
  ENSG00000158578_10 (sequence is synthesized)
caaggcctttggctgtgtgggcggctacattgccagcacccgtgacttggtggacatggtgcgctcctatgctgcaggcttcatctttaccacttctctgccccccatggtgctctctgg

SEQ ID NO: 467397 - DNA, 120 bp, Artificial Sequence
  ENSG00000158578_11 (sequence is synthesized)
agctctagaatctgtgcggctgctcaagggagaggagggccaagccctgaggcgagcccaccagcgcaatgtcaagcacatgcgccagctactcatggacaggggccttcctgtcatccc

SEQ ID NO: 467398 - DNA, 120 bp, Artificial Sequence
  ENSG00000158578_12 (sequence is synthesized)
ctgccccagccacatcatccccatccgggtgggcaatgcagcactcaacagcaagctctgtgatctcctgctctccaagcatggcatctatgtgcaggccatcaactacccaactgtccc

SEQ ID NO: 467399 - DNA, 120 bp, Artificial Sequence
  ENSG00000158578_13 (sequence is synthesized)
ccggggtgaagagctcctgcgcttggcaccctccccccaccacagccctcagatgatggaagattttgtggagaagctgctgctggcttggactgcggtggggctgcccctccaggatgt

SEQ ID NO: 467400 - DNA, 120 bp, Artificial Sequence
  ENSG00000158578_14 (sequence is synthesized)
gtctgtggctgcctgcaatttctgtcgccgtcctgtacactttgagctcatgagtgagtgggaacgttcctacttcgggaacatggggccccagtatgtcaccacctatgcctgagaagc

SEQ ID NO: 467401 - DNA, 120 bp, Artificial Sequence
  ENSG00000158578_15 (sequence is synthesized)
cagctgcctaggattcacaccccacctgcgcttcacttgggtccaggcctactcctgtcttctgctttgttgtgtgcctctagctgaattgagcctaaaaataaagcacaaaccacagca

SEQ ID NO: 467402 - DNA, 120 bp, Artificial Sequence
  ENSG00000158578_16 (sequence is synthesized)
ggagaccctgcagcgtcatggtgctggagctggtggcacccgcaacatctcaggcaccaatcctgccagggtgcgagatttactcagacgcaggcaaccatgcttccatgatccaaggta

SEQ ID NO: 467403 - DNA, 120 bp, Artificial Sequence
  ENSG00000158578_17 (sequence is synthesized)
acctgtcattcgttcgtcctcagtgcagggcaacagggcccacatgccttggccccacataccaacccaggctgctgtgacagcccatgagagggggagaggttgctctgggatggaaca

SEQ ID NO: 467404 - DNA, 120 bp, Artificial Sequence
  ENSG00000158604_0 (sequence is synthesized)
gcaggcgcttaggggctgaggcgcgatggcaggtgtcggggctgggcctctgcgggcgatggggcggcaggccctgctgcttctcgcgctgtgcgccacaggcgcccaggggctctactt

SEQ ID NO: 467405 - DNA, 120 bp, Artificial Sequence
  ENSG00000158604_1 (sequence is synthesized)
ccacatcggcgagaccgagaagcgctgtttcatcgaggaaatccccgacgagaccatggtcatcggcaactatcgtacccagatgtgggataagcagaaggaggtcttcctgccctcgac

SEQ ID NO: 467406 - DNA, 120 bp, Artificial Sequence
  ENSG00000158604_2 (sequence is synthesized)
ccctggcctgggcatgcacgtggaagtgaaggaccccgacggcaaggtggtgctgtcccggcagtacggctcggagggccgcttcacgttcacctcccacacgcccggtgaccatcaaat

SEQ ID NO: 467407 - DNA, 120 bp, Artificial Sequence
  ENSG00000158604_3 (sequence is synthesized)
ctgtctgcactccaattctaccaggatggctctcttcgctggtggcaaactgcgggtgcatctcgacatccaggttggggagcatgccaacaactaccctgagattgctgcaaaagataa

SEQ ID NO: 467408 - DNA, 120 bp, Artificial Sequence
  ENSG00000158604_4 (sequence is synthesized)
gctgacggagctacagctccgcgcccgccagttgcttgatcaggtggaacagattcagaaggagcaggattaccaaaggtatcgtgaagagcgcttccgactgacgagcgagagcaccaa

SEQ ID NO: 467409 - DNA, 120 bp, Artificial Sequence
  ENSG00000158604_5 (sequence is synthesized)
ccagagggtcctatggtggtccattgctcagactgtcatcctcatcctcactggcatctggcagatgcgtcacctcaagagcttctttgaggccaagaagctggtgtagtgccctctttg

SEQ ID NO: 467410 - DNA, 120 bp, Artificial Sequence
  ENSG00000158604_6 (sequence is synthesized)
tatgacccttcctttttacctcatttatttggtactttccccacacagtcctttatccacctggatttttagggaaaaaaatgaaaaagaataagtcacattggttccatggccacaaac

SEQ ID NO: 467411 - DNA, 120 bp, Artificial Sequence
  ENSG00000158604_7 (sequence is synthesized)
cattcagatcagccacttgctgaccctggttcttaaggacacatgacattagtccaatctttcaaaatcttgtcttagggcttgtgaggaatcagaactaacccaggactcagtcctgct

SEQ ID NO: 467412 - DNA, 120 bp, Artificial Sequence
  ENSG00000158604_8 (sequence is synthesized)
tcttttgcctcgagtgattttcctctgtttttcactaaataagcaaatgaaaactctctccattaccttctgctttctctttgtccacttacgcagtaggtgactggcatgtgccacaga

SEQ ID NO: 467413 - DNA, 120 bp, Artificial Sequence
  ENSG00000158604_9 (sequence is synthesized)
actgtctgctggtcagttctgggttcacttaatggctttgtgaatgtaaataaggggcaggtcttggccctagaggattgagatgtttttctaaatcttagaactatttttggataaatt

SEQ ID NO: 467414 - DNA, 120 bp, Artificial Sequence
  ENSG00000158604_10 (sequence is synthesized)
gaactatttttggataaattatatattttccttcctagtagaagtgttactgcctgtaactagctcaaaataccaatgcagtttctgcattctgggttttgtttttcctttttttttttt

SEQ ID NO: 467415 - DNA, 120 bp, Artificial Sequence
  ENSG00000158604_11 (sequence is synthesized)
attcacatatttttggtaactcccatggcagctcctaggatttcagcggtctgtgggccagaaagcaggcaccagggctgacctcaaggccgtatcagagggccaagcagagttcttttg

SEQ ID NO: 467416 - DNA, 120 bp, Artificial Sequence
  ENSG00000158604_12 (sequence is synthesized)
gatacctgcttttcatcccacagggccttagagtcagaggtaaggtagcaacagagctagaatggggcaatgcactcttaccctccttctcaacttttatttaagctgtgctaaatgttt

SEQ ID NO: 467417 - DNA, 120 bp, Artificial Sequence
  ENSG00000158604_13 (sequence is synthesized)
tcttcaagggaaccagatttagttctttacagaattttccagtgaaataaaacatgttgtaatagctgtgtttgagatgaaataagaggttgtgggtagaggggaggcacctaaaggaaa

SEQ ID NO: 467418 - DNA, 120 bp, Artificial Sequence
  ENSG00000158604_14 (sequence is synthesized)
agaggaaaggtgcctgggctacctatgcagataacctggagtggacttcactgtggactcgtggtactaaggcttggcctggacaggcagtctagggggtatgggaatacacggtgtggt

SEQ ID NO: 467419 - DNA, 120 bp, Artificial Sequence
  ENSG00000158604_15 (sequence is synthesized)
tgttcaactatttgcaaaggtcaaccaaatagaccacatgttcgcaaagtatcatctgaggaaattaagtaccttcttagccctctcagtcataaatttgaacaaattttaatacacttc

SEQ ID NO: 467420 - DNA, 120 bp, Artificial Sequence
  ENSG00000158604_16 (sequence is synthesized)
cctcatgcccttctatataaaacttaataccattagttccccattcttgacattttatttcagtttttattatatatttatttgaaatatttattaaattatctgacctacagaactaaa

SEQ ID NO: 467421 - DNA, 120 bp, Artificial Sequence
  ENSG00000158604_17 (sequence is synthesized)
tttatacccactatacctactcaagtttctgcttgggagatcagctctgcagagaatggaatgagaagtattggtttagataggttgtttgtttgttgtttttgagacggagtttcactc

SEQ ID NO: 467422 - DNA, 120 bp, Artificial Sequence
  ENSG00000158604_18 (sequence is synthesized)
gggattacaggtgtgagctaccgcgccctgcctgttttgcttttttatcaaaacattttattgtggtaaaatataacaccaaatgtgtcattttaactgtctatatagttcagtggtatt

SEQ ID NO: 467423 - DNA, 120 bp, Artificial Sequence
  ENSG00000158604_19 (sequence is synthesized)
aaatgtgtcattttaactgtctatatagttcagtggtattaagtgccttcataatgttgtgctaccaacaccatcatccagctccagaactttttcatcttctcaaactaaaaatctgta

SEQ ID NO: 467424 - DNA, 120 bp, Artificial Sequence
  ENSG00000158604_20 (sequence is synthesized)
ttacaggcgtgagccactgcacccagcaaatctgtacttattataaacaataacttcccgtttccttttgtcctgacacccaccattctactttctgtctctatgatcctgactacccta

SEQ ID NO: 467425 - DNA, 120 bp, Artificial Sequence
  ENSG00000158604_21 (sequence is synthesized)
tactttctgtctctatgatcctgactaccctatctcatataagtggaatcattcagtatttgtccttttgtgactggcttatttcactgagtataatgttctcacagttcatccatgtta

SEQ ID NO: 467426 - DNA, 120 bp, Artificial Sequence
  ENSG00000158604_22 (sequence is synthesized)
tagcatgtgtcagaatttcttaaggctaatattccattgtatgcatgtgccacatttcgctttcagtagtcatttttaagctctataaaataaaatgaagaaaggacagttcacaatcta

SEQ ID NO: 467427 - DNA, 120 bp, Artificial Sequence
  ENSG00000158604_23 (sequence is synthesized)
gcgctgtttcatcgaggaaatccccgacgagaccatggtcatcggtcaggcgggctgagggtggggaggccctttgtacccagctcagccctcggcggcgctccctcctcccgagcccag

SEQ ID NO: 467428 - DNA, 120 bp, Artificial Sequence
  ENSG00000158604_24 (sequence is synthesized)
ccgggtcgctggctcccccagtacctagcctgagggtgccccgaggacgccaggccccctgcctagagctccgggccgcacgtcggagggggccgggcggagaggcggcccactagggcc

SEQ ID NO: 467429 - DNA, 120 bp, Artificial Sequence
  ENSG00000158615_0 (sequence is synthesized)
attttgggcttcgcttccaccgcaccagccggcctacccagtccttccggtatcgcgttgctcaggggcttttcaaccctctgtcagtcggaaaaccatcgccgaggccgtggggggact

SEQ ID NO: 467430 - DNA, 120 bp, Artificial Sequence
  ENSG00000158615_1 (sequence is synthesized)
cctatccatggtgttgaagcgtcgagccgactagggaacctccttccccgccaggatggaagtcgcatcagtcgccgcctattgcgcgggctgttcttccctgtgttctgccgcccgctg

SEQ ID NO: 467431 - DNA, 120 bp, Artificial Sequence
  ENSG00000158615_2 (sequence is synthesized)
ccgcattcgctgccctctgtggcttttctgctggctcgaagatcggcctggagcagcgacgccaccgctgggcaaggccgagactctgtaggcttcctccgaatcccgtcgacctccagc

SEQ ID NO: 467432 - DNA, 120 bp, Artificial Sequence
  ENSG00000158615_3 (sequence is synthesized)
cgctgagcgccgcggccctacctgagagactgtcaagaaaaaggagatggagccggggacaggcggatcgcggaaacggcttggccctcgggcgggcttccggttctggccacccttttt

SEQ ID NO: 467433 - DNA, 120 bp, Artificial Sequence
  ENSG00000158615_4 (sequence is synthesized)
ccctcggcgatcgcaagcaggctcttctaagttcccgacgcctcttggcccggaaaactccgggaaccccacactgctttcctctgcccagcccgagactcgggtcagttactggacgaa

SEQ ID NO: 467434 - DNA, 120 bp, Artificial Sequence
  ENSG00000158615_5 (sequence is synthesized)
actgctctcccagctccttgcgccgctccccggattgcttcagaaggtgctaatttggagccaacttttcggtggaatgtttccgaccagatggctagattttgctggagtctacagcgc

SEQ ID NO: 467435 - DNA, 120 bp, Artificial Sequence
  ENSG00000158615_6 (sequence is synthesized)
cctgagagccctgaagggacgggagaaaccagccgcccccacagcgcagaaatctttgagttcgctgcagctcgactcctcagacccctcggtcaccagtccccttgattggctagagga

SEQ ID NO: 467436 - DNA, 120 bp, Artificial Sequence
  ENSG00000158615_7 (sequence is synthesized)
ggggatccactggcaatactcgcccccagacctaaaattggagcttaaggccaagggaagtgctttggaccctgcagcacaggcttttctcttagagcagcagctgtggggagtggagct

SEQ ID NO: 467437 - DNA, 120 bp, Artificial Sequence
  ENSG00000158615_8 (sequence is synthesized)
gttgcccagtagccttcaatcccgtctgtactctaaccgggaacttggctcttcgccctctgggcctctaaacattcaacgcatagacaatttcagtgtggtatcctatttgctgaaccc

SEQ ID NO: 467438 - DNA, 120 bp, Artificial Sequence
  ENSG00000158615_9 (sequence is synthesized)
ttcctacctggactgctttcctaggctagaagtcagctatcagaacagtgatggaaatagcgaggtagtcggcttccagacactaaccccagagagcagctgcctgagagaggaccattg

SEQ ID NO: 467439 - DNA, 120 bp, Artificial Sequence
  ENSG00000158615_10 (sequence is synthesized)
tcatccccagccgctgagtgcagaactcattccggcctcgtggcagggatgtccacctctttctacggaaggcctaccagaaattcaccatcttcgcatgaaacggctggaattccttca

SEQ ID NO: 467440 - DNA, 120 bp, Artificial Sequence
  ENSG00000158615_11 (sequence is synthesized)
acaggctagcaaggggcaagatttacccacccctgaccaggataatggctaccacagcctggaggaggaacacagccttctccggatggatccaaaacactgcagagataacccaacaca

SEQ ID NO: 467441 - DNA, 120 bp, Artificial Sequence
  ENSG00000158615_12 (sequence is synthesized)
gtttgttcctgctgctggagacattcctggaaacacccaggaatccactgaagaaaaaatagaattattaactacagaggttccacttgctttggaagaagagagcccttctgagggctg

SEQ ID NO: 467442 - DNA, 120 bp, Artificial Sequence
  ENSG00000158615_13 (sequence is synthesized)
tccatctagtgagatacctatggaaaaggagcctggagagggccgaataagtgtagttgattactcatacctagaaggtgaccttcccatttctgccagaccagcttgtagtaacaaact

SEQ ID NO: 467443 - DNA, 120 bp, Artificial Sequence
  ENSG00000158615_14 (sequence is synthesized)
gatagattatattttgggaggtgcatccagtgacctggaaacaagttctgatccagaaggtgaggattgggatgaggaagctgaggatgatggttttgatagtgatagctcactgtcaga

SEQ ID NO: 467444 - DNA, 120 bp, Artificial Sequence
  ENSG00000158615_15 (sequence is synthesized)
ctcagaccttgaacaagaccctgaagggcttcacctttggaactctttctgcagtgtagatccttataatccccagaactttacagcaacaattcagactgctgccagaattgttcctga

SEQ ID NO: 467445 - DNA, 120 bp, Artificial Sequence
  ENSG00000158615_16 (sequence is synthesized)
agagccttctgattcagagaaggatttgtctggcaagtctgatctagagaattcctcccagtctggaagccttcctgagacccctgagcatagttctggggaggaagatgactgggaatc

SEQ ID NO: 467446 - DNA, 120 bp, Artificial Sequence
  ENSG00000158615_17 (sequence is synthesized)
tagtgcagatgaagcagagagtctcaaactgtggaactcattctgtaattctgatgacccctacaaccctttaaattttaaggctccttttcaaacatcaggggaaaatgagaaaggctg

SEQ ID NO: 467447 - DNA, 120 bp, Artificial Sequence
  ENSG00000158615_18 (sequence is synthesized)
tcgtgactcaaagaccccatctgagtccattgtggccatttctgagtgtcacaccttactttcttgtaaggtgcagctgttggggagccaagaaagtgaatgtccagactcggtacagcg

SEQ ID NO: 467448 - DNA, 120 bp, Artificial Sequence
  ENSG00000158615_19 (sequence is synthesized)
tgacgttctttctggaggaagacacacacatgtcaaaagaaaaaaggtaaccttccttgaagaagttactgagtattatataagtggtgatgaggatcgcaaaggaccatgggaagaatt

SEQ ID NO: 467449 - DNA, 120 bp, Artificial Sequence
  ENSG00000158615_20 (sequence is synthesized)
tgcaagggatggatgcaggttccagaaacgaattcaagaaacagaagatgctattggatattgcttgacatttgaacacagagaaagaatgtttaatagactccagggaacatgcttcaa

SEQ ID NO: 467450 - DNA, 120 bp, Artificial Sequence
  ENSG00000158615_21 (sequence is synthesized)
ggcagctgtcctttgacatttttttttttagaggaaatgtaacttggatctagtttaatttttttttttgcaacatatcccactcagaaacattcaggtttgaagccagccctgataatg

SEQ ID NO: 467451 - DNA, 120 bp, Artificial Sequence
  ENSG00000158615_22 (sequence is synthesized)
aaggatgaactagtgtgatttctaatcctcccttttttgatttagttggatgtgcttttaaatgtcctttgcctgcatgaggtggaaaggggacctttttgagttgtcattttgcacttt

SEQ ID NO: 467452 - DNA, 120 bp, Artificial Sequence
  ENSG00000158615_23 (sequence is synthesized)
caaaacttattttcttggaaaacaatatttatagggcttaaagcccattttcatttctaatctaaattatgtgtgcctatctgaaaactttgggctctttcttgtttctttcccaaaatt

SEQ ID NO: 467453 - DNA, 120 bp, Artificial Sequence
  ENSG00000158615_24 (sequence is synthesized)
cagaagttaatgggcttttatgtttttctatattttttttatttcaatgatttggcctgtctatgttaggctaaaaaataaccttgtgtatgctaccaacttaaagtgcattattttgtg

SEQ ID NO: 467454 - DNA, 120 bp, Artificial Sequence
  ENSG00000158615_25 (sequence is synthesized)
tcacttttttttttcttgtaaaaatgacttggattgaaaatatgtggtagcctttttatttctacattaagttctacctaggatatttccaaggactgccacaaaacccatatgtgcagt

SEQ ID NO: 467455 - DNA, 120 bp, Artificial Sequence
  ENSG00000158615_26 (sequence is synthesized)
actttactactttgggaaagctgcatctttctaccacattttaacatctaatatatttaatttctttgaagagggttctgtgtacgttattgtagttcccagtttaatatagttctttgt

SEQ ID NO: 467456 - DNA, 120 bp, Artificial Sequence
  ENSG00000158615_27 (sequence is synthesized)
atctcttaacaggttgaagttattgcaaaacactctggaaagtaataattacatcataatcatttattttttaaacttaaaagcctagaaatttcctagaaagaaaataggagacatctc

SEQ ID NO: 467457 - DNA, 120 bp, Artificial Sequence
  ENSG00000158615_28 (sequence is synthesized)
agagcaatttggttttggtgtatatgttctcaacagaaaaccagtgttaatgaatatcatgcctcagcactgtcacttttaaaacctgtcaggatcccactgtaaaattggaaatgggca

SEQ ID NO: 467458 - DNA, 120 bp, Artificial Sequence
  ENSG00000158615_29 (sequence is synthesized)
gttctgaattttcacgtttgaaatgtaaaatataaacttcagtcaatatccaggtttattgtgtcctactatttaataatgagagaagtaatggcaaggcctttactttcaggaaaggat

SEQ ID NO: 467459 - DNA, 120 bp, Artificial Sequence
  ENSG00000158615_30 (sequence is synthesized)
agaagtatagattaatgactggaaagttttaatatatttagcccaaaggttactttgaattgaagtctttgcattgactgtttgtgtttggtttatttgtttagctttacaaggtacaca

SEQ ID NO: 467460 - DNA, 120 bp, Artificial Sequence
  ENSG00000158615_31 (sequence is synthesized)
taagttaggttgaggggttgttaacccttccgtggtctgctttcattccgtgtgcttcctgtcacaggtaatggaaaacataagtagaataggtgacctcttagttttgaacttatttaa

SEQ ID NO: 467461 - DNA, 120 bp, Artificial Sequence
  ENSG00000158615_32 (sequence is synthesized)
gtgtggggatgaatttttcatcagaagtgcttacagggttactacctcagtttacaatctacctggtcattattttatttctatccagttctaagaactgcctccactgtttatatattc

SEQ ID NO: 467462 - DNA, 120 bp, Artificial Sequence
  ENSG00000158615_33 (sequence is synthesized)
aagaactgcctccactgtttatatattcataattaaacacattgagaatgcaacactataaaagctggtcaaatttttgcagagcccttattctgtgtgttttttgtttttttctttttt

SEQ ID NO: 467463 - DNA, 70 bp, Artificial Sequence
  ENSG00000158615_34 (sequence is synthesized)
tatgttggccagactggtcttgactgtgtgttttgtgcacctccactttaggtaatcatagggagcacat

SEQ ID NO: 467464 - DNA, 120 bp, Artificial Sequence
  ENSG00000158615_35 (sequence is synthesized)
ttttgtgcacctccactttaggtaatcatagggagcacatttacaggatggtctaataacatgaaaacaggctagtttcaagcaacagcaatgtcggttggaaagcaggcgtcatttgcc

SEQ ID NO: 467465 - DNA, 120 bp, Artificial Sequence
  ENSG00000158615_36 (sequence is synthesized)
ttgaaaaaagccttttgacaacatacaggcattcttttaaaaccaggctgaaacattttatttccgagacttaacgttgtgtttcctgtttcttaaacctagcacctctgtgtatttgaa

SEQ ID NO: 467466 - DNA, 120 bp, Artificial Sequence
  ENSG00000158615_37 (sequence is synthesized)
aataatgagacatctttcattggattttggaaaattgttccccatgggattctaacctcactaccaaatgagtgaaagcttgattaagagttcttccatatactagcctccttggaagaa

SEQ ID NO: 467467 - DNA, 120 bp, Artificial Sequence
  ENSG00000158615_38 (sequence is synthesized)
gtgatcagaaggtgataagaaggacagaaaggactattttaaagttggactgaaggagaaaaaagcaaaattcttgtttcatcccaattctagttagaacaaagttaaacccccgtaatc

SEQ ID NO: 467468 - DNA, 120 bp, Artificial Sequence
  ENSG00000158615_39 (sequence is synthesized)
ttaaagagaaaatctttggaggttttaattaaacattttatacatttaaagtcttgttaatggtgctttaagtgtcaatgtagcatgtaaaaggctttgtacagacaggtaaaagttcca

SEQ ID NO: 467469 - DNA, 120 bp, Artificial Sequence
  ENSG00000158615_40 (sequence is synthesized)
tttctgagtgatgaaatgtaacacttcttcatctttaacttgaaatcaaaactatcagattttatttttgtataatttaaggaaggtaaagttaggggactagaagactctaaattggct

SEQ ID NO: 467470 - DNA, 120 bp, Artificial Sequence
  ENSG00000158615_41 (sequence is synthesized)
taggggactagaagactctaaattggcttctacagatcaataatttaaatgtaactagttgggattttatagttaaaattatatttgtgtatataacataactaatctgtaaattgtaat

SEQ ID NO: 467471 - DNA, 120 bp, Artificial Sequence
  ENSG00000158623_0 (sequence is synthesized)
cttcctgcagcctcttccgctcgccggctgcggcgcctgggacggttgcggtgggtctgggcgctgggaagtcgtccaagatgattaaaaaattcgacaagaaggacgaggagtctggta

SEQ ID NO: 467472 - DNA, 120 bp, Artificial Sequence
  ENSG00000158623_1 (sequence is synthesized)
gtggctccaatcctttccagcatctggagaagagtgctgttttacaggaggctcgtatattcaatgaaactccaatcaatccaagaagatgtttgcatattcttacaaagattctttact

SEQ ID NO: 467473 - DNA, 120 bp, Artificial Sequence
  ENSG00000158623_2 (sequence is synthesized)
tactgaaccagggtgaacactttggaacaacggaagctacagaagccttctttgcaatgacgcgattgtttcaatctaatgatcaaacattgaggagaatgtgctaccttaccatcaaag

SEQ ID NO: 467474 - DNA, 120 bp, Artificial Sequence
  ENSG00000158623_3 (sequence is synthesized)
aaatggctaccatctctgaggatgtgataattgtcacaagcagtctgactaaagacatgactggaaaagaagatgtataccgaggcccggccatcagagctctctgcaggatcaccgatg

SEQ ID NO: 467475 - DNA, 120 bp, Artificial Sequence
  ENSG00000158623_4 (sequence is synthesized)
gaacaatgttgcaagccattgaaagatacatgaagcaggccattgtggataaagtttccagtgtatccagttcagcactggtatcttccctgcacatgatgaagataagctatgatgtgg

SEQ ID NO: 467476 - DNA, 120 bp, Artificial Sequence
  ENSG00000158623_5 (sequence is synthesized)
ttaagcgctggatcaatgaagcccaagaagctgcatcaagtgataatattatggtccagtaccatgcattgggagtcctgtatcaccttagaaagaatgatcgacttgctgtttccaaga

SEQ ID NO: 467477 - DNA, 120 bp, Artificial Sequence
  ENSG00000158623_6 (sequence is synthesized)
tgttgaataagtttactaaatctggtctcaagtcacagtttgcttactgcatgctgatccgaattgccagtcgcttactaaaagaaactgaggatggccatgaaagtccactgtttgatt

SEQ ID NO: 467478 - DNA, 120 bp, Artificial Sequence
  ENSG00000158623_7 (sequence is synthesized)
tcattgagagctgcttgcgaaataaacatgaaatggttatttatgaagctgcttcagctatcatccatcttcctaactgcactgcaagagagttggcacctgctgtttcagttcttcaac

SEQ ID NO: 467479 - DNA, 120 bp, Artificial Sequence
  ENSG00000158623_8 (sequence is synthesized)
ttttctgtagttctcctaagccagccttgagatatgcagctgtgaggaccttgaacaaggtggcaatgaagcacccctctgctgttactgcctgcaatctggacttagaaaacttaatca

SEQ ID NO: 467480 - DNA, 120 bp, Artificial Sequence
  ENSG00000158623_9 (sequence is synthesized)
cagactcaaacagaagcattgctaccttagccattactacactcctcaaaacaggaagtgagagcagtgtggaccggctcatgaagcagatatcttcttttgtgtctgaaatctcagatg

SEQ ID NO: 467481 - DNA, 120 bp, Artificial Sequence
  ENSG00000158623_10 (sequence is synthesized)
agttcaaggtggtggttgtacaggcaattagtgctctctgtcagaaataccctcgaaagcacagtgtcatgatgactttcctctccaacatgctccgagatgatggaggctttgagtaca

SEQ ID NO: 467482 - DNA, 120 bp, Artificial Sequence
  ENSG00000158623_11 (sequence is synthesized)
agcgggccattgtggactgtataatcagcattgtggaagagaaccctgagagtaaagaagcaggcctagcccacctttgtgaattcattgaggactgtgaacacactgttctggctacta

SEQ ID NO: 467483 - DNA, 120 bp, Artificial Sequence
  ENSG00000158623_12 (sequence is synthesized)
agattctacacttgttgggcaaagagggccctagaacgcctgtcccctccaaatatatccgttttatttttaatagggttgtcctggagaatgaggctgtcagagctgctgctgtgagtg

SEQ ID NO: 467484 - DNA, 120 bp, Artificial Sequence
  ENSG00000158623_13 (sequence is synthesized)
ggggctcagaatgagagtcttctcccaagcatccttgtactcttacagaggtgtatgatggatactgatgacgaggtacgagacagagctaccttctatctgaatgtgctgcagcagagg

SEQ ID NO: 467485 - DNA, 120 bp, Artificial Sequence
  ENSG00000158623_14 (sequence is synthesized)
cagatggcactaaatgccacatatatctttaatggtttgacggtctctgtaccagggatggaaaaagccttacaccagtacacgttggagccttcagaaaaaccgtttgacatgaaatca

SEQ ID NO: 467486 - DNA, 120 bp, Artificial Sequence
  ENSG00000158623_15 (sequence is synthesized)
attcctcttgctatggctcctgtctttgaacagaaagcagaaatcacacttgtggctactaagccagagaagttggctccttccaggcaagacattttccaagaacaattggctgccatt

SEQ ID NO: 467487 - DNA, 120 bp, Artificial Sequence
  ENSG00000158623_16 (sequence is synthesized)
cctgagtttctgaatataggacccttgttcaagtcttctgagcctgttcaacttacagaagcagagacagaatattttgttcgatgtatcaagcacatgtttaccaatcacatcgtgttc

SEQ ID NO: 467488 - DNA, 120 bp, Artificial Sequence
  ENSG00000158623_17 (sequence is synthesized)
cagtttgactgcaccaacactctcaatgaccagctgctggaaaaagtgacagtgcagatggagccatcagattcctatgaagtgctgtcttgtatcccagcccccagccttccttataac

SEQ ID NO: 467489 - DNA, 120 bp, Artificial Sequence
  ENSG00000158623_18 (sequence is synthesized)
caaccaggaatatgttacactcttgttcgtttgcctgatgatgaccctacagcagttgcaggctcctttagctgcaccatgaagtttacagtccgggactgtgaccctaacactggagtt

SEQ ID NO: 467490 - DNA, 120 bp, Artificial Sequence
  ENSG00000158623_19 (sequence is synthesized)
ccagatgaggatgggtatgatgatgagtatgtgctggaagatctcgaagtgactgtgtctgaccatattcagaaagtactgaagcctaactttgctgctgcttgggaagaggtgggagat

SEQ ID NO: 467491 - DNA, 120 bp, Artificial Sequence
  ENSG00000158623_20 (sequence is synthesized)
acctttgagaaagaggaaacctttgccctcagttctaccaaaacccttgaagaggctgtcaacaatatcatcacatttctgggcatgcagccatgtgagaggtccgataaagtacctgag

SEQ ID NO: 467492 - DNA, 120 bp, Artificial Sequence
  ENSG00000158623_21 (sequence is synthesized)
aacaagaattcccattcgctctatctggcaggtatattcagaggtggctatgatttattggtgaggtccaggctggccttagccgatggagtgaccatgcaggtgactgtcagaagtaaa

SEQ ID NO: 467493 - DNA, 120 bp, Artificial Sequence
  ENSG00000158623_22 (sequence is synthesized)
gagagaacacctgtagatgttatcttagcttctgttggataaatgcttactggacaagaggaaactgatgcacactacatggtcagtgggcttttaggctagtggcatcagtttcccaga

SEQ ID NO: 467494 - DNA, 120 bp, Artificial Sequence
  ENSG00000158623_23 (sequence is synthesized)
atcagacttttgaagatgaatgactttggagaagcaaattaaacatttggccctgagccagcagatcaagcaaatgtctatctttgcgcatgggttgtttttttttttttttctttttat

SEQ ID NO: 467495 - DNA, 120 bp, Artificial Sequence
  ENSG00000158623_24 (sequence is synthesized)
tctacttggtcagctttgggacgatagtgcagctttgggtgatcttgaaaatcaaatactatcctatactccagctgcttaacttcattttattctttaatgtgtacctgaaagctcctg

SEQ ID NO: 467496 - DNA, 120 bp, Artificial Sequence
  ENSG00000158623_25 (sequence is synthesized)
gcaatgctggaaaatttttatcccagaggggtgggggggaggggggaggggaagccagagtccacttttgtcacaattcatttttattaatagaaaataaacacttattccagtttcaaa

SEQ ID NO: 467497 - DNA, 120 bp, Artificial Sequence
  ENSG00000158623_26 (sequence is synthesized)
cttgtgagctcttcaactcttcaaatgctcagtttaagaatgtgatgcttttctagaatttaatgatgagtgtttgtgtgtgtgtgtttgtgtgtgtgtgaatatatatatttataaaat

SEQ ID NO: 467498 - DNA, 120 bp, Artificial Sequence
  ENSG00000158623_27 (sequence is synthesized)
ggtttactgctgcagaaatattaattttaaaactaaatctctgagtaaaatttgctgaacacttaatcttaaaagagaaactgagtgtgtatagcagtagcacaaaaaggaactcaagct

SEQ ID NO: 467499 - DNA, 120 bp, Artificial Sequence
  ENSG00000158623_28 (sequence is synthesized)
ttctgttggaataatgtgaccacttgtgagagttcatatacctggtctcctgtgaagaatcttgaccctcttctcctcaaagtttctatctagttagatagaacttggttatgtagtaga

SEQ ID NO: 467500 - DNA, 120 bp, Artificial Sequence
  ENSG00000158623_29 (sequence is synthesized)
ttgttggcattttaaaatacatcatttttgaaggtcctgtagcataaggctggtgtctgagagcatgtctcagcctagtgagtagcttagccaaccatgtgtgtccacattaagaagggc

SEQ ID NO: 467501 - DNA, 120 bp, Artificial Sequence
  ENSG00000158623_30 (sequence is synthesized)
ttttaattccctccttgacccatatgcagtctttgcagggtggagaaatagcccctaaaagacagccaactagtgccaatagtagtatttacttatttggagacttgggaaggtgaatgt

SEQ ID NO: 467502 - DNA, 120 bp, Artificial Sequence
  ENSG00000158623_31 (sequence is synthesized)
caagtatttattctacttgattccccccatcatcattttcctccttgatttcttctcttctcatgttcagtgcacaatattcgtaactgttacccagttttcacagaaataagcacacac

SEQ ID NO: 467503 - DNA, 120 bp, Artificial Sequence
  ENSG00000158623_32 (sequence is synthesized)
atcacatttatgttttgaacaacttttactgctcgtaagtacaggagaaacagaagttaaaaaattaacaaatactgggaaagttacagagttacaataaatcataaaagcactagtaaa

SEQ ID NO: 467504 - DNA, 120 bp, Artificial Sequence
  ENSG00000158623_33 (sequence is synthesized)
agaaatccctcatccaccattccagaagtgcctctcaatctgcctgtgcttttaatccctatgcatattgcctctctatttgatatctaaataatggcctataaatatttattggcagcc

SEQ ID NO: 467505 - DNA, 120 bp, Artificial Sequence
  ENSG00000158636_0 (sequence is synthesized)
gtcgccatcttgccccttcagaggcaccgcaaacaaacccaattcctggtgtcccctagtcttggcggaggagccttttagatgagccccgaaaggccgggcagggaggacaagctcttt

SEQ ID NO: 467506 - DNA, 120 bp, Artificial Sequence
  ENSG00000158636_1 (sequence is synthesized)
ggggctaccaaacagaagcagcaatgcctgttgtgtggccaacccttctggatctcagcagggatgaatgcaaaagaattcttcgaaaattggaattggaggcatatgctggagttatca

SEQ ID NO: 467507 - DNA, 120 bp, Artificial Sequence
  ENSG00000158636_2 (sequence is synthesized)
gtgcacttcgggcacagggggatctcaccaaggaaaagaaagatcttcttggagaactatcaaaagttcttagcatctcaacagaacgccaccgtgctgaagttcggagagcagtaaacg

SEQ ID NO: 467508 - DNA, 120 bp, Artificial Sequence
  ENSG00000158636_3 (sequence is synthesized)
atgaacggttaacaacaattgcacataatatgtctggacctaatagctcttcagaatggtccattgaaggtcgtcgattggtaccactgatgccccggctcgttccccaaaccgccttta

SEQ ID NO: 467509 - DNA, 120 bp, Artificial Sequence
  ENSG00000158636_4 (sequence is synthesized)
ctgtaacagctaatgctgttgctaatgcagctatccagcataatgcatctcttccagtgcctgcagaaacaggaagcaaggaagtggtttgctattcctacacaagtaccacgtcaaccc

SEQ ID NO: 467510 - DNA, 120 bp, Artificial Sequence
  ENSG00000158636_5 (sequence is synthesized)
caacctctacccctgttccaagtggcagcatagcaacggttaagtctccaagacctgccagtcctgcctccaatgtagttgtcttgccaagtggaagtactgtttatgtcaaaagtgtaa

SEQ ID NO: 467511 - DNA, 120 bp, Artificial Sequence
  ENSG00000158636_6 (sequence is synthesized)
gctgttcagatgaagatgaaaaacccagaaaacgaaggcgaacaaactcttccagctcctctcctgttgttctaaaggaagttccaaaggccgttgttccagtctcaaagacgatcactg

SEQ ID NO: 467512 - DNA, 120 bp, Artificial Sequence
  ENSG00000158636_7 (sequence is synthesized)
tgcctgtgagtggtagtcccaagatgagcaacatcatgcagagcattgccaactccttaccaccccacatgtctcctgtaaaaataaccttcactaaaccatcaacacagacaacaaaca

SEQ ID NO: 467513 - DNA, 120 bp, Artificial Sequence
  ENSG00000158636_8 (sequence is synthesized)
caacaacacagaaggttattatagtcaccacatcaccaagctcaaccttcgtgcccaacattctctccaaatcccataactatgcagcagtcactaagcttgtaccaacgtcagtcattg

SEQ ID NO: 467514 - DNA, 120 bp, Artificial Sequence
  ENSG00000158636_9 (sequence is synthesized)
cttctacaacccagaagccaccagttgttataactgcttcacagtcctctctggtcagtaatagcagcagtggcagcagcagttctacaccatcacctattcctaatacagttgcagtaa

SEQ ID NO: 467515 - DNA, 120 bp, Artificial Sequence
  ENSG00000158636_10 (sequence is synthesized)
cagctgtggtgtcctctacaccatctgtggtcatgtcaacagtagcacaaggtgtatctacatcagcaatcaaaatggcatcaaccagacttccttcccccaaaagcttagtgagtgccc

SEQ ID NO: 467516 - DNA, 120 bp, Artificial Sequence
  ENSG00000158636_11 (sequence is synthesized)
caactcagattcttgcacagttccctaaacaacatcaacagtctcctaagcagcagttatatcaagtgcaacagcagacacagcaacaagtggcccagccttctccagtatctcatcagc

SEQ ID NO: 467517 - DNA, 120 bp, Artificial Sequence
  ENSG00000158636_12 (sequence is synthesized)
aacagcctcagcagtctcctttgccacctggtattaaacctaccatccaaatcaaacaggagtcaggtgttaaaatcatcacacaacaggttcaaccaagtaaaatcttacccaaaccag

SEQ ID NO: 467518 - DNA, 120 bp, Artificial Sequence
  ENSG00000158636_13 (sequence is synthesized)
tgacagcaactctacccaccagtagcaattcccctattatggtggttagcagtaatggtgcaattatgacaactaaactggtaaccactcctactggcacacaagcaacctatacccggc

SEQ ID NO: 467519 - DNA, 120 bp, Artificial Sequence
  ENSG00000158636_14 (sequence is synthesized)
caacagtgagcccatccattggtcggatggctgcaacccctggagctgcaacctatgtgaaaactacgagtggtagcatcattacagtagtacccaaatcattagctaccttggggggca

SEQ ID NO: 467520 - DNA, 120 bp, Artificial Sequence
  ENSG00000158636_15 (sequence is synthesized)
agataattagcagtaatatagtttctggaacgactaccaaaatcactacaatcccaatgacttccaagcccaacgtgattgttgtacaaaagactacaggaaaaggaacgaccattcaag

SEQ ID NO: 467521 - DNA, 120 bp, Artificial Sequence
  ENSG00000158636_16 (sequence is synthesized)
gcctcccgggcaaaaatgttgtcacaacgttgctaaatgctggaggagaaaagactattcagacagtgccaacaggagcaaagccagctatccttactgctacaagacccatcaccaaaa

SEQ ID NO: 467522 - DNA, 120 bp, Artificial Sequence
  ENSG00000158636_17 (sequence is synthesized)
tgattgtaacgcagccaaaaggaataggttctacagttcaaccagcagctaaaatcatcccaacaaaaattgtttatgggcagcaagggaaaacgcaggttcttattaaacccaaaccag

SEQ ID NO: 467523 - DNA, 120 bp, Artificial Sequence
  ENSG00000158636_18 (sequence is synthesized)
tgacttttcaagcgacagttgttagtgaacaaacaagacagctagtaacagaaacattacagcaagcatccagggtagcagaggctggtaattcatctattcaggaaggaaaagaagaac

SEQ ID NO: 467524 - DNA, 120 bp, Artificial Sequence
  ENSG00000158636_19 (sequence is synthesized)
cacagaattatacagatagtagttcctcttctacagagtcctcccagagttcccaagattcccagcctgtagttcatgtaattgcttcccggcgtcaggattggtcagaacatgagattg

SEQ ID NO: 467525 - DNA, 120 bp, Artificial Sequence
  ENSG00000158636_20 (sequence is synthesized)
caatggagactagccctaccataatttatcaggatgtatccagtgaatcacaatcagctacttcaacaatcaaagctctgttagaactccaacagacaacagtaaaggaaaaattggaat

SEQ ID NO: 467526 - DNA, 120 bp, Artificial Sequence
  ENSG00000158636_21 (sequence is synthesized)
ctaaaccaagacaacccactattgacctgagtcaaatggcagtgcctattcagatgacccaggaaaagagacattctcctgagagtccatcaattgctgtggtagagtcagaactagtag

SEQ ID NO: 467527 - DNA, 120 bp, Artificial Sequence
  ENSG00000158636_22 (sequence is synthesized)
tgctccagcatgtggctcagtcacagaccgcaacacagacttcggtggtggtgaagtccatcccagcatcttcccctggagcaatcacccacattatgcagcaggcattaagcagtcaca

SEQ ID NO: 467528 - DNA, 120 bp, Artificial Sequence
  ENSG00000158636_23 (sequence is synthesized)
ctgcttttaccaaacacagcgaggaacttggaactgaggagggcgaggttgaagagatggacactttagaccctcagacaggtctgttttaccgatctgccctgactcagtcacagtcag

SEQ ID NO: 467529 - DNA, 120 bp, Artificial Sequence
  ENSG00000158636_24 (sequence is synthesized)
ctaaacagcagaaacttagccagcccccgctggaacagactcagctgcaagtgaaaactctgcagtgcttccagactaaacagaagcagaccatccacctgcaggcagaccagctccagc

SEQ ID NO: 467530 - DNA, 120 bp, Artificial Sequence
  ENSG00000158636_25 (sequence is synthesized)
acaaactcccgcaaatgccccagctttccatcaggcatcaaaaactcacccctctccagcaagaacaagcacagcccaagccagatgtacagcacacacagcatcccatggtggccaaag

SEQ ID NO: 467531 - DNA, 120 bp, Artificial Sequence
  ENSG00000158636_26 (sequence is synthesized)
acaggcagcttcctaccttaatggcacagcccccgcaaactgtagtacaggtgcttgcagtgaaaaccacgcagcagctccctaaactgcagcaggctccgaaccaaccaaaaatctacg

SEQ ID NO: 467532 - DNA, 120 bp, Artificial Sequence
  ENSG00000158636_27 (sequence is synthesized)
tgcaaccccaaaccccccagagccaaatgtcgctcccagcttcttcagagaaacagacggcaagccaggtggagcagccaattataacccaaggatcctctgttacaaagataacttttg

SEQ ID NO: 467533 - DNA, 120 bp, Artificial Sequence
  ENSG00000158636_28 (sequence is synthesized)
aggggcgccagcctcccacagttacaaagataactggtggcagttctgtgcctaagctgacatcaccagttacaagcatatctcccattcaggcctctgagaagacagcagtgtctgaca

SEQ ID NO: 467534 - DNA, 120 bp, Artificial Sequence
  ENSG00000158636_29 (sequence is synthesized)
ttttgaaaatgtctttgatggaagctcagattgatacaaatgtagaacatatgatagtggatcccccaaagaaggctcttgccactagcatgctcactggtgaagcaggatcattaccct

SEQ ID NO: 467535 - DNA, 120 bp, Artificial Sequence
  ENSG00000158636_30 (sequence is synthesized)
ccacccacatggtggtggcagggatggcgaattccactccccagcaacagaaatgtagagagtcctgttcgagtccatccactgttggctcttccctaacgacaaggaaaattgatccac

SEQ ID NO: 467536 - DNA, 120 bp, Artificial Sequence
  ENSG00000158636_31 (sequence is synthesized)
cagcagtgcctgcgacaggccagttcatgcgtattcagaatgtaggccaaaagaaagctgaagagagtccagcagaaattatcatccaggctattcctcagtatgctattccttgtcact

SEQ ID NO: 467537 - DNA, 120 bp, Artificial Sequence
  ENSG00000158636_32 (sequence is synthesized)
ccagctccaatgtggtggtggagcccagtgggcttcttgagctaaacaacttcactagtcaacagctggatgatgaggagacagcaatggagcaggacatagacagtagcacggaggatg

SEQ ID NO: 467538 - DNA, 120 bp, Artificial Sequence
  ENSG00000158636_33 (sequence is synthesized)
gaactgaacccagcccttctcagagctctgctgaacggtcctagtgtttggacacaatagtgcactttaaaacctgcttggttaccaagtgtccagggaaacccttgtattttgatgact

SEQ ID NO: 467539 - DNA, 120 bp, Artificial Sequence
  ENSG00000158636_34 (sequence is synthesized)
aaaaagagcactttgcccgtacttaggctgtggaccctaaaacagcagtgtttcaacaagatgttgctgcaggagcagctttttaaaacaagataaaactcacaggggaatgtacttttt

SEQ ID NO: 467540 - DNA, 120 bp, Artificial Sequence
  ENSG00000158636_35 (sequence is synthesized)
taaaaaaaaatgaaaaagaaaaaaaaagctgcacatttacagtgacttaagacctggtcttctttctctgttggatcatggccggtgaaacagttttgtcttgcagtggaaagagacttc

SEQ ID NO: 467541 - DNA, 120 bp, Artificial Sequence
  ENSG00000158636_36 (sequence is synthesized)
ctgtgaatgtttctcaactggtttctactgagcaaaataccatctaaaaggagaatgtgaatagttgtattttgaaatgatgtgtcaggaaaagttttttaaaaacttgtatgtttttgc

SEQ ID NO: 467542 - DNA, 120 bp, Artificial Sequence
  ENSG00000158636_37 (sequence is synthesized)
aaatccctggaagtgttgaattggttaaaattttacattttctcagttcataattagtttataaacacctagaataatactggcattaaagaatccttgttggatggtagaaatcagatc

SEQ ID NO: 467543 - DNA, 120 bp, Artificial Sequence
  ENSG00000158636_38 (sequence is synthesized)
cctaaccagtgggaggtactttttgggtggcttgtgcattcttatcagttgtgtgctaatttattgtattgttcctttgtgctctaagcagcacacttgccttctatttatttaagtgta

SEQ ID NO: 467544 - DNA, 120 bp, Artificial Sequence
  ENSG00000158636_39 (sequence is synthesized)
aacatttcaaagcaggccgtactccttctgacaaatttcttgtaaaccaggattgcctacgctttccactgtcgtcgtctccccactttccctcttcctttaagaaaacttactaaaaaa

SEQ ID NO: 467545 - DNA, 120 bp, Artificial Sequence
  ENSG00000158636_40 (sequence is synthesized)
tgtttcattgcgaagcagaggaaaagaaacgttttcagacctaaaggaaatgtttggtcatgttaagaaaacaaattattcattcatatgatgctttcttaacgttgaaattgcacattc

SEQ ID NO: 467546 - DNA, 120 bp, Artificial Sequence
  ENSG00000158636_41 (sequence is synthesized)
acattggactgagactttgaaaataacttttacatacttttgtttaagcccctttgaaatgtataaaaagttcatttacagttctaaatgtaatgtttttaagccttctatctttttagg

SEQ ID NO: 467547 - DNA, 120 bp, Artificial Sequence
  ENSG00000158636_42 (sequence is synthesized)
acacagtttgtttaagcaatatgttttggtcttgtgatcactgtctgtcacaagtagagtgaaaggggtaagggggtgggagggtaagagttttgacaagttgtggcaaaggaaactata

SEQ ID NO: 467548 - DNA, 120 bp, Artificial Sequence
  ENSG00000158636_43 (sequence is synthesized)
cttttcatttttaaaaatgtaaatagaaaagtttttaacggttttatatagatttcactataaataagcattttaagactgacaaatgttgaactgtacatacatttatcagcataactg

SEQ ID NO: 467549 - DNA, 120 bp, Artificial Sequence
  ENSG00000158636_44 (sequence is synthesized)
cccagtttttttggtgctgaagtactgtaagtagaattcatcaacggtctcctaatttttgcatctacatctggggggaaaaagctgtgatactatagttaataaattcccactagagtg

SEQ ID NO: 467550 - DNA, 120 bp, Artificial Sequence
  ENSG00000158636_45 (sequence is synthesized)
tctggtggttgtcactagttctgctaggtgataatgatttacccatagatggagctgttggatattattttattgtacaaattcatgtttaaaaaactttgtgactgtttctagttaagt

SEQ ID NO: 467551 - DNA, 120 bp, Artificial Sequence
  ENSG00000158636_46 (sequence is synthesized)
aattttttaacctttcttgggtcatagacttctttggtaaactatgaactctcaccaaaaagatacacatgcaacatgttaaatacatgttagactttgcatacaattttaggggctcat

SEQ ID NO: 467552 - DNA, 120 bp, Artificial Sequence
  ENSG00000158636_47 (sequence is synthesized)
gggcctctaagcctatccatgtattccaggttaagccctctgttatgatcaatccattacttacagattaagtttttataaaataaagtatcttttaaatattcatggatcaagtaacaa

SEQ ID NO: 467553 - DNA, 120 bp, Artificial Sequence
  ENSG00000158636_48 (sequence is synthesized)
gagcaaacttgaataaagttatgttctacatattttggcagcatagcatacctgtgtcccttgagaatttagccttcatatgtttctgcaattggaatggcaaataaaagtgctatcatc

SEQ ID NO: 467554 - DNA, 120 bp, Artificial Sequence
  ENSG00000158636_49 (sequence is synthesized)
agtgctatcatctacatttttttaaagaattacaaatattaagaaattatcaagtgaaatttaaaatttttcttttaaaggtgttaattccaaatagagcatgcattcatttatttattc

SEQ ID NO: 467555 - DNA, 120 bp, Artificial Sequence
  ENSG00000158636_50 (sequence is synthesized)
ttgagcatcttctgtatgacaagtagtattctgtgcactggggataccatagtgaacaaacaggaaatcctatccttatgaagtttataaacagggcttcctgctcatgaaatggataca

SEQ ID NO: 467556 - DNA, 120 bp, Artificial Sequence
  ENSG00000158636_51 (sequence is synthesized)
aggaatgaagacaggagaaaataagaacaatacttaggtttttttataaagtggatagatgatgatgccatatatggattttcagacatccctttactgaaagtcttagcattatatcta

SEQ ID NO: 467557 - DNA, 120 bp, Artificial Sequence
  ENSG00000158636_52 (sequence is synthesized)
ttagtattccacatttaagtacataatttaaaagtaatttaaagtcatctctttgaaggatattaacaaattacaatgcaaatgctacagaatttttagaatcctaacaactattaggca

SEQ ID NO: 467558 - DNA, 120 bp, Artificial Sequence
  ENSG00000158636_53 (sequence is synthesized)
gtgataagaaaaatccatttggcttaaagtaaactttaataagtgcctagtattgcagatgcagtttatggtgaacttagaggattaaaaaccaaagggggcttcattgagatattcaca

SEQ ID NO: 467559 - DNA, 120 bp, Artificial Sequence
  ENSG00000158636_54 (sequence is synthesized)
tgccataaactctcccatttaaagtataccgtttaatggttttagtatatccacagagttgggcaagccattaccacaatcaatttgagaacattttcattaatcacaaaagaaatcctg

SEQ ID NO: 467560 - DNA, 120 bp, Artificial Sequence
  ENSG00000158636_55 (sequence is synthesized)
aaatgaaaccaccaccaccatcgctccagccctgggtggccactcctctactttctgcctcttatggatgtgccataagaaatgtggacatttcatataaatgagattatataatatgtg

SEQ ID NO: 467561 - DNA, 120 bp, Artificial Sequence
  ENSG00000158636_56 (sequence is synthesized)
gtcttttgtgacttctttcacttagcgtattttcaaggttcatccgtgttgtagaatgtgtcagtactacatttctttttatggccattccattgtgtgaaatatatcacattttgttta

SEQ ID NO: 467562 - DNA, 120 bp, Artificial Sequence
  ENSG00000158636_57 (sequence is synthesized)
tcaccagtttttttagtcttccagtccatgaacacggtatgtctcttcatttatttaggtctttgactttttcatcagtgttttacagctttcagcatatagattctgtatatgttttgt

SEQ ID NO: 467563 - DNA, 120 bp, Artificial Sequence
  ENSG00000158636_58 (sequence is synthesized)
tagatttgtacctaagcatttcattttcttgtcgtgattataattggtattatgattttaatttcaatgtctacatgttttttgttagtatataaaaatagtattgatcttgtatccttt

SEQ ID NO: 467564 - DNA, 120 bp, Artificial Sequence
  ENSG00000158636_59 (sequence is synthesized)
gaccttgctgaactcacttgttctcagagtatttacatagattccttgggattttctgtgtatgcaactatgtcatctataaatagggacagttttgtttcttcctttccaatcaattgc

SEQ ID NO: 467565 - DNA, 120 bp, Artificial Sequence
  ENSG00000158636_60 (sequence is synthesized)
tgtttatttctttttggtgttttattttattgtctagaacttccaatactatgctgaatgaataagagtgaggaaagtggacatccttgctttgttcctaatcttaaggagaaaacattc

SEQ ID NO: 467566 - DNA, 120 bp, Artificial Sequence
  ENSG00000158636_61 (sequence is synthesized)
agtttttcaccattaagtacaataccagctgtaggctttttatagatgctctttatcaggtagacggagtgcacttctgctactagtttttggggagtttttatcatgaatgagtgttgg

SEQ ID NO: 467567 - DNA, 120 bp, Artificial Sequence
  ENSG00000158636_62 (sequence is synthesized)
attttgtcaagtgctttttctgttcaattaagttttttcttgtttagtctattgatatgctggattatattgattgattttctgttaaaccagccttgcatatttgaaataaatcccact

SEQ ID NO: 467568 - DNA, 120 bp, Artificial Sequence
  ENSG00000158636_63 (sequence is synthesized)
gtcacacagctcatagatgggcagactgtggtcttctgcctcctagttcacaatactacactttctttctgtgatacaagctcacagacatttgtttaaaatgactactggttacagatg

SEQ ID NO: 467569 - DNA, 120 bp, Artificial Sequence
  ENSG00000158636_64 (sequence is synthesized)
tcttcctattgtgtagcagattcctgagtcttttaagtaacaatatctctatactcagggatcctgatcatagcagtaaaagtgatattaactgtttattcagttgggtttttttttgca

SEQ ID NO: 467570 - DNA, 120 bp, Artificial Sequence
  ENSG00000158636_65 (sequence is synthesized)
tttggttaggcaagctttaagtactcaggtcaaatcctgttacaatgtaatctctgtctaactaaaaatcaccacaatttagcagatgattcacttacttgaggccaagttcagtaacaa

SEQ ID NO: 467571 - DNA, 120 bp, Artificial Sequence
  ENSG00000158636_66 (sequence is synthesized)
agtattgtgacccctaaaattgaaagccctttagaggttctttgtaatggtatttgatatgttattaccttataaataggcgttgtaacttttttgatatctgactcattatttcatgta

SEQ ID NO: 467572 - DNA, 120 bp, Artificial Sequence
  ENSG00000158636_67 (sequence is synthesized)
ttttgagattcagaaaaaaatgtaaaatttgtgttctgtctttaagaaatatgaatataacatctcttaatttatttttaaaaagccaaaaaaataaaacgattaaagattcttaccaaa

SEQ ID NO: 467573 - DNA, 120 bp, Artificial Sequence
  ENSG00000158636_68 (sequence is synthesized)
ttcaagaaaagttgtcttatttttcatctacttttattctagtgtttaaaggttatgaaacatagtaggaaactctaattctgaaattagactgccaggtttttagccttagacaaaatt

SEQ ID NO: 467574 - DNA, 120 bp, Artificial Sequence
  ENSG00000158636_69 (sequence is synthesized)
tagtctcccttttgtcgaaggtgtgaattatgttaatcatcaaaattgcaaaaacctcggaatagatttttgatatcagtgtgtcttgttaaaaatgaatagaaggccttaatggatgac

SEQ ID NO: 467575 - DNA, 120 bp, Artificial Sequence
  ENSG00000158636_70 (sequence is synthesized)
attagaaaataaataaggtaacagaagtcatttagctactaaaaaatgattctgaactgatagctttagaaaataaagctgttttcattttctggaatcagtgatatatgctacttcttt

SEQ ID NO: 467576 - DNA, 120 bp, Artificial Sequence
  ENSG00000158636_71 (sequence is synthesized)
gttctggttaatgaatgtgctgaatccattccctggcagaagggttttatcattatttatctagtaattgacacatgctttaaaaatcctccaatgctctagaggccaccaagagtaata

SEQ ID NO: 467577 - DNA, 120 bp, Artificial Sequence
  ENSG00000158636_72 (sequence is synthesized)
ttaaatttgagagagcatatttggattgactcaagtagtttagtttgatgttgcatgacaatgaccctaaaaacaatgcatttgtcaggttactctggggaattgtctttgcttacctag

SEQ ID NO: 467578 - DNA, 120 bp, Artificial Sequence
  ENSG00000158636_73 (sequence is synthesized)
caatggccatggaacagagtaagacactttttttatgcatgacaggctctgttttagggtgagaaaaggtatatttggaggaagacagtgtataaacttggcctccatcgagttcttcca

SEQ ID NO: 467579 - DNA, 120 bp, Artificial Sequence
  ENSG00000158636_74 (sequence is synthesized)
tctactgacgctcaggtagagtggaaagaatacagagtttccactagtcaaatccatgtttgaatcttaatttgtcatttcctagctgtatgacctccagcaagtttgagcttctgtgag

SEQ ID NO: 467580 - DNA, 120 bp, Artificial Sequence
  ENSG00000158636_75 (sequence is synthesized)
ccttgggttcctcatctttaaaatgagaatgtgatgttgtgagaattagtgaagatgtatggaaaggatttagtgtgtggtactcaataaatggtgcctataacctattcttactgttgt

SEQ ID NO: 467581 - DNA, 120 bp, Artificial Sequence
  ENSG00000158636_76 (sequence is synthesized)
tggcaatgactagcgagttgatttatagaaaagaacgtttccttgattgttccctagtggccacattggaaattgctaaggttagggaaaaattatccacccatatcattggtgctgcta

SEQ ID NO: 467582 - DNA, 120 bp, Artificial Sequence
  ENSG00000158636_77 (sequence is synthesized)
ttagtattaaaagggaatacaagtaagtgcctgttgtcccactcctgccatgagtgaaaattattttcattttttctcagtataattttaaactttatttctttgtaactgtgtttttct

SEQ ID NO: 467583 - DNA, 120 bp, Artificial Sequence
  ENSG00000158636_78 (sequence is synthesized)
ccgtcagcaatgtcacctgtagacaagctgttaaatacttgggaaaaatctatttaagtgataattttcaggaaaggttattaatgccttttaatctgtggacctaatacctagtactgg

SEQ ID NO: 467584 - DNA, 120 bp, Artificial Sequence
  ENSG00000158636_79 (sequence is synthesized)
cctctgacttctgatcacatgaaaatgttaaaattggcctgcaataaaaataatttttttgtatgcctggacagttttggtgaaagttaacagcaaacttttttatcgttccttcagtag

SEQ ID NO: 467585 - DNA, 120 bp, Artificial Sequence
  ENSG00000158636_80 (sequence is synthesized)
tggtccactagctgttagtaggttagtttttgaagattttaaagaattcctttctttacatatgactaggtatatattgcttttttaatcagttctggggtttcagaagtgacttcattt

SEQ ID NO: 467586 - DNA, 120 bp, Artificial Sequence
  ENSG00000158636_81 (sequence is synthesized)
tcattgtctgtgggtaatctgcctttgaactgtgttatccttaagaattcacttttttgattgtcatgaaatagaaatattgtgaatagaaactgaaggaatgtgcttatgtaatttatt

SEQ ID NO: 467587 - DNA, 120 bp, Artificial Sequence
  ENSG00000158636_82 (sequence is synthesized)
atttctcctataattttaatctttgtagtattttcttagattattttatataatgtattatccagctgttatattcagtgaaacattctagagagcctatctttatttctaattgactgt

SEQ ID NO: 467588 - DNA, 120 bp, Artificial Sequence
  ENSG00000158636_83 (sequence is synthesized)
ctgtaatttttgaagtttcttttgtttgtagtttttaattccttgattctaccctatgaagcagtttggtgtcctgttcatttttttttcatttttttgtttttaatttctgttaagaca

SEQ ID NO: 467589 - DNA, 120 bp, Artificial Sequence
  ENSG00000158636_84 (sequence is synthesized)
ttttttgtttttaatttctgttaagacaatgttgctttatatatacattttgtaatttataaagaaaaggggccgggcacggtggctcacgcgtgtaatcctagcactttgggaggccga

SEQ ID NO: 467590 - DNA, 120 bp, Artificial Sequence
  ENSG00000158636_85 (sequence is synthesized)
taaagaattactgagtccaggctaccccttagaagttgtattttatctccctctctccttgcaaggctattcctcagtatgctattccttgtcactccagctccaatgtggtggtggagc

SEQ ID NO: 467591 - DNA, 120 bp, Artificial Sequence
  ENSG00000158636_86 (sequence is synthesized)
agttcctcttctacagagtcctcccagagttcccaagatgctgtggtgatttctggagaaatatcatcacctcctctattttcagtcagccatcgctcccagccccaacagccttcccag

SEQ ID NO: 467592 - DNA, 120 bp, Artificial Sequence
  ENSG00000158636_87 (sequence is synthesized)
aaaaaaaaaacttacttcattgaaggattatatttgatctcaattttttgcttagaaatctaaagctttgttttagtccttatgtttcatgattaaataaagtttttagttttaatattc

SEQ ID NO: 467593 - DNA, 120 bp, Artificial Sequence
  ENSG00000158636_88 (sequence is synthesized)
aatattcacatataaagcttttgatagttttaaaatggaaagaacctttagttgcttttagtcagagtggaaagattatagtttaaatttgcatagagatttttcatttgcaaagtatcc

SEQ ID NO: 467594 - DNA, 120 bp, Artificial Sequence
  ENSG00000158636_89 (sequence is synthesized)
ttctatttgtcaacctattcagaccccataacaactctgaggtggttgctattgtgctgaatttacaaatgaagatagatttggctttagagagatcaaattgacctgtccaagaccaat

SEQ ID NO: 467595 - DNA, 120 bp, Artificial Sequence
  ENSG00000158636_90 (sequence is synthesized)
tagagttagaaagtggaagaactcttatttgttctgaatatgttttagggaacatatctcataatttcaattactgatgtcactttagtttattaaaaataaaaatatttgaatacttta

SEQ ID NO: 467596 - DNA, 120 bp, Artificial Sequence
  ENSG00000158639_0 (sequence is synthesized)
aggcagagctctgcaaggagaggttgtgtcttcgttctttccgccatcttcgttctttccaacatcttcgttctttctcactgaccgagactcagccggtaggtctgcagagtggtcttc

SEQ ID NO: 467597 - DNA, 120 bp, Artificial Sequence
  ENSG00000158639_1 (sequence is synthesized)
ctggtaatttagttgtgagtgaatgtgtggaggagccagcgggcttaggacaggtcccgtggcacagtccgtggctttgagggaaaagggcctcgcggtggtcctccgccttcccccagg

SEQ ID NO: 467598 - DNA, 120 bp, Artificial Sequence
  ENSG00000158639_2 (sequence is synthesized)
tcctgatgcaggcgccatgggccggtaatcgtggctgggctggaacgagggaggaagtgagagatatgagtgagcatgtaacaagatcccaatcctcagaaagaggaaatgaccaagagt

SEQ ID NO: 467599 - DNA, 120 bp, Artificial Sequence
  ENSG00000158639_3 (sequence is synthesized)
tgattgtccagcagcccactgaggaaaaacgtcaagaagaggaaccaccaactgataatcagggtattgcacctagtggggagatcaaaaatgaaggagcacctgctgttcaagggactg

SEQ ID NO: 467600 - DNA, 120 bp, Artificial Sequence
  ENSG00000158639_4 (sequence is synthesized)
atgtggaagcttttcaacaggaactggctctgcttaagatagaggatgcacctggagatggtcctgatgtcagggaggggactctgcccacttttgatcccactaaagtgctggaagcag

SEQ ID NO: 467601 - DNA, 120 bp, Artificial Sequence
  ENSG00000158639_5 (sequence is synthesized)
gtgaagggcaactataggtttaaaccaagacaaatgaagactgaaaccaagaatattgttcttatgctggaaatttgactgctaacattctcttaataaagttttacagttttctgcaaa

SEQ ID NO: 467602 - DNA, 120 bp, Artificial Sequence
  ENSG00000158639_6 (sequence is synthesized)
gcagagctctgcaaggagaggttgtgtcttcgttctttccgccatcttcgttctttccaacatcttcgttctttctcactgaccgagactcagccgtgagagatatgagtgagcatgtaa

SEQ ID NO: 467603 - DNA, 120 bp, Artificial Sequence
  ENSG00000158669_0 (sequence is synthesized)
gcagcttgggcccgcggcggcggcaagggcgggagggagcggtcgccgcgggatttggagctgcctagcctcgcggtcgctttggcagcatgtaagcagctgtttgccaagaacccaggt

SEQ ID NO: 467604 - DNA, 120 bp, Artificial Sequence
  ENSG00000158669_1 (sequence is synthesized)
cactgctaagaaagggtgccttcgggagaagagtgtccagaggataccaatgccagatgcatctggagttacactcagcactcgcagtatgagacattgtgtgccagcatctctttcctt

SEQ ID NO: 467605 - DNA, 120 bp, Artificial Sequence
  ENSG00000158669_2 (sequence is synthesized)
ctggcaaagactgtagctctccaggtaggaggatcctggaagctgtgagcaccaggagccttgccagaggaggatggggccagatatgaactctctaccatgaacatggttctcggctta

SEQ ID NO: 467606 - DNA, 120 bp, Artificial Sequence
  ENSG00000158669_3 (sequence is synthesized)
tgaaggaattttaagtaaaacagttatttaatttccacatattcaagtcaaaagccttctgtgtgaagtgccagtgattacccctccacaggagttatcaggatttttctggcaccaagt

SEQ ID NO: 467607 - DNA, 120 bp, Artificial Sequence
  ENSG00000158669_4 (sequence is synthesized)
ttaattcttcttcgtacttctggtagtgacagatctgcaggacagatttatctgttgaatgctcttgggcaggaaaaccatgtaaaacctctggaagcagcatcaggacagcagagcaga

SEQ ID NO: 467608 - DNA, 120 bp, Artificial Sequence
  ENSG00000158669_5 (sequence is synthesized)
gcccccgtcctcactgctcacttgcacagaaactccatctggactcggatgcttttactgaagacccatctagcttcaatcatctttagagtccatccattctggagagacctggcgttt

SEQ ID NO: 467609 - DNA, 120 bp, Artificial Sequence
  ENSG00000158669_6 (sequence is synthesized)
gcagttgcctcctgtggccgtgtttttctgtcattctgttcccaggccttctattcaggcggttgaagggtgtggactttggaatggggtttgctgttcttcgggaacttgcttcctttc

SEQ ID NO: 467610 - DNA, 120 bp, Artificial Sequence
  ENSG00000158669_7 (sequence is synthesized)
cctggctggtgctgtcaggaaggaccatctgaaggctgcaatttgttcttagggaggcaggtgctggcctggcctggatcttccaccatgttcctgttgctgccttttgatagcctgatt

SEQ ID NO: 467611 - DNA, 120 bp, Artificial Sequence
  ENSG00000158669_8 (sequence is synthesized)
gtcaaccttctgggcatctccctgactgtcctcttcaccctccttctcgttttcatcatagtgccagccatttttggagtctcctttggtatccgcaaactctacatgaaaagtctgtta

SEQ ID NO: 467612 - DNA, 120 bp, Artificial Sequence
  ENSG00000158669_9 (sequence is synthesized)
aaaatctttgcgtgggctaccttgagaatggagcgaggagccaaggagaagaaccaccagctttacaagccctacaccaacggaatcattgcaaaggatcccacttcactagaagaagag

SEQ ID NO: 467613 - DNA, 120 bp, Artificial Sequence
  ENSG00000158669_10 (sequence is synthesized)
atcaaagagattcgtcgaagtggtagtagtaaggctctggacaacactccagagttcgagctctctgacattttctacttttgccggaaaggaatggagaccattatggatgatgaggtg

SEQ ID NO: 467614 - DNA, 120 bp, Artificial Sequence
  ENSG00000158669_11 (sequence is synthesized)
acaaagagattctcagcagaagaactggagtcctggaacctgctgagcagaaccaattataacttccagtacatcagccttcggctcacggtcctgtgggggttaggagtgctgattcgg

SEQ ID NO: 467615 - DNA, 120 bp, Artificial Sequence
  ENSG00000158669_12 (sequence is synthesized)
tactgctttctgctgccgctcaggatagcactggctttcacagggattagccttctggtggtgggcacaactgtggtgggatacttgccaaatgggaggtttaaggagttcatgagtaaa

SEQ ID NO: 467616 - DNA, 120 bp, Artificial Sequence
  ENSG00000158669_13 (sequence is synthesized)
catgttcacttaatgtgttaccggatctgcgtgcgagcgctgacagccatcatcacctaccatgacagggaaaacagaccaagaaatggtggcatctgtgtggccaatcatacctcaccg

SEQ ID NO: 467617 - DNA, 120 bp, Artificial Sequence
  ENSG00000158669_14 (sequence is synthesized)
atcgatgtgatcatcttggccagcgatggctattatgccatggtgggtcaagtgcacgggggactcatgggtgtgattcagagagccatggtgaaggcctgcccacacgtctggtttgag

SEQ ID NO: 467618 - DNA, 120 bp, Artificial Sequence
  ENSG00000158669_15 (sequence is synthesized)
cgctcggaagtgaaggatcgccacctggtggctaagagactgactgaacatgtgcaagataaaagcaagctgcctatcctcatcttcccagaaggaacctgcatcaataatacatcggtg

SEQ ID NO: 467619 - DNA, 120 bp, Artificial Sequence
  ENSG00000158669_16 (sequence is synthesized)
atgatgttcaaaaagggaagttttgaaattggagccacagtttaccctgttgctatcaagtatgaccctcaatttggcgatgccttctggaacagcagcaaatacgggatggtgacgtac

SEQ ID NO: 467620 - DNA, 120 bp, Artificial Sequence
  ENSG00000158669_17 (sequence is synthesized)
ctgctgcgaatgatgaccagctgggccattgtctgcagcgtgtggtacctgcctcccatgactagagaggcagatgaagatgctgtccagtttgcgaatagggtgaaatctgccattgcc

SEQ ID NO: 467621 - DNA, 120 bp, Artificial Sequence
  ENSG00000158669_18 (sequence is synthesized)
aggcagggaggacttgtggacctgctgtgggatgggggcctgaagagggagaaggtgaaggacacgttcaaggaggagcagcagaagctgtacagcaagatgatcgtggggaaccacaag

SEQ ID NO: 467622 - DNA, 120 bp, Artificial Sequence
  ENSG00000158669_19 (sequence is synthesized)
gacaggagccgctcctgagcctgcctccagctggctggggccaccgtgcggggtgccaacgggctcagagctggagttgccgccgccgcccccactgctgtgtcctttccagactccagg

SEQ ID NO: 467623 - DNA, 120 bp, Artificial Sequence
  ENSG00000158669_20 (sequence is synthesized)
gctccccgggctgctctggatcccaggactccggctttcgccgagccgcagcgggatccctgtgcacccggcgcagcctacccttggtggtctaaacggatgctgctgggtgttgcgacc

SEQ ID NO: 467624 - DNA, 120 bp, Artificial Sequence
  ENSG00000158669_21 (sequence is synthesized)
caggacgagatgccttgtttcttttacaataagtcgttggaggaatgccattaaagtgaactccccacctttgcacgctgtgcgggctgagtggttggggagatgtggccatggtcttgt

SEQ ID NO: 467625 - DNA, 120 bp, Artificial Sequence
  ENSG00000158669_22 (sequence is synthesized)
gctagagatggcggtacaagagtctgttatgcaagcccgtgtgccagggatgtgctgggggcggccacccgctctccaggaaaggcacagctgaggcactgtggctggcttcggcctcaa

SEQ ID NO: 467626 - DNA, 120 bp, Artificial Sequence
  ENSG00000158669_23 (sequence is synthesized)
catcgcccccagccttggagctctgcagacatgataggaaggaaactgtcatctgcaggggctttcagcaaaatgaagggttagatttttatgctgctgctgatggggttactaaaggga

SEQ ID NO: 467627 - DNA, 120 bp, Artificial Sequence
  ENSG00000158669_24 (sequence is synthesized)
ggggaagaggccaggtgggccgctgactgggccatggggagaacgtgtgttcgtactccaggctaaccctgaactccccatgtgatgcgcgctttgttgaatgtgtgtctcggtttcccc

SEQ ID NO: 467628 - DNA, 120 bp, Artificial Sequence
  ENSG00000158669_25 (sequence is synthesized)
atctgtaatatgagtcggggggaatggtggtgattcctacctcacagggctgttgtggggattaaagtgctgcgggtgagtgaaggacacatcacgttcagtgtttcaagtacaggccca

SEQ ID NO: 467629 - DNA, 120 bp, Artificial Sequence
  ENSG00000158669_26 (sequence is synthesized)
cttgtgagtaaataaaactggctggtgaatgaactgggggacttctccctttactttctcccctggctgtggccctgagtagcaggcttctcgtgaggattcccgttctcttctgggagc

SEQ ID NO: 467630 - DNA, 120 bp, Artificial Sequence
  ENSG00000158669_27 (sequence is synthesized)
atggccctggggctgcggagaagccaactgactgctggagcgaggaaccctgcagctcagaaggtgaacagctcgtctcagatgcttgcagatctttggttaatttagaatttccagcac

SEQ ID NO: 467631 - DNA, 120 bp, Artificial Sequence
  ENSG00000158669_28 (sequence is synthesized)
agacgtggatttctccagagacggggtgtgtgcgggtcgctgatgtgaggcctaggggaagcaatgagtaaactccagggtgggggaggagcaagggcccggggagggctgcagaggggc

SEQ ID NO: 467632 - DNA, 120 bp, Artificial Sequence
  ENSG00000158669_29 (sequence is synthesized)
cggggcggggcagggcctgtgctgcatggtggcttctgcaggggagggacaggggagggctgcagaggggcagggtgggcagggcatgtgctgcatggcagcttctgcacagccagagca

SEQ ID NO: 467633 - DNA, 120 bp, Artificial Sequence
  ENSG00000158669_30 (sequence is synthesized)
ggcaccacaggaaaagagtcggccactggtgcctgctgtacagtcacagtggaggcagagccaaggccaagcagcccctgtgggttctggggtttcaccagtttcatgctcctcagctcc

SEQ ID NO: 467634 - DNA, 120 bp, Artificial Sequence
  ENSG00000158669_31 (sequence is synthesized)
ccattcatgccccaccagccctcacttgggacccatgctccctcgtggcacagtcatgatgcctctcaggattttgtgcctgtggtgctgagtgtcacgtccccaaggtcgccctctggc

SEQ ID NO: 467635 - DNA, 120 bp, Artificial Sequence
  ENSG00000158669_32 (sequence is synthesized)
ctgcagttcagggagtgggtgggagtgaagctgtgctcctggggctgcagacagatccactttgcatgtggtacctgctgggttggccctgcaatctccttttctctgcacctacctgtg

SEQ ID NO: 467636 - DNA, 120 bp, Artificial Sequence
  ENSG00000158669_33 (sequence is synthesized)
acctccctgggagagcctcccatttcctcacctgccctgttgccagcccgggggaaatctttttgctctcaaatgaagactgaaaaaataaagtcagtgttatgactaataagtctctta

SEQ ID NO: 467637 - DNA, 120 bp, Artificial Sequence
  ENSG00000158669_34 (sequence is synthesized)
ggaactgttttacaaaatgcttaagaataaaaagtgattttcagcttttataggtgatgtttacagtgtttgtaaaccaactggagggatcagtaattggtcttaaaagatcaggttctc

SEQ ID NO: 467638 - DNA, 120 bp, Artificial Sequence
  ENSG00000158669_35 (sequence is synthesized)
ttttaaaaagttcatctgaaactttatggtttgttactttcgtgatttgcataggtatttatatatacacacacacacaggttttgcttttgtctcacattcagcacagctgtctgcggc

SEQ ID NO: 467639 - DNA, 120 bp, Artificial Sequence
  ENSG00000158669_36 (sequence is synthesized)
ccctgccggcaggtgtggccgcacctggtgtgaagtcacgtggagtcagtgctgtggagggaagtcctgtgcgggccgggcagtgaggagagcactgattcacgcctgcagaaacgtaac

SEQ ID NO: 467640 - DNA, 120 bp, Artificial Sequence
  ENSG00000158669_37 (sequence is synthesized)
ctcccctttccgtgtatgccttttaccatcatccaggcgactgctccatccttttaaattaggggtcctgcaagccccaagtgacccatagtcagagtatctggtttggggtaaccgagt

SEQ ID NO: 467641 - DNA, 120 bp, Artificial Sequence
  ENSG00000158669_38 (sequence is synthesized)
tggtcttatggggcaaaaactcaagacacttagaaacatgcaaagtacaaaataatgtgttccctcctgttaccccagcaagggtggggctgagctgggaatgacacccagtggtgtaat

SEQ ID NO: 467642 - DNA, 120 bp, Artificial Sequence
  ENSG00000158669_39 (sequence is synthesized)
gagtggaaagtgctggtcagctgctaacccccctccaagcctgctgcaccttcacttctctgcatccgtctcctgagtcataactagggacttggctagatgacctcagagacctcgtcc

SEQ ID NO: 467643 - DNA, 120 bp, Artificial Sequence
  ENSG00000158669_40 (sequence is synthesized)
acctctgaattctctgtttttaagcccatagttcaaactttggctttgatctctgaagtcttctgggtttggaaatacgggaagtcagctttgaatccattgcttctctaaaacatcagg

SEQ ID NO: 467644 - DNA, 120 bp, Artificial Sequence
  ENSG00000158669_41 (sequence is synthesized)
gctagtggaactaacccacttgagggtgacctcaagggctttaggcagccatggggctggggccatactgctctcaggctgggcagtatcttcattgtggttctcagacagcctttttta

SEQ ID NO: 467645 - DNA, 120 bp, Artificial Sequence
  ENSG00000158669_42 (sequence is synthesized)
agtatcttcattgtggttctcagacagccttttttactcaaacatgagactttccacccaccagttagggaactttttttttttttttaaacacggagtttcactcttgttgcccatgct

SEQ ID NO: 467646 - DNA, 65 bp, Artificial Sequence
  ENSG00000158669_43 (sequence is synthesized)
tctagggaactttttaataaagctagtgggattcccttgacagcagaaccagccttgggacttga

SEQ ID NO: 467647 - DNA, 120 bp, Artificial Sequence
  ENSG00000158669_44 (sequence is synthesized)
gtgggattcccttgacagcagaaccagccttgggacttgatgcttcaccgtgtcagaatccgtccctggtgctgcctttcagagaagaggcttgatgtgtgaggggtcagggggagtgct

SEQ ID NO: 467648 - DNA, 120 bp, Artificial Sequence
  ENSG00000158669_45 (sequence is synthesized)
ccagatccctgaaatgcccttcccagaccagtgacaggcatttttgggtgccatcgtgtgaccttcacggcacagcaaacagtgggcactaaccctgttgtcctgtggaaatctgggtct

SEQ ID NO: 467649 - DNA, 120 bp, Artificial Sequence
  ENSG00000158669_46 (sequence is synthesized)
ctgaatcctgccatttccttcctggaattggccaggaacttgattttctgggctattgcttgctagtgtcccctgatgcatgaaggatccccccatgtcataggtcccacctgcctgctg

SEQ ID NO: 467650 - DNA, 120 bp, Artificial Sequence
  ENSG00000158669_47 (sequence is synthesized)
tgcatcccgggtggccagactcggcttctccaggtgcacttgtcccaggtggcccggtccgtaggctggaagggcagctgcaggtgcactgcctcgcggacaggttaggatatggccacg

SEQ ID NO: 467651 - DNA, 120 bp, Artificial Sequence
  ENSG00000158669_48 (sequence is synthesized)
cagccatccatcttctacagcacgcacaccccactctctcccccagtcaatatgtctctctccgatgggaaagttaataaattttgctctagattaaaagtattgatcatttcatttgta

SEQ ID NO: 467652 - DNA, 120 bp, Artificial Sequence
  ENSG00000158669_49 (sequence is synthesized)
aacgataaataaaaagggggaacttttcattgcgccaggggtggcacctggcgtgtgttgcgggggtgattgcgctggctgccggggggtgggcttctcatatgcattctggccggccag

SEQ ID NO: 467653 - DNA, 120 bp, Artificial Sequence
  ENSG00000158669_50 (sequence is synthesized)
ctgcattgatttcctattagtctcccagcaccacccagtaacacatcatttcagtacctgctattaatggtcttttgataaataatcacttgtaagtcaataaatttttattaaacagtg

SEQ ID NO: 467654 - DNA, 120 bp, Artificial Sequence
  ENSG00000158669_51 (sequence is synthesized)
gcacgtcctgacgcagcttgggcccgcggcggcggcaagggcgggagggagcggtcgccgcgggatttggagctgcctagcctcgcggtcgcttcaagagatggttccgttgctttgggg

SEQ ID NO: 467655 - DNA, 120 bp, Artificial Sequence
  ENSG00000158669_52 (sequence is synthesized)
tgaacttggtaccagtgccgtgttacttatccagttctaactcaagaaagttctggagggcataatgatcttagataagaccaaggccccgaacctgaccatgttctgtcttctctcttt

SEQ ID NO: 467656 - DNA, 120 bp, Artificial Sequence
  ENSG00000158669_53 (sequence is synthesized)
attgacttcacttacatgtcattccccgtggtgtggagaattaaacttgtcagctctagagagagcagtttgactctccccgaattccaacccagaagtgccctgtgcttccttgacctt

SEQ ID NO: 467657 - DNA, 120 bp, Artificial Sequence
  ENSG00000158669_54 (sequence is synthesized)
ggggaacctggatcagggatgcctggactgaggcagttgattctgtgtacctttctggggtttgaaccagtcttccaggacacctggacagtgcccatctctgggtgggcatgacctgct

SEQ ID NO: 467658 - DNA, 120 bp, Artificial Sequence
  ENSG00000158669_55 (sequence is synthesized)
gcgatcctcctgctttggcctcccaaaacgctgggattactggcgtgaactaccatactctgccctttattcttacagagattttgaggtctaagaatgtggactttaaagatttcatta

SEQ ID NO: 467659 - DNA, 120 bp, Artificial Sequence
  ENSG00000158669_56 (sequence is synthesized)
tttaaagatttcattatcagattatgcatttagcacggaatgacaatctgacagccgtgtacagcgtaaaccggcggagagggcttggcactaaaggcaaactgtcttttaagaacagga

SEQ ID NO: 467660 - DNA, 120 bp, Artificial Sequence
  ENSG00000158669_57 (sequence is synthesized)
attctttcctgaagcttgcctctcaggtacaggggcagtattgatctttcagcttctctgcaccatgtgctgctctgagtgtgccttgccagatgctaataccttcaagctccacctcct

SEQ ID NO: 467661 - DNA, 120 bp, Artificial Sequence
  ENSG00000158669_58 (sequence is synthesized)
gttgcttcagagggaagctgtgcttccaccggggtttccagccaaagggaaggggagggcagcagggagcagccctgtggcagaatggccagcttagggttttccagccttccagctgcc

SEQ ID NO: 467662 - DNA, 120 bp, Artificial Sequence
  ENSG00000158669_59 (sequence is synthesized)
tgaggcctcaggagatgcaggcagctgagagccagacccatggctcactgtcagctggaatcaaaaggatctctggttctgataggcctgcttacatttctaggtgaactctggtccagg

SEQ ID NO: 467663 - DNA, 120 bp, Artificial Sequence
  ENSG00000158669_60 (sequence is synthesized)
tcccaggtgagcaggtcttgggggtggtttttgtgatgccccctttgattttcacaccttcagttctgtacttggtagaatgatttgctggctgtgctctaacttttcttcttcttacag

SEQ ID NO: 467664 - DNA, 80 bp, Artificial Sequence
  ENSG00000158669_61 (sequence is synthesized)
aggaggcaccatcgccgcgccccggggatccccggcgggtggagcgggtgccccccgtccgggatggaacggtccgcgcc

SEQ ID NO: 467665 - DNA, 120 bp, Artificial Sequence
  ENSG00000158669_62 (sequence is synthesized)
tggagaggggcttccacagtactcatgcaaggtcagggagcagcaccccagtaccagcacggcccagtggagtcactcacagcagtcactgtggactcgcaaacgttgtgagaactactc

SEQ ID NO: 467666 - DNA, 120 bp, Artificial Sequence
  ENSG00000158683_0 (sequence is synthesized)
ggaagaagctggtctgctgactgtcatacttgtgaccagcttgcacaggacatggccgaggaggcagcccagaacatttctgatgaccaggaaaggtgtctccaggctgcctgctgcctt

SEQ ID NO: 467667 - DNA, 120 bp, Artificial Sequence
  ENSG00000158683_1 (sequence is synthesized)
tcctttggtggtgagctgtctgtgagcactgacaagagctggggtcttcatctgtgcagctgtagccctcctggaggtggattgtgggtcgaggtctatgctaatcatgtgcttcttatg

SEQ ID NO: 467668 - DNA, 120 bp, Artificial Sequence
  ENSG00000158683_2 (sequence is synthesized)
agtgatgggaagtgtggctgtccttggtgtgctctgaatggaaaggcagaagaccgggaatcacagagcccatcctcatcagcttccaggcagaagaacatttggaaaacaactagtgaa

SEQ ID NO: 467669 - DNA, 120 bp, Artificial Sequence
  ENSG00000158683_3 (sequence is synthesized)
gcagcgttaagtgttgttaatgaaaaaacacaggctgttgttaatgaaaaaacacaggcgcctctggattgtgataacagtgctgatagaattccccacaaacctttcattataatcgca

SEQ ID NO: 467670 - DNA, 120 bp, Artificial Sequence
  ENSG00000158683_4 (sequence is synthesized)
agggcctggagcagtggtggccccaggttccatcacaggcggctgtgtgctactgggaccgcagacagcacattctctgctcttctccagctccagggcaccacttctgcagcagctccc

SEQ ID NO: 467671 - DNA, 120 bp, Artificial Sequence
  ENSG00000158683_5 (sequence is synthesized)
tgcagcctgaagatggaggcttcctgctgtgtcctgagactgctgtgctgtgcggaggatgtggccacggggctgcttcctgggactgtcacgatggagacccccaccaaggtggccaga

SEQ ID NO: 467672 - DNA, 120 bp, Artificial Sequence
  ENSG00000158683_6 (sequence is synthesized)
cccactcagaccagctcccagcgagtgcccctgtggccgatttcacattttcccacttctcccagaagctcccacggccttccgcctggcattcctcgcacccccagcttcacggcatcg

SEQ ID NO: 467673 - DNA, 120 bp, Artificial Sequence
  ENSG00000158683_7 (sequence is synthesized)
cagtctggttctgagatcctctatccccctactcagcatcctcctgtggccatcctagctcgaaattctgataacttcatgaaccctgttcttaattgctccctggaagtggaagctcgg

SEQ ID NO: 467674 - DNA, 120 bp, Artificial Sequence
  ENSG00000158683_8 (sequence is synthesized)
gcacctccaaatctgggattccgtgttcatatggcttctggagaggctctctgtctgatgatggatttcggggacagttctggggttgaaatgaggctacacaacatgtctgaggcaatg

SEQ ID NO: 467675 - DNA, 120 bp, Artificial Sequence
  ENSG00000158683_9 (sequence is synthesized)
gcggtgactgcctaccaccagtactcaaaaggtattttttttcatcttttacattttcagttggatatgtccacctacaaagaagcagagacacaaaatacaactttaaatgtttacttg

SEQ ID NO: 467676 - DNA, 120 bp, Artificial Sequence
  ENSG00000158683_10 (sequence is synthesized)
tgccaaagtgaaaacagctgcctggaagactcagaccccagtaaccttggatatgagcttatttctgcctttgtcaccaaaggagtctatatgctcaaggctgttatttataacgagttt

SEQ ID NO: 467677 - DNA, 120 bp, Artificial Sequence
  ENSG00000158683_11 (sequence is synthesized)
catggaaccgaagtggagcttgggccttattatgtggagattggccatgaggccgtgtctgcgttcatgaactccagcagtgtccatgaagatgaagtgcttgtctttgctgactcccaa

SEQ ID NO: 467678 - DNA, 120 bp, Artificial Sequence
  ENSG00000158683_12 (sequence is synthesized)
gtgaatcagaaaagcactgtggttatacatcactttccatctattccttcatataacgtgtcctttatttctcagactcaagtgggtgacagccaggcttggcacagcatgactgtctgg

SEQ ID NO: 467679 - DNA, 120 bp, Artificial Sequence
  ENSG00000158683_13 (sequence is synthesized)
tataagatgcaatccgtctctgtctacacaaatggaactgtgtttgccacagacacagacattacatttacagctgttaccaaggaaacaatacccctggaatttgagtggtattttgga

SEQ ID NO: 467680 - DNA, 120 bp, Artificial Sequence
  ENSG00000158683_14 (sequence is synthesized)
gaggatccaccagtgaggacaacttcaagaagcattaaaaaaagactcagcatcccccaatggtatcgtgtgatggttaaggcttccaacaggatgagcagtgtggtctctgagccccat

SEQ ID NO: 467681 - DNA, 120 bp, Artificial Sequence
  ENSG00000158683_15 (sequence is synthesized)
gtcatcagggtgcagaagaaaattgtggccaatcggctcacgtccccctcctcagctctggtaaatgccagtgtggcctttgagtgctggatcaacttcggcacagatgttgcctacctg

SEQ ID NO: 467682 - DNA, 120 bp, Artificial Sequence
  ENSG00000158683_16 (sequence is synthesized)
tgggactttggggatggcaccgtcagcctggggagcagctccagcagccatgtctacagtagggaaggagaatttacagtggaggtccttgccttcaataatgtcagtgcctccactcta

SEQ ID NO: 467683 - DNA, 120 bp, Artificial Sequence
  ENSG00000158683_17 (sequence is synthesized)
agacagcaacttttcatcgtgtgcgagccctgccagccacccctggtgaagaacatggggcctgggaaagtccagatatggaggtctcagcctgtgaggctgggagtgacgtttgaagct

SEQ ID NO: 467684 - DNA, 120 bp, Artificial Sequence
  ENSG00000158683_18 (sequence is synthesized)
gcagtcttctgtgatatttcccaaggtctttcttacacctggaacttgatggactctgaagggctccctgtctccctccctgctgctgtggacactcacagacagaccctcatcctcccg

SEQ ID NO: 467685 - DNA, 120 bp, Artificial Sequence
  ENSG00000158683_19 (sequence is synthesized)
agccacaccttggagtatgggaactacactgcccttgccaaggttcagattgaaggcagtgtggtgtacagcaactactgtgtgggcctggaggtgcgagcccaggcccctgtcagtgtg

SEQ ID NO: 467686 - DNA, 120 bp, Artificial Sequence
  ENSG00000158683_20 (sequence is synthesized)
atctccgagggcacacacctattcttctccaggaccacctcatcccccattgtcctcagagggacccagtccttcgaccctgacgaccctggggcgactctcaggtatcactgggaatgc

SEQ ID NO: 467687 - DNA, 120 bp, Artificial Sequence
  ENSG00000158683_21 (sequence is synthesized)
gccaccgctggctccccagcacatccctgcttcgactcctccactgcacaccaactggatgccgcggctcccactgtttcctttgaggcacaatggctcagtgacagctatgatcagttc

SEQ ID NO: 467688 - DNA, 120 bp, Artificial Sequence
  ENSG00000158683_22 (sequence is synthesized)
cttgtgatgctgagggtctccagtggtggccggaactcttctgagacccgggtgttcctgtccccctaccctgactcggcgttcagattcgtccacatctcctgggtcagctttaaagac

SEQ ID NO: 467689 - DNA, 120 bp, Artificial Sequence
  ENSG00000158683_23 (sequence is synthesized)
accttcgtcaactggaatgacgaactctctcttcaagctatgtgtgaggactgcagtgaaataccgaatctgtcttattcctgggatctctttttagtcaatgcaacagaaaagaatagg

SEQ ID NO: 467690 - DNA, 120 bp, Artificial Sequence
  ENSG00000158683_24 (sequence is synthesized)
atagaagttcccttctgcagagtagtggggctgcttggctcgctgggactcggtgccatttcagagtcatcacagttaaacctgctgcccactgagcctggcactgcagatcctgatgca

SEQ ID NO: 467691 - DNA, 120 bp, Artificial Sequence
  ENSG00000158683_25 (sequence is synthesized)
acgaccacaccattctcacgggaaccttcacccgtgacccttggccaacctgccacttcagctccaaggggaacccccacagagcccatgactggagtctactggattcctcctgcgggg

SEQ ID NO: 467692 - DNA, 120 bp, Artificial Sequence
  ENSG00000158683_26 (sequence is synthesized)
gactctgcagtcctgggggaggctccagaggaaggttcactagacctagagccagggccacagagcaagggatccctgatgactggccgctctgagagaagtcagcccacccacagccct

SEQ ID NO: 467693 - DNA, 120 bp, Artificial Sequence
  ENSG00000158683_27 (sequence is synthesized)
gaccctcacctctctgattttgaagcctattacagtgacattcaagaagcaataccatcgggaggaagacagccagctaaggacaccagctttccaggatcaggacctagcttgagtgcc

SEQ ID NO: 467694 - DNA, 120 bp, Artificial Sequence
  ENSG00000158683_28 (sequence is synthesized)
gaggagagccctggagatggggataacctggtggacccctccctgtctgcaggcagagccgagcctgtcctcatgattgactggcccaaggccctgctgggtcgagcagttttccaaggc

SEQ ID NO: 467695 - DNA, 120 bp, Artificial Sequence
  ENSG00000158683_29 (sequence is synthesized)
tattcatcctcaggtattacagaacagacagtgacaatcaagccatactctctgagcagtggagagacgtacgtcctgcaagtgtctgtggcttcgaagcatggcttactgggtaaagct

SEQ ID NO: 467696 - DNA, 120 bp, Artificial Sequence
  ENSG00000158683_30 (sequence is synthesized)
cagctgtacttgacagtcaacccggctcctcgggacatggcctgtcaggtgcagccccaccatggtctggaagcacacaccgtcttcagtgtcttctgcatgtctggaaaaccggacttc

SEQ ID NO: 467697 - DNA, 120 bp, Artificial Sequence
  ENSG00000158683_31 (sequence is synthesized)
cattatgaatttagttaccagataggaaacacctccaaacacactttgtaccatgggagagacacccagtattattttgtgttgccagctggtgagcacttggacaattacaaagtcatg

SEQ ID NO: 467698 - DNA, 120 bp, Artificial Sequence
  ENSG00000158683_32 (sequence is synthesized)
gtttccactgaaatcacagatggcaaaggctccaaggtccagccgtgcactgtggtggtgactgtgctgccccgctaccatggaaatgactgtctgggcgaggacctgtataattccagc

SEQ ID NO: 467699 - DNA, 120 bp, Artificial Sequence
  ENSG00000158683_33 (sequence is synthesized)
ctgaaaaacctttctaccctccagctgatggggagttacacagaaatcaggaactacatcactgtgatcaccagaatcctgagtcgtttgtctaaggaggacaaaactgcctcctgcaac

SEQ ID NO: 467700 - DNA, 120 bp, Artificial Sequence
  ENSG00000158683_34 (sequence is synthesized)
caatggtcacgaatacaggatgcattaatttcttcagtatgcagattggcttttgtagatcaggaagaaatgattggttctgttcttatgttgagggacctcgtgagcttctctaataag

SEQ ID NO: 467701 - DNA, 120 bp, Artificial Sequence
  ENSG00000158683_35 (sequence is synthesized)
ctaggctttatgagtgcggttctcatcctcaagtacacccgggcactccttgctcaaggccagttctcggggccatttgtgattgacaaaggagtgaggcttgagctcatcggtctcata

SEQ ID NO: 467702 - DNA, 120 bp, Artificial Sequence
  ENSG00000158683_36 (sequence is synthesized)
tccagagtctgggaagtctctgagcaagaaaactcgaaggaggaagtctatcgacatgaagaaggaattacagtcatctcagatttattgttgggttgtctctctttgaaccatgttagc

SEQ ID NO: 467703 - DNA, 120 bp, Artificial Sequence
  ENSG00000158683_37 (sequence is synthesized)
ccttgctgggcacagtcctgctggggcggagacacagagcccatgctacattagccagctcatactcttcaagaagaacccatatccagggagccaagctcctgggcagattggtggagt

SEQ ID NO: 467704 - DNA, 120 bp, Artificial Sequence
  ENSG00000158683_38 (sequence is synthesized)
tgtgggcctcaacctctatacctgctccagcagaagacccatcaacaggcaatggctaaggaaacccgtgatggtcgagtttggggaggaggatggcctggataataggagaaataaaac

SEQ ID NO: 467705 - DNA, 120 bp, Artificial Sequence
  ENSG00000158683_39 (sequence is synthesized)
gacatttgtattacttcgggataaagtgaatctccatcagttcactgagctttccgaaaacccccaggaatctctacagatagaaattgaattttccaaacctgttacaagggcatttcc

SEQ ID NO: 467706 - DNA, 120 bp, Artificial Sequence
  ENSG00000158683_40 (sequence is synthesized)
cgtcatgttgctagtaagattctctgagaaacctactccctctgattttcttgtgaagcagatctacttctgggatgagtcaattgtgcagatttatatacctgctgcttctcagaaaga

SEQ ID NO: 467707 - DNA, 120 bp, Artificial Sequence
  ENSG00000158683_41 (sequence is synthesized)
tgccagtgtaggctatttatccttattggatgctgactatgacagaaaacctccaaacagatatttagctaaggcagtgaactatacagtacatttccagtggatccgatgcctgttttg

SEQ ID NO: 467708 - DNA, 120 bp, Artificial Sequence
  ENSG00000158683_42 (sequence is synthesized)
ggacaagagagagtggaaatctgaacgtttctctccacaaccagggacttctcctgaaaaagtgaactgcagctaccatcgcctcgcggcattcgctctcctaaggagaaagctgaaggc

SEQ ID NO: 467709 - DNA, 120 bp, Artificial Sequence
  ENSG00000158683_43 (sequence is synthesized)
cagttttgaagtgagtgacatttccaagctacagagccacccagaaaacttgcttcccagtatttttattatgggttctgtgattctttatggatttttggtcgctaaaagtagacaagt

SEQ ID NO: 467710 - DNA, 120 bp, Artificial Sequence
  ENSG00000158683_44 (sequence is synthesized)
agatcatcatgaaaaaaagaaagctggttacatctttctgcaagaagcttccctgccgggccatcagctatatgcggtcgtcattgacactggcttccgagctccggccaggttgacctc

SEQ ID NO: 467711 - DNA, 120 bp, Artificial Sequence
  ENSG00000158683_45 (sequence is synthesized)
aaaggtgtacattgttttatgtggcgacaatggactgtcagaaaccaaggagctctcctgtccagagaagcccctgtttgaaaggaattccagacacacctttatcctgagcgctcctgc

SEQ ID NO: 467712 - DNA, 120 bp, Artificial Sequence
  ENSG00000158683_46 (sequence is synthesized)
ccaactgggcctgctgaggaagatccgcctctggcacgacagccgtgggccttccccaggctggttcatcagccacgtgatggtgaaggagctgcacacgggacagggctggttcttccc

SEQ ID NO: 467713 - DNA, 120 bp, Artificial Sequence
  ENSG00000158683_47 (sequence is synthesized)
tgcccagtgctggctgtctgccggcaggcatgatggtcgcgtggagcgggagctcacctgtctgcaagggggactcggcttccggaagcttttctattgcaagttcacagagtacctgga

SEQ ID NO: 467714 - DNA, 120 bp, Artificial Sequence
  ENSG00000158683_48 (sequence is synthesized)
ggatttccatgtctggctgtcggtgtacagcaggccctcctccagccgctacctgcacacgccgcgcctcaccgtgtccttctccctgctgtgcgtctacgcgtgtctcactgccctggt

SEQ ID NO: 467715 - DNA, 120 bp, Artificial Sequence
  ENSG00000158683_49 (sequence is synthesized)
tgctgctggagggcaagagcagccccacttggacgtcagccccacccttggatccttcagggtgggtctcctgtgtaccctcctggcttctccaggggcccagctcttgtccctgctctt

SEQ ID NO: 467716 - DNA, 120 bp, Artificial Sequence
  ENSG00000158683_50 (sequence is synthesized)
caggctcagcaaggaagccccggggtctgcccgagtggagccacacagcccacttagaggaggagcacagaccgaggcaccccatggtcctaattcctggggaaggataccagacgcaca

SEQ ID NO: 467717 - DNA, 120 bp, Artificial Sequence
  ENSG00000158683_51 (sequence is synthesized)
ggagccacgcaagcaacctgcatcagccattctctctgggagtggcagggcccaaaggaaggcggcaagtgacaatggcacagcttgtccagcccctaagctgcaggttcatggggctga

SEQ ID NO: 467718 - DNA, 120 bp, Artificial Sequence
  ENSG00000158683_52 (sequence is synthesized)
ccacagcaggacttctctgatggggaaaagccactgctgccctccccacactcaagcacccagcagtggtttggagggactaatgccccagtggtcaagggcccttcagccttggtggag

SEQ ID NO: 467719 - DNA, 120 bp, Artificial Sequence
  ENSG00000158683_53 (sequence is synthesized)
ctctgcagtgtgggccatttgtgggaccgcttctttggcctgcagtttggggacaggatttctagcctacaggtttggccaggagcaatgtgtgcagtggctgcacctgctgtccctctc

SEQ ID NO: 467720 - DNA, 120 bp, Artificial Sequence
  ENSG00000158683_54 (sequence is synthesized)
cgtggtctgctgtattttcatcacccagccacttatggtatgcctcatggccttgggttttgcttggaaaagaagagctgacaaccacttttttactgagtctttatgtgaggctaccag

SEQ ID NO: 467721 - DNA, 120 bp, Artificial Sequence
  ENSG00000158683_55 (sequence is synthesized)
ggatctggactctgaattggcagaacgttcctggactcgcctccccttctcttcaagctgcagtattcctgactgtgcaggcgaggttgaaaaagtcttggctgcccgacaacaagctcg

SEQ ID NO: 467722 - DNA, 120 bp, Artificial Sequence
  ENSG00000158683_56 (sequence is synthesized)
ccacctgcgctgggcgcatccaccatccaaggcccagctgaggggcaccagacagaggatgaggagagagagtcgcacacgggctgccctgagagacatttccatggacatcctcatgct

SEQ ID NO: 467723 - DNA, 120 bp, Artificial Sequence
  ENSG00000158683_57 (sequence is synthesized)
gcttctgcttttgtgtgtaatatatgggagattttcccaagatgaatactccctcaatcaagctatccggaaagaatttacaagaaatgccagaaactgcttgggtggcctgagaaacat

SEQ ID NO: 467724 - DNA, 120 bp, Artificial Sequence
  ENSG00000158683_58 (sequence is synthesized)
cgctgactggtgggactggagtctgaccacacttctggatggcctgtacccgggaggcaccccgtcagcccgtgtgccgggggctcagcctggagctcttggaggaaaatgctacctaat

SEQ ID NO: 467725 - DNA, 120 bp, Artificial Sequence
  ENSG00000158683_59 (sequence is synthesized)
aggcagttccgtaattaggcagctaaaagtttttcctaggcatttatgcaagcctcccaggccattttcagcactcatcgaagactctattcctacatgtagtcccgaagttggaggccc

SEQ ID NO: 467726 - DNA, 120 bp, Artificial Sequence
  ENSG00000158683_60 (sequence is synthesized)
tgagaacccctacctgatagacccagagaaccaaaacgtgaccctgaatggtcctgggggctgtgggacaagggaggactgtgtgctcagcctgggcagaacaaggactgaagcccacac

SEQ ID NO: 467727 - DNA, 120 bp, Artificial Sequence
  ENSG00000158683_61 (sequence is synthesized)
agccctgtcccgactcagggccagcatgtggattgaccgcagcaccagggctgtgtctgtgcacttcactctctataaccctccaacccaactcttcaccagcgtgtccctgagagtgga

SEQ ID NO: 467728 - DNA, 120 bp, Artificial Sequence
  ENSG00000158683_62 (sequence is synthesized)
gatcctccctacggggagtctcgtcccctcatccctggtggagtcattcagcatcttccgcagcgactcagccctgcagtaccacctcatgcttccccagctggtcttcctggcactcag

SEQ ID NO: 467729 - DNA, 120 bp, Artificial Sequence
  ENSG00000158683_63 (sequence is synthesized)
cctgatccacctctgtgttcaactctaccgtatgatggacaagggcgtcctcagctactggcgaaagccaaggaactggctggagctctccgtggttggagtgagcctcacctactatgc

SEQ ID NO: 467730 - DNA, 120 bp, Artificial Sequence
  ENSG00000158683_64 (sequence is synthesized)
agtttccggccaccttgttactcttgctggagatgtcactaaccagtttcacagaggactttgccgagcatttatggacctcacccttatggcatcatggaatcagagggctcgatggct

SEQ ID NO: 467731 - DNA, 120 bp, Artificial Sequence
  ENSG00000158683_65 (sequence is synthesized)
ccggggaatcctcttattcctcttcacattaaaatgcgtctatcttcctggcattcaaaacacaatggcatcctgctcctccatgatgcgccactcactccccagcatctttgtagcagg

SEQ ID NO: 467732 - DNA, 120 bp, Artificial Sequence
  ENSG00000158683_66 (sequence is synthesized)
gctggtgggggcactgatgctggccgccctctcccacctgcaccgatttctgctctctatgtgggttctaccacctggcaccttcacagacgccttccccgggctgctgtttcattttcc

SEQ ID NO: 467733 - DNA, 120 bp, Artificial Sequence
  ENSG00000158683_67 (sequence is synthesized)
cagaagaagccaaaaagactgcctccttggcctttccaagtctgaccagcgggccatggcttgttactttgggatccttttaatagtctctgccacactgtgttttggaatgctgagagg

SEQ ID NO: 467734 - DNA, 120 bp, Artificial Sequence
  ENSG00000158683_68 (sequence is synthesized)
ttttctcatgactttaccccaaaaaagaaaatcttttcaaagtaaatcttttgtgagacttaaagatgtcactgcttatatgtgggaaaaggtcctcacctttctgagactggaaacacc

SEQ ID NO: 467735 - DNA, 120 bp, Artificial Sequence
  ENSG00000158683_69 (sequence is synthesized)
aaagttggaagaggctgagatggttgagaatcacaattactacttggatgaatttgcaaatctgttagacgaacttctgatgaagattaatggtttgtccgacagcctacaactccccct

SEQ ID NO: 467736 - DNA, 120 bp, Artificial Sequence
  ENSG00000158683_70 (sequence is synthesized)
tctggaaaaaacatccaacaacacaggggaggcaaggacagaagagagtcccttagtggacatttctagttaccaagctgctgagccagcagacatcaaggacttctgaggagcctggta

SEQ ID NO: 467737 - DNA, 120 bp, Artificial Sequence
  ENSG00000158683_71 (sequence is synthesized)
ccttgcataggcactatggaccctgttttgcttaacccacccaacagccaattttagcagacatcctagttttgcaggtgagaagagctgaggtacgaagaagttttgttaatttttcca

SEQ ID NO: 467738 - DNA, 120 bp, Artificial Sequence
  ENSG00000158683_72 (sequence is synthesized)
gttcacgtaacaagtaaatgggaaaccaggatgaaaatcaaggtttatctgtcatcagactgttactcataatcaccattcggagagttcagatgtgggacaagattctaactccagcct

SEQ ID NO: 467739 - DNA, 120 bp, Artificial Sequence
  ENSG00000158683_73 (sequence is synthesized)
tctcccaaatggttaatttgccagttgccctagagttacatattgtcttatttgtttgttttactgaatctgtctgagtattaaaagccttgtatcttgtgaaatttctttcaggtctca

SEQ ID NO: 467740 - DNA, 120 bp, Artificial Sequence
  ENSG00000158683_74 (sequence is synthesized)
taaaagcgatgaaagagaccaggataacattctaatatttaaataagatttttgaagtaaaatccttattttgtaaatttaacaattgaatcttgctagattaataacgcatctttcctg

SEQ ID NO: 467741 - DNA, 120 bp, Artificial Sequence
  ENSG00000158683_75 (sequence is synthesized)
caccaaacaccccaagtgcctactgaagagcaagtttaggattaaacctctgcagaacaggaaatgggcttgcatcctagctactcaaagctggtcttcctggcactcagcctgatccac

SEQ ID NO: 467742 - DNA, 120 bp, Artificial Sequence
  ENSG00000158683_76 (sequence is synthesized)
ggaggtagcctctcttgtgtcattttcttttgaaaaataacaataaactgtttatatcttgaaaaaataatttaaataagaaattgattatgcactagctactgccaacattattgcagt

SEQ ID NO: 467743 - DNA, 120 bp, Artificial Sequence
  ENSG00000158683_77 (sequence is synthesized)
tttctccctctgtagtgttaatctcaaaacagcatttgagatcaggtatcatttagtgttgttacagttaccgtcatgtaccacacgaatttcagccaaggtggtggtcccataagatct

SEQ ID NO: 467744 - DNA, 120 bp, Artificial Sequence
  ENSG00000158683_78 (sequence is synthesized)
tatggtgctaagaaatttctgtcacctaatgacatcttgattctgaccttgtatgtaggcctaggctaaatatgtctgtttgtatcttagcttttaataaagaagtttaaaaataaaaaa

SEQ ID NO: 467745 - DNA, 74 bp, Artificial Sequence
  ENSG00000158683_79 (sequence is synthesized)
acagaagagagtcccttagtggacatttctagttaccaagctgctgagagtctcactcttgtcacccagactga

SEQ ID NO: 467746 - DNA, 120 bp, Artificial Sequence
  ENSG00000158683_80 (sequence is synthesized)
aaagtgttggaattacaggcgtgagccattgcacccggccgcacataacttttattaccatatgttgttataattgttctattattttattattattcattgttgttaatctcttactgt

SEQ ID NO: 467747 - DNA, 120 bp, Artificial Sequence
  ENSG00000158683_81 (sequence is synthesized)
ctgtgcctagttgataaattaagctttaccataggtgtgtatgtaggaaaaaacatagtttgtatgggggttggtgctagccacagtttcaggcatccagtgtggttcctggaagttatg

SEQ ID NO: 467748 - DNA, 120 bp, Artificial Sequence
  ENSG00000158683_82 (sequence is synthesized)
ctgctcaggtgaggggggactattgtacaaagcatttacatggagactgaaagaaaacagagcagaatggcaatagcgtcatggtcatattttgatccttgagcatatttaatgttttgt

SEQ ID NO: 467749 - DNA, 120 bp, Artificial Sequence
  ENSG00000158683_83 (sequence is synthesized)
tctgtctaacttggcatttcttttttttaatgaaaatgtcttccaggttcatccatgttgttgcaaatgacaagatctccttttgaaagctgaatgatattccattgtgtgtgtgtgtac

SEQ ID NO: 467750 - DNA, 120 bp, Artificial Sequence
  ENSG00000158691_0 (sequence is synthesized)
tccgggtcccaaaagggttcgaggcctcttgccttcgctccgtaggagggagttctcttctggccctgggggccgcaggactgtccaggaatacagtttccaggtgagatcttacttgaa

SEQ ID NO: 467751 - DNA, 120 bp, Artificial Sequence
  ENSG00000158691_1 (sequence is synthesized)
acaccggtagttctagcacagctaaaatggcatctacttgggctatccaggcccacatggaccaggatgaacctttggaagtaaagatagaggaagagaaatataccaccagacaggatt

SEQ ID NO: 467752 - DNA, 120 bp, Artificial Sequence
  ENSG00000158691_2 (sequence is synthesized)
gggacctgcgtaaaaacaacacccatagcagagaggtcttccgtcagtacttcagacagttctgctaccaggagacatctggtccccgtgaggctttgagccgactccgagaactttgcc

SEQ ID NO: 467753 - DNA, 120 bp, Artificial Sequence
  ENSG00000158691_3 (sequence is synthesized)
atcagtggctgaggccagagacccacaccaaagaacagattctggagctgctggtgctggagcagttcctgaccatcctacctgaggagctccaggcctgggtgcaggagcagcatccag

SEQ ID NO: 467754 - DNA, 120 bp, Artificial Sequence
  ENSG00000158691_4 (sequence is synthesized)
agagtggggaggaggtggtgactgtgctggaggatttagagagagaactggatgaaccaggagagcaggtctcagtccacactggggaacaggaaatgttcttgcaggagacggtacgtc

SEQ ID NO: 467755 - DNA, 120 bp, Artificial Sequence
  ENSG00000158691_5 (sequence is synthesized)
tacgaaaagaaggagaacccagtatgtccctccagtccatgaaagcccagccaaagtatgaatctccagaacttgaatcccaacaggagcaagttttagatgttgagactggaaatgagt

SEQ ID NO: 467756 - DNA, 120 bp, Artificial Sequence
  ENSG00000158691_6 (sequence is synthesized)
atgggaatttaaagcaagaagtttctgaagaaatggaaccacatgggaagacatccagtaaatttgaaaatgatatgtccaagtctgctaggtgtggagaaactcgtgaacctgaagaaa

SEQ ID NO: 467757 - DNA, 120 bp, Artificial Sequence
  ENSG00000158691_7 (sequence is synthesized)
taacagaagagccctctgcttgctccagagaagataaacaacctacctgtgatgaaaatggagtaagcctgactgagaactctgaccatactgaacatcagagaatctgtccaggagaag

SEQ ID NO: 467758 - DNA, 120 bp, Artificial Sequence
  ENSG00000158691_8 (sequence is synthesized)
aatcttacggatgtgatgactgtggaaaagcttttagtcagcactcacacctcatagaacatcagaggatccatactggagatagaccctacaaatgcgaagaatgtggaaaagctttcc

SEQ ID NO: 467759 - DNA, 120 bp, Artificial Sequence
  ENSG00000158691_9 (sequence is synthesized)
gtgggagaactgtgcttattcgacacaaaataatacacactggagagaaaccgtataagtgtaatgaatgtggcaaagcctttggccggtggtcagctcttaaccaacatcagagacttc

SEQ ID NO: 467760 - DNA, 120 bp, Artificial Sequence
  ENSG00000158691_10 (sequence is synthesized)
acacaggagaaaaacactatcactgtaatgactgtggcaaagcctttagtcagaaagcaggcctctttcaccatatcaagatccacacaagagacaaaccttatcagtgcactcagtgta

SEQ ID NO: 467761 - DNA, 120 bp, Artificial Sequence
  ENSG00000158691_11 (sequence is synthesized)
ataaaagttttagtcggcgttccatacttactcagcatcaaggagttcataccggcgccaagccgtatgagtgcaacgagtgtggaaaagcctttgtttataactcatcccttgtttccc

SEQ ID NO: 467762 - DNA, 120 bp, Artificial Sequence
  ENSG00000158691_12 (sequence is synthesized)
atcaggaaatccaccacaaagaaaaatgctatcagtgtaaggaatgtgggaaatccttcagtcagagtggccttattcagcatcagagaattcacactggggaaaaaccctacaaatgtg

SEQ ID NO: 467763 - DNA, 120 bp, Artificial Sequence
  ENSG00000158691_13 (sequence is synthesized)
acgtatgtgaaaaagcctttattcaaaggacaagtcttacagaacatcagcgaattcacactggagaaagaccctataaatgtgataagtgtgggaaggcgtttactcaaagatcagtcc

SEQ ID NO: 467764 - DNA, 120 bp, Artificial Sequence
  ENSG00000158691_14 (sequence is synthesized)
tcacggaacatcagagaatccacactggagagaggccctacaagtgtgatgagtgtgggaatgccttccgaggaatcaccagcctcattcagcatcagagaatccacactggggagaagc

SEQ ID NO: 467765 - DNA, 120 bp, Artificial Sequence
  ENSG00000158691_15 (sequence is synthesized)
cctaccaatgtgatgagtgtggaaaagccttcagacagaggaagaagaccagctacaaggaaatacttctgaaaaatcactctgaaccccaagctggagtgaatcttctcctgagctctc

SEQ ID NO: 467766 - DNA, 120 bp, Artificial Sequence
  ENSG00000158691_16 (sequence is synthesized)
tcattccagaatggcaatcttgtttcaggagagatctctaatagtgactgatggtaaaggaagaaggctgtgcctagaacaaagaatcaggctggcaaagaaatcacaggtctttcctca

SEQ ID NO: 467767 - DNA, 120 bp, Artificial Sequence
  ENSG00000158691_17 (sequence is synthesized)
aactttaaattgctactctctggagatagctacctggactttacagagctgtcagaagacttgggaaggtttgccagcattggaaaaagccacttggacttcacagagctgtcagaagac

SEQ ID NO: 467768 - DNA, 120 bp, Artificial Sequence
  ENSG00000158691_18 (sequence is synthesized)
ttaggaagctttgccagtagttcctgagaccagaaatacatattatgaagcaggtgctggaacaggccctggcccctacttgtgaagctgcagatataggtaagataatatcatccagaa

SEQ ID NO: 467769 - DNA, 120 bp, Artificial Sequence
  ENSG00000158691_19 (sequence is synthesized)
tgtggagacgaggcaatcgatgatgctggaaaagttgaagagagagtttgaatgaaggacaaaccaccgatgggaaagcttgggaggatcacttatagcttgactagcaaaaggctttgg

SEQ ID NO: 467770 - DNA, 120 bp, Artificial Sequence
  ENSG00000158691_20 (sequence is synthesized)
gaataggatagaaagcagcaaacctgaactttaggatccaccagatgtctctggagccataacccaacatttcccataaatagtaggttttaattctcctgttatttaggtgcatctctg

SEQ ID NO: 467771 - DNA, 120 bp, Artificial Sequence
  ENSG00000158691_21 (sequence is synthesized)
ggacctcctctttctatattgggttttttgtttgttgggtgttttaacttaggatttagcttcaaattccatttcccaagaccaattttatcacattgcctttaggtctcaggctaaatg

SEQ ID NO: 467772 - DNA, 120 bp, Artificial Sequence
  ENSG00000158691_22 (sequence is synthesized)
ttgccttttgatatggaaagctgatgagagagcatctctggagagaaagaagaggagagcctcacgggaagcttttagaacttttagtagcatcctctccccagaaaacttgtctctact

SEQ ID NO: 467773 - DNA, 120 bp, Artificial Sequence
  ENSG00000158691_23 (sequence is synthesized)
catctccttctcattatctacctgattcgttaagtaggaaatctcagccatatttgtaggggattggggttttgttttttttgacccacttaactcctttagcttcagagtgttgctttc

SEQ ID NO: 467774 - DNA, 120 bp, Artificial Sequence
  ENSG00000158691_24 (sequence is synthesized)
ttacattttagacatgaatattacctagaaaatttatttccccactgttaattttccagtttattgatttccccacatcagattagtgtgtattttgaaactggtttagctattgtttca

SEQ ID NO: 467775 - DNA, 120 bp, Artificial Sequence
  ENSG00000158691_25 (sequence is synthesized)
agttaactttgatcatatcccgttgtttactgatccactcaacaaatatttattgaacattctgtaggtttatagtagtagccaagatacttaaagtgagtagaaatagtccttttaact

SEQ ID NO: 467776 - DNA, 120 bp, Artificial Sequence
  ENSG00000158691_26 (sequence is synthesized)
gtccttaacaaattaaactttctcttggtttcatgatattccttgtttctcagctttggattcaaactgatcttctcttttttgattatactttcctgatttcttttattgtcacatttt

SEQ ID NO: 467777 - DNA, 120 bp, Artificial Sequence
  ENSG00000158691_27 (sequence is synthesized)
tgtgaaaagtcttccatgcacttccagtctctttctgcctagctgtctcttctcacccaaattggacccccctactcctaccctgccacgtgccttcacaaaaatgagatgcttgtttag

SEQ ID NO: 467778 - DNA, 120 bp, Artificial Sequence
  ENSG00000158691_28 (sequence is synthesized)
agacttagaaaaggcatgcactttaggtaaaagtggattttatttttaatcactgtaccctatcataaatctcatttcagaagagacaactgacatttgaattgtctgtgcattttgttt

SEQ ID NO: 467779 - DNA, 120 bp, Artificial Sequence
  ENSG00000158691_29 (sequence is synthesized)
tagatggtgttactgagaaggaaactaaggacttggctccaaaacaaaacaaaacaaaatctggagatgctgaattttgttggggggaatgtctgtagaactgcaacatcaatgcagtaa

SEQ ID NO: 467780 - DNA, 120 bp, Artificial Sequence
  ENSG00000158691_30 (sequence is synthesized)
gtgtagtaaaagctttagtttatggtgagtcattactcagcatcatggagtccacgatgaagagaatctcttttcaatctgtgcaatcaacaagtttttgaaaggcttttgtttatagtg

SEQ ID NO: 467781 - DNA, 120 bp, Artificial Sequence
  ENSG00000158691_31 (sequence is synthesized)
gaaccctcttttccccctagaagaaccaccacaaggaaaaatgctgtcaccataaggaatgtgggaaagttttcagccacatggccttatttgacttcaaagaatccacatgagagagag

SEQ ID NO: 467782 - DNA, 120 bp, Artificial Sequence
  ENSG00000158691_32 (sequence is synthesized)
actgcataaatgtaataactgaggaggcctttgttcagcaaagaaaccttatacaaactcgtataaagaatgtaggaagaccttcacccagaagccaggactgactgtgcaccagagaat

SEQ ID NO: 467783 - DNA, 120 bp, Artificial Sequence
  ENSG00000158691_33 (sequence is synthesized)
ctgcacaataaacatgatgaatgtggagatgcttgcttcagcattggagaattcacagtaaagggaaaccctgccagtgtgatgagtacggaaaagtcttcagaggttggaacttgggaa

SEQ ID NO: 467784 - DNA, 120 bp, Artificial Sequence
  ENSG00000158691_34 (sequence is synthesized)
aaatcagtgagtgaattcatattagagaggctcttataaatgagaggattgtggaaacttgtatagacagagatcagacctcaacaagggagcctccacagtattgaaaagttaatataa

SEQ ID NO: 467785 - DNA, 120 bp, Artificial Sequence
  ENSG00000158691_35 (sequence is synthesized)
ttaatgtaagtgggcaagttgtatggggaatgggtagtctaaattgctcattttagccagtaaaaacattaaattagtttcttagatcaagaaaaggaaatgttagaagttatttttccc

SEQ ID NO: 467786 - DNA, 120 bp, Artificial Sequence
  ENSG00000158691_36 (sequence is synthesized)
ttccagaggggtctatatgtgtaagcaaccaggacttttgaaataagttgcatctctggatttgtgatctgtctcctggatgattatctctgttttgggagacaggtattttttcttcat

SEQ ID NO: 467787 - DNA, 120 bp, Artificial Sequence
  ENSG00000158691_37 (sequence is synthesized)
gcctgctctagtctcatctcatatctttaattcattcagcaagtatacacaatagtattatcgtctactgtttgttgtaaatatatatatattattttctttttggtctgagtaggcttg

SEQ ID NO: 467788 - DNA, 120 bp, Artificial Sequence
  ENSG00000158691_38 (sequence is synthesized)
tattggtaccctaggacataaaaatcacatatatcatgtttcagtaaatgcagtgaaaggaactatattattaaattgctgggaatttctgtaaatttgagactacctttatattctcca

SEQ ID NO: 467789 - DNA, 120 bp, Artificial Sequence
  ENSG00000158691_39 (sequence is synthesized)
tccaacacaagaccgtgtaggtgtcccttcagagagtatatttttctagcttggcttctttattttctttatttttttgagatggagtcttgctcctgtcgcccaggctggagtgcaatg

SEQ ID NO: 467790 - DNA, 120 bp, Artificial Sequence
  ENSG00000158691_40 (sequence is synthesized)
tttaagatagaaaaatatacttcatgtatagcctattgacagataatgactgatattttttcttatagataacacataataaacattgtgaagactaataagtaacttgcttattctttt

SEQ ID NO: 467791 - DNA, 120 bp, Artificial Sequence
  ENSG00000158691_41 (sequence is synthesized)
cagttctaaaacctgtaggaaagaatctttagaagctgtcaacaagttgataatgtagcccaatctctacccatgataggagagtaaggcttatatattttatagtagggcactaaatac

SEQ ID NO: 467792 - DNA, 120 bp, Artificial Sequence
  ENSG00000158691_42 (sequence is synthesized)
aggaaccatgtatttaaaaactttttagtgattatctcagaattctaggtgtccctctgctgtacatccctaaattttttgcataggtattattaataaattcattattttcaaagatgg

SEQ ID NO: 467793 - DNA, 120 bp, Artificial Sequence
  ENSG00000158710_0 (sequence is synthesized)
cctccccccgcgccctgtgcctcctggggctacctgaagccggtgtcctgggagatctctccccgcagccaccgccacccattggaatggccaacaggggacctgcatatggcctgagcc

SEQ ID NO: 467794 - DNA, 120 bp, Artificial Sequence
  ENSG00000158710_1 (sequence is synthesized)
gggaggtgcagcagaagattgagaaacaatatgatgcagatctggagcagatcctgatccagtggatcaccacccagtgccgaaaggatgtgggccggccccagcctggacgcgagaact

SEQ ID NO: 467795 - DNA, 120 bp, Artificial Sequence
  ENSG00000158710_2 (sequence is synthesized)
gcagatggagcagatctctcagttcctgcaagcagctgagcgctatggcattaacaccactgacatcttccaaactgtggacctctgggaaggaaagaacatggcctgtgtgcagcggac

SEQ ID NO: 467796 - DNA, 120 bp, Artificial Sequence
  ENSG00000158710_3 (sequence is synthesized)
gctgatgaatctgggtgggctggcagtagcccgagatgatgggctcttctctggggatcccaactggttccctaagaaatccaaggagaatcctcggaacttctcggataaccagctgca

SEQ ID NO: 467797 - DNA, 120 bp, Artificial Sequence
  ENSG00000158710_4 (sequence is synthesized)
agagggcaagaacgtgatcgggttacagatgggcaccaaccgcggggcgtctcaggcaggcatgactggctacgggatgccacgccagatcctctgatcccaccccaggccttgcccctg

SEQ ID NO: 467798 - DNA, 120 bp, Artificial Sequence
  ENSG00000158710_5 (sequence is synthesized)
tggaggctgaggtactcacgggtggagaccactgcagccgcctttgtagattcagactccccgaacctttaacccttgctctggtctactgtccctctgtctcaagcagtcctccctcct

SEQ ID NO: 467799 - DNA, 120 bp, Artificial Sequence
  ENSG00000158710_6 (sequence is synthesized)
tctgcgctgcggcgcctttaaaccttcttggcccttgccccgccccgggtccgccccgtctgaggcgggaccctcctgaaaatccccggctgggcagggcgcaccacttgcagctgcagc

SEQ ID NO: 467800 - DNA, 120 bp, Artificial Sequence
  ENSG00000158710_7 (sequence is synthesized)
ctctcaagctcctttctgtcagggtggggggttcagcctgtcctgtcacctctgaggtgcctgctggcatcctctcccccatgcttactaatacattcccttccccatagccatcaaaac

SEQ ID NO: 467801 - DNA, 120 bp, Artificial Sequence
  ENSG00000158710_8 (sequence is synthesized)
tggaccaactggcctcttcctttcccctgggaccaaaatttaggggcctcagtccctcaccgccatgccctggcctattctgtctctccttcttccccctggcctgttctgtctctgagc

SEQ ID NO: 467802 - DNA, 120 bp, Artificial Sequence
  ENSG00000158710_9 (sequence is synthesized)
tctgtgtcctccgttcattccatggctgggagtcactgatgctgcctctgccttctgatgctggactggccttgcttctacaagtatgcttctcccacagctgtggctgcaggaacttaa

SEQ ID NO: 467803 - DNA, 120 bp, Artificial Sequence
  ENSG00000158710_10 (sequence is synthesized)
tttatagggaggagcctgtggcagctgctgccccagccacagctgcactgactgtgctcaccacacatctggggcagccttccctggcaggggccctcgtggcttctcattttccattcc

SEQ ID NO: 467804 - DNA, 120 bp, Artificial Sequence
  ENSG00000158710_11 (sequence is synthesized)
cttcactgtggctaaggggtggggtgaggggatggagagggagggctgcctaccatggtctggggcttgaggaagatgagtttgttgatttaaataaagaatttgtcatttttgaatgga

SEQ ID NO: 467805 - DNA, 120 bp, Artificial Sequence
  ENSG00000158710_12 (sequence is synthesized)
cggtggtgaggggctgccctacggtggttcccttaattgtgggccgccccccatccttgctgctggctgtggcacctcgctctgtgggctggtgccctcactgtgctgctctttgagaac

SEQ ID NO: 467806 - DNA, 120 bp, Artificial Sequence
  ENSG00000158710_13 (sequence is synthesized)
actccctgtcccaaatctgagttgggaagttctcctgtgttccatctgcacggtggatggagagtccctttgtcttcccaattaaacaccctagccaagaaccctgaagtcctccctgcc

SEQ ID NO: 467807 - DNA, 120 bp, Artificial Sequence
  ENSG00000158710_14 (sequence is synthesized)
agacagggcgtccgtctggagcagggactcagggactgagccccacccgcgggctccatcgctgagtcctcactggggcgaggggaaaaaagggcgtcggactttagctggctggccccg

SEQ ID NO: 467808 - DNA, 120 bp, Artificial Sequence
  ENSG00000158710_15 (sequence is synthesized)
agtgaccccgggtcgtggcgccggccctgggccagctcgtgctcctgggctttcccgcgcgacccttcacttcctggttccaggagcacgtctccccgcagccaccgccacccattggaa

SEQ ID NO: 467809 - DNA, 120 bp, Artificial Sequence
  ENSG00000158710_16 (sequence is synthesized)
tttctgcccaatcctgtccctaggaaataacttatctcagtagcagctggccctttacaaagcactttcagaaaattcctcatctcacttaatcctcacaacaccctctgggatggcaaa

SEQ ID NO: 467810 - DNA, 120 bp, Artificial Sequence
  ENSG00000158710_17 (sequence is synthesized)
tgactgtccctttggacagatgaggaggtggcttcagagagcttatggctctcgagggcagagctggcaccagcccttgagccaacagcaaagcctgtgctctgtccaaggaagggattt

SEQ ID NO: 467811 - DNA, 80 bp, Artificial Sequence
  ENSG00000158711_0 (sequence is synthesized)
ccgcggagggcctggcaggccccgccgctgcaaggaacgccccgaacgcgcgcgcccggcgtgtagcggccccaagaccc

SEQ ID NO: 467812 - DNA, 120 bp, Artificial Sequence
  ENSG00000158711_1 (sequence is synthesized)
gagatgcgggcggctgcgggcacccggcgggctcggcttggccgccgccgccttctacggctccgccgcgggggtcgcagcggctgccgcgccgtcctcgagtttccagcgtgaggagga

SEQ ID NO: 467813 - DNA, 120 bp, Artificial Sequence
  ENSG00000158711_2 (sequence is synthesized)
ctcgagtttccagcgtgaggaggaggctgagggcggagaggcgcatcgtgttcgaggcggagaccgagggggagccccgcgcgcggcgtcgctcattgctatggacagtgctatcaccct

SEQ ID NO: 467814 - DNA, 120 bp, Artificial Sequence
  ENSG00000158711_3 (sequence is synthesized)
gtggcagttccttcttcagctcctgcagaagcctcagaacaagcacatgatctgttggacctctaatgatgggcagtttaagcttttgcaggcagaagaggtggctcgtctctgggggat

SEQ ID NO: 467815 - DNA, 120 bp, Artificial Sequence
  ENSG00000158711_4 (sequence is synthesized)
tcgcaagaacaagcctaacatgaattatgacaaactcagccgagccctcagatactattatgtaaagaatatcatcaaaaaagtgaatggtcagaagtttgtgtacaagtttgtctctta

SEQ ID NO: 467816 - DNA, 120 bp, Artificial Sequence
  ENSG00000158711_5 (sequence is synthesized)
tccagagattttgaacatggatccaatgacagtgggcaggattgagggtgactgtgaaagtttaaacttcagtgaagtcagcagcagttccaaagatgtggagaatggagggaaagataa

SEQ ID NO: 467817 - DNA, 120 bp, Artificial Sequence
  ENSG00000158711_6 (sequence is synthesized)
accacctcagcctggtgccaagacctctagccgcaatgactacatacactctggcttatattcttcatttactctcaactctttgaactcctccaatgtaaagcttttcaaattgataaa

SEQ ID NO: 467818 - DNA, 120 bp, Artificial Sequence
  ENSG00000158711_7 (sequence is synthesized)
gactgagaatccagccgagaaactggcagagaaaaaatctcctcaggagcccacaccatctgtcatcaaatttgtcacgacaccttccaaaaagccaccggttgaacctgttgctgccac

SEQ ID NO: 467819 - DNA, 120 bp, Artificial Sequence
  ENSG00000158711_8 (sequence is synthesized)
catttcaattggcccaagtatttctccatcttcagaagaaactatccaagctttggagacattggtttccccaaaactgccttccctggaagccccaacctctgcctctaacgtaatgac

SEQ ID NO: 467820 - DNA, 120 bp, Artificial Sequence
  ENSG00000158711_9 (sequence is synthesized)
tgcttttgccaccacaccacccatttcgtccataccccctttgcaggaacctcccagaacaccttcaccaccactgagttctcacccagacatcgacacagacattgattcagtggcttc

SEQ ID NO: 467821 - DNA, 120 bp, Artificial Sequence
  ENSG00000158711_10 (sequence is synthesized)
tcagccaatggaacttccagagaatttgtcactggagcctaaagaccaggattcagtcttgctagaaaaggacaaagtaaataattcatcaagatccaagaaacccaaagggttagaact

SEQ ID NO: 467822 - DNA, 120 bp, Artificial Sequence
  ENSG00000158711_11 (sequence is synthesized)
ggcacccacccttgtgatcacgagcagtgatccaagcccactgggaatactgagcccatctctccctacagcttctcttacaccagcatttttttcacagacacccatcatactgactcc

SEQ ID NO: 467823 - DNA, 120 bp, Artificial Sequence
  ENSG00000158711_12 (sequence is synthesized)
aagccccttgctctccagtatccacttctggagtactctcagtcctgttgctcccctaagtccagccagactgcaaggtgctaacacacttttccagtttccttctgtactgaacagtca

SEQ ID NO: 467824 - DNA, 120 bp, Artificial Sequence
  ENSG00000158711_13 (sequence is synthesized)
tgggccattcactctgtctgggctggatggaccttccacccctggcccattttccccagacctacagaagacataacctatgcacttgtggaatgagagaaccgaggaacgaagaaacag

SEQ ID NO: 467825 - DNA, 120 bp, Artificial Sequence
  ENSG00000158711_14 (sequence is synthesized)
acattcaacatgattgcatttgaagtgagcaattgatagttctacaatgctgataatagactattgtgatttttgccattccccattgaaaacatctttttaggattctctttgaatagg

SEQ ID NO: 467826 - DNA, 120 bp, Artificial Sequence
  ENSG00000158711_15 (sequence is synthesized)
actcaagttggactatatgtataaaaatgccttaattggagtctaaactccacctccctctgtcttttccttttctttttctttccttccttccttttcttttctcctttaaaaatattt

SEQ ID NO: 467827 - DNA, 120 bp, Artificial Sequence
  ENSG00000158711_16 (sequence is synthesized)
tgagctttgtgctgaagaagtttttggtgggctttagtgactgtgctttgcaaaagcaattaagaacaaagttactccttctggctattgggaccctttggccaggaaaaattatgctta

SEQ ID NO: 467828 - DNA, 120 bp, Artificial Sequence
  ENSG00000158711_17 (sequence is synthesized)
gaatctattatttaaagaaatatttgtgaaatgaattggcatctttaggactaagtgtgctctgttgaatgacttaaagtgagctgttcctaagcagtggaagaagaagaatcattccta

SEQ ID NO: 467829 - DNA, 120 bp, Artificial Sequence
  ENSG00000158711_18 (sequence is synthesized)
ttcatacaaagtaagattggagcagtcatactggggagattgttttgtgtgaactataacgtgtaagcaactccatgaaaaggcatcttgtttacctttattcagggtggatctcttagc

SEQ ID NO: 467830 - DNA, 120 bp, Artificial Sequence
  ENSG00000158711_19 (sequence is synthesized)
catatgtatgatcctgtctgaacctgtcaacagagcatggagctagtctatttcactatagaaagatttttagacctggggtttaagacagtttttggaacacctagtaagaatatggga

SEQ ID NO: 467831 - DNA, 120 bp, Artificial Sequence
  ENSG00000158711_20 (sequence is synthesized)
cctcacatctagcacagaaatgctctttgccctctgggtggtatgattatatgcccatggaatacagcatgggaaatgatcacttttaggaggatgaacttggattttgaatatttgaaa

SEQ ID NO: 467832 - DNA, 120 bp, Artificial Sequence
  ENSG00000158711_21 (sequence is synthesized)
catctctgagtaaaagattcgatcagataacttgaaacaacatgtagtggttttctcaattagaagataaccaagtgaaggacctgtctttttcctgttcattttacctcattttctact

SEQ ID NO: 467833 - DNA, 120 bp, Artificial Sequence
  ENSG00000158711_22 (sequence is synthesized)
atacatttatcacctttcctttatgtttaaggttgttagaggttatgatagttttaaagatgcagttaggaaggtagaattcaaagtgaagcctccccagtcaggagcgaagatgtgctt

SEQ ID NO: 467834 - DNA, 120 bp, Artificial Sequence
  ENSG00000158711_23 (sequence is synthesized)
tgatccgcccacctcagcctcccaaaggcgcaggctcagatgtgcttatttctttcaactttttttttttaaatggggaagagcagagttcatttgggaatgcttatacatagggattgg

SEQ ID NO: 467835 - DNA, 120 bp, Artificial Sequence
  ENSG00000158711_24 (sequence is synthesized)
gggattggattgttcatattagtagtaaaaaatgtaggccttattctctacattaccaaatttttaaaatattactatatggtaatcaatgccaggtacagatttgttggttccccaaac

SEQ ID NO: 467836 - DNA, 120 bp, Artificial Sequence
  ENSG00000158711_25 (sequence is synthesized)
tgaattgatatcagtatcacagtggagtcttttgaaaattaaagtccaggattaaattatatgttgtcaccattcaccaccactaccaccctcccccaccaatctctcccaccggttaaa

SEQ ID NO: 467837 - DNA, 120 bp, Artificial Sequence
  ENSG00000158711_26 (sequence is synthesized)
ctcgtcttctaatcctgtagaatcacatgaactaaatgaagaagtaagaacttgaaggctcagactgacactgttacaaactagcatcttcagatgcatggtatttactttaaatgtgct

SEQ ID NO: 467838 - DNA, 120 bp, Artificial Sequence
  ENSG00000158711_27 (sequence is synthesized)
tatatacagtgtagagaagctcttgtataagaagacatctatgctagctaacttagtagtagtagagggaacatattcagtgagctgcctttatatctgtagtgtcggagacttgttact

SEQ ID NO: 467839 - DNA, 120 bp, Artificial Sequence
  ENSG00000158711_28 (sequence is synthesized)
ggttcatttgtggttatcagttgaaggttctgttcctgagatgtgcaatagtagtgttgaaaggtattgtttaatagtgatggggaacagacatattggacttttttttccatattaaat

SEQ ID NO: 467840 - DNA, 120 bp, Artificial Sequence
  ENSG00000158711_29 (sequence is synthesized)
tatttagtttgcatgcctgtttgaaattggacctctcagcagcactttgaaatagttttaattaggttaacattttgtacattaaataagtagatatagatggttgatttaactagatgt

SEQ ID NO: 467841 - DNA, 120 bp, Artificial Sequence
  ENSG00000158711_30 (sequence is synthesized)
gttaaattttgaaagcacaaaggtattttatctttttgaattaaaggagaaaagccattgatttgttttcacagacagtatttttaataattaactgtctcagcacagaggtaccttgga

SEQ ID NO: 467842 - DNA, 120 bp, Artificial Sequence
  ENSG00000158711_31 (sequence is synthesized)
accaagggcaccattgaaactcagttgaagcaacttcctagtaaaccattttagtgagtcctttttgcataaatctatagcctctcagaggtgtgaggctgtcacagattggtgatctgc

SEQ ID NO: 467843 - DNA, 120 bp, Artificial Sequence
  ENSG00000158711_32 (sequence is synthesized)
tatctctttgagatcaactaatttggagaagtgtgtgtgtgcgtatccttttttaagtcaaagtttacaaccttactgcaggtgtatgaggcagacagttctgtttatagactacctcct

SEQ ID NO: 467844 - DNA, 120 bp, Artificial Sequence
  ENSG00000158711_33 (sequence is synthesized)
tcctggaaaagtctcagcttcatattctgttgaatatatgcagaattcttagtgtgaaaggtgatgtaccacttcagatcagttttcactggagagacttgtaattggtagctgtagctc

SEQ ID NO: 467845 - DNA, 120 bp, Artificial Sequence
  ENSG00000158711_34 (sequence is synthesized)
gtatccatccctagtcactttgccaggatgaatgctgttgggcagcagtagcctaagttacggaaggggagcagattgaatggggttttgagacatcttctctgataccttagctttcct

SEQ ID NO: 467846 - DNA, 120 bp, Artificial Sequence
  ENSG00000158711_35 (sequence is synthesized)
tctgctctggtcgctatccactcagtcgtgtgctagaaatgtttaacaaccaggatctctggggtgggggtgggggggagcgctgaatttgtagcatttgctgcaaatataaattataaa

SEQ ID NO: 467847 - DNA, 120 bp, Artificial Sequence
  ENSG00000158711_36 (sequence is synthesized)
taaaattctaatataaattagaattttatatcaaattctttgatataaattagttactcctcctgtggctgatttcaagctaccaccttagagttcagaaaggatgtgcacagttggctc

SEQ ID NO: 467848 - DNA, 120 bp, Artificial Sequence
  ENSG00000158711_37 (sequence is synthesized)
agagccagtgctggcaaaccattgcatttactccacccaagagtggattttcacataatttctaaaataattttttcttatttatatactgacttttcaaaatacaaaattaaaatatca

SEQ ID NO: 467849 - DNA, 120 bp, Artificial Sequence
  ENSG00000158711_38 (sequence is synthesized)
tgtctgacttcagtgatctttttctttttctttttttagaaatgagatctttcagtaatcctttaatttaattttttagagatggagtcttggtgtgttacccagggtggactcaaactc

SEQ ID NO: 467850 - DNA, 120 bp, Artificial Sequence
  ENSG00000158711_39 (sequence is synthesized)
aagtgatcctcctgcctcagcctcctgcatagctgggctacaggcatgcaccaccacacctggcttagtaatccttctttattaatggtttgtcacagtacgtttgtgatgttatattgc

SEQ ID NO: 467851 - DNA, 120 bp, Artificial Sequence
  ENSG00000158711_40 (sequence is synthesized)
tggaaatttccattgatttttttttttttaaatgtatgcacaaacaatctggattttgaggagtacggtcaggaaaaaaaaaaaagaattagaggcccttgaaaggtcaaccgtaagctt

SEQ ID NO: 467852 - DNA, 120 bp, Artificial Sequence
  ENSG00000158711_41 (sequence is synthesized)
cttagagttaaaatatgagtttaattttttcccacattttgacagttgaaattttgatagggacagtaaacctatgagcctctattaggctactggattttttttaactggaaaattcct

SEQ ID NO: 467853 - DNA, 120 bp, Artificial Sequence
  ENSG00000158711_42 (sequence is synthesized)
tgaagatttacatactatattacagattttaaaagtcaagactgacttaagtaaatcagaggtttggaattctggagctgtaactccaggctgttgatagtatcacttcagttccattca

SEQ ID NO: 467854 - DNA, 120 bp, Artificial Sequence
  ENSG00000158711_43 (sequence is synthesized)
cccctgcattgtgtgacgtccagtctgacaacattgtttcatcctgatctgactttctactatgattcttaagttcttaaaggtgtccttttatgtttttggtgaatgtaagcacattta

SEQ ID NO: 467855 - DNA, 120 bp, Artificial Sequence
  ENSG00000158711_44 (sequence is synthesized)
gagccactcagtaccacttctcaatacctctgaagcagtggttcagaaaaggagtgtccagcctttttgaacacacaaattgatcagtaagagttattgaacataaaaactttccctatt

SEQ ID NO: 467856 - DNA, 120 bp, Artificial Sequence
  ENSG00000158711_45 (sequence is synthesized)
aaaaattcatatgggtatatgttaaattatataccgctataccaaagtaatatgtgtgttataaaaaaatacacaaaaattgaagtgaaggatggcataaaaagtaattcttgagtagca

SEQ ID NO: 467857 - DNA, 120 bp, Artificial Sequence
  ENSG00000158711_46 (sequence is synthesized)
gttatagtattttcttcccacaccccagttggttgtcttgtgcaccctccagaagcacacgcttttcctaaagactgctgactcaggatattctcattctaatctccaaacatatatgat

SEQ ID NO: 467858 - DNA, 120 bp, Artificial Sequence
  ENSG00000158711_47 (sequence is synthesized)
gctctcttatgatatatggagaaatcctagagatttggagtttttcaggagagcttattgtcaacttttgaaatttcacattaattctttttgataaattcccaaataataatccattac

SEQ ID NO: 467859 - DNA, 120 bp, Artificial Sequence
  ENSG00000158711_48 (sequence is synthesized)
cacatgttttccacagctttattcctattactttcgtcagcctgttgtctcttatcttcatgttaggtatgactctatttttattttactagtctgctcacagacttctttgggacttat

SEQ ID NO: 467860 - DNA, 120 bp, Artificial Sequence
  ENSG00000158711_49 (sequence is synthesized)
gttatattttaccaacaaatttagaattatttcaagttgctttatgttaaaatatataacaagttacattttcttgctgcattaataagtttttgatttttaaaatctgatatttcagca

SEQ ID NO: 467861 - DNA, 120 bp, Artificial Sequence
  ENSG00000158711_50 (sequence is synthesized)
actaaaggaatacttttctttataggtctgttctgtttttaacctcattgactgtatatgttttatttacccgtgccaggagtctagaatcgtgcttaggtgccattcttaggtatgaaa

SEQ ID NO: 467862 - DNA, 120 bp, Artificial Sequence
  ENSG00000158711_51 (sequence is synthesized)
acaagtttggagaccaatgcaggtctctgtgcagaaatctggggctctaaatgaattaccaaaccaataggaaagttaaaatactactcatgatgtagtgtgtcatctgaagctatgata

SEQ ID NO: 467863 - DNA, 120 bp, Artificial Sequence
  ENSG00000158711_52 (sequence is synthesized)
gaatatattatttctaaaatagtattgagaagttaattgttcagtccatagtagtgtaagtgaagtgtggaggtcagccatagttgtctttcttcagcaggtactctaaccagagactgg

SEQ ID NO: 467864 - DNA, 120 bp, Artificial Sequence
  ENSG00000158711_53 (sequence is synthesized)
gttctgtggaaaatagaattatattcttggtttgggatcaacaaatgttttgttattgttttaatgttgctggcattgcctgaaacaaagtgccctgttattcctcttatgtcatcagaa

SEQ ID NO: 467865 - DNA, 120 bp, Artificial Sequence
  ENSG00000158711_54 (sequence is synthesized)
ctctgcttactgaagttgaagtttaatcttaggatctagaattcttgtggttggtcgtgtattaagaaaagaaggtggtttgattttatttcttgtacttggtggaacctgttactatac

SEQ ID NO: 467866 - DNA, 120 bp, Artificial Sequence
  ENSG00000158711_55 (sequence is synthesized)
aagtcatgttttgacctgtaagccgagcaaatctgaaaggtgaatcgttaatggtagtataattgtttcatttgaaactgtcagtttcttcaagtcacttctctgaaaaaaattatgata

SEQ ID NO: 467867 - DNA, 120 bp, Artificial Sequence
  ENSG00000158711_56 (sequence is synthesized)
gattgatagcctgccagaaaatagcaatttctaaggtgctgccatccacacttacttattgtgaaatatgaaaatccagagtggtttgtatgagaggggaaatactggctctaagctttc

SEQ ID NO: 467868 - DNA, 120 bp, Artificial Sequence
  ENSG00000158711_57 (sequence is synthesized)
tacagaaaacaggaaattcatgctgttgttgacataattttaaaggaaacttttaacaagaaaattcatgagggatacaatcaaacatagttaatctcttgagtgctaatcatttgagta

SEQ ID NO: 467869 - DNA, 120 bp, Artificial Sequence
  ENSG00000158711_58 (sequence is synthesized)
tagtccacatcaggaagttttatgaggttgaaaactttactttgaaatatttaattgggagactagaccatttctttttccaagtcattctgatttattgtcctagtaaatgtatgtgta

SEQ ID NO: 467870 - DNA, 120 bp, Artificial Sequence
  ENSG00000158711_59 (sequence is synthesized)
tgcatatatactgatgtattgactgaatgtgtgtgtgtgtgtgtgtgcgcgtgtaaatctgttttcatagggaacatacattgatggctcctagtctattttatactaaaacttaaaaaa

SEQ ID NO: 467871 - DNA, 120 bp, Artificial Sequence
  ENSG00000158711_60 (sequence is synthesized)
atttgctgcactttgcagttgccactttttaaaagattaatgctttgcacatttcagtaggccttaaagatgaattgctcaccaacattttagaaatacactgcttacatgtgacatact

SEQ ID NO: 467872 - DNA, 120 bp, Artificial Sequence
  ENSG00000158711_61 (sequence is synthesized)
ctaaacaaagtcatagtaaactgttctcttaggttcatgtattattgagcaaataaggatgtcctttcttaaaatttctacatttatgtttgcttttgtgtaaaatctttattagtttgt

SEQ ID NO: 467873 - DNA, 120 bp, Artificial Sequence
  ENSG00000158711_62 (sequence is synthesized)
aagtttctcaaagaggaggtttatactggaagcagtatttctaaagtacagagattcgaccatggattgaatacagtagtggaggaatgctggtattgtggcctaatttatccttttaaa

SEQ ID NO: 467874 - DNA, 120 bp, Artificial Sequence
  ENSG00000158711_63 (sequence is synthesized)
ctgtatgtcattagtattagccaaaacctcagagtggagtgtcttgggctgaatgatcttctcaactttgccttgtttcccatctcataaaggctccttctggttcttttcccttccaag

SEQ ID NO: 467875 - DNA, 120 bp, Artificial Sequence
  ENSG00000158711_64 (sequence is synthesized)
gattgtgagtcatgctcacataggcctgggatcttctggatggggtcggggaggaggtgggggtttcctgtggctggcccagagttctagccaatggaatcattcaagaatgcctaaagt

SEQ ID NO: 467876 - DNA, 120 bp, Artificial Sequence
  ENSG00000158711_65 (sequence is synthesized)
tcaggggtgggaatgccatatattggtgttaatcacttggcactttcttgggcaccaatattagcactgtttcatttttaataactggaagcacttaatgattattttgtttgtttaatt

SEQ ID NO: 467877 - DNA, 120 bp, Artificial Sequence
  ENSG00000158711_66 (sequence is synthesized)
tcaacttaaggatattgagggtcagagaagtaaggtttatttcttgtttatgttttctggaatttatagggtgtttgtagaagggataaatgggttacctaatgagccattcttctaggc

SEQ ID NO: 467878 - DNA, 120 bp, Artificial Sequence
  ENSG00000158711_67 (sequence is synthesized)
tctgtaaggtatgcccttttggctaggatattttaaaataatttgcaagcttttaatattgtgctttgtagaaatttacgatttttaaaaataatttgcaattgatagattacacttaaa

SEQ ID NO: 467879 - DNA, 120 bp, Artificial Sequence
  ENSG00000158711_68 (sequence is synthesized)
tttataaagtatccaattttaagtttcttttctgtttggtcattgttgcttattgtctattgtgtaggggacacaatcctgacatttcattgttttgttacttggggcagtattaaccag

SEQ ID NO: 467880 - DNA, 120 bp, Artificial Sequence
  ENSG00000158711_69 (sequence is synthesized)
tggcctttgtatgtacattcattgcttacatttattgtttaagtggtagagtagcatttttatgaacttccctgttcagtattagtgaaattgacagatgcgtatatgtaaagatagaaa

SEQ ID NO: 467881 - DNA, 120 bp, Artificial Sequence
  ENSG00000158711_70 (sequence is synthesized)
agaaacgaatacaattaattttttattccttgaggcctatttatttgttttggccctggatcttttctaatcacaattatatttctttatttttgcctttgagcagtttcatttatcttt

SEQ ID NO: 467882 - DNA, 120 bp, Artificial Sequence
  ENSG00000158711_71 (sequence is synthesized)
gtgggcagggaagattaaatatgaaattcagtccagtcattttgctactggttagctttagtttgaggcaagtaaaaatttttgattaaaattagtttcttaaaattatgcccttgcttt

SEQ ID NO: 467883 - DNA, 120 bp, Artificial Sequence
  ENSG00000158711_72 (sequence is synthesized)
accaaataatcaaattggctaaaaaataagggtatgtaactttgcattttgaagaacaaaccaataatttttcatgagccctactcgatcttctttaaagaagaccttcctaagagacaa

SEQ ID NO: 467884 - DNA, 120 bp, Artificial Sequence
  ENSG00000158711_73 (sequence is synthesized)
ttagggatgagtttgattaatgggaaatagctctaggttagattattttaaattccatacaccaagtgatttaaccacagtggcagtggcagtttctgaaccgtcaagtatgaacatcac

SEQ ID NO: 467885 - DNA, 120 bp, Artificial Sequence
  ENSG00000158711_74 (sequence is synthesized)
ttaaaaattaaaagatgcttaataataaactcttaattttcattaagccaatctgtaattcagaagaaaagcatatgtctgccatgggactattgcagtgcgtctccatcagtgttaaca

SEQ ID NO: 467886 - DNA, 120 bp, Artificial Sequence
  ENSG00000158711_75 (sequence is synthesized)
caggagagatatgttattttatgtgtatgtcttagtttgggatatgtggtagtaagaacatgtcaagagtgctttcttcaaacctgtcagctcaactgagaagacagttacttcattgct

SEQ ID NO: 467887 - DNA, 120 bp, Artificial Sequence
  ENSG00000158711_76 (sequence is synthesized)
tattttttcccttgttttattgaaatctgtatctcatatccagtatctaacactttgtagagatacttacatataatgtaagtgcacacctacccagaggaatggataactgttaaagtg

SEQ ID NO: 467888 - DNA, 120 bp, Artificial Sequence
  ENSG00000158711_77 (sequence is synthesized)
ttaataatagctcgtcttagttgatttcagcataatttacattagggagacctaaaaagcaccttcaaagtattaaaagcaccttttttttttctttttcctaaaaaagcaattaaaatg

SEQ ID NO: 467889 - DNA, 120 bp, Artificial Sequence
  ENSG00000158711_78 (sequence is synthesized)
gtcactgctaacatttattaaacttcatgttagttgatgaaacagctggagggaagctgccacatctcctagctaagcagtctgacttacctgttgggaaacaaagggatattgctctaa

SEQ ID NO: 467890 - DNA, 120 bp, Artificial Sequence
  ENSG00000158711_79 (sequence is synthesized)
gattgattaggatgattgtagctagagtcttgaattctatctgtatacggcagagaaactttatagagtgtagagaggtgagcgaaaggatgcaaaagcactttgagggctttataataa

SEQ ID NO: 467891 - DNA, 120 bp, Artificial Sequence
  ENSG00000158711_80 (sequence is synthesized)
tatgctgcttgaaaaaaaaaatgtgtagttgatactcagtgcatctccagacatagtaaggggttgctctgaccaatcaggtgatcattttttctatcacttcccaggttttatgcaaaa

SEQ ID NO: 467892 - DNA, 120 bp, Artificial Sequence
  ENSG00000158711_81 (sequence is synthesized)
attttgttaaattctataatggtgatatgcatcttttaggaaagatatacatttttaaaaatctattttatgtaagaactgacagaggaatttgctttgtataatgcaggctggctttac

SEQ ID NO: 467893 - DNA, 120 bp, Artificial Sequence
  ENSG00000158711_82 (sequence is synthesized)
aaaagcactgtagcaaatttactacaagtctaaaagtatacatatatgttaatagatatatgtgcaactagatatggacagcagttgtatttttttaaataaatatttttaacaaaatga

SEQ ID NO: 467894 - DNA, 120 bp, Artificial Sequence
  ENSG00000158711_83 (sequence is synthesized)
tgtctcccatgaataaggagcccattaagtgttattcatttaatgttcagcaaatattaattgaatgtaggtcttaaatgaaactcctgtgtgtgtgcaaccagtactgctgtctcagaa

SEQ ID NO: 467895 - DNA, 120 bp, Artificial Sequence
  ENSG00000158711_84 (sequence is synthesized)
gtgaggctatagttagtgctgttttgggggccacctttccttctgggcctttgtactgagcgtttagagcgtagatatgttcacccactgagagcggatggtgaatgcctgttcctttag

SEQ ID NO: 467896 - DNA, 120 bp, Artificial Sequence
  ENSG00000158711_85 (sequence is synthesized)
agtctccgcctgggcaccttctcttaagaactggctttgcacacagccgatgcagtccctgggcactttgaaagcagtgggcaaaagggcaggttacactaaagcaagtcccagatgtca

SEQ ID NO: 467897 - DNA, 120 bp, Artificial Sequence
  ENSG00000158711_86 (sequence is synthesized)
catcatttcaatgaggagggtatggtgagatgcagctcttcccctccctccagcagggcaaaagaggaggaaaggagaatggagtcacaatgagggagattttggaggccggaagatcta

SEQ ID NO: 467898 - DNA, 120 bp, Artificial Sequence
  ENSG00000158711_87 (sequence is synthesized)
gatgtgaggtcctctctgtcagtttctggaagtgtgactgacctagggtccccacataccgaaccaaccagcatctgcagcaccatctcgccaactcctgcccctgtcaccagcactgtg

SEQ ID NO: 467899 - DNA, 120 bp, Artificial Sequence
  ENSG00000158711_88 (sequence is synthesized)
aacagggtgattccacaggattctgaaatgtccaaattcctgaaaggaagatgaggaagaaagtcctacttgtgtaactgagaagcgtgtggtaatgatctcaaacccagagtatggtcc

SEQ ID NO: 467900 - DNA, 120 bp, Artificial Sequence
  ENSG00000158711_89 (sequence is synthesized)
atgcatgaggtgacaaatggagtgaagcgcgcggctgtctccttccttcccatctgggtatctggacagctcttaccaacagtctgaaccagggaagaagataacttgagaagccaggga

SEQ ID NO: 467901 - DNA, 85 bp, Artificial Sequence
  ENSG00000158711_90 (sequence is synthesized)
tccaggttgctggccaggcacagtggcatatgcatttcggaaggcacatcccagtactttaggagtcagaagtgggaggatctat

SEQ ID NO: 467902 - DNA, 120 bp, Artificial Sequence
  ENSG00000158711_91 (sequence is synthesized)
taggtttgtcttagaaaggttatgtgtgactgtcatgtgaaagttaccccatttctcatcttaattaggattgctaaaatagaaagtttggagtattttcttaaaaaattcattgttcta

SEQ ID NO: 467903 - DNA, 120 bp, Artificial Sequence
  ENSG00000158711_92 (sequence is synthesized)
caagtaaataaatattttgatttttctatttcctcctaaagaaagtacacacactctctcgctctctctcggtcttataaaactcgttggtgtcttataaaacaaacagtgataatctca

SEQ ID NO: 467904 - DNA, 120 bp, Artificial Sequence
  ENSG00000158711_93 (sequence is synthesized)
agttagaaaacagtaggtcctgagaaccataagaaaaatgactggtgtgatgttgagtaacaagttggtacagttactttagctatttattaacttgctcatctcatagaacattttagt

SEQ ID NO: 467905 - DNA, 120 bp, Artificial Sequence
  ENSG00000158711_94 (sequence is synthesized)
agatttttcacacacctcattattaaaaaaaaacaaacatgctggtgtcttggttacccattattcctctgtacctgaattcaggttggtttttctatttggaaaagactttataaatgt

SEQ ID NO: 467906 - DNA, 120 bp, Artificial Sequence
  ENSG00000158711_95 (sequence is synthesized)
tggcttaaaaagaggttgagcaccagaatctcagaatttaccaccaaagaactcatccatgtaaccaaaaaccacttgtacccccaaaaactattgaaataaaaatttaaaaaattttaa

SEQ ID NO: 467907 - DNA, 120 bp, Artificial Sequence
  ENSG00000158714_0 (sequence is synthesized)
gagtttgcctgcctctccagagaaagatggtcatgaggcccctgtggagtctgcttctctgggaagccctacttcccattacagttactggtgcccaagtgctgagcaaagtcgggggct

SEQ ID NO: 467908 - DNA, 120 bp, Artificial Sequence
  ENSG00000158714_1 (sequence is synthesized)
cggtgctgctggtggcagcgcgtccccctggcttccaagtccgtgaggctatctggcgatctctctggccttcagaagagctcctggccacgtttttccgaggctccctggagactctgt

SEQ ID NO: 467909 - DNA, 120 bp, Artificial Sequence
  ENSG00000158714_2 (sequence is synthesized)
accattcccgcttcctgggccgagcccagctacacagcaacctcagcctggagctcgggccgctggagtctggagacagcggcaacttctccgtgttgatggtggacacaaggggccagc

SEQ ID NO: 467910 - DNA, 120 bp, Artificial Sequence
  ENSG00000158714_3 (sequence is synthesized)
cctggacccagaccctccagctcaaggtgtacgatgcagtgcccaggcccgtggtacaagtgttcattgctgtagaaagggatgctcagccctccaagacctgccaggttttcttgtcct

SEQ ID NO: 467911 - DNA, 120 bp, Artificial Sequence
  ENSG00000158714_4 (sequence is synthesized)
gttgggcccccaacatcagcgaaataacctatagctggcgacgggagacaaccatggactttggtatggaaccacacagcctcttcacagacggacaggtgctgagcatttccctgggac

SEQ ID NO: 467912 - DNA, 120 bp, Artificial Sequence
  ENSG00000158714_5 (sequence is synthesized)
caggagacagagatgtggcctattcctgcattgtctccaaccctgtcagctgggacttggccacagtcacgccctgggatagctgtcatcatgaggcagcaccagggaaggcctcctaca

SEQ ID NO: 467913 - DNA, 120 bp, Artificial Sequence
  ENSG00000158714_6 (sequence is synthesized)
aagatgtgctgctggtggtggtgcctgtctcgctgctcctgatgctggttactctcttctctgcctggcactggtgcccctgctcagggaaaaagaaaaaggatgtccatgctgacagag

SEQ ID NO: 467914 - DNA, 120 bp, Artificial Sequence
  ENSG00000158714_7 (sequence is synthesized)
tgggtccagagacagagaacccccttgtgcaggatctgccataaaggacaatatgaactgatgcctggactatcagtaaccccactgcacaggcacacgatgctctgggacataactggt

SEQ ID NO: 467915 - DNA, 120 bp, Artificial Sequence
  ENSG00000158714_8 (sequence is synthesized)
gcctggaaatcaccatggtcctcatatctcccatgggaatcctgtcctgcctcgaaggagcagcctgggcagccatcacaccacgaggacaggaagcaccagcacgtttcacacctcccc

SEQ ID NO: 467916 - DNA, 120 bp, Artificial Sequence
  ENSG00000158714_9 (sequence is synthesized)
cttccctctcccatcttctcatatcctggctcttctctgggcaagatgagccaagcagaacattccatccaggacactggaagttctccaggatccagatccatggggacattaatagtc

SEQ ID NO: 467917 - DNA, 120 bp, Artificial Sequence
  ENSG00000158714_10 (sequence is synthesized)
caaggcattccctcccccaccactattcataaagtattaaccaactggcaccaaggaattgcctccagcctgagtcctaggctctaaaagatattacatatttgaactaatagaggaact

SEQ ID NO: 467918 - DNA, 120 bp, Artificial Sequence
  ENSG00000158714_11 (sequence is synthesized)
ctgagtcacccatgccagcatcagcttcagccccagaccctgcagtttgagatctgatgcttcctgagggccaaggcattgctgtaagaaaaggtctagaaataggtgaaagtgagaggt

SEQ ID NO: 467919 - DNA, 120 bp, Artificial Sequence
  ENSG00000158714_12 (sequence is synthesized)
atgggcaccgttttgcaggaaacaccatattaatagacatcctcaccatctccatccgctctcacgcctcctgcaggatctgggagtgagggtggagagtctttcctcacgctccagcac

SEQ ID NO: 467920 - DNA, 120 bp, Artificial Sequence
  ENSG00000158714_13 (sequence is synthesized)
agtggccaggaaaagaaatactgaatttgccccagccaacaggacgttcttgcacaacttcaagaaaagcagctcagctcaggatgagtcttcctgcctgaaactgagagagtgaagaac

SEQ ID NO: 467921 - DNA, 120 bp, Artificial Sequence
  ENSG00000158714_14 (sequence is synthesized)
cataaaacgctatgcagaaggaacattatggagagaaagggtactgaggcactctagaatctgccacattcattttcaaatgcaaatgcagaagacttaccttagttcaaggggagggga

SEQ ID NO: 467922 - DNA, 120 bp, Artificial Sequence
  ENSG00000158714_15 (sequence is synthesized)
caaagaccccacagcccaacagcaggactgtagaggtcactctgactccatcaaactttttattgtggccatcttaggaaaatacattctgcccctgaatgattctgtctagaaaagctc

SEQ ID NO: 467923 - DNA, 120 bp, Artificial Sequence
  ENSG00000158714_16 (sequence is synthesized)
tggagtattgatcactactggaaaaacacttaaggagctaaacttaccttcggggattattagctgataaggttcacagtttctctcacccaggtgtaactggattttttctggggcctc

SEQ ID NO: 467924 - DNA, 120 bp, Artificial Sequence
  ENSG00000158714_17 (sequence is synthesized)
aatccagtcttgataacagcgaggaaagaggtattgaagaaacaggggtgggtttgaagtactattttcccagggtggcttcaatctccccacctaggatgtcagccctgtccaaggacc

SEQ ID NO: 467925 - DNA, 120 bp, Artificial Sequence
  ENSG00000158714_18 (sequence is synthesized)
ttccctcttctccccagttcctgggcaatcacttcaccttggacaaaggatcagcacagctggcctccagatccacatcaccactcttccactcgattgttcccagatcctccctgcctg

SEQ ID NO: 467926 - DNA, 120 bp, Artificial Sequence
  ENSG00000158714_19 (sequence is synthesized)
gcctgctcagaggttccctgttggtaacctggctttatcaaattctcatccctttcccacacccacttctctcctatcaccttcccccaagattacctgaacagggtccatggccactca

SEQ ID NO: 467927 - DNA, 120 bp, Artificial Sequence
  ENSG00000158714_20 (sequence is synthesized)
acctgtcagcttgcaccatccccacctgccacctacagtcaggccacatgcctggtcactgaatcatgcaaaactggcctcagtccctaaaaatgatgtggaaaggaaagcccaggatct

SEQ ID NO: 467928 - DNA, 120 bp, Artificial Sequence
  ENSG00000158714_21 (sequence is synthesized)
gacaatgagccctggtggatttgtggggaaaaaatacacagcactccccacctttctttcgttcatctccagggccccacctcagatcaaagcagctctggatgagatgggacctgcagc

SEQ ID NO: 467929 - DNA, 120 bp, Artificial Sequence
  ENSG00000158714_22 (sequence is synthesized)
tctccctccacaaggtgactcttagcaacctcatttcgacagtggtttgtagcgtggtgcaccagggccttgttgaacagatccacactgctctaataaagttcccatccttaatgactc

SEQ ID NO: 467930 - DNA, 120 bp, Artificial Sequence
  ENSG00000158714_23 (sequence is synthesized)
acttgtcaactagtggactaattaaccctccaccaaaaaaacacaaagtgcttctgtgagaccaattttgtgctaatgagcattgagactgatgctttgtaagtcacaccacaacaaata

SEQ ID NO: 467931 - DNA, 120 bp, Artificial Sequence
  ENSG00000158714_24 (sequence is synthesized)
ttgattgagggcgctgcatgtgctgggtacatttcttggcacttgggaatcagtagtcaagcgaaacccttgcctttgagagtttatggtctggataatataaataaacaagtaagcata

SEQ ID NO: 467932 - DNA, 120 bp, Artificial Sequence
  ENSG00000158714_25 (sequence is synthesized)
ggaccacagctcctcccgtgcatccactcggcctgggaggttctggattttggctgtcgagggagtttgcctgcctctccagagaaagatggtcatgaggcccctgtggagtctgcttct

SEQ ID NO: 467933 - DNA, 120 bp, Artificial Sequence
  ENSG00000158715_0 (sequence is synthesized)
gcggagtaacctggagatttaaaagccgccggctggcgcgcgtggggggcaaggaagggggggcggaaccagcctgcacgcgctggctccgggtgacagccgcgcgcctcggccaggatc

SEQ ID NO: 467934 - DNA, 120 bp, Artificial Sequence
  ENSG00000158715_1 (sequence is synthesized)
tgagtgatgagacgtgtccccactgaggtgccccacagcagcaggtgttgagcatgggctgagaagctggaccggcaccaaagggctggcagaaatgggcgcctggctgattcctaggca

SEQ ID NO: 467935 - DNA, 120 bp, Artificial Sequence
  ENSG00000158715_2 (sequence is synthesized)
gttggcggcagcaaggaggagaggccgcagcttctggagcagagccgagacgaagcagttctggagtgcctgaacggccccctgagccctacccgcctggcccactatggtccagaggct

SEQ ID NO: 467936 - DNA, 120 bp, Artificial Sequence
  ENSG00000158715_3 (sequence is synthesized)
gtgggtgagccgcctgctgcggcaccggaaagcccagctcttgctggtcaacctgctaacctttggcctggaggtgtgtttggccgcaggcatcacctatgtgccgcctctgctgctgga

SEQ ID NO: 467937 - DNA, 120 bp, Artificial Sequence
  ENSG00000158715_4 (sequence is synthesized)
agtgggggtagaggagaagttcatgaccatggtgctgggcattggtccagtgctgggcctggtctgtgtcccgctcctaggctcagccagtgaccactggcgtggacgctatggccgccg

SEQ ID NO: 467938 - DNA, 120 bp, Artificial Sequence
  ENSG00000158715_5 (sequence is synthesized)
ccggcccttcatctgggcactgtccttgggcatcctgctgagcctctttctcatcccaagggccggctggctagcagggctgctgtgcccggatcccaggcccctggagctggcactgct

SEQ ID NO: 467939 - DNA, 120 bp, Artificial Sequence
  ENSG00000158715_6 (sequence is synthesized)
catcctgggcgtggggctgctggacttctgtggccaggtgtgcttcactccactggaggccctgctctctgacctcttccgggacccggaccactgtcgccaggcctactctgtctatgc

SEQ ID NO: 467940 - DNA, 120 bp, Artificial Sequence
  ENSG00000158715_7 (sequence is synthesized)
cttcatgatcagtcttgggggctgcctgggctacctcctgcctgccattgactgggacaccagtgccctggccccctacctgggcacccaggaggagtgcctctttggcctgctcaccct

SEQ ID NO: 467941 - DNA, 120 bp, Artificial Sequence
  ENSG00000158715_8 (sequence is synthesized)
catcttcctcacctgcgtagcagccacactgctggtggctgaggaggcagcgctgggccccaccgagccagcagaagggctgtcggccccctccttgtcgccccactgctgtccatgccg

SEQ ID NO: 467942 - DNA, 120 bp, Artificial Sequence
  ENSG00000158715_9 (sequence is synthesized)
ggcccgcttggctttccggaacctgggcgccctgcttccccggctgcaccagctgtgctgccgcatgccccgcaccctgcgccggctcttcgtggctgagctgtgcagctggatggcact

SEQ ID NO: 467943 - DNA, 120 bp, Artificial Sequence
  ENSG00000158715_10 (sequence is synthesized)
catgaccttcacgctgttttacacggatttcgtgggcgaggggctgtaccagggcgtgcccagagctgagccgggcaccgaggcccggagacactatgatgaaggcgttcggatgggcag

SEQ ID NO: 467944 - DNA, 120 bp, Artificial Sequence
  ENSG00000158715_11 (sequence is synthesized)
cctggggctgttcctgcagtgcgccatctccctggtcttctctctggtcatggaccggctggtgcagcgattcggcactcgagcagtctatttggccagtgtggcagctttccctgtggc

SEQ ID NO: 467945 - DNA, 120 bp, Artificial Sequence
  ENSG00000158715_12 (sequence is synthesized)
tgccggtgccacatgcctgtcccacagtgtggccgtggtgacagcttcagccgccctcaccgggttcaccttctcagccctgcagatcctgccctacacactggcctccctctaccaccg

SEQ ID NO: 467946 - DNA, 120 bp, Artificial Sequence
  ENSG00000158715_13 (sequence is synthesized)
ggagaagcaggtgttcctgcccaaataccgaggggacactggaggtgctagcagtgaggacagcctgatgaccagcttcctgccaggccctaagcctggagctcccttccctaatggaca

SEQ ID NO: 467947 - DNA, 120 bp, Artificial Sequence
  ENSG00000158715_14 (sequence is synthesized)
cctccacccgcgctctgcggggcctctgcctgtgatgtctccgtacgtgtggtggtgggtgagcccaccgaggccagggtggttccgggccggggcatctgcctggacctcgccatcctg

SEQ ID NO: 467948 - DNA, 120 bp, Artificial Sequence
  ENSG00000158715_15 (sequence is synthesized)
gatagtgccttcctgctgtcccaggtggccccatccctgtttatgggctccattgtccagctcagccagtctgtcactgcctatatggtgtctgccgcaggcctgggtctggtcgccatt

SEQ ID NO: 467949 - DNA, 120 bp, Artificial Sequence
  ENSG00000158715_16 (sequence is synthesized)
tactttgctacacaggtagtatttgacaagagcgacttggccaaatactcagcgtagaaaacttccagcacattggggtggagggcctgcctcactgggtcccagctccccgctcctgtt

SEQ ID NO: 467950 - DNA, 120 bp, Artificial Sequence
  ENSG00000158715_17 (sequence is synthesized)
agccccatggggctgccgggctggccgccagtttctgttgctgccaaagtaatgtggctctctgctgccaccctgtgctgctgaggtgcgtagctgcacagctgggggctggggcgtccc

SEQ ID NO: 467951 - DNA, 120 bp, Artificial Sequence
  ENSG00000158715_18 (sequence is synthesized)
tctcctctctccccagtctctagggctgcctgactggaggccttccaagggggtttcagtctggacttatacagggaggccagaagggctccatgcactggaatgcggggactctgcagg

SEQ ID NO: 467952 - DNA, 120 bp, Artificial Sequence
  ENSG00000158715_19 (sequence is synthesized)
tggattacccaggctcagggttaacagctagcctcctagttgagacacacctagagaagggtttttgggagctgaataaactcagtcacctggtttcccatctctaagccccttaacctg

SEQ ID NO: 467953 - DNA, 120 bp, Artificial Sequence
  ENSG00000158715_20 (sequence is synthesized)
cagcttcgtttaatgtagctcttgcatgggagtttctaggatgaaacactcctccatgggatttgaacatatgaaagttatttgtaggggaagagtcctgaggggcaacacacaagaacc

SEQ ID NO: 467954 - DNA, 120 bp, Artificial Sequence
  ENSG00000158715_21 (sequence is synthesized)
aggtcccctcagcccacagcactgtctttttgctgatccacccccctcttaccttttatcaggatgtggcctgttggtccttctgttgccatcacagagacacaggcatttaaatattta

SEQ ID NO: 467955 - DNA, 120 bp, Artificial Sequence
  ENSG00000158715_22 (sequence is synthesized)
acttatttatttaacaaagtagaagggaatccattgctagcttttctgtgttggtgtctaatatttgggtagggtgggggatccccaacaatcaggtcccctgagatagctggtcattgg

SEQ ID NO: 467956 - DNA, 120 bp, Artificial Sequence
  ENSG00000158715_23 (sequence is synthesized)
gctgatcattgccagaatcttcttctcctggggtctggccccccaaaatgcctaacccaggaccttggaaattctactcatcccaaatgataattccaaatgctgttacccaaggttagg

SEQ ID NO: 467957 - DNA, 120 bp, Artificial Sequence
  ENSG00000158715_24 (sequence is synthesized)
gtgttgaaggaaggtagagggtggggcttcaggtctcaacggcttccctaaccacccctcttctcttggcccagcctggttccccccacttccactcccctctactctctctaggactgg

SEQ ID NO: 467958 - DNA, 120 bp, Artificial Sequence
  ENSG00000158715_25 (sequence is synthesized)
gctgatgaaggcactgcccaaaatttcccctacccccaactttcccctacccccaactttccccaccagctccacaaccctgtttggagctactgcaggaccagaagcacaaagtgcggt

SEQ ID NO: 467959 - DNA, 120 bp, Artificial Sequence
  ENSG00000158715_26 (sequence is synthesized)
ttcccaagcctttgtccatctcagcccccagagtatatctgtgcttggggaatctcacacagaaactcaggagcaccccctgcctgagctaagggaggtcttatctctcagggggggttt

SEQ ID NO: 467960 - DNA, 120 bp, Artificial Sequence
  ENSG00000158715_27 (sequence is synthesized)
aagtgccgtttgcaataatgtcgtcttatttatttagcggggtgaatattttatactgtaagtgagcaatcagagtataatgtttatggtgacaaaattaaaggctttcttatatgttta

SEQ ID NO: 467961 - DNA, 120 bp, Artificial Sequence
  ENSG00000158715_28 (sequence is synthesized)
atctctgcttgcggtttcaggaaggcctctggctgctctaggagtctgatcagagtcgttgccccagtttgacagaaggaaaggcggagcttattcaaagtctagagggagtggaggagt

SEQ ID NO: 467962 - DNA, 120 bp, Artificial Sequence
  ENSG00000158715_29 (sequence is synthesized)
taaggctggatttcagatctgcctggttccagccgcagtgtgccctctgctcccccaacgactttccaaataatctcaccagcgccttccagctcaggcgtcctagaagcgtcttgaagc

SEQ ID NO: 467963 - DNA, 120 bp, Artificial Sequence
  ENSG00000158715_30 (sequence is synthesized)
ctatggccagctgtctttgtgttccctctcacccgcctgtcctcacagctgagactcccaggaaaccttcagactaccttcctctgccttcagcaaggggcgttgcccacattctctgag

SEQ ID NO: 467964 - DNA, 120 bp, Artificial Sequence
  ENSG00000158716_0 (sequence is synthesized)
agaccacgtggcccgggaggcgccgaggccaggtaggtggtgagttacttggctcggagcgggcgaggggacgcgtgggcggagcggggctggccagcctcggcccccatgacccgctgt

SEQ ID NO: 467965 - DNA, 120 bp, Artificial Sequence
  ENSG00000158716_1 (sequence is synthesized)
cctgtgccctttcccagcgatgggcgtgcagccccccaacttctcctgggtgcttccgggccggctggcgggactggcgctgccgcggctccccgcccactaccagttcctgttggacct

SEQ ID NO: 467966 - DNA, 120 bp, Artificial Sequence
  ENSG00000158716_2 (sequence is synthesized)
gggcgtgcggcacctggtgtccctgacggagcgcgggccccctcacagcgacagctgccccggcctcaccctgcaccgcctgcgcatccccgacttctgcccgccggcccccgaccagat

SEQ ID NO: 467967 - DNA, 120 bp, Artificial Sequence
  ENSG00000158716_3 (sequence is synthesized)
gccgcactggcaccatgctggcctgttacctggtgaaggagcggggcttggctgcaggagatgccattgctgaaatccgacgactacgacccggctccatcgagacctatgagcaggaga

SEQ ID NO: 467968 - DNA, 120 bp, Artificial Sequence
  ENSG00000158716_4 (sequence is synthesized)
aagcagtcttccagttctaccagcgaacgaaataaggggccttagtacccttctaccaggccctcactccccttccccatgttgtcgatggggccagagatgaagggaagtggactaaag

SEQ ID NO: 467969 - DNA, 120 bp, Artificial Sequence
  ENSG00000158716_5 (sequence is synthesized)
tattaaaccctctagctcccattggctgaagacactgaagtagcccacccctgcaggcaggtcctgattgaaggggaggcttgtactgctttgttgaataaatgagttttacgaaccagg

SEQ ID NO: 467970 - DNA, 120 bp, Artificial Sequence
  ENSG00000158717_0 (sequence is synthesized)
gcagtagcggctgtgactagcgggccggcccgggccaggacagcgggcggcgggcggcgcgggcctggccccgggatggctatgttccgcagcctggtggcctcggctcagcagcggcag

SEQ ID NO: 467971 - DNA, 120 bp, Artificial Sequence
  ENSG00000158717_1 (sequence is synthesized)
agcggcagccgccggccgggccggcgggcggcgacagcggcctggaggcgcagtacacctgccccatctgcctggaggtctatcaccggcccgtggccatcggcagctgcggccacacgt

SEQ ID NO: 467972 - DNA, 120 bp, Artificial Sequence
  ENSG00000158717_2 (sequence is synthesized)
tctgcggggagtgtctccagccctgcctgcaggtgccatccccgctgtgcccactctgccgcctgcccttcgaccccaagaaggtggacaaggccacccacgtggagaagcagctctcat

SEQ ID NO: 467973 - DNA, 120 bp, Artificial Sequence
  ENSG00000158717_3 (sequence is synthesized)
cctacaaagcgccctgtcgaggctgcaacaaaaaggtgaccctggcaaagatgagagtgcacatttcgtcctgcctgaaggtccaggagcagatggccaactgccccaagttcgtccccg

SEQ ID NO: 467974 - DNA, 120 bp, Artificial Sequence
  ENSG00000158717_4 (sequence is synthesized)
tggtgcccacatcacagcctatccccagcaacatccccaacaggtccaccttcgcctgcccgtactgtggtgcccgcaacctggaccagcaggagctggtgaagcactgtgtggaaagcc

SEQ ID NO: 467975 - DNA, 120 bp, Artificial Sequence
  ENSG00000158717_5 (sequence is synthesized)
accgcagcgaccccaaccgcgtggtgtgccccatctgctcggcaatgccctggggggaccccagctacaagagcgccaacttcctgcagcacctgcttcaccgacacaagttctcctacg

SEQ ID NO: 467976 - DNA, 120 bp, Artificial Sequence
  ENSG00000158717_6 (sequence is synthesized)
acacctttgtggactacagtattgacgaggaggccgccttccaggctgctctggccctgtctctctctgagaactgaagggaagcgcagccacccgcctgcgtctggggtcagggatgtc

SEQ ID NO: 467977 - DNA, 120 bp, Artificial Sequence
  ENSG00000158717_7 (sequence is synthesized)
ggagcctgcacccgcgcagaaggggagccggggccgagcctccgggcctgaatacgggccagccgccgaggccgccagagcagggccgcctggtcccaccggcgtcgctgggttcttcgg

SEQ ID NO: 467978 - DNA, 120 bp, Artificial Sequence
  ENSG00000158717_8 (sequence is synthesized)
tgcttctggccgagcaggcggcctacttgggcagggctggacgctgggacctggagctgccgccgtctcttcaaagccatgataccccctcgtgggaagaagggaccgacgcgcgagtcg

SEQ ID NO: 467979 - DNA, 120 bp, Artificial Sequence
  ENSG00000158717_9 (sequence is synthesized)
cgctccgcagtcgagccgggaggaacccaggctgctgccctgcccagcccgaccctgccccggccccacttccaccttgcgcatttggtactggcttttgtgatacttaggaaccctggc

SEQ ID NO: 467980 - DNA, 120 bp, Artificial Sequence
  ENSG00000158717_10 (sequence is synthesized)
atcttttctatattatccagtgtgataatcttttcacgttttatagagcaaagacagagcagttactcttcatattgcaatatctgtgtttgactaggaataatagtatttttatggaac

SEQ ID NO: 467981 - DNA, 120 bp, Artificial Sequence
  ENSG00000158717_11 (sequence is synthesized)
atttacaaaattatattttttaagaaaacaatcaaaacaagcattgggggattggggcaaggatggaaggagcagtggggcagctgccagagctcaggcgagccatggggtctgctgtgg

SEQ ID NO: 467982 - DNA, 120 bp, Artificial Sequence
  ENSG00000158717_12 (sequence is synthesized)
ggtctgccctggccacccactgtgtgtctgggtccttgaggtttgtacgtttctctttgatgaccaggaagaaatcccagcaccccagccacaggctgtggctgctcccagcagaggcgg

SEQ ID NO: 467983 - DNA, 120 bp, Artificial Sequence
  ENSG00000158717_13 (sequence is synthesized)
ggccggcagagaaggggcctcctccacccagagtcctggccttggcccgctgtcaccttcaaagctgactgtgccccgctgcgggaggggacggcaccccagtggtggcagagcttgggg

SEQ ID NO: 467984 - DNA, 120 bp, Artificial Sequence
  ENSG00000158717_14 (sequence is synthesized)
gcctgggcaggggcccgcttggcgggccgggcaacacgtcaacattcttttctgttcttggcattaattattgctgtcttttttttaaaaaaaaaagtttaaataaaatgtctcagagca

SEQ ID NO: 467985 - DNA, 120 bp, Artificial Sequence
  ENSG00000158717_15 (sequence is synthesized)
gcgggaaggactttcatcaacatcgaacactccagccctgtctccttttcccacccgccgcgggtcaggcacacacctggcccccgggcctgcagaccctcgcacaaactcctcactcct

SEQ ID NO: 467986 - DNA, 120 bp, Artificial Sequence
  ENSG00000158717_16 (sequence is synthesized)
ggtgcggcccctccctgcgccgccctgttcattcctggccctggctaacagtcctggcgatggctgtcactccctctgccagtcgtccgggacccacgctccgcctgcctcaggatggaa

SEQ ID NO: 467987 - DNA, 120 bp, Artificial Sequence
  ENSG00000158717_17 (sequence is synthesized)
catttcgtcctgcctgaaggtccaggagcagatggccaactgccccaagttcgtccccgtggtgcccacatcacagcctatccccagcaacatccccaacagagtcctggccttggcccg

SEQ ID NO: 467988 - DNA, 120 bp, Artificial Sequence
  ENSG00000158717_18 (sequence is synthesized)
ccacaggggcctactgtcaggagggaccggggccaccctttagccagatggggcccatccagctggtgggccccggacataggagtgaccatctccagagacggcgacagcggtaggggg

SEQ ID NO: 467989 - DNA, 120 bp, Artificial Sequence
  ENSG00000158717_19 (sequence is synthesized)
cagtcaaggacatctaagggccgagcaccctccagctgccaggagggccagagccgggctgatgggcactgccacacccacatcagagcagcgtaagggcctgcagcttgtcatgggcct

SEQ ID NO: 467990 - DNA, 120 bp, Artificial Sequence
  ENSG00000158717_20 (sequence is synthesized)
acttggcctcttcctttttctggagcaagtatttgaactcctgcaggcgccagagatctccttacctgtttcccgctacccttctccagccaggtttctgccctcggccagattgtcctg

SEQ ID NO: 467991 - DNA, 120 bp, Artificial Sequence
  ENSG00000158717_21 (sequence is synthesized)
cagtgacttgcttttggccatggagtagtggctgctcagtgcctgagattgttttagcagcagaagggaccgggtccccctgctgctggcaacacagacgcttgcttacagttctctggt

SEQ ID NO: 467992 - DNA, 120 bp, Artificial Sequence
  ENSG00000158717_22 (sequence is synthesized)
gggcccctcgccagcctcagggtccgcagggttcagaggaagccagaaacagaagcctcgtttcaggtggccacattcccccaggttctgtgggggctgcctgcaggtggggagtgatgg

SEQ ID NO: 467993 - DNA, 120 bp, Artificial Sequence
  ENSG00000158717_23 (sequence is synthesized)
accagcagccatccattccgagtgcccccgtacccagcgggtgatggacacaccttcaccttctcaccccccagaggaccgtgcaggccccgagcctgtggggacagtggagctgggtcc

SEQ ID NO: 467994 - DNA, 120 bp, Artificial Sequence
  ENSG00000158717_24 (sequence is synthesized)
ttcctgtgtcctgctggagggaggcaggaagggtggacacgcctgtgtgggtgatgggcagaggggacctctccttcctgtctccctcgagcccggtgcatctctccttcctgtctccag

SEQ ID NO: 467995 - DNA, 120 bp, Artificial Sequence
  ENSG00000158717_25 (sequence is synthesized)
ctctctgaacaccaggctggcagtcactggaaactaggccgatagagcacccaccctgtgggtgcctcgttctgcctcctgctcctcgggcccagccgccctgccagtcgggctgggttc

SEQ ID NO: 467996 - DNA, 120 bp, Artificial Sequence
  ENSG00000158717_26 (sequence is synthesized)
cctcttgtgtctttcctgagtccttccggggaggacgaggctgtcttcctcccagccaaccttctgggcacctttcctctcttcccaagctctgcctgggacccttttccttcccctcag

SEQ ID NO: 467997 - DNA, 120 bp, Artificial Sequence
  ENSG00000158717_27 (sequence is synthesized)
tcgatgcaattctagaagattcttcccactccagaaagaaacccaggactctccccctcgcctggcacccacccgtctgctttctggtcactgggtttctctctgctggacgttgagcgt

SEQ ID NO: 467998 - DNA, 120 bp, Artificial Sequence
  ENSG00000158717_28 (sequence is synthesized)
tgggtgtgcacgccacgccgtctcttcatccgtttaccgacgggcacctgagctgcttccgcttctcctgccatgagtgcctgagtatgggggtcccctgaggcctccccaggtggacca

SEQ ID NO: 467999 - DNA, 120 bp, Artificial Sequence
  ENSG00000158717_29 (sequence is synthesized)
ggtgagaactcgggtgaggttctgcggggagtgtctccagccctgcctgcaggtgccatccccgctgtgcccactctgccgcctgcccttcgaccccaagaaggtggacaaggccaccca

SEQ ID NO: 468000 - DNA, 80 bp, Artificial Sequence
  ENSG00000158747_0 (sequence is synthesized)
ctctttctgcgcgcggccctccccgctgcccccgccctcgcgccctgtttggagggagccaccctgacgtcggagccgct

SEQ ID NO: 468001 - DNA, 80 bp, Artificial Sequence
  ENSG00000158747_1 (sequence is synthesized)
ctgtttggagggagccaccctgacgtcggagccgctcccccgcgccgcgcgcccgcccggggccgcagacagcgcgcagc

SEQ ID NO: 468002 - DNA, 120 bp, Artificial Sequence
  ENSG00000158747_2 (sequence is synthesized)
cgcgacccccgcacccagctccgcaggaccggcgggcgcgcgcgggctctggaggccacgggcatgatgcttcgggtcctggtgggggctgtcctccctgccatgctactggctgcccca

SEQ ID NO: 468003 - DNA, 120 bp, Artificial Sequence
  ENSG00000158747_3 (sequence is synthesized)
ccacccatcaacaagctggcactgttcccagataagagtgcctggtgcgaagccaagaacatcacccagatcgtgggccacagcggctgtgaggccaagtccatccagaacagggcgtgc

SEQ ID NO: 468004 - DNA, 120 bp, Artificial Sequence
  ENSG00000158747_4 (sequence is synthesized)
ctaggacagtgcttcagctacagcgtccccaacaccttcccacagtccacagagtccctggttcactgtgactcctgcatgccagcccagtccatgtgggagattgtgacgctggagtgc

SEQ ID NO: 468005 - DNA, 120 bp, Artificial Sequence
  ENSG00000158747_5 (sequence is synthesized)
ccgggccacgaggaggtgcccagggtggacaagctggtggagaagatcctgcactgtagctgccaggcctgcggcaaggagcctagtcacgaggggctgagcgtctatgtgcagggcgag

SEQ ID NO: 468006 - DNA, 120 bp, Artificial Sequence
  ENSG00000158747_6 (sequence is synthesized)
gacgggccgggatcccagcccggcacccaccctcacccccatccccacccccatcctggcgggcagacccctgagcccgaggacccccctggggccccccacacagaggaagagggggct

SEQ ID NO: 468007 - DNA, 120 bp, Artificial Sequence
  ENSG00000158747_7 (sequence is synthesized)
gaggactgaggcccccccaactcttcctcccctctcatccccctgtggaatgttgggtctcactctctggggaagtcaggggagaagctgaagcccccctttggcactggatggacttgg

SEQ ID NO: 468008 - DNA, 120 bp, Artificial Sequence
  ENSG00000158747_8 (sequence is synthesized)
cttcagactcggacttgaatgctgcccggttgccatggagatctgaaggggcggggttagagccaagctgcacaatttaatatattcaagagtggggggaggaagcagaggtcttcaggg

SEQ ID NO: 468009 - DNA, 120 bp, Artificial Sequence
  ENSG00000158747_9 (sequence is synthesized)
ggggggtggtctcttcctgtctggcttctagagatgtgcctgtgggagggggaggaagttggctgagccattgagtgctgggggaggccatccaagatggcatgaatcgggctaaggtcc

SEQ ID NO: 468010 - DNA, 120 bp, Artificial Sequence
  ENSG00000158747_10 (sequence is synthesized)
ctgggggtgcagatggtactgctgaggtcccgggcttagtgtgagcatcttgccagcctcaggcttgagggagggctgggctagaaagaccactggcagaaacaggaggctccggcccac

SEQ ID NO: 468011 - DNA, 120 bp, Artificial Sequence
  ENSG00000158747_11 (sequence is synthesized)
aggtttccccaaggcctctcaccccacttcccatctccagggaagcgtcgccccagtggcactgaagtggccctccctcagcggaggggtttgggagtcaggcctgggcaggaccctgct

SEQ ID NO: 468012 - DNA, 120 bp, Artificial Sequence
  ENSG00000158747_12 (sequence is synthesized)
gactcgtggcgcgggagctgggagccaggctctccgggcctttctctggcttccttggcttgcctggtgggggaaggggaggaggggaagaaggaaagggaagagtcttccaaggccaga

SEQ ID NO: 468013 - DNA, 120 bp, Artificial Sequence
  ENSG00000158747_13 (sequence is synthesized)
aggagggggacaaccccccaagaccatccctgaagacgagcatccccctcctctccctgttagaaatgttagtgccccgcactgtgccccaagttctaggccccccagaaagctgccaga

SEQ ID NO: 468014 - DNA, 120 bp, Artificial Sequence
  ENSG00000158747_14 (sequence is synthesized)
gccggccgccttctcccctctcccagggatgctctttgtaaatatcggatgggtgtgggagtgaggggttacctccctcgccccaaggttccagaggccctaggcgggatgggctcgctg

SEQ ID NO: 468015 - DNA, 120 bp, Artificial Sequence
  ENSG00000158747_15 (sequence is synthesized)
aacctcgaggaactccaggacgaggaggacatgggacttgcgtggacagtcagggttcacttgggctctctctagctccccaattctgcctgcctcctccctcccagctgcactttaacc

SEQ ID NO: 468016 - DNA, 120 bp, Artificial Sequence
  ENSG00000158747_16 (sequence is synthesized)
ctagaaggtggggacctggggggagggacagggcaggcgggcccatgaagaaagcccctcgttgcccagcactgtctgcgtctgctcttctgtgcccagggtggctgccagcccactgcc

SEQ ID NO: 468017 - DNA, 120 bp, Artificial Sequence
  ENSG00000158747_17 (sequence is synthesized)
tcctgcctggggtggcctggccctcctggctgttgcgacgcgggcttctggagcttgtcaccattggacagtctccctgatggaccctcagtcttctcatgaataaattccttcaacgcc

SEQ ID NO: 468018 - DNA, 120 bp, Artificial Sequence
  ENSG00000158747_18 (sequence is synthesized)
gcgagactttcaggggtcggagcgcgggggccggccgagaggaaagctggaggcgcgggtggggaacatgtctgagtcggagctcggcaggaagtgggaccggtgtctggcggatgcggt

SEQ ID NO: 468019 - DNA, 120 bp, Artificial Sequence
  ENSG00000158747_19 (sequence is synthesized)
gtttacaagcggcggcaaagggggcagccgcctgccttggcgtggccggaggttggcgggcatcaagggagaaagccacacttccaggctttcggaggccctcgctccccaagctggacg

SEQ ID NO: 468020 - DNA, 120 bp, Artificial Sequence
  ENSG00000158747_20 (sequence is synthesized)
actaggataacactaggcaaggctgagcaacccaggctaccaacagcacggacttgaaccgggtcgcatgccggagcggacgggatgaggtgcaccgcagaactggggactcctggtgcc

SEQ ID NO: 468021 - DNA, 120 bp, Artificial Sequence
  ENSG00000158747_21 (sequence is synthesized)
gggacgcggcgggctggggcgccccactctcggggcaagtctgcaatgcccggtgcccacaaaaaggacacatccatctttgtcaccccgaggcctggcacggcctgacggcccaggctc

SEQ ID NO: 468022 - DNA, 120 bp, Artificial Sequence
  ENSG00000158747_22 (sequence is synthesized)
gtaaagcaaaatccccaagtcctacaatcgtgtcccagtggtgtccctgggccaccactttccagaagcaaagttattttctcaccccgttgttaagcacacagaatagagaaggtacgg

SEQ ID NO: 468023 - DNA, 120 bp, Artificial Sequence
  ENSG00000158747_23 (sequence is synthesized)
ccgcaatccacccaagtgcccactgattagataggaacccccgaggtgaggctggaagctggggccaggagctccactcttcccaggagtcagagaaggctctggaggccacgggcatga

SEQ ID NO: 468024 - DNA, 120 bp, Artificial Sequence
  ENSG00000158747_24 (sequence is synthesized)
gtgttttggaggggtggacaggggagtaggtgttctgcatcggccagggatatcgcctcattattttaaagtgaaatttcaggctgagtttagctgcttccccccacccacaacctcaag

SEQ ID NO: 468025 - DNA, 120 bp, Artificial Sequence
  ENSG00000158747_25 (sequence is synthesized)
ggtcggaggctgccggagcgggcagggttgttggtgaggtctgcagtggaacttctgctgagcagatgtgcagcctggccctgcagcagctcattagcatggatttgttttggagactgt

SEQ ID NO: 468026 - DNA, 120 bp, Artificial Sequence
  ENSG00000158747_26 (sequence is synthesized)
gatgcaggctgggtgtggagggtgcgagtaggctggagtacaccagggagttcccagcaggccactaggagccacccaggatgcccggcaacctcatgagtcagacaagcagggctgtgt

SEQ ID NO: 468027 - DNA, 120 bp, Artificial Sequence
  ENSG00000158747_27 (sequence is synthesized)
cttttgcttgttttcattctatttctccagcgagagtgcagaggtttggacccccgttgaggccagactgacaggattagaggaaacagctgggctgagtccgtgccctgcaggagggag

SEQ ID NO: 468028 - DNA, 80 bp, Artificial Sequence
  ENSG00000158748_0 (sequence is synthesized)
cccgcccggcccgcggccgcctcttcctctcgcagccccgcggcgcttgccgcagtcgcaggcggcggagcagccagagc

SEQ ID NO: 468029 - DNA, 120 bp, Artificial Sequence
  ENSG00000158748_1 (sequence is synthesized)
ctcttcctctcgcagccccgcggcgcttgccgcagtcgcaggcggcggagcagccagagcgccccaggtaccagtgcgggcgggagacggaggcgaccctgctgccgggtggggaggggg

SEQ ID NO: 468030 - DNA, 120 bp, Artificial Sequence
  ENSG00000158748_2 (sequence is synthesized)
cccggcgaacccccgcgccgcacaggccgtgtgcgccggatcccggtgcctccgcgccagctgagacctgcctttcccaggggcggctttgctccggcccctaggcccccgccctggtac

SEQ ID NO: 468031 - DNA, 120 bp, Artificial Sequence
  ENSG00000158748_3 (sequence is synthesized)
gcccccgccctggtaccccacacgcccaccggccgcggggagcctgctccggcccgagagcgcccattcacccccctcacccacctccccgcgttcccacttccccgcactctgacccgg

SEQ ID NO: 468032 - DNA, 120 bp, Artificial Sequence
  ENSG00000158748_4 (sequence is synthesized)
ccggacgcccctcccctatcttgccgcccgccccctccagggggctctgctcccaccccagggagcccatccgacctctgcttgacttcccgccgcttccttcaggggcctcggctcatc

SEQ ID NO: 468033 - DNA, 120 bp, Artificial Sequence
  ENSG00000158748_5 (sequence is synthesized)
gggtgcccctccccaaacttccaacccgtttgctccaggagttcctgccccatccccgagggcgcccaaatagccacactgtgtcctcctgtagtcgctgccccctgacctagcgcgacc

SEQ ID NO: 468034 - DNA, 120 bp, Artificial Sequence
  ENSG00000158748_6 (sequence is synthesized)
cagcgcccccgcccatgtccccccactcacctcccccggggggcgtggtgagtcgcggtctgttctcacggacggtccccgtccagcctgcgcttcgccggggccctcatctgctttccc

SEQ ID NO: 468035 - DNA, 120 bp, Artificial Sequence
  ENSG00000158748_7 (sequence is synthesized)
gccaccctatcactcccttgccgtccaccctcggtcctcatggtcccagagccgggcccaaccgccaatagcaccccggcctggggggcagggccgccgtcggccccggggggcagcggc

SEQ ID NO: 468036 - DNA, 120 bp, Artificial Sequence
  ENSG00000158748_8 (sequence is synthesized)
tgggtggcggccgcgctgtgcgtggtcatcgcgctgacggcggcggccaactcgctgctgatcgcgctcatctgcactcagcccgcgctgcgcaacacgtccaacttcttcctggtgtcg

SEQ ID NO: 468037 - DNA, 120 bp, Artificial Sequence
  ENSG00000158748_9 (sequence is synthesized)
ctcttcacgtctgacctgatggtggggctggtggtgatgccgccggccatgctgaacgcgctgtacgggcgctgggtgctggcgcgcggcctctgcctgctctggaccgccttcgacgtg

SEQ ID NO: 468038 - DNA, 120 bp, Artificial Sequence
  ENSG00000158748_10 (sequence is synthesized)
atgtgctgcagcgcctccatcctcaacctctgcctcatcagcctggaccgctacctgctcatcctctcgccgctgcgctacaagctgcgcatgacgcccctgcgtgccctggccctagtc

SEQ ID NO: 468039 - DNA, 120 bp, Artificial Sequence
  ENSG00000158748_11 (sequence is synthesized)
ctgggcgcctggagcctcgccgctctcgcctccttcctgcccctgctgctgggctggcacgagctgggccacgcacggccacccgtccctggccagtgccgcctgctggccagcctgcct

SEQ ID NO: 468040 - DNA, 120 bp, Artificial Sequence
  ENSG00000158748_12 (sequence is synthesized)
tttgtccttgtggcgtcgggcctcaccttcttcctgccctcgggtgccatatgcttcacctactgcaggatcctgctagctgcccgcaagcaggccgtgcaggtggcctccctcaccacc

SEQ ID NO: 468041 - DNA, 120 bp, Artificial Sequence
  ENSG00000158748_13 (sequence is synthesized)
ggcatggccagtcaggcctcggagacgctgcaggtgcccaggaccccacgcccaggggtggagtctgctgacagcaggcgtctagccacgaagcacagcaggaaggccctgaaggccagc

SEQ ID NO: 468042 - DNA, 120 bp, Artificial Sequence
  ENSG00000158748_14 (sequence is synthesized)
ctgacgctgggcatcctgctgggcatgttctttgtgacctggttgcccttctttgtggccaacatagtccaggccgtgtgcgactgcatctccccaggcctcttcgatgtcctcacatgg

SEQ ID NO: 468043 - DNA, 120 bp, Artificial Sequence
  ENSG00000158748_15 (sequence is synthesized)
cctgccatgtccacgctgtccccgggagcgccaggccagcctggcctcgccatcactgcgcacctctcacagcggcccccggcccggccttagcctacagcaggtgctgccgctgcccct

SEQ ID NO: 468044 - DNA, 120 bp, Artificial Sequence
  ENSG00000158748_16 (sequence is synthesized)
gccgccggactcagattcggactcagacgcaggctcaggcggctcctcgggcctgcggctcacggcccagctgctgcttcctggcgaggccacccaggaccccccgctgcccaccagggc

SEQ ID NO: 468045 - DNA, 120 bp, Artificial Sequence
  ENSG00000158748_17 (sequence is synthesized)
cgctgccgccgtcaatttcttcaacatcgaccccgcggagcccgagctgcggccgcatccacttggcatccccacgaactgacccgggcttggggctggccaatggggagctggattgag

SEQ ID NO: 468046 - DNA, 120 bp, Artificial Sequence
  ENSG00000158748_18 (sequence is synthesized)
cagaacccagaccctgagtccttgggccagctcttggctaagaccaggaggctgcaagtctcctagaagccctctgagctccagaggggtgcgcagagctgaccccctgctgccatctcc

SEQ ID NO: 468047 - DNA, 120 bp, Artificial Sequence
  ENSG00000158748_19 (sequence is synthesized)
aggccccttacctgcagggatcatagctgactcagatatcgtgttctgaaggatgctccactgttgagtgtaacttgtgtgtgcagaggatgggctggaggactctggatgttggggaga

SEQ ID NO: 468048 - DNA, 120 bp, Artificial Sequence
  ENSG00000158748_20 (sequence is synthesized)
aggacctcttggttcaggttaggatgaaaacaatcatgacctttgcccattctgtcaggctggacgggagggaatgcccccacctgcaggcatggattaatgctgggctgaaccccttgc

SEQ ID NO: 468049 - DNA, 120 bp, Artificial Sequence
  ENSG00000158748_21 (sequence is synthesized)
tactcacagtgtagtccatggacaatcggcattgccgtcacctttgggagtttgtgaaaaatgcacatctctgcccctgcccagacctgctgagtcagaactgcatgttaccaagatccc

SEQ ID NO: 468050 - DNA, 120 bp, Artificial Sequence
  ENSG00000158748_22 (sequence is synthesized)
aggtgaatcatgtgcccattacagtttgagatgtgctgccttagatcatctttaaccctcagaatgatttgctggatggtttttggacctgtcagtctcccctccctggtatatatgtgg

SEQ ID NO: 468051 - DNA, 120 bp, Artificial Sequence
  ENSG00000158748_23 (sequence is synthesized)
cagcagctgcacctgggaggcaggcaggcatgcatgtgggcctctgctctaccacctatgagctctggggcctgacacgagttatttaacctctccgagcctcggttatcccatgtgtaa

SEQ ID NO: 468052 - DNA, 120 bp, Artificial Sequence
  ENSG00000158748_24 (sequence is synthesized)
ggtagagaaatgatgcctatcttgcaggttgtcttgagaattaagacaatgtgtgcccagcacccagtacacggtcagttaattggtacgttctgttgttacgacccccggctatccagc

SEQ ID NO: 468053 - DNA, 120 bp, Artificial Sequence
  ENSG00000158748_25 (sequence is synthesized)
cccctggcctctccggctgtgtgtcaggaagggctctttgctcccgttgttctctttccatttgcctccccctcttcagccctggcctagcctcccaaagcctgactctggttccccaac

SEQ ID NO: 468054 - DNA, 120 bp, Artificial Sequence
  ENSG00000158748_26 (sequence is synthesized)
tccctgttctggctcctgggtggggaccccatctctcagggaccctcccagctcccaagctgctgccctgcctttcctgggggcaaaaggggcaggtggcagtttctttttcagcctcag

SEQ ID NO: 468055 - DNA, 120 bp, Artificial Sequence
  ENSG00000158748_27 (sequence is synthesized)
aactggttttcctcaatcctggggggtccttggacctagaagggaacaactgatggggataaacccagccccttgcccacctgcctctggccttccctggggtcagtgagagaaatggga

SEQ ID NO: 468056 - DNA, 120 bp, Artificial Sequence
  ENSG00000158748_28 (sequence is synthesized)
atggtagctacttgggtcagcagagtagagtcaaagagctgttcctggtgtgaggtggggcccacgaggcaggcaggtggactctggcacaggggccttggtttctgggggcagggggtt

SEQ ID NO: 468057 - DNA, 120 bp, Artificial Sequence
  ENSG00000158748_29 (sequence is synthesized)
ggggaactcttggtcgccagtttacctgccataggtcccttttcagccctgcctcccccaagttccatcaacacaaactcccagggggtcctccatgcctggcctggccctctccttggt

SEQ ID NO: 468058 - DNA, 120 bp, Artificial Sequence
  ENSG00000158748_30 (sequence is synthesized)
gctgatgagacacaactctggccccggcggctggcctctgaggggccatggtgcttgcggggcttcccctatcccccaggtctgcccaaggggactctcaataaactctagctgaaggca

SEQ ID NO: 468059 - DNA, 120 bp, Artificial Sequence
  ENSG00000158764_0 (sequence is synthesized)
aggatcctctgcaggggagctccgagtgtccacaggaagggaactatcagctcctggcatctgtaaggatgctgtccatgctgaggacaatgaccagactctgcttcctgttattcttct

SEQ ID NO: 468060 - DNA, 120 bp, Artificial Sequence
  ENSG00000158764_1 (sequence is synthesized)
ctgtggccaccagtgggtgcagtgcagcagcagcctcttctcttgagatgctctcgagggaattcgaaacctgtgccttctccttttcttccctgcctagaagctgcaaagaaatcaagg

SEQ ID NO: 468061 - DNA, 120 bp, Artificial Sequence
  ENSG00000158764_2 (sequence is synthesized)
aacgctgccatagtgcaggtgatggcctgtattttctccgcaccaagaatggtgttgtctaccagaccttctgtgacatgacttctgggggtggcggctggaccctggtggccagcgtgc

SEQ ID NO: 468062 - DNA, 120 bp, Artificial Sequence
  ENSG00000158764_3 (sequence is synthesized)
acgagaatgacatgcgtgggaagtgcacggtgggtgatcgctggtccagtcagcagggcaacaaagcagactacccagagggggatggcaactgggccaactacaacacctttggatctg

SEQ ID NO: 468063 - DNA, 120 bp, Artificial Sequence
  ENSG00000158764_4 (sequence is synthesized)
ccaacaagtcccccatgcagcattggagaaacagcgccctgctgaggtaccgcaccaacactggcttcctccagagactgggacataatctgtttggcatctaccagaaatacccagtga

SEQ ID NO: 468064 - DNA, 120 bp, Artificial Sequence
  ENSG00000158764_5 (sequence is synthesized)
aatacagatcagggaaatgttggaatgacaatggcccagccatacctgtggtctatgactttggtgatgctaagaagactgcatcttattactcaccgtatggtcaacgggaatttgttg

SEQ ID NO: 468065 - DNA, 120 bp, Artificial Sequence
  ENSG00000158764_6 (sequence is synthesized)
caggattcgttcagttccgggtgtttaataacgagagagcagccaacgccctttgtgctgggataaaagttactggctgtaacactgagcatcactgcatcggtggaggagggttcttcc

SEQ ID NO: 468066 - DNA, 120 bp, Artificial Sequence
  ENSG00000158764_7 (sequence is synthesized)
cacagggcaaaccccgtcagtgtggggacttctccgcctttgactgggatggatatggaactcacgttaagagcagctgcagtcgggagataacggaggcggctgtactcttgttctata

SEQ ID NO: 468067 - DNA, 120 bp, Artificial Sequence
  ENSG00000158764_8 (sequence is synthesized)
gatgagacagagctctgcggtgtcagggcgagaacccatcttccaaccccggctatttggagacggaaaaactggaattctaacaaggaggagaggagactaaatcacatcaatttgcaa

SEQ ID NO: 468068 - DNA, 120 bp, Artificial Sequence
  ENSG00000158764_9 (sequence is synthesized)
gggtgaggtgtggagtgtggctggccaccagcctgcaggagggagggctggaaggtggggatatggggaagggctggagaagaagagagaaatacaggacttgaatcacaacttcctctc

SEQ ID NO: 468069 - DNA, 120 bp, Artificial Sequence
  ENSG00000158764_10 (sequence is synthesized)
aacaaggctgttagggccctgggtggtggtgggatcatcagctgggagtggggtgtctgagcgtggctggccatctgcctactgatcccagagctctcagcccagctgaggctgcacatg

SEQ ID NO: 468070 - DNA, 120 bp, Artificial Sequence
  ENSG00000158764_11 (sequence is synthesized)
aagacagtcagtgcctctgctcataggtgagcagaacacaagatgcatggagcatcgtcttccagcaagtatgtgttggagtcttctgagtgtgcttttgacttcctagggcttttctat

SEQ ID NO: 468071 - DNA, 120 bp, Artificial Sequence
  ENSG00000158769_0 (sequence is synthesized)
agtcccctcgctgtagtcgcggagctgtgtctgttcccaggagtccttcggcggctgttgtgtcgggagcctgatcgcgatggggacaaaggcgcaagtcgagaggaaactgttgtgcct

SEQ ID NO: 468072 - DNA, 120 bp, Artificial Sequence
  ENSG00000158769_1 (sequence is synthesized)
cttcatattggcgatcctgttgtgctccctggcattgggcagtgttacagtgcactcttctgaacctgaagtcagaattcctgagaataatcctgtgaagttgtcctgtgcctactcggg

SEQ ID NO: 468073 - DNA, 120 bp, Artificial Sequence
  ENSG00000158769_2 (sequence is synthesized)
cttttcttctccccgtgtggagtggaagtttgaccaaggagacaccaccagactcgtttgctataataacaagatcacagcttcctatgaggaccgggtgaccttcttgccaactggtat

SEQ ID NO: 468074 - DNA, 120 bp, Artificial Sequence
  ENSG00000158769_3 (sequence is synthesized)
caccttcaagtccgtgacacgggaagacactgggacatacacttgtatggtctctgaggaaggcggcaacagctatggggaggtcaaggtcaagctcatcgtgcttgtgcctccatccaa

SEQ ID NO: 468075 - DNA, 120 bp, Artificial Sequence
  ENSG00000158769_4 (sequence is synthesized)
gcctacagttaacatcccctcctctgccaccattgggaaccgggcagtgctgacatgctcagaacaagatggttccccaccttctgaatacacctggttcaaagatgggatagtgatgcc

SEQ ID NO: 468076 - DNA, 120 bp, Artificial Sequence
  ENSG00000158769_5 (sequence is synthesized)
tacgaatcccaaaagcacccgtgccttcagcaactcttcctatgtcctgaatcccacaacaggagagctggtctttgatcccctgtcagcctctgatactggagaatacagctgtgaggc

SEQ ID NO: 468077 - DNA, 120 bp, Artificial Sequence
  ENSG00000158769_6 (sequence is synthesized)
acggaatgggtatgggacacccatgacttcaaatgctgtgcgcatggaagctgtggagcggaatgtgggggtcatcgtggcagccgtccttgtaaccctgattctcctgggaatcttggt

SEQ ID NO: 468078 - DNA, 120 bp, Artificial Sequence
  ENSG00000158769_7 (sequence is synthesized)
ttttggcatctggtttgcctatagccgaggccactttgacagaacaaagaaagggacttcgagtaagaaggtgatttacagccagcctagtgcccgaagtgaaggagaattcaaacagac

SEQ ID NO: 468079 - DNA, 120 bp, Artificial Sequence
  ENSG00000158769_8 (sequence is synthesized)
ctcgtcattcctggtgtgagcctggtcggctcaccgcctatcatctgcatttgccttactcaggtgctaccggactctggcccctgatgtctgtagtttcacaggatgccttatttgtct

SEQ ID NO: 468080 - DNA, 120 bp, Artificial Sequence
  ENSG00000158769_9 (sequence is synthesized)
tctacaccccacagggccccctacttcttcggatgtgtttttaataatgtcagctatgtgccccatcctccttcatgccctccctccctttcctaccactgctgagtggcctggaacttg

SEQ ID NO: 468081 - DNA, 120 bp, Artificial Sequence
  ENSG00000158769_10 (sequence is synthesized)
tttaaagtgtttattccccatttctttgagggatcaggaaggaatcctgggtatgccattgacttcccttctaagtagacagcaaaaatggcgggggtcgcaggaatctgcactcaactg

SEQ ID NO: 468082 - DNA, 120 bp, Artificial Sequence
  ENSG00000158769_11 (sequence is synthesized)
cccacctggctggcagggatctttgaataggtatcttgagcttggttctgggctctttccttgtgtactgacgaccagggccagctgttctagagcgggaattagaggctagagcggctg

SEQ ID NO: 468083 - DNA, 120 bp, Artificial Sequence
  ENSG00000158769_12 (sequence is synthesized)
aaatggttgtttggtgatgacactggggtccttccatctctggggcccactctcttctgtcttcccatgggaagtgccactgggatccctctgccctgtcctcctgaatacaagctgact

SEQ ID NO: 468084 - DNA, 120 bp, Artificial Sequence
  ENSG00000158769_13 (sequence is synthesized)
gacattgactgtgtctgtggaaaatgggagctcttgttgtggagagcatagtaaattttcagagaacttgaagccaaaaggatttaaaaccgctgctctaaagaaaagaaaactggaggc

SEQ ID NO: 468085 - DNA, 120 bp, Artificial Sequence
  ENSG00000158769_14 (sequence is synthesized)
gcatgcctgtaatcccagctgctcaggagcctggcaacaagagcaaaactccagctcaaaaaaaaaaagaaagaaaagaaagctggagctggtggcttaggccatcacccttcccttggc

SEQ ID NO: 468086 - DNA, 120 bp, Artificial Sequence
  ENSG00000158769_15 (sequence is synthesized)
ccttcccttggctggaactactggacagacccttttgagatgtgcctgtggtgctgtggagatgtgtgtagtggtcttagctctttgttgagcttgtgtgtgtgttgtgtagtcttagct

SEQ ID NO: 468087 - DNA, 120 bp, Artificial Sequence
  ENSG00000158769_16 (sequence is synthesized)
gtatgctgaaattgggcgtgtgttggagggcttcttagctctttggtgagattgtatttctatgtgtttgtatcagctgaatgttgctggaaataaaaccttggtttgtcaaggctcttt

SEQ ID NO: 468088 - DNA, 120 bp, Artificial Sequence
  ENSG00000158769_17 (sequence is synthesized)
tttgtgggaagtaagtaggggaaaaggtctttgagggttcctaggctcctttgtacaacaggaaaatgcctcaaagccttgcttcccagcaacctggggctggttcccagtgcctggtcc

SEQ ID NO: 468089 - DNA, 120 bp, Artificial Sequence
  ENSG00000158769_18 (sequence is synthesized)
ttcctttgctggaggaaggtacacagggtgaagctgatgctgtacttgggggatctccttggcctgttccaccaagtgagagaaggtacttactcttgtacctcctgttcagccaggtgc

SEQ ID NO: 468090 - DNA, 120 bp, Artificial Sequence
  ENSG00000158769_19 (sequence is synthesized)
attaacagacctccctacagctgtaggaactactgtcccagagctgaggcaaggggatttctcaggtcatttggagaacaagtgctttagtagtagtttaaagtagtaactgctactgta

SEQ ID NO: 468091 - DNA, 120 bp, Artificial Sequence
  ENSG00000158769_20 (sequence is synthesized)
tttagtggggtggaattcagaagaaatttgaagaccagatcatgggtggtctgcatgtgaatgaacaggaatgagccggacagcctggctgtcattgctttcttcctccccatttggacc

SEQ ID NO: 468092 - DNA, 120 bp, Artificial Sequence
  ENSG00000158769_21 (sequence is synthesized)
cttctctgcccttacatttttgtttctccatctaccaccatccaccagtctatttattaacttagcaagaggacaagtaaagggccctcttggcttgattttgcttctttctttctgtgg

SEQ ID NO: 468093 - DNA, 120 bp, Artificial Sequence
  ENSG00000158769_22 (sequence is synthesized)
aggatatactaagtgcgactttgccctatcctatttggaaatccctaacagaattgagttttctattaaggatccaaaaagaaaaacaaaatgctaatgaagccatcagtcaagggtcac

SEQ ID NO: 468094 - DNA, 120 bp, Artificial Sequence
  ENSG00000158769_23 (sequence is synthesized)
atgccaataaacaataaattttccagaagaaatgaaatccaactagacaaataaagtagagcttatgaaatggttcagtaaagatgagtttgttgttttttgttttgttttgttttgttt

SEQ ID NO: 468095 - DNA, 120 bp, Artificial Sequence
  ENSG00000158769_24 (sequence is synthesized)
ctcccaaagtgatgggattacagatgtgagccaccgtgcctagccaaggatgagatttttaaagtatgtttcagttctgtgtcatggttggaagacagagtaggaaggatatggaaaagg

SEQ ID NO: 468096 - DNA, 120 bp, Artificial Sequence
  ENSG00000158769_25 (sequence is synthesized)
tcatggggaagcagaggtgattcatggctctgtgaatttgaggtgaatggttccttattgtctaggccacttgtgaagaatatgagtcagttattgccagccttggaatttacttctcta

SEQ ID NO: 468097 - DNA, 120 bp, Artificial Sequence
  ENSG00000158769_26 (sequence is synthesized)
gcttacaatggaccttttgaactggaaaacaccttgtctgcattcactttaaaatgtcaaaactaatttttataataaatgtttattttcacattgagtttgtttaaatcctgaagttct

SEQ ID NO: 468098 - DNA, 120 bp, Artificial Sequence
  ENSG00000158769_27 (sequence is synthesized)
taccttaagagaattgggactcctagagtgattggacattcaaaatattcctgatagtcttgttaattaagagattaggatatctttccattaccttgataattacgttttaatttagct

SEQ ID NO: 468099 - DNA, 120 bp, Artificial Sequence
  ENSG00000158769_28 (sequence is synthesized)
tttttcattggcctgtgtttaaatgcaaataaccccacaatggacatttcctatgttaaagtgacatttaggggataaaaaatgagagcagttccatggattttggtgtttcccctgaga

SEQ ID NO: 468100 - DNA, 120 bp, Artificial Sequence
  ENSG00000158769_29 (sequence is synthesized)
catgaactcagcataatctgggataaaatgattgagtgttaaggatgtgtttgttgttcctgtcgtttttttattttcttcaaagtatacaacatggtttgatatgcacatacatttgtg

SEQ ID NO: 468101 - DNA, 89 bp, Artificial Sequence
  ENSG00000158769_30 (sequence is synthesized)
caaagtatacaacatggtttgatatgcacatacatttgtgtaatgattgccatggtcaattaacacatcaccagggagtcttgctccgt

SEQ ID NO: 468102 - DNA, 60 bp, Artificial Sequence
  ENSG00000158769_31 (sequence is synthesized)
catcacctcccatgttctatcttacgtattcagaacttgttcatcttgtaactgaaagcg

SEQ ID NO: 468103 - DNA, 120 bp, Artificial Sequence
  ENSG00000158769_32 (sequence is synthesized)
cttacgtattcagaacttgttcatcttgtaactgaaagcgtgtaccctttgaccaacactgtttttcctgtcttaacaggatctacagatcaaggacaggggaggggatagtggaggaaa

SEQ ID NO: 468104 - DNA, 120 bp, Artificial Sequence
  ENSG00000158769_33 (sequence is synthesized)
acggagttagtctgtttctaaatgaggggacagtatgtttcttggggcctgaggacagcttaataaagtagacaaatgaagaaaaacaacaatttgcattaaaaaatatccaattcttta

SEQ ID NO: 468105 - DNA, 120 bp, Artificial Sequence
  ENSG00000158769_34 (sequence is synthesized)
gaggcagctcctgtggggaaaggcgccagtgcgccgaggcggggagtggcggcggggtaacacctggccgaggtgactcgttctgaagagcagcggttccttacaccaatcggaacgtgc

SEQ ID NO: 468106 - DNA, 120 bp, Artificial Sequence
  ENSG00000158773_0 (sequence is synthesized)
tccattgaaaattttccttggataggaaaggacttagcactcaggcctgtgaatcaggagatacaaagacctccaaaaaaggaccagttcctcggatgtgccccctcacagagagatgaa

SEQ ID NO: 468107 - DNA, 120 bp, Artificial Sequence
  ENSG00000158773_1 (sequence is synthesized)
ggggcagcagaaaacagctgaaacggaagaggggacagtgcagattcaggaaggtgcagtggctactggggaagacccaaccagtgtggctattgccagcatccagtcagctgccacctt

SEQ ID NO: 468108 - DNA, 120 bp, Artificial Sequence
  ENSG00000158773_2 (sequence is synthesized)
ccctgaccccaacgtcaagtacgtcttccgaactgagaatgggggccaggtgatgtacagggtgatccaggtgtctgaggggcagctggatggccaaactgagggaactggcgccatcag

SEQ ID NO: 468109 - DNA, 120 bp, Artificial Sequence
  ENSG00000158773_3 (sequence is synthesized)
tggctaccctgccactcaatccatgacccaggcggtgatccagggtgctttcaccagtgatgatgcagttgacacggaggggacagctgctgagacgcactatacttacttccccagcac

SEQ ID NO: 468110 - DNA, 120 bp, Artificial Sequence
  ENSG00000158773_4 (sequence is synthesized)
ggcagtgggagatggggcagggggtaccacatcggggagtacagctgctgttgttactacccagggctcagaggcactgctggggcaggcgacccctcctggcactggtcaattctttgt

SEQ ID NO: 468111 - DNA, 120 bp, Artificial Sequence
  ENSG00000158773_5 (sequence is synthesized)
gatgatgtcaccacaagaagtactgcagggaggaagccagcgctcaattgcccctaggactcacccttattccccgaagtcagaagctccccggacgactcgggatgagaaacgcagggc

SEQ ID NO: 468112 - DNA, 120 bp, Artificial Sequence
  ENSG00000158773_6 (sequence is synthesized)
tcagcataatgaagtggagcgtcgccgccgagacaagatcaacaactggatcgtgcagctctccaagataatcccagactgctctatggagagcaccaagtctggccagagtaaaggtgg

SEQ ID NO: 468113 - DNA, 120 bp, Artificial Sequence
  ENSG00000158773_7 (sequence is synthesized)
cggcagagtaaccaccgcttgtctgaagaactgcagggacttgaccaactgcagctggacaatgacgtgcttcgacaacaggtggaagatcttaaaaacaagaatctgctgcttcgagct

SEQ ID NO: 468114 - DNA, 120 bp, Artificial Sequence
  ENSG00000158773_8 (sequence is synthesized)
cagttgcggcaccacggattagaggtcgtcatcaagaatgacagcaactaactatggggattcaggggctttgggcccaagaactgcagatagcccaggagcaacagcctaatcccgtgc

SEQ ID NO: 468115 - DNA, 120 bp, Artificial Sequence
  ENSG00000158773_9 (sequence is synthesized)
ccctttccttcactgccccacttctggcatgggacagggggaagttcagaaggtgtgtccttgaactgaggccctgtgatatggcggcctgcagtggtgtgaaacacacaatgtggacgt

SEQ ID NO: 468116 - DNA, 120 bp, Artificial Sequence
  ENSG00000158773_10 (sequence is synthesized)
gcactgacagccttgcccacccccaccatgcagcccctgggcccttgtgctcctctcgcacaatgcatgtgctgtctccatgctggatactggacacactaaactctggggcttgtcctg

SEQ ID NO: 468117 - DNA, 120 bp, Artificial Sequence
  ENSG00000158773_11 (sequence is synthesized)
tgcttgcttagagtgcccagcagaggtttgctgacaggtgatgctctggcttgccccaggactctggcacttccattggttcttcctttccctggagctgaggtttagatgtgcaacctg

SEQ ID NO: 468118 - DNA, 120 bp, Artificial Sequence
  ENSG00000158773_12 (sequence is synthesized)
tggctcaggggagcaagcttacacaagaagtgagggaaggatgtttagcagtggctggtgcccatgaagaggagattggccagtgagaagctgaggcctatgcagacatctctggagcca

SEQ ID NO: 468119 - DNA, 88 bp, Artificial Sequence
  ENSG00000158773_13 (sequence is synthesized)
cagtgagaagctgaggcctatgcagacatctctggagccagagagaacaacaggcaggggcccacttggggccttcccccttgtgggg

SEQ ID NO: 468120 - DNA, 120 bp, Artificial Sequence
  ENSG00000158773_14 (sequence is synthesized)
gcccctcaccaacatggccgcgggctggaagtgcgcatgagcagctgtctatggagatacctaggccgggagagggagaacacagttggagaaaatcggcagctgagacggccttggccg

SEQ ID NO: 468121 - DNA, 120 bp, Artificial Sequence
  ENSG00000158773_15 (sequence is synthesized)
ctggccaggtcatggaaagaccctggtagtgggcaggatgcctgaattctgcctcctggtattgtttccagaaatggtagagagaggggcacacatgacagtagtcttatctctccctga

SEQ ID NO: 468122 - DNA, 120 bp, Artificial Sequence
  ENSG00000158773_16 (sequence is synthesized)
ggttcctgtatccctgggagatattataccaccttccttagatgaaaatgaggtccaaagtgtgaacctacttttggaaagcaagctgggtatctgaaatcctagttctcattttgttga

SEQ ID NO: 468123 - DNA, 120 bp, Artificial Sequence
  ENSG00000158773_17 (sequence is synthesized)
gagacggccttggccggacttagcactcaggcctgtgaatcaggagatacaaagacctccaaaaaaggaccagttcctcggatgtgccccctcacagagagatgaaggggtgagtgaaga

SEQ ID NO: 468124 - DNA, 120 bp, Artificial Sequence
  ENSG00000158773_18 (sequence is synthesized)
ctcttagtgatcattaagacctggacaggcagtgagtctggggctgctcttctattagcatgttctttttagaggaggggaccagggtcttcacctcagggcttggtgaggttcctaccc

SEQ ID NO: 468125 - DNA, 120 bp, Artificial Sequence
  ENSG00000158773_19 (sequence is synthesized)
atgtcctgacagaacctaccctgcatcttcacaggtcaattctttgtgatgatgtcaccacaagaagtactgcagggaggaagccagcgctcaattgcccctaggactcacccttattcc

SEQ ID NO: 468126 - DNA, 120 bp, Artificial Sequence
  ENSG00000158786_0 (sequence is synthesized)
agtgtgcgaggcagcgtgaagctggggcctgctccccgcagcctctggagcgcatctcagaccttctgagacctatgttgctggccccccagaacccgcaacatggcagatggggcaaag

SEQ ID NO: 468127 - DNA, 120 bp, Artificial Sequence
  ENSG00000158786_1 (sequence is synthesized)
gccaaccccaaagggttcaaaaagaaggtgctggatagatgcttctctgggtggaggggcccacgcttcggggcctcctgtccttcaagaacctccaggtctagcctgggtatgaagaag

SEQ ID NO: 468128 - DNA, 120 bp, Artificial Sequence
  ENSG00000158786_2 (sequence is synthesized)
ttcttcaccgtggccatccttgctggcagcgttctgtccacagctcacggcagcctgctcaacctgaaggccatggtggaggccgtcacagggaggagcgccatcctgtccttcgtgggc

SEQ ID NO: 468129 - DNA, 120 bp, Artificial Sequence
  ENSG00000158786_3 (sequence is synthesized)
tacggttgctactgtgggctggggggccgtggccagcccaaggatgaggtggactggtgctgccacgcccacgactgctgctaccaggaactctttgaccaaggctgtcacccctatgtg

SEQ ID NO: 468130 - DNA, 120 bp, Artificial Sequence
  ENSG00000158786_4 (sequence is synthesized)
gaccactatgatcacaccatcgagaacaacactgagatagtctgcagtgacctcaacaagacagagtgtgacaagcagacatgcatgtgtgacaagaacatggttctgtgcctcatgaac

SEQ ID NO: 468131 - DNA, 120 bp, Artificial Sequence
  ENSG00000158786_5 (sequence is synthesized)
cagacgtaccgagaggagtaccgtggcttcctcaatgtctactgccagggccccacgcccaactgcagcatctatgaaccgccccctgaggaggtcacctgcagtcaccaatccccagcg

SEQ ID NO: 468132 - DNA, 120 bp, Artificial Sequence
  ENSG00000158786_6 (sequence is synthesized)
ccccccgcccctccctagagcctctgaggtttgagagagagagcgggaggagggtctggcttggggaccagacgaggtgcagggagggtaggagccaggccaggagcctgagggttgctg

SEQ ID NO: 468133 - DNA, 120 bp, Artificial Sequence
  ENSG00000158786_7 (sequence is synthesized)
gttgcctcctccctggagctctccagtgagggctcagctctcagaggactcaggaaggcctgggtcctgactcccccagcccagccccaggcatgggtgcctcctgctgctggttctgga

SEQ ID NO: 468134 - DNA, 120 bp, Artificial Sequence
  ENSG00000158786_8 (sequence is synthesized)
ctgggtgggaggcacggagcttataggggtctctcctgagggtggccggggagacctgagagagaggaggaggggcctctgagtggggcctctgttgctggcgccagtttaactccccgg

SEQ ID NO: 468135 - DNA, 120 bp, Artificial Sequence
  ENSG00000158786_9 (sequence is synthesized)
agccttagaaagtctgagccttagaaagtctgggcctgagcatccaggcccagagctggatgcatcctcggcccaagatcacaggaaggcagattgctggtcacaaagcatgggttccgg

SEQ ID NO: 468136 - DNA, 120 bp, Artificial Sequence
  ENSG00000158786_10 (sequence is synthesized)
gagcccctcagctgatcccacaggatggcctggggtggtggctactttgggcttgaagctctctagagccccattcacagagcaggtgccccaccccagccctcactgaggtggccatga

SEQ ID NO: 468137 - DNA, 120 bp, Artificial Sequence
  ENSG00000158786_11 (sequence is synthesized)
acagagccacacacccaggtacaccccccaggctaatatggggacacacaaaaatatggccttcaacacctacaagtcttctctgtgtcccccatcgacccatgcacatcaccccaaccc

SEQ ID NO: 468138 - DNA, 120 bp, Artificial Sequence
  ENSG00000158786_12 (sequence is synthesized)
tgctctgccacaccacgtgggtctgaggagcactcctaccccccggctccgggtccctgacagacactgccctcctggcctgcacctggaatggcagccagaacactggagggggaccca

SEQ ID NO: 468139 - DNA, 120 bp, Artificial Sequence
  ENSG00000158786_13 (sequence is synthesized)
caccctctctccctgggctgtggatgggtgttgcaagtcccatccctcctggcctgcacctggaacagcagccagaacaccggagggggacccacaccctctctccctgggctgtgggca

SEQ ID NO: 468140 - DNA, 120 bp, Artificial Sequence
  ENSG00000158786_14 (sequence is synthesized)
ggcgtcacaagtcccattggtggggaagaggctgagggctgagacccacctcagtgaagagggaaacgtaagcagggagagcatcaaggcgggaggcagcctggaaacttctagaagagg

SEQ ID NO: 468141 - DNA, 120 bp, Artificial Sequence
  ENSG00000158786_15 (sequence is synthesized)
gtcaaggtaggaggctacatggaagcttctagaaggcagtaaggaacagggtggtgaaggagaggggagaagatgggagcatggagagacgaggtgagtgacagccaccagcagggacgg

SEQ ID NO: 468142 - DNA, 120 bp, Artificial Sequence
  ENSG00000158786_16 (sequence is synthesized)
gcctccaggcaacacagaggagctgggggccagggccttacggggctgggttcctgtgtggggcgtggagctggggctgaagtggaggggacggccctgcggcccccagcactgttgttt

SEQ ID NO: 468143 - DNA, 120 bp, Artificial Sequence
  ENSG00000158786_17 (sequence is synthesized)
ctccaggtgcaccttaccttcctccttacctgcccgagcctcaactcagggtcagcagcctccacggagccagccccacctgcccgaaaaccactgaagccaccctccgcccggactcaa

SEQ ID NO: 468144 - DNA, 120 bp, Artificial Sequence
  ENSG00000158786_18 (sequence is synthesized)
cagccgccagcaagctcgcctggcagtgcccctggagcaccattgtcgctggggagggagagccgggaagggtggagaaggaggcagaagggacatgtatgaaaaaaggacaggaaacct

SEQ ID NO: 468145 - DNA, 120 bp, Artificial Sequence
  ENSG00000158786_19 (sequence is synthesized)
gaccagaggcggtttccagagccccagccttggagacaaggacactgccacccagcgccacagtcagtctgggaggggcccacgccccccaccccccatgccacactgccgcctcttgct

SEQ ID NO: 468146 - DNA, 120 bp, Artificial Sequence
  ENSG00000158786_20 (sequence is synthesized)
ggccatggttctccggcttgggggaacgcaggttcccagctgcgcccctcccccgcgcacacacaccctcccctgtccctcggaaagactaggccagggtctggggatgggattctgctg

SEQ ID NO: 468147 - DNA, 120 bp, Artificial Sequence
  ENSG00000158786_21 (sequence is synthesized)
ccaggggtcctgcctgcccccactcaccccagacgcttcggatgctgcagctcctggataatctccacaggactcggcttcctctcctcaaatgaataaaggcctcctacctcaactccc

SEQ ID NO: 468148 - DNA, 120 bp, Artificial Sequence
  ENSG00000158786_22 (sequence is synthesized)
tcaccgtggccatccttgctggcagcggtgagtaaagactccagagggctcctccttctctcccactcccagcttgtctcccgtgaccttgggcgcctgagttatggttccactgaccag

SEQ ID NO: 468149 - DNA, 120 bp, Artificial Sequence
  ENSG00000158786_23 (sequence is synthesized)
cctaggttccttcctgtctctgggcttctgcttcttgtctcagcccagcaggctgcacccaattctggggctgtttacccctccagccacctgtaaacatgcatttatgagccctggggg

SEQ ID NO: 468150 - DNA, 120 bp, Artificial Sequence
  ENSG00000158786_24 (sequence is synthesized)
gcagggcgcagggctgagcaagcatcgtaaaatgctggtgttggctgggcatttgtgtacctgaatgtgtactagtgtgtgtccatcagactggagttaatgattttgtgtgcagacagg

SEQ ID NO: 468151 - DNA, 120 bp, Artificial Sequence
  ENSG00000158786_25 (sequence is synthesized)
cacaggcatctatgtgtgtgtaggtgtgtctgagcatgtgatgatgtctatgtgtgcaacatgcatccataaagtatgtgacagtgtaggcacctgagtgcgagcccatttgtgtctctt

SEQ ID NO: 468152 - DNA, 120 bp, Artificial Sequence
  ENSG00000158786_26 (sequence is synthesized)
tgtgtgagtgtgtgttaattggggtgtgtgtcttcagagcatgcttatggatgaagggtgcatagatctgcaggagggtgtgtgtgtgtaggatgggtgtctgtgtactgcatagtggtg

SEQ ID NO: 468153 - DNA, 120 bp, Artificial Sequence
  ENSG00000158786_27 (sequence is synthesized)
ggaggtcaggggcttctttctggggttggtacccagggcatcatggctctgggcagccgccccataggattgttgcgtgaggctcttgacacagacctgaccctgccactcgtcccggca

SEQ ID NO: 468154 - DNA, 120 bp, Artificial Sequence
  ENSG00000158786_28 (sequence is synthesized)
tcatttatgtggcaggtgtcccagctccatggaccattggctgggcctctcactggccttgcatgcagcctgttaaacctcgccagaacacagcctggcttgaggaaaagaaataaatga

SEQ ID NO: 468155 - DNA, 120 bp, Artificial Sequence
  ENSG00000158786_29 (sequence is synthesized)
caaaaaccaaaataaggttccacgtggccagacgtgagagagggctggttgcattcaggcaaagtgacttgttattgagaagacgactgcttgagttcagtccaagccactggttagggg

SEQ ID NO: 468156 - DNA, 120 bp, Artificial Sequence
  ENSG00000158786_30 (sequence is synthesized)
cagagccttcaacccaactgaatgcggacttggattccttcgcttggacggtcagtgtggatgtggccttgggccaggcccctgattctcccctggatgcgttgtgtatgtgagtgcatc

SEQ ID NO: 468157 - DNA, 120 bp, Artificial Sequence
  ENSG00000158786_31 (sequence is synthesized)
tgtaatgcacgagggcgagtgtgcaagtgtgtgtatcaggtatgtgtgggtgtatatcatgtatgtatgggtgagtgtaggtgtatgagtgtatcaggtatgtatgtgtgagtgttgagt

SEQ ID NO: 468158 - DNA, 120 bp, Artificial Sequence
  ENSG00000158786_32 (sequence is synthesized)
gtatcaggtatgtgggggtgagtgtgagtttgaggtgtctgggaatgagtgtgtatgcaagtgcatgtggtgtgtaaaggagagtgtgaggtgggcaggtgtgtgagtgtgtgtgagatg

SEQ ID NO: 468159 - DNA, 120 bp, Artificial Sequence
  ENSG00000158786_33 (sequence is synthesized)
ggtgtgtgtgtgtcagtgtgtgttcaccctgtgcatggccacgtagacttcttgctcttcttctcttgccacatgggagttgactgtcgggggtcctgggactggaggtgccccctcccg

SEQ ID NO: 468160 - DNA, 120 bp, Artificial Sequence
  ENSG00000158786_34 (sequence is synthesized)
ggtaacacttacaaggccaggggcagatggggaggcagccagggcctcgcagtggttgggtccctcctcaaggcgctgtgtgggccaggcactctacacaccttcatgatcacacttcaa

SEQ ID NO: 468161 - DNA, 120 bp, Artificial Sequence
  ENSG00000158786_35 (sequence is synthesized)
cctccaaggtgccctgcaaggaggcgtcatgatctccatcctctgctttgggcattgtgatccgagaggttgctggtgtgtgccaggcctccagcagggcactggcctgcctgatctctc

SEQ ID NO: 468162 - DNA, 120 bp, Artificial Sequence
  ENSG00000158786_36 (sequence is synthesized)
atggtttagattgttactcccattttacagatgggagaacagagccccagggagtcccagctgggcttggttattggcctaggtctgtctgactccagattcaatgctcttcccactaag

SEQ ID NO: 468163 - DNA, 120 bp, Artificial Sequence
  ENSG00000158786_37 (sequence is synthesized)
tctctggaagcaggcaagagtggcctttgggattcccctgagccaccagtttctgaaaccgttggctttcccctctcccagtacatttcctcattcaggctggggagcagggtggacatg

SEQ ID NO: 468164 - DNA, 120 bp, Artificial Sequence
  ENSG00000158786_38 (sequence is synthesized)
gagagagtggcaggaagggtgctgagctaggcccctcacgctgactgcagctagaatggctggggtgggggaagcaggcggagctgcactgccctgcgctgcggttagcttcccagctcc

SEQ ID NO: 468165 - DNA, 120 bp, Artificial Sequence
  ENSG00000158786_39 (sequence is synthesized)
gcagtacacaaacctggggcagtctgggctctgccccctccagcctgtgggacctgggcaagcctgcacctttctgagccttagtttcctcacccataaaatcgtgatagattggctctc

SEQ ID NO: 468166 - DNA, 120 bp, Artificial Sequence
  ENSG00000158786_40 (sequence is synthesized)
ctgctggtgtgtgtagggcagcttcccccaggtaaggactgtaggtgccaggctgggcgtgtggacccagtgctgcatccaggaggatgtgcagaggcagcgcaggcaattcagagagcc

SEQ ID NO: 468167 - DNA, 120 bp, Artificial Sequence
  ENSG00000158786_41 (sequence is synthesized)
accgcacaggcacagactgcaagatggagacaagcagtggccagggggagaatgtgtcctggggtgggccggcctggcaggtgccatgaagctgatttcgctggtgcaggaagtgtcctt

SEQ ID NO: 468168 - DNA, 120 bp, Artificial Sequence
  ENSG00000158786_42 (sequence is synthesized)
gcactatttctccctctgtgtgtgtgtggggagactgttttccttcttcccacctccagccagtatcagcctgtaatacgaagccttttctgtttcttcattagcgatcagagcaccgaa

SEQ ID NO: 468169 - DNA, 120 bp, Artificial Sequence
  ENSG00000158786_43 (sequence is synthesized)
ttgtcgctggattgatcctgagatgcaccaggcccgggatcagggtggggactctgaggcccccaggagggcagaggcaggaggcagagaccaggaagggacccagaatcaaccccctga

SEQ ID NO: 468170 - DNA, 120 bp, Artificial Sequence
  ENSG00000158786_44 (sequence is synthesized)
gcttcctaagagcatgtggcctttgcgaagctccctccagcataccaggcacttgggcatcccccttgagaagtgtgtacagccaagtggcagggggtgtggatgcaaaaccctcactgc

SEQ ID NO: 468171 - DNA, 120 bp, Artificial Sequence
  ENSG00000158786_45 (sequence is synthesized)
ctgggtccaaattctgtctccactgctttctgacaacgggatgtagagcaagttactaaatgcactgggcctcagtcttctcatctgcacagaggcataacaagagcatgcagggggttg

SEQ ID NO: 468172 - DNA, 120 bp, Artificial Sequence
  ENSG00000158786_46 (sequence is synthesized)
cagtgagcactcaatggattcatgcacatggaaggggcttgggacagtacctggcatggagcaagtccctagcaaggatgacctgcgttgttttctcagggccgcagggatgtgggtgca

SEQ ID NO: 468173 - DNA, 120 bp, Artificial Sequence
  ENSG00000158786_47 (sequence is synthesized)
caccatacatggtaccttgcagatttctttcctctggcttagctgcccacgcttcttgccccagcttcctctcctgctttctccttccttctcccacctaccctaggtattgggaggatg

SEQ ID NO: 468174 - DNA, 120 bp, Artificial Sequence
  ENSG00000158786_48 (sequence is synthesized)
gaggcctgggctcctgtcaggggccaaatgaggacagctgaaggtcagactgaccttgccctccatccctgagtgggggagaccttctttccccaaaggatccagcttctttgatgactt

SEQ ID NO: 468175 - DNA, 120 bp, Artificial Sequence
  ENSG00000158786_49 (sequence is synthesized)
ggtgaccagagcctggtctttgactatgttctttccaaactgttttgagcgctttctgttgtccatctccaaggccatgggcttggaagtgtttcagcccctcctctctctaggaaggga

SEQ ID NO: 468176 - DNA, 120 bp, Artificial Sequence
  ENSG00000158786_50 (sequence is synthesized)
cctttgacttgctccaaaacacacatgggagagcagtcacacagctgacaccccacaaaggcaagggctgtgacccctgcctgcctcacactggaggctctggaagacaggaccatgcct

SEQ ID NO: 468177 - DNA, 120 bp, Artificial Sequence
  ENSG00000158786_51 (sequence is synthesized)
cctccatcagactgtgagctcccagcagccatggcttgtcttctgctcctatctccccaacagcaggcagcaccaagtttgtatcacagaaagctaaataaatacacattgactagctga

SEQ ID NO: 468178 - DNA, 120 bp, Artificial Sequence
  ENSG00000158792_0 (sequence is synthesized)
gactcccggcggaagcgcgcggcgcgcggggaggcccgaactgatccgcggcggccggagaccgctggggacagacaggatgggcagcagctcgctgtccgaggactaccgccagtgcct

SEQ ID NO: 468179 - DNA, 120 bp, Artificial Sequence
  ENSG00000158792_1 (sequence is synthesized)
ggagcgcgagctgcgacggggccgcgcgggcgtgtgcggggacccctcgctgcgcgcggtgctctggcagatcctggtggaggacttcgacctgcacggggcgctgcaggacgacgcgct

SEQ ID NO: 468180 - DNA, 120 bp, Artificial Sequence
  ENSG00000158792_2 (sequence is synthesized)
ggctctgctcaccgacgggctgtggggccgcgccgacctggcgcccgcgctacgcggcctggctcgcgccttcgagcttctggagctcgccgcggtgcacctgtacctgctgccctggag

SEQ ID NO: 468181 - DNA, 120 bp, Artificial Sequence
  ENSG00000158792_3 (sequence is synthesized)
gaaggagttcaccaccatcaagaccttctctgggggctacgtgcacgtgctgaagggtgtgctctcagacgacctcctcctgaagagcttccagaagatgggctacgtacgcagagacag

SEQ ID NO: 468182 - DNA, 120 bp, Artificial Sequence
  ENSG00000158792_4 (sequence is synthesized)
ccatcggctcatggtgaccgccctgccccccgcctgccagctggtgcaggtggccctgggctgcttcgccctccggctggagtgtgagatcctgggtgaggtgctggcccagctgggcac

SEQ ID NO: 468183 - DNA, 120 bp, Artificial Sequence
  ENSG00000158792_5 (sequence is synthesized)
cagtgtgctgccagctgaggagctgctgcaggcacggcgtgccagcggggacgtggcctcctgtgtggcctggctgcagcagcggctggcccaggatgaggagccgccacccctgccccc

SEQ ID NO: 468184 - DNA, 120 bp, Artificial Sequence
  ENSG00000158792_6 (sequence is synthesized)
ccgaggctcccctgctgcttacagggccccactggacttataccgggacttgcaggaagacgaggggtcggaggacgccagcctgtatggggagccgtcaccaggccctgactcgccccc

SEQ ID NO: 468185 - DNA, 120 bp, Artificial Sequence
  ENSG00000158792_7 (sequence is synthesized)
ggcggagctggcctacaggccaccactctgggagcagagtgccaaactgtggggcactgggggccgggcctgggagcccccagctgaggagctgccgcaggccagcagcccaccatatgg

SEQ ID NO: 468186 - DNA, 120 bp, Artificial Sequence
  ENSG00000158792_8 (sequence is synthesized)
ggccttggaggaggggctggaacctgaaccttccgccttctccttcctctctctgcgccgtgagctgagtaggcctggggacctggccacccctgaaagctctgcagcggccagcccgag

SEQ ID NO: 468187 - DNA, 120 bp, Artificial Sequence
  ENSG00000158792_9 (sequence is synthesized)
gcccccaggctaccaggcacacagctgcctgtcccctggcgccctgcccaccctctgctgcgacacctgtcgccagctgcatgctgcccactgtgcagccctgcccgcctgccgtccagg

SEQ ID NO: 468188 - DNA, 120 bp, Artificial Sequence
  ENSG00000158792_10 (sequence is synthesized)
ccactcgctgcgtgtgctgcttggcgacgcccagcggcgcttgtggctacagcgtgcacagatggacactctgctctacaacagccccggggcccggccctaggccagctgggccccagg

SEQ ID NO: 468189 - DNA, 120 bp, Artificial Sequence
  ENSG00000158792_11 (sequence is synthesized)
tcaagggctcttgggagacagctcccgtggtgcttctctttgctggggaggggtctgggcctctggttgccttgtccctgggggagtcctgggcacagcagggggttggagagtccaggc

SEQ ID NO: 468190 - DNA, 120 bp, Artificial Sequence
  ENSG00000158792_12 (sequence is synthesized)
caacccttgctggaggtgggactctctgtatatggaaggctccaagggcagcaggcctaagccggccagcaggagcctttccacatttccccaccctcggaacccagacgcatgcccaca

SEQ ID NO: 468191 - DNA, 120 bp, Artificial Sequence
  ENSG00000158792_13 (sequence is synthesized)
tgtgctgggtagaggggtccagcctgttccagccagtgcctgaacctgtccctgagaaggaccctgtgccccaaggcccgtggctcctggcctgctccctgcagtacggagtacggggct

SEQ ID NO: 468192 - DNA, 120 bp, Artificial Sequence
  ENSG00000158792_14 (sequence is synthesized)
caggacttgggggtcctccacgtgtcccagggattctccacacgagtgtcctcaagggcctgttggtgacaccgagctccccccaccccaagctctgctggagccaatctgcggggctct

SEQ ID NO: 468193 - DNA, 120 bp, Artificial Sequence
  ENSG00000158792_15 (sequence is synthesized)
gccgggtgcacggctgacctggcttcggggacgccggccctccccttgggtgtcacagcagctgggcccacagacaggaaatgacctgacctcaaaccagatgtggaggtgcacgagagg

SEQ ID NO: 468194 - DNA, 120 bp, Artificial Sequence
  ENSG00000158792_16 (sequence is synthesized)
cgcaggaacgggcagtggctgacagctgggaaggccctgagcgtcactgctgctgggcggaagggcctgtggacagcccgcccaggcggcggggtcttggtgggtccagtggtaatggtg

SEQ ID NO: 468195 - DNA, 120 bp, Artificial Sequence
  ENSG00000158792_17 (sequence is synthesized)
cccctcccctccattccctgtgggtgcagcccacaggctggcgaggaggtgcctctgccctaccctcgggtctggcgagggagagggcagggtgcatccactgtgacagcccctctgggc

SEQ ID NO: 468196 - DNA, 120 bp, Artificial Sequence
  ENSG00000158792_18 (sequence is synthesized)
ccacaactccctgaccctggaagctgagcctgctttcctgaccctccgccccaccccctcctccccagaacactcagagggacggtcaacatcagagcacattaaacgctggtgaaacca

SEQ ID NO: 468197 - DNA, 120 bp, Artificial Sequence
  ENSG00000158792_19 (sequence is synthesized)
tggggacagacaggtagcgccgtcacccgcgggatccgcagctccatctgccgggcgaaggggctctggtcgggagagggctcagcgggcggaagcgcgtctctagagaagggtgcggtc

SEQ ID NO: 468198 - DNA, 120 bp, Artificial Sequence
  ENSG00000158793_0 (sequence is synthesized)
actcgctgcggcgcttctggctccagaccgccctccggatcggaccctgcgaatggttttggctatatcttcatgctgggcttcatcaccaggcctcctcacagattcctgtcccttctg

SEQ ID NO: 468199 - DNA, 120 bp, Artificial Sequence
  ENSG00000158793_1 (sequence is synthesized)
tgtcctggactccggatacctcaactctcagtactttgtgctcagcccaggcccagagccatggctatctcctcttcctcctgcgaactgcccctggtggctgtgtgccaggtaacatcg

SEQ ID NO: 468200 - DNA, 120 bp, Artificial Sequence
  ENSG00000158793_2 (sequence is synthesized)
acgccagacaagcaacagaactttaaaacatgtgctgagctggttcgagaggctgccagactgggtgcctgcctggctttcctgcctgaggcatttgacttcattgcacgggaccctgca

SEQ ID NO: 468201 - DNA, 120 bp, Artificial Sequence
  ENSG00000158793_3 (sequence is synthesized)
gagacgctacacctgtctgaaccactgggtgggaaacttttggaagaatacacccagcttgccagggaatgtggactctggctgtccttgggtggtttccatgagcgtggccaagactgg

SEQ ID NO: 468202 - DNA, 120 bp, Artificial Sequence
  ENSG00000158793_4 (sequence is synthesized)
gagcagactcagaaaatctacaattgtcacgtgctgctgaacagcaaaggggcagtagtggccacttacaggaagacacatctgtgtgacgtagagattccagggcaggggcctatgtgt

SEQ ID NO: 468203 - DNA, 120 bp, Artificial Sequence
  ENSG00000158793_5 (sequence is synthesized)
gaaagcaactctaccatgcctgggcccagtcttgagtcacctgtcagcacaccagcaggcaagattggtctagctgtctgctatgacatgcggttccctgaactctctctggcattggct

SEQ ID NO: 468204 - DNA, 120 bp, Artificial Sequence
  ENSG00000158793_6 (sequence is synthesized)
attacaggcccagcccactgggaggtgttgctgcgggcccgtgctatcgaaacccagtgctatgtagtggcagcagcacagtgtggacgccaccatgagaagagagcaagttatggccac

SEQ ID NO: 468205 - DNA, 120 bp, Artificial Sequence
  ENSG00000158793_7 (sequence is synthesized)
agcatggtggtagacccctggggaacagtggtggcccgctgctctgaggggccaggcctctgccttgcccgaatagacctcaactatctgcgacagttgcgccgacacctgcctgtgttc

SEQ ID NO: 468206 - DNA, 120 bp, Artificial Sequence
  ENSG00000158793_8 (sequence is synthesized)
cagcaccgcaggcctgacctctatggcaatctgggtcacccactgtcttaagacttgacttctgtgagtttagacctgcccctcccacccccaccctgccactatgagctagtgctcatg

SEQ ID NO: 468207 - DNA, 120 bp, Artificial Sequence
  ENSG00000158793_9 (sequence is synthesized)
tgacttggaggcaggatccaggcacagctcccctcacttggagaaccttgactctcttgatggaacacagatgggctgcttgggaaagaaactttcacctgagcttcacctgaggtcaga

SEQ ID NO: 468208 - DNA, 120 bp, Artificial Sequence
  ENSG00000158793_10 (sequence is synthesized)
ctgcagtttcagaaaggtggaattttatatagtcattgtttatttcatggaaactgaagttctgctgagggctgagcagcactggcattgaaaaatataataatcataaagtctgtgtct

SEQ ID NO: 468209 - DNA, 120 bp, Artificial Sequence
  ENSG00000158793_11 (sequence is synthesized)
ggacatcgcctttgggaactagaaggggagttggtattgtaccagctggactaagctccagttctagacctcctggctcattcaacatgcctccctacctaaataaaagtgcaacactca

SEQ ID NO: 468210 - DNA, 120 bp, Artificial Sequence
  ENSG00000158793_12 (sequence is synthesized)
cttctggctccagaccgccctccggatcggaccctgcgaatggttttggctatatcttcatgtaggacctactccctatcccgtcggccgcggtgaatcccacctgcggctgggcttcat

SEQ ID NO: 468211 - DNA, 120 bp, Artificial Sequence
  ENSG00000158793_13 (sequence is synthesized)
ggcgcttctggctccagaccgccctccggatcggaccctgcgaatggttttggctatatcttcatgtaggacctactccctatcccgtcggccgcggctgggcttcatcaccaggcctcc

SEQ ID NO: 468212 - DNA, 120 bp, Artificial Sequence
  ENSG00000158793_14 (sequence is synthesized)
cctgcggtgctttaacttgtgtaacagagatgctgcctctgggagaggcggggagggacgggccaactggagcgggcggcgggagggtggagggcggggcgcggcttggggcctgggttc

SEQ ID NO: 468213 - DNA, 120 bp, Artificial Sequence
  ENSG00000158793_15 (sequence is synthesized)
ctttgccccttgcccaccagggaggggtgggagacgagagagggtgaactttcccctgcgagattctggtgaaaggggaaatatgcttcgagtcagtaaagctgcgcaagtgcacagtca

SEQ ID NO: 468214 - DNA, 120 bp, Artificial Sequence
  ENSG00000158793_16 (sequence is synthesized)
aggagagagtcttgggaaaaccaaggatagttcccggagatgacttttggactgcggaaacgtttgtcagaggaaagaggcttcagtttaatgtgagatcattggaagttgaactattca

SEQ ID NO: 468215 - DNA, 120 bp, Artificial Sequence
  ENSG00000158793_17 (sequence is synthesized)
ggcggcgagcagagcccctttctccatcttcccactgtatggtcttgtcccttagcctataatttcttataaagagcgttttgaagactaggtttttactggcagggccctgattcaggc

SEQ ID NO: 468216 - DNA, 120 bp, Artificial Sequence
  ENSG00000158793_18 (sequence is synthesized)
tcacagtataaagagagaagtcagagaatcctagaaatttattgcttgaagaaggggttggtgtcctcatatctcaccttcctcaggctgggcttcatcaccaggcctcctcacagattc

SEQ ID NO: 468217 - DNA, 120 bp, Artificial Sequence
  ENSG00000158793_19 (sequence is synthesized)
gcctggcacttagatgctcagtttgttaaatggatagtgggagacacaggagtgtcaactatccacacatttgattggtgagccctactagccctgggtcaacgtgccctgtaagagcat

SEQ ID NO: 468218 - DNA, 120 bp, Artificial Sequence
  ENSG00000158793_20 (sequence is synthesized)
gatcaaaaggaagtccagctttcctgcctctccacttgcaccccttagcattaaatttgcttccctgtgctatgaaatctgagaatcctgcctatgctgttcacaggcccagagccatgg

SEQ ID NO: 468219 - DNA, 120 bp, Artificial Sequence
  ENSG00000158793_21 (sequence is synthesized)
ccattgatgtagtcacgccagaatgcatcgagcccgtctcctcttgagggtgacgtagggcagcaggtcgtggcgagtgatgatgcgcagcagctgcagcacctggcgaaagttactttc

SEQ ID NO: 468220 - DNA, 120 bp, Artificial Sequence
  ENSG00000158793_22 (sequence is synthesized)
atcacagcggccctggcgctccagtgccaataagaagtcacgtccatttcggatgagtccacgctcgtggtcatcaatgacatcaacaaagaggaaagaaagcacgcgcacatctctgtg

SEQ ID NO: 468221 - DNA, 120 bp, Artificial Sequence
  ENSG00000158793_23 (sequence is synthesized)
aggcccgccatgctgggggctcaggtacgcaatgctttccagaatccctgctcagcagctgcaatccccaccgtactgaaagggcagggaaagaaccgatgagacactcaagggcaggaa

SEQ ID NO: 468222 - DNA, 120 bp, Artificial Sequence
  ENSG00000158793_24 (sequence is synthesized)
ctagtctcatgcattcccatattcccagttgctaacaatgcctggcacagtatagtgctttatacatgtttattaaatttttgaagtgtttgtttaaaaataaacactggccaggcacag

SEQ ID NO: 468223 - DNA, 120 bp, Artificial Sequence
  ENSG00000158793_25 (sequence is synthesized)
ggtgggaaacttttggaagaatacacccagcttgccaggtatcagggaaatagcgagggagaggtagaatctttgttggacagtgtccctgggttgccagatatgagggtagagccttga

SEQ ID NO: 468224 - DNA, 120 bp, Artificial Sequence
  ENSG00000158793_26 (sequence is synthesized)
cggatcggaccctgcgaatggttttggctatatcttcatgtaggacctactccctatcccgtcggccgcggtgaatcccacctgcggtgctttaacttgtgctgggcttcatcaccaggc

SEQ ID NO: 468225 - DNA, 120 bp, Artificial Sequence
  ENSG00000158793_27 (sequence is synthesized)
gcagactcagaaaatctacaattgtcacgtgctgctgaacagcaaagtagtggccacttacaggaagacacatctgtgtgacgtagagattccagggcaggggcctatgtgtgaaagcaa

SEQ ID NO: 468226 - DNA, 120 bp, Artificial Sequence
  ENSG00000158793_28 (sequence is synthesized)
actcgctgcggcgcttctggctccagaccgccctccggatcggaccctgcgaatggttttggctatatcttcatgcccagagccatggctatctcctcttcctcctgcgaactgcccctg

SEQ ID NO: 468227 - DNA, 120 bp, Artificial Sequence
  ENSG00000158793_29 (sequence is synthesized)
gctttaacttgtgcccagagccatggctatctcctcttcctcctgcgaactgcccctggtggctgtgtgccaggtaacatcgacgccagacaagcaacagaactttaaaacatgtgctga

SEQ ID NO: 468228 - DNA, 120 bp, Artificial Sequence
  ENSG00000158793_30 (sequence is synthesized)
gaccagcctgggcaacatagggagacccgtttctacaaaaaaagaaaaaattagctgggcttggtggtacacgcctgtagtcccagctgcacaggaggctgaggtgggaggaaggcttga

SEQ ID NO: 468229 - DNA, 89 bp, Artificial Sequence
  ENSG00000158793_31 (sequence is synthesized)
aaaaaattagctgggcttggtggtacacgcctgtagtcccagctgcacaggaggctgaggtgggaggaagtcaacatagcaagacccca

SEQ ID NO: 468230 - DNA, 79 bp, Artificial Sequence
  ENSG00000158793_32 (sequence is synthesized)
aatcctgcactgtagcctgggtgacagagtgagtcccccatctcggaaaaaaaagaactagtttaaattctgactgtat

SEQ ID NO: 468231 - DNA, 120 bp, Artificial Sequence
  ENSG00000158793_33 (sequence is synthesized)
atctcggaaaaaaaagaactagtttaaattctgactgtatcactgaaaggctgtgtagctgtgtgaccgtaagcaagtcacttaactccagattctcagtgctgtcatctataaacaggg

SEQ ID NO: 468232 - DNA, 120 bp, Artificial Sequence
  ENSG00000158793_34 (sequence is synthesized)
atgaatgaatatacacctcagagttgttaagaatccaatgagaaaatcacgggtaacccttatataaatggttgtgaaacatttcaaagatacaagcatccttggcctttgcagcccaga

SEQ ID NO: 468233 - DNA, 120 bp, Artificial Sequence
  ENSG00000158793_35 (sequence is synthesized)
atcatccctccacatttttcctacaatccaaccacatcaagaaatgataactgctcagaaagtttatcaatatttaccaaaactcatggatttaaaataaacattaagtttctacaataa

SEQ ID NO: 468234 - DNA, 120 bp, Artificial Sequence
  ENSG00000158793_36 (sequence is synthesized)
ggcctgcgagttaccgcccactcgctgcggcgcttctggctccagaccgccctccggatcggaccctgcgaatggttttggctatatcttcatgcctcctcacagattcctgtcccttct

SEQ ID NO: 468235 - DNA, 120 bp, Artificial Sequence
  ENSG00000158796_0 (sequence is synthesized)
ccgcggcggcggcggcggcggcggctgctggagcccggatgcggcgccgtgaggcaggcccgggagagcggcgcggatggatccaacatggcggcgccgagcctgagccgagagaagaga

SEQ ID NO: 468236 - DNA, 120 bp, Artificial Sequence
  ENSG00000158796_1 (sequence is synthesized)
gagacctgggaaattaagtttcttgcggagtacggtggggattgcagctgctgagcagggattctggaaagcattgcgtacctgagcccccagcatggcgggcctaaagcggcgggcaag

SEQ ID NO: 468237 - DNA, 120 bp, Artificial Sequence
  ENSG00000158796_2 (sequence is synthesized)
ccaggtgtggccagaagagcatggtgagcaggaacatgggctgtacagcctgcaccgcatgtttgacatcgtgggcactcatctgacacacagagatgtgcgcgtgctttctttcctctt

SEQ ID NO: 468238 - DNA, 120 bp, Artificial Sequence
  ENSG00000158796_3 (sequence is synthesized)
tgttgatgtcattgatgaccacgagcgtggactcatccgaaatggacgtgacttcttattggcactggagcgccagggccgctgtgatgaaagtaactttcgccaggtgctgcagctgct

SEQ ID NO: 468239 - DNA, 120 bp, Artificial Sequence
  ENSG00000158796_4 (sequence is synthesized)
gcgcatcatcactcgccacgacctgctgccctacgtcaccctcaagaggagacgggctgtgtgccctgatcttgtagacaagtatctggaggagacatcaattcgctatgtgacccccag

SEQ ID NO: 468240 - DNA, 120 bp, Artificial Sequence
  ENSG00000158796_5 (sequence is synthesized)
agccctcagtgatccagaaccaaggcctccccagccctctaaaacagtgcctccccactatcctgtggtgtgttgccccacttcgggtcctcagatgtgtagcaagcggccagcccgagg

SEQ ID NO: 468241 - DNA, 120 bp, Artificial Sequence
  ENSG00000158796_6 (sequence is synthesized)
gagagccacacttgggagccagcgaaaacgccggaagtcagtgacaccagatcccaaggagaagcagacatgtgacatcagactgcgggttcgggctgaatactgccagcatgagactgc

SEQ ID NO: 468242 - DNA, 120 bp, Artificial Sequence
  ENSG00000158796_7 (sequence is synthesized)
tctgcagggcaatgtcttctctaacaagcaggacccacttgagcgccagtttgagcgctttaaccaggccaacaccatcctcaagtcccgggacctgggctccatcatctgtgacatcaa

SEQ ID NO: 468243 - DNA, 120 bp, Artificial Sequence
  ENSG00000158796_8 (sequence is synthesized)
gttctctgagctcacctacctcgatgcattctggcgtgactacatcaatggctctttattagaggcacttaaaggtgtcttcatcacagactccctcaagcaagctgtgggccatgaagc

SEQ ID NO: 468244 - DNA, 120 bp, Artificial Sequence
  ENSG00000158796_9 (sequence is synthesized)
aacttgatgctgcaagcattgccctgacctattccctcttctcactttggggactgttcccatcacccacctctggagcttacactgttctggggtttgttctctacccttccaaccaat

SEQ ID NO: 468245 - DNA, 120 bp, Artificial Sequence
  ENSG00000158796_10 (sequence is synthesized)
cacacccctgcctttttttttttttttttaaagaaaaagacaaaagaaagtggaagtggtattccccacccctccctgcacccatgtgcctgggcttcccctttatttcccttttccatt

SEQ ID NO: 468246 - DNA, 120 bp, Artificial Sequence
  ENSG00000158796_11 (sequence is synthesized)
taccccgtaatgtgtctctacagctaccttaccactgagccgtaagacaaatgtataggaagaagcaaagtctacagcacatagtctttgtaagggattgatgtgaacacttttttttgg

SEQ ID NO: 468247 - DNA, 120 bp, Artificial Sequence
  ENSG00000158796_12 (sequence is synthesized)
atgcactaaggagttatcaatacttctggctttatgagagctcttaaattttgtctaaaaaaccaaagggctgtgagtaagggagctatgtggaaagtgggactctgaagtgtattttga

SEQ ID NO: 468248 - DNA, 120 bp, Artificial Sequence
  ENSG00000158796_13 (sequence is synthesized)
aaattaatcgccaccctcttccaaattatagaattttttaaaaacaagctgtggccctttccactctctcctggcctctggtgctgctcctctctgccgcctttcctccattccatggct

SEQ ID NO: 468249 - DNA, 120 bp, Artificial Sequence
  ENSG00000158796_14 (sequence is synthesized)
tgaaacctctgcctgatgtggctccttcctttttcccatttgtcaaaccctcttcaaaggaggaacagataagactgggtcagcctagtcatgcctcccaactgtggtggtatatgtgta

SEQ ID NO: 468250 - DNA, 120 bp, Artificial Sequence
  ENSG00000158796_15 (sequence is synthesized)
cacacatacacagggtggatggagaagaggttgctgattaaaatacactccccctataaaggggaagggggagtgtgacactttctttccatgttcaagtgaaaataaataatgtaccct

SEQ ID NO: 468251 - DNA, 120 bp, Artificial Sequence
  ENSG00000158796_16 (sequence is synthesized)
gcagcccttttcccctttgctttcttctggcttgggcaaagggcatcataggtgtaagtgaagtaattcctttttccttccccctcctccactcctacgcccactcccatgcttgggaga

SEQ ID NO: 468252 - DNA, 120 bp, Artificial Sequence
  ENSG00000158796_17 (sequence is synthesized)
atggggctgggacatgcactgagtgttgcacttttatttaggtagggaggcatgttgaatgagccaggaggtctagaactggagcttagtccagctggtacaataccaactccccttcta

SEQ ID NO: 468253 - DNA, 120 bp, Artificial Sequence
  ENSG00000158796_18 (sequence is synthesized)
gttcccaaaggcgatgtccagacacagactttatgattattatatttttcaatgccagtgctgctcagccctcagcagaacttcagtttccatgaaataaacaatgactatataaaattc

SEQ ID NO: 468254 - DNA, 120 bp, Artificial Sequence
  ENSG00000158796_19 (sequence is synthesized)
ggcggcggcggcggcggctgctggagcccggatgcggcgccgtgaggcaggcccgggagagcggcgcggatggatccaacatggcggcgccgagcctgagccgagatacggtggggattg

SEQ ID NO: 468255 - DNA, 120 bp, Artificial Sequence
  ENSG00000158796_20 (sequence is synthesized)
gcagacatgtggtgaggaagttcaagggttccagagatggagcagacttgaaggagaatataaagaactgctgggacactgggcagtttatgctattcagtacatcagactgcgggttcg

SEQ ID NO: 468256 - DNA, 120 bp, Artificial Sequence
  ENSG00000158796_21 (sequence is synthesized)
gtggttggagggaggactggactctgatgaggggtgttgcgaggaggaataaggaattgtggaggaagatgagaagctgccagagggtaattggttttcccagaagttcttaaatttggg

SEQ ID NO: 468257 - DNA, 120 bp, Artificial Sequence
  ENSG00000158796_22 (sequence is synthesized)
cgcaagccattgagactggaaattcttggagttggtattgtttttgtaaattgactaatagagagttagggaagcctggagacttgttgggggtgagttctctaaatggttttaggcttg

SEQ ID NO: 468258 - DNA, 120 bp, Artificial Sequence
  ENSG00000158805_0 (sequence is synthesized)
gcacttccggcgacgggccccctccgcgcgtactgcgggccccacgggtgttagtggcgggggcggcagagtccgggtgggttgtcgcgacggagccgggcctcttcgccgtcttgagac

SEQ ID NO: 468259 - DNA, 120 bp, Artificial Sequence
  ENSG00000158805_1 (sequence is synthesized)
ggggctggcgagaagggcccctcacggagttgccatgggcgtctaaccgcggcagccaggcccctctctacgtgagaccccggcccccctcccctttctgcagcccgcccgccacctgcg

SEQ ID NO: 468260 - DNA, 120 bp, Artificial Sequence
  ENSG00000158805_2 (sequence is synthesized)
cgccgcgtggcctccgccggcgcctgcccgccccgcgcctccgtctcccacggagcaggccgggctctcgccatgggtcactgtcgcctctgccacgggaagttttcctcgagaagcctg

SEQ ID NO: 468261 - DNA, 120 bp, Artificial Sequence
  ENSG00000158805_3 (sequence is synthesized)
cgcagcatctccgagagggcgcctggagcgagcatggagaggccatccgcagaggagcgcgtgctcgtacgggacttccagcgcctgcttggtgtggctgtccgccaggaccccaccttg

SEQ ID NO: 468262 - DNA, 120 bp, Artificial Sequence
  ENSG00000158805_4 (sequence is synthesized)
tctccgtttgtctgcaagagctgccacgcccagttctaccagtgccacagccttctcaagtccttcctgcagagggtcaacgcctccccggctggtcgccggaagccttgtgcaaaggtc

SEQ ID NO: 468263 - DNA, 120 bp, Artificial Sequence
  ENSG00000158805_5 (sequence is synthesized)
ggtgcccagcccccaacaggggcagaggagggagcgtgtctggtggatctgatcacatccagcccccagtgcctgcacggcttggtggggtgggtgcatggacatgcggccagctgcggg

SEQ ID NO: 468264 - DNA, 120 bp, Artificial Sequence
  ENSG00000158805_6 (sequence is synthesized)
gccctgccccaccttcagaggacactgtcctccgagtactgcggcgtcatccaggtcgtgtggggctgcgaccagggccacgactacaccatggataccagctccagctgcaaggccttc

SEQ ID NO: 468265 - DNA, 120 bp, Artificial Sequence
  ENSG00000158805_7 (sequence is synthesized)
ttgctggacagtgcgctggcagtcaagtggccatgggacaaagagacggcgccacggctgccccagcaccgagggtggaaccctggggatgcccctcagacctcccagggtagagggaca

SEQ ID NO: 468266 - DNA, 120 bp, Artificial Sequence
  ENSG00000158805_8 (sequence is synthesized)
gggaccccagttggggctgagaccaagaccctgcccagcacggatgtggcccagcctccttcggacagcgacgcggtggggcccaggtcgggcttcccacctcagccaagcctgcccctt

SEQ ID NO: 468267 - DNA, 120 bp, Artificial Sequence
  ENSG00000158805_9 (sequence is synthesized)
tgcagggccccagggcagttgggtgagaagcagcttccatcttcaacctcggatgatcgggtaaaagacgagttcagtgacctttctgagggagacgtcttgagtgaagatgaaaatgac

SEQ ID NO: 468268 - DNA, 120 bp, Artificial Sequence
  ENSG00000158805_10 (sequence is synthesized)
aagaagcaaaatgcccagtcttcggacgagtcctttgagccttacccagaaaggaaagtctctggtaagaagagtgaaagcaaagaagccaagaagtctgaagaaccaagaattcggaag

SEQ ID NO: 468269 - DNA, 120 bp, Artificial Sequence
  ENSG00000158805_11 (sequence is synthesized)
aagccgggacccaagcccggatggaagaagaagcttcgttgtgagagggaggagcttcccaccatctacaagtgtccttaccagggctgcacggccgtgtaccgaggcgctgacggcatg

SEQ ID NO: 468270 - DNA, 120 bp, Artificial Sequence
  ENSG00000158805_12 (sequence is synthesized)
aagaagcacatcaaggagcaccacgaggaggtccgggagcggccctgcccccaccctggctgcaacaaggttttcatgatcgaccgctacctgcagcgccacgtgaagctcatccacaca

SEQ ID NO: 468271 - DNA, 120 bp, Artificial Sequence
  ENSG00000158805_13 (sequence is synthesized)
gaggtgcggaactatatctgtgacgaatgtggacaaaccttcaagcagcggaagcaccttctcgtccaccaaatgcgacattcgggagccaagcctttgcagtgtgaggtctgtgggttc

SEQ ID NO: 468272 - DNA, 120 bp, Artificial Sequence
  ENSG00000158805_14 (sequence is synthesized)
cagtgcaggcagcgggcatccctcaagtaccacatgaccaaacacaaggctgagactgagctggactttgcctgtgaccagtgtggccggcggtttgagaaggcccacaacctcaatgta

SEQ ID NO: 468273 - DNA, 120 bp, Artificial Sequence
  ENSG00000158805_15 (sequence is synthesized)
cacatgtccatggtgcacccgctgacacagacccaggacaaggccctgcccctggaggcggaaccaccacctgggccaccgagcccctctgtgaccacagagggccaggcggtgaagccc

SEQ ID NO: 468274 - DNA, 120 bp, Artificial Sequence
  ENSG00000158805_16 (sequence is synthesized)
gaacccacctgaggacggcagtgaggatgagcacctctagcagcctggactccgcagtggctgtgtcagcctcacccttcgtgtgcacccgcatgggagggtcggagggtgctgcccgcc

SEQ ID NO: 468275 - DNA, 120 bp, Artificial Sequence
  ENSG00000158805_17 (sequence is synthesized)
cttggtgctggaggcgggcttggtgtccggctcaagtagccttcctctgctctgggaccagtggtttattttcccgcaaacgctgagtgactcggggccggacagttcataaataattga

SEQ ID NO: 468276 - DNA, 120 bp, Artificial Sequence
  ENSG00000158805_18 (sequence is synthesized)
ttcctttccccactaaagcagtcgaggagatttgtaatccactttttagtgcaacaagagctccatgttatgcttgtaataaattatttacacgggagctgggctggtgtgcagtggcag

SEQ ID NO: 468277 - DNA, 120 bp, Artificial Sequence
  ENSG00000158805_19 (sequence is synthesized)
acaggtcagcgtcaggggcagcctgctgtctgctctggagggcggcgctcacctctgggtcgcagtccccacgatcagccagcagctgtgagagaggagcaggtcctcagcccatgccgc

SEQ ID NO: 468278 - DNA, 120 bp, Artificial Sequence
  ENSG00000158805_20 (sequence is synthesized)
ccactaggcctcagaccacaggggaggggctctggcagaaatagtcgagttgtattgccagccaggcaggcacatggcccaggcagctgtcaattctcatgtcccccacatggcccaagg

SEQ ID NO: 468279 - DNA, 120 bp, Artificial Sequence
  ENSG00000158805_21 (sequence is synthesized)
tgggcatcttgacgttacctctgccacgtgtgagaagctctttttcgggcaccgaggtattaactgcagcagaaaaagacgagcttttgttatcagttccacggggttgccctagagaga

SEQ ID NO: 468280 - DNA, 120 bp, Artificial Sequence
  ENSG00000158805_22 (sequence is synthesized)
aaacaggcaaactcacaggttagaagacatacagaaacagggctggtgtgtcccccatagtctgcatgctgtgccggaacattctttggcagaaggagcctccggctggggggagctccc

SEQ ID NO: 468281 - DNA, 120 bp, Artificial Sequence
  ENSG00000158805_23 (sequence is synthesized)
ctggaggtgggactggcccttgcacctgcctgacccttgagctccaggctcctgccagctggaggtgaaactgtgcttgtatccccagccacgaagagctggaccagcttcaagtacatg

SEQ ID NO: 468282 - DNA, 120 bp, Artificial Sequence
  ENSG00000158805_24 (sequence is synthesized)
tccacagcaacatgcaggaaggcctcttccctgatggccgcgtcttcatggaagtaggagagaagactagaggtaaagacatagtgacaaatggctacagactgctggaaaggtagcagg

SEQ ID NO: 468283 - DNA, 120 bp, Artificial Sequence
  ENSG00000158805_25 (sequence is synthesized)
tgatgccaagggatactgctcatctgtggagcagaggcacagacaacccttcccatctggcgggacccagaggtgctgagatgggggtctgggaaacactgcccagccctgaccagccct

SEQ ID NO: 468284 - DNA, 120 bp, Artificial Sequence
  ENSG00000158805_26 (sequence is synthesized)
gtgggtggaggtacctgtaaaaagcgaaaggcagcagcctggtgtgctgatccggggccacacggaggaggagccgccccagcctgaggtctgcaacaccaagaagtggctcaggcaact

SEQ ID NO: 468285 - DNA, 120 bp, Artificial Sequence
  ENSG00000158805_27 (sequence is synthesized)
ctggacatctctgcctattatcagtgctggggacacccctgggggtcgggacgtgtaccctgggaggcctggctgtggggatagtgtggggcgaacagcctgagctgaggatacccaggt

SEQ ID NO: 468286 - DNA, 120 bp, Artificial Sequence
  ENSG00000158805_28 (sequence is synthesized)
acctgtcagcagctgggagaggatgggggggtcgacctcttgcaggagggtgggtgtggtgcagagagaggcagtccccatgataggcccattggtcctggggttgaccagtgagccagt

SEQ ID NO: 468287 - DNA, 120 bp, Artificial Sequence
  ENSG00000158805_29 (sequence is synthesized)
aaattatcttattgctttaaacaagtttgtgcttaatctgtcccaactaaaatggagcttataaacttacttagcaaggaacctcaaggagggctcgttcttaaccatttgcaagatgcc

SEQ ID NO: 468288 - DNA, 120 bp, Artificial Sequence
  ENSG00000158805_30 (sequence is synthesized)
tctgaaaagagcggccctccgcatttgtgcctcagcagcgtgtttcttaccactctctgtcaactgaaagagtgccagccaggatatcttcctcttctctaaacactcgaggattgctgc

SEQ ID NO: 468289 - DNA, 120 bp, Artificial Sequence
  ENSG00000158805_31 (sequence is synthesized)
acaaacgtggaaagcctttggcaggtctgtggtgctctgtaaaccgcaggagaccaaccctgagaatggccgacctggtgctcccatgggtaggagggtacagccctcagcacagaagag

SEQ ID NO: 468290 - DNA, 120 bp, Artificial Sequence
  ENSG00000158805_32 (sequence is synthesized)
ggcatttcctctttgcttattgtaagtcttaaaactggtgacagttttacctatagaaggtaatactgggcctctggacagaagaggctcaggtaggaggccagggacttcgagcaccca

SEQ ID NO: 468291 - DNA, 120 bp, Artificial Sequence
  ENSG00000158805_33 (sequence is synthesized)
gaagaggctcaggtaggaggccagggacttcgagcacccacaccaaggctgctgcaccacgtcctcaaataagacattaaaagaaaggcccacaggccggatgcagtggctcatgcctgt

SEQ ID NO: 468292 - DNA, 64 bp, Artificial Sequence
  ENSG00000158805_34 (sequence is synthesized)
aatcccaacactttgggaggccgaggtcggcggatcactgaggccagttcaagaccagcccaga

SEQ ID NO: 468293 - DNA, 120 bp, Artificial Sequence
  ENSG00000158805_35 (sequence is synthesized)
tgggagttctcactcacacttccgcaaacacaaggagctcctgagctagtctggaaaccctgacttggaagctggctgcctggtgcccctgcctggcccacagtgggagaggacaccttg

SEQ ID NO: 468294 - DNA, 120 bp, Artificial Sequence
  ENSG00000158805_36 (sequence is synthesized)
gctggtaaggtctgacttacatttgaggtcagatgtgacgacagcaggcccatcaaggagaagaagaaaaggaaaaccaatagctgtaaataaaaacgtgcacttattattacattaaaa

SEQ ID NO: 468295 - DNA, 120 bp, Artificial Sequence
  ENSG00000158805_37 (sequence is synthesized)
gccccgcctcgcttccagcgcgccgagcggagcctaacgccgggtcctctaggaacctcgggccgggcagcacccgcgggattctgctggcgtcctccgctgccatgaagcgggaccggc

SEQ ID NO: 468296 - DNA, 120 bp, Artificial Sequence
  ENSG00000158805_38 (sequence is synthesized)
tgggccgcttcctgtctcctgggtcgtcccgacagtgcggggcctcggacggcggcggcggcgtcagccggactcggggccgcccttcccttagcggtgggccgagggtggacggggcga

SEQ ID NO: 468297 - DNA, 120 bp, Artificial Sequence
  ENSG00000158805_39 (sequence is synthesized)
aaatctaccatctctgcccagaaaaatgcacgaacgcacggacctgcccgtcactcggattttggaaggtggcctggcggaccctcctgctacatctcctctacaggtggagcccaggct

SEQ ID NO: 468298 - DNA, 120 bp, Artificial Sequence
  ENSG00000158805_40 (sequence is synthesized)
tacaggcgtgagccaccgcgccggcctcaatgcactctttaaagagaagggcagttagcgacagggtctcatgttgttgcctaggctggggtgccctggcacgatcatggctgactgcag

SEQ ID NO: 468299 - DNA, 120 bp, Artificial Sequence
  ENSG00000158805_41 (sequence is synthesized)
ccctgtgcgctcaagtgagcctctcacctcagcctcccagggtgctgggactgccaacatgagccactggactcggcagtgtaaactacttttttcatgctattgcatatgtattgttca

SEQ ID NO: 468300 - DNA, 120 bp, Artificial Sequence
  ENSG00000158805_42 (sequence is synthesized)
ttgataatatatagaaacataactgggttttgtgtatggattttgtgccctgcaactttgctgaaataattaattagggttttttgtatgtggatctttagggttttctacgtagaaggt

SEQ ID NO: 468301 - DNA, 120 bp, Artificial Sequence
  ENSG00000158805_43 (sequence is synthesized)
cgtgtcatttgtgaatagggagaatttgtctttgttttctttttcttgcccagttactctggctagggcctccagtgctgccctgagagcagtggtgagagaatccgtatcttgttcctg

SEQ ID NO: 468302 - DNA, 120 bp, Artificial Sequence
  ENSG00000158805_44 (sequence is synthesized)
accttggaggaagagctttcagtccttcacagttgagcgtggtgtctgctgtgggtttcatgtagaggttttatcgtggtgaagaagttcctttctgttcttgagatatttccttaacta

SEQ ID NO: 468303 - DNA, 120 bp, Artificial Sequence
  ENSG00000158805_45 (sequence is synthesized)
ttcttacctggatccagaaaggaaccacaagtgcgtctctctctttaagtctccgatagacgcacactggaagctgctgcatttgctggtccctcagggacttgccagaccaactaaaat

SEQ ID NO: 468304 - DNA, 120 bp, Artificial Sequence
  ENSG00000158805_46 (sequence is synthesized)
gcacgaccccagacttttggaggacaaggtctcctgcccaccatggtcccagccagcagctccaggaacacaggctgggctccctgcagtggaggcggggttgaggaatgctggggtggc

SEQ ID NO: 468305 - DNA, 120 bp, Artificial Sequence
  ENSG00000158805_47 (sequence is synthesized)
agctactcaccgtgtgcttcccagggagcatcacctgttcctctgaagccctgcctgggtggcttgagcttggaatcaagctgacccattttgagagagtggattctgagctttttccta

SEQ ID NO: 468306 - DNA, 120 bp, Artificial Sequence
  ENSG00000158805_48 (sequence is synthesized)
gcgtaaggtcgttttgataaaggagtggtcctttggacatccctgttctgccgtcctgatacctctagttgtgggttttatgtgtagcacagggtgaagctttagttctcagaacccacc

SEQ ID NO: 468307 - DNA, 120 bp, Artificial Sequence
  ENSG00000158805_49 (sequence is synthesized)
cctgctgtaccctgtgccctcgccctccgctgtgtttgccctgaccctcctgtaccctgcgtcctcgccctctgctgtgctcacccgaccctgctgtaccctgcgccctcgtcctctgcc

SEQ ID NO: 468308 - DNA, 120 bp, Artificial Sequence
  ENSG00000158805_50 (sequence is synthesized)
gtttgcccctgaccctgctgtaccatgccctcgccctctgctgtgttcaccctgaccctgctgtaccctgcgccctcaccctctgctgtgttcacctgaccctgctgtgtcctgcgccct

SEQ ID NO: 468309 - DNA, 120 bp, Artificial Sequence
  ENSG00000158805_51 (sequence is synthesized)
tgtaccctgcgccctcatcctctgctgtgccctccccctctgctgtgttcgccctgaccctgctgtaccctgcgccctcgccctctgctgtgtttgccctgaccctgctgtaccctgcgc

SEQ ID NO: 468310 - DNA, 120 bp, Artificial Sequence
  ENSG00000158805_52 (sequence is synthesized)
cctcgccctctgctgtgttcacccctgaccctgctgtgtcctgcgcccttgccctctgctgtgctcgcccctgaggcctcctgtccagagttgctctggctttggtggcttcaggtagat

SEQ ID NO: 468311 - DNA, 120 bp, Artificial Sequence
  ENSG00000158805_53 (sequence is synthesized)
tctgagggtcagtcagcacagaagcaactcagggaagcttcagaaaagaccatttctcaggttggagagacaaaaaacattttgcaaatggagatcagaaaccattgaatttgggaacct

SEQ ID NO: 468312 - DNA, 120 bp, Artificial Sequence
  ENSG00000158805_54 (sequence is synthesized)
gtcagtactgcagtgtgacgggtgttgagagagggacagggcgtgcctccgcgggagcctctgggtggggggaatgggccatgcccgggttcagtgccaacagccctgggactgttgtgg

SEQ ID NO: 468313 - DNA, 120 bp, Artificial Sequence
  ENSG00000158805_55 (sequence is synthesized)
agagatgaactgggaggagctggggtgagggaagagaaagttgcctatggggaccgctgaggtttgagatctcgagagggtcccgtacgacgagcgctgtgaacctccgcctgcttgtcc

SEQ ID NO: 468314 - DNA, 120 bp, Artificial Sequence
  ENSG00000158806_0 (sequence is synthesized)
ggggggagctgggacctaagccgcgcgcacacccctttctctgcgtctggtggaggtgcacagaggcttttgagtcaggcccaagcgcagccaggtgacctccccgcggcctttcaagcc

SEQ ID NO: 468315 - DNA, 120 bp, Artificial Sequence
  ENSG00000158806_1 (sequence is synthesized)
tgagctcggtggacagctccctctcccgtgagtcccgctgtcctgtacgcgcccggtcgagccccgggctgcgcaccccgctaggagctgcccggccagcccgcttctctgcccggagcc

SEQ ID NO: 468316 - DNA, 120 bp, Artificial Sequence
  ENSG00000158806_2 (sequence is synthesized)
atgaatctcagtagcgccagtagcacggaggaaaaggcagtgacgaccgtgctctggggctgcgagctcagtcaggagaggcggacttggaccttcagaccccagctggaggggaagcag

SEQ ID NO: 468317 - DNA, 120 bp, Artificial Sequence
  ENSG00000158806_3 (sequence is synthesized)
agctgcaggctgttgcttcatacgatttgcttgggggagaaagccaaagaggagatgcatcgcgtggagatcctgcccccagcaaaccaggaggacaagaagatgcagccggtcaccatt

SEQ ID NO: 468318 - DNA, 120 bp, Artificial Sequence
  ENSG00000158806_4 (sequence is synthesized)
cctccccatggtctccatggtaggagtgcagctttctcccccagttactttccagctccgggctggctcaggacccgtgttcctcagtggccaggaacgttatgaagcatcagacctaac

SEQ ID NO: 468319 - DNA, 120 bp, Artificial Sequence
  ENSG00000158806_5 (sequence is synthesized)
ctgggaggaggaggaggaagaagaaggggaggaggaggaagaggaagaggaagatgatgaggatgaggatgcagatatatctctggaggagcaaagccctgtcaaacaagtcaaaaggct

SEQ ID NO: 468320 - DNA, 120 bp, Artificial Sequence
  ENSG00000158806_6 (sequence is synthesized)
ggtgccccagaagcaggcgagcgtggctaagaaaaaaaagctggaaaaagaagaagaggaaataagagccagcgttagagacaagagccctgtgaaaaaggccaaagccacagccagagc

SEQ ID NO: 468321 - DNA, 120 bp, Artificial Sequence
  ENSG00000158806_7 (sequence is synthesized)
caagaagccaggattcaagaaatgaggagccacgccttggggggcacggtgcaaagtgggccttccctgggctgtgctgcaggcacagggtgcccctgtccagcccctccacctgtgtct

SEQ ID NO: 468322 - DNA, 120 bp, Artificial Sequence
  ENSG00000158806_8 (sequence is synthesized)
gaatgcaacaggggtgttgcgggggcaacatgagagcccctcacccccaactctccactttcaggaggcccccagtgaagagccccacctcggggtcacaataaagttgcctggtcagga

SEQ ID NO: 468323 - DNA, 120 bp, Artificial Sequence
  ENSG00000158806_9 (sequence is synthesized)
agtgtgctccccgccccctgccgcggcgcctcgcctcccggctcacctccccaccccacctgcccgctgcggctctccgcgggagatctcaccgttctggagacagggctcgctcgctct

SEQ ID NO: 468324 - DNA, 120 bp, Artificial Sequence
  ENSG00000158806_10 (sequence is synthesized)
cacggtaggctggaagaacgggctgtctgggccttaggaaaggcccatgctgtataaggcatggggaaaggaaaggaagaaaggcaacgaacaagaaggagggcttccaactgcagcttc

SEQ ID NO: 468325 - DNA, 120 bp, Artificial Sequence
  ENSG00000158806_11 (sequence is synthesized)
ctgccggctgcaggcctcccttcctaagctgagctgaggcttcctctccatgggctggggagggggcgccaggaggcctcggcgggtccgcaattggccgggacagcttctcacgaaagg

SEQ ID NO: 468326 - DNA, 120 bp, Artificial Sequence
  ENSG00000158806_12 (sequence is synthesized)
tcctgggccggcatcatcagcctcacctgggaactggttagaactacaaattccctcggccccacccagaccgacgccaagggcagctgtggagtggggcgcggcaatgcgccccttaac

SEQ ID NO: 468327 - DNA, 120 bp, Artificial Sequence
  ENSG00000158806_13 (sequence is synthesized)
agccctccaggcttcttagcccgggcttggacagccgccttccggccagaggggatgaggttgcgctgcgctccgggagcgccgatggcgtgactggccccgcgcggagcagcgacagta

SEQ ID NO: 468328 - DNA, 120 bp, Artificial Sequence
  ENSG00000158806_14 (sequence is synthesized)
gttgccggtgagcccttgaccgtggcaggtcccctccagccgcgagcgacccctcagtacctgccgatgcctgctggtctctggcatcctccagtcgagggtcagggtcagggagcaagg

SEQ ID NO: 468329 - DNA, 120 bp, Artificial Sequence
  ENSG00000158806_15 (sequence is synthesized)
cagaggggatgaggttgcgctgcgctccgggagcgccgatggcgtgactggccccgcgcggagcagcgacagctgcgagctcagtcaggagaggcggacttggaccttcagaccccagct

SEQ ID NO: 468330 - DNA, 120 bp, Artificial Sequence
  ENSG00000158806_16 (sequence is synthesized)
agccctgtcaaacaagtcaaaaggctggtgccccagaagcaggcgagcgtggctaagaaaaaaaagctggaaaaagaagaagaggaaataagagtccgagtggtccccaggaggagcagc

SEQ ID NO: 468331 - DNA, 120 bp, Artificial Sequence
  ENSG00000158806_17 (sequence is synthesized)
caggcttgctttccagggtgggcactgggagggccacgccgctggtctggagctgagctctctccctgaccccaatcccactcctgctccgctccaccctgttgcagagccagcgttaga

SEQ ID NO: 468332 - DNA, 120 bp, Artificial Sequence
  ENSG00000158813_0 (sequence is synthesized)
ccctttcccacccctcggagtagagctgcacatgcggctgctccctgctccgtcccgcccagccactgtcgcgcaggaacgggtccctgcagcccccagccgatggcaggacagtagccg

SEQ ID NO: 468333 - DNA, 120 bp, Artificial Sequence
  ENSG00000158813_1 (sequence is synthesized)
cctgtcagaggtcgtgaacggctgaggcagacgcagcggctcccgggcctcaagagagtgggtgtctccggaggccatgggctacccggaggtggagcgcagggaactcctgcctgcagc

SEQ ID NO: 468334 - DNA, 120 bp, Artificial Sequence
  ENSG00000158813_2 (sequence is synthesized)
agcgccgcgggagcgagggagccagggctgcgggtgtggcggggcccctgcccgggcgggcgaagggaacagctgcctgctcttcctgggtttctttggcctctcgctggccctccacct

SEQ ID NO: 468335 - DNA, 120 bp, Artificial Sequence
  ENSG00000158813_3 (sequence is synthesized)
gctgacgttgtgctgctacctagagttgcgctcggagttgcggcgggaacgtggagccgagtcccgccttggcggctcgggcacccctggcacctctggcaccctaagcagcctcggtgg

SEQ ID NO: 468336 - DNA, 120 bp, Artificial Sequence
  ENSG00000158813_4 (sequence is synthesized)
cctcgaccctgacagccccatcaccagtcaccttgggcagccgtcacctaagcagcagccattggaaccgggagaagccgcactccactctgactcccaggacgggcaccagatggccct

SEQ ID NO: 468337 - DNA, 120 bp, Artificial Sequence
  ENSG00000158813_5 (sequence is synthesized)
attgaatttcttcttccctgatgaaaagccatactctgaagaagaaagtaggcgtgttcgccgcaataaaagaagcaaaagcaatgaaggagcagatggcccagttaaaaacaagaaaaa

SEQ ID NO: 468338 - DNA, 120 bp, Artificial Sequence
  ENSG00000158813_6 (sequence is synthesized)
gggaaagaaagcaggacctcctggacccaatggccctccaggacccccaggacctccaggaccccagggacccccaggaattccagggattcctggaattccaggaacaactgttatggg

SEQ ID NO: 468339 - DNA, 120 bp, Artificial Sequence
  ENSG00000158813_7 (sequence is synthesized)
accacctggtcctccaggtcctcctggtcctcaaggaccccctggcctccagggaccttctggtgctgctgataaagctggaactcgagaaaaccagccagctgtggtgcatctacaggg

SEQ ID NO: 468340 - DNA, 120 bp, Artificial Sequence
  ENSG00000158813_8 (sequence is synthesized)
ccaagggtcagcaattcaagtcaagaatgatctttcaggtggagtgctcaatgactggtctcgcatcactatgaaccccaaggtgtttaagctacatccccgcagcggggagctggaggt

SEQ ID NO: 468341 - DNA, 120 bp, Artificial Sequence
  ENSG00000158813_9 (sequence is synthesized)
actggtggacggcacctacttcatctatagtcaggtagaagtatactacatcaacttcactgactttgccagctatgaggtggtggtggatgagaagcccttcctgcagtgcacacgcag

SEQ ID NO: 468342 - DNA, 120 bp, Artificial Sequence
  ENSG00000158813_10 (sequence is synthesized)
catcgagacgggcaagaccaactacaacacttgctataccgcaggcgtctgcctcctcaaggcccggcagaagatcgccgtcaagatggtgcacgctgacatctccatcaacatgagcaa

SEQ ID NO: 468343 - DNA, 120 bp, Artificial Sequence
  ENSG00000158813_11 (sequence is synthesized)
gcacaccacgttctttggggccatcaggctgggtgaagcccctgcatcctagattccccccattttgcctctgtccgtgccccttccctgggtttgggagccaggactcccagaacctct

SEQ ID NO: 468344 - DNA, 120 bp, Artificial Sequence
  ENSG00000158813_12 (sequence is synthesized)
aagtgctgctgtggagtgaggtgtattggtgttgcagccgcagagaaatgccccagtgttatttattccccagtgactccagggtgacaaggcctgcttgactttccagaatgaccttga

SEQ ID NO: 468345 - DNA, 120 bp, Artificial Sequence
  ENSG00000158813_13 (sequence is synthesized)
gttaacaggacagttgatggagccccagggtttacatgaagcagaaccttctttggttccatgttgactgacttatggcatgactcttcaaccccgaggtccctgttgtcagatctattg

SEQ ID NO: 468346 - DNA, 120 bp, Artificial Sequence
  ENSG00000158813_14 (sequence is synthesized)
tttgttgcactaaaatgaggatccagggcagcaggccagagaaagcaaaggtgcactccagactctgggggtggacatctgaccccaagggggctgctgctcctctcttgggtagggtag

SEQ ID NO: 468347 - DNA, 120 bp, Artificial Sequence
  ENSG00000158813_15 (sequence is synthesized)
tggctggggtggagtgggaagggagcattgcagcctaagaagaaggccagagagggaaaaggcaggtgcttttggcagagaccataagagaaacctgccaaggagcatccttggcagtgg

SEQ ID NO: 468348 - DNA, 120 bp, Artificial Sequence
  ENSG00000158813_16 (sequence is synthesized)
gaatgttctttctgctctatactgtggcctgcaggagggttggagtgctcttcccactccagctgacagccacaccgtggcagcttgctgggctttgggaagtttgctgtgctttggaac

SEQ ID NO: 468349 - DNA, 120 bp, Artificial Sequence
  ENSG00000158813_17 (sequence is synthesized)
aatcacagggaatggccacaaacctgcccgcctaagaccctgaatccgtacttgggtcacatgactctcattttatttacagctgtgctccacactcagaaaattccctggggtcacctt

SEQ ID NO: 468350 - DNA, 120 bp, Artificial Sequence
  ENSG00000158813_18 (sequence is synthesized)
ctagttgcccccattcccagcctgactagaactcctgtcttctttctccatggagcctacctctgtctgagacaggtgcctaacctgggacctgtggtcatgtgagtctgggatattctt

SEQ ID NO: 468351 - DNA, 120 bp, Artificial Sequence
  ENSG00000158813_19 (sequence is synthesized)
tagcttacctgggcacaaacagaattttccatttattaagcagtacaaatgtttttcatccattcctaatcaaattctgtctggggacgaagggttggacgggatgacctccagaagtcc

SEQ ID NO: 468352 - DNA, 120 bp, Artificial Sequence
  ENSG00000158813_20 (sequence is synthesized)
cttcaatttctagtacctgtgactcttagccctcaccacagccttctaaattcccaaatcctagactgctcctgggcattagcaaggcagagcctttttacctggcctagaaagggcaag

SEQ ID NO: 468353 - DNA, 120 bp, Artificial Sequence
  ENSG00000158813_21 (sequence is synthesized)
aaggccagcagctgatgctgtactaacccagtctttcttcactctggcttcaaaaagccacagcagagcattgtcaccgcaggtgctcatgctgctcccctaaagccaggctcaggagaa

SEQ ID NO: 468354 - DNA, 120 bp, Artificial Sequence
  ENSG00000158813_22 (sequence is synthesized)
gccagtgtctaggcactgagcagggatctgccccctagttcaggtccaaattcaccttcccctaaaccccaagcttcccaacagatcatatggtaggaccctcgagagccttacttcaaa

SEQ ID NO: 468355 - DNA, 120 bp, Artificial Sequence
  ENSG00000158813_23 (sequence is synthesized)
gtgcctgggctcagcctggtttctgggtgctagatccagcccaaacctgggaaggccagccttgtacagtctgctcctcttgttcctgaaatgtgtttccttttcaggagatggggaata

SEQ ID NO: 468356 - DNA, 120 bp, Artificial Sequence
  ENSG00000158813_24 (sequence is synthesized)
atttccttcaggcagctgaaattcaccaagaacagcgggtacttatttctcagctgtgccttccctttctaagcaaccacactgcttggcccttcaagggtcagggtgagacgtgatggg

SEQ ID NO: 468357 - DNA, 120 bp, Artificial Sequence
  ENSG00000158813_25 (sequence is synthesized)
ctaggcctccgttgtctggttgctaatgacagccttgcaacccaaggtgaggtgaactccaggcatgtgtctggccctaactcctataaagtgcctcggacagtccgcagttgtagcaga

SEQ ID NO: 468358 - DNA, 120 bp, Artificial Sequence
  ENSG00000158813_26 (sequence is synthesized)
aaccaacaagaaccactccttcatgtttggaaaataatttctcttgtattatctcctttgaagaaggcaaggctgataatatgacaaacatcattgtttagatgaggctcagagaggtag

SEQ ID NO: 468359 - DNA, 120 bp, Artificial Sequence
  ENSG00000158813_27 (sequence is synthesized)
cactctcagagtgttttgaccagtttaagccgcagacctggagcttcagccaggtctgactccaaagctgttccattacaccacagcattgtgtggaatttgaggtctagagagaaccaa

SEQ ID NO: 468360 - DNA, 120 bp, Artificial Sequence
  ENSG00000158813_28 (sequence is synthesized)
taaaagtggtaattgggaactgaaatccttgagagttccggggagaaacccagagatgcctgatttcattcctcgatggtaatacccgtcctctcggctgccaggggctctgtggcaaaa

SEQ ID NO: 468361 - DNA, 120 bp, Artificial Sequence
  ENSG00000158813_29 (sequence is synthesized)
agagtcagacatttctttggaaaacagcgaacagccttagagctcttgtgttcagaagaatcttcctggcacaatgttggagcagcaggcctctgggacccacagaacttgtggccttta

SEQ ID NO: 468362 - DNA, 120 bp, Artificial Sequence
  ENSG00000158813_30 (sequence is synthesized)
tgttctttcacccatcctaggaaccagccaaccatcatgtgtagagcccctactgtgggcaaagtcctcctttcattaccctacagacagcttacaggagccagcctgcttcccacaact

SEQ ID NO: 468363 - DNA, 120 bp, Artificial Sequence
  ENSG00000158813_31 (sequence is synthesized)
actagtgtgactccttatctctttccaccataccttagagactttgatactaccagggtctctcagggatggagggaagacctgaaagagaggactggttctgaggccagaaaggtgtga

SEQ ID NO: 468364 - DNA, 120 bp, Artificial Sequence
  ENSG00000158813_32 (sequence is synthesized)
ggagagaggaggaaaagtcttcctaattgtgcccctaaagagcatcctgataccattctattctccagacatggaggggatgataaaggaaataggatctccactggacccttgattcat

SEQ ID NO: 468365 - DNA, 120 bp, Artificial Sequence
  ENSG00000158813_33 (sequence is synthesized)
tctgaaccctccaaaggaactctagagggcgagggatgatgagggaagcaataggtagctggggagccctattgctgctaagtcattggcaaagtgacaaagcaatttactgatgagaga

SEQ ID NO: 468366 - DNA, 120 bp, Artificial Sequence
  ENSG00000158813_34 (sequence is synthesized)
atgtggaaatagatgtgcagtttggaattatgttggtgtgaatttgccagaggaccaatgcttgcatggagaatgggacgaggacatttgtgggcaagcagatgacagaggtttgaagga

SEQ ID NO: 468367 - DNA, 120 bp, Artificial Sequence
  ENSG00000158813_35 (sequence is synthesized)
gaatggcatggcaggagtctctgccagttacttgggcttcaacagccaagctggcacaaaagacagctggcggaggctgctcggctactggttacctggagaagtagtatttgcctattt

SEQ ID NO: 468368 - DNA, 120 bp, Artificial Sequence
  ENSG00000158813_36 (sequence is synthesized)
cccccttcatccatcctgagccaaatttcttttgctgaacaggaaagagctaggaaccctggaggtaaacaaagactttgatccatgtatgagtgtatgtgtttatgtaacttcctgtgg

SEQ ID NO: 468369 - DNA, 120 bp, Artificial Sequence
  ENSG00000158813_37 (sequence is synthesized)
atgcaaatagattcagagaaatttagagctaaaaaggcccttagagggaatctagcccaacctacattccaccctgttacttatgtagaaactgaggcccagagagggaagatgacctgc

SEQ ID NO: 468370 - DNA, 120 bp, Artificial Sequence
  ENSG00000158813_38 (sequence is synthesized)
cccaagtggtgagcaagcaccaacctccagactcagcagagtgagggggtaaagcagttcctgtcccacatggccatcttctttcttccacccacaaactccaggctggaagtacttggc

SEQ ID NO: 468371 - DNA, 120 bp, Artificial Sequence
  ENSG00000158813_39 (sequence is synthesized)
ccccttcaggagcctggccaggcagggagagagtagctgcagccttcatcagaactcttcctcctcccaaggcattctcccagctctagcctctggactggaaagcacaagactggccca

SEQ ID NO: 468372 - DNA, 120 bp, Artificial Sequence
  ENSG00000158813_40 (sequence is synthesized)
gtgccagcaagtccttaggctactgtaatgctgcctcaggacccatccctgcctggaggctcctctaggccctgtgagcacaaagaagaaagctgatttttgtcttttaatccatttcag

SEQ ID NO: 468373 - DNA, 120 bp, Artificial Sequence
  ENSG00000158813_41 (sequence is synthesized)
gactctctccaggagggctcggggtgtgtcatttctatattcctccagctgggattggggggtgggctttgttgtgagaatggcctggagcaggcccaatgctgcttttgggggtcagca

SEQ ID NO: 468374 - DNA, 120 bp, Artificial Sequence
  ENSG00000158813_42 (sequence is synthesized)
tccagtgtgagatactgtgtatataaactatatataatgtatataaactgggatgtaagtttgtgtaaattaatggtttattctttgcaaataaaacgctttccccgtctgttcttgaaa

SEQ ID NO: 468375 - DNA, 120 bp, Artificial Sequence
  ENSG00000158813_43 (sequence is synthesized)
aaggagcagatggtaagtctactcagttgatcctttatcacttctgaattatttgttagtaaaagtatccttttaagaactaccttcttggtagggcatggtggctcacgcctgtaatcc

SEQ ID NO: 468376 - DNA, 67 bp, Artificial Sequence
  ENSG00000158813_44 (sequence is synthesized)
agtcccagctgcttgggagactaaggcaggagaatcgcttgaaactgggaggtagaggttgcagtga

SEQ ID NO: 468377 - DNA, 120 bp, Artificial Sequence
  ENSG00000158813_45 (sequence is synthesized)
gtatccagagttgacattacctgtgttaaggctcttcgatcaagaacataactaggaatcattcgaggtgattcaaggcctgttttcctcaggtcttgctaagcctgtgacctgtcagct

SEQ ID NO: 468378 - DNA, 120 bp, Artificial Sequence
  ENSG00000158813_46 (sequence is synthesized)
atgcttaggtatcattttaaagaaagtattgcctaacccaaggagctgagacttgagatttgaattctggctccccaccggttaaggaaaagagctgataaagaccttttgaggcccaga

SEQ ID NO: 468379 - DNA, 120 bp, Artificial Sequence
  ENSG00000158813_47 (sequence is synthesized)
tccctctgtccactctcagcaccttcactctgaagatctgttaaaagcacacgagtcgtctcagtccctcagtgggagctgtttcacctggcgtcatctagtcagccatcttcaataata

SEQ ID NO: 468380 - DNA, 120 bp, Artificial Sequence
  ENSG00000158813_48 (sequence is synthesized)
actgttaaatgaacatttatatccactgaaaccactaagtgaaataaagatgtgtttaggcaaagaactgagtttatgacttatagatcctcaccaaggaaacttccaaaagatgtactt

SEQ ID NO: 468381 - DNA, 120 bp, Artificial Sequence
  ENSG00000158813_49 (sequence is synthesized)
accaggtgagtcacctagtaggggcggcggcggccccctcccctcgcgggtagggcgagggccctccgccacaggggcctgggagcactcagcaacctcgagccaatttagagggcagga

SEQ ID NO: 468382 - DNA, 120 bp, Artificial Sequence
  ENSG00000158813_50 (sequence is synthesized)
ccagggagggaccaggcgagcaagggagaagttgcccagggcaggttgtcttcggtccctggcccagctaatccagactccctggggaccccttgacttggaaagtctcgcgcgcgcccg

SEQ ID NO: 468383 - DNA, 120 bp, Artificial Sequence
  ENSG00000158813_51 (sequence is synthesized)
cggcccctggctgcgggctgcctcgagaaaagttggcgacgctcccgtcgaggaggtgcctgcgctgccccccggccgactaacggcttggcccttctgctcgtgatgaggttctctgcc

SEQ ID NO: 468384 - DNA, 120 bp, Artificial Sequence
  ENSG00000158813_52 (sequence is synthesized)
cgcggtgcttgttttttcgtgtctagagctgatgccagaaccagcaggctcccctttggagttggagctgtaaacagctgtaataactgttccacgcccgcccgttgaaacaacttttaa

SEQ ID NO: 468385 - DNA, 120 bp, Artificial Sequence
  ENSG00000158813_53 (sequence is synthesized)
ccgcattttcagcgcgggtccttgtgcgctgaccagaacgtgggcttgttcacacttacctgcaatttgagactgattgtcctcggcgttctagtgaggatcagcgcccctgaggaattc

SEQ ID NO: 468386 - DNA, 120 bp, Artificial Sequence
  ENSG00000158813_54 (sequence is synthesized)
aaggctcttcgatcaagaacataactaggaatcattcgaggtgattcaaggactttgactacatcatttcattctcttatggcctacaaggtttctgctgagaaatccactgatattcta

SEQ ID NO: 468387 - DNA, 120 bp, Artificial Sequence
  ENSG00000158815_0 (sequence is synthesized)
gtggctcggagagaccttggcttctctgggactctacccctggggacttcccacatctgctcctgagcttgggggcaggggggcaaccgcctgaggaacctctccagcgatgggagccgc

SEQ ID NO: 468388 - DNA, 120 bp, Artificial Sequence
  ENSG00000158815_1 (sequence is synthesized)
ccgcctgctgcccaacctcactctgtgcttacagctgctgattctctgctgtcaaactcagggggagaatcacccgtctcctaattttaaccagtacgtgagggaccagggcgccatgac

SEQ ID NO: 468389 - DNA, 120 bp, Artificial Sequence
  ENSG00000158815_2 (sequence is synthesized)
cgaccagctgagcaggcggcagatccgcgagtaccaactctacagcaggaccagtggcaagcacgtgcaggtcaccgggcgtcgcatctccgccaccgccgaggacggcaacaagtttgc

SEQ ID NO: 468390 - DNA, 120 bp, Artificial Sequence
  ENSG00000158815_3 (sequence is synthesized)
caagctcatagtggagacggacacgtttggcagccgggttcgcatcaaaggggctgagagtgagaagtacatctgtatgaacaagaggggcaagctcatcgggaagcccagcgggaagag

SEQ ID NO: 468391 - DNA, 120 bp, Artificial Sequence
  ENSG00000158815_4 (sequence is synthesized)
caaagactgcgtgttcacggagatcgtgctggagaacaactatacggccttccagaacgcccggcacgagggctggttcatggccttcacgcggcaggggcggccccgccaggcttcccg

SEQ ID NO: 468392 - DNA, 120 bp, Artificial Sequence
  ENSG00000158815_5 (sequence is synthesized)
cagccgccagaaccagcgcgaggcccacttcatcaagcgcctctaccaaggccagctgcccttccccaaccacgccgagaagcagaagcagttcgagtttgtgggctccgcccccacccg

SEQ ID NO: 468393 - DNA, 120 bp, Artificial Sequence
  ENSG00000158815_6 (sequence is synthesized)
ccggaccaagcgcacacggcggccccagcccctcacgtagtctgggaggcagggggcagcagcccctgggccgcctccccacccctttcccttcttaatccaaggactgggctggggtgg

SEQ ID NO: 468394 - DNA, 120 bp, Artificial Sequence
  ENSG00000158815_7 (sequence is synthesized)
cgggaggggagccagatccccgagggaggaccctgagggccgcgaagcatccgagcccccagctgggaaggggcaggccggtgccccaggggcggctggcacagtgcccccttcccggac

SEQ ID NO: 468395 - DNA, 120 bp, Artificial Sequence
  ENSG00000158815_8 (sequence is synthesized)
gggtggcaggccctggagaggaactgagtgtcaccctgatctcaggccaccagcctctgccggcctcccagccgggctcctgaagcccgctgaaaggtcagcgactgaaggccttgcaga

SEQ ID NO: 468396 - DNA, 120 bp, Artificial Sequence
  ENSG00000158815_9 (sequence is synthesized)
caaccgtctggaggtggctgtcctcaaaatctgcttctcggatctccctcagtctgcccccagcccccaaactcctcctggctagactgtaggaagggacttttgtttgtttgtttgttt

SEQ ID NO: 468397 - DNA, 120 bp, Artificial Sequence
  ENSG00000158815_10 (sequence is synthesized)
caggaaaaaagaaagggagagagaggaaaatagagggttgtccactcctcacattccacgacccaggcctgcaccccacccccaactcccagccccggaataaaaccattttcctgcaaa

SEQ ID NO: 468398 - DNA, 120 bp, Artificial Sequence
  ENSG00000158815_11 (sequence is synthesized)
ccagggtggggcgaggggcaggtcttgcagaggctaggcagaggctgctctatggggaggtgcaattggaaatgagcaacggtgcacagtaagtgttaaccccgcgcaggttaaatgtcc

SEQ ID NO: 468399 - DNA, 120 bp, Artificial Sequence
  ENSG00000158815_12 (sequence is synthesized)
agctctgagagctgctccctcactccccctgcctcaaaggtgatatttcccaccccctccctaggagagagtagcccctaacagatgctaatctgggtctagctctgtccagatggctga

SEQ ID NO: 468400 - DNA, 120 bp, Artificial Sequence
  ENSG00000158815_13 (sequence is synthesized)
ggttgggcctgggataaaggtggaattagggatttggggcaggggctgagaaaagctgtcccagcacaggcagcggcatccaggtggagacaaaaccagcaaaaaaggtacattctcatg

SEQ ID NO: 468401 - DNA, 120 bp, Artificial Sequence
  ENSG00000158815_14 (sequence is synthesized)
ctagagctgaggctgttgccaggagccaggaaacctagcccgggtcgcaccttgcaggatggaggggaagaagtactcagtctctcccactcagccttacagatgggtaacgagagacct

SEQ ID NO: 468402 - DNA, 120 bp, Artificial Sequence
  ENSG00000158815_15 (sequence is synthesized)
agctgggaggcggtactcctcctggctttgcacagtgcgtggggggaaatggttcctctcccccaacccaaaggggaagcaggtgggcgggcgcatcccaccaactggccaggagcctct

SEQ ID NO: 468403 - DNA, 120 bp, Artificial Sequence
  ENSG00000158815_16 (sequence is synthesized)
gttacattgtggctaaggagctgcctgccaggggcagccattgggccaccgctgatagtgcctgtcctcttggtactgcctctgcctccctccgctaaggaggcaccttgcctgcctgct

SEQ ID NO: 468404 - DNA, 120 bp, Artificial Sequence
  ENSG00000158815_17 (sequence is synthesized)
gtcccatagtgcccagccccagccccagccccagctccagcccatagaggagggaggaacactggaagggccctgagcaccagggggcaaggccgggaagaagatgggtatgagctcagg

SEQ ID NO: 468405 - DNA, 120 bp, Artificial Sequence
  ENSG00000158815_18 (sequence is synthesized)
attccacagttagtgcttcaaagaaatgctcatgggaccctgcaggagctttcagagtcccccacatgctctctggtgaccctaactcgcagcaccatctgctctgtgcccgtgtgctgg

SEQ ID NO: 468406 - DNA, 120 bp, Artificial Sequence
  ENSG00000158815_19 (sequence is synthesized)
gcaaggggtctttcaaggccagtggggaggatgaggaaggaatctggttgtcctggctaatggagcatgtccttggagttctgggggagatgacaggctctggtctaagaggtagggaca

SEQ ID NO: 468407 - DNA, 120 bp, Artificial Sequence
  ENSG00000158815_20 (sequence is synthesized)
ggggttctgtccctaatgagctgtgtgccccgtgcacctccttcatagaatacgaggacgggatagaaccctgagggctccttccagctcccagagtcctgattccagggctgtgctctg

SEQ ID NO: 468408 - DNA, 120 bp, Artificial Sequence
  ENSG00000158815_21 (sequence is synthesized)
gcaaagaggttatgaccggctcacccaggggcctgggaaggctatggccatatgcccacttcactctgcaggacaagtggcctgtccccactatattcacctcctcacccctctcccttg

SEQ ID NO: 468409 - DNA, 120 bp, Artificial Sequence
  ENSG00000158815_22 (sequence is synthesized)
gatggaccagtggtggtgtcacccaaagcaaattgacactatttttcccttggtaaccgcaaagggggagaatcacccgtctcctaattttaaccagtacgtgagggaccagggcgccat

SEQ ID NO: 468410 - DNA, 120 bp, Artificial Sequence
  ENSG00000158815_23 (sequence is synthesized)
accagagaccccagccccacttgacacctgcggctcacccttggggaggtggggcgccagacctgagtgcaggagacgcagacctggaagggctccccctccctgacctgccacacatcg

SEQ ID NO: 468411 - DNA, 120 bp, Artificial Sequence
  ENSG00000158815_24 (sequence is synthesized)
agtttgtctgcgtcgagtttggccagtctgtgagggtcaggaatagagcaggagacagcagggccacctccttcagaaggcccccaccgctccatccctgcactgggtggcccaggagag

SEQ ID NO: 468412 - DNA, 120 bp, Artificial Sequence
  ENSG00000158815_25 (sequence is synthesized)
actggcagcccagagggcacagcgcgcacgcccccacccgcatctgctttgcagcctcactggccaggaaggtggacacctcatacctcagtctcccaattacgccctcctcctccccct

SEQ ID NO: 468413 - DNA, 120 bp, Artificial Sequence
  ENSG00000158816_0 (sequence is synthesized)
atcgcaatgtgggcattgatcaagccagctgccagggcagcgggcgcagggcttgggcactggagcccagccccggaccgcacctccagcagtgctgggtgcagaaggcagtcactgtgg

SEQ ID NO: 468414 - DNA, 120 bp, Artificial Sequence
  ENSG00000158816_1 (sequence is synthesized)
cagtggagagacagagtgtgtacccagacacgtgttgcttctggggtaaggttctgaaggctgagtagccagcgggatgcccggcttgctgaattggatcacgggggcagccctgcccct

SEQ ID NO: 468415 - DNA, 120 bp, Artificial Sequence
  ENSG00000158816_2 (sequence is synthesized)
caccgcgtctgatgttacctcctgtgtcagcggttatgccctgggcctaactgcctccctcacctatggcaacctggaagcccagcccttccagggcctcttcgtgtaccccctggatga

SEQ ID NO: 468416 - DNA, 120 bp, Artificial Sequence
  ENSG00000158816_3 (sequence is synthesized)
gtgcaccacggtgatcggctttgaggcagtcattgccgaccgtgtcgtgacagtacagatcaaggacaaagccaagctggagagcggccacttcgatgcctcccatgttcgatccccaac

SEQ ID NO: 468417 - DNA, 120 bp, Artificial Sequence
  ENSG00000158816_4 (sequence is synthesized)
agtcacagggaacattctgcaagacggggtttccatagcccctcattcctgcacaccgggaaaggtgaccttggacgaggatttggagcggatcctgttcgtggccaacctggggaccat

SEQ ID NO: 468418 - DNA, 120 bp, Artificial Sequence
  ENSG00000158816_5 (sequence is synthesized)
tgcccccatggagaatgtcaccatcttcatcagcacctcctcggagctcccaacgctgcccagcggggctgtgagggtccttctgcctgctgtctgtgccccaaccgtgccccagttctg

SEQ ID NO: 468419 - DNA, 120 bp, Artificial Sequence
  ENSG00000158816_6 (sequence is synthesized)
caccaagagcactggcacctccaaccaacaggcccagggcaaagacaggcactgcttcggtgcctgggccccgggctcctggaataagttgtgcctggcgactctcctgaacaccgaagt

SEQ ID NO: 468420 - DNA, 120 bp, Artificial Sequence
  ENSG00000158816_7 (sequence is synthesized)
gtccaaccccatggagtatgagttcaacttccagctggagatccgtgggccatgtctgctcgcaggggtggagagtcccactcatgagattcgtgccgacgccgccccatctgcccgctc

SEQ ID NO: 468421 - DNA, 120 bp, Artificial Sequence
  ENSG00000158816_8 (sequence is synthesized)
ggccaagagcatcatcatcaccttggccaacaagcacacctttgaccggcctgtggagatcctcatccaccccagcgagccccatatgccccatgtcctgatagagaaaggggacatgac

SEQ ID NO: 468422 - DNA, 120 bp, Artificial Sequence
  ENSG00000158816_9 (sequence is synthesized)
cctgggagagtttgaccagcacttgaagggaagaacagatttcattaaagggatgaagaagaagagcagagcagagcggaagacagaaatcattcgaaaacgcctccacaaagacattcc

SEQ ID NO: 468423 - DNA, 120 bp, Artificial Sequence
  ENSG00000158816_10 (sequence is synthesized)
ccaccactccgtcatcatgctcaacttctgtcccgacctccagtcagtccagccgtgcctgagaaaggcccacggggagttcatcttcctcattgacaggagcagcagcatgagcgggat

SEQ ID NO: 468424 - DNA, 120 bp, Artificial Sequence
  ENSG00000158816_11 (sequence is synthesized)
cagcatgcaccgagtcaaggatgccatgttggtggcccttaagagcctcatgccagcctgcctcttcaatatcattgggtttggatccacatttaagagcctttttccttccagccagac

SEQ ID NO: 468425 - DNA, 120 bp, Artificial Sequence
  ENSG00000158816_12 (sequence is synthesized)
ctacagtgaggacagcttggccatggcttgtgatgacatccagagaatgaaggccgacatgggtgggaccaacatcctttcccctctcaagtgggtcatcaggcagccagtgcaccgagg

SEQ ID NO: 468426 - DNA, 120 bp, Artificial Sequence
  ENSG00000158816_13 (sequence is synthesized)
ccacccgcggctcctcttcgtgatcacagatggcgctgtcaacaacacagggaaggtgctggagctggtgcgaaatcacgccttctccaccaggtgctatagctttggaattggacccaa

SEQ ID NO: 468427 - DNA, 120 bp, Artificial Sequence
  ENSG00000158816_14 (sequence is synthesized)
cgtctgccacagactggtgaaaggactggcatctgtgtccgagggcagtgctgagctcctgatggagggggagcggctgcaacccaagatggtcaaatccttgaagaaggccatggcccc

SEQ ID NO: 468428 - DNA, 120 bp, Artificial Sequence
  ENSG00000158816_15 (sequence is synthesized)
agtcctgagcgatgtgactgtggagtggatcttccctgagaccactgaggtcctggtctcacccgtcagcgccagctccctcttccctggagaacggctggtggggtatggcattgtatg

SEQ ID NO: 468429 - DNA, 120 bp, Artificial Sequence
  ENSG00000158816_16 (sequence is synthesized)
tccaatcccagatctgacaagaggcgccggtacagcatgctgcactctcaggagtctggcagctctgtcttctaccactctcaggatgacggacccgggctggaaggtggagactgtgcc

SEQ ID NO: 468430 - DNA, 120 bp, Artificial Sequence
  ENSG00000158816_17 (sequence is synthesized)
aagaactcgggggcacccttcatcctagggcaggccaaaaatgcccggctagccagcggagactctaccaccaagcacgatctgaacctctctcagcgacggagggcatacagcaccaac

SEQ ID NO: 468431 - DNA, 120 bp, Artificial Sequence
  ENSG00000158816_18 (sequence is synthesized)
cagatcaccaatcacaagcccctcccaagagccaccatggcaagtgaccccatgccagctgccaagagatacccactgcggaaagccaggctgcaggacctcaccaaccagaccagcctg

SEQ ID NO: 468432 - DNA, 120 bp, Artificial Sequence
  ENSG00000158816_19 (sequence is synthesized)
gatgtccagcggtggcagattgatttgcagcccttgctgaacagtggtcaggacctgaaccagggccccaaactccgtggcccaggggcccgaaggccctctctgctgccccaaggctgc

SEQ ID NO: 468433 - DNA, 120 bp, Artificial Sequence
  ENSG00000158816_20 (sequence is synthesized)
cagcccttcctgccctggggccaggagacccaggcctggagccctgtgagagagcggacttctgacagccgaagccctggagatctggagccgtcccaccatccctctgccttcgagaca

SEQ ID NO: 468434 - DNA, 120 bp, Artificial Sequence
  ENSG00000158816_21 (sequence is synthesized)
gagacgtcctcggactgggaccccccagccgagtcccaggagcgagccagtcccagcaggcccgccaccccggccccggtgctgggcaaggccctggtcaaaggcctgcacgacagccaa

SEQ ID NO: 468435 - DNA, 120 bp, Artificial Sequence
  ENSG00000158816_22 (sequence is synthesized)
cgcctgcagtgggaggtgagcttcgagctggggacccctggaccggagcggggcggcgcgcaggatgccgacctatggagcgagaccttccaccacctggcggcccgcgccatcatccgc

SEQ ID NO: 468436 - DNA, 120 bp, Artificial Sequence
  ENSG00000158816_23 (sequence is synthesized)
gacttcgagcagctggcggagcgcgagggcgagatcgagcaggggtccaaccgccgctaccaagtgagcgccttgcacaccagcaaggcctgcaacatcattagcaaatacacagccttc

SEQ ID NO: 468437 - DNA, 120 bp, Artificial Sequence
  ENSG00000158816_24 (sequence is synthesized)
gtgcctgtggacgtgagcaagagccggtacctgcccaccgtggtggagtaccccaactctgctgccctgcgtatgcttggctctcgggccctggcccaacagtggaggggcacctcttct

SEQ ID NO: 468438 - DNA, 120 bp, Artificial Sequence
  ENSG00000158816_25 (sequence is synthesized)
ggctttggaaggccgcagacgatgcttggagaagattcggcaccaggaaatggtaaatttcaggccctaaacatggaggcaagtcccactgctctcttcagcgaggccaggtcccccggc

SEQ ID NO: 468439 - DNA, 120 bp, Artificial Sequence
  ENSG00000158816_26 (sequence is synthesized)
cgcgagaagcacggtgcttctgaaggtccccagcgcagcctggctacaaatactctttcttccatgaaggcctcagagaatctctttggatcctggctaaatctcaacaagtccaggcta

SEQ ID NO: 468440 - DNA, 120 bp, Artificial Sequence
  ENSG00000158816_27 (sequence is synthesized)
ctgacgcgagcagccaagggcttcctgagcaagccactgatcaaagctgtggagtcgacctccgggaaccagagcttcgactacatacctctggtgtctctgcagctggcctccggagcc

SEQ ID NO: 468441 - DNA, 120 bp, Artificial Sequence
  ENSG00000158816_28 (sequence is synthesized)
ttcctgctcaacgaagccttctgtgaggccacgcacatccccatggagaagctcaagtggacgtcccccttcacctgccatcgagtgtccctcaccacccgcccgtctgagtccaagacc

SEQ ID NO: 468442 - DNA, 120 bp, Artificial Sequence
  ENSG00000158816_29 (sequence is synthesized)
ccgagtccccagctgtgcaccagctccccgcctaggcacccgtcctgtgacagcttctccctggagcctctggccaagggcaagctgggcctggagccgagggcagtggtggagcacact

SEQ ID NO: 468443 - DNA, 120 bp, Artificial Sequence
  ENSG00000158816_30 (sequence is synthesized)
gggaagctgtgggccacggtggtggggctggcatggctggagcacagttcggcctcctacttcactgagtgggagttggtggctgccaaggccaactcatggctggagcagcaggaagta

SEQ ID NO: 468444 - DNA, 120 bp, Artificial Sequence
  ENSG00000158816_31 (sequence is synthesized)
cccgagggccgcacgcagggcacactcaaggccgctgcccgccagctgtttgtgcttctgcggcactgggatgagaatctcgagttcaatatgctctgctataacccgaattatgtgtag

SEQ ID NO: 468445 - DNA, 120 bp, Artificial Sequence
  ENSG00000158816_32 (sequence is synthesized)
gcaagagccggtacctgcccaccgtggtggagtaccccaactctggagctgccctgcgtatgcttggctctcgggccctggcccaacagtggaggggcacctcttctggctttggaaggc

SEQ ID NO: 468446 - DNA, 120 bp, Artificial Sequence
  ENSG00000158816_33 (sequence is synthesized)
ggtggggaggagagggatgggcagggccatgtcggcctggtttcggggagcttttggagctgtaactaatatttcagttactagaaagagccctggactggcagccaggaggcctgagtt

SEQ ID NO: 468447 - DNA, 120 bp, Artificial Sequence
  ENSG00000158816_34 (sequence is synthesized)
caatcccaactttgctaccatccagccatgcaactttaggccagtgcctgcccccgtctgggcctcagtttcctcatctataaaataagagggcgagatgaaggaggtggagtggatctc

SEQ ID NO: 468448 - DNA, 120 bp, Artificial Sequence
  ENSG00000158816_35 (sequence is synthesized)
aaatggttcagtggttcctttctgcccattcaggcagtcccgggctgactgctgctggggctggcgagggaagatgcagtggaagcctgagccctgtctggaggtagaccacgtgggcac

SEQ ID NO: 468449 - DNA, 120 bp, Artificial Sequence
  ENSG00000158816_36 (sequence is synthesized)
ggagtggacacagcaatgcccactcaaataaaagggcagatgagagaacccagtgacctcaagtaaccaggcctacaggcttgcataggcacatagagactagcaagtctggtgcctgta

SEQ ID NO: 468450 - DNA, 120 bp, Artificial Sequence
  ENSG00000158816_37 (sequence is synthesized)
ggacaggctcttgtctccatggtaacagccaaggaccccccctaaatcccacttaaaagccaattggagaagcatccttctcaacgctttacaaaagagtagtttgggggccttttgttt

SEQ ID NO: 468451 - DNA, 120 bp, Artificial Sequence
  ENSG00000158816_38 (sequence is synthesized)
ggtcctagaaagtgctcacagacattgatgggttttaaaacaaaaacagaaacagaacacagtgtgagggggtggaaacccagaggagctcttcagaatcaaagtgttctctcaacttct

SEQ ID NO: 468452 - DNA, 120 bp, Artificial Sequence
  ENSG00000158816_39 (sequence is synthesized)
tggtcccattggcctccaaaacccaggagaaccagctccacccctgagccaagctgaacttccagtcttcaggaaattgctgacatggaggcaagtcccactgctctcttcagcgaggcc

SEQ ID NO: 468453 - DNA, 120 bp, Artificial Sequence
  ENSG00000158816_40 (sequence is synthesized)
actttgataagagtgttggtgctattggtgattgggtggcccttagagcacgggcttctaaaggggacatgaaagcaggacttcctagagggggctggagataagaaaagaagcaaaggc

SEQ ID NO: 468454 - DNA, 120 bp, Artificial Sequence
  ENSG00000158816_41 (sequence is synthesized)
tgagttcaacttccagctggagatccgtgggccatgtctgctcgcaggtggggaaattgaggcagcctggccatggtcacactgcaggtcaggagcccctaacggggctggcatgtcact

SEQ ID NO: 468455 - DNA, 120 bp, Artificial Sequence
  ENSG00000158816_42 (sequence is synthesized)
catctctggcctggatctcggtgtgccccagcgaactcctctctctcctgacctcatgagcctatatcccccttgcctttctatgccactcaggggtggagagtcccactcatgagattc

SEQ ID NO: 468456 - DNA, 120 bp, Artificial Sequence
  ENSG00000158816_43 (sequence is synthesized)
accggtcaataagctcgctcattccctgcacacacactgcccagttggcaaggaacatttgcatgtgctctttcatttgactttatagcagacctgggggaggagagagtttaggggccc

SEQ ID NO: 468457 - DNA, 120 bp, Artificial Sequence
  ENSG00000158816_44 (sequence is synthesized)
accttggctcagtacagatgtggaaattgagagccagagaggtagggcacttatccaaggtcacacagccagtcagaggattgtaacctgtctgacctttgaaggaccccctgccttcaa

SEQ ID NO: 468458 - DNA, 120 bp, Artificial Sequence
  ENSG00000158816_45 (sequence is synthesized)
agccttttattccccctcattagattgcacctcctacaaattccaggggatatacatttacccagggcagagaggattttttgtttatttgtttgtttgtttgttgagacagagtctcgc

SEQ ID NO: 468459 - DNA, 120 bp, Artificial Sequence
  ENSG00000158816_46 (sequence is synthesized)
cgatctgcctgcctcggcctcccaaaggtctgggattacagaagtgagcaaccatgcctggcagcagagagaatttgagagttagagagccacagctaggccagggtttctcagcctcag

SEQ ID NO: 468460 - DNA, 120 bp, Artificial Sequence
  ENSG00000158816_47 (sequence is synthesized)
gttagagagccacagctaggccagggtttctcagcctcagcaccatggacacgataattttatatttgggggcaattctgtgcactgtagaatgttcggcagcatcccttggcctctgct

SEQ ID NO: 468461 - DNA, 120 bp, Artificial Sequence
  ENSG00000158816_48 (sequence is synthesized)
cgctagaggcctcctgggaataacaccatccccaatcatgacaaccaaaaatgtctgcagacactgccaaatgttccctggggagctaaatcacctggttgagcaccattgtcctaaacc

SEQ ID NO: 468462 - DNA, 120 bp, Artificial Sequence
  ENSG00000158816_49 (sequence is synthesized)
ccctagccccaggtaagagggcaggtggcaagcccagaattgcttgtgggctcacagtcttcatctagcccaggcctggctgagcccacacaggtaggggaccccaactctatggagaag

SEQ ID NO: 468463 - DNA, 120 bp, Artificial Sequence
  ENSG00000158825_0 (sequence is synthesized)
cccgctgctctgctgcctgcccggggtaccaacatggcccagaagcgtcctgcctgcaccctgaagcctgagtgtgtccagcagctgctggtttgctcccaggaggccaagaagtcagcc

SEQ ID NO: 468464 - DNA, 120 bp, Artificial Sequence
  ENSG00000158825_1 (sequence is synthesized)
tactgcccctacagtcactttcctgtgggggctgccctgctcacccaggaggggagaatcttcaaagggtgcaacatagaaaatgcctgctacccgctgggcatctgtgctgaacggacc

SEQ ID NO: 468465 - DNA, 120 bp, Artificial Sequence
  ENSG00000158825_2 (sequence is synthesized)
gctatccagaaggccgtctcagaagggtacaaggatttcagggcaattgctatcgccagtgacatgcaagatgattttatctctccatgtggggcctgcaggcaagtcatgagagagttt

SEQ ID NO: 468466 - DNA, 120 bp, Artificial Sequence
  ENSG00000158825_3 (sequence is synthesized)
tgaggacctgcagaagacccagtgacagccagagaatgcccactgcctgtaacagccacctggagaacttcataaagatgtctcacagccctggggacacctgcccagtgggccccagcc

SEQ ID NO: 468467 - DNA, 120 bp, Artificial Sequence
  ENSG00000158825_4 (sequence is synthesized)
ctacagggactgggcaaagatgatgtttccagattacactccagcctgagtcagcacccctcctagcaacctgccttgggacttagaacaccgccgccccctgccccacctttcctttcc

SEQ ID NO: 468468 - DNA, 120 bp, Artificial Sequence
  ENSG00000158825_5 (sequence is synthesized)
ttcctgtgggccctctttcaaagtccagcctagtctggactgcttccccatcagccttcccaaggttctatcctgttccgagcaacttttctaattataaacatcacagaacatcctgga

SEQ ID NO: 468469 - DNA, 80 bp, Artificial Sequence
  ENSG00000158828_0 (sequence is synthesized)
agaggcaccgccccaagtttgttgtgaccggcgggggacgccggtggtggcggcagcggcggctgcgggggcaccgggcc

SEQ ID NO: 468470 - DNA, 80 bp, Artificial Sequence
  ENSG00000158828_1 (sequence is synthesized)
cctgcagctgggtcgagcgctgctgctgcgcttcacgggcaagcccggccgggcctacggcttggggcggccgggcccgg

SEQ ID NO: 468471 - DNA, 120 bp, Artificial Sequence
  ENSG00000158828_2 (sequence is synthesized)
aggaccgggcgcggagcctcgcagggtcgggctcgggctccctaaccgtctccgcttcttccgccagtcggtggccgggctggcggcgcggttgcagcggcagttcgtggtgcgggcctg

SEQ ID NO: 468472 - DNA, 120 bp, Artificial Sequence
  ENSG00000158828_3 (sequence is synthesized)
gggctgcgcgggcccttgcggccgggcagtctttctggccttcgggctagggctgggcctcatcgaggaaaaacaggcggagagccggcgggcggtctcggcctgtcaggagatccaggc

SEQ ID NO: 468473 - DNA, 120 bp, Artificial Sequence
  ENSG00000158828_4 (sequence is synthesized)
aatttttacccagaaaagcaagccggggcctgacccgttggacacgagacgcttgcagggctttcggctggaggagtatctgatagggcagtccattggtaagggctgcagtgctgctgt

SEQ ID NO: 468474 - DNA, 120 bp, Artificial Sequence
  ENSG00000158828_5 (sequence is synthesized)
gtatgaagccaccatgcctacattgccccagaacctggaggtgacaaagagcaccgggttgcttccagggagaggcccaggtaccagtgcaccaggagaagggcaggagcgagctccggg

SEQ ID NO: 468475 - DNA, 120 bp, Artificial Sequence
  ENSG00000158828_6 (sequence is synthesized)
ggcccctgccttccccttggccatcaagatgatgtggaacatctcggcaggttcctccagcgaagccatcttgaacacaatgagccaggagctggtcccagcgagccgagtggccttggc

SEQ ID NO: 468476 - DNA, 120 bp, Artificial Sequence
  ENSG00000158828_7 (sequence is synthesized)
tggggagtatggagcagtcacttacagaaaatccaagagaggtcccaagcaactagcccctcaccccaacatcatccgggttctccgcgccttcacctcttccgtgccgctgctgccagg

SEQ ID NO: 468477 - DNA, 120 bp, Artificial Sequence
  ENSG00000158828_8 (sequence is synthesized)
ggccctggtcgactaccctgatgtgctgccctcacgcctccaccctgaaggcctgggccatggccggacgctgttcctcgttatgaagaactatccctgtaccctgcgccagtacctttg

SEQ ID NO: 468478 - DNA, 120 bp, Artificial Sequence
  ENSG00000158828_9 (sequence is synthesized)
tgtgaacacacccagcccccgcctcgccgccatgatgctgctgcagctgctggaaggcgtggaccatctggttcaacagggcatcgcgcacagagacctgaaatccgacaacatccttgt

SEQ ID NO: 468479 - DNA, 120 bp, Artificial Sequence
  ENSG00000158828_10 (sequence is synthesized)
ggagctggacccagacggctgcccctggctggtgatcgcagattttggctgctgcctggctgatgagagcatcggcctgcagttgcccttcagcagctggtacgtggatcggggcggaaa

SEQ ID NO: 468480 - DNA, 120 bp, Artificial Sequence
  ENSG00000158828_11 (sequence is synthesized)
cagaggtgtccacggcccgtcctggccccagggcagtgattgactacagcaaggctgatgcctgggcagtgggagccatcgcctatgaaatcttcgggcttgtcaatcccttctacggcc

SEQ ID NO: 468481 - DNA, 120 bp, Artificial Sequence
  ENSG00000158828_12 (sequence is synthesized)
agggcaaggcccaccttgaaagccgcagctaccaagaggctcagctacctgcactgcccgagtcagtgcctccagacgtgagacagttggtgagggcactgctccagcgagaggccagca

SEQ ID NO: 468482 - DNA, 120 bp, Artificial Sequence
  ENSG00000158828_13 (sequence is synthesized)
agagaccatctgcccgagtagccgcaaatgtgcttcatctaagcctctggggtgaacatattctagccctgaagaatctgaagttagacaagatggttggctggctcctccaacaatcgg

SEQ ID NO: 468483 - DNA, 120 bp, Artificial Sequence
  ENSG00000158828_14 (sequence is synthesized)
ccgccactttgttggccaacaggctcacagagaagtgttgtgtggaaacaaaaatgaagatgctctttctggctaacctggagtgtgaaacgctctgccaggcagccctcctcctctgct

SEQ ID NO: 468484 - DNA, 120 bp, Artificial Sequence
  ENSG00000158828_15 (sequence is synthesized)
catggagggcagccctgtgatgtccctgcatggagctggtgaattactaaaagaacatggcatcctctgtgtcgtgatggtctgtgaatggtgagggtgggagtcaggagacaagacagc

SEQ ID NO: 468485 - DNA, 120 bp, Artificial Sequence
  ENSG00000158828_16 (sequence is synthesized)
gcagagagggctggttagccggaaaaggcctcgggcttggcaaatggaagaacttgagtgagagttcagtctgcagtcctctgctcacagacatctgaaaagtgaatggccaagctggtc

SEQ ID NO: 468486 - DNA, 120 bp, Artificial Sequence
  ENSG00000158828_17 (sequence is synthesized)
tagtagatgaggctggactgaggaggggtaggcctgcatccacagagaggatccaggccaaggcactggctgtcagtggcagagtttggctgtgacctttgcccctaacacgaggaactc

SEQ ID NO: 468487 - DNA, 120 bp, Artificial Sequence
  ENSG00000158828_18 (sequence is synthesized)
gtttgaagggggcagcgtagcatgtctgatttgccacctggatgaaggcagacatcaacatgggtcagcacgttcagttacgggagtgggaaattacatgaggcctgggcctctgcgttc

SEQ ID NO: 468488 - DNA, 120 bp, Artificial Sequence
  ENSG00000158828_19 (sequence is synthesized)
ccaagctgtgcgttctggaccagctactgaattattaatctcacttagcgaaagtgacggatgagcagtaagtaagtaagtgtggggatttaaacttgagggtttccctcctgactagcc

SEQ ID NO: 468489 - DNA, 120 bp, Artificial Sequence
  ENSG00000158828_20 (sequence is synthesized)
tctcttacaggaattgtgaaatattaaatgcaaatttacaactgcagatgacgtatgtgccttgaactgaatatttggctttaagaatgattcttatactctgaaggtgagaatattttg

SEQ ID NO: 468490 - DNA, 120 bp, Artificial Sequence
  ENSG00000158828_21 (sequence is synthesized)
tgggcaggtatcaacattggggaagagatttcatgtctaactaactaactttatacatgatttttaggaagctattgcctaaatcagcgtcaacatgcagtaaaggttgtcttcaactga

SEQ ID NO: 468491 - DNA, 120 bp, Artificial Sequence
  ENSG00000158828_22 (sequence is synthesized)
ggtaagcaccaggcctttcatctttaaaggagatgttctcaaaatgcccatcttagtgggcctggtgaggattttttccaggaagtaggtaggaaaagacagattatccacaggaaaggt

SEQ ID NO: 468492 - DNA, 120 bp, Artificial Sequence
  ENSG00000158828_23 (sequence is synthesized)
gcctgtatagtcaggttacctccccctgttacacagaagtctaaaccagaatgtttgaaattgtattctgcccacagatcacccagagatcaggttcaaaggtagattttggccaggcct

SEQ ID NO: 468493 - DNA, 120 bp, Artificial Sequence
  ENSG00000158828_24 (sequence is synthesized)
ggtgtgacagcttgcacctgtatgtagtcttagctacttgggtggctggtggctgaagtgggaggatcacttgagtgcaagaggcagaggctgcagtgatccaagattgtggcactgcac

SEQ ID NO: 468494 - DNA, 120 bp, Artificial Sequence
  ENSG00000158828_25 (sequence is synthesized)
tccagcctgggtaacagagtaagaccctgtctcaaaacaaaacaaacaaacaaaaaaaacccaaaggtagattctgattcagcaggtcagggatggggcctaagattgtgccttcccaat

SEQ ID NO: 468495 - DNA, 120 bp, Artificial Sequence
  ENSG00000158828_26 (sequence is synthesized)
aagctcccacgtgataccaatgccactgctctgtcaaccacactttgagtaacaagtgcctaaaccactgatttctaccttgattggttagttcaccatcccctccttcctgcaacctgc

SEQ ID NO: 468496 - DNA, 120 bp, Artificial Sequence
  ENSG00000158828_27 (sequence is synthesized)
ctcactggagagggggaactggatctctttcctttaagctcactctgcaagcccacctccagctcagaggcttgcatgtcaactccctactctcaactcttggaaggactcaagactttg

SEQ ID NO: 468497 - DNA, 120 bp, Artificial Sequence
  ENSG00000158828_28 (sequence is synthesized)
ggaaattgaagagtatttttcccccacgaaaacaatttctgtccacttaatttatttaccttgccattgctaggtaggttttaaaaatgtattaagacccgatgctctgtctcctgccca

SEQ ID NO: 468498 - DNA, 120 bp, Artificial Sequence
  ENSG00000158828_29 (sequence is synthesized)
tccctgggcccatccattcaaggccgcagtgggaagtggccacagccgttcatggtgggccctagaggatgcagtttcttgttctgatttggggaatgaaggttattagactgttgcact

SEQ ID NO: 468499 - DNA, 120 bp, Artificial Sequence
  ENSG00000158828_30 (sequence is synthesized)
ccaagctgggttaatagctaacaagtagccaaatcctttgcctgtgaaacatccagtcttagcatcaaaacatgccctggttggggcatgacagctgttgcattcacagcagctacaaga

SEQ ID NO: 468500 - DNA, 120 bp, Artificial Sequence
  ENSG00000158828_31 (sequence is synthesized)
ttgttgattcttaccagatcttcttgatacaggtttcatatgtcctgagagcccttcccaatacaatgaggacaataaggtgctttccccactctttggtttttgtctgtttgtcgtggg

SEQ ID NO: 468501 - DNA, 120 bp, Artificial Sequence
  ENSG00000158828_32 (sequence is synthesized)
ggatggaggaaggctgttctgtgattcagtacaacttcacccagggtggagcatgtcaggctctggcctggctgctgaagggagcctgcagaatgagttagtgatccagtggtcaatttt

SEQ ID NO: 468502 - DNA, 120 bp, Artificial Sequence
  ENSG00000158828_33 (sequence is synthesized)
gaactggtggggaccagaggcaccgatggcaggaagcagcaccccatatcctgatcaccttggcatctcctccagccctggcatctaggctgcaagagtttgaggagtgtgaagaatcct

SEQ ID NO: 468503 - DNA, 120 bp, Artificial Sequence
  ENSG00000158828_34 (sequence is synthesized)
ctgagttggcatggatggtacctctgtctgcctcccaggagtaactagtctcagcctgccagttaagacaggtcatcttatctcgaaggtcagagccaattctaggcagtagctgccctg

SEQ ID NO: 468504 - DNA, 120 bp, Artificial Sequence
  ENSG00000158828_35 (sequence is synthesized)
ctccaggttacaggcagggcttacaaggaacttaccattctgctccggcctgtgtaaccctgggttccttgtgggtgttccaggcaggttcctccagcgaagccatcttgaacacaatga

SEQ ID NO: 468505 - DNA, 120 bp, Artificial Sequence
  ENSG00000158828_36 (sequence is synthesized)
cacatgtccactgaatgcaggagactcgatgccttgtgataacccaacacctccatcttttctgacccataatttggcacaagttccttccctgccactttgctttcctccggcgttccc

SEQ ID NO: 468506 - DNA, 120 bp, Artificial Sequence
  ENSG00000158828_37 (sequence is synthesized)
tcatgttccaggagaatgcaagtcctgtcacataaaccaggtggtctaagcagaccccttctgggtctgagccacagctcactcaagctctgggttccttgggacagagttcagattagc

SEQ ID NO: 468507 - DNA, 120 bp, Artificial Sequence
  ENSG00000158850_0 (sequence is synthesized)
ccccgcagcgcccgcttccaagatggcggcagcgatgcctgcccggctgttggggtggcggtgacgacaggcagcaaaagaccagctggtcccagattcgctgctggagtgctggatgga

SEQ ID NO: 468508 - DNA, 120 bp, Artificial Sequence
  ENSG00000158850_1 (sequence is synthesized)
gcctttctctgccctctgtgacatttccaattttagataatgcctcacatctctgtccccccgggaccccctggagcccccatgatccctaagaagacagcttgaacctagatctcaccc

SEQ ID NO: 468509 - DNA, 120 bp, Artificial Sequence
  ENSG00000158850_2 (sequence is synthesized)
ccaggatgttgcggaggctgctggagcggccttgcacgctggccctgcttgtgggctcccagctggctgtcatgatgtacctgtcactggggggcttccgaagtctcagtgccctatttg

SEQ ID NO: 468510 - DNA, 120 bp, Artificial Sequence
  ENSG00000158850_3 (sequence is synthesized)
gccgagatcagggaccgacatttgactattctcaccctcgtgatgtctacagtaacctcagtcacctgcctggggccccagggggtcctccagctcctcaaggtctgccctactgtccag

SEQ ID NO: 468511 - DNA, 120 bp, Artificial Sequence
  ENSG00000158850_4 (sequence is synthesized)
aacgatctcctctcttagtgggtcctgtgtcggtgtcctttagcccagtgccatcactggcagagattgtggagcggaatccccgggtagaaccagggggccggtaccgccctgcaggtt

SEQ ID NO: 468512 - DNA, 120 bp, Artificial Sequence
  ENSG00000158850_5 (sequence is synthesized)
gtgagccccgctcccgaacagccatcattgtgcctcatcgtgcccgggagcaccacctgcgcctgctgctctaccacctgcaccccttcttgcagcgccagcagcttgcttatggcatct

SEQ ID NO: 468513 - DNA, 120 bp, Artificial Sequence
  ENSG00000158850_6 (sequence is synthesized)
atgtcatccaccaggctggaaatggaacatttaacagggcaaaactgttgaacgttggggtgcgagaggccctgcgtgatgaagagtgggactgcctgttcttgcacgatgtggacctct

SEQ ID NO: 468514 - DNA, 120 bp, Artificial Sequence
  ENSG00000158850_7 (sequence is synthesized)
tgccagaaaatgaccacaatctgtatgtgtgtgacccccggggaccccgccatgttgccgttgctatgaacaagtttggatacagcctcccgtacccccagtacttcggaggagtctcag

SEQ ID NO: 468515 - DNA, 120 bp, Artificial Sequence
  ENSG00000158850_8 (sequence is synthesized)
ccagtacctgaagatgaatggcttccccaatgaatactggggctggggtggtgaggatgacgacattgctaccagggtgcgcctggctgggatgaagatctctcggccccccacatctgt

SEQ ID NO: 468516 - DNA, 120 bp, Artificial Sequence
  ENSG00000158850_9 (sequence is synthesized)
aggacactataagatggtgaagcaccgaggagataagggcaatgaggaaaatccccacagatttgacctcctggtccgtacccagaattcctggacgcaagatgggatgaactcactgac

SEQ ID NO: 468517 - DNA, 120 bp, Artificial Sequence
  ENSG00000158850_10 (sequence is synthesized)
ataccagttgctggctcgagagctggggcctctttataccaacatcacagcagacattgggactgaccctcggggtcctcgggctccttctgggccacgttacccacctggttcctccca

SEQ ID NO: 468518 - DNA, 120 bp, Artificial Sequence
  ENSG00000158850_11 (sequence is synthesized)
agccttccgtcaagagatgctgcaacgccggcccccagccaggcctgggcctctatctactgccaaccacacagccctccgaggttcacactgactcctccttcctgtctaccttaatca

SEQ ID NO: 468519 - DNA, 120 bp, Artificial Sequence
  ENSG00000158850_12 (sequence is synthesized)
tgaaaccgaattcatggggttgtattctccccaccctcagctcctcactgttctcagagggatgtgagggaactgaactctggtgccgtgctagggggtaggggcctctccctcactgct

SEQ ID NO: 468520 - DNA, 120 bp, Artificial Sequence
  ENSG00000158850_13 (sequence is synthesized)
ggactggagctgggctcctgtagacctgaggggtccctctctctagggtctcctgtagggcttatgactgtgaatccttgatgtcatgattttatgtgacgattcctaggagtccctgcc

SEQ ID NO: 468521 - DNA, 120 bp, Artificial Sequence
  ENSG00000158850_14 (sequence is synthesized)
cctagagtaggagcagggctggaccccaagcccctccctcttccatggagagaagagtgatctggcttctcctcggacctctgtgaatatttattctatttatggttcccgggaagttgt

SEQ ID NO: 468522 - DNA, 120 bp, Artificial Sequence
  ENSG00000158850_15 (sequence is synthesized)
ttggtgaaggaagcccctccctgggcattttctgcctatgctggaatagctccctcttctggtcctggctcagggggctgggattttgatatattttctaataaaggactttgtctcgca

SEQ ID NO: 468523 - DNA, 120 bp, Artificial Sequence
  ENSG00000158850_16 (sequence is synthesized)
cccgcttccaagatggcggcagcgatgcctgcccggctgttggggtggcggtgacgacaggcagcaaaagaccagataatgcctcacatctctgtccccccgggaccccctggagccccc

SEQ ID NO: 468524 - DNA, 120 bp, Artificial Sequence
  ENSG00000158850_17 (sequence is synthesized)
gcctgcgggatacaacgggaatacaaaaatgcgctagagcggtccgcaacgctgtagcctgcgtaaggaacaattgatactaagtggcactaggctgcagggggtgccactgacacactg

SEQ ID NO: 468525 - DNA, 120 bp, Artificial Sequence
  ENSG00000158850_18 (sequence is synthesized)
ggagagggctcagccaaccacaaggtgataacgaggtcagcggagcaccagaaaccggctcactagcctcctgatcagtctcggcccagaggaaaatgaagggcttgagcttctgctttt

SEQ ID NO: 468526 - DNA, 120 bp, Artificial Sequence
  ENSG00000158850_19 (sequence is synthesized)
acaaatctgaggggcaggaaatgaaatcccactagcagtctgcgtagtggagttgaaccctagcacccgctccccagggggtcgcctacaacgcgttccaggtgggcaggctcaggcgct

SEQ ID NO: 468527 - DNA, 120 bp, Artificial Sequence
  ENSG00000158850_20 (sequence is synthesized)
tgcccggctgttggggtggcggtgacgacaggcagcaaaagaccagcagtaaccctcctccccacccccgctagaagaggggaaaggtagaaaaggtagaggacgccacccccaccctac

SEQ ID NO: 468528 - DNA, 120 bp, Artificial Sequence
  ENSG00000158850_21 (sequence is synthesized)
tctccgccgagctccggggctgttcgcttacagcccccaggtggtcacggtccctgcacctgaggagttggcacccaggcacatgaagaatagaaggagcctgtttcctacttcgccctg

SEQ ID NO: 468529 - DNA, 120 bp, Artificial Sequence
  ENSG00000158850_22 (sequence is synthesized)
tctgtcctgttggggtgggggtacgggggtggttaagtatgaacctgacacttatcattccagggtagcacgggagataggcgagggacctaccatctcctgctcctcctcttcctttcc

SEQ ID NO: 468530 - DNA, 120 bp, Artificial Sequence
  ENSG00000158850_23 (sequence is synthesized)
aaccactttccttcacttcgcctgctgggaaaccagcttcaccctgatcctgatctctggcggtgcaggtagctagttatcctttaccacttctgttccagctggtcccagattcgctgc

SEQ ID NO: 468531 - DNA, 120 bp, Artificial Sequence
  ENSG00000158850_24 (sequence is synthesized)
tgtgtgtacagaaacatttaatcccttccttgcttttctctactctggatcccccatgataccctcacttttcccatagggtgcgcctggctgggatgaagatctctcggccccccacat

SEQ ID NO: 468532 - DNA, 120 bp, Artificial Sequence
  ENSG00000158850_25 (sequence is synthesized)
atgtgcgctgggaatgcgtcgacacggaggcctgggataaaggtttgggcattcgagagagtgagaagttttgggtaacgcctggagacgagcctgagcagggacggggtcctaggtgga

SEQ ID NO: 468533 - DNA, 120 bp, Artificial Sequence
  ENSG00000158850_26 (sequence is synthesized)
agtatggacgggggccgggcgggctcacgttgctagtaggtagggcaaaagcaagagactgggataggatgggcgtgctccgaaagagctgggttttaaccccctccacagcgcggacca

SEQ ID NO: 468534 - DNA, 120 bp, Artificial Sequence
  ENSG00000158850_27 (sequence is synthesized)
gggggtgaggactgacagtagatggtgggagtggtttggggggaggtagaggagagcgaaacttgggctgaagtgacaggtggtagggttactggtggttacattctgtttccttgcgtg

SEQ ID NO: 468535 - DNA, 120 bp, Artificial Sequence
  ENSG00000158850_28 (sequence is synthesized)
actgtgcacctgtgtgctcccttctgtgactttgttttctgctttttcctctttacccctggcatcaccttcaaccctacctactgacctctctgctggcttgctctcttcctgcctacc

SEQ ID NO: 468536 - DNA, 120 bp, Artificial Sequence
  ENSG00000158850_29 (sequence is synthesized)
agagccaagcggattgtggttggggatgtgtccccagaagactcggggtatgcaaggatctttctctccctagcctcccgtacccccagtacttcggaggagtctcagcacttactcctg

SEQ ID NO: 468537 - DNA, 120 bp, Artificial Sequence
  ENSG00000158850_30 (sequence is synthesized)
ctgactgtctctgcccctgctctccctctccctttctcttcagcagtaaccctcctccccacccccgctagaagaggggaaaggtagaaaagctggtcccagattcgctgctggagtgct

SEQ ID NO: 468538 - DNA, 120 bp, Artificial Sequence
  ENSG00000158850_31 (sequence is synthesized)
tccaagatggcggcagcgatgcctgcccggctgttggggtggcggtgacgacaggcagcaaaagaccagggtagcacgggagataggcgagggacctaccatctcctgctcctcctcttc

SEQ ID NO: 468539 - DNA, 120 bp, Artificial Sequence
  ENSG00000158856_0 (sequence is synthesized)
gttgcctggttgtgagagtcaggggagcagggacaggtccaagacaaggaaggcagttgggctgtgggaatggggagcccagggaaggcctccagagctggcctggagagtcaccgccga

SEQ ID NO: 468540 - DNA, 120 bp, Artificial Sequence
  ENSG00000158856_1 (sequence is synthesized)
gggatgaggacgcgccagcccgggggaacgcgccagctgctttcgcggccccaagcgcgcagcgcccagcagccgcgccgagcctgacacgctgtcctctcccctcgcgcacagggctct

SEQ ID NO: 468541 - DNA, 120 bp, Artificial Sequence
  ENSG00000158856_2 (sequence is synthesized)
gcgagtgacccggcgggcgagctccgtgctgcatggaacggctgcagaagcaaccacttacctcccccgggagcgtgagcccctcccgagattccagtgtgcctggctctccctccagca

SEQ ID NO: 468542 - DNA, 120 bp, Artificial Sequence
  ENSG00000158856_3 (sequence is synthesized)
tcgtggccaagatggacaatcaggtgctgggctacaaggacctggctgccatccccaaggacaaggccatcctggacatcgagcggcccgacctcatgatctacgagcctcacttcactt

SEQ ID NO: 468543 - DNA, 120 bp, Artificial Sequence
  ENSG00000158856_4 (sequence is synthesized)
attccctcctggaacacgtggagctgcctcgcagccgcgagcgctcgctgtcacccaaatccacatcccccccaccatccccagaggtgtgggcggacagccggtcgcctggaatcatct

SEQ ID NO: 468544 - DNA, 120 bp, Artificial Sequence
  ENSG00000158856_5 (sequence is synthesized)
ctcaggcctcggcccccagaaccactggaaccccccggaccagcctgccccatttccaccaccctgagacctcccgcccagattccaacatctacaagaagcctcccatctataagcaga

SEQ ID NO: 468545 - DNA, 120 bp, Artificial Sequence
  ENSG00000158856_6 (sequence is synthesized)
gagagtccgtgggaggcagccctcagaccaagcacctcatcgaggatctcatcatcgagtcatccaagtttcctgcagcccagcccccagaccccaaccagccagccaaaatcgaaaccg

SEQ ID NO: 468546 - DNA, 120 bp, Artificial Sequence
  ENSG00000158856_7 (sequence is synthesized)
actactggccatgccccccgtctctggctgttgtggagacagaatggaggaagcggaaggcgtctcggaggggagcagaggaagaggaggaggaggaagatgacgactctggagaggaga

SEQ ID NO: 468547 - DNA, 120 bp, Artificial Sequence
  ENSG00000158856_8 (sequence is synthesized)
tgaaggctctcagggagcgtcagagagaggaactcagtaaggttacttccaacttgggaaagatgatcttgaaagaagagatggaaaagtcattgccgatccgaaggaaaacccgctctc

SEQ ID NO: 468548 - DNA, 120 bp, Artificial Sequence
  ENSG00000158856_9 (sequence is synthesized)
tgcctgaccggacacccttccatacctccttgcaccagggaacgtctaaatcttcctctctccccgcctatggcaggaccaccctgagccggctacagtccacagagttcagcccatcag

SEQ ID NO: 468549 - DNA, 120 bp, Artificial Sequence
  ENSG00000158856_10 (sequence is synthesized)
agagggccagagggggaggatggaccgggggaactccctgccctgtgtgctggagcagaagatctatccctatgaaatgctagtggtgaccaacaaggggcgaaccaagctgccaccggg

SEQ ID NO: 468550 - DNA, 120 bp, Artificial Sequence
  ENSG00000158856_11 (sequence is synthesized)
ggtggatcggatgcggcttgagaggcatctgtctgccgaggacttctcaagggtatttgccatgtcccctgaagagtttggcaagctggctctgtggaagcggaatgagctcaagaagaa

SEQ ID NO: 468551 - DNA, 120 bp, Artificial Sequence
  ENSG00000158856_12 (sequence is synthesized)
ggcctctctcttctgatggcccccacctgctccgggacggcccccttacccctgctgcttcagggtttttccccggcgggttgggaggggcaggaggtggggtggaaatagggtgggctc

SEQ ID NO: 468552 - DNA, 120 bp, Artificial Sequence
  ENSG00000158856_13 (sequence is synthesized)
ctttcctcaggtagagtggggggccaaaacctctgcagtccccggcagtgagctatggactttcttccccctcacaaggctgggggcctcctgctctcgtccctggccctccctgcacag

SEQ ID NO: 468553 - DNA, 120 bp, Artificial Sequence
  ENSG00000158856_14 (sequence is synthesized)
ggcaaagccagtctgggctctggcacacagagttcatgtttgcgccctctccctgcccctcaccccagagggtgaggaggaatgaggggcattggtggttaggccggttggctgtcttga

SEQ ID NO: 468554 - DNA, 120 bp, Artificial Sequence
  ENSG00000158856_15 (sequence is synthesized)
acagctggagggaagatgcaggggtgggaagcggccaggcagaaagagctccaggctcttgtgtcgcccacccagccctcccatactcactcctgacagctttcctgcactgcagcctcc

SEQ ID NO: 468555 - DNA, 120 bp, Artificial Sequence
  ENSG00000158856_16 (sequence is synthesized)
tgctcctctgactctagtgggaacaggccccagctcagcctccggcagggaggtcacccctccacttcagcttgccctgacctccgctcgcaaaccccgagcttccaagccttttgctcc

SEQ ID NO: 468556 - DNA, 120 bp, Artificial Sequence
  ENSG00000158856_17 (sequence is synthesized)
agccctgcggcttccccagaagcctgggcttagggtggagatgccgcctacacacgatcctggccctccacctgcctccaggccacgaaatgggaattccagcactaagccaggcaccgg

SEQ ID NO: 468557 - DNA, 120 bp, Artificial Sequence
  ENSG00000158856_18 (sequence is synthesized)
gcagaagctgggccttccgcctcccttggatggggtcaagaggccaggcctggcacattttggagtgtcctggctaccagctctcacctacacccacgcacccccccacacactatgctc

SEQ ID NO: 468558 - DNA, 120 bp, Artificial Sequence
  ENSG00000158856_19 (sequence is synthesized)
tctcaagaatgtaatttattggggcccccccagctgctttcctcacctgcccctgccctaccttacacccccagcttgacttctttccagtccacgtgtgtatataatgatatctatatt

SEQ ID NO: 468559 - DNA, 120 bp, Artificial Sequence
  ENSG00000158856_20 (sequence is synthesized)
tttgcccaggtctgggtattgctcctgcccagaccctgacatccctttccactgtgtgtgtgaccatgctgggggagggggactctgcttggaattaaaaggttgcattgggtccctaca

SEQ ID NO: 468560 - DNA, 120 bp, Artificial Sequence
  ENSG00000158856_21 (sequence is synthesized)
ccagaagagaaagcagaaagacaggaggaagaaagggagagagggccaggcagtcgcactgtgaacagaacaggagaaggcgaagcggggcaaagttccctgcccaccgacgccagcctg

SEQ ID NO: 468561 - DNA, 120 bp, Artificial Sequence
  ENSG00000158856_22 (sequence is synthesized)
cttggatgacttgcctcgtttcataattcacttactgtctgcaccagccggcctccagcctggctggaccctgctgcctgtgtggcccggagccagaggcccccacactcccagctgctc

SEQ ID NO: 468562 - DNA, 120 bp, Artificial Sequence
  ENSG00000158856_23 (sequence is synthesized)
agagaagcctatcgacagggcctgggggagggaggaggcagcagggccggagtccacccaggacatctggcaccagtgaccttgtggggaaaggagccaagaacggggcgtcggggggcc

SEQ ID NO: 468563 - DNA, 120 bp, Artificial Sequence
  ENSG00000158856_24 (sequence is synthesized)
tctctgaggaagaggcagcgggaggcacagcttcctcctccccccctccctgctgccgcggctgagccgggcctgagctgccggcaggttgtcttggcaacaggaggtggagaggagatg

SEQ ID NO: 468564 - DNA, 120 bp, Artificial Sequence
  ENSG00000158856_25 (sequence is synthesized)
ctgcggagcccggcggagcccgggcggcccgcggacgccaggagcctcctcgggcagcgagattgctttttttccgggctctgcgagtgacccggcgggcgagctccgtgctgcatggaa

SEQ ID NO: 468565 - DNA, 120 bp, Artificial Sequence
  ENSG00000158856_26 (sequence is synthesized)
agagaacaatggctcaaaaacaagcgcagcccgtccttcggtcgcctcccgtccacgcgcgcgttctccggggctgagcggatgggaagcctcagccgcaaggggcccggctgcctggag

SEQ ID NO: 468566 - DNA, 120 bp, Artificial Sequence
  ENSG00000158856_27 (sequence is synthesized)
ctctgcagagcccagggagtgcccgaatcagcggccccctggctgtcactggccagctctgtgtccatcattctgtcggacccaggacctcaaccctttctccctgggccaggcaccatc

SEQ ID NO: 468567 - DNA, 120 bp, Artificial Sequence
  ENSG00000158856_28 (sequence is synthesized)
gatcagaccgctcagccgagaccagctcccctccttcgccagctcccaccccgcccacccaccctaagccggcatttttcctgttatttgtgctccggggaagcgccgcggggttcctgg

SEQ ID NO: 468568 - DNA, 120 bp, Artificial Sequence
  ENSG00000158856_29 (sequence is synthesized)
aagagacacctattacctaggctcctgggggaagtgacagcccgtggatctggcctacgcctctcgggcctctgtggcctcagagcgtctgggccacactgtctgggaagagcctggaga

SEQ ID NO: 468569 - DNA, 120 bp, Artificial Sequence
  ENSG00000158856_30 (sequence is synthesized)
ggagcagggacaggtccaagacaaggaaggcagttgggctgtgggaatggggagcccagggaaggcctccagagctggccggcctccagcctggctggaccctgctgcctgtgtggcccg

SEQ ID NO: 468570 - DNA, 120 bp, Artificial Sequence
  ENSG00000158856_31 (sequence is synthesized)
acagaaagccgagaggctgggctgaggccgggctggttgtggagcgatggctggagtggctcctcctccaaggctgtgcccctttctgccacattgaagggctctgcgagtgacccggcg

SEQ ID NO: 468571 - DNA, 80 bp, Artificial Sequence
  ENSG00000158856_32 (sequence is synthesized)
gcgggctcgggtttcctgggctcgcgcggcgcggcccgtgctacctgttggggaagaaaacccgagcccccggaggggcc

SEQ ID NO: 468572 - DNA, 120 bp, Artificial Sequence
  ENSG00000158856_33 (sequence is synthesized)
cccaggccccaggcccgaggcgcaggcgagggccctgcggagcccggcggagcccgggcggcccgcggacgccaggagcctcctcgggcagcgagattgctttttttccgcctggagagt

SEQ ID NO: 468573 - DNA, 120 bp, Artificial Sequence
  ENSG00000158859_0 (sequence is synthesized)
gggagaacccacagggagacccacagacacatatgcacgagagagacagaggaggaaagagacagagacaaaggcacagcggaagaaggcagagacagggcaggcacagaagcggcccag

SEQ ID NO: 468574 - DNA, 120 bp, Artificial Sequence
  ENSG00000158859_1 (sequence is synthesized)
acagagtcctacagagggagaggccagagaagctgcagaagacacaggcagggagagacaaagatccaggaaaggagggctcaggaggagagtttggagaagccagacccctgggcacct

SEQ ID NO: 468575 - DNA, 120 bp, Artificial Sequence
  ENSG00000158859_2 (sequence is synthesized)
ctcccaagcccaaggactaagttttctccatttcctttaacggtcctcagcccttctgaaaactttgcctctgaccttggcaggagtccaagcccccaggctacagagaggagctttcca

SEQ ID NO: 468576 - DNA, 120 bp, Artificial Sequence
  ENSG00000158859_3 (sequence is synthesized)
aagctagggtgtggaggacttggtgccctagacggcctcagtccctcccagctgcagtaccagtgccatgtcccagacaggctcgcatcccgggaggggcttggcagggcgctggctgtg

SEQ ID NO: 468577 - DNA, 120 bp, Artificial Sequence
  ENSG00000158859_4 (sequence is synthesized)
gggagcccaaccctgcctcctgctccccattgtgccgctctcctggctggtgtggctgcttctgctactgctggcctctctcctgccctcagcccggctggccagccccctcccccggga

SEQ ID NO: 468578 - DNA, 120 bp, Artificial Sequence
  ENSG00000158859_5 (sequence is synthesized)
ggaggagatcgtgtttccagagaagctcaacggcagcgtcctgcctggctcgggcgcccctgccaggctgttgtgccgcttgcaggcctttggggagacgctgctactagagctggagca

SEQ ID NO: 468579 - DNA, 120 bp, Artificial Sequence
  ENSG00000158859_6 (sequence is synthesized)
ggactccggtgtgcaggtcgaggggctgacagtgcagtacctgggccaggcgcctgagctgctgggtggagcagagcctggcacctacctgactggcaccatcaatggagatccggagtc

SEQ ID NO: 468580 - DNA, 120 bp, Artificial Sequence
  ENSG00000158859_7 (sequence is synthesized)
ggtggcatctctgcactgggatgggggagccctgttaggcgtgttacaatatcggggggctgaactccacctccagcccctggagggaggcacccctaactctgctgggggacctggggc

SEQ ID NO: 468581 - DNA, 120 bp, Artificial Sequence
  ENSG00000158859_8 (sequence is synthesized)
tcacatcctacgccggaagagtcctgccagcggtcaaggtcccatgtgcaacgtcaaggctcctcttggaagccccagccccagaccccgaagagccaagcgctttgcttcactgagtag

SEQ ID NO: 468582 - DNA, 120 bp, Artificial Sequence
  ENSG00000158859_9 (sequence is synthesized)
atttgtggagacactggtggtggcagatgacaagatggccgcattccacggtgcggggctaaagcgctacctgctaacagtgatggcagcagcagccaaggccttcaagcacccaagcat

SEQ ID NO: 468583 - DNA, 120 bp, Artificial Sequence
  ENSG00000158859_10 (sequence is synthesized)
ccgcaatcctgtcagcttggtggtgactcggctagtgatcctggggtcaggcgaggaggggccccaagtggggcccagtgctgcccagaccctgcgcagcttctgtgcctggcagcgggg

SEQ ID NO: 468584 - DNA, 120 bp, Artificial Sequence
  ENSG00000158859_11 (sequence is synthesized)
cctcaacacccctgaggactcggaccctgaccactttgacacagccattctgtttacccgtcaggacctgtgtggagtctccacttgcgacacgctgggtatggctgatgtgggcaccgt

SEQ ID NO: 468585 - DNA, 120 bp, Artificial Sequence
  ENSG00000158859_12 (sequence is synthesized)
ctgtgacccggctcggagctgtgccattgtggaggatgatgggctccagtcagccttcactgctgctcatgaactgggtcatgtcttcaacatgctccatgacaactccaagccatgcat

SEQ ID NO: 468586 - DNA, 120 bp, Artificial Sequence
  ENSG00000158859_13 (sequence is synthesized)
cagtttgaatgggcctttgagcacctctcgccatgtcatggcccctgtgatggctcatgtggatcctgaggagccctggtccccctgcagtgcccgcttcatcactgacttcctggacaa

SEQ ID NO: 468587 - DNA, 120 bp, Artificial Sequence
  ENSG00000158859_14 (sequence is synthesized)
tggctatgggcactgtctcttagacaaaccagaggctccattgcatctgcctgtgactttccctggcaaggactatgatgctgaccgccagtgccagctgaccttcgggcccgactcacg

SEQ ID NO: 468588 - DNA, 120 bp, Artificial Sequence
  ENSG00000158859_15 (sequence is synthesized)
ccattgtccacagctgccgccgccctgtgctgccctctggtgctctggccacctcaatggccatgccatgtgccagaccaaacactcgccctgggccgatggcacaccctgcgggcccgc

SEQ ID NO: 468589 - DNA, 120 bp, Artificial Sequence
  ENSG00000158859_16 (sequence is synthesized)
acaggcctgcatgggtggtcgctgcctccacatggaccagctccaggacttcaatattccacaggctggtggctggggtccttggggaccatggggtgactgctctcggacctgtggggg

SEQ ID NO: 468590 - DNA, 120 bp, Artificial Sequence
  ENSG00000158859_17 (sequence is synthesized)
tggtgtccagttctcctcccgagactgcacgaggcctgtcccccggaatggtggcaagtactgtgagggccgccgtacccgcttccgctcctgcaacactgaggactgcccaactggctc

SEQ ID NO: 468591 - DNA, 120 bp, Artificial Sequence
  ENSG00000158859_18 (sequence is synthesized)
agccctgaccttccgcgaggagcagtgtgctgcctacaaccaccgcaccgacctcttcaagagcttcccagggcccatggactgggttcctcgctacacaggcgtggccccccaggacca

SEQ ID NO: 468592 - DNA, 120 bp, Artificial Sequence
  ENSG00000158859_19 (sequence is synthesized)
gtgcaaactcacctgccaggcccaggcactgggctactactatgtgctggagccacgggtggtagatgggaccccctgttccccggacagctcctcggtctgtgtccagggccgatgcat

SEQ ID NO: 468593 - DNA, 120 bp, Artificial Sequence
  ENSG00000158859_20 (sequence is synthesized)
ccatgctggctgtgatcgcatcattggctccaagaagaagtttgacaagtgcatggtgtgcggaggggacggttctggttgcagcaagcagtcaggctccttcaggaaattcaggtacgg

SEQ ID NO: 468594 - DNA, 120 bp, Artificial Sequence
  ENSG00000158859_21 (sequence is synthesized)
atacaacaatgtggtcactatccccgcgggggccacccacattcttgtccggcagcagggaaaccctggccaccggagcatctacttggccctgaagctgccagatggctcctatgccct

SEQ ID NO: 468595 - DNA, 120 bp, Artificial Sequence
  ENSG00000158859_22 (sequence is synthesized)
caatggtgaatacacgctgatgccctcccccacagatgtggtactgcctggggcagtcagcttgcgctacagcggggccactgcagcctcagagacactgtcaggccatgggccactggc

SEQ ID NO: 468596 - DNA, 120 bp, Artificial Sequence
  ENSG00000158859_23 (sequence is synthesized)
ccagcctttgacactgcaagtcctagtggctggcaacccccaggacacacgcctccgatacagcttcttcgtgccccggccgaccccttcaacgccacgccccactccccaggactggct

SEQ ID NO: 468597 - DNA, 120 bp, Artificial Sequence
  ENSG00000158859_24 (sequence is synthesized)
gcaccgaagagcacagattctggagatccttcggcggcgcccctgggcgggcaggaaataacctcactatcccggctgccctttctgggcaccggggcctcggacttagctgggagaaag

SEQ ID NO: 468598 - DNA, 120 bp, Artificial Sequence
  ENSG00000158859_25 (sequence is synthesized)
agagagcttctgttgctgcctcatgctaagactcagtggggaggggctgtgggcgtgagacctgcccctcctctctgccctaatgcgcaggctggccctgccctggtttcctgccctggg

SEQ ID NO: 468599 - DNA, 120 bp, Artificial Sequence
  ENSG00000158859_26 (sequence is synthesized)
aggcagtgatgggttagtggatggaaggggctgacagacagccctccatctaaactgccccctctgccctgcgggtcacaggagggagggggaaggcagggagggcctgggccccagttg

SEQ ID NO: 468600 - DNA, 120 bp, Artificial Sequence
  ENSG00000158859_27 (sequence is synthesized)
tatttatttagtatttattcacttttatttagcaccagggaaggggacaaggactagggtcctggggaacctgacccctgacccctcatagccctcaccctggggctaggaaatccaggg

SEQ ID NO: 468601 - DNA, 120 bp, Artificial Sequence
  ENSG00000158859_28 (sequence is synthesized)
tggtggtgataggtataagtggtgtgtgtatgcgtgtgtgtgtgtgtgaaaatgtgtgtgtgcttatgtatgaggtacaacctgttctgctttcctcttcctgaattttattttttggga

SEQ ID NO: 468602 - DNA, 83 bp, Artificial Sequence
  ENSG00000158859_29 (sequence is synthesized)
cctgttctgctttcctcttcctgaattttattttttgggaaaagaaaagtcaagggtagggtgggccttcagggagtgaggga

SEQ ID NO: 468603 - DNA, 120 bp, Artificial Sequence
  ENSG00000158859_30 (sequence is synthesized)
cgcccggctaatttttgttttgttttgtttggagacagagtctcgctattgtcaccagggctggaatgatttcagctcactgcaaccttcgccacctgggttccagcaattctcctgcct

SEQ ID NO: 468604 - DNA, 88 bp, Artificial Sequence
  ENSG00000158859_31 (sequence is synthesized)
acatattttttaaattgaattctactatttatgtgatccttttggagtcagacagatgtggttgcatcctaactccatgtctctgagc

SEQ ID NO: 468605 - DNA, 120 bp, Artificial Sequence
  ENSG00000158859_32 (sequence is synthesized)
cagacagatgtggttgcatcctaactccatgtctctgagcattagatttctcatttgccaataataatacctcccttagaagtttgttgtgaggattaaataatgtaaataaagaactag

SEQ ID NO: 468606 - DNA, 120 bp, Artificial Sequence
  ENSG00000158859_33 (sequence is synthesized)
cataacactcagcatctagtaagtgctcaacaaatagcagctgctgttacttactgttatcaaatttctgtccacatccactctccatatgcacttgaaggtggcaaagatccacaacca

SEQ ID NO: 468607 - DNA, 120 bp, Artificial Sequence
  ENSG00000158859_34 (sequence is synthesized)
tggtgcctgcctttatcctcagggtccgttcctttggttggcagacccctatcctgggttctgagggaccaacagagaaaggaaaattccatccctcacctctggaagttcccaatcaca

SEQ ID NO: 468608 - DNA, 120 bp, Artificial Sequence
  ENSG00000158859_35 (sequence is synthesized)
ggaaggaaacatagtaagcacgtggctacaaatacaattgacaagaacatgaaggtgcaggataacaagaacaaataacaagaacaactgcatcaacacaaatgagtgcttagtaataag

SEQ ID NO: 468609 - DNA, 120 bp, Artificial Sequence
  ENSG00000158859_36 (sequence is synthesized)
ggtgatagttgaggggtctgggtttcacaacagtagaaagagcactggagtgggagccagcgggtctggattcaatttggggctcggcgtcttattagctgggtggtgttgggtaagtca

SEQ ID NO: 468610 - DNA, 120 bp, Artificial Sequence
  ENSG00000158859_37 (sequence is synthesized)
tgttctgggaacaaatgctagaatattttcaaaatagtaaaggttatagtcatggccatgtgagaggttacccctatgactacctgaagatggaacggagtctccagaatctgccagtgt

SEQ ID NO: 468611 - DNA, 120 bp, Artificial Sequence
  ENSG00000158859_38 (sequence is synthesized)
gatggaacggagtctccagaatctgccagtgtaaacccagcagaatgcctagaagatgtgagattagaataaaatttcataaaacaaaaacaatcgggcacggtggctcatgcctgtaat

SEQ ID NO: 468612 - DNA, 64 bp, Artificial Sequence
  ENSG00000158859_39 (sequence is synthesized)
ggatcacgaggtcaggagattgagaccgaccatcctggctaccacatagccgggcatggtgaca

SEQ ID NO: 468613 - DNA, 73 bp, Artificial Sequence
  ENSG00000158859_40 (sequence is synthesized)
atatattagccgggcatggtgaacttgcacccgggaggcagagcttacagtgagtcgagattgcgccactgca

SEQ ID NO: 468614 - DNA, 120 bp, Artificial Sequence
  ENSG00000158859_41 (sequence is synthesized)
gtctcgatacaaaaacaaaaacaaaaacaggatatggtttggcaggaaataggcaagaaggcaaaaagaataacctggaaaaggatctgaggtaagggagccaggtgcctcaaaatggca

SEQ ID NO: 468615 - DNA, 120 bp, Artificial Sequence
  ENSG00000158859_42 (sequence is synthesized)
gaatacctgatgcctgaggagagggagggaataaaacatctgcattttcccctctgggcaaggcgcctttgcttgagaaagaattttgggctggatgagatggttcacacctgtaatccc

SEQ ID NO: 468616 - DNA, 120 bp, Artificial Sequence
  ENSG00000158859_43 (sequence is synthesized)
agtactttggcaggaggattgcttgaggccaggaggttgggaccaacctgggcaacatagaaagattccatctctaccaaaaaaaaaaaagattgaaaaattagccgggcgtggtggcac

SEQ ID NO: 468617 - DNA, 120 bp, Artificial Sequence
  ENSG00000158859_44 (sequence is synthesized)
ctgtagtcccagctacttgggaggctaaaataggaggactgcttgagcccacgatttcgaggctatggtgagctacaatcatgccactatactccagcctgggtgagagaccaaaacacc

SEQ ID NO: 468618 - DNA, 76 bp, Artificial Sequence
  ENSG00000158859_45 (sequence is synthesized)
ggcagtcctctatgtgtcatggatggaacagggatgggcaagggtggtaggtagaccctgcaagaatttggagttt

SEQ ID NO: 468619 - DNA, 120 bp, Artificial Sequence
  ENSG00000158859_46 (sequence is synthesized)
ggcaagggtggtaggtagaccctgcaagaatttggagttttgagaggcagacgcaggactgctagggattggggaaggtactggatgtggggttgtgggagaaactataggtaaagaaga

SEQ ID NO: 468620 - DNA, 120 bp, Artificial Sequence
  ENSG00000158859_47 (sequence is synthesized)
ccctgaggttgaggtggaagagtgaagaatgggggaaccaaaggcacttcactctgccatagcagcccctagctgggatgccaaatactgcttggaatgtgaagctgggactatggggtt

SEQ ID NO: 468621 - DNA, 120 bp, Artificial Sequence
  ENSG00000158859_48 (sequence is synthesized)
gaggcaggccatggaggttgtagtggttatatgtgctatgcttactggatctgggctttgctaatcaagttctgtaccaggcagtgccttatacagcaccctgtactctacaccagccag

SEQ ID NO: 468622 - DNA, 120 bp, Artificial Sequence
  ENSG00000158859_49 (sequence is synthesized)
cacagcgcctgcttcctctgcagcaatgagaaaagactgcccacactctcttctctccagtaaacacggttctccctgctaggcttggccccctggcccttcctgtggtcctcctactaa

SEQ ID NO: 468623 - DNA, 120 bp, Artificial Sequence
  ENSG00000158859_50 (sequence is synthesized)
ccaggctgaagaagatggagacaagacaatagtgatctttactcgtttcatctagtttgcaaaatgagaccacagatagtatgtttatggaccttgatactatgagttgatggtacaatg

SEQ ID NO: 468624 - DNA, 120 bp, Artificial Sequence
  ENSG00000158859_51 (sequence is synthesized)
agcagagttctgtgataagtagatgtaaggtacaaatacaaacaatatatacgactgtcctaaaggggttcacactgcattctgggcaggggaggttgtatactgctcccactccacctt

SEQ ID NO: 468625 - DNA, 120 bp, Artificial Sequence
  ENSG00000158859_52 (sequence is synthesized)
ccccgcaaacagaagcaatgggacagtaaaagggactagaagataagagcctaatgagccctgaactgaatggactatgagggttatggagggctaccttgggctgggccctggagaaca

SEQ ID NO: 468626 - DNA, 120 bp, Artificial Sequence
  ENSG00000158859_53 (sequence is synthesized)
ggtcatcatgatagcccttctcactttcctttaatgttcatggagatacacttttttttttgagatagggtctccctttgttgaccaggcaggagtacagtggtgtgatcttggctcact

SEQ ID NO: 468627 - DNA, 120 bp, Artificial Sequence
  ENSG00000158859_54 (sequence is synthesized)
gcagccttgaactctcaggctcaagcaaccctcccacctcaacctcctgagtacctaggactacaggcacgagctaccacacccagctaatttacttttttttttggttgagacgaggtc

SEQ ID NO: 468628 - DNA, 120 bp, Artificial Sequence
  ENSG00000158859_55 (sequence is synthesized)
gtcttgaactcctggcctcaagggatcttcccacctcgatctcccaaagtgttgggatgaccagtgtgaaccaccatgcctggccttttcttttgagacagtctcgctctgtggctcagg

SEQ ID NO: 468629 - DNA, 120 bp, Artificial Sequence
  ENSG00000158859_56 (sequence is synthesized)
cttttcttttgagacagtctcgctctgtggctcaggttggagtgcagtggcaccatcataacttactacagccttgaactcctgggctcgagtaatcctcccacctcagcctcctaagta

SEQ ID NO: 468630 - DNA, 120 bp, Artificial Sequence
  ENSG00000158859_57 (sequence is synthesized)
tagattcacttttaaatcacttttctgcctgttattttaagagaaagcccttcgctcaccaagtagggttctcactggcataagtaagtttttctgaaaatgagactgagcttaggggcc

SEQ ID NO: 468631 - DNA, 120 bp, Artificial Sequence
  ENSG00000158859_58 (sequence is synthesized)
acctctgtgattgggtaagtaagcaggagctagagtgaaagaggggcagagagagctagctcatcgaagagaagtgatgggcatctcagccctcaatcccaggcaaggcctgaccctttt

SEQ ID NO: 468632 - DNA, 120 bp, Artificial Sequence
  ENSG00000158859_59 (sequence is synthesized)
ctggaatggtctctgccttaccacacctccaagacccagattgtaggtaggctttacctaataggagtccaacaagttcttgctagggatgggattgtgggggggcacatatctccctgt

SEQ ID NO: 468633 - DNA, 120 bp, Artificial Sequence
  ENSG00000158859_60 (sequence is synthesized)
aagagccacagtgagctctgtttcccatctgcctacttattgccctcgtgggcctgagctggggtgtagatatataaggaggaacagaaacagtaataacaggaagtaaggaggcactga

SEQ ID NO: 468634 - DNA, 120 bp, Artificial Sequence
  ENSG00000158859_61 (sequence is synthesized)
aacaattcaagtatctggtcctggagatgaaaagaggaaatggaaaaagaaaaggcattgaatgacaagggattagaaccctgtccctagagaagttcaagaagagtttggacaaccatt

SEQ ID NO: 468635 - DNA, 120 bp, Artificial Sequence
  ENSG00000158859_62 (sequence is synthesized)
ttatgagatggcaagtgttgtgcatgagtatgtgtttgaggtgggggaggaagttgaagcaataagttgggccaatttcctaaagtcccttctgcccctgagattctctgcttctgtggt

SEQ ID NO: 468636 - DNA, 120 bp, Artificial Sequence
  ENSG00000158859_63 (sequence is synthesized)
tcaaacagaggaaatctggacatttgtccagccactatttttgtaatggaggtgggacagccagggttcctggagtgtgctgtggaatcggcatttacacttctcttccatctctagtct

SEQ ID NO: 468637 - DNA, 120 bp, Artificial Sequence
  ENSG00000158859_64 (sequence is synthesized)
catttctgtaatcttcatacagtattacagtattttgttttctaaaataccagattggcagtaagtgacaaaactagcatctcattggtcagggcttgtgggggaggaagggagaagaaa

SEQ ID NO: 468638 - DNA, 120 bp, Artificial Sequence
  ENSG00000158859_65 (sequence is synthesized)
gtggatttcaatgtattaacattttattggctgagaggatgtttctgaaccaattgagtaccttccccattgactgttgctggggccaagccaaaatcattggcaccacgagaaaccaga

SEQ ID NO: 468639 - DNA, 120 bp, Artificial Sequence
  ENSG00000158859_66 (sequence is synthesized)
tgacagctggaggaaaccacgagtgctaaaaatgctcagaaagaggggggtcagggaaggcgggggagcaacaacactgaacaacttccccaggcaggatcttacatggggacagaccca

SEQ ID NO: 468640 - DNA, 120 bp, Artificial Sequence
  ENSG00000158859_67 (sequence is synthesized)
gggtacttaagtagcattaggaaggaaagggaggggaggaagtagattaagtatccctcacagtcttggcacaacaaacaggcaccatacacccacaccaacagtgacacattgacataa

SEQ ID NO: 468641 - DNA, 90 bp, Artificial Sequence
  ENSG00000158859_68 (sequence is synthesized)
ggcaccatacacccacaccaacagtgacacattgacataacacacatccaacttcacagagacacactagcacattctctctttttttta

SEQ ID NO: 468642 - DNA, 67 bp, Artificial Sequence
  ENSG00000158859_69 (sequence is synthesized)
tgcctttctttttcttcttttttttcttaagacagattctcattctgtcacccaggctagagtgcaa

SEQ ID NO: 468643 - DNA, 120 bp, Artificial Sequence
  ENSG00000158859_70 (sequence is synthesized)
gtgctgggattacaggtgtgagccagggtgcctggccaacacattctgttgataatatagatgcaaataagtagtagggagcggaaaatgtaagaattttcacctgaaaatggatctgaa

SEQ ID NO: 468644 - DNA, 120 bp, Artificial Sequence
  ENSG00000158859_71 (sequence is synthesized)
gatctgaagagtaaaagatattaattgacctaatcgtgcattgagaattgactgtttatcccatttatttgttcaataaataagccaatgggttgtaaacattgtaaacattccacagca

SEQ ID NO: 468645 - DNA, 120 bp, Artificial Sequence
  ENSG00000158859_72 (sequence is synthesized)
tgtggaaaggacatggatttttggagtcaaattgaatctaagccttgctacttacttacctgtaatgatgcaaccttaattacttgatctctgtaaacctcagtttccttacctacaaaa

SEQ ID NO: 468646 - DNA, 120 bp, Artificial Sequence
  ENSG00000158859_73 (sequence is synthesized)
cgtttgtactattacctgccttatagagaggtccagacttaagaatatgatgatgtaaatgtttggcactgtgtctggcttttagtaagtggtcaataaaggccagttctcctttcctta

SEQ ID NO: 468647 - DNA, 120 bp, Artificial Sequence
  ENSG00000158859_74 (sequence is synthesized)
agccattctgtttacccgtcaggtgaggccccagtcagcaccgcaggccatgcactgcacaattctaagaagcgccactacatagactatgatgcaaatgatgttcctggagttgtgtga

SEQ ID NO: 468648 - DNA, 120 bp, Artificial Sequence
  ENSG00000158859_75 (sequence is synthesized)
catggtgccttgccccagccacactgccatgtgtggctacctaggccctgacagtgctgggtcctcagtgcccaggtccccgggaatctggatctcaacccaatggacccaggtgtcttg

SEQ ID NO: 468649 - DNA, 120 bp, Artificial Sequence
  ENSG00000158859_76 (sequence is synthesized)
gttaatgggggtcccaaggtattcttcccccaggcctaggtatagggctattactcctctctgctccaggtgtagacatacatttacatttttctattaaataaattagttggtcgaaac

SEQ ID NO: 468650 - DNA, 120 bp, Artificial Sequence
  ENSG00000158859_77 (sequence is synthesized)
cagggtgaggtgggtaatggatctgatcatccacagctgcagccagatttattatggagtccctcagggcatggggaagggaccctcagatcctatcagggcctttgctcccacaggtca

SEQ ID NO: 468651 - DNA, 80 bp, Artificial Sequence
  ENSG00000158863_0 (sequence is synthesized)
gcctcctccgcctagagcgctgccgccgccgctttcgcccgggagccgggggccgggcgccatcatgctgagccggctcg

SEQ ID NO: 468652 - DNA, 120 bp, Artificial Sequence
  ENSG00000158863_1 (sequence is synthesized)
gggcgctgctgcaggaagccgtgggggcgcgcgagcccagcattgacctgctgcaggccttcgtggagcactggaagggcatcacgcactactacatcgagagcacagatgaaagcaccc

SEQ ID NO: 468653 - DNA, 120 bp, Artificial Sequence
  ENSG00000158863_2 (sequence is synthesized)
ccgccaagaagacagacattccctggcggctgaagcagatgctggatatcctggtgtatgaagagcagcagcaggcggccgcgggtgaggcagggccctgcctggagtacctgctgcagc

SEQ ID NO: 468654 - DNA, 120 bp, Artificial Sequence
  ENSG00000158863_3 (sequence is synthesized)
acaagatcctggagactctctgcacgctgggcaaggccgagtaccccccaggcatgcggcagcaggtgttccagttcttcagcaaggttctggcgcaggtgcagcaccccctgctgcatt

SEQ ID NO: 468655 - DNA, 120 bp, Artificial Sequence
  ENSG00000158863_4 (sequence is synthesized)
acctcagcgtccacaggcctgtgcagaaactcctccgacttggtgggactgcttccggatccgttacagaaaaggaggaggtgcagttcaccaccgtcctctgctccaagatccagcagg

SEQ ID NO: 468656 - DNA, 120 bp, Artificial Sequence
  ENSG00000158863_5 (sequence is synthesized)
acccagagctgctcgcctacatcctggaaggtaaaaagattgtaggtaggaagaaagcatgcggagaacccactgccctgcctaaggacacaaccagccacggggacaaggactgctccc

SEQ ID NO: 468657 - DNA, 120 bp, Artificial Sequence
  ENSG00000158863_6 (sequence is synthesized)
acgatggtgctcctgccaggccccagctggacggggagtcctgtggggcccaggccttgaacagccacatgcctgctgagaccgaggagctggacggtgggaccacagagagcaacctga

SEQ ID NO: 468658 - DNA, 120 bp, Artificial Sequence
  ENSG00000158863_7 (sequence is synthesized)
ttacctccctgcttgggctgtgccagagcaagaagagtcgggtggccttgaaggcccaggagaacctgctgctcctggtgagcatggcctccccagcagctgccacctacctggtacaga

SEQ ID NO: 468659 - DNA, 120 bp, Artificial Sequence
  ENSG00000158863_8 (sequence is synthesized)
gcagcgcctgctgccctgcgatcgtccggcacctttgccagttgtaccggtccatgcctgtcttcctggaccccgcagacattgccaccttagagggcatcagctggaggttacccagtg

SEQ ID NO: 468660 - DNA, 120 bp, Artificial Sequence
  ENSG00000158863_9 (sequence is synthesized)
ccccgtctgatgaggcttccttccctggcaaggaggccttggctgccttcttgggctggtttgattactgcgaccacctcatcacagaggcacacacggtggttgcggacgccttggcga

SEQ ID NO: 468661 - DNA, 120 bp, Artificial Sequence
  ENSG00000158863_10 (sequence is synthesized)
aggctgtggctgagaacttcttcgtggagaccctgcagccccagctcctgcacgtgtccgagcagagcatcttgacctccaccgccctcctcacagccatgctgcgccagcttcgctccc

SEQ ID NO: 468662 - DNA, 120 bp, Artificial Sequence
  ENSG00000158863_11 (sequence is synthesized)
ctgcgctgctgcgggaggccgtggctttcctcctgggcacagaccggcagcctgaagcccccggggacaacccccacaccctgtatgctcatctcatcgggcattgtgaccacctctctg

SEQ ID NO: 468663 - DNA, 120 bp, Artificial Sequence
  ENSG00000158863_12 (sequence is synthesized)
atgagatcagcatcaccacactccggctgtttgaggagctgctgcagaagccccacgaggggatcatccacagcctggtcctgcgcaaccttgagggccgcccttacgtggcctggggct

SEQ ID NO: 468664 - DNA, 120 bp, Artificial Sequence
  ENSG00000158863_13 (sequence is synthesized)
caccagagcctgagagctatgaggacaccctagacctggaggaagacccctacttcaccgacagcttcctggattccggctttcaaactcccgcaaagcctcgcctagctcctgctacca

SEQ ID NO: 468665 - DNA, 120 bp, Artificial Sequence
  ENSG00000158863_14 (sequence is synthesized)
gttacgatggcaaaacagcagtgaccgagatcgtcaacagtttcctgtgcctggtccccgaggaagccaagacctctgccttcctggaggagacaggctatgacacatacgtccacgatg

SEQ ID NO: 468666 - DNA, 120 bp, Artificial Sequence
  ENSG00000158863_15 (sequence is synthesized)
cttatggcctgttccaggagtgcagctcccgcgtcgcctcctggggctggcctctgacccccacacctttggacccccatgagcccgagcgacctttcttcgagggccacttcctccgag

SEQ ID NO: 468667 - DNA, 120 bp, Artificial Sequence
  ENSG00000158863_16 (sequence is synthesized)
tgctgtttgaccgcatgtcccggattctggatcagccatacagcctgaacctgcaggtgacctcggtcctgtcccggcttgccctcttcccccacccccatattcatgagtacctgctgg

SEQ ID NO: 468668 - DNA, 120 bp, Artificial Sequence
  ENSG00000158863_17 (sequence is synthesized)
ctggtgcgcaagcagttgacgggccaggctcctggggagcagctggaccaccagaccctcctccagggcgtggtggtgctggaggagttctgcaaggagctggctgccattgccttcgtc

SEQ ID NO: 468669 - DNA, 120 bp, Artificial Sequence
  ENSG00000158863_18 (sequence is synthesized)
aagtttcccccacatgatcctcgccagaacgtctccccagccccggaagggcaggtctgagccagcaccagggcggtgggagactcctgtccacacctctgccccagagctgcctcctgc

SEQ ID NO: 468670 - DNA, 120 bp, Artificial Sequence
  ENSG00000158863_19 (sequence is synthesized)
ctggcactgccgccacactcccctcctgggatggggcttctgctcccgggctcactcaaggagactgcggcatgttgaccacaccagactgggtttcagggaatgggcatgccaggtgcc

SEQ ID NO: 468671 - DNA, 120 bp, Artificial Sequence
  ENSG00000158863_20 (sequence is synthesized)
aaggagccaaacagatggctttccaggcagcaaggtccttggggccttcttggaggagcttgggtgacagccaggtgagcacccagaccccagaccctcatgtgctgtgtgcctggcccc

SEQ ID NO: 468672 - DNA, 120 bp, Artificial Sequence
  ENSG00000158863_21 (sequence is synthesized)
ttctgtactggccatttgtggccagggccaagcctgtgactcaactccaggggcaagatggggagtgagctgatggctccgagactggtcaggagcccaggccagtgagatggggcctgg

SEQ ID NO: 468673 - DNA, 120 bp, Artificial Sequence
  ENSG00000158863_22 (sequence is synthesized)
agccttgtctgtgtcacattaggtaccatgggagctgctgagacctgacattttgtcccctgcctacatggcttggcccatggagaaggagcagtgaatgggatcgtcggggaagcccct

SEQ ID NO: 468674 - DNA, 120 bp, Artificial Sequence
  ENSG00000158863_23 (sequence is synthesized)
cttcctgctctgctcccctggaaactgttgcaaaactcccagccgcctcatggcaaatgcccaaagcatgttccgcacccaggcgggggcccctgctaatgagaaccttggtgcagctgc

SEQ ID NO: 468675 - DNA, 120 bp, Artificial Sequence
  ENSG00000158863_24 (sequence is synthesized)
agccaggaggggagcgggcccaggagccaggctcaggtccagctggttcctctctggcgccttctgaacccgtctcagcaggtccacagcacctgggcagaggtcagagaccaggggagg

SEQ ID NO: 468676 - DNA, 120 bp, Artificial Sequence
  ENSG00000158863_25 (sequence is synthesized)
ccgggccttgccctcccttctgcccagggcccagtgttcttgatagaagacccttctggggagccagggagctcaggggacagataagggaaggacgccccctgactccaggcccctgag

SEQ ID NO: 468677 - DNA, 120 bp, Artificial Sequence
  ENSG00000158863_26 (sequence is synthesized)
cctggcgggaagtggctgcggcccaggcagccagtcctggtggtgttctccctgcatgccctccgtggctgggctgccaccccacccggcccgaatctgtcttgacctgcaggaatacac

SEQ ID NO: 468678 - DNA, 120 bp, Artificial Sequence
  ENSG00000158863_27 (sequence is synthesized)
gggcggcgccaggcattacctcacagcgggactacacagttgctggctttgctcctgggcaaggaggagcaggccagagcctcttttgcttccttttcttgcccatgccgcttctagaag

SEQ ID NO: 468679 - DNA, 120 bp, Artificial Sequence
  ENSG00000158863_28 (sequence is synthesized)
ccaggcacaggttgccaagaggtgacacgaaacaggaggaaactcagtgacctctgcctctcccacattcctccccgcgggggaggacctcgccgctctgaagagcaccgtgcacatgtg

SEQ ID NO: 468680 - DNA, 120 bp, Artificial Sequence
  ENSG00000158863_29 (sequence is synthesized)
ggtgcacaaacgtgggtgttggtgtggacggggcgcagatctccgtggatgaactgcgtctggactcttagattcataaaatattcgagggtttgggagtcacagaccctcccctctcct

SEQ ID NO: 468681 - DNA, 120 bp, Artificial Sequence
  ENSG00000158863_30 (sequence is synthesized)
cagtgcactttggcatttgcacggtgtcttccccggacagcacagcaataaatggtgtgattgcgtggacaccgtggctctgttcttggccaagtttccccaccttctgcccaggactcc

SEQ ID NO: 468682 - DNA, 120 bp, Artificial Sequence
  ENSG00000158863_31 (sequence is synthesized)
actgctaattcgggcccatcttcctccccaaggaagacaaattctttttctagcgctgcagcagggaggtggggtgggcggtaaacagacaggctctggcagtgcagatctgctgatcct

SEQ ID NO: 468683 - DNA, 120 bp, Artificial Sequence
  ENSG00000158863_32 (sequence is synthesized)
cagcgcctgccaggagccagactcttggcggagcagtgccacttctgctgggctgacctgcagcggagagtctgcccaccccggagacaccatgagggaatggaccacgtgggagcatct

SEQ ID NO: 468684 - DNA, 120 bp, Artificial Sequence
  ENSG00000158863_33 (sequence is synthesized)
gtgtgcaagtctcatttgggtgtgtttatgctgcgtgttgtatgcctgttttagtcataaagtaggcctgatatttaaaaccttgtctttaagttcaaggctgcagtgagccgattgcac

SEQ ID NO: 468685 - DNA, 87 bp, Artificial Sequence
  ENSG00000158863_34 (sequence is synthesized)
cctgtctaaaaaaaaaaaaaaaaaatttcacaggtgtgttctcagggaaaaagaaaagttaacacataaataaaccctttgtcctca

SEQ ID NO: 468686 - DNA, 120 bp, Artificial Sequence
  ENSG00000158863_35 (sequence is synthesized)
ggggctgcctcctccgcctagagcgctgccgccgccgctttcgcccgggagccgggggccgggcgccatcatgctgagccggctcggggcgctgctgcaggaagccgtgggggcgacaac

SEQ ID NO: 468687 - DNA, 120 bp, Artificial Sequence
  ENSG00000158863_36 (sequence is synthesized)
accgtgcctgccctgagttttactctttggccacagccctggggtccagtcagggagggagatggggtcccacaagcaggggagagcagggtgagccgggagcgcctccacaccggcttc

SEQ ID NO: 468688 - DNA, 120 bp, Artificial Sequence
  ENSG00000158863_37 (sequence is synthesized)
tcccggattctggatcaggtagctagtgggcctgggccaggagaactccaggctggtgcctctggggtccttcaagagcagaggttggccacagggttgcctctgcttcggttctttggt

SEQ ID NO: 468689 - DNA, 120 bp, Artificial Sequence
  ENSG00000158863_38 (sequence is synthesized)
tctggccctcagccccatggaatccatgacacacacacatcacgtgagcctcccacccccacacacgttcacagtggccaggcaccttgctgggggagtgcaaaaatactcaccagccct

SEQ ID NO: 468690 - DNA, 120 bp, Artificial Sequence
  ENSG00000158863_39 (sequence is synthesized)
gtcaccattcaggtgtcctgggaaaggtaacctgcccagtcgttcagaattggagccgagttcacggagacagagaaccagacagacagaagacccagagccctgggccactccactcct

SEQ ID NO: 468691 - DNA, 120 bp, Artificial Sequence
  ENSG00000158863_40 (sequence is synthesized)
gatgatttagctgccggtcccactctgaccttttggaaagaggctgtgtgaggaaggagtagcctggttgggggtctcactggcctgactctgcaaggaagaggtggctgcacttccccc

SEQ ID NO: 468692 - DNA, 120 bp, Artificial Sequence
  ENSG00000158863_41 (sequence is synthesized)
agcttccagctccagaccttcaggccccaggtgcttgtgcctaggatttaatgatcaaaagaaaagaatttaataaattcccctttcccctgagccagcttaggggcaatgtccttgtag

SEQ ID NO: 468693 - DNA, 120 bp, Artificial Sequence
  ENSG00000158863_42 (sequence is synthesized)
agatctggggtaggaggagaacgaaaaccaaggtgggtaacatgcctgggtccctctctccaagctgacaccccaaagagccaaagccttggcacctggtcccatcaggaccgctcactg

SEQ ID NO: 468694 - DNA, 120 bp, Artificial Sequence
  ENSG00000158863_43 (sequence is synthesized)
aggggatggcatctgagtggctgctctgcagtcatgaggctgccatgggtggatacggactggttgccaggtaaccatatcctgcatccctcacttttcccttcctggagttcatactgg

SEQ ID NO: 468695 - DNA, 120 bp, Artificial Sequence
  ENSG00000158863_44 (sequence is synthesized)
ggcttgatcccagcccacacctttcctacaggctttctttccagcccgggccagcccaggaaattcagaaatctgtgggaccctctgagggttctgctagaccaggtttctcaatcttgg

SEQ ID NO: 468696 - DNA, 120 bp, Artificial Sequence
  ENSG00000158863_45 (sequence is synthesized)
cacagttggcattggacctggagccttccctgcgcggggctgtcctgggcggtgtgggatgtgcagcagtaattctggcctctacccactaggtgccagtagcacaccccacccccgaat

SEQ ID NO: 468697 - DNA, 120 bp, Artificial Sequence
  ENSG00000158863_46 (sequence is synthesized)
tgggacaaccaggaaggtctccagacattgcctcatgttccctgggggggaaaagcgcacccctggttctgaacctatctcttcaggttaaagatctcttgaaggagagcctcagtccac

SEQ ID NO: 468698 - DNA, 120 bp, Artificial Sequence
  ENSG00000158863_47 (sequence is synthesized)
cagctcagtaagatcagatcagaactggctgaaattcacctggggcttcccccatccagccctttcatttccagaatggtccctagaccagaagggttggaagtgcgtggggcaggccgc

SEQ ID NO: 468699 - DNA, 120 bp, Artificial Sequence
  ENSG00000158863_48 (sequence is synthesized)
accagaactttctttaaaacacacactgagactctgactgcaaaagcccccactaagtagcttccccgtcagggcgttggtacagggagcaggactgggtcagacctgaaggtggtggca

SEQ ID NO: 468700 - DNA, 120 bp, Artificial Sequence
  ENSG00000158863_49 (sequence is synthesized)
cagatgtttttttctgctttgtgaaaaacagaggcttgccttctctgagtgtcagtgggggaggccccaggaggttctctctcaggcagctgctggaattacagcttctaagttatgtga

SEQ ID NO: 468701 - DNA, 120 bp, Artificial Sequence
  ENSG00000158863_50 (sequence is synthesized)
caagagccctgagcccacagtgtccactcaggcccagagctgacagcagccttctgtgggcccaggaccatgtgtccctgtctctgtacccatcctagggtttgaaggaaaccgatgctg

SEQ ID NO: 468702 - DNA, 120 bp, Artificial Sequence
  ENSG00000158863_51 (sequence is synthesized)
ctgccccctgataaagggctgggcatgcatgcgttctcagaggactgtgtcctgagcctggaaggacttttgtcttcttaaatattgaagcattcactgtaaacttccatttcccagttg

SEQ ID NO: 468703 - DNA, 120 bp, Artificial Sequence
  ENSG00000158863_52 (sequence is synthesized)
ccagcagctgtcttcccccacctctcccagacaggacctcccctttctgggctttggcaggagagggtgaagttttcaagccggggtgcccctctttaccctactcacccttgtttccca

SEQ ID NO: 468704 - DNA, 120 bp, Artificial Sequence
  ENSG00000158863_53 (sequence is synthesized)
gccaggccgaggtgggaggcctctgtgcgctgggccaggccgaggtgggagaccctctgagtgctgggccaggctgaggtgggcggtgggcagtgggcagcctggggctccctggattcc

SEQ ID NO: 468705 - DNA, 120 bp, Artificial Sequence
  ENSG00000158863_54 (sequence is synthesized)
aggcctttctgcctatgctcttcccagtcctgacactgaaagtggcagttcgggcgagaggagcaaacaggacgggcactgtggctgtctcacttagaacactccaccatcccagcgctc

SEQ ID NO: 468706 - DNA, 120 bp, Artificial Sequence
  ENSG00000158863_55 (sequence is synthesized)
ctgttcccagttcactccacaaagatgggcctgccatgtgccaggctctgctctagatgctggggacacagcagggattcatactgacaagagccaggcatggtgatgcgtgcctgtagc

SEQ ID NO: 468707 - DNA, 82 bp, Artificial Sequence
  ENSG00000158863_56 (sequence is synthesized)
cccagctacgatggaggctgcagtgaactgttatcgtgagaccgcactcctgcctaggaggcagagcaagacactgtctctt

SEQ ID NO: 468708 - DNA, 120 bp, Artificial Sequence
  ENSG00000158863_57 (sequence is synthesized)
aactcactgcagtctccaactcctggcctcaagcgatcctctcacctcagcctcctaaagtgctgggactgcaggcatgagccactgttcccagcttatttttttacagtattttatatt

SEQ ID NO: 468709 - DNA, 120 bp, Artificial Sequence
  ENSG00000158863_58 (sequence is synthesized)
ttgcacacttggctcgctggaaggctaacacgtactacttcgtgaggtaggcgaggttgatactcccatttctcagacatggaaagtaaggcacggagaagcgaattggcttgcctgaaa

SEQ ID NO: 468710 - DNA, 120 bp, Artificial Sequence
  ENSG00000158863_59 (sequence is synthesized)
ttgcacatcaaattagtcacataccagggaccacccagacttctggattcctaggcccacaccccccaactacccccaaaacctgccaccttagcatccagccaagggaggtgactctgc

SEQ ID NO: 468711 - DNA, 89 bp, Artificial Sequence
  ENSG00000158863_60 (sequence is synthesized)
taccagttacgatggcaaaacagcagtgaccgagatcgtcaacaggtggggagcaagttaggcagtctgaaccacttgagagagtctcg

SEQ ID NO: 468712 - DNA, 120 bp, Artificial Sequence
  ENSG00000158863_61 (sequence is synthesized)
cccgggaggcacgcaggcagcttcccctccagctccaggccgacgccctgctggcagcccaccctgcggtcccagtgggggaccctgggaagtggtccccaccaggtctggcctcatctc

SEQ ID NO: 468713 - DNA, 120 bp, Artificial Sequence
  ENSG00000158863_62 (sequence is synthesized)
ggcgcaggtgcagcaccccctgctgcattacctcagcgtccacaggcctgtgcaggtgaggggcccggaagccaaggggtgtctgggtgtgaggccccctctctcccctgccacccctct

SEQ ID NO: 468714 - DNA, 120 bp, Artificial Sequence
  ENSG00000158864_0 (sequence is synthesized)
gccccaggagaggcagagagtgagggaaagggcctggccggcatgcacagataggatcacggtcctgggagaattcctgctcttatagtctaacctaccatggcttctcttttctcaagg

SEQ ID NO: 468715 - DNA, 120 bp, Artificial Sequence
  ENSG00000158864_1 (sequence is synthesized)
ctccctcatgctgccctttggccctagtggctggtttccagggctgaggggactgagtgagctgcctgagaaaagagggtagggaacagaaaagccagccaggagctgtgggaggaaacg

SEQ ID NO: 468716 - DNA, 120 bp, Artificial Sequence
  ENSG00000158864_2 (sequence is synthesized)
ccctcagtaaagatgaccgcggtcactgttatctaaacgcaagtgaagccgagtcacaggacccggatgttgtcagttcgacggtaaacgaccctgccagcttccaagagggcggcttca

SEQ ID NO: 468717 - DNA, 120 bp, Artificial Sequence
  ENSG00000158864_3 (sequence is synthesized)
ctgtgcgaataggtgagaagccaagaaggaggcgcgctggagttacttccgcccggttctccttcccgcagtctgcagccggagtaagatggcggcgctgagggctttgtgcggcttccg

SEQ ID NO: 468718 - DNA, 120 bp, Artificial Sequence
  ENSG00000158864_4 (sequence is synthesized)
gggcgtcgcggcccaggtgctgcggcctggggctggagtccgattgccgattcagcccagcagaggtgttcggcagtggcagccagatgtggaatgggcacagcagtttgggggagctgt

SEQ ID NO: 468719 - DNA, 120 bp, Artificial Sequence
  ENSG00000158864_5 (sequence is synthesized)
tatgtacccaagcaaagaaacagcccactggaagcctccaccttggaatgatgtggaccctccaaaggacacaattgtgaagaacattaccctgaactttgggccccaacacccagcagc

SEQ ID NO: 468720 - DNA, 120 bp, Artificial Sequence
  ENSG00000158864_6 (sequence is synthesized)
gcatggtgtcctgcgactagtgatggaattgagtggggagatggtgcggaagtgtgatcctcacatcgggctcctgcaccgaggcactgagaagctcattgaatacaagacctatcttca

SEQ ID NO: 468721 - DNA, 120 bp, Artificial Sequence
  ENSG00000158864_7 (sequence is synthesized)
ggcccttccatactttgaccggctagactatgtgtccatgatgtgtaacgaacaggcctattctctagctgtggagaagttgctaaacatccggcctcctcctcgggcacagtggatccg

SEQ ID NO: 468722 - DNA, 120 bp, Artificial Sequence
  ENSG00000158864_8 (sequence is synthesized)
tgctgtttggagaaatcacacgtttgttgaaccacatcatggctgtgaccacacatgccctggaccttggggccatgacccctttcttctggctgtttgaagaaagggagaagatgtttg

SEQ ID NO: 468723 - DNA, 120 bp, Artificial Sequence
  ENSG00000158864_9 (sequence is synthesized)
agttctacgagcgagtgtctggagcccgaatgcatgctgcttatatccggccaggaggagtgcaccaggacctaccccttgggcttatggatgacatttatcagttttctaagaacttct

SEQ ID NO: 468724 - DNA, 120 bp, Artificial Sequence
  ENSG00000158864_10 (sequence is synthesized)
ctcttcggcttgatgagttggaggagttgctgaccaacaataggatctggcgaaatcggacaattgacattggggttgtaacagcagaagaagcacttaactatggttttagtggagtga

SEQ ID NO: 468725 - DNA, 120 bp, Artificial Sequence
  ENSG00000158864_11 (sequence is synthesized)
tgcttcggggctcaggcatccagtgggacctgcggaagacccagccctatgatgtttacgaccaggttgagtttgatgttcctgttggttctcgaggggactgctatgataggtacctgt

SEQ ID NO: 468726 - DNA, 120 bp, Artificial Sequence
  ENSG00000158864_12 (sequence is synthesized)
gccgggtggaggagatgcgccagtccctgagaattatcgcacagtgtctaaacaagatgcctcctggggagatcaaggttgatgatgccaaagtgtctccacctaagcgagcagagatga

SEQ ID NO: 468727 - DNA, 120 bp, Artificial Sequence
  ENSG00000158864_13 (sequence is synthesized)
agacttccatggagtcactgattcatcactttaagttgtatactgagggctaccaagttcctccaggagccacatatactgccattgaggctcccaagggagagtttggggtgtacctgg

SEQ ID NO: 468728 - DNA, 120 bp, Artificial Sequence
  ENSG00000158864_14 (sequence is synthesized)
tgtctgatggcagcagccgcccttatcgatgcaagatcaaggctcctggttttgcccatctggctggtttggacaagatgtctaagggacacatgttggcagatgtcgttgccatcatag

SEQ ID NO: 468729 - DNA, 120 bp, Artificial Sequence
  ENSG00000158864_15 (sequence is synthesized)
gtacccaagatattgtatttggagaagtagatcggtgagcaggggagcagcgtttgatcccccctgcctatcagcttcttctgtggagcctgttcctcactggaaattggcctctgtgtg

SEQ ID NO: 468730 - DNA, 90 bp, Artificial Sequence
  ENSG00000158864_16 (sequence is synthesized)
catgtacacttggctgtcaggctttctgtgcatgtactaaaaaaggagaaattataataaattagccgtcttgcggcccctaggcctaaa

SEQ ID NO: 468731 - DNA, 120 bp, Artificial Sequence
  ENSG00000158864_17 (sequence is synthesized)
ggaagcgccgcgcgtttccaagatacgcaggcgggctcggcgagagagcacgaagtatctgccccacgcaggaacggcaattttcccttgctcgctcctagaaaagccagccaggagctg

SEQ ID NO: 468732 - DNA, 120 bp, Artificial Sequence
  ENSG00000158864_18 (sequence is synthesized)
tcctgttcaccataggccatggcatggactcgggtcctcaatcttttgagcacagtaatgggttctggatcttgggtaacaccactttttttgtttgttttgcctcacaacaggaagata

SEQ ID NO: 468733 - DNA, 120 bp, Artificial Sequence
  ENSG00000158864_19 (sequence is synthesized)
tagagaaatacagagatatttgaagagtgtgaggaagagtattaacacaccagttttcttgatcaatagttgctgaccaacaataggatctggcgaaatcggacaattgacattggggtt

SEQ ID NO: 468734 - DNA, 120 bp, Artificial Sequence
  ENSG00000158864_20 (sequence is synthesized)
gtaacagcagaagaagcacttaactatggttttaggtgaggggaatacaacttctctccgtaggagtgggggtgggagtgggggagttccagcctaatatcttgtctttgaagacttgtt

SEQ ID NO: 468735 - DNA, 120 bp, Artificial Sequence
  ENSG00000158864_21 (sequence is synthesized)
tcctctctgcttactgactgacatgtggctttagtctccctgagggtagagattattttctgtgctgggggaggcctaggagacagagtttggatatggtttattgatgctccctgtttc

SEQ ID NO: 468736 - DNA, 120 bp, Artificial Sequence
  ENSG00000158864_22 (sequence is synthesized)
ggaaaggataggaatagggaaggaagtgcaggaagtagagaaggtataaaggagacaggagattaaaagaagagagagaacatgggagaacatttagagggggaaggtatgtttaacttg

SEQ ID NO: 468737 - DNA, 120 bp, Artificial Sequence
  ENSG00000158864_23 (sequence is synthesized)
tgatttccttttctttttttgagacagggtttccctctgtctccctggctggagtgcagtggtgcgaaagtggctcactgtagccttgaacttctgggctcaaggcaaccttctgtctca

SEQ ID NO: 468738 - DNA, 120 bp, Artificial Sequence
  ENSG00000158864_24 (sequence is synthesized)
gcctccccagaaagccgcaacaacaggcctgtgccaccacaactggctaattttgaaaattttccttttgtagagacagagtcttgctatgttgaccaggctggtttcaaactcctggcc

SEQ ID NO: 468739 - DNA, 120 bp, Artificial Sequence
  ENSG00000158865_0 (sequence is synthesized)
ggttgctgttcctgttgctgccactgcggtgagggctgtggctggacgtccctcctggcactttgcctctgtcccctccatccgccgccagcatttttcctcccctccccttcctccagc

SEQ ID NO: 468740 - DNA, 120 bp, Artificial Sequence
  ENSG00000158865_1 (sequence is synthesized)
tcgtcccaagcctgcctgtccccagcgtggaggcgggacagtggaagactgggtgagtgaagcaggatggtgccttgggctccagcgtctccccaacccctccatgccatgggtccccac

SEQ ID NO: 468741 - DNA, 120 bp, Artificial Sequence
  ENSG00000158865_2 (sequence is synthesized)
gcaggtgaggaccctggtggaggacggtgtgggcagagcgtgggacatgtcaccttccccacctgctcagagttcaagggtcctgggctgggccccgttctctcttctgccctggggaga

SEQ ID NO: 468742 - DNA, 120 bp, Artificial Sequence
  ENSG00000158865_3 (sequence is synthesized)
tcattcacgcttcctttaatccccgctgcagctgaggctggagtttggagtttgacccgcttggaggctctctcagcagcgggcatataggaggaagggtcactgctgtctccggaagct

SEQ ID NO: 468743 - DNA, 120 bp, Artificial Sequence
  ENSG00000158865_4 (sequence is synthesized)
cttggctgcaaagagagaggatcccgggtatctccctccttacaaccaccgccacctcctagtgccttagaagccactgacagcccccagggcaggtgagccctgcatctggaataagga

SEQ ID NO: 468744 - DNA, 120 bp, Artificial Sequence
  ENSG00000158865_5 (sequence is synthesized)
tccagaggtctcgttcaggaccatggagagcggcaccagcagccctcagcctccacagttagatcccctggatgcgtttccccagaagggcttggagcctggggacatcgcggtgctagt

SEQ ID NO: 468745 - DNA, 120 bp, Artificial Sequence
  ENSG00000158865_6 (sequence is synthesized)
tctgtacttcctctttgtcctggctgttggactatggtccacagtgaagaccaaaagagacacagtgaaaggctacttcctggctggaggggacatggtgtggtggccagtgggtgcatc

SEQ ID NO: 468746 - DNA, 120 bp, Artificial Sequence
  ENSG00000158865_7 (sequence is synthesized)
cttgtttgccagcaatgttggaagtggacatttcattggcctggcagggtcaggtgctgctacgggcatttctgtatcagcttatgaacttaatggcttgttttctgtgctgatgttggc

SEQ ID NO: 468747 - DNA, 120 bp, Artificial Sequence
  ENSG00000158865_8 (sequence is synthesized)
ctggatcttcctacccatctacattgctggtcaggtcaccacgatgccagaatacctacggaagcgcttcggtggcatcagaatccccatcatcctggctgtactctacctatttatcta

SEQ ID NO: 468748 - DNA, 120 bp, Artificial Sequence
  ENSG00000158865_9 (sequence is synthesized)
catcttcaccaagatctcggtagacatgtatgcaggtgccatcttcatccagcagtctttgcacctggatctgtacctggccatagttgggctactggccatcactgctgtatacacggt

SEQ ID NO: 468749 - DNA, 120 bp, Artificial Sequence
  ENSG00000158865_10 (sequence is synthesized)
tgctggtggcctggctgctgtgatctacacggatgccctgcagacgctgatcatgcttataggagcgctcaccttgatgggctacagtttcgccgcggttggtgggatggaaggactgaa

SEQ ID NO: 468750 - DNA, 120 bp, Artificial Sequence
  ENSG00000158865_11 (sequence is synthesized)
tctcccgtggccgggggtcctatttggaatgtccatcccatccctctggtactggtgcacggatcaggtgattgtccagcggactctggctgccaagaacctgtcccatgccaaaggagg

SEQ ID NO: 468751 - DNA, 120 bp, Artificial Sequence
  ENSG00000158865_12 (sequence is synthesized)
tgctctgatggctgcatacctgaaggtgctgcccctcttcataatggtgttccctgggatggtcagccgcatcctcttcccagatcaagtggcctgtgcagatccagagatctgccagaa

SEQ ID NO: 468752 - DNA, 120 bp, Artificial Sequence
  ENSG00000158865_13 (sequence is synthesized)
gatctgcagcaacccctcaggctgttcggacatcgcgtatcccaaactcgtgctggaactcctgcccacagggctccgtgggctgatgatggctgtgatggtggcggctctcatgtcctc

SEQ ID NO: 468753 - DNA, 120 bp, Artificial Sequence
  ENSG00000158865_14 (sequence is synthesized)
cctcacctccatctttaacagtgccagcaccatcttcaccatggacctctggaatcacctccggcctcgggcatctgagaaggagctcatgattgtgggcagggtgtttgtgctgctgct

SEQ ID NO: 468754 - DNA, 120 bp, Artificial Sequence
  ENSG00000158865_15 (sequence is synthesized)
ggtcctggtctccatcctctggatccctgtggtccaggccagccagggcggccagctcttcatctatatccagtccatcagctcctacctgcagccgcctgtggcggtggtcttcatcat

SEQ ID NO: 468755 - DNA, 120 bp, Artificial Sequence
  ENSG00000158865_16 (sequence is synthesized)
gggatgtttctggaagaggaccaatgaaaagggtgccttctggggcctgatctcgggcctgctcctgggcttggttaggctggtcctggactttatttacgtgcagcctcgatgcgacca

SEQ ID NO: 468756 - DNA, 120 bp, Artificial Sequence
  ENSG00000158865_17 (sequence is synthesized)
gccagatgagcgcccggtcctggtgaagagcattcactacctctacttctccatgatcctgtccacggtcaccctcatcactgtctccaccgtgagctggttcacagagccaccctccaa

SEQ ID NO: 468757 - DNA, 120 bp, Artificial Sequence
  ENSG00000158865_18 (sequence is synthesized)
ggagatggtcagccacctgacctggtttactcgtcacgaccccgtggtccagaaggaacaagcaccaccagcagctcccttgtctcttaccctctctcagaacgggatgccagaggccag

SEQ ID NO: 468758 - DNA, 120 bp, Artificial Sequence
  ENSG00000158865_19 (sequence is synthesized)
cagcagcagcagcgtccagttcgagatggttcaagaaaacacgtctaaaacccacagctgtgacatgaccccaaagcagtccaaagtggtgaaggccatcctgtggctctgtggaataca

SEQ ID NO: 468759 - DNA, 120 bp, Artificial Sequence
  ENSG00000158865_20 (sequence is synthesized)
ggagaagggcaaggaagagctcccggccagagcagaagccatcatagtttccctggaagaaaaccccttggtgaagaccctcctggacgtcaacctcattttctgcgtgagctgcgccat

SEQ ID NO: 468760 - DNA, 120 bp, Artificial Sequence
  ENSG00000158865_21 (sequence is synthesized)
ctttatctggggctattttgcttagtgtggggtgaacccaggggtccaaactctgtttctcttcagtgctccatttttttaatgaaagaaaaaataataaagcttttgtttaccacaagg

SEQ ID NO: 468761 - DNA, 120 bp, Artificial Sequence
  ENSG00000158865_22 (sequence is synthesized)
ctgtacttcctctttgtcctggctgttggactatgggtgggatctccctctgttgctcagggtactagaacgcagtggtggcaatcatagctcactccggcctcgacttcttgggctcaa

SEQ ID NO: 468762 - DNA, 120 bp, Artificial Sequence
  ENSG00000158865_23 (sequence is synthesized)
gtgatcctctcacctcggctgccagacacagaggaggtactatctacgaggaacaggctctcaccagacaccaaacctctcggtgccttgatattgaacttccaagtctccagaatttcc

SEQ ID NO: 468763 - DNA, 120 bp, Artificial Sequence
  ENSG00000158865_24 (sequence is synthesized)
ctgggatgcagtggattaacaagggatgacgtatgactcttctgtgtttgtcagcatctaggctaggccctgatcccagggaacctgtgctgcaaatgtccactcattcattcattcgtt

SEQ ID NO: 468764 - DNA, 120 bp, Artificial Sequence
  ENSG00000158865_25 (sequence is synthesized)
aaggactccagctgtcacctgtggggcaggggaagctcagccctctctgcagagaaagcttgtcatacaccaggacaatggagtgtgtttgtggggtgggcatggtggtatgaagccagc

SEQ ID NO: 468765 - DNA, 120 bp, Artificial Sequence
  ENSG00000158865_26 (sequence is synthesized)
agccggcagccagcagcaccgtacgtgggtcccagctcttccacttaaccaaggtcagggacattgagccaaacattttgcctcaccgagtctcaggttccttatctgtcaaatgggaat

SEQ ID NO: 468766 - DNA, 120 bp, Artificial Sequence
  ENSG00000158869_0 (sequence is synthesized)
gtcagaacggccgatctccagcccaagatgattccagcagtggtcttgctcttactccttttggttgaacaagcagcggccctgggagagcctcagctctgctatatcctggatgccatc

SEQ ID NO: 468767 - DNA, 120 bp, Artificial Sequence
  ENSG00000158869_1 (sequence is synthesized)
ctgtttctgtatggaattgtcctcaccctcctctactgtcgactgaagatccaagtgcgaaaggcagctataaccagctatgagaaatcagatggtgtttacacgggcctgagcaccagg

SEQ ID NO: 468768 - DNA, 120 bp, Artificial Sequence
  ENSG00000158869_2 (sequence is synthesized)
catcacatatgcctgcatgccattaacaccagctggccctacccctataatgatcctgtgtcctaaattaatatacaccagtggttcctcctccctgttaaagactaatgctcagatgct

SEQ ID NO: 468769 - DNA, 120 bp, Artificial Sequence
  ENSG00000158869_3 (sequence is synthesized)
gtttacggatatttatattctagtctcactctcttgtcccacccttcttctcttccccattcccaactccagctaaaatatgggaagggagaacccccaataaaactgccatggactgga

SEQ ID NO: 468770 - DNA, 120 bp, Artificial Sequence
  ENSG00000158869_4 (sequence is synthesized)
ggcaggaagagggggactctgtggtcagggaactgctcgctgagcacagctgcacagtgctgtcagaacggccgatctccagcccaagatgattccagcagtggtcttgctcttactcct

SEQ ID NO: 468771 - DNA, 68 bp, Artificial Sequence
  ENSG00000158869_5 (sequence is synthesized)
tctcttgacctcgtgatctgcacctggaagtaactcttttaaagataaagtgggaataaacttttatt

SEQ ID NO: 468772 - DNA, 120 bp, Artificial Sequence
  ENSG00000158874_0 (sequence is synthesized)
aggcacagacaccaaggacagagacgctggctaggccgccctccccactgttaccaacatgaagctgctcgcagcaactgtgctactcctcaccatctgcagccttgaaggagctttggt

SEQ ID NO: 468773 - DNA, 120 bp, Artificial Sequence
  ENSG00000158874_1 (sequence is synthesized)
cgaggccaagtcttactttgaaaagtcaaaggagcagctgacacccctgatcaagaaggctggaacggaactggttaacttcttgagctatttcgtggaacttggaacacagcctgccac

SEQ ID NO: 468774 - DNA, 120 bp, Artificial Sequence
  ENSG00000158874_2 (sequence is synthesized)
ccagtgaagtgtccagaccattgtcttccaaccccagctggcctctagaacacccactggccagtcctagagctcctgtccctacccactctttgctacaataaatgctgaatgaatcca

SEQ ID NO: 468775 - DNA, 120 bp, Artificial Sequence
  ENSG00000158874_3 (sequence is synthesized)
ggaggcaagatgtgtgagcagcatccaaagaggcctgggcttcagttgtggagagggagagagccaggttggaatgggcagcaggtagggagatccctggggaggagctgaagcccattt

SEQ ID NO: 468776 - DNA, 120 bp, Artificial Sequence
  ENSG00000158874_4 (sequence is synthesized)
ccgtgactgactatggcaaggacctgatggagaaggtcaagagcccagagcttcaggccgaggccaagtcttactttgaaaacttcttgagctatttcgtggaacttggaacacagcctg

SEQ ID NO: 468777 - DNA, 120 bp, Artificial Sequence
  ENSG00000158874_5 (sequence is synthesized)
aaggacagagacgctggctaggtaagataaggaggcaagatgtgtgagcagcatccaaagaggcctgggcttcagttgtggagagggagagagccaggttggaatgggcagcaggccgcc

SEQ ID NO: 468778 - DNA, 120 bp, Artificial Sequence
  ENSG00000158874_6 (sequence is synthesized)
ggcaggcacagacaccaaggacagagacgctggctaggccgccctccccactgttaccaacatgaagctgctcgcagcaactgtgctactcctcaccatctgcagccttgaagtacttcc

SEQ ID NO: 468779 - DNA, 120 bp, Artificial Sequence
  ENSG00000158874_7 (sequence is synthesized)
tcctcaccatctgcagccttgaaggtgggtgtgatatggagagggggccaaaagggagaatgtgctggtggttatagctacctatctgcctgtgctcttatatccaggtctggcaaccaa

SEQ ID NO: 468780 - DNA, 120 bp, Artificial Sequence
  ENSG00000158874_8 (sequence is synthesized)
gctggatacctttttggggagggggcagagagctggggtgggtactggcagaggtatggcaggaggccaggattcactgctgtggacccagctgaaaagagtgtgtgtgtgtgtgtgtgt

SEQ ID NO: 468781 - DNA, 120 bp, Artificial Sequence
  ENSG00000158874_9 (sequence is synthesized)
gccgccctccccactgttaccaacatgaagctgctcgcagcaactgtgctactcctcaccatctgcagccttgaaggtctggcaaccaaagggctcaaaaggaagatcattccctctcta

SEQ ID NO: 468782 - DNA, 120 bp, Artificial Sequence
  ENSG00000158882_0 (sequence is synthesized)
ctagggttgtctctccatgagtgctctccttccctactcttcctgttccaggtgtagcgtcggaccatgtggaagtttctgaggctggggagccggataatggggggtggggcccgttgg

SEQ ID NO: 468783 - DNA, 120 bp, Artificial Sequence
  ENSG00000158882_1 (sequence is synthesized)
ggggtaaaggggcaatagcgtcctttcacaggctaacctcggctcttcccagtcctctggactaaaatggggaacacattgggcctggcaccaatggggactttgccccgccggagcccc

SEQ ID NO: 468784 - DNA, 120 bp, Artificial Sequence
  ENSG00000158882_2 (sequence is synthesized)
cgccgagaggaacccctgcccaaccctgggagcttcgatgagctgcaccgtctatgcaaagatgtattcccagcacagatggagggagtgaagctcgttgtcaacaaggttctgagcagc

SEQ ID NO: 468785 - DNA, 120 bp, Artificial Sequence
  ENSG00000158882_3 (sequence is synthesized)
catttccaggtggcgcacactatacacatgagtgccctgggcttgccgggatatcacctccatgcggcctatgcaggggattggcagctcagtcccactgaggtgttccccactgtggta

SEQ ID NO: 468786 - DNA, 120 bp, Artificial Sequence
  ENSG00000158882_4 (sequence is synthesized)
ggggatatggacagcagtggcagcctgaacgcccaggtcttgctcctcttggcagagcggctccgagctaaggctgtcttccagacgcagcaggccaagttcctgacatggcagtttgat

SEQ ID NO: 468787 - DNA, 120 bp, Artificial Sequence
  ENSG00000158882_5 (sequence is synthesized)
ggcgagtatcggggagatgactacacagccactctgaccctaggaaatcctgacctgattggggagtcggtgatcatggttgctcacttcctgcagagcctcactcatcggctggtgctg

SEQ ID NO: 468788 - DNA, 120 bp, Artificial Sequence
  ENSG00000158882_6 (sequence is synthesized)
ggaggagagctagtttatcaccggcggccaggcgaagagggggccatcttgacactggctgggaagtactcggctgtacactgggtagctacattgaatgtgggatcaggcggggcccat

SEQ ID NO: 468789 - DNA, 120 bp, Artificial Sequence
  ENSG00000158882_7 (sequence is synthesized)
gcaagttactaccacagggcaaatgaacaggttcaggttggagtggagtttgaggcaaacacaaggctacaagacacaacattctcctttggttaccacctgactctgccccaggccaac

SEQ ID NO: 468790 - DNA, 120 bp, Artificial Sequence
  ENSG00000158882_8 (sequence is synthesized)
atggtatttagaggcttggtggatagtaactggtgtgtaggtgctgtgctggagaagaagatgccccctctgcctgtcaccctagcccttggagccttcctcaatcactggcgcaacaga

SEQ ID NO: 468791 - DNA, 120 bp, Artificial Sequence
  ENSG00000158882_9 (sequence is synthesized)
ttccattgtggcttcagcatcactgtgggctgaggttgtccagagccagcccccacagcagctggaacctctgagtcaggtgccctagggccaaagactaggcccctcttcagagcccac

SEQ ID NO: 468792 - DNA, 120 bp, Artificial Sequence
  ENSG00000158882_10 (sequence is synthesized)
tgctaccagccccagtatcaccttccccatgctcttgtggctgtggactaagggagaaggattaaggggtatggctgaattcccccggcaccccttgccctcaggcttccttcttccttt

SEQ ID NO: 468793 - DNA, 120 bp, Artificial Sequence
  ENSG00000158882_11 (sequence is synthesized)
ccctttggttaatcctgcatgggattagctgaccatcctgttttccatcccagagcctcccaaggctgggaaagtagggctgaagggctagatgtttggtctcaggaagtggggcccacc

SEQ ID NO: 468794 - DNA, 120 bp, Artificial Sequence
  ENSG00000158882_12 (sequence is synthesized)
cattcccagaaggagcttctttacctcttagccctgaggtttcctccttcccatcttctgtgcttccagagaacaactttgttcctatggtcacccccactatccccatgaccgcatgaa

SEQ ID NO: 468795 - DNA, 120 bp, Artificial Sequence
  ENSG00000158882_13 (sequence is synthesized)
gaggcagttattgctttagtctttcattgcaaccactgggctccctttgaacccggcccaatctttggtcccagcattttcccactccagtgtatccagggtgttccaggtgagctgggg

SEQ ID NO: 468796 - DNA, 120 bp, Artificial Sequence
  ENSG00000158882_14 (sequence is synthesized)
aaggaagtgagcatggcctcagctgcagatctcctggagcagcggcatcatggcagacaggccctggatgtgctggatttggtacccgtaggcctcattaatgctccggagctcagccag

SEQ ID NO: 468797 - DNA, 120 bp, Artificial Sequence
  ENSG00000158882_15 (sequence is synthesized)
caggcctagcaacttcgcatacagaaacctttggaggaagtagtggggttgccaggaaaacaggagggaaataaggcagttgggagtcttgtctctaggccctgatcccctgaactattc

SEQ ID NO: 468798 - DNA, 120 bp, Artificial Sequence
  ENSG00000158882_16 (sequence is synthesized)
ctcagtgaagccaggtctgaacattagagaaaatcatgctctggtatgacagactatcagaggttccaaaggtcctccagggggcctcggtctgacactgtcttctctcaccatgctcag

SEQ ID NO: 468799 - DNA, 120 bp, Artificial Sequence
  ENSG00000158882_17 (sequence is synthesized)
ttttttctgaacccagagctctgagagccgagtgtgaagaaagctccagacttggccagaactccaaccatgtggaatctgagggcctggccttctagagcaggttctagaaggtggatg

SEQ ID NO: 468800 - DNA, 120 bp, Artificial Sequence
  ENSG00000158882_18 (sequence is synthesized)
tgttctatggtataaagcatcccctttctggccaaactagctcttggaggaacgagcaaaacagaagcggtgcatacctcagagcctggataaatcacagactattgaacctggaactgg

SEQ ID NO: 468801 - DNA, 120 bp, Artificial Sequence
  ENSG00000158882_19 (sequence is synthesized)
ctttgaccatgaaactgtgaatggccctaacttcaagggaaatgagaaatcgaaggaattggcccaatggcgaggagaggaaaggccaagggaagagaaaagtctgcgttagtctggaga

SEQ ID NO: 468802 - DNA, 120 bp, Artificial Sequence
  ENSG00000158882_20 (sequence is synthesized)
agttggactagtgaggtaatggatgtcatcaatctcaggaatgctattacccagagcctctgagctactactttgcatctgtactgaataaaaaaaaaatctggaaaaagtgagatgaaa

SEQ ID NO: 468803 - DNA, 120 bp, Artificial Sequence
  ENSG00000158882_21 (sequence is synthesized)
atcactcaagatggctgcccccatcaagatgaccggggtgtgccggggggaaaggggcagcatgatggtctgagatggtgtagcgtcggaccatgtggaagtttctgaggctggggagcc

SEQ ID NO: 468804 - DNA, 120 bp, Artificial Sequence
  ENSG00000158882_22 (sequence is synthesized)
tccaaatacagcaatttggatgctgaaacgatgtgagacagggatggccagggggaaggactagaccccacgatacctgaattccctaaggaaaggacagtaaaaaaacattcctcccaa

SEQ ID NO: 468805 - DNA, 120 bp, Artificial Sequence
  ENSG00000158882_23 (sequence is synthesized)
actcaagatggctgcccccatcaagatgaccggggtgtgccggggggaaaggggcagcatgatggtctgagatgtcctctggactaaaatggggaacacattgggcctggcaccaatggg

SEQ ID NO: 468806 - DNA, 120 bp, Artificial Sequence
  ENSG00000158882_24 (sequence is synthesized)
caggcgaagagggggccatcttgacactggctgggaagtactcgggtatggggcgaagtgaagtagtggtggtggtggggggcaattctggacttttctggggttcctggcctgtgtcat

SEQ ID NO: 468807 - DNA, 120 bp, Artificial Sequence
  ENSG00000158882_25 (sequence is synthesized)
actacagttaacactccttcccctctgtactttggattttacagctgtacactgggtagctacattgaatgtgggatcaggcggggcccatgcaagttactaccacagggcaaatgaaca

SEQ ID NO: 468808 - DNA, 120 bp, Artificial Sequence
  ENSG00000158882_26 (sequence is synthesized)
gtacactgggtagctacattgaatgtgggatcaggcggggcccatgcaagttactaccacagggcaaatgaacaggtgagacctctgatctcattccctccttgtcagcaagtcagtcat

SEQ ID NO: 468809 - DNA, 120 bp, Artificial Sequence
  ENSG00000158882_27 (sequence is synthesized)
gaacttctgttcatctggacctctatcgccctgctgacctatttttcttcctaccacgctgtgtatatatttacatgcatgcctccattctgctgattccccatcaggacccttctggtc

SEQ ID NO: 468810 - DNA, 120 bp, Artificial Sequence
  ENSG00000158882_28 (sequence is synthesized)
tttcattgattgggcggggcccaatcagggttgggttgggtctttgacagctttctttgccagattcaaagatggcgcttacggccacgctaagaatgcagcgtgaagctgcagttctgc

SEQ ID NO: 468811 - DNA, 120 bp, Artificial Sequence
  ENSG00000158887_0 (sequence is synthesized)
agttcctggtcccccactttctcaaccccacagatgctccgggcccctgcccctgccccagctatggctcctggggctccctcatccagccccagccctatcctggctgtgctgctcttc

SEQ ID NO: 468812 - DNA, 120 bp, Artificial Sequence
  ENSG00000158887_1 (sequence is synthesized)
tcttctttggtgctgtccccggcccaggccatcgtggtttacaccgacagggaggtccatggtgctgtgggctcccgggtgaccctgcactgctccttctggtccagtgagtgggtctca

SEQ ID NO: 468813 - DNA, 120 bp, Artificial Sequence
  ENSG00000158887_2 (sequence is synthesized)
gatgacatctccttcacctggcgctaccagcccgaagggggcagagatgccatttcgatcttccactatgccaagggacaaccctacattgacgaggtggggaccttcaaagagcgcatc

SEQ ID NO: 468814 - DNA, 120 bp, Artificial Sequence
  ENSG00000158887_3 (sequence is synthesized)
cagtgggtaggggaccctcgctggaaggatggctccattgtcatacacaacctagactacagtgacaatggcacgttcacttgtgacgtcaaaaaccctccagacatagtgggcaagacc

SEQ ID NO: 468815 - DNA, 120 bp, Artificial Sequence
  ENSG00000158887_4 (sequence is synthesized)
tctcaggtcacgctgtatgtctttgaaaaagtgccaactaggtacggggtcgttctgggagctgtgatcgggggtgtcctcggggtggtgctgttgctgctgctgcttttctacgtggtt

SEQ ID NO: 468816 - DNA, 120 bp, Artificial Sequence
  ENSG00000158887_5 (sequence is synthesized)
cggtactgctggctacgcaggcaggcggccctgcagaggaggctcagtgctatggagaaggggaaattgcacaagccaggaaaggacgcgtcgaagcgcgggcggcagacgccagtgctg

SEQ ID NO: 468817 - DNA, 120 bp, Artificial Sequence
  ENSG00000158887_6 (sequence is synthesized)
tatgcaatgctggaccacagcagaagcaccaaagctgtcagtgagaagaaggccaaggggctgggggagtctcgcaaggataagaaatagcggttagcgggccgggcgggggatcggggg

SEQ ID NO: 468818 - DNA, 120 bp, Artificial Sequence
  ENSG00000158887_7 (sequence is synthesized)
ttaggggtggagtccgccaaaggcccaaaggtgatggtcatcgagatggagctacgaaaggatgagcagagcccggagctccggcctgctgtcaagtcccccagcagaaccagcctcaaa

SEQ ID NO: 468819 - DNA, 120 bp, Artificial Sequence
  ENSG00000158887_8 (sequence is synthesized)
cggacaagtgatcgccacccccccaccccaggccctgccagagcagggggacctaggctcctcttacccccgtctaggtgctttccctctttgctcccccgccctgccctgccctcacct

SEQ ID NO: 468820 - DNA, 120 bp, Artificial Sequence
  ENSG00000158887_9 (sequence is synthesized)
ccctttgagatgtaagtttcattccagaattcattccccaggcaattgtattctcccccaccttcacccctggctttctgggagcccaggagctaatcctacccctcacctgccccgggg

SEQ ID NO: 468821 - DNA, 120 bp, Artificial Sequence
  ENSG00000158887_10 (sequence is synthesized)
gctgtgtgtttggtgcctgtccacctgagcactgagaagaaagggactttgataccctctgcctcaagtccaggccacctggcattcccatctcctgcatcccccagcctgtccccctgg

SEQ ID NO: 468822 - DNA, 120 bp, Artificial Sequence
  ENSG00000158887_11 (sequence is synthesized)
ctgtttcctctcccgtccctccctcccctctaccaggtggcccagctccatactctgtccccccagctaatacccagagcacccagatcagactctccttcagggtttatttaggttatt

SEQ ID NO: 468823 - DNA, 120 bp, Artificial Sequence
  ENSG00000158887_12 (sequence is synthesized)
attttttattttttaatccattctttgtttgtttacctgtgctcatcctctgcccttacacccatgactgaggaccaatgacgtcatgtggcttttgcaattcacgccccccttaagtcc

SEQ ID NO: 468824 - DNA, 120 bp, Artificial Sequence
  ENSG00000158887_13 (sequence is synthesized)
ttaatgaagagccagcccaagtagaggggcccctgatcctcacacttcagtatagcattggttccccctgaccactttggagcactgttctgggactccaggtcttgaggagagagacag

SEQ ID NO: 468825 - DNA, 120 bp, Artificial Sequence
  ENSG00000158887_14 (sequence is synthesized)
agagagagaatggatcctcataggtcagggagtgggggagggggcaaatgagccttaagaaatggtttttaaacaaccaaacaaaaagcaggaaaaacaaatgggaaatgggggggcggg

SEQ ID NO: 468826 - DNA, 120 bp, Artificial Sequence
  ENSG00000158887_15 (sequence is synthesized)
ggggaggaagaggctgcactgcagccacaggggattcttaggatttttctacattctgtatatttcttctcaaacctccaaatgtccttaaatgtttaataaacactgacatttccagaa

SEQ ID NO: 468827 - DNA, 120 bp, Artificial Sequence
  ENSG00000158887_16 (sequence is synthesized)
aaccctacattgacgaggtggggaccttcaaagagcgcatccagtgggtaggggaccctcgctggaaggatggctccattgtcatacacaacctagactacagtgacaatgtgccaacta

SEQ ID NO: 468828 - DNA, 120 bp, Artificial Sequence
  ENSG00000158887_17 (sequence is synthesized)
tactgctggctacgcaggcaggcggccctgcagaggaggctcagtgctatggagaaggggaaattgcacaagccaggaaaggacgcgtcgaagcgcgggcggcaggttagcgggacttgg

SEQ ID NO: 468829 - DNA, 120 bp, Artificial Sequence
  ENSG00000158887_18 (sequence is synthesized)
ggcctagacaagatgggaaggagaaccctgggagccgccgggcagcagtgaggggtgggatgggaacagtcaagccccagtcgctcggtgactgatgtgtgcgcccctcccccagacgcc

SEQ ID NO: 468830 - DNA, 120 bp, Artificial Sequence
  ENSG00000158901_0 (sequence is synthesized)
ccaggcaggggagcagatgagggaggagccttagagctggagcaaagtgaggaagctgtctccatagggaagaggcctgatgtggactgtccgaactgaaggagggcactttcctctcca

SEQ ID NO: 468831 - DNA, 120 bp, Artificial Sequence
  ENSG00000158901_1 (sequence is synthesized)
tagccccaccttctcctggaggaatgtagctttcctgctgcttctctcccttgctttggagtggacttctgcaatgctgaccaagaagatcaaacacaaaccagggttatgtcccaaaga

SEQ ID NO: 468832 - DNA, 120 bp, Artificial Sequence
  ENSG00000158901_2 (sequence is synthesized)
gaggctcacctgtaccactgaacttccggactcatgtaacacagattttgactgcaaggaataccagaagtgctgcttttttgcctgtcagaagaagtgcatggatccctttcaagaacc

SEQ ID NO: 468833 - DNA, 120 bp, Artificial Sequence
  ENSG00000158901_3 (sequence is synthesized)
ctgcatgctacctgtgaggcatggaaactgtaatcatgaggcacagcgctggcattttgactttaaaaattaccgctgcacacccttcaaatacaggggctgcgaagggaatgccaacaa

SEQ ID NO: 468834 - DNA, 120 bp, Artificial Sequence
  ENSG00000158901_4 (sequence is synthesized)
agtgacatcgattgtccccagacagacaaatgttgtgaatccaggtgtggctttgtttgtgccagggcctggacagtcaaaaaaggtttctgcccacgcaagcccttgctatgtaccaag

SEQ ID NO: 468835 - DNA, 120 bp, Artificial Sequence
  ENSG00000158901_5 (sequence is synthesized)
attgataaacccaagtgcctgcaggatgaggagtgcccattggtggaaaagtgctgctcacattgtggactgaaatgtatggaccccagacgttgaatagtaagtagaaaatattatcat

SEQ ID NO: 468836 - DNA, 120 bp, Artificial Sequence
  ENSG00000158901_6 (sequence is synthesized)
caaaatcattaattatgagtagcatgataaagagctgtcagttttgtcttgtatccaacttgccaaattatcttaagtatcacaatattgaatgatgttactttgattttatatataatc

SEQ ID NO: 468837 - DNA, 120 bp, Artificial Sequence
  ENSG00000158901_7 (sequence is synthesized)
ccatcatctgaaagtgatgatatatttggctttttttcaacttcatgactttattttcttgtcttcttgtattgtgtagaacctccaaaataataatgaaaataaaggcaatggcatcca

SEQ ID NO: 468838 - DNA, 84 bp, Artificial Sequence
  ENSG00000158901_8 (sequence is synthesized)
ttggtggaaaagtgctgctcacattgtggactgaaatgtatggaccccagacgttgaataacggagttttgctcttattgccca

SEQ ID NO: 468839 - DNA, 120 bp, Artificial Sequence
  ENSG00000158901_9 (sequence is synthesized)
gcctccgaaagtgctgggatcacaggtgggagccactgtgcctggccagttatttcctttttaagcctatttcctatccatttatagctactactgaaaatgactactgaattttatcaa

SEQ ID NO: 468840 - DNA, 120 bp, Artificial Sequence
  ENSG00000158901_10 (sequence is synthesized)
ataccttttaagcatacagtcacataatgatttttctcttctaatttgttggcataataaattactaaattttcttgagccatccttgcattcttaataaacttaattgcagactgctgt

SEQ ID NO: 468841 - DNA, 120 bp, Artificial Sequence
  ENSG00000158941_0 (sequence is synthesized)
gcacttccgctccccagttgccgcgggatggcaagccggcgtgggggaagggagaggtcggcggagacgagggagggaccatatccgggagagcggcagcttccgaccagtggtcgcgct

SEQ ID NO: 468842 - DNA, 120 bp, Artificial Sequence
  ENSG00000158941_1 (sequence is synthesized)
tccggagaggcgcttccggtggcggcggcagcagcggctgtggtggttccgggtgtctttgtccccccggtgtcgctgccctggcccgcagccttttccccacgactctgaaagaggaca

SEQ ID NO: 468843 - DNA, 120 bp, Artificial Sequence
  ENSG00000158941_2 (sequence is synthesized)
gcgttcccaatgtcccagtttaagcgccagcggatcaacccgcttccagggggacgcaacttctcaggcacagcttcaacatctcttctgggccctcctcctggtttgctcactcctcct

SEQ ID NO: 468844 - DNA, 120 bp, Artificial Sequence
  ENSG00000158941_3 (sequence is synthesized)
gtggccacagaactgtcccagaatgccaggcaccttcagggtggggagaaacagcgggtcttcactggtattgttaccagcttgcatgactactttggggttgtggatgaagaggtcttt

SEQ ID NO: 468845 - DNA, 120 bp, Artificial Sequence
  ENSG00000158941_4 (sequence is synthesized)
tttcagctaagtgtggtgaagggccgtctgccccagctgggtgagaaggtgctggtgaaggctgcatacaacccaggccaggcagtgccctggaatgctgtcaaggtgcaaacgctctcc

SEQ ID NO: 468846 - DNA, 120 bp, Artificial Sequence
  ENSG00000158941_5 (sequence is synthesized)
aaccagcccctactgaagtccccagcacctcctcttctgcatgtagcagccctgggccagaagcaagggatcctgggagctcagcctcagttgatcttccagcctcaccggattccccca

SEQ ID NO: 468847 - DNA, 120 bp, Artificial Sequence
  ENSG00000158941_6 (sequence is synthesized)
ctctttcctcagaagcctctgagtctcttccaaacatcccacacacttcacctgagccacctgaacagatttcctgcccggggccctcatggacggttggatcagggccgaagtgatgac

SEQ ID NO: 468848 - DNA, 120 bp, Artificial Sequence
  ENSG00000158941_7 (sequence is synthesized)
tatgactccaagaaacgcaaacagcgggctggtggagagccctggggtgctaagaagccaaggcatgacctgcctccttaccgggtccacctcactccttacactgtggacagccccatc

SEQ ID NO: 468849 - DNA, 120 bp, Artificial Sequence
  ENSG00000158941_8 (sequence is synthesized)
tgtgacttcctagaactccagcgccgttaccgcagcctcctggtcccctcagattttctgtccgtgcatctgagttggctatcagccttccccctgagccagcccttttccctccatcat

SEQ ID NO: 468850 - DNA, 120 bp, Artificial Sequence
  ENSG00000158941_9 (sequence is synthesized)
ccaagccggatccaggtctcttctgaaaaggaggcagctccagacgctggtgctgagcccatcactgcagacagtgaccccgcttatagttcgaaggtactgctgctctcttccccgggg

SEQ ID NO: 468851 - DNA, 120 bp, Artificial Sequence
  ENSG00000158941_10 (sequence is synthesized)
ttggaggaattgtatcgttgttgcatgctctttgtggatgacatggctgagccaagggagacgccagagcatcctctgaagcagattaagtttttgctgggcaggaaagaagaggaggca

SEQ ID NO: 468852 - DNA, 120 bp, Artificial Sequence
  ENSG00000158941_11 (sequence is synthesized)
gtgctggttgggggtgaatggtctccttccctggatggcctcgacccccaggctgacccgcaggtgctggtgcgtaccgccatccgctgtgcgcaggcccagactggcattgatttgagc

SEQ ID NO: 468853 - DNA, 120 bp, Artificial Sequence
  ENSG00000158941_12 (sequence is synthesized)
ggctgtaccaagtggtggcgctttgccgagtttcagtacctgcagccgggacccccccggcggcttcagacagtggtggtgtacctgccggatgtctggaccatcatgcctactttggag

SEQ ID NO: 468854 - DNA, 120 bp, Artificial Sequence
  ENSG00000158941_13 (sequence is synthesized)
gagtgggaggccctgtgccagcagaaagctgcagaggcagctcccccaacccaggaggcacaaggggaaacggagcctactgaacaggcacctgatgccttggagcaagcagcagacact

SEQ ID NO: 468855 - DNA, 120 bp, Artificial Sequence
  ENSG00000158941_14 (sequence is synthesized)
tctagacggaacgcagaaactccagaggccaccacacagcaggaaacggacactgatctcccagaggcccctccaccccccctagaacctgctgtcatcgcacgccctggctgtgtaaac

SEQ ID NO: 468856 - DNA, 120 bp, Artificial Sequence
  ENSG00000158941_15 (sequence is synthesized)
ctgtccctccatgggattgtggaggatcggaggccaaaggaaaggatctcttttgaggtgatggtgctggccgagctgtttctggagatgctccagagggattttggctatagagtttat

SEQ ID NO: 468857 - DNA, 120 bp, Artificial Sequence
  ENSG00000158941_16 (sequence is synthesized)
aagatgctactgagccttcctgaaaaggtcgtgtccccacctgaacctgagaaggaggaggcggccaaggaagaagccaccaaggaggaagaagccatcaaagaggaggtggtcaaggag

SEQ ID NO: 468858 - DNA, 120 bp, Artificial Sequence
  ENSG00000158941_17 (sequence is synthesized)
cccaaggatgaggcacagaatgagggcccggctacagagtcagaggccccgctgaaggaggatgggcttttgcccaaaccactctcttctgggggagaggaagaagaaaaaccccggggc

SEQ ID NO: 468859 - DNA, 120 bp, Artificial Sequence
  ENSG00000158941_18 (sequence is synthesized)
gaggcttctgaggacctgtgtgagatggccctggacccagaactgttgcttctgagggatgatggagaggaggagtttgcaggagcaaagctggaggattcggaggtccggtccgttgcc

SEQ ID NO: 468860 - DNA, 120 bp, Artificial Sequence
  ENSG00000158941_19 (sequence is synthesized)
tcaaaccagtcagagatggagttctcttcacttcaggacatgcccaaggagctggatccctctgctgtgctccccttagactgtctgcttgcttttgtgttctttgatgccaactggtgt

SEQ ID NO: 468861 - DNA, 120 bp, Artificial Sequence
  ENSG00000158941_20 (sequence is synthesized)
gctcagtgcagagcaggccaagcagctggtcagcagggtggtgacccagaacatctgccagtaccggagccttcagtacagccgccaggagggcctggatggtggccttcccgaggaggt

SEQ ID NO: 468862 - DNA, 120 bp, Artificial Sequence
  ENSG00000158941_21 (sequence is synthesized)
gctcttcggaaacctggacctgctgccccctcctgggaaaagcacgaagccaggtgctgcccccacagaacacaaagccttggtgtcccacaatggcagcctgattaacgtggggagcct

SEQ ID NO: 468863 - DNA, 120 bp, Artificial Sequence
  ENSG00000158941_22 (sequence is synthesized)
gctgcagcgcgcggagcagcaggacagcggccggctctacctagagaacaagatccacacactggagctgaagctggaggagagccataaccgtttctcagccactgaagtaaccaataa

SEQ ID NO: 468864 - DNA, 120 bp, Artificial Sequence
  ENSG00000158941_23 (sequence is synthesized)
gacgctggcggcagagatgcaggagctgcgagtccggctggcggaggccgaggagaccgcccggacggcggagcgacagaagagccagctccagcggctgctgcaggagctccgcaggcg

SEQ ID NO: 468865 - DNA, 120 bp, Artificial Sequence
  ENSG00000158941_24 (sequence is synthesized)
tctgacccccctgcagctggagatccagcgggtggtggaaaaggctgacagctgggtggagaaggaggagccggcacctagcaactgacggcctcgcacggaactgccatcctgtgaggg

SEQ ID NO: 468866 - DNA, 120 bp, Artificial Sequence
  ENSG00000158941_25 (sequence is synthesized)
cagcggtggcgcccggcaaagttggagcccttgcggtaccagaaagcagcgagagcgagacctgggagccagggcaggggtggctgaccccatgctcagcctctaggggacggcaggcca

SEQ ID NO: 468867 - DNA, 120 bp, Artificial Sequence
  ENSG00000158941_26 (sequence is synthesized)
tcaggctgggggctgtgctatgtgggatggatgtgtgaggaaccccggttccacttaacaactaaatacaacatcttttgcacccctagaatgtcattttgccctcaaccttggtatttc

SEQ ID NO: 468868 - DNA, 120 bp, Artificial Sequence
  ENSG00000158941_27 (sequence is synthesized)
tcctggggcccttttagtcttgtgctgactttctcctgtcctcttccagtttagaataagacaggggagaaaaaggcttttcgagtgtgggacaaggtctgatgtcagtgaacggaactg

SEQ ID NO: 468869 - DNA, 120 bp, Artificial Sequence
  ENSG00000158941_28 (sequence is synthesized)
aagagcaagacatggagcctggctggggctaagcagccccctcctccggatggcacaggctctgctaggttccggacacaggcttctgggggaagggtctcccttggccatcacgggaat

SEQ ID NO: 468870 - DNA, 120 bp, Artificial Sequence
  ENSG00000158941_29 (sequence is synthesized)
ggagtccatgctagaaagagctcagtgttgggctgggtttgccagtagaacactgcgttccagtcaccccggtcttgccagaagaaaccagcacctctttcccgtggctcctgtgttcag

SEQ ID NO: 468871 - DNA, 120 bp, Artificial Sequence
  ENSG00000158941_30 (sequence is synthesized)
aatgtggtattggctctggcccagccttctcccctgttacccataattcttgcctctttccataatccgtggtttcagtttgactttgtatataaagttggggttttttttttttttttt

SEQ ID NO: 468872 - DNA, 120 bp, Artificial Sequence
  ENSG00000158941_31 (sequence is synthesized)
tggcttgttttttaaataaaccaaagtcaaaaacaaactgagagtgtgtcctccacagctcttcctactctcctaggcttgcccgcgtgccctcccacccagcgcctctgctggaccacg

SEQ ID NO: 468873 - DNA, 120 bp, Artificial Sequence
  ENSG00000158941_32 (sequence is synthesized)
gtgcagttcgctccagaaggtgggccagggccggggaggtgcgcacacacccctggcatgctgggctgcctgctggagggtgctgctgctccgtggagggcagcaggcccaggaaggggt

SEQ ID NO: 468874 - DNA, 120 bp, Artificial Sequence
  ENSG00000158941_33 (sequence is synthesized)
ttcctctgctcgcctaagttacagcacaatactatgtggacgtttcattgaaaattttacttgaaaaaataaaattccagatactcaggtgagacacaaacccactgttcctgctttgag

SEQ ID NO: 468875 - DNA, 120 bp, Artificial Sequence
  ENSG00000158941_34 (sequence is synthesized)
acctgtgaattcttgtgggacagttccactgacagcttgcgttcccgaggtaccagtcctcagtgacctcgggaaccccaaccacttaggtcccaaagccacaagggtgccctttgtctt

SEQ ID NO: 468876 - DNA, 120 bp, Artificial Sequence
  ENSG00000158941_35 (sequence is synthesized)
gctgggaagctggctgagggcctgccagggctggaggaccagctctcccgcacagggttcagggcctctcccagaaaaaagaggttttgaagtgaaaaggcaacgaggggccagagggct

SEQ ID NO: 468877 - DNA, 120 bp, Artificial Sequence
  ENSG00000158941_36 (sequence is synthesized)
ccccaggatgggtcttttggaggtagatttgatgcccacaacgcatgcaaggctaagacccccaacttagccaacgaagcccatggcctcagaagggctgcagcttgctcaggccgtggg

SEQ ID NO: 468878 - DNA, 120 bp, Artificial Sequence
  ENSG00000158941_37 (sequence is synthesized)
ccaggatgcatgctggacggttctccaaataaaaaagccccaagggtttgtctacactgcttacctgctggggctgtgagtggggagacggcggcctgcctagggctcctggtgccaggc

SEQ ID NO: 468879 - DNA, 120 bp, Artificial Sequence
  ENSG00000158941_38 (sequence is synthesized)
tcaggaagagtcattcattgcaaagggccggcaagtgaaccagggccacctctgtccccagcctgtgagaggagcagctagccctgagaagggcaaggatgaatgaggctgaccacgtca

SEQ ID NO: 468880 - DNA, 120 bp, Artificial Sequence
  ENSG00000158941_39 (sequence is synthesized)
caggagtcctccaagagtgacggggattcagtcatcggccacaatggagagggcccggagctcactgagtttggcctcgttctcccgctcccgctgctcatcggagtggcctggctggtc

SEQ ID NO: 468881 - DNA, 120 bp, Artificial Sequence
  ENSG00000158941_40 (sequence is synthesized)
cctcagtcctcccttggtggcctcgccgcggctctgctgggagacccggcgctggcggctgctgaggccggagcggagggcccgggagcgtgggagcaggagggtggcgcgcagccggtt

SEQ ID NO: 468882 - DNA, 120 bp, Artificial Sequence
  ENSG00000158941_41 (sequence is synthesized)
tcgcgtttggtcggccagggagctgccttcccaccagccggtcgaggaaacaacgggtcgggcttccggggagagggcccacacagtctcctcgccggcaccggcctcctccatttttcc

SEQ ID NO: 468883 - DNA, 120 bp, Artificial Sequence
  ENSG00000158941_42 (sequence is synthesized)
gggccttgcgtggagggttttggcggatgtttttgaacgaaggaatgtcatcggggctctctcgagcccctcaccccgccagctactctgggggtggcgtggcatagtgagaggagcgct

SEQ ID NO: 468884 - DNA, 120 bp, Artificial Sequence
  ENSG00000158941_43 (sequence is synthesized)
gcttccggtggcggcggcagcagcggctgtggtggttccgggtgtctttgtccccccggtgtcgctgccctggcccgcaggcacagcttcaacatctcttctgggccctcctcctggttt

SEQ ID NO: 468885 - DNA, 120 bp, Artificial Sequence
  ENSG00000158941_44 (sequence is synthesized)
taagctttccagaggcttccatcattaatattttatttcctttcagtcttctaaagttgtttttgcagtagctgaggcctactgtgtatacaatgttgcagagtgtgctttttgcttaac

SEQ ID NO: 468886 - DNA, 120 bp, Artificial Sequence
  ENSG00000158941_45 (sequence is synthesized)
aggaatgtttattaaaacagtaaatatccattttaatatctttataacattctgtcatatggctgttagcatggattctttttccatttattgaatgtgagggatttcgattgtttccag

SEQ ID NO: 468887 - DNA, 120 bp, Artificial Sequence
  ENSG00000158941_46 (sequence is synthesized)
tgattctcctgccttagcctccccagcagctgggacttcaggcatgcatcactgcatgtggcccaagccactggattctggacaggctgaatcctgggcgatagagccactgagggaact

SEQ ID NO: 468888 - DNA, 120 bp, Artificial Sequence
  ENSG00000158941_47 (sequence is synthesized)
ttcttttttccctttcccagtttgacttttgccatctagagtttgtaaattaagtggtcagatctgatctagcttccttgagaggtgccttacttcaaaagttctcagactgaaaaaaaa

SEQ ID NO: 468889 - DNA, 120 bp, Artificial Sequence
  ENSG00000158941_48 (sequence is synthesized)
agtgtggtgaagggccgtctgccccagctgggtgagaaggtgctggtgaaggctgcatacaacccaggccaggcagtgccctggaatgctgtcaaggtgcaaacgctctccaaccagcag

SEQ ID NO: 468890 - DNA, 120 bp, Artificial Sequence
  ENSG00000158941_49 (sequence is synthesized)
tcctttccctgagctccaaaagtccccagaagggcgcttgcccgtgtcgggagtgaccagagggccagcaggcaccggcttcgtctttccatcgcttgccaggcagtgtgcccctggttg

SEQ ID NO: 468891 - DNA, 120 bp, Artificial Sequence
  ENSG00000158941_50 (sequence is synthesized)
caggttctctgggaattgagcagtcagcagcgtgcagtgggagcttcccagcaggaggcagtccgcagtccgcagtcctcagatcaccttgccaggcccgattctgggtacatcatctgt

SEQ ID NO: 468892 - DNA, 80 bp, Artificial Sequence
  ENSG00000158955_0 (sequence is synthesized)
agctgcgagcttgagcggcgcgaggagatgctagagggcgcagcgccgccagcaccatgcgccccccgcccgcgctggcc

SEQ ID NO: 468893 - DNA, 120 bp, Artificial Sequence
  ENSG00000158955_1 (sequence is synthesized)
cctcctacttcggcctgaccgggcgggaagtcctgacgcccttcccaggattgggcactgcggcagccccggcacagggcggggcccacctgaagcagtgtgacctgctgaagctgtccc

SEQ ID NO: 468894 - DNA, 120 bp, Artificial Sequence
  ENSG00000158955_2 (sequence is synthesized)
ggcggcagaagcagctctgccggagggagcccggcctggctgagaccctgagggatgctgcgcacctcggcctgcttgagtgccagtttcagttccggcatgagcgctggaactgtagcc

SEQ ID NO: 468895 - DNA, 120 bp, Artificial Sequence
  ENSG00000158955_3 (sequence is synthesized)
tggagggcaggatgggcctgctcaagagaggcttcaaagagacagctttcctgtacgcggtgtcctctgccgccctcacccacaccctggcccgggcctgcagcgctgggcgcatggagc

SEQ ID NO: 468896 - DNA, 120 bp, Artificial Sequence
  ENSG00000158955_4 (sequence is synthesized)
gctgcacctgtgatgactctccggggctggagagccggcaggcctggcagtggggcgtgtgcggtgacaacctcaagtacagcaccaagtttctgagcaacttcctggggtccaagagag

SEQ ID NO: 468897 - DNA, 120 bp, Artificial Sequence
  ENSG00000158955_5 (sequence is synthesized)
gaaacaaggacctgcgggcacgggcagacgcccacaatacccacgtgggcatcaaggctgtgaagagtggcctcaggaccacgtgtaagtgccatggcgtatcaggctcctgtgccgtgc

SEQ ID NO: 468898 - DNA, 120 bp, Artificial Sequence
  ENSG00000158955_6 (sequence is synthesized)
gcacctgctggaagcagctctccccgttccgtgagacgggccaggtgctgaaactgcgctatgactcggctgtcaaggtgtccagtgccaccaatgaggccttgggccgcctagagctgt

SEQ ID NO: 468899 - DNA, 120 bp, Artificial Sequence
  ENSG00000158955_7 (sequence is synthesized)
gggcccctgccaggcagggcagcctcaccaaaggcctggccccaaggtctggggacctggtgtacatggaggactcacccagcttctgccggcccagcaagtactcacctggcacagcag

SEQ ID NO: 468900 - DNA, 120 bp, Artificial Sequence
  ENSG00000158955_8 (sequence is synthesized)
gtagggtgtgctcccgggaggccagctgcagcagcctgtgctgcgggcggggctatgacacccagagccgcctggtggccttctcctgccactgccaggtgcagtggtgctgctacgtgg

SEQ ID NO: 468901 - DNA, 120 bp, Artificial Sequence
  ENSG00000158955_9 (sequence is synthesized)
agtgccagcaatgtgtgcaggaggagcttgtgtacacctgcaagcactaggcctactgcccagcaagccagtctggcactgccaggacctcctgtggcacccttcaagctgcccagccgg

SEQ ID NO: 468902 - DNA, 120 bp, Artificial Sequence
  ENSG00000158955_10 (sequence is synthesized)
ccctctgggcagactgtcatcacatgcatgcataaaccggcatgtgtgccaatgcacacgagtgtgccactcaccaccattccttggccagccttttgcctccctcgatactcaacaaag

SEQ ID NO: 468903 - DNA, 120 bp, Artificial Sequence
  ENSG00000158955_11 (sequence is synthesized)
agaagcaaagcctcctcccttaacccaagcatccccaaccttgttgaggacttggagaggagggcagagtgagaaagacatggagggaaataagggagaccaagagcacagcaggactga

SEQ ID NO: 468904 - DNA, 120 bp, Artificial Sequence
  ENSG00000158955_12 (sequence is synthesized)
aattttggacgggagagaggggctattccatcttgcttcctgggatgaatggcttggagccagcatgttcttgggaggtgaactgctgggctaggaatgccaaggcaggcagtgccagct

SEQ ID NO: 468905 - DNA, 120 bp, Artificial Sequence
  ENSG00000158955_13 (sequence is synthesized)
ggaagtgaaggcgggagcctggctgagatgggtcaatcgggtcctgtggccctgctcaggtgcagtgggctccaggtgtcacacacctccaccactcccctggttttgctgtgccagaga

SEQ ID NO: 468906 - DNA, 120 bp, Artificial Sequence
  ENSG00000158955_14 (sequence is synthesized)
tggggagaaagcacaggtggtagaagccatccgttcagagaaaggagagctttctgtgcttgagtggacccgagtgagatctgtgccctggagccctgtgtccttgatttggcttttcaa

SEQ ID NO: 468907 - DNA, 120 bp, Artificial Sequence
  ENSG00000158955_15 (sequence is synthesized)
atatgcctccgctgaggcctcattcttgtctcgagagctgggttatgcacactcacccagccgtgctcaaaactaccaccagtgcaggtaagacaggtgggagaactagccaccaaggcg

SEQ ID NO: 468908 - DNA, 120 bp, Artificial Sequence
  ENSG00000158955_16 (sequence is synthesized)
ggactcagtgcacctgaggttgaacagggagacaacggcccctccctgtgttccctgctggccaaaggaatcttcactcccagcgcagaggaggagggcaacagcttcctggtgcctggc

SEQ ID NO: 468909 - DNA, 120 bp, Artificial Sequence
  ENSG00000158955_17 (sequence is synthesized)
agtgacgtggcgagctcagtttctcagctggctcttgagtgagctttggtgacttcctgtggctggggcctgcctggtctgtgacacccccataccagctgagttcacaatactgaagaa

SEQ ID NO: 468910 - DNA, 120 bp, Artificial Sequence
  ENSG00000158955_18 (sequence is synthesized)
cagctggctcacgagctatgacttgaagttacatttctattcttgtggctgctcatctagttaaggcttttgccctggctggggttataggtgcttgagtccttgctaagcctggctcct

SEQ ID NO: 468911 - DNA, 120 bp, Artificial Sequence
  ENSG00000158955_19 (sequence is synthesized)
gggtagcctccttcagttcctaatggcctctcacttggccctcactttggctcttacttgaggaggagacgtgactttgataatttcctcagatcctgtggacattttcagcagcacctg

SEQ ID NO: 468912 - DNA, 120 bp, Artificial Sequence
  ENSG00000158955_20 (sequence is synthesized)
tggatgcacagcccctggaccaggctgggggttcctgttgcacatgcctctcttgttcaggatgaagaccttgcaggggtccccttgctggaggcattgtacttccccagagtggggccc

SEQ ID NO: 468913 - DNA, 120 bp, Artificial Sequence
  ENSG00000158955_21 (sequence is synthesized)
gatgccacccaggaggaagtgacttctttcgggaagcccttggccactttgctggccctgccacgcccatctgtcagcttcctttctccctaaacctagagttgctgacccttcaccaac

SEQ ID NO: 468914 - DNA, 120 bp, Artificial Sequence
  ENSG00000158955_22 (sequence is synthesized)
acaggaaatttcagaatcagctgaatgctcagaaacctcgcctgtgccagctccaggacaaaggcccgctgactgtgccctggccaactccctgagacctccaagggcgaggaggagctg

SEQ ID NO: 468915 - DNA, 120 bp, Artificial Sequence
  ENSG00000158955_23 (sequence is synthesized)
cccagtctccagtggatcagggcagtctgctggatgctggaaggatttttgactgcagaggcccggctgagaagccaaactgacctgagcccctctcgttaaaatgacattgctgaccca

SEQ ID NO: 468916 - DNA, 120 bp, Artificial Sequence
  ENSG00000158955_24 (sequence is synthesized)
agcacctggcccacaccttggcagcaggagaaaaatggggagagggctggttttctcctttcttccacttccccacagcatggagattttctctgccttcccaatccatcttgctcctcc

SEQ ID NO: 468917 - DNA, 120 bp, Artificial Sequence
  ENSG00000158955_25 (sequence is synthesized)
gagaccccaactctgcctccacccaggctcagtgctgggcgtaaggcagcagggacctcactggcagagcagggggcctgggagcaacgtggaggccagagcaccctgatccaccaacat

SEQ ID NO: 468918 - DNA, 120 bp, Artificial Sequence
  ENSG00000158955_26 (sequence is synthesized)
gccacctgcattctgacttcatggctggcagtgccagggtcgtgggagggcaaagggcaggctctaaggcatctaggcagtggctggctgctaacatggacaccccaagtcaatggcaca

SEQ ID NO: 468919 - DNA, 120 bp, Artificial Sequence
  ENSG00000158955_27 (sequence is synthesized)
gtgcaggttctgagggctccttggcttgtggggtcttctctgtctgtctctctccctctcttcttccttgctctcatccctttcttttccagttacccctgaagacccacctcggccctc

SEQ ID NO: 468920 - DNA, 120 bp, Artificial Sequence
  ENSG00000158955_28 (sequence is synthesized)
ttggggcccctggggactagagtgaccactgacccctcattctacagctttaagggaaatgctcacagggtatttttgtctacctcaaatatatagtttttagagcaaaggagaataatt

SEQ ID NO: 468921 - DNA, 120 bp, Artificial Sequence
  ENSG00000158955_29 (sequence is synthesized)
tatatagctaagatatatgagaaagtatttatattatttatatagttgctatatttcacagacagcacaggtggggtttgtgtattttcccggaaaccctctgtctggggagatacagcc

SEQ ID NO: 468922 - DNA, 120 bp, Artificial Sequence
  ENSG00000158955_30 (sequence is synthesized)
tgacctgaccgggtcccccactgagcaggaggccgggtcgctgggaaggaggacaaacctgtattccatgactgggtctgtctcggagctggtaagcacatgtccgctctgtgatgagcc

SEQ ID NO: 468923 - DNA, 120 bp, Artificial Sequence
  ENSG00000158955_31 (sequence is synthesized)
ctggtgggctccatccagaccctccttgtgatgtttttgtagattttctgcccttctgggtccaggcccccttcttctgctctggcaaaagtgtcttactcataatgataatgacaacga

SEQ ID NO: 468924 - DNA, 120 bp, Artificial Sequence
  ENSG00000158955_32 (sequence is synthesized)
gaattcccacacctggcatttgtaaagcactttgctatttagaaacaaaaacttttacccctttcatctcacttgatttctccgttatctctgtgaggtaggtggggccacattactgtg

SEQ ID NO: 468925 - DNA, 120 bp, Artificial Sequence
  ENSG00000158955_33 (sequence is synthesized)
gccattttatagatgaggtccagagatggagagctgtgctcaaagtcacacctaagagacttgttcaatgaatatttactgaacatctccatagaccaggcactacgggctgacctgctc

SEQ ID NO: 468926 - DNA, 120 bp, Artificial Sequence
  ENSG00000158955_34 (sequence is synthesized)
tgagcccaggagccccaaagcctggataccactgtgagcccaagaactcagggaagcagttccttcccaggctgtgatcccagccttttggatctggatggcatgttggcacttccccca

SEQ ID NO: 468927 - DNA, 120 bp, Artificial Sequence
  ENSG00000158955_35 (sequence is synthesized)
agtggagtcccatgtctcaggggctttggctgcctgagaaggctggagagaccaggaacccatggaggccactccaaggggtccttctgcccacactgcccaagaagcttgggctacacc

SEQ ID NO: 468928 - DNA, 120 bp, Artificial Sequence
  ENSG00000158955_36 (sequence is synthesized)
actgggcccctcccaacctacagatgaattttgattgctctcatttgtgttttgcttgtaaaaatgaattgttttccactggatttctggctgcttttgcaaaagtcagctgcgctggca

SEQ ID NO: 468929 - DNA, 120 bp, Artificial Sequence
  ENSG00000158955_37 (sequence is synthesized)
gactgggcctgcatgtcctcctgcaggcagctagagtgagggagtctaatggacaggatgccccaagtgcccccgttgctcatggatgcccctgcctgcctctcatgagcacatagtcct

SEQ ID NO: 468930 - DNA, 120 bp, Artificial Sequence
  ENSG00000158955_38 (sequence is synthesized)
gtcccctggtctagataagcccagctttcctggtacccttcatcacctggcagacagacagccccatgccaaccctggacattacttgcttttgaacctttcctttctcaacaaccatga

SEQ ID NO: 468931 - DNA, 120 bp, Artificial Sequence
  ENSG00000158955_39 (sequence is synthesized)
acttcaaatgctttctgtctcaggacactttagaataacaatggaagccatcacttattgagcaccccttatgtccatttattcaaccaatgattatttagggatctcttattgagcacc

SEQ ID NO: 468932 - DNA, 120 bp, Artificial Sequence
  ENSG00000158955_40 (sequence is synthesized)
aggcagcatcctgggtgcttggtgcagcaaggaacaggaccaagtctctgcctcatggggctgacatcctagtgggtgagaaagacaataaaccaataaatgacatgccagttatttgca

SEQ ID NO: 468933 - DNA, 120 bp, Artificial Sequence
  ENSG00000158955_41 (sequence is synthesized)
agcaaaccgggaagcagcatgtgcgtggaagctgggcctgagccctgacgcttcagctgagctccctgggtgatggctccttccacaagttctaacgtcccactgaaagcaagctgcaat

SEQ ID NO: 468934 - DNA, 120 bp, Artificial Sequence
  ENSG00000158955_42 (sequence is synthesized)
ttctgttgcttcttgtatcaattgcatgaaaggacgggcagtttcttttgatcctctggcatgccaaggcctgaatgccagtcctgggagccttaccagccctctaagaagaatcagaag

SEQ ID NO: 468935 - DNA, 87 bp, Artificial Sequence
  ENSG00000158955_43 (sequence is synthesized)
ttctgccggcccagcaagtactcacctggcacagcaggttggagtgcagtggcaagatctcagctcatcacgtctcagctgcctgag

SEQ ID NO: 468936 - DNA, 120 bp, Artificial Sequence
  ENSG00000158955_44 (sequence is synthesized)
gggattacaggtatgagccactgtgcccggccgccttagcattttgtgtatgttttgagtgacagccatctgtcaatattggcatcttttgttttattggatgaatgaatgaacaaatga

SEQ ID NO: 468937 - DNA, 120 bp, Artificial Sequence
  ENSG00000158955_45 (sequence is synthesized)
ggcatcttttgttttattggatgaatgaatgaacaaatgaatttataaatcttgttctccatactgtttacccatcctcatttccctcacttggcagtgtcttgccatagcaggcttcct

SEQ ID NO: 468938 - DNA, 120 bp, Artificial Sequence
  ENSG00000158955_46 (sequence is synthesized)
ggtgtagctggcaccacatccctccctgacacacggcctccttattgcccctgctacttgcctttttctctcctccctttccttcccttcattccccctggcttccccttcccaactctc

SEQ ID NO: 468939 - DNA, 120 bp, Artificial Sequence
  ENSG00000158955_47 (sequence is synthesized)
agaatccctggctgcctcaaccacaagaacaaagctgtgcagaagcctgaacctggagcttctgcaagatgaggtggggaatgagctaacccagctggaaagcagcctgctgatccctgg

SEQ ID NO: 468940 - DNA, 120 bp, Artificial Sequence
  ENSG00000158955_48 (sequence is synthesized)
gagagacggcgcttgggccaacccaccctccccaaggtggtcccctgcctcagctccacccgcttccccagatgaacttctttctctccctccagcgcttcagaggatgcacagctgtgt

SEQ ID NO: 468941 - DNA, 120 bp, Artificial Sequence
  ENSG00000158955_49 (sequence is synthesized)
gtacttgaccctgagcctgggctagtgctggggacatagccagtctggctgatacccatatcagtacagaaagctgtcctcacccacttcatgcactagttgcattggtatgaagcatta

SEQ ID NO: 468942 - DNA, 120 bp, Artificial Sequence
  ENSG00000158955_50 (sequence is synthesized)
gctttataactatcccatttactgcaggcataaacctatatcaattggtggggatggaggttaaatgagagaagacatcaaagatgcatagaactattgggcccctttcaattaataaat

SEQ ID NO: 468943 - DNA, 120 bp, Artificial Sequence
  ENSG00000158955_51 (sequence is synthesized)
aaaatttgtaggaggccattagtttgtactgtgctcctgtaatggacccaacagaccaaacaaatatggagtcactcatgctaaatgcaattaacttgggagtatactcctaagttgcaa

SEQ ID NO: 468944 - DNA, 120 bp, Artificial Sequence
  ENSG00000158955_52 (sequence is synthesized)
aaagtggtaacaaatagctgagttttggggcagttacagcagctgagcatctgtcaatgtaggtggccaggtgattcaattaaggatgctgtaaccaattaagctgtatctacacctcac

SEQ ID NO: 468945 - DNA, 120 bp, Artificial Sequence
  ENSG00000158955_53 (sequence is synthesized)
ttctgttttctatctacaaatactgcgtgatcatgttgctggttggagttctttgaataagctgtggttcggagggatgcccaattctagaatcatgaataaaagcctattaagatcttt

SEQ ID NO: 468946 - DNA, 120 bp, Artificial Sequence
  ENSG00000158966_0 (sequence is synthesized)
agccgggaagtgcacagagccggagcgcagcgtggtggcaccagacgcctccctttccccaccgcttgctttctttctttcagttgtgtgggtttgtgaagcctcccctttccctcctcg

SEQ ID NO: 468947 - DNA, 120 bp, Artificial Sequence
  ENSG00000158966_1 (sequence is synthesized)
ctcgggtggctgccccagtctcgcagcccggccgccgctcctcttccccgggggccgccgtcagtcctcgccgccgcctgctcgctgcgctgggactcgcaggaagcgagagccgcgcgg

SEQ ID NO: 468948 - DNA, 120 bp, Artificial Sequence
  ENSG00000158966_2 (sequence is synthesized)
agcgagagccgcgcggctcggctcgggctccgactccgactccgattccgactgtcagccccggggcccgcgcaccccggcctgcgggcgcccctgctctcggagacgccctctgcgccg

SEQ ID NO: 468949 - DNA, 120 bp, Artificial Sequence
  ENSG00000158966_3 (sequence is synthesized)
tcctacccccaccgccgcggagccccgcgatggtggccgcccgcgctcccgcgctgtagccgggcgccccctaagtttgggagccttcgccaccgcggcgcggagcagagcctgcaacag

SEQ ID NO: 468950 - DNA, 120 bp, Artificial Sequence
  ENSG00000158966_4 (sequence is synthesized)
gccaccgcggcgcggagcagagcctgcaacagaggaagaaacttttgcggggtgcgccgcgcttttgcggggggcacctcccgcggcccgcttccccgcgcccggagcccgtcggcgggg

SEQ ID NO: 468951 - DNA, 120 bp, Artificial Sequence
  ENSG00000158966_5 (sequence is synthesized)
cccgccagccggaggaagaggagacggccgtggcccgggcgcggcggccgcccctctggctgctctgcctggtcgcgtgctggctcctgggcgccggggccgaagccgacttctccatcc

SEQ ID NO: 468952 - DNA, 120 bp, Artificial Sequence
  ENSG00000158966_6 (sequence is synthesized)
cgaagccgacttctccatcctggacgaggcgcaagtgctggcgagccagatgcggaggctggcggccgaggagctgggggtcgtcaccatgcagcggatattcaactcctttgtttacac

SEQ ID NO: 468953 - DNA, 120 bp, Artificial Sequence
  ENSG00000158966_7 (sequence is synthesized)
tgagaaaatctcaaatggagaaagtgaagtacagcagctagccaaaaaaatccgagagaagttcaaccgttacttggatgtggtcaatcggaacaagcaagttgtagaagcatcctatac

SEQ ID NO: 468954 - DNA, 120 bp, Artificial Sequence
  ENSG00000158966_8 (sequence is synthesized)
ggctcacctaacctctcccctaactgcaattcaagactgctgtactatcccaccttccatgatggaattcgatgggaactttaataccaatgtgtctagaacaattagttgtgatcgact

SEQ ID NO: 468955 - DNA, 120 bp, Artificial Sequence
  ENSG00000158966_9 (sequence is synthesized)
ttctactactgttaatagccgggccttcaatccaggacgagacttaaattcagttcttgcagacaacctgaaatccaaccctggaattaagtggcaatatttcagttcagaagaaggaat

SEQ ID NO: 468956 - DNA, 120 bp, Artificial Sequence
  ENSG00000158966_10 (sequence is synthesized)
tttcactgttttcccagcacacaagttccggtgtaagggcagctacgaacaccgcagtagacccatctacgtctctacagtccggccgcagtcaaagcacatagtagtgattctggacca

SEQ ID NO: 468957 - DNA, 120 bp, Artificial Sequence
  ENSG00000158966_11 (sequence is synthesized)
cggggcttcagtcacagacactcagcttcagattgccaaggacgctgctcaggtcatcctcagcgccatcgatgaacatgacaagatttctgtgttaactgtggcagataccgtccggac

SEQ ID NO: 468958 - DNA, 120 bp, Artificial Sequence
  ENSG00000158966_12 (sequence is synthesized)
ttgctcactagaccagtgctataagaccttcttgtctccagccaccagtgagacaaaaaggaaaatgtccacctttgttagcagcgtgaagtcttcagacagtcctacccagcacgcagt

SEQ ID NO: 468959 - DNA, 120 bp, Artificial Sequence
  ENSG00000158966_13 (sequence is synthesized)
gggattccaaaaggcatttcagctgattcgaagtacaaacaataacacaaagttccaagcaaatacagacatggtcatcatttacctgtcagctggcattacatcaaaggactcttcgga

SEQ ID NO: 468960 - DNA, 120 bp, Artificial Sequence
  ENSG00000158966_14 (sequence is synthesized)
agaagataaaaaagcgactctccaagtcatcaatgaagaaaatagctttctaaacaactctgtaatgattctcacctatgccctcatgaacgatggggtgactggtttgaaagagctggc

SEQ ID NO: 468961 - DNA, 120 bp, Artificial Sequence
  ENSG00000158966_15 (sequence is synthesized)
ttttctgagggatctagctgaacagaattcagggaagtacggtgtgccagaccggatggccttgcctgtgattaagggcagcatgatggtgctgaatcagttgagcaacctggagaccac

SEQ ID NO: 468962 - DNA, 120 bp, Artificial Sequence
  ENSG00000158966_16 (sequence is synthesized)
agtgggcaggttctacacaaaccttcccaaccggatgattgatgaagccgtcttcagcctgcccttctctgatgagatgggagatggtttgataatgactgtgagtaaaccctgttattt

SEQ ID NO: 468963 - DNA, 120 bp, Artificial Sequence
  ENSG00000158966_17 (sequence is synthesized)
tggaaacctacttctgggaattgtaggtgtggacgtgaatctggcttacattcttgaagacgtgacgtattaccaagactctttggcttcctatacttttctcatagacgacaaaggata

SEQ ID NO: 468964 - DNA, 120 bp, Artificial Sequence
  ENSG00000158966_18 (sequence is synthesized)
tacacttatgcacccatctcttaccaggccatatttattgtcagagcccccacttcatactgacatcatacattatgaaaatattccaaaatttgaattagttcggcaaaatatcctaag

SEQ ID NO: 468965 - DNA, 120 bp, Artificial Sequence
  ENSG00000158966_19 (sequence is synthesized)
cctccctctgggcagccagattatcgcagtccctgtgaactcatccctgtcttggcacataaacaagctgagagaaactggaaaggaagcctacaatgttagctatgcctggaagatggt

SEQ ID NO: 468966 - DNA, 120 bp, Artificial Sequence
  ENSG00000158966_20 (sequence is synthesized)
acaagacacttcctttattctgtgtattgtggtgatacaaccagaaatacctgtgaaacaactgaagaacctcaacactgttcccagcagcaagctgctgtaccaccggctggatctcct

SEQ ID NO: 468967 - DNA, 120 bp, Artificial Sequence
  ENSG00000158966_21 (sequence is synthesized)
tggccagcccagtgcttgcctccacttcaaacagctggcaaccctagaaagtcccaccatcatgctgtctgctggcagcttttcctccccctatgagcacctcagccagccagagacaaa

SEQ ID NO: 468968 - DNA, 120 bp, Artificial Sequence
  ENSG00000158966_22 (sequence is synthesized)
gcgcatggtagagcactacaccgcctatctcagcgacaacacccgcctcattgctaacccgggcctcaaattctctgtcagaaatgaagtaatggctaccagccacgtcacagatgaatg

SEQ ID NO: 468969 - DNA, 120 bp, Artificial Sequence
  ENSG00000158966_23 (sequence is synthesized)
gatgacacaaatggaaatgagtagcctgaacacttacattgtccgccgttacatagcaacacccaatggcgtcctcagaatttatcctggttccctcatggacaaagcatttgatcccac

SEQ ID NO: 468970 - DNA, 120 bp, Artificial Sequence
  ENSG00000158966_24 (sequence is synthesized)
ctggtccttacttagatgttggaggagctggttatgttgtgacaatcagtcacacaattcattcatccagtacacagctgtcttctgggcacactgtggctgtgatgggcattgacttca

SEQ ID NO: 468971 - DNA, 120 bp, Artificial Sequence
  ENSG00000158966_25 (sequence is synthesized)
cactcagatacttctacaaagttctgatggacctattacctgtctgtaaccaagatggtggcaacaaaataaggtgcttcataatggaggacaggggttatctggtggcgcacccgactc

SEQ ID NO: 468972 - DNA, 120 bp, Artificial Sequence
  ENSG00000158966_26 (sequence is synthesized)
tcatcgaccccaaaggacatgcacctgtggagcagcagcacatcacccacaaggagcccctggtagcaaatgatatcctcaaccaccccaactttgtaaagaaaaacctgtgcaacagct

SEQ ID NO: 468973 - DNA, 120 bp, Artificial Sequence
  ENSG00000158966_27 (sequence is synthesized)
tcagtgacagaacggtccagaggttttataaattcaacaccagccttgcgggggatttgacgaaccttgtgcatggcagccactgttccaaatacagattagcaaggatcccaggaacca

SEQ ID NO: 468974 - DNA, 120 bp, Artificial Sequence
  ENSG00000158966_28 (sequence is synthesized)
acgcgtttgttggcattgtcaacgaaacctgcgactctcttgccttctgtgcctgcagcatggtggaccgactctgtctcaactgtcaccgaatggaacaaaatgaatgtgaatgtcctt

SEQ ID NO: 468975 - DNA, 120 bp, Artificial Sequence
  ENSG00000158966_29 (sequence is synthesized)
gtgagtgccctctagaggtcaatgagtgcactggcaacctcaccaatgcagagaaccgaaaccccagctgcgaggtccaccaggagccggtgacatacacagctattgaccctggcctgc

SEQ ID NO: 468976 - DNA, 120 bp, Artificial Sequence
  ENSG00000158966_30 (sequence is synthesized)
aagatgctcttcaccagtgtgtcaacagcaggtgcagtcagaggctggaaagtggggactgttttggggtgctggattgtgaatggtgcatggtggacagtgatggaaagactcacctgg

SEQ ID NO: 468977 - DNA, 120 bp, Artificial Sequence
  ENSG00000158966_31 (sequence is synthesized)
acaaaccctactgtgccccccagaaagaatgcttcggggggattgtgggagccaaaagtccctacgttgatgacatgggagcaataggtgatgaggtgatcacattaaacatgattaaaa

SEQ ID NO: 468978 - DNA, 120 bp, Artificial Sequence
  ENSG00000158966_32 (sequence is synthesized)
gcgcccctgtgggtcctgtggctggagggatcatgggatgcatcatggtcttggtcctggcggtgtatgcctaccgccaccagattcatcgccggagccatcagcatatgtctcctcttg

SEQ ID NO: 468979 - DNA, 120 bp, Artificial Sequence
  ENSG00000158966_33 (sequence is synthesized)
ctgcccaagaaatgtcagtgcgtatgtccaacctggagaatgacagagatgaaagggacgacgacagccacgaagacagaggcatcatcagcaacactcggtttatagctgcggtcatcg

SEQ ID NO: 468980 - DNA, 120 bp, Artificial Sequence
  ENSG00000158966_34 (sequence is synthesized)
aacgacatgcacacagtccagaaagaaggcgccgctactggggtcgatcaggaacagaaagtgatcatggttacagcaccatgagcccacaggaggacagtgaaaatcctccatgcaaca

SEQ ID NO: 468981 - DNA, 120 bp, Artificial Sequence
  ENSG00000158966_35 (sequence is synthesized)
atgaccccttgtcagccggggtcgatgtgggaaaccatgatgaggacttagacctggataccccccctcagactgctgccctactaagtcacaagttccaccactaccggtcacaccacc

SEQ ID NO: 468982 - DNA, 120 bp, Artificial Sequence
  ENSG00000158966_36 (sequence is synthesized)
ctacacttcatcatagccaccacttacaggcggccgtcacggtacacactgtcgatgcagaatgctaacaatctcctcacctccacgccaagatgagatctgggagctacagaatgttct

SEQ ID NO: 468983 - DNA, 120 bp, Artificial Sequence
  ENSG00000158966_37 (sequence is synthesized)
ggaaagaaaaagaaccggcttaaaacccacagcaagagacctcccttgtgtttgtgctttgtgcagagttgtttgagtcatttcctgcctgtcgacatggttaaaaacgagagaaacaac

SEQ ID NO: 468984 - DNA, 120 bp, Artificial Sequence
  ENSG00000158966_38 (sequence is synthesized)
aacacagtcacatttgtgaagatgtgaggctggttctgaaatggaggggaaataagcctgatgaacagacctgccataacactaatggaaggtaacagaaggcgaacctccaaacacaga

SEQ ID NO: 468985 - DNA, 120 bp, Artificial Sequence
  ENSG00000158966_39 (sequence is synthesized)
gacggaacctgcaagtgaagctgagccagaggaatgttccaaagagccagaagcattcagctctccttaactggaagagagaaaaatctgctcacccagagactggaatgtggcacatgc

SEQ ID NO: 468986 - DNA, 120 bp, Artificial Sequence
  ENSG00000158966_40 (sequence is synthesized)
agatacaaatgtgtgcattgaagatttcgctttgtttcttagcggtacctggataccacagttgctgtatggaactcatgttatgctctaaacgatgcatctcagaatttctaagtaaag

SEQ ID NO: 468987 - DNA, 120 bp, Artificial Sequence
  ENSG00000158966_41 (sequence is synthesized)
gattatttttctactatttattgaactttcaaacattctcaaactttggggaaaaggaaaggaaacacaggagaagttttcagcagttgccccgagctgttttgtgtgtaatgaagtggt

SEQ ID NO: 468988 - DNA, 120 bp, Artificial Sequence
  ENSG00000158966_42 (sequence is synthesized)
tctttgattaaggagctctatttcttatttaactgatatcccactgccccactccacaaaataggaaaatgaagaaatctttctctctgacttgtttacatcatttcacggaaacacatc

SEQ ID NO: 468989 - DNA, 120 bp, Artificial Sequence
  ENSG00000158966_43 (sequence is synthesized)
tttgtttgtaatgcagtattctttctctgtgtttgacagagatggggaggggcagaggaatttaagaggttttaaaagaaatgttatgtttcttatgacttgtttccactcctcgtacaa

SEQ ID NO: 468990 - DNA, 120 bp, Artificial Sequence
  ENSG00000158966_44 (sequence is synthesized)
tgctattcttaggtttctacgaaacctaatgttagaaccgcatcctttcagctaagggagggttggatttattttccttgttttagagactacaaatttttaaatatcccattttgactg

SEQ ID NO: 468991 - DNA, 120 bp, Artificial Sequence
  ENSG00000158966_45 (sequence is synthesized)
agaatattgacatataagggaagaagttttctaaattgtgaaagtctggttcttaattaaagaattttttttttaatatcacggttaaaagctgctgccagttagccaagacattatcca

SEQ ID NO: 468992 - DNA, 120 bp, Artificial Sequence
  ENSG00000158966_46 (sequence is synthesized)
ccaaattgctttgtgatttatacagggattaatcaaatctggctactataacatggggcattgtaactttaaagtagtgttttaattacagtgatgtattttagactcacattttgtgat

SEQ ID NO: 468993 - DNA, 120 bp, Artificial Sequence
  ENSG00000158966_47 (sequence is synthesized)
tcaaatatgttataaaggcattcttgcaccatggtaaagaatgtgtgtggtaaatctccgtttatatgtagttggaaaaaattcactgaataatgttttaatgatagggtattatgatac

SEQ ID NO: 468994 - DNA, 120 bp, Artificial Sequence
  ENSG00000158966_48 (sequence is synthesized)
aatgtaaaaaacaattggttcttcagcagtacagaaagtaaactatatatgtgctatcaggaaaccccttcatactgtgtataaaattgcaatctagtgaaataaaccgtatgcaatgga

SEQ ID NO: 468995 - DNA, 120 bp, Artificial Sequence
  ENSG00000158966_49 (sequence is synthesized)
aagctttagggttagtgtgtatatatgtgtatattaatgactcgctataggatttttcttcttaaactcagaaagcctaggtagggtgaacaattgagtgatcacgcatctgctgactgt

SEQ ID NO: 468996 - DNA, 120 bp, Artificial Sequence
  ENSG00000158966_50 (sequence is synthesized)
atttctgcaagcttttattttcaccaagtttggttgcatccatctgctgtggaaagatttttaaaaagtaattcggcttggcttctctgcaacagagctttgggaacactgccagcagcc

SEQ ID NO: 468997 - DNA, 120 bp, Artificial Sequence
  ENSG00000158966_51 (sequence is synthesized)
cccctcgctgttctgcccctttgtcttccacgcctgccccttcaactcctcttgccctgcaaaccccgggtcgccacctccacatcccttccacttctacctgcctgccttggcctgcat

SEQ ID NO: 468998 - DNA, 120 bp, Artificial Sequence
  ENSG00000158966_52 (sequence is synthesized)
tttattttcaaccaaggttgaaatggtagccccacgcaaaatccgatggtgtgtggaggaactgcccagtcattgcagtctgcacgccttcttaagtgccaggtgcgagcaaggccgacc

SEQ ID NO: 468999 - DNA, 120 bp, Artificial Sequence
  ENSG00000158966_53 (sequence is synthesized)
aggaactgccgatgggcttcacctgtcagactggactgccacctgccacacattcattgaacttttaataagcactgccgctgtgcttggcgttttgctgggctccagaaataaaaaatt

SEQ ID NO: 469000 - DNA, 120 bp, Artificial Sequence
  ENSG00000158966_54 (sequence is synthesized)
cagagaggccaaagttcttcagggatgcagacaggtgatagaaccatcatttattgagcacttgctaagtgctaaatactcttacctgcgttatcttgtgtaatcctcacaaccacactc

SEQ ID NO: 469001 - DNA, 120 bp, Artificial Sequence
  ENSG00000158966_55 (sequence is synthesized)
agataccatggagacaaggccaaaggggttaggaaacttttctctagtcttttttggacagcctcagtaagggtagtgtgggatacagaatcaaagagcctcatcttttgagatggaaaa

SEQ ID NO: 469002 - DNA, 120 bp, Artificial Sequence
  ENSG00000158985_0 (sequence is synthesized)
gagcgcagctgcaggcgttggggcggcaggagccgcggagccggcgctgagaggggctgcggccggagcgggcggctgagacaaaggcgacgatagggccagatttgagtgtgtgaattt

SEQ ID NO: 469003 - DNA, 120 bp, Artificial Sequence
  ENSG00000158985_1 (sequence is synthesized)
ttgagtgaaacctggaacccaaatgagaagaaatctgcaaggaataactactgacagtgaatctgcggtcatctgtatgcataatatggaatgttcttaacccagaagtagctgaatgtg

SEQ ID NO: 469004 - DNA, 120 bp, Artificial Sequence
  ENSG00000158985_2 (sequence is synthesized)
ttactccattgctgaggagtgactatctgttatagtccctgggtcaagacaacaatttttataccttcgtcgtggttcagaaaggagtctctgtagaaccagaagcaaagaaaggaaaca

SEQ ID NO: 469005 - DNA, 120 bp, Artificial Sequence
  ENSG00000158985_3 (sequence is synthesized)
atccaaatttttctttattaaatcgactgtgtaagatacttgacttccaggaacaaaaacacggtgaaataataaaatttcatcttggcatcactggacatcatcgtattgaggagcgta

SEQ ID NO: 469006 - DNA, 120 bp, Artificial Sequence
  ENSG00000158985_4 (sequence is synthesized)
tttttggaacttcccgagttgagatttggaaccttcattggtgctcatttactgtggactgtaagcatgagtgaattctggttgtgtttcaactgctgtattgcagaacagcctcagcct

SEQ ID NO: 469007 - DNA, 120 bp, Artificial Sequence
  ENSG00000158985_5 (sequence is synthesized)
aaaaggcgacggcggattgacagaagtatgattggagagcccacaaactttgtgcatacagctcatgttggatcaggagacctgttcagtggaatgaattcagttagctccattcagaac

SEQ ID NO: 469008 - DNA, 120 bp, Artificial Sequence
  ENSG00000158985_6 (sequence is synthesized)
caaatgcagtccaagggaggttatggaggtggaatgcctgccaatgtccagatgcagctcgtggatacgaaggcgggatagccctggtcctttctccaaagtgtgatggcaccttgtcca

SEQ ID NO: 469009 - DNA, 120 bp, Artificial Sequence
  ENSG00000158985_7 (sequence is synthesized)
ccctgtcgtgattattccagtgagatgttactgttctgctctgaagaagatactgtcagacgaatcctgcatttccttcagctggcatgcatgcctttggactcatggacagagttcttt

SEQ ID NO: 469010 - DNA, 120 bp, Artificial Sequence
  ENSG00000158985_8 (sequence is synthesized)
ggattgtcactgaattttcaatgtttaatcagtatggatctgatcttcgcatgatcttttttgtgaatgctaacaccattttgcagttttttttttctattttaaacatttttcttttca

SEQ ID NO: 469011 - DNA, 120 bp, Artificial Sequence
  ENSG00000158985_9 (sequence is synthesized)
ctgccgaccccctgccttacgattttattggaaagcaaggacctgctattatttgttaatttgccatcatttatgtatattttggaaggtatgagacccacaagcacaatgatcattttt

SEQ ID NO: 469012 - DNA, 120 bp, Artificial Sequence
  ENSG00000158985_10 (sequence is synthesized)
atttgtttgtttgtttgaaacttcagcagaatagatatctgcatgctttatgaagttgttgcttcggtaagagcccatgggatgccagaaattaacatttctttgctgccatgggctgat

SEQ ID NO: 469013 - DNA, 120 bp, Artificial Sequence
  ENSG00000158985_11 (sequence is synthesized)
gatgctgctattagataaagtttagctgtggcaccaagtcacatcattttcatagaaaaagattacttgtagcttattttagaagtatgaccttttggtctgtttgattgattgattaga

SEQ ID NO: 469014 - DNA, 120 bp, Artificial Sequence
  ENSG00000158985_12 (sequence is synthesized)
attgcaataaaagaaaagcttgcattcataaggcattcattctgttgtaaatgttcaatatatttattttgagagcaaggacctgtggttgtaaacaggtgtggttacaggtgtggttat

SEQ ID NO: 469015 - DNA, 120 bp, Artificial Sequence
  ENSG00000158985_13 (sequence is synthesized)
gtatctgagtgttgcggtcatactctcctccagtccaatcctgagcatcttcatcttattaattagctgttcgtttctttgtgcactcattcttttatttttacttctttttaatgttat

SEQ ID NO: 469016 - DNA, 120 bp, Artificial Sequence
  ENSG00000158985_14 (sequence is synthesized)
catcagttgccaagagcaacatacataccgacctggctgaattattgccagtgaaaacaacctgtacgaagcctttgctcaggttctaaaatatgtttgtccttgcacgaattttgtata

SEQ ID NO: 469017 - DNA, 120 bp, Artificial Sequence
  ENSG00000158985_15 (sequence is synthesized)
tttcaaatatttctgtaaaggtttcttcttttctgttagagtgtggtgttaagccagagtcagtggtttgtgttctcattaaaatgtttgtttaaatcctatgtccaattcaagcctatc

SEQ ID NO: 469018 - DNA, 120 bp, Artificial Sequence
  ENSG00000158985_16 (sequence is synthesized)
taactacatttggtaggattaacatttcatataacaaatggggcttaattaaaaactttaacttggaataaaggaacagggatcactttatcttctgccttcatttaccttagtccaaga

SEQ ID NO: 469019 - DNA, 120 bp, Artificial Sequence
  ENSG00000158985_17 (sequence is synthesized)
ttcttgcaaaacaggcaactgaacaaacattaggtttatgtaggtaaaatgtgaaagcatttctcctccactttttaaaatttaatttacccagtacagcggggcaccagattacttgat

SEQ ID NO: 469020 - DNA, 120 bp, Artificial Sequence
  ENSG00000158985_18 (sequence is synthesized)
ctttgtattttgcagttttgagcctttgtgtcaatcccaagcacagagaggatctgccaaggaaaaacatttgcatcttcggagtagacattttgcagtttgtttaataacaacttctaa

SEQ ID NO: 469021 - DNA, 120 bp, Artificial Sequence
  ENSG00000158985_19 (sequence is synthesized)
agtaagttgaattcatccattgtcactgattcaccaagtggatgttgcattgtggaatttgcctgagtactgttgtcattctgctcagccaggcacggtcagtttcttggccagggacat

SEQ ID NO: 469022 - DNA, 120 bp, Artificial Sequence
  ENSG00000158985_20 (sequence is synthesized)
tgctatgtgctgtgtgcaagctctttagaagagagattggattttcttggcattatcagcactcatgctatttagtctacttctattttgactgactctttaaattagtacaatttttct

SEQ ID NO: 469023 - DNA, 120 bp, Artificial Sequence
  ENSG00000158985_21 (sequence is synthesized)
tacaatttttctacttgtcatataactcctggaacaatagtacgggaagccgtgatccttttccctgactcatgattttagtctttttccaaatcgctgttttttttttttttttttttt

SEQ ID NO: 469024 - DNA, 120 bp, Artificial Sequence
  ENSG00000158985_22 (sequence is synthesized)
caacgaccagcatgtgttggagcagatctccatggtaagccaaaagtggacttgtcagcctataactactctgcagctgccactaactctacaggcacagtaactacactttatacagga

SEQ ID NO: 469025 - DNA, 120 bp, Artificial Sequence
  ENSG00000158985_23 (sequence is synthesized)
gcacatgccaaagtgcctgggaggtgccaataaaatcaagaaataagaaaactacaaaaaaagatacggtattaaccttggacataattttttttagggaggcagctttcccacttttat

SEQ ID NO: 469026 - DNA, 120 bp, Artificial Sequence
  ENSG00000158985_24 (sequence is synthesized)
aaagggggttgtaaatctcaagaggtcatttgttccccatagcagcatatctcatttttaaattgaagcgaattaaataggattttactactcaacattcattatactgttaatctttgc

SEQ ID NO: 469027 - DNA, 120 bp, Artificial Sequence
  ENSG00000158985_25 (sequence is synthesized)
tgaaatatatgctaacaaatgttaagcaagggaaactgaagacttagtcatgtggattgttagcagtgatctgcattctgtaaaagaggtactttcccatgatgtaggcatgaagtggtg

SEQ ID NO: 469028 - DNA, 120 bp, Artificial Sequence
  ENSG00000158985_26 (sequence is synthesized)
ccagtaagcgtagagcggaaatgttgactttagttaacattgggtttagcatttccagtgcagcattatcagtgggcctttaaaaatacttcgtaagtacattagctttcactttgttgt

SEQ ID NO: 469029 - DNA, 120 bp, Artificial Sequence
  ENSG00000158985_27 (sequence is synthesized)
taaattatagcagactcattatagagaacaagtttgccttgattttgtttaaaatgacttctgctaagcacccagaagataaaattgacatatttttataatataagcatactttttttg

SEQ ID NO: 469030 - DNA, 120 bp, Artificial Sequence
  ENSG00000158985_28 (sequence is synthesized)
tacattgtgttcattcttgaataaaatgagttctgtgttggcttgtagatactaaaaagaaagtattgattttgattcaataaatgttttctttcaatcctggttggcctttcctttaaa

SEQ ID NO: 469031 - DNA, 120 bp, Artificial Sequence
  ENSG00000158985_29 (sequence is synthesized)
ggagggggagccaggaagctgcgagcgcgctggggagcgcagctgcaggcgttggggcggcaggagccgcggagccggcgctgagaggggctgcggccggagcgggcggctgagacaaag

SEQ ID NO: 469032 - DNA, 120 bp, Artificial Sequence
  ENSG00000158985_30 (sequence is synthesized)
ggccaataatagtaaatatatgtatatatatataattttttaatggtgaacttattgggaaaggcaaaattactcagctaagtgtagtttctgcacttggaatgtaagttttaggttctt

SEQ ID NO: 469033 - DNA, 120 bp, Artificial Sequence
  ENSG00000158985_31 (sequence is synthesized)
ttccttattaagaactttaaatactttaaaacatctggttggggaggattctgatgacaagatgcttcttatgtgtcctttaaacaagagtgaaatcattattttgagtattgaggccga

SEQ ID NO: 469034 - DNA, 61 bp, Artificial Sequence
  ENSG00000158985_32 (sequence is synthesized)
cattattttgagtatttgatcacctgaggccaggaattggagactagcctggccaacatgg

SEQ ID NO: 469035 - DNA, 60 bp, Artificial Sequence
  ENSG00000158985_33 (sequence is synthesized)
gtggcgcatggggttgcagtcagctgagaatgcgccactgcgctccagcctgggtgacag

SEQ ID NO: 469036 - DNA, 120 bp, Artificial Sequence
  ENSG00000158985_34 (sequence is synthesized)
acagagcaagaccctgtctcaaaaaagtactgatactaaagataatctcttgggtagtaattttacagttaagacttcattgtttataaacttttcaaattaattaaaaagactactttg

SEQ ID NO: 469037 - DNA, 120 bp, Artificial Sequence
  ENSG00000158985_35 (sequence is synthesized)
taaaaagactactttgaaaaaggataaaccctgaaaatgtagaaataatttcaagtttttttttgttttatagggttattgtgaatttctatattttctctgtccactattctgtaattt

SEQ ID NO: 469038 - DNA, 120 bp, Artificial Sequence
  ENSG00000158985_36 (sequence is synthesized)
accagttgtcacacactgctgtcccctggtctagttaaagggttctgaaggctgatagaagttaacagtgtttggtggcttaccatggttcactgggacttaaacagaattgacaaagag

SEQ ID NO: 469039 - DNA, 120 bp, Artificial Sequence
  ENSG00000158985_37 (sequence is synthesized)
taaaggagaatttgctgaaatacttatttaaagtctagtactaagctgtcgggtaccatagtcactagctacacattgctactgagcacctgaaacatggctattctgaattgagatgtg

SEQ ID NO: 469040 - DNA, 120 bp, Artificial Sequence
  ENSG00000158985_38 (sequence is synthesized)
tattaaaattacatttttttaatgtagtgacttgaaaatttaaaattacatatgtggcttgagttatatttctgtaggacagcattggtctattgtatgccataatttagttacttttac

SEQ ID NO: 469041 - DNA, 73 bp, Artificial Sequence
  ENSG00000158985_39 (sequence is synthesized)
agcattggtctattgtatgccataatttagttacttttactataaaaagattgcgagagacaggccagatcac

SEQ ID NO: 469042 - DNA, 120 bp, Artificial Sequence
  ENSG00000158985_40 (sequence is synthesized)
gattcagcagcttcctgactagagatagagccagagcagaagatgggcagagtctgcatgtggctgcaggacctctgtcagagaatgaaacactcatcgcatgatagggccagatttgag

SEQ ID NO: 469043 - DNA, 120 bp, Artificial Sequence
  ENSG00000158985_41 (sequence is synthesized)
catgttggatcaggagacctgttcagtggaatgaattcaccctcaaggacgttttgttctgaagactctcatattcagctctgggaaataattatttctctgattatcccttcaactttt

SEQ ID NO: 469044 - DNA, 120 bp, Artificial Sequence
  ENSG00000158985_42 (sequence is synthesized)
tggaataaaagggggcacttccctcagactttggagaagacattattttgaactagaattctgtctacagccatactctcaatgaagtaagatggcagaataaagatgattacactagca

SEQ ID NO: 469045 - DNA, 120 bp, Artificial Sequence
  ENSG00000158985_43 (sequence is synthesized)
aaaaaaactttattgtagatatatgcaacctctaggctcattttgacccctacctcatctttttaatgcccatcatcttaatgttgtatctggtttgcctttgatgcctagaagaagaaa

SEQ ID NO: 469046 - DNA, 120 bp, Artificial Sequence
  ENSG00000158985_44 (sequence is synthesized)
aaaatctttgcatttactaaagaaaacagttactccctgagtaagatcaagtgtttgatctgggaccttataaggaagttctcaaagaatggtgatcttggtattgaagaaagctgattt

SEQ ID NO: 469047 - DNA, 120 bp, Artificial Sequence
  ENSG00000158985_45 (sequence is synthesized)
acaacgtgcgcagacgtcgctcctccgcacggatgtccgcggcccgggccggggtgggaaggggctcccccacgctcccgcccaggtttggtcgccatctttcggagcgtcctttcccgc

SEQ ID NO: 469048 - DNA, 120 bp, Artificial Sequence
  ENSG00000158985_46 (sequence is synthesized)
attttattggaaagcaaggacctgctattatttgttaatttgccatcatttatgtatattttggaagttttgagcctttgtgtcaatcccaagcacagagaggatctgccaaggaaaaac

SEQ ID NO: 469049 - DNA, 120 bp, Artificial Sequence
  ENSG00000158987_0 (sequence is synthesized)
cccgcgcagacttgtctccggccagtcgcgcgtgggtagaggccttaggcgggcgttgcgaagggttgtttgctagagttcggaccttgttacggcgcgaagttccctccttggggcggg

SEQ ID NO: 469050 - DNA, 120 bp, Artificial Sequence
  ENSG00000158987_1 (sequence is synthesized)
ggaaaggtaccgcacccgctacctagtgtgaatgaactgtggcgtgggctgctaagggcaggctgcggagtacccgggccgtggccatgaactcacccgtggaccctggcgctaggcagg

SEQ ID NO: 469051 - DNA, 120 bp, Artificial Sequence
  ENSG00000158987_2 (sequence is synthesized)
cgttgaggaagaagccacccgagcggactcccgaggacttaaatactatttattcttatcttcatggaatggaaatattatcaaatctcagggaacatcagcttagattaatgtctgcaa

SEQ ID NO: 469052 - DNA, 120 bp, Artificial Sequence
  ENSG00000158987_3 (sequence is synthesized)
gagcacgctatgagagatacagtggcaatcaggttctcttttgttcagaaacgattgccagatgttggtatatcctactttctggatctgtgcttgtgaaaggctccatggtcttgcctc

SEQ ID NO: 469053 - DNA, 120 bp, Artificial Sequence
  ENSG00000158987_4 (sequence is synthesized)
cttgcagttttggtaagcagtttggaggaaaaagaggatgtgattgtcttgtattagagccttcagaaatgattgtggtagagaatgccaaagataatgaagatagtattctacaaagag

SEQ ID NO: 469054 - DNA, 120 bp, Artificial Sequence
  ENSG00000158987_5 (sequence is synthesized)
aaattcctgccagacaatcccgaagaagatttcggaaaattaactataaaggagagcgccaaaccattactgatgatgtggaggttaacagctatctttctcttccagctgatcttacca

SEQ ID NO: 469055 - DNA, 120 bp, Artificial Sequence
  ENSG00000158987_6 (sequence is synthesized)
agatgcatctcacagaaaaccctcatccacaggtgactcatgtgtcttctagtcagtctggttgtagcattgccagtgactctggaagcagcagtttatctgatatctatcaggctacgg

SEQ ID NO: 469056 - DNA, 120 bp, Artificial Sequence
  ENSG00000158987_7 (sequence is synthesized)
agagtgaggtaggagatgtagatttgacacgtcttccagaaggacctgttgattctgaggatgacgaagaggaagatgaagagattgatcgaacagatccattgcaggggcgagatcttg

SEQ ID NO: 469057 - DNA, 120 bp, Artificial Sequence
  ENSG00000158987_8 (sequence is synthesized)
ttcgagaatgtcttgaaaaagaacctgcagacaaaactgatgatgacattgaacaattgctggagtttatgcaccagctccctgcatttgcaaacatgaccatgtctgtaaggagagaac

SEQ ID NO: 469058 - DNA, 120 bp, Artificial Sequence
  ENSG00000158987_9 (sequence is synthesized)
tctgctcagtgatgatttttgaagtggtagagcaggctggagctattattcttgaagatgggcaagagcttgactcatggtatgttattttaaacggcactgtggaaatcagtcatccag

SEQ ID NO: 469059 - DNA, 120 bp, Artificial Sequence
  ENSG00000158987_10 (sequence is synthesized)
atggaaaagttgaaaatttgtttatgggaaatagttttggaattactcccactctggataagcagtacatgcatggaattgtcaggactaaagtagatgattgtcagtttgtctgcatag

SEQ ID NO: 469060 - DNA, 120 bp, Artificial Sequence
  ENSG00000158987_11 (sequence is synthesized)
cccagcaagattattggagaattttaaaccatgtggaaaaaaatacccataaagttgaggaagagggagaaattgttatggtacatgagcatcgggaactagaccggagtggaaccagga

SEQ ID NO: 469061 - DNA, 120 bp, Artificial Sequence
  ENSG00000158987_12 (sequence is synthesized)
aaggacacattgtgatcaaggcaacacctgagcgtctcataatgcatttaatagaagaacattccatcgtggatccaacttatatagaagattttctattaacttacaggacatttcttg

SEQ ID NO: 469062 - DNA, 120 bp, Artificial Sequence
  ENSG00000158987_13 (sequence is synthesized)
aaagtcctttggatgttgggatcaaactattggaatggtttaagatcgacagcttaagagataaggtgacacggattgtattattatgggtaaataatcattttaatgattttgaaggtg

SEQ ID NO: 469063 - DNA, 120 bp, Artificial Sequence
  ENSG00000158987_14 (sequence is synthesized)
accctgctatgactcgatttctagaggaatttgaaaaaaatctggaagatacaaagatgaatggtcatctccggttattgaatattgcctgtgctgcaaaggctaagtggagacaggttg

SEQ ID NO: 469064 - DNA, 120 bp, Artificial Sequence
  ENSG00000158987_15 (sequence is synthesized)
tgctgcaaaaggcttcccgcgagtcccctctacaattcagccttaatggagggagtgagaagggatttggtatttttgttgaaggagtagaacctggtagcaaagctgctgattcaggac

SEQ ID NO: 469065 - DNA, 120 bp, Artificial Sequence
  ENSG00000158987_16 (sequence is synthesized)
tgaaacgtggtgatcagattatggaagtaaatggacaaaactttgagaatattacatttatgaaagccgttgaaattttgaggaataatactcatcttgcacttactgtgaagaccaaca

SEQ ID NO: 469066 - DNA, 120 bp, Artificial Sequence
  ENSG00000158987_17 (sequence is synthesized)
tttttgtgttcaaagagttactttttaggactgaacaagagaaatctggtgttcctcatattcccaaaattgctgaaaaaaaaagtaatcgccattctatccagcatgtgccaggagata

SEQ ID NO: 469067 - DNA, 120 bp, Artificial Sequence
  ENSG00000158987_18 (sequence is synthesized)
ttgaacagacatcacaggagaaaggaagtaagaaagttaaagcaaatactgtttcaggtggaagaaacaaaatcaggaagattttggataaaacacgatttagtatcttgcctccaaagc

SEQ ID NO: 469068 - DNA, 120 bp, Artificial Sequence
  ENSG00000158987_19 (sequence is synthesized)
tatttagtgatggaggcctaagccaatcacaagatgacagcattgtgggaacaaggcactgtaggcatagtctggctataatgcccatccctggaacactctcatccagcagccctgatc

SEQ ID NO: 469069 - DNA, 120 bp, Artificial Sequence
  ENSG00000158987_20 (sequence is synthesized)
tcctgcagcctaccaccagtatgttggatttttccaatccttcagatatccctgatcaagttataagagttttcaaagtggatcagcaaagttgctacattatcatcagtaaagacacca

SEQ ID NO: 469070 - DNA, 120 bp, Artificial Sequence
  ENSG00000158987_21 (sequence is synthesized)
cagctaaagaagtagtttttcatgctgttcatgaatttggtttgaccggtgcatccgacacatattctctctgtgaagtttctgttactcctgagggtgtcataaaacagagaagacttc

SEQ ID NO: 469071 - DNA, 120 bp, Artificial Sequence
  ENSG00000158987_22 (sequence is synthesized)
cagatcagttctccaaattagctgatagaattcaactcaatggaaggtattacttaaaaaataacatggaaacagaaaccttatgttcagatgaagatgctcaagaactagttaaggaaa

SEQ ID NO: 469072 - DNA, 120 bp, Artificial Sequence
  ENSG00000158987_23 (sequence is synthesized)
gccagctatccatgctgcagctcagtaccattgaggtggccacccagctgtcaatgagggactttgatttgtttcgtaatattgaaccgactgagtacatcgatgacctttttaagttaa

SEQ ID NO: 469073 - DNA, 120 bp, Artificial Sequence
  ENSG00000158987_24 (sequence is synthesized)
attccaaaacaggaaatactcatttgaagaggtttgaggacattgtaaaccaagagacattctgggttgcctcagaaattttaactgaagcaaatcagctcaaacgaatgaagattatta

SEQ ID NO: 469074 - DNA, 120 bp, Artificial Sequence
  ENSG00000158987_25 (sequence is synthesized)
agcattttattaaaattgcacttcattgtcgagaatgtaagaacttcaattccatgtttgcaataataagtggcttgaacctggcatctgtagcaagactcagaggaacttgggaaaagt

SEQ ID NO: 469075 - DNA, 120 bp, Artificial Sequence
  ENSG00000158987_26 (sequence is synthesized)
taccaagcaaatacgagaaacatcttcaagatctacaagacatttttgatccatctagaaacatggcaaagtatagaaatattcttagtagtcaaagtatgcagcctccaattattccac

SEQ ID NO: 469076 - DNA, 120 bp, Artificial Sequence
  ENSG00000158987_27 (sequence is synthesized)
tcttccctgttgtcaagaaagatatgacatttctacatgaaggaaatgactccaaagtagatggtttagtaaactttgagaagttaagaatgatttccaaggaaatccgccaagttgttc

SEQ ID NO: 469077 - DNA, 120 bp, Artificial Sequence
  ENSG00000158987_28 (sequence is synthesized)
gaatgacttctgctaacatggacccagctatgatgtttcgacagaggtcactgagtcaaggaagcacaaattcaaacatgctggatgttcagggaggtgctcacaaaaaaagggcacgcc

SEQ ID NO: 469078 - DNA, 120 bp, Artificial Sequence
  ENSG00000158987_29 (sequence is synthesized)
gcagctctctgcttaatgccaagaagctatatgaggatgcccaaatggcaaggaaggtgaagcagtatctttccagtctcgatgtagagacagatgaggagaagttccagatgatgtcat

SEQ ID NO: 469079 - DNA, 120 bp, Artificial Sequence
  ENSG00000158987_30 (sequence is synthesized)
tacagtgggagcctgcatatggtaccttgaccaagaatttaagtgagaaaagatcagccaaatcatctgaaatgtctccagtgcctatgaggtcagctggccaaacaactaaagcccact

SEQ ID NO: 469080 - DNA, 120 bp, Artificial Sequence
  ENSG00000158987_31 (sequence is synthesized)
tgcatcaaccccacagagtaagccaggtgcttcaggtgccagctgttaatttgcaccccatcaggaagaagggacaaacaaaagaccctgcactgaatacaagtttacctcagaaagttt

SEQ ID NO: 469081 - DNA, 120 bp, Artificial Sequence
  ENSG00000158987_32 (sequence is synthesized)
taggaacaactgaagaaataagtggtaagaagcatacagaagacactatttctgtggcgtcatctttacattctagtcctcctgcatctcctcaaggctcccctcacaaaggttacacac

SEQ ID NO: 469082 - DNA, 120 bp, Artificial Sequence
  ENSG00000158987_33 (sequence is synthesized)
ttattccatcagctaaatctgacaacttgtctgactccagccatagtgagatttcttcacggtccagcatcgtgagcaattgttctgttgactccatgtctgcagctctacaggatgaac

SEQ ID NO: 469083 - DNA, 120 bp, Artificial Sequence
  ENSG00000158987_34 (sequence is synthesized)
gatcatagtcaacatggccctgggtggacactcttgaagccatctctaatcaagtgtttagctgtctcatcgtctgtgagcaatgaagagatttctcaagagcatatcattatagaagca

SEQ ID NO: 469084 - DNA, 120 bp, Artificial Sequence
  ENSG00000158987_35 (sequence is synthesized)
gctgacagtggtcgtggaagttggacttcgtgttcaagcagctcccatgacaacttccaaagccttccaaacccaaaaagctgggattttttgaactcttacagacatacccatttggat

SEQ ID NO: 469085 - DNA, 120 bp, Artificial Sequence
  ENSG00000158987_36 (sequence is synthesized)
gaccccattgctgaagttgaacccactgactctgagccctattcctgttctaaaagctgctctagaacttgtgggcagtgtaaaggaagcctagagagaaagagttggacctcctccagt

SEQ ID NO: 469086 - DNA, 120 bp, Artificial Sequence
  ENSG00000158987_37 (sequence is synthesized)
tctctgtctgacacgtatgaaccaaactatgggacagttaaacagagagtattggagagcaccccagctgagtcatctgaaggcttggaccccaaggatgccactgacccagtttataaa

SEQ ID NO: 469087 - DNA, 120 bp, Artificial Sequence
  ENSG00000158987_38 (sequence is synthesized)
actgtcacttcaagtacagaaaagggcttgattgtgtactgtgtcacctcacccaagaaggacgataggtatagggagccacctcccactcctccaggatatttggggatttctttagcg

SEQ ID NO: 469088 - DNA, 120 bp, Artificial Sequence
  ENSG00000158987_39 (sequence is synthesized)
gacctaaaggaaggaccccacacacacctaaaacctccagattatagtgtggcagtgcagaggtcaaagatgatgcataacagcctctctagactgccaccagcttctctcagtagcaac

SEQ ID NO: 469089 - DNA, 120 bp, Artificial Sequence
  ENSG00000158987_40 (sequence is synthesized)
ctcgtggcctgtgttccatcgaagattgtaactcagcctcagaggcataatttgcagccattccatcctaaactaggagatgtgactgatgcagatagcgaagcagatgaaaatgaacaa

SEQ ID NO: 469090 - DNA, 120 bp, Artificial Sequence
  ENSG00000158987_41 (sequence is synthesized)
gtttcagcagtctagcctttggatgacctatttgaaaaccactgaaagtcgtggaggaatgggcaagaaccacctcatgattctgcaggccattgctaacgaacagctcattgctacaac

SEQ ID NO: 469091 - DNA, 120 bp, Artificial Sequence
  ENSG00000158987_42 (sequence is synthesized)
cagtccagaggttttattccctctactccgagcaatgaaatagacctgagttatgcttcctttcatttaatttctgcagataaatagtttcctgagcaatggatgctatgcctggatacc

SEQ ID NO: 469092 - DNA, 120 bp, Artificial Sequence
  ENSG00000158987_43 (sequence is synthesized)
agtctccactttgcacgccggaactgccttgggaccacagttacagaaaaaatgtaaactcagagtgatccttgtgtatattgctatagatttttctttaacaagctattttaaagataa

SEQ ID NO: 469093 - DNA, 120 bp, Artificial Sequence
  ENSG00000158987_44 (sequence is synthesized)
tggcattattatttccaagccatagcttgggctgaaggacaaattgaaattgtctgccaataccaaggatattcttgtatatttgaaaaataacttattatttgaattgttgtggttttg

SEQ ID NO: 469094 - DNA, 120 bp, Artificial Sequence
  ENSG00000158987_45 (sequence is synthesized)
tttgtatttgagagctcttgttagctgatattcatgtttgaggtcataaaattgtctctggtctgaccaaacagaagtcatctttacagaggtgatatgcttgatctacacagagatgtg

SEQ ID NO: 469095 - DNA, 120 bp, Artificial Sequence
  ENSG00000158987_46 (sequence is synthesized)
acttgatctgtagcaccaatgcaatgtaggtctcagtttgagagaaataggaagccctttgcagttgaggtgttaggaacctgctggtcatggtgtggaaggccaaatgaagctgccaca

SEQ ID NO: 469096 - DNA, 120 bp, Artificial Sequence
  ENSG00000158987_47 (sequence is synthesized)
gggtttcttgtcagtcctttgggaaatgggagggagtagtttggggaggagggtgggaaccctaatttccacagaatgaaattttgatgttaaatgacatgtatacaaattcttccttaa

SEQ ID NO: 469097 - DNA, 120 bp, Artificial Sequence
  ENSG00000158987_48 (sequence is synthesized)
gtgaaagttatgctgcatcgaattgtaactgaaagtatagatccaacaaatagagactgggttctagagagttctggtctatagaaacccaaaactaaaatctctcataactcaagtatg

SEQ ID NO: 469098 - DNA, 120 bp, Artificial Sequence
  ENSG00000158987_49 (sequence is synthesized)
gaatactttttttaaagaaattcttatcatgggtgttgtaataatgaagacgaatttgactttatgcagtgttctgcagcatgcctcccccacatctcatagcaccaggttgtgtctgac

SEQ ID NO: 469099 - DNA, 120 bp, Artificial Sequence
  ENSG00000158987_50 (sequence is synthesized)
ctgacataccctgcagctctcagctggctgcagtaacattttgtgggagaaagaggagctggagttacagaaatgattgtctcttggttctcagtttttagcccttgagaggacatactt

SEQ ID NO: 469100 - DNA, 120 bp, Artificial Sequence
  ENSG00000158987_51 (sequence is synthesized)
ttccagcctcatgggtatggcactcttaattaaaatttcagtgactgtttactggatgaggcagatttttcacatttttgcaaattaaatatattttatatatattaagtttaatttttt

SEQ ID NO: 469101 - DNA, 90 bp, Artificial Sequence
  ENSG00000158987_52 (sequence is synthesized)
ttctgtaattgccattaacgtgcactacccagatcaacttggagccaaaaggggtttacttctgaatggctgtccgtatgtgtccacata

SEQ ID NO: 469102 - DNA, 120 bp, Artificial Sequence
  ENSG00000158987_53 (sequence is synthesized)
ggggtttacttctgaatggctgtccgtatgtgtccacataggatttagttggtttgtggcctcctttatagaaatgtgttgtctttccctagctgtctctgctgtctgtcttcctgcata

SEQ ID NO: 469103 - DNA, 120 bp, Artificial Sequence
  ENSG00000158987_54 (sequence is synthesized)
tcccccttcattttaaaatcatgaatcagttgtaagtggtaaatggtagtagttcatctttcccatcaacatgattgtctctttattttaggaataatagcatttcaaaaattcctgtgg

SEQ ID NO: 469104 - DNA, 120 bp, Artificial Sequence
  ENSG00000158987_55 (sequence is synthesized)
taaagaaacattaatctgaaacttaagccttagaaattaatcgcaggtatgatagaatgaggcttggtggttccatagctttcttggtcctttgaaatgggaaataacctgaaccaaaaa

SEQ ID NO: 469105 - DNA, 120 bp, Artificial Sequence
  ENSG00000158987_56 (sequence is synthesized)
tcctagtttgaaagttacacttcagtgatttggcctataaacagtggtcctatgattatacattttttccttcactgatttgcataattttgttttcatggccacagcaaaacaatgtga

SEQ ID NO: 469106 - DNA, 120 bp, Artificial Sequence
  ENSG00000158987_57 (sequence is synthesized)
aatatatttttgctatacccactttttttatcaaattcagatgtctactctcaccattttatattcatttccccagaaaaatgtgctgttttcataatgtctttatttagcaggtctttc

SEQ ID NO: 469107 - DNA, 120 bp, Artificial Sequence
  ENSG00000158987_58 (sequence is synthesized)
aaaccaaatggaagccttacctgtctttgtccttaatagtgtaaatatcttgcacagagtgttgaggcctatggttttggacttgcaccttacagctgcctttgttttatctatctagct

SEQ ID NO: 469108 - DNA, 120 bp, Artificial Sequence
  ENSG00000158987_59 (sequence is synthesized)
ttaactgtgagtgttcagatcagctgatcacattgatcaggagccaaagccaaatgctttgtagtttgttatgtatgtatcccttaaaaaatcatgaggttttgatttttatattttaac

SEQ ID NO: 469109 - DNA, 120 bp, Artificial Sequence
  ENSG00000158987_60 (sequence is synthesized)
taagggtacattcctgccttctcttagtttgtcatatgactagaacaagagaagtcttaagctgcatttactccaattccagatctccatttgtttttgttttataaatttataatctta

SEQ ID NO: 469110 - DNA, 120 bp, Artificial Sequence
  ENSG00000158987_61 (sequence is synthesized)
atgaagagactagtgccctctcttcctgccacaactctcaatctgccaagactgttgaagcagttaacgctcagtgcaaacttttgccaaatagtaagtttcaacaaaatatctttatag

SEQ ID NO: 469111 - DNA, 120 bp, Artificial Sequence
  ENSG00000158987_62 (sequence is synthesized)
tgaaagattttgagaattagtaaatccagtacatgattccataaaagcttattaaagttaataattctaatttactccaaatgattactttcaatatgatctttggggagaaaaagcctt

SEQ ID NO: 469112 - DNA, 120 bp, Artificial Sequence
  ENSG00000158987_63 (sequence is synthesized)
tagtgaattttcttgagggtgataaatcacatcattgcgatctatatcacctccttgagaatctctcccaggctgaaaatgtgatggtaatcatgggtgtttttaagaacaaatctaatt

SEQ ID NO: 469113 - DNA, 120 bp, Artificial Sequence
  ENSG00000158987_64 (sequence is synthesized)
tttatcaagtgttctttcctctacaaaaaaggaaggaggagaaaaagcttccttaaaactgattattttgattcaattttaagtttctaaaaaaggtgatattaaagtatatgtattcct

SEQ ID NO: 469114 - DNA, 120 bp, Artificial Sequence
  ENSG00000158987_65 (sequence is synthesized)
tcagcattaccttaaaggctagaaaaacgggataaatcttcagaaaagtgtcaaaagtgtcacagtacatgttcaaatttaaacttgaatcctggttcatctttgacttttgttgtgcat

SEQ ID NO: 469115 - DNA, 120 bp, Artificial Sequence
  ENSG00000158987_66 (sequence is synthesized)
ttttaatgcttctttatttttgatacacagaatgcagttgaacttgatcttttaaaattgagacatgtaagctaatcagcaaaagacagaaacaaaactgcacatctgtaataatcagat

SEQ ID NO: 469116 - DNA, 120 bp, Artificial Sequence
  ENSG00000158987_67 (sequence is synthesized)
agcaattctactgcacaattcattgattgtaaggtatcctgtaacaagcaatgtttgtctcctattttttgatacctcttaaacttatgtcttttagaaagacagtgcctctgtatgctt

SEQ ID NO: 469117 - DNA, 120 bp, Artificial Sequence
  ENSG00000158987_68 (sequence is synthesized)
gctttttgtatttttactgagtgtaaatatttgttatatttttggttaagagaatgtaaaaataccatttattattatcatatctactaatacattggtggaatcaataaagaatctaca

SEQ ID NO: 469118 - DNA, 120 bp, Artificial Sequence
  ENSG00000158987_69 (sequence is synthesized)
ttgcaaaagaaaatccttcagattaccaggagcacagccaaaagaacagacagtactgagaaggccactgaggagaatagagacaggacaagttgtgagaacacaaccagaaaaagaatg

SEQ ID NO: 469119 - DNA, 120 bp, Artificial Sequence
  ENSG00000158987_70 (sequence is synthesized)
acatccccgtttagaagacttagggaaagaatgctttcaagggagagactagtcaacagccaaaaagaggacacagatcacaatcaagctacagaaagctgtgagaaagtgaaggatgtt

SEQ ID NO: 469120 - DNA, 120 bp, Artificial Sequence
  ENSG00000158987_71 (sequence is synthesized)
ggaagcaacatcaaagatgagaaagggagtgccatcttcaattcaaatagccaaggcaacagtaacactttaaactgcttctatacgcgattcaagtctaaaaggaggaagacactctga

SEQ ID NO: 469121 - DNA, 120 bp, Artificial Sequence
  ENSG00000158987_72 (sequence is synthesized)
atagaatcaataggagcttctccttagggagctgctttgaaacagctctggtttgaaaaggaaactaccctttccagcctaggaaatggcttttcttgttcgctgttatgccaattgtct

SEQ ID NO: 469122 - DNA, 120 bp, Artificial Sequence
  ENSG00000158987_73 (sequence is synthesized)
ttttatattgccgtattggtaccaaatgaacaaatagatggttaagccttgtgcagcaagtgctagagttacttgcagccctcttaactctagattatgacttgatgcaaaaaactaaag

SEQ ID NO: 469123 - DNA, 120 bp, Artificial Sequence
  ENSG00000158987_74 (sequence is synthesized)
atgcaaaaaactaaagggagattgacttgttctgttaatttgaatggtacttcctctaaagtgaaacagaagtacataaaaaagagactacctctggccaggcgcagtggctcacgcctg

SEQ ID NO: 469124 - DNA, 120 bp, Artificial Sequence
  ENSG00000158987_75 (sequence is synthesized)
ttacaaaagtgatgtcccagatcctcagttctagaacccaaatattgcctaaccattccatatttgagggaagcattgagtttttactgcattctgatgtccgactgtattgaattgcat

SEQ ID NO: 469125 - DNA, 120 bp, Artificial Sequence
  ENSG00000158987_76 (sequence is synthesized)
ataaatgctgtaaattttcagctaacgtgttattggtagttctgtttgagttttggccaaaataatggttactagtaaaattggttaacatgctcacagtgggcctgctataatggtagt

SEQ ID NO: 469126 - DNA, 120 bp, Artificial Sequence
  ENSG00000158987_77 (sequence is synthesized)
ggcaatagcatgtccaaagcagaacaacaagcaaaactactttagaaccctcattgctaaagaaccctggttcagagattcggctgaggatggacttgtcgtggtccagactcttgccat

SEQ ID NO: 469127 - DNA, 120 bp, Artificial Sequence
  ENSG00000158987_78 (sequence is synthesized)
atcttcaaagcgtgggtggcctccaggaccagaggaatgctttttcttgttactgttgtgccataggttgcataggcacaaacacaggcctgatggaatatgccactcagggggccattg

SEQ ID NO: 469128 - DNA, 120 bp, Artificial Sequence
  ENSG00000158987_79 (sequence is synthesized)
ttatcctattcttttgaattctgtactttgccaaatcctgttcttaattcagaacgtcaccatatgtgccaaattactttgcattaatgctcttcatcttttaactcatttacatcagca

SEQ ID NO: 469129 - DNA, 120 bp, Artificial Sequence
  ENSG00000158987_80 (sequence is synthesized)
tgcaatagcattaacagaacaaaatcttttaatcttcaatctgctatgcttagttctcatctctatagccccttattgtgattttcatcttcttataggtcactgagtcaaggaagcaca

SEQ ID NO: 469130 - DNA, 120 bp, Artificial Sequence
  ENSG00000158987_81 (sequence is synthesized)
gctattgtaagtagaaacattatcatgttttagtgctcctaaattcactccagaagacgcttgataaaatatcttgtcactcctgctaaaataaactcttagaaccactgatataatcta

SEQ ID NO: 469131 - DNA, 120 bp, Artificial Sequence
  ENSG00000158987_82 (sequence is synthesized)
gttcctgtttttttatagaggaagctgaatgatacaaatcttcatatatatctgaatgactgtatctactaatttataaatttgtttttaatatggccagtatgtactttggcaaaagaa

SEQ ID NO: 469132 - DNA, 120 bp, Artificial Sequence
  ENSG00000158987_83 (sequence is synthesized)
gccatggttttcacagttctttttctaagtagttttcctttaatgaatatgcaggaaaattttaaaaattttaaaatgtgttctgaaaattatttaataaactagattatttctgtagta

SEQ ID NO: 469133 - DNA, 120 bp, Artificial Sequence
  ENSG00000158987_84 (sequence is synthesized)
gctccatggtcttgcctccttgcaggtagagaatgccaaagataatgaagatagtattctacaaagagaaattcctgccagacaatcccgaagaagatttcggaaaattaactataaagg

SEQ ID NO: 469134 - DNA, 120 bp, Artificial Sequence
  ENSG00000158987_85 (sequence is synthesized)
aattttagtgccattttcatcattacaattgtcttttaaaaattgctgtagtatttcagttgtttaaatcacctctttgaattggttcttttatgccttagtgcacagggaacagaaacg

SEQ ID NO: 469135 - DNA, 120 bp, Artificial Sequence
  ENSG00000158987_86 (sequence is synthesized)
gaaaaagaactaatgccgctagatttcttacctttgtgctctgcattggtacatagtgatatatttatgtactataggttcattaactgtccccatgttgttcttggacagtttgtctgc

SEQ ID NO: 469136 - DNA, 120 bp, Artificial Sequence
  ENSG00000158987_87 (sequence is synthesized)
ccatttgtcaaagcttaggcagacaacttagtaaaatactatttataaacacttgaaaatgcctcatttgtacataagttattttactgatgtattgagttagtaaattttatactcttg

SEQ ID NO: 469137 - DNA, 120 bp, Artificial Sequence
  ENSG00000159023_0 (sequence is synthesized)
agttgccctgtcagtgcaggtggaggccccggcggggcaaagtggcaggaacctcttaaagggcgagagcggcgcggagccagaacgcggtcggcccggtccccgccgcacccagcccag

SEQ ID NO: 469138 - DNA, 120 bp, Artificial Sequence
  ENSG00000159023_1 (sequence is synthesized)
caacatcatgacaacagagaagagtttagtgactgaggccgaaaattcacagcaccaacagaaggaagagggtgaggaagccataaactcaggccaacaagaacctcagcaggaggaatc

SEQ ID NO: 469139 - DNA, 120 bp, Artificial Sequence
  ENSG00000159023_2 (sequence is synthesized)
ttgtcaaacagcagctgaaggagataattggtgtgaacagaagctgaaagcttctaatggagacactcctacacatgaagacttgaccaagaacaaggagcggacatcagaaagcagagg

SEQ ID NO: 469140 - DNA, 120 bp, Artificial Sequence
  ENSG00000159023_3 (sequence is synthesized)
actttcacgactattctcctcgtttctcaaaaggcccaaatctcaggtgtccgaggaagaaggcaaagaagtagagtcagataaagaaaaaggtgaaggaggtcagaaagagatagaatt

SEQ ID NO: 469141 - DNA, 120 bp, Artificial Sequence
  ENSG00000159023_4 (sequence is synthesized)
tggaaccagtcttgatgaagagatcattttaaaggccccaattgcagctcctgaaccggaactcaaaacagacccatctttggatcttcattcattaagcagtgcagaaacacagcctca

SEQ ID NO: 469142 - DNA, 120 bp, Artificial Sequence
  ENSG00000159023_5 (sequence is synthesized)
ccattacaattaagaattattttcagagtcttcttatttctgaagcatgtgaatattatctgcatcgttaaaagtcctgctcaggaagaactcagagaagatccagattttgaaattaag

SEQ ID NO: 469143 - DNA, 120 bp, Artificial Sequence
  ENSG00000159023_6 (sequence is synthesized)
gaaggagaaggacttgaagagtgctccaaaatagaagtaaaagaagaaagccctcaatcaaaagcagaaacagaattaaaagcttcccaaaaaccaatcagaaaacacaggaacatgcac

SEQ ID NO: 469144 - DNA, 120 bp, Artificial Sequence
  ENSG00000159023_7 (sequence is synthesized)
tgcaaggtttctttgttggatgacacagtttatgaatgtgttgtggagaaacatgctaagggacaagatttgcttaaacgagtatgtgagcatctcaatcttttggaagaagactatttt

SEQ ID NO: 469145 - DNA, 120 bp, Artificial Sequence
  ENSG00000159023_8 (sequence is synthesized)
ggtctagccatttgggataacgcaacctctaagacatggctggattccgccaaagaaataaaaaagcaggttcgtggtgtcccttggaattttacatttaatgtaaagttttatccacct

SEQ ID NO: 469146 - DNA, 120 bp, Artificial Sequence
  ENSG00000159023_9 (sequence is synthesized)
gacccagcacagttaacagaagacataacaagatattatttatgtcttcagcttcggcaggacatagttgcaggacgtctgccctgttcctttgcaaccttagcattattaggttcttac

SEQ ID NO: 469147 - DNA, 120 bp, Artificial Sequence
  ENSG00000159023_10 (sequence is synthesized)
accatccagtctgaactgggagactacgacccagaactccatggcgtggattatgttagtgattttaaactggccccgaatcagaccaaggaacttgaagagaaggtcatggaactgcat

SEQ ID NO: 469148 - DNA, 120 bp, Artificial Sequence
  ENSG00000159023_11 (sequence is synthesized)
aagtcatacaggtccatgactccagctcaggctgacttggagtttcttgagaatgccaaaaagttgtctatgtatggagttgatcttcataaagcaaaggacttggaaggagtagatatc

SEQ ID NO: 469149 - DNA, 120 bp, Artificial Sequence
  ENSG00000159023_12 (sequence is synthesized)
atcctaggtgtctgctctagtggccttctggtttacaaagataagctgagaattaaccgcttcccttggcccaaagtgctgaagatttcttataaacgtagtagctttttcatcaagatt

SEQ ID NO: 469150 - DNA, 120 bp, Artificial Sequence
  ENSG00000159023_13 (sequence is synthesized)
cggcctggagagcaagagcagtatgaaagtaccatcggattcaaacttcccagttaccgagcagctaagaaattatggaaagtctgtgtagaacatcacacgtttttcagattgacatct

SEQ ID NO: 469151 - DNA, 120 bp, Artificial Sequence
  ENSG00000159023_14 (sequence is synthesized)
acagacaccattcccaaaagcaaatttcttgcgctaggatccaaatttcgatacagtggccggactcaagctcagaccaggcaagctagtgctctaattgacaggcctgccccacacttc

SEQ ID NO: 469152 - DNA, 120 bp, Artificial Sequence
  ENSG00000159023_15 (sequence is synthesized)
gagcgtacagcaagtaaacgggcgtcccggagcctcgatggagcagcagctgtcgattcggcagaccgaagtcctcggcccacttctgcacctgccattactcagggtcaggttgcagaa

SEQ ID NO: 469153 - DNA, 120 bp, Artificial Sequence
  ENSG00000159023_16 (sequence is synthesized)
ggtggcgtcctagatgcctctgctaaaaaaacagtggtccctaaagcacagaaggaaacagtgaaggctgaagtgaaaaaggaagacgagccacctgagcaagctgagccagagcccaca

SEQ ID NO: 469154 - DNA, 120 bp, Artificial Sequence
  ENSG00000159023_17 (sequence is synthesized)
gaagcatggaaggtggaaaaaacccacatcgaggtgacagtacccacctcaaatggtgaccaaacacagaaaaagagagaaagactagatggtgaaaacatttatatcagacatagcaat

SEQ ID NO: 469155 - DNA, 120 bp, Artificial Sequence
  ENSG00000159023_18 (sequence is synthesized)
ttaatgttggaggatttagacaagagtcaagaggagatcaaaaaacatcatgccagcatcagtgagctgaaaaagaacttcatggagtctgtaccagaaccacggcctagtgaatgggat

SEQ ID NO: 469156 - DNA, 120 bp, Artificial Sequence
  ENSG00000159023_19 (sequence is synthesized)
aaacgcttatccactcactcacccttccgaactcttaacatcaatgggcaaatccccacaggagaaggacctcccctggtgaagacacaaactgtcaccatctcagataatgccaatgct

SEQ ID NO: 469157 - DNA, 120 bp, Artificial Sequence
  ENSG00000159023_20 (sequence is synthesized)
gtgaaaagtgaaatcccaaccaaagacgtccctattgtccacactgagaccaagaccatcacttatgaggctgcccagactgacgacaacagtggagacttggacccaggagtcttgctg

SEQ ID NO: 469158 - DNA, 120 bp, Artificial Sequence
  ENSG00000159023_21 (sequence is synthesized)
acagctcaaactatcacatctgagaccccaagcagcaccaccacaactcaaattaccaagactgtaaaaggtgggatttcagagacacgtattgaaaagagaattgtgatcacaggagat

SEQ ID NO: 469159 - DNA, 120 bp, Artificial Sequence
  ENSG00000159023_22 (sequence is synthesized)
gctgatattgaccatgatcaggtccttgtacaagccatcaaggaggcaaaggagcagcacccagacatgtcagtgaccaaggtggtcgtccaccaggagaccgagattgctgatgagtga

SEQ ID NO: 469160 - DNA, 120 bp, Artificial Sequence
  ENSG00000159023_23 (sequence is synthesized)
gctcaggaactaacctaccccaactctgcccttctcccatccaagagaaaccagcaaaatgataaagaagctaacctgccatagtcagacttcagactttcaagattattctaaatcacc

SEQ ID NO: 469161 - DNA, 120 bp, Artificial Sequence
  ENSG00000159023_24 (sequence is synthesized)
aggatatcagaattgttcaacttttcactctatagactgttttaagagttttggggtttttttaattgggtggtttgtaaccccttcagcctagcctctctgcccatttatttccaaccc

SEQ ID NO: 469162 - DNA, 120 bp, Artificial Sequence
  ENSG00000159023_25 (sequence is synthesized)
caacagacactgacagggtccatggaattcttcgggaaatcctccaaggactcttgtcagctgtgttggaagccaaagccagcttagtgggacttccgcgtctctccctagtcttatccc

SEQ ID NO: 469163 - DNA, 120 bp, Artificial Sequence
  ENSG00000159023_26 (sequence is synthesized)
ctttggatgatggcagaaacttcatgaaccagccctttctcagagccagtgatgtgagtgtatcagaatgccagggagggcaccagccctgatccacagacctcggaaagatgcccctgt

SEQ ID NO: 469164 - DNA, 120 bp, Artificial Sequence
  ENSG00000159023_27 (sequence is synthesized)
tcctttgttgcgggtggttttggtaaggcagagccctctgctgagaatgtagtattgtttttcccctctccctcctgctttctttttggagcttctttgggtcaaagacatggaagttgc

SEQ ID NO: 469165 - DNA, 120 bp, Artificial Sequence
  ENSG00000159023_28 (sequence is synthesized)
ttcagatatctgatactgtgaatgtttgaacatatccgtggccttcacctctccagctacccttttacctcatcagaagcagtggctcagctaagtgctccccctagctcccatctcagg

SEQ ID NO: 469166 - DNA, 120 bp, Artificial Sequence
  ENSG00000159023_29 (sequence is synthesized)
agaccaaatctcacagaaaaataggcactttgggccaaaagctctaatggaacatttttagtggtgatttggggaaggaaagttaatgaggtttttaaaataaggttttctagttttgag

SEQ ID NO: 469167 - DNA, 120 bp, Artificial Sequence
  ENSG00000159023_30 (sequence is synthesized)
agtgtgcacttcacacaggggaatggggttacttctgtctgatcctgggcctttctttcatcccaaatgacaaggaatgtggctcagagaagggtttttcttttttgacctttcttctct

SEQ ID NO: 469168 - DNA, 120 bp, Artificial Sequence
  ENSG00000159023_31 (sequence is synthesized)
caacaggaacctgcctgaggacacccttctagagcaaggaattgacttttaggagccgttctccccacaagacaccacatgacaaggggtataagccccagccctgctcattcccactca

SEQ ID NO: 469169 - DNA, 120 bp, Artificial Sequence
  ENSG00000159023_32 (sequence is synthesized)
ccagctgaggtctgtcaggttttgaaggcttgattttgtggtgggtttggggcttagttttcctttttttcattttgatttttgaaagtgaagatgatgccctaattcctggtaaggatt

SEQ ID NO: 469170 - DNA, 120 bp, Artificial Sequence
  ENSG00000159023_33 (sequence is synthesized)
aggtgtgagccaccacgcccggccgatttggggcatttttatttaacagaacttctctaaccttccaactgcttcccacaaacacattggcctcaaggctccttagaatcccagttccag

SEQ ID NO: 469171 - DNA, 120 bp, Artificial Sequence
  ENSG00000159023_34 (sequence is synthesized)
aacacattggcctcaaggctccttagaatcccagttccagcttcctaaaatagacagtgggtatcgggcagcagtcactggggctcaagggcagtgagcaagagaaatgtctaaagctgc

SEQ ID NO: 469172 - DNA, 120 bp, Artificial Sequence
  ENSG00000159023_35 (sequence is synthesized)
ttctcccaacaccgtccaaagtctccactgcctgagttttgtttcggctggtttgaactcatttcgggtgtgtgcatttttcttttggtacccatgtgagacatgaacaacaggagggag

SEQ ID NO: 469173 - DNA, 120 bp, Artificial Sequence
  ENSG00000159023_36 (sequence is synthesized)
ggaaagagcccaggtgggacgtgggacaggcttaggggaaagagcttgtcctatctcaggaacaaaattataggctgtgggcagagggtctgaaaggtgggctttggggtagtgcccaag

SEQ ID NO: 469174 - DNA, 120 bp, Artificial Sequence
  ENSG00000159023_37 (sequence is synthesized)
cctggtcgtgttgccaggagtggtgacaagaaatgcagcttacatcaaacgaacatgtagtgcatgcccactgcctgatggccagatggcctgtaggaagagctaccagggcttccagac

SEQ ID NO: 469175 - DNA, 120 bp, Artificial Sequence
  ENSG00000159023_38 (sequence is synthesized)
ctgtggaacgaagaggatggggaaaaggcagagggcactgagtgtccctttaaaaactaacccactgaatattccgtgtgatctagaacagtgtggcagctttcacagcacaggaccgtt

SEQ ID NO: 469176 - DNA, 120 bp, Artificial Sequence
  ENSG00000159023_39 (sequence is synthesized)
catcgggggcctaaacgtttccctcagctctgtcaccaactcacttctctcggcttcgttgtctgtaaattggatgaaaagagctctaatgcctttcaggctcttagaagccatagattt

SEQ ID NO: 469177 - DNA, 120 bp, Artificial Sequence
  ENSG00000159023_40 (sequence is synthesized)
ggacaagcccagcaagatgggtgtccttccaggcctcttcccctttcctccatctctggcaacagttcttggggtttggcaattgtttggattttttttctttctgcagttgtgtgtatg

SEQ ID NO: 469178 - DNA, 120 bp, Artificial Sequence
  ENSG00000159023_41 (sequence is synthesized)
tgtgtttgtgtgaagaaaaacagactctgtccaggtagaaatggtgaggagggggaagagaattacatttccagggtcagaaacttggcaacagttttcctagagtgactcagacacacc

SEQ ID NO: 469179 - DNA, 120 bp, Artificial Sequence
  ENSG00000159023_42 (sequence is synthesized)
acagtaacaactctcgctgcaattttattttaatttgagaaataaagatttcctccaagccacatgaggactctggcacccacccacaaagcaagacctgtatttataagccgagggctc

SEQ ID NO: 469180 - DNA, 120 bp, Artificial Sequence
  ENSG00000159023_43 (sequence is synthesized)
agggagcctaactgcgggacccgtcagggccccgtgacccatccccgtccccacccccccctccaccgctgggcccatcagtgtgtgttggggggatgcttggcagctgggggtgaggag

SEQ ID NO: 469181 - DNA, 120 bp, Artificial Sequence
  ENSG00000159023_44 (sequence is synthesized)
acaacaaacctcgggaactggagccagagctgcggcctgactgacgccttttgatgctcacgggaaatttctgcccaggatctcagccccaggctggttgtttctacaaatctctctcaa

SEQ ID NO: 469182 - DNA, 120 bp, Artificial Sequence
  ENSG00000159023_45 (sequence is synthesized)
atgtattattttggtgacaaaaatgaaggagctttgtaaattttttttaaaattatgaatcatatcaagtagttgtttacatttcttgaaaaaataggaactcgggcagcagaatcagat

SEQ ID NO: 469183 - DNA, 120 bp, Artificial Sequence
  ENSG00000159023_46 (sequence is synthesized)
tggcagaatctttagactacacaggcaataatcaagtctgctgttttggcctttcgtagtagaagtggttgtagtgtttagatatctgtttggtcttgcttcttgtattgcatttttttc

SEQ ID NO: 469184 - DNA, 120 bp, Artificial Sequence
  ENSG00000159023_47 (sequence is synthesized)
gctcgctcgctccctccctccgctggtgcgtttagtcagtcagccagcagcagccggcgggcccgcgagccgcagagggcccgagcctcggacgccggcgcctcctcctgccattgttcg

SEQ ID NO: 469185 - DNA, 120 bp, Artificial Sequence
  ENSG00000159023_48 (sequence is synthesized)
tcttaacatcaatgggcaaatccccacaggagaaggagtgaagaaaacttctgtcctaccctcggaaagaaagcctcccctggtgaagacacaaactgtcaccatctcagataatgccaa

SEQ ID NO: 469186 - DNA, 120 bp, Artificial Sequence
  ENSG00000159023_49 (sequence is synthesized)
tgattacagtaatgctgctttttaatatccctcatgatttgacaccttgtcagggttactttggaatactgtcgaagtcttaggcagggtaaacacctttgtagattgagctagctctgt

SEQ ID NO: 469187 - DNA, 120 bp, Artificial Sequence
  ENSG00000159023_50 (sequence is synthesized)
acttaattaaagctaacactttgatcagatcagtgtcagaagattacttctccattgccttcagaaatactctagtaactctttccttactgcttcacagcctcccctggtgaagacaca

SEQ ID NO: 469188 - DNA, 120 bp, Artificial Sequence
  ENSG00000159023_51 (sequence is synthesized)
cagctcaaactatcacatctgagaccccaagcagcaccaccacaactcaaattaccaaggtaacagaccagctagaacctctttatggaacccaggggcaggctaagcttgctgccacct

SEQ ID NO: 469189 - DNA, 120 bp, Artificial Sequence
  ENSG00000159023_52 (sequence is synthesized)
ctctgcaagaaggaccctagtccataagcaaatattttcagctccatccctagtaagccacattattcaaagagtcctggatggaaaggccctgctgccttccccagcaataaatctagg

SEQ ID NO: 469190 - DNA, 120 bp, Artificial Sequence
  ENSG00000159023_53 (sequence is synthesized)
gagataccctgagagtatccctgcctacttagtagtctcctaaaggtaggtgtggttgttctctttacacatctgtctctctggtcagtgagtcccctgtctggctgtggaagtaagttt

SEQ ID NO: 469191 - DNA, 120 bp, Artificial Sequence
  ENSG00000159023_54 (sequence is synthesized)
atgtcatcagtccaaatacctagctaactcactttctgatttagaggccttaactttttgaccaggaacgttttcaaagcaattgcttattctcatagactcaacaaagttattcttcat

SEQ ID NO: 469192 - DNA, 120 bp, Artificial Sequence
  ENSG00000159023_55 (sequence is synthesized)
tctttctaaatgaagatgtctcccatgaacctataaaatattttcgtagagttatgtcagtaagactgtaagctatctcagaagttataaggtgacccactccttgacccaactattatt

SEQ ID NO: 469193 - DNA, 120 bp, Artificial Sequence
  ENSG00000159023_56 (sequence is synthesized)
aggcatgagccaccgcgcccggccccaactattatttttttaaatgatcttataaaacacaccagtatgattgatcctctgctttttaaaataattttactcatctagaaggaatctcca

SEQ ID NO: 469194 - DNA, 120 bp, Artificial Sequence
  ENSG00000159023_57 (sequence is synthesized)
gctttttaaaataattttactcatctagaaggaatctccacattgctttttaagactaagctctgctattgtgattaaaataaaattttattttctaagatggatgtatgcacatttcca

SEQ ID NO: 469195 - DNA, 120 bp, Artificial Sequence
  ENSG00000159023_58 (sequence is synthesized)
aagaactggtattacataaagcgcatctgtgtggttgctcaaatcttaagtacctttacaaaaaggagaagattcattatgtaggagaggttgtactgctgagttgcctatggttctgag

SEQ ID NO: 469196 - DNA, 120 bp, Artificial Sequence
  ENSG00000159023_59 (sequence is synthesized)
ttaattgcacccacagtcactgcactgtgttgaaaaatcaccaatttaattagcagatttcctagacagtgactagactgaccttttatatgttaagctttgtaaacacatttaagccgt

SEQ ID NO: 469197 - DNA, 120 bp, Artificial Sequence
  ENSG00000159023_60 (sequence is synthesized)
gatggaatcgaagtgctagctcagatttattgaaataaatatagctcttgctgttggcaacaggaattatgagaagcagtcttcataagaagaattacatttttatatgtctgttaagaa

SEQ ID NO: 469198 - DNA, 120 bp, Artificial Sequence
  ENSG00000159023_61 (sequence is synthesized)
attaaaaaaaatttttttaaccataagatcttagtaagtgttctcgctttggcagatggattaaccttgttcttttggagccagatcaatatctagtttatctctagagcagtggacagt

SEQ ID NO: 469199 - DNA, 63 bp, Artificial Sequence
  ENSG00000159023_62 (sequence is synthesized)
tcttataaacgtagtagctttttcatcaagattcggcctggagagactctacctctcaggttc

SEQ ID NO: 469200 - DNA, 120 bp, Artificial Sequence
  ENSG00000159023_63 (sequence is synthesized)
gcaaatccccacaggagaaggagtgagtactttgtccacatgaccaattgtgaaaatggagggaataaatgtttttatgtattaatattctgtatctgagagaaagcttagagctgaaat

SEQ ID NO: 469201 - DNA, 120 bp, Artificial Sequence
  ENSG00000159023_64 (sequence is synthesized)
ttggatttggtgcctcactatattcattgctgctttaaggcatttgtaatcaaatatttatttttttttaagtcaggtaggctacccagtgcaattataggagctatttggagccaccag

SEQ ID NO: 469202 - DNA, 120 bp, Artificial Sequence
  ENSG00000159023_65 (sequence is synthesized)
tagatgattagcctctgagaactgtctctgcagctacatgcttctggctaatgtatgtttataaactgaccataagccagtagaggtttatttgtattcaaactgtgccttcagggacta

SEQ ID NO: 469203 - DNA, 120 bp, Artificial Sequence
  ENSG00000159023_66 (sequence is synthesized)
gaaagtttactaaatttaggaaggtcaaaataggaaagacattagtctttttaaaaagctttatttgaacatttgcacaacttagaaatatctggactggttccccacaattatatagta

SEQ ID NO: 469204 - DNA, 120 bp, Artificial Sequence
  ENSG00000159023_67 (sequence is synthesized)
gaacgtgctctgttagtacaggatgaagagaaaattaaaaggcaagaaagatctactgaaagagccttgccccagcaagaaaatgaagaaattcttcccaaggtttctattccaatccct

SEQ ID NO: 469205 - DNA, 120 bp, Artificial Sequence
  ENSG00000159023_68 (sequence is synthesized)
gaggatcacaagtctctcaaaaagtgccacctctactttagtacttttccatctcctcgtattcctttcatgatgtcttttctcgtgatccttgtgttggctgtttggtggttggtcttt

SEQ ID NO: 469206 - DNA, 120 bp, Artificial Sequence
  ENSG00000159023_69 (sequence is synthesized)
ctgtgatcagaaaacagggtgctcatctgaaatgtcaagaccattgaacttctgtccttggcttcaactgtgttattgctgtatgatgccctctgatcttgatagttcactatcctaggg

SEQ ID NO: 469207 - DNA, 120 bp, Artificial Sequence
  ENSG00000159023_70 (sequence is synthesized)
gagctcttgtgatcatttttctgtcaaatgttactctttgtagagtatgtattgtggggtacaaaggagtagcaatggactgcccaaagccagcttttctgcattgaagtttaacaaatt

SEQ ID NO: 469208 - DNA, 120 bp, Artificial Sequence
  ENSG00000159023_71 (sequence is synthesized)
taaacaaatcagaattaagcatatggcaggttggtaatcttcccaaaagctttaactcttttatcctgcatgtttactgtttactattgttatgtcttcctatccaatatctcacacaaa

SEQ ID NO: 469209 - DNA, 120 bp, Artificial Sequence
  ENSG00000159023_72 (sequence is synthesized)
ccaggatactctctagatacatttgatggaatattttcctaatcctctatagtcatttgtttggcatgggcttcatagtttaagaaaaaatttcaactcgctaacctttcagaagcctta

SEQ ID NO: 469210 - DNA, 120 bp, Artificial Sequence
  ENSG00000159023_73 (sequence is synthesized)
aaatgataacgttttaatctacaaatccataaccactccttttcttaggatatcaaaccagtataaacaaaagtcttttctggaaaagggcttttgacttctgtggcctttttatgagta

SEQ ID NO: 469211 - DNA, 120 bp, Artificial Sequence
  ENSG00000159023_74 (sequence is synthesized)
tttctgagctgtacagggacagacaactttttcctgcctggtgtatagaagagatcttcaaagattaaatgccatcttttcacaagtagagtgttgatatggtttaaggaaaatggtgct

SEQ ID NO: 469212 - DNA, 120 bp, Artificial Sequence
  ENSG00000159023_75 (sequence is synthesized)
ggtgccccttagcctccagccaggactgaaattctcagactactctacctatccttaaaagtctggaacacagatttactcaagatctgtacataaacccttctctgaattaagatactg

SEQ ID NO: 469213 - DNA, 120 bp, Artificial Sequence
  ENSG00000159023_76 (sequence is synthesized)
tgttacttctttatggctttactaattatattgctagcagcaatagttagccattgctaagcttaaaatatatattgatatactttgttttcctgatatacttcagacctgtttgttcgt

SEQ ID NO: 469214 - DNA, 120 bp, Artificial Sequence
  ENSG00000159023_77 (sequence is synthesized)
gtacttgtgttgaaatcaattgtttttaatcaatggctttgtgacctcaagttcacttgtgacaagtatgtgtcctctgtttgcatgttgacttctaagacttacctgaagtaaatgtgg

SEQ ID NO: 469215 - DNA, 120 bp, Artificial Sequence
  ENSG00000159023_78 (sequence is synthesized)
gcactctctctctcttcaggacaactcacatgcctaacctgttattttttacctcaatattgaagaaaccttgcatgtagcttgctttttatggcacttgaatgtaccaatatggatgat

SEQ ID NO: 469216 - DNA, 120 bp, Artificial Sequence
  ENSG00000159023_79 (sequence is synthesized)
ttggttaatgtctcaaatatttgttttgaaatctgagtttatagggttatcaaactaagattattatactttgttttacttctcaatgcttttcagttgatgaaacttctaaacaagact

SEQ ID NO: 469217 - DNA, 120 bp, Artificial Sequence
  ENSG00000159023_80 (sequence is synthesized)
ttttgtttttgagaagatggcctcttagagcaaaaaaagagaacagtaaagacaagaatcttttgtccttcaacatctaccaatattgttctcttgtctctggagacatgtagaaataat

SEQ ID NO: 469218 - DNA, 120 bp, Artificial Sequence
  ENSG00000159023_81 (sequence is synthesized)
tatctgttatttcctgaaaactgctacgctgtcattataggctttcccaagaaatggaaaaagaagcaaggaccaggttaaaatttaaaatttggtgtgcgtatatatcttttatgtcac

SEQ ID NO: 469219 - DNA, 120 bp, Artificial Sequence
  ENSG00000159023_82 (sequence is synthesized)
ggcccaggttcttaaagtctcctccttgacacaatcatcacagttgtaattcagtagttatttacatgattgtctcctcactgcattgtaagctccataagtacaggggccatgtctgtc

SEQ ID NO: 469220 - DNA, 120 bp, Artificial Sequence
  ENSG00000159023_83 (sequence is synthesized)
ttcttcaggctgtatccccaacacctggcacacagcaggtgctcagttaatgtttgttcacagggacgctgctgcctctagtgggctgggccctggaggcctgatgagctgagggtggat

SEQ ID NO: 469221 - DNA, 120 bp, Artificial Sequence
  ENSG00000159023_84 (sequence is synthesized)
tatcagattattgctgactagggcgtctgccccagcaagaccccagaggcagagggagggcagggttccctcctggctcaggccctggctgaagaaggggacccaaagggctttttcttt

SEQ ID NO: 469222 - DNA, 120 bp, Artificial Sequence
  ENSG00000159023_85 (sequence is synthesized)
ctgatacatatcacttaggggtgtgcaaagaaccagtgttgaacttccaaactgatcagagaaggctagctcaactgagagaacttagagccaagtttttcctttcatagataacatctg

SEQ ID NO: 469223 - DNA, 120 bp, Artificial Sequence
  ENSG00000159023_86 (sequence is synthesized)
tcttgactatggatagcagagtacagaaattgcagggggaataaaaacttctcaattggacaattggggagaaaaaactttctttaaaagtgtctaaagcatttgcttaaagtaatgtat

SEQ ID NO: 469224 - DNA, 120 bp, Artificial Sequence
  ENSG00000159023_87 (sequence is synthesized)
aaaatgtataagattaagattttttatttctggagcaaaaactaattgctatactgaatgaactgttgcttttaaaactgttgtttttaaagtctatatgaagagatataaggattactt

SEQ ID NO: 469225 - DNA, 120 bp, Artificial Sequence
  ENSG00000159023_88 (sequence is synthesized)
tctatatgaagagatataaggattactttttatattctgccattatatttgtaataaaagtaactttttttttttgtctgagacagactgttgttctgtcccccaggctggagtgcagtg

SEQ ID NO: 469226 - DNA, 75 bp, Artificial Sequence
  ENSG00000159023_89 (sequence is synthesized)
tcagccaaaaataacttttatgatggcaaggagaatgcttcattattggcattgcccaattagtgattggcagca

SEQ ID NO: 469227 - DNA, 120 bp, Artificial Sequence
  ENSG00000159023_90 (sequence is synthesized)
tgcttcattattggcattgcccaattagtgattggcagcaccaaagtaatagaaaatgacctaaaattcatatgtgaatatcctcaaaggaagaataaataacatagcaaggggaaagcc

SEQ ID NO: 469228 - DNA, 120 bp, Artificial Sequence
  ENSG00000159023_91 (sequence is synthesized)
agtgattccttgaactttccgttctaatgttcactcactcaaaaaggtatctattgagcaccctattgtgttacagaaactttgccaggataaattgccaaaataaagtaaagctaaaat

SEQ ID NO: 469229 - DNA, 120 bp, Artificial Sequence
  ENSG00000159023_92 (sequence is synthesized)
gaagagtgtctaaaagatacttccaaatcctttgcacatccccaagtatcatttttgagcattttccatctgtcattttgttcatcttattctgtctttcttgatcttctactgtgaaag

SEQ ID NO: 469230 - DNA, 120 bp, Artificial Sequence
  ENSG00000159023_93 (sequence is synthesized)
gccaggctggtctcaaacttctgaccttagttgatccaccttcctcagcctctcaccgcacccagcgagaaatctgttttgaaagtaataattagtggctgggtgcagtggctcacacct

SEQ ID NO: 469231 - DNA, 120 bp, Artificial Sequence
  ENSG00000159023_94 (sequence is synthesized)
aaactcttatctcaaaaaaaagaaaaaaatatatatttctctgaggagaattccccaattcacagcttttttgggcagtatttaccaataagtcagaataagataaagcaacattattta

SEQ ID NO: 469232 - DNA, 80 bp, Artificial Sequence
  ENSG00000159023_95 (sequence is synthesized)
ccttcgttctgtagcccaggccaaagtgcagtggcgcaatcttggctcattacaacctctccctcccgggttcaagcgat

SEQ ID NO: 469233 - DNA, 120 bp, Artificial Sequence
  ENSG00000159023_96 (sequence is synthesized)
gtctcccgagtagctgggattacagacgcgaaccaccgcacccggctaatttttgcatttttagtattttggccaagctggtcttgaactctggacctcaaatgatccgcccaccttggc

SEQ ID NO: 469234 - DNA, 87 bp, Artificial Sequence
  ENSG00000159023_97 (sequence is synthesized)
cttctggcctcaaatagcacaggtgtgtgtcacaccttgctaaaagacagggttttaccatgttgcccaggcaggtctcaaactcct

SEQ ID NO: 469235 - DNA, 90 bp, Artificial Sequence
  ENSG00000159023_98 (sequence is synthesized)
accacaggtgtgtgtcacaccttgctaaaagacagggttttacagctcaggccatccaccctccccagcctcccaaagtgctgggattac

SEQ ID NO: 469236 - DNA, 120 bp, Artificial Sequence
  ENSG00000159023_99 (sequence is synthesized)
taataaatccctatgcacatgtttctttcatttcccttggccaggctccttttgctctaatacttagctgagtaaattaattattcattaacaattcagcatgatatttaagcctaagaa

SEQ ID NO: 469237 - DNA, 120 bp, Artificial Sequence
  ENSG00000159023_100 (sequence is synthesized)
atctttagtccctttgggacattttctttgatatttttctcacattatttgctctgttaatgtgtaaacttatgaataaatcttatttattgcaaatgtgattctggttgctactaatca

SEQ ID NO: 469238 - DNA, 120 bp, Artificial Sequence
  ENSG00000159023_101 (sequence is synthesized)
ttaaggaagtaggagttaataatgctgttcatagacctactaccaaaaaaatccaaatgaacctctgttttcagccgatcagcaagagattgctgtcagctagtctttctcttgtttttc

SEQ ID NO: 469239 - DNA, 120 bp, Artificial Sequence
  ENSG00000159023_102 (sequence is synthesized)
cttatattcactcttctctgtggcccaataattagttgtcttttgcttagtcgtaagacagagacaacctactggtgtgcattcagttctcagaatgttattttaaatcagctttgaact

SEQ ID NO: 469240 - DNA, 120 bp, Artificial Sequence
  ENSG00000159023_103 (sequence is synthesized)
aatttgactatgccaagttttaaaaataatttttttctaaccaatttaattagtcactacaacagatgtagttgtcacatctgttagaaacattttagtatgatgaatttgtcttttatg

SEQ ID NO: 469241 - DNA, 120 bp, Artificial Sequence
  ENSG00000159023_104 (sequence is synthesized)
ggctttttaaaagcactgtacaaatttgtagttaataactcttcagtattgccactctaatcttactgaaaagtgaagaatggtgtgggtgtgggtatgtgggtgtgaggagagcttgtt

SEQ ID NO: 469242 - DNA, 120 bp, Artificial Sequence
  ENSG00000159023_105 (sequence is synthesized)
cctgtaatgtgaaatcgacagaaggtatatcactttatctcttacttcaccttgggtaaaccttctcttaactctcacagctctagattttattatattattcaggtgattatttcaaac

SEQ ID NO: 469243 - DNA, 69 bp, Artificial Sequence
  ENSG00000159023_106 (sequence is synthesized)
ctctagattttattatattattcaggtgattatttcaaactaatgcttcctgggtggatcgcctgaggt

SEQ ID NO: 469244 - DNA, 120 bp, Artificial Sequence
  ENSG00000159023_107 (sequence is synthesized)
tacccacctcaaatggtgaccaaacacagaagcttgcagaaaaaactgaagatctgataagaatgaggaagaaaaagagagaaagactagatggtgaaaacatttatatcagacatagca

SEQ ID NO: 469245 - DNA, 120 bp, Artificial Sequence
  ENSG00000159023_108 (sequence is synthesized)
taagagggacctgaaatattacaaagctgttctctaccacagaaagtaataatcatgagtactctcttttatctgggaaataaagatacaagagtttcccttaatgaaataacaaattgg

SEQ ID NO: 469246 - DNA, 120 bp, Artificial Sequence
  ENSG00000159023_109 (sequence is synthesized)
ttaaatctttttttaaggaattaaaaggaaataatcagaactttatttatacttttataactgtttcagattataattcctgaatttccagttttcatccttatacacagctttttatta

SEQ ID NO: 469247 - DNA, 120 bp, Artificial Sequence
  ENSG00000159023_110 (sequence is synthesized)
attactattgtaaacttcaccctgaattttatttctctttgtattggagttattccaagtccattaaaagtctaagccaatgatacttttcagttttctgaaatgcagcaagagtcctcg

SEQ ID NO: 469248 - DNA, 120 bp, Artificial Sequence
  ENSG00000159023_111 (sequence is synthesized)
gagatctttattgagagtcaaaggagaggccatttcttctatcaatagggtaagaatgattaagaggagaatggccaagcccttgtattggatgaagctgaccaatgcagactcaaaaga

SEQ ID NO: 469249 - DNA, 120 bp, Artificial Sequence
  ENSG00000159023_112 (sequence is synthesized)
taccatcacaattatcagaggaaaaatattgggcattccagctttgtattacctaaaggtaacactgccaatatttgcaacataaagcgtaaatgggctgggcgtggtggctaacacctg

SEQ ID NO: 469250 - DNA, 66 bp, Artificial Sequence
  ENSG00000159023_113 (sequence is synthesized)
agatcacttgagtccagtcaggtatagtggtgtacacctgtgtagtccagctactcagggggctga

SEQ ID NO: 469251 - DNA, 120 bp, Artificial Sequence
  ENSG00000159023_114 (sequence is synthesized)
ctctacaaaaattagtcaggtatagtggtgtacacctgtgtagtccagctactcagggggctgaaacaggaggattgcttgagccaggagaccaaggctgcagtgagccatgattgcacc

SEQ ID NO: 469252 - DNA, 120 bp, Artificial Sequence
  ENSG00000159023_115 (sequence is synthesized)
ggaatgttgaagagatctgggcctgggaggggtccctgggcaggaagaccgatgaatacaggagtttgtttgccatcttcatctgcaaaaagcctctttggccactctagctcttaattg

SEQ ID NO: 469253 - DNA, 120 bp, Artificial Sequence
  ENSG00000159023_116 (sequence is synthesized)
agaagaaagacaaagacaatcaaagtaagaggcctgtgggatggaggccacagattgaggagccaggaaatgtaatggaaagaacatgagctttggattccaagacttgattcaattgct

SEQ ID NO: 469254 - DNA, 120 bp, Artificial Sequence
  ENSG00000159023_117 (sequence is synthesized)
ggttcttaatatattctagctgttaactctctgggcctccattttgcatctgtaagatgaagatgatagtatctccctctcagggttgttgtgagaatcaggtgaaatactggatgaaca

SEQ ID NO: 469255 - DNA, 120 bp, Artificial Sequence
  ENSG00000159023_118 (sequence is synthesized)
gctggtggcacatggtgagctcagttaaatggagctattgttattccgaaggtaaaggtacctgaacccatgctagacaacatcaaaacaaagggaagcatgcccctacccttagagagc

SEQ ID NO: 469256 - DNA, 120 bp, Artificial Sequence
  ENSG00000159023_119 (sequence is synthesized)
tgtaacagccgagaagacacgagcgggagcatagtatggtggacaagacaccagcagactcgaaacttgttttctgccctacatctctaacttgctgtgtgaccttgggcaaatcacttt

SEQ ID NO: 469257 - DNA, 120 bp, Artificial Sequence
  ENSG00000159023_120 (sequence is synthesized)
tccgctgatttttttctcctttcctaaaagagagtgggttgatctagataatttctgggcctgagtgctaaaattctatatttttatgttaattgggtgctaattgtgtgctgcaagcaa

SEQ ID NO: 469258 - DNA, 120 bp, Artificial Sequence
  ENSG00000159023_121 (sequence is synthesized)
ttagcaaataataaggtcaggattaatgttcccagttctctgctgggtgaggttagaacagtaaagctgcagagaagagggggtggaagagattgcatgcaaatgcttctggaatcgttg

SEQ ID NO: 469259 - DNA, 120 bp, Artificial Sequence
  ENSG00000159023_122 (sequence is synthesized)
actgggttgctggagcaataattctgtggcctttttatgctgatatgctgagtgcctttaaaaaaagaaaaactgagctacagtgctggcagttcccttggaggcagggttgagagttac

SEQ ID NO: 469260 - DNA, 120 bp, Artificial Sequence
  ENSG00000159023_123 (sequence is synthesized)
agctgagaatagtggacacagggtcccagaaacaaggctgcaaagcctaaatatcttgcagcctgttggcccagctcagtgggtcccgctgctttagaagcctgcacccacccactcagt

SEQ ID NO: 469261 - DNA, 120 bp, Artificial Sequence
  ENSG00000159023_124 (sequence is synthesized)
ctggtgtgatctgagcccctgctacgtgctcagtctgcactagacagcaaaagcaatgcggtgaaaggtgtttgaggtttggagtgagacagacttgggctgaatcctgactctgcgacc

SEQ ID NO: 469262 - DNA, 120 bp, Artificial Sequence
  ENSG00000159023_125 (sequence is synthesized)
taattggttatatgtccttgagcaacttatattaccaacctgagctctagttttaccatctgtaaaataaggatgatcacaggtttcttccagggtcataagggccaaacacacttggta

SEQ ID NO: 469263 - DNA, 120 bp, Artificial Sequence
  ENSG00000159023_126 (sequence is synthesized)
gctcagagagatgctccagtgtccctcaggttttctagttactgagagtgcatggaaggggtaagctatggtacactctggctggcgagggaggcactttaagaactgttaaggagaagc

SEQ ID NO: 469264 - DNA, 120 bp, Artificial Sequence
  ENSG00000159023_127 (sequence is synthesized)
agtgtggagcagcaggtttcatagagaggtgggcggaggcagagtcacaaagagaagacttgagctgggcctgaggtgtgagcagatgggttgggcaaacaggatcagggaggatggtca

SEQ ID NO: 469265 - DNA, 120 bp, Artificial Sequence
  ENSG00000159023_128 (sequence is synthesized)
ggggcccacagaggtggtagttctaagaatgccattcatagagccaggagaccagaagagggttttccttcttcccttgccccttctagagatggttcttaagagccaggtgagtagtca

SEQ ID NO: 469266 - DNA, 120 bp, Artificial Sequence
  ENSG00000159023_129 (sequence is synthesized)
gctggtcatttctagctgagtccttttccataggggagcctgcaaattcagagactgcagcccaaagaggatggtgtttttgctcttttgactttccctctgctctctttagcttttcta

SEQ ID NO: 469267 - DNA, 120 bp, Artificial Sequence
  ENSG00000159023_130 (sequence is synthesized)
aagtaatcaaagctcctccagatcctcaaacagggaccccctcagaaactaaacaacagtgtggtaaagaggaaagtctgatcgacttgagttaaaatccctattgcacggctgggtgcg

SEQ ID NO: 469268 - DNA, 120 bp, Artificial Sequence
  ENSG00000159023_131 (sequence is synthesized)
tattatgactttaatcaatttttagaactgagacttctgtgaaatccagccaaacaaattcaattttgttccattctaacttcagagtttttgtactggtcatagctcctttttctccac

SEQ ID NO: 469269 - DNA, 120 bp, Artificial Sequence
  ENSG00000159023_132 (sequence is synthesized)
cttcatccctccacccctacccttcatagtgtaatgaaataaaactgaccaccaaacgcttctggtctgttagacatgcttagtataacctttaatatttgcccaagcactttgacctct

SEQ ID NO: 469270 - DNA, 120 bp, Artificial Sequence
  ENSG00000159023_133 (sequence is synthesized)
tgggtatcttcttctgtgcttagcaagataacctcgattcctgctggttctgtggtcatttgcactgcaaagcatttcttactgggtttgcaaagcaaggcctcccctggtgaagacaca

SEQ ID NO: 469271 - DNA, 120 bp, Artificial Sequence
  ENSG00000159023_134 (sequence is synthesized)
tgaatgggagggtcccaagcattcggtagttcctagtaaaagccagatgaccacctcgtcggagtctctgcaaagctttgcctttggctccctctccataagcagcaaggagacagaaga

SEQ ID NO: 469272 - DNA, 120 bp, Artificial Sequence
  ENSG00000159023_135 (sequence is synthesized)
gaaggaggagggggcagctggctatcttgatattaaggagatgccaagaggcccaactgggggatgtataggagtggaggaacaggccagtgccttaaagttctcagtaacaccagcttc

SEQ ID NO: 469273 - DNA, 120 bp, Artificial Sequence
  ENSG00000159023_136 (sequence is synthesized)
ctgtcagctgcaacctggtgtaaaaaaggcagagagtagtgaagaacatgttacaccaggagagccacctggaaaacaaaatggatcatttcttgactttcatgtgggtaaccagttccc

SEQ ID NO: 469274 - DNA, 120 bp, Artificial Sequence
  ENSG00000159023_137 (sequence is synthesized)
caccctcattcgaagtttccagcctcccctggtgaagacacaaactgtcaccatctcagataatgccaatgctgtgaaaagtgaaatcccaaccaaagacgtccctattgtccacactga

SEQ ID NO: 469275 - DNA, 120 bp, Artificial Sequence
  ENSG00000159023_138 (sequence is synthesized)
ctacattttttagtttgcatgttgtagaccatctgggggtattacttaaatacattgttgataatttaagtgactatgatatttattgtttactttagttaagaaccaggagctggactc

SEQ ID NO: 469276 - DNA, 120 bp, Artificial Sequence
  ENSG00000159023_139 (sequence is synthesized)
tcgaagtttccaggtagtaatttattcaatgatgcaggtctaatgactgtctttggaagagggccagaatctgtcctgtggaggaggtggtggtggtatggtgagggtagtggcctccct

SEQ ID NO: 469277 - DNA, 120 bp, Artificial Sequence
  ENSG00000159023_140 (sequence is synthesized)
gctgttttcaaaatcacagactaaaagcctttgattgtgccaaagaaattcattcagagcaattaactgcatggctagaaatgctttcttctctgataacttaacaaaactccagctgtc

SEQ ID NO: 469278 - DNA, 120 bp, Artificial Sequence
  ENSG00000159023_141 (sequence is synthesized)
agtatgaagctggttaagtgtgttcatcttttccttgctcaagtgtgggctatggaaagaggtgaattgcggtgacttctgtggtgaggaggcttcagtgttctgagaccatgcttaaaa

SEQ ID NO: 469279 - DNA, 120 bp, Artificial Sequence
  ENSG00000159023_142 (sequence is synthesized)
aattcaaatactcttaattaaaggggcaactcatcttcttatgagatttcaggccccaaataatttatgtactgcagccacattgtgcagcccaccactcccactgaccccacccacaag

SEQ ID NO: 469280 - DNA, 120 bp, Artificial Sequence
  ENSG00000159023_143 (sequence is synthesized)
agcattcaggatcataggcactgatttcctatgctaaggtggttggccacttaaccttattacaatcaaatggtagtttcagtgtgatttatactcctggggaaggtgagcagatggaca

SEQ ID NO: 469281 - DNA, 120 bp, Artificial Sequence
  ENSG00000159023_144 (sequence is synthesized)
agaaggcctttggtattccactaatgttcattcttctgaaattctgggattaatcaccaggtggtggtagaactgattgtttttttctttccagttttccaaatactgtctcttctcaat

SEQ ID NO: 469282 - DNA, 120 bp, Artificial Sequence
  ENSG00000159023_145 (sequence is synthesized)
aactccaaagtgaatctctgacattgatttgaaagaagttaatgaattcgagggtaatgcattccattgccactgctgtttcatgtaccattcgtacttagtggaggaaatgtggctgat

SEQ ID NO: 469283 - DNA, 120 bp, Artificial Sequence
  ENSG00000159023_146 (sequence is synthesized)
tttcttaattataatggtacagacacaaggacaaatcaaagtgattgctatttggcaaatcgttttatattcaaattctgaaggtcagtctgaagtgttttatatcaccaatcataactg

SEQ ID NO: 469284 - DNA, 120 bp, Artificial Sequence
  ENSG00000159055_0 (sequence is synthesized)
ccatggcgctctggggcgcgggcgatttgtaggtaatggcaggcgttcggtcactgaggtgtagcagaggatgcgctggcggctgtgagtgcggcgacaagggcaaatgcagcgactcct

SEQ ID NO: 469285 - DNA, 120 bp, Artificial Sequence
  ENSG00000159055_1 (sequence is synthesized)
cgctgttgggcaagagactctccgaagactcgagccgccaccagctgttgcagaagtgggcgagcatgtggagctccatgagcgaagacgcgtcggtggccgacatggagagggcgcagc

SEQ ID NO: 469286 - DNA, 120 bp, Artificial Sequence
  ENSG00000159055_2 (sequence is synthesized)
tggaggaggaggcggcggctgcggaggagaggccgctggtgttcctgtgctccggctgccggcggccgctgggcgactcgctgagctgggtggccagccaggaggacaccaactgcatcc

SEQ ID NO: 469287 - DNA, 120 bp, Artificial Sequence
  ENSG00000159055_3 (sequence is synthesized)
tgcttcgctgtgtttcctgtaatgtttctgtggataaggaacagaagctatccaaacgtgaaaaggaaaatggttgcgtccttgagactttgtgctgcgcggggtgctcactcaatcttg

SEQ ID NO: 469288 - DNA, 120 bp, Artificial Sequence
  ENSG00000159055_4 (sequence is synthesized)
gctacgtgtacagatgcacgcccaagaatcttgattacaagagagacttgttttgcctcagtgttgaagccattgaaagttatgttttagggtcctctgaaaagcaaattgtgtcagaag

SEQ ID NO: 469289 - DNA, 120 bp, Artificial Sequence
  ENSG00000159055_5 (sequence is synthesized)
ataaagagctttttaatcttgaaagcagagttgaaatagaaaagtctctaacacagatggaagatgtcttgaaagcattacaaatgaagctgtgggaggccgaatccaaattgtcctttg

SEQ ID NO: 469290 - DNA, 120 bp, Artificial Sequence
  ENSG00000159055_6 (sequence is synthesized)
aatgaagcaacatagtgagacgtcgtctctacaaaaaaaaaaagaaaaaaaaaattagccaggcatgcgaaacgctgaggtgggaggatcagatgagcttgggaggttgaggctgcagtg

SEQ ID NO: 469291 - DNA, 120 bp, Artificial Sequence
  ENSG00000159055_7 (sequence is synthesized)
caacagagtgagaccttctctcaaaaaaaaaacccaaaattgtagaattacttctatagctatattttatgataaagaagtgattgtttctcaaaatcgcattttaaagacgttttatgg

SEQ ID NO: 469292 - DNA, 120 bp, Artificial Sequence
  ENSG00000159055_8 (sequence is synthesized)
tacttgttggaattgggacttaggagttttgattttgataagaaactgggataattttctgaactttttttcctctgtatcacatttatttactatttttaaaaactttgacatttaaca

SEQ ID NO: 469293 - DNA, 120 bp, Artificial Sequence
  ENSG00000159055_9 (sequence is synthesized)
cttgggacaacatttattataaatgataagaaaaatcttagaggtttgtctacccacagtgtcatggaatcttctctgaaaactaatccataaagttccctggagaaattggtcagaatg

SEQ ID NO: 469294 - DNA, 120 bp, Artificial Sequence
  ENSG00000159055_10 (sequence is synthesized)
atctgtcagaaccatttgaaaacttgctcaagagcagttgcttatatatagtaggattttactttttcctgcttatgtactactatatgcttaaaaaacctggaggaatacttaccaaag

SEQ ID NO: 469295 - DNA, 120 bp, Artificial Sequence
  ENSG00000159055_11 (sequence is synthesized)
aggagtaaccatctctgagggtgggattctgggggaatttttgtttttttctgttttctataatgtgaaacttttgtagtatgtatttttctaattgaagagaataaagattaaaacaaa

SEQ ID NO: 469296 - DNA, 120 bp, Artificial Sequence
  ENSG00000159055_12 (sequence is synthesized)
atagaaaagtctctaacacaggtaattttattctgtacattttatatctttgtatgaacagtttgtcagtgaagaagtgctcccccacaaacgataattctcataacgtcatctgtgttg

SEQ ID NO: 469297 - DNA, 120 bp, Artificial Sequence
  ENSG00000159063_0 (sequence is synthesized)
gtggatcaagttggtgggaagcgtgcggtgccgcagcaatggcggcgctcacaattgccacgggtactggcaattggttttcggctttggcgctcggggtgactcttctcaaatgccttc

SEQ ID NO: 469298 - DNA, 120 bp, Artificial Sequence
  ENSG00000159063_1 (sequence is synthesized)
tcatccccacataccattccacagattttgaagtacaccgaaactggcttgctatcactcacagtttgccaatatcacagtggtattatgaggcaacttcagagtggacgttggattacc

SEQ ID NO: 469299 - DNA, 120 bp, Artificial Sequence
  ENSG00000159063_2 (sequence is synthesized)
cccctttctttgcatggtttgagtatatcctgtcacatgttgccaaatattttgatcaagaaatgctgaatgtccataatttgaattactccagctcaaggaccttacttttccagagat

SEQ ID NO: 469300 - DNA, 120 bp, Artificial Sequence
  ENSG00000159063_3 (sequence is synthesized)
tttccgtcatctttatggatgtactctttgtgtatgctgtccgtgagtgctgtaaatgcattgatggaaaaaaagtgggtaaagaacttacagaaaagccaaaatttattctgtcggtat

SEQ ID NO: 469301 - DNA, 120 bp, Artificial Sequence
  ENSG00000159063_4 (sequence is synthesized)
tacttctgtggaacttcgggttattaattgtggaccatattcattttcagtacaatggctttttatttggattaatgctactctccattgcacgattatttcagaaaaggcatatggaag

SEQ ID NO: 469302 - DNA, 120 bp, Artificial Sequence
  ENSG00000159063_5 (sequence is synthesized)
gagcatttctctttgctgttctcctacatttcaagcatatctacctctatgtagcaccagcttatggtgtatatctgctgcgatcctactgtttcactgcaaataaaccagatgggtcta

SEQ ID NO: 469303 - DNA, 120 bp, Artificial Sequence
  ENSG00000159063_6 (sequence is synthesized)
ggtcctttcctggccttgaatcagctgcctcaagtcttttcccgactctttcctttcaagaggggcctctgtcatgcatattgggctccaaacttctgggctttgtacaatgctttggac

SEQ ID NO: 469304 - DNA, 120 bp, Artificial Sequence
  ENSG00000159063_7 (sequence is synthesized)
aaagtgctgtctgtcatcggtttgaaattgaaatttcttgatcccaacaatattcccaaggcctcaatgacaagtggtttggttcagcagttccaacacacagtccttccctcagtgact

SEQ ID NO: 469305 - DNA, 120 bp, Artificial Sequence
  ENSG00000159063_8 (sequence is synthesized)
cccttggcaaccctcatctgcacactgattgccatattgccctctattttctgtctttggtttaaaccccaagggcccagaggctttctccgatgtctaactctttgtgccttgagctcc

SEQ ID NO: 469306 - DNA, 120 bp, Artificial Sequence
  ENSG00000159063_9 (sequence is synthesized)
tttatgtttgggtggcatgttcatgaaaaagccatacttctagcaattctcccaatgagccttttgtctgtgggaaaagcaggagacgcttcgatttttctgattctgaccacaacagga

SEQ ID NO: 469307 - DNA, 120 bp, Artificial Sequence
  ENSG00000159063_10 (sequence is synthesized)
cattattccctctttcctctgctcttcactgcaccagaacttcccattaaaatcttactcatgttactattcaccatatatagtatttcgtcactgaagactttattcagaaaagaaaaa

SEQ ID NO: 469308 - DNA, 120 bp, Artificial Sequence
  ENSG00000159063_11 (sequence is synthesized)
cctctttttaattggatggaaactttctacctgcttggcctggggcctctggaagtctgctgtgaatttgtattccctttcacctcctggaaggtgaagtaccccttcatccctttgtta

SEQ ID NO: 469309 - DNA, 120 bp, Artificial Sequence
  ENSG00000159063_12 (sequence is synthesized)
ctaacctcagtgtattgtgcagtaggcatcacatatgcttggttcaaactgtatgtttcagtattgattgactctgctattggcaagacaaagaaacaatgaataaaggaactgcttaga

SEQ ID NO: 469310 - DNA, 120 bp, Artificial Sequence
  ENSG00000159063_13 (sequence is synthesized)
ttaaatcaaaagctagaaatgattgagcttgatgaggaaggcatcctgaaagccaagacgggctgaaagctaggcccattgtgccaaacagccaagttgtgagtgcagaggaaaagttct

SEQ ID NO: 469311 - DNA, 120 bp, Artificial Sequence
  ENSG00000159063_14 (sequence is synthesized)
tgaaggaaactaaaagtgctactccagtgaatacacaagtgataagaaagtgaaacaaccttgatgatatggagaatgttttagtggtctggatagatcaaaccagccataacattccct

SEQ ID NO: 469312 - DNA, 120 bp, Artificial Sequence
  ENSG00000159063_15 (sequence is synthesized)
taagccaaaaccttatccagagcaaggccctaagtcttcaattctttgaagcctaagagagggtctcactctgcctctcaggctgtagtgcagtagcatgatctcatctcactgcaacct

SEQ ID NO: 469313 - DNA, 120 bp, Artificial Sequence
  ENSG00000159063_16 (sequence is synthesized)
ctgaatattgaaaggacttaggcacatggagaaatggaaaaacctttgtgttttgaatgtggctgaattgtttgttctccagtcctgcatttcagctttcaggatgaacagggggagcag

SEQ ID NO: 469314 - DNA, 120 bp, Artificial Sequence
  ENSG00000159063_17 (sequence is synthesized)
ttcttgggactgaggctttagtgcagtaaacagactgttttccttataaaagctccttgtggtaatgaggttattgatcctttcctggggaaaaaataaaatatgtagacactctataaa

SEQ ID NO: 469315 - DNA, 120 bp, Artificial Sequence
  ENSG00000159063_18 (sequence is synthesized)
tcagggtcctcatccttaataggcagttaagaacctctgcctccaacagccattcagccagtattatcagatgcctgaggtgccaggtaccgttctaactcccgggagatgcggtggtga

SEQ ID NO: 469316 - DNA, 120 bp, Artificial Sequence
  ENSG00000159063_19 (sequence is synthesized)
gcaagacattgctggtccttgccctcgaagttggtgggtggagctagacaaacaggaacttttcagattgtgataaaggaaatagagggttactaagtggctgtgcgctattcctttaga

SEQ ID NO: 469317 - DNA, 120 bp, Artificial Sequence
  ENSG00000159063_20 (sequence is synthesized)
aggtgatgtttgagttgaaattcaaaaaatgaaaaagaataagtgatgtggaaagcagttcaggcataggaaagagtaagttcaaaggccctgtggcaggaaagaagtcagagcattcta

SEQ ID NO: 469318 - DNA, 120 bp, Artificial Sequence
  ENSG00000159063_21 (sequence is synthesized)
tggctgcagagcattgagggagaggagtggcacagcatggggtgcactggggacagataacacagggtttcgaagaccacagttagactgctgtgtaaaaaatggatgtagggccaagac

SEQ ID NO: 469319 - DNA, 120 bp, Artificial Sequence
  ENSG00000159063_22 (sequence is synthesized)
ctcagccagttctaatgtaataggagatgcagtttatttaagctatttgcaagtgtaataacagttgttgttttaagaaattatttttatttttagccttttgtctgtgggaaaagcagg

SEQ ID NO: 469320 - DNA, 120 bp, Artificial Sequence
  ENSG00000159063_23 (sequence is synthesized)
tcatccccacataggtctcactctgcctctcaggctgtagtgcagtagcatgatctcatctcactgcaacctccacctttcaggctcaagcaatcctcctacctcaacctgccaagtagc

SEQ ID NO: 469321 - DNA, 80 bp, Artificial Sequence
  ENSG00000159069_0 (sequence is synthesized)
ctcggccatcgatgcctcggggctcgtggcgtcgggcctggcgggctccccgttgggcgggggcggcggtccgagcggct

SEQ ID NO: 469322 - DNA, 120 bp, Artificial Sequence
  ENSG00000159069_1 (sequence is synthesized)
ggcgcagcgggcggaggcggccgtgggccgcctgggcagaatgtcacgatggacgagggcggcacgcccctgctccccgacagcctggtctaccagatcttcctgagcctgggcccggcc

SEQ ID NO: 469323 - DNA, 120 bp, Artificial Sequence
  ENSG00000159069_2 (sequence is synthesized)
gacgtgctggccgccgggctggtgtgccgccaatggcaggccgtgtcgcgggacgagttcctgtggagggagcagttctaccgctactaccaggtggcccgcgacgtgccccgacaccca

SEQ ID NO: 469324 - DNA, 120 bp, Artificial Sequence
  ENSG00000159069_3 (sequence is synthesized)
gcggccatgtcctggtacgaggagttccagcggctgtatgacacggtgccctgcgtggaggtgcagacgctgcgggaacacacagaccaggtcctgcacctcagcttctcccattccggg

SEQ ID NO: 469325 - DNA, 120 bp, Artificial Sequence
  ENSG00000159069_4 (sequence is synthesized)
taccagttcgcgtcctgctccaaggactgcactgtgaagatctggagcaacgacctgaccatctcgctgctgcacagcgcggacatgcggccctacaactggagctacacccagttctcc

SEQ ID NO: 469326 - DNA, 120 bp, Artificial Sequence
  ENSG00000159069_5 (sequence is synthesized)
cagttcaacaaggacgactcgctactgctggcctcgggggtgttcctggggccgcacaactcctcatccggcgagattgctgtcatcagcctagactccttcgcgctgctgtcccgcgtg

SEQ ID NO: 469327 - DNA, 120 bp, Artificial Sequence
  ENSG00000159069_6 (sequence is synthesized)
cggaacaagccctatgacgtgtttggctgttggctcaccgagaccagcctcatctcggggaacctgcaccgcatcggagatatcacctcctgctcggtgctgtggctcaacaatgccttc

SEQ ID NO: 469328 - DNA, 120 bp, Artificial Sequence
  ENSG00000159069_7 (sequence is synthesized)
caggatgtggagtcagagaacgtcaacgtggtgaagcggctgttcaagatccagaacctcaatgccagcaccgtccgcacggtgatggtggccgactgcagccgcttcgacagccctgac

SEQ ID NO: 469329 - DNA, 120 bp, Artificial Sequence
  ENSG00000159069_8 (sequence is synthesized)
ctgctgctggaagccggtgacccggccacgtccccctgccgcatctttgacctgggcagcgacaacgaggaggtggtggctggcccggcccccgcccacgccaaggagggcttgcggcac

SEQ ID NO: 469330 - DNA, 120 bp, Artificial Sequence
  ENSG00000159069_9 (sequence is synthesized)
cccagggccacaccaagccacccgagcgcagtgccacaggcgccaagagcaagtacctcatcttcaccactggctgcctcacctactccccacaccagatcggcatcaagcagatcctgc

SEQ ID NO: 469331 - DNA, 120 bp, Artificial Sequence
  ENSG00000159069_10 (sequence is synthesized)
cacaccagatgaccacggcagggcccgtgctgggtgagggccggggctccgatgccttcttcgacgcgctggaccacgtcatagacatacacggacacatcatcggcatgggcctgtcgc

SEQ ID NO: 469332 - DNA, 120 bp, Artificial Sequence
  ENSG00000159069_11 (sequence is synthesized)
ccgacaacaggtacctgtacgtgaacagccgcgcctggcccaacggtgcggtggtggccgaccccatgcagccgccaccaatcgcggaggagattgacctgctggtgttcgacctcaaga

SEQ ID NO: 469333 - DNA, 120 bp, Artificial Sequence
  ENSG00000159069_12 (sequence is synthesized)
ccatgcgggaggtgaggcgggctctgcgtgcgcaccgcgcctacacgcccaacgacgagtgcttcttcatcttcctggacgtcagcagggacttcgtggccagcggggcggaggaccggc

SEQ ID NO: 469334 - DNA, 120 bp, Artificial Sequence
  ENSG00000159069_13 (sequence is synthesized)
acggctacatctgggaccgccactacaacatctgtctggccaggctgcggcacgaggatgtggtcaactcagtggtcttcagtccccaggagcaggagctgctgctcacggccagcgacg

SEQ ID NO: 469335 - DNA, 120 bp, Artificial Sequence
  ENSG00000159069_14 (sequence is synthesized)
acgccaccatcaaagcctggcgctccccacgcaccatgcgcgtcctccaggcacctcgcccacggcctcgcaccttcttctcctggcttgccagccagaggcgctgaggtgtgctgggtg

SEQ ID NO: 469336 - DNA, 120 bp, Artificial Sequence
  ENSG00000159069_15 (sequence is synthesized)
cactggagccaccgggaccccttgaggacatcgccaggctctgtggctttttcccgagcgggagaggtggagatgcttatagcagttacgccttaggaaggggacaaccaggccccgcca

SEQ ID NO: 469337 - DNA, 120 bp, Artificial Sequence
  ENSG00000159069_16 (sequence is synthesized)
cacgctcacacacaaacctgctcacgcagctgtgatgcttggcacggggtggccagtgcagatggagcccaaggccccctcggcctcctgggcaacttggggtacacaggatactggggg

SEQ ID NO: 469338 - DNA, 120 bp, Artificial Sequence
  ENSG00000159069_17 (sequence is synthesized)
tgccgctcctcactcaaccccaggctaggggtacacctgacccagctggcctcggcccggggcaccttcggctggtcctgtggggccctggacggtggcccagtggtggcaggggctgct

SEQ ID NO: 469339 - DNA, 120 bp, Artificial Sequence
  ENSG00000159069_18 (sequence is synthesized)
cctggctgtggttgtgcgcccggggcttgggagcggccggtcacgctgctgtgggcccgagtgtgttgcatgtccacgcaccacccgttcagggccctgaataaacagttggcaacagca

SEQ ID NO: 469340 - DNA, 120 bp, Artificial Sequence
  ENSG00000159069_19 (sequence is synthesized)
caggggtcctgaggggcagacagcaagcaagtccacaggcaaagctgggatcgttcactcgcccctggggtcacaagcccagacctggggcctgtgggatgagcagtgaaaacaaacgca

SEQ ID NO: 469341 - DNA, 120 bp, Artificial Sequence
  ENSG00000159069_20 (sequence is synthesized)
ggcagggccgctggccagcaagcaaccgacgggcctgattcaggtctggggcccccggagcaggcagtgcccacggacctctgtggtgctcacagccccagagacaccactgaggcatca

SEQ ID NO: 469342 - DNA, 80 bp, Artificial Sequence
  ENSG00000159069_21 (sequence is synthesized)
gtccgccccgagcccgccgggcagagctgctccagggccgcagggcggaggccactgcctggccgccccgagcttcctct

SEQ ID NO: 469343 - DNA, 80 bp, Artificial Sequence
  ENSG00000159069_22 (sequence is synthesized)
ctctcggcggaagcccgtccccggacggcgcctggtgtccccgtgcctcgcgtgcggcggtccgggccctggcgggctga

SEQ ID NO: 469344 - DNA, 120 bp, Artificial Sequence
  ENSG00000159069_23 (sequence is synthesized)
gccggcccggcccgcccggagctgccgggtccttggttgggcggcggtacccgggcgtcccctgcagacacgcagccccgtggaactcccggcgggacggttggggctggaggaacagga

SEQ ID NO: 469345 - DNA, 120 bp, Artificial Sequence
  ENSG00000159079_0 (sequence is synthesized)
agcgtgggattccggactgtgagcggctgttagtgcgtcgcagctgctggcgatccggcgaccctcggccggcaggacccgcgggccacgcagccggggccttctcaacgcctcagtacc

SEQ ID NO: 469346 - DNA, 120 bp, Artificial Sequence
  ENSG00000159079_1 (sequence is synthesized)
tcggcgggaccgccatggttctgctgcacgtgaagcggggcgacgagagccagttcctgctgcaggcgcctgggagtaccgagctggaggagctcacggtgcaggtggcccgggtctata

SEQ ID NO: 469347 - DNA, 120 bp, Artificial Sequence
  ENSG00000159079_2 (sequence is synthesized)
atgggcggctcaaggtgcagcgcctctgctcagaaatggaagaattagccgaacatggcatatttctccctcctaatatgcaaggactgaccgatgatcagattgaagaattgaaattga

SEQ ID NO: 469348 - DNA, 120 bp, Artificial Sequence
  ENSG00000159079_3 (sequence is synthesized)
aggatgaatggggtgaaaaatgcgtacccagcggaggtgcagtgtttaaaaaggatgatattggacgaaggaatgggcaagctccaaatgagaagatgaagcaagtgttaaagaagacta

SEQ ID NO: 469349 - DNA, 120 bp, Artificial Sequence
  ENSG00000159079_4 (sequence is synthesized)
tagaagaagccaaagcaataatatctaagaaacaagtggaagccggtgtctgtgttaccatggagatggtgaaagatgccttggaccagcttcgaggcgcggtgatgattgtttacccca

SEQ ID NO: 469350 - DNA, 120 bp, Artificial Sequence
  ENSG00000159079_5 (sequence is synthesized)
tggggttgccaccgtatgatcccatccgcatggagtttgaaaataaggaagacttgtcgggaacacaggcagggctcaacgtcattaaagaggcagaggcgcagctgtggtgggcagcca

SEQ ID NO: 469351 - DNA, 120 bp, Artificial Sequence
  ENSG00000159079_6 (sequence is synthesized)
aggagctgagaagaacgaagaagctttcagactacgtggggaagaatgaaaaaaccaaaattatcgccaagattcagcaaaggggacagggagctccagcccgagagcctattattagca

SEQ ID NO: 469352 - DNA, 120 bp, Artificial Sequence
  ENSG00000159079_7 (sequence is synthesized)
gtgaggagcagaagcagctgatgctgtactatcacagaagacaagaggagctcaagagattggaagaaaatgatgatgatgcctatttaaactcaccatgggcggataacactgctttga

SEQ ID NO: 469353 - DNA, 120 bp, Artificial Sequence
  ENSG00000159079_8 (sequence is synthesized)
aaagacattttcatggagtgaaagacataaagtggagaccaagatgaagttcaccagctgatgacacttccaaagagattagctcacctttctcctaggcaattataatttaaaaaaaaa

SEQ ID NO: 469354 - DNA, 120 bp, Artificial Sequence
  ENSG00000159079_9 (sequence is synthesized)
aaaaaggccacttactgccctctgtaaaagatgttaacatttctagttttcttttagtgtgaatttttaaaatagcagttattcaaggttttagaacttaataaatacctagtcagaaga

SEQ ID NO: 469355 - DNA, 120 bp, Artificial Sequence
  ENSG00000159079_10 (sequence is synthesized)
agaacttaataaatacctagtcagaagaaaatgtgtaaatcgtttttgtttcaggactatttagtatgtcatggttttctttgataaaatactaaacttttggccgggcgcggtggctca

SEQ ID NO: 469356 - DNA, 68 bp, Artificial Sequence
  ENSG00000159079_11 (sequence is synthesized)
cccgggaggtggagcttacagtgagccaagatcactgccactgcactctatcctgggcaatttttttt

SEQ ID NO: 469357 - DNA, 120 bp, Artificial Sequence
  ENSG00000159079_12 (sequence is synthesized)
aaaaaaaaaaaaaaaaaaaaagctacacttttttttcttcctgattgttttatattctcatgataactggtttattggaggaaagctgatgactggcagtgaccactagtgaccactaga

SEQ ID NO: 469358 - DNA, 120 bp, Artificial Sequence
  ENSG00000159079_13 (sequence is synthesized)
ctctagatctattggaagctgaactcccagccttgctggagagacttctctaaccctgctgcggggtctaactgtagccttctttaaccctgctgcggggtctaactgtagccttcttta

SEQ ID NO: 469359 - DNA, 120 bp, Artificial Sequence
  ENSG00000159079_14 (sequence is synthesized)
accctgctgcggggtctaactgtagccaggcgttgcctggccttgaaggtgaagtttgcctcctggttggtgcctctctggccttgtattctgggagcgaaagctacaaccatgatgaag

SEQ ID NO: 469360 - DNA, 120 bp, Artificial Sequence
  ENSG00000159079_15 (sequence is synthesized)
gttgagtagcaaactcatctgactttgaaacttaaattcttctggagtttctcagcttctcaagtctccttcatgagaatagatcctgaaaacaaatccagatcccggtagagggtgatg

SEQ ID NO: 469361 - DNA, 120 bp, Artificial Sequence
  ENSG00000159079_16 (sequence is synthesized)
atttctccctatggatgcggggtctgattctaggccagcttcgtacgcagctcagtgaccaaccacgggatggatgggatcactatcatcctaactgagtatctaggacaccattgagtt

SEQ ID NO: 469362 - DNA, 120 bp, Artificial Sequence
  ENSG00000159079_17 (sequence is synthesized)
taaagactccaactcatcatcactgtaaaccatccaagtatcctgcaaaccctggcactttagcatctgaaagacacctgccagactgcctgtggcagtccctcatgcttgacttttggt

SEQ ID NO: 469363 - DNA, 120 bp, Artificial Sequence
  ENSG00000159079_18 (sequence is synthesized)
gcctagggtcctgttctcctggttagagggaacttggtgtgctcacactgagggaaagtgaaggacgcggggcatcttcctgccctggccttcctgccttggtgcctgcgctccccacca

SEQ ID NO: 469364 - DNA, 120 bp, Artificial Sequence
  ENSG00000159079_19 (sequence is synthesized)
tcctgcaaagaggaaccctgggagtgagtggaggtggcaggggtttggttcctgcctgctgccaggcggccttgcccagggggtgggtcccagacctgagagcaaagcgctgttctctga

SEQ ID NO: 469365 - DNA, 120 bp, Artificial Sequence
  ENSG00000159079_20 (sequence is synthesized)
agtgctttgtagctgactgcatcttgtgccttactcttttggttgattttcaaattttgtaaaagcaaatttgcatctattttctcttttacttggttatagttttaaatgtctctatga

SEQ ID NO: 469366 - DNA, 120 bp, Artificial Sequence
  ENSG00000159079_21 (sequence is synthesized)
aagggttttgaccttggatgatgtagtatatgcaataagatgctgtgattttatttcaggagcatcctgtctttgtcagtgtatagttcgtgtgtgttaaattcatgctcagacttgtaa

SEQ ID NO: 469367 - DNA, 120 bp, Artificial Sequence
  ENSG00000159079_22 (sequence is synthesized)
gaaacagttaaccaagccatgtgatcatagtagctcttttcagggaactactacttcaatatcattagaaagtcttactgagcctgcagtaggaatactcttttggccgtgatagttatc

SEQ ID NO: 469368 - DNA, 120 bp, Artificial Sequence
  ENSG00000159079_23 (sequence is synthesized)
ccattgcttcatgtaatcagcagaacttactaaccaaaaagtcactcacgcatgacactacactccttaaatacccatgcgagaagaaccatcctctctccctgcccttgtctgcctcaa

SEQ ID NO: 469369 - DNA, 120 bp, Artificial Sequence
  ENSG00000159079_24 (sequence is synthesized)
aagcctctctgagcttggtgtgtttgggtgcagcagatctcaggaagtacgtgagtagcttatttgcaagccatctgtgacggcggggggcaggtggtgcccgctgtggcaccgtgctgt

SEQ ID NO: 469370 - DNA, 120 bp, Artificial Sequence
  ENSG00000159079_25 (sequence is synthesized)
gtgtgttccctttgcatccacttgctgactcacccaaggtcacaggtagctagtggtggtaggaccacagggtcacgtccaggaactttcccaggatttcccaagaaatcaatttatcaa

SEQ ID NO: 469371 - DNA, 120 bp, Artificial Sequence
  ENSG00000159079_26 (sequence is synthesized)
caaaagtaatcttgccagtgttagaccactgatcagcttaagtctgtggtcttgttgttattttcttctttttttaatccagtccctgtttgagtcaatatcaaaaggaaaccaagtgtc

SEQ ID NO: 469372 - DNA, 120 bp, Artificial Sequence
  ENSG00000159079_27 (sequence is synthesized)
tgctgtatgcacggtgcccatctaggtctgtggttttgtcctttgacataacttgtcttcttatgtggttctttcatggagaccaggaatgctagtaataaaatttgataccacctaaaa

SEQ ID NO: 469373 - DNA, 120 bp, Artificial Sequence
  ENSG00000159079_28 (sequence is synthesized)
agaatcagctgtcctctcagactgtgtgggtggtttccccggccgcagctccgtacgggcttggattgctgggcctcggtgcaccccagcctcccccactcgggttctgagcttgagctg

SEQ ID NO: 469374 - DNA, 120 bp, Artificial Sequence
  ENSG00000159079_29 (sequence is synthesized)
aatccgaaagatttaaactactggtacaaatattttaatcttattggctcgggtttaaactaaaaatatcctcttcctgcacaccaacaaaaactggaagaaaatatggattgagtacca

SEQ ID NO: 469375 - DNA, 120 bp, Artificial Sequence
  ENSG00000159079_30 (sequence is synthesized)
aaaatttcgcccgtcactgatttcaggctttttcaaactgctgatgctgtgtacaggagggggaggaggaaaggttcgagacctttgaaggacatcgtgtagcgctgtaacctgaggggc

SEQ ID NO: 469376 - DNA, 120 bp, Artificial Sequence
  ENSG00000159079_31 (sequence is synthesized)
cgccttggttttgtgggtgctcctacgtcactaggctgtgattttggggaaatggggccctccaccttatgtagatccagagtccgtggctctgagcatcctccctttcccactggacct

SEQ ID NO: 469377 - DNA, 120 bp, Artificial Sequence
  ENSG00000159079_32 (sequence is synthesized)
gcctgcagtgtctgccttgggaatggtcaagacagagatggtatcgtgcagcctctggtctccacacagtgagagtccagggctcagggctgctcaagaccaaggcttcccttgatgctt

SEQ ID NO: 469378 - DNA, 120 bp, Artificial Sequence
  ENSG00000159079_33 (sequence is synthesized)
cacttcgggtgatcagacatgggggacctgtttatctttagtagccggcaaaggcaatcgtaaaacatttgttgtaacttcaggattgtcactctaagaacaccttaatccacaatttgc

SEQ ID NO: 469379 - DNA, 120 bp, Artificial Sequence
  ENSG00000159079_34 (sequence is synthesized)
aggggacagatgggctttctgcagtgctggcgcccacacatagcctgtgtgccttacctggggctgctggggagcagtgagctctgcagaatgccggggaggggtctttctagagcttct

SEQ ID NO: 469380 - DNA, 120 bp, Artificial Sequence
  ENSG00000159079_35 (sequence is synthesized)
gtctgcaggtctgtcggggtcctgccaggtgtcccctggtgttagacatggcagtatcctgctcctagagggcagggagagggggaggtcagtcatggactctttcttcagtctctttat

SEQ ID NO: 469381 - DNA, 120 bp, Artificial Sequence
  ENSG00000159079_36 (sequence is synthesized)
agctgagaagaacgaagaagctttcagactacgtggggaagaatgaaaaaaccaaaattatcgccaagattcagcaaatttttgccactttccaggtggtcgttctttgtcctcctgagc

SEQ ID NO: 469382 - DNA, 120 bp, Artificial Sequence
  ENSG00000159079_37 (sequence is synthesized)
ttctggcagatgagcccggcggcagtggagcgagagatgcagtgagcaatgtggctccataagcacagtacaatgcatatcctttcagccacgtctttgtttatttcattagctttgctt

SEQ ID NO: 469383 - DNA, 120 bp, Artificial Sequence
  ENSG00000159079_38 (sequence is synthesized)
tatgaaatatttcaagaactggcattgtgtgcaaggctctagaagaattttttgcatgtgtttgattttaattttctctgtttgctttttagtaattaagagtaaagtcaaccaagaaca

SEQ ID NO: 469384 - DNA, 120 bp, Artificial Sequence
  ENSG00000159079_39 (sequence is synthesized)
gcacttcattgtactccatgctcagtgctgctcaccgtctgctttataatacaggccacggtgtgcttcgctcagcccctgaaatagatggtagtcactctgggagcaagaactgtttga

SEQ ID NO: 469385 - DNA, 120 bp, Artificial Sequence
  ENSG00000159079_40 (sequence is synthesized)
tttctttttgttgctctggcagtatctggcaagggtcttgtacaagatcttgatcgaatttatggaagtgattagccacactgtagataacgatggctttctgcttgcagaaacaagtgg

SEQ ID NO: 469386 - DNA, 120 bp, Artificial Sequence
  ENSG00000159082_0 (sequence is synthesized)
gcggcgcaatgcggaagagatgggcctgctggagcggaagtgacgctcccggcggctgtggcggcggctgcgggagaaggaggaggaggagccggaggaagagggctgcctccgaagaaa

SEQ ID NO: 469387 - DNA, 120 bp, Artificial Sequence
  ENSG00000159082_1 (sequence is synthesized)
ggagaatggcgttcagtaaaggattccggatctatcacaaattggatcccccacctttcagcctcatagtggaaactaggcataaggaagaatgtctcatgttcgagtctggggctgtcg

SEQ ID NO: 469388 - DNA, 120 bp, Artificial Sequence
  ENSG00000159082_2 (sequence is synthesized)
ctgtgctctcatctgcagaaaaagaggcaatcaagggtacatactccaaagtactggatgcatatggactcttaggtgttctgcggttaaatcttggtgatactatgttacattatctgg

SEQ ID NO: 469389 - DNA, 120 bp, Artificial Sequence
  ENSG00000159082_3 (sequence is synthesized)
tcctagtcactggatgtatgtctgttggaaaaattcaagaatctgaagttttccgagttacttccactgagtttatatcactgcgaatcgattcttcagatgaggatcgcatttcagaag

SEQ ID NO: 469390 - DNA, 120 bp, Artificial Sequence
  ENSG00000159082_4 (sequence is synthesized)
tgcggaaagttttgaattcaggaaacttttattttgcatggtctgcatctggcatcagtttagatttgagtcttaatgcgcatcgtagcatgcaagaacagacaactgataatagatttt

SEQ ID NO: 469391 - DNA, 120 bp, Artificial Sequence
  ENSG00000159082_5 (sequence is synthesized)
tctggaatcagtctttgcatttgcatctcaaacactatggcgtgaattgtgatgactggttattacgtcttatgtgtggaggagtagaaatcagaacaatttatgctgctcataaacagg

SEQ ID NO: 469392 - DNA, 120 bp, Artificial Sequence
  ENSG00000159082_6 (sequence is synthesized)
cgaaggcttgcctcatttcaagattaagctgtgaacgagctgggaccaggtttaatgtccggggaacaaatgatgatggtcatgttgccaattttgtagaaacagaacaggttgtgtact

SEQ ID NO: 469393 - DNA, 120 bp, Artificial Sequence
  ENSG00000159082_7 (sequence is synthesized)
tagatgactcagtttcttccttcatacaaatccgaggatctgttccattgttctgggagcaaccagggttgcaagtgggatctcatcgtgtccgtatgtcaaggggatttgaagccaatg

SEQ ID NO: 469394 - DNA, 120 bp, Artificial Sequence
  ENSG00000159082_8 (sequence is synthesized)
cacctgcttttgacaggcattttagaacacttaagaacttatatggtaaacaaataatagtaaatttgcttggatctaaggaaggtgaacatatgctaagtaaagctttccagagtcatt

SEQ ID NO: 469395 - DNA, 120 bp, Artificial Sequence
  ENSG00000159082_9 (sequence is synthesized)
tgaaagcttctgaacatgctgctgatatccagatggtgaattttgactatcatcaaatggttaagggaggaaaggcagaaaaattacatagtgttcttaaacctcaagtccagaagtttc

SEQ ID NO: 469396 - DNA, 120 bp, Artificial Sequence
  ENSG00000159082_10 (sequence is synthesized)
tagattatggatttttttatttcaatggaagtgaagttcaaagatgccagagtggtacagttcgaacaaactgcttggattgtcttgatagaacaaatagtgtgcaggcatttcttggct

SEQ ID NO: 469397 - DNA, 120 bp, Artificial Sequence
  ENSG00000159082_11 (sequence is synthesized)
tagagatgctagctaaacagttggaagctcttggtttagctgaaaagcctcagttggtgactcgctttcaagaagtttttcggtcaatgtggtccgtgaatggtgattcaatcagtaaga

SEQ ID NO: 469398 - DNA, 120 bp, Artificial Sequence
  ENSG00000159082_12 (sequence is synthesized)
tatatgcaggaactggagctcttgaagggaaagcgaagttaaaagatggtgctcgctctgttacccgaacaattcagaataacttctttgacagctccaagcaagaggccattgatgttt

SEQ ID NO: 469399 - DNA, 120 bp, Artificial Sequence
  ENSG00000159082_13 (sequence is synthesized)
tgctactgggaaatactctgaatagtgatttagctgacaaagctcgagcacttttaactactggaagtttgcgtgtttctgagcagacattacagtcagcatcttctaaagtactaaaga

SEQ ID NO: 469400 - DNA, 120 bp, Artificial Sequence
  ENSG00000159082_14 (sequence is synthesized)
gcatgtgtgagaatttctacaaatattcaaagcctaagaaaattcgagtatgtgtcggaacctggaatgtgaatggtgggaagcaatttcgcagcatagcttttaagaatcagacactca

SEQ ID NO: 469401 - DNA, 120 bp, Artificial Sequence
  ENSG00000159082_15 (sequence is synthesized)
ctgactggcttcttgatgcacccaagttagctggcatccaggagtttcaagataaaagaagtaagccaactgatatatttgcaattggttttgaagaaatggtagaattgaatgctggaa

SEQ ID NO: 469402 - DNA, 120 bp, Artificial Sequence
  ENSG00000159082_16 (sequence is synthesized)
acattgtgagtgcaagcacaacaaatcagaagctctgggctgtagaacttcagaagacaatctccagagacaacaagtatgtgctgctggcttctgaacagttggtgggcgtctgtttgt

SEQ ID NO: 469403 - DNA, 120 bp, Artificial Sequence
  ENSG00000159082_17 (sequence is synthesized)
ttgtttttatcagaccacagcatgctccttttatcagggatgttgcagttgatactgtgaagactggaatgggaggtgcaactggaaataagggagcagttgcaatccgaatgctcttcc

SEQ ID NO: 469404 - DNA, 120 bp, Artificial Sequence
  ENSG00000159082_18 (sequence is synthesized)
atacaaccagcctttgcttcgtctgtagccactttgctgcagggcagtcacaagtcaaagaaagaaatgaagattttatagaaatagcacgaaaattgagttttcctatgggaaggatgc

SEQ ID NO: 469405 - DNA, 120 bp, Artificial Sequence
  ENSG00000159082_19 (sequence is synthesized)
tattttcccatgactatgtattttggtgtggtgatttcaactatcgaatcgatctccctaacgaagaagttaaagagctcataagacagcaaaattgggattctcttatagcaggagatc

SEQ ID NO: 469406 - DNA, 120 bp, Artificial Sequence
  ENSG00000159082_20 (sequence is synthesized)
aaaggtaacctttgctccgacatataagtatgacttgttttctgacgactatgacaccagtgaaaagtgccgcacccctgcctggacagaccgtgtcctttggagaaggaggaaatggcc

SEQ ID NO: 469407 - DNA, 120 bp, Artificial Sequence
  ENSG00000159082_21 (sequence is synthesized)
ttttgatagatcagctgaagatctagatcttctaaatgctagttttcaagatgaaagcaaaattctgtacacgtggactccaggcactttgctgcactatggaagagctgagctgaagac

SEQ ID NO: 469408 - DNA, 120 bp, Artificial Sequence
  ENSG00000159082_22 (sequence is synthesized)
ttctgaccacaggcctgtcgttgccctgattgatatagatatatttgaagttgaagctgaagagaggcaaaacatttataaagaagtaattgcagttcagggtccaccagatggtacagt

SEQ ID NO: 469409 - DNA, 120 bp, Artificial Sequence
  ENSG00000159082_23 (sequence is synthesized)
attggtctcaatcaaaagttctttaccagaaaataatttttttgatgatgccttgattgatgagcttctgcagcagtttgcaagttttggtgaagttatacttataagatttgtagaaga

SEQ ID NO: 469410 - DNA, 120 bp, Artificial Sequence
  ENSG00000159082_24 (sequence is synthesized)
taaaatgtgggttacatttttggagggaagctctgccttgaatgttctgagcctaaatggtaaagagttattgaatcggactataactattgctttaaaaagtccagactggatcaaaaa

SEQ ID NO: 469411 - DNA, 120 bp, Artificial Sequence
  ENSG00000159082_25 (sequence is synthesized)
tttggaagaagaaatgagtttagagaaaattagcattgcattgccatcatcaacaagctctaccctgcttggtgaagatgcagaggttgcagcagattttgatatggaaggtgatgttga

SEQ ID NO: 469412 - DNA, 120 bp, Artificial Sequence
  ENSG00000159082_26 (sequence is synthesized)
tgactatagtgctgaagtggaggaacttcttcctcagcatctccagccatcttcaagttccggccttggtacttcccccagctcttcaccccgaactagtccctgccagtcacctacaat

SEQ ID NO: 469413 - DNA, 120 bp, Artificial Sequence
  ENSG00000159082_27 (sequence is synthesized)
atcagagggtcctgtaccttcccttcccatcagaccaagccgagcaccgtcaagaactcctgggcctcccagtgcacagagttctcctattgacgcgcagccagcaacgccgctgccgca

SEQ ID NO: 469414 - DNA, 120 bp, Artificial Sequence
  ENSG00000159082_28 (sequence is synthesized)
gaaagaccccgcccagcccttggagcccaagcggccgccgccgccccgcccggtcgcccctcccacacgcccggctcccccacagagacctcctccgccttcaggggctaggagtcctgc

SEQ ID NO: 469415 - DNA, 120 bp, Artificial Sequence
  ENSG00000159082_29 (sequence is synthesized)
acccactagaaaggaatttggaggtattggagcccctcccagtcctggggtagctaggagagagatggaagcacccaaaagccctggaacaacaaggaaagataatataggacgcagtca

SEQ ID NO: 469416 - DNA, 120 bp, Artificial Sequence
  ENSG00000159082_30 (sequence is synthesized)
gccttcacctcaagcaggacttgcaggcccaggacctgctggatacagtacagccagaccgacgattcctcctcgtgctggagttatcagtgccccacagagccacgcgcgggcatctgc

SEQ ID NO: 469417 - DNA, 120 bp, Artificial Sequence
  ENSG00000159082_31 (sequence is synthesized)
tggaagactgactcctgaaagccaaagcaaaacatcagaaacgtcgaaaggttcaactttccttcctgaaccactgaagcctcaggctgcttttcctccgcagtcttctttgcccccgcc

SEQ ID NO: 469418 - DNA, 120 bp, Artificial Sequence
  ENSG00000159082_32 (sequence is synthesized)
tgctcaaaggttgcaagagcctcttgtccctgtggcagcacctatgcctcagtctggcccccagccaaatttggaaaccccaccacaaccaccacctcgaagcaggtcatcccatagctt

SEQ ID NO: 469419 - DNA, 120 bp, Artificial Sequence
  ENSG00000159082_33 (sequence is synthesized)
gccttcagaagcttcctcacaaccgcaagtaaaaacaaatggaatctctgatggcaaaagagaatcaccattaaagattgacccatttgaagatctgtcatttaatctgcttgctgtatc

SEQ ID NO: 469420 - DNA, 120 bp, Artificial Sequence
  ENSG00000159082_34 (sequence is synthesized)
aaaggctcagctatctgttcaaacgtcacctgttcccaccccagacccaaagaggttgattcagttgccttctgcaacgcaaagtaatgttttgagttctgtaagttgcatgccaacaat

SEQ ID NO: 469421 - DNA, 120 bp, Artificial Sequence
  ENSG00000159082_35 (sequence is synthesized)
gcctccaattccagctcggagtcaatcccaggaaaatatgcgaagttctccaaacccatttattactggcttgaccaggacaaatcctttcagtgacaggactgctgctcctggaaaccc

SEQ ID NO: 469422 - DNA, 120 bp, Artificial Sequence
  ENSG00000159082_36 (sequence is synthesized)
atttagagccaagtctgaagaatcagaggcaacttcatggttctccaaagaagagcccgttactatcagtcctttcccttctctgcagcctcttggtcataacaaaagcagggcttcatc

SEQ ID NO: 469423 - DNA, 120 bp, Artificial Sequence
  ENSG00000159082_37 (sequence is synthesized)
ttcacttgatggctttaaggacagttttgatctacagggccagtctacattaaaaattagcaacccgaaaggatgggtaaccttcgaggaagaagaggattttggtgtgaaagggaagtc

SEQ ID NO: 469424 - DNA, 120 bp, Artificial Sequence
  ENSG00000159082_38 (sequence is synthesized)
aaagtcagcttgttcagacttactgggtaatcagccaagttcattttctggctccaacctgacattgaatgatgactggaataaaggtacaaatgtctccttctgtgtgttgccgtcaag

SEQ ID NO: 469425 - DNA, 120 bp, Artificial Sequence
  ENSG00000159082_39 (sequence is synthesized)
aagacctcctccacctcctgtccctctgctcccgcccggcaccagccctccagtagatcctttcacgaccttggcctctaaggcttcacccacactggactttacagaaagataacgcca

SEQ ID NO: 469426 - DNA, 120 bp, Artificial Sequence
  ENSG00000159082_40 (sequence is synthesized)
aagccggcggggggcggggagctgctgcggccagacccacgggcagccgggcgggcggacgcctccaagaccagtctctgcctccgcagcgtcagcgggagcgggctgcctccgaagaaa

SEQ ID NO: 469427 - DNA, 120 bp, Artificial Sequence
  ENSG00000159082_41 (sequence is synthesized)
atgtgcaataagtcattgtaagtgcactgatatcttcacaaaacaccactatttgatgtgtacagagttggactatgtgtatattggaaataaggaaaaacccttctcattgttaactgg

SEQ ID NO: 469428 - DNA, 120 bp, Artificial Sequence
  ENSG00000159082_42 (sequence is synthesized)
agttttgatgtatttctctttggatgaataggagacagtagtagccataaaaagtacttatactttagaaaacagtccttattcagaaacttttcggtcagtcttctgaagaatctcaaa

SEQ ID NO: 469429 - DNA, 120 bp, Artificial Sequence
  ENSG00000159082_43 (sequence is synthesized)
aagcccacccaactttcagctgacatttccaccagccctctcatacttgttaacaattggtatctttgagtatttaccaaagagctgccaaggttacagtgaacagagttttgaaaggca

SEQ ID NO: 469430 - DNA, 120 bp, Artificial Sequence
  ENSG00000159082_44 (sequence is synthesized)
ttgctttaaaggaaaaaagtataggtatgtgtacatatataatacatacaaacacatgtacttctgtatacatttacatatttttacaattcatactttaatttctaggctataactcag

SEQ ID NO: 469431 - DNA, 120 bp, Artificial Sequence
  ENSG00000159082_45 (sequence is synthesized)
accaaattatacctaaaagttccaacaaagtccctttttcaatatcacattaccaaaaagatggctgcaaatgtaatttggacctttcattaattttgttttcaaaactagaataatctc

SEQ ID NO: 469432 - DNA, 120 bp, Artificial Sequence
  ENSG00000159082_46 (sequence is synthesized)
accacagaatcagaattttctaccgttccacacccaaccccttcaaatacacacaaccttgttacttttcactccagcaccttcatacgcttttctccaggaggaggttcttgcagctgg

SEQ ID NO: 469433 - DNA, 120 bp, Artificial Sequence
  ENSG00000159082_47 (sequence is synthesized)
aaacagcctattttgtggtcactgtcaagtggatggatattctagcgctcccaaaaaagcactatggccttatatgcagggaaggcacataccaccaagttcaatgagaaatattagagc

SEQ ID NO: 469434 - DNA, 120 bp, Artificial Sequence
  ENSG00000159082_48 (sequence is synthesized)
taaccgtactctcttctctgcgtacgttcgagtatacgttgcccatatccctcccatattttctttttgctgcttttgctctggaactttgcttttagcagggaaagcagctgtcccctg

SEQ ID NO: 469435 - DNA, 120 bp, Artificial Sequence
  ENSG00000159082_49 (sequence is synthesized)
agtgctttgaattgggaatatacccagtgtgtgttctcccccctcttacgaggctacataacacatctatgatgctgctttaagtttttagaggctatacctcaaagtagctgcggattt

SEQ ID NO: 469436 - DNA, 120 bp, Artificial Sequence
  ENSG00000159082_50 (sequence is synthesized)
tgtctcctgcactgccaatatgcaactgatcccgcttttattaattttttgaagaagtacacagaatttttacagaatgtagtattttgatatcattaagtaaaccaatcagaaaactcc

SEQ ID NO: 469437 - DNA, 120 bp, Artificial Sequence
  ENSG00000159082_51 (sequence is synthesized)
ttgagcaatagttgtttctttgtcagtttcagttacaatcatctttacccattaagacttacattaacattccttttatataaagagttgtatatgtccacctaaattcctatgtccaca

SEQ ID NO: 469438 - DNA, 120 bp, Artificial Sequence
  ENSG00000159082_52 (sequence is synthesized)
cttaacctttaaagatgtacattgagggaatatcaaaaaatagcgttcatggctacgaatatgtagaatgttaaaagcacagcaaactgcactgcacttataaagcaaatctattagaaa

SEQ ID NO: 469439 - DNA, 120 bp, Artificial Sequence
  ENSG00000159082_53 (sequence is synthesized)
aaaagcatttttctaaatgctcaaatgttatcaaaatactatatttatagaagtaatcttctctgttaacagccaagatttgctgttagaaataactcttgtgagttttatattgtgctt

SEQ ID NO: 469440 - DNA, 120 bp, Artificial Sequence
  ENSG00000159082_54 (sequence is synthesized)
tttggaggttctaatcatttcagcagtagcgtcttaaacagcagtattactataagcagttgcttcaaaatgtgaattaacttgttgaaactgtggctttaacatccatgtgactagtgt

SEQ ID NO: 469441 - DNA, 120 bp, Artificial Sequence
  ENSG00000159082_55 (sequence is synthesized)
atatggtatttgctctccattagcaaaataattcattgttaggtaaacttcactagtgcaaattgcagatctgtgagcaatgtttcctattgaatataaactactgtctaaaatatacat

SEQ ID NO: 469442 - DNA, 120 bp, Artificial Sequence
  ENSG00000159082_56 (sequence is synthesized)
atcagcagcccagcctttatcaggaaaattatacttggcaagttgctgaaaatgcacaaagttatgaaagttaaaggtatgctgcaaataactagccattattctatgtattattaaata

SEQ ID NO: 469443 - DNA, 120 bp, Artificial Sequence
  ENSG00000159082_57 (sequence is synthesized)
tttactagttctgttaaaagcagagcagaagttagacactaaggatctctttgtgaactctgtgttctctatattagattgctgtttatatgtaagaattttattgcttatgtggcatac

SEQ ID NO: 469444 - DNA, 120 bp, Artificial Sequence
  ENSG00000159082_58 (sequence is synthesized)
aatatttataactataaactttatagaagtacagtattaaagtcagtggtacacagacattctgtacatatcctgtgaaacgtgctgtcatatgaaataaatatatctgtctttaccatg

SEQ ID NO: 469445 - DNA, 120 bp, Artificial Sequence
  ENSG00000159082_59 (sequence is synthesized)
attttctgtaataagactgataacatcataatttgttcttttttgaataataacttcattacatacctgcgaccctcttcagaacttcttctgtcctttttattttttttttcctcttga

SEQ ID NO: 469446 - DNA, 120 bp, Artificial Sequence
  ENSG00000159082_60 (sequence is synthesized)
tagtttttttatttcaaaagtaaaaacttggaatcctatcaaagaccattgaagtcccaaaagagtaaatgtttgtcaatgatgaaagacaaggagcataacttatctaaggcttcttgg

SEQ ID NO: 469447 - DNA, 120 bp, Artificial Sequence
  ENSG00000159082_61 (sequence is synthesized)
ggccagtctggttttgttttctttcactggcaactctcatcttttttgatcataggaaattttcttcagggaagtcactgagacagtgaaaatacatagtactgggttgtggggtccgga

SEQ ID NO: 469448 - DNA, 120 bp, Artificial Sequence
  ENSG00000159082_62 (sequence is synthesized)
gacttggatcccagccctgtaacatattctccttatagagtcactttgaacaagtcacttaacctctgtccctttttgccttgtcaatgaaatggaggattggatgggactggattagca

SEQ ID NO: 469449 - DNA, 120 bp, Artificial Sequence
  ENSG00000159082_63 (sequence is synthesized)
tgcacagactcatttcttgtggctgttccattaacatagtatttgaaattggagttagagtgtttttaggggaagagtgccctctccaggtcaccaccagccctacctgcgctccctcct

SEQ ID NO: 469450 - DNA, 120 bp, Artificial Sequence
  ENSG00000159082_64 (sequence is synthesized)
ttactttttacttcctggcctcttgtggcccttgttaatgatcaataatcatgggagtagtcactgagcttgttatgtctatggtattaattatggttttttattgtttttcttaaagat

SEQ ID NO: 469451 - DNA, 120 bp, Artificial Sequence
  ENSG00000159086_0 (sequence is synthesized)
ggagagcgcgcgtgcgccgtcacgagctcggcgctgccggggccgcggtgtggaagcgagtattcgaccgccgtgcgggccgcggggatgttccgaaaggcccggcgggtgaacgtgcgc

SEQ ID NO: 469452 - DNA, 120 bp, Artificial Sequence
  ENSG00000159086_1 (sequence is synthesized)
aagcggaacgactccgaagaggaagagcgggaacgcgatgaggagcaggagccgccgccgttgttgccgccgccgggcacgggcgaagaggcgggccccggtggcggcgacagggcccct

SEQ ID NO: 469453 - DNA, 120 bp, Artificial Sequence
  ENSG00000159086_2 (sequence is synthesized)
cgtcgccgccttccgcgctgaccccgggcctcggggctgaggccgggggcggcttccccggcggcgcggagcccggcaacgggctgaagccgcgcaagaggcctcgcgagaacaaagagg

SEQ ID NO: 469454 - DNA, 120 bp, Artificial Sequence
  ENSG00000159086_3 (sequence is synthesized)
cgcaagaggcctcgcgagaacaaagaggtgccccgggccagcctgctcagcttccaggacgaggaggaagaaaatgaagaagttttcaaagtgaagaaatcaagttatagcaaaaagata

SEQ ID NO: 469455 - DNA, 120 bp, Artificial Sequence
  ENSG00000159086_4 (sequence is synthesized)
gtaaaattgctcaagaaggaatataaagaagatcttgaaaaatcgaagattaagacagaactcaactcatcagctgaaagtgaacaacctttggacaaaacaggacatgttaaggataca

SEQ ID NO: 469456 - DNA, 120 bp, Artificial Sequence
  ENSG00000159086_5 (sequence is synthesized)
aatcaagaagatggagttatcatcagtgaacatggtgaagatgaaatggatatggaaagtgaaaaagaggaagaaaagccaaagactggtggagctttttcaaatgctttatcttcattg

SEQ ID NO: 469457 - DNA, 120 bp, Artificial Sequence
  ENSG00000159086_6 (sequence is synthesized)
aatgttcttcgtccaggagaaattccagatgcagcttttatacatgctgcaaggaaaaagcgccaaatggcccgagaattgggagatttcactcctcatgataatgagcctggtaaaggc

SEQ ID NO: 469458 - DNA, 120 bp, Artificial Sequence
  ENSG00000159086_7 (sequence is synthesized)
cgccttgttagagaagatgagaatgatgccagtgatgatgaagatgacgatgagaaacgccggatagttttttctgtgaaagaaaagtcacaaagacaaaaaattgctgaggaaatagga

SEQ ID NO: 469459 - DNA, 120 bp, Artificial Sequence
  ENSG00000159086_8 (sequence is synthesized)
attgaggggagtgatgatgatgctttagtaactggagaacaggatgaagagctcagccgatgggaacaggagcagataaggaaaggaattaatatccctcaggttcaagccagtcaaccc

SEQ ID NO: 469460 - DNA, 120 bp, Artificial Sequence
  ENSG00000159086_9 (sequence is synthesized)
gcagaagtgaatatgtactaccagaacacttaccagacaatgccttacggctcatcctatggcattccttatagttatacggcctatggatcatcagatgccaaatctcaaaaaacagat

SEQ ID NO: 469461 - DNA, 120 bp, Artificial Sequence
  ENSG00000159086_10 (sequence is synthesized)
aatacagtccctttcaaaactcccagtaatgagatgactcccgttactattgatttggtaaagaaacagcttaaagacaggttggactccatgaaagaattgcacaaaacaaatcgacag

SEQ ID NO: 469462 - DNA, 120 bp, Artificial Sequence
  ENSG00000159086_11 (sequence is synthesized)
cagcatgagaaacatctgcaaagccgagtggactctaccagggctattgaaagattagaagggtcttctgggggtattggtgaacggtataaatttttgcaagaaatgcgagggtatgtc

SEQ ID NO: 469463 - DNA, 120 bp, Artificial Sequence
  ENSG00000159086_12 (sequence is synthesized)
caagacttgcttgagtgtttcagtgaaaaggtgccactgattaatgaacttgaatcagcaatacatcagctgtacaaacagcgagcttcccgccttgtccaaagacgacaagatgatatt

SEQ ID NO: 469464 - DNA, 120 bp, Artificial Sequence
  ENSG00000159086_13 (sequence is synthesized)
aaagatgaatcttcggagttttcaagccattcaaacaaagctctgatggcaccaaatcttgactcctttggacgcgatcgggcactgtatcaagagcatgcaaaacgtcgcattgcagag

SEQ ID NO: 469465 - DNA, 120 bp, Artificial Sequence
  ENSG00000159086_14 (sequence is synthesized)
cgggaggccaggaggactcgtcgtagacaagccagagaacaaaccggtaagatggcagatcaccttgaaggcctttccagtgatgatgaagaaacttctacagatattactaatttcaat

SEQ ID NO: 469466 - DNA, 120 bp, Artificial Sequence
  ENSG00000159086_15 (sequence is synthesized)
ctggaaaaagatcgaatttcaaaagaatccggcaaagtttttgaagatgtccttgaaagtttctattcaattgactgtattaaatcacagtttgaagcatggcgttcaaaatactacaca

SEQ ID NO: 469467 - DNA, 120 bp, Artificial Sequence
  ENSG00000159086_16 (sequence is synthesized)
tcatacgacttcagctcctcacttggactcctcttgaggcaaaatgtcgtgactttgagaatatgctgtggtttgaatctttgctgttttatggttgtgaagaacgagagcaagaaaaag

SEQ ID NO: 469468 - DNA, 120 bp, Artificial Sequence
  ENSG00000159086_17 (sequence is synthesized)
atgatgtagatgttgccctactacctaccattgtggaaaaggtgattcttcctaaactaacagtgatagctgaaaatatgtgggaccctttttctacaacacagacttcaagaatggtgg

SEQ ID NO: 469469 - DNA, 120 bp, Artificial Sequence
  ENSG00000159086_18 (sequence is synthesized)
gaattacactaaaattaatcaatggatatccttcagtagtgaatgcagaaaataaaaatacacaggtatacctaaaggcacttttattgagaatgagaagaactttagatgatgatgtat

SEQ ID NO: 469470 - DNA, 120 bp, Artificial Sequence
  ENSG00000159086_19 (sequence is synthesized)
ttatgcccttatatcccaaaaatgtcttagaaaataaaaattctgggccttacttgttttttcaacgacagttttggtcttcagttaagctgttaggcaattttcttcagtggtatggca

SEQ ID NO: 469471 - DNA, 120 bp, Artificial Sequence
  ENSG00000159086_20 (sequence is synthesized)
ttttctcaaataaaactctgcaagagttatcaatagatggtttattaaatcgatatattctcatggcttttcagaattcagaatatggagatgacagcatcaaaaaagcccaaaatgtaa

SEQ ID NO: 469472 - DNA, 120 bp, Artificial Sequence
  ENSG00000159086_21 (sequence is synthesized)
tcaattgtttccccaaacaatggttcatgaatctgaaaggagaaaggactatttctcagttagaaaacttttgccgataccttgtacacttagcggatacaatttatagaaatagtatcg

SEQ ID NO: 469473 - DNA, 120 bp, Artificial Sequence
  ENSG00000159086_22 (sequence is synthesized)
ggtgttctgatgtggaaaaaagaaatgcaagggaaaacataaaacagatagtaaaactccttgcaagtgttcgagctttggatcatgctatgtctgttgcaagtgaccacaatgtgaaag

SEQ ID NO: 469474 - DNA, 120 bp, Artificial Sequence
  ENSG00000159086_23 (sequence is synthesized)
aatttaagtctttgatcgaaggaaaatagatctatgagactgaaaaacctatttgcttgattaccattcccaatgtgtaaattttgtatatatgtaaagtttcttaaactgtaaaatagc

SEQ ID NO: 469475 - DNA, 120 bp, Artificial Sequence
  ENSG00000159086_24 (sequence is synthesized)
aattcttgttttaatacaaaaaacattatattcaatactgtgtccttaaatgatatttcttcagaatgaaaggaattcagattatttctaggagtctatgaatgttttctttactgcctg

SEQ ID NO: 469476 - DNA, 120 bp, Artificial Sequence
  ENSG00000159086_25 (sequence is synthesized)
tcatactttgtttactgaagtattttgtatggtcatttaaattaaccctctcagttaattgtcccctgtaaacgatgtgtgcagtgtaaattgtgtaattatgcatatatatatttatac

SEQ ID NO: 469477 - DNA, 120 bp, Artificial Sequence
  ENSG00000159086_26 (sequence is synthesized)
caccatggacttactttcacactggaaatttgtggtgtttttccacagaggaagccttttaacagcagaaaattatccggtagcaaattgtcttagggaaattactacactgttgtaaca

SEQ ID NO: 469478 - DNA, 120 bp, Artificial Sequence
  ENSG00000159086_27 (sequence is synthesized)
aaagggctggcaagtgactaaatgttcattaccttttggttagcgttgctatcactgtagctgtgctgccttaacattgagagttgagttgtggacttagtcattgagtgaatgttgaac

SEQ ID NO: 469479 - DNA, 120 bp, Artificial Sequence
  ENSG00000159086_28 (sequence is synthesized)
tttcttccttgaatcagcgttagagtcaaatgtgggtttaatgtgaatgctaaatgaatatgcaacatagtttcaaatggaacatagaaatttcacttttgaaaataataaacccacaac

SEQ ID NO: 469480 - DNA, 120 bp, Artificial Sequence
  ENSG00000159086_29 (sequence is synthesized)
ctaattgcatggttttgggctgaccgtcctgtctcattcatgattttactccctgcccagcttgcagatacatgcatttgaattttagtagtctgtcatatttaaaatcccacatatgtg

SEQ ID NO: 469481 - DNA, 120 bp, Artificial Sequence
  ENSG00000159086_30 (sequence is synthesized)
agttaaatatgcaataaagaatacgccttgctgattagccacacccaggcaatttaatatccatggtcttctataatgtttataccacattgtaaatattcagagaacttgttttaaagt

SEQ ID NO: 469482 - DNA, 120 bp, Artificial Sequence
  ENSG00000159086_31 (sequence is synthesized)
ttatgctttctgattctgtgattttcaaaagaggaatttttttggaaattaaggactatcgtttgataattatatatgtaattaagatttagccaagcattaaattaatttttaaatata

SEQ ID NO: 469483 - DNA, 120 bp, Artificial Sequence
  ENSG00000159086_32 (sequence is synthesized)
ttcagttaaggtcataaaacccccattccagagagggtcctgccccatacccagaaggaaagaatgctgctcagagaggccaagaagaatctggacggacaggccttgtgttgtcttctc

SEQ ID NO: 469484 - DNA, 120 bp, Artificial Sequence
  ENSG00000159086_33 (sequence is synthesized)
ttgagcagtagatcatacctttttgtccagtcatgtttctgcatgcctgtacatatttcgttaaacctaaacatagtagacaatttctcctccatctttgggtcttcattctgaaggctg

SEQ ID NO: 469485 - DNA, 120 bp, Artificial Sequence
  ENSG00000159086_34 (sequence is synthesized)
aggaccaacctgagcagcagaaccaaagggactgaggaaacagacagtgctggtacaagtatgcaagttttctgtaaacagattactttcaaacagttgggagccccagggagataatag

SEQ ID NO: 469486 - DNA, 120 bp, Artificial Sequence
  ENSG00000159086_35 (sequence is synthesized)
aaggtatcctactcaacaggagtatatagaatgctgtagaagaggaatattgtaagaacaagaactatctcttgaaaactaaaaatatgataactgaaatataaatttaaataggattgg

SEQ ID NO: 469487 - DNA, 120 bp, Artificial Sequence
  ENSG00000159086_36 (sequence is synthesized)
aagctaaagctaggaaattaccctagaatgttttttgagaaatggaaaatacgaagaccaaaaaaataaaataaaactatgctgtgaaagagaaagattagcatttgagaaggcggaagt

SEQ ID NO: 469488 - DNA, 120 bp, Artificial Sequence
  ENSG00000159086_37 (sequence is synthesized)
tggtcctgctcagatgcggttttcagatgccttattctaaaaatagtgatagaaaacaaatttctacaaagcaaaattacaataaatttattaaactcttgcaacaaagctgttttctta

SEQ ID NO: 469489 - DNA, 120 bp, Artificial Sequence
  ENSG00000159086_38 (sequence is synthesized)
tgtcttcctatgttttcctgctgtcattcaatgtgatgctgaagttcttcctccttaaaaatgtaatatttttccctttgcacaggtaatttagagttttaatttatttggtcatcatga

SEQ ID NO: 469490 - DNA, 120 bp, Artificial Sequence
  ENSG00000159086_39 (sequence is synthesized)
tagctattcctgatagctgtcctgttacttagacataaaaatagtgagtaagcccaattacatatttgtagggttgttgaactcttaaaaagaaatcacttctttaatttttctactttt

SEQ ID NO: 469491 - DNA, 120 bp, Artificial Sequence
  ENSG00000159086_40 (sequence is synthesized)
taaaatgggaacgcagaataataatgaaatttgttctaaaccaaaaacctacctggtttaccagttattgcagaatcttgccgttgagattagcaagcagtctgtcgtaatggcttattc

SEQ ID NO: 469492 - DNA, 120 bp, Artificial Sequence
  ENSG00000159086_41 (sequence is synthesized)
cagttttggtcttcagttaaggagaaagtgatttctgagttccaaagtaaggtccatcgtactcaacgaaatgcctgactaagccacaattaattttttcagcaagtagactacagtagt

SEQ ID NO: 469493 - DNA, 120 bp, Artificial Sequence
  ENSG00000159086_42 (sequence is synthesized)
atattctgtatgatgccagcttaggtgggtagttcctacagtacaggaagcttaacaatctctaggattaaaagataaaagaatgcctcaggctcatttatctttagtacttcatggttt

SEQ ID NO: 469494 - DNA, 120 bp, Artificial Sequence
  ENSG00000159086_43 (sequence is synthesized)
aaaaaaaaaaatgagggcatggggaagtgtaaatggcaatgttgtggcagtaattgctaaaaaaaaatcagattataataaattttaatgatagagtctctggactcagctatcaaggat

SEQ ID NO: 469495 - DNA, 120 bp, Artificial Sequence
  ENSG00000159086_44 (sequence is synthesized)
aatcattacagatttggggacattgttgcccatggtgtggcatattaaagaacaaaataactccattagtttgacctttctgtgaacatttgctacttttgcaatggaatcatgcaagta

SEQ ID NO: 469496 - DNA, 120 bp, Artificial Sequence
  ENSG00000159086_45 (sequence is synthesized)
tataaaattgcttttattacagacatctctgtattccacctgcctttttttattttccatttgcagtctgttcagttcaggaagctgctataacacttggtgccagtgttcccaaactct

SEQ ID NO: 469497 - DNA, 120 bp, Artificial Sequence
  ENSG00000159086_46 (sequence is synthesized)
aaataatgtgttttccatttgcactaaccatcaggaaactagaatttctggtttcctcaggtatgtgtagtggtcattagtgttacgtgaaagtctcatagcatttgattataacataag

SEQ ID NO: 469498 - DNA, 120 bp, Artificial Sequence
  ENSG00000159086_47 (sequence is synthesized)
gtatttagaaaaagaaagttttctgttttaagttagctctcatgttcttttgtattctatatgaatcaagtaaatgctttagggatattaacctggaaaaattattgactttgtaagttc

SEQ ID NO: 469499 - DNA, 120 bp, Artificial Sequence
  ENSG00000159086_48 (sequence is synthesized)
acaattcatgtaaagaaatttttataaaatatgggagaatttaaacatttgacaggaagagaacaactttttaaatttgagatatattgagttcagagaggttagtgatagctggaaatt

SEQ ID NO: 469500 - DNA, 120 bp, Artificial Sequence
  ENSG00000159086_49 (sequence is synthesized)
ttattcgccctagtaattattttgtttacattaaaaaatctgtaataaagctacaaaatagtaaacagattactgtaacgtacttggtacatatgagtggcagagcaactgaaatgtcca

SEQ ID NO: 469501 - DNA, 120 bp, Artificial Sequence
  ENSG00000159086_50 (sequence is synthesized)
aaattggagaattagcagactcttgttcttacctacttatagagccattgcacttttttggtaccacacagtgataatgttttactttgaactacaaaaatcgcaatgcagataatgctg

SEQ ID NO: 469502 - DNA, 120 bp, Artificial Sequence
  ENSG00000159086_51 (sequence is synthesized)
ctggaaaattaaaaatagatattaaaaagacttctaagtacttaaatattctctaagggaaaagctctaaaattgttgacatttctttacttgttctatgaatactgaagtgttacattt

SEQ ID NO: 469503 - DNA, 120 bp, Artificial Sequence
  ENSG00000159086_52 (sequence is synthesized)
cttaactaatgtttgctccaataactaggcactggacattatagctctatgcatggattaaaagaagaagtgtcgtttcccaaacataaaacagaatttgctacttgtgtgctgttgggg

SEQ ID NO: 469504 - DNA, 120 bp, Artificial Sequence
  ENSG00000159086_53 (sequence is synthesized)
attcatgattattctgtccatagagagggtactttttcagaaatccggaaatagtatggaaccctcaaataaataagcagctgaggagtttggtgttacggagtgtgttgtatttttaca

SEQ ID NO: 469505 - DNA, 120 bp, Artificial Sequence
  ENSG00000159086_54 (sequence is synthesized)
ttcttaaagacctgtccgctagctttctgttccctcaggcaacatgtagtctggggtagcagatgcagaatatcagcaaagaagattcactggcccagcttcaaaagctaaacagaagat

SEQ ID NO: 469506 - DNA, 120 bp, Artificial Sequence
  ENSG00000159086_55 (sequence is synthesized)
gacttcatactttgttctgctaccttcttggattacttctgtggaagcctcgaaaaattataaaaaatgccactccatgatcttgttgaagacatttctgagtttgtacctcttggactc

SEQ ID NO: 469507 - DNA, 120 bp, Artificial Sequence
  ENSG00000159086_56 (sequence is synthesized)
tgaaaaagtgtagtcacgctatggggggaaaagcaaaacagtgagattttggttagcccacaaaactgtgaaatctgtaaactgccattttttgttttttgagaaaaaaagcagtacaga

SEQ ID NO: 469508 - DNA, 120 bp, Artificial Sequence
  ENSG00000159110_0 (sequence is synthesized)
cccgcactaaagacgcttcttcccggcgggtaggaatcccgccggcgagccgaacagttccccgagcgcagcccgcggaccaccacccggccgcacgggccgcttttgtcccccgcccgc

SEQ ID NO: 469509 - DNA, 120 bp, Artificial Sequence
  ENSG00000159110_1 (sequence is synthesized)
cgcttctgtccgagaggccgcccgcgaggcgcatcctgaccgcgagcgtcgggtcccagagccgggcgcggctggggcccgaggctagcatctctcgggagccgcaaggcgagagctgca

SEQ ID NO: 469510 - DNA, 120 bp, Artificial Sequence
  ENSG00000159110_2 (sequence is synthesized)
aagtttaattagacacttcagaattttgatcacctaatgttgatttcagatgtaaaagtcaagagaagactctaaaaatagcaaagatgcttttgagccagaatgccttcatcttcagat

SEQ ID NO: 469511 - DNA, 120 bp, Artificial Sequence
  ENSG00000159110_3 (sequence is synthesized)
cacttaatttggttctcatggtgtatatcagcctcgtgtttggtatttcatatgattcgcctgattacacagatgaatcttgcactttcaagatatcattgcgaaatttccggtccatct

SEQ ID NO: 469512 - DNA, 120 bp, Artificial Sequence
  ENSG00000159110_4 (sequence is synthesized)
tatcatgggaattaaaaaaccactccattgtaccaactcactatacattgctgtatacaatcatgagtaaaccagaagatttgaaggtggttaagaactgtgcaaataccacaagatcat

SEQ ID NO: 469513 - DNA, 120 bp, Artificial Sequence
  ENSG00000159110_5 (sequence is synthesized)
tttgtgacctcacagatgagtggagaagcacacacgaggcctatgtcaccgtcctagaaggattcagcgggaacacaacgttgttcagttgctcacacaatttctggctggccatagaca

SEQ ID NO: 469514 - DNA, 120 bp, Artificial Sequence
  ENSG00000159110_6 (sequence is synthesized)
tgtcttttgaaccaccagagtttgagattgttggttttaccaaccacattaatgtgatggtgaaatttccatctattgttgaggaagaattacagtttgatttatctctcgtcattgaag

SEQ ID NO: 469515 - DNA, 120 bp, Artificial Sequence
  ENSG00000159110_7 (sequence is synthesized)
aacagtcagagggaattgttaagaagcataaacccgaaataaaaggaaacatgagtggaaatttcacctatatcattgacaagttaattccaaacacgaactactgtgtatctgtttatt

SEQ ID NO: 469516 - DNA, 120 bp, Artificial Sequence
  ENSG00000159110_8 (sequence is synthesized)
tagagcacagtgatgagcaagcagtaataaagtctcccttaaaatgcaccctccttccacctggccaggaatcagaatcagcagaatctgccaaaataggaggaataattactgtgtttt

SEQ ID NO: 469517 - DNA, 120 bp, Artificial Sequence
  ENSG00000159110_9 (sequence is synthesized)
tgatagcattggtcttgacaagcaccatagtgacactgaaatggattggttatatatgcttaagaaatagcctccccaaagtcttgaattttcataactttttagcctggccatttccta

SEQ ID NO: 469518 - DNA, 120 bp, Artificial Sequence
  ENSG00000159110_10 (sequence is synthesized)
acctgccaccgttggaagccatggatatggtggaggtcatttacatcaacagaaagaagaaagtgtgggattataattatgatgatgaaagtgatagcgatactgaggcagcgcccagga

SEQ ID NO: 469519 - DNA, 120 bp, Artificial Sequence
  ENSG00000159110_11 (sequence is synthesized)
caagtggcggtggctataccatgcatggactgactgtcaggcctctgggtcaggcctctgccacctctacagaatcccagttgatagacccggagtccgaggaggagcctgacctgcctg

SEQ ID NO: 469520 - DNA, 120 bp, Artificial Sequence
  ENSG00000159110_12 (sequence is synthesized)
cacgatgccaaaggacagccctcagcagttggaactcttgagtgggccctgtgagaggagaaagagtccactccaggacccttttcccgaagaggactacagctccacggaggggtctgg

SEQ ID NO: 469521 - DNA, 120 bp, Artificial Sequence
  ENSG00000159110_13 (sequence is synthesized)
gggcagaattaccttcaatgtggacttaaactctgtgtttttgagagttcttgatgacgaggacagtgacgacttagaagcccctctgatgctatcgtctcatctggaagagatggttga

SEQ ID NO: 469522 - DNA, 120 bp, Artificial Sequence
  ENSG00000159110_14 (sequence is synthesized)
cccagaggatcctgataatgtgcaatcaaaccatttgctggccagcggggaagggacacagccaacctttcccagcccctcttcagagggcctgtggtccgaagatgctccatctgatca

SEQ ID NO: 469523 - DNA, 120 bp, Artificial Sequence
  ENSG00000159110_15 (sequence is synthesized)
aagtgacacttctgagtcagatgttgaccttggggatggttatataatgagatgactccaaaactattgaatgaacttggacagacaagcacctacagggttctttgtctctgcatccta

SEQ ID NO: 469524 - DNA, 120 bp, Artificial Sequence
  ENSG00000159110_16 (sequence is synthesized)
acttgctgccttatcgtctgcaagtgttctccaagggaaggaggaggaaactgtggtgttcctttcttccaggtgacatcacctatgcacattcccagtatggggaccatagtatcattc

SEQ ID NO: 469525 - DNA, 120 bp, Artificial Sequence
  ENSG00000159110_17 (sequence is synthesized)
agtgcattgtttacatattcaaagtggtgcactttgaaggaagcacatgtgcacctttcctttacactaatgcacttaggatgtttctgcatcatgtctaccagggagcagggttcccca

SEQ ID NO: 469526 - DNA, 76 bp, Artificial Sequence
  ENSG00000159110_18 (sequence is synthesized)
atgtttctgcatcatgtctaccagggagcagggttccccacagtttcagaggtggtccaggaccctatgatatttc

SEQ ID NO: 469527 - DNA, 88 bp, Artificial Sequence
  ENSG00000159110_19 (sequence is synthesized)
taaagtgctgggattacaggggtgagccgctgtgcctggctggccctgtgatatttctgtgaaataaattgggccagggtgggagcag

SEQ ID NO: 469528 - DNA, 120 bp, Artificial Sequence
  ENSG00000159110_20 (sequence is synthesized)
tgatatttctgtgaaataaattgggccagggtgggagcagggaaagaaaaggaaaatagtagcaagagctgcaaagcaggcaggaagggaggaggagagccaggtgagcagtggagagaa

SEQ ID NO: 469529 - DNA, 120 bp, Artificial Sequence
  ENSG00000159110_21 (sequence is synthesized)
ggggggccctgcacaaggaaacagggaagagccatcgaagtttcagtcggtgagccttgggcacctcacccatgtcacatcctgtctcctgcaattggaattccaccttgtccagccctc

SEQ ID NO: 469530 - DNA, 120 bp, Artificial Sequence
  ENSG00000159110_22 (sequence is synthesized)
cccagttaaagtggggaagacagactttaggatcacgtgtgtgactaatacagaaaggaaacatggcgtcggggagagggataaaacctgaatgccatattttaagttaaaaaaaaaaaa

SEQ ID NO: 469531 - DNA, 120 bp, Artificial Sequence
  ENSG00000159110_23 (sequence is synthesized)
ctgagctcaaacagtcgtcctgcctaagcttccccagtagctgggattacaagcgtgcatccctgtgccccagtgattaagttttattatgtagaaaataaagagcaaacagtacagctg

SEQ ID NO: 469532 - DNA, 120 bp, Artificial Sequence
  ENSG00000159110_24 (sequence is synthesized)
aattttcagagtgctctctatgctgattccgagtcgagtgtgtcagctgtgattacagtgcctgtggatctaggccgggttgggggggtgtgggcgggggaagggaagtctggcccggag

SEQ ID NO: 469533 - DNA, 120 bp, Artificial Sequence
  ENSG00000159110_25 (sequence is synthesized)
ggcgggggaagggaagtctggcccggagcaattgctcctgccggtaaccccagcactttgggatgcctaaacaggcgtatcgcttgaggccagtaattcgagaccagcctgggcaacatg

SEQ ID NO: 469534 - DNA, 66 bp, Artificial Sequence
  ENSG00000159110_26 (sequence is synthesized)
ctgggcaacatggcaaatctgtctctacaaaacaaaattagaaaaattaactgggcgtagtggcat

SEQ ID NO: 469535 - DNA, 120 bp, Artificial Sequence
  ENSG00000159110_27 (sequence is synthesized)
acttcagcctgggtgacagaaccagaccctgtctttaaaaagggagttggtggggagaggttctagaatgtcatgtagcaaccagtttaaggactgggactcagggatccaactcccaca

SEQ ID NO: 469536 - DNA, 120 bp, Artificial Sequence
  ENSG00000159110_28 (sequence is synthesized)
gtttccctgtgtgaccctaggcatttgacttagcctttctgagcctcaggttttttgtttctgaagtaaaaggattggactaggtaatctccaagatcctaggaacccaggagaaagatg

SEQ ID NO: 469537 - DNA, 120 bp, Artificial Sequence
  ENSG00000159110_29 (sequence is synthesized)
agaaaatgtacaagaatgaacactcaggtggaaatgctgcaatcctgagaagctcccaggatgaatgaaaggcacaggacctcttacccctcacccctgcccccctcaagagctggtttc

SEQ ID NO: 469538 - DNA, 120 bp, Artificial Sequence
  ENSG00000159110_30 (sequence is synthesized)
tcaaacctttctcttaggccccttcaaagggggaaaactaaaaattatacaagttatagttcaaggactttaaatagattatttatatgattgctcataaggatgaggctgtgaggaggg

SEQ ID NO: 469539 - DNA, 120 bp, Artificial Sequence
  ENSG00000159110_31 (sequence is synthesized)
aacaccttatttaatctaatgaaattccataggaaagaggccttttgtatattgaatcaatttatctgccttctcagtgcatctgtcatattctgaaagattctgggttgatcttttgcg

SEQ ID NO: 469540 - DNA, 120 bp, Artificial Sequence
  ENSG00000159110_32 (sequence is synthesized)
ataacctctatggctgtgagtgtgtgtgtgtgtttgtgtattttttaacattttgtataatgattggaggttggtaaaaagtaacacaacagtacttttttaatacaaacttggtgtggt

SEQ ID NO: 469541 - DNA, 120 bp, Artificial Sequence
  ENSG00000159110_33 (sequence is synthesized)
aagaagggagaagatgagaaactagacatcagtcagttttgtcacagacaagctctgtgaccttggagaagttacttagccacactgagctacagttttctcatccgttgaatggagcat

SEQ ID NO: 469542 - DNA, 120 bp, Artificial Sequence
  ENSG00000159110_34 (sequence is synthesized)
gcacctgcgaccccaggacccctcccgggccctgtcctgcgccctccacgcgtcgcccctgctgggagtccgctttcgttgcacccctccgcgtcccaccccaccccaccaaggatgccc

SEQ ID NO: 469543 - DNA, 120 bp, Artificial Sequence
  ENSG00000159111_0 (sequence is synthesized)
actcggcttccgtccattcttccggtggagatggctgcggccgtggcggggatgctgcgagggggtctcctgccccaggcgggccggctgcctaccctccagactgtccgctatggctcc

SEQ ID NO: 469544 - DNA, 120 bp, Artificial Sequence
  ENSG00000159111_1 (sequence is synthesized)
aaggctgttacccgccaccgtcgtgtgatgcactttcagcggcagaagctgatggctgtgactgaatatatccccccgaaaccagccatccacccatcatgcctgccatctcctcccagc

SEQ ID NO: 469545 - DNA, 120 bp, Artificial Sequence
  ENSG00000159111_2 (sequence is synthesized)
cccccacaggaggagataggcctcatcaggcttctccgccgggagatagcagcagttttccaggacaaccgaatgatagccgtctgccagaatgtggctctgagtgcagaggacaagctt

SEQ ID NO: 469546 - DNA, 120 bp, Artificial Sequence
  ENSG00000159111_3 (sequence is synthesized)
cttatgcgacaccagctgcggaaacacaagatcctgatgaaggtcttccccaaccaggtcctgaagcccttcctggaggattccaagtaccaaaatctgctgcccctttttgtggggcac

SEQ ID NO: 469547 - DNA, 120 bp, Artificial Sequence
  ENSG00000159111_4 (sequence is synthesized)
aacatgctgctggtcagtgaagagcccaaggtcaaggagatggtacggatcttaaggactgtgccattcctgccgctgctaggtggctgcattgatgacaccatcctcagcaggcagggc

SEQ ID NO: 469548 - DNA, 120 bp, Artificial Sequence
  ENSG00000159111_5 (sequence is synthesized)
tttatcaactactccaagctccccagcctgcccctggtgcagggggagcttgtaggaggcctcacctgcctcacagcccagacccactccctgctccagcaccagcccctccagctgacc

SEQ ID NO: 469549 - DNA, 120 bp, Artificial Sequence
  ENSG00000159111_6 (sequence is synthesized)
accctgttggaccagtacatcagagagcaacgcgagaaggattctgtcatgtcggccaatgggaagccagatcctgacactgttccggactcgtagccagcctgtttagccagccctgcg

SEQ ID NO: 469550 - DNA, 120 bp, Artificial Sequence
  ENSG00000159111_7 (sequence is synthesized)
agtgtgtttgtcacttggttttcactagtaatgatattgtcaggtatagggccacttggagatgcagaggattccatttcagatgtcagtcaccggcttcgtccttagttttcccaactt

SEQ ID NO: 469551 - DNA, 120 bp, Artificial Sequence
  ENSG00000159111_8 (sequence is synthesized)
gggacgtgataggagcaaagtctctccattctccaggtccaaggcagagatcctgaaaagatagggctattgtcccctgcctccttggtcactgcctcttgctgcacgggctcctgagcc

SEQ ID NO: 469552 - DNA, 120 bp, Artificial Sequence
  ENSG00000159111_9 (sequence is synthesized)
cacccccttggggcacaacctgccactgccacagtagctcaaccaagcagttgtgctgagaatggcacctggtgagagcctgctgtgtgccaggctttgtgctgagtgctgtacatgtat

SEQ ID NO: 469553 - DNA, 120 bp, Artificial Sequence
  ENSG00000159111_10 (sequence is synthesized)
tagttcctttactgctgaccacattgtacccatttcacagagaaggagcagagaaattaagtggcttgctcaaggtcatgcagttagtaagtggcagaacagggacttgaaccaagccct

SEQ ID NO: 469554 - DNA, 120 bp, Artificial Sequence
  ENSG00000159111_11 (sequence is synthesized)
ctgctctgaagaccgcgtcctgaatttcttcactagagcttcctcatcaggttacccagaagtgggtcccatccaccatccaggtgtgcttggatgttagttctccaccctcgaggtgta

SEQ ID NO: 469555 - DNA, 120 bp, Artificial Sequence
  ENSG00000159111_12 (sequence is synthesized)
cgctgtgaaaagtttgggagcactgctttataataaaatgaaatatattctacttcctttattttgtggtttacacggttgtcctccctctaaacttactctcaggggcttctctgtcat

SEQ ID NO: 469556 - DNA, 120 bp, Artificial Sequence
  ENSG00000159111_13 (sequence is synthesized)
ctgactttcctcactcttgcttcccttcctaggaaaatcctcttcccctatacctgttcccacaaatggcatcccgcgcatgcttgccctattaaaggcagctgacagctgtacccacta

SEQ ID NO: 469557 - DNA, 74 bp, Artificial Sequence
  ENSG00000159111_14 (sequence is synthesized)
ttccgtccattcttccggtggagatggctgcggccgtggcggggatgctgcgagggggtctcctgccccaggcg

SEQ ID NO: 469558 - DNA, 120 bp, Artificial Sequence
  ENSG00000159111_15 (sequence is synthesized)
gttgcccatcttccccccacccccaccagactcagacctcaccatctgctccccagtgatgatacttcttactcctcctctccatgagtcaccctctaatctggtgtctaacctatgatt

SEQ ID NO: 469559 - DNA, 120 bp, Artificial Sequence
  ENSG00000159111_16 (sequence is synthesized)
gtccattcttccggtggagatggctgcggccgtggcggggatgctgcgagggggtctcctgccccaggcgggtaaggagtggcccaggtcctcacggcgtgtcttgcggccgctctctag

SEQ ID NO: 469560 - DNA, 120 bp, Artificial Sequence
  ENSG00000159111_17 (sequence is synthesized)
tcctcatctgccctcctctactactgattcttcccataatctctgaccccagctagatcgctggcctccttaccccgtccagttccttgtgactcgactggccggctgcctaccctccag

SEQ ID NO: 469561 - DNA, 120 bp, Artificial Sequence
  ENSG00000159111_18 (sequence is synthesized)
tacaggcgtgagccaccacacccagcaaaatttctaacaagctctcaaatgatgctgatgttgctggttggggtggaggtggggcataccttgagagccactagattagaccaggggttg

SEQ ID NO: 469562 - DNA, 120 bp, Artificial Sequence
  ENSG00000159111_19 (sequence is synthesized)
ggggcataccttgagagccactagattagaccaggggttggcgtattatggcagggccagtcactgtgttttataaaattctattggtacatagtttctgctgtctctttaaatattgtc

SEQ ID NO: 469563 - DNA, 120 bp, Artificial Sequence
  ENSG00000159111_20 (sequence is synthesized)
tgtggctgcttttggcagagttgagcattagagacagattacatgggccccaaacttaaaatatttactgtttgaccattttaagaaaaagtttatttaaccttatcccctttttctttc

SEQ ID NO: 469564 - DNA, 90 bp, Artificial Sequence
  ENSG00000159111_21 (sequence is synthesized)
ttaaccttatcccctttttctttctctctctctctttttttttctgagacggagtcttactctgtgcccaggctagagtgcagtggcatg

SEQ ID NO: 469565 - DNA, 120 bp, Artificial Sequence
  ENSG00000159111_22 (sequence is synthesized)
tgaagtaggacactcagccattgtcatgcacgtcattatttcagtttgactgcctgatccagatattttaagatgaaatccgcacttgattctgtattggcttttgggctctggattggg

SEQ ID NO: 469566 - DNA, 120 bp, Artificial Sequence
  ENSG00000159128_0 (sequence is synthesized)
gatcgccccactgcactccagcctggtgactccgtctcaaaaaaaaggggaggggggcgggggagagttgaaagcttaatatgtactttgggggctattaaagcaaacatttcgactaaa

SEQ ID NO: 469567 - DNA, 120 bp, Artificial Sequence
  ENSG00000159128_1 (sequence is synthesized)
tgggggctattaaagcaaacatttcgactaaaggggcgaatcctcgaattgtgcgatcaagcacccgagaggagagttggggggggtcaggaggggtgggggctccagggaaagcccggg

SEQ ID NO: 469568 - DNA, 120 bp, Artificial Sequence
  ENSG00000159128_2 (sequence is synthesized)
ggtctgggccggggtctcgcggggcccttccggaaggatcgcggcccccgaaggtgggcgtcccgcggggctccagtctccaggacgttccgggaggctccgcgctctgggaggccggct

SEQ ID NO: 469569 - DNA, 80 bp, Artificial Sequence
  ENSG00000159128_3 (sequence is synthesized)
ggctgcgtggggtccccgcgctgcagccgcagaggccccccagggccgcggttcccggagcgggaaagtcccgcgcgggg

SEQ ID NO: 469570 - DNA, 120 bp, Artificial Sequence
  ENSG00000159128_4 (sequence is synthesized)
cgagccgaatcccctccaccgggacgccccgctgctgctcgggaagaggcgggccctgcgcgccctgcgctcgccatggcggtttgggcggcgacgtgagcggctccgcggaccccgagc

SEQ ID NO: 469571 - DNA, 120 bp, Artificial Sequence
  ENSG00000159128_5 (sequence is synthesized)
ggccgcgacctgagccgccgccgagcgcccggggccatgcgaccgacgctgctgtggtcgctgctgctgctgctcggagtcttcgccgccgccgccgcggccccgccagaccctctttcc

SEQ ID NO: 469572 - DNA, 120 bp, Artificial Sequence
  ENSG00000159128_6 (sequence is synthesized)
gaccctctttcccagctgcccgctcctcagcacccgaagattcgcctgtacaacgcagagcaggtcctgagttgggagccagtggccctgagcaatagcacgaggcctgttgtctaccaa

SEQ ID NO: 469573 - DNA, 120 bp, Artificial Sequence
  ENSG00000159128_7 (sequence is synthesized)
gtgcagtttaaatacaccgacagtaaatggttcacggccgacatcatgtccataggggtgaattgtacacagatcacagcaacagagtgtgacttcactgccgccagtccctcagcaggc

SEQ ID NO: 469574 - DNA, 120 bp, Artificial Sequence
  ENSG00000159128_8 (sequence is synthesized)
ttcccaatggatttcaatgtcactctacgccttcgagctgagctgggagcactccattctgcctgggtgacaatgccttggtttcaacactatcggaatgtgactgtcgggcctccagaa

SEQ ID NO: 469575 - DNA, 120 bp, Artificial Sequence
  ENSG00000159128_9 (sequence is synthesized)
tcgctgatacctccacggcctttttttgttattatgtccattactgggaaaaaggaggaatccaacaggtcaaaggccctttcagaagcaactccatttcattggataacttaaaaccct

SEQ ID NO: 469576 - DNA, 120 bp, Artificial Sequence
  ENSG00000159128_10 (sequence is synthesized)
ccagagtgtactgtttacaagtccaggcacaactgctttggaacaaaagtaacatctttagagtcgggcatttaagcaacatatcttgctacgaaacaatggcagatgcctccactgagc

SEQ ID NO: 469577 - DNA, 120 bp, Artificial Sequence
  ENSG00000159128_11 (sequence is synthesized)
ttcagcaagtcatcctgatctccgtgggaacattttcgttgctgtcggtgctggcaggagcctgtttcttcctggtcctgaaatatagaggcctgattaaatactggtttcacactccac

SEQ ID NO: 469578 - DNA, 120 bp, Artificial Sequence
  ENSG00000159128_12 (sequence is synthesized)
caagcatcccattacagatagaagagtatttaaaagacccaactcagcccatcttagaggccttggacaaggacagctcaccaaaggatgacgtctgggactctgtgtccattatctcgt

SEQ ID NO: 469579 - DNA, 120 bp, Artificial Sequence
  ENSG00000159128_13 (sequence is synthesized)
ttccggaaaaggagcaagaagatgttctccaaacgctttgaaccaaagcatgggcctagcccactggctccctggaagagatcaagccatcggagctgctagagttctgtctggactttc

SEQ ID NO: 469580 - DNA, 120 bp, Artificial Sequence
  ENSG00000159128_14 (sequence is synthesized)
cagagaccagtattcccttttgctgcctctaaaaggcctgtccctgcagacatgagagacagcaggtctcatgggggtgacaagctttttttttttttcttaaagaattttcaaaatcaa

SEQ ID NO: 469581 - DNA, 120 bp, Artificial Sequence
  ENSG00000159128_15 (sequence is synthesized)
attccagaatgattttacggagatatcccaggaaaattaaggcttctcttaaacactaaaaaggcatgtaattgcttgttagcaaaatggatatgacacatctctgatacttttttcatt

SEQ ID NO: 469582 - DNA, 120 bp, Artificial Sequence
  ENSG00000159128_16 (sequence is synthesized)
attggttgggctgagcagtcagaagacctggtcgtcgtcttgactttggcaaatgagccggagccccttgggcaggtcacacaacctgtcccagcgagggacaccgagtggcccttcatg

SEQ ID NO: 469583 - DNA, 120 bp, Artificial Sequence
  ENSG00000159128_17 (sequence is synthesized)
tacatccatggtgtgctggcttaaaatgtaattaatcttgtaaatatactcctagtaatttaagattttgtttttaaactggaaataaaagattgtatagtgcatgttttttaaagtcta

SEQ ID NO: 469584 - DNA, 120 bp, Artificial Sequence
  ENSG00000159128_18 (sequence is synthesized)
actcatgagatgggagatggtgaacaggcgtgtggagggcggaataatggtccccaaagatgtccacgccctcatcctcagagtccgtgaacctgggaatgtgctgcctgacgtacaaaa

SEQ ID NO: 469585 - DNA, 120 bp, Artificial Sequence
  ENSG00000159128_19 (sequence is synthesized)
agtgtcaagggatccacagtgcaggtaggatgaagagtctgagaagggagatgggatcctccgaaaagagaaaatcgggtcttacagcgcgatgtaagacgatgcggatgccacttccct

SEQ ID NO: 469586 - DNA, 120 bp, Artificial Sequence
  ENSG00000159128_20 (sequence is synthesized)
cgtcccgtccgaggcctccgccccctgcccctccgcaccccccgacccaggcacgcgcagcggggagcagcccagcctagcccgtctcactgctttggttttgaaaggtcacgtatttac

SEQ ID NO: 469587 - DNA, 120 bp, Artificial Sequence
  ENSG00000159128_21 (sequence is synthesized)
cttagaatttcagcaccttccaacttactgttttaagtacctttaaccagcctattggctaaaaaccgaaacggtcctacccgcgactaccactgctccagtgacaatgctctgctgcta

SEQ ID NO: 469588 - DNA, 120 bp, Artificial Sequence
  ENSG00000159128_22 (sequence is synthesized)
cttatttaacggagctcaaggtttataattctcgaaagaatgttgttccccttccctttcccctcccgcctctgtacttgactctcgtaagaatgaaatcagaaaagtgcagaaaacaca

SEQ ID NO: 469589 - DNA, 120 bp, Artificial Sequence
  ENSG00000159131_0 (sequence is synthesized)
gggccgacttccggcgagcgggcaagcgggaaccaggtggccacccggtgtcggtttcattttcctttggaatttctgctttacagacagaacaatggcagcccgagtacttataattgg

SEQ ID NO: 469590 - DNA, 120 bp, Artificial Sequence
  ENSG00000159131_1 (sequence is synthesized)
cagtggaggaagggaacatacgctggcctggaaacttgcacagtctcatcatgtcaaacaagtgttggttgccccaggaaacgcaggcactgcctgctctgaaaagatttcaaataccgc

SEQ ID NO: 469591 - DNA, 120 bp, Artificial Sequence
  ENSG00000159131_2 (sequence is synthesized)
catctcaatcagtgaccacactgcccttgctcaattctgcaaagagaagaaaattgaatttgtagttgttggaccagaagcacctctggctgctgggattgttgggaacctgaggtctgc

SEQ ID NO: 469592 - DNA, 120 bp, Artificial Sequence
  ENSG00000159131_3 (sequence is synthesized)
aggagtgcaatgctttggcccaacagcagaagcggctcagttagagtccagcaaaaggtttgccaaagagtttatggacagacatggaatcccaaccgcacaatggaaggctttcaccaa

SEQ ID NO: 469593 - DNA, 120 bp, Artificial Sequence
  ENSG00000159131_4 (sequence is synthesized)
acctgaagaagcctgcagcttcattttgagtgcagacttccctgctttggttgtgaaggccagtggtcttgcagctggaaaaggggtgattgttgcaaagagcaaagaagaggcctgcaa

SEQ ID NO: 469594 - DNA, 120 bp, Artificial Sequence
  ENSG00000159131_5 (sequence is synthesized)
agctgtacaagagatcatgcaggagaaagcctttggggcagctggagaaacaattgtcattgaagaacttcttgacggagaagaggtgtcgtgtctgtgtttcactgatggcaagactgt

SEQ ID NO: 469595 - DNA, 120 bp, Artificial Sequence
  ENSG00000159131_6 (sequence is synthesized)
ggcccccatgcccccagcacaggaccataagcgattactggagggagatggtggccctaacacagggggaatgggagcctattgtccagcccctcaggtttctaatgatctattactaaa

SEQ ID NO: 469596 - DNA, 120 bp, Artificial Sequence
  ENSG00000159131_7 (sequence is synthesized)
aattaaagatactgttcttcagaggacagtggatggcatgcagcaagagggtactccatatacaggtattctctatgctggaataatgctgaccaagaatggcccaaaagttctagagtt

SEQ ID NO: 469597 - DNA, 120 bp, Artificial Sequence
  ENSG00000159131_8 (sequence is synthesized)
taattgccgttttggtgatccagagtgccaagtaatcctcccacttcttaaaagtgatctttatgaagtgattcagtccaccttagatggactgctctgcacatctctgcctgtttggct

SEQ ID NO: 469598 - DNA, 120 bp, Artificial Sequence
  ENSG00000159131_9 (sequence is synthesized)
agaaaaccacaccgccctaactgttgtcatggcaagtaaaggttatcctggagactacaccaagggtgtagagataacagggtttcctgaggctcaagctctaggactggaggtgttcca

SEQ ID NO: 469599 - DNA, 120 bp, Artificial Sequence
  ENSG00000159131_10 (sequence is synthesized)
tgcaggcactgccctcaaaaatggcaaagtagtaactcatgggggtagagttcttgcagtcacagccatccgggaaaatctcatatcagcccttgaggaagccaagaaaggactagctgc

SEQ ID NO: 469600 - DNA, 120 bp, Artificial Sequence
  ENSG00000159131_11 (sequence is synthesized)
tataaagtttgagggagcaatttataggaaagacgtcggctttcgtgccatagctttcctccagcagcccaggagtttgacttacaaggaatctggagtagatatcgcagctggaaatat

SEQ ID NO: 469601 - DNA, 120 bp, Artificial Sequence
  ENSG00000159131_12 (sequence is synthesized)
gctggtcaagaaaattcagcctttagcaaaagccacttccagatcaggctgtaaagttgatcttggaggttttgctggtctttttgatttaaaagcagctggtttcaaagatccccttct

SEQ ID NO: 469602 - DNA, 120 bp, Artificial Sequence
  ENSG00000159131_13 (sequence is synthesized)
tttggtagcaatgtgtgttaatgatattctggcacaaggagcagagcccctcttcttccttgattacttttcctgtggaaaacttgacctcagtgtaactgaagctgttgttgctggaat

SEQ ID NO: 469603 - DNA, 120 bp, Artificial Sequence
  ENSG00000159131_14 (sequence is synthesized)
tgctaaagcttgtggaaaagctggatgtgctctccttggaggtgaaacagcagaaatgcctgacatgtatccccctggagagtatgacctagctgggtttgccgttggtgccatggagcg

SEQ ID NO: 469604 - DNA, 120 bp, Artificial Sequence
  ENSG00000159131_15 (sequence is synthesized)
agatcagaaactccctcacctggaaagaatcactgagggtgatgttgttgttggaatagcttcatctggtcttcatagcaatggatttagccttgtgaggaaaatcgtggcaaaatcttc

SEQ ID NO: 469605 - DNA, 120 bp, Artificial Sequence
  ENSG00000159131_16 (sequence is synthesized)
cctccagtactcctctccagcacctgatggttgtggtgaccagactttaggggacttacttctcacgcctaccagaatctacagccattcactgttacctgtcctacgttcaggacatgt

SEQ ID NO: 469606 - DNA, 120 bp, Artificial Sequence
  ENSG00000159131_17 (sequence is synthesized)
caaagcctttgcccatattactggtggaggattactagagaacatccccagagtcctccctgagaaacttggggtagatttagatgcccagacctggaggatccccagggtcttctcatg

SEQ ID NO: 469607 - DNA, 120 bp, Artificial Sequence
  ENSG00000159131_18 (sequence is synthesized)
gttgcagcaggaaggacacctctctgaggaagagatggccagaacatttaactgtggggttggcgctgtccttgtggtatcaaaggagcagacagagcagattctgagggatatccagca

SEQ ID NO: 469608 - DNA, 120 bp, Artificial Sequence
  ENSG00000159131_19 (sequence is synthesized)
gcacaaggaagaagcctgggtgattggcagtgtggttgcacgagctgaaggttccccacgtgtgaaagtcaagaatctgattgaaagcatgcaaataaatgggtcagtgttgaagaatgg

SEQ ID NO: 469609 - DNA, 120 bp, Artificial Sequence
  ENSG00000159131_20 (sequence is synthesized)
ctccctgacaaatcatttctcttttgaaaaaaaaaaggccagagtggctgtcttaatatctggaacaggatcgaacctgcaagcacttatagacagtactcgggaaccaaatagctctgc

SEQ ID NO: 469610 - DNA, 120 bp, Artificial Sequence
  ENSG00000159131_21 (sequence is synthesized)
acaaattgatattgttatctccaacaaagccgcagtagctgggttagataaagcggaaagagctggtattcccactagagtaattaatcataaactgtataaaaatcgtgtagaatttga

SEQ ID NO: 469611 - DNA, 120 bp, Artificial Sequence
  ENSG00000159131_22 (sequence is synthesized)
cagtgcaattgacctagtccttgaagagttctccatagacatagtctgtcttgcaggattcatgagaattctttctggcccctttgtccaaaagtggaatggaaaaatgctcaatatcca

SEQ ID NO: 469612 - DNA, 120 bp, Artificial Sequence
  ENSG00000159131_23 (sequence is synthesized)
cccatccttgctcccttcttttaagggttcaaatgcccatgagcaagccctggaaaccggagtcacagttactgggtgcactgtacactttgtagctgaagatgtggatgctggacagat

SEQ ID NO: 469613 - DNA, 120 bp, Artificial Sequence
  ENSG00000159131_24 (sequence is synthesized)
tattttgcaagaagctgttcccgtgaagaggggtgatactgtcgcaactctttctgaaagagtaaaattagcagaacataaaatatttcctgcagcccttcagctggtggccagtggaac

SEQ ID NO: 469614 - DNA, 120 bp, Artificial Sequence
  ENSG00000159131_25 (sequence is synthesized)
tgtacagcttggagaaaatggcaagatctgttgggttaaagaggaatgaagccttttaattcagaaatggggccagtttagaaagaattatttgctgtttgcatggtggttttttatcat

SEQ ID NO: 469615 - DNA, 120 bp, Artificial Sequence
  ENSG00000159131_26 (sequence is synthesized)
ggacttggcccaaaagaaaaactgctaaaagacaaaaaagacctcacccttacttcatctatttttttaataaatagagactcactaaaaacaagactagttagtgcagcatatctgaga

SEQ ID NO: 469616 - DNA, 120 bp, Artificial Sequence
  ENSG00000159131_27 (sequence is synthesized)
ctgacgcaggcgccattacaggagccgtctctcttgaggcgaccgtgtccgcataagttgtcagtccccagcagtgtttgggagccttaacaggcttgctaagtgcctgagattaaaggc

SEQ ID NO: 469617 - DNA, 120 bp, Artificial Sequence
  ENSG00000159131_28 (sequence is synthesized)
gaagaggaagaagagcaagaagggcaacccggtgtttaacacacggctttcaggcgctctcaggtggcgccaagttcagtttcgacagggatatgcatccgggagagaatttttcagccc

SEQ ID NO: 469618 - DNA, 120 bp, Artificial Sequence
  ENSG00000159131_29 (sequence is synthesized)
ttttttttaccactttttaatggaccattttttaaatgtttatgatttttccaaaactttgattattagaagtttatgtagtagattttatatttgtaatacagtgtcttcatcatagat

SEQ ID NO: 469619 - DNA, 120 bp, Artificial Sequence
  ENSG00000159131_30 (sequence is synthesized)
tctcttttttttttttttcttttttaatgaaggtattctctatgctggaataatgctgaccaagaatggcccaaaagttctagagtttaattgccgttttggtgatccagagtgccaagt

SEQ ID NO: 469620 - DNA, 120 bp, Artificial Sequence
  ENSG00000159131_31 (sequence is synthesized)
tgccaagtgggtaaaaatatcaaagtattacttggtagaagatatgtggtattttaatcttggaatttatcagcctggaagtaattacctttgggaaattcatgcaagttctgctagtac

SEQ ID NO: 469621 - DNA, 120 bp, Artificial Sequence
  ENSG00000159131_32 (sequence is synthesized)
tactgaaaatacaaaaattagctgggcgcgatggcacatgcctgtagtcccagtcccagctacttgggaagctaaggtttctaatgatctattactaaaaattaaagatactgttcttca

SEQ ID NO: 469622 - DNA, 120 bp, Artificial Sequence
  ENSG00000159131_33 (sequence is synthesized)
gagagaccctctttttcttaacatcgcatatcaagcctttaaatggctttgctaggtcacatgcttatccccgagaccaggagatcatggcactactgtgggtggtctcgctaggaagat

SEQ ID NO: 469623 - DNA, 120 bp, Artificial Sequence
  ENSG00000159131_34 (sequence is synthesized)
ttggggagtaggggcagaatactggcaggcagtcatatatatccaccgtgcacttcaagatagtgatgtgatctgcagcttttagttgaagtaattacatatgttcaccttttggaagtt

SEQ ID NO: 469624 - DNA, 120 bp, Artificial Sequence
  ENSG00000159131_35 (sequence is synthesized)
gttaagtgatacaaatgtgttgttcattttagtccttgcattatcttattttcaggataaaacataccctaaagttttcataaaatatttttctttccattattcttgttaattcacaat

SEQ ID NO: 469625 - DNA, 120 bp, Artificial Sequence
  ENSG00000159131_36 (sequence is synthesized)
gggcacttggacttacacactattgaggttctggattaattcaagcattcatgctttttctttcatatacagtttattgcacaataaataaagtcaccttaaaccaagttttaatgcctg

SEQ ID NO: 469626 - DNA, 120 bp, Artificial Sequence
  ENSG00000159131_37 (sequence is synthesized)
gaagcttaaagtgggggaaaggttgaaatcttttactttgagagtagcttgattttttctgacttccctcaaaaattacaaatccttcagaagttgagtacattatgattcttgatgtat

SEQ ID NO: 469627 - DNA, 120 bp, Artificial Sequence
  ENSG00000159131_38 (sequence is synthesized)
cttttcctcaaagaagaattaagggacatatagtttgcctcactaaatttttttttttagtttttgacagttaacataaatggactattttgttttctttatagtgtctgtgtttcactg

SEQ ID NO: 469628 - DNA, 120 bp, Artificial Sequence
  ENSG00000159131_39 (sequence is synthesized)
taagagcagctaatcaaatggataagatacaattttgaacttattccctaatgtggatgtttatattgttcttacatagattgcccagctatgcaataaacatgataccattggtcaaga

SEQ ID NO: 469629 - DNA, 120 bp, Artificial Sequence
  ENSG00000159131_40 (sequence is synthesized)
actggcctaaatggctatgtagaacatttcattaaccctataagtcattcagtattcttttctctctgtgggagtgatacagtcttggtttgtattttgtttgaatcaaaactggttata

SEQ ID NO: 469630 - DNA, 120 bp, Artificial Sequence
  ENSG00000159131_41 (sequence is synthesized)
ttgaatcaaaactggttatagcaatactcaaatggaaaaaacttcatgatagcgtaagtttggaaagtttagcaaaatcacagtggtactgatttttatttgttttctattttttttatt

SEQ ID NO: 469631 - DNA, 77 bp, Artificial Sequence
  ENSG00000159131_42 (sequence is synthesized)
tttttattttatatttttaatttttttaacagggtcttcctctctcgcccaaaggccaccacacctggctaattttt

SEQ ID NO: 469632 - DNA, 77 bp, Artificial Sequence
  ENSG00000159131_43 (sequence is synthesized)
atcctgctgcacttggcctgatactgatttttattccttgcgttatcacatagtgttgtatttgaaacatagttcat

SEQ ID NO: 469633 - DNA, 120 bp, Artificial Sequence
  ENSG00000159131_44 (sequence is synthesized)
ttgcgttatcacatagtgttgtatttgaaacatagttcatggttttatcaaagaactgaagatgagaatactggtcatctaactttgtaatttgatttgattatactgtaaagtttgaca

SEQ ID NO: 469634 - DNA, 120 bp, Artificial Sequence
  ENSG00000159131_45 (sequence is synthesized)
gtctcattttatcactgcgtttgtatctattactaaaatgtattttttgacctcttactgattcattgttggtatgtacaaactgttgacttgtaaaatcaataaagtcttagttggaaa

SEQ ID NO: 469635 - DNA, 120 bp, Artificial Sequence
  ENSG00000159131_46 (sequence is synthesized)
cccgtccctggcggacaaccgggcctacgagtagctaaacggcaggggggacccaaacaggggagaagggtgaacatcttaactcggttctgaaacagggagtcttgggttacctcggaa

SEQ ID NO: 469636 - DNA, 120 bp, Artificial Sequence
  ENSG00000159131_47 (sequence is synthesized)
aaggcgaagttcctcgagggaaaaggaagggagcggctgggggggcggttggggggggcccggaaaatggatcccaggcccaggcggggccctagcggggcctgagccggggaacgactg

SEQ ID NO: 469637 - DNA, 120 bp, Artificial Sequence
  ENSG00000159131_48 (sequence is synthesized)
tcctccccgcactcttgtgagattgtaaggttactctcggcagagtctagggactggggggaatcatgagggttgtctttgtcttttcagcattcttagtctttccacttttcttaggaa

SEQ ID NO: 469638 - DNA, 120 bp, Artificial Sequence
  ENSG00000159131_49 (sequence is synthesized)
gatagaagctacagctcattttgtatcatagctttgttgttgaaaagtctgaaaacagttgaggaatttttattgttatcttattaattagaagaagtttatgtttaacctttatggata

SEQ ID NO: 469639 - DNA, 120 bp, Artificial Sequence
  ENSG00000159131_50 (sequence is synthesized)
gaggggtaaagtaataagagtattgtattctctcagatggatgtagcctgatttttttccctctattgtaagtaacactgctatgaacattcttgcaaatattcagtatgttcttaaatg

SEQ ID NO: 469640 - DNA, 120 bp, Artificial Sequence
  ENSG00000159131_51 (sequence is synthesized)
catatgtgatttttttttatttgatggccaagatcatagtgattctttttgagacagtcttgctatgttgcccaggctagagtacagtagctattcacagatgcagtcatagtacactgc

SEQ ID NO: 469641 - DNA, 120 bp, Artificial Sequence
  ENSG00000159131_52 (sequence is synthesized)
tataagaagctgtcatctgacctgtgtaccccagaaaagacttgatatactctggttgcttcatctaaaaacataaacccagcagttacaaaggaatttgtatacttttattgttggggg

SEQ ID NO: 469642 - DNA, 120 bp, Artificial Sequence
  ENSG00000159131_53 (sequence is synthesized)
attcatactgaataaataccgttttaagtttaaaaaatgttcctcacaataaggaaaatctattttgcaaacatatgggtaagttattttttataatcccatgtattataatccatctct

SEQ ID NO: 469643 - DNA, 120 bp, Artificial Sequence
  ENSG00000159131_54 (sequence is synthesized)
aattgtaacatcctttgttgtctgccactgaaagaaaatcctcagactctagaacatataaataaattatcaagccatccatgaggacaaaagtatttgtcccacatgtcccgggtctaa

SEQ ID NO: 469644 - DNA, 120 bp, Artificial Sequence
  ENSG00000159131_55 (sequence is synthesized)
gagaagtaaattaatgaatgaatatgccttgtctttcgtgatcgatctttgttgttgtgggttttctgtccttgtagaagtctactttcacaagcatgctttagtatagttattacagcc

SEQ ID NO: 469645 - DNA, 120 bp, Artificial Sequence
  ENSG00000159131_56 (sequence is synthesized)
aaacatgtataattataatcggaagtaaggattaagtggcgataatgaaaacatctgtttttcccataccttatttgaaactggatcaccaaatcttcaggagaatattagaggtgtgtt

SEQ ID NO: 469646 - DNA, 120 bp, Artificial Sequence
  ENSG00000159131_57 (sequence is synthesized)
ttttggcgctcccccccggcgctcctggaaacactgcgtggcaccccgtaccactgtcacattataaacgtgctaaggcttgggtgtctcggctggggagcagtcaggcagcgcccaggg

SEQ ID NO: 469647 - DNA, 120 bp, Artificial Sequence
  ENSG00000159131_58 (sequence is synthesized)
cgggagggaatcagactagattctcgccgcggagacccagggccgcgcggaccaatggggcagggaagccgtcgtagggcggggcagtgaggggcggtgccgcgctggtcccgcgccggt

SEQ ID NO: 469648 - DNA, 120 bp, Artificial Sequence
  ENSG00000159140_0 (sequence is synthesized)
atgctgggagcctggaggactagcgaggaggagttgagagaacggagcggacgccatggcgaccaacatcgagcagatttttaggtctttcgtggtcagtaaattccgggaaattcaaca

SEQ ID NO: 469649 - DNA, 120 bp, Artificial Sequence
  ENSG00000159140_1 (sequence is synthesized)
ggagctttccagtggaaggaatgaaggccagctgaatggtgaaacaaatacacccattgaaggaaaccaggcgggtgatgcagctgcctctgccaggagtctaccaaatgaagaaatagt

SEQ ID NO: 469650 - DNA, 120 bp, Artificial Sequence
  ENSG00000159140_2 (sequence is synthesized)
gcagaagatagaggaagtactttctggggtcttagatacagaactacgatataagccagacttgaaagagggctccagaaaaagtagatgcgtatctgtacaaacagatcctactgatga

SEQ ID NO: 469651 - DNA, 120 bp, Artificial Sequence
  ENSG00000159140_3 (sequence is synthesized)
aattcccactaaaaagtcaaagaagcataaaaagcacaaaaacaaaaagaagaaaaagaagaaagaaaaggaaaaaaaatataaaagacagccagaagaatctgagtcaaagacgaaatc

SEQ ID NO: 469652 - DNA, 120 bp, Artificial Sequence
  ENSG00000159140_4 (sequence is synthesized)
tcatgatgatgggaacatagatttagaatctgattcctttttaaagtttgattctgaaccttcagctgtggcgctggagcttcctacaagagcatttggcccatctgagaccaatgaatc

SEQ ID NO: 469653 - DNA, 120 bp, Artificial Sequence
  ENSG00000159140_5 (sequence is synthesized)
ccctgcagttgtgctagaacctcctgtagtatcaatggaggtatcagagccacacatcttagaaactctgaagccagctacaaaaactgcagaactgtcagttgtatctacatcagtaat

SEQ ID NO: 469654 - DNA, 120 bp, Artificial Sequence
  ENSG00000159140_6 (sequence is synthesized)
ctcagagcagtcagagcagtctgtggcagtaatgccagaaccatccatgacaaagattctggattcctttgcagcagcaccagtgcctactacaacactggtgttgaagtcatctgagcc

SEQ ID NO: 469655 - DNA, 120 bp, Artificial Sequence
  ENSG00000159140_7 (sequence is synthesized)
agttgtaacaatgtcagtggagtatcagatgaagtctgtgctgaaatctgtggagagcacatctccagagccatcaaagatcatgttggtagagcccccagtagcaaaagtgttagagcc

SEQ ID NO: 469656 - DNA, 120 bp, Artificial Sequence
  ENSG00000159140_8 (sequence is synthesized)
ttcagaaacccttgtggtatcatcagagacacctactgaggtgtaccctgagccaagcacatcaacaacaatggattttccagagtcatctgcaattgaagcgctaagattgccagagca

SEQ ID NO: 469657 - DNA, 120 bp, Artificial Sequence
  ENSG00000159140_9 (sequence is synthesized)
gcctgtagacgtaccatcggagattgcagattcatccatgacaagaccgcaggagttgccggagctgcctaagaccacagcgttggagctgcaggagtcgtcggtggcctcagcgatgga

SEQ ID NO: 469658 - DNA, 120 bp, Artificial Sequence
  ENSG00000159140_10 (sequence is synthesized)
gttgccggggccacctgcgacctccatgccggagttgcaggggccccctgtgactccagtgctggagttacctgggccctctgctaccccggtgccagagttgccagggcccctttctac

SEQ ID NO: 469659 - DNA, 120 bp, Artificial Sequence
  ENSG00000159140_11 (sequence is synthesized)
cccagtgcctgagttgccagggccccctgcgacagcagtgcctgagttgccagggccctctgtgacaccagtgccacagttgtcgcaggaattgccagggcttccagcaccatccatggg

SEQ ID NO: 469660 - DNA, 120 bp, Artificial Sequence
  ENSG00000159140_12 (sequence is synthesized)
gttggagccaccacaggaggtaccagagccacctgtgatggcacaggagttgccagggctgcctttggtgacagcagcagtagagttgccagagcagcctgcggtaacagtagcaatgga

SEQ ID NO: 469661 - DNA, 120 bp, Artificial Sequence
  ENSG00000159140_13 (sequence is synthesized)
gttgaccgaacaacctgtgacgacgacagagttggagcagcctgtggggatgacaacggtggaacatcctgggcatcctgaggtgacaacggcaacagggttgctggggcagcctgaggc

SEQ ID NO: 469662 - DNA, 120 bp, Artificial Sequence
  ENSG00000159140_14 (sequence is synthesized)
aacgatggtgctggagttgccaggacagccagtggcaacgacagcgctggagttgccggggcagccttcggtgactggggtgccagagttgccagggctgccttcggcaactagggcact

SEQ ID NO: 469663 - DNA, 120 bp, Artificial Sequence
  ENSG00000159140_15 (sequence is synthesized)
ggagttgtcggggcagcctgtggcaactggggcactagagttgcctgggccgctcatggcagctggggcactggagttctcggggcagtctggggcagctggagcactggagcttttggg

SEQ ID NO: 469664 - DNA, 120 bp, Artificial Sequence
  ENSG00000159140_16 (sequence is synthesized)
gcagcctctggcaacaggggtgctggagttgccagggcagcctggggcgccagagttgcctgggcagcctgtggcaactgtggcgctggagatctctgttcagtctgtggtgacaacatc

SEQ ID NO: 469665 - DNA, 120 bp, Artificial Sequence
  ENSG00000159140_17 (sequence is synthesized)
ggagctgtcaacgatgaccgtgtcgcagtccctggaggtgccctcgacgacagcgctggaatcctataatacggtagcacaggagctgcctactacattagtgggggagacttctgtaac

SEQ ID NO: 469666 - DNA, 120 bp, Artificial Sequence
  ENSG00000159140_18 (sequence is synthesized)
agtaggagtggatcccttgatggccccagaatcccatatattagcttctaacaccatggagacccatatattagcatccaacaccatggactcccaaatgctagcgtccaacaccatgga

SEQ ID NO: 469667 - DNA, 120 bp, Artificial Sequence
  ENSG00000159140_19 (sequence is synthesized)
ctcccagatgctagcatccaacaccatggactcccagatgttagcgtctagcaccatggactcccagatgttagcaactagctccatggactcccagatgttagcaactagctccatgga

SEQ ID NO: 469668 - DNA, 120 bp, Artificial Sequence
  ENSG00000159140_20 (sequence is synthesized)
ctcccagatgttagcaactagcactatggactcccagatgttagcaaccagttccatggactcccagatgttagcaaccagctccatggactcccagatgttagcaaccagctccatgga

SEQ ID NO: 469669 - DNA, 120 bp, Artificial Sequence
  ENSG00000159140_21 (sequence is synthesized)
ctcccagatgttagcaaccagctccatggactcccagatgttagcaaccagcaccatggattctcagatgttagcaaccagcaccatggactcccagatgttagcaactagctcaatgga

SEQ ID NO: 469670 - DNA, 120 bp, Artificial Sequence
  ENSG00000159140_22 (sequence is synthesized)
ttcccagatgttagcatctggcactatggactctcaaatgttagcttctggcaccatggatgctcagatgttagcgtctggtaccatggatgcccagatgttagcgtctagtacccaaga

SEQ ID NO: 469671 - DNA, 120 bp, Artificial Sequence
  ENSG00000159140_23 (sequence is synthesized)
ttctgctatgttgggttcaaaatctcctgatccctataggttagctcaggatccttacaggttagctcaggatccctataggttgggccatgacccctatagattaggtcatgatgctta

SEQ ID NO: 469672 - DNA, 120 bp, Artificial Sequence
  ENSG00000159140_24 (sequence is synthesized)
caggttaggacaagacccttatagattaggccatgatccctacagactaactcctgatccctataggatgtcacctagaccctacaggatagcacccaggtcctatagaatagcacccag

SEQ ID NO: 469673 - DNA, 120 bp, Artificial Sequence
  ENSG00000159140_25 (sequence is synthesized)
gccatataggttagcacctagacccctgatgttagcatctagacgttctatgatgatgtcctatgctgcagaacgttccatgatgtcatcttacgaacgctctatgatgtcttatgagcg

SEQ ID NO: 469674 - DNA, 120 bp, Artificial Sequence
  ENSG00000159140_26 (sequence is synthesized)
gtctatgatgtcccctatggctgaacgctctatgatgtcagcctacgagcgctctatgatgtcagcctacgagcgctctatgatgtcccctatggctgagcgctctatgatgtcagctta

SEQ ID NO: 469675 - DNA, 120 bp, Artificial Sequence
  ENSG00000159140_27 (sequence is synthesized)
tgaacgctccatgatgtcagcttatgaacgctccatgatgtccccaatggctgatcgatctatgatgtccatgggtgctgaccggtctatgatgtcgtcatactctgctgctgaccggtc

SEQ ID NO: 469676 - DNA, 120 bp, Artificial Sequence
  ENSG00000159140_28 (sequence is synthesized)
tatgatgtcatcgtactctgcagctgaccgatctatgatgtcatcttatactgctgatcgttcaatgatgtctatggctgctgattcttacaccgattcttacactgacacatatacaga

SEQ ID NO: 469677 - DNA, 120 bp, Artificial Sequence
  ENSG00000159140_29 (sequence is synthesized)
ggcatatatggtgccacctttgcctcctgaagagcccccaacaatgccaccgttgccacctgaggagccaccaatgacaccaccattgcctcctgaggaaccaccagagggtccagcatt

SEQ ID NO: 469678 - DNA, 120 bp, Artificial Sequence
  ENSG00000159140_30 (sequence is synthesized)
gcccactgagcagtcagcattaacagctgaaaatacttggcctacagaggtgccatcatcaccatctgaagagtctgtatcgcagcctgagcctcctgtgagtcaaagtgagatttcgga

SEQ ID NO: 469679 - DNA, 120 bp, Artificial Sequence
  ENSG00000159140_31 (sequence is synthesized)
gccttcagcagtgcctactgattattcagtgtcagcatcagatccctcagttttagtatcagaggctgctgtgactgttccagaaccaccaccagagccagaatcttcaattacgttaac

SEQ ID NO: 469680 - DNA, 120 bp, Artificial Sequence
  ENSG00000159140_32 (sequence is synthesized)
acctgtagagtctgcagtagtagcagaagaacatgaagttgttccagagagaccagtgacttgtatggtatctgaaactcccgccatgtcagctgaaccaactgtgttagcatcagagcc

SEQ ID NO: 469681 - DNA, 120 bp, Artificial Sequence
  ENSG00000159140_33 (sequence is synthesized)
tcctgttatgtcagagacagcagaaacatttgattccatgagagcctcaggacatgttgcctcagaagtatctacatccttgttggttccagcagtaactactccagtgctggcagagag

SEQ ID NO: 469682 - DNA, 120 bp, Artificial Sequence
  ENSG00000159140_34 (sequence is synthesized)
cattctggagccgccagccatggctgccccagagtcttcagctatggctgtcctggagtcttcggctgtgaccgtcctggagtcttcgactgtgactgtcctggagtcttcgactgtaac

SEQ ID NO: 469683 - DNA, 120 bp, Artificial Sequence
  ENSG00000159140_35 (sequence is synthesized)
tcccggagcctcctgttgtggctgagccagactatgttaccattcctgtgccagttgtttctgcgctggagccttctgtgcctgttctggaaccagcggtgtcagtccttcaaccttcta

SEQ ID NO: 469684 - DNA, 120 bp, Artificial Sequence
  ENSG00000159140_36 (sequence is synthesized)
tgattgtttcagaaccatctgtttctgtccaggaatcgactgtgacagtttcagagcctgctgtcacagtctcagagcagactcaagtaataccaactgaggtggctatagagtccacac

SEQ ID NO: 469685 - DNA, 120 bp, Artificial Sequence
  ENSG00000159140_37 (sequence is synthesized)
caatgatactggaatctagtatcatgtcatcacatgttatgaaaggaattaatctatcctctggtgatcaaaatcttgctccagagattggcatgcaggagattgcattgcattcaggtg

SEQ ID NO: 469686 - DNA, 120 bp, Artificial Sequence
  ENSG00000159140_38 (sequence is synthesized)
aagaaccacatgctgaggaacacctgaaaggtgacttttacgaaagtgaacatggtataaatatagaccttaatataaataatcatttaattgctaaagagatggaacataatacagtgt

SEQ ID NO: 469687 - DNA, 120 bp, Artificial Sequence
  ENSG00000159140_39 (sequence is synthesized)
gtgctgctggtactagtcctgttggggaaattggtgaagagaaaattttgcccaccagtgagactaaacagcgcacagtattggatacctaccctggtgttagtgaagctgatgcaggag

SEQ ID NO: 469688 - DNA, 120 bp, Artificial Sequence
  ENSG00000159140_40 (sequence is synthesized)
aaactctatcttctactggtccttttgctctggaacctgatgcaacaggaactagtaagggtattgaatttaccacagcatctactctcagtttagttaataaatatgatgttgatttat

SEQ ID NO: 469689 - DNA, 120 bp, Artificial Sequence
  ENSG00000159140_41 (sequence is synthesized)
ctttaactactcaagatactgaacatgacatggtaatttccaccagtcctagtggtggtagtgaagctgacattgaagggcctttgcctgctaaagatattcatcttgatttaccatcta

SEQ ID NO: 469690 - DNA, 120 bp, Artificial Sequence
  ENSG00000159140_42 (sequence is synthesized)
ataataaccttgttagtaaggatacagaagaaccattacctgtaaaagagagtgaccagacattagcagctctgctcagccctaaagaaagtagtggaggagaaaaagaagtacctcccc

SEQ ID NO: 469691 - DNA, 120 bp, Artificial Sequence
  ENSG00000159140_43 (sequence is synthesized)
ctcctaaagagacactgcctgattcaggattttctgccaatattgaggatattaatgaagcagatttagtgagaccgttacttcctaaggacatggaacgtcttacaagccttagagctg

SEQ ID NO: 469692 - DNA, 120 bp, Artificial Sequence
  ENSG00000159140_44 (sequence is synthesized)
gcattgaaggacctttacttgcaagtgatgttggacgtgacagatctgctgccagcccggttgtaagtagtatgccagaaagagcttcagagtcttcttcagaggaaaaagatgattatg

SEQ ID NO: 469693 - DNA, 120 bp, Artificial Sequence
  ENSG00000159140_45 (sequence is synthesized)
aaatttttgtaaaagttaaggacactcacgaaaaaagcaagaaaaataagaaccgtgataagggggagaaagagaagaaaagagactcttcattaagatctcgaagtaagcgttccaaat

SEQ ID NO: 469694 - DNA, 120 bp, Artificial Sequence
  ENSG00000159140_46 (sequence is synthesized)
cttctgaacacaaatcacgcaagcgtaccagtgaatctcgttctagggcaagaaagagatcatctaagtccaagtctcatcgctctcagacacgttcacggtcacgttcaagacgcagga

SEQ ID NO: 469695 - DNA, 120 bp, Artificial Sequence
  ENSG00000159140_47 (sequence is synthesized)
ggagaagcagcagatcaagatcaaagtctagaggaagaagatctgtatcaaaagagaagcgcaaaagatctccaaagcacagatccaagtctagggaaagaaaaagaaaaagatcaagct

SEQ ID NO: 469696 - DNA, 120 bp, Artificial Sequence
  ENSG00000159140_48 (sequence is synthesized)
ccagggataaccgaaagacagttagagctcgaagtcgaaccccaagtcgtcggagtcggagtcatactccaagtcgtcgacgaaggtctagatctgtgggtagaagaaggagctttagca

SEQ ID NO: 469697 - DNA, 120 bp, Artificial Sequence
  ENSG00000159140_49 (sequence is synthesized)
tagaagaaggagctttagcatttccccaagccgccgcagccgcacccccagccgccgcagccgcacccccagccgccgcagccgcacccccagccgccgcagccgcacccccagccgccg

SEQ ID NO: 469698 - DNA, 120 bp, Artificial Sequence
  ENSG00000159140_50 (sequence is synthesized)
ggagccgcaccccaagccgccggagaagatcaaggtctgtggtaagaagacgaagcttcagtatctcaccagtcagattaaggcgatcaagaacacccttaagaagaaggtttagcagat

SEQ ID NO: 469699 - DNA, 120 bp, Artificial Sequence
  ENSG00000159140_51 (sequence is synthesized)
ctcccatccgtcgtaaaagatccaggtcttctgaacgaggcagatcacccaaacgtctgacagatttggataaggctcaattacttgaaatagccaaagctaatgcagctgccatgtgtg

SEQ ID NO: 469700 - DNA, 120 bp, Artificial Sequence
  ENSG00000159140_52 (sequence is synthesized)
ctaaggctggtgtccctttaccaccaaacctaaagcctgcacctccacctactatagaagagaaagttgctaaaaagtcaggaggagctactatagaagaactaactgagaaatgtaaac

SEQ ID NO: 469701 - DNA, 120 bp, Artificial Sequence
  ENSG00000159140_53 (sequence is synthesized)
agatcgcacagagtaaagaagatgatgatgtaatagtgaataaacctcatgtttcggatgaagaggaagaagaacctcctttttatcatcatccctttaaactcagtgaacccaaaccta

SEQ ID NO: 469702 - DNA, 120 bp, Artificial Sequence
  ENSG00000159140_54 (sequence is synthesized)
tttttttcaatctgaatattgctgcagcaaaaccaactccaccaaaaagccaggtaacattaacaaaagaattccctgtatcatctggatctcaacatcggaaaaaagaagcggatagtg

SEQ ID NO: 469703 - DNA, 120 bp, Artificial Sequence
  ENSG00000159140_55 (sequence is synthesized)
tttatggagaatgggttcctgtggagaaaaatggtgaagaaaacaaagatgatgataatgttttcagcagcaatttgccctcagagcctgtggacatctctacagcaatgagtgaacggg

SEQ ID NO: 469704 - DNA, 120 bp, Artificial Sequence
  ENSG00000159140_56 (sequence is synthesized)
cacttgctcagaaaagactcagtgagaatgcatttgatcttgaagccatgagcatgttaaatagagctcaggaaaggattgatgcctgggctcagctgaactctattcctggccagttca

SEQ ID NO: 469705 - DNA, 120 bp, Artificial Sequence
  ENSG00000159140_57 (sequence is synthesized)
caggaagtacaggagtacaggttttgacacaagaacagttggccaatactggtgcccaagcctggattaaaaaggatcagttcttaagagcagccccggtaactggaggaatgggagccg

SEQ ID NO: 469706 - DNA, 120 bp, Artificial Sequence
  ENSG00000159140_58 (sequence is synthesized)
ttttgatgagaaaaatgggctggagagaaggagaaggattaggaaaaaacaaagaaggcaataaggaacccatcctagttgattttaagacagaccgaaaaggtcttgttgcagtaggag

SEQ ID NO: 469707 - DNA, 120 bp, Artificial Sequence
  ENSG00000159140_59 (sequence is synthesized)
aaagagcacaaaagaggtctgggaacttctctgctgcaatgaaagatctgtcaggcaaacatcctgtgtctgctttgatggagatctgtaataaaagaaggtggcaaccacctgaatttc

SEQ ID NO: 469708 - DNA, 120 bp, Artificial Sequence
  ENSG00000159140_60 (sequence is synthesized)
tattggtccatgatagtggccctgatcatcgcaaacattttctctttagggtattgagaaatggagcccttaccagacccaattgtatgtttttcttgaataggtattgataaatggaag

SEQ ID NO: 469709 - DNA, 120 bp, Artificial Sequence
  ENSG00000159140_61 (sequence is synthesized)
cgcttaccagcccagctttgccagccctaataagaagcatgctaaagccacagcagctactgtggttcttcaagcaatgggccttgtaccaaaggacctcatggctaatgccacttgctt

SEQ ID NO: 469710 - DNA, 120 bp, Artificial Sequence
  ENSG00000159140_62 (sequence is synthesized)
caggagtgcctcacgtagatagattgaggttttataataatcatttcagaattttactctgcatcacaatgtatttcctctttaatgttgtaaatatttggcaatttaagacattgtgta

SEQ ID NO: 469711 - DNA, 120 bp, Artificial Sequence
  ENSG00000159140_63 (sequence is synthesized)
aaaagcaatctgtaaaaacatctccaggctttgatttttgtaccatggaaattgtatttaaccatacagggttttggtatgtttatattgtttaccttagtgatgtatttgtttaagtgg

SEQ ID NO: 469712 - DNA, 120 bp, Artificial Sequence
  ENSG00000159140_64 (sequence is synthesized)
ctaacatccaaacgactgtttgaaggcatcagagtaatcttcagtgtggaatgttaaataacgcttttatactgtattttgtactatgatgtaactccccttccttatggctaggctact

SEQ ID NO: 469713 - DNA, 120 bp, Artificial Sequence
  ENSG00000159140_65 (sequence is synthesized)
gtaacacttgcctgtaatcagtgaagggctgtgcaccttgtactatttcacaatgggttctgctggacagataatgggccagtgttattgaggtgatcaagatctgttccacagggctaa

SEQ ID NO: 469714 - DNA, 120 bp, Artificial Sequence
  ENSG00000159140_66 (sequence is synthesized)
tgccaccatctcccctcaaaattttgtagaggttctaaaaagaaagtggtatgttgtgtgatgatcagcactaagtcctgcattcctgttaaagccacttgggtcataagaagggagtaa

SEQ ID NO: 469715 - DNA, 120 bp, Artificial Sequence
  ENSG00000159140_67 (sequence is synthesized)
aaaatgaagtctgactagaattctattgcagaggccagtacatttagtatggcattgagttgtgatatagttttactttgatgtgcattttgaatttcagctacacctagatagacgtaa

SEQ ID NO: 469716 - DNA, 120 bp, Artificial Sequence
  ENSG00000159140_68 (sequence is synthesized)
aatgataattaaaatgctgtaaccaacttatctaataaaattggcaaccagccactattttgttgactatgagaaagttaaaagtttatgttaatttttagggtctgatagaatatttca

SEQ ID NO: 469717 - DNA, 120 bp, Artificial Sequence
  ENSG00000159140_69 (sequence is synthesized)
tgtgtattacagtggtattcatatgctatgtctctaaactttattttcaaaagcttaaggcccaaatacaaacttctctggaataaacgtggtgttttattttctgggttataaagtgaa

SEQ ID NO: 469718 - DNA, 120 bp, Artificial Sequence
  ENSG00000159140_70 (sequence is synthesized)
agaacataaaaacctaaaatttagtaacaaggggaaaataaagcatgatttggagatatgtttcaaatttttaaaaaatgaccataaagatcaacagtacaacttaatactgtttgctat

SEQ ID NO: 469719 - DNA, 120 bp, Artificial Sequence
  ENSG00000159140_71 (sequence is synthesized)
atgtacatggatgccctttaataagaggcattgaatatttcttaacctgtaaaaataactgttgaccatgctaatgtatatatacttgtgcatcttaggacattaagtggtttgctgctt

SEQ ID NO: 469720 - DNA, 120 bp, Artificial Sequence
  ENSG00000159140_72 (sequence is synthesized)
tgatggaaattatggttcagtgggttggatacaagagagatgactgttcacagaataacctgtgaactttcacccctctgtatggaaacttgtttcagggccaaatccttgtagctgtct

SEQ ID NO: 469721 - DNA, 120 bp, Artificial Sequence
  ENSG00000159140_73 (sequence is synthesized)
tcttgaagccatgagcatgttaaatagagctcaggaaagggtatgtagcagttttttaaaaaaaattattatttaccatcagccaactcacaccaatgtaccagttttaatgtctaaata

SEQ ID NO: 469722 - DNA, 120 bp, Artificial Sequence
  ENSG00000159140_74 (sequence is synthesized)
agaattttgctaactagatggttgagttgtaacatcctttaccttattttcaatgtcttattttaaatgaaagtgattcgaggcctgatcatttattcaataaatgtttattgtttacta

SEQ ID NO: 469723 - DNA, 120 bp, Artificial Sequence
  ENSG00000159140_75 (sequence is synthesized)
aagaacagttggccaatactggtgcccaagcctggattaaaaaggtacacagtatatgcacatatgaaagtgtcgaacaaaaagtttaaattttttggaaactgtttattaaaactgcat

SEQ ID NO: 469724 - DNA, 120 bp, Artificial Sequence
  ENSG00000159140_76 (sequence is synthesized)
gaaaagaccagtgactctaaccaaagttccaagtaaatttgctatgtgtatatgctccagggcggacactgaagacggactggattcatgagaaaatggcaaatgtataaatgtggctca

SEQ ID NO: 469725 - DNA, 120 bp, Artificial Sequence
  ENSG00000159140_77 (sequence is synthesized)
ttgcccttttttttaggcgtgttccctggaaaagagggacggatgaacctggaaggccaaatccttgtagctgtcttcttgccccggtcagtgccagccgtactattcacaacactgctg

SEQ ID NO: 469726 - DNA, 120 bp, Artificial Sequence
  ENSG00000159140_78 (sequence is synthesized)
gggatgggatggagattaatctgtggaccaccatttaggccctagtggcctctggtgatccacaggctcaatttgagaaccactaatttcatgacaaaacagatatgtaagacctaaaat

SEQ ID NO: 469727 - DNA, 120 bp, Artificial Sequence
  ENSG00000159140_79 (sequence is synthesized)
cagaagctcgcctacagtttcgtttccattcacgacgcgttcactgatcgccacgagtatactgcatatacgcaaagacacagacaatcttcagaaatgatcttttgccaccggagcttg

SEQ ID NO: 469728 - DNA, 120 bp, Artificial Sequence
  ENSG00000159140_80 (sequence is synthesized)
gaaattaataagaatagctggccattgcctgaaaggaacttctttcgcatcaacatttcgggttttggctgtttggtaccagccattggcgataatggccggccattatcagttcttcct

SEQ ID NO: 469729 - DNA, 120 bp, Artificial Sequence
  ENSG00000159140_81 (sequence is synthesized)
gcggttcgggttttggcagtaacatatatattttaaacacacttatttttgtttttaaaagtttgatcttttcaattgaggcttttttggggctttgttttattactatttttttggtgt

SEQ ID NO: 469730 - DNA, 120 bp, Artificial Sequence
  ENSG00000159140_82 (sequence is synthesized)
gggtggatggggggagatgctaaaatattgctgctaggatccagaaataccacactgtttcatatattggaacttgttattggctagccttatgccagcctgccactgtcaatatattct

SEQ ID NO: 469731 - DNA, 120 bp, Artificial Sequence
  ENSG00000159140_83 (sequence is synthesized)
gttccccttggttacaagcttaatatactcttgtgtttttggcgaaatgagctttttatcctattgtaatattttcaattgataatagatgtcattaaatctactgcttgtatagagaca

SEQ ID NO: 469732 - DNA, 120 bp, Artificial Sequence
  ENSG00000159140_84 (sequence is synthesized)
ggtgtacccaaatttactcttgacctttttataaagccaggtaatggagtctgttcctttgcatctcaggaaggaattgactttgctttatgtatcagacctcatcaattgcaccctctc

SEQ ID NO: 469733 - DNA, 120 bp, Artificial Sequence
  ENSG00000159140_85 (sequence is synthesized)
catcatgccttattttcctaagttctccttaaagaaactcaacccacaaaacatttatggagagacatgttgctatctaatcctgttgcaaatatttcagatcttttgttttgccataca

SEQ ID NO: 469734 - DNA, 120 bp, Artificial Sequence
  ENSG00000159140_86 (sequence is synthesized)
tctgggaaaatgtaaagcttctgaatctgtttcctcacttagatttattacaatatgaattacaactttttttaaaaaattaaggaccttgtaaacgcttctattgcttatttacctaat

SEQ ID NO: 469735 - DNA, 120 bp, Artificial Sequence
  ENSG00000159140_87 (sequence is synthesized)
ccaagctccttatccaaaatgctaaggacagttagtattttgctgttttcggccccatcttcagccttcttgtcccaagtttcttctcacctttttaccaccacctgactaggatgactt

SEQ ID NO: 469736 - DNA, 120 bp, Artificial Sequence
  ENSG00000159140_88 (sequence is synthesized)
ctcctttccctaccagtctttgttctttactatgaaaatctggcttagaactcttcaaggaatattccttgattctctaactctgcctgactattctctcttaagcctttgttcttttag

SEQ ID NO: 469737 - DNA, 120 bp, Artificial Sequence
  ENSG00000159140_89 (sequence is synthesized)
cacttatgtactcagtttgtattatatcagtttgcacttgttattgtgttgctctgtaaaagtgttcaattatttcatgtatatgtattccttctcttgtactagattgtaagctccttg

SEQ ID NO: 469738 - DNA, 79 bp, Artificial Sequence
  ENSG00000159140_90 (sequence is synthesized)
agagcagggaccacagacagtgcccagtacagtgctctctctgcacatagtaggtgctcaataaatgttgttgactgac

SEQ ID NO: 469739 - DNA, 120 bp, Artificial Sequence
  ENSG00000159140_91 (sequence is synthesized)
aagtaagattcctctttttagaaagtaaacaatgaatctgtcaccaagttctaactgtaaaatggggacattttacctttctttctttggataggatcagttcttaagagcagccccggt

SEQ ID NO: 469740 - DNA, 120 bp, Artificial Sequence
  ENSG00000159140_92 (sequence is synthesized)
caggagtgttctaattttttttttttgaggggggcacgagggctactgtttcaaaactgccatttacttgtcttatttgacttccaaaatactattacgttaatgtgcaaataatcagaa

SEQ ID NO: 469741 - DNA, 120 bp, Artificial Sequence
  ENSG00000159140_93 (sequence is synthesized)
ctcgtgctacgaagatgagtactggcagcatagcagtgctgaaactgggaggccgcgtggtctaatggattgggaaggtttctttatcctgttgtactcctgactccttgtgtaatcatg

SEQ ID NO: 469742 - DNA, 120 bp, Artificial Sequence
  ENSG00000159140_94 (sequence is synthesized)
aattaactgtctcaaaaattttcttttaagatttttttgaaatttgaaggttaatgttagtttttgacttcagtatttaagatatttattaaattaaaaactttaggctgggtgcgatgg

SEQ ID NO: 469743 - DNA, 120 bp, Artificial Sequence
  ENSG00000159140_95 (sequence is synthesized)
tcgatgcaattcactttgtggaaccaagccacaaagtgaaaagcatcgaattgcagagaacagtgttatcacatccctacccaacattgggccctccctgcacttgtgggaaggtagtcc

SEQ ID NO: 469744 - DNA, 120 bp, Artificial Sequence
  ENSG00000159140_96 (sequence is synthesized)
aaggtacaactatttagcttcccgatttgcttcaaggctctatagctctagattttggtggtagcaaatttatcgggtggagggattgatcggagagggcagatcctcaggttcaacaca

SEQ ID NO: 469745 - DNA, 120 bp, Artificial Sequence
  ENSG00000159140_97 (sequence is synthesized)
agaactggattggaaaaggtcattgtaggttgatgtgagcatcttgggtacatagcccattgcccttaatgatggtttcttactgtttctctgggttgtttgtcagatagcctttaattt

SEQ ID NO: 469746 - DNA, 120 bp, Artificial Sequence
  ENSG00000159140_98 (sequence is synthesized)
taattatttttccttccctttgctaccttggcccttttaaattcttgtgtttaacctaatgctcagccttggtactccattcccttctccttcccctctttgctactattaaaagtcgga

SEQ ID NO: 469747 - DNA, 120 bp, Artificial Sequence
  ENSG00000159140_99 (sequence is synthesized)
gaagtggaattcaaacgttgaaatttccacggggctatagttgtatcttaataatgccaagtgtcaaaacaaccccattaaaatgccgcctgattaaataatgtgctgctaaatatagtg

SEQ ID NO: 469748 - DNA, 120 bp, Artificial Sequence
  ENSG00000159140_100 (sequence is synthesized)
cacatgaaaacagcaagactgtatatatatgtaaatatatatatatatctgtatctttgtatgtatctctgtatctgtacctttgctgtatcttttaataaacagtttacttttatttaa

SEQ ID NO: 469749 - DNA, 120 bp, Artificial Sequence
  ENSG00000159147_0 (sequence is synthesized)
aagtctctgtagggcggccggctaccctcagccgccgcgcgtcatggccctttcggtgcccggctactcaccgggcttccgaaagccgcccgaggtagtgcggctccgacggaaaagggc

SEQ ID NO: 469750 - DNA, 120 bp, Artificial Sequence
  ENSG00000159147_1 (sequence is synthesized)
tccgacggaaaagggcccggagccgtggagctgccgcctccccgccccgtgagctgacggagccggcggcccgccgagccgccctggtggcggggctgcctcttcgccctttccctgctg

SEQ ID NO: 469751 - DNA, 120 bp, Artificial Sequence
  ENSG00000159147_2 (sequence is synthesized)
ccggccgctgctcggaggaaccccttcgcccgcctggacaaccgaccgcgggtcgccgcggagccccccgacgggccggcccgcgagcagccggaggccccggtcccgtttttagattct

SEQ ID NO: 469752 - DNA, 120 bp, Artificial Sequence
  ENSG00000159147_3 (sequence is synthesized)
cccgtttttagattctaatcaagaaaatgatttgctatgggaagagaagtttcctgaaagaacaactgttactgaattacctcagacttcacatgtatcattctccgagcctgatattcc

SEQ ID NO: 469753 - DNA, 120 bp, Artificial Sequence
  ENSG00000159147_4 (sequence is synthesized)
gtcctcaaaaagtactgagttacctgtggactggagtattaaaacgcgactccttttcacctcttctcaaccctttacctgggcagatcatttgaaagcacaggaagaagctcaaggtct

SEQ ID NO: 469754 - DNA, 120 bp, Artificial Sequence
  ENSG00000159147_5 (sequence is synthesized)
tgtccagcattgtagggcaacagaagttactttgcctaaaagtatacaggatcccaaactctcctctgagctccgttgtaccttccagcagagccttatctattggctccaccctgcttt

SEQ ID NO: 469755 - DNA, 120 bp, Artificial Sequence
  ENSG00000159147_6 (sequence is synthesized)
gtcttggctaccactgttccctcgtattggagctgatagaaaaatggctggaaagacaagtccttggtcaaatgatgcaaccctgcagcatgttttaatgagtgactggtctgtgagctt

SEQ ID NO: 469756 - DNA, 120 bp, Artificial Sequence
  ENSG00000159147_7 (sequence is synthesized)
tacttctctatataatttgctgaagacaaaactttgcccctatttctacgtttgtacctatcagtttactgtcctgttccgagcagcaggattagctggaagtgacttaatcacagctct

SEQ ID NO: 469757 - DNA, 120 bp, Artificial Sequence
  ENSG00000159147_8 (sequence is synthesized)
catatctccaacaactcgaggtttaagagaagctatgagaaatgaaggtattgaattttctctgcctttaataaaagaaagtggccataagaaggagacagcatctggaacaagcttggg

SEQ ID NO: 469758 - DNA, 120 bp, Artificial Sequence
  ENSG00000159147_9 (sequence is synthesized)
atatggggaggagcaagccatcagtgatgaggatgaagaggaaagtttttcctggctggaagagatgggtgtgcaagataaaattaaaaagccagacatactttctatcaagctgcgtaa

SEQ ID NO: 469759 - DNA, 120 bp, Artificial Sequence
  ENSG00000159147_10 (sequence is synthesized)
agtttagttgctacctcaggtccacaggcaggacttcctccaaccctcttgtcccctgttgctttccgaggtgccacaatgcaaatgcttaaggcacggagtgtgaatgtgaagacacaa

SEQ ID NO: 469760 - DNA, 120 bp, Artificial Sequence
  ENSG00000159147_11 (sequence is synthesized)
gctctttctggatacagagaccaatttagtttggagattacaggtcctatcatgcctcattctctgcattcactgaccatgctgctcaaatcttcacagagtggatctttctctgcagta

SEQ ID NO: 469761 - DNA, 120 bp, Artificial Sequence
  ENSG00000159147_12 (sequence is synthesized)
ctgtatccacacgagccaactgctgtatttaacatctgcctgcaaatggacaaagtacttgatatggaggttgttcataaggagcttactaactgtggtttgcaccctaacactctggag

SEQ ID NO: 469762 - DNA, 120 bp, Artificial Sequence
  ENSG00000159147_13 (sequence is synthesized)
caacttagtcaaataccgttacttgggaaatcatctttacggaatgtggtgctgagagactacatttataattggagatcctgaacaccaaagtaagcctaaaaggaatctttgaggaaa

SEQ ID NO: 469763 - DNA, 120 bp, Artificial Sequence
  ENSG00000159147_14 (sequence is synthesized)
aaagccttctagcaaggaaattcaagattcttgaagttgaaggaatatactgaaatgtttataaacataacttttactacagtagcatctaaggttttaaatgtgttttactattttcag

SEQ ID NO: 469764 - DNA, 120 bp, Artificial Sequence
  ENSG00000159147_15 (sequence is synthesized)
attagatttttagatataaagatgaaaaactcagataactcaaatgagatatctatatccctacaacctaattgtatattgagcagaaactgaattaatatgcttccttgcaaatgggaa

SEQ ID NO: 469765 - DNA, 120 bp, Artificial Sequence
  ENSG00000159147_16 (sequence is synthesized)
atcacatagcagttaccccatggcattgtgactaatggcatcagggcaaaaatatgttactttacgatttacctgttagcaggttcttgtttcataaaggtagaaaataaatacagacaa

SEQ ID NO: 469766 - DNA, 120 bp, Artificial Sequence
  ENSG00000159147_17 (sequence is synthesized)
catctactgagctagttgattggtgatgcttctaccttaatatctttcctactgatttataattcctttattttcacatatactaaaactttttaaatgcatgttaattcagataaaaag

SEQ ID NO: 469767 - DNA, 120 bp, Artificial Sequence
  ENSG00000159147_18 (sequence is synthesized)
tcagataaaaaggcattttgtattccacatagaatagtgttaagaattgtgaagtacactgagctgtcacggcaaagtagtatttaatgtgcttataggggtgtgtgtgtgtgtgtgtgt

SEQ ID NO: 469768 - DNA, 120 bp, Artificial Sequence
  ENSG00000159147_19 (sequence is synthesized)
tttataattggagatcctgaacaccaaaatctccatcaaagcagacacaggatgtttgcctgcaggggggagaaatacccagttttaaattatttccaccaacttctgcaacaaataatg

SEQ ID NO: 469769 - DNA, 120 bp, Artificial Sequence
  ENSG00000159147_20 (sequence is synthesized)
aattcaaggtgggattagggtaagaggaaattcaaaaacgtgctctcacctgacagatctttcattgcagcagagaagttcccagacctcttttgtgctctttctcctactgcaacaaga

SEQ ID NO: 469770 - DNA, 120 bp, Artificial Sequence
  ENSG00000159147_21 (sequence is synthesized)
cctttaaaaaaaaattgttcactaaataaatttcaaagcaccactttaaaacaaagatccctctgtaggagtctgaacctcaaaatgtatgccttcaaataaaatcagcagattcctagt

SEQ ID NO: 469771 - DNA, 120 bp, Artificial Sequence
  ENSG00000159147_22 (sequence is synthesized)
aaatcatctttacggaatgtggtgctgagagactacatttataattggagatcctgaacaccaaacccatttttctcatcaaaacggctcccattcctccagttaccggggctgctctta

SEQ ID NO: 469772 - DNA, 120 bp, Artificial Sequence
  ENSG00000159147_23 (sequence is synthesized)
agaactgatcctatccaaagaaagaaaggatttatttgtagaattggaggtgtttactggaagatgatgatatggccaagccaaggaagggaacctacagtgaagagtacaggtgtctct

SEQ ID NO: 469773 - DNA, 120 bp, Artificial Sequence
  ENSG00000159147_24 (sequence is synthesized)
atacctagtccagtccttggcaaaagtctgggctttggaaaccaagggcaagaggcgatgacaactaatctatagaacccattctccataaacactatccgcttcttttttccgatgttg

SEQ ID NO: 469774 - DNA, 120 bp, Artificial Sequence
  ENSG00000159147_25 (sequence is synthesized)
agatccagatgatacagggaattcttttgttaatgttacctggctttttggtggagttggttttgctgcagcaatctaaaaaataaagtgtttcttaattaaagctcaatatgatatcta

SEQ ID NO: 469775 - DNA, 120 bp, Artificial Sequence
  ENSG00000159147_26 (sequence is synthesized)
aagtctgcataacctagcttttaagaagtactttactttgataggataaattcttgatttaaaaaaaaacctcctagcatttttacttggtacatattttcattttgctttcctcccatt

SEQ ID NO: 469776 - DNA, 120 bp, Artificial Sequence
  ENSG00000159164_0 (sequence is synthesized)
gcattgccgcttccctggtgccgggagcagtcgccgctgccgcctccgcccgcggccgggacccccgtcctcgcccgggactccttacccggggaacctagaccaggtctccagaggctt

SEQ ID NO: 469777 - DNA, 120 bp, Artificial Sequence
  ENSG00000159164_1 (sequence is synthesized)
gtggaagagaagcaggcgacccttcctgagttatcctggcttagcctcccaatctggctccccttccccttcccattcccctgctccccctgtcccttccccatccacccaactgaactg

SEQ ID NO: 469778 - DNA, 120 bp, Artificial Sequence
  ENSG00000159164_2 (sequence is synthesized)
ggtataggtcaaagctcctctccttccttttccttcctaggcactcattggctaggacctgtttgctcttttttttgtgcccagagatactggaacacgcttcatctaagtaactgtggg

SEQ ID NO: 469779 - DNA, 120 bp, Artificial Sequence
  ENSG00000159164_3 (sequence is synthesized)
gaggggtctttttgactctacaagtccttgagcaaaaagctgaaaaagaagcaggaggtggagaagacccagtgaagtgccccaagccccatcatggaagagggcttccgagaccgggca

SEQ ID NO: 469780 - DNA, 120 bp, Artificial Sequence
  ENSG00000159164_4 (sequence is synthesized)
gctttcatccgtggggccaaagacattgctaaggaagtcaaaaagcatgcggccaagaaggtggtgaagggcctggacagagtccaggacgaatattcccgaagatcgtactcccgcttt

SEQ ID NO: 469781 - DNA, 120 bp, Artificial Sequence
  ENSG00000159164_5 (sequence is synthesized)
gaggaggaggatgatgatgatgacttccctgctcccagtgatggttattaccgaggagaagggacccaggatgaggaggaaggtggtgcatccagtgatgctactgagggccatgacgag

SEQ ID NO: 469782 - DNA, 120 bp, Artificial Sequence
  ENSG00000159164_6 (sequence is synthesized)
gatgatgagatctatgaaggggaatatcagggcattccccgggcagagtctgggggcaaaggcgagcggatggcagatggggcgcccctggctggagtaagggggggcttgagtgatggg

SEQ ID NO: 469783 - DNA, 120 bp, Artificial Sequence
  ENSG00000159164_7 (sequence is synthesized)
gagggtccccctgggggccggggggaggcacaacgacggaaagaacgagaagaactggcccaacagtatgaagccatcctacgggagtgtggccacggccgcttccagtggacactgtat

SEQ ID NO: 469784 - DNA, 120 bp, Artificial Sequence
  ENSG00000159164_8 (sequence is synthesized)
tttgtgcttggtctggcgctgatggctgacggtgtggaggtctttgtggtgggcttcgtgctgcccagcgctgagaaagacatgtgcctgtccgactccaacaaaggcatgctaggcctc

SEQ ID NO: 469785 - DNA, 120 bp, Artificial Sequence
  ENSG00000159164_9 (sequence is synthesized)
atcgtctacctgggcatgatggtgggagccttcctctggggaggtctggctgaccggctgggtcggaggcagtgtctgctcatctcgctctcagtcaacagcgtcttcgccttcttctca

SEQ ID NO: 469786 - DNA, 120 bp, Artificial Sequence
  ENSG00000159164_10 (sequence is synthesized)
tcttttgtccagggttacggcactttcctcttctgccgcctactttctggggttgggattggagggtccatccccattgtcttctcctatttctccgagtttctggcccaggagaaacga

SEQ ID NO: 469787 - DNA, 120 bp, Artificial Sequence
  ENSG00000159164_11 (sequence is synthesized)
ggggagcatttgagctggctctgcatgttttggatgattggtggcgtgtacgcagctgctatggcctgggccatcatcccccactatgggtggagttttcagatgggttctgcctaccag

SEQ ID NO: 469788 - DNA, 120 bp, Artificial Sequence
  ENSG00000159164_12 (sequence is synthesized)
ttccacagctggagggtcttcgtcctcgtctgcgcctttccttctgtgtttgccattggggctctgaccacgcagcctgagagcccccgtttcttcctagagaatggaaagcatgatgag

SEQ ID NO: 469789 - DNA, 120 bp, Artificial Sequence
  ENSG00000159164_13 (sequence is synthesized)
gcctggatggtgctgaagcaggtccatgataccaacatgcgagccaaaggacatcctgagcgagtgttctcagtaacccacattaagacgattcatcaggaggatgaattgattgagatc

SEQ ID NO: 469790 - DNA, 120 bp, Artificial Sequence
  ENSG00000159164_14 (sequence is synthesized)
cagtcggacacagggacctggtaccagcgctggggggtccgggccttgagcctaggggggcaggtttgggggaattttctctcctgttttggtcccgaatatcggcgcatcactctgatg

SEQ ID NO: 469791 - DNA, 120 bp, Artificial Sequence
  ENSG00000159164_15 (sequence is synthesized)
atgatgggtgtgtggttcaccatgtcattcagctactatggcctgaccgtctggtttcctgacatgatccgccatctccaggcagtggactacgcatcccgcaccaaagtgttccccggg

SEQ ID NO: 469792 - DNA, 120 bp, Artificial Sequence
  ENSG00000159164_16 (sequence is synthesized)
gagcgcgtagagcatgtaacttttaacttcacgttggagaatcagatccaccgaggcgggcagtacttcaatgacaagttcattgggctgcggctcaagtcagtgtcctttgaggattcc

SEQ ID NO: 469793 - DNA, 120 bp, Artificial Sequence
  ENSG00000159164_17 (sequence is synthesized)
ctgtttgaagagtgttattttgaggatgtcacatccagcaacacgtttttccgcaactgcacattcatcaacactgtgttctataacactgacctgttcgagtacaagtttgtgaacagc

SEQ ID NO: 469794 - DNA, 120 bp, Artificial Sequence
  ENSG00000159164_18 (sequence is synthesized)
ggacgggcgaaggtgcctacatggtatactttgtgagcttcctggggacactggcagtgcttcctgggaatatcgtgtctgccctgctcatggacaagatcggcaggctcagaatgcttg

SEQ ID NO: 469795 - DNA, 120 bp, Artificial Sequence
  ENSG00000159164_19 (sequence is synthesized)
ctggctccagcgtgatgtcctgtgtctcctgcttcttcctgtcttttgggaacagtgagtcggccatgatcgctctgctctgcctttttggcggggtcagcattgcatcctggaatgcgc

SEQ ID NO: 469796 - DNA, 120 bp, Artificial Sequence
  ENSG00000159164_20 (sequence is synthesized)
tggacgtgttgactgttgaactctacccctcagacaagaggaccacagcttttggcttcctgaatgccctgtgtaagctggcagctgtgctggggatcagcatcttcacatccttcgtgg

SEQ ID NO: 469797 - DNA, 120 bp, Artificial Sequence
  ENSG00000159164_21 (sequence is synthesized)
gaatcaccaaggctgcacccatcctctttgcctcagctgcccttgcccttggcagctctctggccctgaagctgcctgagacccgggggcaggtgctgcagtgaaggggtctctagggct

SEQ ID NO: 469798 - DNA, 120 bp, Artificial Sequence
  ENSG00000159164_22 (sequence is synthesized)
ttgggattggcaggcacactgtgagaccaacaactccttccttcccctccctgccctgccatcctgacctccagagccctcactccccactccccgtgtttggtgtcttagctgtgtgtg

SEQ ID NO: 469799 - DNA, 120 bp, Artificial Sequence
  ENSG00000159164_23 (sequence is synthesized)
cgtgtgcgtgtgcatgtgtgtaaaccccgtgggcagggactacagggaaggctccttcatcccagttttgagatgaagctgtactccccatttcccactgcccttgactttgcacaagag

SEQ ID NO: 469800 - DNA, 120 bp, Artificial Sequence
  ENSG00000159164_24 (sequence is synthesized)
aaggctgagccccatccttctccccctgttagagaggggcccttgcttccctgttccaggggttccagaataggcttcctgccttccccatcattccctctgcctaggccctggtgaaac

SEQ ID NO: 469801 - DNA, 120 bp, Artificial Sequence
  ENSG00000159164_25 (sequence is synthesized)
cacaggtatgcaattatgctaggggctggggctctggtgtagaccatggaccaaaagaacttcttagagtctgaagagtgggcctcgggtgccctctcacatctcctgttggatgctggg

SEQ ID NO: 469802 - DNA, 120 bp, Artificial Sequence
  ENSG00000159164_26 (sequence is synthesized)
ggagaagcaataaacctcagccctctggcctccactttcctctcaatttgggctgcaaatatgaagcctgaattttatgaaattagctttctgattcttatttattaatagattaagttc

SEQ ID NO: 469803 - DNA, 120 bp, Artificial Sequence
  ENSG00000159164_27 (sequence is synthesized)
tgaggcagctccgcaggactgtgtgtgaatgtgtatgtatacttacatatgtgtgtgcatgtgccatggggcggggggtatcactatactgtcctcaaatataagccaagggtaatttca

SEQ ID NO: 469804 - DNA, 120 bp, Artificial Sequence
  ENSG00000159164_28 (sequence is synthesized)
gcggatgcacacacaaccctgcctcccacagttcctcccctaatctggtttctgtgttgagcctgggatggaggagccctaggccagcctgggataagagtcccacagtctagggagatc

SEQ ID NO: 469805 - DNA, 120 bp, Artificial Sequence
  ENSG00000159164_29 (sequence is synthesized)
tgagggcatccgacaaggcccatctccttccctcctcaagaagcagaggcctcctctggagtgagaggctccacccactacagcacaggcgggaatagcacagctgccctcccatgctcc

SEQ ID NO: 469806 - DNA, 120 bp, Artificial Sequence
  ENSG00000159164_30 (sequence is synthesized)
ctacctgtcccctcacagggaggggagcaggggagggaaagaaaccaggcatctggtcaaaccagcagatcaaaaagcacaaagagctggggcagaggcaggaagcaggggccctcctgg

SEQ ID NO: 469807 - DNA, 120 bp, Artificial Sequence
  ENSG00000159164_31 (sequence is synthesized)
cagctcctctgagtggggagaggttgggcagtgagtgagggacccctaatgcagggactagaagcctcagtttccccattttacccttccacacaatagcctctgtaggttaggctgccc

SEQ ID NO: 469808 - DNA, 120 bp, Artificial Sequence
  ENSG00000159164_32 (sequence is synthesized)
catcccaccctactctgtgtggctgctttctttggtgccctcccctcaccccactgtagctgtgacgtgttgtagtttttagatgtttgtaaaatgtttaaaaaaatgttaaaaggaaaa

SEQ ID NO: 469809 - DNA, 120 bp, Artificial Sequence
  ENSG00000159164_33 (sequence is synthesized)
aagtgaaaataacaaaaaagaaaatcaaaattcaccttcgtcatgctgcgtccagtgccccaaccctgtggtcactctccccattttgtaacactgtaccaggtggtgactgtttaactc

SEQ ID NO: 469810 - DNA, 120 bp, Artificial Sequence
  ENSG00000159164_34 (sequence is synthesized)
tttggtgtctgtgctcaaaagactgccttctccagtgcccagtgtatgagtgtgtgccctgtgcccttgtccctcactccccacatgctggacgtagccctcttcctcgcacccctggga

SEQ ID NO: 469811 - DNA, 120 bp, Artificial Sequence
  ENSG00000159164_35 (sequence is synthesized)
gggacccatccatctcccttgctctcctggggaaccctaaacccaactctgttgatgtgaaaaatgcagtgaaaaatattgacgaaaaataaaacggaaacaaatcctcaaaatacaaaa

SEQ ID NO: 469812 - DNA, 120 bp, Artificial Sequence
  ENSG00000159164_36 (sequence is synthesized)
ggtggggtgaggaaggagggctgaatgggaagagcatccttaggggtgagaggatatacatttccattttctcctctaaaatctggtagctttggccgggcacggtgactcatgcctgta

SEQ ID NO: 469813 - DNA, 68 bp, Artificial Sequence
  ENSG00000159164_37 (sequence is synthesized)
gtctgtactaaaaatacaaaaagttagctgggtgcctgtaatcgctttcagtgagccgagatcgcacc

SEQ ID NO: 469814 - DNA, 120 bp, Artificial Sequence
  ENSG00000159166_0 (sequence is synthesized)
acgcggggctcctgcagcatggctgtcagcaggaaggactggtccgcgctgtccagccttgcccggcagaggactctggaggatgaggaggaacaggagcgcgagcgcaggcggcggcac

SEQ ID NO: 469815 - DNA, 120 bp, Artificial Sequence
  ENSG00000159166_1 (sequence is synthesized)
cgcaacctgagctccaccacggacgatgaggctcccaggctcagccagaatggagaccggcaggcctctgcttctgagagactaccgagcgtggaagaagcagaggtgcccaagccactg

SEQ ID NO: 469816 - DNA, 120 bp, Artificial Sequence
  ENSG00000159166_2 (sequence is synthesized)
cccccagcctccaaagatgaggacgaggacatccagagcatcctcagaacacggcaggagcggaggcagaggcggcaggtggtggaggctgcacaggcccccatccaggagaggctggag

SEQ ID NO: 469817 - DNA, 120 bp, Artificial Sequence
  ENSG00000159166_3 (sequence is synthesized)
gcagaggaggggaggaacagcttgagccctgtgcaggccacacagaaacccctagtctccaagaaggaactggaaatcccacctcgccggagactgagtcgggaacagcggggcccctgg

SEQ ID NO: 469818 - DNA, 120 bp, Artificial Sequence
  ENSG00000159166_4 (sequence is synthesized)
gccctggaggaggagagcttggtgggcagggagccagaagagaggaagaaaggggttccagaaaagtccccagtcttggagaagtcctccatgccaaagaagacggcacctgaaaagagc

SEQ ID NO: 469819 - DNA, 120 bp, Artificial Sequence
  ENSG00000159166_5 (sequence is synthesized)
ctggtctccgataaaacctccatctctgagaaggtgctggcctcagagaagacatctctatcagagaagatagcagtgtcagagaaaagaaacagctcagagaagaagtctgttctagaa

SEQ ID NO: 469820 - DNA, 120 bp, Artificial Sequence
  ENSG00000159166_6 (sequence is synthesized)
aaaaccagtgtctctgagaagtcgctggccccagggatggcactgggctcaggaaggaggctggtgtctgagaaagcttccatctttgagaaggcactggcctcagagaagagcccaact

SEQ ID NO: 469821 - DNA, 120 bp, Artificial Sequence
  ENSG00000159166_7 (sequence is synthesized)
gcagatgctaagccggccccaaagagggccacagcctcagagcagcccctggcgcaggagccgccagcctctgggggaagcccagccaccaccaaggagcagagaggaagggccctccct

SEQ ID NO: 469822 - DNA, 120 bp, Artificial Sequence
  ENSG00000159166_8 (sequence is synthesized)
gggaagaacctgccctctttggcaaagcagggggcttcagaccctccgactgtggcctcccgcctcccacccgtcacactccaggtgaaaatccccagcaaggaggaagaggcagatatg

SEQ ID NO: 469823 - DNA, 120 bp, Artificial Sequence
  ENSG00000159166_9 (sequence is synthesized)
tcctcacccacacagcgaacctacagcagctccctcaaacgctccagccccaggaccatctcctttcggatgaaacccaagaaagaaaactcggaaacaaccctaactcgcagtgccagc

SEQ ID NO: 469824 - DNA, 120 bp, Artificial Sequence
  ENSG00000159166_10 (sequence is synthesized)
gttattcgtggctcctgtgggtgtagccagcaagcgccacctctttgagaaggaactggcgggccagagccgagcagaaccagcctccagccggaaggagaacttgaggctctcaggggt

SEQ ID NO: 469825 - DNA, 120 bp, Artificial Sequence
  ENSG00000159166_11 (sequence is synthesized)
tgtgacatcaaggctcaacctgtggatcagcaggacccaggaatctggagatcaggacccccaggaggcacagaaagcatcatctgcaaccgagaggactcagtggggacagaaatctga

SEQ ID NO: 469826 - DNA, 120 bp, Artificial Sequence
  ENSG00000159166_12 (sequence is synthesized)
ctcctcgctggacgctgaggtgtgacaagccccgccaagacagacctgcaagtcttcgtctcaagggacctccctcatgccaggcccctgcctctcacagcagcaccctttcctctcatt

SEQ ID NO: 469827 - DNA, 120 bp, Artificial Sequence
  ENSG00000159166_13 (sequence is synthesized)
gtccctgttccctttttgcctgtggatctgtttggccagggtccctggggtcaggaatatttgcaagactcagccagctccttcccagcccagcctcttggggctgggactttctcaccc

SEQ ID NO: 469828 - DNA, 120 bp, Artificial Sequence
  ENSG00000159166_14 (sequence is synthesized)
tgcggcaggcacaacagatgctgggacccagtctctgcccaggtcacagcacaagtgcacatcagcactatggggcctatgtcctgcccagagacctctgctccttcctgctcacatcca

SEQ ID NO: 469829 - DNA, 120 bp, Artificial Sequence
  ENSG00000159166_15 (sequence is synthesized)
cagtcagggcacggcgcccctcaagaactccagagtcacctgtctcatcggctcccagcaagtgcctctttgtctatgatgtcccccttctctgaggcctggacccacccatctttgtcc

SEQ ID NO: 469830 - DNA, 120 bp, Artificial Sequence
  ENSG00000159166_16 (sequence is synthesized)
ctggggcctgctcccagccactgaggcccgctctggccaggggagaaggagctgccgtgcgtcttccctgtgccccgtctccctgcttggttctcccctcccttccctggccggctgcca

SEQ ID NO: 469831 - DNA, 120 bp, Artificial Sequence
  ENSG00000159166_17 (sequence is synthesized)
tggccaggagctaagtgcctttttgtgtgcaaccacttaccctttctctgaaaaacctgttctcaggaaggatctgataaactcatttactctcaggtgtaagagactgatgagacctta

SEQ ID NO: 469832 - DNA, 120 bp, Artificial Sequence
  ENSG00000159166_18 (sequence is synthesized)
gaagcgaattcctctctggaggccttgctttctagcagaggtcacctgaagtgtgtgaggaggatcatcattttcctcatcccccctcttctcacattaaggtggtggcttgccactcag

SEQ ID NO: 469833 - DNA, 120 bp, Artificial Sequence
  ENSG00000159166_19 (sequence is synthesized)
cagtcctagcttggtgactgggaactgccacatacagggccaggcctaccctccttccccacaagccccctccaacccccacccccatgctctggacctcatggctcctatgagcttgga

SEQ ID NO: 469834 - DNA, 120 bp, Artificial Sequence
  ENSG00000159166_20 (sequence is synthesized)
gcatggtgaaccatcagagaatctagaaccaaccaagctaggaacatcagcctggtgccctgttaaccccttaaagctgtggtttacaacttttcaaaaatttaaatcattagaactctc

SEQ ID NO: 469835 - DNA, 120 bp, Artificial Sequence
  ENSG00000159166_21 (sequence is synthesized)
gtccgacggtccacccagtgcttgcggcctcgcggccgggccggcctgggctgcaatcaatgcggctttgtctgggacgcccacatcccagaggccattcccgggtcggcaaatcggagc

SEQ ID NO: 469836 - DNA, 120 bp, Artificial Sequence
  ENSG00000159166_22 (sequence is synthesized)
agtcaccctgatgaggcacctggaacagaggaccgctcccgctccgctccctgggtgaacaagcctcagcgggcaggcaggaaagggctccttgcccggcagaggactctggaggatgag

SEQ ID NO: 469837 - DNA, 120 bp, Artificial Sequence
  ENSG00000159166_23 (sequence is synthesized)
aaatccctggcgtctgtaagttcctcatgttggccaagtcaacacagcctgctgtgtgatggagggccacattctcttggccacaatgagaacgtgtgatggggctgctcctcaggccct

SEQ ID NO: 469838 - DNA, 120 bp, Artificial Sequence
  ENSG00000159166_24 (sequence is synthesized)
agcatggctgtcagcaggaaggactggtccgcgctgtccagatctgtggagctccatggctcaactctttccacgaagctctttccatctgaaaggtgagggaggctccaagagcccctg

SEQ ID NO: 469839 - DNA, 120 bp, Artificial Sequence
  ENSG00000159167_0 (sequence is synthesized)
agtttgcaaaagccagaggtgcaagaagcagcgactgcagcagcagcagcagcagcggcggtggcagcagcagcagcagcggcggcagcagcagcagcagcggaggcaccggtggcagca

SEQ ID NO: 469840 - DNA, 120 bp, Artificial Sequence
  ENSG00000159167_1 (sequence is synthesized)
gcagcatcaccagcaacaacaacaaaaaaaaatcctcatcaaatcctcacctaagctttcagtgtatccagatccacatcttcactcaagccaggagagggaaagaggaaaggggggcag

SEQ ID NO: 469841 - DNA, 120 bp, Artificial Sequence
  ENSG00000159167_2 (sequence is synthesized)
gaaaaaaaaaaaacccaacaacttagcggaaacttctcagagaatgctccaaaactcagcagtgcttctggtgctggtgatcagtgcttctgcaacccatgaggcggagcagaatgactc

SEQ ID NO: 469842 - DNA, 120 bp, Artificial Sequence
  ENSG00000159167_3 (sequence is synthesized)
tgtgagccccaggaaatcccgagtggcggctcaaaactcagctgaagtggttcgttgcctcaacagtgctctacaggtcggctgcggggcttttgcatgcctggaaaactccacctgtga

SEQ ID NO: 469843 - DNA, 120 bp, Artificial Sequence
  ENSG00000159167_4 (sequence is synthesized)
cacagatgggatgtatgacatctgtaaatccttcttgtacagcgctgctaaatttgacactcagggaaaagcattcgtcaaagagagcttaaaatgcatcgccaacggggtcacctccaa

SEQ ID NO: 469844 - DNA, 120 bp, Artificial Sequence
  ENSG00000159167_5 (sequence is synthesized)
ggtcttcctcgccattcggaggtgctccactttccaaaggatgattgctgaggtgcaggaagagtgctacagcaagctgaatgtgtgcagcatcgccaagcggaaccctgaagccatcac

SEQ ID NO: 469845 - DNA, 120 bp, Artificial Sequence
  ENSG00000159167_6 (sequence is synthesized)
tgaggtcgtccagctgcccaatcacttctccaacagatactataacagacttgtccgaagcctgctggaatgtgatgaagacacagtcagcacaatcagagacagcctgatggagaaaat

SEQ ID NO: 469846 - DNA, 120 bp, Artificial Sequence
  ENSG00000159167_7 (sequence is synthesized)
tgggcctaacatggccagcctcttccacatcctgcagacagaccactgtgcccaaacacacccacgagctgacttcaacaggagacgcaccaatgagccgcagaagctgaaagtcctcct

SEQ ID NO: 469847 - DNA, 120 bp, Artificial Sequence
  ENSG00000159167_8 (sequence is synthesized)
caggaacctccgaggtgaggaggactctccctcccacatcaaacgcacatcccatgagagtgcataaccagggagaggttattcacaacctcaccaaactagtatcattttaggggtgtt

SEQ ID NO: 469848 - DNA, 120 bp, Artificial Sequence
  ENSG00000159167_9 (sequence is synthesized)
gacacaccagttttgagtgtactgtgcctggtttgatttttttaaagtagttcctattttctatcccccttaaagaaaattgcatgaaactaggcttctgtaatcaatatcccaacattc

SEQ ID NO: 469849 - DNA, 120 bp, Artificial Sequence
  ENSG00000159167_10 (sequence is synthesized)
tgcaatggcagcattcccaccaacaaaatccatgtgaccattctgcctctcctcaggagaaagtaccctcttttaccaacttcctctgccatgtttttcccctgctcccctgagaccacc

SEQ ID NO: 469850 - DNA, 120 bp, Artificial Sequence
  ENSG00000159167_11 (sequence is synthesized)
cccaaacacaaaacattcatgtaactctccagccattgtaatttgaagatgtggatccctttagaacggttgccccagtagagttagctgataaggaaactttatttaaatgcatgtctt

SEQ ID NO: 469851 - DNA, 120 bp, Artificial Sequence
  ENSG00000159167_12 (sequence is synthesized)
aaatgctcataaagatgttaaatggaattcgtgttatgaatctgtgctggccatggacgaatatgaatgtcacatttgaattcttgatctctaatgagctagtgtcttatggtcttgatc

SEQ ID NO: 469852 - DNA, 120 bp, Artificial Sequence
  ENSG00000159167_13 (sequence is synthesized)
ctccaatgtctaattttctttccgacacatttaccaaattgcttgagcctggctgtccaaccagactttgagcctgcatcttcttgcatctaatgaaaaacaaaaagctaacatctttac

SEQ ID NO: 469853 - DNA, 120 bp, Artificial Sequence
  ENSG00000159167_14 (sequence is synthesized)
gtactgtaactgctcagagctttaaaagtatctttaacaattgtcttaaaaccagagaatcttaaggtctaactgtggaatataaatagctgaaaactaatgtactgtacataaattcca

SEQ ID NO: 469854 - DNA, 120 bp, Artificial Sequence
  ENSG00000159167_15 (sequence is synthesized)
gaggactctgcttaaacaaagcagtatataataactttattgcatatagatttagttttgtaacttagctttatttttcttttcctgggaatggaataactatctcacttccagatatcc

SEQ ID NO: 469855 - DNA, 120 bp, Artificial Sequence
  ENSG00000159167_16 (sequence is synthesized)
taactaagggggtagaagtagttttaattcaacatcaaaacttaagatgggcctgtatgagacaggaaaaaccaacaggtttatctgaaggaccccaggtaagatgttaatctcccagcc

SEQ ID NO: 469856 - DNA, 120 bp, Artificial Sequence
  ENSG00000159167_17 (sequence is synthesized)
cacctcaacccagaggctactcttgacttagacctatactgaaagatctctgtcacatccaactggaaattccaggaaccaaaaagagcatccctatgggcttggaccacttacagtgtg

SEQ ID NO: 469857 - DNA, 120 bp, Artificial Sequence
  ENSG00000159167_18 (sequence is synthesized)
ataaggcctactatacattaggaagtggcagttctttactcgtcccctttcatcggtgcctggtactctggcaaatgatgatggggtgggagactttccattaaatcaatcaggaatgag

SEQ ID NO: 469858 - DNA, 120 bp, Artificial Sequence
  ENSG00000159167_19 (sequence is synthesized)
tcaatcagcctttaggtctttagtccgggggacttggggctgagagagtataaataaccctgggctgtccagccttaatagacttctcttacattttcgtcctgtagcacgctgcctgcc

SEQ ID NO: 469859 - DNA, 83 bp, Artificial Sequence
  ENSG00000159167_20 (sequence is synthesized)
gggaaaaagagctggtggtttgatcatttctgccatgatgtttacaagatggcgaccaccaaagtcaaacgactaacctatct

SEQ ID NO: 469860 - DNA, 120 bp, Artificial Sequence
  ENSG00000159167_21 (sequence is synthesized)
acaagatggcgaccaccaaagtcaaacgactaacctatctatgaacaacagtagtttctcagggtcactgtccttgaacccaacagtcccttatgagcgtcactgcccaccaaaggtcaa

SEQ ID NO: 469861 - DNA, 120 bp, Artificial Sequence
  ENSG00000159167_22 (sequence is synthesized)
tgtcaagagaggaagagagggaggaggggtaggactgcaggggccactccaaactcgcttaggtagaaactattggtgcttgactctcactaggctaaactcaagatttgaccaaatcga

SEQ ID NO: 469862 - DNA, 120 bp, Artificial Sequence
  ENSG00000159167_23 (sequence is synthesized)
gtgatagggatcctggtgggaggagagagggcacatctccagaaaaatgaaaagcaatacaactttaccataaagcctttaaaaccagtaacgtgctgctcaaggaccaagagcaattgc

SEQ ID NO: 469863 - DNA, 120 bp, Artificial Sequence
  ENSG00000159167_24 (sequence is synthesized)
agcagacccagcagcagcagcagcagcacaaacattgctgcctttgtccccacacagcctctaagcgtgctgacatcagattgttaagggcatttttatactcagaactgtcccatcccc

SEQ ID NO: 469864 - DNA, 120 bp, Artificial Sequence
  ENSG00000159167_25 (sequence is synthesized)
aggtccccaaacttatggacactgccttagcctcttggaaatcaggtagaccatattctaagttagactcttcccctccctcccacacttcccacccccaggcaaggctgacttctctga

SEQ ID NO: 469865 - DNA, 120 bp, Artificial Sequence
  ENSG00000159167_26 (sequence is synthesized)
atcagaaaagctattaaagtttgtgtgttgtgtccattttgcaaacccaactaagccaggaccccaatgcgacaagtagttcatgagtattcctagcaaatttctctctttcttcagttc

SEQ ID NO: 469866 - DNA, 120 bp, Artificial Sequence
  ENSG00000159167_27 (sequence is synthesized)
ttttttttttttttttttttggctgtgacctcttcaaaccgtggtacccccccttttctccccacgatgatatctatatatgtatctacaatacatatatctacacatacagaaagaagc

SEQ ID NO: 469867 - DNA, 120 bp, Artificial Sequence
  ENSG00000159167_28 (sequence is synthesized)
atatctacacatacagaaagaagcagttctcacaatgttgctagttttttgcttctctttcccccaccctactccctccaattcccccttaaacttccaaagcttcgtcttgtgtttgct

SEQ ID NO: 469868 - DNA, 120 bp, Artificial Sequence
  ENSG00000159167_29 (sequence is synthesized)
gcagagtgattcgggggctgacctagaccagtttgcatgattcttctcttgtgatttggttgcactttagacatttttgtgccattatatttgcattatgtatttataatttaaatgata

SEQ ID NO: 469869 - DNA, 120 bp, Artificial Sequence
  ENSG00000159167_30 (sequence is synthesized)
tttaggtttttggctgagtactggaataaacagtgagcatatctggtatatgtcattatttattgttaaattacatttttaagctccatgtgcatataaaggttatgaaacatatcatgg

SEQ ID NO: 469870 - DNA, 120 bp, Artificial Sequence
  ENSG00000159167_31 (sequence is synthesized)
taatgacagatgcaagttattttatttgcttatttttataattaaagatgccatagcataatatgaagcctttggtgaattccttctaagataaaaataataataaagtgttacgtttta

SEQ ID NO: 469871 - DNA, 120 bp, Artificial Sequence
  ENSG00000159167_32 (sequence is synthesized)
aataaatgtgcttcatgcctgatggcaataaactgccagtgtaatccaatagccttaggcagtggagctcctttgtttaataaattgcatgcaactaaacgaagaagctggacgctctgc

SEQ ID NO: 469872 - DNA, 120 bp, Artificial Sequence
  ENSG00000159167_33 (sequence is synthesized)
tgagggtatttcattgcataagcctagcctgattgcctgaaatctggcacgtaccctcttggagggggaggggtgagaggggaggaaaggcttgaatgttggcatgcttcaaagcgctct

SEQ ID NO: 469873 - DNA, 120 bp, Artificial Sequence
  ENSG00000159173_0 (sequence is synthesized)
aaactgccccagcaggccccagggaaggacggcaggctgggatgccgtccccacggactccctctcctctcttagccctggcactaagtgcgttcctctggcaaagaagaaaataatttc

SEQ ID NO: 469874 - DNA, 120 bp, Artificial Sequence
  ENSG00000159173_1 (sequence is synthesized)
tgtccctcgccatctgctgcatgggaagatgggaatggagtgagcacggcaagacagatgctgcgtcctgcaatggccccaccatggaccctcgtcatccaaccgaagtcgcccccttgc

SEQ ID NO: 469875 - DNA, 120 bp, Artificial Sequence
  ENSG00000159173_2 (sequence is synthesized)
ctggctttatcttcactatattgtgaggctgcttcattgaatcttatcccagactttaacttttccatgactgccgtgattttgccatgttgttcacacagagtgtgtctgaccttagct

SEQ ID NO: 469876 - DNA, 120 bp, Artificial Sequence
  ENSG00000159173_3 (sequence is synthesized)
gcattgccaccgcctttgggaccctgagccttcttgccagcactgtcactcccagaggttgcttccactttccccttttccagaaccacttgttcctttgggtggcatcctggaaacttg

SEQ ID NO: 469877 - DNA, 120 bp, Artificial Sequence
  ENSG00000159173_4 (sequence is synthesized)
ctgttgaagtctcaactgcctcagtggttcttcaagggaggtcctcaggccaccacctgagaaattgttagaaatgcaagtttctgggctgcatcccagacctgctgaatcagaaatttg

SEQ ID NO: 469878 - DNA, 120 bp, Artificial Sequence
  ENSG00000159173_5 (sequence is synthesized)
gggaggagcacggactttggcaccagagagctgggtgcagctctcagctctgcgtcatccttgctgtgggaccctgggttattgctgagccactgtgagtctgtttcctcgtgggtatag

SEQ ID NO: 469879 - DNA, 120 bp, Artificial Sequence
  ENSG00000159173_6 (sequence is synthesized)
taggtctgcagtctacggcgaggcacaggccagcccagctccacgaggactgaacaaggtgctgtctcactgccaccatgccggaagtcgagagaaaacccaagatcactgcctcccgca

SEQ ID NO: 469880 - DNA, 120 bp, Artificial Sequence
  ENSG00000159173_7 (sequence is synthesized)
ggctgagaaggtgcgctacctggcagagcgcatccccacgctgcagacccgtggcctgtccctcagtgccctgcaggacctgtgccgggagctgcacgccaaggtggaggtggtggatga

SEQ ID NO: 469881 - DNA, 120 bp, Artificial Sequence
  ENSG00000159173_8 (sequence is synthesized)
ggagcgatacgacattgaggccaaatgcctccacaacaccagggagattaaggacctgaagctgaaggtgatggacctccgtgggaagttcaagcgcccgcccctgcgtcgagtccgtgt

SEQ ID NO: 469882 - DNA, 120 bp, Artificial Sequence
  ENSG00000159173_9 (sequence is synthesized)
ctcggctgacgccatgctccgggccctgctgggctccaagcacaaggtgtccatggatctgcgggccaacctcaagtctgtgaagaaggaagacacagagaaggagcggcctgtggaggt

SEQ ID NO: 469883 - DNA, 120 bp, Artificial Sequence
  ENSG00000159173_10 (sequence is synthesized)
gggtgactggaggaagaacgtggaggccatgtctggcatggaaggccggaagaagatgtttgatgccgccaagtctccgacctcacaatagaggccagcttgctgtgctgcgctctgagc

SEQ ID NO: 469884 - DNA, 120 bp, Artificial Sequence
  ENSG00000159173_11 (sequence is synthesized)
tcctgcttcatgcttcttctccaacccagctcactcacctctctgcctgtgtctggagcatcccttcccacctctcccccacttcttccctccagcctgcatgccctcctctggaactgg

SEQ ID NO: 469885 - DNA, 120 bp, Artificial Sequence
  ENSG00000159173_12 (sequence is synthesized)
gattaaacagatacccaagaggcaggaaaaacgcgagtgtctgaagacctcaccctggcagggtgggcttctatccacccatgaggcacctggggcttctcagccaccccgtggtgtaac

SEQ ID NO: 469886 - DNA, 120 bp, Artificial Sequence
  ENSG00000159173_13 (sequence is synthesized)
aagtggaggaggaggagggggtgagaacacctttcctccagccctgtgccacactccttctatgtgtgtacagtgtccacaggcatcacaccttcttcattaaaaacccagtttcctggt

SEQ ID NO: 469887 - DNA, 120 bp, Artificial Sequence
  ENSG00000159173_14 (sequence is synthesized)
gcttgggaagagagggctgtgctgggctccagtcaccctgtctgcagtccggagctcgggatctgaagggagggctaaggaattggtggctgcttgccagggtcccctggggccccttct

SEQ ID NO: 469888 - DNA, 120 bp, Artificial Sequence
  ENSG00000159173_15 (sequence is synthesized)
gcccagtccctgtgacgtcacactgcacacactcaccacccaggatgctcagctcaccagagccctgacctccgagaaatgaccccgtcctgcccctgactctggccatcagaagaggcc

SEQ ID NO: 469889 - DNA, 120 bp, Artificial Sequence
  ENSG00000159173_16 (sequence is synthesized)
tctccattaagagccgcttctcctgccggctttcatactctccttcctctgcaaacctggattaactctccctgatgtgtgctgggttgagaggtcagggcactttcaatccctcaccta

SEQ ID NO: 469890 - DNA, 120 bp, Artificial Sequence
  ENSG00000159173_17 (sequence is synthesized)
gtcctgctgcacagggcaggaggcctcacagaagagatacttgcagttccaggcctggccaccaggtgacgccttccttctctcctgggctctcctgtccctccggcctctgctctcccc

SEQ ID NO: 469891 - DNA, 120 bp, Artificial Sequence
  ENSG00000159173_18 (sequence is synthesized)
acgttcacccaccctcctcccaattgtttccccttcacactcctgcactggtcctatcccccaggactgattctttcccggagatggggtggccacttatctgtcctctggatcaggtcc

SEQ ID NO: 469892 - DNA, 120 bp, Artificial Sequence
  ENSG00000159173_19 (sequence is synthesized)
tttctccatcccactacctcctgggtccaaagcctggtgagagcatagggccttctggggtggaaggggggtctggggcagcctctcttcccccaacatactcactagagtggctcctgt

SEQ ID NO: 469893 - DNA, 61 bp, Artificial Sequence
  ENSG00000159173_20 (sequence is synthesized)
gcctctcttcccccaacatactcactagagtggctcctgtgaagcagagaccaaagttctg

SEQ ID NO: 469894 - DNA, 83 bp, Artificial Sequence
  ENSG00000159173_21 (sequence is synthesized)
gaccacatccggtcaagttctgacttttcagggcagtgggatggtgacttctgagctaagcctgcaagggaagtggctgttcc

SEQ ID NO: 469895 - DNA, 120 bp, Artificial Sequence
  ENSG00000159173_22 (sequence is synthesized)
gtgacttctgagctaagcctgcaagggaagtggctgttcccagacctggggtcccttggcttttcgaccaccctagcactggccctaggaggggctgagttatcagagcagcaacccttc

SEQ ID NO: 469896 - DNA, 120 bp, Artificial Sequence
  ENSG00000159173_23 (sequence is synthesized)
tacccaccctactgagtccccattctaccttcgaatcccatgtattatcttccataagtgccagaaattggtacaaagtgcagtgccagctgctccccagggcatggtctggctctctgg

SEQ ID NO: 469897 - DNA, 120 bp, Artificial Sequence
  ENSG00000159173_24 (sequence is synthesized)
gctgctgggctgccagcccctttcagaaagcatggcagtgggaaccagcaacttgggctaccttaggggaagcagcactctgcccagggttcttgctataaataggtcagtgggcagaga

SEQ ID NO: 469898 - DNA, 120 bp, Artificial Sequence
  ENSG00000159173_25 (sequence is synthesized)
ggcagatgtgtgcaaaaagcacaaccccaatcacacacagaaacccgtaggcacggacacacccagtctcaatgcacgaagttggagaacctgacagggctggtccaggccacagaggat

SEQ ID NO: 469899 - DNA, 120 bp, Artificial Sequence
  ENSG00000159173_26 (sequence is synthesized)
ggggttaggcttcatgccttcatgcccaggcagccacagaaacccactcttccccgcctcacagggctcctccggttggcctggatccaaagcgatctccttgtttcacctctttccagc

SEQ ID NO: 469900 - DNA, 120 bp, Artificial Sequence
  ENSG00000159173_27 (sequence is synthesized)
tcttccctagagcctggccccaagttccagagtcaaatcccagttttgcagtcaactattaacctggggccctggcagattggggtatccacccagtcatgtaaaggcaggagacctgct

SEQ ID NO: 469901 - DNA, 120 bp, Artificial Sequence
  ENSG00000159173_28 (sequence is synthesized)
ctgggcctgactcaaagcaaacacgtgggtgcagaagacccatgggaggaggaggtggggcccactcaacacacctaagccagtggccctctaggaggggcagaagagccaaccagaggg

SEQ ID NO: 469902 - DNA, 120 bp, Artificial Sequence
  ENSG00000159173_29 (sequence is synthesized)
caaggattgagaggccctgtggacaaggggaaggagagcttgggggtgggagagggatctatggaaggggctgttgtagccaagaatggggcctgggctgggggcctggcctctggagag

SEQ ID NO: 469903 - DNA, 120 bp, Artificial Sequence
  ENSG00000159173_30 (sequence is synthesized)
ccctgattctactccagtcttctctcaccatggagacaacaccagtagagctgggagctggggcctgccactgagtaacagctcacacatgtagcacacttatgcgtcaggcaccagcat

SEQ ID NO: 469904 - DNA, 120 bp, Artificial Sequence
  ENSG00000159173_31 (sequence is synthesized)
gtacaccttaatttatttaactttcacaacaaccctaggagaaaggtacagctactattctcatggtacagtggggaaaactgaggcacagagaggttagggacttttcatgatcacaca

SEQ ID NO: 469905 - DNA, 120 bp, Artificial Sequence
  ENSG00000159173_32 (sequence is synthesized)
gctaataagtggtggtcccaggattcaacccaagaagtctgttagaatccatactcttatcgactattttaataacagcatttcaataatagtaatatgtgatgttaaatgctttatctg

SEQ ID NO: 469906 - DNA, 120 bp, Artificial Sequence
  ENSG00000159173_33 (sequence is synthesized)
agttatatcattgcattctcacaaaaatggtacatttgttagctcaaatttacagatgaggaaatggaggcctggagagttcaagtagctcactctaagttacagggtttgctagctgca

SEQ ID NO: 469907 - DNA, 120 bp, Artificial Sequence
  ENSG00000159173_34 (sequence is synthesized)
gactggagactagatctcaggtcactctgccttggggttgcccttttctgagatcagactggccttaacagagcccaactttcttggaaggacacagctgggggtcgagggtcctgcata

SEQ ID NO: 469908 - DNA, 120 bp, Artificial Sequence
  ENSG00000159173_35 (sequence is synthesized)
tgcacctggggagtccccacacacccgcaccaaaggggaaacattcaaaggagatgcaggtgacatacagatgggctaaggtgaggccttcctccaacatggggccctggctgagagtgg

SEQ ID NO: 469909 - DNA, 120 bp, Artificial Sequence
  ENSG00000159173_36 (sequence is synthesized)
agggatagggtgctacttgggggatatctattactaatcagcacacaatagctgggtgggcaccccctctctctgcagctggtggagatgggcctggtgctcctctctgcttggtaggaa

SEQ ID NO: 469910 - DNA, 120 bp, Artificial Sequence
  ENSG00000159173_37 (sequence is synthesized)
tgaccagggcaggatgccacctgctacactcttgcctgtcccagagcccttgggagaccagctgttgctcccacctttccccacagggtgcccggtccccacggcgcaaggaggccaagc

SEQ ID NO: 469911 - DNA, 120 bp, Artificial Sequence
  ENSG00000159173_38 (sequence is synthesized)
tcagctgtgtgtctgagcccactcagcagcaggcatgatcagggcagggcccagcgctaagggctgctggggctaaagtgccttgctgaaggaggggcagagttaaacattagccacaat

SEQ ID NO: 469912 - DNA, 120 bp, Artificial Sequence
  ENSG00000159173_39 (sequence is synthesized)
ggccccccgcgaagtgagtcatactccccacaagtctctgggctgggcagccgggggcgggggggttagcttcgttccaggtgggtgaccaagctgcggaagcccaggacagttcgctgg

SEQ ID NO: 469913 - DNA, 120 bp, Artificial Sequence
  ENSG00000159173_40 (sequence is synthesized)
gaccagtgctaatggcagcttctgctcctgacccccatcaggtctctttcctcagacatccccaaagcttgtctgcctgtgggtctttcattaaaggtgacgggcaagggttttctcttc

SEQ ID NO: 469914 - DNA, 120 bp, Artificial Sequence
  ENSG00000159173_41 (sequence is synthesized)
cttccaagacacacttctaggctggcttgtgggtcccctgagacgaaggctgagcagggtgagcctcgaaaaccccatagcactggcccagagcactgcggtcaatgtccgaaggaccag

SEQ ID NO: 469915 - DNA, 120 bp, Artificial Sequence
  ENSG00000159173_42 (sequence is synthesized)
agagggagggtgacttgctcaaggtcacaaacctaactggagctaggaagtaggtccccagactcccagtctgaggaaattggatgtggacagggctttggtctcctggccagaggcaaa

SEQ ID NO: 469916 - DNA, 120 bp, Artificial Sequence
  ENSG00000159173_43 (sequence is synthesized)
cgcccagggatctgaacaggctgcccatctctggcctcaactcagcaccccaactggctccagtgccaaccattggcctctctcactggttggcacaggctgggtgagcctggccctttg

SEQ ID NO: 469917 - DNA, 120 bp, Artificial Sequence
  ENSG00000159173_44 (sequence is synthesized)
ccctgggttcaggagagaggtatggctttgcctggcagtcaggggaggtgttccaacctgggagcccctgggggaggagcgtgtgtgtgaacgcttgtgcctgttcatcagaaggggtga

SEQ ID NO: 469918 - DNA, 120 bp, Artificial Sequence
  ENSG00000159173_45 (sequence is synthesized)
gcatggtgtgtatgcgtgggcatgcagaatgcagggtgatgacctgtctgcccgccctgagtgtcacagacacctgtgtgtcccctgtactagtgcctcccagatgctcttctcctgact

SEQ ID NO: 469919 - DNA, 120 bp, Artificial Sequence
  ENSG00000159173_46 (sequence is synthesized)
ggctctttgtgacctaaatttcaactgctccaccccacaaggaggaaaccagggccacaaatgtagtgagattttcataaagctaaatgtattcagtggaaacgaccttcctctgatcta

SEQ ID NO: 469920 - DNA, 120 bp, Artificial Sequence
  ENSG00000159173_47 (sequence is synthesized)
aaagcatgcatgcctttgttttattactggagtattaaattagcccttacttatggaataggaggacagtaggtggcaattgttttctaatgctcttacttcacaaaataaaatggtggc

SEQ ID NO: 469921 - DNA, 120 bp, Artificial Sequence
  ENSG00000159173_48 (sequence is synthesized)
agcacaatgtcagtatttatattacacaatattattagtttgtaaaaaccgaaagccagggagcttactgccctggattctttagggcgtgggtcttatcacctcattcatttcttccct

SEQ ID NO: 469922 - DNA, 120 bp, Artificial Sequence
  ENSG00000159173_49 (sequence is synthesized)
tcccctaagagtgccacaagcatggcagttgctcagctgagacacatgaatgggaacagaactgaaatatcaggatgtgacctcgagccagctggttggggctggggatccccctggatc

SEQ ID NO: 469923 - DNA, 120 bp, Artificial Sequence
  ENSG00000159173_50 (sequence is synthesized)
tccactctgtcctgtccgagaaaggggaagctgccctatgagtcttttttctgggggattccagaggttgaacgtctgttctgaggctcctcagaacctcgagggaggggacgagagaga

SEQ ID NO: 469924 - DNA, 120 bp, Artificial Sequence
  ENSG00000159173_51 (sequence is synthesized)
tgaccccttgcccaaccactggctgaaaaatcttgaaattccctgactttgaccagggaattcccagttgtgctaagccctgcctggtggaatgtccctggaggaagtaaccaggacacg

SEQ ID NO: 469925 - DNA, 120 bp, Artificial Sequence
  ENSG00000159173_52 (sequence is synthesized)
catacgtttttaatgtacgtataaagaatcgtaaagtgaacacccatctgccaaccactcattttaagaactaggatatggcacatacttttgaagcccttatgcgtccctccccaatca

SEQ ID NO: 469926 - DNA, 120 bp, Artificial Sequence
  ENSG00000159173_53 (sequence is synthesized)
caaccccttcctctccacaaaggtaaatacaatcctcaattttgtgtttgttattctcttggttctcttcataatgttactacgtatttatgaattcctaatacatcattcagttttgga

SEQ ID NO: 469927 - DNA, 120 bp, Artificial Sequence
  ENSG00000159173_54 (sequence is synthesized)
tcacaatagaggtacctagagaccagctcccttctctggggtccatcagagtctagaggataatgagggagtccacaatgggcaggcgggttgtacttagtgtggtgcacggatgcacgg

SEQ ID NO: 469928 - DNA, 120 bp, Artificial Sequence
  ENSG00000159173_55 (sequence is synthesized)
actaaggcaccgatgagactgatttgagtcggctctcctgggctcagtcctggctccagcaccatgatacttgggcatgtcatttctgtttggcggccctttttgttcccattatctatg

SEQ ID NO: 469929 - DNA, 120 bp, Artificial Sequence
  ENSG00000159173_56 (sequence is synthesized)
aaattgggggctgtatcaaatcagtggttctccaagtgtggtcctgggaccagcagcgtctacatcacctgggatgcaaatgatcagcccccaccccagatccactaaattggaaactct

SEQ ID NO: 469930 - DNA, 120 bp, Artificial Sequence
  ENSG00000159173_57 (sequence is synthesized)
ggggtgaggccagccttctaggtgattctgatgcacatgagagtttgagaaccactaggttagagggtccctgggatcccttcatctctgactttctgagaatctatgcacttttaaata

SEQ ID NO: 469931 - DNA, 120 bp, Artificial Sequence
  ENSG00000159173_58 (sequence is synthesized)
ctcggctctgcccctcacagtctgcagtctacggcgaggcacaggccagcccagctccacgaggactgaacaaggtgctgtctcactgccaccatgccggaagtacagagaaaacccaag

SEQ ID NO: 469932 - DNA, 120 bp, Artificial Sequence
  ENSG00000159173_59 (sequence is synthesized)
cctcttcccccagctgctacttgcccctctgggccttcactgtggccctttgctctccctcattccccctcccagtcccatctctgctcagtccccacacctggtctggctgctcattct

SEQ ID NO: 469933 - DNA, 120 bp, Artificial Sequence
  ENSG00000159173_60 (sequence is synthesized)
tctgcagtctacggcgaggcacaggccagcccagctccacgaggactgaacaaggtgctgtctcactgccaccatgccggaagtgtaagtagtctcactgccatctggggccccaggaag

SEQ ID NO: 469934 - DNA, 120 bp, Artificial Sequence
  ENSG00000159176_0 (sequence is synthesized)
agccgccacttccgagagcgcctgccgcccctgcgccgccgagccagctgccagaatgccgaactggggaggaggcaagaaatgtggggtgtgtcagaagacggtttactttgccgaaga

SEQ ID NO: 469935 - DNA, 120 bp, Artificial Sequence
  ENSG00000159176_1 (sequence is synthesized)
ggttcagtgcgaaggcaacagcttccataaatcctgcttcctgtgcatggtctgcaagaagaatctggacagtaccactgtggccgtgcatggtgaggagatttactgcaagtcctgcta

SEQ ID NO: 469936 - DNA, 120 bp, Artificial Sequence
  ENSG00000159176_2 (sequence is synthesized)
cggcaagaagtatgggcccaaaggctatggctacgggcagggcgcaggcaccctcagcactgacaagggggagtcgctgggtatcaagcacgaggaagcccctggccacaggcccaccac

SEQ ID NO: 469937 - DNA, 120 bp, Artificial Sequence
  ENSG00000159176_3 (sequence is synthesized)
caaccccaatgcatccaaatttgcccagaagattggtggctccgagcgctgcccccgatgcagccaggcagtctatgctgcggagaaggtgattggtgctgggaagtcctggcataaggc

SEQ ID NO: 469938 - DNA, 120 bp, Artificial Sequence
  ENSG00000159176_4 (sequence is synthesized)
ctgctttcgatgtgccaagtgtggcaaaggccttgagtcaaccaccctggcagacaaggatggcgagatttactgcaaaggatgttatgctaaaaacttcgggcccaagggctttggttt

SEQ ID NO: 469939 - DNA, 120 bp, Artificial Sequence
  ENSG00000159176_5 (sequence is synthesized)
tgggcaaggagctggggccttggtccactctgagtgaggccaccatcacccaccacaccctgcccactcctgcgcttttcatcgccattccattcccagcagctttggagacctccagga

SEQ ID NO: 469940 - DNA, 120 bp, Artificial Sequence
  ENSG00000159176_6 (sequence is synthesized)
ttatttctctgtcagccctgccacatatcactaatgacttgaacttgggcatctggctccctttggtttgggggtctgcctgaggtcccaccccactaaagggctccccaggcctgggat

SEQ ID NO: 469941 - DNA, 120 bp, Artificial Sequence
  ENSG00000159176_7 (sequence is synthesized)
agacctcagtgttttgggtctaggtgagagcaggcccctctccccacacctcgccccacagagctctgttcttagcctcctgtgctgcgtgtccatcatcagctgaccaagacacctgag

SEQ ID NO: 469942 - DNA, 120 bp, Artificial Sequence
  ENSG00000159176_8 (sequence is synthesized)
gacacatcttggcacccagaggagcagcagcaacaggctggagggagagggaagcaagaccaagatgaggaggggggaaggctgggttttttggatctcagagattctcctctgtgggaa

SEQ ID NO: 469943 - DNA, 120 bp, Artificial Sequence
  ENSG00000159176_9 (sequence is synthesized)
agaggttgagcttcctggtgtccctcagagtaagcctgaggagtcccagcttagggagtcactattggaggcagagaggcatgcaggcagggtcctaggagcccctgcttctccaggcct

SEQ ID NO: 469944 - DNA, 120 bp, Artificial Sequence
  ENSG00000159176_10 (sequence is synthesized)
cttgcctttgagtctttgtggaatggatagcctcccactaggactgggaggagaataacccaggtcttaaggaccccaaagtcaggatgttgtttgatcttctcaaacatctagttccct

SEQ ID NO: 469945 - DNA, 120 bp, Artificial Sequence
  ENSG00000159176_11 (sequence is synthesized)
gcttgatgggaggatcctaatgaaatacctgaaacatatattggcatttatcaatggctcaaatcttcatttatctctggccttaaccctggctcctgaggctgcggccagcagagccca

SEQ ID NO: 469946 - DNA, 120 bp, Artificial Sequence
  ENSG00000159176_12 (sequence is synthesized)
ggccagggctctgttcttgccacacctgcttgatcctcagatgtggagggaggtaggcactgcctcagtcttcatccaaacacctttccctttgccctgagacctcagaatcttcccttt

SEQ ID NO: 469947 - DNA, 120 bp, Artificial Sequence
  ENSG00000159176_13 (sequence is synthesized)
aacccaagaccctgcctcttccactccacccttctccagggacccttagatcacatcactccacccctgccaggccccaggttaggaatagtggtgggaggaaggggaaagggctgggcc

SEQ ID NO: 469948 - DNA, 120 bp, Artificial Sequence
  ENSG00000159176_14 (sequence is synthesized)
tcaccgctcccagcaactgaaaggacaacactatctggagccacccactgaaagggctgcaggcatgggctgtacccaagctgatttctcatctggtcaataaagctgtttagaccagaa

SEQ ID NO: 469949 - DNA, 120 bp, Artificial Sequence
  ENSG00000159176_15 (sequence is synthesized)
ggcttgttcctgtttgcatgacaggaaactcctgaaatgcccctcgcacgtgcaagacgttttccgcggtggcggcgacagggcgcacagtgggaccgcagcacgagctcggagcacccc

SEQ ID NO: 469950 - DNA, 120 bp, Artificial Sequence
  ENSG00000159176_16 (sequence is synthesized)
cagagtcggcgactcctgcccccgcccctgccggccggccttcccggggcctaggagggcagcaccgccgggcttcgcgccatgacatcagccctggagtggtgcagtgtgcaaagccca

SEQ ID NO: 469951 - DNA, 120 bp, Artificial Sequence
  ENSG00000159176_17 (sequence is synthesized)
atcctttagagtgcctagcacagggctgaaaatgcagcagctgctctgtaaagacctgttgattagattggggggaggaaatccccgagaacgtgcgaggctgctgtcgagagctagcag

SEQ ID NO: 469952 - DNA, 120 bp, Artificial Sequence
  ENSG00000159176_18 (sequence is synthesized)
gtgcgtgacccagggcgacccggctccccgcaaccgcctgcaagtcgggcagaacaatcggcgattctgcgcgccactgacgctcattgtatggcagagagatgagggcatccgtgccac

SEQ ID NO: 469953 - DNA, 120 bp, Artificial Sequence
  ENSG00000159176_19 (sequence is synthesized)
cccctccctcaccctcctgctggggagaaaatgcccgcgggcggggtggggcaaacatctgggcctgaccttggacatctgtgtccctgagcgcagaatgccgaactggggaggaggcaa

SEQ ID NO: 469954 - DNA, 120 bp, Artificial Sequence
  ENSG00000159176_20 (sequence is synthesized)
ggtgctgggaaggtaaggtggctgctgggcatgagagggatggggggagatatcttcctgaaatgtggattccagaacttttaaattggtgacctagctctgctcagggcagcctgagca

SEQ ID NO: 469955 - DNA, 120 bp, Artificial Sequence
  ENSG00000159176_21 (sequence is synthesized)
ctggggtttaacctcttctctttgtccctgtgggttgcatgtacctgtgctttccagtctccaaggagctcatatcagccatgagcagtaacatccccagcattgatggacaatgggcaa

SEQ ID NO: 469956 - DNA, 120 bp, Artificial Sequence
  ENSG00000159176_22 (sequence is synthesized)
aggcctgcctttaaaattccccttgattgagtctttggtggatcttacaaagactttggtgagttgcagagtctctcagtatatcacctggatggaggtagaggggcagagggccacgat

SEQ ID NO: 469957 - DNA, 120 bp, Artificial Sequence
  ENSG00000159176_23 (sequence is synthesized)
gggcaggattgggcctctgggagaacagaagggccaaggcaaagcagaaaggagcagggaggtcctcggcaggggagccatctggaagatgtcaacttgcaggccctgaggtctgccctg

SEQ ID NO: 469958 - DNA, 120 bp, Artificial Sequence
  ENSG00000159176_24 (sequence is synthesized)
ggctgagttcctgggtctcctactggagagatcagccaaaatacacctctgttcccccaagcactctttgctttctgccttctctctggtcttggaattttcagttcaattgggatctta

SEQ ID NO: 469959 - DNA, 120 bp, Artificial Sequence
  ENSG00000159176_25 (sequence is synthesized)
caggaaaacaattccaggccaattcctgacttcccaccctagaagggaatgttggagcccttggcctgtggttccctctccctccttcttgggagctggtcccggggggaaatggtggga

SEQ ID NO: 469960 - DNA, 120 bp, Artificial Sequence
  ENSG00000159176_26 (sequence is synthesized)
agttccatatttggatggcccagagtgctggaatgagatggagatctccagagcaggacaagagggtccttatttagtctgaagtctccaacctggggcttagggtgagagaggagctgg

SEQ ID NO: 469961 - DNA, 120 bp, Artificial Sequence
  ENSG00000159176_27 (sequence is synthesized)
cagagggatggaccctttaaaggcaagaggatggcagttgcaaggaaaggagctgagagcttctccgagggtggtaaaaggcgtggcttctccagtggtatccctcggtttctatgttca

SEQ ID NO: 469962 - DNA, 120 bp, Artificial Sequence
  ENSG00000159176_28 (sequence is synthesized)
ggacatgtttgaggatgcgtccaactgagatgctgaactccaatatttaaggaatatgatcaaaccgaattaggattacaggacaagtaaagaaaaagaatgcagttgaatctcttgaga

SEQ ID NO: 469963 - DNA, 120 bp, Artificial Sequence
  ENSG00000159176_29 (sequence is synthesized)
ggagtatgtgaaagttagaagcaatgatctcttgaagctggggcctgtccctcccacttccttgtctcccgatggtactaactttatataatactaataagagtagccaacatttattat

SEQ ID NO: 469964 - DNA, 120 bp, Artificial Sequence
  ENSG00000159176_30 (sequence is synthesized)
gcatttgttgtatgcagggtattatgccaagtacttcacatgtcagatctcatttgattctcaccaccagcttttggggcagacattattatgttcatttacaaatgaggacacagaggc

SEQ ID NO: 469965 - DNA, 120 bp, Artificial Sequence
  ENSG00000159176_31 (sequence is synthesized)
tggaaaggcaaaaaaaacttgcaaatggctggaaagggagagagctgggatttgattctgggcagtctgactcttcatgaccccaggctctgaactgctttaactttatttttattttta

SEQ ID NO: 469966 - DNA, 120 bp, Artificial Sequence
  ENSG00000159176_32 (sequence is synthesized)
aggctctgaactgctttaactttatttttatttttaaaagttttatttatttatttatttttaaataaatagagacagggttatgccatcttccccaggctgatctcaaactcctgggct

SEQ ID NO: 469967 - DNA, 120 bp, Artificial Sequence
  ENSG00000159176_33 (sequence is synthesized)
actacaggcatgagccactgcacccagcccaaactgttttattctggatagctgggcatagctcccctctgagattaacaggacgaaatatgaggcccacagcctttccagctcagacca

SEQ ID NO: 469968 - DNA, 120 bp, Artificial Sequence
  ENSG00000159176_34 (sequence is synthesized)
ttgcaatccctagttccttccgttccactctctcttaccccaggagtcaggaagttcttctgtgtctgaccctcacttcttcctgtggtaaagtgatttctgagattagaaacttcaaat

SEQ ID NO: 469969 - DNA, 120 bp, Artificial Sequence
  ENSG00000159176_35 (sequence is synthesized)
cctcttgtgattagcatgagctgcatcccatttcaaagcccaccatgttgggcacttaataaatgttaaacatttcttatggggtatcacatcacctgcatctccccccgttggctccct

SEQ ID NO: 469970 - DNA, 120 bp, Artificial Sequence
  ENSG00000159176_36 (sequence is synthesized)
gccaacatgcacagatagtctcttctggattccactgttgaaggcaggaaaactgcccttcttttctttttcctcctcccccattgggacatatggtctctgttgagggcagagtgagga

SEQ ID NO: 469971 - DNA, 120 bp, Artificial Sequence
  ENSG00000159176_37 (sequence is synthesized)
acctcaacaggcgtcctgtggcttggggtcagcctaggctgttgcctctgaaccctgtgttgcactgcagcctgaggaagtttaggggtgcagaggaccaaaggagacacatatggattc

SEQ ID NO: 469972 - DNA, 120 bp, Artificial Sequence
  ENSG00000159176_38 (sequence is synthesized)
ctggaagaggaattggtgttggccagcatttctagagtcggatatgcagatcccatccctctgtcctcccacccattggccatcccgcctgcctccatttgtagacagttcctgaaagat

SEQ ID NO: 469973 - DNA, 120 bp, Artificial Sequence
  ENSG00000159176_39 (sequence is synthesized)
caggatattatgtatgcaaagaggccagagagcttcagctgtaagaagcttgcaatgagcaagaaggtcaccccagcttcaactcaatgcgtccgcttccccttcccctccacagtggtc

SEQ ID NO: 469974 - DNA, 120 bp, Artificial Sequence
  ENSG00000159176_40 (sequence is synthesized)
aaccatttttgggtaagcaatggaaggctcagaaaaccagttatttaaaaggcagtcacagagcagtgtctatgtgtcaggctgctgcaggagctggggatgcagcagggactaaaacag

SEQ ID NO: 469975 - DNA, 120 bp, Artificial Sequence
  ENSG00000159176_41 (sequence is synthesized)
gctgggctcctccctgcaaggagcgtgcattctatatttgtatgagagtcagagctgggaggggccccaagaatcacttagtccaatttcctctttttttgtttttttttgaaagggagt

SEQ ID NO: 469976 - DNA, 89 bp, Artificial Sequence
  ENSG00000159176_42 (sequence is synthesized)
gtggtacaatcttggctcactgcagcctctgcttcttgggctcaagtgatcctcttgcctcaggctcccgagtagctgggagctgtatt

SEQ ID NO: 469977 - DNA, 120 bp, Artificial Sequence
  ENSG00000159176_43 (sequence is synthesized)
agagacagggtttcaccatgttgcctcctctttttatagatgagaaaatccagcccaggctcagtgacttgcctggggtcccacggctagtgagtgtcggagccagatcaggggctcagg

SEQ ID NO: 469978 - DNA, 120 bp, Artificial Sequence
  ENSG00000159176_44 (sequence is synthesized)
agtgagtgtcggagccagatcaggggctcagggcagcaccgttgccacaccagcctcactgtctcagccctgctatctctcactactgagaagaagtcatttccctttcttcgaaatgcc

SEQ ID NO: 469979 - DNA, 120 bp, Artificial Sequence
  ENSG00000159176_45 (sequence is synthesized)
atagggtgtcatcagccccaccacacccccctcaccccacggcactccctggcctctgggtaaatggtggctgttggcagtcagcctggcttgctcctcggcctggggggtggacggaaa

SEQ ID NO: 469980 - DNA, 120 bp, Artificial Sequence
  ENSG00000159176_46 (sequence is synthesized)
tgatggatgaattaccaagtttcagccaaggtcattgccccagtgggaatgattcatcagcagatttctcctgtaaagaatctgataatagaccagctgcaggaatgaggggcagaggag

SEQ ID NO: 469981 - DNA, 120 bp, Artificial Sequence
  ENSG00000159176_47 (sequence is synthesized)
ggcaattcttagcaaatggggtgttaaatgattctggggttaactgggtgaccgagggaagtatgatgttacaatggaaataacattgtgctgaggcttggtttgtccatctgtaaaatg

SEQ ID NO: 469982 - DNA, 120 bp, Artificial Sequence
  ENSG00000159176_48 (sequence is synthesized)
ggagatgaccctagaggccctagcctttgtgactttggcagagagaattgcgcgctgctctggcatgagatgaaggtagggtcatgccctctcagtgccagccccacctgtacttacagt

SEQ ID NO: 469983 - DNA, 120 bp, Artificial Sequence
  ENSG00000159176_49 (sequence is synthesized)
aaagccctgaagattatatacaaagtttcatgggaacctgtctgtttcttagaagaagatccatagcttttattaaattttcaaaggatttgtgatcccaaaaatatacattctgtttca

SEQ ID NO: 469984 - DNA, 120 bp, Artificial Sequence
  ENSG00000159176_50 (sequence is synthesized)
tgggatgtggactcccaaaaacccatccaaatacccccagggcagagattttcaaggttcagacctaccagagcctcctaggaggcttttttcacactgtttagaattgccgcacatgcc

SEQ ID NO: 469985 - DNA, 120 bp, Artificial Sequence
  ENSG00000159176_51 (sequence is synthesized)
cccaattgagctgatcacttccttcagataggctgcagtagagaagaggcagaactcttgcccctggggtttgcagtgtcagattagcagtcagaaaatcacagaagagatgtctttcag

SEQ ID NO: 469986 - DNA, 120 bp, Artificial Sequence
  ENSG00000159176_52 (sequence is synthesized)
ctgtggggccagagaggaattctggagcatcacgtgaggcctgagatagaaaagtgacttggccaagatcacacaacaaggttatggaatgtctgggcctggagcccatcttcatctctt

SEQ ID NO: 469987 - DNA, 120 bp, Artificial Sequence
  ENSG00000159176_53 (sequence is synthesized)
ctggattcaggttttggctttcaaggctttttgaccttgaggaatgggataggggaattgatcaagaaatgttaaacaattaacacttaggccagtgttagaatctctactctcacagtc

SEQ ID NO: 469988 - DNA, 120 bp, Artificial Sequence
  ENSG00000159176_54 (sequence is synthesized)
atggttggacagagatggggattagtatccctgttgtacagatgaagaaactgggagtcaggaggattacataatttgcccagatccgctagctaggaaggggctaagccagactcaagc

SEQ ID NO: 469989 - DNA, 120 bp, Artificial Sequence
  ENSG00000159176_55 (sequence is synthesized)
ccaggtttgtctgactccgaagcccttgctcttactgctgttactactgttaatgctactttgggccatttagcctcttcaaacccatttccaaggctgcaaaatgggaggggatcctag

SEQ ID NO: 469990 - DNA, 120 bp, Artificial Sequence
  ENSG00000159176_56 (sequence is synthesized)
cacggtgattaagagcttggactctagacagcctgctttgaatcctagttttgccatttattggctgagcgaacttgggaaaatttagccttcctaagcctcagttcttcagctctaaag

SEQ ID NO: 469991 - DNA, 120 bp, Artificial Sequence
  ENSG00000159176_57 (sequence is synthesized)
ccttcctaagcctcagttcttcagctctaaagtgggcctggatggtggaggaaatgcaaagtggaccaagtaatggcccctgacaaataaggcagtttttttttgtttgtttgtttttgt

SEQ ID NO: 469992 - DNA, 75 bp, Artificial Sequence
  ENSG00000159176_58 (sequence is synthesized)
gtttttgtttttgttttcttttggcagaatttcacacttgtcacctaggctggagtacagtggcgcgatcttagc

SEQ ID NO: 469993 - DNA, 60 bp, Artificial Sequence
  ENSG00000159176_59 (sequence is synthesized)
ccatgttggccaggctggtcttgaaccagcctggacctcaacaacaaggcagttttaatg

SEQ ID NO: 469994 - DNA, 120 bp, Artificial Sequence
  ENSG00000159176_60 (sequence is synthesized)
ctaccacacccaacaacaaggcagttttaatgattaaatgagatagtacatgtataatgtgcaatgtagtgcctggtatgtcctcagtacagttttgctattgttattattattgttgtt

SEQ ID NO: 469995 - DNA, 120 bp, Artificial Sequence
  ENSG00000159176_61 (sequence is synthesized)
tattttcagggattattttgaggtcacaatgaagatccttgccattgactaaaggatatgaaaacaggagacattaatattattattaagttgggttttttgttctatctcattatgaga

SEQ ID NO: 469996 - DNA, 120 bp, Artificial Sequence
  ENSG00000159176_62 (sequence is synthesized)
atagaaaattattaagaatagctaagaatcactatttccattacttaggcaggctataaggtaaagttagggctgtactaaggagtaggataagagaattttgcattcaagtggaaaagg

SEQ ID NO: 469997 - DNA, 120 bp, Artificial Sequence
  ENSG00000159176_63 (sequence is synthesized)
tagggagaagccccacctttctattgcctcgctcaagaaatgttgagctgggagtacttttgggtgcttatgaatgagcaaagggattcagcttattttggcagggaggtggctaggaaa

SEQ ID NO: 469998 - DNA, 120 bp, Artificial Sequence
  ENSG00000159176_64 (sequence is synthesized)
tatgaggagaggtgttggtctaggtgtgattcagtttttctccagcctagagagcttggggtagcagcccctgctttacagaggaggcagcaaaggctgggtgactattgaggttgcacc

SEQ ID NO: 469999 - DNA, 120 bp, Artificial Sequence
  ENSG00000159176_65 (sequence is synthesized)
agcactgacctagacccaggtccccccatttcagctctctggaggagaagccaatgtgcaaggttaggcaaccaggaaatctgaggggatgaatttcctttctcatccaccagcctgggc

SEQ ID NO: 470000 - DNA, 120 bp, Artificial Sequence
  ENSG00000159176_66 (sequence is synthesized)
actgggagtgtctttgcccttaaaaggccttgttttgtcttatctgactgctgcctgcctcttgcttttcctgggttaagcagagctgtctacacatcagcctcttagcctgcccagctg

SEQ ID NO: 470001 - DNA, 120 bp, Artificial Sequence
  ENSG00000159176_67 (sequence is synthesized)
ttgatgggaactggctgcggagaagtctgtctgtgcaacgtcccatcactgtgtacaaactcgggcctcactttttttctgggacagctgtttgccctgtgttacagaatgcatgtgagg

SEQ ID NO: 470002 - DNA, 120 bp, Artificial Sequence
  ENSG00000159176_68 (sequence is synthesized)
actagatatttaaacatatgatgcctggccacagagaaggtatttgtaattggattctcctggaccagcccagcctctgaagttctagaattaggtgcctcctttgcccaaaggctatca

SEQ ID NO: 470003 - DNA, 120 bp, Artificial Sequence
  ENSG00000159176_69 (sequence is synthesized)
gctattggaggggagggtggcagtatgtccctcactgggtagctgtgaacactaactgacttcaccagtgtaaagtgcctggcacagggcctggcacagaggaagccagagtcaatgttg

SEQ ID NO: 470004 - DNA, 120 bp, Artificial Sequence
  ENSG00000159176_70 (sequence is synthesized)
tctagtatcactttggaaggagaataagtctatgaaatgcattaaactcagcagggaaagtcctaaggagtagtttctccaggggccacagaagaccctttgggtctctatgagaggccc

SEQ ID NO: 470005 - DNA, 120 bp, Artificial Sequence
  ENSG00000159176_71 (sequence is synthesized)
caaggcaacacagggcagagaggtctttctggtgagggctgttcaagtactaagtgacagtaccaggaggagtgcaaagccctggctcacaccactgatctactggcaagatgggtctgg

SEQ ID NO: 470006 - DNA, 120 bp, Artificial Sequence
  ENSG00000159176_72 (sequence is synthesized)
agaaggctcatctggcccagccagtggggtaacagctactttggtgttaaacccaccccctcacctgccttttgtggtatagctggtgaccctaatcatcaggccattgcaacatagcat

SEQ ID NO: 470007 - DNA, 120 bp, Artificial Sequence
  ENSG00000159176_73 (sequence is synthesized)
ggaagatggtgcgaggtggcgtgtggtccctggccttctccctctactgccttgcaccataggccatgtcctcccagcagcaccagctgagtagacttcagaagtggcttgagcccttat

SEQ ID NO: 470008 - DNA, 120 bp, Artificial Sequence
  ENSG00000159176_74 (sequence is synthesized)
ctgctggggagaaaatgcccgcgggcggggtggggcaaacatctgggcctgaccttggacatctgtgtccctgagcgcaggtaatgccgaactggggaggaggcaagaaatgtggggtgt

SEQ ID NO: 470009 - DNA, 120 bp, Artificial Sequence
  ENSG00000159176_75 (sequence is synthesized)
acaccagcgtctcctcacctgcaggctgagacttactgacacttttcaccctcttggccccacatgtgtggcccactggaggggagcaatggctggcagaaaaccaccaggtctggaggt

SEQ ID NO: 470010 - DNA, 120 bp, Artificial Sequence
  ENSG00000159176_76 (sequence is synthesized)
caggggctgggttctggcctggccctgcatctggccaacacgtgatctggaactgttttgtgggcctcggttttccttccagaagcagagaatcattctctatttctgagtggggcaagg

SEQ ID NO: 470011 - DNA, 120 bp, Artificial Sequence
  ENSG00000159176_77 (sequence is synthesized)
gggctctgacctctcccctggggctgccttttccctttatttccaagcagtatcacaagggcccaccaaagtggcatctggaagtatgtgtttccaacaaatccagtcttttttttttct

SEQ ID NO: 470012 - DNA, 120 bp, Artificial Sequence
  ENSG00000159176_78 (sequence is synthesized)
agcttccataaatcctgcttcctgtgcagtgagtacgccccaggccctattgctgttgccttggacaccctggacgggcctgcccccacaggctgggcctgtcaacaccccagggaactg

SEQ ID NO: 470013 - DNA, 120 bp, Artificial Sequence
  ENSG00000159176_79 (sequence is synthesized)
atcccatgggatgtaaacagcttgacatttggctgaagcgcagctgggcagggaaacacttcagggcctctttgttccgttcagaagcttctttctaagggatgaactggccagagcggg

SEQ ID NO: 470014 - DNA, 120 bp, Artificial Sequence
  ENSG00000159176_80 (sequence is synthesized)
ggctgaaagccaagctgtaaagacttggttaagaaaactttccactcagctctctcttctctctctccctgtcatgatttcaccatttcagaggaaaacactttcagccctttgcaccct

SEQ ID NO: 470015 - DNA, 120 bp, Artificial Sequence
  ENSG00000159176_81 (sequence is synthesized)
aattatctcttgttcaaaggcaacagaggccacaacctcatggtgaagctgaatctggaggaagagtggggctcctccttcctcagccccttgcaggctggcctgttcagttcttcactt

SEQ ID NO: 470016 - DNA, 120 bp, Artificial Sequence
  ENSG00000159176_82 (sequence is synthesized)
cccattcccactcagcctgggatgagaggaagagggagtacaaagttccctgatatctactcctaagaagccagagcaaggtttgctccagtcataagcctagatgagtaagaaatcaga

SEQ ID NO: 470017 - DNA, 120 bp, Artificial Sequence
  ENSG00000159182_0 (sequence is synthesized)
ccttcctctcctagcctaaggcgtgcaaacagagcgccactgggaggctgaaacctttaggccgatgcttgcttgcaaggtcaggcaagctggattctggtccccacctttgcagagaga

SEQ ID NO: 470018 - DNA, 120 bp, Artificial Sequence
  ENSG00000159182_1 (sequence is synthesized)
tctcagatcaaggaccggcccatcttactacctccaagagtgcttttctctctaataagaaaacatctactttgaaacatctactgggcgagaccaggagtgatggctcagcctgtaatt

SEQ ID NO: 470019 - DNA, 120 bp, Artificial Sequence
  ENSG00000159182_2 (sequence is synthesized)
ctggaatttcgggaggccgaggcaggaagattccttgagcacaggagttccagaccagcctgggcaatgtagcaagacgctgtctctatttatacaataaaatttttttaaaaaaggaaa

SEQ ID NO: 470020 - DNA, 120 bp, Artificial Sequence
  ENSG00000159184_0 (sequence is synthesized)
aggagacagaaagctagggagggagaggaggagaaggaggtggggcccggctcctcgtcccctcttcctccgcccaccacgcctcccctccccccggacgtgtaaatgagactctgcaaa

SEQ ID NO: 470021 - DNA, 120 bp, Artificial Sequence
  ENSG00000159184_1 (sequence is synthesized)
ctggaaagcagcgaaaggacacctccttccttttctctcttgttgtttttaagtggaatgagagagagaggagtggagagggaaaagaagagagagagggagaagagagagaggagagaa

SEQ ID NO: 470022 - DNA, 74 bp, Artificial Sequence
  ENSG00000159184_2 (sequence is synthesized)
taagctggggtaaagtattttcgcagtttctgcctttaggattttattagcttctctcccccaggccgcagcca

SEQ ID NO: 470023 - DNA, 120 bp, Artificial Sequence
  ENSG00000159184_3 (sequence is synthesized)
tttaggattttattagcttctctcccccaggccgcagccaatcagcgcgcgtgcccgggcccctgcgtctcttgcgtcaagacggccgtgctgagcgaatgcaggcgacttgcgagctgg

SEQ ID NO: 470024 - DNA, 120 bp, Artificial Sequence
  ENSG00000159184_4 (sequence is synthesized)
gagcgatttaaaacgctttggattcccccggcctgggtggggagagcgagctgggtgccccctagattccccgcccccgcacctcatgagccgaccctcggctccatggagcccggcaat

SEQ ID NO: 470025 - DNA, 120 bp, Artificial Sequence
  ENSG00000159184_5 (sequence is synthesized)
tatgccaccttggatggagccaaggatatcgaaggcttgctgggagcgggaggggggcggaatctggtcgcccactcccctctgaccagccacccagcggcgcctacgctgatgcctgct

SEQ ID NO: 470026 - DNA, 120 bp, Artificial Sequence
  ENSG00000159184_6 (sequence is synthesized)
gtcaactatgcccccttggatctgccaggctcggcggagccgccaaagcaatgccacccatgccctggggtgccccaggggacgtccccagctcccgtgccttatggttactttggaggc

SEQ ID NO: 470027 - DNA, 120 bp, Artificial Sequence
  ENSG00000159184_7 (sequence is synthesized)
gggtactactcctgccgagtgtcccggagctcgctgaaaccctgtgcccaggcagccaccctggccgcgtaccccgcggagactcccacggccggggaagagtaccccagccgccccact

SEQ ID NO: 470028 - DNA, 120 bp, Artificial Sequence
  ENSG00000159184_8 (sequence is synthesized)
gagtttgccttctatccgggatatccgggaacctaccagcctatggccagttacctggacgtgtctgtggtgcagactctgggtgctcctggagaaccgcgacatgactccctgttgcct

SEQ ID NO: 470029 - DNA, 120 bp, Artificial Sequence
  ENSG00000159184_9 (sequence is synthesized)
gtggacagttaccagtcttgggctctcgctggtggctggaacagccagatgtgttgccagggagaacagaacccaccaggtcccttttggaaggcagcatttgcagactccagcgggcag

SEQ ID NO: 470030 - DNA, 120 bp, Artificial Sequence
  ENSG00000159184_10 (sequence is synthesized)
caccctcctgacgcctgcgcctttcgtcgcggccgcaagaaacgcattccgtacagcaaggggcagttgcgggagctggagcgggagtatgcggctaacaagttcatcaccaaggacaag

SEQ ID NO: 470031 - DNA, 120 bp, Artificial Sequence
  ENSG00000159184_11 (sequence is synthesized)
aggcgcaagatctcggcagccaccagcctctcggagcgccagattaccatctggtttcagaaccgccgggtcaaagagaagaaggttctcgccaaggtgaagaacagcgctaccccttaa

SEQ ID NO: 470032 - DNA, 120 bp, Artificial Sequence
  ENSG00000159184_12 (sequence is synthesized)
gagatctccttgcctgggtgggaggagcgaaagtgggggtgtcctggggagaccaggaacctgccaagcccaggctggggccaaggactctgctgagaggcccctagagacaacaccctt

SEQ ID NO: 470033 - DNA, 120 bp, Artificial Sequence
  ENSG00000159184_13 (sequence is synthesized)
cccaggccactggctgctggactgttcctcaggagcggcctgggtacccagtatgtgcagggagacggaaccccatgtgacagcccactccaccagggttcccaaagaacctggcccagt

SEQ ID NO: 470034 - DNA, 120 bp, Artificial Sequence
  ENSG00000159184_14 (sequence is synthesized)
ccgctttcatgaattgagctaattatgaataaatttggaaggcgatccctttgcagggaagctttctctcagacccccttccattacacctctcaccctggtaacagcaggaagactgag

SEQ ID NO: 470035 - DNA, 120 bp, Artificial Sequence
  ENSG00000159184_15 (sequence is synthesized)
gagaggggaacgggcagattcgttgtgtggctgtgatgtccgtttagcatttttctcagctgacagctgggtaggtggacaattgtagaggctgtctcttcctccctccttgtccacccc

SEQ ID NO: 470036 - DNA, 120 bp, Artificial Sequence
  ENSG00000159184_16 (sequence is synthesized)
atagggtgtacccactggtcttggaagcacccatccttaatacgatgatttttctgtcgtgtgaaaatgaagccagcaggctgcccctagtcagtccttccttccagagaaaaagagatt

SEQ ID NO: 470037 - DNA, 120 bp, Artificial Sequence
  ENSG00000159184_17 (sequence is synthesized)
tgagaaagtgcctgggtaattcaccattaatttcctcccccaaactctctgagtcttcccttaatatttctggtggttctgaccaaagcaggtcatggtttgttgagcatttgggatccc

SEQ ID NO: 470038 - DNA, 120 bp, Artificial Sequence
  ENSG00000159184_18 (sequence is synthesized)
agtgaagtagatgtttgtagccttgcatacttagcccttcccaggcacaaacggagtggcagagtggtgccaaccctgttttcccagtccacgtagacagattcacagtgcggaattctg

SEQ ID NO: 470039 - DNA, 120 bp, Artificial Sequence
  ENSG00000159184_19 (sequence is synthesized)
gaagctggagacagacgggctctttgcagagccgggactctgagagggacatgagggcctctgcctctgtgttcattctctgatgtcctgtacctgggctcagtgcccggtgggactcat

SEQ ID NO: 470040 - DNA, 120 bp, Artificial Sequence
  ENSG00000159184_20 (sequence is synthesized)
ctcctggccgcgcagcaaagccagcgggttcgtgctggtccttcctgcaccttaggctgggggtggggggcctgccggcgcattctccacgattgagcgcacaggcctgaagtctggaca

SEQ ID NO: 470041 - DNA, 120 bp, Artificial Sequence
  ENSG00000159184_21 (sequence is synthesized)
acccgcagaaccgaagctccgagcagcgggtcggtggcgagtagtggggtcggtggcgagcagttggtggtgggccgcggccgccactacctcgaggacatttccctcccggagccagct

SEQ ID NO: 470042 - DNA, 120 bp, Artificial Sequence
  ENSG00000159184_22 (sequence is synthesized)
ctcctagaaaccccgcggcggccgccgcagccaagtgtttatggcccgcggtcgggtgggatcctagccctgtctcctctcctgggaaggagtgagggtgggacgtgacttagacaccta

SEQ ID NO: 470043 - DNA, 120 bp, Artificial Sequence
  ENSG00000159184_23 (sequence is synthesized)
caaatctatttaccaaagaggagcccgggactgagggaaaaggccaaagagtgtgagtgcatgcggactgggggttcaggggaagaggacgaggaggaggaagatgaggtcgatttcctg

SEQ ID NO: 470044 - DNA, 120 bp, Artificial Sequence
  ENSG00000159184_24 (sequence is synthesized)
atttaaaaaatcgtccaagccccgtggtccagcttaaggtcctcggttacatgcgccgctcagagcaggtcactttctgccttccacgtcctccttcaaggaagccccatgtgggtagct

SEQ ID NO: 470045 - DNA, 120 bp, Artificial Sequence
  ENSG00000159184_25 (sequence is synthesized)
ttcaatatcgcaggttcttactcctctgcctctataagctcaaacccaccaacgatcgggcaagtaaaccccctccctcgccgacttcggaactggcgagagttcagcgcagatgggcct

SEQ ID NO: 470046 - DNA, 120 bp, Artificial Sequence
  ENSG00000159184_26 (sequence is synthesized)
gtggggagggggcaagatagatgagggggagcggcatggtgcggggtgaccccttggagagaggaaaaaggccacaagaggggctgccaccgccactaacggagatggccctggtagaga

SEQ ID NO: 470047 - DNA, 120 bp, Artificial Sequence
  ENSG00000159184_27 (sequence is synthesized)
cctttgggggtctggaacctctggactccccatgctctaactcccacactctgctatcagaaacttaaacttgaggattttctctgtttttcactcgcaataaattcagagcaaacaaaa

SEQ ID NO: 470048 - DNA, 120 bp, Artificial Sequence
  ENSG00000159189_0 (sequence is synthesized)
tgggagaggggaagcagatctgaggacatctctgtgccaggccagaaaccgcccacctgcaggtgaggcccggacccctgcccaggtatgggcagatggccgtttcctccaccttccgcc

SEQ ID NO: 470049 - DNA, 120 bp, Artificial Sequence
  ENSG00000159189_1 (sequence is synthesized)
accttcctgaaatgtggtgccaggggcagcttggtgtgtgaggggaaggagggttcccactcctgctgggccccggggcctgggctgaagaaaaggccccaccatccatccatgttcctt

SEQ ID NO: 470050 - DNA, 120 bp, Artificial Sequence
  ENSG00000159189_2 (sequence is synthesized)
ctccgggatggacgtggggcccagctccctgccccaccttgggctgaagctgctgctgctcctgctgctgctgcccctcaggggccaagccaacacaggctgctacgggatcccagggat

SEQ ID NO: 470051 - DNA, 120 bp, Artificial Sequence
  ENSG00000159189_3 (sequence is synthesized)
gcccggcctgcccggggcaccagggaaggatgggtacgacggactgccggggcccaagggggagccaggaatcccagccattcccgggatccgaggacccaaagggcagaagggagaacc

SEQ ID NO: 470052 - DNA, 120 bp, Artificial Sequence
  ENSG00000159189_4 (sequence is synthesized)
cggccatcctgggaaaaatggccccatgggaccccctgggatgccaggggtgcccggccccatgggcatccctggagagccaggtgaggagggcagatacaagcagaaattccagtcagt

SEQ ID NO: 470053 - DNA, 120 bp, Artificial Sequence
  ENSG00000159189_5 (sequence is synthesized)
gttcacggtcactcggcagacccaccagccccctgcacccaacagcctgatcagattcaacgcggtcctcaccaacccgcagggagattatgacacgagcactggcaagttcacctgcaa

SEQ ID NO: 470054 - DNA, 120 bp, Artificial Sequence
  ENSG00000159189_6 (sequence is synthesized)
agtccccggcctctactactttgtctaccacgcgtcgcatacagccaacctgtgcgtgctgctgtaccgcagcggcgtcaaagtggtcaccttctgtggccacacgtccaaaaccaatca

SEQ ID NO: 470055 - DNA, 120 bp, Artificial Sequence
  ENSG00000159189_7 (sequence is synthesized)
ggtcaactcgggcggtgtgctgctgaggttgcaggtgggcgaggaggtgtggctggctgtcaatgactactacgacatggtgggcatccagggctctgacagcgtcttctccggcttcct

SEQ ID NO: 470056 - DNA, 120 bp, Artificial Sequence
  ENSG00000159189_8 (sequence is synthesized)
gctcttccccgactagggcgggcagatgcgctcgagccccacgggccttccacctccctcagcttcctgcatggacccaccttactggccagtctgcatccttgcctagaccattctccc

SEQ ID NO: 470057 - DNA, 120 bp, Artificial Sequence
  ENSG00000159189_9 (sequence is synthesized)
cttgtgtggttcctgggacacttaaccaatgccttctggtactgccattcttttttttttttttttcaagtattggaaggggtggggagatatataaataaatcatgaaatcaatacata

SEQ ID NO: 470058 - DNA, 120 bp, Artificial Sequence
  ENSG00000159197_0 (sequence is synthesized)
gtaaggtgaaggtgcccagcaggctgaggcttgtgtgcaacccagaagagagctcgctaacgccagcaagaaggttcagaacagcctggctttggaaaggaatttcatcctgcccacaca

SEQ ID NO: 470059 - DNA, 120 bp, Artificial Sequence
  ENSG00000159197_1 (sequence is synthesized)
ctgcatagcaggagggaagcatgtctactttatccaatttcacacagacgctggaagacgtcttccgaaggatttttattacttatatggacaattggcgccagaacacaacagctgagc

SEQ ID NO: 470060 - DNA, 120 bp, Artificial Sequence
  ENSG00000159197_2 (sequence is synthesized)
aagaggccctccaagccaaagttgatgctgagaacttctactatgtcatcctgtacctcatggtgatgattggaatgttctctttcatcatcgtggccatcctggtgagcactgtgaaat

SEQ ID NO: 470061 - DNA, 120 bp, Artificial Sequence
  ENSG00000159197_3 (sequence is synthesized)
ccaagagacgggaacactccaatgacccctaccaccagtacattgtagaggactggcaggaaaagtacaagagccaaatcttgaatctagaagaatcgaaggccaccatccatgagaaca

SEQ ID NO: 470062 - DNA, 120 bp, Artificial Sequence
  ENSG00000159197_4 (sequence is synthesized)
acgaggcaaatccaaattgtctttgcttagaagaaagtgagttccttgctctctgttgagaattttcatggagattatgtggttggccaataaagatagatgacatttcaatctcagtga

SEQ ID NO: 470063 - DNA, 120 bp, Artificial Sequence
  ENSG00000159197_5 (sequence is synthesized)
tttatgcttgcttgttggagcaatattttgtgctgaagacctcttttactttccgggcaagtgaatgtcattttaatcaatatcaatgatgaaaataaagccaaatttgaagtaaagtgt

SEQ ID NO: 470064 - DNA, 120 bp, Artificial Sequence
  ENSG00000159197_6 (sequence is synthesized)
ctgggcagtggctgtggggatagaaaggagagatttacaaatcattgaatcttctttctcatgaaacatcatttgtgtgtgacaaattcaatttataaataacccagatgtattatgtag

SEQ ID NO: 470065 - DNA, 120 bp, Artificial Sequence
  ENSG00000159197_7 (sequence is synthesized)
aagctgaggctcaaaagctatcacttgcttaccagacggacataggagcatttatctgtaatattaattcatgagtgtggagtctgaagagatgaataaacaaaccataagattacttta

SEQ ID NO: 470066 - DNA, 120 bp, Artificial Sequence
  ENSG00000159199_0 (sequence is synthesized)
ccaatgagaatggagaaggtccaggacacgtgggtgggggaagctgagcgctgagaccaagggctaaagctgggagactgaaaaaatgcagaccgccggggcattattcatttctccagc

SEQ ID NO: 470067 - DNA, 120 bp, Artificial Sequence
  ENSG00000159199_1 (sequence is synthesized)
tctgatccgctgttgtaccaggggtctaatcaggcctgtgtctgcctccttcttgaatagcccagtgaattcatctaaacagccttcctacagcaacttcccactccaggtggccagacg

SEQ ID NO: 470068 - DNA, 120 bp, Artificial Sequence
  ENSG00000159199_2 (sequence is synthesized)
agcttgatcattggctatgccaggaacccgtctctcaagcagcagctcttctcctatgccattcttggctttgccctgtctgaggccatggggcttttctgtttgatggtcgccttcctc

SEQ ID NO: 470069 - DNA, 120 bp, Artificial Sequence
  ENSG00000159199_3 (sequence is synthesized)
atcctcttcgccatgtgaggctccatgggggggtcaccggcctgttgctactgcaactccacaccattcttggtgctggggtgtgttaagctttaccattaaacacaacgtttctctaaa

SEQ ID NO: 470070 - DNA, 120 bp, Artificial Sequence
  ENSG00000159199_4 (sequence is synthesized)
aggacacgtgggtgggggaagctgagcgctgagaccaagggctaaagctgggaggtgagtctgtcaccttgagccgggcgagcgctgtgggccaagcaggggttgcagggtagtaggagt

SEQ ID NO: 470071 - DNA, 120 bp, Artificial Sequence
  ENSG00000159199_5 (sequence is synthesized)
gtgaaggttgccactgctgactatatcaagctattgagacagctgtctctggggcaggcctatctgataggaacaggaataaattgaccttgaaatacattgaacttattctgtttatga

SEQ ID NO: 470072 - DNA, 120 bp, Artificial Sequence
  ENSG00000159199_6 (sequence is synthesized)
gagaccaagggctaaagctgggagactgaaaaaatgcagaccgccggggcattattcatttctccagctctgccttcctacagcaacttcccactccaggtggccagacgggagttccag

SEQ ID NO: 470073 - DNA, 120 bp, Artificial Sequence
  ENSG00000159199_7 (sequence is synthesized)
cttgagccgggcgagcgctgtgggccaagcaggggttgcagggtagtaggagtgcaggtgacttggggccgggagccagcaataggcagggttgtgggctgggcagtgtggaggggtatt

SEQ ID NO: 470074 - DNA, 120 bp, Artificial Sequence
  ENSG00000159199_8 (sequence is synthesized)
tccccccagtgctgggagaggctatggcaatctagatatggccttatcaatgaatgttaattaccaacggtaatgaacgattgactgcctcggctggggcgggtcggggactgctgtgta

SEQ ID NO: 470075 - DNA, 120 bp, Artificial Sequence
  ENSG00000159199_9 (sequence is synthesized)
cggacgggggtgaaggggacgaccaaaggtcgtcattataagcaaacaaccagggtctcagtgggattattattactattttttccccctctgcagactgaaaaaatgcagaccgccggg

SEQ ID NO: 470076 - DNA, 120 bp, Artificial Sequence
  ENSG00000159199_10 (sequence is synthesized)
tggtaaggtgccgcgccgcagtgctctgtagtaccaggtgtatggtgtggacgccatcagtgtttaatgaatgaacccaggggagcttggcgtcctgatgatgtaggctctttgaggtgg

SEQ ID NO: 470077 - DNA, 120 bp, Artificial Sequence
  ENSG00000159199_11 (sequence is synthesized)
ctgtaggatgtgatgaaggtaacccctgtttatctgggcctgtgaaccaagctatcttggctttggaatgtggtcagagagtctggatttgatttttatccccagtctgtcctggccata

SEQ ID NO: 470078 - DNA, 120 bp, Artificial Sequence
  ENSG00000159199_12 (sequence is synthesized)
gagacagcccactaaaacagtggttttcaacagtggctgcacgttagaatcatccagggaactttttaaaatcctgatgcctaggctgcaccttagaccatttgcatcagactttgggaa

SEQ ID NO: 470079 - DNA, 120 bp, Artificial Sequence
  ENSG00000159199_13 (sequence is synthesized)
tgggggtggaacccaggcatctgtatcttttaagacttctccagatgattccaccgtgcagccaagtttgagaaccactgcactaaaaattatttcaaaaaagccatgttacagatggct

SEQ ID NO: 470080 - DNA, 120 bp, Artificial Sequence
  ENSG00000159199_14 (sequence is synthesized)
ctccttggatggctattccagtcggtttccggggctgactggcccactccatttagggtgtgtagctgtgagtgtattttagcagaataaaatttcccccatctgattacttggtgatct

SEQ ID NO: 470081 - DNA, 88 bp, Artificial Sequence
  ENSG00000159199_15 (sequence is synthesized)
ccagtgaattcatctaaacaggtaagggaggaatagctctcttaggaatgttcccaaggcccaggaagaggctgaggcgagaggatca

SEQ ID NO: 470082 - DNA, 120 bp, Artificial Sequence
  ENSG00000159199_16 (sequence is synthesized)
gaaaccccatctctacaaaaaaaataaaaaaattagccatgtgtggtggcatgtggctgtagtcccagttactccagggctgagatgagaggattggttaatcccagaggtcgagactgc

SEQ ID NO: 470083 - DNA, 120 bp, Artificial Sequence
  ENSG00000159199_17 (sequence is synthesized)
ccagactgggtgacagagcaagaccctgactcataaaaacccattaattaattttttttaaatcaaggaatgttcccagacaggggtccttcagcttaagttgcctttagaccaaagtgg

SEQ ID NO: 470084 - DNA, 120 bp, Artificial Sequence
  ENSG00000159199_18 (sequence is synthesized)
ttgcctttagaccaaagtgggaggagagttggagaatctgtatgctttaatagttctaagtcccccaaggtaagccttgtaggtaagaaacttataaaagtgaggtgtgcctaacccatg

SEQ ID NO: 470085 - DNA, 120 bp, Artificial Sequence
  ENSG00000159199_19 (sequence is synthesized)
aaatttccctagtcctgtctgctgtctgacaacagactctaagactaattcccagcatactctgcaatcagagtattctgcatttaccaggcagtttgccaacagtttcagagctcaggt

SEQ ID NO: 470086 - DNA, 120 bp, Artificial Sequence
  ENSG00000159199_20 (sequence is synthesized)
gggtggggtgaaggaggtagagtcagccacctgtccttatgccatactatctctctgctatctcgcctgccttgcttctctttctagccttcctacagcaacttcccactccaggtggcc

SEQ ID NO: 470087 - DNA, 120 bp, Artificial Sequence
  ENSG00000159200_0 (sequence is synthesized)
tgtctgcctgcaagcatgcaggacttgactcaggaatttgctgtccaaacaggatgctgtggaagctgcactttttttttccccagggagtgggggctggcccttactgctttataagca

SEQ ID NO: 470088 - DNA, 120 bp, Artificial Sequence
  ENSG00000159200_1 (sequence is synthesized)
ccagctcaagaaggaacctacagcctcttggaaaggaatctcactaggggcttgactgcgtgggtctgtagcgctttcactgtaagaaagcaagatgcattttagaaactttaactacag

SEQ ID NO: 470089 - DNA, 120 bp, Artificial Sequence
  ENSG00000159200_2 (sequence is synthesized)
ttttagctccctgattgcctgtgtggcaaacagtgatatcttcagcgaaagtgaaaccagggccaaatttgagtccctctttaggacgtatgacaaggacatcacctttcagtattttaa

SEQ ID NO: 470090 - DNA, 120 bp, Artificial Sequence
  ENSG00000159200_3 (sequence is synthesized)
gagcttcaaacgagtcagaataaacttcagcaaccccttctccgcagcagatgccaggctccagctgcataagactgagtttctgggaaaggaaatgaagttatattttgctcagacctt

SEQ ID NO: 470091 - DNA, 120 bp, Artificial Sequence
  ENSG00000159200_4 (sequence is synthesized)
acacataggaagctcacacctggctccgccaaatccagacaagcagtttctgatctcccctcccgcctctccgccagtgggatggaaacaagtggaagatgcgaccccagtcataaacta

SEQ ID NO: 470092 - DNA, 120 bp, Artificial Sequence
  ENSG00000159200_5 (sequence is synthesized)
tgatctcttatatgccatctccaagctggggccaggggaaaagtatgaattgcacgcagcgactgacaccactcccagcgtggtggtccatgtatgtgagagtgatcaagagaaggagga

SEQ ID NO: 470093 - DNA, 120 bp, Artificial Sequence
  ENSG00000159200_6 (sequence is synthesized)
agaagaggaaatggaaagaatgaggagacctaagccaaaaattatccagaccaggaggccggagtacacgccgatccacctcagctgaactggcacgcgacgaggacgcattccaaatca

SEQ ID NO: 470094 - DNA, 120 bp, Artificial Sequence
  ENSG00000159200_7 (sequence is synthesized)
tactcacgggaggaatcttttactgtggaggtggctggtcacgacttcttcggaggtggcagccgagatcggggtggcagaaatcccagttcatgttgctcagaagagaatcaaggccgt

SEQ ID NO: 470095 - DNA, 120 bp, Artificial Sequence
  ENSG00000159200_8 (sequence is synthesized)
gtccccttgttctaatgctgcacaccagttactgttcatggcacccgggaatgacttgggccaatcactgagtttgtggtgatcgcacaaggacatttgggactgtcttgagaaaacaga

SEQ ID NO: 470096 - DNA, 120 bp, Artificial Sequence
  ENSG00000159200_9 (sequence is synthesized)
taatgatagtgttttgtacttgttcttttctggtaggttctgtctgtgccaagggcaggttgatcagtgagctcaggagagagcttcctgtttctaagtggcctgcaggggccactctct

SEQ ID NO: 470097 - DNA, 120 bp, Artificial Sequence
  ENSG00000159200_10 (sequence is synthesized)
gaagaggtaccacaggaagccgcctagtgcagagaggttgtgaaaacagcagcaatgcaatgtggaaattgtagcgtttcctttcttccctcatgttctcatgtttgtgcatgtatatta

SEQ ID NO: 470098 - DNA, 120 bp, Artificial Sequence
  ENSG00000159200_11 (sequence is synthesized)
ctgatttacaagactaacctttgttcgtatataaagttacaccgttgttgttttacatcttttgggaagccaggaaagcgtttggaaaacgtatcacctttcccagattctcggattctc

SEQ ID NO: 470099 - DNA, 120 bp, Artificial Sequence
  ENSG00000159200_12 (sequence is synthesized)
gactctttgcaacagcacttgcttgcggaactcttcctggaatgcattcactcagcatccccaaccgtgcaacgtgtaacttgtgcttttgcaaaagaagttgatctgaaattcctctgt

SEQ ID NO: 470100 - DNA, 120 bp, Artificial Sequence
  ENSG00000159200_13 (sequence is synthesized)
agaatttagcttatacaattcagagaatagcagtttcactgccaacttttagtgggtgagaaattttagtttaggtgtttgggatcggacctcagtttctgttgtttcttttatgtggtg

SEQ ID NO: 470101 - DNA, 120 bp, Artificial Sequence
  ENSG00000159200_14 (sequence is synthesized)
gtttctatacatgaatcatagccaaaaacttttttggaaactgttggttgagatagttggttcttttaccccacgaagacatcaagatacacttgtaaataaagctgatagcatatattc

SEQ ID NO: 470102 - DNA, 120 bp, Artificial Sequence
  ENSG00000159200_15 (sequence is synthesized)
atacctgttgtacacttgggtgaaaagtatggcagtgggagactaagatgtattaacctacctgtgaatcatatgttgtaggaaaagctgttcccatgtctaacaggacttgaattcaaa

SEQ ID NO: 470103 - DNA, 120 bp, Artificial Sequence
  ENSG00000159200_16 (sequence is synthesized)
gcatgtcaagtggatagtagatctgtggcgatatgagagggatgcagtgcctttccccattcattcctgatggaattgttatactaggttaacatttgtaatttttttctagttgtaatg

SEQ ID NO: 470104 - DNA, 120 bp, Artificial Sequence
  ENSG00000159200_17 (sequence is synthesized)
tgtatgtctggtaaataggtattatattttggccttacaataccgtaacaatgtttgtcattttgaaatacttaatgccaagtaacaatgcatgctttggaaatttggaagatggtttta

SEQ ID NO: 470105 - DNA, 120 bp, Artificial Sequence
  ENSG00000159200_18 (sequence is synthesized)
ttctttgagaagcaaatatgtttgcattaaatgctttgattgttcatatcaagaaattgattgaacgttctcaaaccctgtttacggtacttggtaagagggagccggtttgggagagac

SEQ ID NO: 470106 - DNA, 120 bp, Artificial Sequence
  ENSG00000159200_19 (sequence is synthesized)
cattgcatcgctgtccaagtgtttcttgttaagtgcttttaaactggagaggctaacctcaaaatattttttttaactgcattctataataaatgggcacagtatgctccttacagaaaa

SEQ ID NO: 470107 - DNA, 120 bp, Artificial Sequence
  ENSG00000159200_20 (sequence is synthesized)
atgatttgtgcatcctcttttgctcgcttaggcaaattctggatttgtgttagagtggtcagaaatgccaagaacctgacttcttagattaaaagacaaaattgttggggggagaaaggt

SEQ ID NO: 470108 - DNA, 120 bp, Artificial Sequence
  ENSG00000159200_21 (sequence is synthesized)
tttttaatggtctgaacattttctcagttcagagcctgagatctgcatgagctcaccattgctctcgttaagtaatgttcactggctcaccgtggaaacttgaaggcatgtcagtgtacc

SEQ ID NO: 470109 - DNA, 120 bp, Artificial Sequence
  ENSG00000159200_22 (sequence is synthesized)
tgaaccgtgcctttttcaggactaactcaaagaccttcaggaagaaatatttgggtacagccatccgggaccacagaatcacagggcaggaatgtgaatgttgatgctggcgattgtgag

SEQ ID NO: 470110 - DNA, 120 bp, Artificial Sequence
  ENSG00000159200_23 (sequence is synthesized)
ccgccagtgggatggaaacaagtggaagatgcgaccccagtcataaactatgatctcttatatgccatctccaagctggggccagatgattggctagagggtgcggcacaaaggaacttg

SEQ ID NO: 470111 - DNA, 120 bp, Artificial Sequence
  ENSG00000159200_24 (sequence is synthesized)
cagtcatggtaacagctgtatacatctgttgaaaactcatcaaacttatcatatttagaaagggtacattttgcttcatgtaaagtatgcctcaataaagtgtacttgattttaaaatca

SEQ ID NO: 470112 - DNA, 80 bp, Artificial Sequence
  ENSG00000159200_25 (sequence is synthesized)
gcaagcccggagcagcccgctggggcgcacagggtcgcgcgggcgcggggatggaggacggcgtggccggtccccagctc

SEQ ID NO: 470113 - DNA, 120 bp, Artificial Sequence
  ENSG00000159200_26 (sequence is synthesized)
ggaggcggccgaggcgcgagcgcggcccggggtgacgctgcggcccttcgcgcccctctcgggggcggccgaggcggacgagggcggcggcgactggagcttcattgactgcgagatgga

SEQ ID NO: 470114 - DNA, 120 bp, Artificial Sequence
  ENSG00000159200_27 (sequence is synthesized)
ggcgactggagcttcattgactgcgagatggaggaggtggacctgcaggacctgcccagcgccaccatcgcctgtcacctggacccgcgcgtgttcgtggacggcctgtgccgggccaaa

SEQ ID NO: 470115 - DNA, 120 bp, Artificial Sequence
  ENSG00000159200_28 (sequence is synthesized)
ccccctgcgctctcgccatcgccccgcatttactcgctggaggagggggtcacctcattcctagggaggaggaaacagacattgagcggcgacgtgactcagtgttcataaataggacga

SEQ ID NO: 470116 - DNA, 120 bp, Artificial Sequence
  ENSG00000159200_29 (sequence is synthesized)
cagcagagaaacaggagtctgcagaagatgcctgcaaatcagcccaggactgccaggtctggcttgaaaggaaaataggggataaccagactgggcgcagatgctaagaaaccctctggt

SEQ ID NO: 470117 - DNA, 120 bp, Artificial Sequence
  ENSG00000159200_30 (sequence is synthesized)
tggcagggttcccagccccagggcacccacggcagggagaggggtagctggggttgggcttgccttttctcctgcccactaccattttgaccctcctctggggaacttaggacaggtgac

SEQ ID NO: 470118 - DNA, 120 bp, Artificial Sequence
  ENSG00000159200_31 (sequence is synthesized)
ccaccttcaaggcagctcccagagttccatttgatgtccttaggggctgacagattgtcagggaagaagagaggagcttctagaatgcagccagctcctcagtaaagcaagtccccctca

SEQ ID NO: 470119 - DNA, 120 bp, Artificial Sequence
  ENSG00000159200_32 (sequence is synthesized)
ggctctgagcacccccccaacccgcccccaccacacacacacatacacacataccttgctgggatgggagaggaccctgtccaaaggcctcccccagtgggaggaagctcatctgacacc

SEQ ID NO: 470120 - DNA, 120 bp, Artificial Sequence
  ENSG00000159200_33 (sequence is synthesized)
acgccagagagccaaagtgtcttttcttcctcaaagtgaggacagcgaacttgctgggcccttcaagtataaataaagcatttgggatccccgccccacccctgacctttttgccctggg

SEQ ID NO: 470121 - DNA, 120 bp, Artificial Sequence
  ENSG00000159200_34 (sequence is synthesized)
aggcacaggctgagctttgaccttgggtgcctaggccttcctgtgtgagtacactcctttctgcacgggataagattttatgcaaataattacttagtactcctctgaccttttctgttt

SEQ ID NO: 470122 - DNA, 120 bp, Artificial Sequence
  ENSG00000159200_35 (sequence is synthesized)
gtaaaacaatgcatattcattgtgaaaacttggggagggcaatctggaagtgcagagaaaacctacaccgcgcagcttgagatgtaagagctctatggacagccctctcatcactggtca

SEQ ID NO: 470123 - DNA, 120 bp, Artificial Sequence
  ENSG00000159200_36 (sequence is synthesized)
gcatttctaaaaccaaactaggatcgtaggttattgttccttattcttatttcttaaagtctcctgggaagtggcttttttttttttttctggcatctgatccagagtcccggagaggga

SEQ ID NO: 470124 - DNA, 120 bp, Artificial Sequence
  ENSG00000159200_37 (sequence is synthesized)
agctgctgctgggtggggaaccctaggggcaggtggagccctggctccctgtccctgagaagctgtgtcctctcagaactgtggcctaggctttggactttcagagcttgcctctgtggt

SEQ ID NO: 470125 - DNA, 120 bp, Artificial Sequence
  ENSG00000159200_38 (sequence is synthesized)
atgaggagcggggagagactgattccaagagccctcctgacctcaatgacagtgacttaaatttccatatatactaaagtcacctctgctgattttctgtccatctaggtcaagcgtaat

SEQ ID NO: 470126 - DNA, 120 bp, Artificial Sequence
  ENSG00000159200_39 (sequence is synthesized)
tatttgcagtccctgtgcctgtgactcccatagccctgggagggggctgtcatcctatctgtgccacaaccagagttcatatgtccttttgccctccccattacagaccatcttacaatt

SEQ ID NO: 470127 - DNA, 120 bp, Artificial Sequence
  ENSG00000159200_40 (sequence is synthesized)
ggtcctggaatcacacctgtcctgacgcctggacattgacctgcccatctcccggaactggcgttaggtgctgttgcctcactgcagttcttccctggcaacaactgacctgtgcttatt

SEQ ID NO: 470128 - DNA, 120 bp, Artificial Sequence
  ENSG00000159200_41 (sequence is synthesized)
taccaccactacccccgtagctctcctgagcccatgccggcatgttttgtgagcttctctgtattcttctgcgccaccgtcccttgtgctgggagcatgcctgcctcttggcaccacctg

SEQ ID NO: 470129 - DNA, 120 bp, Artificial Sequence
  ENSG00000159200_42 (sequence is synthesized)
cagtgttagagagactgcggctgatcgtggggaccctgcatcacgcccctccaccccccgcagtgtcccaggaatccattcctgtgtccactgagcacagcctgcgtgggaggcctgagc

SEQ ID NO: 470130 - DNA, 120 bp, Artificial Sequence
  ENSG00000159200_43 (sequence is synthesized)
cccggccccaggttctgtcgctccggatagggatgagtgattggactttggaaagggaaaatcgatgccccctttaagaaatgttatttttaatcaaaataaattctccctttcctgtga

SEQ ID NO: 470131 - DNA, 120 bp, Artificial Sequence
  ENSG00000159200_44 (sequence is synthesized)
gaatcataacttcaaaactaaacagtgggtcacagtgcctattgatgaggtcatacaaaattccaaatgtacgaagacacacttttgccagaaacttgcccgtgctcaagagaggtgggg

SEQ ID NO: 470132 - DNA, 120 bp, Artificial Sequence
  ENSG00000159200_45 (sequence is synthesized)
aaaaagagtgagaggcggccagatgaactctaccgtccgccagctccgcgttccttcgcacgtgcctctgcgggatccctcgtgggaaagtctcagaaatgtccctaaactgaagaaaag

SEQ ID NO: 470133 - DNA, 120 bp, Artificial Sequence
  ENSG00000159200_46 (sequence is synthesized)
ccggggaatgcaaggagagcaaggtcgtaggttgttccgactgctccttaacgacctgcctggcagggaccgactaccctgctcctacccgcagccccatgtggagcaggcatccaccag

SEQ ID NO: 470134 - DNA, 120 bp, Artificial Sequence
  ENSG00000159200_47 (sequence is synthesized)
tgcctccccgcgcttgctagcagtgaacattcctgaagacactctcctctcttatcctgaatcctcgctcccactgcagagacactgcgccttccataggttctccaaggccaaatttga

SEQ ID NO: 470135 - DNA, 120 bp, Artificial Sequence
  ENSG00000159200_48 (sequence is synthesized)
attttagagagttaaaaagtaacagactgagataaaagcgatcgtggaaatttttaaaaactacttattttaagaaatgcaaaactttctaccaactttgttatttttcaagccaaattt

SEQ ID NO: 470136 - DNA, 120 bp, Artificial Sequence
  ENSG00000159200_49 (sequence is synthesized)
tttgttaccgtaagtagtgtctatgtattggcaactgttctgctgattcgatgaatgtaataaatcataccttcttaccttcttgtaaaatcacctgcattgggactaaaggccatagtc

SEQ ID NO: 470137 - DNA, 120 bp, Artificial Sequence
  ENSG00000159200_50 (sequence is synthesized)
agtcccctaagaggggaaaggcttttctctaagaaagaagttaggagttcttgaaaggattgatgatccacttcctcagtaaaaaatgtattgaggaggccaggcacggtggctcatgcc

SEQ ID NO: 470138 - DNA, 62 bp, Artificial Sequence
  ENSG00000159200_51 (sequence is synthesized)
tattgtcacctgaggacaggagcttgagaccagccttgccaacatggcaaagccccgtctct

SEQ ID NO: 470139 - DNA, 120 bp, Artificial Sequence
  ENSG00000159200_52 (sequence is synthesized)
ctctgtctcgaagaaaaaaaaaaaagtaatgacatcatctagtcaagggtcatatgcaggtaaatttcaactccttttatttttattgttatttttcaggccaaatttgagtccctcttt

SEQ ID NO: 470140 - DNA, 120 bp, Artificial Sequence
  ENSG00000159200_53 (sequence is synthesized)
aaagaagtgctgtggtggccgcctacgtaattggattcattgtggagctctacttgaagttgcactcatctgaactcattcttgaacatataagccactgcccagaacaaacagggctct

SEQ ID NO: 470141 - DNA, 120 bp, Artificial Sequence
  ENSG00000159200_54 (sequence is synthesized)
tcttacagaaagactcctgcgctgtgaatcagtcacagattgtattaaacttcccaacactactcaatttgtcaggccaaatttgagtccctctttaggacgtatgacaaggacatcacc

SEQ ID NO: 470142 - DNA, 120 bp, Artificial Sequence
  ENSG00000159202_0 (sequence is synthesized)
actctggcccggttctcggtggtgcgggagcgggcgggagcagcggccgctctggtcggcggacgtgctgccgagtagtcccggaagcgaagcagcgatggcggagagtccgactgagga

SEQ ID NO: 470143 - DNA, 120 bp, Artificial Sequence
  ENSG00000159202_1 (sequence is synthesized)
actgaggaggcggcaacggcgggcgccggggcggcgggccccggggcgagcagcgttgctggtgttgttggcgttagcggcagcggcggcgggttcgggccgcctttcctgccggatgtg

SEQ ID NO: 470144 - DNA, 120 bp, Artificial Sequence
  ENSG00000159202_2 (sequence is synthesized)
ctggctccgctgcccgggctcccgccctcagccgctgcccacggggccgcgctgcttagccactgggaccccacgctcagctccgactgggacggcgagcgcaccgcgccgcagtgtcta

SEQ ID NO: 470145 - DNA, 120 bp, Artificial Sequence
  ENSG00000159202_3 (sequence is synthesized)
ctccgactgggacggcgagcgcaccgcgccgcagtgtctactccggatcaagcgggatatcatgtccatttataaggagcctcctccaggaatgttcgttgtacctgatactgttgacat

SEQ ID NO: 470146 - DNA, 120 bp, Artificial Sequence
  ENSG00000159202_4 (sequence is synthesized)
gactaagattcatgcattgatcacaggcccatttgacactccttatgaagggggtttcttcctgttcgtgtttcggtgtccgcccgactatcccatccacccacctcgggtcaaactgat

SEQ ID NO: 470147 - DNA, 120 bp, Artificial Sequence
  ENSG00000159202_5 (sequence is synthesized)
gacaacgggcaataacacagtgaggtttaaccccaacttctaccgcaatgggaaagtctgcttgagtattctaggtacatggactggacctgcctggagcccagcccagagcatctcctc

SEQ ID NO: 470148 - DNA, 120 bp, Artificial Sequence
  ENSG00000159202_6 (sequence is synthesized)
agtgctcatctctatccagtccctgatgactgagaacccctatcacaatgagcccggctttgaacaggagagacatccaggagacagcaaaaactataatgaatgtatccggcacgagac

SEQ ID NO: 470149 - DNA, 120 bp, Artificial Sequence
  ENSG00000159202_7 (sequence is synthesized)
catcagagttgcagtctgtgacatgatggaaggaaagtgtccctgtcctgaacccctacgaggggtgatggagaagtcctttctggagtattacgacttctacgaggtggcctgcaaaga

SEQ ID NO: 470150 - DNA, 120 bp, Artificial Sequence
  ENSG00000159202_8 (sequence is synthesized)
tcgcctgcaccttcaaggccaaactatgcaggacccttttggagagaagcggggccactttgactaccagtccctcttgatgcgcctgggactgatacgtcagaaagtgctggagaggct

SEQ ID NO: 470151 - DNA, 120 bp, Artificial Sequence
  ENSG00000159202_9 (sequence is synthesized)
ccataatgagaatgcagaaatggactctgatagcagttcatctgggacagagacagaccttcatgggagcctgagggtttagaccctgctcccatctccccttcccccactcaagagtcc

SEQ ID NO: 470152 - DNA, 120 bp, Artificial Sequence
  ENSG00000159202_10 (sequence is synthesized)
cagcagaatcccttccccccaccccagggatggagaggcactgtgtatctccctccagactcgaagtcatcctgcaagatggcaagaaccaagcaagctccgatcccagggtgtgggagt

SEQ ID NO: 470153 - DNA, 120 bp, Artificial Sequence
  ENSG00000159202_11 (sequence is synthesized)
gggggcctgttcccggtctgacctccttggcactggagcatctggggcttcgttcatccattcatcccgtatcaggggccaaggtacctttacaggagcacctagagcgagggcctttgg

SEQ ID NO: 470154 - DNA, 120 bp, Artificial Sequence
  ENSG00000159202_12 (sequence is synthesized)
agtgtgcccaaatgatttatggggatacctggaagggagcttggggtgggggctgtctgtgacacttaagcagtctgggtggttgtctatttgtctgtcttcagtcttgaagcagggctt

SEQ ID NO: 470155 - DNA, 120 bp, Artificial Sequence
  ENSG00000159202_13 (sequence is synthesized)
cccaatgcccttttcctccctgccttccttcccccattatttcccacaggccagcataattttgtttttcctaatttatagtcactgttctagacagaccaaagagaaggaacagtggtg

SEQ ID NO: 470156 - DNA, 120 bp, Artificial Sequence
  ENSG00000159202_14 (sequence is synthesized)
gagtctaggctgctgatcagtaagctttacctagcacctgagcacctttctcccctcccctctttcctcacccttttctagatgtaagacagaaagtaaatgtgactgggacttaaccaa

SEQ ID NO: 470157 - DNA, 120 bp, Artificial Sequence
  ENSG00000159202_15 (sequence is synthesized)
ggtcttggtaaagcctgcatggcaccgtaagaagctgaaaatactgtttgttcccgcaatcactgatttgaaaagttcccaacacaggcagctgctgtgtatatgggattagagccacta

SEQ ID NO: 470158 - DNA, 120 bp, Artificial Sequence
  ENSG00000159202_16 (sequence is synthesized)
catagaatagtctcttacagattttcataaatactagtcacaataagggtatttttcttgggggtggagtaagggggagactgatgctagtccttgttgtattttgttgggctgtccttg

SEQ ID NO: 470159 - DNA, 120 bp, Artificial Sequence
  ENSG00000159202_17 (sequence is synthesized)
tgtattttcaccccagcctgtagtcctcctcacttcaaccccagggatttttggggagcaagggtagccaatggcagagggggttggggctgggactctggaggctcctccccttctttc

SEQ ID NO: 470160 - DNA, 120 bp, Artificial Sequence
  ENSG00000159202_18 (sequence is synthesized)
tcttccttccgcctcccccgtgcccccagctgctcttgtcactgtctctgatgggtatttgcctggctttgttgcttctctatctgtatttagctgcagtgatcctttagctggttggct

SEQ ID NO: 470161 - DNA, 120 bp, Artificial Sequence
  ENSG00000159202_19 (sequence is synthesized)
cagaaaaaaaaaaatgtgctttaggtgccctgtaatcctgggcatcaagggaatccatccttcccctttttgatatgttctccccgtacttccagatttattgttatggctcccagtggg

SEQ ID NO: 470162 - DNA, 120 bp, Artificial Sequence
  ENSG00000159202_20 (sequence is synthesized)
tattggcgattcttgtgatgcagggcctcagtcagtgtccagccatgcataagggagaggatagtgtgtacctgccctgccctctgctatgaaggtctctgccttgtggatcatgggact

SEQ ID NO: 470163 - DNA, 120 bp, Artificial Sequence
  ENSG00000159202_21 (sequence is synthesized)
ccccttggaggatctgtgcaaaggggggctgggcacaaaggagaatgtcctatttgggagggcaggaagcaaaggaactggacagggattggtgggcttggggaacggaagtttatcttg

SEQ ID NO: 470164 - DNA, 120 bp, Artificial Sequence
  ENSG00000159202_22 (sequence is synthesized)
gatacccttgaagaggctgggtctcttcacatgaagatcgaaaagggaccctgcttccaatttccctcttccattcctcgagctactccagggcttagaagaatgctcttggtctgtggg

SEQ ID NO: 470165 - DNA, 120 bp, Artificial Sequence
  ENSG00000159202_23 (sequence is synthesized)
tccagtgttgtctgtcatccatttaagtgttcccactttcaagtgacaatcctctccttggccctgccatagggcagagcatgtctggcatagcagcctgacttttatgccctaatcttg

SEQ ID NO: 470166 - DNA, 120 bp, Artificial Sequence
  ENSG00000159202_24 (sequence is synthesized)
agttgaggaaatatatgcacaggagtcaaagagatgtctttatatctgactgtatataaatgaagtttttttgttttttttgttttcctttttggtgcaataaagtttgttttggcagaa

SEQ ID NO: 470167 - DNA, 120 bp, Artificial Sequence
  ENSG00000159202_25 (sequence is synthesized)
gctctttgagatccacggagattaacatttagacaactttggagctaattgcttacctaatttcttttgttttgattgtcgtaactgtttctagtacaaagaaaatcccttcaaagttac

SEQ ID NO: 470168 - DNA, 120 bp, Artificial Sequence
  ENSG00000159202_26 (sequence is synthesized)
atagcttgctattacctgttcttttgccccccccccttgatttgaggattaggcaattgactgatttctggtgaaatcagaacatgagcatgagacagaggctgggaaattccagagtat

SEQ ID NO: 470169 - DNA, 120 bp, Artificial Sequence
  ENSG00000159202_27 (sequence is synthesized)
taatagtgaaagagaaacttatggtgagtcacttatggtggtgttgccgggccccagggtacttgttccctattctttctctgcctcaccctccattccttctgatgtgtttacagtaca

SEQ ID NO: 470170 - DNA, 120 bp, Artificial Sequence
  ENSG00000159202_28 (sequence is synthesized)
aagcaccactttctcaaaccctggcctcattgaggtgataacaactgtcctgctcaagggattccccctttccccctcttcctcactccttcccccacctcctcttggtgttatacaggg

SEQ ID NO: 470171 - DNA, 120 bp, Artificial Sequence
  ENSG00000159202_29 (sequence is synthesized)
ctgctgctaattgcagaagccctacagctggccatgtaaaagccccccacaagcgtggcatcgacagctgtcatagaatgacacagctaagcctgggttcagtggctcatgcctgtaatc

SEQ ID NO: 470172 - DNA, 120 bp, Artificial Sequence
  ENSG00000159202_30 (sequence is synthesized)
aataaaggtccactgtatagtttatagaattagttttttagtggagttgatgatgcctttccagttactaaaaaatcttcatttagcattcagtcgtagtacctgggaatcatggaggtg

SEQ ID NO: 470173 - DNA, 120 bp, Artificial Sequence
  ENSG00000159202_31 (sequence is synthesized)
gggagtgaatgaattgccatgtgggaggaagtgagagtaagtggaaagtggcttttccaggctgacatttgatgccattgggatctctgatttttttcctctctccctcccctccccctg

SEQ ID NO: 470174 - DNA, 120 bp, Artificial Sequence
  ENSG00000159202_32 (sequence is synthesized)
ggataataaattatatggtcaccctatccattgtactacccagctcttcccccatcccgttactcttgacattaactatgctatggtactataaatcagatgtagggaaggttgggaata

SEQ ID NO: 470175 - DNA, 120 bp, Artificial Sequence
  ENSG00000159202_33 (sequence is synthesized)
gggcaagcttgactgaagtgtttgtggttaaaggactttgctcaggatcctgtccttactggttgcgtttaagtatcccttccaccccaaagactatacctctcttgtcctcctctcaga

SEQ ID NO: 470176 - DNA, 120 bp, Artificial Sequence
  ENSG00000159202_34 (sequence is synthesized)
gagaaagcttaatacataatgtcacatttctctggcatagatacctaggtttctctgtcactgaatgctctacccacagaagtgcagttgcacttaaactgatgttagaaagaaatcata

SEQ ID NO: 470177 - DNA, 120 bp, Artificial Sequence
  ENSG00000159202_35 (sequence is synthesized)
tttcctaaacctaatgctgtttaagtgaaacacatagttttcttacagtaaatttcttacagtaaaaattcagattttgtattgttggtgtatctttttttgttgttttgaatagatttc

SEQ ID NO: 470178 - DNA, 120 bp, Artificial Sequence
  ENSG00000159202_36 (sequence is synthesized)
ccttcatattttttttttatgtagttagaaatgtttttcctaggacatctcgtcctcagtcaagtaccagtgttaatagcctagtacctggggtcccagagttgatgccatgttgagacc

SEQ ID NO: 470179 - DNA, 120 bp, Artificial Sequence
  ENSG00000159202_37 (sequence is synthesized)
agttgagtttactattccaaatgactgagagccagaatatgacgtagggtcttgccaggagggcaaggtgggaactatagacttaggcattggattgccacgtccctttccttttgctgt

SEQ ID NO: 470180 - DNA, 120 bp, Artificial Sequence
  ENSG00000159202_38 (sequence is synthesized)
tcaaatgcttagcagacctaaatgcctaggagcctttgtggaagaagaaatataactgagtcagttcaggttttcctcccttcagggggggaaatcctgttgaagaattatggcttgagg

SEQ ID NO: 470181 - DNA, 120 bp, Artificial Sequence
  ENSG00000159202_39 (sequence is synthesized)
gggaagagaatttagtgtcgttttcaggacggctgattttttttttttttttttttttaaacagtattggggaaagttctgggactggtctaatggctctgagtggaccctgagtcttcc

SEQ ID NO: 470182 - DNA, 120 bp, Artificial Sequence
  ENSG00000159202_40 (sequence is synthesized)
ccattttcagtcatgatgtgctgcctgagccacatcctccacaataggtttgatcctctgcagaggaagcaagcagataccctaggcatccatcacaccccctaaccctgctgtgttact

SEQ ID NO: 470183 - DNA, 120 bp, Artificial Sequence
  ENSG00000159202_41 (sequence is synthesized)
ggcactgggctgtggcctccaatccctttcttcgtctcctttcatcatactttcccttcgtgccacataaatgtagggtggggttgcatcatatgcatgtttggcctgggcaaatccaaa

SEQ ID NO: 470184 - DNA, 120 bp, Artificial Sequence
  ENSG00000159202_42 (sequence is synthesized)
catatattcagtcaaaatctgtgtcgatttctcaaaattaaaaacgctagggttatattttatagataagcatattatatttttccacagtggtgttttatccattatatgtaacactga

SEQ ID NO: 470185 - DNA, 120 bp, Artificial Sequence
  ENSG00000159202_43 (sequence is synthesized)
tcagggaggtctgcacaaaaaaaaaaaatgctttaagagagttttaggggatactcaagagtgattttgactagattcagttttcgccttgggctctaactttagaagtaacccctgagt

SEQ ID NO: 470186 - DNA, 120 bp, Artificial Sequence
  ENSG00000159202_44 (sequence is synthesized)
aagatgtcattccactgtaatgagatttcttaaaattccaaacctacgtattagtatgagtgaatacaggatgttccttctgcatggtgaggatatagaacatgtgtaccagattatgga

SEQ ID NO: 470187 - DNA, 120 bp, Artificial Sequence
  ENSG00000159208_0 (sequence is synthesized)
agatagacccggagagacggcgaaggagctggaaaccgagccagggctgagccggctgacaacaggtaaggagattcggaggacaaagcgagctgttagggagtatttgggagtggattt

SEQ ID NO: 470188 - DNA, 120 bp, Artificial Sequence
  ENSG00000159208_1 (sequence is synthesized)
gggggctgaatgcagatcttggtattgggagggtttgcatcacgtggcaggtgcgagcccagagagaccggcgcagggatcctgatcttgaaagattgggagagggcaggaggccagtct

SEQ ID NO: 470189 - DNA, 120 bp, Artificial Sequence
  ENSG00000159208_2 (sequence is synthesized)
ctatgggggcggttcccgtaggatcaccaggtgggttcgcgtgcccagattgactgcttgtgggtggcatggcctcaggtggagaggcttgctgcggactcaggctggcgaatagccctg

SEQ ID NO: 470190 - DNA, 120 bp, Artificial Sequence
  ENSG00000159208_3 (sequence is synthesized)
gcgaacaacgggcggaggggaaggtgtctttcaagtcggtatttactctgaactgagggaagaaaagaacggaggccgcgtcagaccgagagctgctctgcggcggccagagagggaatc

SEQ ID NO: 470191 - DNA, 120 bp, Artificial Sequence
  ENSG00000159208_4 (sequence is synthesized)
ccaagctcttaatgggcgggggtgggggtagaaatgtctttttctattgtgtttgagaccggtaatattggggagggggagaacaagtattatcccacgcagtacaccccaatctcccag

SEQ ID NO: 470192 - DNA, 120 bp, Artificial Sequence
  ENSG00000159208_5 (sequence is synthesized)
ttcatttcctaatccttaaactctggtttcaaactccctcgctttgctcttcagttgcaggttccgatctttgggtactccaggagctgttctatagcccctgcttctggacctatggat

SEQ ID NO: 470193 - DNA, 120 bp, Artificial Sequence
  ENSG00000159208_6 (sequence is synthesized)
tctccatctagcgtttcttcctattcctcctactctctctcttcgtcttttcccacctccccagtgaacagtgactttggcttcccctctgatagtgagagggaggacaagggggcccat

SEQ ID NO: 470194 - DNA, 120 bp, Artificial Sequence
  ENSG00000159208_7 (sequence is synthesized)
gggcccaggccagacactgttgggcagaggggaggttcacggcccagcccgggtcctatccgctgcaggcatcgatcgaaggtttccggtaaccagcatacaccatctcatccgaaacag

SEQ ID NO: 470195 - DNA, 120 bp, Artificial Sequence
  ENSG00000159208_8 (sequence is synthesized)
cagagggagacctgctgtttgcccagaagtgtaaagaactccaaggatttatacctcctctcacagacctactcaatgggctgaagatgggtcgttttgagagaggattaagcagttttc

SEQ ID NO: 470196 - DNA, 120 bp, Artificial Sequence
  ENSG00000159208_9 (sequence is synthesized)
agcagagtgtggcaatggacaggatccagcgtattgtaggtgttttgcagaagccacagatgggggaacgttacctaggaaccttgctacaggtagaagggatgttaaagacttggtttc

SEQ ID NO: 470197 - DNA, 120 bp, Artificial Sequence
  ENSG00000159208_10 (sequence is synthesized)
cacaaatagctgcccagaagtcatcattgggtggtggcaagcatcagctgaccaagcattttccaagccaccacagtgattcagctgcttcctctcctgcatctcctatggaaaagatgg

SEQ ID NO: 470198 - DNA, 120 bp, Artificial Sequence
  ENSG00000159208_11 (sequence is synthesized)
accagacacagctaggacatctagctttaaaaccaaagcagccttggcacctcacacaatggccagctatgaacctcacctggatccacaccactccaatttgcaacccccctctcagct

SEQ ID NO: 470199 - DNA, 120 bp, Artificial Sequence
  ENSG00000159208_12 (sequence is synthesized)
ccccaggtactatctcctttagccatggtcctttaggcactggaaccggcattggcgtcattcttttcctccagcatggagtgcaacccttcacccactctgccccaaccaccccagtcc

SEQ ID NO: 470200 - DNA, 120 bp, Artificial Sequence
  ENSG00000159208_13 (sequence is synthesized)
cacctactacagcatctcctgtcatccctggtgagcctatgaaactatctggagagggtcctcgttgctacagtttgccagtaactctgccatcagactggagctataccctatcccctc

SEQ ID NO: 470201 - DNA, 120 bp, Artificial Sequence
  ENSG00000159208_14 (sequence is synthesized)
ccagtctacccaccttggccagaaagatgaccataggacaccgggagcagcagagaagccatcctccagttgctgctgatgctcatcttctcaacctctagcccagggcatacagctgtc

SEQ ID NO: 470202 - DNA, 120 bp, Artificial Sequence
  ENSG00000159208_15 (sequence is synthesized)
cactgtgacttctaatttgtgtaaatatttatgtatatatgtatttttactattaatgtgtgcatttgtgttgagggaagataaatcctttctgattaaagaaatttttttatacctaaa

SEQ ID NO: 470203 - DNA, 120 bp, Artificial Sequence
  ENSG00000159208_16 (sequence is synthesized)
cggaggtgggtagatagacccggagagacggcgaaggagctggaaaccgagccagggctgagccggctgacaacagttgcaggttccgatctttgggtactccaggagctgttctatagc

SEQ ID NO: 470204 - DNA, 120 bp, Artificial Sequence
  ENSG00000159208_17 (sequence is synthesized)
cggaggtgggtagatagacccggagagacggcgaaggagctggaaaccgagccagggctgagccggctgacaacaggcatcgatcgaaggtttccggtaaccagcatacaccatctcatc

SEQ ID NO: 470205 - DNA, 120 bp, Artificial Sequence
  ENSG00000159208_18 (sequence is synthesized)
tcagctgaccaaggtaagaacttaagaacacgaggaagaggtgggaaaatagccaagaaaatgaaatgtgcatgcagaaatggccccttttgccattttcttttgagtcttttcttcaag

SEQ ID NO: 470206 - DNA, 120 bp, Artificial Sequence
  ENSG00000159208_19 (sequence is synthesized)
tggccccttttgccattttcttttgagtcttttcttcaagtttcttttcagggaaggaaattcctaaactttctgcattgtcttgattcctacatgttttgttgttgttgttgttgttgt

SEQ ID NO: 470207 - DNA, 120 bp, Artificial Sequence
  ENSG00000159208_20 (sequence is synthesized)
atcctatccctcatgccacagcttatctgctttctgcgtagatacaaaaggctttttacctggccaaatgattcatgcgggaatacacctcagcttctctctgcaaactcttttttccct

SEQ ID NO: 470208 - DNA, 120 bp, Artificial Sequence
  ENSG00000159208_21 (sequence is synthesized)
actgcccccaaacccttcccttctccttcttttcatttctgcccacgtatccttgtgccaaaccctttgacagtttttgagtctacactgggtttcaaggactggtcataagaggtacct

SEQ ID NO: 470209 - DNA, 120 bp, Artificial Sequence
  ENSG00000159208_22 (sequence is synthesized)
taagaggtacctcactggaagtaggggaggggggcaccaatagcagcagtgttgatagattcttagacctggtatagaagtgacctattttcagccgggagcggtggctcacacctgtaa

SEQ ID NO: 470210 - DNA, 120 bp, Artificial Sequence
  ENSG00000159208_23 (sequence is synthesized)
cggaggtgggtagatagacccggagagacggcgaaggagctggaaaccgagccagggctgagccggctgacaacagcggggttcggcttctcctatggcaggatctggggcgaaaagatc

SEQ ID NO: 470211 - DNA, 120 bp, Artificial Sequence
  ENSG00000159210_0 (sequence is synthesized)
gcggcggagtccgggacgtggagacccggggtcccggcagccgggcggcccgcgggcccagggtggggatgcaccgccgcggggtgggagctggcgccatcgccaagaagaaacttgcag

SEQ ID NO: 470212 - DNA, 120 bp, Artificial Sequence
  ENSG00000159210_1 (sequence is synthesized)
ggggtgggagctggcgccatcgccaagaagaaacttgcagaggccaagtataaggagcgagggacggtcttggctgaggaccagctagcccagatgtcaaagcagttggacatgttcaag

SEQ ID NO: 470213 - DNA, 120 bp, Artificial Sequence
  ENSG00000159210_2 (sequence is synthesized)
accaacctggaggaatttgccagcaaacacaagcaggagatccggaagaatcctgagttccgtgtgcagttccaggacatgtgtgcaaccattggcgtggatccgctggcctctggaaaa

SEQ ID NO: 470214 - DNA, 120 bp, Artificial Sequence
  ENSG00000159210_3 (sequence is synthesized)
ggattttggtctgagatgctgggcgtgggggacttctattacgaactaggtgtccaaattatcgaagtgtgcctggcgctgaagcatcggaatggaggtctgataactttggaggaacta

SEQ ID NO: 470215 - DNA, 120 bp, Artificial Sequence
  ENSG00000159210_4 (sequence is synthesized)
catcaacaggtgttgaagggaaggggcaagttcgcccaggatgtcagtcaagatgacctgatcagagccatcaagaaactaaaggcacttggcactggcttcggcatcatccctgtgggc

SEQ ID NO: 470216 - DNA, 120 bp, Artificial Sequence
  ENSG00000159210_5 (sequence is synthesized)
ggcacttacctcattcagtctgttccagctgagctcaatatggatcacaccgtggtgctgcagctggcagagaagaatggctacgtgactgtcagtgagatcaaagccagtcttaaatgg

SEQ ID NO: 470217 - DNA, 120 bp, Artificial Sequence
  ENSG00000159210_6 (sequence is synthesized)
gagaccgagcgagcgcggcaagtgctggaacacctgctgaaggaagggttggcgtggctggacttacaggccccaggggaggcccactactggctgccagctctcttcactgacctctac

SEQ ID NO: 470218 - DNA, 120 bp, Artificial Sequence
  ENSG00000159210_7 (sequence is synthesized)
tcccaggagattacagctgaggaggccagagaagccctcccctgactgcatgtggaagggcacacagcagcaggcagggaggaggcggaggtggcaaataaacctgggcaattttgttta

SEQ ID NO: 470219 - DNA, 120 bp, Artificial Sequence
  ENSG00000159210_8 (sequence is synthesized)
aaaaatagaaaaaaagttccaagtttttctttcttccctcattcttttatttttgaaaagtgccttcacgttgcatttttattggaggaaaacctcgctcgttcagtaagcataatctga

SEQ ID NO: 470220 - DNA, 120 bp, Artificial Sequence
  ENSG00000159210_9 (sequence is synthesized)
ttaacacagagaacggcaagcacatataaaatgatttttgtaggtcatctgcaagttcatggaagagctgggcctagaatgtgggttgtttcctggcctgtctagtctttgtagctgtga

SEQ ID NO: 470221 - DNA, 120 bp, Artificial Sequence
  ENSG00000159210_10 (sequence is synthesized)
gacatagattacagcctatgctaattcaaaccttttaaataaaatgttccttatctcaaactagctggtcctaatggaccagtaaataatattcactttcagtctcttctggcttcctct

SEQ ID NO: 470222 - DNA, 120 bp, Artificial Sequence
  ENSG00000159210_11 (sequence is synthesized)
gtagaggctctaggttatgacagagttagctgtgagtatgaaggaaatagaagtcaatgtccaatcgtggctaaattggaggaaagaaaacaatggaatctgaggggaatcaaacaatag

SEQ ID NO: 470223 - DNA, 120 bp, Artificial Sequence
  ENSG00000159210_12 (sequence is synthesized)
ttagggaatgttctattttcttaaattccctactagctttctcaccctcctgtagtgattgccaggtccctctagcctcagtagtgggaaagggagtcatttactgaacacctaccctgt

SEQ ID NO: 470224 - DNA, 120 bp, Artificial Sequence
  ENSG00000159210_13 (sequence is synthesized)
gccattttacatacagctcacttaaatttcaccaagtaggcagccttcaacatcacaggtgattcaatcaaagtaatttgccaggggccgccagcttcagccgagctaaagctggtgcct

SEQ ID NO: 470225 - DNA, 120 bp, Artificial Sequence
  ENSG00000159210_14 (sequence is synthesized)
aggcctattaacccgagcccatgccttcatgtatcactgcatagtacagaatggcagcacatactgtgtgtagacatttttctacacacgtggtcagccaagagtaaaagcctctgcatc

SEQ ID NO: 470226 - DNA, 120 bp, Artificial Sequence
  ENSG00000159210_15 (sequence is synthesized)
agaaagcaagaatctcctatagcaagtagaagtggtgatgagggaagaggccagagttgtttaaggctcccaaagtccttatggtctaaaggctaagatcctaaaagtgctagtttagta

SEQ ID NO: 470227 - DNA, 120 bp, Artificial Sequence
  ENSG00000159210_16 (sequence is synthesized)
ctggaaatctgaaaactcaatggtttttccatactgagacccttcctttagcaggatatagcctgggcccatctcttcctctgcctatccttgtaggacatgctcactccaagctctgga

SEQ ID NO: 470228 - DNA, 120 bp, Artificial Sequence
  ENSG00000159210_17 (sequence is synthesized)
ctaaaggcacttggcactggcttcggcatcatccctgtgggcggcacttacctcattcagtctgttccagctgagctcaatatggatcacaccgtggtgctgcagctggcagaggtactg

SEQ ID NO: 470229 - DNA, 120 bp, Artificial Sequence
  ENSG00000159210_18 (sequence is synthesized)
gtgcaccttcgagtgtgtgtgtgtgcaagggacagtctgtgaggcaagtctggagcagttctcagctcgtgctccccattatgcaggtcttttgctgagactatccagtggatgaactac

SEQ ID NO: 470230 - DNA, 120 bp, Artificial Sequence
  ENSG00000159210_19 (sequence is synthesized)
tcaggcctgtgcttgttcagcagacatttattgagcagctacagtgcaaagcactgggccaggctgtggggcatataaagatgataaaattcctgctctcaaggagcttacagtctagtc

SEQ ID NO: 470231 - DNA, 120 bp, Artificial Sequence
  ENSG00000159210_20 (sequence is synthesized)
aggtagacagacatgcagacaactaactagatttctttgggtagccagactctttgatgtcttttgaaactactttatggattcttcaaaaacagattttaaaaaatcttgtttgccatg

SEQ ID NO: 470232 - DNA, 120 bp, Artificial Sequence
  ENSG00000159210_21 (sequence is synthesized)
cccccatccctcatcatgccttaagcatatgccatcttcccccaaatccccatcaggtatttagatgtgttcagttttattatttttgagatggagtttcactcgttgcctaggccagag

SEQ ID NO: 470233 - DNA, 120 bp, Artificial Sequence
  ENSG00000159210_22 (sequence is synthesized)
gctgaatatttaaataatggaggttattagcagtttatgattatcatcatttcttcccatcaattaattgtccagaatcttcccttgtcatgctctagagtgctttgcagaagtctaact

SEQ ID NO: 470234 - DNA, 65 bp, Artificial Sequence
  ENSG00000159210_23 (sequence is synthesized)
tcccttgtcatgctctagagtgctttgcagaagtctaactcagtatgttagtacaagggacccca

SEQ ID NO: 470235 - DNA, 120 bp, Artificial Sequence
  ENSG00000159210_24 (sequence is synthesized)
gatccacccacctcggcctcccaaaaagtgctaggattacaggcatgagctgccgtgcctggccggtaccccagttttaggattgaacccaccaacctacctctgtcatgctgaaagtca

SEQ ID NO: 470236 - DNA, 120 bp, Artificial Sequence
  ENSG00000159210_25 (sequence is synthesized)
ctctgtcatgctgaaagtcacttctctctctccccgctggaacctttaaacattttctgtgttctctcatgcttgacagcttttcctcctgtctgggtaagtctcttgttcctgggcaga

SEQ ID NO: 470237 - DNA, 120 bp, Artificial Sequence
  ENSG00000159210_26 (sequence is synthesized)
gggtggctaggtcctgtgaactggactctggacttctctgagagggagaaaaccgtaaaagattatcgtttccatcctgcagtctacaggcctctaaggacttgagagacatcttagctg

SEQ ID NO: 470238 - DNA, 120 bp, Artificial Sequence
  ENSG00000159210_27 (sequence is synthesized)
tttcatgcagttgaatccatggcaagtctccatggccaagggtaaatagaattacctgaacgattgtctctgttctccaaagatctttggccaggaaggtctagtccctagtcagtacag

SEQ ID NO: 470239 - DNA, 120 bp, Artificial Sequence
  ENSG00000159210_28 (sequence is synthesized)
aaaatagtagagaggtaggaagtaggccttttcccctgatgtctgatgtgtctggagtgattttctcattagtaactatagtcctgcactgtctctccgacgtatgggaatgccaactga

SEQ ID NO: 470240 - DNA, 120 bp, Artificial Sequence
  ENSG00000159210_29 (sequence is synthesized)
acttcatgccatgcagggaagacttcccatatgatagatgttttaatgcaggtttgaaagaaaagaagggatgtaaattaatcaataaccgagattttgtttttctgtcttgtagctgga

SEQ ID NO: 470241 - DNA, 120 bp, Artificial Sequence
  ENSG00000159210_30 (sequence is synthesized)
aatcccttggagtacagaaagaggtctttaaaattcagatggaactcttttctccctattcctcatgtctaggctagcttagaaatctgtatgatctccatatcatacaggaaaaaaaaa

SEQ ID NO: 470242 - DNA, 120 bp, Artificial Sequence
  ENSG00000159210_31 (sequence is synthesized)
ttttttatttttagtaaagataaggtcttgctgtgttgcccaggctggtctctaacccctgggctcaagcagtcttctcaatgtgggcatcccaaaagtgttgcgattatgggtatgagc

SEQ ID NO: 470243 - DNA, 120 bp, Artificial Sequence
  ENSG00000159210_32 (sequence is synthesized)
cattgcgcctggcagttgtgcagtcttctaaattttctgtcagtatcctgcccagggcagagctgaaactgtgttgttaggtctgattctgccaagggtcgttaagcaactcttccttac

SEQ ID NO: 470244 - DNA, 80 bp, Artificial Sequence
  ENSG00000159210_33 (sequence is synthesized)
tgggccagtatggctggctatttttagaaaacagaaaatatagatttaaaaaaggaaacaaaaaccattatttctcaatt

SEQ ID NO: 470245 - DNA, 120 bp, Artificial Sequence
  ENSG00000159210_34 (sequence is synthesized)
tagatttaaaaaaggaaacaaaaaccattatttctcaattaagagattacaactgctatatattttaatgtagttccttctaagcattttttcatgtattattttttaacaaacttgggg

SEQ ID NO: 470246 - DNA, 80 bp, Artificial Sequence
  ENSG00000159212_0 (sequence is synthesized)
atggccgaggccgcggagccggagggggttgccccgggtccccaggggccgccggaggtccccgcgcctctggctgagag

SEQ ID NO: 470247 - DNA, 80 bp, Artificial Sequence
  ENSG00000159212_1 (sequence is synthesized)
ccggaggggagcgagggcgcagaggaggcgccgaggggcgccgccgctgtgaaggaggcaggaggcggcgggccagacag

SEQ ID NO: 470248 - DNA, 120 bp, Artificial Sequence
  ENSG00000159212_2 (sequence is synthesized)
ggcgagactgaggccgaggagggagccccggagggtgccgaggtgccccaaggaggggaggagacaagcggcgcgcagcaggtggagggggcgagcccgggacgcggcgcgcagggcgag

SEQ ID NO: 470249 - DNA, 120 bp, Artificial Sequence
  ENSG00000159212_3 (sequence is synthesized)
ccccgcggggaggctcagagggagcccgaggactctgcggcccccgagaggcaggaggaggcggagcagaggcctgaggtcccggaaggtagcgcgtccggggaggcgggggacagcgta

SEQ ID NO: 470250 - DNA, 120 bp, Artificial Sequence
  ENSG00000159212_4 (sequence is synthesized)
gacgcggagggcccgctgggggacaacatagaagcggagggcccggcgggcgacagcgtagaggcggagggccgggtgggggacagcgtagacgcggaaggtccggcgggggacagcgta

SEQ ID NO: 470251 - DNA, 120 bp, Artificial Sequence
  ENSG00000159212_5 (sequence is synthesized)
gacgcggagggcccgctgggggacaacatacaagccgagggcccggcgggggacagcgtagacgcggagggccgggtgggggacagcgtagacgcggaaggtccggcgggggacagcgta

SEQ ID NO: 470252 - DNA, 120 bp, Artificial Sequence
  ENSG00000159212_6 (sequence is synthesized)
gacgcggagggccgggtgggggacagcgtagaggcgggggacccggcgggggacggcgtagaagcgggggtcccggcgggggacagcgtagaagccgaaggcccggcgggggacagcatg

SEQ ID NO: 470253 - DNA, 120 bp, Artificial Sequence
  ENSG00000159212_7 (sequence is synthesized)
gacgccgagggtccggcaggaagggcgcgccgggtctcgggtgagccgcagcaatcgggggacggcagcctctcgccccaggccgaggcaattgaggtcgcagccggggagagtgcgggg

SEQ ID NO: 470254 - DNA, 120 bp, Artificial Sequence
  ENSG00000159212_8 (sequence is synthesized)
cgcagccccggtgagctcgcctgggacgcagcggaggaggcggaggtcccgggggtaaaggggtccgaagaagcggcccccggggacgcaagggcagacgctggcgaggacagggtaggg

SEQ ID NO: 470255 - DNA, 120 bp, Artificial Sequence
  ENSG00000159212_9 (sequence is synthesized)
gatgggccacagcaggagccgggggaggacgaagagagacgagagcggagcccggaggggccaagggaggaggaagcagcggggggcgaagaggaatcccccgacagcagcccacatggg

SEQ ID NO: 470256 - DNA, 120 bp, Artificial Sequence
  ENSG00000159212_10 (sequence is synthesized)
gaggcctccaggggcgccgcggagcctgaggcccagctcagcaaccacctggccgaggagggccccgccgagggtagcggcgaggccgcgcgcgtgaacggccgccgggaggacggagag

SEQ ID NO: 470257 - DNA, 120 bp, Artificial Sequence
  ENSG00000159212_11 (sequence is synthesized)
gcgtccgagccccgggccctggggcaggagcacgacatcaccctcttcgtcaaggctggttatgatggtgagagtatcggaaattgcccgttttctcagcgtctctttatgattctctgg

SEQ ID NO: 470258 - DNA, 120 bp, Artificial Sequence
  ENSG00000159212_12 (sequence is synthesized)
ctgaaaggcgttatatttaatgtgaccacagtggacctgaaaaggaaacccgcagacctgcagaacctggctcccggaacaaaccctcctttcatgacttttgatggtgaagtcaagacg

SEQ ID NO: 470259 - DNA, 120 bp, Artificial Sequence
  ENSG00000159212_13 (sequence is synthesized)
gatgtgaataagatcgaggagttcttagaggagaaattagctcccccgaggtatcccaagctggggacccaacatcccgaatctaattccgcaggaaatgacgtgtttgccaaattctca

SEQ ID NO: 470260 - DNA, 120 bp, Artificial Sequence
  ENSG00000159212_14 (sequence is synthesized)
gcgtttataaaaaacacgaagaaggatgcaaatgagattcatgaaaagaacctgctgaaggccctgaggaagctggataattacttaaatagccctctgcctgatgaaatagatgcctac

SEQ ID NO: 470261 - DNA, 120 bp, Artificial Sequence
  ENSG00000159212_15 (sequence is synthesized)
ccatattattaagattgtggccaagaagtacagagattttgaatttccttctgaaatgactggcatctggagatacttgaataatgcttatgctagagatgagttcacaaatacgtgtcc

SEQ ID NO: 470262 - DNA, 120 bp, Artificial Sequence
  ENSG00000159212_16 (sequence is synthesized)
agctgatcaagagattgaacacgcatattcagatgttgcaaaaagaatgaaatgaagctgggctgttttctgtcttatttctcagttgagtgagcaaggatacgaaaacagtgtgtttga

SEQ ID NO: 470263 - DNA, 120 bp, Artificial Sequence
  ENSG00000159212_17 (sequence is synthesized)
aaacaaattaggtttgggttcaattccttcaatttttaaaaaactggtctctgagagttttttaaatcattgagagcctgtttttcttctctaaaacattagtttaattttcttcaaaat

SEQ ID NO: 470264 - DNA, 120 bp, Artificial Sequence
  ENSG00000159212_18 (sequence is synthesized)
gaaaatactgctttgtaattacaaaatgagacacacctatcttgatattttaaagcaatatcagagggtgtaaagaaggacattttaacaatcgccttcaattttactccacttaattac

SEQ ID NO: 470265 - DNA, 87 bp, Artificial Sequence
  ENSG00000159212_19 (sequence is synthesized)
cattttaacaatcgccttcaattttactccacttaattaccgaaaacttactggagaacatgttccaaatcttcagtatcttcacac

SEQ ID NO: 470266 - DNA, 120 bp, Artificial Sequence
  ENSG00000159212_20 (sequence is synthesized)
tcatatatggtattgcattattttattttaaagcactggtgaggggacctcttggtgattcctggatgatcatacacagaggacttacaccatacaaaaatattgggcaccgcagtgcca

SEQ ID NO: 470267 - DNA, 120 bp, Artificial Sequence
  ENSG00000159212_21 (sequence is synthesized)
gagaagatgcttgaggttagattttaaggagtggggaattgtgaagcccacagatgcgcacgcaatgaccagcaggaaccggaagccctgggtcacccccactctgcctcatttctgcct

SEQ ID NO: 470268 - DNA, 120 bp, Artificial Sequence
  ENSG00000159212_22 (sequence is synthesized)
ccaggatgccactgcctctgcttccaggaaaggcaagggggagggtgcttatccgtgtctctggttccagcttcctgtctttgctccctcccctctcttagagactgtgccttcagcagg

SEQ ID NO: 470269 - DNA, 120 bp, Artificial Sequence
  ENSG00000159212_23 (sequence is synthesized)
actcttaatatctgctgcaacttggagaacctccctgccctgaaatgtgaaccaagcacactttggttccttctccgggcggctctctctgagacccaaggctgcagtccctcagtgctg

SEQ ID NO: 470270 - DNA, 120 bp, Artificial Sequence
  ENSG00000159212_24 (sequence is synthesized)
gtggtatcgtgtggggatagcaatacttctctgcccttcattgtctcatctagacatcaagcagggaaaatccagggagattaaattcatggtgacaagtcctgggcagttctggtaaac

SEQ ID NO: 470271 - DNA, 120 bp, Artificial Sequence
  ENSG00000159212_25 (sequence is synthesized)
ggtccagttagggagggagtagaaactattgactcaaaagagtttctggctgatctgtggctttgcctccaccatccctaaccaacctctcatcacagctttgtgtgtgggctgagtgct

SEQ ID NO: 470272 - DNA, 120 bp, Artificial Sequence
  ENSG00000159212_26 (sequence is synthesized)
ggccttaaccctaggcgtggaagagaaaatgtgaggttgtttagatactcatcaggacctcacaggagctgagacttatcagccagaatgtgttcttcggacagtcgtacacatcttaca

SEQ ID NO: 470273 - DNA, 120 bp, Artificial Sequence
  ENSG00000159212_27 (sequence is synthesized)
gaaaaccctccttgtagagttggttgtggtatgtgtttgatgctataaagctcatttttaatgtgtacacctgctctagggacgattcgtttgaaagagagtaagatgcattaacagaaa

SEQ ID NO: 470274 - DNA, 120 bp, Artificial Sequence
  ENSG00000159212_28 (sequence is synthesized)
ctatcctgggattaggtgaaaaatgtctagcaaaagaaacaaagtctttaatagagtggcctctttcgctcttcgattatgactgctgcagttttaccccagcagtcagctgtctttgtc

SEQ ID NO: 470275 - DNA, 120 bp, Artificial Sequence
  ENSG00000159212_29 (sequence is synthesized)
aaccatacgtttttggagattgggtctagcacatgtcacccttgtccacgttgtttcacatctggttagggggcagattttaaaatgtagttttgtaatgttacatttaagcatgataaa

SEQ ID NO: 470276 - DNA, 120 bp, Artificial Sequence
  ENSG00000159212_30 (sequence is synthesized)
tgattagactaccagatgttactagtgctaactttgtattcttagacattaaaatgattgacataaactctttgtgccttgaaaatgaaacaaattataaaaatgtttaaatggaaccaa

SEQ ID NO: 470277 - DNA, 120 bp, Artificial Sequence
  ENSG00000159212_31 (sequence is synthesized)
gcgtccgagccccgggccctggggcaggagcacgacatcaccctcttcgtcaaggtaaaacttactgcattaggctgttctcgcattgctataaagaaatacctgagagctggttatgat

SEQ ID NO: 470278 - DNA, 120 bp, Artificial Sequence
  ENSG00000159214_0 (sequence is synthesized)
agaggtggggctagggccctggttcccactgcctggtttctgggcccccggcatccgagtcggccaaaagccgggcagaagagagcgccaaggactggcagttccggaacgggcaatccc

SEQ ID NO: 470279 - DNA, 120 bp, Artificial Sequence
  ENSG00000159214_1 (sequence is synthesized)
agccgaggggaccagcggcagagcacgggtccgagccggggacggcggcgtcggtgggtcatgctccggcactccccctcgctgtgggagctggtggaggagcacgttccgctccgggag

SEQ ID NO: 470280 - DNA, 120 bp, Artificial Sequence
  ENSG00000159214_2 (sequence is synthesized)
cgacgcgaagtgaagaggattctgggggaggcggcggtggacctgagcctggagctgcgggcggaggtggcgatgttacgggcactgctccaagaggctcgatcctctcaagcccccagc

SEQ ID NO: 470281 - DNA, 120 bp, Artificial Sequence
  ENSG00000159214_3 (sequence is synthesized)
tcccgccccatctctgacccctcttctcttctggcaccaccgcctctcctaaaggacctcttgcgccaggagctccggcagttgctccagggtctccgccacaaagccatctgtgagggc

SEQ ID NO: 470282 - DNA, 120 bp, Artificial Sequence
  ENSG00000159214_4 (sequence is synthesized)
agggaccaggcccaagcttgggtccagtatagccccagggtcctgcactttgccttggaggagcccaggtgtgatttgccagaacaggagatattccagatgagaggtggtgggcccagc

SEQ ID NO: 470283 - DNA, 120 bp, Artificial Sequence
  ENSG00000159214_5 (sequence is synthesized)
agcggtcacagagatctcagcatcatcaaggaccaactgaacgtgtccaacattgaccaggtggccagacacctgaggggccttctggaggaggagtgtcacaccttggagagggagatc

SEQ ID NO: 470284 - DNA, 120 bp, Artificial Sequence
  ENSG00000159214_6 (sequence is synthesized)
tttgaggccttgccacccctctgaggcagccctggagcccaccctggcagagctaaaggaacagaagaaggccatggagcaggagctgcaggcatctgtggggccttcttgtgtctctcc

SEQ ID NO: 470285 - DNA, 120 bp, Artificial Sequence
  ENSG00000159214_7 (sequence is synthesized)
caaccacaggcagcggcccttggggtcctccacacagggcctcagacccccgcttcccctctgcggggttgcacctctccagtgctgcctgcctgcacctcctctggagccctaccttcg

SEQ ID NO: 470286 - DNA, 120 bp, Artificial Sequence
  ENSG00000159214_8 (sequence is synthesized)
acctcgaggccagtcggctacccaccgctggggacggcagcttcagtgcagccccagggaagggccagcttccacacccatgtccagtgcagcaccccaagccccagcctgaagggctgg

SEQ ID NO: 470287 - DNA, 120 bp, Artificial Sequence
  ENSG00000159214_9 (sequence is synthesized)
tcaccgagtaggctctggcttctgccacagcgcacctgtctgccgctgccgcctcagctgctttggcccagccagcttcagatctggtcttggcgagctctcgccaggaccccaaggctg

SEQ ID NO: 470288 - DNA, 120 bp, Artificial Sequence
  ENSG00000159214_10 (sequence is synthesized)
ttggtctgtctggcccttgccccacccccttgccagatccctggtgtctggagctgagtggccgggcatcggtcccaagcatcaaagcctttggcctttctcctcccaggcctccacaaa

SEQ ID NO: 470289 - DNA, 120 bp, Artificial Sequence
  ENSG00000159214_11 (sequence is synthesized)
ggcctggcagacagaggtctcattccagcctgactcttgtcccctgggggacccagacaaagcacagcagccgctcagagacaggaatagaaatttcattaaaatctatggactttaaaa

SEQ ID NO: 470290 - DNA, 120 bp, Artificial Sequence
  ENSG00000159214_12 (sequence is synthesized)
gggggaggcggcggtggacctgagcctggagctgcgggcggagaaacagttgcctagaagtgatatttgggtcctgaaggcctggggtgagcaacatgcggagagtgatagtgacttcat

SEQ ID NO: 470291 - DNA, 120 bp, Artificial Sequence
  ENSG00000159214_13 (sequence is synthesized)
ttccgggacagtggaggcgacgaagtaataaacccgtggacccagatttctcaggtcttaacacgttccctgaggcctaaaggtgcccagggccgagcccaaagtgcttgggtcagggct

SEQ ID NO: 470292 - DNA, 120 bp, Artificial Sequence
  ENSG00000159214_14 (sequence is synthesized)
agaggattctgggggaggcggcggtggacctgagcctggagctgcgggcggagcccccaccattccggacactcccctccccagtcgcaaggtatcccagctctccttgcaggtggcgat

SEQ ID NO: 470293 - DNA, 120 bp, Artificial Sequence
  ENSG00000159214_15 (sequence is synthesized)
gtgaggcccaggggcacctgcatgtgtataggcaggggtggagacaaggatggatcttgaggtgctgggattgtgagacaggaggtgggtagtatacttggcggggaggcccatgtgcgt

SEQ ID NO: 470294 - DNA, 120 bp, Artificial Sequence
  ENSG00000159214_16 (sequence is synthesized)
aaggctgagaggtggaaagagctggctgctatagagctagtgaggttgctttcaggaagcagccaagtacagatgccacggccgagcatgatggtgcatgcctataatcccagcaatttg

SEQ ID NO: 470295 - DNA, 120 bp, Artificial Sequence
  ENSG00000159214_17 (sequence is synthesized)
cccagcaatttgggaggccgaggcaagagggtcatttgggcccaggaattcgaaaccagcttggccaacatgggaaaaccccatctctaccaaaacaaatacaaaaattagctgggcgtg

SEQ ID NO: 470296 - DNA, 120 bp, Artificial Sequence
  ENSG00000159214_18 (sequence is synthesized)
tgtaccagttacttgggaggctgaggtgagaagggattgattgagccctggaaggtaaggctacagtgagtcatgatgggtggcagagcaagaccctgtttctttctttctttctttctt

SEQ ID NO: 470297 - DNA, 120 bp, Artificial Sequence
  ENSG00000159214_19 (sequence is synthesized)
acaggcatgagccacctcgcctggccgaccctgtttcaaaaataaataccttgacacaggggtagcctgtgtcagaggattttaagcagcggaagggctgtgatgtgggggaagatggag

SEQ ID NO: 470298 - DNA, 120 bp, Artificial Sequence
  ENSG00000159214_20 (sequence is synthesized)
gtgggggaagatggaggcaagaagaatcacagtgcagaagtgtgggagagagaaggatgcctgccagggtgaggcaggcgaggggaagatacttcctgcccagaaagagcctcacagggg

SEQ ID NO: 470299 - DNA, 120 bp, Artificial Sequence
  ENSG00000159214_21 (sequence is synthesized)
ccagacgtctatgctgggtcagcccccaagcagcagagggcagtgtgggctgaggaaggacaggttgggtggggctcctgctgaggctggaggttggggccatgtggtggactcagctga

SEQ ID NO: 470300 - DNA, 120 bp, Artificial Sequence
  ENSG00000159214_22 (sequence is synthesized)
gccctggtcctgtgtctcgggttctggctgctgctccctcatgtcccaggggccttctggaggaggagtgtcacaccttggagagggagatcctcatcctgcagcgctgcctggaagagg

SEQ ID NO: 470301 - DNA, 120 bp, Artificial Sequence
  ENSG00000159214_23 (sequence is synthesized)
gaacacccagcctcctgctcccaccccacacttgtacacaccctagaagagctgggcactgtctcagcccaatctctccttcagagctaaaggaacagaagaaggccatggagcaggagc

SEQ ID NO: 470302 - DNA, 120 bp, Artificial Sequence
  ENSG00000159214_24 (sequence is synthesized)
cccacgactcgggtgatttcccacctctgcgggtccctggccctgccgggtaactcccgagatcctatcctggtctcccctttgactccgccctctccctcactcccccagcccccacca

SEQ ID NO: 470303 - DNA, 120 bp, Artificial Sequence
  ENSG00000159214_25 (sequence is synthesized)
cctttacctaagtctgggtacaggccccaccactatcttgccaaactcagctcttccgcaaggctggtattccctggggaacgtggctgccctcacggtggatgggctgaaggggctgca

SEQ ID NO: 470304 - DNA, 120 bp, Artificial Sequence
  ENSG00000159214_26 (sequence is synthesized)
tacgggcactgctccaagaggctcgatcctctcaagcccccagctcccgggtctccgccacaaagccatctgtgagggcaggtgggagcctcaggcctgggccctttccctagataccag

SEQ ID NO: 470305 - DNA, 120 bp, Artificial Sequence
  ENSG00000159216_0 (sequence is synthesized)
ggaaaggggaacagttaaatttgtaatttgggttgtgtgaaaacttctttgggcctcataaacaaccacagaaccacaagttgggtagcctggcagtgtcagaagtctgaacccagcata

SEQ ID NO: 470306 - DNA, 120 bp, Artificial Sequence
  ENSG00000159216_1 (sequence is synthesized)
gtggtcagcaggcaggacgaatcacactgaatgcaaaccacagggtttcgcagcgtggtgagcatcaccaacccacagccaaggcggcgctggctttttttttttttttaatctttaaca

SEQ ID NO: 470307 - DNA, 120 bp, Artificial Sequence
  ENSG00000159216_2 (sequence is synthesized)
atttgaatatttgtttttacaaaggtgcattttttaatagggcttggggagtcccagaggtatccagcagaggggagaagaaagagagatgtagggctagaggggtgaggctgaaacagt

SEQ ID NO: 470308 - DNA, 120 bp, Artificial Sequence
  ENSG00000159216_3 (sequence is synthesized)
gacctgtcttggttttcgctccgaaggtaaaagaaatcattgagtcccccgccttcagaagagggtgcattttcaggaggaagcgatggcttcagacagcatatttgagtcatttccttc

SEQ ID NO: 470309 - DNA, 120 bp, Artificial Sequence
  ENSG00000159216_4 (sequence is synthesized)
gtacccacagtgcttcatgagagaatgcatacttggaatgaatccttctagagacgtccacgatgccagcacgagccgccgcttcacgccgccttccaccgcgctgagcccaggcaagat

SEQ ID NO: 470310 - DNA, 120 bp, Artificial Sequence
  ENSG00000159216_5 (sequence is synthesized)
gagcgaggcgttgccgctgggcgccccggacgccggcgctgccctggccggcaagctgaggagcggcgaccgcagcatggtggaggtgctggccgaccacccgggcgagctggtgcgcac

SEQ ID NO: 470311 - DNA, 120 bp, Artificial Sequence
  ENSG00000159216_6 (sequence is synthesized)
cgacagccccaacttcctctgctccgtgctgcctacgcactggcgctgcaacaagaccctgcccatcgctttcaaggtggtggccctaggggatgttccagatggcactctggtcactgt

SEQ ID NO: 470312 - DNA, 120 bp, Artificial Sequence
  ENSG00000159216_7 (sequence is synthesized)
gatggctggcaatgatgaaaactactcggctgagctgagaaatgctaccgcagccatgaagaaccaggttgcaagatttaatgacctcaggtttgtcggtcgaagtggaagagggaaaag

SEQ ID NO: 470313 - DNA, 120 bp, Artificial Sequence
  ENSG00000159216_8 (sequence is synthesized)
cttcactctgaccatcactgtcttcacaaacccaccgcaagtcgccacctaccacagagccatcaaaatcacagtggatgggccccgagaacctcgaagacatcggcagaaactagatga

SEQ ID NO: 470314 - DNA, 120 bp, Artificial Sequence
  ENSG00000159216_9 (sequence is synthesized)
tcagaccaagcccgggagcttgtccttttccgagcggctcagtgaactggagcagctgcggcgcacagccatgagggtcagcccacaccacccagcccccacgcccaaccctcgtgcctc

SEQ ID NO: 470315 - DNA, 120 bp, Artificial Sequence
  ENSG00000159216_10 (sequence is synthesized)
cctgaaccactccactgcctttaaccctcagcctcagagtcagatgcaggatacaaggcagatccaaccatccccaccgtggtcctacgatcagtcctaccaatacctgggatccattgc

SEQ ID NO: 470316 - DNA, 120 bp, Artificial Sequence
  ENSG00000159216_11 (sequence is synthesized)
ctctccttctgtgcacccagcaacgcccatttcacctggacgtgccagcggcatgacaaccctctctgcagaactttccagtcgactctcaacggcacccgacctgacagcgttcagcga

SEQ ID NO: 470317 - DNA, 120 bp, Artificial Sequence
  ENSG00000159216_12 (sequence is synthesized)
cccgcgccagttccccgcgctgccctccatctccgacccccgcatgcactatccaggcgccttcacctactccccgacgccggtcacctcgggcatcggcatcggcatgtcggccatggg

SEQ ID NO: 470318 - DNA, 120 bp, Artificial Sequence
  ENSG00000159216_13 (sequence is synthesized)
ctcggccacgcgctaccacacctacctgccgccgccctaccccggctcgtcgcaagcgcagggaggcccgttccaagccagctcgccctcctaccacctgtactacggcgcctcggccgg

SEQ ID NO: 470319 - DNA, 120 bp, Artificial Sequence
  ENSG00000159216_14 (sequence is synthesized)
ctcctaccagttctccatggtgggcggcgagcgctcgccgccgcgcatcctgccgccctgcaccaacgcctccaccggctccgcgctgctcaaccccagcctcccgaaccagagcgacgt

SEQ ID NO: 470320 - DNA, 120 bp, Artificial Sequence
  ENSG00000159216_15 (sequence is synthesized)
ggtggaggccgagggcagccacagcaactcccccaccaacatggcgccctccgcgcgcctggaggaggccgtgtggaggccctactgaggcgccaggcctggcccggctgggccccgcgg

SEQ ID NO: 470321 - DNA, 120 bp, Artificial Sequence
  ENSG00000159216_16 (sequence is synthesized)
cttcgcctccgggcgcgcgggcctcctgttcgcgacaagcccgccgggatcccgggccctgggcccggccaccgtcctggggccgagggcgcccgacggccaggatctcgctgtaggtca

SEQ ID NO: 470322 - DNA, 120 bp, Artificial Sequence
  ENSG00000159216_17 (sequence is synthesized)
gtaggtcaggcccgcgcagcctcctgcgcccagaagcccacgccgccgccgtctgctggcgccccggccctcgcggaggtgtccgaggcgacgcacctcgagggtgtccgccggccccag

SEQ ID NO: 470323 - DNA, 120 bp, Artificial Sequence
  ENSG00000159216_18 (sequence is synthesized)
cacccaggggacgcgctggaaagcaaacaggaagattcccggagggaaactgtgaatgcttctgatttagcaatgctgtgaataaaaagaaagattttatacccttgacttaacttttta

SEQ ID NO: 470324 - DNA, 120 bp, Artificial Sequence
  ENSG00000159216_19 (sequence is synthesized)
accaagttgtttattccaaagagtgtggaattttggttggggtggggggagaggagggatgcaactcgccctgtttggcatctaattcttatttttaatttttccgcaccttatcaattg

SEQ ID NO: 470325 - DNA, 120 bp, Artificial Sequence
  ENSG00000159216_20 (sequence is synthesized)
caaaatgcgtatttgcatttgggtggtttttatttttatatacgtttatataaatatatataaattgagcttgcttctttcttgctttgaccatggaaagaaatatgattcccttttctt

SEQ ID NO: 470326 - DNA, 120 bp, Artificial Sequence
  ENSG00000159216_21 (sequence is synthesized)
gtttttttttgttttgttttgtttttttgagaaacagctacagctttgggtcatttttaactactgtattcccacaaggaatccccagatatttatgtatcttgatgttcagacatttat

SEQ ID NO: 470327 - DNA, 120 bp, Artificial Sequence
  ENSG00000159216_22 (sequence is synthesized)
aggaatccccagatatttatgtatcttgatgttcagacatttatgtgttgataattttttaattatttaaatgtacttatattaagaaaaatatcaagtactacattttcttttgttctt

SEQ ID NO: 470328 - DNA, 120 bp, Artificial Sequence
  ENSG00000159216_23 (sequence is synthesized)
gtagccaaagttaaatgtatcacattgaagaaggctagaaaaaaagaatgagtaatgtgatcgcttggttatccagaagtattgtttacattaaactccctttcatgttaatcaaacaag

SEQ ID NO: 470329 - DNA, 120 bp, Artificial Sequence
  ENSG00000159216_24 (sequence is synthesized)
tgagtagctcacgcagcaacgtttttaataggatttttagacactgagggtcactccaaggatcagaagtatggaattttctgccaggctcaacaagggtctcatatctaacttcctcct

SEQ ID NO: 470330 - DNA, 120 bp, Artificial Sequence
  ENSG00000159216_25 (sequence is synthesized)
aggtcatctgataatttcacagatgctgtgtaacagaacacagccaaagtaaactgtgtaggggagccacatttacataggaaccaaatcaatgaatttaggggttacgattatagcaat

SEQ ID NO: 470331 - DNA, 120 bp, Artificial Sequence
  ENSG00000159216_26 (sequence is synthesized)
ttaagggcccaccagaagcaggcctcgaggagtcaatttgcctctgtgtgcctcagtggagacaagtgggaaaacatggtcccacctgtgcgagaccccctgtcctgtgctgctcactca

SEQ ID NO: 470332 - DNA, 120 bp, Artificial Sequence
  ENSG00000159216_27 (sequence is synthesized)
acaacatctttgtgttgctttcaccaggctgagaccctaccctatggggtatatgggcttttacctgtgcaccagtgtgacaggaaagattcatgtcactactgtccgtggctacaattc

SEQ ID NO: 470333 - DNA, 120 bp, Artificial Sequence
  ENSG00000159216_28 (sequence is synthesized)
aaaggtatccaatgtcgctgtaaattttatggcactatttttattggaggatttggtcagaatgcagttgttgtacaactcataaatactaactgctgattttgacacatgtgtgctcca

SEQ ID NO: 470334 - DNA, 120 bp, Artificial Sequence
  ENSG00000159216_29 (sequence is synthesized)
aatgatctggtggttatttaacgtacctcttaaaattcgttgaaacgatttcaggtcaactctgaagagtatttgaaagcaggacttcagaacagtgtttgatttttattttataaattt

SEQ ID NO: 470335 - DNA, 120 bp, Artificial Sequence
  ENSG00000159216_30 (sequence is synthesized)
aagcattcaaattaggcaaatctttggctgcaggcagcaaaaacagctggacttatttaaaacaacttgtttttgagttttcttatatatatattgattatttgttttacacacatgcag

SEQ ID NO: 470336 - DNA, 120 bp, Artificial Sequence
  ENSG00000159216_31 (sequence is synthesized)
tagcactttggtaagagttaaagagtaaagcagcttatgttgtcaggtcgttcttatctagagaagagctatagcagatctcggacaaactcagaatatattcactttcatttttgacag

SEQ ID NO: 470337 - DNA, 120 bp, Artificial Sequence
  ENSG00000159216_32 (sequence is synthesized)
gattccctccacaactcagtttcatatattattccgtattacatttttgcagctaaattaccataaaatgtcagcaaatgtaaaaatttaatttctgaaaagcaccattagcccatttcc

SEQ ID NO: 470338 - DNA, 120 bp, Artificial Sequence
  ENSG00000159216_33 (sequence is synthesized)
cccaaattaaacgtaaatgttttttttcagcacatgttaccatgtctgacctgcaaaaatgctggagaaaaatgaaggaaaaaattatgtttttcagtttaattctgttaactgaagata

SEQ ID NO: 470339 - DNA, 120 bp, Artificial Sequence
  ENSG00000159216_34 (sequence is synthesized)
ttccaactcaaaaccagcctcatgctctgattagataatcttttacattgaacctttactctcaaagccatgtgtggagggggcttgtcactattgtaggctcactggattggtcattta

SEQ ID NO: 470340 - DNA, 120 bp, Artificial Sequence
  ENSG00000159216_35 (sequence is synthesized)
gagtttcacagactcttaccagcatatatagtatttaattgtttcaaaaaaaatcaaactgtagttgttttggcgataggtctcacgcaacacatttttgtatgtgtgtgtgtgtgcgtg

SEQ ID NO: 470341 - DNA, 120 bp, Artificial Sequence
  ENSG00000159216_36 (sequence is synthesized)
tgtgtgtgtgtgtgtgaaaaattgcattcattgacttcaggtagattaaggtatctttttattcattgccctcaggaaagttaaggtatcaatgagacccttaagccaatcatgtaataa

SEQ ID NO: 470342 - DNA, 120 bp, Artificial Sequence
  ENSG00000159216_37 (sequence is synthesized)
ctgcatgtgtctggtccaggagaagtattgaataagccatttctactgcttactcatgtccctatttatgatttcaacatggatacatatttcagttctttctttttctcactatctgaa

SEQ ID NO: 470343 - DNA, 120 bp, Artificial Sequence
  ENSG00000159216_38 (sequence is synthesized)
aatacatttccctccctctcttccccccaatatctccctttttttctctcttcctctatcttccaaaccccactttctccctcctccttttcctgtgttctcttaagcagatagcacata

SEQ ID NO: 470344 - DNA, 120 bp, Artificial Sequence
  ENSG00000159216_39 (sequence is synthesized)
cccccacccagtaccaaatttcagaacacaagaaggtccagttcttcccccttcacataaaggaacatggtttgtcagcctttctcctgtttatgggtttcttccagcagaacagagaca

SEQ ID NO: 470345 - DNA, 120 bp, Artificial Sequence
  ENSG00000159216_40 (sequence is synthesized)
ttgccaaccatattggatctgcttgctgtccaaaccagcaaactttcctgggcaaatcacaatcagtgagtaaatagacagcctttctgctgccttgggtttctgtgcagataaacagaa

SEQ ID NO: 470346 - DNA, 120 bp, Artificial Sequence
  ENSG00000159216_41 (sequence is synthesized)
atgctctgattagaaaggaaatgaatggttccactcaaatgtcctgcaatttaggattgcagatttctgccttgaaatacctgtttctttgggacattccgtcctgatgatttttatttt

SEQ ID NO: 470347 - DNA, 120 bp, Artificial Sequence
  ENSG00000159216_42 (sequence is synthesized)
tgttggtttttatttttggggggaatgacatgtttgggtcttttatacatgaaaatttgtttgacaataatctcacaaaacatattttacatctgaacaaaatgcctttttgtttaccgt

SEQ ID NO: 470348 - DNA, 120 bp, Artificial Sequence
  ENSG00000159216_43 (sequence is synthesized)
agcgtatacatttgttttgggatttttgtgtgtttgttgggaattttgtttttagccaggtcagtattgatgaggctgatcatttggctctttttttccttccagaagagttgcatcaac

SEQ ID NO: 470349 - DNA, 120 bp, Artificial Sequence
  ENSG00000159216_44 (sequence is synthesized)
aaagttaattgtatttatgtatgtaaatagattttaagcttcattataaaatattgttaatgcctataactttttttcaatttttttgtgtgtgtttctaaggactttttcttaggtttg

SEQ ID NO: 470350 - DNA, 120 bp, Artificial Sequence
  ENSG00000159216_45 (sequence is synthesized)
ctaaatactgtagggaaaaaaatgcttctttctactttgtttattttagactttaaaatgagctacttcttattcacttttgtaaacagctaatagcatggttccaattttttttaagtt

SEQ ID NO: 470351 - DNA, 120 bp, Artificial Sequence
  ENSG00000159216_46 (sequence is synthesized)
cactttttttgttctaggggaaatgaatgtgcaaaaaaagaaaaagaactgttggttatttgtgttattctggatgtataaaaatcaatggaaaaaaataaactttcaaattgaaatgac

SEQ ID NO: 470352 - DNA, 120 bp, Artificial Sequence
  ENSG00000159216_47 (sequence is synthesized)
ggtataacacatctactgaaaaagcaacgggaaatgtggtcctatttaagccagcccccacctagggtctatttgtgtggcagttattgggtttggtcacaaaacatcctgaaaattcgt

SEQ ID NO: 470353 - DNA, 120 bp, Artificial Sequence
  ENSG00000159216_48 (sequence is synthesized)
gcgtgggcttctttctccctggtacaaacgtatggaatgcttcttaaaggggaactgtcaagctggtgtcttcagccagatgacatgagagaatatcccagaaccctctctccaaggtgt

SEQ ID NO: 470354 - DNA, 120 bp, Artificial Sequence
  ENSG00000159216_49 (sequence is synthesized)
ttctagatagcacaggagagcaggcactgcactgtccacagtccacggtacacagtcgggtgggccgcctcccctctcctgggagcattcgtcgtgcccagcctgagcagggcagctgga

SEQ ID NO: 470355 - DNA, 120 bp, Artificial Sequence
  ENSG00000159216_50 (sequence is synthesized)
ctgctgctgttcaggagccaccagagccttcctctctttgtaccacagtttcttctgtaaatccagtgttacaatcagtgtgaatggcaaataaacagtttgacaagtacatacaccata

SEQ ID NO: 470356 - DNA, 120 bp, Artificial Sequence
  ENSG00000159216_51 (sequence is synthesized)
catagagccagcgggcgcgggcgggacgggcgccccgcggccggacccagccagggcaccacgctgcccggccctgcgccgccaggcacttctttccggggctcctagggacgccagaag

SEQ ID NO: 470357 - DNA, 90 bp, Artificial Sequence
  ENSG00000159216_52 (sequence is synthesized)
ccccctttcttccttttgaattaactggcttcttggctggatgttttcaacttctttcctggctgcgaacttttccccaattgttttcct

SEQ ID NO: 470358 - DNA, 120 bp, Artificial Sequence
  ENSG00000159216_53 (sequence is synthesized)
cttctttcctggctgcgaacttttccccaattgttttccttttacaacagggggagaaagtgctctgtggtccgaggcgagccgtgaagttgcgtgtgcgtggcagtgtgcgtggcagga

SEQ ID NO: 470359 - DNA, 120 bp, Artificial Sequence
  ENSG00000159216_54 (sequence is synthesized)
tgtgcgtgcgtgtgtaacccgagccgcccgatctgtttcgatctgcgccgcggagccctccctcaaggcccgctccacctgctgcggttacgcggcgctcgtgggtgttcgtgcctcgga

SEQ ID NO: 470360 - DNA, 120 bp, Artificial Sequence
  ENSG00000159216_55 (sequence is synthesized)
gcagctaaccggcgggtgctgggcgacggtggaggagtatcgtctcgctgctgcccgagtcagggctgagtcacccagctgatgtagacagtggctgccttccgaagagtgcgtgtttgc

SEQ ID NO: 470361 - DNA, 120 bp, Artificial Sequence
  ENSG00000159216_56 (sequence is synthesized)
atgtgtgtgactctgcggctgctcaactcccaacaaaccagaggaccagccacaaacttaaccaacatccccaaacccgagttcacagatgtgggagagctgtagaaccctgagtgtcat

SEQ ID NO: 470362 - DNA, 120 bp, Artificial Sequence
  ENSG00000159216_57 (sequence is synthesized)
cgactgggccttcttatgattgttgttttaagattagctgaagatctctgaaacgctgaattttctgcactgagcgttttgacagaattcattgagagaacagagaacatgacaagtact

SEQ ID NO: 470363 - DNA, 120 bp, Artificial Sequence
  ENSG00000159216_58 (sequence is synthesized)
tctagctcagcactgctccaactactgaagctgattttcaaggctacttaaaaaaatctgcagcgtacattaatggatttctgttgtgtttaaattctccacagattgtattgtaaatat

SEQ ID NO: 470364 - DNA, 120 bp, Artificial Sequence
  ENSG00000159216_59 (sequence is synthesized)
tttatgaagtagagcatatgtatatatttatatatacgtgcacatacattagtagcactacctttggaagtctcagctcttgcttttcgggactgaagccagttttgcatgataaaagtg

SEQ ID NO: 470365 - DNA, 120 bp, Artificial Sequence
  ENSG00000159216_60 (sequence is synthesized)
gccttgttacgggagataattgtgttctgttgggactttagacaaaactcacctgcaaaaaactgacaggcattaactactggaacttccaaataatgtgtttgctgatcgttttactct

SEQ ID NO: 470366 - DNA, 120 bp, Artificial Sequence
  ENSG00000159216_61 (sequence is synthesized)
tcgcataaatattttaggaagtgtatgagaattttgccttcaggaacttttctaacagccaaagacagaacttaacctctgcaagcaagattcgtggaagatagtctccactttttaatg

SEQ ID NO: 470367 - DNA, 120 bp, Artificial Sequence
  ENSG00000159216_62 (sequence is synthesized)
cactaagcaatcggttgctaggagcccatcctgggtcagaggccgatccgcagaaccagaacgttttcccctcctggactgttagtaacttagtctccctcctcccctaaccacccccgc

SEQ ID NO: 470368 - DNA, 120 bp, Artificial Sequence
  ENSG00000159216_63 (sequence is synthesized)
ccccccccaccccccgcagtaataaaggcccctgaacgtgtatgttggtctcccgggagctgcttgctgaagatccgcgcccctgtcgccgtctggtaggagctgtttgcagggtcctaa

SEQ ID NO: 470369 - DNA, 120 bp, Artificial Sequence
  ENSG00000159216_64 (sequence is synthesized)
gttgtggtgtcatctcatcagaggggtaatcagaaaacaagcacttagtgcacacaaatgagtatggatatgtaggccggactagtgacagtatcttcatgagattggaagtgcaatcag

SEQ ID NO: 470370 - DNA, 120 bp, Artificial Sequence
  ENSG00000159216_65 (sequence is synthesized)
acaatagcttgaggatagatatttggaggtctccaggtgaaagaagaaagcttaacctggcttctgaattccaagagcacacggcaaagtgattacagggacaaaagcaagttgacgaat

SEQ ID NO: 470371 - DNA, 120 bp, Artificial Sequence
  ENSG00000159216_66 (sequence is synthesized)
gccaggcagctacagcatgcccagcctaaaacaggaacttggtaaatgttgaagactccaccctctgcccaaccttggtcccaggtcccaggagaacaatgttttgcaaacaacacccag

SEQ ID NO: 470372 - DNA, 120 bp, Artificial Sequence
  ENSG00000159216_67 (sequence is synthesized)
cttgggagtgtctggggttctgatttgattttggtctaacgtggaagtggggcttcccccagtttttcccaccctggtctgatggcttcctgtagcattcctttcgccttctgcatgcag

SEQ ID NO: 470373 - DNA, 120 bp, Artificial Sequence
  ENSG00000159216_68 (sequence is synthesized)
gcacacagatgagagatctggaaggcaactgacagcagggtgaggtaagaaacctcacctcctgcttatgcatcagagggaactgaaacccagagtggcaggcaatttcgtgtagattac

SEQ ID NO: 470374 - DNA, 120 bp, Artificial Sequence
  ENSG00000159216_69 (sequence is synthesized)
atacctagctcacagcagggctgagataaggatctatttttcaactctttaagccaatgactctctacttttctactcttccactgggtctcctctctctacttctatcttttcagtaca

SEQ ID NO: 470375 - DNA, 120 bp, Artificial Sequence
  ENSG00000159216_70 (sequence is synthesized)
acgtctctcttatttctaagtcaaattcttaggtctatattcatgaaaagcacctgtcaaaagctttaaaaattgttgttattaggtgtattttaagtatcaatagctttagtttgattc

SEQ ID NO: 470376 - DNA, 120 bp, Artificial Sequence
  ENSG00000159216_71 (sequence is synthesized)
tcctaataaagatctttcttggtgggtgttctaattgaatactttgaaatttgaaaatattctcttgggaaaacacacattcttatgtattgttggtggaaatgcaaagtggtacagcca

SEQ ID NO: 470377 - DNA, 120 bp, Artificial Sequence
  ENSG00000159216_72 (sequence is synthesized)
ctaggcagggatttcagcaacatgatagctctatttatcttttaaccaaacaatcccacttctaggaatctatcccaaagatagactaccaaatatgaaaaaaaaaaatgcaaaagccta

SEQ ID NO: 470378 - DNA, 120 bp, Artificial Sequence
  ENSG00000159216_73 (sequence is synthesized)
tttattgtggcactggtggcagtggaaggagactggcagtagcccaaatattcatcaggaggggactgattgaataaactatgctacatctacacaatgaactactatgtagctactaaa

SEQ ID NO: 470379 - DNA, 120 bp, Artificial Sequence
  ENSG00000159216_74 (sequence is synthesized)
agagatgaaagactaacttatatactgccaaggggtaatctttagaatatattcttaagtgcaaaaagtaagacaaaaattagaatgtgtattatgctaccttttgcctaagaaaagtga

SEQ ID NO: 470380 - DNA, 120 bp, Artificial Sequence
  ENSG00000159216_75 (sequence is synthesized)
gtgtgtatttaatatttaacacattcaatgacagtaggataggaaacaacaaattaataaaagcgaatcattagaggagggaggaaacagtgaaagcaacagatttggaaacgaggtttt

SEQ ID NO: 470381 - DNA, 120 bp, Artificial Sequence
  ENSG00000159216_76 (sequence is synthesized)
cctgaatttgctttgttttgttcatttgaaaatatacaaatatttgacaaaattataaaacaaaaaaaatcccttaattcaaaaacaaaatgaaataaatcagtcggagtattaaccatg

SEQ ID NO: 470382 - DNA, 120 bp, Artificial Sequence
  ENSG00000159216_77 (sequence is synthesized)
tagaaaggaattatttgaagtgatttacactcttgtctatttggttgtatatctgcagtgggacatgtcctcaggacgaaaagaactgcaacaaaatattaaattgcttcagtagttata

SEQ ID NO: 470383 - DNA, 120 bp, Artificial Sequence
  ENSG00000159216_78 (sequence is synthesized)
tcagtagttatattgttaataatatgttggtatggattcttaaaatttttttcttacattaaccaggaaaagcacaaaataattatatttatgtcataagaaatcaagttttttgactta

SEQ ID NO: 470384 - DNA, 120 bp, Artificial Sequence
  ENSG00000159216_79 (sequence is synthesized)
taaaaatctgtagctcttaacttgaattgtaaatattggtataaactcctgatgtatttctatttaaaaacgttttctggatgtgtccactgaaaaggtctagaaccaatgattaacccc

SEQ ID NO: 470385 - DNA, 120 bp, Artificial Sequence
  ENSG00000159216_80 (sequence is synthesized)
cccaagaacaaggagctcccaagcatccatgctttcgtatccaaatgccttttttattgaaaggaaccagggtccttgagagaaaaaaaaaaaaaaaaaggttaattccagcctggggca

SEQ ID NO: 470386 - DNA, 120 bp, Artificial Sequence
  ENSG00000159216_81 (sequence is synthesized)
agaaatgttcaagatgaggtggtaacatcttatcataccagaaagcaaggaagccttcaaagacagcttaggcaatgggaaaagactcaaaacacacaggactcaacaggtaaagcctcc

SEQ ID NO: 470387 - DNA, 120 bp, Artificial Sequence
  ENSG00000159216_82 (sequence is synthesized)
tactggccaaagatgaaaaaactatattcaaagatggatctaaaaagaacaatatccaggtgttcaagaccagcctggacaacatagtgataccctgtctctacaaaaaataaaaaatga

SEQ ID NO: 470388 - DNA, 120 bp, Artificial Sequence
  ENSG00000159216_83 (sequence is synthesized)
ctactcaggaggctgaggtgggagaaccacttgagcccaagaagtcgaggctgcagtgagttatgattgcagcactgtactccagcctgggcaacagcagaagatcctatttcaacacaa

SEQ ID NO: 470389 - DNA, 120 bp, Artificial Sequence
  ENSG00000159216_84 (sequence is synthesized)
tccagcctgggcaacagcagaagatcctatttcaacacaaacaaacaaagaataatatctgcaatgtattgaaacatagaggatatgtcaaaatccaagcatttatagtgatattttaaa

SEQ ID NO: 470390 - DNA, 120 bp, Artificial Sequence
  ENSG00000159216_85 (sequence is synthesized)
agctttgcactccccttgtaggatgccaggaaccaactcattgttctgaaaagtggcaaataaaggtaaagaatcaagcatttatccccagtttccagaaagcgctgtaccttgggataa

SEQ ID NO: 470391 - DNA, 120 bp, Artificial Sequence
  ENSG00000159216_86 (sequence is synthesized)
ccaaaatagttgaggagataaattttttctttttcaaaagaatttataaacaaaggaggcattagaaggagctagaatgccgccactttgtaaccactaatgaaacaatgagtctaggca

SEQ ID NO: 470392 - DNA, 120 bp, Artificial Sequence
  ENSG00000159216_87 (sequence is synthesized)
aggattatcaatgactgctaaaactgttagacaaaatgctgaagggaagctttggatgaagctggcatcacctactcccaatggtcaatgccaatatcacaaaaagagagagaaccagat

SEQ ID NO: 470393 - DNA, 120 bp, Artificial Sequence
  ENSG00000159216_88 (sequence is synthesized)
attacgtgtctccagttggatgcaatgggaaggacacagcacatctcctgatatactatcactcaaaccttctaagctaaatcttagccagcctctagatctcactactagggctgtaga

SEQ ID NO: 470394 - DNA, 120 bp, Artificial Sequence
  ENSG00000159216_89 (sequence is synthesized)
aaacacaagggaaaaataaatctatcaagaatcaccatggggatacagtcagcaacaagcaaaatgtagaaaatatgctctaggtttttcaacaaacaaattttaagaaaattaaaaaga

SEQ ID NO: 470395 - DNA, 120 bp, Artificial Sequence
  ENSG00000159216_90 (sequence is synthesized)
gaaggataacatattaacagatttaagaggtgcattcccaggtgcaacataggagccttgctcaccctccaattcaagcacaccaatgatagaaccaaccttgatagatacttgaaattt

SEQ ID NO: 470396 - DNA, 120 bp, Artificial Sequence
  ENSG00000159216_91 (sequence is synthesized)
tacacaatgcaaaataagttttcattaattgtatgattatgtatttttatatctagacatttggtggactcttttagtagctgttggtaggagagggctgcctctttgcagaagtatttt

SEQ ID NO: 470397 - DNA, 120 bp, Artificial Sequence
  ENSG00000159216_92 (sequence is synthesized)
tggaatatgtgttgaagtgtatgtatttctaaactttaggctctaaaggactgtaaattgctagaatgtatttatgtttctactctacataattatgcatttttctttacatcctcctcc

SEQ ID NO: 470398 - DNA, 120 bp, Artificial Sequence
  ENSG00000159216_93 (sequence is synthesized)
agttgaaaagctctttgaaggcaagaattaaatgaattgttttaccaaaaaaatgaaataaatgatgaactcaggtgtttttttgttttgttttgttttcacaaaaaaaaaaaaaaaaaa

SEQ ID NO: 470399 - DNA, 120 bp, Artificial Sequence
  ENSG00000159216_94 (sequence is synthesized)
ggaaaagcttcactctgaccatcactgtcttcacaaacccaccgcaagtcgccacctaccacagagccatcaaaatcacagtggatgggccccgagaacctcgaaactctttgacctggc

SEQ ID NO: 470400 - DNA, 120 bp, Artificial Sequence
  ENSG00000159216_95 (sequence is synthesized)
aggagttggcttatatgattggctggcatatttggctcatctcgaagactgtctattatagaagggcaaatggtagtgcctcattgcaggtgtggagcctttgacttgaggtatgcgtgc

SEQ ID NO: 470401 - DNA, 120 bp, Artificial Sequence
  ENSG00000159216_96 (sequence is synthesized)
aaactgctgcccttctagtgctgatgctggactgaagcttcctgcaggctgggatcctgtctgcatatctcgcaatgtgttcccaggaccaggcgtagtttctgaactgtgaagccaact

SEQ ID NO: 470402 - DNA, 120 bp, Artificial Sequence
  ENSG00000159216_97 (sequence is synthesized)
atgcagcgatgactgtacccacagatgttaatgattaagaacaagtgcgacagagatcaacagctctgcgttcaagtccaaactcttcccctcggcaaggcacgtgacctccctgtgcct

SEQ ID NO: 470403 - DNA, 120 bp, Artificial Sequence
  ENSG00000159216_98 (sequence is synthesized)
caggttcttgcagagtggaaatgcccacttcacagaatggctgagggtgtggatgaacggtggacgctcctgcccggcacccatgggtgctcacgacgattgtgttttactgttggctgc

SEQ ID NO: 470404 - DNA, 120 bp, Artificial Sequence
  ENSG00000159216_99 (sequence is synthesized)
aatatgtcatgacttatcatgtgtgatccttgagtgaataggcagctgcgagcctgagcggactcctatgaaccagtcttctccagcaatagaccctccttcaactcgtggtagcctgta

SEQ ID NO: 470405 - DNA, 120 bp, Artificial Sequence
  ENSG00000159216_100 (sequence is synthesized)
tgtacgccaagggtgacagactggaaagcaggatccaccggttcatctatgggaaaaggagggggaatgagatcaaggattgaggacgctaatggagatggggtttcaccatgttgccca

SEQ ID NO: 470406 - DNA, 120 bp, Artificial Sequence
  ENSG00000159216_101 (sequence is synthesized)
ttggcctcccaaaatgctggaattacagtttatgtattgaagaacctgggccgtttgacccacggagtggttctcaatctggatttggctgattgggcactcatgttgcaggttaacatg

SEQ ID NO: 470407 - DNA, 120 bp, Artificial Sequence
  ENSG00000159216_102 (sequence is synthesized)
tgcaggttaacatgctcctcggttttctgacctcctagaagttggcagctggatccagaagcttcaacagcctcaggttcagcctcctgggctggcggattgtaggccaaagcttgattt

SEQ ID NO: 470408 - DNA, 120 bp, Artificial Sequence
  ENSG00000159216_103 (sequence is synthesized)
gggtatcagcaagttaaaactcaggcacatccatctttcctgatccaagtaaattctagtgggcaagaggaagagaagagaaactacaacatcattatcttactgctggaggcagcagat

SEQ ID NO: 470409 - DNA, 120 bp, Artificial Sequence
  ENSG00000159216_104 (sequence is synthesized)
tacggacccctgactgtgatgtgtcaaatgcactgtgtgacaaccaagaccctacacatctggggggcacttcaggattcctccaggcggcagttgctggcctagactcacttcttcagg

SEQ ID NO: 470410 - DNA, 120 bp, Artificial Sequence
  ENSG00000159216_105 (sequence is synthesized)
agggaggttcgccctggaaaagctgatttgcatttctgctgggatcgatgccgtggagactgaatacattgaggtctccaggtgaaagaagaaagcttaacctggcttctgaattccaag

SEQ ID NO: 470411 - DNA, 120 bp, Artificial Sequence
  ENSG00000159216_106 (sequence is synthesized)
agcacacggcaaagtgagcgagcccggcacccagctgtcgtccacttgcatttagtgtagctgccacccagcaattaacgcgcctgggctctcctttggaaaccgagcagagaagaacaa

SEQ ID NO: 470412 - DNA, 84 bp, Artificial Sequence
  ENSG00000159216_107 (sequence is synthesized)
aattgcttgagtccaggagattgagaccagcctgagcaacctacggagacccccctctctaccaaaaaaaaaaaaaaaaaaaaa

SEQ ID NO: 470413 - DNA, 120 bp, Artificial Sequence
  ENSG00000159216_108 (sequence is synthesized)
gcggggccctccgagctccgcgaaaatgcccgcagcaccgcggggaccggcgcagggggaagcggccgcccgcacgcgaagccgggatgccagcacgagccgccgcttcacgccgccttc

SEQ ID NO: 470414 - DNA, 120 bp, Artificial Sequence
  ENSG00000159216_109 (sequence is synthesized)
ttgtatagagttatttaagtccgtctgattctctctttatcatctggatagacaaaaggaagaaaacctttccaccttcctgtaggagaaggagataaatcctctttccagccttggaga

SEQ ID NO: 470415 - DNA, 120 bp, Artificial Sequence
  ENSG00000159216_110 (sequence is synthesized)
ggaagacacagcaccctggagatgttaaggcagaagtcagttcttctgtccatccctctccccagccaggatagagctatcttttccatctcatcctcagaagagactcagaagaaagat

SEQ ID NO: 470416 - DNA, 120 bp, Artificial Sequence
  ENSG00000159216_111 (sequence is synthesized)
gtgtcccttctccccctctgcaaaccgtcgtaacaataatagttcctaacacatgggacaattgtgaggattaaatgagttagcctgcagaaatcacttgatgcacagcacatgggaagc

SEQ ID NO: 470417 - DNA, 120 bp, Artificial Sequence
  ENSG00000159216_112 (sequence is synthesized)
attgtgtgtatttattaatccttcacaaagtctttgagatatatttttatcaaatatttagcatggatcccggtacactttcaatacttaataaatggtcaatgttattctttttcacta

SEQ ID NO: 470418 - DNA, 120 bp, Artificial Sequence
  ENSG00000159216_113 (sequence is synthesized)
aagcaggtccttgaaaaggatgcaagaaaaaaggaaaaaaaaaaaatccacagcagcctgcagtgattgaagttcaatggcgtactctattatcttctcctgtatgtttaaataaacccc

SEQ ID NO: 470419 - DNA, 120 bp, Artificial Sequence
  ENSG00000159216_114 (sequence is synthesized)
cactgcccgcctctcctgcacctgggccaccacccacaactggcccccatgtgcacacaccttcccagaccaactggggtttccccttgatgctcagagaaaggcctcgaaccaacagca

SEQ ID NO: 470420 - DNA, 120 bp, Artificial Sequence
  ENSG00000159216_115 (sequence is synthesized)
ccacctgggagctgttggaaatgcagagtcttgggccccacccaccccagacccaccgagtcagatctgcattgtaaccagatccccacaaggaaaagcactgctacagaggatacgagg

SEQ ID NO: 470421 - DNA, 120 bp, Artificial Sequence
  ENSG00000159216_116 (sequence is synthesized)
agctctgggtatggatatccatattggatagatagctctcttgaattttttaagagttagctttggctatgctatttttttacctacccattaggcttgaagacacacacgcagacacac

SEQ ID NO: 470422 - DNA, 120 bp, Artificial Sequence
  ENSG00000159216_117 (sequence is synthesized)
acacacacacacgtcaagcaaagtgaagatgggatgtttcaagttctcgctattgccagattatttgtgggttttgtatctagtgtttttttattattaagaaatagttgaaatgtatgg

SEQ ID NO: 470423 - DNA, 120 bp, Artificial Sequence
  ENSG00000159216_118 (sequence is synthesized)
aaggcccactgtgccaaattagataatacaagaagttcatttacactgtagaccagtgacgtcaatgactgtttgctctgtgataccgtttcaaaaatccaaaatgcagacttttctctg

SEQ ID NO: 470424 - DNA, 120 bp, Artificial Sequence
  ENSG00000159216_119 (sequence is synthesized)
tgccatgcaggatgcagctgtgtgtgatatggtttacagtaatatttctttctcaaagtagcaggcttgttaaggaaaagataagcaacacatctggggaaaagggcaggtggccagcaa

SEQ ID NO: 470425 - DNA, 120 bp, Artificial Sequence
  ENSG00000159216_120 (sequence is synthesized)
tcgatgtggtagctctttgcccctctcggacagcaggaattagcttccccaggcattttctgtatgtgagttgtattgtgggatgtacaaatatcatctgttcctttgggtttccaggcc

SEQ ID NO: 470426 - DNA, 81 bp, Artificial Sequence
  ENSG00000159216_121 (sequence is synthesized)
ggatgtacaaatatcatctgttcctttgggtttccaggccagtagctctctattttgggttcaaacatgggttctcaggcc

SEQ ID NO: 470427 - DNA, 120 bp, Artificial Sequence
  ENSG00000159216_122 (sequence is synthesized)
aaggcatgcccactgtctcccatggagcttgacagcccatgccattagctctcactgttaggtttctggggaaggttcttctacttgattggaaaatttccaaataaatctttccagaag

SEQ ID NO: 470428 - DNA, 120 bp, Artificial Sequence
  ENSG00000159216_123 (sequence is synthesized)
cttcttacagcttttggcagtttctggtggaggccagctctccttgtcatctaccttggcctgagaagcctgttcccctctgcagaggatgagctcagggctacacctttccttccaggc

SEQ ID NO: 470429 - DNA, 120 bp, Artificial Sequence
  ENSG00000159216_124 (sequence is synthesized)
tctcatggtgtggtccaggctccatttctttctctttgaacctcacttcaacatgattagagtgactgaaggtaaagaaataggaactgttttaccgtaaataaattagtccctgctaca

SEQ ID NO: 470430 - DNA, 120 bp, Artificial Sequence
  ENSG00000159217_0 (sequence is synthesized)
cgctccattttttttcaagtcgattttatttagaggcggcgccagggcggccgcggagaaacgtgacacaccagccctctcggaggggtttcggaccgaagggaagaagctgcgccgtgt

SEQ ID NO: 470431 - DNA, 120 bp, Artificial Sequence
  ENSG00000159217_1 (sequence is synthesized)
cgtccgtctccctgcgcgccgcgggcacttctcctgggctctccccgaactctcccgcgacctctgcgcgccctcaggccgccttccccgccctgggctcgggacaacttctggggtggg

SEQ ID NO: 470432 - DNA, 120 bp, Artificial Sequence
  ENSG00000159217_2 (sequence is synthesized)
gtgcaaagaaagtttgcggctcctgccgccggcctctccgcctcttggcctaggaggctcgccgcccgcgcccgctcgttcggccttgcccgggaccgcgtcctgccccgagaccgccac

SEQ ID NO: 470433 - DNA, 120 bp, Artificial Sequence
  ENSG00000159217_3 (sequence is synthesized)
catgaacaagctttacatcggcaacctcaacgagagcgtgacccccgcggacttggagaaagtgtttgcggagcacaagatctcctacagcggccagttcttggtcaaatccggctacgc

SEQ ID NO: 470434 - DNA, 120 bp, Artificial Sequence
  ENSG00000159217_4 (sequence is synthesized)
cttcgtggactgcccggacgagcactgggcgatgaaggccatcgaaactttctccgggaaagtagaattacaaggaaaacgcttagagattgaacattcggtgcccaaaaaacaaaggag

SEQ ID NO: 470435 - DNA, 120 bp, Artificial Sequence
  ENSG00000159217_5 (sequence is synthesized)
ccggaaaattcaaatccgaaatattccaccccagctccgatgggaagtactggacagcctgctggctcagtatggtacagtagagaactgtgagcaagtgaacaccgagagtgagacggc

SEQ ID NO: 470436 - DNA, 120 bp, Artificial Sequence
  ENSG00000159217_6 (sequence is synthesized)
agtggtgaatgtcacctattccaaccgggagcagaccaggcaagccatcatgaagctgaatggccaccagttggagaaccatgccctgaaggtctcctacatccccgatgagcagatagc

SEQ ID NO: 470437 - DNA, 120 bp, Artificial Sequence
  ENSG00000159217_7 (sequence is synthesized)
acagggacctgagaatgggcgccgagggggctttggctctcggggtcagccccgccagggctcacctgtggcagcgggggccccagccaagcagcagcaagtggacatcccccttcggct

SEQ ID NO: 470438 - DNA, 120 bp, Artificial Sequence
  ENSG00000159217_8 (sequence is synthesized)
cctggtgcccacccagtatgtgggtgccattattggcaaggagggggccaccatccgcaacatcacaaaacagacccagtccaagatagacgtgcataggaaggagaacgcaggtgcagc

SEQ ID NO: 470439 - DNA, 120 bp, Artificial Sequence
  ENSG00000159217_9 (sequence is synthesized)
tgaaaaagccatcagtgtgcactccacccctgagggctgctcctccgcttgtaagatgatcttggagattatgcataaagaggctaaggacaccaaaacggctgacgaggttcccctgaa

SEQ ID NO: 470440 - DNA, 120 bp, Artificial Sequence
  ENSG00000159217_10 (sequence is synthesized)
gatcctggcccataataactttgtagggcgtctcattggcaaggaaggacggaacctgaagaaggtagagcaagataccgagacaaaaatcaccatctcctcgttgcaagaccttaccct

SEQ ID NO: 470441 - DNA, 120 bp, Artificial Sequence
  ENSG00000159217_11 (sequence is synthesized)
ttacaaccctgagaggaccatcactgtgaagggggccatcgagaattgttgcagggccgagcaggaaataatgaagaaagttcgggaggcctatgagaatgatgtggctgccatgagcct

SEQ ID NO: 470442 - DNA, 120 bp, Artificial Sequence
  ENSG00000159217_12 (sequence is synthesized)
gcagtctcacctgatccctggcctgaacctggctgctgtaggtcttttcccagcttcatccagcgcagtcccgccgcctcccagcagcgttactggggctgctccctatagctcctttat

SEQ ID NO: 470443 - DNA, 120 bp, Artificial Sequence
  ENSG00000159217_13 (sequence is synthesized)
gcaggctcccgagcaggagatggtgcaggtgtttatccccgcccaggcagtgggcgccatcatcggcaagaaggggcagcacatcaaacagctctcccggtttgccagcgcctccatcaa

SEQ ID NO: 470444 - DNA, 120 bp, Artificial Sequence
  ENSG00000159217_14 (sequence is synthesized)
gattgcaccacccgaaacacctgactccaaagttcgtatggttatcatcactggaccgccagaggcccaattcaaggctcagggaagaatctatggcaaactcaaggaggagaacttctt

SEQ ID NO: 470445 - DNA, 120 bp, Artificial Sequence
  ENSG00000159217_15 (sequence is synthesized)
tggtcccaaggaggaagtgaagctggagacccacatacgtgtgccagcatcagcagctggccgggtcattggcaaaggtggaaaaacggtgaacgagttgcagaatttgacggcagctga

SEQ ID NO: 470446 - DNA, 120 bp, Artificial Sequence
  ENSG00000159217_16 (sequence is synthesized)
ggtggtagtaccaagagaccagacccctgatgagaacgaccaggtcatcgtgaaaatcatcggacatttctatgccagtcagatggctcaacggaagatccgagacatcctggcccaggt

SEQ ID NO: 470447 - DNA, 120 bp, Artificial Sequence
  ENSG00000159217_17 (sequence is synthesized)
taagcagcagcatcagaagggacagagtaaccaggcccaggcacggaggaagtgaccagcccctccctgtcccttcgagtccaggacaacaacgggcagaaatcgagagtgtgctctccc

SEQ ID NO: 470448 - DNA, 120 bp, Artificial Sequence
  ENSG00000159217_18 (sequence is synthesized)
cggcaggcctgagaatgagtgggaatccgggacacctgggccgggctgtagatcaggtttgcccacttgattgagaaagatgttccagtgaggaaccctgatctctcagccccaaacacc

SEQ ID NO: 470449 - DNA, 120 bp, Artificial Sequence
  ENSG00000159217_19 (sequence is synthesized)
cacccaattggcccaacactgtctgcccctcggggtgtcagaaattctagcgcaaggcacttttaaacgtggattgtttaaagaagctctccaggccccaccaagagggtggatcacacc

SEQ ID NO: 470450 - DNA, 120 bp, Artificial Sequence
  ENSG00000159217_20 (sequence is synthesized)
tcagtgggaagaaaaataaaatttccttcaggttttaaaaacatgcagagaggtgttttaatcagccttaaaggatggttcatttcttgaccttaatgtttttccaatcttcttccccct

SEQ ID NO: 470451 - DNA, 120 bp, Artificial Sequence
  ENSG00000159217_21 (sequence is synthesized)
acttgggtaattgattaaaatacctccatttacggcctctttctatatttacactaatttttttatctttattgctaccagaaaaaaatgcgaacgaatgcattgctttgcttacagtat

SEQ ID NO: 470452 - DNA, 120 bp, Artificial Sequence
  ENSG00000159217_22 (sequence is synthesized)
tgactcaagggaaaagaactgtcagtatctgtagattaattccaatcactccctaaccaataggtacaatacggaatgaagaagaggggaaaatggggagaaagatggttaaaatacata

SEQ ID NO: 470453 - DNA, 120 bp, Artificial Sequence
  ENSG00000159217_23 (sequence is synthesized)
ataatccacgtttaaaaggagcgcacttgtggctgatctatgccagatcaccatcttcaaattggcacaactgaaatttccccactctgttggggcttccccaccacattcatgtccctc

SEQ ID NO: 470454 - DNA, 120 bp, Artificial Sequence
  ENSG00000159217_24 (sequence is synthesized)
tcccgtgtaggtttcacattatgtccaggtgcacataggtggtattgaatgctcagcagggtaggggctgaccactgtccctgattcccatcgttctcaggcggattttatattttttta

SEQ ID NO: 470455 - DNA, 120 bp, Artificial Sequence
  ENSG00000159217_25 (sequence is synthesized)
aagtctattttaatgattggatatgagcactgggaaggggacgctaactccccttgataaagtctcggttccatggaggacttgagtggccccaaaggctgccacggtgccctcacccca

SEQ ID NO: 470456 - DNA, 120 bp, Artificial Sequence
  ENSG00000159217_26 (sequence is synthesized)
gcccatgtgctcccataagggctggttcctagaggcaggggttgtggggcactcccagccacggcactgttaccttggtggtgggacttggaacccaaccctgagctcccgataaagcta

SEQ ID NO: 470457 - DNA, 120 bp, Artificial Sequence
  ENSG00000159217_27 (sequence is synthesized)
aagtccatcatctggcaaattcagtaaattggagagtacttgcttctgtttgtatctgagaggaatttttaactgacggcttctgtctccatgaatcattatcagcatgatgaaaggtgt

SEQ ID NO: 470458 - DNA, 120 bp, Artificial Sequence
  ENSG00000159217_28 (sequence is synthesized)
gtctaaaaaacaattcagaataccagcagcattgtacagcaaggggtaaataagcttaatttattaatttaccaggcttaattaagatcccatggagtgtttagcccttgtgggagacag

SEQ ID NO: 470459 - DNA, 120 bp, Artificial Sequence
  ENSG00000159217_29 (sequence is synthesized)
aagccatcagttaaatgaggttaggcctctcctcctaatatactgattgacaatgcatattagccaggtaatgcactttagctaccctggacaatgctatcaagtgtgctgggaagggag

SEQ ID NO: 470460 - DNA, 120 bp, Artificial Sequence
  ENSG00000159217_30 (sequence is synthesized)
gaaggcctctctacatatggaaaagcccatgcgtggagttcccctcctttcaacattgcaacaacagtaacaacaagacaaccgcaacatgtgggcgtagtcaggcaatgctgtgtgcga

SEQ ID NO: 470461 - DNA, 120 bp, Artificial Sequence
  ENSG00000159217_31 (sequence is synthesized)
agtaaactacctcaaggtatgaagttacctcagcaattattttcctttttgttccccccaaccccattaaaaaaatttttttttgatttttgtttttttgcagcttgctgatattttata

SEQ ID NO: 470462 - DNA, 120 bp, Artificial Sequence
  ENSG00000159217_32 (sequence is synthesized)
taaaaaagaaaagcaaagcaaaagagaagctgatagtcttgaatattttatttttttaatgaaaagaaaaaacaagaaagttatgtttcataatttcttacaacatgagccagtaaccct

SEQ ID NO: 470463 - DNA, 120 bp, Artificial Sequence
  ENSG00000159217_33 (sequence is synthesized)
ttaggaactctctatggagaacaggcctggtgggaaaggctttgggggctgcccccttaggaggaggctagtgctaagagggaaggcccaggtttgagagagcccagaggggcagagccc

SEQ ID NO: 470464 - DNA, 120 bp, Artificial Sequence
  ENSG00000159217_34 (sequence is synthesized)
agagccttgtttggccctgatctctgacttctagagccccagctgctggcggctgctggaatatcctacctgataggattaaaaggcctagtggagctgggggctctcagtggttaaaca

SEQ ID NO: 470465 - DNA, 120 bp, Artificial Sequence
  ENSG00000159217_35 (sequence is synthesized)
atgcccaacaaccaaccagctggcccttggtctcctctctttcctcctttggttaaagagcatctcagccagcttttcccaccagtggtgctgttgagatattttaaaatattgcctccg

SEQ ID NO: 470466 - DNA, 120 bp, Artificial Sequence
  ENSG00000159217_36 (sequence is synthesized)
ccctttaaaaaaacctatatttctctgtctaaaaatatgggagctgagattccgttcgtggaaaaaagacaaggccaccctctcgccctcagagaggtccacctggtttgtcattgcaat

SEQ ID NO: 470467 - DNA, 120 bp, Artificial Sequence
  ENSG00000159217_37 (sequence is synthesized)
gcttttcattttttttttttgttattgtttcatttcagttccgtcttgctattcttcctaatctatatccatagatctaaggggcaaacagatactagttaactgcccccacctctgtct

SEQ ID NO: 470468 - DNA, 120 bp, Artificial Sequence
  ENSG00000159217_38 (sequence is synthesized)
ccctgtcttctttagatcggtctgattgattttaaaagtggacccaaacttagggaattcttgatttagggtggctggtggcaaggaggggcaggggatatggggacgtgactgggacag

SEQ ID NO: 470469 - DNA, 120 bp, Artificial Sequence
  ENSG00000159217_39 (sequence is synthesized)
gttcctgccttatcattttctccctaggacattcccttgtagcccccagaattgtctggcccaaattgaatagaagcagaaaaacatttagggataacatcaggccagtagaattaagcc

SEQ ID NO: 470470 - DNA, 120 bp, Artificial Sequence
  ENSG00000159217_40 (sequence is synthesized)
tctccacctgtcccaaccataaaaagggtctcccagctttccatctctggctctatatgctttatcccaaaacaaagcagataacgttcagacgtcggccatttagtaatttaaagcgaa

SEQ ID NO: 470471 - DNA, 120 bp, Artificial Sequence
  ENSG00000159217_41 (sequence is synthesized)
tttccagcagcaagcatgctttgatatctggttcagactatcatcaggaagaaaaaaaaatcccacagtacctgaaatgtgattgttgcagtgttcagtttccttgggggcctgctccct

SEQ ID NO: 470472 - DNA, 120 bp, Artificial Sequence
  ENSG00000159217_42 (sequence is synthesized)
tcacaccttgagcccaagtccttttccgttggctgattcagctcccagaagagacgaggaagtgtgtggcaagggactggaaaacttcacttgcttggattaggcaaggctccactcatt

SEQ ID NO: 470473 - DNA, 120 bp, Artificial Sequence
  ENSG00000159217_43 (sequence is synthesized)
gttgatatttgcccagcaggaaaatcatgtaagttataccaccagaaagcaaaaggagcatggtttggtggttaaggtttagtgggatgaaggacctgtcttggtgggccgggccctctt

SEQ ID NO: 470474 - DNA, 120 bp, Artificial Sequence
  ENSG00000159217_44 (sequence is synthesized)
gtgccccgtaggctaggtcttagggcaactccttgccctcctgctcagcacctccatttccccatccttggtgagataacaagctatcgcgaaaagcacttgggagatttggatgatttg

SEQ ID NO: 470475 - DNA, 120 bp, Artificial Sequence
  ENSG00000159217_45 (sequence is synthesized)
agaagagtgacttaaaaaaaatgcttctgtgctctaagatatatatgtgtgtgtgtgtgctacatatatatttttaagaaaggaccatctctttaggatatatttttaaattctttgaaa

SEQ ID NO: 470476 - DNA, 120 bp, Artificial Sequence
  ENSG00000159217_46 (sequence is synthesized)
cacataaccaaaatggtttgattcactgactgactttgaagctgcatctgccagttacaccccaaatggctttaatcccctctcgggtctggttgccttttgcagtttgggttgtggact

SEQ ID NO: 470477 - DNA, 120 bp, Artificial Sequence
  ENSG00000159217_47 (sequence is synthesized)
cagctcctgtgaggggtctggttaggagagagccatttttaaggacagggagttttatagcccttttctactttcctcccctcctcccagtccttatcaatcttttttcctttttcctga

SEQ ID NO: 470478 - DNA, 120 bp, Artificial Sequence
  ENSG00000159217_48 (sequence is synthesized)
ccccctccttctggaggcagttgggagctatccttgtttatgcctcactattggcagaaaagaccccatttaaaacccagagaacactggagggggatgctctagttggttctgtgtcca

SEQ ID NO: 470479 - DNA, 120 bp, Artificial Sequence
  ENSG00000159217_49 (sequence is synthesized)
ttttcctctgtgccaaagacagacagacagaggctgagagaggctgttcctgaatcaaagcaatagccagctttcgacacatacctggctgtctgaggaggaaggcctcctggaaactgg

SEQ ID NO: 470480 - DNA, 120 bp, Artificial Sequence
  ENSG00000159217_50 (sequence is synthesized)
gagctaagggcgaggcccttcccttcagaggctcctgggggattagggtgtggtgtttgccaagccaaggggtagggagccgagaaattggtctgtcggctcctggttgcactttgggga

SEQ ID NO: 470481 - DNA, 120 bp, Artificial Sequence
  ENSG00000159217_51 (sequence is synthesized)
aggagaggaagtttggggctccaggtagctccctgttgtgggactgctctgtcccctgcccctactgcagagatagcactgccgagttcccttcaggcctggcagacgggcagtgaggag

SEQ ID NO: 470482 - DNA, 120 bp, Artificial Sequence
  ENSG00000159217_52 (sequence is synthesized)
gggcctcagttagctctcaagggtgccttcccctcctcccaacccagacataccctctgccaaactgggaaccagcagtgctagtaactacctcacagagccccagagggcctgcttgag

SEQ ID NO: 470483 - DNA, 120 bp, Artificial Sequence
  ENSG00000159217_53 (sequence is synthesized)
ccttcttgctccacaggagaagctggtgcctctaggcaaccccttcctcccacctctcatcaggggtgggggttctcctttctttcccctgaagtgtttatggggagatcctagtggctt

SEQ ID NO: 470484 - DNA, 120 bp, Artificial Sequence
  ENSG00000159217_54 (sequence is synthesized)
tgccattcaaaccactcgactgtttgcctgtttcttgaaaaccagtagaagggaaacagcacagcctgtcacagtaattgcaggaagattgaagaaaaatcctcatcaatgccaggggac

SEQ ID NO: 470485 - DNA, 120 bp, Artificial Sequence
  ENSG00000159217_55 (sequence is synthesized)
ataaaagccatttcccttccaaatactcgacaatttagatgcagaacatttctctgtattcagacttagagtaacaccagctgaaaactgcagtttctttcctttggatacataaggctt

SEQ ID NO: 470486 - DNA, 120 bp, Artificial Sequence
  ENSG00000159217_56 (sequence is synthesized)
ctctatcggggtacgggacagggaggaggcctcatgtctgaagggggatttaggggcgagagccccagccctgaccctcggtcctgtgcaccgctttggggcacagtctgatggcgcctt

SEQ ID NO: 470487 - DNA, 120 bp, Artificial Sequence
  ENSG00000159217_57 (sequence is synthesized)
tgctggcgccttagtatggttgactccggatggacaaaagaaaaaaaattttttttcttgaatgaaatagcaggaagctcctcgggagcatgtgttttgattaaccgcaggtgatggatg

SEQ ID NO: 470488 - DNA, 120 bp, Artificial Sequence
  ENSG00000159217_58 (sequence is synthesized)
ctacgagtataaatggattaactacctcaatccttacagtaagattggaactaagggcagggactcatgcataagggtatgaatcccagccaggacaagtgagttgaggcttgtgccaca

SEQ ID NO: 470489 - DNA, 120 bp, Artificial Sequence
  ENSG00000159217_59 (sequence is synthesized)
aaaggtttgtccttggggaacaggcaggcctgccaggatcccccccatatcgattgggctgggagggctggccatgaggtccccactttctgctttccttgcccatgtgtcacccctttg

SEQ ID NO: 470490 - DNA, 120 bp, Artificial Sequence
  ENSG00000159217_60 (sequence is synthesized)
gcctccagcttgtccctctctcactttctatagctttgttggaccagatggtgaggaaaggaatggcctcttcccttctagagggggctggctggagtgagacctggggcttggcctgga

SEQ ID NO: 470491 - DNA, 120 bp, Artificial Sequence
  ENSG00000159217_61 (sequence is synthesized)
acccaccacacagccccaaagtcaggaagcctggggaaaccagagctgagacctcttcaacagggtttctttgagatcctacacctccattgggccctttttcagtcttcaatgggggcc

SEQ ID NO: 470492 - DNA, 120 bp, Artificial Sequence
  ENSG00000159217_62 (sequence is synthesized)
cagttggctctagaaggagaagaggtgaagcaggatcctttgccctgggggagtctgagggcgcggtccttggactcattcaggccgtctttgtagttgggggagttccactgggcgatc

SEQ ID NO: 470493 - DNA, 120 bp, Artificial Sequence
  ENSG00000159217_63 (sequence is synthesized)
ccagcccctccccacccaccctctaatggacctcctcatagaagccccatttcacttttgttttatctacctcttagcaaaacaatagataaattaggtagtggcagctccacttgctta

SEQ ID NO: 470494 - DNA, 120 bp, Artificial Sequence
  ENSG00000159217_64 (sequence is synthesized)
attaggtagtggcagctccacttgcttaggttagggggggaaaaagatttctttttccaaaggaaaaaaatattaccttgagaatactttccaaaaaataaaattaaaaaaaaaaaaacc

SEQ ID NO: 470495 - DNA, 120 bp, Artificial Sequence
  ENSG00000159217_65 (sequence is synthesized)
gacattttccagtgaccactggattgttttaatttcccaagcttttttttcccccataaataagtttcactctttggcgattttcttcacttgtttaagataacgtgctagctattccaa

SEQ ID NO: 470496 - DNA, 120 bp, Artificial Sequence
  ENSG00000159217_66 (sequence is synthesized)
caggtaacagctttcacagtctgcccctggcctgtctcaccccatcccccaccctattcctgccagtgagtccttcctgtgcttctctcccttctcccctcccagccagctgacttcagt

SEQ ID NO: 470497 - DNA, 120 bp, Artificial Sequence
  ENSG00000159217_67 (sequence is synthesized)
cacccctgtcccccctcccctgccaataagctcccccaggaataaaggctttgttttggggatgcttaaatcttgactggcacttcccggctgtgggggctggggagccacttgtaacat

SEQ ID NO: 470498 - DNA, 120 bp, Artificial Sequence
  ENSG00000159217_68 (sequence is synthesized)
ttctgtgcagattttatgttagccactgctatgtaaaagcacgttcaaaatgaatttcagcagattatgtgttaccataatgaataaacgtcctctatcaccatttggagtctccctttt

SEQ ID NO: 470499 - DNA, 120 bp, Artificial Sequence
  ENSG00000159217_69 (sequence is synthesized)
ctccaggatcttgatcctggtccccaaaaccagagtgaatcaaaagagcttcctcccctgaggcaaagtggatttgtaagcagttctgaaacatcacttactcagaagagggaacgatgt

SEQ ID NO: 470500 - DNA, 120 bp, Artificial Sequence
  ENSG00000159217_70 (sequence is synthesized)
attttgatgagtgcaaattgggaagagctggaggcctactgcttgggacagttttttttttttttttttttttaaatatgagtgctagcttattctgtaattgcggcaactttgaaaatt

SEQ ID NO: 470501 - DNA, 120 bp, Artificial Sequence
  ENSG00000159217_71 (sequence is synthesized)
gtattttactggaaatctgccagccatcaccacccgattttgattgtatccttcctcccatcctttaatctgttcattgctttgggggaggtggggcagctggctcacacgttggagttt

SEQ ID NO: 470502 - DNA, 120 bp, Artificial Sequence
  ENSG00000159217_72 (sequence is synthesized)
gttctttgatggatgaacgaacactccagttttctttcccgtgaaggttgtttcagccacaaaccacttcattttgctgtttcaatttcaaaataaaaggaaacttatattgaaagacaa

SEQ ID NO: 470503 - DNA, 120 bp, Artificial Sequence
  ENSG00000159217_73 (sequence is synthesized)
aacaataacagaggcagtaatagtagtcagaggttctatccatggattttgtttatcttgtaaaagagagacaacaggccttccagttgtccagggtctcagccagtcttcgactccatg

SEQ ID NO: 470504 - DNA, 120 bp, Artificial Sequence
  ENSG00000159217_74 (sequence is synthesized)
ttagtgtaaaacttctgcaccccatccatttccacctttcctctcctcccctatacctttttaaatgcctgtcaaaacaaaaagcagaaggaaaggtctctcaaacctgtactcaagaaa

SEQ ID NO: 470505 - DNA, 120 bp, Artificial Sequence
  ENSG00000159217_75 (sequence is synthesized)
cgtgcggagccctgtagcggaggggctggggggctgctctgtccccttccttgcgcgctgcggcctcagcccacccagaggccggggtgggagggcgagtgctcagcttcccgggttagg

SEQ ID NO: 470506 - DNA, 120 bp, Artificial Sequence
  ENSG00000159217_76 (sequence is synthesized)
ttcaacacccgccacgatggcgttcaacctggcagattaatttaacaactctctgatgggttgccctgaaatttgaaaaacagtgccttgggctgggcgcgatggctcacacctgtaatc

SEQ ID NO: 470507 - DNA, 120 bp, Artificial Sequence
  ENSG00000159217_77 (sequence is synthesized)
agggtgtccagtggctgctttgcaagggtcttgggactcagagttaagtgtacttcccttctccattctcctaggtactggacagcctgctggctcagtatggtacagtagagaactgtg

SEQ ID NO: 470508 - DNA, 120 bp, Artificial Sequence
  ENSG00000159224_0 (sequence is synthesized)
agcaggctcagaaggtccagaaatcaggggaaggagacccctatctgtccttcttctggaagagctggaaaggaagtctgctcaggaaataaccttggaagatggtggccacgaagacct

SEQ ID NO: 470509 - DNA, 120 bp, Artificial Sequence
  ENSG00000159224_1 (sequence is synthesized)
ttgctctgctgctgctgtccctgttcctggcagtgggactaggagagaagaaagagggtcacttcagcgctctcccctccctgcctgttggatctcatgctaaggtgagcagccctcaac

SEQ ID NO: 470510 - DNA, 120 bp, Artificial Sequence
  ENSG00000159224_2 (sequence is synthesized)
gactggaaacacaacatcacccagagggaggctcgggcgctggagctggccagtcaagctaataggaaggaggaggaggcagtggagccacagagctccccagccaagaaccccagcgat

SEQ ID NO: 470511 - DNA, 120 bp, Artificial Sequence
  ENSG00000159224_3 (sequence is synthesized)
gaagatttgctgcgggacttgctgattcaagagctgttggcctgcttgctggatcagacaaacctctgcaggctcaggtctcggtgactctgaccacacccagctcaggactggattctg

SEQ ID NO: 470512 - DNA, 120 bp, Artificial Sequence
  ENSG00000159224_4 (sequence is synthesized)
cccttcacttagcacctgcctcagccccactccagaatagccaagagaacccaaaccaataaagtttatgctaagtcgagcccattgtgaaaatttattaaaatgactactgagcactaa

SEQ ID NO: 470513 - DNA, 120 bp, Artificial Sequence
  ENSG00000159228_0 (sequence is synthesized)
agactcgagcagtctctggaacacgctgcggggctcccgggcctgagccaggtctgttctccacgcaggtgttccgcgcgccccgttcagccatgtcgtccggcatccatgtagcgctgg

SEQ ID NO: 470514 - DNA, 120 bp, Artificial Sequence
  ENSG00000159228_1 (sequence is synthesized)
tgactggaggcaacaagggcatcggcttggccatcgtgcgcgacctgtgccggctgttctcgggggacgtggtgctcacggcgcgggacgtgacgcggggccaggcggccgtacagcagc

SEQ ID NO: 470515 - DNA, 120 bp, Artificial Sequence
  ENSG00000159228_2 (sequence is synthesized)
tgcaggcggagggcctgagcccgcgcttccaccagctggacatcgacgatctgcagagcatccgcgccctgcgcgacttcctgcgcaaggagtacgggggcctggacgtgctggtcaaca

SEQ ID NO: 470516 - DNA, 120 bp, Artificial Sequence
  ENSG00000159228_3 (sequence is synthesized)
acgcgggcatcgccttcaaggttgctgatcccacaccctttcatattcaagctgaagtgacgatgaaaacaaatttctttggtacccgagatgtgtgcacagaattactccctctaataa

SEQ ID NO: 470517 - DNA, 120 bp, Artificial Sequence
  ENSG00000159228_4 (sequence is synthesized)
aaccccaagggagagtggtgaacgtatctagcatcatgagcgtcagagcccttaaaagctgcagcccagagctgcagcagaagttccgcagtgagaccatcactgaggaggagctggtgg

SEQ ID NO: 470518 - DNA, 120 bp, Artificial Sequence
  ENSG00000159228_5 (sequence is synthesized)
aacaagtttgtggaggatacaaagaagggagtgcaccagaaggagggctggcccagcagcgcatacggggtgacgaagattggcgtcaccgttctgtccaggatccacgccaggaaactg

SEQ ID NO: 470519 - DNA, 120 bp, Artificial Sequence
  ENSG00000159228_6 (sequence is synthesized)
agtgagcagaggaaaggggacaagatcctcctgaatgcctgctgcccagggtgggtgagaactgacatggcgggacccaaggccaccaagagcccagaagaaggtgcagagacccctgtg

SEQ ID NO: 470520 - DNA, 120 bp, Artificial Sequence
  ENSG00000159228_7 (sequence is synthesized)
tacttggcccttttgcccccagatgctgagggtccccatggacaatttgtttcagagaagagagttgaacagtggtgagctgggctcacagctccatccatgggccccattttgtacctt

SEQ ID NO: 470521 - DNA, 120 bp, Artificial Sequence
  ENSG00000159228_8 (sequence is synthesized)
gtcctgagttggtccaaagggcatttacaatgtcataaatatccttatataagaaaaaaaatgatctcttatcaattagcactcactaatgtactactaattgagcaacctacgcactca

SEQ ID NO: 470522 - DNA, 120 bp, Artificial Sequence
  ENSG00000159228_9 (sequence is synthesized)
gttgactacgtaaatctgtcaggtcttttgtgatttcctctgatgcaggagaggaaaaattgtaattgatgaaaataatgaatgaaaatcaacagatgaataaatggttctttataagtg

SEQ ID NO: 470523 - DNA, 120 bp, Artificial Sequence
  ENSG00000159228_10 (sequence is synthesized)
ggcccctgcttgcctgggatttctcctgcaggctcctgcttcctctccatgctgcacgtgcactgacctctgtgctttttctcctgccagctgatatgtgccattttgcctcaggacttt

SEQ ID NO: 470524 - DNA, 120 bp, Artificial Sequence
  ENSG00000159228_11 (sequence is synthesized)
gtcctcacttctcccactcccatggccattcgtcctccctgtcgcactggtctttgcacacctggctgactctcatccttcaggtcttagctcaaacgtctcctgagagatgctctttat

SEQ ID NO: 470525 - DNA, 120 bp, Artificial Sequence
  ENSG00000159228_12 (sequence is synthesized)
ttgctccattcccctctgcgtgggagtccatcctgtaccctttctctgctctttcagagagatcttattcaggctggtggaggctttactaccaccagttcattaggcccttctaatacc

SEQ ID NO: 470526 - DNA, 120 bp, Artificial Sequence
  ENSG00000159228_13 (sequence is synthesized)
tgtcacctgtctgaaacactccttaagctcccaaccacatggttgtcttgctgcctttccatctcttcctgatgcctttccccacaatctaagatatttccagaggatccctatcctttt

SEQ ID NO: 470527 - DNA, 120 bp, Artificial Sequence
  ENSG00000159228_14 (sequence is synthesized)
cctctcccaaaatccttcaggaggaaagtccaagcccttagcatggttcacagagatgtccataatctgccgctgcttaactctgggcccattttaactccccttcaacgtgctgaaggt

SEQ ID NO: 470528 - DNA, 120 bp, Artificial Sequence
  ENSG00000159228_15 (sequence is synthesized)
gctggacatgactatcacatgtctttggttgtaaactgctgtgatagttaccctaagtaatgggacaggagatgaacccacccattaaataacacagcaattaagcagccacttttagaa

SEQ ID NO: 470529 - DNA, 120 bp, Artificial Sequence
  ENSG00000159228_16 (sequence is synthesized)
aaatttaaatgtgtggcttcgagttgggtacttgcatgtacagcttactctcagcttttatcctgtttccctgtcctgtcgtcctgttaagttgtgctacttctaaggctctggttcacc

SEQ ID NO: 470530 - DNA, 120 bp, Artificial Sequence
  ENSG00000159228_17 (sequence is synthesized)
cctcaaagggcagctcttccaaatctcacctgactctactcagccaaaattcgaaggcaggaatgaacttcttcatgcaactaccaccacactttctatgcgtattcctcttagaactca

SEQ ID NO: 470531 - DNA, 120 bp, Artificial Sequence
  ENSG00000159228_18 (sequence is synthesized)
taccagtaactgtctctcatatgaaaattttctgctccaaaatccctgcaaatttggcattcacctctctacgggattgttgcacacctttctacataatgctttgtggtgtatcttagg

SEQ ID NO: 470532 - DNA, 120 bp, Artificial Sequence
  ENSG00000159231_0 (sequence is synthesized)
agaacttagtctgcgcggcggcattgacactagctgggctcctcggggcgcgccccaggtggtccgaagcccggtccgccctccacgcaggtgccccgcgctccccgctcagccatgtcg

SEQ ID NO: 470533 - DNA, 120 bp, Artificial Sequence
  ENSG00000159231_1 (sequence is synthesized)
tcctgcagccgcgtggcgctggtgaccggggccaacaggggcatcggcttggccatcgcgcgcgaactgtgccgacagttctctggggatgtggtgctcaccgcgcgggacgtggcgcgg

SEQ ID NO: 470534 - DNA, 120 bp, Artificial Sequence
  ENSG00000159231_2 (sequence is synthesized)
ggccaggcggccgtgcagcagctgcaggcggagggcctgagcccgcgcttccaccaactggacatcgacgacttgcagagcatccgcgccctgcgcgacttcctgcgcaaggagtacggg

SEQ ID NO: 470535 - DNA, 120 bp, Artificial Sequence
  ENSG00000159231_3 (sequence is synthesized)
gggctcaacgtactggtcaacaacgcggccgtcgccttcaagagtgatgatccaatgccctttgacattaaagctgagatgacactgaagacaaatttttttgccactagaaacatgtgc

SEQ ID NO: 470536 - DNA, 120 bp, Artificial Sequence
  ENSG00000159231_4 (sequence is synthesized)
ggtgaatatcagtagtttgcagtgtttaagggcttttgaaaactgcagtgaagatctgcaggaaaggttccacagtgagacactcacagaaggagacctggtggatctcatgaaaaagtt

SEQ ID NO: 470537 - DNA, 120 bp, Artificial Sequence
  ENSG00000159231_5 (sequence is synthesized)
tgtggaggacacaaaaaatgaggtgcatgagagggaaggctggcccaactcaccttatggggtgtccaagttgggggtcacggtcttatcgaggatcctggccaggcgtctggatgagaa

SEQ ID NO: 470538 - DNA, 120 bp, Artificial Sequence
  ENSG00000159231_6 (sequence is synthesized)
gaggaaagctgacaggattctggtgaatgcgtgctgcccaggaccagtgaagacagacatggatgggaaagacagcatcaggactgtggaggagggggctgagacccctgtctacttggc

SEQ ID NO: 470539 - DNA, 120 bp, Artificial Sequence
  ENSG00000159231_7 (sequence is synthesized)
cctcttgcctccagatgccactgagccacaaggccagttggtccatgacaaagttgtgcaaaactggtaaacgtctgcttcggagcttgctgcttaataaatgttggtggaatgaatgaa

SEQ ID NO: 470540 - DNA, 120 bp, Artificial Sequence
  ENSG00000159248_0 (sequence is synthesized)
gcggatccccgagcccagcattcggctccgcgcgctcggccctggcctcgcaggctgccgcgccggagcgccaggtgcccgctgaagtagcaggaacagagccggtgttcggaccctccc

SEQ ID NO: 470541 - DNA, 120 bp, Artificial Sequence
  ENSG00000159248_1 (sequence is synthesized)
ctggcccccaacctgcggcggagagcggcgctgagacttctcctgggcgggcgagcgctggaggacctgcaggctgccaccccgccccgcccctcgtcccggcgtccgcgggatccagac

SEQ ID NO: 470542 - DNA, 120 bp, Artificial Sequence
  ENSG00000159248_2 (sequence is synthesized)
ccgaaccccggacggcgcccgaggttcgtgccctctctctagaccgcgccaactgccccatcggtcgggacgcgcttggatttctttccccatttcttctcttttaagtacaataaaagg

SEQ ID NO: 470543 - DNA, 120 bp, Artificial Sequence
  ENSG00000159248_3 (sequence is synthesized)
aaagggggattcgaggattttttaaaaaattgcttctttaattgggaggcaattcactcccattctggaagtgcggcccggggaggggccaggagcgggaacgtgcccggtgctgcccag

SEQ ID NO: 470544 - DNA, 120 bp, Artificial Sequence
  ENSG00000159248_4 (sequence is synthesized)
tctttgtctgctgcctccggatgcacagcgatgggggaatggaccatcttggagaggctgctagaagccgcggtgcagcagcactccactatgatcgggaggatcctgttgactgtggtg

SEQ ID NO: 470545 - DNA, 120 bp, Artificial Sequence
  ENSG00000159248_5 (sequence is synthesized)
gtgatcttccggatcctcattgtggccattgtgggggagacggtgtacgatgatgagcagaccatgtttgtgtgcaacaccctgcagcccggctgtaaccaggcctgctatgaccgcgcc

SEQ ID NO: 470546 - DNA, 120 bp, Artificial Sequence
  ENSG00000159248_6 (sequence is synthesized)
ttccccatctcccacatacgttactgggtcttccagatcataatggtgtgtacccccagtctttgcttcatcacctactctgtgcaccagtccgccaagcagcgagaacgccgctactct

SEQ ID NO: 470547 - DNA, 120 bp, Artificial Sequence
  ENSG00000159248_7 (sequence is synthesized)
acagtcttcctagccctggacagagacccccctgagtccataggaggtcctggaggaactgggggtgggggcagtggtgggggcaaacgagaagataagaagttgcaaaatgctattgtg

SEQ ID NO: 470548 - DNA, 120 bp, Artificial Sequence
  ENSG00000159248_8 (sequence is synthesized)
aatggggtgctgcagaacacagagaacaccagtaaggagacagagccagattgtttagaggttaaggagctgactccacacccatcaggtctacgcactgcatcaaaatccaagctcaga

SEQ ID NO: 470549 - DNA, 120 bp, Artificial Sequence
  ENSG00000159248_9 (sequence is synthesized)
aggcaggaaggcatctcccgcttctacattatccaagtggtgttccgaaatgccctggaaattgggttcctggttggccaatattttctctatggctttagtgtcccagggttgtatgag

SEQ ID NO: 470550 - DNA, 120 bp, Artificial Sequence
  ENSG00000159248_10 (sequence is synthesized)
tgtaaccgctacccctgcatcaaggaggtggaatgttatgtgtcccggccaactgagaagactgtctttctagtgttcatgtttgctgtaagtggcatctgtgttgtgctcaacctggct

SEQ ID NO: 470551 - DNA, 120 bp, Artificial Sequence
  ENSG00000159248_11 (sequence is synthesized)
gaactcaaccacctgggatggcgcaagatcaagctggctgtgcgaggggctcaggccaagagaaagtcaatctatgagattcgtaacaaggacctgccaagggtcagtgttcccaatttt

SEQ ID NO: 470552 - DNA, 120 bp, Artificial Sequence
  ENSG00000159248_12 (sequence is synthesized)
aggtttcatgaaggtctgggggatggcaaggagccccaaggcagatgactgctcagacgtggctgtatccaccctcatttatgtgaccctcaccattaagatgtaggataagactggata

SEQ ID NO: 470553 - DNA, 120 bp, Artificial Sequence
  ENSG00000159248_13 (sequence is synthesized)
aaagaagattttgcaccaatgggaaaggaggaaaagtggacccattttcacatatcacctaattggttctacagagacgattgggtagagtgatgaaatggatcaattagacttctttgg

SEQ ID NO: 470554 - DNA, 120 bp, Artificial Sequence
  ENSG00000159248_14 (sequence is synthesized)
tccctttctgtttatggcctagcctgatcctgataacactgaacttgcacagctaccaagtaggacttagccctgctgagctctttattctggtgaatggtgtgagttgagtacttcatt

SEQ ID NO: 470555 - DNA, 120 bp, Artificial Sequence
  ENSG00000159248_15 (sequence is synthesized)
gatataaaatttgtgacctatctcaacccatccctttatcctgagccatgggacaaacatccttgaggcactcttcatgtatctcccccaccagcatgcccctttccctcaatccaaaat

SEQ ID NO: 470556 - DNA, 120 bp, Artificial Sequence
  ENSG00000159248_16 (sequence is synthesized)
ttttttttttttttttttttttttccagaatctggccttacattagacctaatatgttttatttgcaaacttagagggaattacatggggtgcttattggagaacggccatggcagaggt

SEQ ID NO: 470557 - DNA, 120 bp, Artificial Sequence
  ENSG00000159248_17 (sequence is synthesized)
catggcagaggttttcattagagccccatctgactggcccttagtcgtgatgaaaaccttaggaatgtctcaatatttccagttttctaactcaaactgcactggtgctgtttactaggg

SEQ ID NO: 470558 - DNA, 120 bp, Artificial Sequence
  ENSG00000159248_18 (sequence is synthesized)
atgggggatgggtgggagggagggaattgcaatatgcaactacaacacttttgtgagattgttgttgcacagttaggcacacggttacgagcttcaggatatttctgccttccagcttgt

SEQ ID NO: 470559 - DNA, 120 bp, Artificial Sequence
  ENSG00000159248_19 (sequence is synthesized)
ggactttggttaacattaaaaagattttttttggctaatatcaagagtgtctagctgagccacagcatttgtaactggtgtatctcactcattttcttacatagttttgttgtgcaacac

SEQ ID NO: 470560 - DNA, 120 bp, Artificial Sequence
  ENSG00000159248_20 (sequence is synthesized)
agctgcacggtcattttgccatgatttgaatttacctgtgtgcttacaccagagaccttaatcatcccatgtcaatcctgatttattattttttcagttactctttgaaacacacacaca

SEQ ID NO: 470561 - DNA, 120 bp, Artificial Sequence
  ENSG00000159248_21 (sequence is synthesized)
tatacagacacacatacaaaattactggcttaaaagacctgcaactaaacactattggctaacgtgtgtttacggtgacttatttgagacatataccaaaggttcaaaaacctattgcat

SEQ ID NO: 470562 - DNA, 120 bp, Artificial Sequence
  ENSG00000159248_22 (sequence is synthesized)
tggactgtcaatatgttttcttctttttgctcttatttatttaagtgccatactgtacctttcatatccactgtgtatttagttaaaatattggccaagagaaacatctgggtaatgtgc

SEQ ID NO: 470563 - DNA, 120 bp, Artificial Sequence
  ENSG00000159248_23 (sequence is synthesized)
ttttatgaagccctttgttccctttgaattatcattatcatttttgatttagatatggacatggtgtaacacacaactaaggatttgtttaaaataaagttcttgcctttttttgtaaaa

SEQ ID NO: 470564 - DNA, 120 bp, Artificial Sequence
  ENSG00000159251_0 (sequence is synthesized)
agagcccgctgccgccggagccgagccgacccgccccgccgacgaaccccctgaagctgtgccaagatgtgtgacgacgaggagaccaccgccctggtgtgcgacaacggctctgggctg

SEQ ID NO: 470565 - DNA, 120 bp, Artificial Sequence
  ENSG00000159251_1 (sequence is synthesized)
gtgaaggccggctttgcgggcgatgacgcgccccgcgctgtcttcccgtccatcgtgggccgcccgcggcaccagggagttatggtgggtatgggtcagaaggactcctacgtaggtgat

SEQ ID NO: 470566 - DNA, 85 bp, Artificial Sequence
  ENSG00000159251_2 (sequence is synthesized)
aggactcctacgtaggtgatgaatcccatcgagcatggtatcatcaccaactgggacgacatggagaagatctggcaccacacct

SEQ ID NO: 470567 - DNA, 120 bp, Artificial Sequence
  ENSG00000159251_3 (sequence is synthesized)
gctcccgaggagcaccccaccctgctcacagaggccccgctgaaccccaaggccaaccgggagaagatgactcagatcatgtttgagaccttcaatgtccctgccatgtacgtggccatc

SEQ ID NO: 470568 - DNA, 120 bp, Artificial Sequence
  ENSG00000159251_4 (sequence is synthesized)
caggcagtgctatccctgtatgcttctggccgtaccacaggcattgttctggactctggggatggtgtaactcacaatgtccccatctatgagggctacgctttgccccatgccatcatg

SEQ ID NO: 470569 - DNA, 120 bp, Artificial Sequence
  ENSG00000159251_5 (sequence is synthesized)
ctactcctttgtcaccactgctgaacgtgaaattgtccgtgacattaaagagaagctgtgctatgtcgccctggattttgagaatgagatggccacagctgcctcttcctcctccctgga

SEQ ID NO: 470570 - DNA, 120 bp, Artificial Sequence
  ENSG00000159251_6 (sequence is synthesized)
gaagagctatgaactgcctgatggccaagtcatcactattggcaatgagcgcttccgctgtcctgagacactcttccagccctccttcattggtatggaatctgctggcatccatgaaac

SEQ ID NO: 470571 - DNA, 120 bp, Artificial Sequence
  ENSG00000159251_7 (sequence is synthesized)
aacttacaatagcatcatgaagtgtgacattgatatccgcaaggacctgtatgccaacaatgtcttatctggaggcaccactatgtaccctggtattgctgatcgtatgcagaaggaaat

SEQ ID NO: 470572 - DNA, 120 bp, Artificial Sequence
  ENSG00000159251_8 (sequence is synthesized)
cactgctctggctcctagcaccatgaagattaagattattgctccccctgagcgtaaatactctgtctggattgggggctccatcctggcctctctgtccaccttccagcaaatgtggat

SEQ ID NO: 470573 - DNA, 120 bp, Artificial Sequence
  ENSG00000159251_9 (sequence is synthesized)
tagcaagcaagagtacgatgaggcaggcccatccattgtccaccgcaaatgcttctaagatgccttctctctccatctaccttccagtcaggatgacggtattatgcttcttggagtctt

SEQ ID NO: 470574 - DNA, 120 bp, Artificial Sequence
  ENSG00000159251_10 (sequence is synthesized)
ccaaaccaccttccctcatctttcatcaatcattgtacagtttgtttacacacgtgcaatttgtttgtgcttctaatatttattgctttataaataaaccagaccaggacttgcaaccta

SEQ ID NO: 470575 - DNA, 120 bp, Artificial Sequence
  ENSG00000159251_11 (sequence is synthesized)
atttcactgttggagtgaggatggcatatcagcccatcattatgtgttcacttgaatgtcaaaatctttttcttaggagaaatacaatgtgtcattaattcagtcattccaaaatgcagt

SEQ ID NO: 470576 - DNA, 120 bp, Artificial Sequence
  ENSG00000159251_12 (sequence is synthesized)
catctatattccagttgacatgggtgatgagcttaataacttaatgaaggcatatgatatttttaaggtgaggtgaggctctgcttcttcagtggaatagcttcattctctcctgagtta

SEQ ID NO: 470577 - DNA, 120 bp, Artificial Sequence
  ENSG00000159251_13 (sequence is synthesized)
gattttccctggaaatcttagggtctcccagagtaaaatctagaaggctcaagaagcccttgagttaaaagaagtcatagtttggattcccacacagctcaacctcaagtcctgatggct

SEQ ID NO: 470578 - DNA, 120 bp, Artificial Sequence
  ENSG00000159251_14 (sequence is synthesized)
cattaaaggggaagtctatgttctgctctagtgatataataaaggatgacacactgagttcatctcaaaataaaggatgacacagagtagtaactgaatagcacgtatctgcaggaaaag

SEQ ID NO: 470579 - DNA, 120 bp, Artificial Sequence
  ENSG00000159251_15 (sequence is synthesized)
ggctagttcacaagagctgacttattcccgtaagtttcactaccaagtagctggactttccaagttcctcatcattaaatgcaataacattcctactcatattaataactgggcacttat

SEQ ID NO: 470580 - DNA, 120 bp, Artificial Sequence
  ENSG00000159251_16 (sequence is synthesized)
gcttacataatgtgctcgtggctgacaagaaagatggtcatttgaaagtgtcctcgggaattttttctactataatagttaaaaagatgagctgcagtttgcttcagatttagtattcct

SEQ ID NO: 470581 - DNA, 120 bp, Artificial Sequence
  ENSG00000159256_0 (sequence is synthesized)
acagtcgttccgccacctcccagtcgggttgcggcggaggccgttcctggctttgtagctcgctcaagatggcggcgcagccaccccgcgggatacgcctcagcgcgctttgcccgaagt

SEQ ID NO: 470582 - DNA, 120 bp, Artificial Sequence
  ENSG00000159256_1 (sequence is synthesized)
ttttacatacaaattctactagtcacacctggccattcagtgcagttgctgaattaatagataatgcttatgatcctgatgtgaacgctaaacaaatatggattgacaaaacagtgataa

SEQ ID NO: 470583 - DNA, 120 bp, Artificial Sequence
  ENSG00000159256_2 (sequence is synthesized)
atgaccatatatgcttgacattcaccgacaatgggaatggtatgacttctgataaattacataaaatgctaagctttggcttcagtgacaaagtcaccatgaatggtcatgtcccagttg

SEQ ID NO: 470584 - DNA, 120 bp, Artificial Sequence
  ENSG00000159256_3 (sequence is synthesized)
gattatatgggaatggcttcaagtcgggttctatgcgtctgggtaaagacgcaatcgtttttaccaaaaatggagaaagcatgagcgtgggccttttgtctcagacctacttggaagtca

SEQ ID NO: 470585 - DNA, 120 bp, Artificial Sequence
  ENSG00000159256_4 (sequence is synthesized)
taaaagcggagcatgttgttgttccaatagtggcattcaacaagcaccgacagatgattaatttagcagaatcaaaagccagccttgctgcaattctggaacattctctgttttccacgg

SEQ ID NO: 470586 - DNA, 120 bp, Artificial Sequence
  ENSG00000159256_5 (sequence is synthesized)
aacagaagttactggcagaacttgatgctattataggcaagaaggggacgaggatcatcatttggaatcttagaagctacaaaaatgcaacagagttcgattttgaaaaggataaatatg

SEQ ID NO: 470587 - DNA, 120 bp, Artificial Sequence
  ENSG00000159256_6 (sequence is synthesized)
atatcagaattcccgaggatttagatgagataacagggaagaaggggtacaagaagcaggaaaggatggaccagattgcccctgagagtgactattccctgagggcttattgcagtatat

SEQ ID NO: 470588 - DNA, 120 bp, Artificial Sequence
  ENSG00000159256_7 (sequence is synthesized)
tatatctaaagccaagaatgcagatcatcctacgtggacagaaagtgaagacacagctggtttcgaagagtcttgcctacatcgaacgtgatgtttatcgaccaaaatttttatctaaaa

SEQ ID NO: 470589 - DNA, 120 bp, Artificial Sequence
  ENSG00000159256_8 (sequence is synthesized)
cagtgagaattacctttggattcaactgcagaaataaagatcattatgggataatgatgtatcacagaaatagactcatcaaagcttatgaaaaagttggatgtcagttaagggcaaaca

SEQ ID NO: 470590 - DNA, 120 bp, Artificial Sequence
  ENSG00000159256_9 (sequence is synthesized)
acatgggtgttggagtggttggaattatagagtgtaatttccttaagccaactcataataaacaagatttcgactatactaatgagtacagacttacaataacagcactaggagaaaagc

SEQ ID NO: 470591 - DNA, 120 bp, Artificial Sequence
  ENSG00000159256_10 (sequence is synthesized)
tgaatgattactggaatgaaatgaaagtgaagaaaaatacagaatatcctctaaatttgccagttgaagatatacagaagcgtcctgatcagacatgggttcagtgtgatgcctgtctaa

SEQ ID NO: 470592 - DNA, 120 bp, Artificial Sequence
  ENSG00000159256_11 (sequence is synthesized)
agtggcggaaattacctgatgggatggatcaacttcctgaaaaatggtattgctccaataaccctgacccacagttcagaaattgtgaggttccagaagaacctgaagatgaggatttgg

SEQ ID NO: 470593 - DNA, 120 bp, Artificial Sequence
  ENSG00000159256_12 (sequence is synthesized)
tacatcccacttatgaaaaaacctacaaaaagaccaacaaggaaaaattcaggatcagacaaccggaaatgatccctcggattaatgctgaactgttgtttcggccaactgctctttcaa

SEQ ID NO: 470594 - DNA, 120 bp, Artificial Sequence
  ENSG00000159256_13 (sequence is synthesized)
ctccaagcttttcttctcctaaggaaagtgttccaagaagacatctttcagaaggaacaaattcttatgcgacaagacttctaaataatcatcaagttccacctcagtctgaacctgaga

SEQ ID NO: 470595 - DNA, 120 bp, Artificial Sequence
  ENSG00000159256_14 (sequence is synthesized)
gcaacagcttgaaacggagactttctactcgttcctcaattttgaatgcaaagaatcggagattgagtagtcagtttgaaaattcagtttataaaggtgatgatgatgatgaagatgtca

SEQ ID NO: 470596 - DNA, 120 bp, Artificial Sequence
  ENSG00000159256_15 (sequence is synthesized)
tcatcttagaagaaaacagtacccccaaacctgcagtagatcatgatattgacatgaaatcagaacagagtcacgttgagcaaggtggtgttcaggttgagtttgtgggtgacagtgaac

SEQ ID NO: 470597 - DNA, 120 bp, Artificial Sequence
  ENSG00000159256_16 (sequence is synthesized)
cttgtggccagactggttcaacaagcacctcatcatcccgatgcgaccagggaaatactgcagctacccagactgaagtaccaagtttagttgttaaaaaagaagaaactgttgaagacg

SEQ ID NO: 470598 - DNA, 120 bp, Artificial Sequence
  ENSG00000159256_17 (sequence is synthesized)
tgattctgccctcctgtgtagaagctgaagcaaagatacatgaaacccaggaaaccaccgataaatctgcagatgatgcaggctgccaattacaagaactgagaaaccagctactccttg

SEQ ID NO: 470599 - DNA, 120 bp, Artificial Sequence
  ENSG00000159256_18 (sequence is synthesized)
tcactgaggaaaaagagaattataaaagacagtgtcatatgtttactgatcaaatcaaagtgttacaacagaggatactagaaatgaatgacaagtatgttaagaaagaaacttgccatc

SEQ ID NO: 470600 - DNA, 120 bp, Artificial Sequence
  ENSG00000159256_19 (sequence is synthesized)
agtccactgaaaccgatgctgtatttttacttgaaagtattaatggcaaatctgaaagtccagaccatatggtatctcagtatcagcaagctttggaagaaatagaaaggctgaaaaaac

SEQ ID NO: 470601 - DNA, 120 bp, Artificial Sequence
  ENSG00000159256_20 (sequence is synthesized)
aatgtagtgctttgcaacatgtaaaggctgaatgcagccagtgttccaataatgagagtaaaagtgaaatggatgagatggctgtgcagcttgacgatgtgtttagacaactggacaaat

SEQ ID NO: 470602 - DNA, 120 bp, Artificial Sequence
  ENSG00000159256_21 (sequence is synthesized)
gcagtattgagagggaccagtataaaagtgaggttgaattgctggaaatggaaaagtcacaaatccgttcacagtgtgaagaactcaaaactgaagtagaacagttaaaatctacaaatc

SEQ ID NO: 470603 - DNA, 120 bp, Artificial Sequence
  ENSG00000159256_22 (sequence is synthesized)
aacagacggcaacagatgtttcaacatcaagtaacattgaggagtctgtaaatcatatggatggagaaagcctcaaactccgatctcttcgagttaacgtaggacaactgctggctatga

SEQ ID NO: 470604 - DNA, 120 bp, Artificial Sequence
  ENSG00000159256_23 (sequence is synthesized)
ttgtgcctgatcttgatcttcagcaagtgaattacgatgttgatgtagttgatgagattttaggacaagttgttgaacaaatgagtgaaatcagtagtacttaaagtatatgttatgtaa

SEQ ID NO: 470605 - DNA, 120 bp, Artificial Sequence
  ENSG00000159256_24 (sequence is synthesized)
gataaaatatttgctcaattcttttggttgtacagctttcaaaatataattaattttgttttatagatatgataggcaacagactgaaaaccataatctttactgtattctatgcattca

SEQ ID NO: 470606 - DNA, 120 bp, Artificial Sequence
  ENSG00000159256_25 (sequence is synthesized)
aatgtggtcacaaatattgtggacacattatcttatgttttgaaatacctgtgaattgttggcattgagcagctgaagctaactcatgactctgttttgaatgtaaatatttgtaattaa

SEQ ID NO: 470607 - DNA, 120 bp, Artificial Sequence
  ENSG00000159256_26 (sequence is synthesized)
gcctgcacatatttttttattgccctagagtactcaagtgtttttcaccaagagcttttcaggttgcccctaagctttgtgcaattttttctggttccccaaagtgtatttttctctaag

SEQ ID NO: 470608 - DNA, 120 bp, Artificial Sequence
  ENSG00000159256_27 (sequence is synthesized)
tcgagggctatgccataatacaaatggaaatgttacctttgattttcttataaaggagtttaaataggatttttaaataatgtagtaacactcctgatacaactctggttataagtgaat

SEQ ID NO: 470609 - DNA, 120 bp, Artificial Sequence
  ENSG00000159256_28 (sequence is synthesized)
tgagcattaatgtttcttttgtataaattcctgtcctgaaatattttattcatgaaaataaggtaagcaaaaaccaactccattttgccaggattttgttgtgctgagattgccaatcac

SEQ ID NO: 470610 - DNA, 120 bp, Artificial Sequence
  ENSG00000159256_29 (sequence is synthesized)
ggttaaacacaaagtgtttttatagaatgaagaaacagtctttaacagaaaaaaggtattgaaatattaaatggccaccaagtttactttgaagcccatttttggctgtttagtcagcat

SEQ ID NO: 470611 - DNA, 120 bp, Artificial Sequence
  ENSG00000159256_30 (sequence is synthesized)
gaagtgggcatgataattttttaatatttctttttgtgaaatttcctgtacagccttttgtaggattactacaggttaatgtgagttgaggaagacagtctttctcaaacaatactacat

SEQ ID NO: 470612 - DNA, 120 bp, Artificial Sequence
  ENSG00000159256_31 (sequence is synthesized)
accttttattatattacaaacctaagtgttttatatcctagagtcaaggaacaaatttccttaggattatagtattacatgccataaaatactatgctttattggtcccatgttttgtgc

SEQ ID NO: 470613 - DNA, 120 bp, Artificial Sequence
  ENSG00000159256_32 (sequence is synthesized)
aattttaaagagatggctttctattaagtataaactatgtatatataagaaccatattttccacaactaaaatgtgcattattttttccaaagttttatcattgctatttatttttacct

SEQ ID NO: 470614 - DNA, 120 bp, Artificial Sequence
  ENSG00000159256_33 (sequence is synthesized)
ttgtttttgaacattcaatccgttcattttgtatgtatgcttaatacgtgtcggtcatatacagtattgaatttttactgtatagtaattctggaaagagcaaataaatgaagattgttt

SEQ ID NO: 470615 - DNA, 120 bp, Artificial Sequence
  ENSG00000159256_34 (sequence is synthesized)
ttatttgcctgataaagtaattgaaagtgtatttttggtatgaagctggttttctgtcacaattgtaatttcccaaattttaaaatatcttataataaaataaaaatatatgatggctaa

SEQ ID NO: 470616 - DNA, 120 bp, Artificial Sequence
  ENSG00000159256_35 (sequence is synthesized)
ctgaattaagactcaacaggttggatgatgccccagatactgcccaggttggtgagggcggatcttctgtactcagtctactgattcaaatgctaaagtcttccagaaacaccctcatag

SEQ ID NO: 470617 - DNA, 120 bp, Artificial Sequence
  ENSG00000159256_36 (sequence is synthesized)
tcagaagtaatgttgaccacctatcggttcagagtcgtgacacttcaagagtaaaagcagcgcatccagaggtacttgtttcctggccttctgcgaagcccacagataaattaggtctca

SEQ ID NO: 470618 - DNA, 120 bp, Artificial Sequence
  ENSG00000159256_37 (sequence is synthesized)
tttggaaacgtcccatttcgaaaagcctgagcattttgcagctttctcctgtcttgaagaagtagaacggtgcccgagaaacgtttttccccttcgagactcaggaggatgaaagtcatc

SEQ ID NO: 470619 - DNA, 120 bp, Artificial Sequence
  ENSG00000159256_38 (sequence is synthesized)
cggaggccgttcctggctttgtagctcgctcaagatggcggcgcagccaccccgcgggatacgcctcagcgcgataatgcttatgatcctgatgtgaacgctaaacaaatatggattgac

SEQ ID NO: 470620 - DNA, 120 bp, Artificial Sequence
  ENSG00000159256_39 (sequence is synthesized)
gtggacatagatgttgaccgtttgggaagtaaagtgcacgtgcagggtggtggtgttatattcatctctcgttacacacagtagaaatacatggaaaggtactcattttttggtgtagtt

SEQ ID NO: 470621 - DNA, 120 bp, Artificial Sequence
  ENSG00000159256_40 (sequence is synthesized)
actgatttgtctttgcccaggatatgttatagaggccatttcagcttcaatttgagatattttcatcttgttaaaaaaaatttttttttgagacgaagtctcactcttgttccccaggct

SEQ ID NO: 470622 - DNA, 120 bp, Artificial Sequence
  ENSG00000159256_41 (sequence is synthesized)
ggaatgcgatggcgcaatctcagctgactgcagcctccgcctcctaggtttaagcgattctcctgcttcagtcccccgagtagctgggattacagtcgcctgccaccatgcccggctaac

SEQ ID NO: 470623 - DNA, 120 bp, Artificial Sequence
  ENSG00000159256_42 (sequence is synthesized)
ccaccacacccggccaaaaaaaaaaatttttttctatccctgccattcagtctccattagcactctattctctctcatttattccaccccgtcttctcaaaaaaaaaaaaaaaaaaagaa

SEQ ID NO: 470624 - DNA, 120 bp, Artificial Sequence
  ENSG00000159256_43 (sequence is synthesized)
aggagtctgtaaatcatatggatggagaaagcattttgcagctttctcctgtcttgaagaagtagaacggtgcccgagaaacgtttttccccttcgagactcaggaggatgaaagtcatc

SEQ ID NO: 470625 - DNA, 120 bp, Artificial Sequence
  ENSG00000159256_44 (sequence is synthesized)
gagattacatcactgcactccatcctgggcaagactccctctcaaaagaaaaaacctatgtgatgttctagttcaaaagcctgtgattctggactgagttatctggtcttagtggagaaa

SEQ ID NO: 470626 - DNA, 120 bp, Artificial Sequence
  ENSG00000159256_45 (sequence is synthesized)
aaaacaccaaagatctgcagtttataccggtgaggatggaaaaattcaggctaaaattagggtgctactgagataaaaggtagaaagtatttcctgaagggcttactgttgattatattg

SEQ ID NO: 470627 - DNA, 120 bp, Artificial Sequence
  ENSG00000159256_46 (sequence is synthesized)
ggaatgagagagacaggataaggctggaaggaagatggataagaaccacaaattgaaggatattgttattactgtagtttaaaaatagtctgaaatggtgaacctgatggtttttaatag

SEQ ID NO: 470628 - DNA, 120 bp, Artificial Sequence
  ENSG00000159256_47 (sequence is synthesized)
agcagaattaggattagttgtatggtttggtctatagttgggtttataaaaattttcattttatgagttacacattttacttttttcttcatagactaagaagtatagctacaatcatga

SEQ ID NO: 470629 - DNA, 120 bp, Artificial Sequence
  ENSG00000159256_48 (sequence is synthesized)
caagggttttgaaccaagtcttggtgagtaagctgtttagttggttcccagtgttatcttccaagaatcgtatattctagattgtatcttccagatgtatcctggagcaagcagctaagt

SEQ ID NO: 470630 - DNA, 120 bp, Artificial Sequence
  ENSG00000159256_49 (sequence is synthesized)
caagatatgagacttcgaaaatgtggctcacagttgcagacagaacaactgttgtttaacagaacaacgtgggctttcatgatgagtcaagtcttcctaatctcccatggggttcctgtt

SEQ ID NO: 470631 - DNA, 120 bp, Artificial Sequence
  ENSG00000159259_0 (sequence is synthesized)
gggaagcggcgcgcgctgcgcgggaggtgacggtgcctctgactgtccgggtccctccagcattttgcagctttctcctgtcttgaagaagtagaacggtgcccgagaaacgtttttccc

SEQ ID NO: 470632 - DNA, 120 bp, Artificial Sequence
  ENSG00000159259_1 (sequence is synthesized)
cttcgagactcaggaggatgaaagtcatcacttgtgaaatagcctggcacaacaaggagcccgtgtacagcctggacttccagcatgggacggctgggaggatccacagactggcgtctg

SEQ ID NO: 470633 - DNA, 120 bp, Artificial Sequence
  ENSG00000159259_2 (sequence is synthesized)
ccggcgtggacaccaatgtcaggatctggaaggtagaaaagggaccagatggaaaagccatcgtggaatttttgtccaatcttgctcgtcataccaaagccgtcaatgttgtgcgttttt

SEQ ID NO: 470634 - DNA, 120 bp, Artificial Sequence
  ENSG00000159259_3 (sequence is synthesized)
ctccaactggggaaattttagcatcgggaggagatgatgctgtcatcctattgtggaaggtgaatgataacaaggagccggagcagatcgcttttcaggatgaggacgaggcccagctga

SEQ ID NO: 470635 - DNA, 120 bp, Artificial Sequence
  ENSG00000159259_4 (sequence is synthesized)
acaaggagaactggacggttgtgaagactctgcggggccacttagaagatgtgtatgatatttgctgggcaactgatgggaatttaatggcttctgcctctgtggataacacagccatca

SEQ ID NO: 470636 - DNA, 120 bp, Artificial Sequence
  ENSG00000159259_5 (sequence is synthesized)
tatgggatgtcagcaaaggacaaaagatatcaatttttaatgaacataaaagttatgtccaaggagtaacctgggaccctttgggtcaatatgttgctactctgagctgtgacagggtgc

SEQ ID NO: 470637 - DNA, 120 bp, Artificial Sequence
  ENSG00000159259_6 (sequence is synthesized)
tgcgagtatacagtatacagaagaagcgtgtggctttcaatgtttcgaagatgctgtctggaataggggctgaaggagaggcaagaagctaccggatgtttcacgacgacagcatgaagt

SEQ ID NO: 470638 - DNA, 120 bp, Artificial Sequence
  ENSG00000159259_7 (sequence is synthesized)
ctttcttccgtagactgagtttcactcccgacggatctttgcttctcacgccagctggatgtgtggaatctggtgaaaatgtaatgaataccacttatgttttctccaggaagaatctta

SEQ ID NO: 470639 - DNA, 120 bp, Artificial Sequence
  ENSG00000159259_8 (sequence is synthesized)
aaaggcccatcgctcatcttccatgtcctggaaaagccactcttgctgttcgctgctgtccggtctactttgaactgaggccagtggtggaaacaggtgtggagctgatgagtctgccct

SEQ ID NO: 470640 - DNA, 120 bp, Artificial Sequence
  ENSG00000159259_9 (sequence is synthesized)
accgcctggtgtttgctgtggcctcggaggattccgtgcttctgtatgacacccagcagtccttcccttttggttacgtgtctaatatacattaccacaccctcagtgacatttcatggt

SEQ ID NO: 470641 - DNA, 120 bp, Artificial Sequence
  ENSG00000159259_10 (sequence is synthesized)
ccagcgatggtgccttcctggccatttcttccacggacggttactgctcatttgtgacatttgagaaagatgaacttggaattcctttgaaagagaagccagttttgaacatgagaactc

SEQ ID NO: 470642 - DNA, 120 bp, Artificial Sequence
  ENSG00000159259_11 (sequence is synthesized)
ctgatacagcaaagaaaaccaagagtcagacacatcgagggtcttcgccaggacccagaccggtagagggaacccctgccagcagaacccaagaccccagcagccccggcacgactcccc

SEQ ID NO: 470643 - DNA, 120 bp, Artificial Sequence
  ENSG00000159259_12 (sequence is synthesized)
ctcaggccagacaggccccagccccaacagtcatcagggaccctccctccatcactcctgctgtcaaaagccccttgccggggccttcggaggagaagaccctgcagcccagtagtcaaa

SEQ ID NO: 470644 - DNA, 120 bp, Artificial Sequence
  ENSG00000159259_13 (sequence is synthesized)
acacaaaagcccacccatcccggagggtcactctgaacacactgcaagcctggagcaagacaacaccccggagaataaacttaacacccttaaagacggacactccaccaagttctgtac

SEQ ID NO: 470645 - DNA, 120 bp, Artificial Sequence
  ENSG00000159259_14 (sequence is synthesized)
caaccagtgtgatttccaccccttctacagaagaaattcagtcagagacgcctggagacgctcagggcagtcccccagagctaaagcggcccagactcgatgaaaacaaaggaggcacgg

SEQ ID NO: 470646 - DNA, 120 bp, Artificial Sequence
  ENSG00000159259_15 (sequence is synthesized)
aaagtctggacccttgatgggacctcggcttctgctcgaagcctaccaggctcccggtgtgtgcagggagacggtaaagctggaggtgcctgagaccagggcttccatggagcgggacac

SEQ ID NO: 470647 - DNA, 120 bp, Artificial Sequence
  ENSG00000159259_16 (sequence is synthesized)
actgtaaatggatttctataacagaagtgacatgtgtactgatttttctccagaaatatggatgctgttgtattcagtatccatttttaacttgggacatgaacgttttaacgtagtaaa

SEQ ID NO: 470648 - DNA, 120 bp, Artificial Sequence
  ENSG00000159259_17 (sequence is synthesized)
tcctctttttgatgagtttctgaaactggagcggttcaacgttatccagtgtgaaaatcagtgagtcctccctggcatcctcgtgaaagtgcacacacttcatggagggactccttttca

SEQ ID NO: 470649 - DNA, 120 bp, Artificial Sequence
  ENSG00000159259_18 (sequence is synthesized)
atttgagattttactctgtcgaattttagagtatttgaagtgattgttagatttcacttctaaggagttgattgattaaactttggaaggtagttgtgtttgttttctgattttaaaggt

SEQ ID NO: 470650 - DNA, 120 bp, Artificial Sequence
  ENSG00000159259_19 (sequence is synthesized)
gacgatgcttattcttttagtaactaagtgaagtgaaaaagatgggtatcacccatcatcttcccaccagaagtaaccctcgttaatgttgtagtatatttccttagcatttttgtggat

SEQ ID NO: 470651 - DNA, 120 bp, Artificial Sequence
  ENSG00000159259_20 (sequence is synthesized)
ctatttattctaaaaagagaattgagattttatttcatatgcaatttggtatctaaataggttagttttttagattggtttttcaaagcaaaaaaagtatcttttttgttttttgagaca

SEQ ID NO: 470652 - DNA, 120 bp, Artificial Sequence
  ENSG00000159259_21 (sequence is synthesized)
catgtgccaccatgccatgctaatttcacacacacatgcacccacacacacacatatatatgatacatatatatatatatacacacacacacaagtatgtgtgtatatatatattttttt

SEQ ID NO: 470653 - DNA, 85 bp, Artificial Sequence
  ENSG00000159259_22 (sequence is synthesized)
ttgggattacaggtgtgagctactgcacctggcctaattattatatttttaggggagacggggttttctcaagtaatcctccctc

SEQ ID NO: 470654 - DNA, 120 bp, Artificial Sequence
  ENSG00000159259_23 (sequence is synthesized)
ggattacaggcgtgagacaccatgcctggtcaaatggtatctgttttgacgggtggttctcaactgtagctgcatactgaaatcacctaagagctgacataccagtgcctgggttcccgc

SEQ ID NO: 470655 - DNA, 120 bp, Artificial Sequence
  ENSG00000159259_24 (sequence is synthesized)
aatcacctaagagctgacataccagtgcctgggttcccgcttcggaggatttggcctaatcggtctggggtatgttctgaatattaggatttcttaaagctcctggagtaattctgatgc

SEQ ID NO: 470656 - DNA, 120 bp, Artificial Sequence
  ENSG00000159259_25 (sequence is synthesized)
gcagccaagattgagaaatctaagggaaaaaactttccctggatacggtctgttctggttaaatgcatttccactgaaagcatttttttttttttccgagacagagtctcgctctgtcac

SEQ ID NO: 470657 - DNA, 120 bp, Artificial Sequence
  ENSG00000159259_26 (sequence is synthesized)
gccaccgcgcccagccgaaagcattttcttgattatctctgccccgtcactgattgacatcctcctttgctggggccgcggactgaaggacagtatgcaggaggtgccatcagctcttct

SEQ ID NO: 470658 - DNA, 120 bp, Artificial Sequence
  ENSG00000159259_27 (sequence is synthesized)
gaaaagagacagctttcagtgtcatgtggctggcgtgaggtgcggtttgcagttgttgatcctgtgcagacagatgaatgaccatgggtcccctgtccttattgagcagcctgcttcctg

SEQ ID NO: 470659 - DNA, 71 bp, Artificial Sequence
  ENSG00000159259_28 (sequence is synthesized)
accatgggtcccctgtccttattgagcagcctgcttcctggccatacctggggaggaacagtattaggttt

SEQ ID NO: 470660 - DNA, 120 bp, Artificial Sequence
  ENSG00000159259_29 (sequence is synthesized)
atctgtttcttgtgcattgattgtgggagttggggtgggggacccctgatggcctgcctgttctcagccatcatccttaaatataaatcaaaattggcaataaaagaccaagtgaagtca

SEQ ID NO: 470661 - DNA, 68 bp, Artificial Sequence
  ENSG00000159259_30 (sequence is synthesized)
gttgctactctgagctgtgacagacacagtctcactctgtcacccaggcaggtgttgtggcgcaatct

SEQ ID NO: 470662 - DNA, 78 bp, Artificial Sequence
  ENSG00000159259_31 (sequence is synthesized)
gagacagggtttcaccacgttggtcaagctgttctcaaactcctaacctcaaatgatctgcctgccttggctgaactt

SEQ ID NO: 470663 - DNA, 84 bp, Artificial Sequence
  ENSG00000159259_32 (sequence is synthesized)
ttacaggcatgagccaccatgccccgccctgaacttagtaaatctttattattattactatttttttttttttttgagagaggg

SEQ ID NO: 470664 - DNA, 72 bp, Artificial Sequence
  ENSG00000159259_33 (sequence is synthesized)
gagcaatcctcatgcttcagccccccaagtaattgggactacgggtgtgcaccaccacacccggctaatttt

SEQ ID NO: 470665 - DNA, 120 bp, Artificial Sequence
  ENSG00000159259_34 (sequence is synthesized)
gttggtaaggtctgtaacttttccctgttttggggacgaaggtccagcgatggtgccttcctggccatttcttccacggacggttactgctcatttgtgacatttgagaaagatgaactt

SEQ ID NO: 470666 - DNA, 120 bp, Artificial Sequence
  ENSG00000159261_0 (sequence is synthesized)
ggggagggcaagctgggaaaagctgagagaggcaggcagcccagccaggcagaagtcacgagccaggcacctgccaagagagggagtaagatgttcaagaggagctccggaagaactttc

SEQ ID NO: 470667 - DNA, 120 bp, Artificial Sequence
  ENSG00000159261_1 (sequence is synthesized)
agatatagcactggacttggctgaggacacagcagcacggggctgcaaggcccagagatctggacacaagccaagaagtcaagaactgttgaagccgcagtctccactctcctactgaca

SEQ ID NO: 470668 - DNA, 120 bp, Artificial Sequence
  ENSG00000159261_2 (sequence is synthesized)
ccagagaccacccagcccagccaaaccatatggcctcttgttttcctgatgtatgagggctccggctggcacctgaggagcggcgtgaccccgagggcccagggagctgcccggctggcc

SEQ ID NO: 470669 - DNA, 120 bp, Artificial Sequence
  ENSG00000159261_3 (sequence is synthesized)
taggcaggcagccgcaccatggccagcacggccgtgcagcttctgggcttcctgctcagcttcctgggcatggtgggcacgttgatcaccaccatcctgccgcactggcggaggacagcg

SEQ ID NO: 470670 - DNA, 120 bp, Artificial Sequence
  ENSG00000159261_4 (sequence is synthesized)
cacgtgggcaccaacatcctcacggccgtgtcctacctgaaagggctctggatggagtgtgtgtggcacagcacaggcatctaccagtgccagatctaccgatccctgctggcgctgccc

SEQ ID NO: 470671 - DNA, 120 bp, Artificial Sequence
  ENSG00000159261_5 (sequence is synthesized)
caagacctccaggctgcccgcgccctcatggtcatctcctgcctgctctcgggcatagcctgcgcctgcgccgtcatcgggatgaagtgcacgcgctgcgccaagggcacacccgccaag

SEQ ID NO: 470672 - DNA, 120 bp, Artificial Sequence
  ENSG00000159261_6 (sequence is synthesized)
tcctcggcggcaccctcttcatcctggccggcctcctgtgcatggtggccgtctcctggaccaccaacgacgtggtgcagaacttctacaacccgctgctgcccagcggcatgaagtttg

SEQ ID NO: 470673 - DNA, 120 bp, Artificial Sequence
  ENSG00000159261_7 (sequence is synthesized)
agattggccaggccctgtacctgggcttcatctcctcgtccctctcgctcattggtggcaccctgctttgcctgtcctgccaggacgaggcaccctacaggccctaccaggccccgccca

SEQ ID NO: 470674 - DNA, 120 bp, Artificial Sequence
  ENSG00000159261_8 (sequence is synthesized)
gggccaccacgaccactgcaaacaccgcacctgcctaccagccaccagctgcctacaaagacaatcgggccccctcagtgacctcggccacgcacagcgggtacaggctgaacgactacg

SEQ ID NO: 470675 - DNA, 120 bp, Artificial Sequence
  ENSG00000159261_9 (sequence is synthesized)
tgtgagtccccacagcctgcttctcccctgggctgctgtgggctgggtccccggcgggactgtcaatggaggcaggggttccagcacaaagtttacttctgggcaatttttgtatccaag

SEQ ID NO: 470676 - DNA, 120 bp, Artificial Sequence
  ENSG00000159261_10 (sequence is synthesized)
gaaataatgtgaatgcgaggaaatgtctttagagcacagggacagagggggaaataagaggaggagaaagctctctataccaaagactgaaaaaaaaaatcctgtctgtttttgtattta

SEQ ID NO: 470677 - DNA, 120 bp, Artificial Sequence
  ENSG00000159261_11 (sequence is synthesized)
ttatatatatttatgtgggtgatttgataacaagtttaatataaagtgacttgggagtttggtcagtggggttggtttgtgatccaggaataaaccttgcggatgtggctgtttatgaaa

SEQ ID NO: 470678 - DNA, 120 bp, Artificial Sequence
  ENSG00000159261_12 (sequence is synthesized)
agcagaaaagtccaaagcagtgtgaggacaaccgccaggtggtggctcagaggaggacacagtcgctgtgggcaggtggtcagggcgcaggagggaatgagctgtggatttttagtaatc

SEQ ID NO: 470679 - DNA, 120 bp, Artificial Sequence
  ENSG00000159261_13 (sequence is synthesized)
tacaacaatcaggcagttccaggacacagggaagtgagtgtgaacagccaatggacccggagccgagagcctgggcaggcgtaggctggactatggacgccctgcaaccctgccaggctg

SEQ ID NO: 470680 - DNA, 120 bp, Artificial Sequence
  ENSG00000159261_14 (sequence is synthesized)
ggaaggggaggcttgatcctgagcgcgtgttaggaaggagatgcccaggttcaggtgtatcgtgcattttttttccacagtgcagaaatgacatttctggttggtcttgaatgtctgctc

SEQ ID NO: 470681 - DNA, 120 bp, Artificial Sequence
  ENSG00000159261_15 (sequence is synthesized)
tggccaagccacctcctctcatgctagctaaccaagtggcacgtgtgcccacgcaggccattctaaggaacactgtaattgtctagacaattttctctcaaatactccgtcctggaagcg

SEQ ID NO: 470682 - DNA, 120 bp, Artificial Sequence
  ENSG00000159261_16 (sequence is synthesized)
tctggttggcagaagagggaaggcaggagggtggcagcgtcccggctgagtcctcttgcacatgggagctggagtccagccaggctccagagcggctccggctggcaagggacctgaaca

SEQ ID NO: 470683 - DNA, 120 bp, Artificial Sequence
  ENSG00000159261_17 (sequence is synthesized)
ggaagtgcacatgctcatctacagctttcttggaagaagaaagaaacaaaaactgagatttagaacaccaggtctgtttccactggcggccactcttgggcactggagaccagcaagagc

SEQ ID NO: 470684 - DNA, 120 bp, Artificial Sequence
  ENSG00000159261_18 (sequence is synthesized)
attgtaagtttcctgaggcctccccagtcctgcggaactggctccggctggcacctgaggagcggcgtgaccccgagggcccagggagctgcccggctggcctaggcaggcagccgcacc

SEQ ID NO: 470685 - DNA, 120 bp, Artificial Sequence
  ENSG00000159263_0 (sequence is synthesized)
ataaacaaacgcggctcggccgcacgtggacagcggaggtgctgcgcctagccacacatcgcgggctccggcgctgcgtctccaggcacagggagccgccaggaagggcaggagagcgcg

SEQ ID NO: 470686 - DNA, 120 bp, Artificial Sequence
  ENSG00000159263_1 (sequence is synthesized)
cagccgcctgcgactcgctcccctccgctgggctcccgctccatggctccgcggccaccgccgcccctgtcgccctccggtccggaggggccttgccgcagccggttcgagcactcgacg

SEQ ID NO: 470687 - DNA, 120 bp, Artificial Sequence
  ENSG00000159263_2 (sequence is synthesized)
gccggttcgagcactcgacgaaggagtaagcagcgcctccgcctccgcgccggccgcccccaccccccaggaaggccgaggcaggagaggcaggagggaggaaacaggagcgagcaggaa

SEQ ID NO: 470688 - DNA, 120 bp, Artificial Sequence
  ENSG00000159263_3 (sequence is synthesized)
gaaacaggagcgagcaggaacggggctccggttgctgcaggacggtccagcccggaggaggctgcgctccgggcagcggcgggcggcgccgccgggttgctcggagctcaggcccggcgg

SEQ ID NO: 470689 - DNA, 120 bp, Artificial Sequence
  ENSG00000159263_4 (sequence is synthesized)
cgcacctgcccgcggcccactccgcggactcacctggctcccggctcccccttccccatccccgccgccgcagcccgagcggggctccgcgggcctggagcacggccgggtctaatatgc

SEQ ID NO: 470690 - DNA, 120 bp, Artificial Sequence
  ENSG00000159263_5 (sequence is synthesized)
gccgggtctaatatgcccggagccgaggcgcgatgaaggagaagtccaagaatgcggccaagaccaggagggagaaggaaaatggcgagttttacgagcttgccaagctgctcccgctgc

SEQ ID NO: 470691 - DNA, 120 bp, Artificial Sequence
  ENSG00000159263_6 (sequence is synthesized)
cgtcggccatcacttcgcagctggacaaagcgtccatcatccgcctcaccacgagctacctgaagatgcgcgccgtcttccccgaaggtttaggagacgcgtggggacagccgagccgcg

SEQ ID NO: 470692 - DNA, 120 bp, Artificial Sequence
  ENSG00000159263_7 (sequence is synthesized)
ccgggcccctggacggcgtcgccaaggagctgggatcgcacttgctgcagactttggatggatttgtttttgtggtagcatctgatggcaaaatcatgtatatatccgagaccgcttctg

SEQ ID NO: 470693 - DNA, 120 bp, Artificial Sequence
  ENSG00000159263_8 (sequence is synthesized)
tccatttaggcttatcccaggtggagctcacgggcaacagtatttatgaatacatccatccttctgaccacgatgagatgaccgctgtcctcacggcccaccagccgctgcaccaccacc

SEQ ID NO: 470694 - DNA, 120 bp, Artificial Sequence
  ENSG00000159263_9 (sequence is synthesized)
tgctccaagagtatgagatagagaggtcgttctttcttcgaatgaaatgtgtcttggcgaaaaggaacgcgggcctgacctgcagcggatacaaggtcatccactgcagtggctacttga

SEQ ID NO: 470695 - DNA, 120 bp, Artificial Sequence
  ENSG00000159263_10 (sequence is synthesized)
agatcaggcagtatatgctggacatgtccctgtacgactcctgctaccagattgtggggctggtggccgtgggccagtcgctgccacccagtgccatcaccgagatcaagctgtacagta

SEQ ID NO: 470696 - DNA, 120 bp, Artificial Sequence
  ENSG00000159263_11 (sequence is synthesized)
acatgttcatgttcagggccagccttgacctgaagctgatattcctggattccagggtgaccgaggtgacggggtacgagccgcaggacctgatcgagaagaccctataccatcacgtgc

SEQ ID NO: 470697 - DNA, 120 bp, Artificial Sequence
  ENSG00000159263_12 (sequence is synthesized)
acggctgcgacgtgttccacctccgctacgcacaccacctcctgttggtgaagggccaggtcaccaccaagtactaccggctgctgtccaagcggggcggctgggtgtgggtgcagagct

SEQ ID NO: 470698 - DNA, 120 bp, Artificial Sequence
  ENSG00000159263_13 (sequence is synthesized)
acgccaccgtggtgcacaacagccgctcgtcccggccccactgcatcgtgagtgtcaattatgtactcacggagattgaatacaaggaacttcagctgtccctggagcaggtgtccactg

SEQ ID NO: 470699 - DNA, 120 bp, Artificial Sequence
  ENSG00000159263_14 (sequence is synthesized)
ccaagtcccaggactcctggaggaccgccttgtctacctcacaagaaactaggaaattagtgaaacccaaaaataccaagatgaagacaaagctgagaacaaacccttaccccccacagc

SEQ ID NO: 470700 - DNA, 120 bp, Artificial Sequence
  ENSG00000159263_15 (sequence is synthesized)
aatacagctcgttccaaatggacaaactggaatgcggccagctcggaaactggagagccagtccccctgcaagcgctgctgctcctccagaactgcagccccactcagaaagcagtgacc

SEQ ID NO: 470701 - DNA, 120 bp, Artificial Sequence
  ENSG00000159263_16 (sequence is synthesized)
ttctgtacacgccatcctacagcctgcccttctcctaccattacggacacttccctctggactctcacgtcttcagcagcaaaaagccaatgttgccggccaagttcgggcagccccaag

SEQ ID NO: 470702 - DNA, 120 bp, Artificial Sequence
  ENSG00000159263_17 (sequence is synthesized)
gatccccttgtgaggtggcacgctttttcctgagcacactgccagccagcggtgaatgccagtggcattatgccaaccccctagtgcctagcagctcgtctccagctaaaaatcctccag

SEQ ID NO: 470703 - DNA, 120 bp, Artificial Sequence
  ENSG00000159263_18 (sequence is synthesized)
ggcacagcctggtgccaagctacgaagcgcccgccgccgccgtgcgcaggttcggcgaggacaccgcgcccccgagcttcccgagctgcggccactaccgcgaggagcccgcgctgggcc

SEQ ID NO: 470704 - DNA, 80 bp, Artificial Sequence
  ENSG00000159263_19 (sequence is synthesized)
gcggcacccgagtgctgcgcgcccccgacccccgaggccccgggcgcgccggcgcagctgcccttcgtgctgctcaacta

SEQ ID NO: 470705 - DNA, 80 bp, Artificial Sequence
  ENSG00000159263_20 (sequence is synthesized)
tcgtgctgctcaactaccaccgcgtgctggcccggcgcggaccgctggggggcgccgcacccgccgcctccggcctggcc

SEQ ID NO: 470706 - DNA, 80 bp, Artificial Sequence
  ENSG00000159263_21 (sequence is synthesized)
ggctccggcacccgagccccgccgccacctccccgcccggcgcgcccctgccgcactacctgggcgcctcggtcatcatc

SEQ ID NO: 470707 - DNA, 120 bp, Artificial Sequence
  ENSG00000159263_22 (sequence is synthesized)
ctggacccggcctcccggggctgcggcgccaccgagcccggcaaatgcgcacgacctacattaatttatgcagagacagctgtttgaattggaccccgccgccgacttgcggatttccac

SEQ ID NO: 470708 - DNA, 120 bp, Artificial Sequence
  ENSG00000159263_23 (sequence is synthesized)
gaggccccgcgcgccggtgccgagggccgaggagcgcccgggtccgggcaggtgaccgcccgcctctgtcctgcgagggccggtgcgacccagttgctgggggcttggtttcctcacctt

SEQ ID NO: 470709 - DNA, 120 bp, Artificial Sequence
  ENSG00000159263_24 (sequence is synthesized)
ccttgaaatcgggcttcacgcgtcttgccttgtccccaacgttccacaacagtcccgctgggggattgaagcggtttcactccgcaaatatcctccactttcaggagggaaaacccaccc

SEQ ID NO: 470710 - DNA, 120 bp, Artificial Sequence
  ENSG00000159263_25 (sequence is synthesized)
taccacagtccgctcttccaagtggacggcagacctgggaggggacgcctgtgtcacgagcccttttagatgcttaggtgaaggcagaagtgatgattgtaagtcccatgaatacacaac

SEQ ID NO: 470711 - DNA, 120 bp, Artificial Sequence
  ENSG00000159263_26 (sequence is synthesized)
tccactgtctttaaaagtcattcaagagtctcattatttttgtttttatttaaccctttcttcaatacaaaaagccaacaaaccaagactaagggggtgaccatgcaattccattttgtg

SEQ ID NO: 470712 - DNA, 120 bp, Artificial Sequence
  ENSG00000159263_27 (sequence is synthesized)
tctgtgaacataggtgtgcttcccaaatacattaacaagctcttacttccccctaacccctatgaactcttgataacaccaagagtagcaccttcagaatatattgaataggcattaaat

SEQ ID NO: 470713 - DNA, 120 bp, Artificial Sequence
  ENSG00000159263_28 (sequence is synthesized)
gcaaaaatatatatgtagccagacagtttatgagaatgaccctgtcaagcttcattattacgtggcaaaatccctctggcccacacagatctgtaattcactaggctcgtgtttgctaca

SEQ ID NO: 470714 - DNA, 120 bp, Artificial Sequence
  ENSG00000159263_29 (sequence is synthesized)
aatagtgctaataaagttaaattgcacgtgcaatacggaacactgtcaatggactgcaccttgtgaaggaaaaacatgcttaagggggtgtaatgaaaatgatgtagacattttaagcat

SEQ ID NO: 470715 - DNA, 120 bp, Artificial Sequence
  ENSG00000159263_30 (sequence is synthesized)
tttctacacagcgagaaaacttcgtaagaacatgttacgtgtgcaacaggtaaacagaaatcctttcataaagcaccagcagtgtttaaaaaatgagcttccattaatttttacttttta

SEQ ID NO: 470716 - DNA, 120 bp, Artificial Sequence
  ENSG00000159263_31 (sequence is synthesized)
tgggttttgcttaaagatctcaacatggaaaaatcctgtcatggctctgaactgcacaatgcattgaaccgccgtccttcaattttcttcacactatcaacactgcagcattttgctgct

SEQ ID NO: 470717 - DNA, 120 bp, Artificial Sequence
  ENSG00000159263_32 (sequence is synthesized)
ttatcaaaatggtttattttaggaaactttttccacctttctgaatggaaagaggttttcacaaatgttttaaactcatcgttctaaaatcaagtgcacctacaccaactgctctcaaaa

SEQ ID NO: 470718 - DNA, 120 bp, Artificial Sequence
  ENSG00000159263_33 (sequence is synthesized)
tgtgaactgacttttttttttttttttttgccaaccctgtgtcacttagtgaggacctgacacaatccctacagggtgtctgtcagtgggcctcatggtaagagtcacaatttgcaaatt

SEQ ID NO: 470719 - DNA, 120 bp, Artificial Sequence
  ENSG00000159263_34 (sequence is synthesized)
taggaccgtgggtcatgcagcgaaggggctggatggtaggaagggatgtgcccgcctctccacgcactcagctatacctcattcacagctccttgtgagtgtgtgcacaggaaataagcc

SEQ ID NO: 470720 - DNA, 120 bp, Artificial Sequence
  ENSG00000159263_35 (sequence is synthesized)
gagggtattatttttttatgttcatgagtcttgtaattaaaccgtgattcttgaaaggtgtaggtttgattactaggagataccaccgacatttttcaataaagtactgcaaaatgcttt

SEQ ID NO: 470721 - DNA, 120 bp, Artificial Sequence
  ENSG00000159263_36 (sequence is synthesized)
tgtgtctaccttgttattaacttttggggctgtatttagtaaaaataaatcaaggctatcggagcagttcaataacaaaggttactgttgagaaaaaagaccctatcatagatttacaag

SEQ ID NO: 470722 - DNA, 120 bp, Artificial Sequence
  ENSG00000159263_37 (sequence is synthesized)
ccggcgaacactgctaggcacagcctggtgccaagctacgaaggcaagcagatgtcctctgcggagataccgccagctccccaggacgcagactgactcctgtttgctcgctggaccaac

SEQ ID NO: 470723 - DNA, 120 bp, Artificial Sequence
  ENSG00000159263_38 (sequence is synthesized)
caagctacgaaggtgggtcaggtctgctcgtggggaaggtgggaggactgcgcacggccgggagccgaagcagccatggcggtgggtggcagatggagacagaaccctcacgctttgggc

SEQ ID NO: 470724 - DNA, 120 bp, Artificial Sequence
  ENSG00000159263_39 (sequence is synthesized)
aaacttgccctctttctgcttctaagtagggcttgctgtgctttcttgctctcaatgcaggtgctcctcgagagtgagaaatggcagtctgcctgcctcggggacactagtgacagtata

SEQ ID NO: 470725 - DNA, 120 bp, Artificial Sequence
  ENSG00000159263_40 (sequence is synthesized)
aagggcaaaggaaaaccgagtatctggccttcacgtaaatcctggccacattcaccaaccaaagggggacagtgattttcaaaaccagctcccatgtgctgagaacaccccagctgcatt

SEQ ID NO: 470726 - DNA, 120 bp, Artificial Sequence
  ENSG00000159263_41 (sequence is synthesized)
tcttttgcaagattcctttccactccaaccagaagtgaatatttgagacaaacggcctattggctattttcccatgccagttttggaagtggggaaaactatggtggaaatttgtgggct

SEQ ID NO: 470727 - DNA, 120 bp, Artificial Sequence
  ENSG00000159263_42 (sequence is synthesized)
tggggacagaaatgccactcaccaacccagggcaaagaacacaaaccctccaggcctcagtttcttcacctgtaaaatggggtgaagctgtgatgtgcctactcccaaggacacgacaca

SEQ ID NO: 470728 - DNA, 120 bp, Artificial Sequence
  ENSG00000159263_43 (sequence is synthesized)
cagtagggacctgccctgtacatgctagttcaacagaaaggaatggcctttcaccttctcctggtggcaggcaagcagatgtcctctgcggagataccgccagctccccaggacgcagac

SEQ ID NO: 470729 - DNA, 120 bp, Artificial Sequence
  ENSG00000159263_44 (sequence is synthesized)
tgactcctgtttgctcgctggaccaaccccaggcagaaggtggaaggtgggaacagaggtttagctgcaggacatgtattcccattgcaccgagacctaactgccgctcagagtgtagac

SEQ ID NO: 470730 - DNA, 120 bp, Artificial Sequence
  ENSG00000159263_45 (sequence is synthesized)
ctaactgccgctcagagtgtagaccgagatggtgcagatgcctgcagtgccactaaaatgtgggtgaaggtgacatcaggattatgtgccccaggccgggctcagtggctcacacctgta

SEQ ID NO: 470731 - DNA, 120 bp, Artificial Sequence
  ENSG00000159263_46 (sequence is synthesized)
cttcccacatctgccaagtggctgggcatgactaggactgcccagcccaggtctctccaatacacacacagcacccaccacgtggggatttgcattgatacctgtgtcttttaagccaat

SEQ ID NO: 470732 - DNA, 120 bp, Artificial Sequence
  ENSG00000159263_47 (sequence is synthesized)
ggattacagcatcacgggtctagaccaagcttctccttaaccaagatgccgtgcctaaaactcgggggtcgggggtggtccatgacatttcatggggaaaattacatatgtgtttcctcc

SEQ ID NO: 470733 - DNA, 120 bp, Artificial Sequence
  ENSG00000159263_48 (sequence is synthesized)
agttgaaatttggcatttcctttgcttctgatgatagatgataaaccatcttggggtccctagtacctgtggctttgccaacaatagaaatcacagatgttttccatatcataggaaagt

SEQ ID NO: 470734 - DNA, 120 bp, Artificial Sequence
  ENSG00000159263_49 (sequence is synthesized)
tttgcaggtttaaacatatcgcttatgcccacatgcctacttcaaaatttcaggagttctaagacctgctactgaatcttcttatttatgtattaataaagcagcacatttatatccgta

SEQ ID NO: 470735 - DNA, 120 bp, Artificial Sequence
  ENSG00000159263_50 (sequence is synthesized)
tcgccaaggagctgggatcgcacttgctgcaggtagagcggcctcgccgggggaggagcgcagccgccgcaggctcccttcccaccccgccaccccagcctccaggcgtcccttccccag

SEQ ID NO: 470736 - DNA, 120 bp, Artificial Sequence
  ENSG00000159263_51 (sequence is synthesized)
gagcgccaggcagatccagaggctgccgggggctggggatggggtggtccccactgcggagggatggacgcttagcatgtcggatgcggcctgcggccaaccctaccctaaccctacgtc

SEQ ID NO: 470737 - DNA, 120 bp, Artificial Sequence
  ENSG00000159263_52 (sequence is synthesized)
tggtcaagtgctttccaatctcacttccctcagcaggttccacccagcgcttgctctgtgccaggcgccagggctggagcagcagaaatgattgggctgctctgagctctgaagcattcg

SEQ ID NO: 470738 - DNA, 120 bp, Artificial Sequence
  ENSG00000159263_53 (sequence is synthesized)
gccgctgtgtgtgtgcaaggggcgcaaggacggagagacagcatcaataatacaatattaacaggagcacttgtccagagcttactgcaagccacattcagttccggaccttattgactt

SEQ ID NO: 470739 - DNA, 88 bp, Artificial Sequence
  ENSG00000159263_54 (sequence is synthesized)
cttactgcaagccacattcagttccggaccttattgacttccccctcccatctagagtggattctggtttttcaatttgttttgtttt

SEQ ID NO: 470740 - DNA, 69 bp, Artificial Sequence
  ENSG00000159263_55 (sequence is synthesized)
ttctcccgcttcagcctcccgagtagccaggattgcaggctggtctcgatctcctgacctccgatgatc

SEQ ID NO: 470741 - DNA, 75 bp, Artificial Sequence
  ENSG00000159263_56 (sequence is synthesized)
cgcgcgtcctgccttgattctgtttttaactccattttttagaggaggaaattgaggcacagagaggttaaataa

SEQ ID NO: 470742 - DNA, 120 bp, Artificial Sequence
  ENSG00000159263_57 (sequence is synthesized)
tttttagaggaggaaattgaggcacagagaggttaaataacatgtctaaggtcacacagcaaggggtggagcggagttagcccactggcctagctctagagcccacccggataaccagaa

SEQ ID NO: 470743 - DNA, 120 bp, Artificial Sequence
  ENSG00000159263_58 (sequence is synthesized)
cttggtgaggcctccgggctcttgcttggtttggagccaggtgcttagcgccccgagcccggggccattcaccctgcaggagctgcacgcgcccctgacctcggcttttccctggcagca

SEQ ID NO: 470744 - DNA, 120 bp, Artificial Sequence
  ENSG00000159263_59 (sequence is synthesized)
gaggggctttgcgggtcggccgggtagccctgagcacagctcgccacttccaggtgggctgttggcgctggctggggacacatcccgatctttcaaatgccctttacagagcctcatcaa

SEQ ID NO: 470745 - DNA, 120 bp, Artificial Sequence
  ENSG00000159263_60 (sequence is synthesized)
cgacccgattcattcccccctcctgtcatttgtctctgccatcgaaaaatgcctaccgagagctgctctgcatttccgccctctattttgtgttttactttaaaataataataaaaaaaa

SEQ ID NO: 470746 - DNA, 120 bp, Artificial Sequence
  ENSG00000159267_0 (sequence is synthesized)
acgagagggcgcagcgcggcgcggcagggattcgcgggcgaccacccggcgcaggagcggccgcgtttcggcctcagaatccattgaagacttgaacaagtgggccctatttcttgtgtc

SEQ ID NO: 470747 - DNA, 120 bp, Artificial Sequence
  ENSG00000159267_1 (sequence is synthesized)
tccttttatacttgaagcagaacacatagcatttgtgacggagagcatttgggtacaaagtgagaatttacagagatcatcctcttcagaaacagttcggtttttgcccactagggatga

SEQ ID NO: 470748 - DNA, 120 bp, Artificial Sequence
  ENSG00000159267_2 (sequence is synthesized)
tgtggtttctcatgaggttacttgctctaaaggactttatattttggaaccataagagcacccttgtggcccaggcactttatggatgatcccttttagtgctcccagtaaccttccaag

SEQ ID NO: 470749 - DNA, 120 bp, Artificial Sequence
  ENSG00000159267_3 (sequence is synthesized)
attgtcaagtggtcagactgttgtttgccattagcttgcagacctggggatccttatcggctaattgctgaagcaagtgtggacaacttcagcaagctgggggtggcgttcatggaagat

SEQ ID NO: 470750 - DNA, 120 bp, Artificial Sequence
  ENSG00000159267_4 (sequence is synthesized)
agactccacatggataatggactggtaccccaaaagattgtgtcggtgcacttgcaggactccactctgaaggaagttaaggatcaggtctcaaacaagcaagcccagatcctagagccg

SEQ ID NO: 470751 - DNA, 120 bp, Artificial Sequence
  ENSG00000159267_5 (sequence is synthesized)
aagcctgaaccttctcttgagattaagcctgagcaggacggtatggagcatgttggcagagatgacccaaaggctcttggtgaagaacccaaacaaaggagaggcagtgcctctgggagt

SEQ ID NO: 470752 - DNA, 120 bp, Artificial Sequence
  ENSG00000159267_6 (sequence is synthesized)
gagcctgctggggacagtgacaggggagggggccccgttgagcattatcacctccatctgtctagttgccacgagtgtctggaacttgagaacagcaccattgagtcagtcaagtttgcg

SEQ ID NO: 470753 - DNA, 120 bp, Artificial Sequence
  ENSG00000159267_7 (sequence is synthesized)
tctgccgagaacattccagaccttccctacgattatagcagcagtttggagagtgttgctgatgagacctcccccgaaagagaagggaggagagtcaacctcacgggaaaggcacccaac

SEQ ID NO: 470754 - DNA, 120 bp, Artificial Sequence
  ENSG00000159267_8 (sequence is synthesized)
atcctcctctatgtgggctccgactcccaggaagccctcggccggttccacgaggtccggtctgtgctggccgactgtgtggacattgacagttatattctctaccacctgctggaggac

SEQ ID NO: 470755 - DNA, 120 bp, Artificial Sequence
  ENSG00000159267_9 (sequence is synthesized)
agtgctctcagagacccgtggacggacaactgtctgctgttggtcattgctaccagggagtccattcccgaagacctgtaccagaagttcatggcctatctttctcagggagggaaggtg

SEQ ID NO: 470756 - DNA, 120 bp, Artificial Sequence
  ENSG00000159267_10 (sequence is synthesized)
ttgggcctgtcttcatccttcacctttggtggctttcaggtgacaagcaagggtgcactgcacaagacagtccagaacttggttttctccaaggctgaccagagcgaggtgaagctcagc

SEQ ID NO: 470757 - DNA, 120 bp, Artificial Sequence
  ENSG00000159267_11 (sequence is synthesized)
gtcttgagcagtggctgcaggtaccaggaaggccccgtccggctcagccccggcaggctccagggccacctggagaatgaggacaaggacaggatgattgtgcatgtgccttttggaact

SEQ ID NO: 470758 - DNA, 120 bp, Artificial Sequence
  ENSG00000159267_12 (sequence is synthesized)
cgcgggggagaagctgttctttgccaggtgcacttagaactacctcccagctccaacatagtgcaaactccagaagattttaacttgctcaagtcaagcaattttagaagatacgaagtc

SEQ ID NO: 470759 - DNA, 120 bp, Artificial Sequence
  ENSG00000159267_13 (sequence is synthesized)
cttagagagattctgacaacccttggcctcagctgtgacatgaaacaagttcctgccttaactcctctttacttgctgtcagctgcggaggaaatcagggatcctcttatgcagtggctt

SEQ ID NO: 470760 - DNA, 120 bp, Artificial Sequence
  ENSG00000159267_14 (sequence is synthesized)
gggaaacatgtggactccgagggagaaataaaatccggccagctctctcttagatttgtttcatcctacgtgtctgaagtagaaataaccccatcttgtatacctgtggtgaccaacatg

SEQ ID NO: 470761 - DNA, 120 bp, Artificial Sequence
  ENSG00000159267_15 (sequence is synthesized)
gaggccttctcatcagaacatttcaacttagagatctatcgccaaaatctgcagaccaagcagttggggaaagtaattttgtttgccgaagtgacccccacaacgatgcgtctcctggat

SEQ ID NO: 470762 - DNA, 120 bp, Artificial Sequence
  ENSG00000159267_16 (sequence is synthesized)
gggctgatgtttcagacaccgcaggaaatgggcttaatagtgatcgcggcccggcagaccgagggcaaaggacggggagggaatgtgtggctgagccctgtgggatgtgctctttctact

SEQ ID NO: 470763 - DNA, 120 bp, Artificial Sequence
  ENSG00000159267_17 (sequence is synthesized)
ctgctcatctccattccactgagatcccagctgggacagaggatcccgtttgtccagcatctgatgtccgtggctgtcgtggaagcagtgaggtccattcccgagtatcaggatatcaac

SEQ ID NO: 470764 - DNA, 120 bp, Artificial Sequence
  ENSG00000159267_18 (sequence is synthesized)
ttacgagtgaagtggcccaacgatatttattacagtgacctcatgaagatcggcggagttctggttaactcaacactcatgggagaaacattttatatacttattggctgtggatttaat

SEQ ID NO: 470765 - DNA, 120 bp, Artificial Sequence
  ENSG00000159267_19 (sequence is synthesized)
gtgactaacagtaaccctaccatctgcatcaacgacctcatcacagaatacaataaacaacacaaggcagaactgaagcccttaagagccgattatctcatcgccagagtcgtgactgtg

SEQ ID NO: 470766 - DNA, 120 bp, Artificial Sequence
  ENSG00000159267_20 (sequence is synthesized)
ctggagaaactgatcaaagagtttcaggacaaagggcccaacagcgtccttcccctttattaccgatactgggtccacagtggtcagcaagtccatctgggcagcgcagagggaccaaag

SEQ ID NO: 470767 - DNA, 120 bp, Artificial Sequence
  ENSG00000159267_21 (sequence is synthesized)
gtgtccatcgttggcctggacgattctggcttcctccaggttcaccaggagggcggcgaggttgtgactgtgcacccggacggcaactccttcgacatgctgagaaacctcatcctcccc

SEQ ID NO: 470768 - DNA, 120 bp, Artificial Sequence
  ENSG00000159267_22 (sequence is synthesized)
aaacggcggtaatgccgggcgtccccgagacgcggctgcctgtccgtgcccatgcatctggaaatctaatttagagttgtaggtgaattttcttttcctccaattcatttgttaagtctt

SEQ ID NO: 470769 - DNA, 120 bp, Artificial Sequence
  ENSG00000159267_23 (sequence is synthesized)
tgttctttttctgtgtttctgtttgtttttaggtttgttttgttgtcgttttctttggtgtttgaagaggctctgggatagatggttaagaagtagaaaatttagtttagggaaagccct

SEQ ID NO: 470770 - DNA, 120 bp, Artificial Sequence
  ENSG00000159267_24 (sequence is synthesized)
cccacaggtgggaaattgctctcccctctgtggcttggacttacgtttattgtcaaggggagtttttacatggaaatgacaatgggaaaattcagatattttcttagtagtgcagacctt

SEQ ID NO: 470771 - DNA, 120 bp, Artificial Sequence
  ENSG00000159267_25 (sequence is synthesized)
ctatgaaaaaacaaaccaaaatatgctcttgcgcccaggccagtggtgagttagaggtatgctatcactgtttgtaagcatctggggaggtactgaactgtaagaacatgcttggacact

SEQ ID NO: 470772 - DNA, 120 bp, Artificial Sequence
  ENSG00000159267_26 (sequence is synthesized)
tagtcattgttctgtgtttttattaatgaagaaaagggaagacagacttccaagagttactgtccacccggtggtgtggccccatagcgaagtctaaatgcctgtagagatagagctagc

SEQ ID NO: 470773 - DNA, 120 bp, Artificial Sequence
  ENSG00000159267_27 (sequence is synthesized)
tggtgtggttgcagtgaccttgtagaggaaatcagttcattactttgacatcattcagtgagctctcctttcctaaggaagtttaaatgtccttagttagggactgactttcttaagtaa

SEQ ID NO: 470774 - DNA, 120 bp, Artificial Sequence
  ENSG00000159267_28 (sequence is synthesized)
gtttaaatttactacatattgtgaagagacaggatcaagttcagaatccttaaatgtctgattaggcatcacttggatgaggaggtgggcgatttggctctgacagctggagatgaaggc

SEQ ID NO: 470775 - DNA, 120 bp, Artificial Sequence
  ENSG00000159267_29 (sequence is synthesized)
acactcataccacatacaagggaggatttggagcttttaagccagtttcagatttactctgaaatgtggagcattcctgcaagactgtgcagctcacggaatatagaagacatggcattt

SEQ ID NO: 470776 - DNA, 120 bp, Artificial Sequence
  ENSG00000159267_30 (sequence is synthesized)
tactcagaagtcataagtttttgcccccctcatttacctcgtattaccaagaaagaaaatgttatcgatactaaacaccatcagttcagagggaggatgtgtgtgtgtgcccgcatatgt

SEQ ID NO: 470777 - DNA, 120 bp, Artificial Sequence
  ENSG00000159267_31 (sequence is synthesized)
gtgtgcgtgcgtgtgtgcgcacatagctttaaaagaagacattcaaaatttgatgtgctacaagcctcatgaaagaacaaaagaaatgaagccttttgatatgcattcgctattcccaga

SEQ ID NO: 470778 - DNA, 120 bp, Artificial Sequence
  ENSG00000159267_32 (sequence is synthesized)
tgtacgccatgccttttccatgtccctcctatctctgttgaacttatgaatcatactcattacttttcagctttttaaaaggccaatttttgtccagttttctctcttccagtcccagct

SEQ ID NO: 470779 - DNA, 120 bp, Artificial Sequence
  ENSG00000159267_33 (sequence is synthesized)
gaaattagtggaaagaaagtttgatggagctttcagctttgaacaaaatcccttcattgtaaactagcaccatctttatccaggtcttacccagtcaggctaattccagaaacttgtggt

SEQ ID NO: 470780 - DNA, 120 bp, Artificial Sequence
  ENSG00000159267_34 (sequence is synthesized)
ttttagtatagtctgtctacctttagccaggcacaggacagccctatgaaaaaatacccaatatatattttttggaaatgaaacattaaaagaacttaaaaagtaatttttggaaatgag

SEQ ID NO: 470781 - DNA, 120 bp, Artificial Sequence
  ENSG00000159267_35 (sequence is synthesized)
aacaaacaaacaaaaaacacaaaaaaaaccactcttctccaaatgcccaagccttctttcaaaattagttagaaacttaagtaaaatacaagtccacaccatccccaaattacaaaatgg

SEQ ID NO: 470782 - DNA, 120 bp, Artificial Sequence
  ENSG00000159267_36 (sequence is synthesized)
tccacaccatccccaaattacaaaatggacttacccttgagagggcatctgcagaatatcatcagggacaaagatctcgaggctaacgatgtaggtttcatttctcagactttgtaatat

SEQ ID NO: 470783 - DNA, 120 bp, Artificial Sequence
  ENSG00000159267_37 (sequence is synthesized)
aaggcaagccctctctcagagctgccatcatcactttttgaatttctttgggggttatttaatgaaaaacatgctatgttttgttttaagctgaagtcctattctggacactctgctttg

SEQ ID NO: 470784 - DNA, 120 bp, Artificial Sequence
  ENSG00000159267_38 (sequence is synthesized)
ggaaaaaatgttatcatttaatttcctttctgcaaattaaaactaatgaagtgtggccttgtcaaaggctatggagatgttccgggcatactgctgtgctctgtgctttccagcaggcgc

SEQ ID NO: 470785 - DNA, 120 bp, Artificial Sequence
  ENSG00000159267_39 (sequence is synthesized)
tcctccctcacgcaggagactcagttgtcctgagagagatgaagcagccttgaagcagatgctgcgttttccataaacctgattttgcctcacatgaaccaaagactctcaaaactccgc

SEQ ID NO: 470786 - DNA, 120 bp, Artificial Sequence
  ENSG00000159267_40 (sequence is synthesized)
ttctatagaattagctgaataaaggcattttactgatagctgttcgtgttagcgaaacctgtctacctgctatagcacactctccgatttgggccatttatgcaccccgcaacctgggat

SEQ ID NO: 470787 - DNA, 120 bp, Artificial Sequence
  ENSG00000159267_41 (sequence is synthesized)
ctcaaggagctttaaagtcttaatgggaacttggcattttcctgatgatctttaaaatgtggtcactaaactcaggattggcgtgtgcttttagaacactggagtagcccttgttttaga

SEQ ID NO: 470788 - DNA, 120 bp, Artificial Sequence
  ENSG00000159267_42 (sequence is synthesized)
ggctgtgcattgagtatcgaccgtattttgtaaaaggcaagatatcctcccttccaggctggtaacgggtttcaaggggactcttgaggaagtgccccctaaaatagaacacagcaataa

SEQ ID NO: 470789 - DNA, 120 bp, Artificial Sequence
  ENSG00000159267_43 (sequence is synthesized)
ctgggcttcctgtccccacccccaccccagcagtgctctctggcactgggaactctgctagggagtggtggaagtaggaaggatttgtgtgcaaaggaaaatcgtggttgagtttcactg

SEQ ID NO: 470790 - DNA, 120 bp, Artificial Sequence
  ENSG00000159267_44 (sequence is synthesized)
cagcaggctgacgttgcctgatgtgagagcaagtggccgactggggtgcgggtgcacaggtcgggggagcacaggccacagagcgcagcctctgggggtcccccaaggcacagcatatac

SEQ ID NO: 470791 - DNA, 120 bp, Artificial Sequence
  ENSG00000159267_45 (sequence is synthesized)
agcatggtcgccccttgccctggagtctgggaacaaagagaggagccagcctccccgcactgcttcagatggaaaagggaggcagggtgggcttccgttctccagatctgtttgctctta

SEQ ID NO: 470792 - DNA, 120 bp, Artificial Sequence
  ENSG00000159267_46 (sequence is synthesized)
acaggcagaacatgggagaatccttattcctggttaatcactatgcatatttgaaataaaagaaagcgtaagcctctgcaattttaacttctcaaaggatgtctctgaaaagaatcactt

SEQ ID NO: 470793 - DNA, 120 bp, Artificial Sequence
  ENSG00000159267_47 (sequence is synthesized)
taaaccaatgcctataaaaagcaagtctaccaaaataaactaagactttctatgtggtttgggctccctcttatttttacaagtttcatttttaaaagtaggcaactactttgggttaca

SEQ ID NO: 470794 - DNA, 120 bp, Artificial Sequence
  ENSG00000159267_48 (sequence is synthesized)
tacagtatttttattcatatttaaacatttttacaaaataaataaagtgttttacatagtaaggaatatgtacgtatttccaagtattaagaagccaagtgtttttttttttgacgtatt

SEQ ID NO: 470795 - DNA, 120 bp, Artificial Sequence
  ENSG00000159267_49 (sequence is synthesized)
acaaatgtattcagcgccatacacaagagaaatattattactccaaagaacgaaagttaacaaaactccaaagcaaaaacccttttaatggaggtgagaaataaatttaatgtaacaaca

SEQ ID NO: 470796 - DNA, 69 bp, Artificial Sequence
  ENSG00000159267_50 (sequence is synthesized)
gtggtgtggtctcggctcaccacaacctctgcctactgggttcctaccatgcccggctaatttttgtat

SEQ ID NO: 470797 - DNA, 74 bp, Artificial Sequence
  ENSG00000159267_51 (sequence is synthesized)
tattttcaaattctttacctctgcgtttccagccttgctccatccaatttgttactagagctttttaacaattt

SEQ ID NO: 470798 - DNA, 120 bp, Artificial Sequence
  ENSG00000159267_52 (sequence is synthesized)
ttgctccatccaatttgttactagagctttttaacaatttcacgttgaattaagatgatttggaagaggagaaacaagagtcagaaaaattagcagcatccgtgatctgactctgggtac

SEQ ID NO: 470799 - DNA, 120 bp, Artificial Sequence
  ENSG00000159267_53 (sequence is synthesized)
cagtgggttgttgagatttctgttccccactcactgcagagctgctgcctgccaatgccccctgttgggcagggccacctgtgctagtttaacctggggtctttcactcccggactgctt

SEQ ID NO: 470800 - DNA, 120 bp, Artificial Sequence
  ENSG00000159267_54 (sequence is synthesized)
cttggatgtgagttttaagttgagcagagaagatatgccttgcctgctgccatacattgtaacatcaagtcaagagctttagttacttaacagatttctgctggctgctattataggagg

SEQ ID NO: 470801 - DNA, 120 bp, Artificial Sequence
  ENSG00000159267_55 (sequence is synthesized)
aaactcctttgtttagggacagccagggcttccttagctttgatctttgggagtgagccttttgcttgacttcccttctcttttccatgcctttgtttccatctcgaagtgcaaatttaa

SEQ ID NO: 470802 - DNA, 120 bp, Artificial Sequence
  ENSG00000159267_56 (sequence is synthesized)
agtgtcctgtttgcctttatccactggaaggcaaacaccctggacgacgtatcagtgacagcgcggttctgctttgatcggagcacccagcgctgcttgaaggcgtttgcatggtccatg

SEQ ID NO: 470803 - DNA, 120 bp, Artificial Sequence
  ENSG00000159267_57 (sequence is synthesized)
gtgctggcgaggcagggcctgagcagccagtggagaagggcagcgggaagtgcgctgtgcaggagccagacgtctcagcccgtgtggccagaggtggcaggggcgcggcctgagcggggc

SEQ ID NO: 470804 - DNA, 120 bp, Artificial Sequence
  ENSG00000159267_58 (sequence is synthesized)
ggccgcccggggctctggggactcgggtgtccaggtgccgaagtcgccgcttccacgggggactcaggcccgtgagtgggtttcctaagaacttaccagattccacggctcgggtttcct

SEQ ID NO: 470805 - DNA, 120 bp, Artificial Sequence
  ENSG00000159267_59 (sequence is synthesized)
gccttggatcctgctttttattccccagggggagttatttatagacaggaatcgtgtgttcaaggcctggctcttcggactcggcgtttttcttgttcgaggtgcttcaatgggggctgg

SEQ ID NO: 470806 - DNA, 120 bp, Artificial Sequence
  ENSG00000159267_60 (sequence is synthesized)
catgctcatcacgctgtgctacctgtacctgtgggcgcgctggggtcgccggccggctgagctcgtgcgcgccacggtgcggcggctgcgtgcctcgcgctgttccttcaccttctgcgg

SEQ ID NO: 470807 - DNA, 120 bp, Artificial Sequence
  ENSG00000159267_61 (sequence is synthesized)
tcatcctctcttaccaatagacggggaggggatagagttgtagaggaatacgtttgaccagacctattagcaaggtggaagtactcttgtcctagaagagttaaatcgtgggaaaggaaa

SEQ ID NO: 470808 - DNA, 120 bp, Artificial Sequence
  ENSG00000159267_62 (sequence is synthesized)
ttgaagttctttgatcacaggtttgttttttatgggaatggaaggtggttgtgctttgtgtcttgcttctttgaatcaggccctcagaatgttctttgataaacgaatattatgaaaaaa

SEQ ID NO: 470809 - DNA, 120 bp, Artificial Sequence; identical to SEQ ID NO: 360564
  ENSG00000159289_0 (sequence is synthesized)

SEQ ID NO: 470810 - DNA, 120 bp, Artificial Sequence
  ENSG00000159289_1 (sequence is synthesized)
aaaagctaaaagaatatcagcaaaggaagagccctggtattccagcaggagcaaagacaaaaaagaaaaaaactgacagtagccctgagacaaccacttccggtggttgccactcacctg

SEQ ID NO: 470811 - DNA, 120 bp, Artificial Sequence
  ENSG00000159289_2 (sequence is synthesized)
gggatagccagtaccaagaactagcagtagccctggagtcaagctcagtgacaatcagtcaactcaatgaaaacatagaatcattgaaacagcagaagaaacaagtggaacatcagctgg

SEQ ID NO: 470812 - DNA, 120 bp, Artificial Sequence
  ENSG00000159289_3 (sequence is synthesized)
aagaagcaaagaaaacaaacaatgaaatacacaaagcacaaatggagcggttagagacaatcaacatcctcacattggaaaaggcagacttgaagaccaccctttaccatactaaacgtg

SEQ ID NO: 470813 - DNA, 120 bp, Artificial Sequence
  ENSG00000159289_4 (sequence is synthesized)
ctgcccgacacttcgaagaagagtccaaggatctggctggccgcctgcaatactccttacagcgtattcaagaattggagcgggctctctgtgctgtgtctacacagcagcaggaagagg

SEQ ID NO: 470814 - DNA, 120 bp, Artificial Sequence
  ENSG00000159289_5 (sequence is synthesized)
acaggtcctcgagctgcagagaagcggtcctccagcggtggttacagcagaccataaaggagcgggcgctgctgaacgcacacgtgacacaggtgacagagtcactaaaacaagtccagc

SEQ ID NO: 470815 - DNA, 120 bp, Artificial Sequence; identical to SEQ ID NO: 360570
  ENSG00000159289_6 (sequence is synthesized)

SEQ ID NO: 470816 - DNA, 120 bp, Artificial Sequence
  ENSG00000159289_7 (sequence is synthesized)
ggatacaggagctggagaggagcttgtccgaactcaaaaaccagatggctgagcccccatccctggcgcccccagcagtgacctctgtggtggaacagctacaagatgaggccaaacacc

SEQ ID NO: 470817 - DNA, 120 bp, Artificial Sequence
  ENSG00000159289_8 (sequence is synthesized)
tgaggcaggaggtggaaggtctggagggaaagctccagtcccaggtggaaaacaatcaggccttgagtctccttagcaaggaacaaaagcagagactccaggagcaggaggagatgctcc

SEQ ID NO: 470818 - DNA, 120 bp, Artificial Sequence
  ENSG00000159289_9 (sequence is synthesized)
gagagcaggaggcgcagagagtgcgggagcaggagagactgtgtgaacaaaacgagaggcttcgggagcagcagaagacgctacaggagcagggtgagaggctgcgaaagcaggagcaga

SEQ ID NO: 470819 - DNA, 120 bp, Artificial Sequence
  ENSG00000159289_10 (sequence is synthesized)
ggctacgcaaacaggaggagaggctgcgaaaggaggaggagaggctgcaaaagcaggaaaagaggctgtgggaccaggaggagaggctgtggaagaaggaggagaggctacaaaagcagg

SEQ ID NO: 470820 - DNA, 120 bp, Artificial Sequence
  ENSG00000159289_11 (sequence is synthesized)
caggaggagaggctcgcgctctcccagaaccacaagctcgacaagcagctggccgagccacagtgcagcttcgaggatctgaacaacgagaaaaagagcgcactgcagttggagcagcaa

SEQ ID NO: 470821 - DNA, 120 bp, Artificial Sequence
  ENSG00000159289_12 (sequence is synthesized)
aggagctgcaggagaagctagacgaggagcacctagaagctgccagccaccagaaccaacagctagagacccagctaagcctcgtggctctccctggagaaggagatggaggacaacatc

SEQ ID NO: 470822 - DNA, 120 bp, Artificial Sequence
  ENSG00000159289_13 (sequence is synthesized)
gagagccgggaggccacgagcagctttatggacctcccgaaggagaaggcggacgggacggagcaggtggagagacgagagcttggattcgtccagccttctggagtgacagacggcatg

SEQ ID NO: 470823 - DNA, 120 bp, Artificial Sequence
  ENSG00000159289_14 (sequence is synthesized)
agagagtccttcaccgtatatgaaagccagggggcagtgccaaacacgcggcaccaggagatggaggatgtcatcaggctggcccagaaggaggaggagatgaaggtgaagctgctggag

SEQ ID NO: 470824 - DNA, 120 bp, Artificial Sequence
  ENSG00000159289_15 (sequence is synthesized)
ctgcaagagttggtgttgccccttgtgggcaaccatgaggggcatggcaaattcctcatcgctgcccagaaccctgctgatgagcccactccaggggccccagccccccaggaacttggg

SEQ ID NO: 470825 - DNA, 120 bp, Artificial Sequence
  ENSG00000159289_16 (sequence is synthesized)
gctgccggtgagcaggatgttttttatgaagtgagcctggacaacaacgtggagcctgcaccaggagcggccagggagggttctccccatgacaaccccactgtacagcagatcgtgcag

SEQ ID NO: 470826 - DNA, 120 bp, Artificial Sequence
  ENSG00000159289_17 (sequence is synthesized)
ctgtctcctgtcatgcaggacacctaggagcacccaggcttgcccagcaaaccctgcgtgccattcttctaccaggcagccgagaacagggagataaacatcatcatcttctaagagctg

SEQ ID NO: 470827 - DNA, 120 bp, Artificial Sequence
  ENSG00000159289_18 (sequence is synthesized)
gtcaagaaatttaaaacaacaacaacaacaaaaagttacggggttcatctcctacacaattcatttactccatttgaatgctagagccactcacatttatttgtgtttctaatttaccgt

SEQ ID NO: 470828 - DNA, 120 bp, Artificial Sequence
  ENSG00000159289_19 (sequence is synthesized)
ttaaatttatttgtaaaaagttaagggagagttggtctttccctgatgttctttctggcatcctttagcatttttatttttaatttgataattgtaggtcattagtatgcatatcgagtt

SEQ ID NO: 470829 - DNA, 120 bp, Artificial Sequence
  ENSG00000159289_20 (sequence is synthesized)
attagtatgcatatcgagtttgcccttaggtggtgggaattcaaacacacaaagacccactaatttgcacaaaactattctggctggtttggaacaggctgccatgcttttttaatgtta

SEQ ID NO: 470830 - DNA, 120 bp, Artificial Sequence
  ENSG00000159289_21 (sequence is synthesized)
ccagaattcagataaaatgtgcttatgttctgctattacgtttgatcgaatcctaaccacagtgagctcttcattagctcaatatgtggtttgccctcaattgagcactgtttattactt

SEQ ID NO: 470831 - DNA, 120 bp, Artificial Sequence
  ENSG00000159289_22 (sequence is synthesized)
taaatctcacagaagaggaaagtggcctgctctggcaggtgtgtgcaggatagagtgtgtttcatttgttctggtgccaagaatgagcgctgtactatggtagttcccttaggatttgta

SEQ ID NO: 470832 - DNA, 79 bp, Artificial Sequence
  ENSG00000159289_23 (sequence is synthesized)
gcagttgtaccctttcttgatgacctgactgtggatgtggaaaaccttttctagcttagagcatttatatctacaatac

SEQ ID NO: 470833 - DNA, 90 bp, Artificial Sequence
  ENSG00000159289_24 (sequence is synthesized)
ctcttttccttggcttttctcccaaacgttcaattccagacaatcaacatcctcacattggaaaaggcagacttgaagaccaccctttac

SEQ ID NO: 470834 - DNA, 81 bp, Artificial Sequence
  ENSG00000159289_25 (sequence is synthesized)
gagatggccggacaaaagttgcaggagacccaggggagggagttgctgaggacggggccccgagggggatgacctggcaac

SEQ ID NO: 470835 - DNA, 80 bp, Artificial Sequence
  ENSG00000159307_0 (sequence is synthesized)
cgcgccccgcacgcccgcacgcccagcggggcccgcattgagcatgggcgcggcggccgtgcgctggcacttgtgcgtgc

SEQ ID NO: 470836 - DNA, 120 bp, Artificial Sequence
  ENSG00000159307_1 (sequence is synthesized)
gcggccgtgcgctggcacttgtgcgtgctgctggccctgggcacacgcgggcggctggccgggggcagcgggctcccagggtcagtcgacgtggatgagtgctcagagggcacagatgac

SEQ ID NO: 470837 - DNA, 120 bp, Artificial Sequence
  ENSG00000159307_2 (sequence is synthesized)
tgccacatcgatgccatctgtcagaacacgcccaagtcctacaaatgcctctgcaagccaggctacaagggggaaggcaagcagtgtgaagacattgacgagtgtgagaatgactactac

SEQ ID NO: 470838 - DNA, 120 bp, Artificial Sequence
  ENSG00000159307_3 (sequence is synthesized)
aatgggggctgtgtccacgagtgcatcaacatcccggggaactacaggtgtacctgctttgatggcttcatgctggcacacgatggacacaactgcctggatgtggacgagtgtcaggac

SEQ ID NO: 470839 - DNA, 120 bp, Artificial Sequence
  ENSG00000159307_4 (sequence is synthesized)
aataatggtggctgccagcagatctgcgtcaatgccatgggcagctacgagtgtcagtgccacagtggcttcttccttagtgacaaccagcatacctgcatccaccgctccaatgagggt

SEQ ID NO: 470840 - DNA, 120 bp, Artificial Sequence
  ENSG00000159307_5 (sequence is synthesized)
atgaactgcatgaacaaagaccatggctgtgcccacatctgccgggagacgcccaaaggtggggtggcctgcgactgcaggcccggctttgaccttgcccaaaaccagaaggactgcaca

SEQ ID NO: 470841 - DNA, 120 bp, Artificial Sequence
  ENSG00000159307_6 (sequence is synthesized)
ctaacctgtaattatggaaacggaggctgccagcacagctgtgaggacacagacacaggccccacgtgtggttgccaccagaagtacgccctccactcagacggtcgcacgtgcatcgag

SEQ ID NO: 470842 - DNA, 120 bp, Artificial Sequence
  ENSG00000159307_7 (sequence is synthesized)
acgtgcgcagtcaataacggaggctgcgaccggacatgcaaggacacagccactggcgtgcgatgcagctgccccgttggattcacactgcagccggacgggaagacatgcaaagacatc

SEQ ID NO: 470843 - DNA, 120 bp, Artificial Sequence
  ENSG00000159307_8 (sequence is synthesized)
aacgagtgcctggtcaacaacggaggctgcgaccacttctgccgcaacaccgtgggcagcttcgagtgcggctgccggaagggctacaagctgctcaccgacgagcgcacctgccaggac

SEQ ID NO: 470844 - DNA, 120 bp, Artificial Sequence
  ENSG00000159307_9 (sequence is synthesized)
atcgacgagtgctccttcgagcggacctgtgaccacatctgcatcaactccccgggcagcttccagtgcctgtgtcaccgcggctacatcctctacgggacaacccactgcggagatgtg

SEQ ID NO: 470845 - DNA, 120 bp, Artificial Sequence
  ENSG00000159307_10 (sequence is synthesized)
gacgagtgcagcatgagcaacgggagctgtgaccagggctgcgtcaacaccaagggcagctacgagtgcgtctgtcccccggggaggcggctccactggaacgggaaggattgcgtggag

SEQ ID NO: 470846 - DNA, 120 bp, Artificial Sequence
  ENSG00000159307_11 (sequence is synthesized)
acaggcaagtgtctttctcgcgccaagacctccccccgggcccagctgtcctgcagcaaggcaggcggtgtggagagctgcttcctttcctgcccggctcacacactcttcgtgccagac

SEQ ID NO: 470847 - DNA, 120 bp, Artificial Sequence
  ENSG00000159307_12 (sequence is synthesized)
tcggaaaatagctacgtcctgagctgcggagttccagggccgcagggcaaggcgctgcagaaacgcaacggcaccagctctggcctcgggcccagctgctcagatgcccccaccaccccc

SEQ ID NO: 470848 - DNA, 120 bp, Artificial Sequence
  ENSG00000159307_13 (sequence is synthesized)
atcaaacagaaggcccgcttcaagatccgagatgccaagtgccacctccggccccacagccaggcacgagcaaaggagaccgccaggcagccgctgctggaccactgccatgtgactttc

SEQ ID NO: 470849 - DNA, 120 bp, Artificial Sequence
  ENSG00000159307_14 (sequence is synthesized)
gtgaccctcaagtgtgactcctccaagaagaggcgccgtggccgcaagtccccatccaaggaggtgtcccacatcacagcagagtttgagatcgagacaaagatggaagaggcctcagac

SEQ ID NO: 470850 - DNA, 120 bp, Artificial Sequence
  ENSG00000159307_15 (sequence is synthesized)
acatgcgaagcggactgcttgcggaagcgagcagaacagagcctgcaggccgccatcaagaccctgcgcaagtccatcggccggcagcagttctatgtccaggtctcaggcactgagtac

SEQ ID NO: 470851 - DNA, 120 bp, Artificial Sequence
  ENSG00000159307_16 (sequence is synthesized)
gaggtagcccagaggccagccaaggcgctggaggggcagggggcatgtggcgcaggccaggtgctacaggacagcaaatgcgttgcctgtgggcctggcacccacttcggtggtgagctc

SEQ ID NO: 470852 - DNA, 120 bp, Artificial Sequence
  ENSG00000159307_17 (sequence is synthesized)
ggccagtgtgtgtcatgtatgccaggaacataccaggacatggaaggccagctcagttgcacaccgtgccccagcagcgacgggcttggtctgcctggtgcccgcaacgtgtcggaatgt

SEQ ID NO: 470853 - DNA, 120 bp, Artificial Sequence
  ENSG00000159307_18 (sequence is synthesized)
ggaggccagtgttctccaggcttcttctcggccgatggcttcaagccctgccaggcctgccccgtgggcacgtaccagcctgagcccgggcgcaccggctgcttcccctgtggagggggt

SEQ ID NO: 470854 - DNA, 120 bp, Artificial Sequence
  ENSG00000159307_19 (sequence is synthesized)
ttgctcaccaaacacgaaggcaccacctccttccaggactgcgaggctaaagtgcactgctcccccggccaccactacaacaccaccacccaccgctgcatccgctgccccgtcggcacc

SEQ ID NO: 470855 - DNA, 120 bp, Artificial Sequence
  ENSG00000159307_20 (sequence is synthesized)
taccagcccgagtttggccagaaccactgcatcacctgtccgggcaacaccagcacagacttcgatggctccaccaacgtcacacactgcaaaaaccagcactgcggcggcgagcttggt

SEQ ID NO: 470856 - DNA, 120 bp, Artificial Sequence
  ENSG00000159307_21 (sequence is synthesized)
gactacaccggctacatcgagtcccccaactaccctggcgactacccagccaacgctgaatgcgtctggcacatcgcgcctcccccaaagcgcaggatcctcatcgtggtccctgagatc

SEQ ID NO: 470857 - DNA, 120 bp, Artificial Sequence
  ENSG00000159307_22 (sequence is synthesized)
ttcctgcccatcgaggatgagtgcggcgatgttctggtcatgaggaagagtgcctctcccacgtccatcaccacctatgagacctgccagacctacgagaggcccatcgccttcacctcc

SEQ ID NO: 470858 - DNA, 120 bp, Artificial Sequence
  ENSG00000159307_23 (sequence is synthesized)
cgctcccgcaagctctggatccagttcaaatccaatgaaggcaacagcggcaaaggcttccaagtgccctatgtcacctacgatgaggactaccagcaactcatagaggacatcgtgcgc

SEQ ID NO: 470859 - DNA, 120 bp, Artificial Sequence
  ENSG00000159307_24 (sequence is synthesized)
gatgggcgcctgtacgcctcggagaaccaccaggaaattttgaaagacaagaagctgatcaaggccctcttcgacgtgctggcgcatccccagaactacttcaagtacacagcccaggaa

SEQ ID NO: 470860 - DNA, 120 bp, Artificial Sequence
  ENSG00000159307_25 (sequence is synthesized)
tccaaggagatgttcccacggtccttcatcaaactgctgcgctccaaagtgtctcggttcctgcggccctacaaataaccggggggagcggccctgcctgggggtggcctggtccgcgga

SEQ ID NO: 470861 - DNA, 120 bp, Artificial Sequence
  ENSG00000159307_26 (sequence is synthesized)
gggtgcacctgccctccacagtgggagctgcatgggcctccacaccaccttgggaaccccatggcactgcccttcagggaagccgaccagcccatggagaccgagcccaggcacccttcg

SEQ ID NO: 470862 - DNA, 120 bp, Artificial Sequence
  ENSG00000159307_27 (sequence is synthesized)
gacccgctgcccctgtgggagcaccctgcttcaggaagcctccctccctccctctgcctcccttccccaggacaccaagagcgccctctcctgagccctggcagaccgactgcaggtagc

SEQ ID NO: 470863 - DNA, 120 bp, Artificial Sequence
  ENSG00000159307_28 (sequence is synthesized)
aggattgcaggaccctctgcctggcctggcgtttcaggagagaggggaagtggggcctgtgctctgggaggcgtggtcatccgagacaggagtccaggggagagaggaggggacaaaggc

SEQ ID NO: 470864 - DNA, 120 bp, Artificial Sequence
  ENSG00000159307_29 (sequence is synthesized)
gccgtctgggggaggtcgatgagcctgtgctggcatccgcgggccccacgctttgccaactcctccagccacaggcaaggccacggctccgggctgttgcgctctaagggttctgtgatt

SEQ ID NO: 470865 - DNA, 120 bp, Artificial Sequence
  ENSG00000159307_30 (sequence is synthesized)
gctctaagggttctgtgattggatggaacagagctgctggggaggagactggaagtttctgcattccttcaacagaacatttaatgaagtactctatatatatatataaatatatatata

SEQ ID NO: 470866 - DNA, 120 bp, Artificial Sequence
  ENSG00000159307_31 (sequence is synthesized)
tttgtgggtactttaggaaaatgccctttggtcactgtaaatatgaattgtgaccccatcccttcccgcatgagcccagtgagtcccagcagctatcagcctccctgaacgattaaacag

SEQ ID NO: 470867 - DNA, 120 bp, Artificial Sequence
  ENSG00000159307_32 (sequence is synthesized)
ctcctcccagcatttgcatttgcccttctgtttctgtgaggccggcagcccttggggctggggagagcacagcttgccttggacttgcttctgaacacgaattcttcgagaactaggctc

SEQ ID NO: 470868 - DNA, 120 bp, Artificial Sequence
  ENSG00000159307_33 (sequence is synthesized)
agatgctctgctggagtgttggcctcaccccagtccccttgccagcaacatcactgcccttggacgagactcagtggaagacacttcccctcggacccgttcccaggaggtgcaggggcc

SEQ ID NO: 470869 - DNA, 120 bp, Artificial Sequence
  ENSG00000159307_34 (sequence is synthesized)
cagcaataaacggcgaaaggggccttggctcttgccctgtggcagtgaccttggggtccgtactatgcccaggtgtcagcaggaaacaaggccttgctcacaggagcacaggctgtacca

SEQ ID NO: 470870 - DNA, 120 bp, Artificial Sequence
  ENSG00000159307_35 (sequence is synthesized)
ccacaaggagcctcagagcggccagtgaggaaaggggagagagcagagcttgctgtcagaggccaggctcccagtgcagcctcctcttgctacgccatgccacccccattcacagggaaa

SEQ ID NO: 470871 - DNA, 83 bp, Artificial Sequence
  ENSG00000159307_36 (sequence is synthesized)
ctcctcttgctacgccatgccacccccattcacagggaaacctctttccttcctataaaggaaagaggttgaattgactcaca

SEQ ID NO: 470872 - DNA, 120 bp, Artificial Sequence
  ENSG00000159307_37 (sequence is synthesized)
aaggcagcaggagagagaagcaagcagggaaatgtcgggagaaagagagtctgggctgtgaccgagtgcatgtgtcccacccagccggaaggccagcgcctgggatggagccagcagaac

SEQ ID NO: 470873 - DNA, 120 bp, Artificial Sequence
  ENSG00000159307_38 (sequence is synthesized)
cccatgccgaggtccaggaggccttgcctgctcttcatctgcctgcgagctgtaggacctgcatgggaaatggtctgtgtgtttcaggttaacaaatactgaaaatcccaaggaacctgg

SEQ ID NO: 470874 - DNA, 120 bp, Artificial Sequence
  ENSG00000159307_39 (sequence is synthesized)
gagaatctgaaaatgaactccagtcttcagctcgaagttgcctctagggttcctcctggtcacccccgggcccagcctggctggcgagaaacaaacacggtttgagaggctgtggcacac

SEQ ID NO: 470875 - DNA, 120 bp, Artificial Sequence
  ENSG00000159307_40 (sequence is synthesized)
cacatattctacagtccaaaagagggcccggagctcagcaattactcacgccgtcacatgtgcccacagtagcgggctccgcggcgtggctcctgctgccatcagctgccttctctgctg

SEQ ID NO: 470876 - DNA, 120 bp, Artificial Sequence
  ENSG00000159307_41 (sequence is synthesized)
aagtccaactcaagtcggagagagagtggagcctctgcacttggggagtaggtcagtgtcaactaacaagccctgccaggggccactgccgctcctctggtcacagtccacgcaggccag

SEQ ID NO: 470877 - DNA, 120 bp, Artificial Sequence
  ENSG00000159307_42 (sequence is synthesized)
ccctggtttctggaaagaggcctccctccctccctttgtggagccgtcagtcatccccaagatgagaggcgagcatcctgccgagtgagcctgcagcaacagctcctgaggaaggtgccg

SEQ ID NO: 470878 - DNA, 120 bp, Artificial Sequence
  ENSG00000159307_43 (sequence is synthesized)
ggaggggtgtcgcctcttcacgagtgttctccagagaatcagaacccagaggatacagacgtagatgtgtgaggggctgcattatgggaactggctcacagattctggaggccaacaagt

SEQ ID NO: 470879 - DNA, 120 bp, Artificial Sequence
  ENSG00000159307_44 (sequence is synthesized)
cccacgatcggctgtctgcgattgggagaccaggagaagccacaccgtaactcagtctgagtccaaagcccgagaagccaggggccaccctgtgagtcccagcatccaaagccccgagaa

SEQ ID NO: 470880 - DNA, 120 bp, Artificial Sequence
  ENSG00000159307_45 (sequence is synthesized)
cgaggaagatggatgtcccagctcccaaagggaggattctcccttcctcctccttcttttctattggggccctcaacagattggatggagtggatgtcttcactcagtctgccaattccc

SEQ ID NO: 470881 - DNA, 120 bp, Artificial Sequence
  ENSG00000159307_46 (sequence is synthesized)
atcctaacctcttctggaaacaccctagcatgttttcccagctagctgggtatccgttcacccaaccaagacgaccatgcaatcaaccatcacacttaaatgtttttgttttgttttttt

SEQ ID NO: 470882 - DNA, 120 bp, Artificial Sequence
  ENSG00000159307_47 (sequence is synthesized)
tccagaaacagaaagagctcttaacctctctgagctctttctgcaattcctttgggcgatttctgaaagttgccacccacgtactcacagatccactgcccgcctctcctcccctcatgt

SEQ ID NO: 470883 - DNA, 120 bp, Artificial Sequence
  ENSG00000159307_48 (sequence is synthesized)
tccaggactcaccaccgtggtcagaccatgcccagtgtgcccagggcaaagttggatgggcaggtgcagacgaggcccagccttcatcctgctttccctcgcaagcccttctatagctcc

SEQ ID NO: 470884 - DNA, 120 bp, Artificial Sequence
  ENSG00000159307_49 (sequence is synthesized)
cagcccacgggagaggccatgaggagcgcgaggtcgccagcagccccactgggcctcccacaccatctgagtgacttgaattccagggttgggctctgtcttgagtctccacatcagtct

SEQ ID NO: 470885 - DNA, 120 bp, Artificial Sequence
  ENSG00000159307_50 (sequence is synthesized)
cacaccagggaacttgggggtcccccgttaaactacagctgaccctgggcctcagggcgggatggtcccaaggtgagctccgtggacagcaaagcgcatttcttccagttggcatgttgt

SEQ ID NO: 470886 - DNA, 120 bp, Artificial Sequence
  ENSG00000159307_51 (sequence is synthesized)
cgaagccaatggcagcttgactgatgtgaggtggctattccacctggttcaagatggaggtgtagagaaaagggaagtggggaacaaggactgggccaggtaggacggatccacgtaacg

SEQ ID NO: 470887 - DNA, 120 bp, Artificial Sequence
  ENSG00000159307_52 (sequence is synthesized)
aggcccaagaaaaaatggaagctgggggcagagagtccaggaggcccccatgctgtctgaggggaggccggcatagcccctcctcgactgtcgcctgagcagctgatgaggtccccagcg

SEQ ID NO: 470888 - DNA, 120 bp, Artificial Sequence
  ENSG00000159307_53 (sequence is synthesized)
ccgcacgctgtgctccagggagaggagccaagaagcaagcgggctgctgggagtccctgcactgccatctggccgggacggaggcgcctgcccggtctccaggctcctctgagcttgggt

SEQ ID NO: 470889 - DNA, 120 bp, Artificial Sequence
  ENSG00000159307_54 (sequence is synthesized)
cagctcctaatggagcatggcaccccagggaaccagaggaactctgtgaagaaaggcatggaaaaccggggtgtctcccgcacagcttcccaggagtcaggtgggacccaggcgtggggg

SEQ ID NO: 470890 - DNA, 120 bp, Artificial Sequence
  ENSG00000159307_55 (sequence is synthesized)
gacctttctgccccacattcctggcattccccccaagtttatttctactttccagaaacaagccacgggaagggaaggaacctgcagcagggtttcgaagacagccaggccctccgtgat

SEQ ID NO: 470891 - DNA, 120 bp, Artificial Sequence
  ENSG00000159307_56 (sequence is synthesized)
tgagggctcatatagccgctgagggcagcctgcagccaggtggcctcacctgctgcccagaattaggctgtgccttttcccagtccttccccatgccagagcctctccccatctttcccc

SEQ ID NO: 470892 - DNA, 120 bp, Artificial Sequence
  ENSG00000159307_57 (sequence is synthesized)
gcgccagagcctcacagccacagccacaccaacctccctcctctcaagcagcagaatcagcctacgctccccagcctcagtgcccctgccccacacaggtcacgctggcaaggcgatgac

SEQ ID NO: 470893 - DNA, 120 bp, Artificial Sequence
  ENSG00000159307_58 (sequence is synthesized)
cagtttccgaaacgctggatccccaagggtacagtgtggcccagtcctcccccacctccatggtggcccaggctgcagggctcacggtgggcccacggtggaggcctcaggcagctttct

SEQ ID NO: 470894 - DNA, 120 bp, Artificial Sequence
  ENSG00000159307_59 (sequence is synthesized)
ctccagctacccattggcttaggacacacagataaagtagagctgaaacacgggccaaaacatccccagacaaggatggcacaagaggccaaatttgaaggccttgggagagaagccatt

SEQ ID NO: 470895 - DNA, 120 bp, Artificial Sequence
  ENSG00000159307_60 (sequence is synthesized)
tcccctacctctaacgagcgtagttttctgtctgaatggccccccttttcatgcacgctcgttcttaagagacgcaccatccgcaggcagcgtctcagtgaagcctgtcccctgggcttg

SEQ ID NO: 470896 - DNA, 120 bp, Artificial Sequence
  ENSG00000159307_61 (sequence is synthesized)
tccacggcaggaggcccctggcctgtttaagccataccgatgcttaatttacatttttggagttgaatattattccggtgcctccaccacccccagcagaaaaaataagatactgaaata

SEQ ID NO: 470897 - DNA, 120 bp, Artificial Sequence
  ENSG00000159307_62 (sequence is synthesized)
agttgagtcatttcgcaaacatttactgagcacctcctgtgtgccaggctcctagaaagacagggagttggtgccctgcacagatgacaaactgccccagacagcagacagacaaacaaa

SEQ ID NO: 470898 - DNA, 120 bp, Artificial Sequence
  ENSG00000159307_63 (sequence is synthesized)
ctgccccggacagcagacagacaaacagacacattgccctggacagcagagagacaaacagacacactgccccggacagcagacagacagacacgttgccccggacagcagacagaaaaa

SEQ ID NO: 470899 - DNA, 120 bp, Artificial Sequence
  ENSG00000159307_64 (sequence is synthesized)
ctgccccggacagcagacagacagacaaactgccccagacagcagacagacaaactgccccggaaagcagacagcaaactgccccagacagcagacagacagacacacttccccagacag

SEQ ID NO: 470900 - DNA, 120 bp, Artificial Sequence
  ENSG00000159307_65 (sequence is synthesized)
cagatagacagacaccctgccccagacagcagacaagctgccctggacagcctgctcaccttgcctgccacagtgcatgccccacagggagaagccttccttctcacccagggagtccag

SEQ ID NO: 470901 - DNA, 120 bp, Artificial Sequence
  ENSG00000159307_66 (sequence is synthesized)
ccattttcacctcccctggtccatgctcaggaagtctggtcaccctggcaaactgcacctgacattgaggtcccttttcaccaaagatgcacaaggtgtccatgccgagccgacatcatt

SEQ ID NO: 470902 - DNA, 120 bp, Artificial Sequence
  ENSG00000159307_67 (sequence is synthesized)
caggccaagggcagaggatgtaatgaggggtggagtgaggatgtggagagagagcagagagcgcctcctattctaccgcggctgcctctgcccccacagcacccacagatccctggccct

SEQ ID NO: 470903 - DNA, 120 bp, Artificial Sequence
  ENSG00000159307_68 (sequence is synthesized)
tccaggagtaagtcctgggcaggcagagctggggttggcctgatcccacctgccttgctcttggaaaggacatcaggtgtgggcaaagcatccttgaagcccagacaacacaggcatggc

SEQ ID NO: 470904 - DNA, 120 bp, Artificial Sequence
  ENSG00000159307_69 (sequence is synthesized)
ctgcgtgccctcccagcatctgctgcgatggcctcaaggcctctccagtcccctgctgcaccatgccactcagagcccctgagtgagccccctggaattgtctgcaccccccaagcccca

SEQ ID NO: 470905 - DNA, 120 bp, Artificial Sequence
  ENSG00000159307_70 (sequence is synthesized)
acaggaagaagggaaaggtggggaagctgacgctcactcagtgcccactgggtgccaggctctgggctcaaccctctaatatccacacattccatccccccagccccatgtagatggtgg

SEQ ID NO: 470906 - DNA, 120 bp, Artificial Sequence
  ENSG00000159307_71 (sequence is synthesized)
ggttaagaccattcttcagatgtggaaatgaaggctctgggagaccacaggacatgcccaaggcaaagagttggtagtccctggatttgggaatcaaactcaagcccatctaatccaagg

SEQ ID NO: 470907 - DNA, 120 bp, Artificial Sequence
  ENSG00000159307_72 (sequence is synthesized)
gtaggaaatgtctctaaaacgttgatcaatctgaagcttacagattggaaactgggccaggtcagccctggcggtggagtccagagacagagagaaggctgcagggaggggagagaacag

SEQ ID NO: 470908 - DNA, 120 bp, Artificial Sequence
  ENSG00000159307_73 (sequence is synthesized)
gaggatcccgggccagggtgacttcagtgacattccttccctccttcacaagcacgaaaaactcgttcggagaaaagacagcttctgccttccctaccaggcggacagggtactcactgt

SEQ ID NO: 470909 - DNA, 120 bp, Artificial Sequence
  ENSG00000159307_74 (sequence is synthesized)
gccgacgtgagcagacacagccagaggctcaagtgcccttgccgagtgtccccactgctcttggggaggccccggcacagccctgcagagatgcaagtaagagagtgcccagtgccctcg

SEQ ID NO: 470910 - DNA, 120 bp, Artificial Sequence
  ENSG00000159307_75 (sequence is synthesized)
gcagatgggtggcagaaagcaggaggaggaagagggagctgaccgatgccgggtgtcttactccgctgagatcagaacctccaacatgccgagcagacgcaggccacattgctcggggaa

SEQ ID NO: 470911 - DNA, 120 bp, Artificial Sequence
  ENSG00000159307_76 (sequence is synthesized)
caggacaccagggcgctgtgctagcggcccgcagacttcacttctggctcctgtgagggcactgtattgtccagacgcttggcaacgactctgcctgcaagtggcaaataccaacataac

SEQ ID NO: 470912 - DNA, 120 bp, Artificial Sequence
  ENSG00000159307_77 (sequence is synthesized)
cacatcttccttttagttgccacaaatattcagttttgttttatccatcatgtcccccatatgcatgtaatgaaacatttgtgaaaatcactttaataataaacaggaaatgaacctaaa

SEQ ID NO: 470913 - DNA, 120 bp, Artificial Sequence
  ENSG00000159307_78 (sequence is synthesized)
ctccctaaatatttgtggaatgaaggggcacgccttggctttgcagggtatgttcccggcccacagggggctctccatggatctgaggagactggcagggcaggatcggaatcggcaccc

SEQ ID NO: 470914 - DNA, 120 bp, Artificial Sequence
  ENSG00000159307_79 (sequence is synthesized)
tggagaagctgtcgttggagacggccttggcgagacagtgtgttgcagctccagctctgtccgctgggttcagccccctcaccttacctcagtcactaacctctgtgcgctcagcgttct

SEQ ID NO: 470915 - DNA, 120 bp, Artificial Sequence
  ENSG00000159307_80 (sequence is synthesized)
ccaaaatgcttgggaccagaagtgtttccagtgttggatgttttcacatttgggaacatttgcagatacataatgaagtagcttgtggatggacccaagtctaaagatggaacgcatttg

SEQ ID NO: 470916 - DNA, 120 bp, Artificial Sequence
  ENSG00000159307_81 (sequence is synthesized)
atggacccaagtctaaagatggaacgcatttgttttatatactccttgtacacatacctgaaggcaattttacatggcatttcaataattttgtgcataaaacaaagtttgtgtgaagta

SEQ ID NO: 470917 - DNA, 120 bp, Artificial Sequence
  ENSG00000159307_82 (sequence is synthesized)
gggcacgtaagcacacaagcagttgaacgtggaaggcgttgggagccagataatacaagatgtggactcttgtggctggaacagctgggtggccttggctttgcagggtatgttcccggc

SEQ ID NO: 470918 - DNA, 120 bp, Artificial Sequence
  ENSG00000159307_83 (sequence is synthesized)
acctgctttgatggcttcatgctggcacacgatggacacaactgcctggagacagggtcttgctatattgcccaggcctctggaactcctgggctcaggtgatctgcccacctcgacctc

SEQ ID NO: 470919 - DNA, 120 bp, Artificial Sequence
  ENSG00000159307_84 (sequence is synthesized)
cgaccatttggttttttatggctttctaaaagggctcagcaaagcttctgttgtgccagctggtttgtgggtgtgtggtagaggatactgggtgtcctgagtgctctggaactttccctc

SEQ ID NO: 470920 - DNA, 120 bp, Artificial Sequence
  ENSG00000159307_85 (sequence is synthesized)
ttaatggggtgttagccttagacctgcctgcctgtttttgtccaacccatgttggatgtcagataagtttgttgtggaaaacatctgtgagcatgtaattacaccccgaataaataccca

SEQ ID NO: 470921 - DNA, 120 bp, Artificial Sequence
  ENSG00000159307_86 (sequence is synthesized)
agcagggtccccagcagagttcgagagaacacaggtcccacggcacatcagcaggttcctgggccaaaaaggcactgatgtcagagaatttggctgcacgctgggttaaacagttaagcc

SEQ ID NO: 470922 - DNA, 120 bp, Artificial Sequence
  ENSG00000159307_87 (sequence is synthesized)
agcgtctctactgtgggacttcctgggccctcagtgatagtgtggcttcccaaggcgcgtagaatgtagcgcgtttccgaaccccttgacctttggttgcagtgggtcttgcagagctga

SEQ ID NO: 470923 - DNA, 120 bp, Artificial Sequence
  ENSG00000159307_88 (sequence is synthesized)
tggggacagtctggtgttgggccatctgggacacacaggtctactcatgccaggaaaaataaggacagtgtgtcactactaggggggcgaggctagggggatcccatctgaaaagataag

SEQ ID NO: 470924 - DNA, 120 bp, Artificial Sequence
  ENSG00000159307_89 (sequence is synthesized)
gactcaggacttctgcttgccatcagaaaatgaggagtcaggaagacctgagagtgactggttgaaggaaggagggacagggctggcctgctggtggctggcagtgagggaaggcagagg

SEQ ID NO: 470925 - DNA, 120 bp, Artificial Sequence
  ENSG00000159307_90 (sequence is synthesized)
tgtatcctcccacttgtcccctgagtcaccccacaaagacttactgagtacctcctgggttgaggggaccctcaggaaacaggaagcccagggagctgggagaggagagctgggtgggct

SEQ ID NO: 470926 - DNA, 120 bp, Artificial Sequence
  ENSG00000159307_91 (sequence is synthesized)
ctcgagacagccctgcagatgaggaggtccagctacccccaaaggacagacggagccccaagaagctgtgggccctggggcagggtgttaggcctgagtgccggagccctctgtgcagaa

SEQ ID NO: 470927 - DNA, 120 bp, Artificial Sequence
  ENSG00000159307_92 (sequence is synthesized)
gggtgaggggcagtgctcagtgcccccagcatcactccagaccaccctccaaacgcccccaccccagcgctgggcagtacccccacactctgccaggaagggagagcctagagagcaggg

SEQ ID NO: 470928 - DNA, 120 bp, Artificial Sequence
  ENSG00000159307_93 (sequence is synthesized)
cgtggaggggagaggaactggaacttccaaagtcccatcggggaaaatattgaaagtggaggttagggtgacttaaaatagcttgaggtggactttttttaagcctgtaaaaataaatgt

SEQ ID NO: 470929 - DNA, 120 bp, Artificial Sequence
  ENSG00000159307_94 (sequence is synthesized)
atttttgtacagtgtatgacttcttccttgccaacttgctgggaagaaccgagtgattattgacagaaataacagtgcttccgcctgtttatttgaaaataaagcccttctgtggccacc

SEQ ID NO: 470930 - DNA, 120 bp, Artificial Sequence
  ENSG00000159314_0 (sequence is synthesized)
gaaaacgccgcggctgcgatggcggcggacgtggtgggggacgtgtacgtgctggtggagcaccccttcgagtacaccggcaaggacgggcgccgcgtggccatccggccgaatgagcgc

SEQ ID NO: 470931 - DNA, 120 bp, Artificial Sequence
  ENSG00000159314_1 (sequence is synthesized)
taccggctgctgcggcgcagcaccgagcactggtggcacgtgcggcgtgagcccggcggccgccccttctacctgcctgcgcagtacgtgcgcgagctgcccgcgctgggcaaccctgcc

SEQ ID NO: 470932 - DNA, 120 bp, Artificial Sequence
  ENSG00000159314_2 (sequence is synthesized)
ccacccgagccccgcggcccctgagccgctcgcctacgactaccggtttgtgagcgcggcggcgaccgcgggccccgacggcgcccccgaggagtccggaggccgagccagctccctgtg

SEQ ID NO: 470933 - DNA, 80 bp, Artificial Sequence
  ENSG00000159314_3 (sequence is synthesized)
cggaggccgagccagctccctgtgcggccctgcgcaacgcggcgccgcgacccagcgcagcagcctggcgcccggcctgc

SEQ ID NO: 470934 - DNA, 120 bp, Artificial Sequence
  ENSG00000159314_4 (sequence is synthesized)
cagtccctgaacgacctggcctgcgccgccgtctcgcctcccgccggcctcctaggaagcagcggcagcttcaaggcctgcagcgtggcgggctcctgggtgtgcccgcggcctctggcg

SEQ ID NO: 470935 - DNA, 120 bp, Artificial Sequence
  ENSG00000159314_5 (sequence is synthesized)
cgcagcgactcagagaacgtctacgaggtcatccaggacttgcacgtcccgccgccggaggagagcgcagagcaggtggacgacccaccggagcccgtgtacgcgaacatagagaggcag

SEQ ID NO: 470936 - DNA, 120 bp, Artificial Sequence
  ENSG00000159314_6 (sequence is synthesized)
ccccgggccacttcaccgggcgccgctgcagccccccttcccagcccggtgtgggagacgcacacggacgcgggcaccgggcgcccctactactacaacccagacacgggagttaccacc

SEQ ID NO: 470937 - DNA, 120 bp, Artificial Sequence
  ENSG00000159314_7 (sequence is synthesized)
tgggagtcgccctttgaggctgccgagggtgccgccagcccagccacctcccctgcctcggtggacagccacgtgagccttgagaccgagtggggccagtactgggatgaggagagccgc

SEQ ID NO: 470938 - DNA, 120 bp, Artificial Sequence
  ENSG00000159314_8 (sequence is synthesized)
agggtgttcttctacaacccgctgacgggcgagacggcctgggaggacgaggccgagaacgagcccgaggaggagttggagatgcagccgggcctgagccctggcagcccaggggacccg

SEQ ID NO: 470939 - DNA, 120 bp, Artificial Sequence
  ENSG00000159314_9 (sequence is synthesized)
cggccccccactcccgagacggactaccccgagtcgctgaccagttaccccgaggaggactattctcccgtgggctctttcggtgagcccggccctacctctcccttgaccacacccccc

SEQ ID NO: 470940 - DNA, 120 bp, Artificial Sequence
  ENSG00000159314_10 (sequence is synthesized)
ggctggtcttgtcatgtcagccaggacaagcagatgctctacaccaaccacttcactcaggagcagtgggtgaggctggaggacccccacgggaagccatacttctacaatccagaggac

SEQ ID NO: 470941 - DNA, 120 bp, Artificial Sequence
  ENSG00000159314_11 (sequence is synthesized)
tcctctgttcgatgggagctgccccaggtccctgtccctgcccctcgaagcatccataaatccagccaggatggtgacaccccagcccaggccagccctccagaggagaaggtcccagca

SEQ ID NO: 470942 - DNA, 120 bp, Artificial Sequence
  ENSG00000159314_12 (sequence is synthesized)
gagctggatgaggttgggagctgggaggaagtctctcctgccacagctgctgtgaggaccaagaccttggacaaggcaggggtgctccatcgcaccaagacggcagacaagggaaagcgg

SEQ ID NO: 470943 - DNA, 120 bp, Artificial Sequence
  ENSG00000159314_13 (sequence is synthesized)
ctccggaagaagcactggagtgcctcctggactgtgctggagggtggcgtcctgacattcttcaaggactcaaagacctcggctgcaggcggcctgaggcagccttccaagttttccacc

SEQ ID NO: 470944 - DNA, 120 bp, Artificial Sequence
  ENSG00000159314_14 (sequence is synthesized)
cctgagtacacagtggagctgaggggggccactctctcctgggcccccaaagacaaatccagtaggaagaatgtgctggagctacggagccgagatggctctgagtacctgatccagcac

SEQ ID NO: 470945 - DNA, 120 bp, Artificial Sequence
  ENSG00000159314_15 (sequence is synthesized)
gactcggaggccatcatcagcacctggcataaggccattgctcagggcatccaggagctgtccgcagagctgcccccagaggagagcgagagcagcagagtggacttcgggtcgagcgag

SEQ ID NO: 470946 - DNA, 120 bp, Artificial Sequence
  ENSG00000159314_16 (sequence is synthesized)
cgcttgggaagctggcaggagaaagaggaggacgcgcgaccgaatgcagccgcgcccgccctgggccccgtgggcctggagagcgacttgagcaaggtccggcacaagctccgcaagttc

SEQ ID NO: 470947 - DNA, 120 bp, Artificial Sequence
  ENSG00000159314_17 (sequence is synthesized)
tacatcaaagaccaggtgttcggctgcgcgctggccgcgctgtgtgagcgcgagaggagccgggtgccacgcttcgtgcagcagtgcatccgcgccgtcgaggcccgcgggctggacatc

SEQ ID NO: 470948 - DNA, 120 bp, Artificial Sequence
  ENSG00000159314_18 (sequence is synthesized)
gacgggctgtaccgcatcagtggaaacctggccaccatccagaagctacgctataaggtggaccacgatgagcgccttgacctggatgacgggcgctgggaggacgtccacgttatcacc

SEQ ID NO: 470949 - DNA, 120 bp, Artificial Sequence
  ENSG00000159314_19 (sequence is synthesized)
ggagccctgaagctcttctttcgggagctgcccgagcccctcttccccttctcgcacttccgccagttcattgcggccatcaagttgcaggaccaggcccggcgcagccgctgtgtgcgt

SEQ ID NO: 470950 - DNA, 120 bp, Artificial Sequence
  ENSG00000159314_20 (sequence is synthesized)
gacttggtgcgctcgctgcccgctcccaaccacgacactctgcggatgctcttccagcacctctgccgggtgatcgagcacggcgagcagaaccgcatgtcggtgcagagcgtggccatt

SEQ ID NO: 470951 - DNA, 120 bp, Artificial Sequence
  ENSG00000159314_21 (sequence is synthesized)
gtgttcgggcccacgctgctgcggcccgaggtggaagagaccagcatgcccatgaccatggtgttccagaaccaggtggtggagctcatcctgcagcagtgcgcggacatcttcccgccg

SEQ ID NO: 470952 - DNA, 120 bp, Artificial Sequence
  ENSG00000159314_22 (sequence is synthesized)
cactgactgctggcctgtgactggggcggcggccgcggtcctgccacacaagctgggcggcggaggccacgcagccgggccttcttctctctgggaccctccgccagcgcatagccgcag

SEQ ID NO: 470953 - DNA, 120 bp, Artificial Sequence
  ENSG00000159314_23 (sequence is synthesized)
gccggtgtgacttctgcaccctcggttctgagggtacggtgacccctagtgggcagtttgcaaaatgtgattccttcttcccaactccccatccccccttcccttcccgtcacgtcctgt

SEQ ID NO: 470954 - DNA, 120 bp, Artificial Sequence
  ENSG00000159314_24 (sequence is synthesized)
ttgggggttaattcggttttttctctgttgcatcgcgcctactgtgcgtgtgcgatagcgtgtgtgggggtgagagtttgttttctggaatggtaggtgctgggaggaggagtttgatgg

SEQ ID NO: 470955 - DNA, 120 bp, Artificial Sequence
  ENSG00000159314_25 (sequence is synthesized)
agggcttcctggctgcttctggccctcacctcgtggaggccttcacagagaccctgtgggccctggccctgtgctggcactgtgccagtcatgaggcagctctgatcacttccccactgt

SEQ ID NO: 470956 - DNA, 120 bp, Artificial Sequence
  ENSG00000159314_26 (sequence is synthesized)
ggaaacaggactgacccagccttcagtgtgggctgctgaagctatcctcctcaggcctcagggatgacctcctgcctgagcctctcacaggctggctgtgggccagtttcatctgctttc

SEQ ID NO: 470957 - DNA, 120 bp, Artificial Sequence
  ENSG00000159314_27 (sequence is synthesized)
ctgttgggggtcccgggcctctgctgtccttgacccactggtgttctgtgcaaggcttcttcccattcaccaagtgcacaccttgcatctgccgctcggcatgcaccagttccacacacc

SEQ ID NO: 470958 - DNA, 120 bp, Artificial Sequence
  ENSG00000159314_28 (sequence is synthesized)
atcccattttacagacaaggacgctgaggcctgcagcagcagtgtgacttgctcaaggtccagtgagtgacctcattccccagaaaaggctcctcccacaccagagtacagcctgggtag

SEQ ID NO: 470959 - DNA, 120 bp, Artificial Sequence
  ENSG00000159314_29 (sequence is synthesized)
ggggaaaatcagttctttcagctaccacccatccaacctttgggcctatgtgaaaagaaaggaactaagctgggtgtgttctgtctggacctggggaggcccctgaaggcaaagagggaa

SEQ ID NO: 470960 - DNA, 120 bp, Artificial Sequence
  ENSG00000159314_30 (sequence is synthesized)
actgtcccagctgttctgtcctaggggagggggacatagccctagcaggagctcccagcccctcttggcactctgacacacaagtacacccatctggggcccgctttgccacgaagagct

SEQ ID NO: 470961 - DNA, 120 bp, Artificial Sequence
  ENSG00000159314_31 (sequence is synthesized)
gggcaggcctgcagggtgtggggaaggaggacacaacctcaagaaaggaagcgtgaaccccagggaacagcgggtcccttccctcctcagacacaagccacctcagcttgtggctcttgg

SEQ ID NO: 470962 - DNA, 120 bp, Artificial Sequence
  ENSG00000159314_32 (sequence is synthesized)
cccccagccccaccaacccacctgttcatttattcaacagacaatgacagctgatatttattggacatttgcaccatgccaagcattcggcttggattatcccatttgtttctcacagcc

SEQ ID NO: 470963 - DNA, 120 bp, Artificial Sequence
  ENSG00000159314_33 (sequence is synthesized)
ggtatttattgtctgctcctctgtgccaggtgctgtgctctgggcaggggcactgcatgggctgcctgccctggtggagcttgtggtctgatgggtgaggctgacccaagcccaccccat

SEQ ID NO: 470964 - DNA, 120 bp, Artificial Sequence
  ENSG00000159314_34 (sequence is synthesized)
tgccaacagggccagggcaagagtacacacaggggcctcataccatatgtctaaatatttaaaagttatcaatcaagctaacaactgttaaataaaatatgttctattctcctactttga

SEQ ID NO: 470965 - DNA, 120 bp, Artificial Sequence
  ENSG00000159314_35 (sequence is synthesized)
gctggagtctcagcctcccgccatctcggcaacttcttgtttccctgttgccctgtgccagcactggggtagtgcccctgggctctacccccaaaaccttcccagggctctgtcccggca

SEQ ID NO: 470966 - DNA, 120 bp, Artificial Sequence
  ENSG00000159314_36 (sequence is synthesized)
gtggcagctgagcaggtgaccagcctctactccccatagctcaccccttaactacacactcttgcgcctgctctctcttctctctcttagaccaagaccttggacaaggcaggggtgctc

SEQ ID NO: 470967 - DNA, 120 bp, Artificial Sequence
  ENSG00000159314_37 (sequence is synthesized)
ccaggaaggtttaattcaggatccgggactgcttcagctacggagccgagatggctctgagtacctgatccagcacgactcggaggccatcatcagcacctggcataaggccattgctca

SEQ ID NO: 470968 - DNA, 120 bp, Artificial Sequence
  ENSG00000159314_38 (sequence is synthesized)
tgaccattcctctccccacagtgggtgaggctggaggacccccacgggaagccatacttctacaatccagaggactcctctgttcgatgggagctgccccaggtaacaacctggggaaag

SEQ ID NO: 470969 - DNA, 120 bp, Artificial Sequence
  ENSG00000159314_39 (sequence is synthesized)
atcagcacctggcataaggccattgctcagggcatccaggagctggtaagcagagcccagggcctctaggggcagtggggagggggtggccattatgagtggggccctctgctcaggctc

SEQ ID NO: 470970 - DNA, 120 bp, Artificial Sequence
  ENSG00000159314_40 (sequence is synthesized)
agggagctctaaggtaccagtgggtaatgcaaatgcagtccccactaatggctaggatggcagggtaggcggctgaagaaactgccttctgtaagtctgtgaatccagccctggggttgg

SEQ ID NO: 470971 - DNA, 120 bp, Artificial Sequence
  ENSG00000159314_41 (sequence is synthesized)
ccctgcaggaagactctccaggtgagggtagggcacattctaaaggaagttcccatttcacgggaggcagaaggccaaataaatactctgcaagccaaccaatggcaggctgaaactagc

SEQ ID NO: 470972 - DNA, 120 bp, Artificial Sequence
  ENSG00000159314_42 (sequence is synthesized)
agataaaattttaaaggattgatttcaatagtcgaccatttttttaaggctgaaaacaccaattgcataagtagagctaggacaggggccctctgacaactactgacctggaaatgacct

SEQ ID NO: 470973 - DNA, 120 bp, Artificial Sequence
  ENSG00000159314_43 (sequence is synthesized)
gcactgcttagtggacctcatttaatcttcccaataatccagtgaagtgggtgttactatcccattgacaggaaagaaatctgagctgcagagataaggcagaactcccaaggtgccacc

SEQ ID NO: 470974 - DNA, 120 bp, Artificial Sequence
  ENSG00000159314_44 (sequence is synthesized)
aaggctcagacacacagattctcagaggaagtgtggactcacaggtgggcaatgcctagcagaggcaaagatatagaggtaagggagttccttacttactatatcttacaaagatataga

SEQ ID NO: 470975 - DNA, 120 bp, Artificial Sequence
  ENSG00000159314_45 (sequence is synthesized)
ggtaagggagttccttacttactatatcttacaaagatatagaggtaagggagttcctctgaatctgggtggccagattcagcttcccacccaaccctgggtccccaggaggtggtgtca

SEQ ID NO: 470976 - DNA, 120 bp, Artificial Sequence
  ENSG00000159314_46 (sequence is synthesized)
agagaggccatggcctgggatgcgggcccttcttcctcccagaacactggcctgaatcagccagctcttggcacacacagccaggtccacaggcacaactgttccttggggcccctgagg

SEQ ID NO: 470977 - DNA, 120 bp, Artificial Sequence
  ENSG00000159314_47 (sequence is synthesized)
gcagggggtgtgctggggctgtggcttgtaatgtctggagtgagtgcaggctcagatcagggcgaggctgcttgtccagagaggcagaaaattctccaacagaagacccccaaggcggag

SEQ ID NO: 470978 - DNA, 120 bp, Artificial Sequence
  ENSG00000159314_48 (sequence is synthesized)
ggccctggggctggactcctggaggttgttctgagcttaccctgtggacggattggagggtggccctccttccccacaaggatcaagagggggtgggggatggtgggagggcaatctggc

SEQ ID NO: 470979 - DNA, 120 bp, Artificial Sequence
  ENSG00000159314_49 (sequence is synthesized)
caggcgaacctgcgggggaggctcccgccctccccagtcccaccatctcagccccgcagcctctttctccctggagacagccaggtgcggcccaggatcccgggaaaggcaggggagggg

SEQ ID NO: 470980 - DNA, 120 bp, Artificial Sequence
  ENSG00000159314_50 (sequence is synthesized)
gtggcgtcttcgctcctcaggcgctggcccggcccagaggggacaggaagccaggacaccggggattgtctctcgcaaccgcagcccagccccagtccgggaggaagttctgcccggcgc

SEQ ID NO: 470981 - DNA, 120 bp, Artificial Sequence
  ENSG00000159314_51 (sequence is synthesized)
tctccgccggtgcctccctggttatattgttgaacaggaaacccggcagcgcgggagccgcacagtcgaggagggagcgcgggacgccgagcccacgcgcgcctgccggggcaagtggag

SEQ ID NO: 470982 - DNA, 120 bp, Artificial Sequence
  ENSG00000159314_52 (sequence is synthesized)
aaccgaggtccggtccccttcttatccagcccgagacatcgagctccggtgggcgtccctgcgctgggaatcccgctcggagtttttccaggcccggccgggctgctccgggaaaggccc

SEQ ID NO: 470983 - DNA, 120 bp, Artificial Sequence
  ENSG00000159314_53 (sequence is synthesized)
tgctcctgttccgcgcagcctctccggcctcgcccctggaaaccccgcccagggcgatggtaggggcctaacctgcagccaccgccggctccgcccacccagcccatgggctccctgagg

SEQ ID NO: 470984 - DNA, 120 bp, Artificial Sequence
  ENSG00000159314_54 (sequence is synthesized)
ggtggcgcgctagggaccgcgcccgcacggagccggggcgcaaggagacccgctccgctcagcgtcgggcacgacgcccacctctgtccgaagacttcggatgagctccctctccccaac

SEQ ID NO: 470985 - DNA, 120 bp, Artificial Sequence
  ENSG00000159314_55 (sequence is synthesized)
cgcgaaacgtgaggggtgcacgcccgcagtccctcatcagcaattcccaagctccaaagctccctggaagcccagaggcttttcgtaatccaattggtggcaaaattgcgcttgaactga

SEQ ID NO: 470986 - DNA, 120 bp, Artificial Sequence
  ENSG00000159314_56 (sequence is synthesized)
gggccttggtgacgatgttcactgagcacttcctgtatgccaggctcttattaatcctcacaacaacttcgtgagtggtcctctgtggaccctgagacactgtgagataaagtgacttgc

SEQ ID NO: 470987 - DNA, 120 bp, Artificial Sequence
  ENSG00000159314_57 (sequence is synthesized)
tcaaggtccctcggctgctaggtgttagagtcgggattccagccctcataatggggtgccctagcctgtgttcctaagctctgacttgttcctggggtaggaggggccctcagcccagga

SEQ ID NO: 470988 - DNA, 120 bp, Artificial Sequence
  ENSG00000159314_58 (sequence is synthesized)
gaccaggaggcagagtcgagccttgccggcacaggtaggggatgctggggtcaaggggtgcccggtgggcctctaccacaagccctgttaggagctgggtgagctggggcttagagcagg

SEQ ID NO: 470989 - DNA, 120 bp, Artificial Sequence
  ENSG00000159314_59 (sequence is synthesized)
gagcctcttggaagttggggctcatacttccttttctctttccttctcggaggccctgcccatccaagaggtggtcagcttggggcaagagtggcagggctgccacctgcttgtggacag

SEQ ID NO: 470990 - DNA, 120 bp, Artificial Sequence
  ENSG00000159314_60 (sequence is synthesized)
gggagggaactggagataaggggtgaaccactgtaaggcagtaccagggggctgggcagcctggagcctgagagccaggtccctcttggctcctcctctggcctgaggtcggaaggccac

SEQ ID NO: 470991 - DNA, 120 bp, Artificial Sequence
  ENSG00000159314_61 (sequence is synthesized)
ttcttgtctctaggatgcgacccaagagccattgatcccgtagtcaggcccctgcttatgagctgcatctgggtcttgtctgggcctccatgaacaggagcaaggaggagggtaggggtg

SEQ ID NO: 470992 - DNA, 120 bp, Artificial Sequence
  ENSG00000159314_62 (sequence is synthesized)
gcaggcgcctgtaactccttgaaggccagaggatgtggagggcgtgactgcacctggccccaggagctggttagaacccagctgaggctctgccaggagaggagagcatctctatctcag

SEQ ID NO: 470993 - DNA, 120 bp, Artificial Sequence
  ENSG00000159314_63 (sequence is synthesized)
cactgtgcagggtctgccgagagttccagagtttgaaggggcctgaaggacactgcagttcaacacccaccacagggctatggcttccctaacagggagtagactctgctcagtcacctc

SEQ ID NO: 470994 - DNA, 120 bp, Artificial Sequence
  ENSG00000159314_64 (sequence is synthesized)
cagtgagggcccctcactacctccagaagcagcctgtgtctctggcagccctagtcctcagaatgcttccttcagaggaatgctgctgtgcccctgcagcatgataccccatcttctctt

SEQ ID NO: 470995 - DNA, 120 bp, Artificial Sequence
  ENSG00000159314_65 (sequence is synthesized)
ccttgtgacagccctgtcatgctggggacctaaacttctacctccgaaatctcctctgtacctgctggggacattccttcgtgtgaggaccccatcagcctcactggcctgggactcctc

SEQ ID NO: 470996 - DNA, 120 bp, Artificial Sequence
  ENSG00000159314_66 (sequence is synthesized)
gtggacccagagccatggcccacagcctgccaagtagaaattcctgctccaaagagcctgttccttatcagctcatccacccctggtggagcctttcaactcctgccccagtgcgttcag

SEQ ID NO: 470997 - DNA, 120 bp, Artificial Sequence
  ENSG00000159314_67 (sequence is synthesized)
ctgggaggatgggaggtgtgtctggttcctctgccttcctctccccgctgcttccatcctgccctccccaggaatctcctggtttctgtggctccgaccctcctcctcagaaagctcaag

SEQ ID NO: 470998 - DNA, 120 bp, Artificial Sequence
  ENSG00000159314_68 (sequence is synthesized)
gctatgtgcttcagggcattggcccagctgctggggggcaaatggaatcagctacattatccttagtcttgctctcaagaaaatcctgccttttggggcagaggaggtgggcagatggtt

SEQ ID NO: 470999 - DNA, 120 bp, Artificial Sequence
  ENSG00000159314_69 (sequence is synthesized)
ggacaactggctgcccaccaaggcagaacgccattgggcctcaacagagcagtgagcagagtgccagcaggtttgacctctccctggagaggcttgtcagctgagcaccgtgagagagca

SEQ ID NO: 471000 - DNA, 120 bp, Artificial Sequence
  ENSG00000159314_70 (sequence is synthesized)
ggatttgggtaggcagagaaccagagaagggaattccaggctgagggaatggctggagcaaacgcttcgaggtgggaggatgccttttctgttgggggccggtgagaggcctgttgtggt

SEQ ID NO: 471001 - DNA, 120 bp, Artificial Sequence
  ENSG00000159314_71 (sequence is synthesized)
tggactacaggatgccacatcagagctatggtgggggtagagaaaggacaagtggggtggagggtcccctctcagccacacagcagcctggaggaaggggagaggagagaagaactgatg

SEQ ID NO: 471002 - DNA, 120 bp, Artificial Sequence
  ENSG00000159314_72 (sequence is synthesized)
ggctgggatccccagctctccctgtcccccaggcgcctggggactggcaccctgtctaaaactgtaacatcctcttcattgacagtgttttcatttcttgcttagcagtgatcagcactg

SEQ ID NO: 471003 - DNA, 120 bp, Artificial Sequence
  ENSG00000159314_73 (sequence is synthesized)
acatgctgtccatttactcatcacccccaccatttacacacaggtgcacttgagtgccagctctgccagggaaggatttgtgtccctttcttccctgctgtattccccgtgcctcaaaca

SEQ ID NO: 471004 - DNA, 120 bp, Artificial Sequence
  ENSG00000159314_74 (sequence is synthesized)
gtgcctggcacagagcaggtgaatctttgttgggtaaacaaatgttcttcttttccttcttcttttcattgttttggtttggtttgcttttttggcatcagtttggtgaaaaatgaattt

SEQ ID NO: 471005 - DNA, 120 bp, Artificial Sequence
  ENSG00000159314_75 (sequence is synthesized)
ttttttttttttggcatctgcctaaggctcagggagagaccaccctgaacaggtgcttcctctttcgaggagtttacagcttagtgatggtgtcacagtcagcagaggaacttctgtgaa

SEQ ID NO: 471006 - DNA, 120 bp, Artificial Sequence
  ENSG00000159314_76 (sequence is synthesized)
tttttaaaagttttgtagtacaaaattttgaggctgcaggaaagttcaaagaaaacaaaacaaaaacaaacccctataatcacagtgctcagaagggacctctgttagcattttggaaag

SEQ ID NO: 471007 - DNA, 120 bp, Artificial Sequence
  ENSG00000159314_77 (sequence is synthesized)
tctgttagcattttggaaagtttccgaaaacacaaaattgaaatgtggaaatctgctttcccctgaagtattgtgtatgcttagaaaatagtagtaattggccaggtgcggtggctcaca

SEQ ID NO: 471008 - DNA, 120 bp, Artificial Sequence
  ENSG00000159314_78 (sequence is synthesized)
gcagcgcgggagccgcacagtcgaggagggagcgcgggacgccgagcccacgcgcgcctgccggggcaagtggaggcgaagccggcgagcggacgccccgaggtggacgacccaccggag

SEQ ID NO: 471009 - DNA, 120 bp, Artificial Sequence
  ENSG00000159314_79 (sequence is synthesized)
atggacccggacagcctcagagtcctccccacaaccttcctcactaataggtcgcctcagtgctctaaaccgcagctcccacacagagcctaaaccagccaaacacagtcacctgcacct

SEQ ID NO: 471010 - DNA, 120 bp, Artificial Sequence
  ENSG00000159314_80 (sequence is synthesized)
gcccctccagactccctggtgctgtcttggaacctggttagagggaaacttttcctcccctctcataagctgggctggaggccctgaccattcctctccccacagtgggtgaggctggag

SEQ ID NO: 471011 - DNA, 120 bp, Artificial Sequence
  ENSG00000159322_0 (sequence is synthesized)
gtagcgcttgtgtcgacatcggcgcgcgccgagcccggaagaggcgcgggctaggaaaggagttggttcgcgcaggtgcggcgcctgggtccccatggcgctgtggcgcggctccgcgta

SEQ ID NO: 471012 - DNA, 120 bp, Artificial Sequence
  ENSG00000159322_1 (sequence is synthesized)
cgcgggcttcctggcgctggccgtgggctgcgtcttcctgctggagccagagctgccaggctcggcgctgcgctctctctggagctcgctgtgtctggggcccgcgcctgcgcccccggg

SEQ ID NO: 471013 - DNA, 120 bp, Artificial Sequence
  ENSG00000159322_2 (sequence is synthesized)
acccgtctcccccgagggccggttggcggcagcctgggacgcgcttatcgtgcggccagtccggcgctggcgccgcgtggcagtgggagtcaatgcatgtgttgatgtggtgctctcagg

SEQ ID NO: 471014 - DNA, 120 bp, Artificial Sequence
  ENSG00000159322_3 (sequence is synthesized)
ggtgaagctcttgcaggcacttggccttagtcctgggaatgggaaagatcacagcattctgcattcaaggaatgatctggaagaagccttcattcacttcatggggaagggagcagctgc

SEQ ID NO: 471015 - DNA, 120 bp, Artificial Sequence
  ENSG00000159322_4 (sequence is synthesized)
tgagcgcttcttcagtgataaggaaacttttcacgacattgcccaggttgcatcagagttcccaggagcccagcactatgtaggaggaaatgcagctttaattggacagaaatttgcagc

SEQ ID NO: 471016 - DNA, 120 bp, Artificial Sequence
  ENSG00000159322_5 (sequence is synthesized)
caactcagatttaaaggttcttctttgcggtccagttggtccaaagctacatgagcttcttgatgacaatgtctttgttccaccagagtcattgcaggaagtggatgagttccacctcat

SEQ ID NO: 471017 - DNA, 120 bp, Artificial Sequence
  ENSG00000159322_6 (sequence is synthesized)
tttagagtatcaagcaggggaggagtggggccagttaaaagctccccatgccaaccgattcatcttctctcacgacctctccaacggggccatgaatatgctggaggtgtttgtgtctag

SEQ ID NO: 471018 - DNA, 120 bp, Artificial Sequence
  ENSG00000159322_7 (sequence is synthesized)
cctggaggagtttcagccagacctggtggtcctctctggattgcacatgatggagggacaaagcaaggagctccagaggaagagactcttggaggttgtaacctccatttctgacatccc

SEQ ID NO: 471019 - DNA, 120 bp, Artificial Sequence
  ENSG00000159322_8 (sequence is synthesized)
cactggtattccagttcacctagagctggccagtatgactaacagggagctcatgagcagcattgtccatcaggtctttcccgcggtgacttcccttgggctgaatgaacaggagctgtt

SEQ ID NO: 471020 - DNA, 120 bp, Artificial Sequence
  ENSG00000159322_9 (sequence is synthesized)
atttctcacccagtcagcctctggacctcactcttctctctcttcctggaacggtgttcctgatgtgggcatggtcagtgacatcctcttctggatcttgaaagaacatgggaggagtaa

SEQ ID NO: 471021 - DNA, 120 bp, Artificial Sequence
  ENSG00000159322_10 (sequence is synthesized)
acgctggtctaccacatcctggcaactgtggatggacactgggccaaccagctggcagccgtggctgcaggagctcgtgtggctgggacacaggcctgcgccacagaaaccatagacacc

SEQ ID NO: 471022 - DNA, 120 bp, Artificial Sequence
  ENSG00000159322_11 (sequence is synthesized)
agccgagtgtctctgagggcaccccaagagttcatgacttcccattcggaggcaggctccaggattgtattaaacccaaacaagccagtagtagaatggcacagagagggaatatccttc

SEQ ID NO: 471023 - DNA, 120 bp, Artificial Sequence
  ENSG00000159322_12 (sequence is synthesized)
cacttcacaccagtattggtgtgtaaagaccccattcgaactgtaggccttggagatgccatttcagccgaaggactcttctattcggaagtacaccctcactattaggaagattcttag

SEQ ID NO: 471024 - DNA, 120 bp, Artificial Sequence
  ENSG00000159322_13 (sequence is synthesized)
gggtaatttttctgaggaaggagaactagccaacttaagaattacaggaagaaagtggtttggaagacagccaaagaaataaaagcagattaaactgtatcaggtacattccagcctgtt

SEQ ID NO: 471025 - DNA, 120 bp, Artificial Sequence
  ENSG00000159322_14 (sequence is synthesized)
ggcaactccataaaaacatttcagattttaatccgaatttagctaatgagactggatttttgttttttatgttgtgtgtcacagagctaaaaactcagttcccaaatccccagtttatgc

SEQ ID NO: 471026 - DNA, 120 bp, Artificial Sequence
  ENSG00000159322_15 (sequence is synthesized)
agcgccatcaggtattttaagctaaacttcttcacccctgagagcatgtcagctggagaaaagcagttcttccttgcccacttgagaagtgcacgcccactcacccaacatcctggtctc

SEQ ID NO: 471027 - DNA, 120 bp, Artificial Sequence
  ENSG00000159322_16 (sequence is synthesized)
taggaaagcctcatgtgaggttcctctttctttcagctcagtgcccatgggcaaggatcatgatttccattccgtgttacaatgacaatatttaatgagcataaccttctcagtctcctg

SEQ ID NO: 471028 - DNA, 120 bp, Artificial Sequence
  ENSG00000159322_17 (sequence is synthesized)
ctctcaaatttaggacagagccgctaaggacaaaacaatccctcccgtgctttatgatggcagcaggggctggggagcctctgagggactctttcattctgcagttgtctggaagcctgg

SEQ ID NO: 471029 - DNA, 120 bp, Artificial Sequence
  ENSG00000159322_18 (sequence is synthesized)
gtggcgtcatgagctgaaggatcatgctttcctgtcctggctccataggttataggctggctggtgaaaggttcacgtggcccaggctgaacttcattgcctagctttggatgtgctttc

SEQ ID NO: 471030 - DNA, 120 bp, Artificial Sequence
  ENSG00000159322_19 (sequence is synthesized)
tgccataaagactgatttttgttcgttctgagccttcaaggaatttgttttttacaactggaatatgctcctgtgtgtgttaacagatcatggatgttttatgttttcactgatcattta

SEQ ID NO: 471031 - DNA, 120 bp, Artificial Sequence
  ENSG00000159322_20 (sequence is synthesized)
aagagtttgacctcagagctccaggatcatcagtaaatttgtcatgttatatatttatttttttataaatcaagacttctgtgtgctcttaaatatattaaaaacaatttacatttcagg

SEQ ID NO: 471032 - DNA, 120 bp, Artificial Sequence
  ENSG00000159322_21 (sequence is synthesized)
ggaagagactcttggaggtcctggcctcccagggacatatcttggcagctggctgtggagcttgcctcctgctgcagtgaggcacctcactgtatcccttcagatgtgggcagcagcttg

SEQ ID NO: 471033 - DNA, 120 bp, Artificial Sequence
  ENSG00000159322_22 (sequence is synthesized)
tgtgactgtgccggaaatttatctttgtaaattagcaggatcctgtttttgccatactgaaagtttcctgacctattggttctactgagctgatactggccgttgtctcaagggagactg

SEQ ID NO: 471034 - DNA, 120 bp, Artificial Sequence
  ENSG00000159322_23 (sequence is synthesized)
gagtgccaacggggcctgggtctctgagcctccgaggtcggccttggaggtcgggcggagccgcgcagaaacagggcttctcagaggtccccgggaggcgctgctgtccgcgctggcccc

SEQ ID NO: 471035 - DNA, 120 bp, Artificial Sequence
  ENSG00000159322_24 (sequence is synthesized)
ttggcgagaagtgtcggacgtctgagtggaacccggttcttctttgcggtccagttggtccaaagctacatgagcttcttgatgacaatgtctttgttccaccagagtcattgcaggaag

SEQ ID NO: 471036 - DNA, 120 bp, Artificial Sequence
  ENSG00000159322_25 (sequence is synthesized)
gaaatatttcaagagggactgtggcaccaagacagtgaatgcctgcccctgagccccgatgagaaggaattaagggccctgtgactctgtatgtgaccagaagccacatcaggctccgcc

SEQ ID NO: 471037 - DNA, 120 bp, Artificial Sequence
  ENSG00000159322_26 (sequence is synthesized)
cttctgcatacaaagcagtggacttccattaaactttgtgaggtgacattttcctaggtccaaggagggagcctagtctagtggcagtagccctgggctcagctctctcaacagaaatcc

SEQ ID NO: 471038 - DNA, 120 bp, Artificial Sequence
  ENSG00000159322_27 (sequence is synthesized)
attcccagcttgtctctgacctcaatagggaaattccaagggatttgtccatttttttttccacattctctcttaccagatctccccagagaagcccattgtcaggcttgggctgggaat

SEQ ID NO: 471039 - DNA, 120 bp, Artificial Sequence
  ENSG00000159322_28 (sequence is synthesized)
ccagtgagtcactacgcagaggttttgctgacttactggctgagggcaggatgatacattgagaagagattgcttacaggaatgaatacaacactttgtgaggaaagaggggcgctaact

SEQ ID NO: 471040 - DNA, 120 bp, Artificial Sequence
  ENSG00000159322_29 (sequence is synthesized)
accattacaggcagaattagatccatttgcatctgccccctgcatggcctctccaacggggccatgaatatgctggaggtgtttgtgtctagcctggaggagtttcagccagacctggtg

SEQ ID NO: 471041 - DNA, 120 bp, Artificial Sequence
  ENSG00000159322_30 (sequence is synthesized)
tccagcctctcttggcatctgctgccttgtttcctgtggaaacagcaagcagctctgcacggttcttctcatccttgccttgcagaagagcctgtttatttttgcctctgtcacttcctg

SEQ ID NO: 471042 - DNA, 120 bp, Artificial Sequence
  ENSG00000159322_31 (sequence is synthesized)
aagaaatcagtgtattttcaatacagtgtggctcctttctcctaggttcagttaggtcgtgtttcctagcagtgtcactattcaagggttgagtccacgtcttgctctctggagaatgtc

SEQ ID NO: 471043 - DNA, 120 bp, Artificial Sequence
  ENSG00000159322_32 (sequence is synthesized)
aatgtaatgtatttttcccatcgtacagagtctttgttgatttgcaaaatgttggatttggggttcatacccatattttttgttgtcatgggcatttaggtcatcagtctgttctcttat

SEQ ID NO: 471044 - DNA, 120 bp, Artificial Sequence
  ENSG00000159322_33 (sequence is synthesized)
ttgcttgttcttttgttaattcattcccatggctatatgccagacacagcatgatgcagaaggaatacgacagaggatgacacaggccctgccctcagctcacagtttactgccagagat

SEQ ID NO: 471045 - DNA, 78 bp, Artificial Sequence
  ENSG00000159322_34 (sequence is synthesized)
gcagaggttgcagtgagctgaggtcgcgccattgcgctccaacctgggcaacagagtgaaactccatctttgcaaaat

SEQ ID NO: 471046 - DNA, 120 bp, Artificial Sequence
  ENSG00000159322_35 (sequence is synthesized)
tgcctcagtcctgtattagggtacagtggtggccccagaaaggaggtaatcaagtctgcttaggggtggtaggattaggaaaggcttcatgtttagggaggaactagcacttgaacttgg

SEQ ID NO: 471047 - DNA, 120 bp, Artificial Sequence
  ENSG00000159322_36 (sequence is synthesized)
gtctttaaacagtcattcctctaaagcaactcacatagaagcaactggagcagctagatagtctgatcctttggatcaggtgcccagaaaccactgatgggcagcagggaagaggagatg

SEQ ID NO: 471048 - DNA, 120 bp, Artificial Sequence
  ENSG00000159322_37 (sequence is synthesized)
cagtgagcttggctgttgggaagaaattcagcctgcttaagttccaactgaatgaaagatgctcagggcaatgctgtgaggaagaatgtgctttaaacaatgacagcctatactgtctgc

SEQ ID NO: 471049 - DNA, 120 bp, Artificial Sequence
  ENSG00000159322_38 (sequence is synthesized)
agggcgtgcgtgctgcacactgtatgctggtatttggaagtcatgctgccattctgtactgtctctcctgtgtttgagagctcaagtagggctctcctgggactcagggggagctaatta

SEQ ID NO: 471050 - DNA, 120 bp, Artificial Sequence
  ENSG00000159322_39 (sequence is synthesized)
ccttgaaaaaggcatatagcacccatactatgtttctgtttcttggctgggtttgggtttaggtttttggtttgtttcttgcagtgccatgctgaccttaggccattgttgctggggtct

SEQ ID NO: 471051 - DNA, 120 bp, Artificial Sequence
  ENSG00000159322_40 (sequence is synthesized)
cctcagccagaaaccagcctgcttggagccaaggctcctgtgaggtgcctgaaagtgcccccacagctaggagacctaaagcctcttccttttcttcccattgtgttgactgggtttttc

SEQ ID NO: 471052 - DNA, 120 bp, Artificial Sequence
  ENSG00000159322_41 (sequence is synthesized)
ttgtatcatctcacttcacatcagctatgctgcaactcctacagattcgtacagcagtcgaagtgaactgccatctctgattctgtatccctgatggctctgcacagcctagtcttccct

SEQ ID NO: 471053 - DNA, 120 bp, Artificial Sequence
  ENSG00000159322_42 (sequence is synthesized)
ggtgggaagagtgtcccttgtccacagaggtggtggggacccacattgcttgtagctcccgtgagcatgcaaagaaggccattaccaggaggaaccgcctctcaggatctgatcttttct

SEQ ID NO: 471054 - DNA, 80 bp, Artificial Sequence
  ENSG00000159335_0 (sequence is synthesized)
ataagcgggttcccttcccgggggcggcagcggctggtcggcggcagctctgctggtgcgggggcggcgagcccgggatc

SEQ ID NO: 471055 - DNA, 120 bp, Artificial Sequence
  ENSG00000159335_1 (sequence is synthesized)
ctgcaccgcccttccgcccgccctccggacggccgcagccctgcgggtctccgctccagacccacccccgccccaccccgcgcgcctctgccgcctcttccagagacccagcttgccgag

SEQ ID NO: 471056 - DNA, 80 bp, Artificial Sequence
  ENSG00000159335_2 (sequence is synthesized)
ccagggcccctccgtctcggccccgggaccccggctccccgccagccccggccccggccccggcaccatgtcggagaaaa

SEQ ID NO: 471057 - DNA, 120 bp, Artificial Sequence
  ENSG00000159335_3 (sequence is synthesized)
gccccggcaccatgtcggagaaaagcgtggaggcagcggccgagttgagcgccaaggacctgaaggagaagaaggagaaggtggaggagaaggcaagccggaaagagcgaaagaaagaag

SEQ ID NO: 471058 - DNA, 120 bp, Artificial Sequence
  ENSG00000159335_4 (sequence is synthesized)
gaagaggatgatgaagggcccgcgctgaagagagctgccgaagaggaggatgaagcggatcccaaacggcagaagacagaaaatggggcatcggcgtgagcccctgccaacaggctgggg

SEQ ID NO: 471059 - DNA, 120 bp, Artificial Sequence
  ENSG00000159335_5 (sequence is synthesized)
ttgggaggcctctctgggcctggaggtgggggtgggggcagccaagtccagccactcttcacctggctccctgctctgggccctgcaccagagctgccaccctcttctttctccccagcc

SEQ ID NO: 471060 - DNA, 120 bp, Artificial Sequence
  ENSG00000159335_6 (sequence is synthesized)
ttctcatttccgcctctccagacactgcgccctccaccctcactctgccattgttccacctcctgacctgctccatctgagctctccagctggcccccaattgctcctctctctctttgc

SEQ ID NO: 471061 - DNA, 120 bp, Artificial Sequence
  ENSG00000159335_7 (sequence is synthesized)
tctctttctccctcccctaccagcctcattcttcctccggtagcctctcccacctaacctctgcatcccccagcctcatgtcctgccccatccctatcctgcctgatccctggatctccc

SEQ ID NO: 471062 - DNA, 120 bp, Artificial Sequence
  ENSG00000159335_8 (sequence is synthesized)
tcagatcccctcttctcagacagcgccaggccggggtggggccggggttggggccgagccccacagctgcccccctcccctccctttttgtataatttaataaagaaatggtcgcgcttc

SEQ ID NO: 471063 - DNA, 120 bp, Artificial Sequence
  ENSG00000159335_9 (sequence is synthesized)
gtttggccaagtaggggcctgaggattagggagacacagatggagagaaacaaagaccttagaagctgaaggggaagctgggagggatgcccaggagagagagtcctcaggaaaaggccc

SEQ ID NO: 471064 - DNA, 120 bp, Artificial Sequence
  ENSG00000159335_10 (sequence is synthesized)
agcctgaggctactccctctcctggtccccacaggaggaggagaacggggctgaggaggaagaagaagaaactgccgaggatggagaggaggaagatgaaggggaagaagaagatgagga

SEQ ID NO: 471065 - DNA, 120 bp, Artificial Sequence
  ENSG00000159335_11 (sequence is synthesized)
ggagaagaggtgagagaagaatgggagcgattcgagttataattggttgtgaaggaggggtctaggtacagatgactgaggacggatgaagagaaatagaaggaccaggcgaataaaagt

SEQ ID NO: 471066 - DNA, 120 bp, Artificial Sequence
  ENSG00000159337_0 (sequence is synthesized)
agattcatgctggtcctatcccactgggaccgtcgctgccactcagccagagagccagcatcttggcaagggctgggcctggagtgaagctggaagggctagcatggagagcctgtcacc

SEQ ID NO: 471067 - DNA, 120 bp, Artificial Sequence
  ENSG00000159337_1 (sequence is synthesized)
tgggggaccacctggccacccttaccagggggaggcctctacctgctggcagctcacagtgagggtcctggaggcgcggaacctgcgctgggctgacctgttgagtgaggccgaccctta

SEQ ID NO: 471068 - DNA, 120 bp, Artificial Sequence
  ENSG00000159337_2 (sequence is synthesized)
cgtgatcctacagctgtcgaccgcacctggaatgaagtttaagaccaagacgctcaccgacaccagtcatcctgtgtggaatgaggccttccgtttccttatccaaagtcaggtcaagaa

SEQ ID NO: 471069 - DNA, 120 bp, Artificial Sequence
  ENSG00000159337_3 (sequence is synthesized)
tgttctggagcttagcatctatgatgaggactcagtcacggaggatgacatctgcttcaaggttctctatgacatctcagaagtcctccctggcaagctgctccggaaaaccttctccca

SEQ ID NO: 471070 - DNA, 120 bp, Artificial Sequence
  ENSG00000159337_4 (sequence is synthesized)
gagtccccagggagaggaggagctggatgtggagttcctgatggaagaaacgtcagatcgcccagaaaacctcatcaccaacaaagtcattgtggcccgagagctgtcatgcctggatgt

SEQ ID NO: 471071 - DNA, 120 bp, Artificial Sequence
  ENSG00000159337_5 (sequence is synthesized)
gcatctggacagcacagggagcaccgctgtggttgcagatcaggacaagctggagctggagctggtgctgaaggggtcctatgaggacacacagacatccttcctgggcacagcctctgc

SEQ ID NO: 471072 - DNA, 120 bp, Artificial Sequence
  ENSG00000159337_6 (sequence is synthesized)
cttccgcttccactacatggcagccctagagacagagctgagcgggcgcctgaggagctccagaagcaatggctggaatggggacaactcagctgggtacctcactgtgcccctgaggcc

SEQ ID NO: 471073 - DNA, 120 bp, Artificial Sequence
  ENSG00000159337_7 (sequence is synthesized)
cttgaccattgggaaggaggtgactatggatgttcctgctccaaatgccccaggagtgaggctgcagctcaaggcagagggctgccctgaggagctggccgtgcacctgggcttcaatct

SEQ ID NO: 471074 - DNA, 120 bp, Artificial Sequence
  ENSG00000159337_8 (sequence is synthesized)
ctgtgcagaggagcaggccttcctgagcaggaggaagcaggtggtggccaaggccctgaagcaggccctgcagctggacagagacctgcaggaggatgaggtacccgttgtgggcatcat

SEQ ID NO: 471075 - DNA, 120 bp, Artificial Sequence
  ENSG00000159337_9 (sequence is synthesized)
ggccacaggaggaggtgcccgggccatgacctcactctacggccacctattggccttgcagaagctgggcctcctagactgtgtgacctacttcagtggcatctctggctctacgtggac

SEQ ID NO: 471076 - DNA, 120 bp, Artificial Sequence
  ENSG00000159337_10 (sequence is synthesized)
aatggcccacctgtacggggaccctgagtggtcgcagagggacctggagggacctatcagatacgcccgggagcacctggccaagagcaagctggaggtcttttccccagagcgcctggc

SEQ ID NO: 471077 - DNA, 120 bp, Artificial Sequence
  ENSG00000159337_11 (sequence is synthesized)
gagctaccgccgggagctggagctgcgggctgagcagggccaccccacgacctttgtggacctgtgggcgctagtgctggagtccatgctgcacggccaggtgatggatcagaagctgtc

SEQ ID NO: 471078 - DNA, 120 bp, Artificial Sequence
  ENSG00000159337_12 (sequence is synthesized)
aggacagagagccgccctggaacggggtcagaaccctctgcccctctacttgagcctcaatgtcaaagagaacaatctggagacactggacttcaaggagtgggttgagttctcccccta

SEQ ID NO: 471079 - DNA, 120 bp, Artificial Sequence
  ENSG00000159337_13 (sequence is synthesized)
tgaggtcggtttcctgaagtacggggccttcgtccctcctgagctcttcggctccgagttcttcatgggacggctgatgaggaggatcccggagccccggatctgctttctggaagccat

SEQ ID NO: 471080 - DNA, 120 bp, Artificial Sequence
  ENSG00000159337_14 (sequence is synthesized)
ctggagcaacattttctccctgaacctgctggatgcctggtatgacctcaccagttctggggagtcctggaaacagcacatcaaggacaagaccaggagcttagagaaggagcccctgac

SEQ ID NO: 471081 - DNA, 120 bp, Artificial Sequence
  ENSG00000159337_15 (sequence is synthesized)
cacctcggggacctcctcgcggctggaggcctcgtggctgcagccaggcacggcgctggcccaggcatttaaaggcttcctgacaggcaggcccctccaccagcgcagccccaacttcct

SEQ ID NO: 471082 - DNA, 120 bp, Artificial Sequence
  ENSG00000159337_16 (sequence is synthesized)
ccagggcctccagctgcaccaggactactgtagccacaaagacttctccacctgggcagactaccagcttgactccatgcccagccagctgacccccaaggagccccggctctgcctggt

SEQ ID NO: 471083 - DNA, 120 bp, Artificial Sequence
  ENSG00000159337_17 (sequence is synthesized)
catcctctccttcgactactccctatctgcgcccttcgaggcactgcagcagacggagctgtactgccgggcccgggggctgcccttcccccgggtggaacccagccctcaggaccagca

SEQ ID NO: 471084 - DNA, 120 bp, Artificial Sequence
  ENSG00000159337_18 (sequence is synthesized)
ccagccaagggaatgccacctcttctcagaccccgcctgccccgaggccccgatcctgctgcacttcccgctggtcaatgcctccttcaaggaccactcagcccccggtgtccagcgcag

SEQ ID NO: 471085 - DNA, 120 bp, Artificial Sequence
  ENSG00000159337_19 (sequence is synthesized)
ccccgcagagctccagggtggccaagtggatctcaccggggccacctgcccctacaccctgtccaacatgacctacaaggaggaagacttcgagcgcctgctgcggctcagtgactacaa

SEQ ID NO: 471086 - DNA, 120 bp, Artificial Sequence
  ENSG00000159337_20 (sequence is synthesized)
cgtgcagaccagccagggtgccatcctgcaggccctgaggaccgcgctgaagcaccggactctagaggcgaggcctccaagggcacagacctgaggttgctcagaggctgcaggaccctc

SEQ ID NO: 471087 - DNA, 120 bp, Artificial Sequence
  ENSG00000159337_21 (sequence is synthesized)
cagggcctgcgggcataacctgatctgtagctgggctcagccacaggccttcctggttggagttctgggctctcccaggcctgggtggcctctgtagctggtctcactgcccagagggaa

SEQ ID NO: 471088 - DNA, 120 bp, Artificial Sequence
  ENSG00000159337_22 (sequence is synthesized)
ctgcacacacagacttctctcttacgttcatggctggcttgagatgagttgaaaataacttcgccaggccagtgtgtagaacagctggtccaaccagacagactttcacaccacaattac

SEQ ID NO: 471089 - DNA, 120 bp, Artificial Sequence
  ENSG00000159337_23 (sequence is synthesized)
ttccatgcctgagcaggatagatttgaagtgcaagccggaggcagcagatcaggagtagggacaggaaggacaggggatgcctgacctgacaggtggcttcaggcctcgggaatcacaag

SEQ ID NO: 471090 - DNA, 120 bp, Artificial Sequence
  ENSG00000159337_24 (sequence is synthesized)
acatcctgaacacattgcctcctcatcttcttcctgctcctccacctcctcctctccttgtccttctcctctttgtcctcctgctttccgtatccaagtcttgtacttgtttaaatttat

SEQ ID NO: 471091 - DNA, 120 bp, Artificial Sequence
  ENSG00000159337_25 (sequence is synthesized)
tcctaaatattttattctttttgataagtggagttactttcttaatttcatttagattattcattgctattttatagaaatacaatggatttttaaatgttgatcttgtattccgcaatc

SEQ ID NO: 471092 - DNA, 120 bp, Artificial Sequence
  ENSG00000159337_26 (sequence is synthesized)
ttgctgaagttgtttaccggctctaatacttttgcggatttcttagaattttctgtagacagatcatgccatctccaaatagagatggttttacttcttcctgtctgatctgaatgcctt

SEQ ID NO: 471093 - DNA, 120 bp, Artificial Sequence
  ENSG00000159337_27 (sequence is synthesized)
ttatttatttttcccaattgccctgagcagtacaatgatgaacacacgtttcaagagcagacatcttgtcttgttcctgactctgacaagaaagcataagtctctcaccatttagtgtga

SEQ ID NO: 471094 - DNA, 120 bp, Artificial Sequence
  ENSG00000159337_28 (sequence is synthesized)
ttttagctgtgggtttttcttggacatccttatcaggttgagaaagttctcttttatttctagtttattgagtgttttatgatgaaacggtgttaggttttgtcaagtgatttttctgtg

SEQ ID NO: 471095 - DNA, 120 bp, Artificial Sequence
  ENSG00000159337_29 (sequence is synthesized)
tctatgggcatgatcatgtggttttgtcgtgtattttattaatgtactctattgcattaattggtttttggatattaaaccaactttgcattcctggggcagtttccatttgattatggt

SEQ ID NO: 471096 - DNA, 81 bp, Artificial Sequence
  ENSG00000159337_30 (sequence is synthesized)
tcacactctgtcacccaggccaagttcaatggtgcaatctggctcactgcatcctcaacttcctgggctcaagtgatcctt

SEQ ID NO: 471097 - DNA, 73 bp, Artificial Sequence
  ENSG00000159337_31 (sequence is synthesized)
cacactctgtcacccaggccaagttcaatggtgcaatctggctcactgcatcctcaacttcctgggctcaagt

SEQ ID NO: 471098 - DNA, 120 bp, Artificial Sequence
  ENSG00000159337_32 (sequence is synthesized)
cacatttcttacctccctcatgcaagggtgcgtgtacacatacacacacacacacacctggccccaggtgggggttgtagtgagagcttcgggacagaccttggctcagggactgccctc

SEQ ID NO: 471099 - DNA, 120 bp, Artificial Sequence
  ENSG00000159337_33 (sequence is synthesized)
atctgatgtcctctctcagcttccttccctgtgcctcttctgcatttggctttattttgattcttcactttttccctttatcatggactcttatttttttaacagtgatatgggaattga

SEQ ID NO: 471100 - DNA, 120 bp, Artificial Sequence
  ENSG00000159337_34 (sequence is synthesized)
tttcgggagtttggcaaagccaggggagctggaggggaggtgtggagccagggccctcctggctgctgcggaatatcaggttcagccgcggcagaggatcggcaatgggatgaagggcct

SEQ ID NO: 471101 - DNA, 120 bp, Artificial Sequence
  ENSG00000159337_35 (sequence is synthesized)
ctgcagccaatcccatcctgagcccacacaactccttgtgtgtgtggtggatttgggacagtgggtctcagagggttgaggttaaggggacctcagcttaccctgcagaggcccctgccc

SEQ ID NO: 471102 - DNA, 120 bp, Artificial Sequence
  ENSG00000159337_36 (sequence is synthesized)
cctctgcccagccaggccaagctccagaggcgagcagcagggccactgagcccctgccccacaccgccggggtcccgaagggaaggagaggtgtcaggccttgatctgctggctcctgcc

SEQ ID NO: 471103 - DNA, 120 bp, Artificial Sequence
  ENSG00000159337_37 (sequence is synthesized)
agggtccttaggtgggaaggctggggtggtgcaggggccttgggctcccaggacaggtgaacagggagggacctccccacacctactccaaagaacagctggacggagctgagaggagac

SEQ ID NO: 471104 - DNA, 120 bp, Artificial Sequence
  ENSG00000159337_38 (sequence is synthesized)
cctagcatctccatgtccatcccccagacctcccctgagacgctgtgccaatgtgggtctcctctcggctctgggatttgaacagtccagcaatagcaatccagaattggggttttgggg

SEQ ID NO: 471105 - DNA, 120 bp, Artificial Sequence
  ENSG00000159337_39 (sequence is synthesized)
ggctgggggatgggtctgaccccacctagagcttttaaccaaacaacattgcagaccaccagagtccttggactccccctgggtctccctccgagtcactctgcagcttggcccgaccac

SEQ ID NO: 471106 - DNA, 120 bp, Artificial Sequence
  ENSG00000159337_40 (sequence is synthesized)
aaacaggacagagccaggctgttgtcttgacactgaagcagctggtgtgggctggaactggcccagcattgacctgggccgggctggttctctccgggccaccttctccccaccaggcac

SEQ ID NO: 471107 - DNA, 120 bp, Artificial Sequence
  ENSG00000159339_0 (sequence is synthesized)
agccagagggacgagctagcccgacgatggcccaggggacattgatccgtgtgaccccagagcagcccacccatgccgtgtgtgtgctgggcaccttgactcagcttgacatctgcagct

SEQ ID NO: 471108 - DNA, 120 bp, Artificial Sequence
  ENSG00000159339_1 (sequence is synthesized)
ctgcccctgaggactgcacgtccttcagcatcaacgcctccccaggggtggtcgtggatattgcccacggccctccagccaagaagaaatccacaggttcctccacatggcccctggacc

SEQ ID NO: 471109 - DNA, 120 bp, Artificial Sequence
  ENSG00000159339_2 (sequence is synthesized)
ctggggtagaggtgaccctgacgatgaaagtggccagtggtagcacaggcgaccagaaggttcagatttcatactacggacccaagactccaccagtcaaagctctactctacctcaccg

SEQ ID NO: 471110 - DNA, 120 bp, Artificial Sequence
  ENSG00000159339_3 (sequence is synthesized)
gggtggaaatctccttgtgcgcagacatcacccgcaccggcaaagtgaagccaaccagagctgtgaaagatcagaggacctggacctggggcccttgtggacagggtgccatcctgctgg

SEQ ID NO: 471111 - DNA, 120 bp, Artificial Sequence
  ENSG00000159339_4 (sequence is synthesized)
tgaactgtgacagagacaatctcgaatcttctgccatggactgcgaggatgatgaagtgcttgacagcgaagacctgcaggacatgtcgctgatgaccctgagcacgaagacccccaagg

SEQ ID NO: 471112 - DNA, 120 bp, Artificial Sequence
  ENSG00000159339_5 (sequence is synthesized)
acttcttcacaaaccatacactggtgctccacgtggccaggtctgagatggacaaagtgagggtgtttcaggccacacggggcaaactgtcctccaagtgcagcgtagtcttgggtccca

SEQ ID NO: 471113 - DNA, 120 bp, Artificial Sequence
  ENSG00000159339_6 (sequence is synthesized)
agtggccctctcactacctgatggtccccggtggaaagcacaacatggacttctacgtggaggccctcgctttcccggacaccgacttcccggggctcattaccctcaccatctccctgc

SEQ ID NO: 471114 - DNA, 120 bp, Artificial Sequence
  ENSG00000159339_7 (sequence is synthesized)
tggacacgtccaacctggagctccccgaggctgtggtgttccaagacagcgtggtcttccgcgtggcgccctggatcatgacccccaacacccagcccccgcaggaggtgtacgcgtgca

SEQ ID NO: 471115 - DNA, 120 bp, Artificial Sequence
  ENSG00000159339_8 (sequence is synthesized)
gtatttttgaaaatgaggacttcctgaagtcagtgactactctggccatgaaagccaagtgcaagctgaccatctgccctgaggaggagaacatggatgaccagtggatgcaggatgaaa

SEQ ID NO: 471116 - DNA, 120 bp, Artificial Sequence
  ENSG00000159339_9 (sequence is synthesized)
gattttggctatgtaactcgagggccccaaacagggggtatcagtggactggactcctttgggaacctggaagtgagccccccagtcacagtcaggggcaaggaatacccgctgggcagg

SEQ ID NO: 471117 - DNA, 120 bp, Artificial Sequence
  ENSG00000159339_10 (sequence is synthesized)
attctcttcggggacagctgttatcccagcaatgacagccggcagatgcaccaggccctgcaggacttcctcagtgcccagcaggtgcaggcccctgtgaagctctattctgactggctg

SEQ ID NO: 471118 - DNA, 120 bp, Artificial Sequence
  ENSG00000159339_11 (sequence is synthesized)
tccgtgggccacgtggacgagttcctgagctttgtgccagcacccgacaggaagggcttccggctgctcctggccagccccaggtcctgctacaaactgttccaggagcagcagaatgag

SEQ ID NO: 471119 - DNA, 120 bp, Artificial Sequence
  ENSG00000159339_12 (sequence is synthesized)
ggccacggggaggccctgctgttcgaagggatcaagaaaaaaaaacagcagaaaataaagaacattctgtcaaacaagacattgagagaacataattcatttgtggagagatgcatcgac

SEQ ID NO: 471120 - DNA, 120 bp, Artificial Sequence
  ENSG00000159339_13 (sequence is synthesized)
tggaaccgcgagctgctgaagcgggagctgggcctggccgagagtgacatcattgacatcccgcagctcttcaagctcaaagagttctctaaggcggaagcttttttccccaacatggtg

SEQ ID NO: 471121 - DNA, 120 bp, Artificial Sequence
  ENSG00000159339_14 (sequence is synthesized)
aacatgctggtgctagggaagcacctgggcatccccaagcccttcgggcccgtcatcaacggccgctgctgcctggaggagaaggtgtgttccctgctggagccactgggcctccagtgc

SEQ ID NO: 471122 - DNA, 120 bp, Artificial Sequence
  ENSG00000159339_15 (sequence is synthesized)
accttcatcaacgacttcttcacctaccacatcaggcatggggaggtgcactgcggcaccaacgtgcgcagaaagcccttctccttcaagtggtggaacatggtgccctgagcccatctt

SEQ ID NO: 471123 - DNA, 120 bp, Artificial Sequence
  ENSG00000159339_16 (sequence is synthesized)
ccctggcgtcctctccctcctggccagatgtcgctgggtcctctgcagtgtggcaagcaagagctcttgtgaatattgtggctccctgggggcggccagccctcccagcagtggcttgct

SEQ ID NO: 471124 - DNA, 120 bp, Artificial Sequence
  ENSG00000159339_17 (sequence is synthesized)
ttcttctcctgtgatgtcccagtttcccactctgaagatcccaacatggtcctagcactgcacactcagttctgctctaagaagctgcaataaagtttttttaagtcactttgtacatga

SEQ ID NO: 471125 - DNA, 120 bp, Artificial Sequence
  ENSG00000159339_18 (sequence is synthesized)
gccccacacaaaacgctgcccgtggtcttcgactctccaaggaacagaggcctgaaggagtttcccatcaaacgcgtgatggtacctgcatggggtggggagggggcacagctgccgaaa

SEQ ID NO: 471126 - DNA, 120 bp, Artificial Sequence
  ENSG00000159339_19 (sequence is synthesized)
ccctcttgtcttgagactccctccttttagcctgccttccccgcccgcgcctgtagctgagtagcccagtgcaaggaggtggaattcctaccaaagtgggagcatgtaggtggggcttgt

SEQ ID NO: 471127 - DNA, 120 bp, Artificial Sequence
  ENSG00000159339_20 (sequence is synthesized)
gctcccaaagtgctcggattactggcatgaaccactgcgccaggccctctattcctttttgatacctcaaatatctataacaaaaagtagataatgacactgtcttatacaagaatatag

SEQ ID NO: 471128 - DNA, 120 bp, Artificial Sequence
  ENSG00000159339_21 (sequence is synthesized)
atagtgttcctcaaattccattatttatatctcatcttcaccatttctgccatatcaatgatccacctatactcatatttatgtaatgttcttctttaaataaaatccattcttaaactt

SEQ ID NO: 471129 - DNA, 120 bp, Artificial Sequence
  ENSG00000159346_0 (sequence is synthesized)
gggagggcgctgaagatcggggccgctcggccgcaggccgcctccagcgccgcgggatgtagcgcgggggaccgcggcccccagcagagcccgcctgcccggcttgtctaccatcagagg

SEQ ID NO: 471130 - DNA, 120 bp, Artificial Sequence
  ENSG00000159346_1 (sequence is synthesized)
gcccggcttgtctaccatcagagggagatctctgccccctggggctgagagaccccaacctttccccaagctgaagctgcagggtattgaggtaccagccagatgtcttcccacaaagga

SEQ ID NO: 471131 - DNA, 120 bp, Artificial Sequence
  ENSG00000159346_2 (sequence is synthesized)
tctgtggtggcacaggggaatggggctcctgccagtaacagggaagctgacacggtggaactggctgaactgggacccctgctagaagagaagggcaaacgggtaatcgccaacccaccc

SEQ ID NO: 471132 - DNA, 120 bp, Artificial Sequence
  ENSG00000159346_3 (sequence is synthesized)
aaagctgaagaagagcaaacatgcccagtgccccaggaagaagaggaggaggtgcgggtactgacacttcccctgcaagcccaccacgccatggagaagatggaagagtttgtgtacaag

SEQ ID NO: 471133 - DNA, 120 bp, Artificial Sequence
  ENSG00000159346_4 (sequence is synthesized)
gtctgggagggacgttggagggtcatcccatatgatgtgctccctgactggctaaaggacaacgactatctgctacatggtcatagacctcccatgccctcctttcgggcttgcttcaag

SEQ ID NO: 471134 - DNA, 120 bp, Artificial Sequence
  ENSG00000159346_5 (sequence is synthesized)
agcatcttccgcattcatacagaaactggcaacatctggacccatctgcttggtttcgtgctgtttctctttttgggaatcttgaccatgctcagaccaaatatgtacttcatggcccct

SEQ ID NO: 471135 - DNA, 120 bp, Artificial Sequence
  ENSG00000159346_6 (sequence is synthesized)
ctacaggagaaggtggtttttgggatgttctttttgggtgcagtgctctgcctcagcttctcctggctctttcacaccgtctattgtcattcagagaaagtctctcggactttttccaaa

SEQ ID NO: 471136 - DNA, 120 bp, Artificial Sequence
  ENSG00000159346_7 (sequence is synthesized)
ctggactattcagggattgctcttctaattatggggagctttgtcccctggctctattattccttctactgctccccacagccacggctcatctacctctccatcgtctgtgtcctgggc

SEQ ID NO: 471137 - DNA, 120 bp, Artificial Sequence
  ENSG00000159346_8 (sequence is synthesized)
cggcagacaagagcaggcgtgttcctgggacttggcttgagtggcgtcgtgcccaccatgcactttactatcgctgagggctttgtcaaggccaccacagtgggccagatgggctggttc

SEQ ID NO: 471138 - DNA, 120 bp, Artificial Sequence
  ENSG00000159346_9 (sequence is synthesized)
ttcctcatggctgtgatgtacatcactggagctggcctttatgctgctcgaattcctgagcgcttctttcctggaaaatttgacatatggttccagtctcatcagattttccatgtcctg

SEQ ID NO: 471139 - DNA, 120 bp, Artificial Sequence
  ENSG00000159346_10 (sequence is synthesized)
gtggtggcagcagcctttgtccacttctatggagtctccaaccttcaggaattccgttacggcctagaaggcggctgtactgatgacacccttctctgagccttcccacctgcggggtgg

SEQ ID NO: 471140 - DNA, 120 bp, Artificial Sequence
  ENSG00000159346_11 (sequence is synthesized)
aggaggaacttcccaagtgcttttaaaaataacttctttgctgaagtgagaggaagagtctgagttgtctgtttctagaagaaacctcttagagaattcagtaccaaccaagcttcagcc

SEQ ID NO: 471141 - DNA, 120 bp, Artificial Sequence
  ENSG00000159346_12 (sequence is synthesized)
cactttcacacccactgggcaataaactttccatttccattctcctagctggggatggggcatggtcaaacttagccatcccctcctcagcaaggcatctaccggcccctcacagagaca

SEQ ID NO: 471142 - DNA, 120 bp, Artificial Sequence
  ENSG00000159346_13 (sequence is synthesized)
gtactttgaaactcatgttgagattttaccctctcctccaaccattttgggaaaattatggactgggactcttcagaaattctgtcttttcttctggaagaaaatgtccctcccttaccc

SEQ ID NO: 471143 - DNA, 120 bp, Artificial Sequence
  ENSG00000159346_14 (sequence is synthesized)
ccatccttaactttgtatcctggcttataacaggccatccatttttgtagcacacttttcaaaaacaattatataccctggtcccatctttctagggcctggatctgcttatagagcagg

SEQ ID NO: 471144 - DNA, 120 bp, Artificial Sequence
  ENSG00000159346_15 (sequence is synthesized)
aagaataaagccaccaacttttacctagcccggctaatcatggaagtgtgtccaggcttcaagtaacttgagttttaattttttttttttcttggcagagtaatgtaaaatttaaatggg

SEQ ID NO: 471145 - DNA, 120 bp, Artificial Sequence
  ENSG00000159346_16 (sequence is synthesized)
gaaagatatttaatatttaatactaagctttaaaaagaaacctgctatcattgctatgtatcttgatgcaaagactatgatgttaataaaagaaagtacagaagacacttggcattcaaa

SEQ ID NO: 471146 - DNA, 120 bp, Artificial Sequence
  ENSG00000159346_17 (sequence is synthesized)
atcacgcacttcaggctgcgataacgaggtggagtgtagaatccgacgaacgtcctctaccccggggcgggtggaggttacctggctgcggcggggagtttagaagaccaaactggacaa

SEQ ID NO: 471147 - DNA, 120 bp, Artificial Sequence
  ENSG00000159346_18 (sequence is synthesized)
agggcgctgaagatcggggccgctcggccgcaggccgcctccagcgccgcgggatgtagcgcgggggaccgcggcccccagcagagcccgcctgcccggcttttagaagaccaaactgga

SEQ ID NO: 471148 - DNA, 120 bp, Artificial Sequence
  ENSG00000159346_19 (sequence is synthesized)
cttactgcatcctcttcaacagatggagagaccaattgtggaatatattttctacctgaaaagcactatcttttgtgaggcttagagtgccagtgcactggctgctttccaagaccttgt

SEQ ID NO: 471149 - DNA, 120 bp, Artificial Sequence
  ENSG00000159346_20 (sequence is synthesized)
acaagcgtaacttactattagcccaagccaaagtagggtgtggtaaatagtctatgcttcattctgctggtgctcctacccagcagtcaagtaaagcttatctttgctgcccatgcattg

SEQ ID NO: 471150 - DNA, 120 bp, Artificial Sequence
  ENSG00000159346_21 (sequence is synthesized)
ctggaagctccagatgtccatcatcgtgtgctttctctcttgcccagccgtgagcctgaggttctatttgtttgcttgtttttgttgttattgttggttttggtggcgacagtggtgtat

SEQ ID NO: 471151 - DNA, 120 bp, Artificial Sequence
  ENSG00000159346_22 (sequence is synthesized)
tattttgttttttctaacaacaccagtaagaaggtacattttcctcatttaaaaagtcaactaagatagaaaaagctagagtatcccttaatactactcccaatttaagaattttgtttt

SEQ ID NO: 471152 - DNA, 120 bp, Artificial Sequence
  ENSG00000159346_23 (sequence is synthesized)
tagaactcattctatcagaataggagaattttcaaagcctttcctgagtgtgatgctgggaaccagctggattgtgatggaatttctaaattcaagtgtctactatgggagatacggctg

SEQ ID NO: 471153 - DNA, 120 bp, Artificial Sequence
  ENSG00000159346_24 (sequence is synthesized)
ttcactagtaagggaaagggatagagttctttgaatggggattcttagagatttttccatcgtaaaatagaagtgaccttgtggaattttaatccagaatacaggatagattgtatggga

SEQ ID NO: 471154 - DNA, 120 bp, Artificial Sequence
  ENSG00000159346_25 (sequence is synthesized)
gtctacaatacaggatagattgagggaatggttaaatctgggagcaggtggagaacagaaagagctagttaaatgagccatacaaattcatttcccccactgatttgtttcatttttgtg

SEQ ID NO: 471155 - DNA, 120 bp, Artificial Sequence
  ENSG00000159348_0 (sequence is synthesized)
gcattgtgggatctgtcggcttgtcaggtggtggaggaaaaggcgctccgtcatggggatccagacgagccccgtcctgctggcctccctgggggtggggctggtcactctgctcggcct

SEQ ID NO: 471156 - DNA, 120 bp, Artificial Sequence
  ENSG00000159348_1 (sequence is synthesized)
ggctgtgggctcctacttggttcggaggtcccgccggcctcaggtcactctcctggaccccaatgaaaagtacctgctacgactgctagacaagacgactgtgagccacaacaccaagag

SEQ ID NO: 471157 - DNA, 120 bp, Artificial Sequence
  ENSG00000159348_2 (sequence is synthesized)
gttccgctttgccctgcccaccgcccaccacactctggggctgcctgtgggcaaacatatctacctctccacccgaattgatggcagcctggtcatcaggccatacactcctgtcaccag

SEQ ID NO: 471158 - DNA, 120 bp, Artificial Sequence
  ENSG00000159348_3 (sequence is synthesized)
tgatgaggatcaaggctatgtggatcttgtcatcaaggtctacctgaagggtgtgcaccccaaatttcctgagggagggaagatgtctcagtacctggatagcctgaaggttggggatgt

SEQ ID NO: 471159 - DNA, 120 bp, Artificial Sequence
  ENSG00000159348_4 (sequence is synthesized)
ggtggagtttcgggggccaagcgggttgctcacttacactggaaaagggcattttaacattcagcccaacaagaaatctccaccagaaccccgagtggcgaagaaactgggaatgattgc

SEQ ID NO: 471160 - DNA, 120 bp, Artificial Sequence
  ENSG00000159348_5 (sequence is synthesized)
cggcgggacaggaatcaccccaatgctacagctgatccgggccatcctgaaagtccctgaagatccaacccagtgctttctgctttttgccaaccagacagaaaaggatatcatcttgcg

SEQ ID NO: 471161 - DNA, 120 bp, Artificial Sequence
  ENSG00000159348_6 (sequence is synthesized)
catcccccaaaagattgggcctacagcaagggctttgtgactgccgacatgatccgggaacacctgcccgctccaggggatgatgtgctggtactgctttgtgggccacccccaatggtg

SEQ ID NO: 471162 - DNA, 120 bp, Artificial Sequence
  ENSG00000159348_7 (sequence is synthesized)
cagctggcctgccatcccaacttggacaaactgggctactcacaaaagatgcgattcacctactgagcatcctccagcttccctggtgctgttcgctgcagttgttccccatcagtactc

SEQ ID NO: 471163 - DNA, 120 bp, Artificial Sequence
  ENSG00000159348_8 (sequence is synthesized)
aagcactataagccttagattcctttcctcagagtttcaggttttttcagttacatctagagctgaaatctggatagtacctgcaggaacaatattcctgtagccatggaagagggccaa

SEQ ID NO: 471164 - DNA, 120 bp, Artificial Sequence
  ENSG00000159348_9 (sequence is synthesized)
ggctcagtcactccttggatggcctcctaaatctccccgtggcaacaggtccaggagaggcccatggagcagtctcttccatggagtaagaaggaagggagcatgtacgcttggtccaag

SEQ ID NO: 471165 - DNA, 120 bp, Artificial Sequence
  ENSG00000159348_10 (sequence is synthesized)
attggctagttccttgatagcatcttactctcaccttctttgtgtctgtgatgaaaggaacagtctgtgcaatgggttttacttaaacttcactgttcaacctatgagcaaatctgtatg

SEQ ID NO: 471166 - DNA, 120 bp, Artificial Sequence
  ENSG00000159348_11 (sequence is synthesized)
tgtgagtataagttgagcatagcatacttccagaggtggtcttatggagatggcaagaaaggaggaaatgatttcttcagatctcaaaggagtctgaaatatcatatttctgtgtgtgtc

SEQ ID NO: 471167 - DNA, 120 bp, Artificial Sequence
  ENSG00000159348_12 (sequence is synthesized)
tctctcagcccctgcccaggctagagggaaacagctactgataatcgaaaactgctgtttgtggcaggaacccctggctgtgcaaataaatggggctgaggcccctgtgtgatattgaaa

SEQ ID NO: 471168 - DNA, 120 bp, Artificial Sequence
  ENSG00000159348_13 (sequence is synthesized)
ggcccagtgccctgttttagcctctgcccaaggtcccctctgtaaggcacagggtcctctttcaataaggaggaaaaggacagagcactgaatcaaattccttccctggtccccaaggaa

SEQ ID NO: 471169 - DNA, 120 bp, Artificial Sequence
  ENSG00000159348_14 (sequence is synthesized)
agaagaaaacttttaaggtatctagtctggagcacagaaacttagatcttcttggttaaatattcatctttgttccttcataatgtgtagataaaggctgttcccctcttctcctcatcc

SEQ ID NO: 471170 - DNA, 120 bp, Artificial Sequence
  ENSG00000159348_15 (sequence is synthesized)
tttgctttcccttaacattctttttcttagttggaaagttgtatagcagaaaactttttatgtgggcctgagaagactcctaaagactttccttcccctttgcatttcagacagaaaagg

SEQ ID NO: 471171 - DNA, 120 bp, Artificial Sequence
  ENSG00000159348_16 (sequence is synthesized)
cctgtggctccttgggaccacagcaggaagcaagacatcttgttctctcaaatctctttgagtattttgagggatgcagcacatcacagacaacccttatgtagctctctgcacggtccc

SEQ ID NO: 471172 - DNA, 120 bp, Artificial Sequence
  ENSG00000159348_17 (sequence is synthesized)
ttacactggaaaaggtaatgacctgtcttctccttgagcctgtctcccactttatcagttcccatagtcctcttggcacagtatggctgtgtgtacacatgtgtatgcacgtaagggcca

SEQ ID NO: 471173 - DNA, 120 bp, Artificial Sequence
  ENSG00000159348_18 (sequence is synthesized)
gggccgcccttccttctaaacatagcgctgatacaatagaaaggcatgtttctcagccccatttgccacaggaagcagttcctcctccacttgaattccctagccatggcagctgtggag

SEQ ID NO: 471174 - DNA, 120 bp, Artificial Sequence
  ENSG00000159348_19 (sequence is synthesized)
attactaaagcaaacatgtgcccctcttccccaccttcaaaaatttgcccccctgggtgagctgtggagtgagccagagatagctttcagcccttcccatgggaacagctgggtgcatta

SEQ ID NO: 471175 - DNA, 120 bp, Artificial Sequence
  ENSG00000159348_20 (sequence is synthesized)
gcaagtccctggagctgctgtgtgccacttgggaaaatagattcacacctggctctgtgcctgtctccttcaccagggagtgacactttgccagaagcagctgatacattgtgtggcgct

SEQ ID NO: 471176 - DNA, 120 bp, Artificial Sequence
  ENSG00000159348_21 (sequence is synthesized)
gaactgactcacagatagccctggccccattgtccctcaactatattattgtcagggctggctcaactcaagcttccacccaagctccaggatcagatgtcatagcagctgctcaactgg

SEQ ID NO: 471177 - DNA, 120 bp, Artificial Sequence
  ENSG00000159348_22 (sequence is synthesized)
cctcaggcatattttcaactctgcatttgttttctaagttcgctgtattgactttattcttccactgctctcttcacctgacctctcagggcattttaacattcagcccaacaagaaatc

SEQ ID NO: 471178 - DNA, 120 bp, Artificial Sequence
  ENSG00000159348_23 (sequence is synthesized)
tccaccagaaccccgagtggcgaagaaactgggaatgattgccggcgggacaggtgcattacactgagggcctttctctcccaccattgttgactgttgccatgcaaattcctaggtgac

SEQ ID NO: 471179 - DNA, 120 bp, Artificial Sequence
  ENSG00000159348_24 (sequence is synthesized)
cctctgaagactggtaaccatagccaagctgttgttcatcaggggatttccagcaatgcttagaactccctagtatctgaaaaacaaaatcataagcaggtagaaaccaaaaaaaatttt

SEQ ID NO: 471180 - DNA, 120 bp, Artificial Sequence
  ENSG00000159348_25 (sequence is synthesized)
aactgatggaattagagaaacaaattaaatgagctttcctcattttgaatggatctaatagttttaggtgagagaagagagaagcagctaggaatgactagctaggaagaaagaaaatta

SEQ ID NO: 471181 - DNA, 120 bp, Artificial Sequence
  ENSG00000159348_26 (sequence is synthesized)
gcattggacactactgtgcattagacactgtgtagtctaatacactactatatattagacacaaaaattagacacatatataggtatctatgaagtaggtactagccttttccttttaca

SEQ ID NO: 471182 - DNA, 120 bp, Artificial Sequence
  ENSG00000159348_27 (sequence is synthesized)
gagagacaatggggttccagagaggctaaatgatttccacagggttatttcactggtaatggcctggagcaaaattagtatttggctctgcctagtgcctaagtacatgcacttaacctc

SEQ ID NO: 471183 - DNA, 120 bp, Artificial Sequence
  ENSG00000159348_28 (sequence is synthesized)
tgcaaatacagtgttctagaaccctcatcattgaatccggaggtacttgtagtcatttgtgacactggagtcctagcctccaaaggactttcagaagagtcttagattagttcctaagaa

SEQ ID NO: 471184 - DNA, 120 bp, Artificial Sequence
  ENSG00000159348_29 (sequence is synthesized)
agggtgcccggaaatacagatgttggagaatatgcaggaagagtttagaggatgagaatgctaaaggaaaatggagtggagtggtgaatgagcagaatgaagatgaaagggctggtcagc

SEQ ID NO: 471185 - DNA, 120 bp, Artificial Sequence
  ENSG00000159348_30 (sequence is synthesized)
cccccaaaaggtatccttcccatttctggacatcccactatcccctcatcgtcaaaatcaaagccttgcccctttgtgaattctggcttcattgaaatcaaccttgcctcacactgccaa

SEQ ID NO: 471186 - DNA, 120 bp, Artificial Sequence
  ENSG00000159348_31 (sequence is synthesized)
ctcggaagtctgagtgcacagacacagtgatctcctggtccctttcctttgggttcctgtttaccaggtgggtgacagggatggcggtgctgctaaggctcagcttgaggcaggctgagt

SEQ ID NO: 471187 - DNA, 120 bp, Artificial Sequence
  ENSG00000159348_32 (sequence is synthesized)
atacccattcccagctgctgctaccacttgacactttctccagagcctttcagggccctccccagtctcatggcaccacacccccttgccagcatgtatctggagtattaagtactttct

SEQ ID NO: 471188 - DNA, 120 bp, Artificial Sequence
  ENSG00000159348_33 (sequence is synthesized)
ctctggggctgcctgtgggtaaggaaagtgtggaatgggctcctttccctggtatcctcagaaggtgactcccctcctgggatctcatgaaacacgctgcttcaaccggtttgctccaca

SEQ ID NO: 471189 - DNA, 120 bp, Artificial Sequence
  ENSG00000159348_34 (sequence is synthesized)
ccctctagagtgtggcttccatgacccccatccagctttaacactcaacagtcttgcctcttccctgcaggatttgctaattactccctctgagcaagcactactaactttttcccattg

SEQ ID NO: 471190 - DNA, 120 bp, Artificial Sequence
  ENSG00000159348_35 (sequence is synthesized)
cccagacccttttggctcatctgtcaaggtcctggcagtaactggcaggaaacgctggaaataagtgtttcctcaactgggcgcttataagagatccaactgagggctcaatggggcaaa

SEQ ID NO: 471191 - DNA, 120 bp, Artificial Sequence
  ENSG00000159352_0 (sequence is synthesized)
ggtgaagagcgacgggccaattggaggagttgttgttaggccgtcccggagacccggtcgggagggaggaaggtggcaagatggtgttggaaagcactatggtgtgtgtggacaacagtg

SEQ ID NO: 471192 - DNA, 120 bp, Artificial Sequence
  ENSG00000159352_1 (sequence is synthesized)
agtatatgcggaatggagacttcttacccaccaggctgcaggcccagcaggatgctgtcaacatagtttgtcattcaaagacccgcagcaaccctgagaacaacgtgggccttatcacac

SEQ ID NO: 471193 - DNA, 120 bp, Artificial Sequence
  ENSG00000159352_2 (sequence is synthesized)
tggctaatgactgtgaagtgctgaccacactcaccccagacactggccgtatcctgtccaagctacatactgtccaacccaagggcaagatcaccttctgcacgggcatccgcgtggccc

SEQ ID NO: 471194 - DNA, 120 bp, Artificial Sequence
  ENSG00000159352_3 (sequence is synthesized)
atctggctctgaagcaccgacaaggcaagaatcacaagatgcgcatcattgcctttgtgggaagcccagtggaggacaatgagaaggatctggtgaaactggctaaacgcctcaagaagg

SEQ ID NO: 471195 - DNA, 120 bp, Artificial Sequence
  ENSG00000159352_4 (sequence is synthesized)
agaaagtaaatgttgacattatcaattttggggaagaggaggtgaacacagaaaagctgacagcctttgtaaacacgttgaatggcaaagatggaaccggttctcatctggtgacagtgc

SEQ ID NO: 471196 - DNA, 120 bp, Artificial Sequence
  ENSG00000159352_5 (sequence is synthesized)
tcagttctccgattttggctggtgaaggtggtgccatgctgggtcttggtgccagtgactttgaatttggagtagatcccagtgctgatcctgagctggccttggcccttcgtgtatcta

SEQ ID NO: 471197 - DNA, 120 bp, Artificial Sequence
  ENSG00000159352_6 (sequence is synthesized)
tggaagagcagcggcagcggcaggaggaggaggcccggcgggcagctgcagcttctgctgctgaggccgggattgctacgactgggactgaagactcagacgatgccctgctgaagatga

SEQ ID NO: 471198 - DNA, 120 bp, Artificial Sequence
  ENSG00000159352_7 (sequence is synthesized)
ccatcagccagcaagagtttggccgcactgggcttcctgacctaagcagtatgactgaggaagagcagattgcttatgccatgcagatgtccctgcagggagcagagtttggccaggcgg

SEQ ID NO: 471199 - DNA, 120 bp, Artificial Sequence
  ENSG00000159352_8 (sequence is synthesized)
aatcagcagacattgatgccagctcagctatggacacatctgagccagccaaggaggaggatgattacgacgtgatgcaggaccccgagttccttcagagtgtcctagagaacctcccag

SEQ ID NO: 471200 - DNA, 120 bp, Artificial Sequence
  ENSG00000159352_9 (sequence is synthesized)
gtgtggatcccaacaatgaagccattcgaaatgctatgggctccctggcctcccaggccaccaaggacggcaagaaggacaagaaggaggaagacaagaagtgagactggagggaaaggg

SEQ ID NO: 471201 - DNA, 120 bp, Artificial Sequence
  ENSG00000159352_10 (sequence is synthesized)
tagctgagtctgcttaggggactgcatgggaagcacggaatatagggttagatgtgtgttatctgtaaccattacagcctaaataaagcttggcaactttttttccttttttgcttcaaa

SEQ ID NO: 471202 - DNA, 77 bp, Artificial Sequence
  ENSG00000159352_11 (sequence is synthesized)
aatatattttaaagtcagtgaaaagtgattttgggctgggcacagtgacccgagatcacgccataaataaataaaag

SEQ ID NO: 471203 - DNA, 120 bp, Artificial Sequence
  ENSG00000159352_12 (sequence is synthesized)
atgctactcttctttagattccatgaagctgcttttgcccatcaccttcctagactgccttctgcactatttagtgtaaatgtcaatagcaacttgttttttgtattaacctgtatttaa

SEQ ID NO: 471204 - DNA, 87 bp, Artificial Sequence
  ENSG00000159352_13 (sequence is synthesized)
tctttttattgtttgttgggcagggctagggtagggggtgaaatttcataatatattttaaagtcagtgaaaagtgattttgagagt

SEQ ID NO: 471205 - DNA, 120 bp, Artificial Sequence
  ENSG00000159352_14 (sequence is synthesized)
caccactgcacaccagcttgggcgacagaatgagactccatttcaaaaaaaaagaaaaaagtaatttttggatcagagcccctgggcatatatcactcatccttttaccctgaaagtgtt

SEQ ID NO: 471206 - DNA, 120 bp, Artificial Sequence
  ENSG00000159352_15 (sequence is synthesized)
cccatcaggtttaaagtccttgaatttagatcctcatccctctggggctgggagtatttctaccatagctaagtcctttgaggagcagagggaaacacatggatttgcatttcttacatg

SEQ ID NO: 471207 - DNA, 120 bp, Artificial Sequence
  ENSG00000159352_16 (sequence is synthesized)
acattgatgccagctcagctatggacacatctgagccagccaagagctcaattaacagagttctcagcaggcccctctatttggaggaggatgattacgacgtgatgcaggaccccgagt

SEQ ID NO: 471208 - DNA, 120 bp, Artificial Sequence
  ENSG00000159352_17 (sequence is synthesized)
gggattgctacgactgggactgaaggtgaaagaggtggaatccgaagtcctgggactgcgggatgctaaacattgaaagctgggtgtaggcactgcagggagagtgtggaggtctgacag

SEQ ID NO: 471209 - DNA, 120 bp, Artificial Sequence
  ENSG00000159352_18 (sequence is synthesized)
ggtaggaatatgtgggagggctgggctaggaatggccttggaggctggcctgtgtggatatggcaccaattctaccctgctcctcttttccttttcccagactcagacgatgccctgctg

SEQ ID NO: 471210 - DNA, 120 bp, Artificial Sequence
  ENSG00000159352_19 (sequence is synthesized)
gagcccatgtttgggactgaggtcttccagccctcaggagaacctggcagaggcatcaggctcatcactttggggaaaggtgaatgtggagaattcagtgattctgttggaggaccttgg

SEQ ID NO: 471211 - DNA, 120 bp, Artificial Sequence
  ENSG00000159352_20 (sequence is synthesized)
ggaggtcaatagatttctgtatgcttttatgcggcgggtcctttccccccctcgagtatggaacagatttcttgatttttctccccttcttcccagctggtgaaactggctaaacgcctc

SEQ ID NO: 471212 - DNA, 120 bp, Artificial Sequence
  ENSG00000159352_21 (sequence is synthesized)
gactgattggagggcattgacttaatttggtcataaacagaatggtccttaaccctgaggagtgcgggtactgtggcagagtagtgcagaaatgggaaagaacagggagcaaggcctgaa

SEQ ID NO: 471213 - DNA, 89 bp, Artificial Sequence
  ENSG00000159352_22 (sequence is synthesized)
cccgggaagctgaagtgggaagatctatgtgactgcgcttgaacctgtgcctgcgcttgaacctgtgcctgaatactaccctagacagt

SEQ ID NO: 471214 - DNA, 80 bp, Artificial Sequence
  ENSG00000159363_0 (sequence is synthesized)
agtgtcggagccgcgccgagcctggtggcccaggtgccccgcccgcgtcagccctgctccagccccgcgctagcccagcg

SEQ ID NO: 471215 - DNA, 120 bp, Artificial Sequence
  ENSG00000159363_1 (sequence is synthesized)
gccttgcgcacgccggggcccaggccgagggccgcagcgccggggccggcgatgagcgcgaggagccggcatgagcgcagacagcagccctctcgtgggcagcacgcccaccggttatgg

SEQ ID NO: 471216 - DNA, 120 bp, Artificial Sequence
  ENSG00000159363_2 (sequence is synthesized)
gaccctgacgatagggacatcaatagatcccctcagctcctcagtttcatccgtgaggctcagcggctactgtggcagtccatggagggtcatcggctatcacgtcgtggtctggatgat

SEQ ID NO: 471217 - DNA, 120 bp, Artificial Sequence
  ENSG00000159363_3 (sequence is synthesized)
ggctgggatccctttgctgctcttccgttggaagcccctgtggggggtgcggctgcggctccggccctgcaacctggcccacgccgaaacactcgttatcgaaataagagacaaagagga

SEQ ID NO: 471218 - DNA, 120 bp, Artificial Sequence
  ENSG00000159363_4 (sequence is synthesized)
tagttcctggcagctcttcactgtccaggtgcagactgaggccatcggcgagggcagcctggagccgtccccacagtcccaggcagaggatggccggagccaggcggcagttggggcggt

SEQ ID NO: 471219 - DNA, 120 bp, Artificial Sequence
  ENSG00000159363_5 (sequence is synthesized)
accagagggtgcctggaaggatacggcccagctccacaagagcgaggaggcggtgagtgtcggacagaagcgggtgctgcggtattacctcttccagggccagcgctatatctggatcga

SEQ ID NO: 471220 - DNA, 120 bp, Artificial Sequence
  ENSG00000159363_6 (sequence is synthesized)
gacccagcaagccttctaccaggtcagcctcctggaccatggccgctcttgtgacgacgtccaccgctcccgccatggcctcagcctccaggaccaaatggtgaggaaggccatttacgg

SEQ ID NO: 471221 - DNA, 120 bp, Artificial Sequence
  ENSG00000159363_7 (sequence is synthesized)
ccccaacgtgatcagcataccggtcaagtcctacccccagctgctggtggacgaggcactgaacccctactatgggttccaggccttcagcatcgcgctgtggctggctgaccactacta

SEQ ID NO: 471222 - DNA, 120 bp, Artificial Sequence
  ENSG00000159363_8 (sequence is synthesized)
ctggtacgccctgtgcatcttcctcatttcctccatctccatctgcctgtcgctgtacaagaccagaaagcaaagccagactctaagggacatggtcaagttgtccatgcgggtgtgcgt

SEQ ID NO: 471223 - DNA, 120 bp, Artificial Sequence
  ENSG00000159363_9 (sequence is synthesized)
gtgccggccagggggagaggaagagtgggtggactccagtgagctagtgcccggagactgcctggtgctgccccaggagggtgggctgatgccctgtgatgccgccctggtggccggcga

SEQ ID NO: 471224 - DNA, 120 bp, Artificial Sequence
  ENSG00000159363_10 (sequence is synthesized)
gtgcatggtgaatgagagctctctgacaggagagagcattccagtgctgaagacggcactgccggaggggctggggccctactgtgcagagacacaccggcggcacacactcttctgcgg

SEQ ID NO: 471225 - DNA, 120 bp, Artificial Sequence
  ENSG00000159363_11 (sequence is synthesized)
gaccctcatcttgcaggcccgggcctatgtgggaccgcacgtcctggcagtggtgacccgcacagggttctgcacggcaaaagggggcctggtgagctccatcttgcacccccggcccat

SEQ ID NO: 471226 - DNA, 120 bp, Artificial Sequence
  ENSG00000159363_12 (sequence is synthesized)
caacttcaagttctataaacacagcatgaagtttgtggctgccctctctgtcctggctctcctcggcaccatctacagcatcttcatcctctaccgaaaccgggtgcctctgaatgagat

SEQ ID NO: 471227 - DNA, 120 bp, Artificial Sequence
  ENSG00000159363_13 (sequence is synthesized)
tgtaatccgggctctcgacctggtgaccgtggtggtgccacctgccctgcctgctgccatgactgtgtgcacgctctacgcccagagccgactgcggagacagggcattttctgcatcca

SEQ ID NO: 471228 - DNA, 120 bp, Artificial Sequence
  ENSG00000159363_14 (sequence is synthesized)
cccactgcgcatcaacctggggggcaagctgcagctggtgtgtttcgacaagacgggcaccctcactgaggacggcttagacgtgatgggggtggtgcccctgaaggggcaggcattcct

SEQ ID NO: 471229 - DNA, 120 bp, Artificial Sequence
  ENSG00000159363_15 (sequence is synthesized)
gcccctggtcccagagcctcgccgcctgcctgtggggcccctgctccgagcactggccacctgccatgccctcagccggctccaggacacccccgtgggcgaccccatggacttgaagat

SEQ ID NO: 471230 - DNA, 120 bp, Artificial Sequence
  ENSG00000159363_16 (sequence is synthesized)
ggctgcagactcagcatttgggacccaggtcttggcagtgatgagacccccactttgggagccccagctgcaggcaatggaggagcccccggtgccagtcagcgtcctccaccgcttccc

SEQ ID NO: 471231 - DNA, 120 bp, Artificial Sequence
  ENSG00000159363_17 (sequence is synthesized)
cttctcttcggctctgcagcgcatgagtgtggtggtggcgtggccaggggccactcagcccgaggcctacgtcaaaggctccccggagctggtggcagggctctgcaaccccgagacagt

SEQ ID NO: 471232 - DNA, 120 bp, Artificial Sequence
  ENSG00000159363_18 (sequence is synthesized)
gcccaccgacttcgcccagatgctgcagagctatacagctgctggctaccgtgtcgtggccctggccagcaagccactgcccactgtgcccagcctggaggcagcccagcaactgacgag

SEQ ID NO: 471233 - DNA, 120 bp, Artificial Sequence
  ENSG00000159363_19 (sequence is synthesized)
ggacactgtggaaggagacctgagcctcctggggctgctggtcatgaggaacctactgaagccgcagacaacgccagttatccaggctctgcgaaggacccgcatccgcgccgtcatggt

SEQ ID NO: 471234 - DNA, 120 bp, Artificial Sequence
  ENSG00000159363_20 (sequence is synthesized)
gacaggggacaacctgcagacagcggtgactgtggcccggggctgtggcatggtggccccccaggagcatctgatcatcgtccacgccacccaccctgagcggggtcagcctgcctctct

SEQ ID NO: 471235 - DNA, 120 bp, Artificial Sequence
  ENSG00000159363_21 (sequence is synthesized)
cgagttcctgccgatggagtcccccacagccgtgaatggcgttaaggatcctgaccaggctgcaagctacaccgtggagccagacccccgatccaggcacctggccctcagcgggcccac

SEQ ID NO: 471236 - DNA, 120 bp, Artificial Sequence
  ENSG00000159363_22 (sequence is synthesized)
ctttggtatcattgtgaagcacttccccaagctgctgcccaaggtcctggtccagggcactgtctttgcccgcatggcccctgagcagaagacagagctggtgtgcgagctacagaagct

SEQ ID NO: 471237 - DNA, 120 bp, Artificial Sequence
  ENSG00000159363_23 (sequence is synthesized)
tcagtactgcgtgggcatgtgcggagacggcgccaatgactgtggggccctgaaggcggctgatgtcggcatctcgctgtcccaggcagaagcctcagtggtctcacccttcacctcgag

SEQ ID NO: 471238 - DNA, 120 bp, Artificial Sequence
  ENSG00000159363_24 (sequence is synthesized)
catggccagtattgagtgcgtgcccatggtcatcagggaggggcgctgttcccttgacacttcgttcagcgtcttcaagtacatggctctgtacagcctgacccagttcatctccgtcct

SEQ ID NO: 471239 - DNA, 120 bp, Artificial Sequence
  ENSG00000159363_25 (sequence is synthesized)
gatcctctacacgatcaacaccaacctgggtgacctgcagttcctggccatcgacctggtcatcaccaccacagtggcagtgctcatgagccgcacggggccagcgctggtcctgggacg

SEQ ID NO: 471240 - DNA, 120 bp, Artificial Sequence
  ENSG00000159363_26 (sequence is synthesized)
ggtgcggccaccgggggcgctgctcagcgtgcccgtgctcagcagcctgctgctgcagatggtcctggtgaccggcgtgcagctagggggctacttcctgaccctggcccagccatggtt

SEQ ID NO: 471241 - DNA, 120 bp, Artificial Sequence
  ENSG00000159363_27 (sequence is synthesized)
cgtgcctctgaacaggacagtggccgcaccagacaacctgcccaactacgagaacaccgtggtcttctctctgtccagcttccagtacctcatcctggctgcagccgtgtccaagggggc

SEQ ID NO: 471242 - DNA, 120 bp, Artificial Sequence
  ENSG00000159363_28 (sequence is synthesized)
gcccttccgccggccgctctacaccaatgtgcccttcctggtggccctggcgctcctgagctccgtcctggtgggccttgtcctggtccccggcctcctgcaggggccgctggcgctgag

SEQ ID NO: 471243 - DNA, 120 bp, Artificial Sequence
  ENSG00000159363_29 (sequence is synthesized)
gaacatcactgacaccggcttcaagctgctgctgctgggtctggtcaccctcaacttcgtgggggccttcatgctggagagcgtgctagaccagtgcctccccgcctgcctgcgccgcct

SEQ ID NO: 471244 - DNA, 120 bp, Artificial Sequence
  ENSG00000159363_30 (sequence is synthesized)
ccggcccaagcgggcctccaagaagcgcttcaagcagctggaacgagagctggccgagcagccctggccgccgctgcccgccggccccctgaggtagtgcaggcccacgggcaccccaga

SEQ ID NO: 471245 - DNA, 120 bp, Artificial Sequence
  ENSG00000159363_31 (sequence is synthesized)
cactggaactccctgcctctgagccaccaactggacccctctccagcaacaccaccgccaccacctcccacatccctgaggttggcgactgtctacactcctcccccgagaccaccccca

SEQ ID NO: 471246 - DNA, 120 bp, Artificial Sequence
  ENSG00000159363_32 (sequence is synthesized)
ccctggggaagcgttgactactgtcccctaccttggaccatcccgcgtaggggtggcagcccccagctcccctcagtgctgctgtcagtgtagcaaataaagtcatgatattttcctggc

SEQ ID NO: 471247 - DNA, 120 bp, Artificial Sequence
  ENSG00000159363_33 (sequence is synthesized)
aaggtggggccgcaggtggggttggtgcaggggagcgggacagccacaggcgccccagtgaggcctccacacccgcgttattctctcagcagcacccacaggatgccaggtcctgtctag

SEQ ID NO: 471248 - DNA, 120 bp, Artificial Sequence
  ENSG00000159363_34 (sequence is synthesized)
gagatgctggcggagggagggaggagccctggggtgctggggaggcagatgggagagaggtgccggccgagtggaagactggcgtgcacacgtgtgtctgtgggtgccgggggggcgtgg

SEQ ID NO: 471249 - DNA, 89 bp, Artificial Sequence
  ENSG00000159363_35 (sequence is synthesized)
acctcagcctcctgagtagctgggagcgtaggcacaggccaccccatcaggctaatttttgtattttttgtagatataaacccttgtcc

SEQ ID NO: 471250 - DNA, 120 bp, Artificial Sequence
  ENSG00000159363_36 (sequence is synthesized)
tctttagagcggagaaactgagggccctggggatgtctggttgggtggggatgggattgaccaggagaaaggcctggctccagtcctttggcagccactgggccctctgctcccatgggc

SEQ ID NO: 471251 - DNA, 120 bp, Artificial Sequence
  ENSG00000159363_37 (sequence is synthesized)
acaggagacccagcctgtggctgggctgccctgggggacgcggccctgacgctgcctcccgcccctcccccaggcactgaacccctactatgggttccaggccttcagcatcgcgctgtg

SEQ ID NO: 471252 - DNA, 120 bp, Artificial Sequence
  ENSG00000159363_38 (sequence is synthesized)
ccagaggatccaccccatcccactcctgccctcactgggctcacggtctggcagatgaaatgtctagaatcatgtattcatgtgttcaagaactggtggggggccgggcgcggtggctca

SEQ ID NO: 471253 - DNA, 120 bp, Artificial Sequence
  ENSG00000159363_39 (sequence is synthesized)
tccactagttccttgtttaaagcccttaaaaagcctacaagagccgggccagacctgttaggactccacactgctgatggctaatttcacaaacatcatgtcttgcaactccagaggcac

SEQ ID NO: 471254 - DNA, 120 bp, Artificial Sequence
  ENSG00000159363_40 (sequence is synthesized)
gggtcgggagggctaggggtggggaaggcctgccctcaccctggcttccctgccttggggtccccgcctcctccccagggttctgcacggcaaaagggggcctggtgagctccatcttgc

SEQ ID NO: 471255 - DNA, 120 bp, Artificial Sequence
  ENSG00000159374_0 (sequence is synthesized)
gggcccggagcttcctccgcggggcccccaggcccgagggccgggctgctgatccgccaggcacggtgtaaagaatatccagctggtggctacagttccccctctggttttgctgccatg

SEQ ID NO: 471256 - DNA, 120 bp, Artificial Sequence
  ENSG00000159374_1 (sequence is synthesized)
catcctgggcgaactactggtaaagggccctctactcacactcagattgaccagcaacctccacggcttctcattgtgcacattgctctaccgtcctgggctgacatctgcaccaacctc

SEQ ID NO: 471257 - DNA, 120 bp, Artificial Sequence
  ENSG00000159374_2 (sequence is synthesized)
tgtgaggctctgcagaacttcttctctctagcctgcagcttgatgggccccagccgcatgtccctgttcagtttatacatggtacaagatcagcatgagtgcatcctcccttttgtgcaa

SEQ ID NO: 471258 - DNA, 120 bp, Artificial Sequence
  ENSG00000159374_3 (sequence is synthesized)
gtgaaagggaactttgctaggttgcagacctgcatctcagaactccgcatgttacagagagaagggtgtttcagatcacaaggtgcttctctgcggctggcagtagaggatgggctccag

SEQ ID NO: 471259 - DNA, 120 bp, Artificial Sequence
  ENSG00000159374_4 (sequence is synthesized)
caattcaaacaatacagcagacatgtgaccacaagggcagctctgacctatacctccctggagattactattctgacttctcagcctggaaaagaggtggtcaaacagttggaggaaggg

SEQ ID NO: 471260 - DNA, 120 bp, Artificial Sequence
  ENSG00000159374_5 (sequence is synthesized)
ttgaaagatacagacctagccagagtcaggaggtttcaggtcgttgaggtcacaaagggaatcctagagcacgtggactcagcgtctcctgttgaggataccagcaatgatgagagttct

SEQ ID NO: 471261 - DNA, 120 bp, Artificial Sequence
  ENSG00000159374_6 (sequence is synthesized)
attctgggaactgacattgaccttcagactatagacaatgatatcgtcagcatggagattttcttcaaagcctggctacataacagtggaacagaccaagaacaaatccatcttcttctt

SEQ ID NO: 471262 - DNA, 120 bp, Artificial Sequence
  ENSG00000159374_7 (sequence is synthesized)
tcttcacagtgtttcagcaacatttccagacccagagataatccaatgtgtctgaaatgtgatctccaagagcgactgctctgcccatccctactcgctggcacagctgacggctccttg

SEQ ID NO: 471263 - DNA, 120 bp, Artificial Sequence
  ENSG00000159374_8 (sequence is synthesized)
agaatggatgaccctaaaggagacttcatcacactctaccagatggcttcccagtcatcggcctctcattacaagctccaagtgatcaaggctttaaaatctagcgggctctgcgagtca

SEQ ID NO: 471264 - DNA, 120 bp, Artificial Sequence
  ENSG00000159374_9 (sequence is synthesized)
ttgacatatggactcccgttcatcctcagacctacaagctgttggcagctggactgggatgagctggagacaaatcagcaacatttccatgctttgtgtcacagcctgctgaaaagggaa

SEQ ID NO: 471265 - DNA, 120 bp, Artificial Sequence
  ENSG00000159374_10 (sequence is synthesized)
accaccgggcccaggacacagccagagaattcctgccagcaccttctatgtgatcatgccgtcacactccctcacactgctggtaaaggcggtggccacgcgggaactgatgctgcccag

SEQ ID NO: 471266 - DNA, 120 bp, Artificial Sequence
  ENSG00000159374_11 (sequence is synthesized)
caccttccccctgctacctgaggacccacatgatgatagccttaagaatgtggagagcatgctggacagcctggagctggagcccacctacaaccccttgcatgttcaaagccacctgta

SEQ ID NO: 471267 - DNA, 120 bp, Artificial Sequence
  ENSG00000159374_12 (sequence is synthesized)
ctcacacctgagcagcatctatgccaagcctcaggggcggctccacccacactgggagagccgagctccgagaaagcatccctgcaagactgggcagttgcagaccaaccgagctcgagc

SEQ ID NO: 471268 - DNA, 120 bp, Artificial Sequence
  ENSG00000159374_13 (sequence is synthesized)
tactgtggcccccctgcctatgactcctgtcccaggcagagcctccaagatgccagcagccagcaaatcttcctcagatgccttcttcctgccttcagagtgggagaaggatccctcaag

SEQ ID NO: 471269 - DNA, 120 bp, Artificial Sequence
  ENSG00000159374_14 (sequence is synthesized)
gccctaagtcaccagcaccagagcccagctgcccagcttaaccatatccatgctcaggttcacataatggctatctgtggtcagacttgctctctatccgcctgagcctctgtgagtgag

SEQ ID NO: 471270 - DNA, 120 bp, Artificial Sequence
  ENSG00000159374_15 (sequence is synthesized)
ggctgactgggaaacaacagccttcctgtcctgtttcagtgctgtcccactcctcaagtctggaagcgacacacccgagcctgtcctttctccagcaaggactttcattttctttagaat

SEQ ID NO: 471271 - DNA, 120 bp, Artificial Sequence
  ENSG00000159374_16 (sequence is synthesized)
catttgctactgtttacacaggtgaagattaaacacccagtaagcttctaccattgttaggagcattcataactcagaatttcttcttgtagctctgtgtaagcaggtggatgaggtcag

SEQ ID NO: 471272 - DNA, 120 bp, Artificial Sequence
  ENSG00000159374_17 (sequence is synthesized)
atcacctttggtaaactggacctcaggaacaaggatgaggttttgaaagctcataaaagacaagtaagattgaaatccaagcctcatttcagagcctgtgcccttcccactacaccacca

SEQ ID NO: 471273 - DNA, 120 bp, Artificial Sequence
  ENSG00000159374_18 (sequence is synthesized)
ggcttcagcctccaaagagacaagtgcttggtacctacatgcaaagtgtgtgtgctggggggtgggagggctgcccagaacaggggagaggatggtgtaaaaaaagacctactcctttcc

SEQ ID NO: 471274 - DNA, 120 bp, Artificial Sequence
  ENSG00000159374_19 (sequence is synthesized)
ttcctgttaccctctccccacatgtaccaaccttcctgttgctccctccatccacagaataatagctaccatttataaaatgtttactctgggctgggagcagtggctcacacctgtaat

SEQ ID NO: 471275 - DNA, 78 bp, Artificial Sequence
  ENSG00000159374_20 (sequence is synthesized)
acactttgagaggctgaggtgggactgtgagacccccccgccatctctacataaataataaaaacttttaaaaaaaca

SEQ ID NO: 471276 - DNA, 120 bp, Artificial Sequence
  ENSG00000159374_21 (sequence is synthesized)
gcgcctccgaacgcgcgggcgcacgctgagagccgggaggaccaggtgagggggcctccgtcttccgaagacaggtgtaaagaatatccagctggtggctacagttccccctctggtttt

SEQ ID NO: 471277 - DNA, 120 bp, Artificial Sequence
  ENSG00000159374_22 (sequence is synthesized)
atcaaaatgcatatatccttaggagaagtaacattgacctagtatcagattaaattagttgactcctaagagcaagtttttataaaggtagatgaggagaaccaaaaggtcgcttgtctc

SEQ ID NO: 471278 - DNA, 120 bp, Artificial Sequence
  ENSG00000159374_23 (sequence is synthesized)
ggtttaacatgttggctccttaagctgactgcagactaacccaaatatctcttctttactgaagttatcctaaagagcgtattagataggacgtatgaattctgaagtgatcaaccacat

SEQ ID NO: 471279 - DNA, 120 bp, Artificial Sequence
  ENSG00000159377_0 (sequence is synthesized)
gctaccgtgactaagatggaagcgtttttggggtcgcggtccggactttgggcggggggtccggccccaggacagttttaccgcattccgtccactcccgattccttcatggatccggcg

SEQ ID NO: 471280 - DNA, 120 bp, Artificial Sequence
  ENSG00000159377_1 (sequence is synthesized)
tctgcactttacagaggtccaatcacgcggacccagaaccccatggtgaccgggacctcagtcctcggcgttaagttcgagggcggagtggtgattgccgcagacatgctgggatcctac

SEQ ID NO: 471281 - DNA, 120 bp, Artificial Sequence
  ENSG00000159377_2 (sequence is synthesized)
ggctccttggctcgtttccgcaacatctctcgcattatgcgagtcaacaacagtaccatgctgggtgcctctggcgactacgctgatttccagtatttgaagcaagttctcggccagatg

SEQ ID NO: 471282 - DNA, 120 bp, Artificial Sequence
  ENSG00000159377_3 (sequence is synthesized)
tacagccggcgctcgaagatgaaccctttgtggaacaccatggtcatcggaggctatgctgatggagagagcttcctcggttatgtggacatgcttggtgtagcctatgaagccccttcg

SEQ ID NO: 471283 - DNA, 120 bp, Artificial Sequence
  ENSG00000159377_4 (sequence is synthesized)
ctggccactggttatggtgcatacttggctcagcctctgctgcgagaagttctggagaagcagccagtgctaagccagaccgaggcccgcgacttagtagaacgctgcatgcgagtgctg

SEQ ID NO: 471284 - DNA, 120 bp, Artificial Sequence
  ENSG00000159377_5 (sequence is synthesized)
tactaccgagatgcccgttcttacaaccggtttcaaatcgccactgtcaccgaaaaaggtgttgaaatagagggaccattgtctacagagaccaactgggatattgcccacatgatcagt

SEQ ID NO: 471285 - DNA, 120 bp, Artificial Sequence
  ENSG00000159377_6 (sequence is synthesized)
ggctttgaatgaaatacagatgcattatccagaactgaagttgccctacttttaactttgaacttggctagttcaaagatagactcttcttttgtaaagtaaataaattcttcaaaatgc

SEQ ID NO: 471286 - DNA, 120 bp, Artificial Sequence
  ENSG00000159377_7 (sequence is synthesized)
ggttgtctgcttttctcctgaaattctgatatgagggatgggctgggatcgctattactgggcagatggttttctttgtagtctgggggctgtaggtgttgacactgattccagtgacaa

SEQ ID NO: 471287 - DNA, 120 bp, Artificial Sequence
  ENSG00000159377_8 (sequence is synthesized)
gatgacatgactgggagtcagtagacatgcaaagagaggacaccctagaacttcttcctgaagtggctcttagcttattttctaagcagagttcattctggtgaggcaagaagtagaatg

SEQ ID NO: 471288 - DNA, 120 bp, Artificial Sequence
  ENSG00000159377_9 (sequence is synthesized)
gagaacaggagagtggttcccaagtagagaggggagtcccctgttttttattcccttcgatgggatggggggacttgttgcagcgggggactggaagagttgttggaggtgggcgatctg

SEQ ID NO: 471289 - DNA, 120 bp, Artificial Sequence
  ENSG00000159377_10 (sequence is synthesized)
tgtttgcaataaagtttttggcattaggtgtaaaatgggggaaggtgtggtaacttcttttggggatgggtggagaccccgacttaattctctcccttttctcacaaccaattcctttta

SEQ ID NO: 471290 - DNA, 120 bp, Artificial Sequence
  ENSG00000159377_11 (sequence is synthesized)
gtcatcggaggctatgctgatggagagaggttcatatgaatacaaataacttatttcctttaccacccaacctagtacctgtgtagtatctcttctgtctcttctccccaagtgaatccc

SEQ ID NO: 471291 - DNA, 120 bp, Artificial Sequence
  ENSG00000159377_12 (sequence is synthesized)
actttaactcagaccccatggtccccttcttcagctaagatgaatctaaggtgaaatgagttttgacccattgtgtcctgttagcttcctcggttatgtggacatgcttggtgtagccta

SEQ ID NO: 471292 - DNA, 120 bp, Artificial Sequence
  ENSG00000159377_13 (sequence is synthesized)
gaacagattgccttacttgtgtgactcctattttcacattggggaagacctccacctgacctttcatttaaggacttaaggcgtgggcattattgaatgctctgctttcttccagtttca

SEQ ID NO: 471293 - DNA, 120 bp, Artificial Sequence
  ENSG00000159377_14 (sequence is synthesized)
aggtctttggcttacactaagctgggcttttctgggaggctcacccaggaaaattttctgggtggaaagttttggttggacagtacagctatttttaggaattgatccctttatgcttca

SEQ ID NO: 471294 - DNA, 120 bp, Artificial Sequence
  ENSG00000159387_0 (sequence is synthesized)
ggccactgcgggaggcgcgcgcgcgaggcagccaagccttgccttcggaggagatgcccagggatcttagcaagcagcctgcggctgccagggatcggacctggcgagtttcccgacgga

SEQ ID NO: 471295 - DNA, 120 bp, Artificial Sequence
  ENSG00000159387_1 (sequence is synthesized)
atctgagggatcccgaacctcggcctcgagggggcgctatccggcctactcgaggaccaggcagctgcagagaagctccaaggtcaaggccctgggccaggccagggcttggagagccgg

SEQ ID NO: 471296 - DNA, 120 bp, Artificial Sequence
  ENSG00000159387_2 (sequence is synthesized)
aatctagcccgagtcctggggaggctgaggcggggaaccagatccccgaggacaaagatgggcgggccagtgggatccaccgacgctgcccggagctgctccaacgagagccgggcctgt

SEQ ID NO: 471297 - DNA, 120 bp, Artificial Sequence
  ENSG00000159387_3 (sequence is synthesized)
ggcgtgaacaaactttacttcagcgcaggggcggaggaaccgggctggaggcttctcccccgggcctctgctctcctccacctgccagtgctcagcctccgcccagccttcgcccacccc

SEQ ID NO: 471298 - DNA, 120 bp, Artificial Sequence
  ENSG00000159387_4 (sequence is synthesized)
agctccctccccctcccccacgcgcctctgttcactcagactcctgtctcccctctcccctcctccttctccctcttgcctttctcccccacttttctcctgtctcttcttttgtattct

SEQ ID NO: 471299 - DNA, 120 bp, Artificial Sequence
  ENSG00000159387_5 (sequence is synthesized)
ctcctccctcgccgccccggttgcctctcgcctcctccgggccgcaggggaggaggtgagcgcgctgcgcccggggcctgcgcggctcagagggaggcgtttctcctacttctcccgggt

SEQ ID NO: 471300 - DNA, 120 bp, Artificial Sequence
  ENSG00000159387_6 (sequence is synthesized)
aatttggagaggttgtgtgtgtgtgcgcgcgcgcgtgagctccaggcgaaaaggggtaggattcagcgccgagcagagagggtcagggtttttgacgttcctcgccagctgcacaaacct

SEQ ID NO: 471301 - DNA, 120 bp, Artificial Sequence
  ENSG00000159387_7 (sequence is synthesized)
cccggagcaagtgtgagtgtgggtgagagtgcgcgcgcgcgcacgggctggctgcgcttggcacgcttggtggcccagggtcccggggcccggggtcccgtctggcggcccgggattacc

SEQ ID NO: 471302 - DNA, 120 bp, Artificial Sequence
  ENSG00000159387_8 (sequence is synthesized)
gtgacgtcacattgagcctctggccaccttggactgggacacctccggagcctcacagccccgcgccgcgccgcgcctcacctcgccaccacgcgcctttgggaacccgcatcttcttcc

SEQ ID NO: 471303 - DNA, 120 bp, Artificial Sequence
  ENSG00000159387_9 (sequence is synthesized)
ttcccctgcccatccatgggcccttctgtcttccggaccccacgggccggaggggcgccttccggagcgcagggctcggcagccgggctgccctcggctctgcctccactggggccaacc

SEQ ID NO: 471304 - DNA, 120 bp, Artificial Sequence
  ENSG00000159387_10 (sequence is synthesized)
aggcgaaggaaccggcgctgggcatccgcagcggtgtaaggaactgagacacctcactgctgggggcgcggaacagctgggctgagacgggaactcgacagggaagagagagacgggcca

SEQ ID NO: 471305 - DNA, 120 bp, Artificial Sequence
  ENSG00000159387_11 (sequence is synthesized)
gggacagccaccatgtccttcccacactttggacacccgtaccgcggcgcttcccagtttctggcgtcggcaagttccagcaccacatgctgcgaatctacccaacgctctgtctcagat

SEQ ID NO: 471306 - DNA, 120 bp, Artificial Sequence
  ENSG00000159387_12 (sequence is synthesized)
gtggcatcaggctccaccccagcgcccgctctctgctgcgcaccctacgatagtcgactgctgggcagtgcgcgaccggagctgggcgccgccttgggcatctatggagcaccctatgcg

SEQ ID NO: 471307 - DNA, 120 bp, Artificial Sequence
  ENSG00000159387_13 (sequence is synthesized)
agctgcccagagctaccctggctacctgccctatagcccagagcccccctcactgtatggggcactgaatccacagtatgaatttaaggaggctgcagggagttttacatccagcctggc

SEQ ID NO: 471308 - DNA, 120 bp, Artificial Sequence
  ENSG00000159387_14 (sequence is synthesized)
acaaccaggagcctattatccctatgagcggactctggggcagtaccaatatgaacggtatggcgcagtggaattgagtggcgccggtcgccgaaagaacgcgacccgggagaccaccag

SEQ ID NO: 471309 - DNA, 120 bp, Artificial Sequence
  ENSG00000159387_15 (sequence is synthesized)
tacactcaaggcctggctcaacgagcaccgcaaaaacccctaccccactaagggtgagaagatcatgctggccatcatcaccaagatgaccctcacccaggtgtccacctggttcgccaa

SEQ ID NO: 471310 - DNA, 120 bp, Artificial Sequence
  ENSG00000159387_16 (sequence is synthesized)
cgcacgccggcgcctcaagaaagagaacaaaatgacatgggcgcccaagaacaaaggtggggaggagaggaaggcagagggaggagaggaggactcactaggctgcctaactgctgacac

SEQ ID NO: 471311 - DNA, 120 bp, Artificial Sequence
  ENSG00000159387_17 (sequence is synthesized)
caaagaagttactgctagccaggaggcccgggggctccggctgagtgacctggaagacctggaggaagaggaggaggaggaggaggaagctgaagacgaggaggtagtggccacagctgg

SEQ ID NO: 471312 - DNA, 120 bp, Artificial Sequence
  ENSG00000159387_18 (sequence is synthesized)
ggacaggctgacggagttccgaaagggcgcgcagtcactgcctgggccgtgcgctgcagctcgagagggccgattggagcgcagggagtgcggcctggctgcgccccgcttctccttcaa

SEQ ID NO: 471313 - DNA, 120 bp, Artificial Sequence
  ENSG00000159387_19 (sequence is synthesized)
tgacccttccggatcggaagaagctgacttcctctcggcggagacaggcagccctaggttgaccatgcactacccatgcttggagaaaccgcgcatctggtctctggcgcacaccgcgac

SEQ ID NO: 471314 - DNA, 120 bp, Artificial Sequence
  ENSG00000159387_20 (sequence is synthesized)
agccagcgctgttgaaggtgcacccccagcccggcctaggccacgaagtcctgagtgccgtatgattcctggacagcctcctgcctctgcccggcgactctcagtccccagagactccgc

SEQ ID NO: 471315 - DNA, 120 bp, Artificial Sequence
  ENSG00000159387_21 (sequence is synthesized)
gtgcgacgagtcttcctgcatacccaaagcctttggaaaccccaagtttgccctgcagggactaccgctgaactgtgcgccgtgcccgcggaggagcgagcctgtagtgcagtgccagta

SEQ ID NO: 471316 - DNA, 120 bp, Artificial Sequence
  ENSG00000159387_22 (sequence is synthesized)
cccgtctggagcagaagcaggttagcgcaatggctgcgatttgcgaaagaatcttggaaatgggccccacgtttcgaattcatctccaggttaagaagctgccagaccttgccagggacc

SEQ ID NO: 471317 - DNA, 120 bp, Artificial Sequence
  ENSG00000159387_23 (sequence is synthesized)
aggagctctcactttgcctaagagacagacacacagaaaccctcctagcagctgtccttgcacgcagagctggggtggtgggccgacttgaaccttagcagtccccacgggagatggcag

SEQ ID NO: 471318 - DNA, 120 bp, Artificial Sequence
  ENSG00000159387_24 (sequence is synthesized)
ggcaccttggggaaggccaagtgggaggctgggaggctgccccacccaccgactctaccaagtctctcttcctcctgtggattcagcaaggcttcctctcctgctcacccctgtctctca

SEQ ID NO: 471319 - DNA, 120 bp, Artificial Sequence
  ENSG00000159387_25 (sequence is synthesized)
cctccaccaaccccactcactttgtaacttcatcactgacccggccaataaggaccctgtgcgtcttctccccctcctaagcccttgtgtccttaaaaataatcagtccgaacccatgta

SEQ ID NO: 471320 - DNA, 120 bp, Artificial Sequence
  ENSG00000159387_26 (sequence is synthesized)
actgttctccagcttttctctagagttctgagtgtattttcctgttgtctagtgccggctcgacctttgacctgctgtgtgatcttagacaagtctcacactctctctgattatccactc

SEQ ID NO: 471321 - DNA, 120 bp, Artificial Sequence
  ENSG00000159387_27 (sequence is synthesized)
ccaatctatagaatgggagcaggaatgagacgttaataatggtctctaaggccaccttctagctccgcctttgcaggatcctgggaggaggtttctggcgtcggcaagttccagcaccac

SEQ ID NO: 471322 - DNA, 120 bp, Artificial Sequence
  ENSG00000159388_0 (sequence is synthesized)
agagcccgagcagcggccagggtaacgctgtcttgtggacccgcacttcccacccgagacctctcactgagcccgagccgcgcgcgacatgagccacgggaagggaaccgacatgctccc

SEQ ID NO: 471323 - DNA, 120 bp, Artificial Sequence
  ENSG00000159388_1 (sequence is synthesized)
ggagatcgccgccgccgtgggcttcctctccagcctcctgaggacccggggctgcgtgagcgagcagaggcttaaggtcttcagcggggcgctccaggaggcactcacagagcactacaa

SEQ ID NO: 471324 - DNA, 120 bp, Artificial Sequence
  ENSG00000159388_2 (sequence is synthesized)
acaccactggtttcccgaaaagccgtccaagggctccggctaccgctgcattcgcatcaaccacaagatggaccccatcatcagcagggtggccagccagatcggactcagccagcccca

SEQ ID NO: 471325 - DNA, 120 bp, Artificial Sequence
  ENSG00000159388_3 (sequence is synthesized)
gctgcaccagctgctgcccagcgagctgaccctgtgggtggacccctatgaggtgtcctaccgcattggggaggacggctccatctgcgtcttgtacgaggaggccccactggccgcctc

SEQ ID NO: 471326 - DNA, 120 bp, Artificial Sequence
  ENSG00000159388_4 (sequence is synthesized)
ctgtgggctcctcacctgcaagaaccaagtgctgctgggccggagcagcccctccaagaactacgtgatggcagtctccagctaggcccttccgcccccgccctgggcgccgccgtgctc

SEQ ID NO: 471327 - DNA, 120 bp, Artificial Sequence
  ENSG00000159388_5 (sequence is synthesized)
atgctgccgtgacaacaggccaccacatacctcaacctggggaactgtatttttaaatgaagagctatttatatatattatttttttttaagaaaggaggaaaagaaaccaaaagttttt

SEQ ID NO: 471328 - DNA, 120 bp, Artificial Sequence
  ENSG00000159388_6 (sequence is synthesized)
tttaagaaaaaaaatccttcaagggagctgcttggaagtggcctccccaggtgcctttggagagaactgttgcgtgcttgagtctgtgagccagtgtctgcctataggagggggagctgt

SEQ ID NO: 471329 - DNA, 120 bp, Artificial Sequence
  ENSG00000159388_7 (sequence is synthesized)
tagggggtagacctagccaaggagaagtgggagacgtttggctagcaccccaggaagatgtgagagggagcaagcaaggttagcaactgtgaacagagaggtcgggatttgccctggggg

SEQ ID NO: 471330 - DNA, 120 bp, Artificial Sequence
  ENSG00000159388_8 (sequence is synthesized)
aggaagagaggccaagttcagagctctctgtctcccccagccagacacctgcatccctggctcctctattactcaggggcattcatgcctggacttaaacaatactatgttatcttttct

SEQ ID NO: 471331 - DNA, 120 bp, Artificial Sequence
  ENSG00000159388_9 (sequence is synthesized)
tttatttttctaatgaggtcctgggcagagagtgaaaaggcctctcctgattcctactgtcctaagctgcttttcttgaaatcatgacttgtttctaattctaccctcaggggcctgtag

SEQ ID NO: 471332 - DNA, 120 bp, Artificial Sequence
  ENSG00000159388_10 (sequence is synthesized)
atgttgctttccagccaggaatctaaagctttgggttttctgaggggggggaggagggaactggaggttattggggttaggatggaagggaactctgcacaaaacctttgctttgctagt

SEQ ID NO: 471333 - DNA, 120 bp, Artificial Sequence
  ENSG00000159388_11 (sequence is synthesized)
tggccaaaactcttccttttggaaccacatgaaagtcttgatgctgctgccatgatccctttgagaggtggctcaaaagctacagggaactccaggtcctttattactgccttcttttca

SEQ ID NO: 471334 - DNA, 120 bp, Artificial Sequence
  ENSG00000159388_12 (sequence is synthesized)
aaagcacaactctcctctaaccctcccctcccccttcccttctggtcgggtcatagagctaccgtattttctaggacaagagttctcagtcactgtgcaatatgccccctgggtcccagg

SEQ ID NO: 471335 - DNA, 120 bp, Artificial Sequence
  ENSG00000159388_13 (sequence is synthesized)
agggtctggaggaaaactggctatcagaacctcctgatgccctggtgggcttagggaaccatctctcctgctctccttgggatgatggctggctagtcagccttgcatgtattccttggc

SEQ ID NO: 471336 - DNA, 120 bp, Artificial Sequence
  ENSG00000159388_14 (sequence is synthesized)
tgaatgggagagtgccccatgttctgcaagactacttggtattcttgtagggccgacactaaataaaagccaaaccttgggcactgttttttctccctggtgctcagagcacctgtggga

SEQ ID NO: 471337 - DNA, 120 bp, Artificial Sequence
  ENSG00000159388_15 (sequence is synthesized)
aaggttgctgtctgtctcagtacaatccaaatttgtcgtagacttgtgcaatatatactgttgtgggttggagaaaagtggaaagctacactgggaagaaactcccttccttcaatttct

SEQ ID NO: 471338 - DNA, 120 bp, Artificial Sequence
  ENSG00000159388_16 (sequence is synthesized)
cagtgacattgatgaggggtcctcaaaagacctcgagtttcccaaaccgaatcaccttaagaaggacagggctagggcatttggccaggatggccaccctcctgctgttgccccttagtg

SEQ ID NO: 471339 - DNA, 120 bp, Artificial Sequence
  ENSG00000159388_17 (sequence is synthesized)
aggaatcttcaccccacttcctctacccccaggttctcctccccacagccagtcccctttcctggatttctaaactgctcaattttgactcaaaggtgctatttaccaaacactctccct

SEQ ID NO: 471340 - DNA, 120 bp, Artificial Sequence
  ENSG00000159388_18 (sequence is synthesized)
acccattcctgccagctctgcctccttttcaactctccacattttgtattgccttcccagacctgcttccagtctttattgctttaaagttcactttgggcccacagacccaagagctaa

SEQ ID NO: 471341 - DNA, 120 bp, Artificial Sequence
  ENSG00000159388_19 (sequence is synthesized)
ttttctggtttgtgggttgaaacaaagctgtgaatcactgcaggctgtgttcttgcatcttgtctgcaaacaggtccctgcctttttagaagcagcctcatggtctcatgcttaatcttg

SEQ ID NO: 471342 - DNA, 120 bp, Artificial Sequence
  ENSG00000159388_20 (sequence is synthesized)
tctctcttctcttctttatgatgttcactttaaaaacaacaaaacccctgagctggactgttgagcaggcctgtctctcctattaagtaaaaataaatagtagtagtatgtttgtaagct

SEQ ID NO: 471343 - DNA, 120 bp, Artificial Sequence
  ENSG00000159388_21 (sequence is synthesized)
attctgacagaaaagacaaaggttactaattgtatgatagtgtttttatatggaagaatgtacagcttatggacaaatgtacacctttttgttactttaataaaaatgtagtaggataaa

SEQ ID NO: 471344 - DNA, 120 bp, Artificial Sequence
  ENSG00000159398_0 (sequence is synthesized)
attgttctgatgctgatcttcagtaactctgctgcctctgcctgcctattcagcatttgcctgttaacaggaagctctttctggctcccaactgaagctctctgaggccagcagccgccg

SEQ ID NO: 471345 - DNA, 120 bp, Artificial Sequence
  ENSG00000159398_1 (sequence is synthesized)
tcaatgttcacagagtgcaggcaggcagccaaatgagtgggaattgggtgcacccaggccagatcctaatttgggctatctgggtccttgcagcccccaccaaagggccttctgctgaag

SEQ ID NO: 471346 - DNA, 120 bp, Artificial Sequence
  ENSG00000159398_2 (sequence is synthesized)
ggccacagaggaacaccaggctgggatggattcagggcaagcaagtcactgtgctgggaagccctgtgcctgtgaacgtgttcctcggagtcccctttgctgctcccccgctgggatccc

SEQ ID NO: 471347 - DNA, 120 bp, Artificial Sequence
  ENSG00000159398_3 (sequence is synthesized)
tgcgatttacgaacccgcagcctgcatcgccctgggataacttgcgagaagccacctcctaccctaatttgtgcctccagaactcagagtggctgctcttagatcaacatatgctcaagg

SEQ ID NO: 471348 - DNA, 120 bp, Artificial Sequence
  ENSG00000159398_4 (sequence is synthesized)
tgcattacccgaaattcggagtgtcagaagactgcctctacctgaacatctatgcgcctgcccacgccgatacaggctccaagctccccgtcttggtgtggttcccaggaggtgccttca

SEQ ID NO: 471349 - DNA, 120 bp, Artificial Sequence
  ENSG00000159398_5 (sequence is synthesized)
agactggctcagcctccatctttgatgggtccgccctggctgcctatgaggacgtgctggttgtggtcgtccagtaccggctaggaatatttggtttcttcaccacatgggatcagcatg

SEQ ID NO: 471350 - DNA, 120 bp, Artificial Sequence
  ENSG00000159398_6 (sequence is synthesized)
ctccggggaactgggccttcaaggaccaggtggctgctctgtcctgggtccagaagaacatcgagttcttcggtggggaccccagctctgtgaccatctttggcgagtccgcgggagcca

SEQ ID NO: 471351 - DNA, 120 bp, Artificial Sequence
  ENSG00000159398_7 (sequence is synthesized)
taagtgtttctagtcttatactgtctcccatggccaaaggcttattccacaaagccatcatggagagtggggtggccatcatcccttacctggaggcccatgattatgagaagagtgagg

SEQ ID NO: 471352 - DNA, 120 bp, Artificial Sequence
  ENSG00000159398_8 (sequence is synthesized)
acctgcaggtggttgcacatttctgtggtaacaatgcgtcagactctgaggccctgctgaggtgcctgaggacaaaaccctccaaggagctgctgaccctcagccagaaaacaaagtctt

SEQ ID NO: 471353 - DNA, 120 bp, Artificial Sequence
  ENSG00000159398_9 (sequence is synthesized)
ggtgctttctttcctaatgagcctctagatctattgtctcagaaagcatttaaagcaattccttccatcatcggagtcaataaccacgagtgtggcttcctgctgcctatgaaggaggct

SEQ ID NO: 471354 - DNA, 120 bp, Artificial Sequence
  ENSG00000159398_10 (sequence is synthesized)
cctgagatcctcagtggctccaacaagtcccttgccctccatctgatacaaaacatcctgcacatcccgcctcagtatttgcaccttgtggctaatgaatacttccatgacaagcactcc

SEQ ID NO: 471355 - DNA, 120 bp, Artificial Sequence
  ENSG00000159398_11 (sequence is synthesized)
ctgactgaaatccgagacagtcttctggacttgcttggagatgtgttctttgtggtccctgcactgatcacagctcgatatcacagagatgctggtgcacctgtctacttctatgagttt

SEQ ID NO: 471356 - DNA, 120 bp, Artificial Sequence
  ENSG00000159398_12 (sequence is synthesized)
cggcaccggcctcagtgctttgaagacacgaagccagcttttgtcaaagccgaccacgctgatgaagtccgctttgtgttcggtggtgccttcctgaagggggacattgttatgttcgaa

SEQ ID NO: 471357 - DNA, 120 bp, Artificial Sequence
  ENSG00000159398_13 (sequence is synthesized)
ggagccacggaggaggagaagttactgagccggaagatgatgaaatactgggctacctttgctcgaaccgggaatcctaatgggaacgacctgtctctgtggccagcttataatctgact

SEQ ID NO: 471358 - DNA, 120 bp, Artificial Sequence
  ENSG00000159398_14 (sequence is synthesized)
gagcagtacctccagctggacttgaacatgagcctcggacagagactcaaagaaccgcgggtggatttttggaccagcaccatccccctgatcctgtctgcctccgacatgctccacagt

SEQ ID NO: 471359 - DNA, 120 bp, Artificial Sequence
  ENSG00000159398_15 (sequence is synthesized)
cctctttcttccttaactttcctctctctcctccagcctttctttttcttttgtgctccttgagaagttatctttctgtgattttggtttcccttctcctcccataatttctcccgcaat

SEQ ID NO: 471360 - DNA, 120 bp, Artificial Sequence
  ENSG00000159398_16 (sequence is synthesized)
cattagcttctttctgagctcagctgctttctatggggatccttgcaaaacaagctgctttcgctgatattttatggacttaggaatgatccttacagaattcttttcaacatcaaaaag

SEQ ID NO: 471361 - DNA, 120 bp, Artificial Sequence
  ENSG00000159398_17 (sequence is synthesized)
tgcaatttgtcttggaaggcaacaagatttcttcaataaatttggaagagggctggcctattagttgtcataataatggttttgtaactcatatgaaataaaatcagaatgtaaaatagg

SEQ ID NO: 471362 - DNA, 120 bp, Artificial Sequence
  ENSG00000159398_18 (sequence is synthesized)
agctggcaacggtagaggaaagtggtgaactcatttgacttttctttatcagctgtaccatgtacatgatgtgcaagaggactggggctctgtgtcaaggccagctgggatgctgaggtt

SEQ ID NO: 471363 - DNA, 120 bp, Artificial Sequence
  ENSG00000159398_19 (sequence is synthesized)
ttgtgttaggaccaagggcaagtctgatggctgttctggtttgccctgcttcatgccatggcctaaaggagtttaggataagaaggggaatgtggagattgtgcctggtttactattttt

SEQ ID NO: 471364 - DNA, 120 bp, Artificial Sequence
  ENSG00000159398_20 (sequence is synthesized)
aggaaactccaaactgttctccataatggctgtgctaatttacattttcatcaacagtgtacgagggttctccgttttctgcactcttgccagcatccgttttttcctgtctttttgata

SEQ ID NO: 471365 - DNA, 120 bp, Artificial Sequence
  ENSG00000159398_21 (sequence is synthesized)
ctgagtggcactgcacagggatggggaaaaaaggttggaccgcactgcagggactagaagatgcccctggcttccctctccccaaaaatgagagcccccaatggtggtagagagtttatt

SEQ ID NO: 471366 - DNA, 120 bp, Artificial Sequence
  ENSG00000159398_22 (sequence is synthesized)
ctgttcaaagcatgttcttaccttttacttcattagatcttctcaacaatccaggaggtcaccaggggccattaactccattttatgggtgaggcaaaaagtccctggaggagaggggtc

SEQ ID NO: 471367 - DNA, 120 bp, Artificial Sequence
  ENSG00000159398_23 (sequence is synthesized)
ttgttcagagtcgtactgtcagctattgatggaaccaggactgggacccaagtcttcacaatacaatttcttagcccataagtaatacagagaggttgtcagatcccttgaagtctcctt

SEQ ID NO: 471368 - DNA, 120 bp, Artificial Sequence
  ENSG00000159398_24 (sequence is synthesized)
tggacatcccagatccccaaagggcagcagtgcagtagccatagacagtgcccagcaacctaagaaggagcgagccttccgggacaatgaacaaaactggccctaattacttagcacatg

SEQ ID NO: 471369 - DNA, 120 bp, Artificial Sequence
  ENSG00000159399_0 (sequence is synthesized)
cggccgcgcccgcgagccgtgagcgatgattggctgcgccacggcggcgggcggtccgtgggcgcacacaccctccccgcgcagccaatgggcgtgcgcacgtcactgatccggaggccc

SEQ ID NO: 471370 - DNA, 120 bp, Artificial Sequence
  ENSG00000159399_1 (sequence is synthesized)
gcgggccggcagcccctcaataagccacattgttgcatgaaactccggcgcaggagtcccgggctgccgctggcaacatcgtgtcacccagctaagaaaatccgcgggcccgagccacgc

SEQ ID NO: 471371 - DNA, 120 bp, Artificial Sequence
  ENSG00000159399_2 (sequence is synthesized)
gcctgtgaatcggagaggtcccactgcccgagtggagccgggctgagattcttctcaagttgagcctcagtgatcctgtggccgaagttagcgccttgacgtgggacaaccggacacgtc

SEQ ID NO: 471372 - DNA, 120 bp, Artificial Sequence
  ENSG00000159399_3 (sequence is synthesized)
gccaggagagaactgaggcgccttctagcagttgtgacgccaaaatcacgtctccggagacccgcgccctccgccagccgggcgcaccctcgccggtagccttctttgtgcgccgtccgg

SEQ ID NO: 471373 - DNA, 120 bp, Artificial Sequence
  ENSG00000159399_4 (sequence is synthesized)
actcccagctcccggcccggcagccgagccccagcacaaagcagtcggaccgcgccgcccgcctcccctctcgcgtctccgcctcggtttcccaactctgcgccgtcgggccgcggcagg

SEQ ID NO: 471374 - DNA, 120 bp, Artificial Sequence
  ENSG00000159399_5 (sequence is synthesized)
atgattgcctcgcatctgcttgcctacttcttcacggagctcaaccatgaccaagtgcagaaggttgaccagtatctctaccacatgcgcctctctgatgagaccctcttggagatctct

SEQ ID NO: 471375 - DNA, 120 bp, Artificial Sequence
  ENSG00000159399_6 (sequence is synthesized)
aagcggttccgcaaggagatggagaaagggcttggagccaccactcaccctactgcagcagtgaagatgctgcccacctttgtgaggtccactccagatgggacagaacacggagagttc

SEQ ID NO: 471376 - DNA, 120 bp, Artificial Sequence
  ENSG00000159399_7 (sequence is synthesized)
ctggctctggatcttggagggaccaacttccgtgtgctttgggtgaaagtaacggacaatgggctccagaaggtggagatggagaatcagatctatgccatccctgaggacatcatgcga

SEQ ID NO: 471377 - DNA, 120 bp, Artificial Sequence
  ENSG00000159399_8 (sequence is synthesized)
ggcagtggcacccagctgtttgaccacattgccgaatgcctggctaacttcatggataagctacaaatcaaagacaagaagctcccactgggttttaccttctcgttcccctgccaccag

SEQ ID NO: 471378 - DNA, 120 bp, Artificial Sequence
  ENSG00000159399_9 (sequence is synthesized)
actaaactagacgagagtttcctggtctcatggaccaagggattcaagtccagtggagtggaaggcagagacgttgtggctctgatccggaaggccatccagaggagaggggactttgat

SEQ ID NO: 471379 - DNA, 120 bp, Artificial Sequence
  ENSG00000159399_10 (sequence is synthesized)
atcgacattgtggctgtggtgaatgacacagttgggaccatgatgacctgtggttatgatgaccacaactgtgagattggtctcattgtgggcacgggcagcaacgcctgctacatggaa

SEQ ID NO: 471380 - DNA, 120 bp, Artificial Sequence
  ENSG00000159399_11 (sequence is synthesized)
gagatgcgccacatcgacatggtggaaggcgatgaggggcggatgtgtatcaatatggagtggggggccttcggggacgatggctcgctcaacgacattcgcactgagtttgaccaggag

SEQ ID NO: 471381 - DNA, 120 bp, Artificial Sequence
  ENSG00000159399_12 (sequence is synthesized)
attgacatgggctcactgaacccgggaaagcaactgtttgagaagatgatcagtgggatgtacatgggggagctggtgaggcttatcctggtgaagatggccaaggaggagctgctcttt

SEQ ID NO: 471382 - DNA, 120 bp, Artificial Sequence
  ENSG00000159399_13 (sequence is synthesized)
ggggggaagctcagcccagagcttctcaacaccggtcgctttgagaccaaagacatctcagacattgaaggggagaaggatggcatccggaaggcccgtgaggtcctgatgcggttgggc

SEQ ID NO: 471383 - DNA, 120 bp, Artificial Sequence
  ENSG00000159399_14 (sequence is synthesized)
ctggacccgactcaggaggactgcgtggccactcaccggatctgccagatcgtgtccacacgctccgccagcctgtgcgcagccaccctggccgccgtgctgcagcgcatcaaggagaac

SEQ ID NO: 471384 - DNA, 120 bp, Artificial Sequence
  ENSG00000159399_15 (sequence is synthesized)
aaaggcgaggagcggctgcgctctactattggggtcgacggttccgtctacaagaaacacccccattttgccaagcgtctacataagaccgtgcggcggctggtgcccggctgcgatgtc

SEQ ID NO: 471385 - DNA, 120 bp, Artificial Sequence
  ENSG00000159399_16 (sequence is synthesized)
cgcttcctccgctccgaggatggcagtggcaaaggtgcagccatggtgacagcagtggcttaccggctggccgatcaacaccgtgcccgccagaagacattagagcatctgcagctgagc

SEQ ID NO: 471386 - DNA, 120 bp, Artificial Sequence
  ENSG00000159399_17 (sequence is synthesized)
catgaccagctgctggaggtcaagaggaggatgaaggtagaaatggagcgaggtctgagcaaggagactcatgccagtgcccccgtcaagatgctgcccacctacgtgtgtgctaccccg

SEQ ID NO: 471387 - DNA, 120 bp, Artificial Sequence
  ENSG00000159399_18 (sequence is synthesized)
gacggcacagagaaaggggacttcttggccttggaccttggaggaacaaatttccgggtcctgctggtccgtgttcggaatgggaagtggggtggagtggagatgcacaacaagatctac

SEQ ID NO: 471388 - DNA, 120 bp, Artificial Sequence
  ENSG00000159399_19 (sequence is synthesized)
gccatcccgcaggaggtcatgcacggcaccggggacgagctctttgaccacattgtccagtgcatcgcggacttcctcgagtacatgggcatgaagggcgtgtccctgcctctgggtttt

SEQ ID NO: 471389 - DNA, 120 bp, Artificial Sequence
  ENSG00000159399_20 (sequence is synthesized)
accttctccttcccctgccagcagaacagcctggacgagagcatcctcctcaagtggacaaaaggcttcaaggcatctggctgcgagggcgaggacgtggtgaccctgctgaaggaagcg

SEQ ID NO: 471390 - DNA, 120 bp, Artificial Sequence
  ENSG00000159399_21 (sequence is synthesized)
atccaccggcgagaggagtttgacctggatgtggttgctgtggtgaacgacacagtcggaactatgatgacctgtggctttgaagaccctcactgtgaagttggcctcattgttggcacg

SEQ ID NO: 471391 - DNA, 120 bp, Artificial Sequence
  ENSG00000159399_22 (sequence is synthesized)
ggcagcaatgcctgctacatggaggagatgcgcaacgtggaactggtggaaggagaagaggggcggatgtgtgtgaacatggaatggggggccttcggggacaatggatgcctagatgac

SEQ ID NO: 471392 - DNA, 120 bp, Artificial Sequence
  ENSG00000159399_23 (sequence is synthesized)
ttccgcacagaatttgatgtggctgtggatgagctttcactcaaccccggcaagcagaggttcgagaaaatgatcagtggaatgtacctgggtgagattgtccgtaacattctcatcgat

SEQ ID NO: 471393 - DNA, 120 bp, Artificial Sequence
  ENSG00000159399_24 (sequence is synthesized)
ggactactcttccgaggccgcatctcagagcggctcaagacaaggggcatctttgaaaccaagttcttgtctcagattgagagtgactgcctggccctgctgcaagtccgagccatcctg

SEQ ID NO: 471394 - DNA, 120 bp, Artificial Sequence
  ENSG00000159399_25 (sequence is synthesized)
caacacttagggcttgagagcacctgtgacgacagcatcattgttaaggaggtgtgcactgtggtggcccggcgggcagcccagctctgtggcgcaggcatggccgctgtggtggacagg

SEQ ID NO: 471395 - DNA, 120 bp, Artificial Sequence
  ENSG00000159399_26 (sequence is synthesized)
atacgagaaaaccgtgggctggacgctctcaaagtgacagtgggtgtggatgggaccctctacaagctacatcctcactttgccaaagtcatgcatgagacagtgaaggacctggctccg

SEQ ID NO: 471396 - DNA, 120 bp, Artificial Sequence
  ENSG00000159399_27 (sequence is synthesized)
aaatgtgatgtgtctttcctgcagtcagaggatggcagcgggaagggggcggcgctcatcactgctgtggcctgccgcatccgtgaggctggacagcgatagaacccctgaaatcggaag

SEQ ID NO: 471397 - DNA, 120 bp, Artificial Sequence
  ENSG00000159399_28 (sequence is synthesized)
ggacttcctctttctctccttcttccctgttttaaattataagatgtcatccccttgtgtcagagacagaccccttggcttttgcttggcagagaggaccccactggactgggttttgtc

SEQ ID NO: 471398 - DNA, 120 bp, Artificial Sequence
  ENSG00000159399_29 (sequence is synthesized)
tctgcatctcattgtagagcttggtggctgagcttggccctattaagataaatagagttccaaataaggatttgttcacatgcatcataaccattcccattggttctcctaaaacatgaa

SEQ ID NO: 471399 - DNA, 120 bp, Artificial Sequence
  ENSG00000159399_30 (sequence is synthesized)
aattatctcccttagtaatcccccttgccaaattccatgtccctgtataattctacaggatggggacactaatgaagatacggttgcttcaccttggagcctgaacatgacatttctaag

SEQ ID NO: 471400 - DNA, 120 bp, Artificial Sequence
  ENSG00000159399_31 (sequence is synthesized)
tggggtgcatcccccagcactgatgttgttactgattctcctgtcagagatctgggaggtctccactgaggatgtgagcctgattatcctataggcagacgtggggagggtggaggggtg

SEQ ID NO: 471401 - DNA, 120 bp, Artificial Sequence
  ENSG00000159399_32 (sequence is synthesized)
acagtggaggaaaatccatggatatccacgcagcagcccctctttaacctcatctacaagcatttgccctgtggattccagcatttgccattcctggaatcaaggaatcctgagtctggg

SEQ ID NO: 471402 - DNA, 120 bp, Artificial Sequence
  ENSG00000159399_33 (sequence is synthesized)
caatgaaaccaaagccaggagttgacgcatcctgcagttgggccagctgtcgcatctcagcggggcgcacatgttatccacaagcaatggacctttggggaagggggagtttttagtttg

SEQ ID NO: 471403 - DNA, 120 bp, Artificial Sequence
  ENSG00000159399_34 (sequence is synthesized)
ttttacaaatttttcctgcaaaagtggaatcactgtattttcattttaatttatatttgaaattttatttagttcttgagtagatctgcttcttcatcttgacatgtaatgaatggtcag

SEQ ID NO: 471404 - DNA, 120 bp, Artificial Sequence
  ENSG00000159399_35 (sequence is synthesized)
ttgtacgtaatgtatttatatgttaatttgttatgtatatagatgtgcaagtcttgtcagaattggcctcagtgtagttaaagggcagaaggggaagatactgactagtcatagaaatac

SEQ ID NO: 471405 - DNA, 120 bp, Artificial Sequence
  ENSG00000159399_36 (sequence is synthesized)
ctcattcgcctgtgggaagagaagggaagcctcttcagggtgagtgaatggcaaagcggttgcttctggctcctccttcccctgtggtcttggaagtgtgtggaaggcagggacagagat

SEQ ID NO: 471406 - DNA, 120 bp, Artificial Sequence
  ENSG00000159399_37 (sequence is synthesized)
ggaggccgagccaatagactgaagagaccacagcaattggctcctccatctagagattttcttggcagtattccatgggatgttaagcaaaggaaaccaaaggaatcgtttcaaatggac

SEQ ID NO: 471407 - DNA, 120 bp, Artificial Sequence
  ENSG00000159399_38 (sequence is synthesized)
tcatggcttagaaatctttattcttagggcagtcagtagtattctaaagctttctgacaagataaaggaagtcaccaaaatttctttttttaaattgtatctaatcctcaacaacaaacc

SEQ ID NO: 471408 - DNA, 120 bp, Artificial Sequence
  ENSG00000159399_39 (sequence is synthesized)
aaaacagaacaattaaacagccaaataaaacctcagggacaacatttttggtgtatttgagccctcccagcaagtttcaccttgggtttgtattttaaatgttttacaagaattgtccat

SEQ ID NO: 471409 - DNA, 120 bp, Artificial Sequence
  ENSG00000159399_40 (sequence is synthesized)
gtgcttccctaggctgagctggcattggtctgctgacctgtttttgtgtttttcttttttttatacacaacatttatttcaaactattgggagggatgagagtggcttaaaaacttccat

SEQ ID NO: 471410 - DNA, 120 bp, Artificial Sequence
  ENSG00000159399_41 (sequence is synthesized)
ccctacttttcaagagtgcagttgattctgaatctgaaagcccgcctctgtcctaaaatacaaacaagcacagacattaaacctggatactatatgataaagagggatgtaactattgaa

SEQ ID NO: 471411 - DNA, 120 bp, Artificial Sequence
  ENSG00000159399_42 (sequence is synthesized)
ttggatacaaggatcagaatggaaagaaactcacgatgaaattgaacctggtttttgtatatttatcaaacttgtgctgagaatagtgtctgattatacgacttttaagcaaagttgggt

SEQ ID NO: 471412 - DNA, 120 bp, Artificial Sequence
  ENSG00000159399_43 (sequence is synthesized)
gtaattaggtgaaaacagcccaggtcctcccgggagcacagaggggctaggggctggtccttctcgtttgctctagtcttgctttgctgtctggtgtagctcctctgctgctcccatctg

SEQ ID NO: 471413 - DNA, 120 bp, Artificial Sequence
  ENSG00000159399_44 (sequence is synthesized)
cactaattgacccaaaacgtgggtatttcctgctacacaaaagccaaaaggtttcatgtagattttagttcactaaagggtgcccacaaaatagagattaattttaacttaaattttaag

SEQ ID NO: 471414 - DNA, 120 bp, Artificial Sequence
  ENSG00000159399_45 (sequence is synthesized)
cttgaagattaggtactatctgtgaagttacacttttttttttttttttaaaggtagagatgtgtgtgtgtgtaggtattaaagatgtgttgttggtttccaaaaaggaacactggaaaa

SEQ ID NO: 471415 - DNA, 120 bp, Artificial Sequence
  ENSG00000159399_46 (sequence is synthesized)
taaattttgaatgtttatgttctcagaatcaggttgacagtcccttgctgacatggctttgctttgtgtaaatacagtggatctcaatcttcggggtgtgatgaatagcgaatcatctca

SEQ ID NO: 471416 - DNA, 120 bp, Artificial Sequence
  ENSG00000159399_47 (sequence is synthesized)
aatccttgagcactcagtctagtgaagatgttgtcattatgtacaatacataactagtttaattaactatgtgatgttaactattattaataaattttaacattttccaaaataatcaaa

SEQ ID NO: 471417 - DNA, 120 bp, Artificial Sequence
  ENSG00000159399_48 (sequence is synthesized)
acccgggaaggagtaggaaaggggcagaggaactccgcccgccgcgccccctccccggaactgtggcgcccggaactgaggctcggcgaggggcgtcccccattaacccccgcccctcca

SEQ ID NO: 471418 - DNA, 120 bp, Artificial Sequence
  ENSG00000159399_49 (sequence is synthesized)
tgacccttctctcagggcagcccctggtgacaaaaaacttccttggcatgttctttctgtactttctccagccgctcccagcgtgtggataggcagtcacccaagacactcatggatgcc

SEQ ID NO: 471419 - DNA, 120 bp, Artificial Sequence
  ENSG00000159403_0 (sequence is synthesized)
acacagtgcacgaagacgctgtcgggagagcccaggattcaacacgggccttgagaaatgtggctcttgtacctcctggtgccggccctgttctgcagggcaggaggctccattcccatc

SEQ ID NO: 471420 - DNA, 120 bp, Artificial Sequence
  ENSG00000159403_1 (sequence is synthesized)
cctcagaagttatttggggaggtgacttcccctctgttccccaagccttaccccaacaactttgaaacaaccactgtgatcacagtccccacgggatacagggtgaagctcgtcttccag

SEQ ID NO: 471421 - DNA, 120 bp, Artificial Sequence
  ENSG00000159403_2 (sequence is synthesized)
cagtttgacctggagccttctgaaggctgcttctatgattatgtcaagatctctgctgataagaaaagcctggggaggttctgtgggcaactgggttctccactgggcaaccccccggga

SEQ ID NO: 471422 - DNA, 120 bp, Artificial Sequence
  ENSG00000159403_3 (sequence is synthesized)
aagaaggaatttatgtcccaagggaacaagatgctgctgaccttccacacagacttctccaacgaggagaatgggaccatcatgttctacaagggcttcctggcctactaccaagctgtg

SEQ ID NO: 471423 - DNA, 120 bp, Artificial Sequence
  ENSG00000159403_4 (sequence is synthesized)
gaccttgatgaatgtgcttcccggagcaaatcaggggaggaggatccccagccccagtgccagcacctgtgtcacaactacgttggaggctacttctgttcctgccgtccaggctatgag

SEQ ID NO: 471424 - DNA, 120 bp, Artificial Sequence
  ENSG00000159403_5 (sequence is synthesized)
cttcaggaagacaggcattcctgccaggctgagtgcagcagcgagctgtacacggaggcatcaggctacatctccagcctggagtaccctcggtcctacccccctgacctgcgctgcaac

SEQ ID NO: 471425 - DNA, 120 bp, Artificial Sequence
  ENSG00000159403_6 (sequence is synthesized)
tacagcatccgggtggagcggggcctcaccctgcacctcaagttcctggagccttttgatattgatgaccaccagcaagtacactgcccctatgaccagctacagatctatgccaacggg

SEQ ID NO: 471426 - DNA, 120 bp, Artificial Sequence
  ENSG00000159403_7 (sequence is synthesized)
aagaacattggcgagttctgtgggaagcaaaggccccccgacctcgacaccagcagcaatgctgtggatctgctgttcttcacagatgagtcgggggacagccggggctggaagctgcgc

SEQ ID NO: 471427 - DNA, 120 bp, Artificial Sequence
  ENSG00000159403_8 (sequence is synthesized)
tacaccaccgagatcatcaagtgcccccagcccaagaccctagacgagttcaccatcatccagaacctgcagcctcagtaccagttccgtgactacttcattgctacctgcaagcaaggc

SEQ ID NO: 471428 - DNA, 120 bp, Artificial Sequence
  ENSG00000159403_9 (sequence is synthesized)
taccagctcatagaggggaaccaggtgctgcattccttcacagctgtctgccaggatgatggcacgtggcatcgtgccatgcccagatgcaagatcaaggactgtgggcagccccgaaac

SEQ ID NO: 471429 - DNA, 120 bp, Artificial Sequence
  ENSG00000159403_10 (sequence is synthesized)
acaagatgcagaccagagctggcagcagggagtctgagcaaggggtgtacacctgcacagcacagggcatttggaagaatgaacagaagggagagaagattcctcggtgcttgccagtgt

SEQ ID NO: 471430 - DNA, 120 bp, Artificial Sequence
  ENSG00000159403_11 (sequence is synthesized)
gtgggaagcccgtgaaccccgtggaacagaggcagcgcatcatcggagggcaaaaagccaagatgggcaacttcccctggcaggtgttcaccaacatccacgggcgcgggggcggggccc

SEQ ID NO: 471431 - DNA, 120 bp, Artificial Sequence
  ENSG00000159403_12 (sequence is synthesized)
tgctgggcgaccgctggatcctcacagctgcccacaccctgtatcccaaggaacacgaagcgcaaagcaacgcctctttggatgtgttcctgggccacacaaatgtggaagagctcatga

SEQ ID NO: 471432 - DNA, 120 bp, Artificial Sequence
  ENSG00000159403_13 (sequence is synthesized)
agctaggaaatcaccccatccgcagggtcagcgtccacccggactaccgtcaggatgagtcctacaattttgagggggacatcgccctgctggagctggaaaatagtgtcaccctgggtc

SEQ ID NO: 471433 - DNA, 120 bp, Artificial Sequence
  ENSG00000159403_14 (sequence is synthesized)
ccaacctcctccccatctgcctccctgacaacgataccttctacgacctgggcttgatgggctatgtcagtggcttcggggtcatggaggagaagattgctcatgacctcaggtttgtcc

SEQ ID NO: 471434 - DNA, 120 bp, Artificial Sequence
  ENSG00000159403_15 (sequence is synthesized)
gtctgcccgtagctaatccacaggcctgtgagaactggctccggggaaagaataggatggatgtgttctctcaaaacatgttctgtgctggacacccatctctaaagcaggacgcctgcc

SEQ ID NO: 471435 - DNA, 120 bp, Artificial Sequence
  ENSG00000159403_16 (sequence is synthesized)
agggggatagtgggggcgtttttgcagtaagggacccgaacactgatcgctgggtggccacgggcatcgtgtcctggggcatcgggtgcagcaggggctatggcttctacaccaaagtgc

SEQ ID NO: 471436 - DNA, 120 bp, Artificial Sequence
  ENSG00000159403_17 (sequence is synthesized)
tcaactacgtggactggatcaagaaagagatggaggaggaggactgagcccagaattcactaggttcgaatccagagagcagtgtggaaaaaaaaaaacaaaaaacaactgaccagttgt

SEQ ID NO: 471437 - DNA, 120 bp, Artificial Sequence
  ENSG00000159403_18 (sequence is synthesized)
tgataaccactaagagtctctattaaaattactgatgcagaaagaccgtgtgtgaaattctctttcctgtagtcccattgatgtactttacctgaaacaacccaaagggcccctttcttt

SEQ ID NO: 471438 - DNA, 120 bp, Artificial Sequence
  ENSG00000159403_19 (sequence is synthesized)
cttctgaggattgcagaggatatagttatcaatctctagttgtcactttcctcttccactttgataccattgggtcattgaatataactttttccaaataaagttttatgagaaatgcca

SEQ ID NO: 471439 - DNA, 120 bp, Artificial Sequence
  ENSG00000159403_20 (sequence is synthesized)
gatctgtatggcatgcacacccccagacacagcccagccccacaagagctgatggccaacggcctctctgagagcccggggatgccctggatgggcgctcactggtgtagaggccctcgg

SEQ ID NO: 471440 - DNA, 120 bp, Artificial Sequence
  ENSG00000159403_21 (sequence is synthesized)
tgagcactgaggggagaagcacagagaaggaaggggacaggacccactcaggaaattcaacatccactgagtcaggaaaaccttccccatctgctgtctagctgagagtctttgggaaac

SEQ ID NO: 471441 - DNA, 120 bp, Artificial Sequence
  ENSG00000159403_22 (sequence is synthesized)
gttcattccctccaacattcctccgggaatggtcccccctccactccacagaaaaccctcccctccctgctgtgcatgacgcgggctccctctgcacacagtgcacgaagacgctgtcgg

SEQ ID NO: 471442 - DNA, 120 bp, Artificial Sequence
  ENSG00000159403_23 (sequence is synthesized)
gacactgccctggagagtgacccgatgcagcagctgcacaggccatcctccccacccacgcacccctgctgagaacatgtctgtgaggttcagggtgggcagagaggagaatgcccagtg

SEQ ID NO: 471443 - DNA, 120 bp, Artificial Sequence
  ENSG00000159403_24 (sequence is synthesized)
aaggagaggttgaggaggctgtgaggaggaaggaagagggacgaggcagtgcctgctgacactgagatgggtgggcttcagggctcatgttccgccgagggcatcaggaggcactcgagg

SEQ ID NO: 471444 - DNA, 120 bp, Artificial Sequence
  ENSG00000159403_25 (sequence is synthesized)
tgtgaatggtttgattaggctgaggtggaatctgaagacagaaaataaagcggagctgtctgagctctgggaatgaggggcagatctctgctgataagaaaagcctggggaggttctgtg

SEQ ID NO: 471445 - DNA, 120 bp, Artificial Sequence
  ENSG00000159403_26 (sequence is synthesized)
atgtccttaagtcacagttaattcatttaatgcacactttaagtgtctactgtcaggcactgtcctagatgtgggaggttcagtaaaaagaaacccacatagtcacacagcctttgtgga

SEQ ID NO: 471446 - DNA, 120 bp, Artificial Sequence
  ENSG00000159403_27 (sequence is synthesized)
gctcacatttgaatgttgcatcaagtcgagttcacctgatgcattgttctttactccaaggtgcttccagctccatcaggaggattgggtgggtgtcctgggtccagaagaatggagact

SEQ ID NO: 471447 - DNA, 120 bp, Artificial Sequence
  ENSG00000159403_28 (sequence is synthesized)
accaacctctttgctcctattacaaccctcccttgcctgcaccacccactgcccttacttttgcatttgttattcacatcatagaatttaaagcaagtcacacggtttctcacattacct

SEQ ID NO: 471448 - DNA, 120 bp, Artificial Sequence
  ENSG00000159403_29 (sequence is synthesized)
acattttactcagacgttctagttctcatacacattctcttacaaccttttccagggctaactccatggaatgatttttggtctttttgttttgtcttgttttgtttttgagagagagtc

SEQ ID NO: 471449 - DNA, 120 bp, Artificial Sequence
  ENSG00000159403_30 (sequence is synthesized)
ttgctctgtcacccaggcagtggcatggtctcagctcactgtaaactccgcctcccaagttcaagtgtttctcctggattcaagctattcaagtgcctcagccacccgagttgctggaat

SEQ ID NO: 471450 - DNA, 120 bp, Artificial Sequence
  ENSG00000159403_31 (sequence is synthesized)
ccaaagtgctggggttaccggcgtgagccactgcacctggccgaattttggtcttagtaaaacttattcatttgtccagtaacttttcatttcaaagactgccatttcctagtcttgtcc

SEQ ID NO: 471451 - DNA, 120 bp, Artificial Sequence
  ENSG00000159403_32 (sequence is synthesized)
ctgctcaatagcaacagcacttcacatacatcaacgtctccagcacctttcaaagctgcgaggtggctctagtattttagggaaggcctctgtccttaggaaaactgcaacccaggagag

SEQ ID NO: 471452 - DNA, 120 bp, Artificial Sequence
  ENSG00000159403_33 (sequence is synthesized)
ataaagtgatgcacgcctggaggcaggggacaccagcaagagaaacacagttctgccctggagcacaggcttttgttttgatacagaaaacactcaaacgtggcttgtgattttttcaaa

SEQ ID NO: 471453 - DNA, 120 bp, Artificial Sequence
  ENSG00000159403_34 (sequence is synthesized)
ttacaaattgtgggattcaactggacctcagtaggaacaggccacagtctagagagaggatgatcaggtctatcagttagctctgctctgacttgctgtggtgtggctcaatgctcctgt

SEQ ID NO: 471454 - DNA, 120 bp, Artificial Sequence
  ENSG00000159403_35 (sequence is synthesized)
gggagccacatccatgggggagccaagagatgtcttggtattgcctcccactcctgtgtggaaagggcaggaaggggacctccattgcctcttggcactgatggcacctctatcctctgc

SEQ ID NO: 471455 - DNA, 120 bp, Artificial Sequence
  ENSG00000159403_36 (sequence is synthesized)
agtgcacgaagacgctgtcgggagagcccaggattcaacacgggccttgagaaatgtgagtaagggtgatgggcaaccaggtgggagggagaagccaggggagaagccagggcatgggag

SEQ ID NO: 471456 - DNA, 120 bp, Artificial Sequence
  ENSG00000159403_37 (sequence is synthesized)
gcaattcagggagacaggaacacccttctctcttcacacacctcatcagttccactgtgcacacgcgtggacacacacaacacacgccccatccctcctcctagggatcagaggagactt

SEQ ID NO: 471457 - DNA, 120 bp, Artificial Sequence
  ENSG00000159403_38 (sequence is synthesized)
catacatagatgctcatgccatggtcctttcttccctctgggctcttggcagggagcagcgagaggaggggaccccttgcccaggacgggacactctgtgcctgtgtcccccactccaca

SEQ ID NO: 471458 - DNA, 120 bp, Artificial Sequence
  ENSG00000159403_39 (sequence is synthesized)
gatggtttctcccagacgctcttgctgaacctgtgggagccctttcagagacccacgggtggaaaccctcaccctccattaactggtcccaagccagtcctattcctggaaggggagggg

SEQ ID NO: 471459 - DNA, 120 bp, Artificial Sequence
  ENSG00000159403_40 (sequence is synthesized)
tccccttctgtctgcacttggctcctcttgtcccaacttcctcctggatcccctggccagctggggcaggaacggccaacatcacccatgggctgggtaagttcccacacaactagaatt

SEQ ID NO: 471460 - DNA, 120 bp, Artificial Sequence
  ENSG00000159403_41 (sequence is synthesized)
accttcccctgaaaacacacataaggcaggatttcatcaccaccaccaccaccctggccaccaggctactacccagttggccctgtgtaaaaacgtccaagctgaaaaaaaaaaaccctc

SEQ ID NO: 471461 - DNA, 120 bp, Artificial Sequence
  ENSG00000159403_42 (sequence is synthesized)
attgtggtgcatgatgcactctgggcgagacaaggaggaccatcactgagccaccacgtgcgccactccgcaacagatcttcttcctaccccctgtccttcttccaccagatctctgctg

SEQ ID NO: 471462 - DNA, 120 bp, Artificial Sequence
  ENSG00000159403_43 (sequence is synthesized)
gtgagtagccccccagggatcccttttctctgacctcagccatattgaatggggggccaagaaagggaatcttgaatgcaaagaagccgaaagcctggctttccttgttcctcccctcga

SEQ ID NO: 471463 - DNA, 120 bp, Artificial Sequence
  ENSG00000159403_44 (sequence is synthesized)
acactgccctggagagtgacccgatgcagcagctgcacaggccatcctccccacccacgcacccctgctgagaacatgtctgtgaggttcagggtggctcttgtacctcctggtgccggc

SEQ ID NO: 471464 - DNA, 120 bp, Artificial Sequence
  ENSG00000159403_45 (sequence is synthesized)
acagaaaaccctcccctccctgctgtgcatgacgcgggctccctctgcacacagtgcacgaagacgctgtcgggagagcccaggattcaacacgggccttgagaaatgaggctccattcc

SEQ ID NO: 471465 - DNA, 120 bp, Artificial Sequence
  ENSG00000159409_0 (sequence is synthesized)
ggtttttgttgaggagagcgcggccggagagcagagctccgggacccaggtgaccgggaaagcaggcagccccagcggcgggagcagccggcagcagcccaggcccggggactggggtgg

SEQ ID NO: 471466 - DNA, 120 bp, Artificial Sequence
  ENSG00000159409_1 (sequence is synthesized)
gggtgggaggggggctgaggggaggacctgaaggggggcggcagggcaaaagggacccctggagccctgccgccatcagagatcaagcatctggcatcagggatcttcggacccagcaga

SEQ ID NO: 471467 - DNA, 120 bp, Artificial Sequence
  ENSG00000159409_2 (sequence is synthesized)
aggatccgccacaggggaggtgtcctcccagggaagccaacgagagattcacctgccccacatcaggagtgggccccccttactgacgctgctggcaaccatagcaggccccttaacccc

SEQ ID NO: 471468 - DNA, 120 bp, Artificial Sequence
  ENSG00000159409_3 (sequence is synthesized)
tcagtctcctccccatcaccctcctcaggccctttccccgcctccagctctcatctcaactcccagttcccagccctctaagccctagcacccccggctaccacctaaccctccaggtct

SEQ ID NO: 471469 - DNA, 120 bp, Artificial Sequence
  ENSG00000159409_4 (sequence is synthesized)
tggccatactcacccccatcctgggacatttgccagatctctgggagggagatcgtttgtttaggcgatgccccctggtggcatgacagcgtctgcctagacccctgacccctagcactc

SEQ ID NO: 471470 - DNA, 120 bp, Artificial Sequence
  ENSG00000159409_5 (sequence is synthesized)
aactccctgggcctcctttgtgtgaagagccgcccctctgcttagcagcgtggttgggggccaaagggaaagccagccccagctgggcccccgggccccaccacttatctccttgctggg

SEQ ID NO: 471471 - DNA, 120 bp, Artificial Sequence
  ENSG00000159409_6 (sequence is synthesized)
cagctccccttggcctttgggcctctccctgctcccctcggcccctcctcctgggccgcctcaatgaaggagccggatgccatcaagctgtttgtggggcagatcccgaggcatctggag

SEQ ID NO: 471472 - DNA, 120 bp, Artificial Sequence
  ENSG00000159409_7 (sequence is synthesized)
gagaaggacctgaagcccatcttcgaacagtttggtcggatctttgagctgactgtcatcaaggacaagtacaccgggctgcacaagggatgtgccttcctgacatactgtgcccgggat

SEQ ID NO: 471473 - DNA, 120 bp, Artificial Sequence
  ENSG00000159409_8 (sequence is synthesized)
tcagccctgaaggcccagagcgccctgcacgaacagaagacgcttccagggatgaacaggccgatccaggtcaagccagccgacagcgagagccgaggagaagaccggaagctctttgtg

SEQ ID NO: 471474 - DNA, 120 bp, Artificial Sequence
  ENSG00000159409_9 (sequence is synthesized)
gggatgctagggaagcagcagacagatgaggacgtccggaagatgtttgagcccttcgggaccatcgacgagtgcactgtgctccgggggccagatggcaccagcaaaggctgcgccttc

SEQ ID NO: 471475 - DNA, 120 bp, Artificial Sequence
  ENSG00000159409_10 (sequence is synthesized)
gtgaagttccagacccacgctgaggcccaggcggccatcaacacccttcacagcagccggaccctgccaggtgcctcgtccagcctggtggtgaagtttgctgacactgagaaggagcga

SEQ ID NO: 471476 - DNA, 120 bp, Artificial Sequence
  ENSG00000159409_11 (sequence is synthesized)
ggtctccgccgcatgcagcaggtggccacccagttgggcatgttcagccccatcgccctccagtttggagcctacagcgcctacacccaggccctgatgcagcagcaggcggccctggta

SEQ ID NO: 471477 - DNA, 120 bp, Artificial Sequence
  ENSG00000159409_12 (sequence is synthesized)
gcggctcacagtgcctacctcagccccatggccaccatggctgccgtgcagatgcagcacatggctgccatcaatgccaatggcctcatcgccacccccatcaccccatcctcaggaacc

SEQ ID NO: 471478 - DNA, 120 bp, Artificial Sequence
  ENSG00000159409_13 (sequence is synthesized)
agcacccctcctgccatcgctgccacgcctgtctctgccattccggctgccctgggcgtcaacggctacagcccggtgcccacccagcccactgggcagcctgcccctgatgctctgtat

SEQ ID NO: 471479 - DNA, 120 bp, Artificial Sequence
  ENSG00000159409_14 (sequence is synthesized)
cccaacggggttcacccctacccagcccagagccccgcggcccccgtggaccccctgcagcaggcctacgcggggatgcagcactacacagcagcctacccagcagcctacagcctggtt

SEQ ID NO: 471480 - DNA, 120 bp, Artificial Sequence
  ENSG00000159409_15 (sequence is synthesized)
cagcagcctacccagcagcctacagcctggttgcacctgcgttcccgcagcctccagccctggtcgcccagcagcccccaccaccacctcaacagcagcagcagcagcagcagcagcaac

SEQ ID NO: 471481 - DNA, 120 bp, Artificial Sequence
  ENSG00000159409_16 (sequence is synthesized)
tgcaacatcttcatctaccacctgccccaggagttcactgactcagagatcctccagatgtttgtcccctttggccacgtcatctcagccaaagtctttgttgaccgagccaccaatcaa

SEQ ID NO: 471482 - DNA, 120 bp, Artificial Sequence
  ENSG00000159409_17 (sequence is synthesized)
agcaaatgttttggctttgtgagtttcgacaatccggccagtgcccaggctgccatccaggccatgaatggcttccagatcggcatgaagcgcctcaaagtccagctaaagcggcctaag

SEQ ID NO: 471483 - DNA, 120 bp, Artificial Sequence
  ENSG00000159409_18 (sequence is synthesized)
gatgccaaccggccctactgagggcccccaggtctggagatcccagaggaaggggcgcctcacaccctcttcccacgactggccccggccctctccgcacacctgccctgggccttgact

SEQ ID NO: 471484 - DNA, 120 bp, Artificial Sequence
  ENSG00000159409_19 (sequence is synthesized)
gggttctggggcaaacgctgcttcgtggcccccgggggcacaagacaccggcccctcccacccccctgcctctctgaagggccatggctatgcttccctggctccaagggcccatttcct

SEQ ID NO: 471485 - DNA, 120 bp, Artificial Sequence
  ENSG00000159409_20 (sequence is synthesized)
cctagatgcccttttggcctttgtgagggagcgaggaacaggctcgaaggctccggggtatctgccttctgctgggctcctgtgacaggccttctgtacccagcgtttgtacttgcctcc

SEQ ID NO: 471486 - DNA, 120 bp, Artificial Sequence
  ENSG00000159409_21 (sequence is synthesized)
cccaacagtgggcctgttctacccgtgcaggccccaggagagccgcaggggcctgccacacactcccagctcaccctcaccccagcctcttccccacattaggggtttcttggaagctgg

SEQ ID NO: 471487 - DNA, 120 bp, Artificial Sequence
  ENSG00000159409_22 (sequence is synthesized)
ctctcactcccctccaccctcagctagaggtaggatatccctgattcctgggctcccagccctaaaactcactgcctcccccaagggccccctctaaggagggtgtgggggagccctgag

SEQ ID NO: 471488 - DNA, 120 bp, Artificial Sequence
  ENSG00000159409_23 (sequence is synthesized)
ctgaacccctaaaaatgtttacagtctctgctggttccctctgtgtaaataccactaccacccgtgcgttatccagcccgcccggcctggcccggacgctgccatctctctttctgggag

SEQ ID NO: 471489 - DNA, 120 bp, Artificial Sequence
  ENSG00000159409_24 (sequence is synthesized)
tttagacaatgttgcccttggatttttttctctctcttaatttctccctttgctttggggggtaattgggtattgggaggaggggtgtggggaggggtcaaggggtttattacctgatca

SEQ ID NO: 471490 - DNA, 120 bp, Artificial Sequence
  ENSG00000159409_25 (sequence is synthesized)
ttttctttaggaagaggttttagggaaaagaaaatggggtgggggtgggggtggtaaggggagaccggggagtcagtttcagacagttctctatgcttaacttatttatttattgcattt

SEQ ID NO: 471491 - DNA, 120 bp, Artificial Sequence
  ENSG00000159409_26 (sequence is synthesized)
tacttttaaagagttggtcttttctgtctaaataaagaaaaaagtttaaaagcatcaaataagagtcttggaaggttgagggtaggggattgttccctacccacactgggaagggggagg

SEQ ID NO: 471492 - DNA, 120 bp, Artificial Sequence
  ENSG00000159409_27 (sequence is synthesized)
gaggtagagaatgaggtttgagagagaaaatcccatcagggaaggccgggcccttgcttttgagcagcatccaggccttgttcatggcttcatgatcctgtccttcagcccttctttggg

SEQ ID NO: 471493 - DNA, 120 bp, Artificial Sequence
  ENSG00000159409_28 (sequence is synthesized)
gcttaattctggaatgtcctgcagagttcggcacaaggagatctcccctgtcgggggctctcccctgtatccagctctgtccctctgaaggctgaggacttgcagtctcacatctggacc

SEQ ID NO: 471494 - DNA, 120 bp, Artificial Sequence
  ENSG00000159409_29 (sequence is synthesized)
tccatttctgcacagaggccagtgtggatactgggagccagttgtgacaccaccatttactaaccactgctccatatgtgattctgttccaagtccttattgtgcatttcctcattttac

SEQ ID NO: 471495 - DNA, 120 bp, Artificial Sequence
  ENSG00000159409_30 (sequence is synthesized)
ctcctaacaaccttgtgaggcaggctatagtttatttattttacttatttactttgaaacagggtctcactctgtcactcaagctggagtgtgatggtgagatcatagctcactgcaacc

SEQ ID NO: 471496 - DNA, 120 bp, Artificial Sequence
  ENSG00000159409_31 (sequence is synthesized)
ttgaactcctggttcaggggatcctcctgtctcagcctcccaagtagttaggactataagcggctgcaccaccacgcccagctcatttttaaaaatggtgtttttttttgtagacagggt

SEQ ID NO: 471497 - DNA, 80 bp, Artificial Sequence
  ENSG00000159409_32 (sequence is synthesized)
ggtgtttttttttgccctgggctcaagcaaacctcctgccttggcctcccgaagtgctcagattacaggcatgagccacc

SEQ ID NO: 471498 - DNA, 120 bp, Artificial Sequence
  ENSG00000159409_33 (sequence is synthesized)
ttttatagatgggaaaaggaggcttggaaggttaactaacttccctggagtcacaaagccagtaaggcatggctgtaggagttgaacccagtttgtcagattccaaagcccatgatgttc

SEQ ID NO: 471499 - DNA, 120 bp, Artificial Sequence
  ENSG00000159409_34 (sequence is synthesized)
tcttcttacctgttctttgacctgaggcaaagatcccaagaagtagcaagcaggcttaggagtgagtccttcaggtagagggtggactgcataagccctaagtccctccacttcctagat

SEQ ID NO: 471500 - DNA, 120 bp, Artificial Sequence
  ENSG00000159409_35 (sequence is synthesized)
tcttctctgtgagctgctttagggcaggctcaggatcacacaggtgtcttctttgacttcatagaacatgtgcttctaggctgctaccccaccctctgtcttcatcattagtaagcagca

SEQ ID NO: 471501 - DNA, 120 bp, Artificial Sequence
  ENSG00000159409_36 (sequence is synthesized)
ccactaggtacctactcaagccaaaacttggattacaccctttctctcatgtctcctccccaatccaactgcaaagccctaccaagtctacctctaaagtattcagctgatttacttact

SEQ ID NO: 471502 - DNA, 120 bp, Artificial Sequence
  ENSG00000159409_37 (sequence is synthesized)
catgtctctgcatctccacagccatcaacactgtccacgtcacattgctctcatctgtctccatgtttcttttcctgctctcctacaatttgttctcccaagaagccaagagtcatcttt

SEQ ID NO: 471503 - DNA, 120 bp, Artificial Sequence
  ENSG00000159409_38 (sequence is synthesized)
taaaagttaattcaccaacatttactacccagtctgctttgtccagcactgtatcctggtcaccctaaacagtgccccaaatattagacattgcttagtaaataagaaatgactgttgga

SEQ ID NO: 471504 - DNA, 120 bp, Artificial Sequence
  ENSG00000159409_39 (sequence is synthesized)
catctatactggacttcccatccatatctacatcatcatagggccaatgctaaaactttctcccataaagtcctgactcatatatttctattttctagtcacatagacagaaaacctcaa

SEQ ID NO: 471505 - DNA, 120 bp, Artificial Sequence
  ENSG00000159409_40 (sequence is synthesized)
gagtttttagtactttcgcataaactcaatggtattaaatcatttaagatttcacttccacaaactttctcatatcatttccctcttttcaattatcactgcctacacttattaactgag

SEQ ID NO: 471506 - DNA, 120 bp, Artificial Sequence
  ENSG00000159409_41 (sequence is synthesized)
taatcatagcaatttcctaattggtccttctgtctatgttctgaagcatcaatctttctaaactgcagctaataaaaaacaaaacttctctgctgctgttttttgttgtttttcatagaa

SEQ ID NO: 471507 - DNA, 120 bp, Artificial Sequence
  ENSG00000159409_42 (sequence is synthesized)
cacctcagcctggcattcaaggctcttcgaagccttactttccacttcattcctacacatacccaaatagaactattcattgttctctaggcaagtttggtcccttttctcccatgtctt

SEQ ID NO: 471508 - DNA, 120 bp, Artificial Sequence
  ENSG00000159409_43 (sequence is synthesized)
ttcattcccagttactacagtgtctggcacataacggctcaataaatgtttgttgaatgccttcttgttgaaatccttctcacactaaaacagttcaccttaaacactactttcttcatg

SEQ ID NO: 471509 - DNA, 120 bp, Artificial Sequence
  ENSG00000159409_44 (sequence is synthesized)
aaaatcttaacggccctcatccacaggtctttctccttccttttctagtccttatggcacttaaacctttcactgctgtgtatcatggccatgcgtaagtgtctcattcttctgtgagcc

SEQ ID NO: 471510 - DNA, 120 bp, Artificial Sequence
  ENSG00000159409_45 (sequence is synthesized)
tgtaagctggcagaaatgtttctttctttgcttttgtgtctgttgcagtatctcaaacaatctccccaccccacccccaacagcagatacctaataaatgtttgactttaaccactgtaa

SEQ ID NO: 471511 - DNA, 120 bp, Artificial Sequence
  ENSG00000159409_46 (sequence is synthesized)
ccgggctgcacaagggtgaggggtcgggcaggctgaagaggcttcggggtgggctgggaggctgggggaagttaagccaggctggaggggtggagcggctgggaagggctgatgtggaag

SEQ ID NO: 471512 - DNA, 120 bp, Artificial Sequence
  ENSG00000159409_47 (sequence is synthesized)
gagaagagttcaggcctgaggaaagtggatggaggagctgaaaaagaactcagctagagtgatcaggaaaccccggtgaaggactaaggagggcctcttttggctgaagagttgtcaaga

SEQ ID NO: 471513 - DNA, 120 bp, Artificial Sequence
  ENSG00000159409_48 (sequence is synthesized)
cgagtccctcagagctgggatgagcaccctctgcaactataccccattccccaaccatcagcccctacagccattggaccctaagggtagcagaagtagtgttaggagctccagggaagg

SEQ ID NO: 471514 - DNA, 120 bp, Artificial Sequence
  ENSG00000159409_49 (sequence is synthesized)
tttgtgctgcccgagtgccttccccctggggtcaaggggtataggggggcagaaagagaggcagacacacctctagaggtcagaaggaagtctgggcctttgtggggtctccctcagtct

SEQ ID NO: 471515 - DNA, 120 bp, Artificial Sequence
  ENSG00000159409_50 (sequence is synthesized)
agagtcctccttggggcttcttcagagtggcctctgttgcgcccactttgtagaattgaggcaattcttattaaataactccttggtcgggctctctctcaggccccgggtcctatgtgc

SEQ ID NO: 471516 - DNA, 120 bp, Artificial Sequence
  ENSG00000159409_51 (sequence is synthesized)
aggcccccttctcccactcaggacagcagcacccatccctggccaagtcatcaggagcccaacctgagcctggagctgtgcccatgagcctctccctctacatcctctctctctgtgcct

SEQ ID NO: 471517 - DNA, 120 bp, Artificial Sequence
  ENSG00000159409_52 (sequence is synthesized)
ctgatcccctcaggccttcatcctgaacagtattaggccctgtcccttccttcccatcagaaacttagagggcctggggcttgcccctctagtctctctgcagggcctggcctgggaggg

SEQ ID NO: 471518 - DNA, 120 bp, Artificial Sequence
  ENSG00000159409_53 (sequence is synthesized)
atggcctgggcaaggccgggcaagggagctaagcatggtaggggtagggaggggcacagggcattgctcagggaagcctcggggtctgggagggactcaggggtcagagaggcctgcttc

SEQ ID NO: 471519 - DNA, 120 bp, Artificial Sequence
  ENSG00000159423_0 (sequence is synthesized)
tccagcgaacagccccgcttctaacccgagatgctgctgccggcgcccgcgctccgccgcgccctgctgtcccgcccctggaccggggccggcctgcggtggaagcacacctcctccctg

SEQ ID NO: 471520 - DNA, 120 bp, Artificial Sequence
  ENSG00000159423_1 (sequence is synthesized)
aaggtggccaacgagcccgtcttagccttcacgcagggcagccctgagcgagatgccctgcaaaaggccttgaaggacctgaagggccggatggaagccatcccatgcgtggtgggggat

SEQ ID NO: 471521 - DNA, 120 bp, Artificial Sequence
  ENSG00000159423_2 (sequence is synthesized)
gaggaggtgtggacgtcggacgtgcagtaccaagtgtcgccttttaaccatggacataaggtggccaagttctgttatgcagacaagagcctgctcaacaaagccattgaggctgccctg

SEQ ID NO: 471522 - DNA, 120 bp, Artificial Sequence
  ENSG00000159423_3 (sequence is synthesized)
gctgcccggaaagagtgggacctgaagcctattgcagaccgggcccagatcttcctgaaggcggcagacatgctgagtgggccgcgcagggctgagatcctcgccaagaccatggtggga

SEQ ID NO: 471523 - DNA, 120 bp, Artificial Sequence
  ENSG00000159423_4 (sequence is synthesized)
cagggtaagaccgtgatccaagcggagattgacgctgcagcggaactcatcgacttcttccggttcaatgccaagtatgcggtggagctggaggggcagcagcccatcagcgtgcccccg

SEQ ID NO: 471524 - DNA, 120 bp, Artificial Sequence
  ENSG00000159423_5 (sequence is synthesized)
agcaccaacagcacggtgtaccggggtctggagggcttcgtggcggccatctcgccctttaacttcactgcaatcggcggcaacctggcgggggcaccggccctgatgggcaacgtggtc

SEQ ID NO: 471525 - DNA, 120 bp, Artificial Sequence
  ENSG00000159423_6 (sequence is synthesized)
ctatggaagcccagtgacactgccatgctggccagctatgctgtctaccgcatccttcgggaggctggcctgccccccaacatcatccagtttgtgccagctgatgggcccctatttggg

SEQ ID NO: 471526 - DNA, 120 bp, Artificial Sequence
  ENSG00000159423_7 (sequence is synthesized)
gacactgtcaccagctcagagcacctctgtggcatcaacttcacaggcagtgtgcccaccttcaaacacctgtggaagcaggtggcccagaacctggaccggttccacaccttcccacgc

SEQ ID NO: 471527 - DNA, 120 bp, Artificial Sequence
  ENSG00000159423_8 (sequence is synthesized)
tcagccttcgagtacggtggccagaagtgttccgcgtgctcgcgtctctacgtgccgcactcgctgtggccgcagatcaaagggcggctgctggaggagcacagtcggatcaaagtgggc

SEQ ID NO: 471528 - DNA, 120 bp, Artificial Sequence
  ENSG00000159423_9 (sequence is synthesized)
gaccctgcagaggattttgggaccttcttctctgcagtgattgatgccaagtcctttgcccgtatcaagaagtggctggagcacgcacgctcctcacccagcctcaccatcctggccggg

SEQ ID NO: 471529 - DNA, 120 bp, Artificial Sequence
  ENSG00000159423_10 (sequence is synthesized)
ggcaagtgtgatgactccgtgggctactttgtggagccctgcatcgtggagagcaaggaccctcaggagcccatcatgaaggaggagatcttcgggcctgtactgtctgtgtacgtctac

SEQ ID NO: 471530 - DNA, 120 bp, Artificial Sequence
  ENSG00000159423_11 (sequence is synthesized)
ccggatgacaagtacaaggagacgctgcagctggttgacagcaccaccagctatggcctcacgggggcagtgttctcccaggataaggacgtcgtgcaggaggccacaaaggtgctgagg

SEQ ID NO: 471531 - DNA, 120 bp, Artificial Sequence
  ENSG00000159423_12 (sequence is synthesized)
aatgctgccggcaacttctacatcaacgacaagtccactggctcgatagtgggccagcagccctttgggggggcccgagcctctggaaccaatgacaagccagggggcccacactacatc

SEQ ID NO: 471532 - DNA, 120 bp, Artificial Sequence
  ENSG00000159423_13 (sequence is synthesized)
ctgcgctggacgtcgccgcaggtcatcaaggagacacataagcccctgggggactggagctacgcgtacatgcagtgagcccctctcgggctccaccgtccagctgtctgtccgtccaga

SEQ ID NO: 471533 - DNA, 120 bp, Artificial Sequence
  ENSG00000159423_14 (sequence is synthesized)
tgcctcctgcttggattctgagtggtcagagatctgtaaagcatgactttcaaggatggttcttaggggactgtgaaagtgttgggtcttcctccaggatgcctgcatgggaccccaccc

SEQ ID NO: 471534 - DNA, 120 bp, Artificial Sequence
  ENSG00000159423_15 (sequence is synthesized)
ggagctggtgtggccattccccaagtgccactggcccatggatgggggtgggtgctggtgccagctgggctgggtgtgggttctgtgtccttccaggatatgtgtcatttcccatgaggg

SEQ ID NO: 471535 - DNA, 120 bp, Artificial Sequence
  ENSG00000159423_16 (sequence is synthesized)
gccggggcaggtggctgggtgggggcacaggctggagtattcttagttctactggttctacactgtgaggtggcaatgggatttgctcagatgccacccaataaaatgcctgttacttaa

SEQ ID NO: 471536 - DNA, 120 bp, Artificial Sequence
  ENSG00000159423_17 (sequence is synthesized)
cacagctgcctttctataatccgggcttgactcccttcttaccactgtattctggcctctcccatgcctcaggctctggtttgagatcgtgctggggaggaacatggccactacccctta

SEQ ID NO: 471537 - DNA, 120 bp, Artificial Sequence
  ENSG00000159423_18 (sequence is synthesized)
tcccatcggccatgtgggaggtatgaccctggtgcctggcaggttctccctctgccctccactgggcccagtggctcagggacctggggaaaggagatggagcagctcttgggatccttt

SEQ ID NO: 471538 - DNA, 120 bp, Artificial Sequence
  ENSG00000159423_19 (sequence is synthesized)
ggggaaaaggaggccattctgggccccttggcaaacctcaccactcacagaggctcctggccttgatccctgcccctccaggtgtccagggtaaagtgtaactcagactgacctgtgggg

SEQ ID NO: 471539 - DNA, 120 bp, Artificial Sequence
  ENSG00000159423_20 (sequence is synthesized)
cacagggggcaccagctggccttgccctctctggtctgggctgtctaccttcctcactgtatctttgcccagacccacctgggccagtaggcccctgtccccagccacacaccttagatg

SEQ ID NO: 471540 - DNA, 120 bp, Artificial Sequence
  ENSG00000159423_21 (sequence is synthesized)
ctggcatgccttactccaggtgcctgtgtttggccgaggcctgtgtgattcccggtctgcaccacatggcggggttggggggccgctggaggccacctgccaaggcgtgggatgggatgg

SEQ ID NO: 471541 - DNA, 120 bp, Artificial Sequence
  ENSG00000159423_22 (sequence is synthesized)
tcctgccggtttaggccgtgattctggaaaaccttggatgggccttcgtcctatgtcagccttccctttgatcctcaggccctacctgtagagacctccactcctagagccagtctcagg

SEQ ID NO: 471542 - DNA, 120 bp, Artificial Sequence
  ENSG00000159423_23 (sequence is synthesized)
gtctgggatttccctgcaggagctcagccaccactgtgccatggtgacacaggccaaggcagacattggccctcccttctcccagcccccagaggcctggccttgggttcgtcagcatgg

SEQ ID NO: 471543 - DNA, 120 bp, Artificial Sequence
  ENSG00000159423_24 (sequence is synthesized)
gccgaggacgttgcctgtagaatcctcctctgcctgggagtggctctgtgtggaccagtccctcactggcccattctttttttgacgcagccaatctgtgaccacgattcctcccacaga

SEQ ID NO: 471544 - DNA, 120 bp, Artificial Sequence
  ENSG00000159423_25 (sequence is synthesized)
cctgatgcttcgagagggagttgtgactctgcctctttgccagatgacaaaactgagacacacagccgtgacttacttggcaagactgagtgactagtaaataaatgatggagcagagaa

SEQ ID NO: 471545 - DNA, 120 bp, Artificial Sequence
  ENSG00000159423_26 (sequence is synthesized)
gtgccaaggggatctcagctggttcacattctgagactgtgttctggaatgtgctgccctttcagcttagagagaggagtttgggtctttttgggataaagcctgccttgtgggagaaga

SEQ ID NO: 471546 - DNA, 120 bp, Artificial Sequence
  ENSG00000159423_27 (sequence is synthesized)
aatgcccccgttatggcactagaaatattttttattagccgaagctaaatatagtgggactttggctgatcccgagctcggaggacagccggggtgatccgtttccccccgaggatcgag

SEQ ID NO: 471547 - DNA, 120 bp, Artificial Sequence
  ENSG00000159433_0 (sequence is synthesized)
agaggcgcgtggggcgggcggggctgggttggggctgtgtctgggcttagggcgggggcctgggatgctgccgctgagctgacccgctggacttgggttgtggcagacggatggcgaacg

SEQ ID NO: 471548 - DNA, 120 bp, Artificial Sequence
  ENSG00000159433_1 (sequence is synthesized)
tgcaggtcgccgtgcgggtccggccgctcagcaagagggagaccaaagaagggggaagaattattgtggaagttgatggcaaagtggcaaaaatcaggaatttaaaggtggacaatcgac

SEQ ID NO: 471549 - DNA, 120 bp, Artificial Sequence
  ENSG00000159433_2 (sequence is synthesized)
cagatggctttggggactcccgggagaaggttatggcatttggctttgattactgctactggtcagtcaacccagaggatccccagtatgcatctcaagatgtggttttccaggatttag

SEQ ID NO: 471550 - DNA, 120 bp, Artificial Sequence
  ENSG00000159433_3 (sequence is synthesized)
ggatggaagtactgtctggagttgccaaaggctataacatatgcctttttgcttatggacagacaggctctgggaagacatataccatgctggggaccccagcctctgttgggttgacac

SEQ ID NO: 471551 - DNA, 120 bp, Artificial Sequence
  ENSG00000159433_4 (sequence is synthesized)
cacggatatgtgagggtctcttcgtcagggagaaagactgtgcctcactgccttcctcctgtaggataaaagtaagttttctagaaatctataatgaacgggtgcgggatctgttgaagc

SEQ ID NO: 471552 - DNA, 120 bp, Artificial Sequence
  ENSG00000159433_5 (sequence is synthesized)
aatctggtcaaaaaaagtcctataccctgcgggtcagggagcatccagagatggggccctatgtacaaggtttatctcaacatgtagttaccaattataagcaagtaatccaactcttgg

SEQ ID NO: 471553 - DNA, 120 bp, Artificial Sequence
  ENSG00000159433_6 (sequence is synthesized)
aggagggaattgcaaacagaatcacagcagccacccatgttcatgaggccagcagcagatcccacgccattttcacgatccactacacgcaggcaatcctggagaacaacctcccttctg

SEQ ID NO: 471554 - DNA, 120 bp, Artificial Sequence
  ENSG00000159433_7 (sequence is synthesized)
aaatggctagcaagatcaaccttgtggacctagcaggcagcgaaagagcagatcccagttactgtaaggaccgcattgctgaaggagccaatatcaacaagtcccttgtgactctaggaa

SEQ ID NO: 471555 - DNA, 120 bp, Artificial Sequence
  ENSG00000159433_8 (sequence is synthesized)
ttgtcatctccaccttagcccagaactcccaagttttcagcagctgccagagcctcaacagctcagtcagcaatggtggtgacagtgggatccttagctctccttctgggaccagcagtg

SEQ ID NO: 471556 - DNA, 120 bp, Artificial Sequence
  ENSG00000159433_9 (sequence is synthesized)
gaggggcaccctcccgaaggcagtcttatatcccataccgagactctgtgttgacctggctgctgaaggacagccttggaggcaactctaaaaccatcatggttgccacggtgtctcctg

SEQ ID NO: 471557 - DNA, 120 bp, Artificial Sequence
  ENSG00000159433_10 (sequence is synthesized)
cacacactagctacagtgagaccatgagcacactgagatatgcatccagtgccaaaaacattatcaacaagccacgagtaaatgaggatgcaaacttaaaactgattagagaactcagag

SEQ ID NO: 471558 - DNA, 120 bp, Artificial Sequence
  ENSG00000159433_11 (sequence is synthesized)
aagagattgaaagactgaaagccctgctgctgagctttgaactgagaaacttcagttcattgagtgatgaaaacctgaaggagctggttctccaaaatgaattgaagatagaccagctga

SEQ ID NO: 471559 - DNA, 120 bp, Artificial Sequence
  ENSG00000159433_12 (sequence is synthesized)
ctaaagactggacccagaagtggaatgattggcaggccctcatggagcattacagtgtggacatcaacaggaggagggctggggtggtcatcgactccagcctgccacacttgatggcct

SEQ ID NO: 471560 - DNA, 120 bp, Artificial Sequence
  ENSG00000159433_13 (sequence is synthesized)
tggaggatgatgtgctcagcacaggtgttgtgctctatcatctcaaggaagggacaacaaaaataggaaggattgactcagaccaggaacaggacattgtcctgcagggtcagtggattg

SEQ ID NO: 471561 - DNA, 120 bp, Artificial Sequence
  ENSG00000159433_14 (sequence is synthesized)
agagagaccactgcactatcaccagtgcctgtggtgtagttgttctacgacctgcccgtggggcccgctgtacagtcaatggccgggaggtcactgcctcctgccgtctgactcaaggag

SEQ ID NO: 471562 - DNA, 120 bp, Artificial Sequence
  ENSG00000159433_15 (sequence is synthesized)
ctgtcataaccctggggaaggcacagaagttccgattcaaccacccagcagaggctgctgtcctgcggcagcgaaggcaggttggagaggctgctgctggtcgtggctcgttggagtggc

SEQ ID NO: 471563 - DNA, 120 bp, Artificial Sequence
  ENSG00000159433_16 (sequence is synthesized)
tggatttggatggagatctcgctgcctcccggctgggtctctcccctttgctttggaaggaaaggagagcgcttgaagagcaatgtgacgaggaccatcagacaccgagggatggagaga

SEQ ID NO: 471564 - DNA, 120 bp, Artificial Sequence
  ENSG00000159433_17 (sequence is synthesized)
catcccacagggcccagattcagcagcagcagagctacgtagaggatttgaggcatcaaatcctagcagaagagattcgagctgcgaaggaactggaatttgaccaagcttggattagcc

SEQ ID NO: 471565 - DNA, 120 bp, Artificial Sequence
  ENSG00000159433_18 (sequence is synthesized)
agcagattaaagaaaaccagcagtgtctgctcagagaagagacctggctggccagcttgcaacagcagcagcaagaagaccaggtagcagagaaagaacttgaggcatctgtggcacttg

SEQ ID NO: 471566 - DNA, 120 bp, Artificial Sequence
  ENSG00000159433_19 (sequence is synthesized)
atgcttggcttcagacagatcctgagattcagccatccccatttgtccaaagtcagaaaagggtggtgcacctgcagctcctgcggagacacactcttcgggcagcagagcggaatgtcc

SEQ ID NO: 471567 - DNA, 120 bp, Artificial Sequence
  ENSG00000159433_20 (sequence is synthesized)
ggcggaaaaaggtctcattccagctagagagaatcatcaaaaagcagaggctgctggaggcccagaagagactggagaagctcacgacattgtgctggctccaggatgacagcacccagg

SEQ ID NO: 471568 - DNA, 120 bp, Artificial Sequence
  ENSG00000159433_21 (sequence is synthesized)
agcccccataccaggtcctcagccctgatgccacagtcccacggcctccatgtagaagcaaattgacgagttgcagttctttgagcccccaaagactctgcagcaagcacatgccccagc

SEQ ID NO: 471569 - DNA, 120 bp, Artificial Sequence
  ENSG00000159433_22 (sequence is synthesized)
tacacagcattttcctaagttgggatccctctaccacattgccacctaggcctgaccctacacaccaaacatcagagaaaacatcatcagaagagcatttgccacaggctgcttcctacc

SEQ ID NO: 471570 - DNA, 120 bp, Artificial Sequence
  ENSG00000159433_23 (sequence is synthesized)
ctgcaaggacagggtgcctccgcaagaacggcctgcattcctcaggtcatgggcagccctgcacagccagagcagccttggccaggaagggagcctcagctccagacgcttgcctcacca

SEQ ID NO: 471571 - DNA, 120 bp, Artificial Sequence
  ENSG00000159433_24 (sequence is synthesized)
tgagtcccaactctgttggcatccaggaaatggagatgggggttaagcagccccatcagatggtgagccagggcttagcatctctgaggaaatcagctaacaaactaaagccaaggcatg

SEQ ID NO: 471572 - DNA, 120 bp, Artificial Sequence
  ENSG00000159433_25 (sequence is synthesized)
agccaaagatcttcacctctactacccagaccagaggggcgaagggactagcagaccctagccacacacaagctgggtggcgaaaagaagggaaccttgggacccacaaggctgctaagg

SEQ ID NO: 471573 - DNA, 120 bp, Artificial Sequence
  ENSG00000159433_26 (sequence is synthesized)
gagccagttgcaattccttgtatcctcatggacccaggcagactgctgggcacggaaaggcagtcaagactttttggacagaatacaaaccaccttctccaagcagggcatcaaaaaggc

SEQ ID NO: 471574 - DNA, 120 bp, Artificial Sequence
  ENSG00000159433_27 (sequence is synthesized)
atcagagggttctggcaactagggtcagaaatattaccaaaaagtcctctcacttgcctcttggcagtcctttgaagagacaacaaaatacaagggacccagacaccatggtcccactca

SEQ ID NO: 471575 - DNA, 120 bp, Artificial Sequence
  ENSG00000159433_28 (sequence is synthesized)
cagatttcagcccagtaatggatcattcaagagaaaaagacaatgatttatctgacacagatagcaactactcattggattctctctcatgtgtctatgccaaagccctgatagagccac

SEQ ID NO: 471576 - DNA, 120 bp, Artificial Sequence
  ENSG00000159433_29 (sequence is synthesized)
tgaagccagaggagaggaaatgggatttcccagagccagagaactctgaaagtgatgacagccaactatctgaggactcactggctgagaagaggtaccaaagccccaaaaacaggctag

SEQ ID NO: 471577 - DNA, 120 bp, Artificial Sequence
  ENSG00000159433_30 (sequence is synthesized)
ggggcaatcgtcccaccaacaaccgtggccaacccaggaccagaactagagcttctgtgaggggcttcactgcagcctcagacagtgacctacttgctcaaactcataggagcttctcct

SEQ ID NO: 471578 - DNA, 120 bp, Artificial Sequence
  ENSG00000159433_31 (sequence is synthesized)
tggatagcctgattgatgcagaggaagaactgggggaagatcagcaagaagaacctttccctggttcagctgacgagatacccacagagactttttggcacctggaggactctagtctgc

SEQ ID NO: 471579 - DNA, 120 bp, Artificial Sequence
  ENSG00000159433_32 (sequence is synthesized)
ctgtaatggaccaagaggcaatatgcaggcttggtcccatcaactacagaacagcagctaggctggatgccgtcctgccaatgagcagttcgttttaccttgatcctcagttccaacccc

SEQ ID NO: 471580 - DNA, 120 bp, Artificial Sequence
  ENSG00000159433_33 (sequence is synthesized)
attgtgagctccaaccccattgtgagctccaaccccattgtgagctccagccccattgtgagcaggctgaatcacaggtagagccaagctactctgaacaagccgactctctccaaggca

SEQ ID NO: 471581 - DNA, 120 bp, Artificial Sequence
  ENSG00000159433_34 (sequence is synthesized)
tgcagctttcaagagagagcccactgatgtccatggattcctggttttcctgtgactctaagatcaaccccagcagccccccaggaatagtgggttctttatgtccaagtcctgatatgc

SEQ ID NO: 471582 - DNA, 120 bp, Artificial Sequence
  ENSG00000159433_35 (sequence is synthesized)
aggaatttcactcctgtaagggggagaggcctggatactggccaaatactgaggaactaaagccatcagatgcagaaacggttctgccatatagctccaaactgcaccaaggcagtactg

SEQ ID NO: 471583 - DNA, 120 bp, Artificial Sequence
  ENSG00000159433_36 (sequence is synthesized)
agctcctctgcagtgcaagagatgagcacacagcctctgctgctgatacgtctaggctgtctctctggggaattcaaaggcttattcaaccaggagctgatggcacctttcagggcagat

SEQ ID NO: 471584 - DNA, 120 bp, Artificial Sequence
  ENSG00000159433_37 (sequence is synthesized)
gtatccctgacatgacccagcagggcagctctgaagcatcccacaattctagcgtatcaaacgtgctggctgcctctgccaccaccttgactcatgtaggcagcacccatgaaagggatt

SEQ ID NO: 471585 - DNA, 120 bp, Artificial Sequence
  ENSG00000159433_38 (sequence is synthesized)
ggtctgcccttcagcagaagtacctccttgaactctcttgtcctgttttggaggccataggagcacccaagccagcttacccctaccttgaggaagactctggttccctggcccaagctt

SEQ ID NO: 471586 - DNA, 120 bp, Artificial Sequence
  ENSG00000159433_39 (sequence is synthesized)
ctagcaaaggaggagatactctattgccagttggccctagggtatctagcaatctgaatctcaacaactttccagtccatctgtccagaatcaggcgtttgagggcagagaaagaacagg

SEQ ID NO: 471587 - DNA, 120 bp, Artificial Sequence
  ENSG00000159433_40 (sequence is synthesized)
acagtttaaatgccaaattagaaggtgtttcagatttctttagcactagtgagaaagaggcgagttatgacgaaacttattcggcagacttagaatcattgtctgcttctcgatctacaa

SEQ ID NO: 471588 - DNA, 120 bp, Artificial Sequence
  ENSG00000159433_41 (sequence is synthesized)
atgcacaggtctttgcaacagagaacgcgataccagattccatgacagaagcatgtgaagtcaagcagaacaacttggaagaatgccttcagagttgcaggaaacctggactgatgactt

SEQ ID NO: 471589 - DNA, 120 bp, Artificial Sequence
  ENSG00000159433_42 (sequence is synthesized)
cctctgatgaggattttttccagaagaacgcttgtcacagtaatgtcactacagccaccaaagcagaccattggtcccaaggctgggctcctctcaggaaaaatagtgcagtccagccag

SEQ ID NO: 471590 - DNA, 120 bp, Artificial Sequence
  ENSG00000159433_43 (sequence is synthesized)
ggcaattaagtcccgacagccactacccactagaggaagagaagacagattgccaggagagctctaaggaagcagttagaagacacataaatgtttcctttgcccttccttcaggtccag

SEQ ID NO: 471591 - DNA, 120 bp, Artificial Sequence
  ENSG00000159433_44 (sequence is synthesized)
agctataccttcactctgctccctggaatccattgtcatcttccctgcagcccccactcttggaaacattctatgtgaccaaaagcagggatgccctgacagaaactgccttagagattc

SEQ ID NO: 471592 - DNA, 120 bp, Artificial Sequence
  ENSG00000159433_45 (sequence is synthesized)
cagcttgcagagaagtaagggtaccctccccaccccccagggaagcctggggctttggtcacaaccaccaagctctccaaggtgcttatttgaagaataatttgccagtgctgttacaaa

SEQ ID NO: 471593 - DNA, 120 bp, Artificial Sequence
  ENSG00000159433_46 (sequence is synthesized)
accagaattctaagattgcctcatctcagcaggtcacagctgagataccagttgatctgaataccagggaagtcatcagagaatcaggtaaatgccctggaaatattacagaagaaagcc

SEQ ID NO: 471594 - DNA, 120 bp, Artificial Sequence
  ENSG00000159433_47 (sequence is synthesized)
atgattcagtttattcttctgttactcagaacagacattttctcccctctaccagcacaaaagtatgtgaatttgaaaaccaagttgtaattttaaataaaaaacacagttttccagcac

SEQ ID NO: 471595 - DNA, 120 bp, Artificial Sequence
  ENSG00000159433_48 (sequence is synthesized)
ttgagggaggagaggtcactgctcagtcctgttgcggtgcttcctcagacagcactgagtctgggaagtctctcctctttcgtgaatctgaggcacgagaggaagaagagctggatcaga

SEQ ID NO: 471596 - DNA, 120 bp, Artificial Sequence
  ENSG00000159433_49 (sequence is synthesized)
atacggttctgaggcagaccatcaatgtaagccttgagaaagacatgccaggggaaagtgctgtttctttgaaatccagatcagtagatcgtagagtaagcagcccagtgatggtggccc

SEQ ID NO: 471597 - DNA, 120 bp, Artificial Sequence
  ENSG00000159433_50 (sequence is synthesized)
agggtggtggcccaacccctaagtgggaagggaaaaatgaaactgggcttcttgaaaaaggtcttcgtcccaaagatagctcagaagagtttaagcttccaggtacaaagcctgcatatg

SEQ ID NO: 471598 - DNA, 120 bp, Artificial Sequence
  ENSG00000159433_51 (sequence is synthesized)
aaaggttccagttagttgcatgccctcaggaaagaaaccccagtgaatgcaagtcacaagaaatgttaaatcccaacagagaaccttctggaaagaaacagaataaaagagttaataata

SEQ ID NO: 471599 - DNA, 120 bp, Artificial Sequence
  ENSG00000159433_52 (sequence is synthesized)
ctgatgaaatggctaggctaattaggagtgtaatgcagctggaaaatggcatcttagaaattgaatctaagcagaataagcaggttcatgcttcccacacaccaggaaccgataaggagt

SEQ ID NO: 471600 - DNA, 120 bp, Artificial Sequence
  ENSG00000159433_53 (sequence is synthesized)
tggtgttccaggaccagaaggagcaggagaagactgaccatgcctttaggccagacagctctggaaaccctttgccctctaaggatcagccatcttctccaagacagacagatgatactg

SEQ ID NO: 471601 - DNA, 120 bp, Artificial Sequence
  ENSG00000159433_54 (sequence is synthesized)
tctttagggatagtgaagctggagcgatggaggttaacagcattgggaaccatccccaggtccagaaaatcaccccaaaccccttcaggtcaagggaaggtgtacgagagagtgaacctg

SEQ ID NO: 471602 - DNA, 120 bp, Artificial Sequence
  ENSG00000159433_55 (sequence is synthesized)
tgagagagcacacccacccagctggatcggacagacctgccagggatatttgtgattctttagggaaacacacaacttgcagagagttcaccaacacttctcttcacccacagagaatga

SEQ ID NO: 471603 - DNA, 120 bp, Artificial Sequence
  ENSG00000159433_56 (sequence is synthesized)
aagcattggctagagctctgccattgcaacccaggctagagaggtcttctaagaataatggccagtttgtaaaagcatcagcaagtctcaaagggcagccttggggcttaggaagtcttg

SEQ ID NO: 471604 - DNA, 120 bp, Artificial Sequence
  ENSG00000159433_57 (sequence is synthesized)
aggaattggagactgtgaaaggttttcaggaaagccaagtagctgaacacgtaagtagttccaaccaagaagagccaaaagctcaaggtaaagttgaagaaatgcctatgcaaaggggag

SEQ ID NO: 471605 - DNA, 120 bp, Artificial Sequence
  ENSG00000159433_58 (sequence is synthesized)
gcagccttcaggaagaaaataaagtgactcagaaatttcctagtctcagccagctttgtagggacacgtttttcaggcaggaaactgtcagcccattactaagccggacagaattctgta

SEQ ID NO: 471606 - DNA, 120 bp, Artificial Sequence
  ENSG00000159433_59 (sequence is synthesized)
cagctcctcttcaccaagacctgagtaataccttgcccttgaattctccaaggtggccaagaaggtgtcttcatgtacctgttgctctaggcatctcttcacttgactgtgtgctggatc

SEQ ID NO: 471607 - DNA, 120 bp, Artificial Sequence
  ENSG00000159433_60 (sequence is synthesized)
tcacaatgttgaaaattcataacagtcccttggtaactggagtagagcatcaggaccagagtacggagaccagaagccacagccccgaaggaaatgttagagggcgttcctctgaggcac

SEQ ID NO: 471608 - DNA, 120 bp, Artificial Sequence
  ENSG00000159433_61 (sequence is synthesized)
acactgcctggtgtgggtctgtgcgatccatggccatgggatctcatagtcaatctggtgtaccagagagcattcctctggggacagaggacaggatctcagcaagcaccagcccccaag

SEQ ID NO: 471609 - DNA, 120 bp, Artificial Sequence
  ENSG00000159433_62 (sequence is synthesized)
accatggaaaggacctcagaatcaccttgctgggtttcagtaccagtgaagattttgcttctgaagccgaggtggctgtacaaaaagaaataagagtcagttcactgaacaaggtctcta

SEQ ID NO: 471610 - DNA, 120 bp, Artificial Sequence
  ENSG00000159433_63 (sequence is synthesized)
gccagcctgaaaagagggtcagcttctccttggaagaggatagtgaccaagccagcaagccaaggcagaaggcagagaaggagactgaggacgtcggactgaccagcggtgtttccttag

SEQ ID NO: 471611 - DNA, 120 bp, Artificial Sequence
  ENSG00000159433_64 (sequence is synthesized)
cacctgtttccctgccgagggtgcccagtccagagcctaggctgttggagccctctgaccatgcatccatgtgcctggccatcttggaggagatcagacaggcaaaggcccagagaaagc

SEQ ID NO: 471612 - DNA, 120 bp, Artificial Sequence
  ENSG00000159433_65 (sequence is synthesized)
ttactgtgaaactttactagaacccgaatgttcttcaagggttgctggcaggcctcagtgtaaacaaatagaccagtcatcatcagaccagaccaggaatgagggtgaagcaccgggatt

SEQ ID NO: 471613 - DNA, 120 bp, Artificial Sequence
  ENSG00000159433_66 (sequence is synthesized)
tcatgtggcatctctatctgctgaagcagggcagatagatctgttacctgatgagaggaaagtccaggccacatctctgtctgcagacagctttgaatctctgcccaatacggaaactga

SEQ ID NO: 471614 - DNA, 120 bp, Artificial Sequence
  ENSG00000159433_67 (sequence is synthesized)
cagagagccatgggatcctgtgcaggctttctcccatgctgctcctgctcaagacaggaaacgtcgtactggagaactgaggcagttcgcgggagcaagtgaaccatttatatgtcactc

SEQ ID NO: 471615 - DNA, 120 bp, Artificial Sequence
  ENSG00000159433_68 (sequence is synthesized)
tagttcttctgaaatcatagagaaaaagaaagatgcaaccagaacaccttcctcagctgatcctttggccccagacagtcctcgttcttcagcacctgtggaggaggtcaggagggtagt

SEQ ID NO: 471616 - DNA, 120 bp, Artificial Sequence
  ENSG00000159433_69 (sequence is synthesized)
atcaaagaaggtagtggctgccttaccttctcaggccccttatgatgatcctagagtgactctgcatgagctaagtcagtcagttccgcaggagactgcagagggcataccccctggcag

SEQ ID NO: 471617 - DNA, 120 bp, Artificial Sequence
  ENSG00000159433_70 (sequence is synthesized)
tcaggacagcagcccagagcatcaggaacccagaactctagacaccacatatggagaagtttcagataatttgttagtgactgcacagggagaaaaaacagcccattttgaaagtcagtc

SEQ ID NO: 471618 - DNA, 120 bp, Artificial Sequence
  ENSG00000159433_71 (sequence is synthesized)
tgtgacctgtgatgttcagaattctacaagtgcctcagggcctaagcaagaccatgtccaatgccctgaggcttctactggctttgaagaaggtagggcaagtcccaaacaagataccat

SEQ ID NO: 471619 - DNA, 120 bp, Artificial Sequence
  ENSG00000159433_72 (sequence is synthesized)
tctgcctggagctctgacaagggttgcactggaagctcccacacagcagtgtgtgcagtgtaaggagagtgttgggtctgggttgacagaagtctgcagggctggcagcaaacattccag

SEQ ID NO: 471620 - DNA, 120 bp, Artificial Sequence
  ENSG00000159433_73 (sequence is synthesized)
gccaattccactgccagatcaaagaccaagcgcaaatcctgggggaattggggaggaagccccatgtagacacccaagggaagctttagatggccctgtcttctcaaggaaccctgaagg

SEQ ID NO: 471621 - DNA, 120 bp, Artificial Sequence
  ENSG00000159433_74 (sequence is synthesized)
cagcaggactctcagcccgtctagagggaaagagagcagaactcttccttgccgacagccatgcagttctcaacctgttgctactcatgcttattcctcccattcctctactttactgtg

SEQ ID NO: 471622 - DNA, 120 bp, Artificial Sequence
  ENSG00000159433_75 (sequence is synthesized)
ttttagagatggtgacctagggaaggagcctttcaaggctgccccacatactatccacccaccctgtgtagtaccttccagggcctatgaaatggatgagacaggagagatctctagggg

SEQ ID NO: 471623 - DNA, 120 bp, Artificial Sequence
  ENSG00000159433_76 (sequence is synthesized)
acctgatgtgcacttgacacatggccttgagcccaaagatgttaacagggaatttaggctaacagagagcagcacttgtgagccttctactgtggctgctgtcctatctcgagctcaagg

SEQ ID NO: 471624 - DNA, 120 bp, Artificial Sequence
  ENSG00000159433_77 (sequence is synthesized)
ctgcagatccccttctgctcctgacgtgaggacaggttccttcagccactcagctactgatggaagcgtggggttaataggggttcctgagaaaaaggttgctgagaagcaagcaagcac

SEQ ID NO: 471625 - DNA, 120 bp, Artificial Sequence
  ENSG00000159433_78 (sequence is synthesized)
agaacttgaggctgcctctttccctgcaggcatgtactctgagcccctgaggcagtttagggacagctctgtaggtgaccagaatgcacaggtgtgtcaaaccaatccagaaccacctgc

SEQ ID NO: 471626 - DNA, 120 bp, Artificial Sequence
  ENSG00000159433_79 (sequence is synthesized)
aacaactcagggaccacacaccctggatttaagtgaagggtctgctgagagcaagttggtggtagagccacagcatgaatgtttagaaaataccactagatgttttttggaaaagccaca

SEQ ID NO: 471627 - DNA, 120 bp, Artificial Sequence
  ENSG00000159433_80 (sequence is synthesized)
attttccactgagttgagggatcacaatcgcttggattcccaagccaagtttgtagcaaggttaaaacatacctgcagcccccaggaagacagtccctggcaggaagaagagcagcacag

SEQ ID NO: 471628 - DNA, 120 bp, Artificial Sequence
  ENSG00000159433_81 (sequence is synthesized)
agaccaggcttcaggtggtggagaaggcttcgcccagggtgtgaatccccttcctgatgaagatggcttagatggctgtcagattttagatgctgggagagaggaggtggctgtggccaa

SEQ ID NO: 471629 - DNA, 120 bp, Artificial Sequence
  ENSG00000159433_82 (sequence is synthesized)
gcctcctgtgtccaagattttatcacagggcttcaaagacccagccactgtgtccttgaggcaaaatgaaacaccgcagcctgctgctcagaggagtggccacctctacactggcagaga

SEQ ID NO: 471630 - DNA, 120 bp, Artificial Sequence
  ENSG00000159433_83 (sequence is synthesized)
gcagccagcacccaaccacaggggctcacttcctgtgactacaatcttctctggccccaaacactccaggtcctcccccacaccacagttctcagttgtcggctcttctcgttctcttca

SEQ ID NO: 471631 - DNA, 120 bp, Artificial Sequence
  ENSG00000159433_84 (sequence is synthesized)
ggagctgaacttgagtgtggagcctccttcccctacagacgaagatacacaggggcctaacagattgtggaacccacatctcaggggctattcctcaggaaagtcagtggcaagaacatc

SEQ ID NO: 471632 - DNA, 120 bp, Artificial Sequence
  ENSG00000159433_85 (sequence is synthesized)
tctgcaggctgaggacagcaatcagaaagcctcatctcgcttggatgatgggactaccgatcacaggcacctgaagcctgccacccctccttatccaatgccttccactctctcacacat

SEQ ID NO: 471633 - DNA, 120 bp, Artificial Sequence
  ENSG00000159433_86 (sequence is synthesized)
gccaacccctgatttcacgaccagctggatgtctggtactttggaacaagcccaacagggaaagcgagagaaactgggtgtccaggttaggccagaaaattggtgctctcagatggacaa

SEQ ID NO: 471634 - DNA, 120 bp, Artificial Sequence
  ENSG00000159433_87 (sequence is synthesized)
aggaatgctgcactttggctccagtgacatcagtccctatgcgctgccgtggcgtccggaggagcctgcacgtatcagctggaagcagtatatgtctggcagtgcagtcgatgtttcctg

SEQ ID NO: 471635 - DNA, 120 bp, Artificial Sequence
  ENSG00000159433_88 (sequence is synthesized)
cagccagaagccccaggggctgacactatcaaatgtggcccggtgctccagcatggacaatggcctagaagaccagaactcccctttccactcccacctcagcacttacgccaatatttg

SEQ ID NO: 471636 - DNA, 120 bp, Artificial Sequence
  ENSG00000159433_89 (sequence is synthesized)
tgatctgtcaaccacacacagcagcactgagaatgcccagggttcaaatgaggcctgggaagtattccgagggagttcttcaattgccttaggagacccccacatcccgacgagccctga

SEQ ID NO: 471637 - DNA, 120 bp, Artificial Sequence
  ENSG00000159433_90 (sequence is synthesized)
aggagtagcccccacttcgggtcatgacagaaggcctcagttcaggggcccttctggtgaagcagactgtctgaggagtaagccccccttggccaaaggaagtgctgcaggtccagtgga

SEQ ID NO: 471638 - DNA, 120 bp, Artificial Sequence
  ENSG00000159433_91 (sequence is synthesized)
tgagattatgctgctgtatccatcagaggcaggctgccctgtgggacagaccaggacgaacacattcgaacagggcacacagaccctcggcagcaggcgccactggagcagcactgacat

SEQ ID NO: 471639 - DNA, 120 bp, Artificial Sequence
  ENSG00000159433_92 (sequence is synthesized)
ctcctttgctcagcctgaagccagtgcagtatcagcctttgatctggcctcatggaccagcatgcacaatctgtctctccacctctcacagctcctgcacagtacctcagagctgcttgg

SEQ ID NO: 471640 - DNA, 120 bp, Artificial Sequence
  ENSG00000159433_93 (sequence is synthesized)
gagtctctcccagccagatgtggccagaagggagcagaacaccaagagggacatcccagataaagccccacaggccctgatgatggatggctctactcagaccactgtggatgagggcag

SEQ ID NO: 471641 - DNA, 120 bp, Artificial Sequence
  ENSG00000159433_94 (sequence is synthesized)
ccagactgacctcaccttacccaccctgtgcctccagacttcagaggctgaacctcagggagccaatgtgatccttgaagggctaggctcagatacctcgactgtgtctcaagaagaggg

SEQ ID NO: 471642 - DNA, 120 bp, Artificial Sequence
  ENSG00000159433_95 (sequence is synthesized)
agatgtgccaggggtacctcagaagagagaggcagaggaaacagcacagaaaatggctcagctcctctatcttcaggaagaaagcactccctacaagccccagagcccttcaataccctc

SEQ ID NO: 471643 - DNA, 120 bp, Artificial Sequence
  ENSG00000159433_96 (sequence is synthesized)
atcccacttgaggtttcagaaagcccccgttgggcagcatcttccttctgtgagcccctcagtttctgatgctttcctgcctcccagctcccagccagaggagtcatattgcttagttgt

SEQ ID NO: 471644 - DNA, 120 bp, Artificial Sequence
  ENSG00000159433_97 (sequence is synthesized)
cagcagtcccagtcccagctcccctcattccccagggctctttcccagtacttccgagtatcctggggactccagggtccagaagaagctgggccccacaagtgctttgttcgtggacag

SEQ ID NO: 471645 - DNA, 120 bp, Artificial Sequence
  ENSG00000159433_98 (sequence is synthesized)
ggcctcctccccaatcctcactcttagtgccagcacccaagagccgggtctttccccaggctctttgaccctctcagccccttcaactcaccctgttgaaggccaccagaagcttgactc

SEQ ID NO: 471646 - DNA, 120 bp, Artificial Sequence
  ENSG00000159433_99 (sequence is synthesized)
cagcccagaccctgttgatgccccaaggactccaatggataattattcccaaaccactgacgagttaggtggctcccagagaggtagaagttccttacaaaggagtaatgggagatcctt

SEQ ID NO: 471647 - DNA, 120 bp, Artificial Sequence
  ENSG00000159433_100 (sequence is synthesized)
ccttgagttgcactccccacacagcccacagcagagtccaaaactccaatttagtttcttagggcagcaccctcagcagcttcagcccaggacaactatcggggtccaaagcagactgct

SEQ ID NO: 471648 - DNA, 120 bp, Artificial Sequence
  ENSG00000159433_101 (sequence is synthesized)
gccaccaccactgaggcacaggagccaaaggctgggcaacagctttgtgcctgagaaggtggcttccccggagcattgcccactgagcggtagggagccaagtcagtggcagagcaggac

SEQ ID NO: 471649 - DNA, 120 bp, Artificial Sequence
  ENSG00000159433_102 (sequence is synthesized)
agaaaatggaggtgagagttcagcatctccaggggaaccacaacgcactctggaccgaccttcttcatggggaggcctccagcacctcagcccctgccctgtctctgagttgactgatac

SEQ ID NO: 471650 - DNA, 120 bp, Artificial Sequence
  ENSG00000159433_103 (sequence is synthesized)
tgcagggctccgaggttctgccttgggcctccctcaggcctgccaacctgaggagttactgtgcttcagttgccagatgtgcatggcccctgagcaccagcaccacagtctgagggacct

SEQ ID NO: 471651 - DNA, 120 bp, Artificial Sequence
  ENSG00000159433_104 (sequence is synthesized)
cccggtgcataacaaatttagtaactggtgtggggttcagaagggctcacctggggggttggacatgactgaggaggagctgggggccagcggtgatctcagctctgaaaagcaggaaca

SEQ ID NO: 471652 - DNA, 120 bp, Artificial Sequence
  ENSG00000159433_105 (sequence is synthesized)
gagtcccccacaacctcctaatgaccacagccaggattctgagtggtccaagagggagcagatccccctgcaagttggggcccagaacctctcactcagcgtggaactcacagaagcgaa

SEQ ID NO: 471653 - DNA, 120 bp, Artificial Sequence
  ENSG00000159433_106 (sequence is synthesized)
actgcaccatggctttggggaggccgatgccctgctccaggtgctgcagagtgggacaggggaggcgcttgctgctgatgaacctgtgacatccacctggaaggagctctatgcacggca

SEQ ID NO: 471654 - DNA, 120 bp, Artificial Sequence
  ENSG00000159433_107 (sequence is synthesized)
aaaaaaggccattgagaccctcaggagagagcgggctgagcgacttgggaacttctgccggacgcgaagccttagccctcagaaacaactgagcctcctgcccaacaaagatctcttcat

SEQ ID NO: 471655 - DNA, 120 bp, Artificial Sequence
  ENSG00000159433_108 (sequence is synthesized)
ctgggatcttgacttgcccagcagacgccgagaatacctgcagcaactgaggaaggatgttgtggagaccaccaggagcccagagtcagtgtcaaggtcagctcacacaccctctgacat

SEQ ID NO: 471656 - DNA, 120 bp, Artificial Sequence
  ENSG00000159433_109 (sequence is synthesized)
agagttgatgctgcaagactaccagcaggcccatgaggaggccaaggtggagattgcccgggcccgagaccaactgcgggagcggactgaacaagagaagctgagaatccaccagaagat

SEQ ID NO: 471657 - DNA, 120 bp, Artificial Sequence
  ENSG00000159433_110 (sequence is synthesized)
catttcccagctattgaaggaagaggataaactacataccttggccaattccagctccctgtgcaccagctctaatggaagcctctcgtctggcatgacctctggctataatagcagccc

SEQ ID NO: 471658 - DNA, 120 bp, Artificial Sequence
  ENSG00000159433_111 (sequence is synthesized)
agccttgtcaggccagctccagttcccagagaatatggggcatacaaacttgcctgattccagggatgtatggataggggatgagcgaggaggccattctgcagtgaggaagaactctgc

SEQ ID NO: 471659 - DNA, 120 bp, Artificial Sequence
  ENSG00000159433_112 (sequence is synthesized)
ctacagccacagagcctccctgggcagttgctgctgttcaccatccagtctgtccagcttggggacctgcttttcctcctcctaccaggatttggccaagcatgtcgtggacacttctat

SEQ ID NO: 471660 - DNA, 120 bp, Artificial Sequence
  ENSG00000159433_113 (sequence is synthesized)
ggctgatgtaatggctgcttgttcggataatttgcacaacctcttcagctgccaggcaactgctggctggaactatcagggtgaggagcaggcggtgcagctttactacaaggtgttttc

SEQ ID NO: 471661 - DNA, 120 bp, Artificial Sequence
  ENSG00000159433_114 (sequence is synthesized)
tcccactcggcatggcttcctgggggcaggtgtggtgtcccagccgctgtctcgtgtgtgggcggctgtcagtgaccccactgtgtggcccctgtattacaagcccatccagacagcaag

SEQ ID NO: 471662 - DNA, 120 bp, Artificial Sequence
  ENSG00000159433_115 (sequence is synthesized)
gctgcatcagcgagtgaccaacagcatcagcctggtgtacttggtgtgcaacaccaccctgtgcgcactgaagcagccacgggatttctgttgtgtctgcgtggaagccaaagagggtca

SEQ ID NO: 471663 - DNA, 120 bp, Artificial Sequence
  ENSG00000159433_116 (sequence is synthesized)
cctgtctgtcatggcagcccagtctgtgtatgatacatccatgccaagacccagcagaaaaatggttcgcggggagatcctgcccagtgcctggatcttgcagcccatcactgtggaagg

SEQ ID NO: 471664 - DNA, 120 bp, Artificial Sequence
  ENSG00000159433_117 (sequence is synthesized)
gaaggaagtcaccagagtcatctacttggcccaggtggaacttggtgctccaggcttcccacctcagctcctgagctctttcatcaaacggcagccactggttatagccagactggcttc

SEQ ID NO: 471665 - DNA, 120 bp, Artificial Sequence
  ENSG00000159433_118 (sequence is synthesized)
cttccttggtaggtagcatctcaccgtcaagatggtgctgctgagatgcaggcccaggctgctcaagagagacactgtggcagctccttgttactttccataccacagtgcaggaaaagc

SEQ ID NO: 471666 - DNA, 120 bp, Artificial Sequence
  ENSG00000159433_119 (sequence is synthesized)
tgatgctacctgctgtggccgattggggcagacagcactggcccagggatgctagcaaagcccagtcagtacttggtcacagctggcaccagtgcagagcaaacggcctgagctcctggc

SEQ ID NO: 471667 - DNA, 120 bp, Artificial Sequence
  ENSG00000159433_120 (sequence is synthesized)
ccagactatccagagtgaatgcagctccgctcaccttttggatttctcacctttctttcctgtttctgggactctgcggcagacaggacacttaaggaccaggactgggcacagccagca

SEQ ID NO: 471668 - DNA, 120 bp, Artificial Sequence
  ENSG00000159433_121 (sequence is synthesized)
gagccggggactgcagtgctttggcaaggtgcttccgcaggctggtagggaagcaggcagccactggccaagactctgttctgaatctacctcctctagcattcagctctactgtgtgat

SEQ ID NO: 471669 - DNA, 120 bp, Artificial Sequence
  ENSG00000159433_122 (sequence is synthesized)
gggacgttaaaaataccaaaacagaaagagggtttaaaaaacagctgcacaaaccagaacaccgattcagaatcttttctccctcttgagtttttgcaaaatactttattattgattttt

SEQ ID NO: 471670 - DNA, 120 bp, Artificial Sequence
  ENSG00000159433_123 (sequence is synthesized)
gctttttttctccctttccctcccaggagaagacatttgggtcttggcctgaggcaggggtgttgagcgatgatgctctgatatggagctgtcactctagagctcggtcagatggaagac

SEQ ID NO: 471671 - DNA, 120 bp, Artificial Sequence
  ENSG00000159433_124 (sequence is synthesized)
actatagaaccaggttggacagatttggggtcagggttggaggctgagttcttttgaggactggttggagtggcagccagatggtggctgctgacaaggcaagaggaatttcagagatta

SEQ ID NO: 471672 - DNA, 120 bp, Artificial Sequence
  ENSG00000159433_125 (sequence is synthesized)
aacattgtcctttgaggaagggagaggaggtgaatgaactcccagaggaggtgagtggcttgttgggaggaagctcagttccagaacttacctcagtgcacttgggaggggtggagtcct

SEQ ID NO: 471673 - DNA, 120 bp, Artificial Sequence
  ENSG00000159433_126 (sequence is synthesized)
gagcattccatgatttctgccctggccccacctatcctaggatggggtgggatggagagtgggttcagttttcttgtactttagcctggctgaacatgaactttgtgtttacctggaagt

SEQ ID NO: 471674 - DNA, 120 bp, Artificial Sequence
  ENSG00000159433_127 (sequence is synthesized)
ggtaggggtgggagagattctcatctttagttctggtgcccaaaatctttggtagatggagggaactggggattcagaagatgtggtaaaggtctatttctgtagtgtggcagagatgtg

SEQ ID NO: 471675 - DNA, 120 bp, Artificial Sequence
  ENSG00000159433_128 (sequence is synthesized)
tttttctaaagtgtttgcagggcatttttccctcttacctcagattaagttatttatatattgttgattgaaggttttttaaaattgcttttaaacttctatttctcgggtaaatttttt

SEQ ID NO: 471676 - DNA, 120 bp, Artificial Sequence
  ENSG00000159433_129 (sequence is synthesized)
ggtgacatgatatatttaacaccctatttatatactcctacctcttttcatataaatctcttactaagactactgaccaaaaaagaacattttaaaattaaaagtcctctgtgtacttta

SEQ ID NO: 471677 - DNA, 120 bp, Artificial Sequence
  ENSG00000159433_130 (sequence is synthesized)
attcaagatgtatgctgtgagatgcagaattaatatgtatcttatcaactcagcaaaattatcagttatcgagggcatgactttgtctcacagagcagtgccgtacacatagtatgtact

SEQ ID NO: 471678 - DNA, 120 bp, Artificial Sequence
  ENSG00000159433_131 (sequence is synthesized)
atatggtttttgtccttcattctgttgacatgatgtatcacattcattgatttgcatatgttgagtcatccttgcatccctaggataaattccacttggtcacgataaatgatctttttt

SEQ ID NO: 471679 - DNA, 81 bp, Artificial Sequence
  ENSG00000159433_132 (sequence is synthesized)
cattgatttgcatatgttgagtcatccttgcatccctaggataaattccacttggtcacgataaactgagtctcactctgt

SEQ ID NO: 471680 - DNA, 120 bp, Artificial Sequence
  ENSG00000159433_133 (sequence is synthesized)
cagagaaagggccatggccccagtgagtgggatgccagagctggatctgtgttgggactggtactctatctcagagaaagggccatgaccacctaggtttctcatttcatcaggggtctt

SEQ ID NO: 471681 - DNA, 120 bp, Artificial Sequence
  ENSG00000159433_134 (sequence is synthesized)
tctcaaggtgaggaggctagtgtatccttttcttcctaagccactggttccagaggtcaaggagggaaaagctaggagcagcagccatgttactgtgaattgaaatcaagacagatgcta

SEQ ID NO: 471682 - DNA, 120 bp, Artificial Sequence
  ENSG00000159433_135 (sequence is synthesized)
cagagctgccttcaggtttgctctcaggaaacgtctacctgacaaattgtgatctgttttgccttcgtatgtatagagcagaagactggaaatcagaacaattgtttttcaactgctgct

SEQ ID NO: 471683 - DNA, 120 bp, Artificial Sequence
  ENSG00000159433_136 (sequence is synthesized)
actgttgttcttatgtaacttacttttgttctctttgccttaatttcctcattttaaagtaagaatgatgcttatcatattccttttctggcttagtgaagcataggggtatagtcatgg

SEQ ID NO: 471684 - DNA, 120 bp, Artificial Sequence
  ENSG00000159433_137 (sequence is synthesized)
gtatagtcatggagagtgaaaccctaacctcaagataaccattagtgctcctaaactctacaaatacagactgctcaaaggtggctttcaggttgggcgcggtggctcacacctgtaatc

SEQ ID NO: 471685 - DNA, 120 bp, Artificial Sequence
  ENSG00000159433_138 (sequence is synthesized)
gttcggaaaataactcatgttttcattttgtcgcaatagggtagacacagggttccttttgataaggttaccttctggtttggggcatgaaaagttgatatttgtccttggttttagagt

SEQ ID NO: 471686 - DNA, 120 bp, Artificial Sequence
  ENSG00000159433_139 (sequence is synthesized)
agaatgctgtcctactaccatcatttctcaaagaggggagtctaaaaaattatgtgactcaaacattccatatcgtgagtctaaagtctttaggaatacctaaaatatcctattgtatgc

SEQ ID NO: 471687 - DNA, 120 bp, Artificial Sequence
  ENSG00000159433_140 (sequence is synthesized)
agaagggattaggaaatatgatacttaagtctgtgttctccaaccattgttttgttttaatatatttgcttcataattccttctttcttccattttcttttttcatcttttaagcccaga

SEQ ID NO: 471688 - DNA, 120 bp, Artificial Sequence
  ENSG00000159433_141 (sequence is synthesized)
agggaattcagaagatttgaaagttttcttctgacacttccccacttcattcaaccccaaataaacagtacacttcccacttctccatcactacatttacctggaaaaggagacagagaa

SEQ ID NO: 471689 - DNA, 120 bp, Artificial Sequence
  ENSG00000159433_142 (sequence is synthesized)
agtaggtaaaggaagcttaaaacatagggagggtccaaagagctagagtagtgtgatggtgggggaagaggggatgacaggcatccatctagaaaaagattaaagttaaagcttccaaac

SEQ ID NO: 471690 - DNA, 120 bp, Artificial Sequence
  ENSG00000159433_143 (sequence is synthesized)
agcacctggcccacctggctctgtgtcacctggaggccagtcctcatttctgattgaagtggttttgagagttagtgacctatggtagatagagtcttttatcttgttctcatcaatgtg

SEQ ID NO: 471691 - DNA, 120 bp, Artificial Sequence
  ENSG00000159433_144 (sequence is synthesized)
ttctactgtgggaggacagttccttttgacagcagaacgtacttcccatgctcaaaatccctgtgctcactgaaaatctagttttcattctcataattatccccagctgacgtttaaaaa

SEQ ID NO: 471692 - DNA, 120 bp, Artificial Sequence
  ENSG00000159433_145 (sequence is synthesized)
gaacaaagagtttctggggagtatgtaatgctgctgttatccctggagaaattggactccttcttagtgctgcagggcatatggaagtgagatgttagcaaagctcatcggtgttcttag

SEQ ID NO: 471693 - DNA, 120 bp, Artificial Sequence
  ENSG00000159433_146 (sequence is synthesized)
gataagccctttgggaagttgtcagagactgagctgctcagacagaaaatttaaagtagcttattttctggtatacagggtataaattttcttagtgaaagtgcctgaggcagaagtggc

SEQ ID NO: 471694 - DNA, 120 bp, Artificial Sequence
  ENSG00000159433_147 (sequence is synthesized)
tggcaacttttaccttagcaagaaaactaaacaccaaatggctgtatagatcctcccattagtcagaagcacagagagaggttggaggtcaggaagagaccagattgattaaaatggtca

SEQ ID NO: 471695 - DNA, 120 bp, Artificial Sequence
  ENSG00000159433_148 (sequence is synthesized)
ctatttgagtagaactgatctgatatatggattggatgtagagtgaatagatgaagctagaaatcaagtagtagagcttagggtcgcagcagagggttaaaggacatgactattagattg

SEQ ID NO: 471696 - DNA, 84 bp, Artificial Sequence
  ENSG00000159433_149 (sequence is synthesized)
gggtcgcagcagagggttaaaggacatgactattagattgaatcgtagacatggagatgaatgatgaactcatctgaagatagg

SEQ ID NO: 471697 - DNA, 120 bp, Artificial Sequence
  ENSG00000159433_150 (sequence is synthesized)
cctgggctcaagtgattctcctgcctaagcctcctgcatagctgggattacaggcatgcaccactgttgggaataatgcttaaaattttaaggaaattgaacacttaaaggatttttagt

SEQ ID NO: 471698 - DNA, 120 bp, Artificial Sequence
  ENSG00000159433_151 (sequence is synthesized)
gaaattgaacacttaaaggatttttagtaaagcaattttacttttgtgcagaggggtgcttctccttggccagttgccatgagaacacatctgaacaaaggggcatgagagcctttattt

SEQ ID NO: 471699 - DNA, 120 bp, Artificial Sequence
  ENSG00000159433_152 (sequence is synthesized)
ctgacacaagtcctgctcctgtaccctttctccttccccattggctggggttgggtcgtacattctaaactaatcctggttggctaaacatctgaacctttttggataaggtgggcacat

SEQ ID NO: 471700 - DNA, 120 bp, Artificial Sequence
  ENSG00000159433_153 (sequence is synthesized)
aagggagaggggggaaggggtgtctgcaatgagctagagagctagtttttttttaaataaggaaaggaatgtgagctggtactgataacgctggtactgtggcatgtctgggcatgtaat

SEQ ID NO: 471701 - DNA, 120 bp, Artificial Sequence
  ENSG00000159433_154 (sequence is synthesized)
aaaggcagaaaggaagaaaaaagagaaaaaggaaaaaaaggggtggggggttactatgaattgaagaataaaggattgatcaggctatttgaagagaaacttcatcatatcccacaacca

SEQ ID NO: 471702 - DNA, 78 bp, Artificial Sequence
  ENSG00000159433_155 (sequence is synthesized)
agtgatccacccatcttggtctcctaaagttctgggactacaggcatgagccctcacgccccgctggactgctgattt

SEQ ID NO: 471703 - DNA, 120 bp, Artificial Sequence
  ENSG00000159433_156 (sequence is synthesized)
tacaggcatgagccctcacgccccgctggactgctgattttcattgcttagtcagtgcatagtgaggattttactcccttccttgtgcatttctggtggacctgggtgatgagattttaa

SEQ ID NO: 471704 - DNA, 120 bp, Artificial Sequence
  ENSG00000159433_157 (sequence is synthesized)
tctacttctaatcctggcatttctgcattttatgtactttccccaccttttgtttgtttagctattgacttaggtaatagtactaacagtaatggcccaagattctgtttgttgttgttt

SEQ ID NO: 471705 - DNA, 120 bp, Artificial Sequence
  ENSG00000159433_158 (sequence is synthesized)
gtttgttggtttgtttgtcactaagttggttacagacctagaactagtccctggcaactcggaagctgttttttcctgggtcaccttggggaagtgtcttgggtgggaagaggacagagg

SEQ ID NO: 471706 - DNA, 120 bp, Artificial Sequence
  ENSG00000159433_159 (sequence is synthesized)
gaaggacagggagagcccaggttactgatatgctggacttcatcctcataattgcctttgtgccactaacactccctacataaagaggcagggtgggcagtgaacacatatgccagccag

SEQ ID NO: 471707 - DNA, 120 bp, Artificial Sequence
  ENSG00000159433_160 (sequence is synthesized)
ctcagtcctcatctgacatgccatcaccttttgttggtaatttctaccctgcaaatctagaagttatgatgtgccatagcctttatctttttggaagggctgtccctgaacgcacatgaa

SEQ ID NO: 471708 - DNA, 120 bp, Artificial Sequence
  ENSG00000159433_161 (sequence is synthesized)
aagtttcgaccgttttcccttgaactgccctctgattctgtttgacagtgtttgtggaggctagcatctgttgacttctgtggtcctcagtgcctgagcaggaaaggctggctctggctg

SEQ ID NO: 471709 - DNA, 120 bp, Artificial Sequence
  ENSG00000159433_162 (sequence is synthesized)
tttgtgtgtttgcagagaggagggacagaggggcatgcagtgcggacagagcctcattcattatagctaggattcttccttctcgcaagctattttggaggagtgtcagggacctccctg

SEQ ID NO: 471710 - DNA, 120 bp, Artificial Sequence
  ENSG00000159433_163 (sequence is synthesized)
ttttggaggagtgtcagggacctccctgctctggctgctgacagtgaagcctagtggggaattctctggtctccctaaaaacattactgggccagatgtggtggctcatgcctataatcc

SEQ ID NO: 471711 - DNA, 120 bp, Artificial Sequence
  ENSG00000159445_0 (sequence is synthesized)
ggtagagtgcgccgtccagggctagagcaagcgcggccccgcggcccggagccatgctgaggagctgcgccgcgcgcctccgcacgctgggggctctgtgcctgccgccagtaggccggc

SEQ ID NO: 471712 - DNA, 120 bp, Artificial Sequence
  ENSG00000159445_1 (sequence is synthesized)
gcctgccgggaagcgagccgcgacccgagctgaggtcattttcttctgaggaagtcattcttaaggactgttctgtccccaaccccagctggaacaaggacctaagactgctctttgacc

SEQ ID NO: 471713 - DNA, 120 bp, Artificial Sequence
  ENSG00000159445_2 (sequence is synthesized)
agtttatgaagaaatgtgaagacggctcctggaaacgtttgccttcatataaacgtacacctactgaatggattcaagacttcaaaacccattttcttgacccaaagcttatgaaagaag

SEQ ID NO: 471714 - DNA, 120 bp, Artificial Sequence
  ENSG00000159445_3 (sequence is synthesized)
aacaaatgtcacaggcccagctcttcaccagaagctttgatgatggcctgggctttgaatacgtgatgttctacaatgacattgagaaaaggatggtttgcttatttcaaggaggccctt

SEQ ID NO: 471715 - DNA, 120 bp, Artificial Sequence
  ENSG00000159445_4 (sequence is synthesized)
acctggaaggaccacctggattcattcatggaggtgccattgcaaccatgattgatgctactgttggtatgtgtgcaatgatggctgggggaatcgtcatgactgccaatctcaacatca

SEQ ID NO: 471716 - DNA, 120 bp, Artificial Sequence
  ENSG00000159445_5 (sequence is synthesized)
attataaaagacctatccctctttgttctgttgttatgataaatagccaacttgataaagttgaaggaaggaaattttttgtttcctgtaatgttcagagtgttgatgagaagaccctat

SEQ ID NO: 471717 - DNA, 120 bp, Artificial Sequence
  ENSG00000159445_6 (sequence is synthesized)
actcagaggcgacaagcttatttataaagctgaatcctgctaaaagtctgacataaagagctgctggtgaactccatctcattctcgcccctccagaagaagcagttgtcccccaaatac

SEQ ID NO: 471718 - DNA, 120 bp, Artificial Sequence
  ENSG00000159445_7 (sequence is synthesized)
tctgctccctcactgctgaatccctgtagggagaagcctgccaacagtgaccttccgaaacagccttctgaatacaaagaggattcagtttccatcttctcaactttttaacacagaaat

SEQ ID NO: 471719 - DNA, 74 bp, Artificial Sequence
  ENSG00000159445_8 (sequence is synthesized)
ggattcagtttccatcttctcaactttttaacacagaaatacttcctgcgagcatatcgacaactctcgggcca

SEQ ID NO: 471720 - DNA, 71 bp, Artificial Sequence
  ENSG00000159445_9 (sequence is synthesized)
gcggattgcctgagctcaggagttcaagatcagtctgggcaacacgagtacgcctgtagtcccagctactc

SEQ ID NO: 471721 - DNA, 90 bp, Artificial Sequence
  ENSG00000159445_10 (sequence is synthesized)
caacctgggcaacagaacaagaacaaaaactcttgtctccttaggatatgttacctgctccactgcagactagagaaataaatgtgtatt

SEQ ID NO: 471722 - DNA, 120 bp, Artificial Sequence
  ENSG00000159445_11 (sequence is synthesized)
ttacctgctccactgcagactagagaaataaatgtgtattgaaccttttactgcaaacttgaaaatgctagaaaaccaagcatgaagaataaatacatggtgggaaacacacaggcatgt

SEQ ID NO: 471723 - DNA, 120 bp, Artificial Sequence
  ENSG00000159445_12 (sequence is synthesized)
gcatatgcatatacattgtaagttagtaagttagaaagctagctttgttgtatctgaacacatgaatcttttttggtcagtgtaggaagcacagccagatcctataggaatgaatacctc

SEQ ID NO: 471724 - DNA, 120 bp, Artificial Sequence
  ENSG00000159445_13 (sequence is synthesized)
aaatctgttgtctgagattctagagattaaaccactgtgccatttttaacccaggctgtactgttgtttcttaccaacagcataggttttcatcactggaaggagcctgtgttcatttcc

SEQ ID NO: 471725 - DNA, 120 bp, Artificial Sequence
  ENSG00000159445_14 (sequence is synthesized)
tagggctgctgtagcaaagtagtacaaactggattgtttaaaccaacaaaaactcattgtctctcagttctggaggccagaagttcaaaatcaaggtgttgaccaaggccattctcctga

SEQ ID NO: 471726 - DNA, 120 bp, Artificial Sequence
  ENSG00000159445_15 (sequence is synthesized)
aagtgctagggaaggagctgtccacgcctccctcctggcttctgggagcctcaggtgttccttggcttctagatgcatcattccagtcctccatcttcacatggcattccctctgtgtgt

SEQ ID NO: 471727 - DNA, 120 bp, Artificial Sequence
  ENSG00000159445_16 (sequence is synthesized)
ctccacagtgtcttccctctgtgcagatctatctctgtgtccaagtctcctctttttataaggaaaccagtcataatggacccacctgaatgacctcattttaacttgattacctctgta

SEQ ID NO: 471728 - DNA, 120 bp, Artificial Sequence
  ENSG00000159445_17 (sequence is synthesized)
aaaaatgtatttccaaataaagtgaccttatgaggtattggagattaggaccacaacataccttttttgggaggacacaattcaacctgtaaaagagcctcaacaaaactaaaaaatgaa

SEQ ID NO: 471729 - DNA, 80 bp, Artificial Sequence
  ENSG00000159445_18 (sequence is synthesized)
gttcacagagacaaagtataaagaaagaaccctgggcccaggggaccggtgctcagcatacagaggacccgcaccggccc

SEQ ID NO: 471730 - DNA, 120 bp, Artificial Sequence
  ENSG00000159445_19 (sequence is synthesized)
cactatctcggcaaggggaatgcagcaggagaacagggtgatagtggggagaaggtcagcaggaaaatctgtgagcaaaggaatctgtgttacaaataagttcaagggaaggtactatgc

SEQ ID NO: 471731 - DNA, 120 bp, Artificial Sequence
  ENSG00000159445_20 (sequence is synthesized)
caaacatctcagtgtagcaaagagtaacagcagcattgccgccagcgtatcttggctccagccacagggtggttttctcctatctcagaatggaacgaacataggatcgggttttacacc

SEQ ID NO: 471732 - DNA, 120 bp, Artificial Sequence
  ENSG00000159445_21 (sequence is synthesized)
aagacatgctgttcccaggggcatgcaggagacagaggccttcctcatctcaaccacaagaggccttcctcttttactaatccccctcagcacagaccctttgcgggtgtcgggctgggg

SEQ ID NO: 471733 - DNA, 75 bp, Artificial Sequence
  ENSG00000159445_22 (sequence is synthesized)
cttttaccaagcatactgcctgtaaacatactgttaatgaggcacgtcctgcacagaagcacagggttggggcta

SEQ ID NO: 471734 - DNA, 69 bp, Artificial Sequence
  ENSG00000159445_23 (sequence is synthesized)
tcaattttcttagaacagatcaaaatggaatttctcatgtcttcctttctacatagacacagtaacagt

SEQ ID NO: 471735 - DNA, 120 bp, Artificial Sequence
  ENSG00000159445_24 (sequence is synthesized)
gtaacagtctgatctctcttttccctacagagactaatgttctggaaaatatattctgcttcctagtgcaggcaatagattatttgggcttccatttctttcctttctttccccatatta

SEQ ID NO: 471736 - DNA, 120 bp, Artificial Sequence
  ENSG00000159445_25 (sequence is synthesized)
ccatattagaaatttaagctgaaccatatgaaatcactatttcgaagaacagaatggtcaaatattgacaatttcctatggttcaacctaataacttagggacagccttgtggtacccta

SEQ ID NO: 471737 - DNA, 120 bp, Artificial Sequence
  ENSG00000159445_26 (sequence is synthesized)
cccagtcatccttccacagccaaaagatcagctggagccctccattgccagagctgactgacctgggatggccaagccagaggaagacccacatcctggaagccctgtctctagtgccca

SEQ ID NO: 471738 - DNA, 120 bp, Artificial Sequence
  ENSG00000159445_27 (sequence is synthesized)
actccagttctcaagttgcaagggcccagcagacatgggggcactgcaggggtgaagctggcagttccttctcccagaaattctgagagagcctgggaaagtgccccaggagatggctgg

SEQ ID NO: 471739 - DNA, 120 bp, Artificial Sequence
  ENSG00000159445_28 (sequence is synthesized)
gctcacagctctacaagttacaggtctggcaatggccaccctctattcccagtcttccaacaaatcctgaaacttaagagagtggactcttacaataattatatttcacatgttaaaaaa

SEQ ID NO: 471740 - DNA, 120 bp, Artificial Sequence
  ENSG00000159445_29 (sequence is synthesized)
tatgactccgaaggaataagccagcgctgctcatttagctagtttcacttaactagttgggaggaagtttagacaatgaaggtactgtactctcatcgttagatttctctggcaggcttg

SEQ ID NO: 471741 - DNA, 120 bp, Artificial Sequence
  ENSG00000159445_30 (sequence is synthesized)
cagaactgctatggcacaccagacctccagccaagtgaaagaacctaactgaaagagtgccaaatgaccaggttttcttcatgttaagtatgcctgcctcccttcgtatccacttttttc

SEQ ID NO: 471742 - DNA, 120 bp, Artificial Sequence
  ENSG00000159445_31 (sequence is synthesized)
cctttacagtttcatttcttacactggtttgctcacatccaggttagatgctgcacaagatcaactaaggaaaaagctcagtcactgttaacatagggttccccatagccagtgagggaa

SEQ ID NO: 471743 - DNA, 120 bp, Artificial Sequence
  ENSG00000159445_32 (sequence is synthesized)
aaatggcttccctgctttgcagcagactattcctagccttcaccatgccctggcactcttgctttcctcaggttgtattttgacaagtatgtaagataacaaaaggtggcagaacaggta

SEQ ID NO: 471744 - DNA, 120 bp, Artificial Sequence
  ENSG00000159445_33 (sequence is synthesized)
gaaagaaggagagagatgctatcagaattgccagctccactccatcactggcttgctgtgtgacctaatggaactattcctcatttcctgtttccttctttttcctttcttttttctttt

SEQ ID NO: 471745 - DNA, 75 bp, Artificial Sequence
  ENSG00000159445_34 (sequence is synthesized)
tccttcgacagggtctggctctgtcgcctgggctggaatgcagagacacaatctcagctcaatgcaacctccacc

SEQ ID NO: 471746 - DNA, 120 bp, Artificial Sequence
  ENSG00000159445_35 (sequence is synthesized)
aagtactgggattacaggcatgagccaccttgctcaacctgtttccttctttataccaagtgctaacattttgaatgaatattaggaattgatgctggttagtgctaaaatatctttaaa

SEQ ID NO: 471747 - DNA, 120 bp, Artificial Sequence
  ENSG00000159445_36 (sequence is synthesized)
ggttagtgctaaaatatctttaaactatcagtgtaaacataattaggccgtgagtttttgctcttactcccaggtttctaaatgtctaagaaacaataaaatgagagtcatgtacagaaa

SEQ ID NO: 471748 - DNA, 120 bp, Artificial Sequence
  ENSG00000159445_37 (sequence is synthesized)
ctttgaactggctttcacatagttaagcattgctagagaaaatcaccccatctagcagataagtttggtgattgtgatttttgtagtttcatctcctgtctccattcttatcctcctcaa

SEQ ID NO: 471749 - DNA, 120 bp, Artificial Sequence
  ENSG00000159445_38 (sequence is synthesized)
agcccttcttccactcaactgtcagaatgattcaaaatgcaaatctcatcatgttattccaatgctattttcagtgctatcccatttcttaaaatactcttgcctttcagacttaaaaat

SEQ ID NO: 471750 - DNA, 120 bp, Artificial Sequence
  ENSG00000159445_39 (sequence is synthesized)
gaatatgaagcacctaggaatcttgttaaaatgcaagttctgcttcagaaggtcagaagtagaacctgagattctgcatttccaacaaacttctttcaccatcacaaaggacaaacacat

SEQ ID NO: 471751 - DNA, 120 bp, Artificial Sequence
  ENSG00000159445_40 (sequence is synthesized)
cctcttgagagtagtagcttttggtctttattttgaaatgacctacattttaactcaacccagaccttatttttctcatttttatgaaataagctcaaggtttgccaatctagaccagaa

SEQ ID NO: 471752 - DNA, 120 bp, Artificial Sequence
  ENSG00000159445_41 (sequence is synthesized)
atctcaaactcctaagtaaaacaattataagcacttaacacctatcttatcctgaagtcctggaatgtcagagttggaagagatcttagagctcattttgttttatctcctcattgtatg

SEQ ID NO: 471753 - DNA, 120 bp, Artificial Sequence
  ENSG00000159445_42 (sequence is synthesized)
gataaagtgtagtgcaaaagagtgagttctaggccagaggtaggccaataatttaattttcccaactcacgggccaaggttctttccactgcaccataatactgatccccaattttaagg

SEQ ID NO: 471754 - DNA, 120 bp, Artificial Sequence
  ENSG00000159445_43 (sequence is synthesized)
ttccttgtctgtccttctaaaccatcaattcactcaacaactgcttaagtgtatatagtatgtgcacatctgtgccatttgttgggtatgcaaagtctaaaagacagggtgcctgccctg

SEQ ID NO: 471755 - DNA, 120 bp, Artificial Sequence
  ENSG00000159445_44 (sequence is synthesized)
agatgctcatgacctaattcaaatgcatccttcctgtccctctccccacttctcctggatcttctcatctgtatctttttccacgtttgtaaatataaattcaatagaaataaacagttt

SEQ ID NO: 471756 - DNA, 120 bp, Artificial Sequence
  ENSG00000159445_45 (sequence is synthesized)
tatatatggcaaatcatgatgagctatgaaagaaaggtgagtagggggattaaattttaaaatagatacaaaaggataaatgcactatttcttgagagcaatggctttcaatctttattt

SEQ ID NO: 471757 - DNA, 120 bp, Artificial Sequence
  ENSG00000159445_46 (sequence is synthesized)
tgaagtgacctatattttgattcaatccagttcccccaacttgctcacaattgtgtaagtgaaaaaaaactgtgtctaaacaagtgcactattacttacccagagtatatggttctgtta

SEQ ID NO: 471758 - DNA, 70 bp, Artificial Sequence
  ENSG00000159445_47 (sequence is synthesized)
cactattacttacccagagtatatggttctgttaactaagtgttctgtttctttttaaagcctggttaat

SEQ ID NO: 471759 - DNA, 120 bp, Artificial Sequence
  ENSG00000159445_48 (sequence is synthesized)
cctacccggaccccgccggcctcacaccccggccagccagccgccagtagtgcgcaccgcctcctccccaagccccgccctgcgtccaccccaggggttaactcgcacgcgcgctcttgt

SEQ ID NO: 471760 - DNA, 120 bp, Artificial Sequence
  ENSG00000159445_49 (sequence is synthesized)
gattgaagtactagttactacctgaaaaaaagaaagaatataatgcaggattatggttctatagtcaccaattttatagaccagaaatcacaataaattttgcagattggagagcataaa

SEQ ID NO: 471761 - DNA, 120 bp, Artificial Sequence
  ENSG00000159445_50 (sequence is synthesized)
tctgttacattttttattttctgtaaattgcatttaaaccacagttcttccaagaaggatttccgtctttaccgtaccattttattcagtatattgttagcgtttatatactatattcct

SEQ ID NO: 471762 - DNA, 120 bp, Artificial Sequence
  ENSG00000159445_51 (sequence is synthesized)
gattgccatgtgtgggtacttcattttgatttcatgtctgtttactctgtccccagttggactgttaattccacaagggcaaagatcctatcttctgtttcattgagacgctcccattcc

SEQ ID NO: 471763 - DNA, 120 bp, Artificial Sequence
  ENSG00000159450_0 (sequence is synthesized)
atgtctccacttctgagaagcatctgtgacatcactgaaattttcaatcagtatgtctctcatgattgtgatggagcagcattaactaagaaagacctgaagaacctccttgaaagggaa

SEQ ID NO: 471764 - DNA, 120 bp, Artificial Sequence
  ENSG00000159450_1 (sequence is synthesized)
tttggagctgtgcttcggagaccacatgaccctaagacggtagatctgatcctggaacttctggatcttgacagtaatgggcgtgtcgatttcaacgaattcctcctatttattttcaaa

SEQ ID NO: 471765 - DNA, 120 bp, Artificial Sequence
  ENSG00000159450_2 (sequence is synthesized)
gtggctcaagcttgttactatgctctcggccaggccacgggactggatgaggagaagcgagcccggtgtgacggaaaggagagcctgttacaagatcgcaggcaagaagaagaccaaagg

SEQ ID NO: 471766 - DNA, 120 bp, Artificial Sequence
  ENSG00000159450_3 (sequence is synthesized)
agattcgagccccgggacagacaactggaagaagaacctgggcaacgacgcaggcagaagaggcaggaacaggagagggagctagctgagggagaggagcaaagtgagaaacaagagcga

SEQ ID NO: 471767 - DNA, 120 bp, Artificial Sequence
  ENSG00000159450_4 (sequence is synthesized)
cttgaacagcgcgacaggcagcgccgcgacgaggagctgtggcggcaaaggcaagaatggcaagaacgggaagagcgccgtgcagaggaagagcagctgcagagttgcaaaggtcacgaa

SEQ ID NO: 471768 - DNA, 120 bp, Artificial Sequence
  ENSG00000159450_5 (sequence is synthesized)
actgaggagtttccagacgaagagcaactgcgaaggcgggagctgctggagctgaggaggaagggccgcgaggagaaacagcagcaaaggcgagagcggcaagacagagtgttccaggag

SEQ ID NO: 471769 - DNA, 120 bp, Artificial Sequence
  ENSG00000159450_6 (sequence is synthesized)
gaagaagagaaagagtggaggaagcgcgagacagtgctccggaaggaagaagagaagttgcaggaagaggagccgcagcggcaaagagagctccaggaggaagaagagcagctacggaag

SEQ ID NO: 471770 - DNA, 120 bp, Artificial Sequence
  ENSG00000159450_7 (sequence is synthesized)
ctggagcggcaagagctgaggagggagcgccaggaggaagagcagcagcagcaaaggctgaggcgcgagcagcaactaaggcgcaagcaggaggaggagaggcgcgagcagcaggaggag

SEQ ID NO: 471771 - DNA, 120 bp, Artificial Sequence
  ENSG00000159450_8 (sequence is synthesized)
aggcgcgagcagcaggagaggcgcgagcagcaggaggagaggcgcgagcagcagctgaggcgcgagcaggaggagaggcgcgagcagcagctgaggcgcgagcaggaggaggagaggcgc

SEQ ID NO: 471772 - DNA, 120 bp, Artificial Sequence
  ENSG00000159450_9 (sequence is synthesized)
gagcagcagctgaggcgcgagcaggaggaggagaggcgcgagcagcagctgaggcgcgagcagcagctgaggcgcgagcagcagctgaggcgcgagcagcagctgaggcgcgagcagcag

SEQ ID NO: 471773 - DNA, 120 bp, Artificial Sequence
  ENSG00000159450_10 (sequence is synthesized)
ctgaggcgcgagcagcagctgaggcgcgagcagcagctgaggcgcgagcagcagctgaggcgcgagcagcagctgaggcgcgagcaggaggaggagaggcacgagcagaagcacgagcag

SEQ ID NO: 471774 - DNA, 120 bp, Artificial Sequence
  ENSG00000159450_11 (sequence is synthesized)
gagaggcgcgagcagcggctgaagcgcgagcaggaggagaggcgcgattggctgaagcgcgaggaggagacggagaggcacgagcaggagaggcgcaagcagcagctgaagcgcgaccag

SEQ ID NO: 471775 - DNA, 120 bp, Artificial Sequence
  ENSG00000159450_12 (sequence is synthesized)
gaggaggagaggcgcgaacgttggctgaagctcgaggaggaggagaggcgcgagcagcaggagaggcgcgagcagcaactaaggcgggagcaagaggagaggcgcgagcagcggctgaag

SEQ ID NO: 471776 - DNA, 120 bp, Artificial Sequence
  ENSG00000159450_13 (sequence is synthesized)
cgccaggaggaggaagagaggctccagcagcggttgaggagcgagcaacaactaagacgcgagcaggaggagaggcgcgagcagctgctgaagcgcgaggaggagaagaggctcgagcag

SEQ ID NO: 471777 - DNA, 120 bp, Artificial Sequence
  ENSG00000159450_14 (sequence is synthesized)
gagaggcgagagcagcggctgaagcgcgagcaggaggagaggcgcgatcagctgctgaagcgcgaggaggagaggcgccagcagcggctgaagcgcgagcaggaagagaggctcgagcag

SEQ ID NO: 471778 - DNA, 120 bp, Artificial Sequence
  ENSG00000159450_15 (sequence is synthesized)
cgactgaagcgcgaggaggtggagagactcgagcaggaggagaggcgcgagcagcggctgaagcgcgaggagccggaggaagagaggcgccagcagctgctgaagagcgaggagcaggag

SEQ ID NO: 471779 - DNA, 120 bp, Artificial Sequence
  ENSG00000159450_16 (sequence is synthesized)
gagaggcgccagcagcaactaaggcgcgagcagcaggaaaggcgcgagcagcggctgaagcgcgaggaggaggaagagaggctcgagcagcggctgaagcgcgagcatgaggaagagagg

SEQ ID NO: 471780 - DNA, 120 bp, Artificial Sequence
  ENSG00000159450_17 (sequence is synthesized)
cgcgagcaggagctagctgaggaggagcaggaacaggcccgggagcggattaagagccgcatcccgaagtggcagtggcagctagaaagcgaggccgacgcacggcaaagcaaagtctac

SEQ ID NO: 471781 - DNA, 120 bp, Artificial Sequence
  ENSG00000159450_18 (sequence is synthesized)
tcgaggccccgcaagcaggaagggcagaggcgccgccaagagcaggaggaaaagaggcggcgccgggagagtgagctgcaatggcaggaggaggaacgggctcaccggcagcagcaggaa

SEQ ID NO: 471782 - DNA, 120 bp, Artificial Sequence
  ENSG00000159450_19 (sequence is synthesized)
gaggagcagcgccgggacttcacatggcagtggcaggcggaggaaaagagcgagaggggccgtcagaggctgtcggccaggcccccattgcgggagcagcgggagaggcagctgagggcc

SEQ ID NO: 471783 - DNA, 120 bp, Artificial Sequence
  ENSG00000159450_20 (sequence is synthesized)
gaggagcgccagcagcgggaacaacggtttctcccggaggaggaggagaaggagcagcggcgccgccagcgacgcgagagggagaaagagctgcagttcctggaggaagaggagcagctc

SEQ ID NO: 471784 - DNA, 120 bp, Artificial Sequence
  ENSG00000159450_21 (sequence is synthesized)
cagcggcgggagcgtgcccaacagctccaggaggaggaggacggcctccaggaggatcaggagaggaggcgaagccaggagcagcgccgcgaccaaaaatggaggtggcaactagaagaa

SEQ ID NO: 471785 - DNA, 120 bp, Artificial Sequence
  ENSG00000159450_22 (sequence is synthesized)
gaaaggaagagacgccgccacacgctgtacgccaagccagccctacaagagcagctgaggaaggaacagcagctgctgcaggaggaggaggaggagctacagagagaggagcgcgagaag

SEQ ID NO: 471786 - DNA, 120 bp, Artificial Sequence
  ENSG00000159450_23 (sequence is synthesized)
agaaggcgccaagaacaggagagacaataccgcgaggaagagcagctgcagcaggaggaagagcagctgctgagagaggaacgggagaaaagaagacgccaggagcgggaaaggcaatat

SEQ ID NO: 471787 - DNA, 120 bp, Artificial Sequence
  ENSG00000159450_24 (sequence is synthesized)
cggaaggataagaagctgcagcagaaggaagagcagctgctgggagaggaaccggagaagagaaggcgccaggagcgggagaaaaaataccgcgaggaagaggagttgcagcaggaggaa

SEQ ID NO: 471788 - DNA, 120 bp, Artificial Sequence
  ENSG00000159450_25 (sequence is synthesized)
gagcagctgctgagagaggaacgggagaagagaaggcgccaggagtgggagaggcagtaccgcaaaaaagacgagctgcagcaggaagaagagcagctgctgagagaggaacgggagaaa

SEQ ID NO: 471789 - DNA, 120 bp, Artificial Sequence
  ENSG00000159450_26 (sequence is synthesized)
agaagactccaggagcgggagaggcaatatcgggaggaagaggagctgcagcaggaggaagagcagctgctgggagaggaacgggagacgagaaggcgccaggagctggagaggcaatat

SEQ ID NO: 471790 - DNA, 120 bp, Artificial Sequence
  ENSG00000159450_27 (sequence is synthesized)
cggaaggaagaggagctgcagcaggaggaagagcagctgctgagagaggaaccggagaagagaaggcgccaggagcgggagaggcaatgtcgggaggaagaggagctgcagcaggaggaa

SEQ ID NO: 471791 - DNA, 120 bp, Artificial Sequence
  ENSG00000159450_28 (sequence is synthesized)
cgggaggaagaggaggtgcagcaggaggaagagcagctgctgagagaggaaccggagaagagaaggcgccaggagctggagaggcaataccgcgaggaagaggagctgcagcaggaggaa

SEQ ID NO: 471792 - DNA, 120 bp, Artificial Sequence
  ENSG00000159450_29 (sequence is synthesized)
gagcagctgctgagagaggaacaggagaaaaggcgccaggagcgggagaggcagtatcgggaggaggaagagcttcagcgccagaaaaggaagcagcgataccgggatgaggatcagcgc

SEQ ID NO: 471793 - DNA, 120 bp, Artificial Sequence
  ENSG00000159450_30 (sequence is synthesized)
agtgatctgaaatggcagtgggaaccagaaaaagaaaatgcagttcgtgataacaaggtttactgcaaaggcagagagaatgaacagttccggcagttggaagattcccagctgcgcgac

SEQ ID NO: 471794 - DNA, 120 bp, Artificial Sequence
  ENSG00000159450_31 (sequence is synthesized)
agacaatcccagcaagatctgcagcacctgctgggtgaacagcaagagcgagatcgtgagcaagagaggaggcgctggcagcagcgcgacaggcatttcccagaggaagaacagctggag

SEQ ID NO: 471795 - DNA, 120 bp, Artificial Sequence
  ENSG00000159450_32 (sequence is synthesized)
cgagaagagcaaaaggaagccaaaaggcgcgacaggaagtcccaagaggaaaagcagttgctgagagaggaaagagaagagaagagacgccgtcaagagacagacagaaaattccgcgag

SEQ ID NO: 471796 - DNA, 120 bp, Artificial Sequence
  ENSG00000159450_33 (sequence is synthesized)
gaggaacagctgctccaggaaagggaggaacagccgctgcgccgccaagagcgtgacagaaaattccgcgaagaggaactgcgccatcaggaacaagggagaaaattcctcgaggaggaa

SEQ ID NO: 471797 - DNA, 120 bp, Artificial Sequence
  ENSG00000159450_34 (sequence is synthesized)
cagcggctgcgccgccaggaacgggagagaaaattccttaaggaggaacagcagctgcgctgccaggagcgcgagcaacagctgcgtcaggaccgcgacagaaaattccgcgaggaggaa

SEQ ID NO: 471798 - DNA, 120 bp, Artificial Sequence
  ENSG00000159450_35 (sequence is synthesized)
cagcagctgagccgccaagagcgtgacagaaaattccgtgaagaggaacagcaggtgcgccgccaggaacgagagagaaaattcctggaggaggaacagcagctgcgccaggagcgtcac

SEQ ID NO: 471799 - DNA, 120 bp, Artificial Sequence
  ENSG00000159450_36 (sequence is synthesized)
agaaaattccgcgaagaggaacagctgctccaggaaagggaagaacagcagctgcaccgccaagagcgtgacagaaaattcctggaggaggaacaacagctgcgccgccaagagcgtgac

SEQ ID NO: 471800 - DNA, 120 bp, Artificial Sequence
  ENSG00000159450_37 (sequence is synthesized)
agaaaattccgcgaacaggaactgcgcagtcaggaaccagagagaaaattcctcgaggaggaacagcagctgcaccgccagcaacggcagagaaaattcctccaggaggaacagcagctg

SEQ ID NO: 471801 - DNA, 120 bp, Artificial Sequence
  ENSG00000159450_38 (sequence is synthesized)
cgccgccaggagcgcgggcaacagcggcgtcaggaccgtgacagaaaattccgcgaggaggaacagctgcgccaggagagggaggaacagcagctgagccgccaagagcgtgacagaaaa

SEQ ID NO: 471802 - DNA, 120 bp, Artificial Sequence
  ENSG00000159450_39 (sequence is synthesized)
ttccgtttagaggaacagaaagtgcgccgccaggaacaagagagaaaattcatggaggacgaacagcagctgcgccgccaggagggccaacaacagctgcgccaggagcgcgacagaaaa

SEQ ID NO: 471803 - DNA, 120 bp, Artificial Sequence
  ENSG00000159450_40 (sequence is synthesized)
ttccgcgaagacgaacagctgctccaggaaagggaagaacagcagctgcaccgccaagagcgtgacagaaaattcctcgaggaggaaccgcagctgcgccgccaggagcgcgaacaacag

SEQ ID NO: 471804 - DNA, 120 bp, Artificial Sequence
  ENSG00000159450_41 (sequence is synthesized)
ctgcgtcacgaccgcgacagaaaattccgtgaagaggaacagctgctccaggaaggggaggaacagcagctgcgccgccaagagcgtgacagaaaattccgcgaagaggaacagcagctc

SEQ ID NO: 471805 - DNA, 120 bp, Artificial Sequence
  ENSG00000159450_42 (sequence is synthesized)
cgccgtcaggaacgagagagaaaattcctccaggaggaacagcagctgcgccgccaggaactggagagaaaattccgtgaggaggaacagctgcgccaagaaacggagcaagagcagctg

SEQ ID NO: 471806 - DNA, 120 bp, Artificial Sequence
  ENSG00000159450_43 (sequence is synthesized)
cgccgccaagaacgctacagaaaaatcctagaggaagagcagctccgtccggaaagggaagaacagcagctgcgccgccaggagcgcgacagaaaattccgcgaggaggaacagctccgc

SEQ ID NO: 471807 - DNA, 120 bp, Artificial Sequence
  ENSG00000159450_44 (sequence is synthesized)
caggagagggaggaacagcagctgcgcagccaagagtctgacagaaaattccgcgaggaggaacagctacgccaggagagggaagaacagcagctgcgcccccaacagcgtgacggaaag

SEQ ID NO: 471808 - DNA, 120 bp, Artificial Sequence
  ENSG00000159450_45 (sequence is synthesized)
tatcgctgggaagaagagcagctccaacttgaggaacaagagcagaggctgcggcaggagcgagaccggcagtaccgggcggaggagcagtttgccacgcaggagaagagtcgtcgtgag

SEQ ID NO: 471809 - DNA, 120 bp, Artificial Sequence
  ENSG00000159450_46 (sequence is synthesized)
gaacaagaactatggcaagaagaggagcagaaacgtcgccaggaacgggaaaggaaattacgggaagaacacatccgccgccagcagaaggaggaacagaggcaccgccaagtcggggag

SEQ ID NO: 471810 - DNA, 120 bp, Artificial Sequence
  ENSG00000159450_47 (sequence is synthesized)
ataaaatcccaagaagggaagggccatgggcggcttctggagcccggcactcatcagtttgccagtgtcccagtgcgctccagccctctctatgagtacatccaagagcagagatctcaa

SEQ ID NO: 471811 - DNA, 120 bp, Artificial Sequence
  ENSG00000159450_48 (sequence is synthesized)
taccgcccttaagtgatgttgccaatatcttgacacctgccaaagcttcgagcacgggaaaatgagaaacactgggtaccaagtgataactcagatgtttctggttgtgggaaaactctc

SEQ ID NO: 471812 - DNA, 120 bp, Artificial Sequence
  ENSG00000159450_49 (sequence is synthesized)
tgatattagaatgtcttttcttccaaaatcttaaactacgctcattttacgcactttgtacttctgctttttattcttcctcaagtagttctttactgcaagatgtctttcttttgctct

SEQ ID NO: 471813 - DNA, 120 bp, Artificial Sequence
  ENSG00000159450_50 (sequence is synthesized)
ttgatgcagatgtggtgtgcatttaaaaaaaatataaatcatttaatttgtttaagaaattttgtttgaggaacatgttcatttattgctttcagaagtaacaagagtaataggatgatt

SEQ ID NO: 471814 - DNA, 120 bp, Artificial Sequence
  ENSG00000159450_51 (sequence is synthesized)
tgagattctaaacaatgggtcggtttgtttaatgactgacccatcttgtggaaagtgcagatacttttaatgttcaagttgctatttcttcttgaacctaaattgatcattgcctccaaa

SEQ ID NO: 471815 - DNA, 120 bp, Artificial Sequence
  ENSG00000159450_52 (sequence is synthesized)
cagcatttcatcttttgtggcatagttagcacaaattccaggtaactaaatttttataacccttgaatagtgcagggggagtgacctctgcataaaaacttcctgtaaaatcagcccatt

SEQ ID NO: 471816 - DNA, 120 bp, Artificial Sequence
  ENSG00000159450_53 (sequence is synthesized)
actggaagaaatatctgttaagaataggtttagctttgaagatttagaatttaaattagattttttttaaactcaactccacttaaacacataatctcatgaagaaataatgaggtgttt

SEQ ID NO: 471817 - DNA, 120 bp, Artificial Sequence
  ENSG00000159450_54 (sequence is synthesized)
ctcaacttcagagttcaaattttaaaactgtgtctgttgtagtctatagtgttcattctacttccccaagttttgatgagtttcagaatattatgaacctttgttaattttagcttgtta

SEQ ID NO: 471818 - DNA, 120 bp, Artificial Sequence
  ENSG00000159450_55 (sequence is synthesized)
gaaggaagctgctcagaatcccataaacatctgtcttactctagggccaataagagatcacatagagcatgttgggggtgtaaaagggaaaaatgtgtgaacataggggcaaatttctag

SEQ ID NO: 471819 - DNA, 120 bp, Artificial Sequence
  ENSG00000159450_56 (sequence is synthesized)
aggccctttgacaagacccatttgcccacaatcatttgaggcctattgataataccttagatatattcttgttgaaataattggactgtgaaaaattaataataaatgtttggcaagtaa

SEQ ID NO: 471820 - DNA, 120 bp, Artificial Sequence
  ENSG00000159455_0 (sequence is synthesized)
cagggacgtgtctgtgctcctgcgtgtgaccagggttgactaaactctgccaggatgtcttgccagcaaaaccagcagcagtgccagccccctcccaagtgtcctcccaagtgtacccca

SEQ ID NO: 471821 - DNA, 120 bp, Artificial Sequence
  ENSG00000159455_1 (sequence is synthesized)
aaatgtccacctaagtgtccccctaaatgcctgccccagtgcccagctccatgttcccctgcagtctcttcttgctgtggtcccatctctgggggctgctgtggtcccagctctgggggc

SEQ ID NO: 471822 - DNA, 120 bp, Artificial Sequence
  ENSG00000159455_2 (sequence is synthesized)
ctctggggctggtggctgctgcctgagccaccacaggccccgtctcttccaccggcgccggcaccagagccccgactgctgtgagagtgaaccttctgggggctctggctgctgccacag

SEQ ID NO: 471823 - DNA, 120 bp, Artificial Sequence
  ENSG00000159455_3 (sequence is synthesized)
ctctgggggctgctgctgacctgggctaagaagaactctttggacagaatgtttaagaacctcctacagcctgatgcttaaccctttccatttcctctcattccattcatgggtggacag

SEQ ID NO: 471824 - DNA, 120 bp, Artificial Sequence
  ENSG00000159455_4 (sequence is synthesized)
cgaccacaaagactcatggggcttccctgggagaactttgcacttgatggagcacctcaattgcaggttttgttttcctcctttacctcatgttataataaagctctgatttctgactca

SEQ ID NO: 471825 - DNA, 120 bp, Artificial Sequence
  ENSG00000159459_0 (sequence is synthesized)
gtcagtttccctcaagatggcggacgaggaggctggaggtactgagaggatggaaatcagcgcggagttaccccagacccctcagcgtctggcatcttggtgggatcagcaagttgattt

SEQ ID NO: 471826 - DNA, 120 bp, Artificial Sequence
  ENSG00000159459_1 (sequence is synthesized)
ttatactgctttcttgcatcatttggcacaattggtgccagaaatttactttgctgaaatggacccagacttggaaaagcaggaggaaagtgtacaaatgtcaatattcactccactgga

SEQ ID NO: 471827 - DNA, 120 bp, Artificial Sequence
  ENSG00000159459_2 (sequence is synthesized)
atggtacttatttggagaagatccagatatttgcttagagaaattgaagcacagtggagcatttcagctttgtgggagggttttcaaaagtggagagacaacctattcttgcagggattg

SEQ ID NO: 471828 - DNA, 120 bp, Artificial Sequence
  ENSG00000159459_3 (sequence is synthesized)
tgcaattgatccaacatgtgtactctgtatggactgcttccaggacagtgttcataaaaatcatcgttacaagatgcatacttctactggaggagggttctgtgactgtggagacacaga

SEQ ID NO: 471829 - DNA, 120 bp, Artificial Sequence
  ENSG00000159459_4 (sequence is synthesized)
ggcatggaaaactggccctttttgtgtaaatcatgaacctggaagagcaggtactataaaagagaattcacgctgtccgttgaatgaagaggtaattgtccaagccaggaaaatatttcc

SEQ ID NO: 471830 - DNA, 120 bp, Artificial Sequence
  ENSG00000159459_5 (sequence is synthesized)
ttcagtgataaaatatgtcgtagaaatgactatatgggaagaggaaaaagaactgcctcctgaactccagataagggagaaaaatgaaagatactattgtgtccttttcaatgatgaaca

SEQ ID NO: 471831 - DNA, 120 bp, Artificial Sequence
  ENSG00000159459_6 (sequence is synthesized)
ccattcatatgaccacgtcatatacagcctacaaagagctcttgactgtgagctcgcagaggcccagttgcataccactgccattgacaaagagggtcgtcgggctgttaaagcgggagc

SEQ ID NO: 471832 - DNA, 120 bp, Artificial Sequence
  ENSG00000159459_7 (sequence is synthesized)
ttatgctgcttgccaggaagcaaaggaagatataaagagtcattcagaaaatgtctctcaacatccacttcatgtagaagtattacactcagagattatggctcatcagaaatttgcttt

SEQ ID NO: 471833 - DNA, 120 bp, Artificial Sequence
  ENSG00000159459_8 (sequence is synthesized)
gcgtcttggttcctggatgaacaaaattatgagctattcaagtgactttaggcagatcttttgccaagcatgccttagagaagaacctgactcggagaatccctgtctcataagcaggtt

SEQ ID NO: 471834 - DNA, 120 bp, Artificial Sequence
  ENSG00000159459_9 (sequence is synthesized)
aatgctttgggatgcaaagctttataaaggtgcccgtaagatccttcatgaattgatcttcagcagtttttttatggagatggaatacaaaaaactctttgctatggaatttgtgaagta

SEQ ID NO: 471835 - DNA, 120 bp, Artificial Sequence
  ENSG00000159459_10 (sequence is synthesized)
ttataaacaactgcagaaagaatatatcagtgatgatcatgacagaagtatctctataactgcactttcagttcagatgtttactgttcctactctggctcgacatcttattgaagagca

SEQ ID NO: 471836 - DNA, 120 bp, Artificial Sequence
  ENSG00000159459_11 (sequence is synthesized)
gaatgttatctctgtcattactgaaactctgctagaagttttacctgagtacttggacaggaacaataaattcaacttccagggttatagccaggacaaattgggaagagtatatgcagt

SEQ ID NO: 471837 - DNA, 120 bp, Artificial Sequence
  ENSG00000159459_12 (sequence is synthesized)
aatatgtgacctaaagtatatcctgatcagcaaacccacaatatggacagaaagattaagaatgcagttccttgaaggttttcgatcttttttgaagattcttacctgtatgcagggaat

SEQ ID NO: 471838 - DNA, 120 bp, Artificial Sequence
  ENSG00000159459_13 (sequence is synthesized)
ggaagaaatccgaagacaggttgggcaacacattgaagtggatcctgattgggaggctgccattgctatacagatgcaattgaagaatattttactcatgttccaagagtggtgtgcttg

SEQ ID NO: 471839 - DNA, 120 bp, Artificial Sequence
  ENSG00000159459_14 (sequence is synthesized)
tgatgaagaactcttacttgtggcttataaagaatgtcacaaagctgtgatgaggtgcagtaccagtttcatatctagtagcaagacagtagtacaatcgtgtggacatagtttggaaac

SEQ ID NO: 471840 - DNA, 120 bp, Artificial Sequence
  ENSG00000159459_15 (sequence is synthesized)
aaagtcctacagagtatctgaggatcttgtaagcatacatctgccactctctaggacccttgctggtcttcatgtacgtttaagcaggctgggtgctgtttcaagactgcatgaatttgt

SEQ ID NO: 471841 - DNA, 120 bp, Artificial Sequence
  ENSG00000159459_16 (sequence is synthesized)
gtcttttgaggactttcaagtagaggtactagtggaatatcctttacgttgtctggtgttggttgcccaggttgttgctgagatgtggcgaagaaatggactgtctcttattagccaggt

SEQ ID NO: 471842 - DNA, 120 bp, Artificial Sequence
  ENSG00000159459_17 (sequence is synthesized)
gttttattaccaagatgttaagtgcagagaagaaatgtatgataaagatatcatcatgcttcagattggtgcatctttaatggatcccaataagttcttgttactggtacttcagaggta

SEQ ID NO: 471843 - DNA, 120 bp, Artificial Sequence
  ENSG00000159459_18 (sequence is synthesized)
tgaacttgccgaggcttttaacaagaccatatctacaaaagaccaggatttgattaaacaatataatacactaatagaagaaatgcttcaggtcctcatctatattgtgggtgagcgtta

SEQ ID NO: 471844 - DNA, 120 bp, Artificial Sequence
  ENSG00000159459_19 (sequence is synthesized)
tgtacctggagtgggaaatgtgaccaaagaagaggtcacaatgagagaaatcattcacttgctttgcattgaacccatgccacacagtgccattgccaaaaatttacctgagaatgaaaa

SEQ ID NO: 471845 - DNA, 120 bp, Artificial Sequence
  ENSG00000159459_20 (sequence is synthesized)
taatgaaactggcttagagaatgtcataaacaaagtggccacatttaagaaaccaggtgtatcaggccatggagtttatgaactaaaagatgaatcactgaaagacttcaatatgtactt

SEQ ID NO: 471846 - DNA, 120 bp, Artificial Sequence
  ENSG00000159459_21 (sequence is synthesized)
ttatcattactccaaaacccagcatagcaaggctgaacatatgcagaagaaaaggagaaaacaagaaaacaaagatgaagcattgccgccaccaccacctcctgaattctgccctgcttt

SEQ ID NO: 471847 - DNA, 120 bp, Artificial Sequence
  ENSG00000159459_22 (sequence is synthesized)
cagcaaagtgattaaccttctcaactgtgatatcatgatgtacattctcaggaccgtatttgagcgggcaatagacacagattctaacttgtggaccgaagggatgctccaaatggcttt

SEQ ID NO: 471848 - DNA, 120 bp, Artificial Sequence
  ENSG00000159459_23 (sequence is synthesized)
tcatattctggcattgggtttactagaagagaagcaacagcttcaaaaagctcctgaagaagaagtaacatttgacttttatcataaggcttcaagattgggaagttcagccatgaatat

SEQ ID NO: 471849 - DNA, 120 bp, Artificial Sequence
  ENSG00000159459_24 (sequence is synthesized)
acaaatgcttttggaaaaactcaaaggaattccccagttagaaggccagaaggacatgataacgtggatacttcagatgtttgacacagtgaagcgattaagagaaaaatcttgtttaat

SEQ ID NO: 471850 - DNA, 120 bp, Artificial Sequence
  ENSG00000159459_25 (sequence is synthesized)
tgtagcaaccacatcaggatcggaatctattaagaatgatgagattactcatgataaagaaaaagcagaacgaaaaagaaaagctgaagctgctaggctacatcgccagaagatcatggc

SEQ ID NO: 471851 - DNA, 120 bp, Artificial Sequence
  ENSG00000159459_26 (sequence is synthesized)
tcagatgtctgccttacagaaaaacttcattgaaactcataaactcatgtatgacaatacatcagaaatgcctgggaaagaagattccattatggaggaagagagcaccccagcagtcag

SEQ ID NO: 471852 - DNA, 120 bp, Artificial Sequence
  ENSG00000159459_27 (sequence is synthesized)
tgactactctagaattgctttgggtcctaaacggggtccatctgttactgaaaaggaggtgctgacgtgcatcctttgccaagaagaacaggaggtgaaaatagaaaataatgccatggt

SEQ ID NO: 471853 - DNA, 120 bp, Artificial Sequence
  ENSG00000159459_28 (sequence is synthesized)
attatcggcctgtgtccagaaatctactgccttaacccagcacaggggaaaacccatagaactctcaggagaagccctagacccacttttcatggatccagacttggcatatggaactta

SEQ ID NO: 471854 - DNA, 120 bp, Artificial Sequence
  ENSG00000159459_29 (sequence is synthesized)
tacaggaagctgtggtcatgtaatgcacgcagtgtgctggcagaagtattttgaagctgtacagctgagctctcagcagcgcattcatgttgacctttttgacttggaaagtggagaata

SEQ ID NO: 471855 - DNA, 120 bp, Artificial Sequence
  ENSG00000159459_30 (sequence is synthesized)
tctttgccctctttgcaaatctctgtgcaatactgtgatccccattattcctttgcaacctcaaaagataaacagtgagaatgcagatgctcttgctcaacttttgaccctggcacggtg

SEQ ID NO: 471856 - DNA, 120 bp, Artificial Sequence
  ENSG00000159459_31 (sequence is synthesized)
gatacagactgttctggccagaatatcaggttataatataagacatgctaaaggagaaaacccaattcctattttctttaatcaaggaatgggagattctactttggagttccattccat

SEQ ID NO: 471857 - DNA, 120 bp, Artificial Sequence
  ENSG00000159459_32 (sequence is synthesized)
gtcttcgattaaatattcaaatagcatcaaggaaatggttattctctttgccacaacaatttatagaattggattgaaagtgccacctgatgaaagggatcctcgagtccccatgctgac

SEQ ID NO: 471858 - DNA, 120 bp, Artificial Sequence
  ENSG00000159459_33 (sequence is synthesized)
ctggagcacctgcgctttcactatccaggcaattgaaaatctattgggagatgaaggaaaacctctgtttggagcacttcaaaataggcagcataatggtctgaaagcattaatgcagtt

SEQ ID NO: 471859 - DNA, 120 bp, Artificial Sequence
  ENSG00000159459_34 (sequence is synthesized)
tgcagttgcacagaggattacctgtcctcaggtcctgatacagaaacatctggttcgtcttctatcagttgttcttcctaacataaaatcagaagatacaccatgccttctgtctataga

SEQ ID NO: 471860 - DNA, 120 bp, Artificial Sequence
  ENSG00000159459_35 (sequence is synthesized)
tctgtttcatgttttggtgggtgctgtgttagcattcccatccttgtattgggatgaccctgttgatctgcagccttcttcagttagttcttcctataaccacctttatctcttccattt

SEQ ID NO: 471861 - DNA, 120 bp, Artificial Sequence
  ENSG00000159459_36 (sequence is synthesized)
gatcaccatggcacacatgcttcagatactacttacagtagacacaggcctaccccttgctcaggttcaagaagacagtgaagaggctcattccgcatcttctttctttgcagaaatttc

SEQ ID NO: 471862 - DNA, 120 bp, Artificial Sequence
  ENSG00000159459_37 (sequence is synthesized)
tcaatatacaagtggctccattgggtgtgatattcctggctggtatttgtgggtctcactgaagaatggcatcaccccttatcttcgctgtgctgcattgtttttccactatttacttgg

SEQ ID NO: 471863 - DNA, 120 bp, Artificial Sequence
  ENSG00000159459_38 (sequence is synthesized)
ggtaactccgcctgaggaactgcataccaattctgcagaaggagagtacagtgcactctgtagctatctatctttacctacaaatttgttcctgctcttccaggaatattgggatactgt

SEQ ID NO: 471864 - DNA, 120 bp, Artificial Sequence
  ENSG00000159459_39 (sequence is synthesized)
aaggcccttgctccagaggtggtgtgcagatcctgccttactaaactgtttgaagcaaaaaaacaccgtggtcaggtaccctagaaaaagaaatagtttgatagagcttcctgatgacta

SEQ ID NO: 471865 - DNA, 120 bp, Artificial Sequence
  ENSG00000159459_40 (sequence is synthesized)
tagctgcctcctgaatcaagcttctcatttcaggtgcccacggtctgcagatgatgagcgaaagcatcctgtcctctgccttttctgtggggctatactatgttctcagaacatttgctg

SEQ ID NO: 471866 - DNA, 120 bp, Artificial Sequence
  ENSG00000159459_41 (sequence is synthesized)
ccaggaaattgtgaacggggaagaggttggagcttgcatttttcacgcacttcactgtggagccggagtctgcattttcctaaaaatcagagaatgccgagtggtcctggttgaaggtaa

SEQ ID NO: 471867 - DNA, 120 bp, Artificial Sequence
  ENSG00000159459_42 (sequence is synthesized)
agccagaggctgtgcctatccagctccttacttggatgaatatggagaaacagaccctggcctgaagaggggcaacccccttcatttatctcgtgagcggtatcggaagctccatttggt

SEQ ID NO: 471868 - DNA, 120 bp, Artificial Sequence
  ENSG00000159459_43 (sequence is synthesized)
ctggcaacaacactgcattatagaagagattgctaggagccaagagactaatcagatgttatttggattcaactggcagttactgtgagctccaactctgcctcaagacaatcacaaatg

SEQ ID NO: 471869 - DNA, 120 bp, Artificial Sequence
  ENSG00000159459_44 (sequence is synthesized)
acgacagtagtaaaggctgattcaaaattatggaaaactttctgagggctgggaaagtattggagggtcttttgctccatgtccaggttcacttacatcaataaaatatttcttaatgga

SEQ ID NO: 471870 - DNA, 120 bp, Artificial Sequence
  ENSG00000159459_45 (sequence is synthesized)
gtattgctttcaattagcaaacatatgcttcacaggaaaaaaggacatagatcaatctgttttatgtgctagtatttccaggaatttattccccttcataatttgtctcatttcatttta

SEQ ID NO: 471871 - DNA, 120 bp, Artificial Sequence
  ENSG00000159459_46 (sequence is synthesized)
tttcatccacttggtagatgaagtcacgtcaaacagttgtagacattttatatgttggttaactcttctgcaattttgtatttggtgttttccccccaagtttagttcaactgacattgg

SEQ ID NO: 471872 - DNA, 120 bp, Artificial Sequence
  ENSG00000159459_47 (sequence is synthesized)
atcactgacaaaattctaataatctgtgatagtcttccttgcagttaaagaagaattgcagaaaccatgcaatatacttgggaaagattccaaaaataaattttttattatttctctttt

SEQ ID NO: 471873 - DNA, 120 bp, Artificial Sequence
  ENSG00000159459_48 (sequence is synthesized)
aaggaaatacccctaatgtgccacctgctgctatcaccacaaattaaactcaatctctatgtggacagaggatgatttctgccaatatggaaaagcttttttctcactgtaggcctcaag

SEQ ID NO: 471874 - DNA, 120 bp, Artificial Sequence
  ENSG00000159459_49 (sequence is synthesized)
aaaagttagggtaatgtatttgttattcattcctgacggtacaaagagcttgcagttctcacctctgactaccagtagctttgttgagttttgaaataatacttgacattttccaaaggc

SEQ ID NO: 471875 - DNA, 120 bp, Artificial Sequence
  ENSG00000159459_50 (sequence is synthesized)
aaatctcattctgcaaggagattgtggcaccatcctgtttgactctcagaaacctcttgtaattctgatgtaaaaactgtagaatgaagatgagaaaattctcgcaatgagtggatcatg

SEQ ID NO: 471876 - DNA, 120 bp, Artificial Sequence
  ENSG00000159459_51 (sequence is synthesized)
acaactgtaaattagaacaatcagatttaaaccaattccgcagtcttctatatctttgtaaaagacaaatccttgatgttgtctgtgtgcaaccttttcataaactctggttttatgact

SEQ ID NO: 471877 - DNA, 120 bp, Artificial Sequence
  ENSG00000159459_52 (sequence is synthesized)
agtacaaaccaccaaaaaagccatgtgatcaatagtctgtgtcctgttataacatgctgtggttgagccatcttgtttataaataatagagctctcctgaatttgtgcatagacttcttg

SEQ ID NO: 471878 - DNA, 120 bp, Artificial Sequence
  ENSG00000159459_53 (sequence is synthesized)
gttcctggcttttgttttttgtatcaagagattgtgatataaaacagcagaagataaatggaaaccttccattttaacttacgttgtttctggggtaatgttagaaccttgaaagatgca

SEQ ID NO: 471879 - DNA, 120 bp, Artificial Sequence
  ENSG00000159459_54 (sequence is synthesized)
ttcaaagactgtatcttattttgcccttggctattagtgtctcacatatgtgtgtaaatgttttcctaccttctttttgctcagcaaaggcaagcaagtaaaatatatttgctaagtgat

SEQ ID NO: 471880 - DNA, 120 bp, Artificial Sequence
  ENSG00000159459_55 (sequence is synthesized)
tagtgatgcacatttggggctagatttttttggtacttttatgtaaagaaaagtggattttgcagtaagggattggcatgagcaggcgtcagaatcacaatcatgattttctacttgaat

SEQ ID NO: 471881 - DNA, 120 bp, Artificial Sequence
  ENSG00000159459_56 (sequence is synthesized)
aattacaattcagaaggtatctggataaatagatacatgtctagtgaacaatttgtaacaataacaggtaaggatcaggaaattcagtattcagtttgtcagatttgccagaatgatgaa

SEQ ID NO: 471882 - DNA, 120 bp, Artificial Sequence
  ENSG00000159459_57 (sequence is synthesized)
agtatttgaacatgtgtgtttgtttcttatataattgtattgagtggattgtttgactgggaaatctgggctagaataggaaacagaagatactgacttctaccctaatagatgggcccc

SEQ ID NO: 471883 - DNA, 120 bp, Artificial Sequence
  ENSG00000159459_58 (sequence is synthesized)
aatttagcaaagataaactgactttatttttagtcctttttatattaacttaataaattctggagttaggctctcaagaggacagagggactgtctggcaatggccagccagacctttac

SEQ ID NO: 471884 - DNA, 120 bp, Artificial Sequence
  ENSG00000159459_59 (sequence is synthesized)
tgccaaagaacccatttcatattgcgttccactgattgagattgattcagatttttgcactgtagatgagcgtatgtctcagtgctgccccaagccccagggatttctcattatgttcaa

SEQ ID NO: 471885 - DNA, 120 bp, Artificial Sequence
  ENSG00000159459_60 (sequence is synthesized)
atgtcctagtgatttaccttaatcattgcaaacaattatgcttatgaagtttacttacaaacaagcaactgagtcactttattttctttagtgtagtatgtgaaggcactggttcaacag

SEQ ID NO: 471886 - DNA, 120 bp, Artificial Sequence
  ENSG00000159459_61 (sequence is synthesized)
gatggctccagaactgtgtttttctaatgtttggtaaggggctagtgagaattttaatgatatggtgaagaaaaatatatctgtataattaatttattatattggtgtatgggctgtgag

SEQ ID NO: 471887 - DNA, 120 bp, Artificial Sequence
  ENSG00000159459_62 (sequence is synthesized)
ttcaccttttagtggtcatttgtcatttcataacaactatgcattttggttcactgtgatgatgatctatatttagtgactgcaacatgtttataccactgattcaaattccatccatga

SEQ ID NO: 471888 - DNA, 120 bp, Artificial Sequence
  ENSG00000159459_63 (sequence is synthesized)
caaattccatccatgatgaagttatacaaataatgcatatattgataacttttattgcaaaaatgtaaatttaaaacttgtataatgttcttgtgctttttaaaataaaatatatgtgta

SEQ ID NO: 471889 - DNA, 120 bp, Artificial Sequence
  ENSG00000159459_64 (sequence is synthesized)
cccagaataatttgacttgtatgaggactattagtatttcagtgtattagtgtggctcatgccatttggtctggtaatttttttatgttgatctctttttaactatgattgtggccatat

SEQ ID NO: 471890 - DNA, 120 bp, Artificial Sequence
  ENSG00000159459_65 (sequence is synthesized)
gcaacataagttaaaaaaaatatttttaaaaagctgggcacggtggattatgcctgggaggctgagctttgggaggctgaggtgggaggataacttgagagcaggagtttgagaccagcc

SEQ ID NO: 471891 - DNA, 120 bp, Artificial Sequence
  ENSG00000159459_66 (sequence is synthesized)
gtgttaaaccactgtaccattgtagacatttactactggttttcataatcacttatttttcatgttaataattctattttcctatattttattgtagttttaaaaataaactaagattta

SEQ ID NO: 471892 - DNA, 120 bp, Artificial Sequence
  ENSG00000159459_67 (sequence is synthesized)
gctccttttctatagcttcaacagaaatagcaataagtgttctcttttatttagacaaaacataatttagtctatttgtctgtttatattgtctttttactgaatatctaacagatattg

SEQ ID NO: 471893 - DNA, 120 bp, Artificial Sequence
  ENSG00000159459_68 (sequence is synthesized)
gccacgtcttttctctaggttaacattgatgcagtgcctatcatttgcacacatacacttaaccatatttcctattgattttctctttcagaatcagagaatgccgagtggtcctggttg

SEQ ID NO: 471894 - DNA, 120 bp, Artificial Sequence
  ENSG00000159459_69 (sequence is synthesized)
gtacttttatcattactccaaaacccagcatagcaaggtagaaaaaagtatccttttcagtaaataaacctaaatgctttatgctttctaactccacagaaaattttctgctttttctat

SEQ ID NO: 471895 - DNA, 120 bp, Artificial Sequence
  ENSG00000159459_70 (sequence is synthesized)
agtttcacgctggttcttattaatagaggtcattatgtcacccaagaattaaaattgaatcaataatcttatctagtatacaggcaatattcagattttcctgattatactacatatgtc

SEQ ID NO: 471896 - DNA, 120 bp, Artificial Sequence
  ENSG00000159459_71 (sequence is synthesized)
catatgtctttaatagctgttttgggaagaggattcaatcaagcatcatggacttcatcatcacacactcatttgattgtcatgtttctttagtttttgttttgttttgttttttgtttt

SEQ ID NO: 471897 - DNA, 70 bp, Artificial Sequence
  ENSG00000159459_72 (sequence is synthesized)
gttttttgtttttgtttttgttttgtgaaatggagcctcactctgttgtccaggctggaacgtagttgca

SEQ ID NO: 471898 - DNA, 74 bp, Artificial Sequence
  ENSG00000159459_73 (sequence is synthesized)
gtatttttagtaaagacaatgattccacccacctcggcctcccaacgtcctgggattacaggcgtgagccacct

SEQ ID NO: 471899 - DNA, 120 bp, Artificial Sequence
  ENSG00000159459_74 (sequence is synthesized)
tttcttttgtaacatcggcatttctatagagtaccaaatagattcagcttaaacagtttttggcaagaatactatgtaaatgatatattgcatcccattattaggcacatacgtcttttt

SEQ ID NO: 471900 - DNA, 120 bp, Artificial Sequence
  ENSG00000159459_75 (sequence is synthesized)
gtcccatgaaggatcatgttaagtttgatcagttagttaaggtgatgtctggctttgtccttatcaagtaaatactttacagcccatagcatagtaccctgtgcataataggtactgggt

SEQ ID NO: 471901 - DNA, 120 bp, Artificial Sequence
  ENSG00000159459_76 (sequence is synthesized)
aaatattttcagtagaaaataatggagactaagtttttgatcagggatattcctcatctattttgcattaggtttctctagaacacaattttatttctaggacaaagaggcattttgaat

SEQ ID NO: 471902 - DNA, 120 bp, Artificial Sequence
  ENSG00000159459_77 (sequence is synthesized)
acatgcttcagtatataaagtattttaataggtggttgggtctttcctgactgctttaatgtatttcatttgtttcatgcttccaaagcagtatatttaatgatagatttttttataggc

SEQ ID NO: 471903 - DNA, 65 bp, Artificial Sequence
  ENSG00000159459_78 (sequence is synthesized)
gaggatggaaatcagcgcggagttaccccagacccctcagcgtctggcatctatacctctccctc

SEQ ID NO: 471904 - DNA, 120 bp, Artificial Sequence
  ENSG00000159461_0 (sequence is synthesized)
cagcgacgccagagcccgtgggcgccgttcgcgaggccgccgcagaggcccggccgcagcgcagggaagcctgggggccagaggtcgccgctgccgccatgccgctgctcttcctcgagc

SEQ ID NO: 471905 - DNA, 120 bp, Artificial Sequence
  ENSG00000159461_1 (sequence is synthesized)
gcttcccctggcccagcctccgcacctacacgggcctcagcggcctggccctgctgggcaccatcatcagcgcctaccgcgcgctcagccagcccgaggccggccccggcgagccggacc

SEQ ID NO: 471906 - DNA, 120 bp, Artificial Sequence
  ENSG00000159461_2 (sequence is synthesized)
agctaacggcctcgctgcagcctgagccgccggcgcccgcccggccgagcgccgggggaccccgggcccgcgatgtggcccagtacctgctctcagacagcctcttcgtgtgggttctag

SEQ ID NO: 471907 - DNA, 120 bp, Artificial Sequence
  ENSG00000159461_3 (sequence is synthesized)
taaataccgcttgctgtgttttgatgttggtggctaagctcatccagtgtattgtgtttggccctcttcgagtgagtgagagacagcatctcaaagacaaattttggaattttattttct

SEQ ID NO: 471908 - DNA, 120 bp, Artificial Sequence
  ENSG00000159461_4 (sequence is synthesized)
acaagttcattttcatctttggtgtgctgaatgtccagacagtggaagaggtggtcatgtggtgcctctggtttgccggacttgtctttctgcacctgatggttcagctctgcaaggatc

SEQ ID NO: 471909 - DNA, 120 bp, Artificial Sequence
  ENSG00000159461_5 (sequence is synthesized)
gatttgaatatctttccttctcgcccaccacgccgatgagcagccacggtcgagtcctgtccctgttggttgccatgctgctttcctgctgtggactggcggccgtctgctccatcaccg

SEQ ID NO: 471910 - DNA, 120 bp, Artificial Sequence
  ENSG00000159461_6 (sequence is synthesized)
gctacacccacggaatgcacaccttggctttcatggctgcagagtctcttcttgtgacagtgaggactgctcatgtgattttacgatacgtaattcacctctgggacctcaaccacgaag

SEQ ID NO: 471911 - DNA, 120 bp, Artificial Sequence
  ENSG00000159461_7 (sequence is synthesized)
ggacgtgggaaggaaaggggacgtatgtctattacacagactttgtcatggagctcactctcctgtccctggacctcatgcaccatattcacatgttgttatttggcaacatctggttat

SEQ ID NO: 471912 - DNA, 120 bp, Artificial Sequence
  ENSG00000159461_8 (sequence is synthesized)
ccatggccagcctggtcatctttatgcagctgcgttacctgtttcatgaggtgcaacgtcgaattcgtcggcacaagaactatctacgtgtggttggaaacatggaggccaggtttgcag

SEQ ID NO: 471913 - DNA, 120 bp, Artificial Sequence
  ENSG00000159461_9 (sequence is synthesized)
ttgcaactccagaggagctggctgtcaacaatgacgactgtgccatctgttgggactccatgcaggctgcgcggaaactgccctgtggacatcttttccacaactcctgtcttcgttcct

SEQ ID NO: 471914 - DNA, 120 bp, Artificial Sequence
  ENSG00000159461_10 (sequence is synthesized)
ggctagaacaagacacctcctgtccaacatgcagaatgtctcttaatattgccgacaataatcgtgtcagggaagaacatcaaggagagaacttggatgagaatttggttcctgtagcag

SEQ ID NO: 471915 - DNA, 120 bp, Artificial Sequence
  ENSG00000159461_11 (sequence is synthesized)
cagccgaagggagacctcgcttaaaccaacacaatcacttcttccatttcgatgggtctcggattgcgagctggctgccgagtttttcggttgaagtgatgcacaccaccaacattcttg

SEQ ID NO: 471916 - DNA, 120 bp, Artificial Sequence
  ENSG00000159461_12 (sequence is synthesized)
gcattacgcaggccagcaactcccagctcaatgcaatggctcatcagattcaagagatgtttccccaggttccataccatctggtactgcaggacctccagctgacacgctcagttgaaa

SEQ ID NO: 471917 - DNA, 120 bp, Artificial Sequence
  ENSG00000159461_13 (sequence is synthesized)
taacaacagacaatattttagaaggacggattcaagtaccttttcctacacagcggtcagatagcatcagacctgcattgaacagtcctgtggaaaggccaagcagtgaccaggaagagg

SEQ ID NO: 471918 - DNA, 120 bp, Artificial Sequence
  ENSG00000159461_14 (sequence is synthesized)
ttctgctcagaccgagcgtgtgccactggacctcagtcctcgcctggaggagacgctggacttcggcgaggtggaagtggagcccagtgaggtggaagacttcgaggctcgtgggagccg

SEQ ID NO: 471919 - DNA, 120 bp, Artificial Sequence
  ENSG00000159461_15 (sequence is synthesized)
cttctccaagtctgctgatgagagacagcgcatgctggtgcagcgtaaggacgaactcctccagcaagctcgcaaacgtttcttgaacaaaagttctgaagatgatgcggcctcagagag

SEQ ID NO: 471920 - DNA, 120 bp, Artificial Sequence
  ENSG00000159461_16 (sequence is synthesized)
cttcctcccctcggaaggtgcgtcctctgaccccgtgaccctgcgtcgaaggatgctggctgccgccgcggaacggaggcttcagaagcagcagacctcctagcgctcccttgccttcct

SEQ ID NO: 471921 - DNA, 120 bp, Artificial Sequence
  ENSG00000159461_17 (sequence is synthesized)
cagctgcctcctgcgccctgtgcccgactgactggaggaggcctgtcccaattctgcccgctccatggaaaagcgggcttgactgcattgccgctgtataaagcatgtggtcttatagtg

SEQ ID NO: 471922 - DNA, 120 bp, Artificial Sequence
  ENSG00000159461_18 (sequence is synthesized)
tttggacagctgataaatttaatccttctttgtaatactttctatgtgacatttctcttccccttagaaacactgcaaattttaactgtaggtatgatctcttctggtgttgactggact

SEQ ID NO: 471923 - DNA, 120 bp, Artificial Sequence
  ENSG00000159461_19 (sequence is synthesized)
gcttggggtgggggacgatcaggaggaagtgagcagtcgcctgcctgcagcaggcagcttctactcctgcctcatgcgtacgtcccacaaatgcaggtgtcctgagcaccacacccagtg

SEQ ID NO: 471924 - DNA, 120 bp, Artificial Sequence
  ENSG00000159461_20 (sequence is synthesized)
ggaagagtgtgggggaggcgcacagtgtgagcccgcccccacgtcgtggggtaacatctgttatcaaactgctgtcgttgttgtggaagcatgtagactgtgccagaggccagacccacg

SEQ ID NO: 471925 - DNA, 120 bp, Artificial Sequence
  ENSG00000159461_21 (sequence is synthesized)
ggctcatgcacccctgagccagcagggcatcttggaaaaggaactcttggttcgatacctggagcagaggaggggaaagtccagggctatagggtgtgatgaagtcacccctttctgtcc

SEQ ID NO: 471926 - DNA, 120 bp, Artificial Sequence
  ENSG00000159461_22 (sequence is synthesized)
cactacatctgggactgactttccgagcctccagtccaaagccggcttgatttccgtgaactctggtgctcctgcatctcatgagtgtgccccatgggtcccctcccctctcagcatttc

SEQ ID NO: 471927 - DNA, 120 bp, Artificial Sequence
  ENSG00000159461_23 (sequence is synthesized)
cttgtcccgtctggacctggggagtggttaggcagcaagctttggtttatggttttcattcattggtgaagtaaattaggcagtgctaaagcctgtgggtttggtccttgaacaagatgt

SEQ ID NO: 471928 - DNA, 120 bp, Artificial Sequence
  ENSG00000159461_24 (sequence is synthesized)
gggccttgcaagatgggagagtaaaccttgaagggctttattaaagaaataaaaaagaacttttgtatcttttatcctgggagcactgcgttttcctagctgtgttattcctggtttaat

SEQ ID NO: 471929 - DNA, 120 bp, Artificial Sequence
  ENSG00000159461_25 (sequence is synthesized)
tcagcagagaaggtaaggtgtgaacctacctgccttggagagggcccaggtcccaaatctcttcaaattcttcacatgtttaactttaaggatttgaaccatgaagtcataggttacaga

SEQ ID NO: 471930 - DNA, 120 bp, Artificial Sequence
  ENSG00000159461_26 (sequence is synthesized)
ttttttttttttttttttactctttgaaagctttgttttgtggtagtccttttgggaagaatccagtattatccacaattattggcaaagtttaaatgtattttacataacggaaagttt

SEQ ID NO: 471931 - DNA, 120 bp, Artificial Sequence
  ENSG00000159461_27 (sequence is synthesized)
attggcaaagtttaaatgtattttacataacggaaagtttttagaatgttgaaaagtaattgaaaaaggtgataggtaaatttttaggcaaagataatttatttcaataaatctttcaaa

SEQ ID NO: 471932 - DNA, 120 bp, Artificial Sequence
  ENSG00000159461_28 (sequence is synthesized)
agccttaccttgaaatgctgttagtaaatttctgtgatttttttttttaatttgttttgctgagagcatagctatttgtttttattgtaaaacaataataataataaaaagcaaactcta

SEQ ID NO: 471933 - DNA, 120 bp, Artificial Sequence
  ENSG00000159461_29 (sequence is synthesized)
tctctttttaaacagatgccaacagtgaaacggcattacatgccaccccaaaactcagatttcaagcctctcttgaaaaaaccagagcatctggtaacactgggccccactggtctacct

SEQ ID NO: 471934 - DNA, 120 bp, Artificial Sequence
  ENSG00000159461_30 (sequence is synthesized)
ctgatgctggtactgtcagtcatctcccatggacccctttggccacgcttgccgagagagcacttgtgtgctaacctgatctaagccctttatatgaattactttaacagctctaagagg

SEQ ID NO: 471935 - DNA, 120 bp, Artificial Sequence
  ENSG00000159461_31 (sequence is synthesized)
gagcactgttaacccattcagctgacatacagctgaagaaatggaggctggagaggttagcactggcctggccctggcgtctgtctcccaggtcctccctgttgaccactctgcctttca

SEQ ID NO: 471936 - DNA, 120 bp, Artificial Sequence
  ENSG00000159461_32 (sequence is synthesized)
gctgagcattgtacacacactcagcgcatctgtgcgtcacacacccatggttggtggcagctacagcaggtgtgtcctgtggatagagggggttttgttccagctcttaaggacagggcc

SEQ ID NO: 471937 - DNA, 120 bp, Artificial Sequence
  ENSG00000159461_33 (sequence is synthesized)
agcactgtgttcctcaagtgggtttgggccctggcagaccctgtgattgtgggagttctgtgctgtgtctgtgggtggaggggatgggcaggaagagacagcagggaacagcactgaagg

SEQ ID NO: 471938 - DNA, 120 bp, Artificial Sequence
  ENSG00000159461_34 (sequence is synthesized)
gttcctccctggtgcagagagaatttgcgcccatctgttgggggctggatgtcttggtcattgggtggtgctgagtgacagcttcatgaaggtgcctggacatggggagatgtgaaatca

SEQ ID NO: 471939 - DNA, 120 bp, Artificial Sequence
  ENSG00000159461_35 (sequence is synthesized)
gtgcatttcagctttccttctcgcccaccacgccgatgagcagccacggtcgagtcctgtccctgttggttgccatgctgctttcctgctgtggactggcggccgtctgctccatcaccg

SEQ ID NO: 471940 - DNA, 120 bp, Artificial Sequence
  ENSG00000159461_36 (sequence is synthesized)
attaggagggaaagaacagctagagcgtgtgtgccgggtatatgaccttgttggtcttactctgctctggcagagtggaaggatttttaggggcttctttttatttactgggaccattta

SEQ ID NO: 471941 - DNA, 120 bp, Artificial Sequence
  ENSG00000159461_37 (sequence is synthesized)
cattcctgtgttttaaattttgaaacgttcattttatttctgtggcggataatctaaccttttctgaacactactaggttcactctgttgtgatctaggcctaccttgggactccttcga

SEQ ID NO: 471942 - DNA, 120 bp, Artificial Sequence
  ENSG00000159461_38 (sequence is synthesized)
cttaaaccaacacaatcacttcttccatttcgatggagatgacagctccatgcgtgttactgcccctgaagacgttccagtgggacaggaggtggaggtggtcgacagtgatactgatgc

SEQ ID NO: 471943 - DNA, 120 bp, Artificial Sequence
  ENSG00000159461_39 (sequence is synthesized)
acaccagggtttccctgagtctgtgatttgatttctgtgtgactctggactgtttttggtactgtttctcttccagcggtcagatagcatcagacctgcattgaacagtcctgtggaaag

SEQ ID NO: 471944 - DNA, 120 bp, Artificial Sequence
  ENSG00000159461_40 (sequence is synthesized)
ggagctgtggagggggaatgtggtcccgacagtggtcttcctcagtcctgaagcttgcaaggcttagggcacgagtacaaaagaaactgtgctgtatccatcccaataatgaagggtagc

SEQ ID NO: 471945 - DNA, 120 bp, Artificial Sequence
  ENSG00000159461_41 (sequence is synthesized)
tgataaggcacacatgctggtttcgttcattagaacagataatttcagactgatcagatcaacggtattttggctagagaattttgctttcatcttggccttgaatacttatgtaaatcc

SEQ ID NO: 471946 - DNA, 120 bp, Artificial Sequence
  ENSG00000159461_42 (sequence is synthesized)
cgcagtgatcagaaaagtttctccaggatttaaagcctcacttggatttaatatggcttcttggatcttgtctccttgcatgttcccatttggggttgaaagtgggctgtaaatgactga

SEQ ID NO: 471947 - DNA, 120 bp, Artificial Sequence
  ENSG00000159461_43 (sequence is synthesized)
caggaagcggtgggatttatggactctgtgggctgtagattaagtctcctggtccttctgatggagagtttagtagaaggcagtgaagggtgaagttcctgtttatctactgctgtgtaa

SEQ ID NO: 471948 - DNA, 120 bp, Artificial Sequence
  ENSG00000159461_44 (sequence is synthesized)
agctgaactttacagtcctaaagaagggagaagcgaaagaactcaactcacatctcttgcttaatttcaaatctgtttttgcatttgagttagcaggttctagtaaataccgcttgctgt

SEQ ID NO: 471949 - DNA, 120 bp, Artificial Sequence
  ENSG00000159479_0 (sequence is synthesized)
ggaagtgaaatcgtggcagccgcctcggccgccgcaatgcagagagaggagaagcagcttgaggcatcattagatgcactgctgagtcaagtggctgatctgaagaactctctggggagt

SEQ ID NO: 471950 - DNA, 120 bp, Artificial Sequence
  ENSG00000159479_1 (sequence is synthesized)
ttcatttgcaagttggagaacgagtatggccggctgacctggccatctgtcctggacagctttgccttgctttctggacagctgaacactctgaacaaggtcttgaagcatgaaaaaaca

SEQ ID NO: 471951 - DNA, 120 bp, Artificial Sequence
  ENSG00000159479_2 (sequence is synthesized)
ccgctgttccgtaaccaggtcatcattcctctggtgttgtctccagaccgagatgaagatctcatgcggcagactgaaggacgggtgcctgttttcagccatgaggtagtccctgaccat

SEQ ID NO: 471952 - DNA, 120 bp, Artificial Sequence
  ENSG00000159479_3 (sequence is synthesized)
ctgagaaccaagcctgaccctgaagtggaagaacaggagaagcaactgacgacagatgctgcccgcattggtgcagatgcagcccagaagcagatccagagcttgaataaaatgtgttca

SEQ ID NO: 471953 - DNA, 120 bp, Artificial Sequence
  ENSG00000159479_4 (sequence is synthesized)
aaccttctggagaaaatcagcaaagaggagcgagaatcagagagtggaggtctccggccgaacaagcagacctttaaccctacagacactaatgccttggtggcagctgttgcctttggg

SEQ ID NO: 471954 - DNA, 120 bp, Artificial Sequence
  ENSG00000159479_5 (sequence is synthesized)
aaaggactatctaattggagaccttcaggcagcagtggtcctggccaggcaggccagccaggagctgggacgatccttgcaggaacctcaggattacagcaggtgcagatggcaggagct

SEQ ID NO: 471955 - DNA, 120 bp, Artificial Sequence
  ENSG00000159479_6 (sequence is synthesized)
ccaagccagcagcagccaatgctcagtggggtacaaatggctcaggcaggtcaaccagggaaaatgccaagtggaataaaaaccaacatcaagtcggcttccatgcatccctaccagcgg

SEQ ID NO: 471956 - DNA, 120 bp, Artificial Sequence
  ENSG00000159479_7 (sequence is synthesized)
tgagtgtggctggcaacctcgactccctggtgctctttgcagagttgggcagtgaaattaccttttgctcaaggctcacctagatgggtacaataaaaagaacatgggctttcagcagca

SEQ ID NO: 471957 - DNA, 120 bp, Artificial Sequence
  ENSG00000159479_8 (sequence is synthesized)
gacctaatttttctgagcctgtttctcatttgtaaatggtgataatacctacctcatagggttgttgtgaggattaaaatgaggaaatgaatgtaaagcacttagtacagtatatgaaat

SEQ ID NO: 471958 - DNA, 120 bp, Artificial Sequence
  ENSG00000159479_9 (sequence is synthesized)
aatgggtattcaataaatgatagtttctacagatccttctccccaccaccctccacagtccttgatccagaacttaccctaatctgatactgcctcacgtcaatggtgagctgatggaca

SEQ ID NO: 471959 - DNA, 120 bp, Artificial Sequence
  ENSG00000159479_10 (sequence is synthesized)
caagatcaaataaggctatgcttattttgtgctgccagaaactgtagcaacctctgtgttcttagaggcacactgtttttgcaggccctcctgcctgggtttcattctggctatccctct

SEQ ID NO: 471960 - DNA, 120 bp, Artificial Sequence
  ENSG00000159479_11 (sequence is synthesized)
aaggcgcaaggtgaagaagcttctgggccaggaaggaaaaaaaaatgcccacctgcagctctggtgaagcttgggcctgctctcctttccatcctctaaggagccaacttggcttttacc

SEQ ID NO: 471961 - DNA, 120 bp, Artificial Sequence
  ENSG00000159479_12 (sequence is synthesized)
tgtcaaatagtcataaagtcccctatcctttaccccaccttatacacacgaggctttctcaggaagtggctctgccaggcaggactatgtgggaaagggtttttccttagcacacgaaaa

SEQ ID NO: 471962 - DNA, 120 bp, Artificial Sequence
  ENSG00000159479_13 (sequence is synthesized)
agccccttcccctggattcatgtttcttattttggagggagaagggaattgcacttcacactgccatcagggtttagttgacctcataatggtgcccactttctcgactttggccaggat

SEQ ID NO: 471963 - DNA, 120 bp, Artificial Sequence
  ENSG00000159479_14 (sequence is synthesized)
ttccttcaaagaaaacgactttccttcatttccctaagcctgtggcccaaatggtggaccagaatgatggtgggagggggcaacccccagtagctttgcctgcttttataaagttgaaca

SEQ ID NO: 471964 - DNA, 120 bp, Artificial Sequence
  ENSG00000159479_15 (sequence is synthesized)
aattgaatttagacattcaggctaacctgcctttcttagtactcctttgttggcatgggcaggggttgagtcagcagaagtggaccaaaggattcctctgaataaagttatttaaattga

SEQ ID NO: 471965 - DNA, 120 bp, Artificial Sequence
  ENSG00000159479_16 (sequence is synthesized)
agccagcagcagccaatgctcagtggggtacaaatggctcaggcaggtcaaccaggtaaggtggcaggggttgaaatgaagctgactttgagcaggagtgggagggaataagctagatta

SEQ ID NO: 471966 - DNA, 120 bp, Artificial Sequence
  ENSG00000159479_17 (sequence is synthesized)
tctgggcctccagcatctctagacctagaggttttctctatttctccttttcactgtgacccaggaaataattttcagaagtaaaaaaatctcatctgagactctgcaacaggcaccaga

SEQ ID NO: 471967 - DNA, 120 bp, Artificial Sequence
  ENSG00000159479_18 (sequence is synthesized)
gagtgaggaagaactttgagtaacagaaactgctccaatttctcatccgcatctcacatctctgtgtcaactatccttctatcccatttattctggtattagatatgttgtcagtgtctc

SEQ ID NO: 471968 - DNA, 120 bp, Artificial Sequence
  ENSG00000159479_19 (sequence is synthesized)
gagtggaggtatgatgggactggtggctaaacagagaaggagaggtatataagatcactggaatgggaatggttgttttggaagtagtgaagttaggacacaagggtgaactgctttggg

SEQ ID NO: 471969 - DNA, 120 bp, Artificial Sequence
  ENSG00000159479_20 (sequence is synthesized)
gccttttgtatttaaggccagcactgaagcagtggaggaaatgggcaaagtaagaagagagaattctgagataggcttgggggtcctctggctctttttctgggctgtgagggagtctag

SEQ ID NO: 471970 - DNA, 120 bp, Artificial Sequence
  ENSG00000159479_21 (sequence is synthesized)
atgttgctgaattcagaactccaaaccctggcactcatactggtcttccagctgccacgttcagtcctgcatcagaagcatacttcaggatccccattactttttcttcaggtctccggc

SEQ ID NO: 471971 - DNA, 120 bp, Artificial Sequence
  ENSG00000159495_0 (sequence is synthesized)
gggagatggatcaggtggcaaccttgcggcttgagtctgtcgacctgcagagctccaggaacaacaaggagcaccacacgcaggagatgggcgtcaagcggctcactgtgcgccgcggcc

SEQ ID NO: 471972 - DNA, 120 bp, Artificial Sequence
  ENSG00000159495_1 (sequence is synthesized)
agcccttctacctccggctgagcttcagccgacccttccagtcccagaacgaccacatcacctttgtggctgagaccggacccaagccgtcagagctgctggggacccgagccacattct

SEQ ID NO: 471973 - DNA, 120 bp, Artificial Sequence
  ENSG00000159495_2 (sequence is synthesized)
tcctcacccgggtccagcccgggaatgtctggagcgcttctgatttcaccattgactccaactctctccaagtttcccttttcacaccagccaatgcagttattggccattacactctga

SEQ ID NO: 471974 - DNA, 120 bp, Artificial Sequence
  ENSG00000159495_3 (sequence is synthesized)
aaatagagatctctcagggccaaggtcacagtgtgacttacccgctgggaactttcatcctactttttaacccttggagtccagaggacgacgtctacctgccaagtgaaatactgctgc

SEQ ID NO: 471975 - DNA, 120 bp, Artificial Sequence
  ENSG00000159495_4 (sequence is synthesized)
aggagtatatcatgcgagattatggctttgtttacaagggtcatgaaagattcatcacctcctggccctggaactacgggcagtttgaagaggacatcatagacatctgctttgagatcc

SEQ ID NO: 471976 - DNA, 120 bp, Artificial Sequence
  ENSG00000159495_5 (sequence is synthesized)
tgaacaagagcctgtatcacttaaagaacccggccaaagactgttcccagcggaacgacgtggtgtatgtgtgcagggtggtgagtgccatgatcaacagcaacgatgacaatggcgtgc

SEQ ID NO: 471977 - DNA, 120 bp, Artificial Sequence
  ENSG00000159495_6 (sequence is synthesized)
tgcaggggaactggggcgaggactactccaaaggggtcagtcctctggagtggaagggcagtgtggccatcctacagcagtggtcagccaggggcgggcagcctgtgaagtacggacagt

SEQ ID NO: 471978 - DNA, 120 bp, Artificial Sequence
  ENSG00000159495_7 (sequence is synthesized)
gctgggtcttcgcctctgttatgtgcaccgtaatgagatgcttaggtgttccaacccgtgttgtttccaatttccgttccgcgcacaacgtggataggaacttgaccatcgatacgtact

SEQ ID NO: 471979 - DNA, 120 bp, Artificial Sequence
  ENSG00000159495_8 (sequence is synthesized)
atgaccgaaatgccgagatgctgtcaactcagaaacgagacaaaatatggaacttccacgtctggaatgagtgctggatgatccggaaagatctcccaccaggatacaacgggtggcagg

SEQ ID NO: 471980 - DNA, 120 bp, Artificial Sequence
  ENSG00000159495_9 (sequence is synthesized)
gctgtggccctgcctctgtgaaggccatcagggaaggggatgtccacctggcctatgacaccccttttgtgtatgccgaggtgaacgccgatgaagtcatttggctccttggggatggcc

SEQ ID NO: 471981 - DNA, 120 bp, Artificial Sequence
  ENSG00000159495_10 (sequence is synthesized)
aggcccaggaaatcctggcccacaacaccagttccatcgggaaggagatcagcactaagatggtggggtcagaccagcgccagagcatcaccagctcctacaagtacccagaaggatccc

SEQ ID NO: 471982 - DNA, 120 bp, Artificial Sequence
  ENSG00000159495_11 (sequence is synthesized)
ctgaggagagagctgtcttcatgaaggcttctcggaaaatgctgggcccccaaagagcttctttgcccttcctggatctcctggagtctgggggtcttagggatcagccagcgcagctgc

SEQ ID NO: 471983 - DNA, 120 bp, Artificial Sequence
  ENSG00000159495_12 (sequence is synthesized)
agcttcacctggccaggatacccgagtggggccaggacctgcagctgctgctgcgtatccagagggtgccagacagcacccaccctcgggggcccatcggactggtggtgcgcttctgtg

SEQ ID NO: 471984 - DNA, 120 bp, Artificial Sequence
  ENSG00000159495_13 (sequence is synthesized)
cacaggccctgctgcatgggggtggtacccagaagcccttctggaggcacacagtgcggatgaacctggactttgggaaggagacacagtggccgctcctcctgccctacagcaattaca

SEQ ID NO: 471985 - DNA, 120 bp, Artificial Sequence
  ENSG00000159495_14 (sequence is synthesized)
gaaacaagctaacggacgaaaagctcatccgcgtgtctggcatcgcggaggttgaagagacagggaggtccatgctggtcctaaaagatatctgtctggagcctccccacttgtctattg

SEQ ID NO: 471986 - DNA, 120 bp, Artificial Sequence
  ENSG00000159495_15 (sequence is synthesized)
aggtgtctgagagggctgaggtgggcaaggcgctgagagtccatgtcaccctcaccaacaccttaatggtggctctgagcagctgcacgatggtgctggaaggaagcggcctcatcaatg

SEQ ID NO: 471987 - DNA, 120 bp, Artificial Sequence
  ENSG00000159495_16 (sequence is synthesized)
ggcagatagcaaaggaccttgggactctggtggccggacacaccctccaaattcaactggacctctacccgaccaaagctggaccccgccagctccaggttctcatcagcagcaacgagg

SEQ ID NO: 471988 - DNA, 120 bp, Artificial Sequence
  ENSG00000159495_17 (sequence is synthesized)
tcaaggagatcaaaggctacaaggacatcttcgtcactgtggctggggctccctgagacccgccctccagctgccctccctggcacccctgccccacctggctcctttctactcctggct

SEQ ID NO: 471989 - DNA, 120 bp, Artificial Sequence
  ENSG00000159495_18 (sequence is synthesized)
atgtcgtcttggctccacctctgtcctctctctagcctgcctgggaatgaatgaagctctgttagaaacaccgtgtgctttgggaagagacaataaagatgtctttatttatcaccagca

SEQ ID NO: 471990 - DNA, 120 bp, Artificial Sequence
  ENSG00000159496_0 (sequence is synthesized)
taaacccatctcctcctatgccacctgcctgggcccctcctgggactttatcactgtgccacactttttggaactactggttagaaggtgagtgtccatccccctccaagacacagaggt

SEQ ID NO: 471991 - DNA, 120 bp, Artificial Sequence
  ENSG00000159496_1 (sequence is synthesized)
gcctctgtcccctactggctctgtcttgaagatgcacctctcggagcctcggttggctcctctggaacagggagtagtgagaagacgaacctcacagggttcttgtagggactcaatgat

SEQ ID NO: 471992 - DNA, 120 bp, Artificial Sequence
  ENSG00000159496_2 (sequence is synthesized)
ctaagacacagcaaacaaaggggtccctagagcctaaaactctggaaaatctgctgggggtgctgtgattcatgtttgttacttttctcttccccctcacttgaagcagctctcagcatt

SEQ ID NO: 471993 - DNA, 120 bp, Artificial Sequence
  ENSG00000159496_3 (sequence is synthesized)
ctgcctcaatggcctgtatcactcactgtttggaaaaacacatagaaaccaagtctgcgatggcactggtaaaggatgtctgagattccttctggctggtctttctccttgacacagaca

SEQ ID NO: 471994 - DNA, 120 bp, Artificial Sequence
  ENSG00000159496_4 (sequence is synthesized)
gaagaggggtcccttggtgctgaaaaaggagccacaggcccactcagacatctggagaggctcactggggttctccaaaggttggggttcactcattcaacacatacattcaaaacacct

SEQ ID NO: 471995 - DNA, 120 bp, Artificial Sequence
  ENSG00000159496_5 (sequence is synthesized)
catttgtgcatcgctcttcttggggcttggcataatttcataaacaaagcagatgacaatcccccggccttgattctactcagagtcaggcactcacagtagacagaataaacaagtcat

SEQ ID NO: 471996 - DNA, 120 bp, Artificial Sequence
  ENSG00000159496_6 (sequence is synthesized)
atctacagaatgttacaggtgagaccctcatggcctcctctacgtatggtggcatcctcccagattctgactagaatgacgcagcccagcaacaaatataaactgggtggatttagggtt

SEQ ID NO: 471997 - DNA, 120 bp, Artificial Sequence
  ENSG00000159496_7 (sequence is synthesized)
ctgaagggccttttcacccacaaaacatgggggaaaatatgtggactctggctggggagagactaaaggagctctggggctcatacttcttataattcccacgagaaggctgacatctgg

SEQ ID NO: 471998 - DNA, 120 bp, Artificial Sequence
  ENSG00000159496_8 (sequence is synthesized)
ggacttcccccacaagaggcaaatagtgagttctgtaaatggagacttaggtcccctgcaaagcagaggggaggctggggtcacagctggccactgagagacccatccccctcagcaccg

SEQ ID NO: 471999 - DNA, 120 bp, Artificial Sequence
  ENSG00000159496_9 (sequence is synthesized)
tggcttcccagctctccctgtcctcctccccccgacatctgccccttccctcctaaccccaggaccaggggacccagatctggagctttgatgaggaagctgctcacaaatctgcctgca

SEQ ID NO: 472000 - DNA, 120 bp, Artificial Sequence
  ENSG00000159496_10 (sequence is synthesized)
gctgcagtcttgagtgcccaggtgtacagtgctgtgctccagggcctttgggaagagaatgtctgtgggacgccagggcgcacgagggtctgtacagccctgctgtatggccaggtctgc

SEQ ID NO: 472001 - DNA, 120 bp, Artificial Sequence
  ENSG00000159496_11 (sequence is synthesized)
cccttccaggacagcactgatggcttacgcaccatcacctccattttgttcaactggccccccgaaaacacttcagtttactatcagcccccgcaacggtcatctttccggataaagctg

SEQ ID NO: 472002 - DNA, 120 bp, Artificial Sequence
  ENSG00000159496_12 (sequence is synthesized)
caggaacctctcctggcctggactgggcttggaggaccatcaggaaattgtcctaggccagttggtgcttccggagcccaacgaggccaagccagatgatcctgctccacgtcctgggca

SEQ ID NO: 472003 - DNA, 120 bp, Artificial Sequence
  ENSG00000159496_13 (sequence is synthesized)
acacgcattaacaatgccggccctggagccagcaccaccactgctggcggacctggggcctgctctggagccagagtcacctgcagccctgggtccaccaggatatctacattcagcacc

SEQ ID NO: 472004 - DNA, 120 bp, Artificial Sequence
  ENSG00000159496_14 (sequence is synthesized)
agggccagcaccagcaccaggggaagggccccctccagggacagtgctggagccacagtcagccccagagtcctcctgtccctgtcgtgggtctgtaaagaaccaacccagtgaggagct

SEQ ID NO: 472005 - DNA, 120 bp, Artificial Sequence
  ENSG00000159496_15 (sequence is synthesized)
gcctgacatgacgaccttccctcccaggctgctggcagagcagctgaccctcatggatgcggagctgttcaagaaggtggtgctccacgaatgcttgggctgcatctggggccaaggaca

SEQ ID NO: 472006 - DNA, 120 bp, Artificial Sequence
  ENSG00000159496_16 (sequence is synthesized)
tctgaaggggaatgagcacatggcacccacagttcgtgccaccatcgcacacttcaacaggctcaccaactgcatcaccacctcctgcctcggggaccacagcatgagggcccgggacag

SEQ ID NO: 472007 - DNA, 120 bp, Artificial Sequence
  ENSG00000159496_17 (sequence is synthesized)
ggccagggtggtggagcactggatcaaggtggccagggagtgcctaagcctcaacaacttctcctcggtgcacgtcatcgtctctgctctgtgcagcaacccaataggtcagctacacaa

SEQ ID NO: 472008 - DNA, 120 bp, Artificial Sequence
  ENSG00000159496_18 (sequence is synthesized)
gacgtgggcaggagtgtccagcaaaagcatgaaagagctaaaagaactctgcaaaaaagacactgcagtgaagagggacctactgatcaaggcggggagctttaaggtggccacccagga

SEQ ID NO: 472009 - DNA, 120 bp, Artificial Sequence
  ENSG00000159496_19 (sequence is synthesized)
gaggaacccccagagagtccagatgaggctgcggaggcagaagaagggtgtggtccccttcctgggggattttctgactgagttacagaggctggattcggccatcccggacgacctgga

SEQ ID NO: 472010 - DNA, 120 bp, Artificial Sequence
  ENSG00000159496_20 (sequence is synthesized)
tggcaacaccaacaagaggagcaaggaggtccgagttctgcaggaaatgcagctgctccaagtggctgccatgaattacaggcttcggcctcttgagaaatttgtcacctatttcacaag

SEQ ID NO: 472011 - DNA, 120 bp, Artificial Sequence
  ENSG00000159496_21 (sequence is synthesized)
aatggagcagctcagtgacaaagagagctacaagctgtcctgccagctggagcccgaaaacccgtaggctggcaacatcctgcagtggctgggaacccaccgggatgctggccagaacac

SEQ ID NO: 472012 - DNA, 120 bp, Artificial Sequence
  ENSG00000159496_22 (sequence is synthesized)
cggctctgcaccatccctcacccagaccgtagacaccagggaaccacatctaggaggctggcagctcagctgcatcttgccctggatcctcatcaccaactgctcctgctggccaggatc

SEQ ID NO: 472013 - DNA, 120 bp, Artificial Sequence
  ENSG00000159496_23 (sequence is synthesized)
aggccatgggacttttgtgagtcaggcgggagaccattttatgtttattttctttagtgtataagtaagggttttttcttaactttcgttaaaataaaattttaaaaaactattcaaaat

SEQ ID NO: 472014 - DNA, 120 bp, Artificial Sequence
  ENSG00000159496_24 (sequence is synthesized)
taggcgatgctcgagagaacaacatgttctcctgctgtatcccgacatgctgccgacctcctcgtcgcacaagaggccaaaatgagagtctttcccgagaatatagacattggttcaacc

SEQ ID NO: 472015 - DNA, 120 bp, Artificial Sequence
  ENSG00000159496_25 (sequence is synthesized)
ctcaccctcgacgcctctggccctttgccagaaggcacccacaggtaacacagggcccagggcaggcccatccaggctaggcctcagctgtgcccatcagggcagcctcaggcccctccc

SEQ ID NO: 472016 - DNA, 120 bp, Artificial Sequence
  ENSG00000159496_26 (sequence is synthesized)
cacttgtttgggggaaacaggagatgaggggccctccctggataggagcaggtaggttgtcaggtgtttggagcctggtaggtatgtcaggttcacagcccaggcagtgcctggcaggat

SEQ ID NO: 472017 - DNA, 120 bp, Artificial Sequence
  ENSG00000159496_27 (sequence is synthesized)
gggaaggtgagtgtcaaggacacagtttgtctgctcagatctgaatcccaagtcctcaagctgtcatctgccggagacctcaggcttctctggctggaggtctatgcagatgctcctatg

SEQ ID NO: 472018 - DNA, 120 bp, Artificial Sequence
  ENSG00000159496_28 (sequence is synthesized)
tgccaaatcctgttggggaagggggtgccagggatgagttctaatgggggtgtcccactgtggggtcagccagacaggccactgacacctcttggcccggctctcgggcactctctttgc

SEQ ID NO: 472019 - DNA, 120 bp, Artificial Sequence
  ENSG00000159496_29 (sequence is synthesized)
agagctccacacaacagaccaaacaagagctgttggatggattcaatttctccatattcttcaaagggcacgtgcaccacaccaccaaccacgtccagtgccggtctgcgtatgaaaatg

SEQ ID NO: 472020 - DNA, 120 bp, Artificial Sequence
  ENSG00000159496_30 (sequence is synthesized)
tcggcctcttgagaaatttgtcacctatttcacaagaatggagcagctcagtgacaaagagagatggggtttcacgatgatgtccaggatcgtctcaaactcctggcctcaagcaatcca

SEQ ID NO: 472021 - DNA, 120 bp, Artificial Sequence
  ENSG00000159496_31 (sequence is synthesized)
gctcagtgacaaagagaggctgcactgcagtgtcaccatctctgttcactgcaacgtctgccttctgggctcaagtccttcctcagcctcccaagcagctgggactaccgctgtacacca

SEQ ID NO: 472022 - DNA, 120 bp, Artificial Sequence
  ENSG00000159496_32 (sequence is synthesized)
caactctgagaacaggctgggggcgctgcatgggaccccttcagaaaactgccccagggaccagccccttctccctgcctgccaaaggcccccacagcaacttccacccaggccctgtca

SEQ ID NO: 472023 - DNA, 120 bp, Artificial Sequence
  ENSG00000159496_33 (sequence is synthesized)
tgacggtgagaacaacggcaacagctacaggaaactgagccctcagaggccctgtgaggtagctgtggtttgcatcactctttacagaagaggaaacagtctcagggaggcccggctgca

SEQ ID NO: 472024 - DNA, 120 bp, Artificial Sequence
  ENSG00000159496_34 (sequence is synthesized)
gagagcctatggccatgcctccacggccagcatcaagccctgttgcatggggaccactggggacccaggattccagctgggcaggcactgacaggggacctgatgtgtggctcatggtgg

SEQ ID NO: 472025 - DNA, 120 bp, Artificial Sequence
  ENSG00000159496_35 (sequence is synthesized)
ctgggccagtggtatgagcacggtgccaggtggctcccgccactccctggggatccaagtgcggggtggctggggtgtaactgggggagaggaggagagcctcactgtccctgtcgctga

SEQ ID NO: 472026 - DNA, 120 bp, Artificial Sequence
  ENSG00000159516_0 (sequence is synthesized)
atcttcttgccattcagttgtagatctttgaagactctgattctctgagactgaggagagatgtcttaccagcagcagcagtgcaagcagccctgccagccacctcctgtgtgccccacg

SEQ ID NO: 472027 - DNA, 120 bp, Artificial Sequence
  ENSG00000159516_1 (sequence is synthesized)
ccaaagtgcccagagccatgtccacccccgaagtgccctgagccttacctgcctcctccttgtccacctgagcattgcccacctccaccatgccaggataaatgccctcctgtgcaacca

SEQ ID NO: 472028 - DNA, 120 bp, Artificial Sequence
  ENSG00000159516_2 (sequence is synthesized)
atcatcttcccttcagctgtagtgggaggctgcatcttccctaacctctgtctggcttgagcgttgacagagaaaaggcttagttctgaaaaccgatatgttgttggaagatgagcagcc

SEQ ID NO: 472029 - DNA, 120 bp, Artificial Sequence
  ENSG00000159516_3 (sequence is synthesized)
agatcactgcctaatctcgctttgctgtctgtgatgtagatggtggttcctatcctgagagcaagtgtgtttattcttttgcttctccccaataaagcacatgtttcatggtcaagccca

SEQ ID NO: 472030 - DNA, 120 bp, Artificial Sequence
  ENSG00000159527_0 (sequence is synthesized)
cctctcttccagggctgccgtccacactctcccggtcagagtcctgggaccacatggggacgctgccatggcttcttgccttcttcattctgggtctccaggcttgggatactcccacca

SEQ ID NO: 472031 - DNA, 120 bp, Artificial Sequence
  ENSG00000159527_1 (sequence is synthesized)
tcgtctcccgcaaggagtggggggcaagaccgctcgcctgcagggccctgctgaccctgcctgtggcctacatcatcacagaccagctcccagggatgcagtgccagcagcagagcgttt

SEQ ID NO: 472032 - DNA, 120 bp, Artificial Sequence
  ENSG00000159527_2 (sequence is synthesized)
gcagccagatgctgcgggggttgcagtcccattccgtctacaccataggctggtgcgacgtggcgtacaacttcctggttggggatgatggcagggtgtatgaaggtgttggctggaaca

SEQ ID NO: 472033 - DNA, 120 bp, Artificial Sequence
  ENSG00000159527_3 (sequence is synthesized)
tccaaggcttgcacacccagggctacaacaacatttccctgggcatcgccttctttggcaataagataggcagcagtcccagccctgctgccttatcagctgcagagggtctgatctcct

SEQ ID NO: 472034 - DNA, 120 bp, Artificial Sequence
  ENSG00000159527_4 (sequence is synthesized)
ccaggaaggtttgccccaacatcatcaaacgatctgcttgggaagccagagagacacactgccctaaaatgaacctcccagccaaatatgtcatcatcatccacaccgctggcacaagct

SEQ ID NO: 472035 - DNA, 120 bp, Artificial Sequence
  ENSG00000159527_5 (sequence is synthesized)
gcactgtatccacagactgccagactgtcgtccgaaacatacagtcctttcacatggacacacggaacttttgtgacattggatatcacttcctggtgggccaggatggtggcgtgtatg

SEQ ID NO: 472036 - DNA, 120 bp, Artificial Sequence
  ENSG00000159527_6 (sequence is synthesized)
aaggggttggatggcacatccaaggctctcacacttatggattcaacgatattgccctaggaattgccttcatcggctactttgtagaaaagcctccaaatgctgcagcgctggaggcgg

SEQ ID NO: 472037 - DNA, 120 bp, Artificial Sequence
  ENSG00000159527_7 (sequence is synthesized)
cccaggacctgatccagtgtgccgtggttgaggggtacctgactccaaactacctgctgatgggccacagtgacgtggtcaacatcctgtcccctgggcaggctttgtataacatcatca

SEQ ID NO: 472038 - DNA, 120 bp, Artificial Sequence
  ENSG00000159527_8 (sequence is synthesized)
gcacctggcctcatttcaagcactgaaggaggccccactccctttgagactgccctccctcccctgctgggtctctccaaccctcaccagccaaggtggctcagcaccttgtgtccccct

SEQ ID NO: 472039 - DNA, 120 bp, Artificial Sequence
  ENSG00000159556_0 (sequence is synthesized)
ccttcaactccgcggggcagtaggagttagttagcaaagagccgaggccgggcgcgcgaccctcgtccttctgcccctggccgcacactttgcgcacatctctttttctgcatggtggat

SEQ ID NO: 472040 - DNA, 120 bp, Artificial Sequence
  ENSG00000159556_1 (sequence is synthesized)
attatttttcattatccttttctgggtgctatgggtgatcattccaagaagaagcccgggacggccatgtgcgtgggctgcgggagtcagatccacgaccagtttatcctgcgggtgtcg

SEQ ID NO: 472041 - DNA, 120 bp, Artificial Sequence
  ENSG00000159556_2 (sequence is synthesized)
cccgacctcgagtggcacgcggcctgcctcaagtgtgccgagtgcagccagtacctggacgagacgtgcacgtgcttcgtgagagacgggaagacctactgcaagcgggactatgtcagg

SEQ ID NO: 472042 - DNA, 120 bp, Artificial Sequence
  ENSG00000159556_3 (sequence is synthesized)
ctgttcggcatcaagtgcgccaagtgccaggtgggcttcagcagcagcgacctggtgatgagggcgcgggacagcgtgtaccacatcgagtgcttccgctgctccgtgtgcagccgccag

SEQ ID NO: 472043 - DNA, 120 bp, Artificial Sequence
  ENSG00000159556_4 (sequence is synthesized)
ccagctgctgcctggggacgagttctcgctgcgggagcacgagctgctctgccgcgccgaccacggcctcctgctcgagcgcgccgcggccggcagcccgcgcagccccggcccgcttcc

SEQ ID NO: 472044 - DNA, 120 bp, Artificial Sequence
  ENSG00000159556_5 (sequence is synthesized)
gcccgcggcctgcatctgcccgacgctgggtcgggccggcagcccgcgttgcgcccgcacgtgcacaagcagacggagaagacgacccgcgtgcggactgtgctgaacgagaagcagctg

SEQ ID NO: 472045 - DNA, 120 bp, Artificial Sequence
  ENSG00000159556_6 (sequence is synthesized)
cacactctgcggacctgctacgccgccaacccgcggcccgacgctctcatgaaggagcagctggtggagatgaccggcctgagcccgcgggtcatccgcgtctggttccagaacaagcgc

SEQ ID NO: 472046 - DNA, 120 bp, Artificial Sequence
  ENSG00000159556_7 (sequence is synthesized)
agcagctgcagcagcagcagcacagcgacaagacgagccttcagggactgactgggacgcccctggtggcgggcagtcccatccgccatgagaacgccgtgcagggcagcgcagtggagg

SEQ ID NO: 472047 - DNA, 120 bp, Artificial Sequence
  ENSG00000159556_8 (sequence is synthesized)
tgcagacgtaccagccgccgtggaaggcgctcagcgagtttgccctccagagcgacctggaccaacccgccttccaacagctggtctccttctccgagtccggctccctaggcaactcct

SEQ ID NO: 472048 - DNA, 120 bp, Artificial Sequence
  ENSG00000159556_9 (sequence is synthesized)
ccggcagcgacgtgacctccctgtcctcgcagctcccggacacccccaacagtatggtgccgagtcccgtggagacgtgagggggacccctccctgccagcccgcggacctcgcatgctc

SEQ ID NO: 472049 - DNA, 120 bp, Artificial Sequence
  ENSG00000159556_10 (sequence is synthesized)
cctgcatgagactcacccatgctcaggccattccagttccgaaagctctctcgccttcgtaattattctattgttatttatgagagagtaccgagagacacggtctggacagcccaaggc

SEQ ID NO: 472050 - DNA, 120 bp, Artificial Sequence
  ENSG00000159556_11 (sequence is synthesized)
gccaggatgcaacctgctttcaccagactgcagacccctgctccgaggactcttagtttttcaaaaccagaatctgggacttaccagggttagctctgccctctcctctcctctctacgt

SEQ ID NO: 472051 - DNA, 120 bp, Artificial Sequence
  ENSG00000159556_12 (sequence is synthesized)
acgtggccgccgctctgtctctccacgccccacctgtgtccccatctcggccggcccggagctcgcccacgcggacccccgccctgccccagctcagcgctccctggcggcttcgcccgg

SEQ ID NO: 472052 - DNA, 120 bp, Artificial Sequence
  ENSG00000159556_13 (sequence is synthesized)
ctagcggggaaaaggaaggggataactcagaggaacagacactcaaactcccaaagcgcatgattgctgggaaacagtagaaaccagacttgccttgaaagtgtttaagttattcgacgg

SEQ ID NO: 472053 - DNA, 120 bp, Artificial Sequence
  ENSG00000159556_14 (sequence is synthesized)
aggacagagtatgtgagcctttgccgaacaaacaaacgtaagttattgttatttattgtgagaacagccagttcatagtgggacttgtattttgatcttaataaaaaataataacccggg

SEQ ID NO: 472054 - DNA, 120 bp, Artificial Sequence
  ENSG00000159556_15 (sequence is synthesized)
gttgatatccaggcgtccgcagtgcctgtgtatttactctcttcttagtttcgtgtttgcgtttagtttcaagacacgtcgacaaaacgactgtcattaatgaatgtaataacgaaatat

SEQ ID NO: 472055 - DNA, 120 bp, Artificial Sequence
  ENSG00000159556_16 (sequence is synthesized)
ttggggtgggggacagaagaaaccttcagcaatccacaagatactggtttttcgtttccaatgccctggacctttagagagctcatcatctttccttatggtcgcaagtcttgaaagaaa

SEQ ID NO: 472056 - DNA, 120 bp, Artificial Sequence
  ENSG00000159556_17 (sequence is synthesized)
gagcaagagagcgagcgggttgggttggggctggagtagccgaggccggcctgggtccgggcagtcaggcctgacgcggccccgcgcccttccccggcagagaagcccgggacggccatg

SEQ ID NO: 472057 - DNA, 120 bp, Artificial Sequence
  ENSG00000159579_0 (sequence is synthesized)
ctctgcgcgtaatggcagcgccgtggcctcgcgtccatctttgccgttctctcggacctgtcacaaaggagtcgcgccgccgccgccgccccctccctccggtgggcccgggaggtagag

SEQ ID NO: 472058 - DNA, 120 bp, Artificial Sequence
  ENSG00000159579_1 (sequence is synthesized)
aaaaactgccattggatgtccagaatcccctgtagttgataatgttgggaataagctctgcaactttctttggcattcagttgttaaaaacaaataggatgcaaattcctcaactccagg

SEQ ID NO: 472059 - DNA, 120 bp, Artificial Sequence
  ENSG00000159579_2 (sequence is synthesized)
ttatgaaaacagtacttggaaaactgaaaactacctaaatgatcgtctttggttgggccgtgttcttagcgagcagaagccttggccagggtctgttgttgactctcgaagagcacatag

SEQ ID NO: 472060 - DNA, 120 bp, Artificial Sequence
  ENSG00000159579_3 (sequence is synthesized)
cccacttcctagggactggaggtgccgctactaccatgggtaattcctgtatctgccgagatgacagtggaacagatgacagtgttgacacccaacagcaacaggccgagaacagtgcag

SEQ ID NO: 472061 - DNA, 120 bp, Artificial Sequence
  ENSG00000159579_4 (sequence is synthesized)
tacccactgctgacacaaggagccaaccacgggaccctgttcggccaccaaggaggggccgaggacctcatgagccaaggagaaagaaacaaaatgtggatgggctagtgttggacacac

SEQ ID NO: 472062 - DNA, 120 bp, Artificial Sequence
  ENSG00000159579_5 (sequence is synthesized)
tggcagtaatacggactcttgtagataatgatcaggaacctccctattcaatgataacattacacgaaatggcagaaacagatgaaggatggttggatgttgtccagtctttaattagag

SEQ ID NO: 472063 - DNA, 120 bp, Artificial Sequence
  ENSG00000159579_6 (sequence is synthesized)
ttattccactggaagatccactgggaccagctgttataacattgttactagatgaatgtccattgcccactaaagatgcactccagaaattgactgaaattctcaatttaaatggagaag

SEQ ID NO: 472064 - DNA, 120 bp, Artificial Sequence
  ENSG00000159579_7 (sequence is synthesized)
tagcttgccaggactcaagccatcctgccaaacacaggaacacatctgcagtcctaggctgcttggccgagaaactagcaggtcctgcaagtataggtttacttagcccaggaatactgg

SEQ ID NO: 472065 - DNA, 120 bp, Artificial Sequence
  ENSG00000159579_8 (sequence is synthesized)
aatacttgctacagtgtctgaagttacagtcccaccccacagtcatgctttttgcacttatcgcactggaaaagtttgcacagacaagtgaaaataaattgactatttctgaatccagta

SEQ ID NO: 472066 - DNA, 120 bp, Artificial Sequence
  ENSG00000159579_9 (sequence is synthesized)
ttagtgaccggcttgtcacattggagtcctgggctaatgatcctgattatctgaaacgtcaagttggtttctgtgcccagtggagcttagacaatctctttttaaaagaaggtagacagc

SEQ ID NO: 472067 - DNA, 120 bp, Artificial Sequence
  ENSG00000159579_10 (sequence is synthesized)
tgacctatgagaaagtgaacttgagtagcattagggccatgctgaatagcaatgatgtcagcgagtacctgaagatctcacctcatggcttagaggctcgctgtgatgcctcctcttttg

SEQ ID NO: 472068 - DNA, 120 bp, Artificial Sequence
  ENSG00000159579_11 (sequence is synthesized)
aaagtgtgcgttgcaccttttgtgtggatgccggggtatggtactatgaagtaacagtggtcacttctggcgtcatgcagattggctgggccactcgagacagcaaattcctcaatcatg

SEQ ID NO: 472069 - DNA, 120 bp, Artificial Sequence
  ENSG00000159579_12 (sequence is synthesized)
aaggctacggcattggggatgatgaatactcctgtgcgtatgatggctgccggcagctgatttggtacaatgccagaagtaagcctcacatacacccatgctggaaagaaggagatacag

SEQ ID NO: 472070 - DNA, 120 bp, Artificial Sequence
  ENSG00000159579_13 (sequence is synthesized)
taggatttctgttagacttgaatgaaaagcaaatgatcttctttttaaatggcaaccagctgcctcctgaaaagcaagtcttttcatctactgtatctggattttttgctgcagctagtt

SEQ ID NO: 472071 - DNA, 120 bp, Artificial Sequence
  ENSG00000159579_14 (sequence is synthesized)
ttcaattttggagcaaaaccattcaaatacccaccatctatgaaatttagcacttttaatgactacgccttcctaacagctgaagaaaaaatcattttgccaaggcacaggcgtcttgct

SEQ ID NO: 472072 - DNA, 120 bp, Artificial Sequence
  ENSG00000159579_15 (sequence is synthesized)
ctgttgaagcaagtcagtatccgagaaaactgctgttccctttgttgtgatgaggtagcagacacacaattgaagccatgtggacacagtgacctgtgcatggattgtgccttgcagctg

SEQ ID NO: 472073 - DNA, 120 bp, Artificial Sequence
  ENSG00000159579_16 (sequence is synthesized)
gagacctgcccattgtgtcgtaaagaaatagtatctagaatcagacagatttctcatatttcatgacacatgtgaagaggcatcgtggacttttttctactcaattccagccaatgttga

SEQ ID NO: 472074 - DNA, 120 bp, Artificial Sequence
  ENSG00000159579_17 (sequence is synthesized)
aaagaaaaagaaaaaaaaaactctctaatcagttgtacacacattgaaacttatagccatggccagattttatgctaaaaatggtagtttgtcaaagacaaaattctcttagaatctaat

SEQ ID NO: 472075 - DNA, 120 bp, Artificial Sequence
  ENSG00000159579_18 (sequence is synthesized)
ccaacttgccagccctgagaaaatcccttttaaggccaaggaaagctgaatgctagcagccaggcctgtggtacttccatgagaaaccatagcagacaatgccctcccaagtactgaaat

SEQ ID NO: 472076 - DNA, 120 bp, Artificial Sequence
  ENSG00000159579_19 (sequence is synthesized)
cacactggaatcccccttgttgggttcatttgattgtttaacacaggatgtgttgtgtcattctgaagtttttatttggggcagaagtctttatggagatgtaaatgacagcgtttctgg

SEQ ID NO: 472077 - DNA, 120 bp, Artificial Sequence
  ENSG00000159579_20 (sequence is synthesized)
gttatgcataacttctcactggtcagagacaccggtgtgtcaagcatggatattgcattgcaagacttgaatctataaaaattagaatcacacagtcagtactacaagcaaaacagagaa

SEQ ID NO: 472078 - DNA, 120 bp, Artificial Sequence
  ENSG00000159579_21 (sequence is synthesized)
acagagaacctgaaagaaggtgcacagactgtaagaaaaaacccaagtttgtgatatttcagtgattccaaagaacattctaggttttttgtttgtttttttgttttttgggtttttttt

SEQ ID NO: 472079 - DNA, 120 bp, Artificial Sequence
  ENSG00000159579_22 (sequence is synthesized)
cagaaaattggtggtattttcacattcatagtgtttctatccaatttcagtacccacatttaatgaggaaaaaatgttttaccaatgaaggaggaattcttaaattagctgtaatgttag

SEQ ID NO: 472080 - DNA, 120 bp, Artificial Sequence
  ENSG00000159579_23 (sequence is synthesized)
gttggagaaaatttggtatttagggtattttcaaggtaccatcaaatcagatttctgtttttttgttaaaaaaaatttttttaatcagtattgtttttacaagtaatatactttgaaact

SEQ ID NO: 472081 - DNA, 120 bp, Artificial Sequence
  ENSG00000159579_24 (sequence is synthesized)
cttgaactaatagtctcaaaaactctagaggacagtctgagaacacgtatttctattgttctaaataaatacatgtttttgaatagttcaatcatgaattattgactatgtcttcatcaa

SEQ ID NO: 472082 - DNA, 120 bp, Artificial Sequence
  ENSG00000159579_25 (sequence is synthesized)
aagtgttaatccctctcagggtctctggtgaagaccttcaagagtttggttttttctcccaggaaattggaaggtagaattgtaaattcatagaacttcttttataatggtgtacctcag

SEQ ID NO: 472083 - DNA, 120 bp, Artificial Sequence
  ENSG00000159579_26 (sequence is synthesized)
cagctgcctttcaatttatgccaagtccttacagagtttatacttgaatagtaaatatgtcttctgagttttacagtgtcttaaactcaatgcacatttttttttcttctttttccaccc

SEQ ID NO: 472084 - DNA, 120 bp, Artificial Sequence
  ENSG00000159579_27 (sequence is synthesized)
cttcttgtttgtagttcattatacctgtcctattacagaactgatttccttcctggctgtacatgttggggtgctggatttttttccgtgtctttagtcttccataaatccacacacaca

SEQ ID NO: 472085 - DNA, 120 bp, Artificial Sequence
  ENSG00000159579_28 (sequence is synthesized)
cacacacacaaaaaatatatatatatataaatatatatgtaggatacatgttctcttctttagcttgtggtgaatacagtaatttgcattgaagaataaaacatctgttgccttttttga

SEQ ID NO: 472086 - DNA, 120 bp, Artificial Sequence
  ENSG00000159579_29 (sequence is synthesized)
tcagtgccacagcccgaccgcgctgctctgagccctgggcacgcggaacgggagggagtctgagggttggggacgtctgtgagggaggggaacagccgctcgagcctggggcgggcggac

SEQ ID NO: 472087 - DNA, 120 bp, Artificial Sequence
  ENSG00000159579_30 (sequence is synthesized)
cggactggggccggggtaggctctggaaagggcccgggagagaggtggcgttggtcagaacctgagaaacagccgagaggttttccaccgaggcccgcgcttgagggatctgaagaggtt

SEQ ID NO: 472088 - DNA, 120 bp, Artificial Sequence
  ENSG00000159579_31 (sequence is synthesized)
cctagaagagggtgttccctctttcgggggtcctcaccagaagaggttcttgggggtcgcccttctgaggaggctgcggctaacagggcccaggtgagaggcagctatctatctcctggg

SEQ ID NO: 472089 - DNA, 120 bp, Artificial Sequence
  ENSG00000159579_32 (sequence is synthesized)
gtggctcctggtaccgatggggtcctgacctactcaggggtgcccgggatagaaagggtagatgaagggacgctttaggagggttctttttgtggagtttacggtctaggtggcacggat

SEQ ID NO: 472090 - DNA, 120 bp, Artificial Sequence
  ENSG00000159579_33 (sequence is synthesized)
gaggcatacctccccggggagatttagaaacgccttgggatagagagagaatggggctaggaagcaggagctagaactagcggaatgtcctactacggaagccggagctgaaaattggaa

SEQ ID NO: 472091 - DNA, 120 bp, Artificial Sequence
  ENSG00000159579_34 (sequence is synthesized)
gaaccccatcagatgggcatacattctgttttcatctggatagacacgttaaagccaatgaagtataacagggacaaaggcaaggattttctcacctaagaatcaaaacttggtaaccat

SEQ ID NO: 472092 - DNA, 120 bp, Artificial Sequence
  ENSG00000159579_35 (sequence is synthesized)
gtttactcactttttatagccaaaaatttagtgatgtgattgctagtttctagaaaaaagtatggtggctcttgcccataatcccagcactttgggaagctaaggccagagcattgcttc

SEQ ID NO: 472093 - DNA, 120 bp, Artificial Sequence
  ENSG00000159579_36 (sequence is synthesized)
ccatttgtccatttttgctttggtgcctgtgcttttggggtattcaagaaatctttgcccagatcagtgtcctggagagtttccccaatgttttattttagtagcttcatagtttgaggt

SEQ ID NO: 472094 - DNA, 120 bp, Artificial Sequence
  ENSG00000159579_37 (sequence is synthesized)
cttagatttaaatctttaatccatttttatttgatttttgtaggcaatgagagataggggtctagttttattcttttgcttatggatatgtagtttttccagcaccatttattgaagaca

SEQ ID NO: 472095 - DNA, 120 bp, Artificial Sequence
  ENSG00000159579_38 (sequence is synthesized)
ctttgttgaaaatgagttcactgtagatgtatggatttctggattctctcttctgttccattggtccatgtgtctgtttttatgccagtaccatgcagttttggttcctatgactccata

SEQ ID NO: 472096 - DNA, 89 bp, Artificial Sequence
  ENSG00000159579_39 (sequence is synthesized)
gttttcttgctgagggtcaggttttttgctattctgggtcttttgtagttctgtataaattttaggattattttttactatttctgtga

SEQ ID NO: 472097 - DNA, 87 bp, Artificial Sequence
  ENSG00000159579_40 (sequence is synthesized)
gtaatctgtagattgctttgagtagtatggacattttaacaatattgagtcttccaatccatgaccatggtatatctttgtgtcctc

SEQ ID NO: 472098 - DNA, 120 bp, Artificial Sequence
  ENSG00000159579_41 (sequence is synthesized)
attgctttgagtagtatggacattttaacaatattgagtcttccaatccatgaccatggtatatctttgtgtcctctttgatttcttgcattagtgttttatagttttcattgtagagat

SEQ ID NO: 472099 - DNA, 120 bp, Artificial Sequence
  ENSG00000159579_42 (sequence is synthesized)
tattttatttatagcttttgtaaatacaattactttcttgatttcttcttcagattgtttgctattggcatatagaaatgctattgatttttgtctgttaattttatatcctgcaacttt

SEQ ID NO: 472100 - DNA, 120 bp, Artificial Sequence
  ENSG00000159579_43 (sequence is synthesized)
actgaatttgctttttagttctaatagtttttggcagatttttttaggttttcctaaatataagatcatattatccacaaacatggataatttgacttcttcctttccattttggatgcc

SEQ ID NO: 472101 - DNA, 120 bp, Artificial Sequence
  ENSG00000159579_44 (sequence is synthesized)
ctttatttcttcctcttgtctgattgctgtagctggcactagcttcttcttttctccacagcagcctgccttagaaacatgaacactctttcttttgcagttttaaaagaaggtagacag

SEQ ID NO: 472102 - DNA, 120 bp, Artificial Sequence
  ENSG00000159579_45 (sequence is synthesized)
acctccagtggaatgaaaagtgttctgcccggaaccatgactttaggactccttcagttcctttaggacatactcgccaagccttgtgctcacagggcaaaggagaatattttaatgctc

SEQ ID NO: 472103 - DNA, 120 bp, Artificial Sequence
  ENSG00000159579_46 (sequence is synthesized)
cgctgatggcagagtaaatgataagatttgatgtttttgcttgctgtcatctactttgtctggaaatgtctaaatgtttctgtagcagaaaacacgataaagctatgatctttattagag

SEQ ID NO: 472104 - DNA, 120 bp, Artificial Sequence
  ENSG00000159588_0 (sequence is synthesized)
caaacttgaagatctcacagacctaatagacacggcctttcctctctgcctctggctttatgtctctttcatcctcctctgcctttcccctgcccttgatcccttctgcaggtcttggct

SEQ ID NO: 472105 - DNA, 120 bp, Artificial Sequence
  ENSG00000159588_1 (sequence is synthesized)
ggtttcaggaaacgggtcccatcccatggactcccactctggggagcctgcgctcctgccctgtgggacctgtgacatggttttccgctcctcagctctgttagccacccatactcagcg

SEQ ID NO: 472106 - DNA, 120 bp, Artificial Sequence
  ENSG00000159588_2 (sequence is synthesized)
cttctgcattggccacccgacccaagagatgacatttggagcacaggcatcagttgccactgaaccccagcgggccgcggttgtgccacaagaacaccagggcgtgccacaagaacccca

SEQ ID NO: 472107 - DNA, 120 bp, Artificial Sequence
  ENSG00000159588_3 (sequence is synthesized)
gggcctcccagaccagcaggccagtagatctgctctaaagaggttaacagaggaggtgcagtggctgcggctatccctacaggaaatgcggccctggataacagaggtccccagggtgtt

SEQ ID NO: 472108 - DNA, 120 bp, Artificial Sequence
  ENSG00000159588_4 (sequence is synthesized)
cgcggggccctggacacgttccgaggcgcggcctcagagtcccatgtccgaggcggtgggaagccccagcgagcggctgcgggcgctgttcaggactcgcgcgaggcgcgtggcggagat

SEQ ID NO: 472109 - DNA, 120 bp, Artificial Sequence
  ENSG00000159588_5 (sequence is synthesized)
ggaagcgcagagccgggccctgcagctacgcggcgaggaactgagccgacgcctccaagttgtggcctgtacgcggggcgggatgtcccgcctcttcggcctggagcaggagattcgaga

SEQ ID NO: 472110 - DNA, 120 bp, Artificial Sequence
  ENSG00000159588_6 (sequence is synthesized)
actacaagctgaggccgggaggacgcggggagctctagaggtgttgggggcccgcattcaggagctgcaggcggagccagggaacccgctgagctcccggcgagaggcagaactttattc

SEQ ID NO: 472111 - DNA, 120 bp, Artificial Sequence
  ENSG00000159588_7 (sequence is synthesized)
tccagtgcaaaaggccaacccgggaactctggctgccgaaatccgggcgctgcgggaggcctacattcgagacgggggccgggaccccggcgtgctgggccagatatggcagttgcaggt

SEQ ID NO: 472112 - DNA, 120 bp, Artificial Sequence
  ENSG00000159588_8 (sequence is synthesized)
ggaggcgtctgcactggagctgcagcggtcgcagacccgcagaggaagggcaggtgccacctcaggggagcttccagtagtggaggctgaaaaccggcgcttggaggcagaaatcttggc

SEQ ID NO: 472113 - DNA, 120 bp, Artificial Sequence
  ENSG00000159588_9 (sequence is synthesized)
agagatcccccactcctcccgccaccggtggcaccaccgctgccaccacttccaggcttctcggagccacagcttcctggaacaatgaccagaaacctgggcctggactcacacttcctc

SEQ ID NO: 472114 - DNA, 120 bp, Artificial Sequence
  ENSG00000159588_10 (sequence is synthesized)
ctgcccacatcggacatgctgggccctgcaccctatgatcctggggctggcctggtcattttctatgatttcctgcggggccttgaggcttcctggatttgggtgcaactaaggactggc

SEQ ID NO: 472115 - DNA, 120 bp, Artificial Sequence
  ENSG00000159588_11 (sequence is synthesized)
ttggcacgcgatggacgggatacaggaaggaccacagcgttgcccccagccctttgcctgcccccacctcctgctcccgggcccatgggcaactgtgccatccttgccagcaggcagcct

SEQ ID NO: 472116 - DNA, 120 bp, Artificial Sequence
  ENSG00000159588_12 (sequence is synthesized)
gtgcccagactaccaccctcatcatcagtatctttggtctgtgagctgcaggtctggcaggggctagcatgggctagggcaccacagccaaaggcttgggtctcacttggactatttgac

SEQ ID NO: 472117 - DNA, 120 bp, Artificial Sequence
  ENSG00000159588_13 (sequence is synthesized)
caagatcagcgggtgctaagtggccgctggcgcctcccacttcgggcccttcctctggaccccagccttagccttgggcagctgaatgggattcctcaggcaggtcaggctgagctcttt

SEQ ID NO: 472118 - DNA, 120 bp, Artificial Sequence
  ENSG00000159588_14 (sequence is synthesized)
ctgcggctggtgaatgcaagagatgcagctgtacagacactggcagagatcaatccagcaagtgtccatgagtaccagtacccacctccggtgtccagcacatcttcactggaagccagc

SEQ ID NO: 472119 - DNA, 120 bp, Artificial Sequence
  ENSG00000159588_15 (sequence is synthesized)
ttcctcacccccgcagttggctttgctgatcccccacctcgtacagaagagcccctcagtggagtcaaggatagagatgagggtttgggccctcaccacagttctgacttgcccccagtg

SEQ ID NO: 472120 - DNA, 120 bp, Artificial Sequence
  ENSG00000159588_16 (sequence is synthesized)
agtttctgaacccaagtgaatgtggagatgagcatctgaacatgcacaggactggggcctatttccagacctacaggtttactactccatgttctgacattgggtctagaagcatctagc

SEQ ID NO: 472121 - DNA, 120 bp, Artificial Sequence
  ENSG00000159588_17 (sequence is synthesized)
agttgagtacagaaaaccagttccaaccacagctttaccacctcccgttaagtccttaacttttctgtacctcttctgtttttgtaaaacagattaaggattaaatgagtttgtcaggta

SEQ ID NO: 472122 - DNA, 120 bp, Artificial Sequence
  ENSG00000159588_18 (sequence is synthesized)
agcaggccagtagatctgctctaaagaggttaacagaggaggtagagctacctaccttcccccagggctcaaaacgttgagcgtcttccccaaacctgtagatcatacttgggacagatt

SEQ ID NO: 472123 - DNA, 120 bp, Artificial Sequence
  ENSG00000159588_19 (sequence is synthesized)
ccctgcagctacgcggcgagggtgaaggagatgggggacggggaccaaggacctcctctgccctcgccgtttggcttaagcttgctcgggccggttctgactcggcccgcattccctcag

SEQ ID NO: 472124 - DNA, 120 bp, Artificial Sequence
  ENSG00000159588_20 (sequence is synthesized)
acggggtgggttgggggaacaggttggaggcagctctgctctgagcagttgggggaacatgagcagctacaaggctttctggaggagtcagctctcttccccacagccacagcttcctgg

SEQ ID NO: 472125 - DNA, 120 bp, Artificial Sequence
  ENSG00000159588_21 (sequence is synthesized)
tggccagcactgctggttaagggagcccactaggaccagatagggttagggacctgcctgagaggagggaggttgaaaggagttgggtatttctgtgctaagacttgtgttccccagggc

SEQ ID NO: 472126 - DNA, 120 bp, Artificial Sequence
  ENSG00000159588_22 (sequence is synthesized)
gttgaggcttatccaccattctgctaagttttctcatctgtatacagaggccgctggctctaaagggctaagtcctagaaagggactgtagctctggcttccgacactgctttttggtta

SEQ ID NO: 472127 - DNA, 120 bp, Artificial Sequence
  ENSG00000159588_23 (sequence is synthesized)
cacataccggtgtggctggtatggctaacggccagcctttattgaccactgtgtgccagtcattaccaatgctttcttgtttgatcctcacatctctatgaagtcctactatgtaacaga

SEQ ID NO: 472128 - DNA, 120 bp, Artificial Sequence
  ENSG00000159588_24 (sequence is synthesized)
taaggaaatcaaagcaggagcaggttaacttggttcacagtgtccagcacatcttcactggaagccagcttcctcacccccgcagttggctttgctgatcccccacctcgtacagaagag

SEQ ID NO: 472129 - DNA, 120 bp, Artificial Sequence
  ENSG00000159588_25 (sequence is synthesized)
tgcggctccggggtgggaggggcgggctggctgcagccccggggcctctgatgcgttaccgtctccctgcgcgtcgcctgccaccccaggaacccgctgagctcccggcgagaggcagaa

SEQ ID NO: 472130 - DNA, 120 bp, Artificial Sequence
  ENSG00000159592_0 (sequence is synthesized)
cgggcagccattttgggaagagctttgttatggttgtggactagccgcctctgccgggtcgacaagctggggacgcgtcctcagacgcagcgtctagtccctggccatagctccgccgct

SEQ ID NO: 472131 - DNA, 120 bp, Artificial Sequence
  ENSG00000159592_1 (sequence is synthesized)
gcccgagtgatagattcgtgtggcctttcaaatgattgtgaagtggtggaaatggatccaaaataataagtgacttctctaccaaagcatagaagattcttcatatctccttccagtggc

SEQ ID NO: 472132 - DNA, 120 bp, Artificial Sequence
  ENSG00000159592_2 (sequence is synthesized)
tcaatttagattttgggaaggagcagaacaagtgaaacacagaaaactgaagagaagaaatcctcattttggacctatatttctccttgactatttcttaatatccatcctacccatcgt

SEQ ID NO: 472133 - DNA, 120 bp, Artificial Sequence
  ENSG00000159592_3 (sequence is synthesized)
tctaatgttttaactttgctctgaatttataaatagtaaaggccaaagacatagaatatacatttagtagctttataccaagaaatttgccttgaaagctgctgttcgtggagggaaaag

SEQ ID NO: 472134 - DNA, 120 bp, Artificial Sequence
  ENSG00000159592_4 (sequence is synthesized)
tgtagcaaattcctgtctatttttattttttatttttttttaacaaagacaagatttatgtccctagattttgaaggttaaggcaaatataaatacatatctgcacactattttttagca

SEQ ID NO: 472135 - DNA, 120 bp, Artificial Sequence
  ENSG00000159592_5 (sequence is synthesized)
gttgcatgagtaagagtaatgagatttgtattttaaggactttgtcatgtggatgttttggagttgactgctcagatcttttatagggctttaatatttttgatctattaccttgatgac

SEQ ID NO: 472136 - DNA, 120 bp, Artificial Sequence
  ENSG00000159592_6 (sequence is synthesized)
attatttgtccacacttgagcccatctgtctttctagctatgaccttgttatgaacagtatttgcactcggtgcaaatatccatgtcttacctaattaagcaacatcatagtgccataac

SEQ ID NO: 472137 - DNA, 120 bp, Artificial Sequence
  ENSG00000159592_7 (sequence is synthesized)
tcaaggaagttgaatgaggtgaacatagatacagctctttccccttccccccctttttaaatgtaacaaatactttttatgttccccttccccccttccccttttcccctttcccctttt

SEQ ID NO: 472138 - DNA, 120 bp, Artificial Sequence
  ENSG00000159592_8 (sequence is synthesized)
ggaaacgtgtcaggaaccaaatagtttaagatgagcagttgaggggactgagagagtgatcgacacagaacctggcttcttcgtgcttcatcataagtcgtgctgccggccaggttactt

SEQ ID NO: 472139 - DNA, 120 bp, Artificial Sequence
  ENSG00000159592_9 (sequence is synthesized)
aagcacccttttaacaaggaaaccttgtgggagatccagctggccgactcgagttcagaaacaggaccacagaggttacactctgggatcctggccatgaggttggatgcctcaccttac

SEQ ID NO: 472140 - DNA, 120 bp, Artificial Sequence
  ENSG00000159592_10 (sequence is synthesized)
tgaaaggagacactggacctaaatggcgcagcatgattttgttcctgcttggctaaatttctcaacaccacagtcagctaagtcacctactgccaccttcgaaaaacacggagagcacct

SEQ ID NO: 472141 - DNA, 120 bp, Artificial Sequence
  ENSG00000159592_11 (sequence is synthesized)
acccagaggagaaggtagatttggagtaagccgccgtcgacataattcctctgatggtttttttaacaatggtcccctacgaactgcaggagattcttggcaccagccctccctgttccg

SEQ ID NO: 472142 - DNA, 120 bp, Artificial Sequence
  ENSG00000159592_12 (sequence is synthesized)
ccatgattctgtggactctggtgtctctaagggagcatatgctggaatcacagggaacccatctggttggcatagctcttcccgaggtcatgatggcatgagccaacgtagtggaggtgg

SEQ ID NO: 472143 - DNA, 120 bp, Artificial Sequence
  ENSG00000159592_13 (sequence is synthesized)
cacagggaaccatcgccattggaatggcagcttccactcccggaaagggtgtgcttttcaggaaaagccacctatggagattagggaagaaaagaaagaagacaaggtggaaaagttgca

SEQ ID NO: 472144 - DNA, 120 bp, Artificial Sequence
  ENSG00000159592_14 (sequence is synthesized)
ccaagatgctagttatcaaaaaagtttccaaagaggatcctgctgctgccttctctgctgcattcacctcaccaggatctcaccatgcaaatgggaacaaattgtcatccgtggttccaa

SEQ ID NO: 472145 - DNA, 120 bp, Artificial Sequence
  ENSG00000159592_15 (sequence is synthesized)
gtgtctataagaacctggttcctaagcctgtaccacctccttccaagcctaatgcatggaaagctaacaggatggagcacaagtcaggatccctttcctctagccgggagtctgctttta

SEQ ID NO: 472146 - DNA, 120 bp, Artificial Sequence
  ENSG00000159592_16 (sequence is synthesized)
ccagtccaatctctgttaccaaaccagtggtactggctagtggtgcagctctgagttctcccaaagagagtccctccagcaccacccctccaattgagatcagctcctctcgtctgacca

SEQ ID NO: 472147 - DNA, 120 bp, Artificial Sequence
  ENSG00000159592_17 (sequence is synthesized)
agttgacccgccgaaccaccgacaggaagagtgagttcctgaaaactctgaaggatgaccggaatggagacttctcagagaatagagactgtgacaagctggaagatttggaggacaaca

SEQ ID NO: 472148 - DNA, 120 bp, Artificial Sequence
  ENSG00000159592_18 (sequence is synthesized)
gcacacctgaaccaaaggaaaatggggaggaaggctgtcatcaaaatggtcttgccctccctgtagtggaagaaggggaggttctctcacactctctagaagcagagcacaggttattga

SEQ ID NO: 472149 - DNA, 120 bp, Artificial Sequence
  ENSG00000159592_19 (sequence is synthesized)
aagctatgggttggcaggaatatcctgaaaatgatgagaattgccttcccctcacagaggatgagctcaaagagttccacatgaagacagagcagctgagaagaaatggctttggaaaga

SEQ ID NO: 472150 - DNA, 120 bp, Artificial Sequence
  ENSG00000159592_20 (sequence is synthesized)
atggcttcttgcagagccgcagttccagtctgttctccccttggagaagcacttgcaaagcagagtttgaggactcagacaccgaaaccagtagcagtgaaacatcagatgacgatgcct

SEQ ID NO: 472151 - DNA, 120 bp, Artificial Sequence
  ENSG00000159592_21 (sequence is synthesized)
ggaagtaggcatataaatgctcacagttaaatctgacccagtaaactctgtgtgtttagggagtatacaaaagaaatcgttcttttccttttcttatgttgttgaatacttcattcacaa

SEQ ID NO: 472152 - DNA, 120 bp, Artificial Sequence
  ENSG00000159592_22 (sequence is synthesized)
gggaaataatcatatcccaaagagagagcaattggcttgttttgcttttgttattgttcttccctgttatctgctttatagagagaagtttgtgtggtgggacagattttttaaacacac

SEQ ID NO: 472153 - DNA, 120 bp, Artificial Sequence
  ENSG00000159592_23 (sequence is synthesized)
tcacacacacacacacatacacacccagtatatatggggcgatgcacaggtaggagctggcagtgcagggaagaggagacactggtctgcagcaacagcttctactaccagcccttgggg

SEQ ID NO: 472154 - DNA, 120 bp, Artificial Sequence
  ENSG00000159592_24 (sequence is synthesized)
cactcacccctgtgatcaagcaatcattgtcaatgacaaagtgactattgaagttataattgtattaaattaatgctaataatttggatattttattttatttttggctgctcgggtaac

SEQ ID NO: 472155 - DNA, 87 bp, Artificial Sequence
  ENSG00000159592_25 (sequence is synthesized)
ggtacagctgtaaaatatttggatataggaaatgttgtgttattcttgcagccttgatattcagggtggattgtaaaatataaattt

SEQ ID NO: 472156 - DNA, 120 bp, Artificial Sequence
  ENSG00000159592_26 (sequence is synthesized)
gcagccttgatattcagggtggattgtaaaatataaatttttgtgagatttcaaagattaagattattttgataacattatttacagatttaaaagatgtggttatcacaagtctcgagg

SEQ ID NO: 472157 - DNA, 120 bp, Artificial Sequence
  ENSG00000159592_27 (sequence is synthesized)
gggaaactactgcataaaataactaacttggaataaatattttgcatcagtttggattgtcttgtgtaagaagtatattttctttaaaattagatgagtggattcttttttaggggaaat

SEQ ID NO: 472158 - DNA, 120 bp, Artificial Sequence
  ENSG00000159592_28 (sequence is synthesized)
atttttagaagttggggggaaatgtgaattcagacacaactgtttctctattttagcagatacttttttgatgcagaaaaacctgtgcaataaattaccagtaataaagtcagaaaccaa

SEQ ID NO: 472159 - DNA, 120 bp, Artificial Sequence
  ENSG00000159592_29 (sequence is synthesized)
gtcctcatttgtaaatggggaaaaaaatctgtgggctgaggctgtcttttggaaaacacttcctgggtcgtgagtccttgatttcataggttgcttatattactacaaaggaaccttaaa

SEQ ID NO: 472160 - DNA, 120 bp, Artificial Sequence
  ENSG00000159592_30 (sequence is synthesized)
gctaattggttcctaggcccggctttctgtttgggggccattcttaatttctagttgaatccagatgttgaacggtccttgaagttctattccagggctcccaggcagcagaatctgccc

SEQ ID NO: 472161 - DNA, 120 bp, Artificial Sequence
  ENSG00000159592_31 (sequence is synthesized)
gcgcagcctccggggccaggccgtgtggcccgctggggactggagtctcaacgacgcgcacacgagaagtaaggagcggaaggtgggaaagggccggaaaacacacgttcctccgaaacc

SEQ ID NO: 472162 - DNA, 89 bp, Artificial Sequence
  ENSG00000159592_32 (sequence is synthesized)
agctaaggtactgttctccattcctgtagtaacttctcaaatatgagagggtttgggggtggttttggttgttttttggtttcattttg

SEQ ID NO: 472163 - DNA, 120 bp, Artificial Sequence
  ENSG00000159592_33 (sequence is synthesized)
ggcctcctgggctcaggcagtcctcctgactcagctcccagagtagctgggcctacaggctgtgtaccaccacgccctgctaatttttgtttttgttgttgttgttttatagagatggaa

SEQ ID NO: 472164 - DNA, 88 bp, Artificial Sequence
  ENSG00000159592_34 (sequence is synthesized)
tctcactctgttgccaggctggagtgcggtggcgagatctcagctcactgcaacctcagcctcccggattcaagcttatacaggccta

SEQ ID NO: 472165 - DNA, 120 bp, Artificial Sequence
  ENSG00000159592_35 (sequence is synthesized)
cagctgctcttaactatataaaccctgcaaaactgaagtttgaactgcttaaataaaaggattgtttggtttaagacagagtgataaataggctaccagattcttgaagtcagcacttag

SEQ ID NO: 472166 - DNA, 120 bp, Artificial Sequence
  ENSG00000159592_36 (sequence is synthesized)
aaaaggagagaacatttaaaaaacaacaacaaaaaaaactggttatacaattcactttaatggacttttacatgtataatcatctaataaaaacaggtgtggggcataatgatttttcca

SEQ ID NO: 472167 - DNA, 120 bp, Artificial Sequence
  ENSG00000159592_37 (sequence is synthesized)
gggggtagtctagctatctcatagggtttaagttactgaaaattaagttgaaataaaattggcacagacatagatattctgttttatgtaacagagtaaatcttttgtactactgtggca

SEQ ID NO: 472168 - DNA, 120 bp, Artificial Sequence
  ENSG00000159592_38 (sequence is synthesized)
gaaacccaagtgtttctgtgctctggagtgacattgttttaaagacaggacatctggtgactacaactcaggggaagccacaaatcatctttgagagttaacctgacacaagcaaccatc

SEQ ID NO: 472169 - DNA, 120 bp, Artificial Sequence
  ENSG00000159592_39 (sequence is synthesized)
tttagatttttatcaatgcaagaaaaaaattaatcttcattctggttgggtcatcgtttctcttatctgcttgcttgttctttgtggaggcattttgggatagtggaaaggtggtttcat

SEQ ID NO: 472170 - DNA, 120 bp, Artificial Sequence
  ENSG00000159592_40 (sequence is synthesized)
ttactagctgaataaccttgaacaaattgtggaacttccttattgtcagtgtcatcctctattaaaagtcagcgtaacaattattattcctgattggtttaagaattaaataaaacagac

SEQ ID NO: 472171 - DNA, 120 bp, Artificial Sequence
  ENSG00000159592_41 (sequence is synthesized)
tgaccatcacctggtacatggtagatagtaaagttaattcctttcctaaagctattattgtgtcttcttttaatacccatcaatcaagaaagcaaccaggaagggaatccatttcactca

SEQ ID NO: 472172 - DNA, 120 bp, Artificial Sequence
  ENSG00000159592_42 (sequence is synthesized)
ggcccctttgtcctggaggtcctctgttctaagtgtttcattctggaaaaataagttggaagtttttcatttgcttcagcaccactccactggcttgccacatcttccttggtctccttg

SEQ ID NO: 472173 - DNA, 120 bp, Artificial Sequence
  ENSG00000159592_43 (sequence is synthesized)
gacagtgtggtaactcagtattccagctttctatcatacttggggttatggccagagtgacagaatgggcccagaccctgcagagttgagtagacgggcctccagactaaataaatcagg

SEQ ID NO: 472174 - DNA, 120 bp, Artificial Sequence
  ENSG00000159592_44 (sequence is synthesized)
attgttcaaccatttacaatagccaccctggcctggaactagccttttgccatcagagttcctggaaagcagcaattttgtgatgcactttgtgggctatcaggattacatccaaagtta

SEQ ID NO: 472175 - DNA, 120 bp, Artificial Sequence
  ENSG00000159592_45 (sequence is synthesized)
acaaacactactaaaaaaagttttgggattcaataaattaggaaaatgctgcataactgcctctcaaattcttatgtgcagttaagtgctttgagaaattgcacagtgaagaaccttgtt

SEQ ID NO: 472176 - DNA, 120 bp, Artificial Sequence
  ENSG00000159592_46 (sequence is synthesized)
gaacttttttcaccccggcacctcccaaactcattgaactattgaactagagccctgtttttgggaagtcactattaatgtccaatggctcttctgtatcccatctaccattttccttga

SEQ ID NO: 472177 - DNA, 120 bp, Artificial Sequence
  ENSG00000159592_47 (sequence is synthesized)
agtgcctaacctccgaaagaggttgcatacttcccaaacatgttaagacaggtaagccctggaaacttatgttctcatgtaacatttcactctttgctttatgattttataagctgagct

SEQ ID NO: 472178 - DNA, 120 bp, Artificial Sequence
  ENSG00000159592_48 (sequence is synthesized)
gtaaaatgggtatgatgccaaaagtttagtattgttacaggtattatatctggaaataaatgttttataaaactgtaaaaactctagtagttgggagctgtggcttatacctgtaatccc

SEQ ID NO: 472179 - DNA, 70 bp, Artificial Sequence
  ENSG00000159592_49 (sequence is synthesized)
aggactgagaaaattagccagtcttagtggcatgggccaatagttctagctactccataggccgaggcag

SEQ ID NO: 472180 - DNA, 120 bp, Artificial Sequence
  ENSG00000159592_50 (sequence is synthesized)
cagtcttagtggcatgggccaatagttctagctactccataggccgaggcaggaggatcctttaagctcaagggtaagcagctgtagtgagctttgattgtgccactgcactccagcctg

SEQ ID NO: 472181 - DNA, 120 bp, Artificial Sequence
  ENSG00000159592_51 (sequence is synthesized)
acttcatctcttttttttttttaaaagttctgtaattactactgacctcccaaggtgatatttcaaccgttgccttcacccttattccagaaatactaaaactttagaattatttttgag

SEQ ID NO: 472182 - DNA, 120 bp, Artificial Sequence
  ENSG00000159592_52 (sequence is synthesized)
gcaatcatcttgattttcctctcctacaaggtaaatatttttaagtgtaaagttttggagcttatatttatgaatatttgcaaggcttttttcccctccgcctcctttcatgcaaacaat

SEQ ID NO: 472183 - DNA, 120 bp, Artificial Sequence
  ENSG00000159592_53 (sequence is synthesized)
tgaagtggctagcttttctcctctcctggaataaaggaagtgaattagcaattgaatatataacctaggacttctctaaattaggcacctgtgggtacccttagggtccatatgcttaca

SEQ ID NO: 472184 - DNA, 120 bp, Artificial Sequence
  ENSG00000159592_54 (sequence is synthesized)
gccaacaaataatgtctgaaatatgagaccctgttagtaatgagaacatttcagaaattacagaaaaaggaatttgtaagttgaggtttttattgttttagaggaaagaagttaagttga

SEQ ID NO: 472185 - DNA, 120 bp, Artificial Sequence
  ENSG00000159592_55 (sequence is synthesized)
taatatttgaaaatggtgaccaaaactcctatgtaacttgtagcaaatttttcatctttgtgtctttggaatttagaaaaatatttaatttctcttaagtcttataaagtttactcaaat

SEQ ID NO: 472186 - DNA, 120 bp, Artificial Sequence
  ENSG00000159593_0 (sequence is synthesized)
agtgcgcctgcgcgcttgtggagctggtggcggcgctccgcaggggctcggctgttttccgcgcggcaggcgcggccatggcgcagctgggaaagctgctcaaggagcagaagtacgacc

SEQ ID NO: 472187 - DNA, 120 bp, Artificial Sequence
  ENSG00000159593_1 (sequence is synthesized)
ggcagctgaggttgtggggtgatcatgggcaagaggctttagaatctgctcatgtttgcctaataaatgcaacagccacaggaactgaaattcttaaaaacttggtactaccaggtattg

SEQ ID NO: 472188 - DNA, 120 bp, Artificial Sequence
  ENSG00000159593_2 (sequence is synthesized)
gttcgtttacaattattgatggaaatcaggtcagcggagaagatgctggaaacaatttcttccttcaaagaagcagtatcggcaagaaccgagctgaagctgccatggaattcttacaag

SEQ ID NO: 472189 - DNA, 120 bp, Artificial Sequence
  ENSG00000159593_3 (sequence is synthesized)
aattaaatagcgatgtctctggaagttttgtggaagagagtccagaaaaccttctagacaatgatccctcatttttctgtaggtttactgttgtagttgcaactcagcttcctgaaagca

SEQ ID NO: 472190 - DNA, 120 bp, Artificial Sequence
  ENSG00000159593_4 (sequence is synthesized)
cttcactacgcttagcagatgtcctctggaattcccagattcctcttttgatctgtaggacatatggactagttggttatatgaggatcattataaaagaacatccagtaatagaatctc

SEQ ID NO: 472191 - DNA, 120 bp, Artificial Sequence
  ENSG00000159593_5 (sequence is synthesized)
atccagataatgcattagaggatctacgactagataagccatttcctgaactgagagaacattttcagtcctatgatttggatcatatggaaaaaaaggaccacagtcatactccatgga

SEQ ID NO: 472192 - DNA, 120 bp, Artificial Sequence
  ENSG00000159593_6 (sequence is synthesized)
ttgtgatcatagctaaatatttagcacagtggtatagtgaaacaaatggacgaatacctaaaacgtataaagaaaaagaggacttcagagatttgattagacaaggaattctaaaaaatg

SEQ ID NO: 472193 - DNA, 120 bp, Artificial Sequence
  ENSG00000159593_7 (sequence is synthesized)
agaagatgaagagaattttgaagaagctattaaaaatgtgaacacagcactaaatacaactcagatcccaagcagtattgaagatatatttaatgatgatcgctgcataaatatcaccaa

SEQ ID NO: 472194 - DNA, 120 bp, Artificial Sequence
  ENSG00000159593_8 (sequence is synthesized)
acagactccatcattttggattttagctcgtgccttaaaggaatttgtggccaaagagggtcaaggaaatttacctgttcgaggcacaattcctgatatgattgcagattcaggcaaata

SEQ ID NO: 472195 - DNA, 120 bp, Artificial Sequence
  ENSG00000159593_9 (sequence is synthesized)
tataaaactgcaaaacgtttaccgtgaaaaagcaaagaaagatgctgccgctgtgggtaatcatgttgccaaattgctgcagtccattggccaggcaccagagtccatttcagagaaaga

SEQ ID NO: 472196 - DNA, 120 bp, Artificial Sequence
  ENSG00000159593_10 (sequence is synthesized)
attaaaattactctgcagcaattctgcatttcttcgagtggtaagatgtcgatccttagctgaagaatatggtttggatacaattaacaaggatgaaattatttctagcatggacaatcc

SEQ ID NO: 472197 - DNA, 120 bp, Artificial Sequence
  ENSG00000159593_11 (sequence is synthesized)
agataatgaaatagtgttgtacttaatgttacgggctgttgatagatttcataaacaacagggtagatatccaggagtatctaactatcaagttgaagaagatataggaaagttgaagtc

SEQ ID NO: 472198 - DNA, 120 bp, Artificial Sequence
  ENSG00000159593_12 (sequence is synthesized)
ttgtctcactggcttccttcaggaatatggtttatctgtaatggtgaaagatgattatgtccacgaattttgccgatatggagctgctgagccacataccattgctgcattcttgggggg

SEQ ID NO: 472199 - DNA, 120 bp, Artificial Sequence
  ENSG00000159593_13 (sequence is synthesized)
agctgctgctcaagaggtcatcaaaataatcaccaaacaatttgtaatttttaataatacttacatttacagtggcatgtcacaaacttcagcaactttccagttgtagagtaagcaagc

SEQ ID NO: 472200 - DNA, 120 bp, Artificial Sequence
  ENSG00000159593_14 (sequence is synthesized)
accttaagtagtgtgttaatgattgaaactgtaattgccttcgggttgtgctttagtctgtaaaattctaaaggagagctgctaaattgttttcttaataaacatttttctcatttgtaa

SEQ ID NO: 472201 - DNA, 120 bp, Artificial Sequence
  ENSG00000159593_15 (sequence is synthesized)
cgcagagtcggctgcgtcagcaggcaatggccttggagcaccggcctgagctacccagggagacggtggatctccaggaaaccgcgagtgcctaggagcccctccccaccttttccgggg

SEQ ID NO: 472202 - DNA, 120 bp, Artificial Sequence
  ENSG00000159593_16 (sequence is synthesized)
ctcctcagtcagggtgactcgactctcagtggaaatcatccttatgtttgggattatggtgaggaagtgagataatataggtaaagtgctagtacagcatctggcaaatagggcattaat

SEQ ID NO: 472203 - DNA, 120 bp, Artificial Sequence
  ENSG00000159593_17 (sequence is synthesized)
aaatgttacccatcattactgtctttattgttattaatacaaaggagtagtcgttattcctttattcatggaatatgggcacttcctaagctcttgtattgatccgtaggtgttagcata

SEQ ID NO: 472204 - DNA, 120 bp, Artificial Sequence
  ENSG00000159593_18 (sequence is synthesized)
taattaacaataatgcctgttgtttgtgatgtcttttaggcttagtctaggggtatctctctttacagtgtcaacaaaaatgctgttttaaagatggcctgtatattattctttaaagat

SEQ ID NO: 472205 - DNA, 120 bp, Artificial Sequence
  ENSG00000159593_19 (sequence is synthesized)
cgcgcggcaggcgcggccatggcgcagctgggaaagctgctcaaggagcagaagtacgaccggcagctgaggtgtcttctacgtgccatactttgatggagaaaacaggcgtttacggtc

SEQ ID NO: 472206 - DNA, 120 bp, Artificial Sequence
  ENSG00000159593_20 (sequence is synthesized)
catctggttcttctaggcgattcctccatacatttgacagctgtctgggcccttatggagcatacagtggagtggaaagatggatgctcagcaaacaaaaacaaatgaagccaggttgtg

SEQ ID NO: 472207 - DNA, 120 bp, Artificial Sequence
  ENSG00000159593_21 (sequence is synthesized)
tcataaggctaatcaaaattcatgtctctgtggtctcctttagttgccgatatggagctgctgagccacataccattgctgcattcttggggggtgagttccatatatgagaagactcac

SEQ ID NO: 472208 - DNA, 120 bp, Artificial Sequence
  ENSG00000159593_22 (sequence is synthesized)
ctgttgttacatagtacagttactattttaatacaaagttttgtcgtctagctattttaattagggaggtcagtgaagcaggatgttatatttctttcttttttttttttttgagacgca

SEQ ID NO: 472209 - DNA, 120 bp, Artificial Sequence
  ENSG00000159593_23 (sequence is synthesized)
caaagaagcagtatcggcaaggtaaacaattagagaatatagttggatgtgagcatctaatgatgcccctgtgttttgattgcttgaaaagctttgactttaaaaacgtgtattatttct

SEQ ID NO: 472210 - DNA, 120 bp, Artificial Sequence
  ENSG00000159593_24 (sequence is synthesized)
ctgagaaaaaagttaactaatttttgtaatcttgtaaatcttcatatgtttggtagtttaagaacttagaggtgtactgtctgtgtttatacattgcatcctgtattaaagctaaatctt

SEQ ID NO: 472211 - DNA, 70 bp, Artificial Sequence
  ENSG00000159593_25 (sequence is synthesized)
ctgtgtttatacattgcatcctgtattaaagctaaatcttgagtaatgttaatattcattctggttaaca

SEQ ID NO: 472212 - DNA, 120 bp, Artificial Sequence
  ENSG00000159593_26 (sequence is synthesized)
ttttccttatggagttgtatggtagggcaaatggatgcttttaaatttaaatctagcagttcctcttttgatcctgataattttaattaaaatgaaattcaataaatgtcattatgaaac

SEQ ID NO: 472213 - DNA, 120 bp, Artificial Sequence
  ENSG00000159593_27 (sequence is synthesized)
tggcagggggaatgaatgtagataaatggtcacagtgtctgttttctatcaagtgagcctctgatttcacagagaaatatatttgttgatgaaatcttatgtagagaatgggggacactt

SEQ ID NO: 472214 - DNA, 120 bp, Artificial Sequence
  ENSG00000159593_28 (sequence is synthesized)
tagactttcaatttctgtattttgaattttaataactagatttttaaaatttttaaccaatttagacaaatggacgaatacctaaaacgtataaagaaaaagaggacttcagagatttga

SEQ ID NO: 472215 - DNA, 120 bp, Artificial Sequence
  ENSG00000159593_29 (sequence is synthesized)
ttagacaaggtaatatgggatatgattaaatactgtataaagcttgaaaagcaaattgctagaggcaggtacttattggatttctgttaacacctttgtcagatgatagcatcatgagct

SEQ ID NO: 472216 - DNA, 120 bp, Artificial Sequence
  ENSG00000159593_30 (sequence is synthesized)
tttattttccttctggagaagttaagaagccacgccttgtatagttttaaggactaatgataagccgtatttcttcttaagatttaatattctgcaggatctgacaaggttatttttata

SEQ ID NO: 472217 - DNA, 120 bp, Artificial Sequence
  ENSG00000159593_31 (sequence is synthesized)
atgggggaacagaagagtgaaaagaaaagggctgtttgctaacaatttcccattacaataggaattctaaaaaatgaaaatggggctccagaagatgaagagaattttgaagaagctatt

SEQ ID NO: 472218 - DNA, 120 bp, Artificial Sequence
  ENSG00000159593_32 (sequence is synthesized)
gtggagctggtggcggcgctccgcaggggctcggctgttttccgcgcggcaggcgcggccatggcgcagctgggaaagctgctcaaggagcagaagtacgaccggcagctgagagtccag

SEQ ID NO: 472219 - DNA, 120 bp, Artificial Sequence
  ENSG00000159593_33 (sequence is synthesized)
gattatattagagataaacattttatcatcctgtcagaaatcaaatgaaagtttattacaacctcattgcttataaataaactaggccagctgcagtggctcatgcctgtaatcccaaca

SEQ ID NO: 472220 - DNA, 120 bp, Artificial Sequence
  ENSG00000159593_34 (sequence is synthesized)
ttgagtccaggagtttgagaccatcgtgggcaacatagtgagacttccatctctacaaattgaaaaattaggtgggcatggtagtgttcgcctttaatctcaactactcaggaggctgag

SEQ ID NO: 472221 - DNA, 120 bp, Artificial Sequence
  ENSG00000159593_35 (sequence is synthesized)
ttttgttcttcagtttcatacatattttgactagaacatctgaaactagattaaataaaggagttggccattaattttgaatcacatttattttaatgaaaactaacttttatttttagg

SEQ ID NO: 472222 - DNA, 120 bp, Artificial Sequence
  ENSG00000159593_36 (sequence is synthesized)
aaatttagaattttgaatctttgtgtcatttatgattagttgaattggaattgttgcctcatttgttgtaaaatagcttaactgtctctgccatgtttaatatgattgtgaaattggttt

SEQ ID NO: 472223 - DNA, 120 bp, Artificial Sequence
  ENSG00000159596_0 (sequence is synthesized)
acttgccggaagtgcctttccagtggacctgggctgttgttgcggttgttttccttctctccgtgcaacgctggcaagtctcaaagtcgccacagaaacatgcccctgattcagtgcctc

SEQ ID NO: 472224 - DNA, 120 bp, Artificial Sequence
  ENSG00000159596_1 (sequence is synthesized)
tgcttagctgtaacatgttaatcagaactacctggcatcttcctgaacaagactttcaataggggccagtatgcttcgcttcatccagaagttttctcaagcatcttcaaagatactgaa

SEQ ID NO: 472225 - DNA, 120 bp, Artificial Sequence
  ENSG00000159596_2 (sequence is synthesized)
gtactctttcccagtgggactaagaaccagcagaacagatatactttctctcaagatgtctctccagcaaaacttttccccatgtccaaggccttggctttcctcatcatttccagcgta

SEQ ID NO: 472226 - DNA, 120 bp, Artificial Sequence
  ENSG00000159596_3 (sequence is synthesized)
tatgagcaagacacagtgctatcatacatccccctgcagctttaaaaagcagcagaagcaagcacttctagccagaccctcaagcaccatcacttacctaactgacagcccaaagccagc

SEQ ID NO: 472227 - DNA, 120 bp, Artificial Sequence
  ENSG00000159596_4 (sequence is synthesized)
attatgtgtaactctggcaggactaatccccttcgttgctccaccactggtcatgctgatgacaaaaacttatattcccatattagcttttactcagatggcttatggagccagtttcct

SEQ ID NO: 472228 - DNA, 120 bp, Artificial Sequence
  ENSG00000159596_5 (sequence is synthesized)
atctttcttgggtgggatcagatggggttttgctctaccagaaggtagtccagccaaaccagactaccttaatttagctagcagtgcagctcctcttttcttttcatggtttgccttcct

SEQ ID NO: 472229 - DNA, 120 bp, Artificial Sequence
  ENSG00000159596_6 (sequence is synthesized)
atagtcacagtaataatgggtatgggagtagcattccaccttgaactttttctcttaccacattatcccaactggtttaaagccctgaggatagtagtcactttattggccactttttca

SEQ ID NO: 472230 - DNA, 120 bp, Artificial Sequence
  ENSG00000159596_7 (sequence is synthesized)
tttataatcactttagtagttaaaagtagttttccagaaaaaggacataagagacctggtcaagtataaaaaatataaaagtctgggaagtgaggagcacctctgcccagctgctgcccc

SEQ ID NO: 472231 - DNA, 82 bp, Artificial Sequence
  ENSG00000159596_8 (sequence is synthesized)
agtgaggagcgcctctgcctggccgcctgaccatctgggaagtgtgacaagcgcctctgcccggccgctgtgcaaccttcca

SEQ ID NO: 472232 - DNA, 120 bp, Artificial Sequence
  ENSG00000159596_9 (sequence is synthesized)
tttcgacattaaagtttactttttagttaaaagttttaaaaatatatatatataaatacactgtagataacatttgtatgccagctacacctttttctacttctgtttggctttttttcc

SEQ ID NO: 472233 - DNA, 120 bp, Artificial Sequence
  ENSG00000159596_10 (sequence is synthesized)
ctacttctgtttggctttttttccccacaccaatggtaatttatcttcacagattgttcttcatttctagaaattgttacttcatggtaattacttgagcaaaagcttgaaaatccctga

SEQ ID NO: 472234 - DNA, 120 bp, Artificial Sequence
  ENSG00000159596_11 (sequence is synthesized)
caagtacttttcatctcatagtatattagttttcactcagtcattttatgaataatatagttatccacttaaacatttcaatattttaaccatcttgaaaattaaagattaaaaatcccc

SEQ ID NO: 472235 - DNA, 120 bp, Artificial Sequence
  ENSG00000159618_0 (sequence is synthesized)
ggcagcttctcaggtcagcctcctccgggcctctccccactctcctctgcccagttctctgtccttatccacaggcccctcagtgggcactggccatacccatgtccaggtgggcacaga

SEQ ID NO: 472236 - DNA, 120 bp, Artificial Sequence
  ENSG00000159618_1 (sequence is synthesized)
cctggtgatatcctggtgagcaagctggggacccaccctccttccctttctggttggcagctccacatctggggcaatgtagagatctgtgcttttggaaggaggggcaatttaaattaa

SEQ ID NO: 472237 - DNA, 120 bp, Artificial Sequence
  ENSG00000159618_2 (sequence is synthesized)
gaagtggttaggcatgggtctcgaatcttagcttccccgcgaggtctgggacaagtgaagagaggtttcttttctggacctcagtttctcatctgtaaaatggggtgagtctgggaacct

SEQ ID NO: 472238 - DNA, 120 bp, Artificial Sequence
  ENSG00000159618_3 (sequence is synthesized)
gcaccttggatggctgtcaggggctcagtagaggacctggcacacagtttgtgcttggcaatctggagcaggtgcagctcctttcagagtgacctggattggatcctggggacagcatgt

SEQ ID NO: 472239 - DNA, 120 bp, Artificial Sequence
  ENSG00000159618_4 (sequence is synthesized)
ctcagggccggagccagttcttggaggagactctgcacagggcatggatcactgtggtgcccttttcctgtgcctgtgccttctgactttgcagaatgcaacaacagagacatgggaaga

SEQ ID NO: 472240 - DNA, 120 bp, Artificial Sequence
  ENSG00000159618_5 (sequence is synthesized)
actcctgagctacatggagaatatgcaggtgtccaggggccggagctcagttttttcctctcgtcaactccaccagctggagcagatgctactgaacaccagcttcccaggctacaacct

SEQ ID NO: 472241 - DNA, 120 bp, Artificial Sequence
  ENSG00000159618_6 (sequence is synthesized)
gaccttgcagacacccaccatccagtctctggccttcaagctgagctgtgacttctctggcctctcgctgaccagtgccactctgaagcgggtgccccaggcaggaggtcagcatgcccg

SEQ ID NO: 472242 - DNA, 120 bp, Artificial Sequence
  ENSG00000159618_7 (sequence is synthesized)
gggtcagcacgccatgcagttccccgccgagctgacccgggacgcctgcaagacccgccccagggagctgcggctcatctgtatctacttctccaacacccactttttcaaggatgaaaa

SEQ ID NO: 472243 - DNA, 120 bp, Artificial Sequence
  ENSG00000159618_8 (sequence is synthesized)
caactcatctctgctgaataactacgtcctgggggcccagctgagtcatgggcacgtgaacaacctcagggatcctgtgaacatcagcttctggcacaaccaaagcctggaaggctacac

SEQ ID NO: 472244 - DNA, 120 bp, Artificial Sequence
  ENSG00000159618_9 (sequence is synthesized)
cctgacctgtgtcttctggaaggagggagccaggaaacagccctgggggggctggagccctgagggctgtcgtacagagcagccctcccactctcaggtgctctgccgctgcaaccacct

SEQ ID NO: 472245 - DNA, 120 bp, Artificial Sequence
  ENSG00000159618_10 (sequence is synthesized)
cacctactttgctgttctcatgcaactctccccagccctggtccctgcagagttgctggcacctcttacgtacatctccctcgtgggctgcagcatctccatcgtggcctcgctgatcac

SEQ ID NO: 472246 - DNA, 120 bp, Artificial Sequence
  ENSG00000159618_11 (sequence is synthesized)
agtcctgctgcacttccatttcaggaagcagagtgactccttaacacgcatccacatgaacctgcatgcctccgtgctgctcctgaacatcgccttcctgctgagccccgcattcgcaat

SEQ ID NO: 472247 - DNA, 120 bp, Artificial Sequence
  ENSG00000159618_12 (sequence is synthesized)
gtctcctgtgcccgggtcagcatgcacggctctggccgctgccctgcactacgcgctgctcagctgcctcacctggatggccatcgagggcttcaacctctacctcctcctcgggcgtgt

SEQ ID NO: 472248 - DNA, 120 bp, Artificial Sequence
  ENSG00000159618_13 (sequence is synthesized)
ctacaacatctacatccgcagatatgtgttcaagcttggtgtgctaggctggggggccccagccctcctggtgctgctttccctctctgtcaagagctcggtatacggaccctgcacaat

SEQ ID NO: 472249 - DNA, 120 bp, Artificial Sequence
  ENSG00000159618_14 (sequence is synthesized)
ccccgtcttcgacagctgggagaatggcacaggcttccagaacatgtccatatgctgggtgcggagccccgtggtgcacagtgtcctggtcatgggctacggcggcctcacgtccctctt

SEQ ID NO: 472250 - DNA, 120 bp, Artificial Sequence
  ENSG00000159618_15 (sequence is synthesized)
gggagcgggcggatgcaccaagtgtcagggcctgccatgacactgtcactgtgctgggcctcaccgtgctgctgggaaccacctgggccttggccttcttttcttttggcgtcttcctgc

SEQ ID NO: 472251 - DNA, 120 bp, Artificial Sequence
  ENSG00000159618_16 (sequence is synthesized)
tgccccagctgttcctcttcaccatcttaaactcgctctacggtttcttccttttcctgtggttctgctcccagcggtgccgctcagaagcagaggccaaggcacagatagaggccttca

SEQ ID NO: 472252 - DNA, 120 bp, Artificial Sequence
  ENSG00000159618_17 (sequence is synthesized)
gctcctcccaaacaacacagtagtccgggcctcctggcctggaatcctcagcctctctggccgccagtagcctgaggctacggctcctgctagagagggtggcaggcctgctgctggacc

SEQ ID NO: 472253 - DNA, 120 bp, Artificial Sequence
  ENSG00000159618_18 (sequence is synthesized)
ccagaggccactgtgaccgccaaggggccttttccacttccacggcctctccaggcactgaggggaaggcattgctctacctctccctgacattttgctccggggcagatccaaccttac

SEQ ID NO: 472254 - DNA, 120 bp, Artificial Sequence
  ENSG00000159618_19 (sequence is synthesized)
ctggggcagcaaactttgtcctggtacctgggcccagctcgccagggatgtgggcagagcaccagcctgggcatcaggaagccaagtttcaaggactgtctttgagtctgtctgtatgac

SEQ ID NO: 472255 - DNA, 120 bp, Artificial Sequence
  ENSG00000159618_20 (sequence is synthesized)
cttgggcctgccacttctcacagaccctaggtatccacagctgtgacatgggggcaagcggctttgtttcagcctaacccaggagcttagtaaaaattgcataagaccagggggaagagt

SEQ ID NO: 472256 - DNA, 120 bp, Artificial Sequence
  ENSG00000159618_21 (sequence is synthesized)
gtcagcgtggggtgggaattcccgcggcctccacctgcttgctaggggcaggatctcattcaggctgccctggaagcacctgcttggccctgccaccttcctccaggggagggccagatg

SEQ ID NO: 472257 - DNA, 120 bp, Artificial Sequence
  ENSG00000159618_22 (sequence is synthesized)
gcatcctggcttggggcgggtgggacctacccaggctctgagactttactggcctatgcctgaggcctcttttcctttaactccctaaattatgatgactccaagtccaagcccaccctt

SEQ ID NO: 472258 - DNA, 120 bp, Artificial Sequence
  ENSG00000159618_23 (sequence is synthesized)
cccaaagattgggaggttccgccgttcccagaggctcctcctgcggtgctcccaagacttccatagaccatctggaccagtagcccatcccgcagttttcttgggggcagaggaaaacgc

SEQ ID NO: 472259 - DNA, 120 bp, Artificial Sequence
  ENSG00000159618_24 (sequence is synthesized)
ttctttctcctccagctgaatcagctggatcccagtgtcctggctgtttggtgattgggcaagattgaatttgcccaggtaggcgtgagagtgtgggttttaaattcgaagctcaggcca

SEQ ID NO: 472260 - DNA, 120 bp, Artificial Sequence
  ENSG00000159618_25 (sequence is synthesized)
tagtttcagagaatcacccttaccccagaccttcatgagacagtgctcatgaagccagtgcgtttcccagaacgaacactaggcggcaccgttggtccacactcagaggcccttggcgcc

SEQ ID NO: 472261 - DNA, 120 bp, Artificial Sequence
  ENSG00000159618_26 (sequence is synthesized)
aagactgcatctagaatcgctcaaacacctgtttgcagaccccatgcaccagctggaggggccgtaactgcaggactgcgcctactgagtgacccatttcctccaggaggaaaggcaaga

SEQ ID NO: 472262 - DNA, 120 bp, Artificial Sequence
  ENSG00000159618_27 (sequence is synthesized)
cacgcttacacggccatttgtctcttttcccaatgcggcggtgcactttcgctcttgggggctgcaccccagacatagctggcaccagagcagggtgctcaggtggtgggtgctcagggc

SEQ ID NO: 472263 - DNA, 120 bp, Artificial Sequence
  ENSG00000159618_28 (sequence is synthesized)
cctgccccaggccactgggccgttttgatgacctcgaaggtcacaggcagaaaataggagcaggatttcccctggggaaaagttctcctgggacatcttctgctcttctgtacatttcta

SEQ ID NO: 472264 - DNA, 120 bp, Artificial Sequence
  ENSG00000159618_29 (sequence is synthesized)
gatgcaaataactccttcaccaggcagtgagtggcgtaggctctggagccaggctgcctgggctccaatgccagctctgccacttgctagctgtgagactgtggacaaaccactcagcct

SEQ ID NO: 472265 - DNA, 120 bp, Artificial Sequence
  ENSG00000159618_30 (sequence is synthesized)
ctgtgtgcctcagttttcctatttgtaaaatagaggccatagtggtacctattttgaagactaagtaaaagaattcaaataaagagacttggcacagagtaagtgctcagtaaatggtta

SEQ ID NO: 472266 - DNA, 120 bp, Artificial Sequence
  ENSG00000159618_31 (sequence is synthesized)
aactcgctctacggcaaaggagggggcactgtttctaagaagagtgatgataccaccgtatttttgaaaaatgatgaaacagcgtgggggaaactgctatgtcttccatattcaggcttt

SEQ ID NO: 472267 - DNA, 120 bp, Artificial Sequence
  ENSG00000159618_32 (sequence is synthesized)
ttcttctccaagcccatttcctccctagcaatgataagaggaaacactcccgcgcctgtgggtggcgatgacatccctgccatctatgaggtggagcatttccaacaagagcaggtctga

SEQ ID NO: 472268 - DNA, 120 bp, Artificial Sequence
  ENSG00000159618_33 (sequence is synthesized)
ggaaccatcttggaaatccatcacactttgaaaattcctgctcaagaaataagagagagagaagtttttactcatgcatttgtcagaattctttcagttgcaagtaagaaaagaccactt

SEQ ID NO: 472269 - DNA, 120 bp, Artificial Sequence
  ENSG00000159618_34 (sequence is synthesized)
caagccagcttgagcacagagggaactgattggcacacatccatgaaatgtctagaggtgatccaccagcttcagacatagctggatccagggatggatctgatgcccttgtggctcagt

SEQ ID NO: 472270 - DNA, 120 bp, Artificial Sequence
  ENSG00000159618_35 (sequence is synthesized)
ctctctccgtctcagcaatggtctcctgtcttggctgtccattctgtggcatgatggatgctggagagccagacttcctttccctcttcccatcaggctcttcccccgactccccaccca

SEQ ID NO: 472271 - DNA, 120 bp, Artificial Sequence
  ENSG00000159618_36 (sequence is synthesized)
caacctgccccagtgcagatcagggtctcaggatcttaaaggttcagctgggtcacacatgtccatccctgcacctgtcactgtgcccagggggatggaatgtgtggattggccaggcct

SEQ ID NO: 472272 - DNA, 120 bp, Artificial Sequence
  ENSG00000159618_37 (sequence is synthesized)
gggtcacacggcccagggactggggtgaaggagtgagctcctagggtaagtgcagatgctgatcctggaacagagacagggctgcttgttgggggtgggggcagagtggggtggttcaca

SEQ ID NO: 472273 - DNA, 120 bp, Artificial Sequence
  ENSG00000159618_38 (sequence is synthesized)
agcctcagtgcctccatttctggttcctggcattcctgaaaagcccggagcctctgctttctggcttcatcttcccttcagcttcaccaggactgccctgcactctaaatttcaccatca

SEQ ID NO: 472274 - DNA, 120 bp, Artificial Sequence
  ENSG00000159618_39 (sequence is synthesized)
tcctttcctttcagctctgggcttttgccactatggttccctccacctggaatgcccttgccctactcgtgttgaaatccaacacgtcctctaagggttcagggcccccacctccccttc

SEQ ID NO: 472275 - DNA, 120 bp, Artificial Sequence
  ENSG00000159618_40 (sequence is synthesized)
tccctttgggtcagctctgcctaccctccatggtcttccgtgactacctgtgtcatttcctccacttctccacccacgtggcttggcattagggttgtctgtggatgagtctcccccaac

SEQ ID NO: 472276 - DNA, 120 bp, Artificial Sequence
  ENSG00000159618_41 (sequence is synthesized)
caggcgtgggtctgagcacattgctgttccccatggggaggaagggaagggatcagctggttatggagcgcctactgtataaaaggccagagctggacactcaagattccgtgttgccct

SEQ ID NO: 472277 - DNA, 120 bp, Artificial Sequence
  ENSG00000159618_42 (sequence is synthesized)
ttgtttttccaccattgttgtaacatgggtacgaatgatcctattctgtagatgactaaactgaggctcagagcaacttggtgtcttgcctgggtcactctgagagcccacagtggaggt

SEQ ID NO: 472278 - DNA, 120 bp, Artificial Sequence
  ENSG00000159618_43 (sequence is synthesized)
gggacaggaatctgagactgtctgaagccaaaggccagccagtgcctggtaaaatgttggcaaatgtgcagttgagtcaccgttggcccccaggactcccagacactgatctgcagcctt

SEQ ID NO: 472279 - DNA, 120 bp, Artificial Sequence
  ENSG00000159618_44 (sequence is synthesized)
cccaagcctgcaccttgaatcagtgggtcagggttagtctaatgtagactcttaactgtgcatttcttcagcacttttattgagcacctactgcatgcctgacactaggctctggggatg

SEQ ID NO: 472280 - DNA, 120 bp, Artificial Sequence
  ENSG00000159625_0 (sequence is synthesized)
gttaccatggagatggctaacagctagagcaggctgtcctcggagggaaccgggtcacatcgcagggccacctctagctgcaagagaatctgggaagctgagcaattcaaaccaggcaca

SEQ ID NO: 472281 - DNA, 120 bp, Artificial Sequence
  ENSG00000159625_1 (sequence is synthesized)
ctgctgccccccacacaactggggttctgccgtatagaagaggagactggatctttggagacattccatctccagacacccagagacgctccagaatggaggtcctgagggagaaggtgg

SEQ ID NO: 472282 - DNA, 120 bp, Artificial Sequence
  ENSG00000159625_2 (sequence is synthesized)
aggaggaggaggaggccgagcgggaggaggcggccgagtgggctgaatgggcgaggatggagaaaatgatgaggccagttgaggtgcggaaggaggaaatcaccttaaagcaggagacgc

SEQ ID NO: 472283 - DNA, 120 bp, Artificial Sequence
  ENSG00000159625_3 (sequence is synthesized)
tcagagacctggagaagaagctgtcagagatccagatcactgtctcagcggagctcccggcctttaccaaggacactattgacatctccaagctgcccatttcctacaaaaccaacacac

SEQ ID NO: 472284 - DNA, 120 bp, Artificial Sequence
  ENSG00000159625_4 (sequence is synthesized)
ccaaggaggaacacctgctgcaggtggcagacaacttctcccgccagtacagccatctgtgcccggaccgcgtgcccctcttcctgcaccccctgaacgagtgtgaagtgcccaagttcg

SEQ ID NO: 472285 - DNA, 120 bp, Artificial Sequence
  ENSG00000159625_5 (sequence is synthesized)
tgagcacaaccctccggcccacactgatgccctaccccgagctctacaactgggacagctgtgcccagtttgtctccgacttcctcaccatggtgcccctgcctgaccctctcaagccgc

SEQ ID NO: 472286 - DNA, 120 bp, Artificial Sequence
  ENSG00000159625_6 (sequence is synthesized)
cctcgcacctgtactcctcgaccactgtgctcaagtaccagaaggggaactgctttgacttcagtacgctgctctgctccatgcttatcggctctggctatgatgcttactgcgtcaacg

SEQ ID NO: 472287 - DNA, 120 bp, Artificial Sequence
  ENSG00000159625_7 (sequence is synthesized)
gctacggctcgctggacctgtgccacatggacctgacgcgggaggtgtgcccactcactgtgaagcccaaggagaccatcaagaaggaggaaaaggtgctgcctaagaagtataccatca

SEQ ID NO: 472288 - DNA, 120 bp, Artificial Sequence
  ENSG00000159625_8 (sequence is synthesized)
aaccccccagggacctgtgcagcaggtttgagcaggagcaagaggtgaagaagcagcaggagatcagagcccaggagaagaagcggctgagggaggaggaggagcgcctcatggaagcgg

SEQ ID NO: 472289 - DNA, 120 bp, Artificial Sequence
  ENSG00000159625_9 (sequence is synthesized)
agaaggcaaagccggatgccctgcacggcctgcgggtgcactcctgggtccttgtgctatcggggaagcgcgaggtgcctgagaacttcttcatcgacccattcacaggacatagctaca

SEQ ID NO: 472290 - DNA, 120 bp, Artificial Sequence
  ENSG00000159625_10 (sequence is synthesized)
gcacccaggatgagcacttcctgggcatcgaaagcctgtggaaccacaagaactactggatcaacatgcaggattgctggaactgctgcaaggacttgatctttgacctgggtgaccctg

SEQ ID NO: 472291 - DNA, 120 bp, Artificial Sequence
  ENSG00000159625_11 (sequence is synthesized)
tgagatgggagtacatgctcctggggactgataagtctcagctgtccttgactgaagaagacgacagtgggataaacgatgaggatgatgtggaaaatctgggcaaggaggatgaggata

SEQ ID NO: 472292 - DNA, 120 bp, Artificial Sequence
  ENSG00000159625_12 (sequence is synthesized)
agagcttcgacatgccccactcgtgggtggagcagattgagatctccccggaagcatttgagacccgctgcccgaacgggaagaaggtgattcagtacaagagggcaaagctggagaagt

SEQ ID NO: 472293 - DNA, 120 bp, Artificial Sequence
  ENSG00000159625_13 (sequence is synthesized)
gggccccgtacctcaatagcaatggccttgtgagccgcctcaccacctatgaggacttgcagtgtaccaatattttggagataaaggagtggtaccagaaccgggaagacatgctggagc

SEQ ID NO: 472294 - DNA, 120 bp, Artificial Sequence
  ENSG00000159625_14 (sequence is synthesized)
tgaagacagactacttcaagcctggccacccccaggctctgcgcgtgcactcgtacaagtccatgcaacctgagatggaccgtgtcattgagttttatgaaacggcccgtgtggatggcc

SEQ ID NO: 472295 - DNA, 120 bp, Artificial Sequence
  ENSG00000159625_15 (sequence is synthesized)
tgatgaagcgggaggagacacccaggacaatgacagagtactatcaaggacgcccagacttcctctcctaccgccatgccagcttcggaccccgagtcaagaagctcactctgagcagtg

SEQ ID NO: 472296 - DNA, 120 bp, Artificial Sequence
  ENSG00000159625_16 (sequence is synthesized)
cagagtcaaacccccggcccattgtgaaaatcacagagcggttcttccgcaacccagcgaagcccgcggaggaggacgtggcagagcgcgtgtttctggtcgcggaggagcgcatccagc

SEQ ID NO: 472297 - DNA, 120 bp, Artificial Sequence
  ENSG00000159625_17 (sequence is synthesized)
tgcgctaccactgccgtgaggaccacatcacggcctccaagcgcgagttcctgcggcgcaccgaggtggacagcaaaggcaacaagatcatcatgacgcccgacatgtgcatcagcttcg

SEQ ID NO: 472298 - DNA, 120 bp, Artificial Sequence
  ENSG00000159625_18 (sequence is synthesized)
aggtggagcccatggagcacaccaagaagctgctctaccagtacgaggccatgatgcacctgaagagggaggagaagctgtccagacatcaggtctgggagtcagagctggaggtgctgg

SEQ ID NO: 472299 - DNA, 120 bp, Artificial Sequence
  ENSG00000159625_19 (sequence is synthesized)
agattctgaagcttcgagaggaagaggaggcggcgcacacactgaccatctccatctatgacaccaagcggaatgagaagagcaaggaatatcgggaggccatggagcgcatgatgcacg

SEQ ID NO: 472300 - DNA, 120 bp, Artificial Sequence
  ENSG00000159625_20 (sequence is synthesized)
aagagcacctgcggcaggtggagacccagctggactacctggccccattcctggcccagctcccgccaggagagaaactaacatgctggcaggcggtgcgcctcaaggatgagtgcctca

SEQ ID NO: 472301 - DNA, 120 bp, Artificial Sequence
  ENSG00000159625_21 (sequence is synthesized)
gcgacttcaagcagcggctcatcaacaaggccaacctcatccaggcccgctttgagaaggagacccaggagctgcaaaagaagcagcagtggtaccaggagaaccaggtgacgctgacac

SEQ ID NO: 472302 - DNA, 120 bp, Artificial Sequence
  ENSG00000159625_22 (sequence is synthesized)
ccgaggatgaagacctgtacctgagttactgctctcaggccatgttccgcatccgcatcctggagcagcgcctcaatcgacacaaggaactggccccactgaagtacctggctctggagg

SEQ ID NO: 472303 - DNA, 120 bp, Artificial Sequence
  ENSG00000159625_23 (sequence is synthesized)
aaaagctctacaaggacccacgcctgggggagctccagaaaatattcgcttgatgtccctcctggggcctcagccagagctgccagagaaaggaaacctcttcccgcagcctggctcctg

SEQ ID NO: 472304 - DNA, 120 bp, Artificial Sequence
  ENSG00000159625_24 (sequence is synthesized)
tgttccctctatccagccaatgcctgtttacacagacacctggcctcactgccagcccacctcccctacagccctgtttgttcctgcttctcatgattttcctgtaaataaacacactct

SEQ ID NO: 472305 - DNA, 120 bp, Artificial Sequence
  ENSG00000159625_25 (sequence is synthesized)
taatttgccatttgtgccttgcgcttcacaagctccagcagcagcctttctcttcttctgttatctatagcctgggaccacccccttcctccccttggcctgtcgtttgcttcctgtcct

SEQ ID NO: 472306 - DNA, 120 bp, Artificial Sequence
  ENSG00000159625_26 (sequence is synthesized)
tctctccgttggaatgtcaggtcttcacagcacctctgcagatggtcccacagccatctgcaaacaactggttatatctcaatgtgactagggtggcccacctcaccaagtgggatgggg

SEQ ID NO: 472307 - DNA, 120 bp, Artificial Sequence
  ENSG00000159625_27 (sequence is synthesized)
aaggctaagatgcatgccccagaatttgaggactgaatcccagctcctcctcttaccagataccacttacccatctgtggaatggggtagcattgttgcattaaataagacttatggcca

SEQ ID NO: 472308 - DNA, 120 bp, Artificial Sequence
  ENSG00000159625_28 (sequence is synthesized)
aggttgttaccatggagatggctaacagctagagcaggctgtcctcggaggggtgggaggaggagaagggcagagggctccccaatcacttctgcccacatctcattggccagaaccggg

SEQ ID NO: 472309 - DNA, 120 bp, Artificial Sequence
  ENSG00000159625_29 (sequence is synthesized)
acttccttattgttatacaaaaatacacactcatgactaaacatttggaaaatatgtaaaaatgtagagaaaagtaaacatatctcagaatggcatctctcatatgttgccacggattat

SEQ ID NO: 472310 - DNA, 120 bp, Artificial Sequence
  ENSG00000159625_30 (sequence is synthesized)
aggtttggttttgagagttttttctaatgtaattgagatcgggacccagggattagagtccctgtattacccacttaacatgaaattgtgcattttccccttcatgtcattacaaattag

SEQ ID NO: 472311 - DNA, 120 bp, Artificial Sequence
  ENSG00000159625_31 (sequence is synthesized)
ttggcaactgtgtgtaatggcagcatgccaaagaagctctttctagcagtaagggatgtctagcaatggagtaggctgcctggagaggtggtgagctccccatctcttgaggtaggcaag

SEQ ID NO: 472312 - DNA, 120 bp, Artificial Sequence
  ENSG00000159625_32 (sequence is synthesized)
cagagtcttgaaggagctgaggaggggcccagcaccatatgggagtggagtggcctggccctgagaacccacgaaatccattgtctggctaggaggggctattccacgtgaatcgccaaa

SEQ ID NO: 472313 - DNA, 120 bp, Artificial Sequence
  ENSG00000159625_33 (sequence is synthesized)
cgaccccagactccagtgtcctgaacgttcgttgctcctgcctgcgggcatgcacagaaatctcctctcacacgctcatcctttgctcatcctttgcatgttctggcctcccagaaaatc

SEQ ID NO: 472314 - DNA, 120 bp, Artificial Sequence
  ENSG00000159625_34 (sequence is synthesized)
cggctgcaggaggaaccggggctctctgtcttattccagccacttgggagaaccaggatgggcgctggtgaatcccggcgaggaaattcatctttgctctttgggaaaaccaaaagttcc

SEQ ID NO: 472315 - DNA, 120 bp, Artificial Sequence
  ENSG00000159625_35 (sequence is synthesized)
catctggggacccttctctttgagctcctctgaaaatcttccttttccaccaaaaaagcgaactcagcaggctaagacgactctgcagtcctggtcagggcaaacctcagatcctaggga

SEQ ID NO: 472316 - DNA, 120 bp, Artificial Sequence
  ENSG00000159625_36 (sequence is synthesized)
ggctctgtgggaggggaagagtctcactacctctgaggggctagctttcctagtcaaacgctcactctcccggcacagtccccagcttttctgagtcttcagttcctcttttattattat

SEQ ID NO: 472317 - DNA, 120 bp, Artificial Sequence
  ENSG00000159625_37 (sequence is synthesized)
ttagcaacttgctcgaggtcacacagctggaaagtggcaggggtagatttgaacccaggtggtcctatgccccgatcatggcagcctctctgtgttactaaggtggttgttgtcccaggt

SEQ ID NO: 472318 - DNA, 120 bp, Artificial Sequence
  ENSG00000159625_38 (sequence is synthesized)
ggagcccatggagcacaccaagaagctgctctaccagtacgaggccatgatgcacctgaagagggaggagaagctgtccagacatcaggtctgggagtcagagctggaggtagggtcctg

SEQ ID NO: 472319 - DNA, 120 bp, Artificial Sequence
  ENSG00000159625_39 (sequence is synthesized)
tgggagagtgagcaggtgggcggtatctttgtttttgagatagggtctcgctctataacccaggctggaatgcagtggcgcaattatggctctacatcccgggctcaggtggtcctccca

SEQ ID NO: 472320 - DNA, 120 bp, Artificial Sequence
  ENSG00000159625_40 (sequence is synthesized)
cctcatcctcccaggtaactgggaccactagcgcacaccaccatgcctggctaatttcttgtttttgtttttgttttttaacagatggggtttttccattttgcccaggctggtctcaaa

SEQ ID NO: 472321 - DNA, 120 bp, Artificial Sequence
  ENSG00000159625_41 (sequence is synthesized)
aagcaatggcagccagaccttggggagagcgagacaccaggccacgagggctttgaaccttctccatagctgcgtctccatggcccactcccttgcccatgaataaccattctgatacga

SEQ ID NO: 472322 - DNA, 80 bp, Artificial Sequence
  ENSG00000159640_0 (sequence is synthesized)
gggggccggggctgctgctgccgctgccgctgctgttgctgctgccgccgcagcccgccctggcgttggaccccgggctg

SEQ ID NO: 472323 - DNA, 120 bp, Artificial Sequence
  ENSG00000159640_1 (sequence is synthesized)
gttggaccccgggctgcagcccggcaacttttctgctgacgaggccggggcgcagctcttcgcgcagagctacaactccagcgccgaacaggtgctgttccagagcgtggccgccagctg

SEQ ID NO: 472324 - DNA, 120 bp, Artificial Sequence
  ENSG00000159640_2 (sequence is synthesized)
ggcgcacgacaccaacatcaccgcggagaatgcaaggcgccaggaggaagcagccctgctcagccaggagtttgcggaggcctggggccagaaggccaaggagctgtatgaaccgatctg

SEQ ID NO: 472325 - DNA, 120 bp, Artificial Sequence
  ENSG00000159640_3 (sequence is synthesized)
gcagaacttcacggacccgcagctgcgcaggatcatcggagctgtgcgcaccctgggctctgccaacctgcccctggctaagcggcagcagtacaacgccctgctaagcaacatgagcag

SEQ ID NO: 472326 - DNA, 120 bp, Artificial Sequence
  ENSG00000159640_4 (sequence is synthesized)
gatctactccaccgccaaggtctgcctccccaacaagactgccacctgctggtccctggacccagatctcaccaacatcctggcttcctcgcgaagctacgccatgctcctgtttgcctg

SEQ ID NO: 472327 - DNA, 120 bp, Artificial Sequence
  ENSG00000159640_5 (sequence is synthesized)
ggagggctggcacaacgctgcgggcatcccgctgaaaccgctgtacgaggatttcactgccctcagcaatgaagcctacaagcaggacggcttcacagacacgggggcctactggcgctc

SEQ ID NO: 472328 - DNA, 120 bp, Artificial Sequence
  ENSG00000159640_6 (sequence is synthesized)
ctggtacaactcccccaccttcgaggacgatctggaacacctctaccaacagctagagcccctctacctgaacctccatgccttcgtccgccgcgcactgcatcgccgatacggagacag

SEQ ID NO: 472329 - DNA, 120 bp, Artificial Sequence
  ENSG00000159640_7 (sequence is synthesized)
atacatcaacctcaggggacccatccctgctcatctgctgggagacatgtgggcccagagctgggaaaacatctacgacatggtggtgcctttcccagacaagcccaacctcgatgtcac

SEQ ID NO: 472330 - DNA, 120 bp, Artificial Sequence
  ENSG00000159640_8 (sequence is synthesized)
cagtactatgctgcagcagggctggaacgccacgcacatgttccgggtggcagaggagttcttcacctccctggagctctcccccatgcctcccgagttctgggaagggtcgatgctgga

SEQ ID NO: 472331 - DNA, 120 bp, Artificial Sequence
  ENSG00000159640_9 (sequence is synthesized)
gaagccggccgacgggcgggaagtggtgtgccacgcctcggcttgggacttctacaacaggaaagacttcaggatcaagcagtgcacacgggtcacgatggaccagctctccacagtgca

SEQ ID NO: 472332 - DNA, 120 bp, Artificial Sequence
  ENSG00000159640_10 (sequence is synthesized)
ccatgagatgggccatatacagtactacctgcagtacaaggatctgcccgtctccctgcgtcggggggccaaccccggcttccatgaggccattggggacgtgctggcgctctcggtctc

SEQ ID NO: 472333 - DNA, 120 bp, Artificial Sequence
  ENSG00000159640_11 (sequence is synthesized)
cactcctgaacatctgcacaaaatcggcctgctggaccgtgtcaccaatgacacggaaagtgacatcaattacttgctaaaaatggcactggaaaaaattgccttcctgccctttggcta

SEQ ID NO: 472334 - DNA, 120 bp, Artificial Sequence
  ENSG00000159640_12 (sequence is synthesized)
cttggtggaccagtggcgctggggggtctttagtgggcgtacccccccttcccgctacaacttcgactggtggtatcttcgaaccaagtatcaggggatctgtcctcctgttacccgaaa

SEQ ID NO: 472335 - DNA, 120 bp, Artificial Sequence
  ENSG00000159640_13 (sequence is synthesized)
cgaaacccactttgatgctggagctaagtttcatgttccaaatgtgacaccatacatcaggtactttgtgagttttgtcctgcagttccagttccatgaagccctgtgcaaggaggcagg

SEQ ID NO: 472336 - DNA, 120 bp, Artificial Sequence
  ENSG00000159640_14 (sequence is synthesized)
ctatgagggcccactgcaccagtgtgacatctaccggtccaccaaggcaggggccaagctccggaaggtgctgcaggctggctcctccaggccctggcaggaggtgctgaaggacatggt

SEQ ID NO: 472337 - DNA, 120 bp, Artificial Sequence
  ENSG00000159640_15 (sequence is synthesized)
cggcttagatgccctggatgcccagccgctgctcaagtacttccagccagtcacccagtggctgcaggagcagaaccagcagaacggcgaggtcctgggctggcccgagtaccagtggca

SEQ ID NO: 472338 - DNA, 120 bp, Artificial Sequence
  ENSG00000159640_16 (sequence is synthesized)
cccgccgttgcctgacaactacccggagggcatagacctggtgactgatgaggctgaggccagcaagtttgtggaggaatatgaccggacatcccaggtggtgtggaacgagtatgccga

SEQ ID NO: 472339 - DNA, 120 bp, Artificial Sequence
  ENSG00000159640_17 (sequence is synthesized)
ggccaactggaactacaacaccaacatcaccacagagaccagcaagattctgctgcagaagaacatgcaaatagccaaccacaccctgaagtacggcacccaggccaggaagtttgatgt

SEQ ID NO: 472340 - DNA, 120 bp, Artificial Sequence
  ENSG00000159640_18 (sequence is synthesized)
gaaccagttgcagaacaccactatcaagcggatcataaagaaggttcaggacctagaacgggcagcactgcctgcccaggagctggaggagtacaacaagatcctgttggatatggaaac

SEQ ID NO: 472341 - DNA, 120 bp, Artificial Sequence
  ENSG00000159640_19 (sequence is synthesized)
cacctacagcgtggccactgtgtgccacccgaatggcagctgcctgcagctcgagccagatctgacgaatgtgatggccacgtcccggaaatatgaagacctgttatgggcatgggaggg

SEQ ID NO: 472342 - DNA, 120 bp, Artificial Sequence
  ENSG00000159640_20 (sequence is synthesized)
gaaatacgtggaactcatcaaccaggctgcccggctcaatggctatgtagatgcaggggactcgtggaggtctatgtacgagacaccatccctggagcaagacctggagcggctcttcca

SEQ ID NO: 472343 - DNA, 120 bp, Artificial Sequence
  ENSG00000159640_21 (sequence is synthesized)
ggagctgcagccactctacctcaacctgcatgcctacgtgcgccgggccctgcaccgtcactacggggcccagcacatcaacctggaggggcccattcctgctcacctgctggggaacat

SEQ ID NO: 472344 - DNA, 120 bp, Artificial Sequence
  ENSG00000159640_22 (sequence is synthesized)
gtgggcgcagacctggtccaacatctatgacttggtggtgcccttcccttcagccccctcgatggacaccacagaggctatgctaaagcagggctggacgcccaggaggatgtttaagga

SEQ ID NO: 472345 - DNA, 120 bp, Artificial Sequence
  ENSG00000159640_23 (sequence is synthesized)
ggctgatgatttcttcacctccctggggctgctgcccgtgcctcctgagttctggaacaagtcgatgctggagaagccaaccgacgggcgggaggtggtctgccacgcctcggcctggga

SEQ ID NO: 472346 - DNA, 120 bp, Artificial Sequence
  ENSG00000159640_24 (sequence is synthesized)
cttctacaacggcaaggacttccggatcaagcagtgcaccaccgtgaacttggaggacctggtggtggcccaccacgaaatgggccacatccagtatttcatgcagtacaaagacttacc

SEQ ID NO: 472347 - DNA, 120 bp, Artificial Sequence
  ENSG00000159640_25 (sequence is synthesized)
tgtggccttgagggagggtgccaaccccggcttccatgaggccattggggacgtgctagccctctcagtgtctacgcccaagcacctgcacagtctcaacctgctgagcagtgagggtgg

SEQ ID NO: 472348 - DNA, 120 bp, Artificial Sequence
  ENSG00000159640_26 (sequence is synthesized)
cagcgacgagcatgacatcaactttctgatgaagatggcccttgacaagatcgcctttatccccttcagctacctcgtcgatcagtggcgctggagggtatttgatggaagcatcaccaa

SEQ ID NO: 472349 - DNA, 120 bp, Artificial Sequence
  ENSG00000159640_27 (sequence is synthesized)
ggagaactataaccaggagtggtggagcctcaggctgaagtaccagggcctctgccccccagtgcccaggactcaaggtgactttgacccaggggccaagttccacattccttctagcgt

SEQ ID NO: 472350 - DNA, 120 bp, Artificial Sequence
  ENSG00000159640_28 (sequence is synthesized)
gccttacatcaggtactttgtcagcttcatcatccagttccagttccacgaggcactgtgccaggcagctggccacacgggccccctgcacaagtgtgacatctaccagtccaaggaggc

SEQ ID NO: 472351 - DNA, 120 bp, Artificial Sequence
  ENSG00000159640_29 (sequence is synthesized)
cgggcagcgcctggcgaccgccatgaagctgggcttcagtaggccgtggccggaagccatgcagctgatcacgggccagcccaacatgagcgcctcggccatgttgagctacttcaagcc

SEQ ID NO: 472352 - DNA, 120 bp, Artificial Sequence
  ENSG00000159640_30 (sequence is synthesized)
gctgctggactggctccgcacggagaacgagctgcatggggagaagctgggctggccgcagtacaactggacgccgaactccgctcgctcagaagggcccctcccagacagcggccgcgt

SEQ ID NO: 472353 - DNA, 120 bp, Artificial Sequence
  ENSG00000159640_31 (sequence is synthesized)
cagcttcctgggcctggacctggatgcgcagcaggcccgcgtgggccagtggctgctgctcttcctgggcatcgccctgctggtagccaccctgggcctcagccagcggctcttcagcat

SEQ ID NO: 472354 - DNA, 120 bp, Artificial Sequence
  ENSG00000159640_32 (sequence is synthesized)
ccgccaccgcagcctccaccggcactcccacgggccccagttcggctccgaggtggagctgagacactcctgaggtgacccggctgggtcggccctgcccaagggcctcccaccagagac

SEQ ID NO: 472355 - DNA, 120 bp, Artificial Sequence
  ENSG00000159640_33 (sequence is synthesized)
tgggatgggaacactggtgggcagctgaggacacaccccacaccccagcccaccctgctcctcctgccctgtccctgtccccctcccctcccagtcctccagaccaccagccgccccagc

SEQ ID NO: 472356 - DNA, 120 bp, Artificial Sequence
  ENSG00000159640_34 (sequence is synthesized)
cccttctcccagcacacggctgcctgacactgagccccacctctccaagtctctctgtgaatacaattaaaggtcctgccctccccatctgagtctgtgtccctcacagggaagccaggg

SEQ ID NO: 472357 - DNA, 120 bp, Artificial Sequence
  ENSG00000159640_35 (sequence is synthesized)
acagggacaggctgctttcctgcctcctggcagtcaagtgggtcccgttactaggtttgttcctccatcctccttcaggagccggggaggatccccagagctctgccccagcacctcctg

SEQ ID NO: 472358 - DNA, 120 bp, Artificial Sequence
  ENSG00000159640_36 (sequence is synthesized)
gcgctggcgcctgtcttccctccagcccaggcagcccgccactgtcctgccaccgcaggcagcccctgtctggcccaagcactgacccacgcggactctgggaagcagacatcctgggct

SEQ ID NO: 472359 - DNA, 120 bp, Artificial Sequence
  ENSG00000159640_37 (sequence is synthesized)
gctggcctcacatttccactggcagtggagcctttccctgctccacaaatggccaggtccccccaggggaaggcttccggctgttatcggctgcctcagggggcgagtaccttggagggc

SEQ ID NO: 472360 - DNA, 120 bp, Artificial Sequence
  ENSG00000159640_38 (sequence is synthesized)
ctgcttcaaggagggtgccccctggagggcacacaccagcctagtgcttaccttggctcctgcctgtaccagctccatgactctgctcgggtgaacagccttggctctcagacagccatt

SEQ ID NO: 472361 - DNA, 120 bp, Artificial Sequence
  ENSG00000159640_39 (sequence is synthesized)
ctaacactgccagtgcagaggggcctcagacgctggagtgtagcagtggctgcacctgcacagggattagctgccagcagccaccctgctggcgtcccagcacacacctcctcactccct

SEQ ID NO: 472362 - DNA, 120 bp, Artificial Sequence
  ENSG00000159640_40 (sequence is synthesized)
gcattggagggagtgtcattttaagggacatttttatgacttttatgtgtatgtttatgtagaaatttggaaaatacagaaaactgtaaagaaaataaaagccctttatatcaacgtcaa

SEQ ID NO: 472363 - DNA, 120 bp, Artificial Sequence
  ENSG00000159640_41 (sequence is synthesized)
ctcctgagttgtggaggcagctctgtgggtgggaggcatctacacaggcacggctaggaagaggctcagacaatgctaagagctggggtgggggagctcaccctgatagctgtgggcaga

SEQ ID NO: 472364 - DNA, 120 bp, Artificial Sequence
  ENSG00000159640_42 (sequence is synthesized)
gttggggggccttggctctgctgtgcgcatgtgacttagcacacatcacatgtgatgtgcagaagggcctggggcccagtggcacaaggccctcaaccaactccgccccgggccacggcc

SEQ ID NO: 472365 - DNA, 120 bp, Artificial Sequence
  ENSG00000159640_43 (sequence is synthesized)
ggtgagaccaaagaacatctggtgatgtcacagtggacgtcagttcaccaactgggagacacaggccccgggaagaaaagcaacatgcccagcgtggcctgggagctggggcagagctgg

SEQ ID NO: 472366 - DNA, 120 bp, Artificial Sequence
  ENSG00000159640_44 (sequence is synthesized)
aggactctgctctcctgcggccatgggccagggttgggctactgcaggacttcccagcctcctcttcctgctgctctgctacgggcaccctctgctggtccccagccaggaggcatccca

SEQ ID NO: 472367 - DNA, 120 bp, Artificial Sequence
  ENSG00000159640_45 (sequence is synthesized)
acaggtgacagtcacccatgggacaagcagccaggcaacaaccagcagccagacaaccacccaccaggcgacggcccaccagacatcagcccagagcccaaacctggtgactgatgaggc

SEQ ID NO: 472368 - DNA, 120 bp, Artificial Sequence
  ENSG00000159640_46 (sequence is synthesized)
gccagctctgaaattctctgagctccccttacaagcagaggtgagctaagggctggagctcaaggcattcaaacccctaccagatctgacgaatgtgatggccacgtcccggaaatatga

SEQ ID NO: 472369 - DNA, 120 bp, Artificial Sequence
  ENSG00000159640_47 (sequence is synthesized)
accagcagccagacaaccacccaccaggcgacggcccaccagacatcagcccagagcccaagtgggaccatgcaggggaggggcagggtgccaggggtgggagaggcggggccgggtagg

SEQ ID NO: 472370 - DNA, 120 bp, Artificial Sequence
  ENSG00000159640_48 (sequence is synthesized)
ggtgtggggcagagcaatcggaaggaagggagccacccagaccatcccaggaggcaggtcacagggcccaaaaggtacagcacccccacccctccaccatcacaggcacaccagggccaa

SEQ ID NO: 472371 - DNA, 120 bp, Artificial Sequence
  ENSG00000159640_49 (sequence is synthesized)
ccgcggggcccgagcgccgggctgcgcgcacggcctgcgctcccagcatgcacgagttggatggatgagggtggctgctcccaggccgcgcccgccttcgccgaaggtgctgggcttggc

SEQ ID NO: 472372 - DNA, 120 bp, Artificial Sequence
  ENSG00000159640_50 (sequence is synthesized)
tctggggcccccgcgctctcgggcagctgccttctcacctccggacgctgtcgctgtcaccgtcaccgcactgcactgtccatccaccctccactcgcccggcctcttttctggtcccaa

SEQ ID NO: 472373 - DNA, 120 bp, Artificial Sequence
  ENSG00000159640_51 (sequence is synthesized)
accgtgtcaccaatgacacggaaccaagtatcaggggatctgtcctcctgttacccgaaacgaaacccactttgatgctggagctaagtttcatgttccaaatgtgacaccatacatcag

SEQ ID NO: 472374 - DNA, 120 bp, Artificial Sequence
  ENSG00000159640_52 (sequence is synthesized)
ctggttcctgtcagagttgctgagctgcagacaccgacctcaggtggtgcggaggggacatggcagagtggctggtgaagagagcagcctgccagcctttcaatcccagccctgccactt

SEQ ID NO: 472375 - DNA, 120 bp, Artificial Sequence
  ENSG00000159640_53 (sequence is synthesized)
aggagccgtgggcccccggcgaggggggcggtcacttaactctccagcctgtttcctttactagccaatgggaatcgtgacagtacctgggtgcagacaggattgaaagtgaattcacac

SEQ ID NO: 472376 - DNA, 120 bp, Artificial Sequence
  ENSG00000159640_54 (sequence is synthesized)
aatgttcttggtgcagagccaataagaggtggccaccggggtgtaggtgttctggggacctgtaatgtcctcacatgtcagcagttgctagtcacattggtctccactgctcacggacag

SEQ ID NO: 472377 - DNA, 120 bp, Artificial Sequence
  ENSG00000159640_55 (sequence is synthesized)
ccaggcagtaatgacctactgggctggatatgcacaccaaagatgatgtgtgcctcaaagcttgcaaacagtaggtgctcaagaaatgccactatgattagcaggactgggatctggagc

SEQ ID NO: 472378 - DNA, 120 bp, Artificial Sequence
  ENSG00000159640_56 (sequence is synthesized)
tgagcatgtgcatacacacagagatgctgtcccgctcaccacacagtggggctgccaccacattttaaattgaatatttaaaacaatactcaatttcgggccgggcgcggtggctcacgc

SEQ ID NO: 472379 - DNA, 120 bp, Artificial Sequence
  ENSG00000159640_57 (sequence is synthesized)
ggcctttacgacacttgggggtcttctcttctctgcccctgcctggatatgtgttgcttgaccgcaggcatccagggaggctgcagaagaacatgcaaatagccaaccacaccctgaagt

SEQ ID NO: 472380 - DNA, 120 bp, Artificial Sequence
  ENSG00000159640_58 (sequence is synthesized)
atggcatctgccatgcgatgtgcacctcagaactgctgagagggcagcgctccccagctccctggctccccacctgccagcccatggggcctgggggtagtgcaggccccagagagacca

SEQ ID NO: 472381 - DNA, 120 bp, Artificial Sequence
  ENSG00000159640_59 (sequence is synthesized)
cgggggagagcagcccatcagggagggaggaaccctgggatccacatgggccctgacagaagggaaagcccaggtaagcacagaatggctttctgagcattgatttttcttggagatggg

SEQ ID NO: 472382 - DNA, 120 bp, Artificial Sequence
  ENSG00000159640_60 (sequence is synthesized)
gtggggagttactttctgttaaaggaagcattctggagtaggaagccaaattcaaatacacttctccctaggctggtttatgagcttctttggaagagttgagaagggctgggcgtggtg

SEQ ID NO: 472383 - DNA, 120 bp, Artificial Sequence
  ENSG00000159640_61 (sequence is synthesized)
ccattcccatgaggcagattccctccagaaggaggaagcgcggcttccgcaaactaaggtctcccgcagggatctccccagggcccgggctctggaagcccttggccttcctcccctccc

SEQ ID NO: 472384 - DNA, 120 bp, Artificial Sequence
  ENSG00000159640_62 (sequence is synthesized)
aggctgggcagccatgcggctgacctcggagcctggccctgccccgcacccttgccctgccctgccctgccctgcccatgctgtctccttgcttcccgctcagctcgctcagaagggccc

SEQ ID NO: 472385 - DNA, 120 bp, Artificial Sequence
  ENSG00000159648_0 (sequence is synthesized)
ggttgctaaggagtgggtgcctcagaatcaggctgcaatgggcattgtctgtgcacaatgttcctttattctgctgctgtccataataagggctcgtccacctcccttcctcttctgccc

SEQ ID NO: 472386 - DNA, 120 bp, Artificial Sequence
  ENSG00000159648_1 (sequence is synthesized)
attgagcagtcaaagaactgaaagtccttataagcctgtgcacctgggcctgggccctacagataaggtagctgctattgctatggcccgcatcattgacctggtgccctgggacgatgg

SEQ ID NO: 472387 - DNA, 120 bp, Artificial Sequence
  ENSG00000159648_2 (sequence is synthesized)
ctccacacatgtgtatgcctccccggccatcctgcttcccatggagcggcagcgcaaccagctggcgggcgtgaagcagcagctctaccacccagccctgcccaccctgcgccacatgga

SEQ ID NO: 472388 - DNA, 120 bp, Artificial Sequence
  ENSG00000159648_3 (sequence is synthesized)
cagggacaccgtcaaggcctgccttcctgatgagcactgccagtccaccacctactgccgcaaagatgaatttgacaacgcccattttacactccttggggtccccaacaaacccctgca

SEQ ID NO: 472389 - DNA, 120 bp, Artificial Sequence
  ENSG00000159648_4 (sequence is synthesized)
aggactggtcccacttcgtgtcctcggccggggagttcaagctgccttgcctgaggaagcgagcggagggtctcagcggctacgcggtgcggtacttgaagcccgacgtgacccagacct

SEQ ID NO: 472390 - DNA, 120 bp, Artificial Sequence
  ENSG00000159648_5 (sequence is synthesized)
ggcggcaggaagccctgtgtggggcgtgggcagggcgtccgtgctcccccgactcaccgcgcccctatccctgctgcccgcctcagtactgcctcagccagaaccccagcctggaccgct

SEQ ID NO: 472391 - DNA, 120 bp, Artificial Sequence
  ENSG00000159648_6 (sequence is synthesized)
acggacagaagcccctgcctttcgactccctgaacactttccgaagcttcggctccagctacagtcgtgtcaactacctgaccccctggcattaatctctggaaaggaggctgactccca

SEQ ID NO: 472392 - DNA, 120 bp, Artificial Sequence
  ENSG00000159648_7 (sequence is synthesized)
ggctgccggacggtgccacctcaggtcccctggccagacagaggacttatggtggcaccagccatctccccaggagttcagcctaactagaaataaacctaatgctcccttagagacaca

SEQ ID NO: 472393 - DNA, 120 bp, Artificial Sequence
  ENSG00000159648_8 (sequence is synthesized)
gtccttataagcctgtgcacctgggcctgggccctacagataaggtagctgctattgatgaatttgacaacgcccattttacactccttggggtccccaacaaacccctgcagtgtttgg

SEQ ID NO: 472394 - DNA, 120 bp, Artificial Sequence
  ENSG00000159648_9 (sequence is synthesized)
ggggacagcctcggggctccctgactctgaaacccccctgccccagcgaggcctggcgaggaggaggggccctcctgggagggcgcgagctgcttcgctctggagagatccgcccctggc

SEQ ID NO: 472395 - DNA, 120 bp, Artificial Sequence
  ENSG00000159648_10 (sequence is synthesized)
aaatgtgcagcccactggggtgggggtggacgcgggagggggtccacatcccaccaggtttgactggaggaggccaaaaggatagggcgaggatgttaactagaaggagagaaaacagac

SEQ ID NO: 472396 - DNA, 120 bp, Artificial Sequence
  ENSG00000159648_11 (sequence is synthesized)
aaataagaaacacaagggagagagccgagaatctgccttttagggtgcggagaggccctaagggagggggctaagtggtcttcccggcagggtcgccccacaagtaaagagataagataa

SEQ ID NO: 472397 - DNA, 120 bp, Artificial Sequence
  ENSG00000159648_12 (sequence is synthesized)
gaacaagagttcttatctccaagataagcacctcttgcaagaggttgcaggatactcaaacattttcataactaagccatctctcaccctcccggccccactttgtacactccagccaga

SEQ ID NO: 472398 - DNA, 120 bp, Artificial Sequence
  ENSG00000159648_13 (sequence is synthesized)
ctagactcccccgaaacccagcagaccaagcactcttcacacctttgcctgtgctgtttcagcgcctagatggcccttcctcctctgcctggaaaactccttcgtgccattattattatt

SEQ ID NO: 472399 - DNA, 120 bp, Artificial Sequence
  ENSG00000159648_14 (sequence is synthesized)
ccagatgtgccatcctccttgaagtcttcccccaccctctgcctctccccaccggctcacactccctcccattggtcactacctttgtgtccctgagtatcgagtgcaatactcagacta

SEQ ID NO: 472400 - DNA, 120 bp, Artificial Sequence
  ENSG00000159648_15 (sequence is synthesized)
ttgcactgtcattattgacagaaaccagccttcccgtctcccacacggggaaacgtttctgggttttgctaccatatgatgcctaacagagtaggttcactaaatgattgaaaaatgggt

SEQ ID NO: 472401 - DNA, 120 bp, Artificial Sequence
  ENSG00000159648_16 (sequence is synthesized)
gaagctgttcatagttaggtatcaatgggagagaaggatgaggcacagtcaaaggagggaggttagcttgaaagctaaggaggacagctgaaaatacagaaaacagggagccactgaagt

SEQ ID NO: 472402 - DNA, 120 bp, Artificial Sequence
  ENSG00000159648_17 (sequence is synthesized)
ctcctgagccacatagaggctggctggaagctgtgttttcagatcctagaggggaaaagcctgatttttcccctaggacaccctggaaacccccacctcacccctacttctctccacagt

SEQ ID NO: 472403 - DNA, 120 bp, Artificial Sequence
  ENSG00000159648_18 (sequence is synthesized)
atcttacccttgcccgtccccggccaactcctggaggactggtggggggttggagaaaaatgtctggtgacctggtttgagagtcagggtgtaagccgcaaggtccagccagaattgaga

SEQ ID NO: 472404 - DNA, 120 bp, Artificial Sequence
  ENSG00000159648_19 (sequence is synthesized)
tccaagagcaagagatgtgctccagccccttgcctgcagccccacacccaagccccctccatttcagatcctgaatttgagccctaagaagaaagggagagggctagaaagctattttta

SEQ ID NO: 472405 - DNA, 120 bp, Artificial Sequence
  ENSG00000159648_20 (sequence is synthesized)
ggtgcctttttgaagctcttgtcatactggtgtgctctggggggcttccctgtgcctggggtccccctgaaggtgtgggagcaggctggggcaaggggagctggccaggcctatggcctt

SEQ ID NO: 472406 - DNA, 120 bp, Artificial Sequence
  ENSG00000159648_21 (sequence is synthesized)
gattcctgtgacgcaacagaatgtagagtctaaacttgcatgagatgcatgaagccactcagagaagaaagttccccgctctccaaagcaccaccaataaacatgtcatttaagcaaaaa

SEQ ID NO: 472407 - DNA, 120 bp, Artificial Sequence
  ENSG00000159650_0 (sequence is synthesized)
agtctcttcctggcctccccacagtgctggcctctgcctccatctcagtcacacatgtctagcctccaggcgctgtgctctggcctgcccctgcggcccctcccagagaaccggggacgc

SEQ ID NO: 472408 - DNA, 120 bp, Artificial Sequence
  ENSG00000159650_1 (sequence is synthesized)
caggctggggtgccccatgcccctgtcaggacccccagcctcagccctgtggagaaacagctggcgctgaggaacgccctgcgctacttccccccggatgtccaggagctgctggcccca

SEQ ID NO: 472409 - DNA, 120 bp, Artificial Sequence
  ENSG00000159650_2 (sequence is synthesized)
gagtttgcccaggagctgcaactgtacggacacatctacatgtaccggttttgccccgacattgaaatgagggcctacccgattgagcagtacccctgccagacgaaagtggctgccgcc

SEQ ID NO: 472410 - DNA, 120 bp, Artificial Sequence
  ENSG00000159650_3 (sequence is synthesized)
atcatgcacatgattatgaacaacctggatcctgccgtggcccagtttccccaggagctggtgacctatggaggaaatgggcaggtgttcagcaactgggctcagttctggctgaccatg

SEQ ID NO: 472411 - DNA, 120 bp, Artificial Sequence
  ENSG00000159650_4 (sequence is synthesized)
ttctacttgtcgaagatgacagaggagcagactttggtcatgtacagtgggcacccacttggcctctttcccagcagccgcagtgccccacggctcgtcatcaccaatgggatggtcatt

SEQ ID NO: 472412 - DNA, 120 bp, Artificial Sequence
  ENSG00000159650_5 (sequence is synthesized)
cccaactactcctcccggacggagtatgagaagctctttgccttgggggttacaatgtacggccagatgacagcaggtagctactgctacatcggtccccagggaatcgttcatggcact

SEQ ID NO: 472413 - DNA, 120 bp, Artificial Sequence
  ENSG00000159650_6 (sequence is synthesized)
gtgctcaccgtgttgaatgctgcacgtcggtacctgggcatcgaggacttggctgggaaggtctttgtcacctctgggctcggcggaatgagtggggctcaggccaaggccgcagtcatc

SEQ ID NO: 472414 - DNA, 120 bp, Artificial Sequence
  ENSG00000159650_7 (sequence is synthesized)
gtggggtgcatcggtgtgatagcagaggtggataaagcagcccttgagaaacgccacaggcagggctggctgatggaagtgactgacagcttggaccgctgcatccagaggctcagggaa

SEQ ID NO: 472415 - DNA, 120 bp, Artificial Sequence
  ENSG00000159650_8 (sequence is synthesized)
gcaaggaaaaaaaaggaggtgctcagccttggttaccatggcaacgtggtggctctttgggagcgcctggtccacgaattggacacgacgggggagtgcttggtggacctggggtcagat

SEQ ID NO: 472416 - DNA, 120 bp, Artificial Sequence
  ENSG00000159650_9 (sequence is synthesized)
cagacatcctgccacaacccgttcaatggcggctactaccctgtgcagctcagcttcacggaggcccagagcctcatggcctccaaccctgctgtgttcaaggacctggtccaggaaagc

SEQ ID NO: 472417 - DNA, 120 bp, Artificial Sequence
  ENSG00000159650_10 (sequence is synthesized)
ctgaggaggcaagtctcagccatcaacaggttggccgaggagaagttcttcttctgggactacggcaatgccttcctcttggaggcccagagagcaggagcggatgtggagaagaaaggt

SEQ ID NO: 472418 - DNA, 120 bp, Artificial Sequence
  ENSG00000159650_11 (sequence is synthesized)
gctggcaggacagagttccgctacccttcctatgtgcagcacatcatgggggacatattctcccagggatttgggcctttccgctgggtgtgcacatcgggggacccccaggacctggcg

SEQ ID NO: 472419 - DNA, 120 bp, Artificial Sequence
  ENSG00000159650_12 (sequence is synthesized)
gtcacagacgaactggccacatctgtgctggaggaagccattgctgatggagtgaaggtgtctgtgaagctgcagtacatggacaacatccgctggatccgggaggccgccaggcaccgg

SEQ ID NO: 472420 - DNA, 120 bp, Artificial Sequence
  ENSG00000159650_13 (sequence is synthesized)
atcctgtactcagaccagaagggccgcgtggccatcgctgtggccattaaccaggccatcgcctgcaggaggatcaaggcgccggtggtcctgagccgagatcaccatgacgtgagcggc

SEQ ID NO: 472421 - DNA, 120 bp, Artificial Sequence
  ENSG00000159650_14 (sequence is synthesized)
accgacagcccctttagggagacctccaacatttacgacggctctgccttctgtgcagacatggctgtgcagaacttcgtgggagatgcctgtcgcggagccacctgggtcgcccttcac

SEQ ID NO: 472422 - DNA, 120 bp, Artificial Sequence
  ENSG00000159650_15 (sequence is synthesized)
aacggagggggcgtgggctggggtgaggtgatcaacgggggattcggcctcgtgctggacggtaccccggaggccgaggggagagccaggctgatgctcagctgggatgtctccaatggt

SEQ ID NO: 472423 - DNA, 120 bp, Artificial Sequence
  ENSG00000159650_16 (sequence is synthesized)
gtggcccggcgctgctggtcagggaaccagaaggcctatgagatcatctgccagaccatgcaggagaacagcaccttggtggtgacactgcctcacaaggtggaggacgagcgggtgctc

SEQ ID NO: 472424 - DNA, 120 bp, Artificial Sequence
  ENSG00000159650_17 (sequence is synthesized)
cagcaggccctgcagctctgagggagccaggagtcgcggcccctgcctcccttcctccctggcgatcctcacctgcccagccatggcacacacccttcctgcacacccgcactacctgca

SEQ ID NO: 472425 - DNA, 120 bp, Artificial Sequence
  ENSG00000159650_18 (sequence is synthesized)
cttctcgcacatcctcacgtggcccttatggtgccctgtgcagggtgccaccacagcctcattttacagacagccccctgaggcccagagacatgcagctctctgtccacaaccatgcca

SEQ ID NO: 472426 - DNA, 120 bp, Artificial Sequence
  ENSG00000159650_19 (sequence is synthesized)
cttgcatgggagccctgaaggctgtcaaagtccatttagggccaagtcccaagcctgcccgggggccctgcggtgaacactggtcaagctctctccggctgggatgatcacaccctctgc

SEQ ID NO: 472427 - DNA, 120 bp, Artificial Sequence
  ENSG00000159650_20 (sequence is synthesized)
ttcctggccacctgccagcctccatgcaactctgtctgtctgctgcccatctgctgtctgtgcaagcaacttctggaccctggcaccctgggctgctggcctggaggagttcgggaagga

SEQ ID NO: 472428 - DNA, 120 bp, Artificial Sequence
  ENSG00000159650_21 (sequence is synthesized)
ggatagaccaggaaataaagggtcaacagagctgtgtgctgcactgtgggctggtgggacgggcaggccgggtctgccctaaggataaatgatcacttactggggaagaaatgagagagc

SEQ ID NO: 472429 - DNA, 120 bp, Artificial Sequence
  ENSG00000159650_22 (sequence is synthesized)
aggggcacccccctaggccagcacagcctgaggggtacagcaaaggggaccctttgctggcccctgaggctggagtctggcaccccttccccaatcccatagcccggtaatgactgggtc

SEQ ID NO: 472430 - DNA, 120 bp, Artificial Sequence
  ENSG00000159650_23 (sequence is synthesized)
cagagcctcgtgagaggtcaccgggatgggggaagtggcctctgtcagggccagggctcatgaatctcattctcttagctgggcgtgcaacagaccaacagataactcatcctaaacaga

SEQ ID NO: 472431 - DNA, 120 bp, Artificial Sequence
  ENSG00000159650_24 (sequence is synthesized)
gaaatgagaaagagtctgtgggtgggcctctgagggccacagaaaaccagacaccccacatgtcggtggattggagaggggcaggccactgccctctccaggaccaagccgggttcttgg

SEQ ID NO: 472432 - DNA, 120 bp, Artificial Sequence
  ENSG00000159650_25 (sequence is synthesized)
tccccaccctccctgcactccgcatctcctccccagcagccattctcccctttcccttgtgaacaaaagcctagttttgtgtgggcagcaatatagggtaaataaaaccacctgattctc

SEQ ID NO: 472433 - DNA, 120 bp, Artificial Sequence
  ENSG00000159650_26 (sequence is synthesized)
cagccttccttgctgttaggagggactgttggcctagtcctggcccacgagatgagggtggggtctgtggggcagggcttcttgagagccgtcgtttttctaataaaatggacagatcca

SEQ ID NO: 472434 - DNA, 120 bp, Artificial Sequence
  ENSG00000159650_27 (sequence is synthesized)
agccctgggctgggccggcctccctgctgccctgggactgtgtgtcctttcctgctttgtcaaccttgcacccctgggggaggggaggtgcctggctccctcgggcttctccaggccact

SEQ ID NO: 472435 - DNA, 120 bp, Artificial Sequence
  ENSG00000159658_0 (sequence is synthesized)
gaagtgatctggggctggagcgatggcccggggctggagctcgcggccgccgccgccgcagccgccgccaccaacgccaacaacaacgtgtcgggagcagccgcggccgaagccggagca

SEQ ID NO: 472436 - DNA, 120 bp, Artificial Sequence
  ENSG00000159658_1 (sequence is synthesized)
ggggccggagtcgcggctggagtggggcctgcgcgtgtgagtggccgagagttgcccgtgccggagacctcaaactccgggcgggagcgctttcggtcggccgagccgccgtcgcccgcg

SEQ ID NO: 472437 - DNA, 120 bp, Artificial Sequence
  ENSG00000159658_2 (sequence is synthesized)
gcaccgtgtccccaaggcccagacagcggggcgggggtctatcaggcgcgggactggcttctctcaggccgacccttctagccgggctccggatcttcctcggcctcgggcccccttcac

SEQ ID NO: 472438 - DNA, 120 bp, Artificial Sequence
  ENSG00000159658_3 (sequence is synthesized)
gttcaggacggaggccggagaacggtgatcatcacacaccccagccggcttcctggccagggcattttctctgcggccaagcagtgttgggattgtagctgctgggagccccctcctgcc

SEQ ID NO: 472439 - DNA, 120 bp, Artificial Sequence
  ENSG00000159658_4 (sequence is synthesized)
gccacctctcctgcaaggaagggactgacgcgttcccactttcttactctgcacctccccactctcttcccattcaagaacgagtttctcttccctctccattggaaatcttgctccgga

SEQ ID NO: 472440 - DNA, 120 bp, Artificial Sequence
  ENSG00000159658_5 (sequence is synthesized)
ggtccgaaacacgtattttaagcgtgcccttcctcacctcctggagcacccttagaagtattgcctacttatccgggctgagaatccttcatttttgacctggcttttttttcgcccttt

SEQ ID NO: 472441 - DNA, 120 bp, Artificial Sequence
  ENSG00000159658_6 (sequence is synthesized)
gggagataaaggtccctctccaccctctactaacactctgcacccaaggccttatcctttggggtcaccagctccttggccatttctatgtgatttcccccacccatctgagttccagtt

SEQ ID NO: 472442 - DNA, 120 bp, Artificial Sequence
  ENSG00000159658_7 (sequence is synthesized)
tcctctgggctccaatctccagtccctggcggatctggtcagtcccacccctaggtgggagtgaccagggggctctggcccaggattcccaaccctggaaggcagctccaaggcaggaag

SEQ ID NO: 472443 - DNA, 120 bp, Artificial Sequence
  ENSG00000159658_8 (sequence is synthesized)
agaattgggcatcgggtacgaacctggcagctcaggagtcggggctccactcaccccacacaaaaagatgaaaaagcgcaaagagctcaatgcattgattggtttggctggggacagccg

SEQ ID NO: 472444 - DNA, 120 bp, Artificial Sequence
  ENSG00000159658_9 (sequence is synthesized)
gagaaagaagcccaagaaaggcccaagcagtcaccgcctgcttcgcactgagcctcccgactcagactctgagtccagctccgaagaggaagaggaattcggtgtggttggaaatcgctc

SEQ ID NO: 472445 - DNA, 120 bp, Artificial Sequence
  ENSG00000159658_10 (sequence is synthesized)
tcgctttgccaagggagactatttacgatgctgcaagatctgttatccgctctgtggttttgtcatccttgctgcctgtgttgtggcctgtgttggcttggtgtggatgcaggttgctct

SEQ ID NO: 472446 - DNA, 120 bp, Artificial Sequence
  ENSG00000159658_11 (sequence is synthesized)
caaggaggatctggatgccctcaaggaaaaatttcgaacaatggaatctaatcagaaaagctcattccaagaaatccccaaacttaatgaagaactactcagcaagcaaaaacaacttga

SEQ ID NO: 472447 - DNA, 120 bp, Artificial Sequence
  ENSG00000159658_12 (sequence is synthesized)
gaagattgaatctggagagatgggtttgaacaaagtctggataaacatcacagaaatgaataagcagatttctctgttgacttctgcagtgaaccacctcaaagccaatgttaagtcagc

SEQ ID NO: 472448 - DNA, 120 bp, Artificial Sequence
  ENSG00000159658_13 (sequence is synthesized)
tgcagacttgattagcctgcctaccactgtagagggacttcagaagagtgtagcttccattggcaatactttaaacagcgtccatcttgctgtggaagcactacagaaaactgtggatga

SEQ ID NO: 472449 - DNA, 120 bp, Artificial Sequence
  ENSG00000159658_14 (sequence is synthesized)
acacaagaaaacgatggaattactgcagagtgatatgaatcagcacttcttgaaggagactcctggaagcaaccagatcattccgtcaccttcagccacatcagaacttgacaataaaac

SEQ ID NO: 472450 - DNA, 120 bp, Artificial Sequence
  ENSG00000159658_15 (sequence is synthesized)
ccacagtgagaatttgaaacaggatatcctgtaccttcacaactctttagaggaggtaaacagtgccctagtggggtaccagagacagaatgatcttaaactcgagggaatgaacgagac

SEQ ID NO: 472451 - DNA, 120 bp, Artificial Sequence
  ENSG00000159658_16 (sequence is synthesized)
agtcagtaatcttacccagagagtcaacctgatagaaagcgatgtggttgctatgagcaaggtagaaaagaaagcaaacctgtccttcagcatgatgggtgatagatctgccactctgaa

SEQ ID NO: 472452 - DNA, 120 bp, Artificial Sequence
  ENSG00000159658_17 (sequence is synthesized)
aagacagtctttggatcaagtcaccaacagaacagatacagtaaaaatccaaagcataaagaaagaagatagttcaaattctcaggtatccaagctaagagagaaactccagctgatcag

SEQ ID NO: 472453 - DNA, 120 bp, Artificial Sequence
  ENSG00000159658_18 (sequence is synthesized)
tgctcttacaaacaaacctgagagcaacaggcctccagagaccgccgatgaagagcaagtagagagtttcacatcaaagccatcagcattgccaaaattttcacagtttcttggagaccc

SEQ ID NO: 472454 - DNA, 120 bp, Artificial Sequence
  ENSG00000159658_19 (sequence is synthesized)
agttgagaaagctgcccaactaagacctatctccctaccaggagtttctagcactgaagatcttcaggatttattccgcaagactggccaggacgtggatgggaagctgacctaccagga

SEQ ID NO: 472455 - DNA, 120 bp, Artificial Sequence
  ENSG00000159658_20 (sequence is synthesized)
aatctggacctccctaggttctgctatgccagaaccagagagcttgagagcatttgattccgatggagatggaagatactcattcctggagctaagggtagctttaggtatctagcttca

SEQ ID NO: 472456 - DNA, 120 bp, Artificial Sequence
  ENSG00000159658_21 (sequence is synthesized)
tcaggcatattttagaaatggactgcctaatatctatttacctaacaacaaaacaacccttacttacccatcagtcctctagtcctccaaactactgtagcagatactttgccacctttt

SEQ ID NO: 472457 - DNA, 120 bp, Artificial Sequence
  ENSG00000159658_22 (sequence is synthesized)
aacttgtttgaagaagctatataaaagttatttttttaaagaagaagaccattttacttatgatgttcagaaatctatgatttcctacaaccagtaagatcttacattttaaaattgcca

SEQ ID NO: 472458 - DNA, 120 bp, Artificial Sequence
  ENSG00000159658_23 (sequence is synthesized)
gaaaaaaaattaaagccctctttttttctctttcctttttttgaggggaggagaccttatcttttaaagctgggaaatgtatatagagagagaataagccacttttatatttcacttaaa

SEQ ID NO: 472459 - DNA, 120 bp, Artificial Sequence
  ENSG00000159658_24 (sequence is synthesized)
ataggccttttctgtttgtaaatatttaaatgaaagaaagcattgtgcatattgtgtggaaagtaggaagaatggttttgaacaggatatgaacaaatgacttattaaaaattgctgatc

SEQ ID NO: 472460 - DNA, 120 bp, Artificial Sequence
  ENSG00000159658_25 (sequence is synthesized)
tggtgtaggtggcagctgaaactacatccatgtctccataaggtatccctcaaaggcccaggcgctgccagggggtttgtcctggtagctggaggaaccgatttcagggagtagacactg

SEQ ID NO: 472461 - DNA, 120 bp, Artificial Sequence
  ENSG00000159658_26 (sequence is synthesized)
gagacaatactgactccaggcatggctcatggaagtaggattctggttctttgttcctattccctcagctaatcccaacctgggaatcagagaagtcttggggatttttctcatttttag

SEQ ID NO: 472462 - DNA, 120 bp, Artificial Sequence
  ENSG00000159658_27 (sequence is synthesized)
tactatttcagggtttatgagcataaaaagttatccattggggagctccattttccctgctgagtgagctagattgccttccccacccacccacttaagtctgtcttaaagccgtagctg

SEQ ID NO: 472463 - DNA, 120 bp, Artificial Sequence
  ENSG00000159658_28 (sequence is synthesized)
gctcccaccaccagtaccatctccatttgaatggcagggctaaattcccccagccattatctcacactgaccacccagagctttagaagagagctgtgcttctaattttgacccagaaaa

SEQ ID NO: 472464 - DNA, 120 bp, Artificial Sequence
  ENSG00000159658_29 (sequence is synthesized)
ccataccccttgagattttacctagaggctaaccaagagcctaatatgtttctctgggggatgactaaagccaaaaaggctgtgagatgaaacatgtgaaataatattcagtttccttac

SEQ ID NO: 472465 - DNA, 120 bp, Artificial Sequence
  ENSG00000159658_30 (sequence is synthesized)
cattaccagctcagaagtagctagaggctttctacccaaaggatgccaaagtatagcagggcaggcctggagctagggccttcacatggtggtagcaagtttttcaaatctaatacaatc

SEQ ID NO: 472466 - DNA, 120 bp, Artificial Sequence
  ENSG00000159658_31 (sequence is synthesized)
aagtacaatacttcctttaaatgcttctgtggacctggcatgaaagatccctagattgaaaggaataatacctccatgtctcctgtatgttgagtctagaattgctgtgttgttcttaga

SEQ ID NO: 472467 - DNA, 120 bp, Artificial Sequence
  ENSG00000159658_32 (sequence is synthesized)
agcagtctttgggcaacaacttgaaaggggaaaaaaaaactacaaaaacttaactttggtataggccaagtcagggagaaagtagagaaagctgtcatgccacagacttctttagtggag

SEQ ID NO: 472468 - DNA, 120 bp, Artificial Sequence
  ENSG00000159658_33 (sequence is synthesized)
atcatttcctttttaactttgttcaggttgcccttcaccatggatacagtccggtacccttaaacatttaagggctgttttttttttctttacatgatgttcagcttggtattaaccaaa

SEQ ID NO: 472469 - DNA, 120 bp, Artificial Sequence
  ENSG00000159658_34 (sequence is synthesized)
cttaaattttttttccagaagtattaaaatttagttaaagcaagatgaagtcttttcccatgaatgtgtccccttatctcattatagcttatgctcagtttcactttcttggaaaggtta

SEQ ID NO: 472470 - DNA, 120 bp, Artificial Sequence
  ENSG00000159658_35 (sequence is synthesized)
aaacaaattagcctggcactttaggtaacttgaaaataactctcacccttctgactgccttccatccactctcaccccacacctttttttaatatatatacacccttacagattttctaa

SEQ ID NO: 472471 - DNA, 120 bp, Artificial Sequence
  ENSG00000159658_36 (sequence is synthesized)
caaccaaataaaattctagcaataaattgaattatactgctatatttgtatatactgtaccataaatagtatgtctgtacctggaaggtatttttttgagaactgatttatatgaaatat

SEQ ID NO: 472472 - DNA, 120 bp, Artificial Sequence
  ENSG00000159658_37 (sequence is synthesized)
acttgagggtaatgtagcttgtcctttttagtttcaaattcttattcataggcagatactttgaagacaccttaactctttgttgtgtgtattttcccttgcatcagataactatacatg

SEQ ID NO: 472473 - DNA, 120 bp, Artificial Sequence
  ENSG00000159658_38 (sequence is synthesized)
gagaaatccattttgttttttggtttatcttctgttcttcctaccttgtgcttgtctgactagtatcacccctgagccagtatacagtaccatcctctccccctaccaagtttggcagag

SEQ ID NO: 472474 - DNA, 120 bp, Artificial Sequence
  ENSG00000159658_39 (sequence is synthesized)
gtgtttatactgcattctcagatctatgaatatttttgtcatcctgcctgagaaagtacatcttccaggcaaaagtagggtatcttgaactcctttcttctgagttgagcagactcactg

SEQ ID NO: 472475 - DNA, 120 bp, Artificial Sequence
  ENSG00000159658_40 (sequence is synthesized)
gcttaagcatcccataagcctattatttagtgtgaatttgggacttttatttgtatgttgtcttaacttactaagcctgtgacttgtatttagctgtagtcaagcctcaccagccatatc

SEQ ID NO: 472476 - DNA, 120 bp, Artificial Sequence
  ENSG00000159658_41 (sequence is synthesized)
tcatctctgagaggaagactggatagtgagtttggttttggttttggttttaaacccttttaccttttcagtctggcagctcctactgctgctttcctaagttactcaaagcactgcttc

SEQ ID NO: 472477 - DNA, 120 bp, Artificial Sequence
  ENSG00000159658_42 (sequence is synthesized)
ttggtccttgttttcttttgccttgtactatcttgtataatgtttactaaaagagcctccccataaatcagagaggcaaaaaggtagcatataaaaagaagaaccaaaagaagagaaaac

SEQ ID NO: 472478 - DNA, 120 bp, Artificial Sequence
  ENSG00000159658_43 (sequence is synthesized)
ctgacttctagatgactgtggtgtcatctaaaaggcagaggtgcctgaccctcaggaatgtgtatgatgcaacagagctgaagaatgggttcccttcacctactgctggccattgtccct

SEQ ID NO: 472479 - DNA, 120 bp, Artificial Sequence
  ENSG00000159658_44 (sequence is synthesized)
tctgttggagattcctttctttatggttgctgttcataaccccttcaacacccccccttgctggtcctgccggtcacagttgaggattttggctgtgatgggctcatactcataatggcc

SEQ ID NO: 472480 - DNA, 120 bp, Artificial Sequence
  ENSG00000159658_45 (sequence is synthesized)
tgttgagttgtttttagtgacaggttttgtttgctgcacacctcattggcttgcttaccaacaccagctagaagtggtccctctttcatatccaaaccagaacacatttgggtattcctg

SEQ ID NO: 472481 - DNA, 120 bp, Artificial Sequence
  ENSG00000159658_46 (sequence is synthesized)
agactttatagagcgtgtattgtttgttatacgaacctaacctaccttgttgttttctcatattaagaaatttaaatctactttgttttagtgaagctattttggtaatgtataagcaat

SEQ ID NO: 472482 - DNA, 120 bp, Artificial Sequence
  ENSG00000159658_47 (sequence is synthesized)
tttggttctgtttagggagaattcagggtttccatgacttgatttgagctttgcatatttcaaataagtaacacagccattttaatttagctaaataaaaaaatttcttttttctctcaa

SEQ ID NO: 472483 - DNA, 120 bp, Artificial Sequence
  ENSG00000159658_48 (sequence is synthesized)
aaatccaaagcataaagttctgccaccagttgactcatcaccagggagaaacagaggaaagatcaggggaaaacttgtgaaagaagatagttcaaattctcaggtatccaagctaagaga

SEQ ID NO: 472484 - DNA, 120 bp, Artificial Sequence
  ENSG00000159658_49 (sequence is synthesized)
aatcagcacttcttgaaggagactcctggaagcaaccagatcattccgtcaccttcagccacatcagaacttgacaataaaacccacagtgagaatttgaaacagatgggtgatagatct

SEQ ID NO: 472485 - DNA, 120 bp, Artificial Sequence
  ENSG00000159658_50 (sequence is synthesized)
aactaagacctatctccctaccaggagtttctagcactgaaggtaaatttttataccacggggtagtaatgggaatgttcaaagtaataactttttaatgtttattttcacttgtcaaaa

SEQ ID NO: 472486 - DNA, 120 bp, Artificial Sequence
  ENSG00000159658_51 (sequence is synthesized)
caaacctgagagcaacaggcctccagagaccgccgatgaaggtgagagcagagccggcttcttaatatttcatggaggcttgagcagcttgcctctcacatggggagcagggaaggtgtt

SEQ ID NO: 472487 - DNA, 120 bp, Artificial Sequence
  ENSG00000159658_52 (sequence is synthesized)
ccagcagtactgatcgcaccaagcgagtgatgcctgaacgcaccgagatgaagctgatacactttgctttcatttagaaaaggcccattttgtacatgatttgtactctagtctattaag

SEQ ID NO: 472488 - DNA, 120 bp, Artificial Sequence
  ENSG00000159658_53 (sequence is synthesized)
ggaagaattggtaatgtttagctggaaatagaattctccatgctgtctgcatccaattataggcaaaaatgttactgtcatagagtatattaagccagccctaaaagttgtttatgagag

SEQ ID NO: 472489 - DNA, 120 bp, Artificial Sequence
  ENSG00000159674_0 (sequence is synthesized)
gaccgctgccggccgcgctcccgctgctcctgccgggtgatggaaaaccccagcccggccgccgccctgggcaaggccctctgcgctctcctcctggccactctcggcgccgccggccag

SEQ ID NO: 472490 - DNA, 120 bp, Artificial Sequence
  ENSG00000159674_1 (sequence is synthesized)
ccagcctcttgggggagagtccatctgttccgccagagccctggccaaatacagcatcaccttcacgggcaagtggagccagacggccttccccaagcagtaccccctgttccgcccccc

SEQ ID NO: 472491 - DNA, 120 bp, Artificial Sequence
  ENSG00000159674_2 (sequence is synthesized)
tgcgcagtggtcttcgctgctgggggccgcgcatagctccgactacagcatgtggaggaagaaccagtacgtcagtaacgggctgcgcgactttgcggagcgcggcgaggcctgggcgct

SEQ ID NO: 472492 - DNA, 120 bp, Artificial Sequence
  ENSG00000159674_3 (sequence is synthesized)
gatgaaggagatcgaggcggcgggggaggcgctgcagagcgtgcacgcggtgttttcggcgcccgccgtccccagcggcaccgggcagacgtcggcggagctggaggtgcagcgcaggca

SEQ ID NO: 472493 - DNA, 120 bp, Artificial Sequence
  ENSG00000159674_4 (sequence is synthesized)
ctcgctggtctcgtttgtggtgcgcatcgtgcccagccccgactggttcgtgggcgtggacagcctggacctgtgcgacggggaccgttggcgggaacaggcggcgctggacctgtaccc

SEQ ID NO: 472494 - DNA, 120 bp, Artificial Sequence
  ENSG00000159674_5 (sequence is synthesized)
ctacgacgccgggacggacagcggcttcaccttctcctcccccaacttcgccaccatcccgcaggacacggtgaccgagataacgtcctcctctcccagccacccggccaactccttcta

SEQ ID NO: 472495 - DNA, 120 bp, Artificial Sequence
  ENSG00000159674_6 (sequence is synthesized)
ctgcctcccatcgccagggtgacactggtgcggctgcgacagagccccagggccttcatccctcccgccccagtcctgcccagcagggacaatgagattgtagacagcgcctcagttcca

SEQ ID NO: 472496 - DNA, 120 bp, Artificial Sequence
  ENSG00000159674_7 (sequence is synthesized)
gaaacgccgctggactgcgaggtctccctgtggtcgtcctggggactgtgcggaggccactgtgggaggctcgggaccaagagcaggactcgctacgtccgggtccagcccgccaacaac

SEQ ID NO: 472497 - DNA, 120 bp, Artificial Sequence
  ENSG00000159674_8 (sequence is synthesized)
gggagcccctgccccgagctcgaagaagaggctgagtgcgtccctgataactgcgtctaagaccagagccccgcagcccctggggccccccggagccatggggtgtcgggggctcctgtg

SEQ ID NO: 472498 - DNA, 120 bp, Artificial Sequence
  ENSG00000159674_9 (sequence is synthesized)
caggctcatgctgcaggcggccgagggcacagggggtttcgcgctgctcctgaccgcggtgaggccgcgccgaccatctctgcactgaagggccctctggtggccggcacgggcattggg

SEQ ID NO: 472499 - DNA, 120 bp, Artificial Sequence
  ENSG00000159674_10 (sequence is synthesized)
aaacagcctcctcctttcccaaccttgcttcttaggggcccccgtgtcccgtctgctctcagcctcctcctcctgcaggataaagtcatccccaaggctccagctactctaaattatgtc

SEQ ID NO: 472500 - DNA, 120 bp, Artificial Sequence
  ENSG00000159674_11 (sequence is synthesized)
tccttataagttattgctgctccaggagattgtccttcatcgtccaggggcctggctcccacgtggttgcagatacctcagacctggtgctctaggctgtgctgagcccactctcccgag

SEQ ID NO: 472501 - DNA, 120 bp, Artificial Sequence
  ENSG00000159674_12 (sequence is synthesized)
ggcgcatccaagcgggggccacttgagaagtgaataaatggggcggtttcggaagcgtcagtgtttccatgttatggatctctctgcgtttgaataaagactatctctgttgctcacaaa

SEQ ID NO: 472502 - DNA, 120 bp, Artificial Sequence
  ENSG00000159674_13 (sequence is synthesized)
gatgcctgcgccgggagccaggagcttccccagccacttccagcatgtagactgaagtcaggccacgcacagggctctccaggtcacaccctgcgcaagaaggtgtagcacgctggctct

SEQ ID NO: 472503 - DNA, 120 bp, Artificial Sequence
  ENSG00000159674_14 (sequence is synthesized)
ggttctgacactgagggctccggggcaggggcagggcccgctggcttggcgtgcgcgtgcgtgcacaggtgtgtgggtgtctgcctggtgggcgggcggcgtgtgcgtgtgcgcatgtgt

SEQ ID NO: 472504 - DNA, 120 bp, Artificial Sequence
  ENSG00000159674_15 (sequence is synthesized)
gtttgtgaactggcgatgtgatcgagggcacgggtgctgggcttccccctcatgggtaaaaccagagctactgtatgccagccgtggaggcatggacggcccctgagctcggacagcaga

SEQ ID NO: 472505 - DNA, 120 bp, Artificial Sequence
  ENSG00000159674_16 (sequence is synthesized)
cggacagaccgttgacgcgttggcaccgtggccagagtccgttcaagaaaggtcggcagagagggctgagaacgcggcaggcacatcctccaagggccctgctggaacccctggagcagg

SEQ ID NO: 472506 - DNA, 120 bp, Artificial Sequence
  ENSG00000159674_17 (sequence is synthesized)
aggaagcggtgattctccaggccttggtttcctcactgcttggaggaagatgagaattctcagaggtccttatgctgccctttttgctgcagtcttgacatcttaacgtggatagaaaaa

SEQ ID NO: 472507 - DNA, 120 bp, Artificial Sequence
  ENSG00000159674_18 (sequence is synthesized)
gttacccctggtcgctcgcaggcgcacgggcgatctaaccccgcgccgtccattccgctgatgggggtctcggaagcaccgcaggagagctttgcggagcagggagggggtcgcgggtgc

SEQ ID NO: 472508 - DNA, 120 bp, Artificial Sequence
  ENSG00000159674_19 (sequence is synthesized)
tcggggccgtcctcagagcccaaagtgccgcagccctctcggctttccaccccgaggctgccacgacggtgccagcgcgcggctgctcccctctgtgctcccaggtgatggaaaacccca

SEQ ID NO: 472509 - DNA, 120 bp, Artificial Sequence
  ENSG00000159674_20 (sequence is synthesized)
aagagccccgggaagagctgcatgcacacggctggagagaggctctgcacccgagcacagcctgctgcgactcctcatagacccggaaaactgattagaaggcagagggcctcctccctc

SEQ ID NO: 472510 - DNA, 120 bp, Artificial Sequence
  ENSG00000159674_21 (sequence is synthesized)
cctgcgtggtttgggggctgttcctgatagcacagatgccctgatcacaaacacctgcctgcattgctgaccacaggcctggcctggagaaacccacagcctcttcagggaagcgagcaa

SEQ ID NO: 472511 - DNA, 120 bp, Artificial Sequence
  ENSG00000159674_22 (sequence is synthesized)
cgtcctgttggctttccgagtttagctcccatgtttggaccatggaggtttatgtcttctatctcagtcatcgtccctgccacatgcccaaccagacatgctgacatcacaggccctact

SEQ ID NO: 472512 - DNA, 120 bp, Artificial Sequence
  ENSG00000159674_23 (sequence is synthesized)
tagccctgtttcctctccccttggcctcaccttgatgtcaggggggtgtcctctggtctgactcagaggcagtgactggcttccttctagtaccttctctggataatgagtatggatgac

SEQ ID NO: 472513 - DNA, 120 bp, Artificial Sequence
  ENSG00000159674_24 (sequence is synthesized)
ggctgcggggttggagccgccggctgcggggttggagacgccggctgcggggttggagccgccggctgcggggttggagccgccggctgcggggttggaaccgccggctgtgagtttcct

SEQ ID NO: 472514 - DNA, 120 bp, Artificial Sequence
  ENSG00000159674_25 (sequence is synthesized)
cccacagcctcttcagggaagcgagcaaggggcttggaagtgcctgaagccagtgggctggggactcacggccgggacactcagggccgtgcgccgtttctcctggaataactggaggtg

SEQ ID NO: 472515 - DNA, 120 bp, Artificial Sequence
  ENSG00000159674_26 (sequence is synthesized)
atttcatggaacctggaggctgggcttcaggctggggggagaggctccagactgggtcttctccgtggctctgccccccgctctccttgcttgagtggtgggggccctgcatcctctcat

SEQ ID NO: 472516 - DNA, 120 bp, Artificial Sequence
  ENSG00000159674_27 (sequence is synthesized)
gtcacctggagacactgttcctgccagctccggtcttggaaaacatggcctctcctctcctgccctggccccggcccctcctgccagctggacgtgggcatttctgcacccagtagaacc

SEQ ID NO: 472517 - DNA, 120 bp, Artificial Sequence
  ENSG00000159674_28 (sequence is synthesized)
ccacagccaggaaagatgcctggaaggctagagaagaggcgtgatggggggaccccatgtgtggcgacagagcagcacacccagctattctcagccaccatgtgggagagaaatgacgcc

SEQ ID NO: 472518 - DNA, 120 bp, Artificial Sequence
  ENSG00000159674_29 (sequence is synthesized)
agggtgtcacggtccgacgtgactgggggccatggttccctgcgggcggcggggagggatttcctggggcgccccctggaatccaagcccgaccgcagtgtctgaccatggtccgcggcg

SEQ ID NO: 472519 - DNA, 120 bp, Artificial Sequence
  ENSG00000159674_30 (sequence is synthesized)
agtccctctggggtggcccaagcagggcacagggcagggagccaggctcttcggggccccaccccaggctggccctgcaccccatcctgccttctctccccactgtgggcccagaacttg

SEQ ID NO: 472520 - DNA, 120 bp, Artificial Sequence
  ENSG00000159674_31 (sequence is synthesized)
ccccgtgggggccgggaagcacccaccatccccacccctagctgctctcagccagagcccagctggacttgcaggattgattttccagcaaaaaacaacagcagagaaacccaagagcag

SEQ ID NO: 472521 - DNA, 120 bp, Artificial Sequence
  ENSG00000159674_32 (sequence is synthesized)
tctgccccgctgagcagctctgctccccaggctggccctgggcctctcgcggcctgacccgctccccttggcatcaagcaccaggagggacggggtggcccggccagggcgtgggtgttc

SEQ ID NO: 472522 - DNA, 120 bp, Artificial Sequence
  ENSG00000159674_33 (sequence is synthesized)
cccggcccctctgagcaccagcacctggccgtgcagcatcgaagacaggaggaactggagcctcattggccggcccggggcgccggcctcgggcttaaataggagctccgggctctggct

SEQ ID NO: 472523 - DNA, 120 bp, Artificial Sequence
  ENSG00000159674_34 (sequence is synthesized)
aaaatttccaggtgattattgctagaggagtgggaagttactaatttttgtatatttatcttgtattaaaatgtttttactgatttttaattttaattttaatattttttgagatggagt

SEQ ID NO: 472524 - DNA, 89 bp, Artificial Sequence
  ENSG00000159674_35 (sequence is synthesized)
ttcactcttctggcctgctgcaacctccacccatgggttcaagcgattctcgtgcctcagacccccgagtagctgggattacaggcatg

SEQ ID NO: 472525 - DNA, 85 bp, Artificial Sequence
  ENSG00000159674_36 (sequence is synthesized)
ttttaatttttaaatgagggagcagaggcataactaggtttacaatcatgtcatcaacaaaataaattgtcttatttttctgata

SEQ ID NO: 472526 - DNA, 120 bp, Artificial Sequence
  ENSG00000159674_37 (sequence is synthesized)
agacagacaaagaaaggggtgcggcagcactgccaggggaagagggtgatccgacccggggaaggtcgctgggcagggcgagttgggaaagcggcagcccccgccgcccccgcagcccct

SEQ ID NO: 472527 - DNA, 120 bp, Artificial Sequence
  ENSG00000159674_38 (sequence is synthesized)
tctcctcctttctcccacgtcctatctgcctctcgctggaggccaggccgtgcagcatcgaagacaggaggaactggagcctcattggccggcccggggcgccggcctcgggcttaaata

SEQ ID NO: 472528 - DNA, 120 bp, Artificial Sequence
  ENSG00000159674_39 (sequence is synthesized)
cagtctggggcgtgctgacgtcgggagactctaacaccagaatgtttgccgagcgcctgcggtgtgcggttccggggatgcggtgggggcagggggcgctcacggggagggcgcaggtgg

SEQ ID NO: 472529 - DNA, 120 bp, Artificial Sequence
  ENSG00000159674_40 (sequence is synthesized)
gtcgcggcaggggcagccacagggtgtcacggtccgacgtgactgggggccatggttccctgcgggcggcggggagggatttcctggggcgccccctggaatccaagcccgaccgcagtg

SEQ ID NO: 472530 - DNA, 120 bp, Artificial Sequence
  ENSG00000159674_41 (sequence is synthesized)
acactgaagatgtgactcttgcacattatttgcagttgaaagcatcttacagggccacagcccagaggaaagaatgaaaggaggctccagacagtacctgagagactctgtcctgtcaga

SEQ ID NO: 472531 - DNA, 120 bp, Artificial Sequence
  ENSG00000159674_42 (sequence is synthesized)
cacgcacccacaggtgacctgtgtgtcacagctgacaaggaagcttgctaggatggccctgtgtggccaccgggtgacagctatgctgcagggcacctgtgggggtctcgggacccagcc

SEQ ID NO: 472532 - DNA, 120 bp, Artificial Sequence
  ENSG00000159674_43 (sequence is synthesized)
accacacagctcggggctctgctcacaggcgccttggcctggggcggggcaggtgctgatgagcattctcctagctcttccaggcacctgctggacagggcaggctgggaacgctggggc

SEQ ID NO: 472533 - DNA, 120 bp, Artificial Sequence
  ENSG00000159674_44 (sequence is synthesized)
cgagtggcagttccctccctactcagctgggtggcagccactggcctcacggagcgcctgtggtctggagcgcattgctgggtcgtgggtcagggcctgttggctctgggtctctgggtc

SEQ ID NO: 472534 - DNA, 120 bp, Artificial Sequence
  ENSG00000159674_45 (sequence is synthesized)
agcatgtagactgaagtcaggccacgcacagggctctccaggtcacaccctgcgcaagaaggtgtagcacgctggctctaatttcgagaaggccaggccgtgcagcatcgaagacaggag

SEQ ID NO: 472535 - DNA, 120 bp, Artificial Sequence
  ENSG00000159685_0 (sequence is synthesized)
aaagcgttgttggcccggttgctctggagccgggtctcgggtctggtggctgccggccctgcggcatctcgccatggggagcacggagagcagcgagggccgcagggtgtccttcggagt

SEQ ID NO: 472536 - DNA, 120 bp, Artificial Sequence
  ENSG00000159685_1 (sequence is synthesized)
ggacgaggaggagcgggtccgggtgctgcagggtgtccggctgtctgaaaacgtggtgaaccgcatgaaggagcccagctctccaccccctgctcccacatcttctacctttggccttca

SEQ ID NO: 472537 - DNA, 120 bp, Artificial Sequence
  ENSG00000159685_2 (sequence is synthesized)
agatggcaacttgagagcccctcacaaagaatccacactgcccaggtcggggagcagtggtggccagcagccctcagggatgaaggagggtgtcaagaggtatgaacaggagcatgctgc

SEQ ID NO: 472538 - DNA, 120 bp, Artificial Sequence
  ENSG00000159685_3 (sequence is synthesized)
tatccaggataagctcttccaggtggcaaagagggaaagagaggctgccaccaagcactccaaggcatccctgcccacgggcgaaggcagcatcagccatgaggagcagaagtcagtccg

SEQ ID NO: 472539 - DNA, 120 bp, Artificial Sequence
  ENSG00000159685_4 (sequence is synthesized)
cgccgtgacaccttctacaaggagcagctggagcgtattgagaggaagaatgctgagatgtataaactgtcttcagagcaattccatgaggcagcctcaaagatggagagcacaataaag

SEQ ID NO: 472540 - DNA, 120 bp, Artificial Sequence
  ENSG00000159685_5 (sequence is synthesized)
ccccgcagggtggagcccgtctgctcagggttgcaggcccagattctccactgctaccgagatcgcccgcatgaggtgctgctgtgctcggacctggtcaaggcataccagcgctgcgtg

SEQ ID NO: 472541 - DNA, 120 bp, Artificial Sequence
  ENSG00000159685_6 (sequence is synthesized)
agcgccgcccacaagggctgaggagcagacatcattccctgccctggcagtgacttggagccctgaagaagggaccaatcatgggaccacagccactgtgccctgccgtttcctgctggg

SEQ ID NO: 472542 - DNA, 120 bp, Artificial Sequence
  ENSG00000159685_7 (sequence is synthesized)
cccctgcatatgcccctgagcctggggctgccacgtgtttaggaaacaaagtatgcgctactgtctgaaaacaaataaagcagatgcctttgttttcagtcgttgactcactggcaaaca

SEQ ID NO: 472543 - DNA, 120 bp, Artificial Sequence
  ENSG00000159685_8 (sequence is synthesized)
ggtttccaagggccttgggaggtaggcgaggtacctctatctagcattggagatctctgcctgccttttcctgttagaatcagatgctccacttggaggtctctgcatttgccaagggag

SEQ ID NO: 472544 - DNA, 120 bp, Artificial Sequence
  ENSG00000159685_9 (sequence is synthesized)
ggattcttcgctttcctcagtcacctgcacactctcctggctgcttccaggagcgccttggacatctggccccagggagatgatccctgttgcgtttgccctattaggctgggtgggagc

SEQ ID NO: 472545 - DNA, 120 bp, Artificial Sequence
  ENSG00000159685_10 (sequence is synthesized)
aggctgggtaaagtcaggccccaccttcaagggccgggccccttgtgggtgccggggacttcttagccctcggcacttaggggtgggagggtggcagaggcccgagtgcagagtgggggt

SEQ ID NO: 472546 - DNA, 120 bp, Artificial Sequence
  ENSG00000159685_11 (sequence is synthesized)
ggctgtctcaggcataaagggatggctatcctgggcacagcggggcgggttgtcctggaggcgggctgcaccatcctcatgggggccctccagtggggctttcctgtctcctgagtgtac

SEQ ID NO: 472547 - DNA, 120 bp, Artificial Sequence
  ENSG00000159685_12 (sequence is synthesized)
acaggccccagtgaaggagcccggtgtggagccccataccacagcatgtttcagtgtctgctatattgtgagcctaagccacccaccacagggcttgaccctgcgaccgtcctctcattt

SEQ ID NO: 472548 - DNA, 120 bp, Artificial Sequence
  ENSG00000159685_13 (sequence is synthesized)
tgtatccaaggggctgggtggaatcctgcggccgtccaccgtggaagctggtcagcctccaccttctacctgttgagactggcagaatgctgagatgtataaactgtcttcagagcaatt

SEQ ID NO: 472549 - DNA, 120 bp, Artificial Sequence
  ENSG00000159685_14 (sequence is synthesized)
ccatgaggcagcctcaaagatggagagcacaataaagcacaaacaggcaacacttcataacccagtggcggccctggacccaggaggtttgtgcagtcatggacagctacacaggcgcct

SEQ ID NO: 472550 - DNA, 120 bp, Artificial Sequence
  ENSG00000159685_15 (sequence is synthesized)
gccatggacggaagggaaggctgcacagacacctgccatggacggaaaaagggaaggctgcaccaacaggtctgccgtggacggaagggaaggctgcacggactcctgctgtggacgaaa

SEQ ID NO: 472551 - DNA, 120 bp, Artificial Sequence
  ENSG00000159685_16 (sequence is synthesized)
gccgtggacggaagggaaggctgctgcccggactgccgccgtggacggaagggaaggctgctgcccggactgccgccgtggacggaagggaaggctgctgcccggactgccgccgtggac

SEQ ID NO: 472552 - DNA, 120 bp, Artificial Sequence
  ENSG00000159685_17 (sequence is synthesized)
ggaagggaaggctgctgcgcggactgccgccgtggacggaagggaaggctgtacagagccttatcaccaatgggaaggaaaggctgcacggaggcttgcttggatagaagggaagggtgc

SEQ ID NO: 472553 - DNA, 120 bp, Artificial Sequence
  ENSG00000159685_18 (sequence is synthesized)
agattgtcttggacatgaagggaaggctacacacagaattatcatggatggaaggaaagctgcacagaggaatgttaatgacgagaagggaagaatgcagagccttgccatagatgagaa

SEQ ID NO: 472554 - DNA, 120 bp, Artificial Sequence
  ENSG00000159685_19 (sequence is synthesized)
tgtctccggccacctgggatgctcagccagtgcctttggaaacatttctgccttgaatgtcagggccacactgcgttactgagcatgttctgaccgggccgtcttgggcatcacctgcca

SEQ ID NO: 472555 - DNA, 120 bp, Artificial Sequence
  ENSG00000159692_0 (sequence is synthesized)
ccgggctcgcggcggcgcagcgcgccggagtggtcggggcccgcggccgctcgcgcctctcgatgggcagctcgcacttgctcaacaagggcctgccgcttggcgtccgacctccgatca

SEQ ID NO: 472556 - DNA, 120 bp, Artificial Sequence
  ENSG00000159692_1 (sequence is synthesized)
tgaacgggcccctgcacccgcggcccctggtggcattgctggatggccgggactgcacagtggagatgcccatcctgaaggacgtggccactgtggccttctgcgacgcgcagtccacgc

SEQ ID NO: 472557 - DNA, 120 bp, Artificial Sequence
  ENSG00000159692_2 (sequence is synthesized)
aggagatccatgagaaggtcctgaacgaggctgtgggggccctgatgtaccacaccatcactctcaccagggaggacctggagaagttcaaagccctccgcatcatcgtccggattggca

SEQ ID NO: 472558 - DNA, 120 bp, Artificial Sequence
  ENSG00000159692_3 (sequence is synthesized)
gtggttttgacaacatcgacatcaagtcggccggggatttaggcattgccgtctgcaacgtgcccgcggcgtctgtggaggagacggccgactcgacgctgtgccacatcctgaacctgt

SEQ ID NO: 472559 - DNA, 120 bp, Artificial Sequence
  ENSG00000159692_4 (sequence is synthesized)
accggcgggccacctggctgcaccaggcgctgcgggagggcacacgagtccagagcgtcgagcagatccgcgaggtggcgtccggcgctgccaggatccgcggggagaccttgggcatca

SEQ ID NO: 472560 - DNA, 120 bp, Artificial Sequence
  ENSG00000159692_5 (sequence is synthesized)
tcggacttggtcgcgtggggcaggcagtggcgctgcgggccaaggccttcggcttcaacgtgctcttctacgacccttacttgtcggatggcgtggagcgggcgctggggctgcagcgtg

SEQ ID NO: 472561 - DNA, 120 bp, Artificial Sequence
  ENSG00000159692_6 (sequence is synthesized)
tcagcaccctgcaggacctgctcttccacagcgactgcgtgaccctgcactgcggcctcaacgagcacaaccaccacctcatcaacgacttcaccgtcaagcagatgagacaaggggcct

SEQ ID NO: 472562 - DNA, 120 bp, Artificial Sequence
  ENSG00000159692_7 (sequence is synthesized)
tcctggtgaacacagcccggggtggcctggtggatgagaaggcgctggcccaggccctgaaggagggccggatccgcggcgcggccctggatgtgcacgagtcggaacccttcagcttta

SEQ ID NO: 472563 - DNA, 120 bp, Artificial Sequence
  ENSG00000159692_8 (sequence is synthesized)
gatgcacccaacctcatctgcaccccccatgctgcatggtacagcgagcaggcatccatcgagatgcgagaggaggcggcacgggagatccgcagagccatcacaggccggatcccagac

SEQ ID NO: 472564 - DNA, 120 bp, Artificial Sequence
  ENSG00000159692_9 (sequence is synthesized)
agcctgaagaactgtgtcaacaaggaccatctgacagccgccacccactgggccagcatggaccccgccgtcgtgcaccctgagctcaatggggctgcctataggtaccctccgggcgtg

SEQ ID NO: 472565 - DNA, 120 bp, Artificial Sequence
  ENSG00000159692_10 (sequence is synthesized)
gtgggcgtggcccccactggcatcccagctgctgtggaaggtatcgtccccagcgccatgtccctgtcccacggcctgccccctgtggcccacccgccccacgccccttctcctggccaa

SEQ ID NO: 472566 - DNA, 120 bp, Artificial Sequence
  ENSG00000159692_11 (sequence is synthesized)
accgtcaagcccgaggcggatagagaccacgccagtgaccagttgtagcccgggaggagctctccagcctcggcgcctgggcagagggcccggaaaccctcggaccagagtgtgtggagg

SEQ ID NO: 472567 - DNA, 120 bp, Artificial Sequence
  ENSG00000159692_12 (sequence is synthesized)
aggcatctgtgtggtggccctggcactgcagagactggtccgggctgtcaggaggcgggagggggcagcgctgggcctcgtgtcgcttgtcgtcgtccgtcctgtgggcgctctgccctg

SEQ ID NO: 472568 - DNA, 120 bp, Artificial Sequence
  ENSG00000159692_13 (sequence is synthesized)
tgtccttcgcgttcctcgttaagcagaagaagtcagtagttattctcccatgaacgttcttgtctgtgtacagtttttagaacattacaaaggatctgtttgcttagctgtcaacaaaaa

SEQ ID NO: 472569 - DNA, 90 bp, Artificial Sequence
  ENSG00000159692_14 (sequence is synthesized)
gaacgtgccccagaatgaggcagttggcaaacttctcaggacaatgaatccttcccgtttttctttttatgccacacagtgcattgtttt

SEQ ID NO: 472570 - DNA, 120 bp, Artificial Sequence
  ENSG00000159692_15 (sequence is synthesized)
cttcccgtttttctttttatgccacacagtgcattgttttttctacctgcttgtcttatttttagaataatttagaaaaacaaaacaaaggctgtttttcctaattttggcatgaacccc

SEQ ID NO: 472571 - DNA, 120 bp, Artificial Sequence
  ENSG00000159692_16 (sequence is synthesized)
cccttgttccaaatgaagacggcatcacgaagcagctccaaaaggaaaagcttgggcggtgcccagcgtgcccgctgcccatcgacgtctgtcctggggacgtggagggtggcagcgtcc

SEQ ID NO: 472572 - DNA, 120 bp, Artificial Sequence
  ENSG00000159692_17 (sequence is synthesized)
ccgcctgcaccagtgccgtcctgctgatgtggtaggctagcaatattttggttaaaatcatgtttgtgactgtaaccatttgtatgaattattttaaagaaataaaaatcctggaaagag

SEQ ID NO: 472573 - DNA, 120 bp, Artificial Sequence
  ENSG00000159692_18 (sequence is synthesized)
cagaagcctgagcactttggctcgagacaattaaggacgtgggatgaggctccgagacaggacgcggttctgcctggggatcctgaagataaaaagctttgaaaagtcgaattcatggtc

SEQ ID NO: 472574 - DNA, 120 bp, Artificial Sequence
  ENSG00000159692_19 (sequence is synthesized)
gtccaccatcctgccggccttgacctccagacggcgcctctgccaggccggacacttgcctgtactcaggcctctcgctggccagcagtgggggagtttgccgcccgctgcgggctttag

SEQ ID NO: 472575 - DNA, 120 bp, Artificial Sequence
  ENSG00000159692_20 (sequence is synthesized)
ggatccgcggggagaccttgggcatcatcggacttggtgcacacaggaaaacattgtacacattcaccccatgaacccaccagcacgttgacagagcaggctcctgcacacagacagctc

SEQ ID NO: 472576 - DNA, 120 bp, Artificial Sequence
  ENSG00000159692_21 (sequence is synthesized)
gcttcctagagcagagggccttccccagctgtgccgaggtgggatcacgggcacgcagccttctgtgtccgcctcccgtcagtcggggtgatgcctctgggtctcacctgtgttttcata

SEQ ID NO: 472577 - DNA, 120 bp, Artificial Sequence
  ENSG00000159692_22 (sequence is synthesized)
cgacccagcagtttctgataacggttccatcacgtgaacacagcacgatttgcttctccagactcttggtgatgcattttgtaagtttttggctaatattacaaacaaaacttgtgtgaa

SEQ ID NO: 472578 - DNA, 120 bp, Artificial Sequence
  ENSG00000159692_23 (sequence is synthesized)
gacaggcctggagcccctcggtctcttgctggcggctggcacagagacgggctgccgtgggctctgaccttaataccgggtcacagtcgcttctaggaccaagaggacagagaccccatc

SEQ ID NO: 472579 - DNA, 120 bp, Artificial Sequence
  ENSG00000159692_24 (sequence is synthesized)
accgtatgcaggggcctgtttccaggcagactgcccagtgcccagctgagcctcgggtgcagtgcgacccccgcagggcatgtccagaccccaggaccccctctcaggtctagaagatcc

SEQ ID NO: 472580 - DNA, 120 bp, Artificial Sequence
  ENSG00000159692_25 (sequence is synthesized)
gctcagccagcctgccgagcagagcagggccgtggggtctgtggttcccaggcagggccccccacagggggttccagtgcccagccacctcccctccgtacccagccacagcactcaggc

SEQ ID NO: 472581 - DNA, 120 bp, Artificial Sequence
  ENSG00000159692_26 (sequence is synthesized)
ggactttcgggccctcccgggtcggggcttcaccggtagcaggcagggctttgatattaatgcttaaagggaaagcagagctgagctgtcaggacgttggttagctacaaaccctactct

SEQ ID NO: 472582 - DNA, 120 bp, Artificial Sequence
  ENSG00000159692_27 (sequence is synthesized)
tgttaaaagagaaatggggtcggggaaggggttctccagccctgaacttcccgggccgggcaggacgcggtccctccaggagtcggggctcccccgcctggggacgcactggggcaggcg

SEQ ID NO: 472583 - DNA, 120 bp, Artificial Sequence
  ENSG00000159692_28 (sequence is synthesized)
gggaagggtcttgcgcatgcgcgggccgctgcgtgtgcgcgagcgccgcagtctgctctccccgcccgcggcccgtgcagtaagactttgaccccgacgcaggcttcagtgattgccgcg

SEQ ID NO: 472584 - DNA, 120 bp, Artificial Sequence
  ENSG00000159692_29 (sequence is synthesized)
tccgccttggcagtgggcgcgttggagcggacgtggagcgctcgtgtggagcgtgcgtgggcaccttggcttgaccacagctggtgtcatccttggcagatggtcaaactgaggcacaga

SEQ ID NO: 472585 - DNA, 120 bp, Artificial Sequence
  ENSG00000159692_30 (sequence is synthesized)
ggcagggctcctgaccaaccaggagagagtgaggccccagtgtctgtgagtggtccccatgggccctggccatggagtcatggcatcccgtccagacctgcagcccctacagcaccttgg

SEQ ID NO: 472586 - DNA, 120 bp, Artificial Sequence
  ENSG00000159692_31 (sequence is synthesized)
tccctgaagacagacgaagaagctgggcccccaggagctcacaggatagggccaggcccaggctgcagcctggagaggcctataacctgcaggaacgggcgggccttgccaactctggcc

SEQ ID NO: 472587 - DNA, 120 bp, Artificial Sequence
  ENSG00000159692_32 (sequence is synthesized)
tggggtgttggctgttctggaagaagtagctgagaggctgaatttggctttggtggcatcactggcctgctgggtgtggggccctgccgggatatccatggcctgaaaggtgacatctgg

SEQ ID NO: 472588 - DNA, 120 bp, Artificial Sequence
  ENSG00000159692_33 (sequence is synthesized)
agtgagggtgacctggactctgacgcgccacacgatcggcacccagcctgctgatgtccaggaaaccttgaatctggatttttggggaccccgcactgccggccccaggtgcctggcaaa

SEQ ID NO: 472589 - DNA, 120 bp, Artificial Sequence
  ENSG00000159692_34 (sequence is synthesized)
agaagtaagacggcccctttagaggaagacagcgtcagccgaggcctcgggtcatttctacaaatcaccatctggtgcggggtccatcacatgcaaacagaggtaaccaggcagtcaagg

SEQ ID NO: 472590 - DNA, 120 bp, Artificial Sequence
  ENSG00000159692_35 (sequence is synthesized)
gcttccagaacaggaggcagagcctttccgcagtttccctgcccacagcacacaccctgtgccctccgtcccctggttcttggacactggggacatctggatgcggctagagcctgtggg

SEQ ID NO: 472591 - DNA, 120 bp, Artificial Sequence
  ENSG00000159692_36 (sequence is synthesized)
ggtggccgcagccctgggggactgttcccaggagtaggcctcggggccacaggggcgcggcctcgggcctggcactgcaacctcagggtgagcgcccttcgtgtgtgcggcaggagccgg

SEQ ID NO: 472592 - DNA, 120 bp, Artificial Sequence
  ENSG00000159692_37 (sequence is synthesized)
ggcccctggctgtcagcaggcccccgagtccaggtaggtcccagacagcagtcccgggtgtggcagatgcagtgaggtccacttctgaggcgttccctggagtctgtgagttctggtcgg

SEQ ID NO: 472593 - DNA, 120 bp, Artificial Sequence
  ENSG00000159692_38 (sequence is synthesized)
caggtctgggtgccactggggcaggagcagcctctgtcccagtcgtcccgcgccgtcaggaggtggacacggggttttccctggacaccatcaggaggtggacatcgggtttgccctgag

SEQ ID NO: 472594 - DNA, 80 bp, Artificial Sequence
  ENSG00000159692_39 (sequence is synthesized)
acaccatcaggaggtggacatcgggtttgtgccccatcaggaggtggacaccacgtttgtcctgagccccatcaggaggt

SEQ ID NO: 472595 - DNA, 67 bp, Artificial Sequence
  ENSG00000159692_40 (sequence is synthesized)
tcaggaggtggacacggggttttccctgcacaccatcaggaggtgaacaccgggttttcactgagct

SEQ ID NO: 472596 - DNA, 87 bp, Artificial Sequence
  ENSG00000159692_41 (sequence is synthesized)
cacactcggtttgtcctgagcgccatcaggaggtggacactgggtttgccctgtgccccatcaggagatggacgctcggtttctcct

SEQ ID NO: 472597 - DNA, 85 bp, Artificial Sequence
  ENSG00000159692_42 (sequence is synthesized)
ggtttgtcctgagcgccatcaggaggtggacactgggtttgccctgtgccccatcaggagatggacgctcggtttcccctgagcc

SEQ ID NO: 472598 - DNA, 74 bp, Artificial Sequence
  ENSG00000159692_43 (sequence is synthesized)
tggcttcttgattcattttcagttttttcccagagagcaggtcctcgggatgccagcttttgtggcgggggtgg

SEQ ID NO: 472599 - DNA, 120 bp, Artificial Sequence
  ENSG00000159692_44 (sequence is synthesized)
gagcaggtcctcgggatgccagcttttgtggcgggggtggagtaaggtgcttcccccggccccagttgcgcggcggtcttcacacgggcggtctcggcattgcccgcggcctggctttgg

SEQ ID NO: 472600 - DNA, 120 bp, Artificial Sequence
  ENSG00000159692_45 (sequence is synthesized)
tccagcagtgagcagcctttgggcagctttcctgattcttgtttgctcaggagacccacaggctcctccgtgatgagaactaggttggtctggcttctacttgtagccagggatcagtga

SEQ ID NO: 472601 - DNA, 120 bp, Artificial Sequence
  ENSG00000159692_46 (sequence is synthesized)
caccgacgaagagctgatgactctggaacggggcgtagcagcgttaggggagaaaatgagatgcggatctgagaaaacggcgaagctgatcggtggaactgaggggcgggtttaccagct

SEQ ID NO: 472602 - DNA, 120 bp, Artificial Sequence
  ENSG00000159692_47 (sequence is synthesized)
gaccaggcggcagcggacaggagggaaggagagaacgcgggagagggcgagatgaggaagggtcgctcttgcagaaacttcagaacaggagagggaaggggttggaagtgatgatgacag

SEQ ID NO: 472603 - DNA, 120 bp, Artificial Sequence
  ENSG00000159692_48 (sequence is synthesized)
caaaaccctttccaaaatggacggaagaaaatctgatgttaaaaatgcgcgtggtctgccgggagcgtctgctggggcgttcgctctggaagattcttcatggtttctcacacgggtaga

SEQ ID NO: 472604 - DNA, 120 bp, Artificial Sequence
  ENSG00000159692_49 (sequence is synthesized)
tgcgtgcttgtaatgcagcccagtggccacactcctttatcccggagactcggaatgcgcgtccacacacagacctgcacgtcatgctccctagcagcttaactcaccatagcccaaacc

SEQ ID NO: 472605 - DNA, 120 bp, Artificial Sequence
  ENSG00000159692_50 (sequence is synthesized)
agaaggacgccccccaccggctgtccttcagtgggtgagtggccaggcaaatgctggccacctccctcggtgtcctcctcagcaacaggcatgaacgctgggtccctgccacaccctggg

SEQ ID NO: 472606 - DNA, 120 bp, Artificial Sequence
  ENSG00000159692_51 (sequence is synthesized)
tgatctcggcagcatgatggcgagtgaagaagctggtttcaaggggtgcacactgtatgatctcttcatccccaggtgataggattagcgtgacggaaacagtggcccggggtgtaggtg

SEQ ID NO: 472607 - DNA, 120 bp, Artificial Sequence
  ENSG00000159692_52 (sequence is synthesized)
ggggggccgccggcaggccggtgtctggaatcggcacatgggcacgttggcacgtcacgtgggcatgtccacacgcatgcaaggggctgtgggtgaactgcccgtggtgcacacctgagg

SEQ ID NO: 472608 - DNA, 120 bp, Artificial Sequence
  ENSG00000159692_53 (sequence is synthesized)
gagttgtgtggcaccagctcggtttggacagtgccctttgttaggtacggttttctcattgggaagctggatttgtattaaagatgcacacgtaagaataaaaaagaggctcgtagaaaa

SEQ ID NO: 472609 - DNA, 120 bp, Artificial Sequence
  ENSG00000159708_0 (sequence is synthesized)
gtgcgccgggtggtctcgcgggcggtggcaggtgagcggcgggcggggatggcggagcaatgggagctggacgaggaaggcattcgccgcctgggggcgctgacgctggagcagccggaa

SEQ ID NO: 472610 - DNA, 120 bp, Artificial Sequence
  ENSG00000159708_1 (sequence is synthesized)
ctggtggagtctctttcattgcagggatcttatgctggcaaaatccattccattggtgatgccttcagaaattttaaaaatctccgatccttagatttatcaaggaatttgatcactagc

SEQ ID NO: 472611 - DNA, 120 bp, Artificial Sequence
  ENSG00000159708_2 (sequence is synthesized)
cttaagggaatccagtatttatgttcactccaagacctgaatttatattataacaacattccttcattagtggaagtgtcccgtctacaaccgttacccttcctcaaagaactggatttg

SEQ ID NO: 472612 - DNA, 120 bp, Artificial Sequence
  ENSG00000159708_3 (sequence is synthesized)
agacttaatcctgttgtaaggaaagatacagattataggctctttgctgtatatacactacaaactctggagaaattagatgaccgaactgtacgtgaaggtgagagaaaagctgccaag

SEQ ID NO: 472613 - DNA, 120 bp, Artificial Sequence
  ENSG00000159708_4 (sequence is synthesized)
ctgcattttagtcagttgggcaacagtgaaaattttcttttagaggtggaaaaaagctctagggagaagacaatgaaaaactgtgtaacaggtgagagctctgcatcaaaagtcagtgct

SEQ ID NO: 472614 - DNA, 120 bp, Artificial Sequence
  ENSG00000159708_5 (sequence is synthesized)
aatgttgacagcaggattgaaatggactcaaacaaaggactttttattcccttccccaaccgggaaataaaggattccctaagtacttctgcaactcagggcaatggtacacgtgatcag

SEQ ID NO: 472615 - DNA, 120 bp, Artificial Sequence
  ENSG00000159708_6 (sequence is synthesized)
aaattagacaccttcccactggggacacagacacaggaagtagcaagaagggagatgccaagtgacaatcaccaggaagatgagttcagacactactcgcctcgtcagtccacagtccga

SEQ ID NO: 472616 - DNA, 120 bp, Artificial Sequence
  ENSG00000159708_7 (sequence is synthesized)
tccccagagaagatgactagagaagggtaccaagtatcttttttggacaataagtcttcaggttcttctccagaaaaggaattgataccaaaacctgatacttttcatcttacccatgat

SEQ ID NO: 472617 - DNA, 120 bp, Artificial Sequence
  ENSG00000159708_8 (sequence is synthesized)
gcctcattgagtaaatgcctggatgtgggtgattctagccagatccatccctatcagttaccttcagatgttggtctggaaaattatgacagttgttattctcaaactctatccctgcat

SEQ ID NO: 472618 - DNA, 120 bp, Artificial Sequence
  ENSG00000159708_9 (sequence is synthesized)
ggaagtcttggtaaaaggcctcagagaagcaagaactatcaagagtatagcataaagccttcaaatgacataaagaccaccgcttcacattcctgtggagacttattaacttctctgtca

SEQ ID NO: 472619 - DNA, 120 bp, Artificial Sequence
  ENSG00000159708_10 (sequence is synthesized)
tgaagcttagttcagatctgtatgccacaacccatttcaacagtgaccctgctgtacttgtcaatgtagagcaacaattatctaccagcctggatgatttaacaccagcacatggttctg

SEQ ID NO: 472620 - DNA, 120 bp, Artificial Sequence
  ENSG00000159708_11 (sequence is synthesized)
tcccaaacaacgctgtcctgggaaacaggacaactcctctgcggacactgctgttgtctcctgggacttcagaacacagaaagatttttaccaagaggtcactaagcccatcgaagagag

SEQ ID NO: 472621 - DNA, 120 bp, Artificial Sequence
  ENSG00000159708_12 (sequence is synthesized)
gattcaaatggaaggacaatatccttgccaacctgaatctaaagcatggtttccaagatgctacaggcagcgagcctctctctagtgacctgggtagtttgcacggtttggctggaaacc

SEQ ID NO: 472622 - DNA, 120 bp, Artificial Sequence
  ENSG00000159708_13 (sequence is synthesized)
acagtccccccatctctgccagaaccccccatgtggccactgtcctcagacagctcctggagcttgtggataagcactggaatggctccggctccctcctcctcaacaagaagtttctcg

SEQ ID NO: 472623 - DNA, 120 bp, Artificial Sequence
  ENSG00000159708_14 (sequence is synthesized)
gtcctgcccgagatttgcttctgtctttggtagtcccggctccttctcagccgaggtgttgctcacatcctgaagacacgatgaaagcattctgcaggagggagcttgaactgaaggagg

SEQ ID NO: 472624 - DNA, 120 bp, Artificial Sequence
  ENSG00000159708_15 (sequence is synthesized)
ctgcgcagctggtccctaatgacatggaaagtttgaagcaaaaactggtcagagtgctggaggaaaacctcattttgtcagaaaaaattcaacagttggaggaaggtgctgccatctcaa

SEQ ID NO: 472625 - DNA, 120 bp, Artificial Sequence
  ENSG00000159708_16 (sequence is synthesized)
ttgtgagtgggcaacagtcacatacttatgatgatcttctgcacaaaaaccaacagctgaccatgcaggtggcttgcctgaaccaggagcttgcccagctgaaaaagctggagaagacag

SEQ ID NO: 472626 - DNA, 120 bp, Artificial Sequence
  ENSG00000159708_17 (sequence is synthesized)
ttgccattctccatgaaagtcagagatccctggtggtaactaatgagtatctgctgcagcagctgaataaggagccaaaaggttattccgggaaagcgctcctgcctcctgagaagggtc

SEQ ID NO: 472627 - DNA, 120 bp, Artificial Sequence
  ENSG00000159708_18 (sequence is synthesized)
atcatctggggagatcatcgccctttgggaaaagcacgttgtcttcctcctcaccagtggcacatgagactggtcagtatctaatacagagcgtcttggatgctgccccagagcctggct

SEQ ID NO: 472628 - DNA, 120 bp, Artificial Sequence
  ENSG00000159708_19 (sequence is synthesized)
tatagagctagcatggaactcacaccacagcttccctggtccacagaggctctcaccgccattgccaccagtatggtggtatgtactcacaaagattaagaaagaaatgtattctgatta

SEQ ID NO: 472629 - DNA, 66 bp, Artificial Sequence
  ENSG00000159708_20 (sequence is synthesized)
aaaagctgccaagctgcattttagtcagttgggcaacagtgaaaattttcttttagaggtggaaaa

SEQ ID NO: 472630 - DNA, 89 bp, Artificial Sequence
  ENSG00000159708_21 (sequence is synthesized)
ctctagggagaagacaatgaaaaactgtgtaacaggtgagagctctgcatcaaaagtcagtgctaatgttgacagcaggattgaaatgg

SEQ ID NO: 472631 - DNA, 120 bp, Artificial Sequence
  ENSG00000159708_22 (sequence is synthesized)
aacacaccaagatgagactggtcctaatttttcctctgcgaatatggttttctgattaactactagttatgtctatgccaaaaaaagaaacatgctcagaccacggtttttgcctccaga

SEQ ID NO: 472632 - DNA, 120 bp, Artificial Sequence
  ENSG00000159708_23 (sequence is synthesized)
gtttgtgcgagaaacaggtcaggttcgagaccagaatgagggttctgttgggaatggaggtggttctgaccaacagggctagaaattcaaagagattttcagaggctggtggctaatact

SEQ ID NO: 472633 - DNA, 120 bp, Artificial Sequence
  ENSG00000159708_24 (sequence is synthesized)
gccaagctaacacctgttgagccttctgcccttgggaaagtcattcccccactgctgccattttctcacctatatcacagggagaactgtccctgatctacttccggctgaagattgaac

SEQ ID NO: 472634 - DNA, 120 bp, Artificial Sequence
  ENSG00000159708_25 (sequence is synthesized)
tctgtagcatctatgtttacagtctcatcatatttacacatttgcttcggccacacatgaaatagttcttataaaagcattgcttcaggctgggcacagtggcgcatgcctgtaatccca

SEQ ID NO: 472635 - DNA, 120 bp, Artificial Sequence
  ENSG00000159708_26 (sequence is synthesized)
gactcagtttcgtaaaaaataatagtaataaaagcattgctttgcttttctgtctagaagttaaaaggatttaaaatttttttccaatgtagaagcaaacagaagatgaattagattatc

SEQ ID NO: 472636 - DNA, 120 bp, Artificial Sequence
  ENSG00000159708_27 (sequence is synthesized)
caagggatttttagttcagagaatgatttaaaaatcaagaaccattcccacataaacaatatacatgtaattcattttataaaatatcctagtggccaggcacggtggcttacatctgta

SEQ ID NO: 472637 - DNA, 120 bp, Artificial Sequence
  ENSG00000159708_28 (sequence is synthesized)
ggacgaggaaggcattcgccgcctgggggcgctgacgctggagcagccggagacaggttcttgctatgttgcccaggctggacttgaacttctggactcaagcaatcctgtctcagcctc

SEQ ID NO: 472638 - DNA, 120 bp, Artificial Sequence
  ENSG00000159708_29 (sequence is synthesized)
aaaatagacttaaactggacctttgcttaaaggtctgtttccctagcttgcaaggatagtctttcccattaataggaaggtattctgaacccctagtctaataagctcacatttgaacgc

SEQ ID NO: 472639 - DNA, 120 bp, Artificial Sequence
  ENSG00000159713_0 (sequence is synthesized)
ggcggagccgcctgggctgcagtcccacccgggagccggcagggagcggagctgcggagccgcctggtctcccgcgtccatcggtccattcctgcgtcgttctgtccttccgaacgcaca

SEQ ID NO: 472640 - DNA, 120 bp, Artificial Sequence
  ENSG00000159713_1 (sequence is synthesized)
cttcaggagcagccgcgaggagtgagcactgcacgcaggatccgcccagtgcttgggccaagcaccctgtggcatccaagctcccctggacgttacccttggtgaaccaaggtggcatgg

SEQ ID NO: 472641 - DNA, 120 bp, Artificial Sequence
  ENSG00000159713_2 (sequence is synthesized)
cagcgagcacagacatggctgggctggaggagagcttccgcaagtttgccatccatggtgaccccaaggccagtgggcaagagatgaatggcaagaactgggccaagctgtgcaaggact

SEQ ID NO: 472642 - DNA, 120 bp, Artificial Sequence
  ENSG00000159713_3 (sequence is synthesized)
gcaaggtggctgacggaaagtccgtgacagggaccgatgtggacatcgtcttctccaaagtcaaggggaagtctgctcgggtcatcaactatgaggagttcaagaaggccctggaagagc

SEQ ID NO: 472643 - DNA, 120 bp, Artificial Sequence
  ENSG00000159713_4 (sequence is synthesized)
aggccttcgatgccatctgccagctggtggcaggcaaagagccagccaatgtgggcgtcactaaagcaaaaacagggggtgctgtagaccggctgacggacaccagcagatacacgggct

SEQ ID NO: 472644 - DNA, 120 bp, Artificial Sequence
  ENSG00000159713_5 (sequence is synthesized)
cccacaaggagcgcttcgatgagagcggcaagggcaagggcattgcgggacggcaggacatcctggacgacagtggctacgtgagcgcctacaagaatgcaggcacctacgatgccaagg

SEQ ID NO: 472645 - DNA, 120 bp, Artificial Sequence
  ENSG00000159713_6 (sequence is synthesized)
tgaagaagtgaggcttgggaagaccgccctgccaagtgcggctgcccctgccagaggctcaggcctgggtctaaggggcacgtggagcaagagatcctggtcccctccctgctggacctg

SEQ ID NO: 472646 - DNA, 120 bp, Artificial Sequence
  ENSG00000159713_7 (sequence is synthesized)
ccacccagagcttcctgcctagtcccactgggctggcccaccaggcctctgacccaggctgctctgcggccccttcctcctcctcttcctgctccaacttctgtccacctggggacagtc

SEQ ID NO: 472647 - DNA, 120 bp, Artificial Sequence
  ENSG00000159713_8 (sequence is synthesized)
tgtgcctgtagcctcatgaccccaacccagccccaggcatggctaacccctgactgcttgcctcatatttaagctgctgctctggccaagtgcctaattttaacccagacctcaataaag

SEQ ID NO: 472648 - DNA, 120 bp, Artificial Sequence
  ENSG00000159713_9 (sequence is synthesized)
cccgggagccggcagggagcggagctgcggagccgcctggtctcccgcgtccatcggtccattcctgcgtcgttctgtccttccgaacgcacacttcaggagcagccgcgaggtagaagc

SEQ ID NO: 472649 - DNA, 120 bp, Artificial Sequence
  ENSG00000159713_10 (sequence is synthesized)
ccataggagacccagatgcccgccaccccaatcagtatcctgcacgatgagggttggggggagcagcctggaaagggtcccaacctccggcggtcccagccgaggagccagctgagcggc

SEQ ID NO: 472650 - DNA, 120 bp, Artificial Sequence
  ENSG00000159713_11 (sequence is synthesized)
cctgccctggccccaagcattccacctcgcagcccccacctcctggtccggctgattgatgactccagctgtcccagtgggagcgggacgggtggctccagttcacgggtgtggccactc

SEQ ID NO: 472651 - DNA, 120 bp, Artificial Sequence
  ENSG00000159713_12 (sequence is synthesized)
agtgggaggttacagcaccagtcggtggcaaggggccaggaagccacggttatgccctaggcgcagggagtgctggcgtgccccacccgtgggccccagcttcccagcccagcccagccc

SEQ ID NO: 472652 - DNA, 120 bp, Artificial Sequence
  ENSG00000159713_13 (sequence is synthesized)
ctcagcactgggagcttctccctgagctgccctgacaccatcctgcccttagcaacattctccaagcagcaccaccctcccttagcaaccgtctccaggcttcacaaactgtggccaggc

SEQ ID NO: 472653 - DNA, 120 bp, Artificial Sequence
  ENSG00000159713_14 (sequence is synthesized)
cagccccaagctcccctcatgtttttgtttaacagcaaatagtaacaaggccttgctggaccagctgcacccctgcccagggcatgcacccgtgcccagactggctcttgctgggtcctc

SEQ ID NO: 472654 - DNA, 120 bp, Artificial Sequence
  ENSG00000159713_15 (sequence is synthesized)
atgacccttacagagatgctgtcctcactgaatgcctgcccgaccagcagcctggcctggccccaagccagcttggcatggagcttccagggagggggcctgctctgccaccctcacttc

SEQ ID NO: 472655 - DNA, 120 bp, Artificial Sequence
  ENSG00000159713_16 (sequence is synthesized)
cacccaagcaaggccttgtgccagggccagacaaagccagggccccagctgctgccctaacagtctttctggacagtgccactctgttccctgtgggcatcattatttcatctgctgaac

SEQ ID NO: 472656 - DNA, 120 bp, Artificial Sequence
  ENSG00000159713_17 (sequence is synthesized)
cctgctgagagccagggctggcattagtgacaagaccgtgcctcccggggctcttccttggggctctgtggcccagggcgacagtgacgggcccctctccccaggcagctccagcaccaa

SEQ ID NO: 472657 - DNA, 120 bp, Artificial Sequence
  ENSG00000159713_18 (sequence is synthesized)
ctctgtagcagaacctgcccaggtcttgcaggtttgaggtagaggctgggatgttctgggcttgggggaggggaagggcagattggctgggagatgacccaggtgggtctctatagggtg

SEQ ID NO: 472658 - DNA, 120 bp, Artificial Sequence
  ENSG00000159713_19 (sequence is synthesized)
tcagggaaacaccatgatcacgaaggtcgttcttccagggcaaaccttatatctattgccctccagagttgctgacccctgcgacttccccaaacgtgggaaagaaacgcaattgcataa

SEQ ID NO: 472659 - DNA, 120 bp, Artificial Sequence
  ENSG00000159713_20 (sequence is synthesized)
tttgtggtggcagcaaatgtgtttgagctttcccctgggggagaaaaaagaaaggggaaccctcatggtgcccacatgcctgtcagggggaagtctgctcgggtcatcaactatgaggag

SEQ ID NO: 472660 - DNA, 120 bp, Artificial Sequence
  ENSG00000159714_0 (sequence is synthesized)
gccggacgaggcccagccagtctgggtctggcctggccgcccctccagcctgctggagccggagccggagccggagccggagccggagccggagccagagccagagctcgaggactcacc

SEQ ID NO: 472661 - DNA, 120 bp, Artificial Sequence
  ENSG00000159714_1 (sequence is synthesized)
cagtctccgtccgggatggggccccgctcccgggcgcgttgccgcccagtcccggggaccgtccctaccgcgagggtctgaggcgcggctgccccggggagggtggaaggccaggcgtgg

SEQ ID NO: 472662 - DNA, 120 bp, Artificial Sequence
  ENSG00000159714_2 (sequence is synthesized)
gtggggcccgaacctctggctgactttggcagggcccatctggcacggcctccgcggcgcgcagctgttttcaagtcagcaaacatttactgaggatctactatgtacaagatgaacatc

SEQ ID NO: 472663 - DNA, 120 bp, Artificial Sequence
  ENSG00000159714_3 (sequence is synthesized)
tgcaacaagccctccaacaagacggcccctgagaagagtgtgtggacggcaccggcacagcccagcggaccctcccctgagctgcagggccagcgatcccgccggaatgggtggagctgg

SEQ ID NO: 472664 - DNA, 120 bp, Artificial Sequence
  ENSG00000159714_4 (sequence is synthesized)
ccccctcacccgctccagattgtggcctggctgctgtacctcttctttgctgtgatcggctttgggatccttgttcccctcctgcctcaccactgggtgcccgctggctacgcttgcatg

SEQ ID NO: 472665 - DNA, 120 bp, Artificial Sequence
  ENSG00000159714_5 (sequence is synthesized)
ggcgccatctttgctggccaccttgtggtgcacctgaccgccgtctccatcgatccagcagatgccaacgtgcgggacaagagctatgcggggcccctgcccatcttcaaccgaagccag

SEQ ID NO: 472666 - DNA, 120 bp, Artificial Sequence
  ENSG00000159714_6 (sequence is synthesized)
cacgcacatgtcattgaagacctgcactgcaacttgtgcaacgtggatgtgagcgctcgctccaagcactgcagcgcctgcaacaagtgcgtgtgcggtttcgaccaccactgcaagtgg

SEQ ID NO: 472667 - DNA, 120 bp, Artificial Sequence
  ENSG00000159714_7 (sequence is synthesized)
ctcaacaactgtgtgggcgagcggaactaccggctctttctacacagtgttgcatccgctttactgggcgtcctgctcctggtgctggtggccacatatgtcttcgtggagttctttgtc

SEQ ID NO: 472668 - DNA, 120 bp, Artificial Sequence
  ENSG00000159714_8 (sequence is synthesized)
tgcgtctgcgcaccaaccgacactttgaagtcctgaagaatcacacggatgtgtggttcgtgttcctgcctgccgcccccgtggagacccaggcccctgccatcctggccctggccgccc

SEQ ID NO: 472669 - DNA, 120 bp, Artificial Sequence
  ENSG00000159714_9 (sequence is synthesized)
tgctcatccttctgggcctcctgtccacagccctcctggggcacctgctctgcttccacatttatctcatgtggcacaagctcaccacctatgagtacatcgtgcagcaccgcccaccac

SEQ ID NO: 472670 - DNA, 120 bp, Artificial Sequence
  ENSG00000159714_10 (sequence is synthesized)
aggaggccaagggggttcacagggagctcgagtcatgtcctcccaagatgcggcccattcaggagatggagttctacatgcggaccttcagacatatgcgcccagagccccctggccagg

SEQ ID NO: 472671 - DNA, 120 bp, Artificial Sequence
  ENSG00000159714_11 (sequence is synthesized)
ccgggccagcagcagtgaatgccaaacactctcgccctgcctccccggatccgaccccaggtaggagggactgtgctgggcctccggtccaggtggagtgggatagaaagaagcctctac

SEQ ID NO: 472672 - DNA, 120 bp, Artificial Sequence
  ENSG00000159714_12 (sequence is synthesized)
cctggcgctcgcctctgcttcttttggcgatgtggggccctcaggctcccccgtgtctctgcagaaaaagaggaagaggcgcgtgtataaagtgcgaacgtctgagacctcggatccggc

SEQ ID NO: 472673 - DNA, 120 bp, Artificial Sequence
  ENSG00000159714_13 (sequence is synthesized)
gtcggggcctagggcccccagccgccgctccagctcgtcgacggattccgcggacgccagccctgtgcacgccgctggccctgccggcgcctaccactcggcgtcggcagagtccgtgga

SEQ ID NO: 472674 - DNA, 120 bp, Artificial Sequence
  ENSG00000159714_14 (sequence is synthesized)
gcctaccactcggcgtcggcagagtccgtggacgagattccagtggcgcagacgcgcctgggcagcgccgctctggccgccccgcggggccggggccgacagcccacgctggcgcggcag

SEQ ID NO: 472675 - DNA, 120 bp, Artificial Sequence
  ENSG00000159714_15 (sequence is synthesized)
cagcggcgagcccagggcgccgggcggccgggaggctggtctggcttagctgggccgagaggccggagggccgagttagagcggccggcctgactctctatgcaacaccccatccttgcc

SEQ ID NO: 472676 - DNA, 120 bp, Artificial Sequence
  ENSG00000159714_16 (sequence is synthesized)
gcaccgagtgcactttaggggcccctacggccggcgggatcggcctccctcccccacgactcagcaatacccgccccaccggctgtgatgctccaataaacttttttatgcttttgcgga

SEQ ID NO: 472677 - DNA, 120 bp, Artificial Sequence
  ENSG00000159714_17 (sequence is synthesized)
ggccacgggccatccagaagcccgaccctggccagtggaccgggggcggggaggaggtccctgtatagtaggtagccacccaggctgccctgtggaggtgctcacgtgcggctcgtggtt

SEQ ID NO: 472678 - DNA, 120 bp, Artificial Sequence
  ENSG00000159714_18 (sequence is synthesized)
aggaaaggccttagaaggcggcctggaggaggttatttttcttaaagatgggctttgcactgggaggccgagagaaagcaggctttgggctccgaaagcagcagtgggcgctgaggctgc

SEQ ID NO: 472679 - DNA, 120 bp, Artificial Sequence
  ENSG00000159714_19 (sequence is synthesized)
gcctgactgtcctgagaggggcgggttgagggctttgtctccgcattcagggttcgtctgctttgagcattgcagaggctcacagaaccacctggttcatgcctgaccagcctatatgct

SEQ ID NO: 472680 - DNA, 120 bp, Artificial Sequence
  ENSG00000159714_20 (sequence is synthesized)
ctccttccttccatcaaagccttctttctgcaggctctctcaggtcccctgagaagtgaggtaaggtcataatgggtaccaggtacccaccttgggcctggaactggcctgggccttagg

SEQ ID NO: 472681 - DNA, 120 bp, Artificial Sequence
  ENSG00000159714_21 (sequence is synthesized)
gatacaagctgagccctagggtgctgggcccccagctgaagggaaggctggtgcacgccacgtggtgatcacgccacatggtaagtgcagcagactgtgagggcaagcagaggccaccta

SEQ ID NO: 472682 - DNA, 120 bp, Artificial Sequence
  ENSG00000159714_22 (sequence is synthesized)
caccagtatcaccgcatgtccacaggcacactcgtggcctgtggctccccccctcccccgccccacctctccccacatgctcttggctcctcccgcttccttcctaacttaaatccagtc

SEQ ID NO: 472683 - DNA, 120 bp, Artificial Sequence
  ENSG00000159714_23 (sequence is synthesized)
gaaccacctggttcatgcctgaccagcctatatgctctccttccttccatcaaagccttctttctgcaggctctctcaggtcccctgagaagtgagatgccaacgtgcgggacaagagct

SEQ ID NO: 472684 - DNA, 120 bp, Artificial Sequence
  ENSG00000159714_24 (sequence is synthesized)
aaagctggggcgagtcctgcgggcgggggtgcaggactaggccactcctgcaaccccctggcctcaaggcccctttgctctcaggggtcgcgtctgcaccctcagggttgctgtgaagat

SEQ ID NO: 472685 - DNA, 120 bp, Artificial Sequence
  ENSG00000159714_25 (sequence is synthesized)
cagggcttgcccataagcctggtgctcagtggggctgcggctctgtttgttccaccacctgctaccttcccttttggtgtagtggcagggagaccaccgcatgtgcatttacgcagcccc

SEQ ID NO: 472686 - DNA, 120 bp, Artificial Sequence
  ENSG00000159714_26 (sequence is synthesized)
tcagctctgcgggagctggtggatgcacactcaggcctgtttctcagccaggggaaaacaattggttcagaggctggatccctggggacaccaggagcaggtgcgggcagctctgagctt

SEQ ID NO: 472687 - DNA, 120 bp, Artificial Sequence
  ENSG00000159714_27 (sequence is synthesized)
cccaccactccctggctgagcctctctaaactgggcctatagacccatgggggctgggagccttcctgcaggaggcagaggctgaatagatgagcctccttgacttccaccttccccagg

SEQ ID NO: 472688 - DNA, 120 bp, Artificial Sequence
  ENSG00000159714_28 (sequence is synthesized)
tggccaagcggaacctccaccaccctcttccccagacactctcgccctgcctccccggatccgaccccagaaaaagaggaagaggcgcgtgtataaagtgcgaacgtctgagacctcgga

SEQ ID NO: 472689 - DNA, 120 bp, Artificial Sequence
  ENSG00000159720_0 (sequence is synthesized)
agctgacctggggagtcgcgattcgtgccggccggtcctggttctccggtcccgccgctcccgcagcagccatgtcgttcttcccggagctttactttaacgtggacaatggctacttgg

SEQ ID NO: 472690 - DNA, 120 bp, Artificial Sequence
  ENSG00000159720_1 (sequence is synthesized)
agggactggtgcgcggcctgaaggccggggtgctcagccaggccgactacctcaacctggtgcagtgcgagacgctagaggacttgaaactgcatctgcagagcactgattatggtaact

SEQ ID NO: 472691 - DNA, 120 bp, Artificial Sequence
  ENSG00000159720_2 (sequence is synthesized)
tcctggccaacgaggcatcacctctgacggtgtcagtcatcgatgaccggctcaaggagaagatggtggtggagttccgccacatgaggaaccatgcctatgagccactcgccagcttcc

SEQ ID NO: 472692 - DNA, 120 bp, Artificial Sequence
  ENSG00000159720_3 (sequence is synthesized)
tagacttcattacttacagttacatgatcgacaacgtgatcctgctcatcacaggcacgctgcaccagcgctccatcgctgagctcgtgcccaagtgccacccactaggcagcttcgagc

SEQ ID NO: 472693 - DNA, 120 bp, Artificial Sequence
  ENSG00000159720_4 (sequence is synthesized)
agatggaggccgtgaacattgctcagacacctgctgagctctacaatgccattctggtggacacgcctcttgcggcttttttccaggactgcatttcagagcaggaccttgacgagatga

SEQ ID NO: 472694 - DNA, 120 bp, Artificial Sequence
  ENSG00000159720_5 (sequence is synthesized)
acatcgagatcatccgcaacaccctctacaaggcctacctggagtccttctacaagttctgcaccctactgggcgggactacggctgatgccatgtgccccatcctggagtttgaagcag

SEQ ID NO: 472695 - DNA, 120 bp, Artificial Sequence
  ENSG00000159720_6 (sequence is synthesized)
acactgtgggcggctctaccctgagggcctggcgcagctggctcgggctgacgactatgaacaggtcaagaacgtggccgattactacccggagtacaagctgctcttcgagggtgcagg

SEQ ID NO: 472696 - DNA, 120 bp, Artificial Sequence
  ENSG00000159720_7 (sequence is synthesized)
tagcaaccctggagacaagacgctggaggaccgattctttgagcacgaggtaaagctgaacaagttggccttcctgaaccagttccactttggtgtcttctatgccttcgtgaagctcaa

SEQ ID NO: 472697 - DNA, 120 bp, Artificial Sequence
  ENSG00000159720_8 (sequence is synthesized)
ggagcaggagtgtcgcaacatcgtgtggatcgctgaatgtatcgcccagcgccaccgcgccaaaatcgacaactacatccctatcttctagcgtcctggcccaaggctctcaattgcact

SEQ ID NO: 472698 - DNA, 120 bp, Artificial Sequence
  ENSG00000159720_9 (sequence is synthesized)
gtgtgtgtgtgtgtgtgcgcgtgtgtgtgcgtgtgtgtgtatgtggtctgtgacaagcctgtggctcacctgcctgtccggggtgtagtacgctgtcctagcggctgcccagttctcctg

SEQ ID NO: 472699 - DNA, 120 bp, Artificial Sequence
  ENSG00000159720_10 (sequence is synthesized)
ttctcctgaccctcttagagactgttcttaggcctgaaaaggggctgggcacccccccccaccaaggatggacgaagaccccctccagagcaaggaggccccctcagccctgtggttaca

SEQ ID NO: 472700 - DNA, 120 bp, Artificial Sequence
  ENSG00000159720_11 (sequence is synthesized)
gccgctgatgtatctaagaagcatgtcactttcatgttcctccctaactccctgacctgagaaccctggggcctgggggcagtttgagcctcctctcccttctgtgggtcgctcccagag

SEQ ID NO: 472701 - DNA, 120 bp, Artificial Sequence
  ENSG00000159720_12 (sequence is synthesized)
ccatggcccatgggaaggacagagtgtgtgtgtccttggggcctggggggatgttgctcctcagctccctccctcagccctgcccctctgagacaataaaactgccctctctaaggccaa

SEQ ID NO: 472702 - DNA, 120 bp, Artificial Sequence
  ENSG00000159720_13 (sequence is synthesized)
aatgctgtgggccttgtgccaggactgccagcctgtcaggcgatgtcccagcccggtgaccacagatgggagattaggcggaccctcaaccacccagcaggcctacctggagtccttcta

SEQ ID NO: 472703 - DNA, 120 bp, Artificial Sequence
  ENSG00000159720_14 (sequence is synthesized)
ccctggagcacttgctggagcagagatcacaggaaggtcactctggccagcaagtagcactgttagaccagtcaagggctgaggtaatgctagggctgagggcacggggcctcacaggct

SEQ ID NO: 472704 - DNA, 120 bp, Artificial Sequence
  ENSG00000159720_15 (sequence is synthesized)
gtgggggagaggcagaactccagcttcagggctacatggactgctgggtgaaggtgacagcgaaccattcaatttggaggacttcattctggtgatgacttgaaactgcatctgcagagc

SEQ ID NO: 472705 - DNA, 80 bp, Artificial Sequence
  ENSG00000159720_16 (sequence is synthesized)
cacctggttttcagaggctgaggaaggggaggtttggaaagatttggggaaaaggaaggcagagcagcaggggaaagtca

SEQ ID NO: 472706 - DNA, 120 bp, Artificial Sequence
  ENSG00000159720_17 (sequence is synthesized)
gatttggggaaaaggaaggcagagcagcaggggaaagtcagaggacccctgcgagcccagccttctgtgaggtgagggggtgaaggagactgtagcctgaagcagacagtcgggtgggcc

SEQ ID NO: 472707 - DNA, 120 bp, Artificial Sequence
  ENSG00000159720_18 (sequence is synthesized)
ctgccctggcactcctgggtgggaggctgtgggcagctgccacttggctgattcacagaagtgtttcattggctttgctgtaagggctgccccggcccatccatgggtgtgcttgtaccc

SEQ ID NO: 472708 - DNA, 120 bp, Artificial Sequence
  ENSG00000159720_19 (sequence is synthesized)
accttgaaaggggctagggaggggaggagggagctgtgagggcttgtgcctagcaagccctccagagcttccttgcctgtgctgagcaagctccatactctctacaggcctacctggagt

SEQ ID NO: 472709 - DNA, 120 bp, Artificial Sequence
  ENSG00000159720_20 (sequence is synthesized)
ggccaggagtacaagctgctcttcgagggtgcaggtagcaaccctggagacaagacgctggaggaccgattctttgagcacgaggtgagtctgcagggtctgcttgtcagagggaggcca

SEQ ID NO: 472710 - DNA, 120 bp, Artificial Sequence
  ENSG00000159720_21 (sequence is synthesized)
gcacttcaagggcttctctctccggcagcctgtggacttccctggagcacttgctggagcagagatcacaggaaggtcactctggccagcaagtagcactgttagaccagtcaagggctg

SEQ ID NO: 472711 - DNA, 120 bp, Artificial Sequence
  ENSG00000159720_22 (sequence is synthesized)
aagtagggtgggttgcctaaagccacataataagtcactggcagcgccagggatcacacctggctcagcttgtttgcaaaagtgagtgctctcacccactccgctaatagggcacaggcc

SEQ ID NO: 472712 - DNA, 120 bp, Artificial Sequence
  ENSG00000159720_23 (sequence is synthesized)
agccagttagctgagaggagagagagcatacacacgtgtgtgtttgtgtgtgtgtgtgtacgcacgcgcctagctggcctgttgccgggttgcctgccctgagacagggtgaggggtgcg

SEQ ID NO: 472713 - DNA, 120 bp, Artificial Sequence
  ENSG00000159720_24 (sequence is synthesized)
gctgtccgccagcctcacccatgccctcaccgggcctgactggttctagctggagtcgccggcgagggctgcccaggcactagctcataaacacagacccaatgctgtgggccttgtgcc

SEQ ID NO: 472714 - DNA, 120 bp, Artificial Sequence
  ENSG00000159720_25 (sequence is synthesized)
aggactgccagcctgtcaggcgatgtcccagcccggtgaccacagatgggagattaggcggaccctcaaccacccagcaggtgggaacagtaggcagctggtgcagcagccgtggattgg

SEQ ID NO: 472715 - DNA, 120 bp, Artificial Sequence
  ENSG00000159720_26 (sequence is synthesized)
cagactccaggggacagggcgggggtgggaaggtgactttggtaccggggttgctgggatcttgccagtttctttagctgccctagcctccagaggagagtcccaccagcctccctgacc

SEQ ID NO: 472716 - DNA, 120 bp, Artificial Sequence
  ENSG00000159720_27 (sequence is synthesized)
ctgggatcagcctctcctgggattggtacagattggctaagcaattgggtgggtagcagggcatggagcccaatacctggttggttggttcccccacaaataggaagtgcagggccccac

SEQ ID NO: 472717 - DNA, 120 bp, Artificial Sequence
  ENSG00000159720_28 (sequence is synthesized)
tggggcaggctgtgggatttttgacatatccagcttggctggccacagggaaggaggtggctggggacagacccctagagggactgtgaaaggtaccaccaagccatgggaggggttggc

SEQ ID NO: 472718 - DNA, 120 bp, Artificial Sequence
  ENSG00000159720_29 (sequence is synthesized)
agctgtctctgccacccaggccctctcattcctgggatcctctgtgctggggtcaaccctcttttccaggcttcttacttcctgacctgtcctagatttttgtttcccgtgatcccagag

SEQ ID NO: 472719 - DNA, 120 bp, Artificial Sequence
  ENSG00000159720_30 (sequence is synthesized)
gtcactctcaggccttcccctgagttgggcttgcccagcattgctggccagggcaggcctgggctcacagactcctgggtctcatctcatctctcttggagcaccacccagcagagcttg

SEQ ID NO: 472720 - DNA, 120 bp, Artificial Sequence
  ENSG00000159720_31 (sequence is synthesized)
tgagcccaagttggctgatggttggtggaaaggtctccacaccttggagttcagacctcggtatgaaaagctttccatgccatccaacccttgcctacaatctagaagaatagtctctag

SEQ ID NO: 472721 - DNA, 120 bp, Artificial Sequence
  ENSG00000159720_32 (sequence is synthesized)
cctgtggagccagggtctctgagcccatgccagcagatgggaccagggaggtctgagtggagggtggccattacaagggagctccccatggggcccgtaagatcatccaccttccttggc

SEQ ID NO: 472722 - DNA, 120 bp, Artificial Sequence
  ENSG00000159720_33 (sequence is synthesized)
atggagaggtgttgggaggaagcatggctgcttttgtgagtgagcgttgggagggacctggggcctgggctgacctcttctttcctcatgcccagcagatccaatttgcctgggcaggga

SEQ ID NO: 472723 - DNA, 120 bp, Artificial Sequence
  ENSG00000159720_34 (sequence is synthesized)
gtgcttgttcccgccggcagcccatgtgcctgccattgtactgtgcccagctgacgtccgtgtaggcaataaccatccctcagcaggaactggcctgacaattttgttcctgctctgtga

SEQ ID NO: 472724 - DNA, 120 bp, Artificial Sequence
  ENSG00000159720_35 (sequence is synthesized)
tgctgaggggctgcctggaggatgggaggaggaggtgttctgtaagggaaggtggcagagagggccgggggcactcagtccctgccatccctgtggactttcaggcgtggcctttcctca

SEQ ID NO: 472725 - DNA, 60 bp, Artificial Sequence
  ENSG00000159720_36 (sequence is synthesized)
cctttcctcaccagcctacggacacctgtttttttattcttttctgagacggagtctctt

SEQ ID NO: 472726 - DNA, 120 bp, Artificial Sequence
  ENSG00000159720_37 (sequence is synthesized)
cctgagtgatgacagtccagtgacagtgctgatggtccatgcctgtcaggtgagcagtgagtgttcaggctgcctccgaggaggggaagaaggcatgccctggcttctcccacccctctg

SEQ ID NO: 472727 - DNA, 120 bp, Artificial Sequence
  ENSG00000159720_38 (sequence is synthesized)
ccaccacctgccagctcatctgggactgaaatctgtctggacagctgagtctgtatctgaaaagcctgtcctgggtcaagggctggggaatagagcggtaaaggaggtgcagagtgggga

SEQ ID NO: 472728 - DNA, 120 bp, Artificial Sequence
  ENSG00000159720_39 (sequence is synthesized)
ggagaggaggaaactagatctggggacagatagaatcccccaggcctgctccacatcccagcccctctatgccccaactctgggactctggacaggtttcatgttctgtctgatttctgt

SEQ ID NO: 472729 - DNA, 120 bp, Artificial Sequence
  ENSG00000159720_40 (sequence is synthesized)
tcctgaggctgagatgggcatggttgagaggtccagcacacaggttgctcctggcatggggatgagtacaccgtacagcccatgtgtttccagttagagtagatctgggttgcccgcttc

SEQ ID NO: 472730 - DNA, 120 bp, Artificial Sequence
  ENSG00000159720_41 (sequence is synthesized)
atgttgggatgaggggactcccccctggccagtcccaggtgttggatagagagtcatggaggcctagggaggggaaaggtgcttggcagtggggaagttgctgagctagggagagaagcc

SEQ ID NO: 472731 - DNA, 120 bp, Artificial Sequence
  ENSG00000159720_42 (sequence is synthesized)
atgtggagcaaagtgggaggctggagcagaggaagtttcatgctgcttgagagctcatgaggatcctgagtaggaggtgacagctcactcggggaagcctcccagcagcttgtgccaggg

SEQ ID NO: 472732 - DNA, 120 bp, Artificial Sequence
  ENSG00000159720_43 (sequence is synthesized)
cctggaagagcagtgtgtacacagatgcccgggtgaggcccagcccctgatgctttggaggggagggatcaggaggccagaccggggtccagactcccagtcccagggaatagtggagtc

SEQ ID NO: 472733 - DNA, 120 bp, Artificial Sequence
  ENSG00000159720_44 (sequence is synthesized)
actggcaggagtgccaccacccaaaggactgagtttttctctggagctcaccctgtacatctggcccggcctctaggcccaggctatagctgaaaaggaagaagtctcctggcctgagaa

SEQ ID NO: 472734 - DNA, 120 bp, Artificial Sequence
  ENSG00000159720_45 (sequence is synthesized)
gggctcttggctggctgcagtggctgtgtgaataagcagacaggtttggtctggcagctgccgcaccagtgcctgggtctgacccagagaactgtattccagtcttggctcccagctgcc

SEQ ID NO: 472735 - DNA, 120 bp, Artificial Sequence
  ENSG00000159720_46 (sequence is synthesized)
atccgctctgcagcttcccctagtggagatttcagcacttgctgggcctgggccagaaccccaagtatataaaatcagagcatgaacatgactttgataaattaagaaggcttcatttta

SEQ ID NO: 472736 - DNA, 120 bp, Artificial Sequence
  ENSG00000159720_47 (sequence is synthesized)
ataccacagtaagaggaaccagttaatattcttaccatttcacatccacaaaaaccacatcaggggcattaacaatctctcagttttgtacaaataaaccatgtttctcttaaaaagact

SEQ ID NO: 472737 - DNA, 120 bp, Artificial Sequence
  ENSG00000159720_48 (sequence is synthesized)
tctcagaaaaaaaaaaaaaaaaggcttgcatacttgcccaagctcaaggatattaaaatctagcacatgaaacccatttctagaggtagaaatacaggcaatatattatttcagcaatga

SEQ ID NO: 472738 - DNA, 120 bp, Artificial Sequence
  ENSG00000159720_49 (sequence is synthesized)
ccatcaattacagttaagaacagttaacaaccaaatgggtaatgaaataatgcaaccacccaagtttactgagcaaagcatcttttctcacccatgccttactctaggagtagctggggc

SEQ ID NO: 472739 - DNA, 120 bp, Artificial Sequence
  ENSG00000159720_50 (sequence is synthesized)
ttggttagatgtggtgaggatgtgggagaagagatctcagggcaagggttcattgcagacggcctggggtaaggatgtaggagagtgcacatttcccaggcaaaaaggcattggggtcca

SEQ ID NO: 472740 - DNA, 120 bp, Artificial Sequence
  ENSG00000159720_51 (sequence is synthesized)
cagagcagaacaggggctggtggcttctgcctgccctgcctgactttctcttctatgcccttttgggtggccatgggagaaaagtagtggtcaattgcagagtaatggtgaaggcagcag

SEQ ID NO: 472741 - DNA, 120 bp, Artificial Sequence
  ENSG00000159720_52 (sequence is synthesized)
gtgtctcctgcaggcctcaggaggttgaagttcactccatgagtgcccaggagccacagaggtcatgagtgtggcctgctaccagccccccagagatgcaggtggaaggcatctattcca

SEQ ID NO: 472742 - DNA, 120 bp, Artificial Sequence
  ENSG00000159720_53 (sequence is synthesized)
gagacctgctgtattccaacatgctgtgttccatctctcctttagctcgcctgactccaggttggggctgtcttctcctgatggagtacagcaggaggggcatcacaggggtcccctaag

SEQ ID NO: 472743 - DNA, 120 bp, Artificial Sequence
  ENSG00000159720_54 (sequence is synthesized)
cttgtagagggtttatgtgccccacttcccttcttctctaaacaacccaggctagcatggtctcctgagcctcaaagacatctggggaggccgtggccaggacagcgtgtggaggtggtc

SEQ ID NO: 472744 - DNA, 120 bp, Artificial Sequence
  ENSG00000159720_55 (sequence is synthesized)
ccaagtgcagctccgcctttgatcccctgggcagcctccccaggggacagagaggcatgtagtcttccaagccagcctccgccaccatgtgcctgggtatcttctcagccactgtccttg

SEQ ID NO: 472745 - DNA, 120 bp, Artificial Sequence
  ENSG00000159720_56 (sequence is synthesized)
gtactgtccccagggagcttctgtgtcctgtatcaggtgggataagtactgctaagaagaataacacaagggacagtgatgggctgctggagaagcctctgaagagggggcgtgtgagga

SEQ ID NO: 472746 - DNA, 120 bp, Artificial Sequence
  ENSG00000159720_57 (sequence is synthesized)
aagatctgaaggaagagggggagacagctccactttcaggccaggggacggggaagggccctgaggtggggacatggctggggatagtgagcatgggggaatggcaggacctaagtcaga

SEQ ID NO: 472747 - DNA, 120 bp, Artificial Sequence
  ENSG00000159720_58 (sequence is synthesized)
gaggttaagcggggatggtgggaccaccacatgagggctctggaagggactctttctgagtaaagtaggagtagcggagagtttaaggccaatgaatggcatggtctgccttgtgtttta

SEQ ID NO: 472748 - DNA, 63 bp, Artificial Sequence
  ENSG00000159720_59 (sequence is synthesized)
gtttaaggccaatgaatggcatggtctgccttgtgttttaaaaagatcactctggcactagga

SEQ ID NO: 472749 - DNA, 120 bp, Artificial Sequence
  ENSG00000159720_60 (sequence is synthesized)
caggcaggagtcagaggctgggacacctgaagggccagggaacatgcccaagctaggaagcaggccctctcctggccacaggcctcctttcctgagagtctccttgctgccctggcctcc

SEQ ID NO: 472750 - DNA, 120 bp, Artificial Sequence
  ENSG00000159720_61 (sequence is synthesized)
ctttataaatcaattttaggagcaaggaggcaggagaagctcaggtcagtgtacatggcccagagcattgcttctgccacttccaaggcaacagcctaggctggggacccctcaataccc

SEQ ID NO: 472751 - DNA, 120 bp, Artificial Sequence
  ENSG00000159720_62 (sequence is synthesized)
agccctgtgggccttgtggcacgggcactctgtgccgtgtagggcatttgaacatcaggattctggcctaggccacctgcccacccctcaaaccatgtttcctccccagcggcttttttc

SEQ ID NO: 472752 - DNA, 120 bp, Artificial Sequence
  ENSG00000159723_0 (sequence is synthesized)
agctcctaggtccctgtcctgtggaaatttgtggaccctgggcaccctctcttgctcccaaattttaatcggctcctggaaacctcaccccaaattggagataggcactcctcttgtaga

SEQ ID NO: 472753 - DNA, 120 bp, Artificial Sequence
  ENSG00000159723_1 (sequence is synthesized)
acaaaaggctcaggttcagggagtgagggcctgaactgtgcccccaccctccaggaagggtccttcacggcctggctgcagggatcagtcacgtgtggcccttcattaggccctgccata

SEQ ID NO: 472754 - DNA, 120 bp, Artificial Sequence
  ENSG00000159723_2 (sequence is synthesized)
taagccaagggcacggggtggccgggaactctctaggcaagaatcccggaggcagaggccatgctgaccgcagcggtgctgagctgtgccctgctgctggcactgcctgccacgcgagga

SEQ ID NO: 472755 - DNA, 120 bp, Artificial Sequence
  ENSG00000159723_3 (sequence is synthesized)
ccaggccctgctcccagagctcccaggcctgggcctgcgggccccactgaagaagacaactgcagaacaggcagaagaggatctgttgcaggaggctcaggccttggcagaggtactaga

SEQ ID NO: 472756 - DNA, 120 bp, Artificial Sequence
  ENSG00000159723_4 (sequence is synthesized)
cctgcaggaccgcgagccccgctcctcacgtcgctgcgtaaggctgcatgagtcctgcctgggacagcaggtgccttgctgtgacccatgtgccacgtgctactgccgcttcttcaatgc

SEQ ID NO: 472757 - DNA, 120 bp, Artificial Sequence
  ENSG00000159723_5 (sequence is synthesized)
cttctgctactgccgcaagctgggtactgccatgaatccctgcagccgcacctagctggccaacgtcagggtcggggctagggtaggggcaaggaaactcgaataaaggatgggaccaac

SEQ ID NO: 472758 - DNA, 120 bp, Artificial Sequence
  ENSG00000159733_0 (sequence is synthesized)
gtgcggcgcggggcggccgtgaccagcggagcgctgggtgtcagtgagcagcgaggagccgcgcgcccccgtgcccgcgtctgtccgtgcgcccgagcgcccactcccgggtctgaggtc

SEQ ID NO: 472759 - DNA, 120 bp, Artificial Sequence
  ENSG00000159733_1 (sequence is synthesized)
ctgaggtctgcccggcgcgccgcttgcagagcatactcagggccgcgcacctgccccgcgcacctgcccgccgcccgctcggcgctccgggcttcgctagccagcctccctgcgacagcg

SEQ ID NO: 472760 - DNA, 120 bp, Artificial Sequence
  ENSG00000159733_2 (sequence is synthesized)
ccgcgtccgccccgcgcctcagccgggcccgggcgcagcgctgcggagggcgagggccgcccggagtccggccagggccggcgcggcgatgatgaacaggttccgaaagtggctctacaa

SEQ ID NO: 472761 - DNA, 120 bp, Artificial Sequence
  ENSG00000159733_3 (sequence is synthesized)
gtggctctacaaacccaagaggtcggatccgcagctgcttgcccggttctactatgccgacgaggagctgaaccaggtggccgcggagctggacagcctggatgggcggaaggaccccca

SEQ ID NO: 472762 - DNA, 120 bp, Artificial Sequence
  ENSG00000159733_4 (sequence is synthesized)
gcggtgcacgctgctggtcagccagttccgctcctgtcaggacaatgtgttgaacatcattaaccagatcatggatgagtgcatcccccaggaccgcgcccccagagatttctgcgtcaa

SEQ ID NO: 472763 - DNA, 120 bp, Artificial Sequence
  ENSG00000159733_5 (sequence is synthesized)
gttccctgaggagatccggcacgacaacctggccggccagctgtggttcggtgccgagtgcctggccgccggctccatcatcatgaaccgggagctggagagcatggccatgcgcccgct

SEQ ID NO: 472764 - DNA, 120 bp, Artificial Sequence
  ENSG00000159733_6 (sequence is synthesized)
ggccaaggagctgacgcgcagcctggaggacgtgcggggcgccctccgtgaccaggcgctgcgggacctgaacacctacacagagaagatgagggaagcgctgaggcacttcgacgtcct

SEQ ID NO: 472765 - DNA, 120 bp, Artificial Sequence
  ENSG00000159733_7 (sequence is synthesized)
gttcgcagagtttgagctcagctacgtctcggccatggtgcctgtgaagtcccccagggagtactacgtgcagcaggaggtcatcgtgctcttctgcgagacggtggagagggccctgga

SEQ ID NO: 472766 - DNA, 120 bp, Artificial Sequence
  ENSG00000159733_8 (sequence is synthesized)
cttcgggtacctgactcaggacatgattgatgactacgagccggccctcatgttcagcatccccaggctggccatcgtgtgtggcctcgtggtctatgcggacggacctctgaacttgga

SEQ ID NO: 472767 - DNA, 120 bp, Artificial Sequence
  ENSG00000159733_9 (sequence is synthesized)
ccgcaaggtggaagacatgtccgagctgttccggcccttccacacgttgctgcggaaaataagggatttgctgcagacgctgacggaggaggagctgcacacgctggaacggaacctctg

SEQ ID NO: 472768 - DNA, 120 bp, Artificial Sequence
  ENSG00000159733_10 (sequence is synthesized)
catttcccaagacgtggagttccccatccgcgcagacgtgcagggacccgctgccctggcgcctgccctctctgcccctctcccccctgaggggccactctcagctaaggccaaagaccc

SEQ ID NO: 472769 - DNA, 120 bp, Artificial Sequence
  ENSG00000159733_11 (sequence is synthesized)
ggatgcagagctggcctgctccatgcagtacgacgaccaggagctggagcagctcagccgcatggtccacagggcgggggacgagatgtcctctttgctttcaccgcccattgcctgcca

SEQ ID NO: 472770 - DNA, 120 bp, Artificial Sequence
  ENSG00000159733_12 (sequence is synthesized)
gtccccagctcacaggccaggagcggagggcagcccaggcggggaggcctctccaggtagaccgcgcctgcggtcaggcagtgacgaggaggagcgcgtgttcttcatggatgacgtgga

SEQ ID NO: 472771 - DNA, 120 bp, Artificial Sequence
  ENSG00000159733_13 (sequence is synthesized)
ggggacggcagaagccctggccaggcccgagtccccagctggcccatttgggtgggcaggcagtacctgggccgacccccaggagaaagggcagggtgggccaggcggagcggcggggat

SEQ ID NO: 472772 - DNA, 120 bp, Artificial Sequence
  ENSG00000159733_14 (sequence is synthesized)
cagcttgcccgcctcggaaaaggaggaggacttgagcaacaacaatctcgaggccgagggcacagatggggccagcctcgcgggcaccagctcctgcagctgcctggactcgcggctgca

SEQ ID NO: 472773 - DNA, 120 bp, Artificial Sequence
  ENSG00000159733_15 (sequence is synthesized)
cctggacggctgggaggtgggtgcggatgacgcagagacggctgagatgatcgcccaccggacagggggcatgaagctctcagccacggtcatcttcaaccccaaatcgcccacttccct

SEQ ID NO: 472774 - DNA, 120 bp, Artificial Sequence
  ENSG00000159733_16 (sequence is synthesized)
ggactctgcggtcgccacccaggaggccgcctcggagcccgtggccgaggggatggatggcggcccccacaagcttagcactggggccaccaactgccttctgcattcctgcgtgtgctg

SEQ ID NO: 472775 - DNA, 120 bp, Artificial Sequence
  ENSG00000159733_17 (sequence is synthesized)
gtgcagcccgggaggcgtcattggtgcctcgtacgctgccggcttagccaaggccagcgacagggcccctgagagacaggaggaggcgcccccaccctcagaagatgcctccaacgggcg

SEQ ID NO: 472776 - DNA, 120 bp, Artificial Sequence
  ENSG00000159733_18 (sequence is synthesized)
ggagcccaaagcccccacttccgacaagtgcctgcctcacacctcaggttcccaggtggacacagcgagtgggctgcaaggagaggctggggttgcaggtcagcaggagccagaggccag

SEQ ID NO: 472777 - DNA, 120 bp, Artificial Sequence
  ENSG00000159733_19 (sequence is synthesized)
agagctgcatgctgggagcccctcggctcacgaggcgcctcaggccctgtcgggctccagcagctccacagctgggtcctgctcctcagacaagatggggccagaggcggccccagcagc

SEQ ID NO: 472778 - DNA, 120 bp, Artificial Sequence
  ENSG00000159733_20 (sequence is synthesized)
cacgcatgctgccccacaggccacaagagagaagatccggtccaggttccacggcagccacgacctcatccaccgcctgttcgtctgcatttcaggtgtggctgaccagctgcagacgaa

SEQ ID NO: 472779 - DNA, 120 bp, Artificial Sequence
  ENSG00000159733_21 (sequence is synthesized)
ctatgccagtgacctgagaagtattcttaaaacactgtttgaggtcatggccaccaagcctgaaacagacgacaaggaaaagttaaggaaggtcacccagactctgcggagtgcggcctt

SEQ ID NO: 472780 - DNA, 120 bp, Artificial Sequence
  ENSG00000159733_22 (sequence is synthesized)
ggaggactgtgcactgtgccaggagaccctgtcatcctctgaactggcagccaagacccgcgatggggactttgaagaccccccggagtgggtgccagacgaggcctgtggcttctgcac

SEQ ID NO: 472781 - DNA, 120 bp, Artificial Sequence
  ENSG00000159733_23 (sequence is synthesized)
ggcgtgcaaagcacccttcaccgtcatccgccggaagcaccactgccgcagctgtgggaagatcttctgctcgcgctgctcctcgcactcagcaccgctgccccgctacgggcaggtgaa

SEQ ID NO: 472782 - DNA, 120 bp, Artificial Sequence
  ENSG00000159733_24 (sequence is synthesized)
gccggtccgagtgtgcacccactgctacatgttccatgtcacgcccttctacagcgacaaggccggcctgtgacgtggtgccaggggcagccccaacccacccgggccaggaacccccag

SEQ ID NO: 472783 - DNA, 120 bp, Artificial Sequence
  ENSG00000159733_25 (sequence is synthesized)
gaaggtggggccacgctgcaggcaggtctcactgcgtctcatgaggccgctgccgctgctgcaggggcacccagacctccagagcatccagagcctctgtcctgcccacgctagcctccc

SEQ ID NO: 472784 - DNA, 120 bp, Artificial Sequence
  ENSG00000159733_26 (sequence is synthesized)
tgcagggaccccgggccggctgcaggggccaacaagaggtcagctttgcccagcaggggacccggaggagcctggtggctgcctcagggcagggtgcctggcggagaaggcctgggccct

SEQ ID NO: 472785 - DNA, 120 bp, Artificial Sequence
  ENSG00000159733_27 (sequence is synthesized)
cccactggtccctcggagatctgctggggctatgggaatcggggcgggtgatggaggtggacaagagtggggccactctgcgcctctgctgttgcggtgaatctggaagccggagcaagg

SEQ ID NO: 472786 - DNA, 120 bp, Artificial Sequence
  ENSG00000159733_28 (sequence is synthesized)
gccactccacaggctctttggcacagcagggctccctatgtgcctcccaaacgtcaaatgcaggctacccattctccccatcagctgcccacctcgttccccagccctcacccctcaccc

SEQ ID NO: 472787 - DNA, 120 bp, Artificial Sequence
  ENSG00000159733_29 (sequence is synthesized)
ctcaccatccttcctcaggacttggctaaacaacatgcatctcatttcttcttggagtggggagatgcgggaagctgacccagtggtcctctaggcaggcagggtgctcctggtgtctgc

SEQ ID NO: 472788 - DNA, 120 bp, Artificial Sequence
  ENSG00000159733_30 (sequence is synthesized)
ccaccactgtccccttgctgatggcatgggggtccgaccaggcactgacaccgcaggcagaggttgctcggggccttgggtcgggtttaccaatcagccaggacgcccggggccaccagc

SEQ ID NO: 472789 - DNA, 120 bp, Artificial Sequence
  ENSG00000159733_31 (sequence is synthesized)
tcagctaccacttccccttccctctgcaccctctggaaccctggcccaattcctcagaccccagagtggcctgggacccaagctgccgcagctgagtggccccagcggacacctcctcag

SEQ ID NO: 472790 - DNA, 120 bp, Artificial Sequence
  ENSG00000159733_32 (sequence is synthesized)
gcttaaatctcaggcttcacattgcaatgacgattgcagttttatttttggagatgacacacctactgcttcttttctaggataaatctaattactgtttactggtggagtacatatgca

SEQ ID NO: 472791 - DNA, 120 bp, Artificial Sequence
  ENSG00000159733_33 (sequence is synthesized)
tagaaacggcttctgtcggggggagagtatataatggaggaaatattatgtattgagattatatttattttctaaatgctgtaatttgaagccatttccataaatctatttaaggattgc

SEQ ID NO: 472792 - DNA, 120 bp, Artificial Sequence
  ENSG00000159733_34 (sequence is synthesized)
agagacctaaagagatcccaagggcgcctgggacaccccttcctccccttagctccagacgtcctggaaatctgtgatgtctgctggcctctgtagagggaacaccagccgcagccacct

SEQ ID NO: 472793 - DNA, 120 bp, Artificial Sequence
  ENSG00000159733_35 (sequence is synthesized)
ccacgtcagtcaccgcagagaaaggaagatttgtggaaggaatacagcaaatcaacgcctcctcgcaaagcactttccctggatgttgaaacagtgactgcaaactcagaggcccttcag

SEQ ID NO: 472794 - DNA, 120 bp, Artificial Sequence
  ENSG00000159733_36 (sequence is synthesized)
gggcttaagccaggattcgttcagcccatcctacggctgctgcacgtgaggcccgaggcccttgctgcatctgcactgcacccacgccgctgagaggatctcacttgtctgacccgtcag

SEQ ID NO: 472795 - DNA, 120 bp, Artificial Sequence
  ENSG00000159733_37 (sequence is synthesized)
tggctatcttactgtccgtgtctgtggctcaggcagcaaagctctggaccacataacctgcccagggtcgcccagcgggtgagagatgctcttaggatcagatgacagattccacctcta

SEQ ID NO: 472796 - DNA, 120 bp, Artificial Sequence
  ENSG00000159733_38 (sequence is synthesized)
gatgcctgtctggggctgctgtaacagaacacccatgagctgggaggcttaaaaccgtggggatttgctggtttacagttctggaggcaggcatctgagatgagggcgctggtggggtgg

SEQ ID NO: 472797 - DNA, 120 bp, Artificial Sequence
  ENSG00000159733_39 (sequence is synthesized)
cactgcagcccaaggttctaggggatgatcctcctgccgcttccagcttctggtggctcctggcacttccttgccttgtggccaagtcactccaagctctgcctccgtcttctcttggcc

SEQ ID NO: 472798 - DNA, 120 bp, Artificial Sequence
  ENSG00000159733_40 (sequence is synthesized)
cctcgctgtgtctgtctcttgtaaggatatttattggagttggtatccatccagatagtccaggatggtttcatctcaagatccttaacttaattaaatctgcaaacaacctttttctaa

SEQ ID NO: 472799 - DNA, 120 bp, Artificial Sequence
  ENSG00000159733_41 (sequence is synthesized)
aaaaggtcacagtcgcagattcacattttgggggtcacattcagcccaccgtgacgtctgaatcctgtgcctccagcccctcacccctcccgtcaccccccaccctgtcttcaggacaca

SEQ ID NO: 472800 - DNA, 120 bp, Artificial Sequence
  ENSG00000159733_42 (sequence is synthesized)
gcagagagcaggggctggagagtcagcagccaagggctgagctccttccctaatcccacctggcataggtgaactggagaccgcatttgctccaccaagagcccacgtctcagctttgca

SEQ ID NO: 472801 - DNA, 120 bp, Artificial Sequence
  ENSG00000159733_43 (sequence is synthesized)
tcagctagctgggctgtgtataagcaatgccgagtaagggtcctgcagcatccatgcgtcagatgcctgtctcagcacagctgggttctgtgctcagggtctccccaggctgaaatccag

SEQ ID NO: 472802 - DNA, 120 bp, Artificial Sequence
  ENSG00000159733_44 (sequence is synthesized)
gtgctgtggactgcgctctcgtctggagcggctgacgtttatttcatcgcttcttgttgattgagaagagactatgagatgcagttgtggcagggaccgaagtcctgcagcagcaaatct

SEQ ID NO: 472803 - DNA, 120 bp, Artificial Sequence
  ENSG00000159733_45 (sequence is synthesized)
caggccactgtccctgcaccccctagagtgcctgcatggagcaggtttggaggtgggtgggggagcagtgactgggcccagagtgtctggaaggacccctggacctgtgcccacaccctg

SEQ ID NO: 472804 - DNA, 120 bp, Artificial Sequence
  ENSG00000159733_46 (sequence is synthesized)
agaccggaggaatatggacattggagggtgctccaagacaatgcgccaagaccgggtgacacatccaggagagacctgcggaccaagctagtgcctgcctgtggggaccacagaccccgg

SEQ ID NO: 472805 - DNA, 120 bp, Artificial Sequence
  ENSG00000159733_47 (sequence is synthesized)
ccagctgaccagggcggggcagccctgagatcccggcttcaatttccctccctcccgctgagctgtttctgggatgggcgcctgccctcctggaccggcccagccctccttcctgtccct

SEQ ID NO: 472806 - DNA, 120 bp, Artificial Sequence
  ENSG00000159733_48 (sequence is synthesized)
cggttctgtccttcattctggcccacagtggcagcggcccttctgaggatgccctggtcacggaacagcattcgtctccttctcagtcccagcctgtgctcaacccaggggctgtggagc

SEQ ID NO: 472807 - DNA, 120 bp, Artificial Sequence
  ENSG00000159733_49 (sequence is synthesized)
gggagattccagcctgctcagaagaaatcagcttacttgctgctggaagttattagggctgacaccagtgcaaaggcctggcagccacagtggggccggcgccatggcggggtcagcgcc

SEQ ID NO: 472808 - DNA, 120 bp, Artificial Sequence
  ENSG00000159733_50 (sequence is synthesized)
actctcgcgactttgccgcggcgacgtgggggttttatcgcggtatcgcggaacacagcccccgccattcccagtcacccgctcggaggccgtgggcgccttgacgagggcgcggcggcg

SEQ ID NO: 472809 - DNA, 120 bp, Artificial Sequence
  ENSG00000159733_51 (sequence is synthesized)
ggaatgcacaacgttatgctcatcacctgcgtccaccactgtcacccctgacggcgagacgcgaggtgctaagggcttgtccaggctaagcgggttctctgcgtccttaagcccactttg

SEQ ID NO: 472810 - DNA, 120 bp, Artificial Sequence
  ENSG00000159733_52 (sequence is synthesized)
cagatgctaatcagaggggacaggcggccaagaacctggagcccacccgggcgtctgtgcccagtgccgaccgtctaaattcccttcccacgtggctcctgttgcgtctgggctgtggag

SEQ ID NO: 472811 - DNA, 120 bp, Artificial Sequence
  ENSG00000159733_53 (sequence is synthesized)
acgtggcctgcaggatggttgccggatcctcttcaggggccctcacccatccacctgtgtcaaaacaaggtgtcatctctgccctgctcagacccttgccggagctcccaccgtgatctg

SEQ ID NO: 472812 - DNA, 120 bp, Artificial Sequence
  ENSG00000159733_54 (sequence is synthesized)
cctgcaccgtgcccacaccagtcctctctccccagtccccacgcacccgctgccctgggtctccaccatgctgtccccttcgctcagggtccccttgactgtcctatccctactgccaca

SEQ ID NO: 472813 - DNA, 120 bp, Artificial Sequence
  ENSG00000159733_55 (sequence is synthesized)
ctgtcccctcccccgcactgtccccttttccatgatgtttcctcctccacgctgtcccctctgctccagtgtcctcttggccatgctgtcctctccatggtgctggcccctccactacac

SEQ ID NO: 472814 - DNA, 120 bp, Artificial Sequence
  ENSG00000159733_56 (sequence is synthesized)
tgtcccctcctctatgctgtccccttgtctatgctgttccctcctctatgctatcccattctccatgctatcccattctccatgctgtcccctcctccatgctgtcccttcctctgcaat

SEQ ID NO: 472815 - DNA, 120 bp, Artificial Sequence
  ENSG00000159733_57 (sequence is synthesized)
gtcctctcccctgtgctcctctgcactgtcccctcctccatgctgtcccctcctttatgatgttccctcctccgtgctgtcccctccatgatgtcccctcttccgtgctgtcctctcctc

SEQ ID NO: 472816 - DNA, 120 bp, Artificial Sequence
  ENSG00000159733_58 (sequence is synthesized)
tgcactgtcccctactccctgctgtacctccctctgcgatgtccccaccactgcaccgctcacccaagccctctcccaccagcaggttgcgtgacttactctgttatttatttttccatg

SEQ ID NO: 472817 - DNA, 120 bp, Artificial Sequence
  ENSG00000159733_59 (sequence is synthesized)
ttactgagataaaattcattaccctatgactcacccatctacagtgcacagtcgtttttggtacattcagaattgtgcagccatcaccacaaatttcataacattttcattactcacaaa

SEQ ID NO: 472818 - DNA, 120 bp, Artificial Sequence
  ENSG00000159733_60 (sequence is synthesized)
aggtgttctaaaattcatgtggaactgcaatgggccctaaatagccaaaacaatattgaaaaacaaaaacaaaattggaagattcatacgtcctgatttcaaaacttactacaagtcaaa

SEQ ID NO: 472819 - DNA, 120 bp, Artificial Sequence
  ENSG00000159733_61 (sequence is synthesized)
accttatggtactggcataaagatagatgtatagaccaatggaataaaattgagaagccataaataaacccaaacatctatggtgaactgattattgacaagggggccaagatcattcaa

SEQ ID NO: 472820 - DNA, 120 bp, Artificial Sequence
  ENSG00000159733_62 (sequence is synthesized)
taaggaaagaacagtctcttcagtgaatgttcctggagcaactggataaccacatgcaaaagaacaaagttggaaaaaaaaaaaaaaaagaacaaagttggaccctgcgatggttaactt

SEQ ID NO: 472821 - DNA, 120 bp, Artificial Sequence
  ENSG00000159733_63 (sequence is synthesized)
catgtgtcatcttgggtaggccacattacccagatatttggtaaaataccagtctgaatgttgctgtgaaggtatttttttttctttttataatgataaactggcaatttataattgcgc

SEQ ID NO: 472822 - DNA, 120 bp, Artificial Sequence
  ENSG00000159733_64 (sequence is synthesized)
agatttatagcatgcaaagttgtgttataatctatgaatgcagtgtggaataattaaatcaagctggttaacatatccatcacctcaaatatttaacatcttttgaatgagatcatttta

SEQ ID NO: 472823 - DNA, 120 bp, Artificial Sequence
  ENSG00000159733_65 (sequence is synthesized)
gactccaggcatttgaccacgggaacctggatggtgcccatgtccagtcccggctgctgcagagccagccacagagaggggacagcgagtgtgaacaggagcctgcagcagccttggtgc

SEQ ID NO: 472824 - DNA, 120 bp, Artificial Sequence
  ENSG00000159733_66 (sequence is synthesized)
aggacgtggacccctcatagagtccagcctcctgaaggtcacaacccctggcagctggggctgggcagtccccacccaccaatgcggcctgagctgggtgggtaggtgtgtgggagggcg

SEQ ID NO: 472825 - DNA, 120 bp, Artificial Sequence
  ENSG00000159733_67 (sequence is synthesized)
ggcgtctagccaagtccctgcgaaccttgtgcatgggcgcctgcaggtgccgggacctggtgtctcctccaagagctccgtccactctgggttacgtggtgtggtctgagcctggtaggc

SEQ ID NO: 472826 - DNA, 120 bp, Artificial Sequence
  ENSG00000159733_68 (sequence is synthesized)
gtgctgttgacgagagatgtccacgagacagcttccgcagaaaggctgaaaagaaaggggcagaaaaggtgaaccaggcgtttaccaaaagcaaggaggtgaggttctttctccctgtat

SEQ ID NO: 472827 - DNA, 120 bp, Artificial Sequence
  ENSG00000159733_69 (sequence is synthesized)
agtagtcccacttattggttgaattttatttttattttttgtattataaaggcttaacatttttcttacagtgcagaatttccttcagagtttagtgcatgatttcttgcctgagaaggg

SEQ ID NO: 472828 - DNA, 120 bp, Artificial Sequence
  ENSG00000159733_70 (sequence is synthesized)
tcatgcttccccactcatagtgagttttcgtatctcttcctaagaaaaatgaaagtcaagcctcaggagggatggtcgagattaaaaattgccaagcaatcagtgggtcctaaggaagta

SEQ ID NO: 472829 - DNA, 120 bp, Artificial Sequence
  ENSG00000159733_71 (sequence is synthesized)
atccacactcggagcatcgtgcaccacagtagtgagggcagcattgcgtggaggtggaggattaggcacatcgtcagtgtccagcagaagacaaaggagtgagttaacaggacggtccat

SEQ ID NO: 472830 - DNA, 120 bp, Artificial Sequence
  ENSG00000159733_72 (sequence is synthesized)
ctgaaaacaggccctcggaagatgagaattagaaggaactgtgtcccacctgcggtcatatttccccaaggacattttccccacttctctcctttcccattggttccagttttcctagga

SEQ ID NO: 472831 - DNA, 120 bp, Artificial Sequence
  ENSG00000159733_73 (sequence is synthesized)
tgaacgtgtattgatttcatatttaacaaattaaagcaaaagttaaacttccagtgtttttgtaacctacagaatgaatagtcaatgtttaaagaataggacaaatttacagaaaaggat

SEQ ID NO: 472832 - DNA, 120 bp, Artificial Sequence
  ENSG00000159733_74 (sequence is synthesized)
ggaatgcaatttaagatgtaaaaaaatgggcttcttctccctcatatacacaaagtgttcaaaacactctgttatactttatattttgaacataaggaaataaagtaaaataattttaaa

SEQ ID NO: 472833 - DNA, 120 bp, Artificial Sequence
  ENSG00000159753_0 (sequence is synthesized)
atggcccagacccccgacggcatctcctgtgagctccgaggcgagatcaccaggttcctgtggcccaaagaggtggagctgctgctgaaaacctggctacccggggagggtgctgtgcaa

SEQ ID NO: 472834 - DNA, 120 bp, Artificial Sequence
  ENSG00000159753_1 (sequence is synthesized)
aaccatgtcctggcactgctacgatggagagcctacctgctgcacaccacctgcctcccgctgagggtggactgcacgttcagctacctggaggtccaggccatggcgctgcaggagaca

SEQ ID NO: 472835 - DNA, 120 bp, Artificial Sequence
  ENSG00000159753_2 (sequence is synthesized)
ccccctcaggtcacctttgagctggagtccctgcgtgagctggtcctggagtttcctggtgtggccgccctggaacagctggcccagcacgtggctgcagccatcaagaaggtcttccct

SEQ ID NO: 472836 - DNA, 120 bp, Artificial Sequence
  ENSG00000159753_3 (sequence is synthesized)
cgctcgacccttgggaagctattccggaggcccacaccagcctccatgctggctcggctggagagaagcagcccctcggagtccactgacccctgcagcccctgtggtggcttcttggag

SEQ ID NO: 472837 - DNA, 120 bp, Artificial Sequence
  ENSG00000159753_4 (sequence is synthesized)
acatacgaggctctgtgtgactacaatggcttccctttccgagaggagattcagtgggacgtggacaccatttaccatcgccagggctgccgccatttcagcctgggagacttcagccac

SEQ ID NO: 472838 - DNA, 120 bp, Artificial Sequence
  ENSG00000159753_5 (sequence is synthesized)
ctcggcagtcgggacctggccttgagtgtggctgccctgtcctacaacctgtggttccggtgcctctcctgtgtggacatgaagctgagccttgaggtctcagaacagattctgcacatg

SEQ ID NO: 472839 - DNA, 120 bp, Artificial Sequence
  ENSG00000159753_6 (sequence is synthesized)
atgagtcagtcatcacacctggaggagctggtgctggagacctgcagcctgaggggagactttgtccgacgactggcccaggcgctggcgggacactcaagctctgggctgcgggagctc

SEQ ID NO: 472840 - DNA, 120 bp, Artificial Sequence
  ENSG00000159753_7 (sequence is synthesized)
agcctcgcggggaacctgctggatgaccgaggcatgactgcactcagcagacacctcgagcgttgtccaggagccctgaggagactcagcctggcccagacagggttgacaccgcgagga

SEQ ID NO: 472841 - DNA, 120 bp, Artificial Sequence
  ENSG00000159753_8 (sequence is synthesized)
atgagggctctgggccgggcactggccaccaatgccgccttcgactccaccctgacccacctggacctttctgggaatcctggggcgctgggggcctccgaggacagtgggggcctctat

SEQ ID NO: 472842 - DNA, 120 bp, Artificial Sequence
  ENSG00000159753_9 (sequence is synthesized)
agcttcctgagccgtcctaacgtactgtcgttcctgaatctcgcaggcaccgacactgccctggacactctcttcgcagcggtatcccgaggctgctgcaccagccttacccacctcgac

SEQ ID NO: 472843 - DNA, 120 bp, Artificial Sequence
  ENSG00000159753_10 (sequence is synthesized)
gcttcgaggaacgtcttctcccgcacgaagtcccgcgccgcgccggccgcgctgcagctcttcctcagccgcgcgcggacgctgcggcacctgggcctggcgggctgcaagctgccgccc

SEQ ID NO: 472844 - DNA, 120 bp, Artificial Sequence
  ENSG00000159753_11 (sequence is synthesized)
gacgcgctcagagcccttttggatggcctcgcgctcaacacgcacctccgcgacctgcacctggacctcagcgcttgcgagctgcgctcggccggcgcccaggtgatacaagacttagtg

SEQ ID NO: 472845 - DNA, 120 bp, Artificial Sequence
  ENSG00000159753_12 (sequence is synthesized)
tgcgacgcaggcgctgtgagctccctggatctggcggataacggcttcggctcagacatggtgactctggtgctggccatcgggagaagccggtccctgagacatgtggcgcttggaagg

SEQ ID NO: 472846 - DNA, 120 bp, Artificial Sequence
  ENSG00000159753_13 (sequence is synthesized)
aacttcaacgtccggtgcaaggagaccctggacgacgtcctgcaccggattgtccagctcatgcaggacgacgattgtcctcttcagtctctgtcggtggctgagtctcggctgaagctg

SEQ ID NO: 472847 - DNA, 120 bp, Artificial Sequence
  ENSG00000159753_14 (sequence is synthesized)
ggtgccagcgtcctactccgggccctagccaccaatcctaacctgaccgcgctggatatcagcggcaacgccatgggggacgcgggcgccaagttgctggccaaggcgctgcgggtcaac

SEQ ID NO: 472848 - DNA, 120 bp, Artificial Sequence
  ENSG00000159753_15 (sequence is synthesized)
tcgaggctccggtctgtggtctgggaccggaaccacacatctgctttgggtctgctggacgtggcgcaggcgctggagcagaaccacagcctgaaggccatgcctctgccactgaacgac

SEQ ID NO: 472849 - DNA, 120 bp, Artificial Sequence
  ENSG00000159753_16 (sequence is synthesized)
gtggcccaggcgcagcgcagccgcccggaactgacagcacgtgcagtccatcagatccaagcctgtctcttgaggaacaaccgcgcagaccctgcctcttctgaccacacgacccgcctt

SEQ ID NO: 472850 - DNA, 120 bp, Artificial Sequence
  ENSG00000159753_17 (sequence is synthesized)
gtgaatgaattgtgtcagtcggtgcaggagcatgtggagctgctgggctgtggggctgggccccagggtgaagccgctgtgcgccaggccgaggatgccatccaaaatgccaacttctct

SEQ ID NO: 472851 - DNA, 120 bp, Artificial Sequence
  ENSG00000159753_18 (sequence is synthesized)
ctcagcattctccccattctatatgaagctggaagctccccaagccatcactggcagcttgggcagaagctggagggccttctgagacaggtgggcgaggtctgccgccaggacatccag

SEQ ID NO: 472852 - DNA, 120 bp, Artificial Sequence
  ENSG00000159753_19 (sequence is synthesized)
gacttcactcaggccacactggacacagcaaggagcctctgcccacagatgctgcagggatccagctggagggagcagctagagggggtcctggcaggctcgaggggcctcccggagctg

SEQ ID NO: 472853 - DNA, 120 bp, Artificial Sequence
  ENSG00000159753_20 (sequence is synthesized)
ctcccagagcagctgctgcaagatgccttcactaggctcagggacatgcggctatcaatcacggggaccttggcagagagcattgtggctcaggctttggcaggcctgagtgcagcccgg

SEQ ID NO: 472854 - DNA, 120 bp, Artificial Sequence
  ENSG00000159753_21 (sequence is synthesized)
gatcagctggtggagagtctggctcagcaggcaacagtgacaatgccccctgccctaccagcaccggatggaggtgagcccagcctccttgagcctggggaattggaaggtcttttcttc

SEQ ID NO: 472855 - DNA, 120 bp, Artificial Sequence
  ENSG00000159753_22 (sequence is synthesized)
cccgaggagaaggaagaggagaaggagaaggatgacagtcctccacagaaatggcctgagctcagccacggtcttcacctggtccccttcattcacagtgctgctgaggaagcggagccg

SEQ ID NO: 472856 - DNA, 120 bp, Artificial Sequence
  ENSG00000159753_23 (sequence is synthesized)
tcacagtgctgctgaggaagcggagccggagcccgagctggcggctccgggagaagatgcagagccgcaggcggggccgtccgcgcgcggctctccgagccctgccgcccctgggccccc

SEQ ID NO: 472857 - DNA, 80 bp, Artificial Sequence
  ENSG00000159753_24 (sequence is synthesized)
gcggccgcgccgccagcaccaccaccgcccgccgccggggggcccccaggtacccccagccttgccgcaggaagggaatg

SEQ ID NO: 472858 - DNA, 120 bp, Artificial Sequence
  ENSG00000159753_25 (sequence is synthesized)
aatgggctcagtgcccgcgtggacgagggcgtggaggaattcttctccaaaaggctgatccagcaggatcgcctctgggcccccgaggaggacccggccactgaggggggcgccactcct

SEQ ID NO: 472859 - DNA, 120 bp, Artificial Sequence
  ENSG00000159753_26 (sequence is synthesized)
gtcccccgtacactgcgaaagaagctgggcaccctctttgccttcaagaagcctcgttcaacgcggggtccacggactgatctagagaccagccctggggcagctccccgaacccgaaaa

SEQ ID NO: 472860 - DNA, 120 bp, Artificial Sequence
  ENSG00000159753_27 (sequence is synthesized)
actacatttggcgacctactgcggccgccaacccgtcccagccgtggtgaggagcttggtggggctgagggggacaccagcagccctgaccctgccggcaggagccgacctcgctacaca

SEQ ID NO: 472861 - DNA, 120 bp, Artificial Sequence
  ENSG00000159753_28 (sequence is synthesized)
agagatagcaaggcctactcgatgatactgctgcctgccgaggaggaggcaacgctgggtgccagacccgacaagcggcggcccctggagcggggagaaacagaactggctccatccttt

SEQ ID NO: 472862 - DNA, 120 bp, Artificial Sequence
  ENSG00000159753_29 (sequence is synthesized)
gaacagcgggtacaagtaatgctgcagaggataggcgtcagccgaggcagcgggggtgccgaaggcaagaggaagcaaagcaaagatggcgagatcaagaaagctggctcagatggtgac

SEQ ID NO: 472863 - DNA, 120 bp, Artificial Sequence
  ENSG00000159753_30 (sequence is synthesized)
attatggacagttccacggaggcccctcccatctcgatcaagtcccgcacccactctgtgtctgctgacccttcctgcagacctggcccagggagccaggggcctgagtctgccacctgg

SEQ ID NO: 472864 - DNA, 120 bp, Artificial Sequence
  ENSG00000159753_31 (sequence is synthesized)
aagacactggggcagcagttgaatgcggagctcaggagccgtggttggggccaacaggatggtccaggccctccctcccctggtcaaagcccaagtccctgcagaaccagcccctcccca

SEQ ID NO: 472865 - DNA, 120 bp, Artificial Sequence
  ENSG00000159753_32 (sequence is synthesized)
gacagcctgggcctcccagaggacccttgcttgggccccagaaatgaagaacggcccctgaggctgcagcgctcccccgtcctcaaacgcaggccaaaactcgaggcacctccatcccca

SEQ ID NO: 472866 - DNA, 120 bp, Artificial Sequence
  ENSG00000159753_33 (sequence is synthesized)
agcctaggatctggccttggaaccgagcctctgcccccacagcccacagagccctccagccctgagcggagcccaccctccccagccacagaccaaagaggcggcggccccaatccctga

SEQ ID NO: 472867 - DNA, 120 bp, Artificial Sequence
  ENSG00000159753_34 (sequence is synthesized)
gtactgtcgttcctgaatctcgcaggcaccgacactgccctggacactgtgagggggtgctccgtggggggatggatgaccggcagggcggactggagggcgggacggggagggctcggt

SEQ ID NO: 472868 - DNA, 120 bp, Artificial Sequence
  ENSG00000159753_35 (sequence is synthesized)
ggacctgtcggggccgggggaggctgctggaagccgcctccttgcggccccaggcccaccttcccacttcccccaggaagtcccgcgccgcgccggccgcgctgcagctcttcctcagcc

SEQ ID NO: 472869 - DNA, 120 bp, Artificial Sequence
  ENSG00000159753_36 (sequence is synthesized)
gcctggcgggctgcaagctgccgcccgacgcgctcaggtcagtgtcggaccccggccacgcccccgcgggcgctcccaccctgccctggccttcgcccctccccgctcctgcttctgtcg

SEQ ID NO: 472870 - DNA, 120 bp, Artificial Sequence
  ENSG00000159753_37 (sequence is synthesized)
ccctccccgctcctgcttctgtcgctcccacaacctcccccagatcctggccctgcctccttcgttcgcaccctggagccccctgtcccagctcccgccaccccgtgtaacgtcctctcc

SEQ ID NO: 472871 - DNA, 120 bp, Artificial Sequence
  ENSG00000159753_38 (sequence is synthesized)
aggcgctgtgagctccctggatctggcggataacggtgaggctgcaggagagcccatcctcgcatcatccactcgattcccaatccccaccctacccttgcaacttcgcctcgtgcgtga

SEQ ID NO: 472872 - DNA, 120 bp, Artificial Sequence
  ENSG00000159753_39 (sequence is synthesized)
cccgagtcacccccaggcttcggctcagacatggtgactctggtgctggccatcgggagaagccggtccctgagacatgtggcgcttggaaggaacttcaacgtccggtgcaagtgagcc

SEQ ID NO: 472873 - DNA, 120 bp, Artificial Sequence
  ENSG00000159753_40 (sequence is synthesized)
cccaccctactcctgggcctcccagacaacaccccaccacccctgtcccccacaactgcggcccctgcccacagggagaccctggacgacgtcctgcaccggattgtccagctcatgcag

SEQ ID NO: 472874 - DNA, 120 bp, Artificial Sequence
  ENSG00000159753_41 (sequence is synthesized)
gacgacgattgtgtgagttcacgggaccttgcagggcctcgggcaattagaccactttggtcctcctttctcttgttccctcagaccctgtgacctgccctcactgacccctgactccag

SEQ ID NO: 472875 - DNA, 120 bp, Artificial Sequence
  ENSG00000159753_42 (sequence is synthesized)
gcggtggagaggagggcaccgggctaaggggagggactgaatgaggcggagcaaatggagcaggctgacgaggcgaatggactaggccgagggttgggtggggcgttgggaagctccgtc

SEQ ID NO: 472876 - DNA, 120 bp, Artificial Sequence
  ENSG00000159753_43 (sequence is synthesized)
cctcagagcaggtcaatgtcccctccccaaccacgagaggtagggcatgaggagacctgtggcatccgggagcctccatgagtcagagggtctgactttcctggggccagggtgcctgag

SEQ ID NO: 472877 - DNA, 120 bp, Artificial Sequence
  ENSG00000159753_44 (sequence is synthesized)
cttaaatagctctccaaataacacccttggctgcctaacgttaagcctgtaaacaggctgtcctgttagagaggaatttttatgtccttcctcaattttcccccaattgtagccccatct

SEQ ID NO: 472878 - DNA, 120 bp, Artificial Sequence
  ENSG00000159753_45 (sequence is synthesized)
ctgtcctcacatatacgtgactcccctcccctctccattgtgtgcccaaacccagctgctccttcactgtcttcatctccctccactaccttatctgttggagatgtttctacctctcca

SEQ ID NO: 472879 - DNA, 120 bp, Artificial Sequence
  ENSG00000159753_46 (sequence is synthesized)
ttcccaaatacctcttctttcctaagcttcagagcccaaaggtcttaatccagacatcctgctgggcttcatgctctgcacttctccaagtgatgtcatcgtcgctcacaaaccctgttg

SEQ ID NO: 472880 - DNA, 120 bp, Artificial Sequence
  ENSG00000159753_47 (sequence is synthesized)
tctaccctggagcccaatcccactggtgcccacagccacccagtgctgtggacagaggttggggcacccttccaggtctctcctggtcacactggagccctcataggcctccttcgtcct

SEQ ID NO: 472881 - DNA, 120 bp, Artificial Sequence
  ENSG00000159753_48 (sequence is synthesized)
gcctctagaccaaccttcatacatgccactccttacccccacaccaattatcccttgctcctcctggtccctcctccagggctactcactcccttttctacccctctctcagtctatcct

SEQ ID NO: 472882 - DNA, 120 bp, Artificial Sequence
  ENSG00000159753_49 (sequence is synthesized)
ctgtgtggacagactgagcttctaaaacacagacatgatttacaactcctttccttcctattctgggcacttaggaagtgtatataaagtccttaaaatgaaccaaagcaacagatagtt

SEQ ID NO: 472883 - DNA, 120 bp, Artificial Sequence
  ENSG00000159753_50 (sequence is synthesized)
ccttccctccttgaacagatagggttccaaagtggctggtctaagggtgtcagcttcaggacctccctctgttaaagagcctgggaggaaggcaggcaggatctgggagactgggagggg

SEQ ID NO: 472884 - DNA, 120 bp, Artificial Sequence
  ENSG00000159753_51 (sequence is synthesized)
gcccgggatcagctggtgagggggagatgtgcacacactttcgtgcaaacacacacatgcagtgacttggccatctcccttgcaggggctctgtaatgtcttctggggtcatgtagccca

SEQ ID NO: 472885 - DNA, 120 bp, Artificial Sequence
  ENSG00000159753_52 (sequence is synthesized)
gagcagtgtctgtgcatgaggaccagctccaggcccctgctggtgaggggagacacctccacgtgtgcttgaatgcaggagatgtgggagggtgggcttctggggctcccttcatagctt

SEQ ID NO: 472886 - DNA, 120 bp, Artificial Sequence
  ENSG00000159753_53 (sequence is synthesized)
tggtccttggagggagccaccagtgtgtgaggtctcaagaaatcagggagccagaagaccaggtgcaagggtttgacagcaagcccttccaactagcactggctccacttcccgaagagc

SEQ ID NO: 472887 - DNA, 120 bp, Artificial Sequence
  ENSG00000159753_54 (sequence is synthesized)
ctctgaaggcagcagtgtgtgtgagtgcatgcttatgtgcactggaggtggaagagaggggcaggggatggacagaccccaagccttagcaacccaccccaagcctttctgtgtccctta

SEQ ID NO: 472888 - DNA, 80 bp, Artificial Sequence
  ENSG00000159753_55 (sequence is synthesized)
tcctgggcgacggggcgggcgggcaggtgggactcggcccccctcccacaaccccgctcccgggcaagctctcgagccgc

SEQ ID NO: 472889 - DNA, 120 bp, Artificial Sequence
  ENSG00000159753_56 (sequence is synthesized)
caggaagcggcgcgcaccttccgccgccggaggagcaggtggctgccgtgcgggtctgggccccaggcttcctgtgtgcgcgctcgtcctctgctgtttcccgccggagctcgttgggcc

SEQ ID NO: 472890 - DNA, 120 bp, Artificial Sequence
  ENSG00000159753_57 (sequence is synthesized)
ctcccagaggacccttgcttgggccccagaaatgaagatggccagctgaggccgaggcctctctcggcagggcggcgagcagtgtctgtgcatgaggaccagctccaggcccctgctgaa

SEQ ID NO: 472891 - DNA, 120 bp, Artificial Sequence
  ENSG00000159753_58 (sequence is synthesized)
cgcagcgcagccgcccggaactgacagcacgtgcagtccatcaggtgggcgtccccctcttcccttgcccttctctgcacggtaactccgtccctcggcatttctcaataccccttgccc

SEQ ID NO: 472892 - DNA, 120 bp, Artificial Sequence
  ENSG00000159761_0 (sequence is synthesized)
gtagtttcggccgagggtgggctccgcggtcgccggtttctcttcccagctctgccctcgcttgctggccggtctccggggtcagcgcggggccaccatccagccccttggggcccgccc

SEQ ID NO: 472893 - DNA, 120 bp, Artificial Sequence
  ENSG00000159761_1 (sequence is synthesized)
caagcagctgtcgaggacgcactcagcctgcgcagccatggcctcggcaggggcggagaggcggccgggggtccaggaggcgacggtcgtggggcagggacagctcacggaggagcccgg

SEQ ID NO: 472894 - DNA, 120 bp, Artificial Sequence
  ENSG00000159761_2 (sequence is synthesized)
cagcgctcagacctccgagtgtccagtggcgggagaccagttcctggtgcctgcccatgaggcccgcggaacccagagtgaagaccagcgcccagcaggcgcagcttcggagtcggagct

SEQ ID NO: 472895 - DNA, 120 bp, Artificial Sequence
  ENSG00000159761_3 (sequence is synthesized)
ccaggaggaaggacccaagctgggggaggagcggcccaagccgcatgccggggcgctagaggagagaggccccaggcccgtggtctccattgtgaggccccgtcatggtccaaagagaaa

SEQ ID NO: 472896 - DNA, 120 bp, Artificial Sequence
  ENSG00000159761_4 (sequence is synthesized)
gcctgtcaagtctctcagcctcccgggccttcgtgcccatcttaaggctgaagctgagctgccacccaagctgccgctgcaggaggaggagccagaggacagccagagtgagccctcacc

SEQ ID NO: 472897 - DNA, 120 bp, Artificial Sequence
  ENSG00000159761_5 (sequence is synthesized)
ggccagcatggtgtctgcacccttagagacattgaggctggagcgaaaggcccagcgcctgcggccgctgtaccagtacgtcaactattgcaaccctgagctgaaccaggcagggaaggg

SEQ ID NO: 472898 - DNA, 120 bp, Artificial Sequence
  ENSG00000159761_6 (sequence is synthesized)
ggacggggaggctgaggtggaggcagaggcagagctggccccggttcccgaggagggaggtgtggagcaactgcaggccttgctgcccttggcaggtgagctgggcccaggcctcgcttt

SEQ ID NO: 472899 - DNA, 120 bp, Artificial Sequence
  ENSG00000159761_7 (sequence is synthesized)
gccctgtcccagtccactagtgacccccacccatgccctggctcccctcggagaggaggctggagaggagcctgggggcttgcccagcttgggggtgagtgaccacaaggccgaggtgga

SEQ ID NO: 472900 - DNA, 120 bp, Artificial Sequence
  ENSG00000159761_8 (sequence is synthesized)
taagtcaacccaggtggacatcgacaagatgctgagtgtctgcactgctccacttgtccccccgctctctcctcagtacaagtgactgtcccgccccactggtggctcccctccttccac

SEQ ID NO: 472901 - DNA, 120 bp, Artificial Sequence
  ENSG00000159761_9 (sequence is synthesized)
gcctgaatttggcttcaggcttcctgtgggcctaggccctctggtggcgggggcaaatttggcacctgcccccacttgggactttggtcttgctgaaaataaatatttttctttttcaaa

SEQ ID NO: 472902 - DNA, 120 bp, Artificial Sequence
  ENSG00000159761_10 (sequence is synthesized)
ctgtcaagtgagggggctctcggggggaaggagctgcagccccggggttggggcacacaccacagtaggattcctaaatcctgcactcctgcagggaggattctcgtccccagccactac

SEQ ID NO: 472903 - DNA, 120 bp, Artificial Sequence
  ENSG00000159761_11 (sequence is synthesized)
catcactctcctcccgttcctcaagagcccccgtgtagggagcagcaggagagtgggagcttcagggcttgtaggggcctgggctcactggcctctaagcctcttgggcctggggtctca

SEQ ID NO: 472904 - DNA, 120 bp, Artificial Sequence
  ENSG00000159761_12 (sequence is synthesized)
ttgaccaggaacgggacaggcgtcgagccctggggctgtgggcaggctgggctattccctgggccagggaatgggagccagggctggagcctggctcaagtctcttgtccctggctcagg

SEQ ID NO: 472905 - DNA, 120 bp, Artificial Sequence
  ENSG00000159761_13 (sequence is synthesized)
cccgtgctccacgctgtggccagcatggtgtctgcacccttagagacattgaggctggagcgtgagtggcagtccctggactgttccttctccccctgcctgtggggcccgacatggcac

SEQ ID NO: 472906 - DNA, 120 bp, Artificial Sequence
  ENSG00000159763_0 (sequence is synthesized)
accacttctctgggacacattgccttctgttttctccagcatgcgcttgctccagctcctgttcagggccagccctgccaccctgctcctggttctctgcctgcagttgggggccaacaa

SEQ ID NO: 472907 - DNA, 120 bp, Artificial Sequence
  ENSG00000159763_1 (sequence is synthesized)
agctcaggacaacactcggaagatcataataaagaattttgacattcccaagtcagtacgtccaaatgacgaagtcactgcagtgcttgcagttcaaacagaattgaaagaatgcatggt

SEQ ID NO: 472908 - DNA, 120 bp, Artificial Sequence
  ENSG00000159763_2 (sequence is synthesized)
gggacttttacaccaacagaactgtgcaaattgcagccgtcgttgatgttattcgggaattaggcatctgccctgatgatgctgctgtaatccccatcaaaaacaaccggttttatacta

SEQ ID NO: 472909 - DNA, 120 bp, Artificial Sequence
  ENSG00000159763_3 (sequence is synthesized)
ttgaaatcctaaaggtagaataatggaagccctgtctgtttgccacacccaggtgatttcctctaaagaaacttggctggaatttctgctgtggtctataaaataaacttcttaacatgc

SEQ ID NO: 472910 - DNA, 80 bp, Artificial Sequence
  ENSG00000159784_0 (sequence is synthesized)
ggggagggatggagaggggaggggggagcggagccgagcggagacagccgcggcgctgcagagcggctggggcggcggcg

SEQ ID NO: 472911 - DNA, 120 bp, Artificial Sequence
  ENSG00000159784_1 (sequence is synthesized)
gagggcccggctctgcggcccccggagccatgggctgcatcggctcccggactgtggggaatgaggtgattgcagtggattggaagggcctgaaggatgtcgatcaaatcaacatggaca

SEQ ID NO: 472912 - DNA, 120 bp, Artificial Sequence
  ENSG00000159784_2 (sequence is synthesized)
gcaccagctcactgcacgggagcagcctccatcggccatcgactgagcaaactcgaactgatttctcctgggacggcatcaacctctccatggaggacaccacttccattcttccgaagc

SEQ ID NO: 472913 - DNA, 120 bp, Artificial Sequence
  ENSG00000159784_3 (sequence is synthesized)
ttaagcgaaactctaacgcctatggcattggggccctggccaagtcatcattctcagggatctcacggagcatgaaggaccatgtgacaaagcccacagccatggggcaaggccgggtgg

SEQ ID NO: 472914 - DNA, 120 bp, Artificial Sequence
  ENSG00000159784_4 (sequence is synthesized)
cccacatgattgagtggcagggctgggggaagacaccagctgttcagccacaacacagccatgagtccgtgcgcagggatacggatgcctactccgacctcagcgatggcgagaaggagg

SEQ ID NO: 472915 - DNA, 120 bp, Artificial Sequence
  ENSG00000159784_5 (sequence is synthesized)
cacgttttctagcaggcgtcatggagcagtttgctatctctgaggccacactcatggcctggtcttccatggatggtgaggacatgagtgtgaactccacccaggagccattgggctgca

SEQ ID NO: 472916 - DNA, 120 bp, Artificial Sequence
  ENSG00000159784_6 (sequence is synthesized)
actacagtgacaactaccaggaactgatggacagtcaggatgccctggctcaagcacccatggatggatggcctcactcttacgtgtcccagggtatgtactgtctggggtcgtcagatg

SEQ ID NO: 472917 - DNA, 120 bp, Artificial Sequence
  ENSG00000159784_7 (sequence is synthesized)
cctgggaagccagcgatcagtccctcattgcctctccggccacaggatcctatcttgggcctgcatttgatgactcacaacccagcttgcatgaaatgggaccttcccaaccagcttcag

SEQ ID NO: 472918 - DNA, 120 bp, Artificial Sequence
  ENSG00000159784_8 (sequence is synthesized)
gatactctgctctggagcctccacctttgctggggggagacactgactgggctccgggggtaggcgcagtggacctggcaaggggccctgctgaggaggagaagaggccattggcacctg

SEQ ID NO: 472919 - DNA, 120 bp, Artificial Sequence
  ENSG00000159784_9 (sequence is synthesized)
aggaggaagaggatgcgggatgccgggacctggagtcactttccccacgagaagaccctgagatgtctaccgctctcagccggaaggtgtctgacgtcacatcctcaggtgtgcagtcct

SEQ ID NO: 472920 - DNA, 120 bp, Artificial Sequence
  ENSG00000159784_10 (sequence is synthesized)
ttgatgaggaggaaggcgaggccaacaactagtttcctcccccaatgccctgccttccactcccacctgagggccatggctgtgacccataccctccctccccccagcagtacagctgaa

SEQ ID NO: 472921 - DNA, 120 bp, Artificial Sequence
  ENSG00000159784_11 (sequence is synthesized)
actgggcagacaacattggggaacccaggagcttccagtcctctcctggaaatggaggaccaggatgggattttatccaggcttacactctagaaacccacaggcctgggaactgagacc

SEQ ID NO: 472922 - DNA, 120 bp, Artificial Sequence
  ENSG00000159784_12 (sequence is synthesized)
tgggcaactagatggccgtgagcttggtgtggctgtggagaaggacctgggctgtgggcttctgggtctgtgccgacaaagcctccagtgtgtgcaccctgaggacgggggcagcgcagc

SEQ ID NO: 472923 - DNA, 120 bp, Artificial Sequence
  ENSG00000159784_13 (sequence is synthesized)
tgtgctcaagactggatctcagttcttcacgccccgatttcgtcttccaggagctgtaactctgctgtctgaatgcctcctttctccatttcactcttgcttttcccaactctgttttct

SEQ ID NO: 472924 - DNA, 120 bp, Artificial Sequence
  ENSG00000159784_14 (sequence is synthesized)
ctggctgtggccccagctcatccctactgagagaacagacctcaggggctgttggacatggctggacaggcgcaggggaggctgcctgaagggcacgtccatggggagggtggagaggct

SEQ ID NO: 472925 - DNA, 120 bp, Artificial Sequence
  ENSG00000159784_15 (sequence is synthesized)
gcctcagcaggtcatttggcttctgagatcaggagtcgaggaggaggtggatgtggcagctgagatctacagggggcacggatgtggttctttctatcaaggcctgcccggagacaagag

SEQ ID NO: 472926 - DNA, 120 bp, Artificial Sequence
  ENSG00000159784_16 (sequence is synthesized)
agtcactgaggagactaagaacaaacacagccccttgctctgggatctttaatatcccatggctaaaaggaagatcctaaggatctgggaaaagacccagccagggctggctgctccagc

SEQ ID NO: 472927 - DNA, 120 bp, Artificial Sequence
  ENSG00000159784_17 (sequence is synthesized)
tcttgcttccctttcagctttcttccatccctgctccgggagcctgaggagggtgtggggacacccatcttggatacaccaacgcaggatgcaggtgtcgccaacagcagggggagcatg

SEQ ID NO: 472928 - DNA, 120 bp, Artificial Sequence
  ENSG00000159784_18 (sequence is synthesized)
ttctacatttttataacttcttgggcactcagggttgagtggagtggagggaggagtccggtgctgtcactccctcagccaggcagggttgcagctgagggccagggtgggcactcggca

SEQ ID NO: 472929 - DNA, 120 bp, Artificial Sequence
  ENSG00000159784_19 (sequence is synthesized)
ctttctgccccttcttcagctcctcccaggactcccaaacagcctcacagctgtcctccctgcctccccaggcctcctaccagaggaagagaggaaaatcagcggattcttccttccagg

SEQ ID NO: 472930 - DNA, 120 bp, Artificial Sequence
  ENSG00000159784_20 (sequence is synthesized)
atggtgtatggtgaggcacaagcttgccctcccacacttggcatccatgctggtggggactgagcagcatatgcgccccagcactaccgtgagagcacaggcagaggatgggcggagcaa

SEQ ID NO: 472931 - DNA, 120 bp, Artificial Sequence
  ENSG00000159784_21 (sequence is synthesized)
agcagcggtgctgtggggttggagagcacttggccctgccactgcccaggtagcccctccccagcccttggcacaggcagagttcgggtaggagagagaggcctaagaggctcactgccc

SEQ ID NO: 472932 - DNA, 120 bp, Artificial Sequence
  ENSG00000159784_22 (sequence is synthesized)
tatctccttctttcctcacgcccttccaaggctccggctcccaggcctgtgtcctacccacactctgtcaggagtcctaccacttgcatcctctgctggaagggagcactgttgtcctct

SEQ ID NO: 472933 - DNA, 120 bp, Artificial Sequence
  ENSG00000159784_23 (sequence is synthesized)
cctggccctgggcacaaactttgccctcacccccaggccccagaacttattattttggagtgagaaggttgagagttggggtgtttctgtccatctatggtcctgtcccgccatcaagtt

SEQ ID NO: 472934 - DNA, 120 bp, Artificial Sequence
  ENSG00000159784_24 (sequence is synthesized)
catactctcttactcacacttctgggatgcaagcagggcagggggttctgtgtcttccatggaagggggacaatggttatcctgaggttggtttttggaggaaacatgggcgtaggcaag

SEQ ID NO: 472935 - DNA, 120 bp, Artificial Sequence
  ENSG00000159784_25 (sequence is synthesized)
gtgaaccaaggcaggtgcagtcacctaaccgaatgctgcctgtacaggggaagagtcctcttgtgcttgctaacgtgtgctgactccatgtcccaggacctcatttccaggagctctgag

SEQ ID NO: 472936 - DNA, 120 bp, Artificial Sequence
  ENSG00000159784_26 (sequence is synthesized)
aggtggtctagcatgcccgccctggcagctattccccacccgtctcctgctgcaggctctggggttttgcatgttcatgtgaccttccttccatggggtccctggttcctcaccttctcc

SEQ ID NO: 472937 - DNA, 120 bp, Artificial Sequence
  ENSG00000159784_27 (sequence is synthesized)
aatgtgtgctattcccacatcacctcttcctgtcgtctcatcctctcagtgcccatatcatacccccagaccacggtggacagctcacctagtgagtgcgttcattcattacagttcgtt

SEQ ID NO: 472938 - DNA, 120 bp, Artificial Sequence
  ENSG00000159784_28 (sequence is synthesized)
tttgctcaggcccgggggagttaggaaaggtagaccacagcagctttcgttcctccttccctttcccaaggaagccaaatggtccctgacaaaagatgactaaagatctgaaggactcta

SEQ ID NO: 472939 - DNA, 120 bp, Artificial Sequence
  ENSG00000159784_29 (sequence is synthesized)
gcagggttcatacatgaacctgctttccccagggtgctggcatattgctgcagatggaagtcaggtgggggtctgtcttctgcaaggagctcctactcgctctgaagagggagactgagg

SEQ ID NO: 472940 - DNA, 120 bp, Artificial Sequence
  ENSG00000159784_30 (sequence is synthesized)
agctggcctgggaccatcttaggactcttctggtgctgggggcagggtgcatgggggttgcttatcgtctatttcagggggtggggaggggcatgtgcaggaagaggctgtttcggggtg

SEQ ID NO: 472941 - DNA, 120 bp, Artificial Sequence
  ENSG00000159784_31 (sequence is synthesized)
ggaaagggttgcttttcctttggggttaaggctgtgcagcacgttttacagcagtcctggaacagggctgtttttatattcttgtgaatgaaactgctcttgctaaatgattttcttttt

SEQ ID NO: 472942 - DNA, 120 bp, Artificial Sequence
  ENSG00000159784_32 (sequence is synthesized)
ttggagggggggtgcactttcattttcaattgactttattaaatgaaaatccaaatcttccactcctccccctccattgtcccctcccccaccacacaccttccttcttgtccttgtgtt

SEQ ID NO: 472943 - DNA, 120 bp, Artificial Sequence
  ENSG00000159784_33 (sequence is synthesized)
gaagagggtatcttggggaatgagtttattatcttctccacgacctcacctatacatcccacacaccatcctccaggtctgggaaatatccatttttctggccagtcttagcatgttttc

SEQ ID NO: 472944 - DNA, 120 bp, Artificial Sequence
  ENSG00000159784_34 (sequence is synthesized)
ttaatgtcacattcccacgccaggcccaagagagattctatgacatatattatagagagaattctatatcaatatatataaatattagagattatgtacacaagggcatgggctcaaatg

SEQ ID NO: 472945 - DNA, 120 bp, Artificial Sequence
  ENSG00000159784_35 (sequence is synthesized)
cccactgccagtcccccacccaggcttcagcatctctcttggcctggggaagtgggagggatgtgatgctggagaaggctacaggctgtgttcaatgacactaaacagaatgtggtggca

SEQ ID NO: 472946 - DNA, 120 bp, Artificial Sequence
  ENSG00000159784_36 (sequence is synthesized)
ggcggggcggggccggctctttatttacctttgacgcggggagggaagagaggcgcctcctaatccatcttctccctccagcttctgcctggctaccgcccctgacccccacccaggcac

SEQ ID NO: 472947 - DNA, 120 bp, Artificial Sequence
  ENSG00000159784_37 (sequence is synthesized)
ccactccactctcgccgctcagcgaattcatccggccctctcccaccccctcccccattcttcccctttccaactcccaatttctcccgcctacacctcccggtgacctcaggctgagag

SEQ ID NO: 472948 - DNA, 120 bp, Artificial Sequence
  ENSG00000159784_38 (sequence is synthesized)
aataattcgtattattattacaaacaaactcactctccagaagcctgatttccctgagacccggtttatttccatggataccccctcctcctctgctttcaccccttctccgcggctctc

SEQ ID NO: 472949 - DNA, 120 bp, Artificial Sequence
  ENSG00000159784_39 (sequence is synthesized)
tccctccccgctgccccccacagctctgactcagctctccgtctctcacaaaggccacctcccgctcccctctccccccgcaccccgccctcccctgtctcccttctcctcaggctcttc

SEQ ID NO: 472950 - DNA, 120 bp, Artificial Sequence
  ENSG00000159784_40 (sequence is synthesized)
tccacctgccccattcctgctgtgtccggagggccatctttcctcttttcccccagtcaccaccccgcggagccccaggggacagcaggccaactttggagggtcctccctcctcagtcc

SEQ ID NO: 472951 - DNA, 120 bp, Artificial Sequence
  ENSG00000159784_41 (sequence is synthesized)
ggttcaccacaagccccttcctttcccccagccctgctgatgtgctgaatgcctcctcgtgcccagccccattcaatgctccccttcccaaaaatggagccgacccctaaactcacaatt

SEQ ID NO: 472952 - DNA, 120 bp, Artificial Sequence
  ENSG00000159784_42 (sequence is synthesized)
gtaaaacctcatgagtataaagggcctgtacggtcagatggttcaggcagccatctgctgcttgaatagtccctttatgaagacccaagcagttcttccgcaagactctccgcggcacca

SEQ ID NO: 472953 - DNA, 120 bp, Artificial Sequence
  ENSG00000159784_43 (sequence is synthesized)
tcctgccctcagtccaggagtctccctccaccaggagctctggcccggctgtaacaaggaccctccttcccctgagtcctgcagtttcccactcagccctcagaccctgtccacccctcc

SEQ ID NO: 472954 - DNA, 120 bp, Artificial Sequence
  ENSG00000159784_44 (sequence is synthesized)
caccatcttctgtcttctctctgacttgaattcctattttcttaattcctattttaaaaagttctcttttctcctcctgctcaccagcttccctccactttaatccatcacttctctccc

SEQ ID NO: 472955 - DNA, 120 bp, Artificial Sequence
  ENSG00000159784_45 (sequence is synthesized)
cacagtcaggtgaaatgcctccagctcacccttggtttctctgctcactgtttttgggaggacacacccaactccttgctatccaactcctgcctcgattcccaggaagtcctcttccag

SEQ ID NO: 472956 - DNA, 120 bp, Artificial Sequence
  ENSG00000159784_46 (sequence is synthesized)
tcagtcagactcatggactcttaggaagggcccaccgggggagacacatcccttccaccctaagcatagagaaaagttcctcatagagcagctctgcccttatctgtagacttgtaatag

SEQ ID NO: 472957 - DNA, 120 bp, Artificial Sequence
  ENSG00000159784_47 (sequence is synthesized)
agaaaaagcccagctcccatacagaaaccctccaagagtcctcaggacggaataattggttttctgataaaacccaacctctgacccctccacataaacaacaacaaataaggccataca

SEQ ID NO: 472958 - DNA, 120 bp, Artificial Sequence
  ENSG00000159784_48 (sequence is synthesized)
tcactttttctgagtgcactattctgggttgagctaaaactgaatatttgggctcagcattactacttgtctcccctagaatttggagagtgcagggatataagaggaaatgggcagctg

SEQ ID NO: 472959 - DNA, 120 bp, Artificial Sequence
  ENSG00000159784_49 (sequence is synthesized)
gggtaaggaaggggtgtgaagggctggccccagggtgtcgcctcggctgcacagggaggtgagggccggcggctaaccttctggccccctcagggaatgaggtgattgcagtggattgga

SEQ ID NO: 472960 - DNA, 120 bp, Artificial Sequence
  ENSG00000159784_50 (sequence is synthesized)
ctgatttctcctgggacggcatcaacgcactgtgagcactcacgttctcaacctgtgccccagttttccagagcactggggatatatccctccttgggactcttggctctccatggagga

SEQ ID NO: 472961 - DNA, 120 bp, Artificial Sequence
  ENSG00000159784_51 (sequence is synthesized)
caccttccaaccagcacggtattccctggctccaataggcactgtgagcactcacgttctcaacctgtgccccagttttccagagcactggggatatatccctccttgggactcttgggt

SEQ ID NO: 472962 - DNA, 120 bp, Artificial Sequence
  ENSG00000159784_52 (sequence is synthesized)
atagtagcttttcttatcatctgccctagctcgaatgctttttcctggaaaccatgaacctcctccatgtataaagcacgcccgtaccttcttattcctctgcccttcctcccacattcc

SEQ ID NO: 472963 - DNA, 120 bp, Artificial Sequence
  ENSG00000159784_53 (sequence is synthesized)
atctctctctccctctccgttgccttttactgtcgttcctgcctcctccgattcgctttgttcacggaatgaggtgattgcagtggattggaagggcctgaaggatgtcgatcaaatcaa

SEQ ID NO: 472964 - DNA, 120 bp, Artificial Sequence
  ENSG00000159784_54 (sequence is synthesized)
gcggagccgagcggagacagccgcggcgctgcagagcggctggggcggcggcgcggctcccggtgctccccccggcgcgcgccccgagtcgggaatgaggtgattgcagtggattggaag

SEQ ID NO: 472965 - DNA, 120 bp, Artificial Sequence
  ENSG00000159788_0 (sequence is synthesized)
agggcactgtttgaagaagcaaacatggtagcatcaagcattccttgaaatatggctccaagggaacaatgagacgtgctcttggtcttggaagctcatcagaatgtttagagctgggga

SEQ ID NO: 472966 - DNA, 120 bp, Artificial Sequence
  ENSG00000159788_1 (sequence is synthesized)
ggcctccaaacgcccattgcctgggccgtcgcccccaagggtgcggagtgtggaggttgcccgggggagggccggctacggattcacgctttcgggacaggcaccctgtgtgctcagctg

SEQ ID NO: 472967 - DNA, 120 bp, Artificial Sequence
  ENSG00000159788_2 (sequence is synthesized)
cgtcatgagagggagccctgcggatttcgtgggcctccgagctggagaccagatacttgctgtcaatgaaatcaacgtgaaaaaagcatctcatgaagatgtagtgaaattaattgggaa

SEQ ID NO: 472968 - DNA, 120 bp, Artificial Sequence
  ENSG00000159788_3 (sequence is synthesized)
gtgctctggtgtccttcacatggtgattgctgaaggcgtcggccgcttcgaatcctgttccagtgatgaagaagggggactctatgaaggaaaaggctggctgaagcccaagctggattc

SEQ ID NO: 472969 - DNA, 120 bp, Artificial Sequence
  ENSG00000159788_4 (sequence is synthesized)
taaagcactaggtataaacagagcagagcgagtcgtggaggaaatgcagtctggtggaattttcaatatgatttttgaaaacccgagcctttgtgcgagcaattcagagcccttgaaatt

SEQ ID NO: 472970 - DNA, 120 bp, Artificial Sequence
  ENSG00000159788_5 (sequence is synthesized)
gaaacaaagatccctttcagagtcggccgcaactcgatttgatgttggacatgaaagtataaataatccaaatcccaacatgctttctaaggaggaaatatcaaaagttattcatgatga

SEQ ID NO: 472971 - DNA, 120 bp, Artificial Sequence
  ENSG00000159788_6 (sequence is synthesized)
ttcggttttcagcattggactagaaagtcatgacgattttgcattggatgcaagtattttaaacgtggcgatgatcgtgggctacttaggctccattgagcttccttccacgagctccaa

SEQ ID NO: 472972 - DNA, 120 bp, Artificial Sequence
  ENSG00000159788_7 (sequence is synthesized)
cctggagtccgacagcttgcaagccatccgcggctgcatgcggcgcctgcgggcagagcagaaaatccactcgctggtgaccatgaagatcatgcacgactgtgtgcagctgagcactga

SEQ ID NO: 472973 - DNA, 120 bp, Artificial Sequence
  ENSG00000159788_8 (sequence is synthesized)
caaggctggagtcgtggccgagtacccggccgagaagctggccttcagcgccgtgtgcccggacgaccggcgatttttcgggttggttaccatgcagacgaatgacgacgggagcctggc

SEQ ID NO: 472974 - DNA, 120 bp, Artificial Sequence
  ENSG00000159788_9 (sequence is synthesized)
ccaggaggaggagggcgccctgcggacttcctgccacgtgttcatggtggacccagacttgtttaatcacaagatccaccaaggcattgctcggcggtttgggtttgagtgcacggccga

SEQ ID NO: 472975 - DNA, 120 bp, Artificial Sequence
  ENSG00000159788_10 (sequence is synthesized)
cccagacaccaatggctgtctggaattcccggcgtcctccctccccgtcctgcagttcatctctgtcctgtaccgagacatgggtgagctgattgagggcatgcgggcccgcgcctttct

SEQ ID NO: 472976 - DNA, 120 bp, Artificial Sequence
  ENSG00000159788_11 (sequence is synthesized)
ggacggggacgccgatgcccaccagaacaacagcaccagcagcaacagtgacagcggcattgggaacttccaccaggaggagaagagcaaccgggtccttgtggtggacctgggtgggag

SEQ ID NO: 472977 - DNA, 120 bp, Artificial Sequence
  ENSG00000159788_12 (sequence is synthesized)
ctcgagcagacacggccccggaggcagcgcgtgggacggtgtgggtgggaggggtgcccagccctggggtgctccctggactgggcccttctgtccggaccccgaagggagccccccatt

SEQ ID NO: 472978 - DNA, 120 bp, Artificial Sequence
  ENSG00000159788_13 (sequence is synthesized)
tgaggccgctcatcagactgacaggttctgggacctaaacaagcacctagggccagcctctcctgtggaggtgcccccagcttccttgaggagctcagtccccccttccaagaggggcac

SEQ ID NO: 472979 - DNA, 120 bp, Artificial Sequence
  ENSG00000159788_14 (sequence is synthesized)
cgtgggtgctggctgtggtttcaaccagcgctggctcccggtccacgtgctccgggagtggcagtgcggacacaccagcgaccaggactcttacacagattccaccgatggctggtccag

SEQ ID NO: 472980 - DNA, 120 bp, Artificial Sequence
  ENSG00000159788_15 (sequence is synthesized)
catcaactgcggcacactgccccctcctatgagcaagatccccgcagaccgctacagggtggagggcagcttcgcgcagcccccgctgaatgccccgaagagggagtggtccaggaaggc

SEQ ID NO: 472981 - DNA, 120 bp, Artificial Sequence
  ENSG00000159788_16 (sequence is synthesized)
ctttggaatgcaaagcatttttggtccccatcgaaatgttcgaaagactaaggaagataaaaagggctcaaaatttgggcggggaactggactcactcagccttctcaacgcacgtctgc

SEQ ID NO: 472982 - DNA, 120 bp, Artificial Sequence
  ENSG00000159788_17 (sequence is synthesized)
tcggagatcatttgggagatccaagagattcagtatcactcgctcccttgatgatcttgagtctgcaactgtgtctgatggcgagttgacgggcgccgacctgaaggactgcgtcagcaa

SEQ ID NO: 472983 - DNA, 120 bp, Artificial Sequence
  ENSG00000159788_18 (sequence is synthesized)
caacagcctgagcagcaatgccagcctccccagcgtgcagagctgccggcgcctgcgtgagaggagggtcgccagctgggccgtgtcctttgagcgcctgctgcaggaccccgtcggtgt

SEQ ID NO: 472984 - DNA, 120 bp, Artificial Sequence
  ENSG00000159788_19 (sequence is synthesized)
cagggcccgggagattttcagtaagtttctctgcagcaaagccaccaccccggtcaacatcgacagccaggcccagctagcagacgacgtcctccgcgcacctcacccagacatgttcaa

SEQ ID NO: 472985 - DNA, 120 bp, Artificial Sequence
  ENSG00000159788_20 (sequence is synthesized)
ggagcagcagctgcagatcttcaatctcatgaagtttgatagctacactcgctttctgaagtccccgctgtaccaggaatgcatcctggcggaagtggagggccgtgcactcccggactc

SEQ ID NO: 472986 - DNA, 120 bp, Artificial Sequence
  ENSG00000159788_21 (sequence is synthesized)
gcagcaggtccccagcagcccggcttccaagcacagcctcggttcagaccactccagtgtgtccacgccaaaaaagttaagtggaaaatcaaaatccggccgatccctgaatgaagagct

SEQ ID NO: 472987 - DNA, 120 bp, Artificial Sequence
  ENSG00000159788_22 (sequence is synthesized)
gggggatgaggacagcgagaagaagcggaaaggcgcgtttttctcgtggtcgcggaccaggagcaccgggaggtcccagaaaaagagggagcacggggaccacgcagacgacgccctgca

SEQ ID NO: 472988 - DNA, 120 bp, Artificial Sequence
  ENSG00000159788_23 (sequence is synthesized)
tgccaatggaggcctgtgtcgccgagagtcgcagggctctgtgtcctctgcggggagcctggacctgtcggaggcctgcaggactttggcacccgagaaggacaaggccaccaagcactg

SEQ ID NO: 472989 - DNA, 120 bp, Artificial Sequence
  ENSG00000159788_24 (sequence is synthesized)
ctgcattcatctcccggatgggacatcctgcgtggtggctgtcaaggcgggcttctccatcaaagacatcctgtccggactctgtgagcggcatggcatcaacggggcggccgcggacct

SEQ ID NO: 472990 - DNA, 120 bp, Artificial Sequence
  ENSG00000159788_25 (sequence is synthesized)
cttcctggtgggcggggacaagcctctggtgctgcaccaagacagtagcatcttggagtcaagggacctgcgcctagaaaagcgcaccttgtttcggctggatcttgttccgattaaccg

SEQ ID NO: 472991 - DNA, 120 bp, Artificial Sequence
  ENSG00000159788_26 (sequence is synthesized)
gtcagtgggactcaaggccaagcccaccaagcccgtcacggaggtgctgcggcccgtggtggccagatacggcctggacctcagtggcctgctggtgaggctgagtggagagaaggagcc

SEQ ID NO: 472992 - DNA, 120 bp, Artificial Sequence
  ENSG00000159788_27 (sequence is synthesized)
cctggaccttggcgcccctatatcgagtctggacggacagcgggttgtcttggaggagaaggatccttccagaggaaaggcatccgcagataaacagaaaggtgtgccagtgaaacagaa

SEQ ID NO: 472993 - DNA, 120 bp, Artificial Sequence
  ENSG00000159788_28 (sequence is synthesized)
cacagctgtaaattccagctccagaaaccactcggctacgggagaggaaagaacactaggcaagtctaattctattaaaataaaaggagaaaatggaaaaaatgctagggatccccggct

SEQ ID NO: 472994 - DNA, 120 bp, Artificial Sequence
  ENSG00000159788_29 (sequence is synthesized)
ttcaaagagagaagaatctattgcaaagattgggaaaaaaaaatatcagaaaattaatttggacgaagcagaggagttttttgagcttatttccaaagctcagagcaacagagcagatga

SEQ ID NO: 472995 - DNA, 120 bp, Artificial Sequence
  ENSG00000159788_30 (sequence is synthesized)
ccaacgtgggctgctaaggaaggaagacctggtgttgccagagttcctccgtttacctcctggttccacagaactcaccctccccactccagctgctgtggccaagggctttagcaagag

SEQ ID NO: 472996 - DNA, 120 bp, Artificial Sequence
  ENSG00000159788_31 (sequence is synthesized)
aagcgccacaggcaacggccgggagagcgcctcccagcctggcgagcagtgggagccagtccaggagagcagcgacagcccgtccaccagcccgggctcagcctccagcccccctggacc

SEQ ID NO: 472997 - DNA, 120 bp, Artificial Sequence
  ENSG00000159788_32 (sequence is synthesized)
tcctgggacgaccccccccgggcagaagtctcccagcgggcccttctgcactccccagtcccccgtctccctcgcgcaggagggcaccgcccagatctggaagaggcagtctcaggaagt

SEQ ID NO: 472998 - DNA, 120 bp, Artificial Sequence
  ENSG00000159788_33 (sequence is synthesized)
ggaggccgggggcatccagacggtggaggatgagcacgtggccgagctgaccctgatgggggagggggacatcagcagccccaacagcaccttgctgccgccgccctccaccccccagga

SEQ ID NO: 472999 - DNA, 120 bp, Artificial Sequence
  ENSG00000159788_34 (sequence is synthesized)
agtgccaggaccttccagaccaggaagtgggacccatggcagccgagacctcccagtcaacagaatcatcgatgtggatcttgtaactggctcggcgcccgggcgggatggtggcatagc

SEQ ID NO: 473000 - DNA, 120 bp, Artificial Sequence
  ENSG00000159788_35 (sequence is synthesized)
gggggcacaggctggccctgggaggtcgcaggccagtggtgggcctcctacatcagacctccctggcttgggccccgtcccgggtgagcctgctaagcccaagaccagcgctcaccacgc

SEQ ID NO: 473001 - DNA, 120 bp, Artificial Sequence
  ENSG00000159788_36 (sequence is synthesized)
caccttcgtctgagctgccctggcctggccaactctcctgtggacatgtcggggtggggcagcccaggtggattctgtgggcctcaggggggccaccctggccaccacaccctcaggagc

SEQ ID NO: 473002 - DNA, 120 bp, Artificial Sequence
  ENSG00000159788_37 (sequence is synthesized)
ccagccaggagggcagggggtgacctcgctggaggcactggccccggacattcgccatgctggccatggggctccctggccctggcctcctgctgcccaataaagcatttctgaggaccc

SEQ ID NO: 473003 - DNA, 120 bp, Artificial Sequence
  ENSG00000159788_38 (sequence is synthesized)
atttatattcattttttactcttttccatcaaaacataattttactaagtacgcatgttctgtgtccgtgttttgtcatcactgaagccacttttggagtcacctagtaatagcctttcc

SEQ ID NO: 473004 - DNA, 120 bp, Artificial Sequence
  ENSG00000159788_39 (sequence is synthesized)
actctatctagttctgtagcttttatgtgtgtaaattacttcaaatctgtttatgatcctattgctggaaactttatcccaagacacaaaaatcttttctattagaagttattaacttta

SEQ ID NO: 473005 - DNA, 83 bp, Artificial Sequence
  ENSG00000159788_40 (sequence is synthesized)
gcaaacaattatttctttaaaaaaacataccctctattctattttgtgtcttcacaacacaatcacttactgtattgcttttt

SEQ ID NO: 473006 - DNA, 120 bp, Artificial Sequence
  ENSG00000159788_41 (sequence is synthesized)
ttgtgtcttcacaacacaatcacttactgtattgctttttaaagtgatctttaaagagtcttgcagaagagactacacagcaggcccgagaccatcctgagaggcctgtgtgcaaggctg

SEQ ID NO: 473007 - DNA, 120 bp, Artificial Sequence
  ENSG00000159788_42 (sequence is synthesized)
agaatagattcattggcagctgtaattaaggttgtgaactgcaccacgatgctaaaaaaaacaaattctctgcagctgttttactgactgagaaattacccctgtcggccgaagttttat

SEQ ID NO: 473008 - DNA, 120 bp, Artificial Sequence
  ENSG00000159788_43 (sequence is synthesized)
tcttctgatttggtagaggaaatagtttaaaaatgatctcacagcgtgatttatgtaaacggcgcttctttctttggatgagacaattgagatagagtctgaaaccctggcaagccacag

SEQ ID NO: 473009 - DNA, 120 bp, Artificial Sequence
  ENSG00000159788_44 (sequence is synthesized)
cttcctgcagtgtcctgttgccatgggttacgaagggagcgagagggaacttcatcggaaatgcctttaaacttttctcacacgcacaagctgcggtgttgaatggtgtgtcttagaccc

SEQ ID NO: 473010 - DNA, 120 bp, Artificial Sequence
  ENSG00000159788_45 (sequence is synthesized)
gggtgcctagtgtggctcggtgccttacaatgaatttggggaaagagttgtcaaacgaaacccatgtttctaatgaccagcagtctgcaactgtgtctgatggcgagttgacgggcgccg

SEQ ID NO: 473011 - DNA, 120 bp, Artificial Sequence
  ENSG00000159788_46 (sequence is synthesized)
ttgctggtggtctccgtgaccccctcctcacctgctggttgggggcttccttggccctcttggaaaggaggggctcgtgtggccccaggccagtgtctgtcaggatggtccccccgaggc

SEQ ID NO: 473012 - DNA, 120 bp, Artificial Sequence
  ENSG00000159788_47 (sequence is synthesized)
gctctgggcaggcatcctggtgtcctgagaggctcttgcaggaatgatacgtggcagtgcctgcagcgaggtctgggaacaccctgggtgaggcctgggggtttccgaaaatggaggcat

SEQ ID NO: 473013 - DNA, 120 bp, Artificial Sequence
  ENSG00000159788_48 (sequence is synthesized)
tcctttccaaatctggacagcgatcgtttttagtgtttctgtctcaagactggaaaacaatagcatttgtcttgagtgaggaagtgaagcccgctgtgttcatagcaggagagggctccc

SEQ ID NO: 473014 - DNA, 120 bp, Artificial Sequence
  ENSG00000159788_49 (sequence is synthesized)
agacacaggcccgtcctcggaagagccttgagagtgcagctcggacccaccggcggcccccgtagcaggtggtgtgggtgctcgggagtggaggtgacgtcagcagcgctctctgaccgc

SEQ ID NO: 473015 - DNA, 120 bp, Artificial Sequence
  ENSG00000159788_50 (sequence is synthesized)
gggtgtcacgggcatttctcaaaggaagcaggggattcagtgagtgtgaaggtgaacaggatggcctggcagcagggatgtttccgtgagccacaaataccagaaactgaggcgaggctc

SEQ ID NO: 473016 - DNA, 120 bp, Artificial Sequence
  ENSG00000159788_51 (sequence is synthesized)
ccagcagccggtagggaaaggtgtttccaggggtccgagggccgtggcctgcgtggccatcccctggagagaggagccgctcagggtgcgcgtcatggagtgtgctcaggggtgcgtgga

SEQ ID NO: 473017 - DNA, 120 bp, Artificial Sequence
  ENSG00000159788_52 (sequence is synthesized)
cacctctgctgtggtttgctgctgggggcgatgggagcgcctctccgtcctgtgccctggtccaggatgctgacagcagtgagaggcctgccgtgaggtttggtcttgtcagacctgtag

SEQ ID NO: 473018 - DNA, 120 bp, Artificial Sequence
  ENSG00000159788_53 (sequence is synthesized)
cctggacctcgccgggggaccagggagtgcacgtctgtagatctgtacatatctgggcctttggaggccacgtgtggcatgggaggggctacctggtccctttcacagccaggacacgcc

SEQ ID NO: 473019 - DNA, 120 bp, Artificial Sequence
  ENSG00000159788_54 (sequence is synthesized)
tggatgagaaagcctgaggtgcctggcatgcccaccggtgccactctgcagcctccacccctggcctgagtccccctccatccgtcttggtggacacctgtgtggctctcacctgcgttt

SEQ ID NO: 473020 - DNA, 120 bp, Artificial Sequence
  ENSG00000159788_55 (sequence is synthesized)
tgagtctgttcttccaggagtaataaattctggacatcatcactggactggcttacaacttttctttctcatttgaaactttgtttccactttagaaaataataaaagtattttaatcta

SEQ ID NO: 473021 - DNA, 120 bp, Artificial Sequence
  ENSG00000159788_56 (sequence is synthesized)
gtcatggcacacaggcactgagtggactgttggtggctgcccccgagtgtggtcctgggtggcgtcacggcacgtgggcactgagtgggctgttggtggctgcccccagtgtgtgtgtca

SEQ ID NO: 473022 - DNA, 120 bp, Artificial Sequence
  ENSG00000159788_57 (sequence is synthesized)
cttacagggcatgatgctactgaagtttgtgaagttggtttcattgacgctgttactaagactgtaatgtcagacatgttgggatctgttcttttcacatgaaaaggatgacttcctctt

SEQ ID NO: 473023 - DNA, 120 bp, Artificial Sequence
  ENSG00000159788_58 (sequence is synthesized)
gttgggtgtcacctagtttgggcggagtgggagccgtgactcttgactcattgggccgtctggctttcccgggacacctccacctggagagtgcctctgagaacctcccagagtctgccc

SEQ ID NO: 473024 - DNA, 120 bp, Artificial Sequence
  ENSG00000159788_59 (sequence is synthesized)
cttgtgttcctcagatggacttttcgtttcctggagttttgtcatgaggcttaattaactcatgtctctctctcttttctttcagtctgcaactgtgtctgatggcgagttgacgggcgc

SEQ ID NO: 473025 - DNA, 120 bp, Artificial Sequence
  ENSG00000159788_60 (sequence is synthesized)
acagcggcaccctgcgggccctgagcagccccgtggcaggggtctcccctccctggaccgccaccctctcaagagctcagaggagggtgggttgaatcctgcccctggttctgcccccag

SEQ ID NO: 473026 - DNA, 120 bp, Artificial Sequence
  ENSG00000159788_61 (sequence is synthesized)
ggagcgtccctggccctcccgctctctactggggtctctctgcagcccgcagcactggagcttcctatctgtgttaagaagccaggtgcctgttgccagctcttcaaagagatgttttgc

SEQ ID NO: 473027 - DNA, 120 bp, Artificial Sequence
  ENSG00000159788_62 (sequence is synthesized)
ttttggggaaacagctggaagcagcagtgcggttccctaaagtgctgggcagcgatgaggtttctctctccaggccctcgggcagctcactgagcagccagtgaccccgtggtttctgta

SEQ ID NO: 473028 - DNA, 120 bp, Artificial Sequence
  ENSG00000159788_63 (sequence is synthesized)
gaaggggaagtaggaaaaaggaggaccctgtgtcagtgttaataaatggtgtctttgtctttcttaggattttctaaggaaagaattcagtgaagaaaacattttattctggcaggcctg

SEQ ID NO: 473029 - DNA, 120 bp, Artificial Sequence
  ENSG00000159788_64 (sequence is synthesized)
tgacttgtctgttcttgtccctggtgcctttaagccagccaccctgctctcctccagccccttccactgttccaagccccttcctcggaggcgtctccccaaccctcctgctggtggccg

SEQ ID NO: 473030 - DNA, 120 bp, Artificial Sequence
  ENSG00000159788_65 (sequence is synthesized)
ggggcgcccccacactgctcgcgtcaggagggacgggggcgcccccacactgctcgcgtcaggagggacgggggcgcccccacactgctcacgtcaggagggacgggggcgcccccacac

SEQ ID NO: 473031 - DNA, 120 bp, Artificial Sequence
  ENSG00000159788_66 (sequence is synthesized)
tgctcgcgtcaggagggacgggggcgcccccacactgctcgcgtcaggagggacgggggcgcccccacactgctcgcgtcaggagggacgggggcgcccccacactgctcgcatccagtg

SEQ ID NO: 473032 - DNA, 120 bp, Artificial Sequence
  ENSG00000159788_67 (sequence is synthesized)
gacaagggtgatgaacggggatttcctggggacctcccttctctttattcgagagctcaggagatactgggaaccaaaggctactgagggccgttttgcagacacgtcaggcaggatccg

SEQ ID NO: 473033 - DNA, 120 bp, Artificial Sequence
  ENSG00000159788_68 (sequence is synthesized)
gtgtcctgggagcgcgctgtgccatatcccacatcgggtctcctgtaaatgagccgccgagccgacatgcgtggctgagggcttagctctggacactgtgcctgagagtttcgtgttgag

SEQ ID NO: 473034 - DNA, 120 bp, Artificial Sequence
  ENSG00000159788_69 (sequence is synthesized)
aaggagcccacatgcagagcagtgtgcagtcacgggtgtgtgggcttcgcatccggaaggtgagcctcgtgcccccttcgactgagcacgctcccgagggcaccgtgggtcaggacgtaa

SEQ ID NO: 473035 - DNA, 120 bp, Artificial Sequence
  ENSG00000159788_70 (sequence is synthesized)
ctcacgtggcatacgcggcgccccgcgcccagctgctttcgctctagcaagcctgtttgggaaacatcttgttgccatgatggtcttagtgctctgtgtgcacatgctcctgtgtaaggt

SEQ ID NO: 473036 - DNA, 120 bp, Artificial Sequence
  ENSG00000159788_71 (sequence is synthesized)
tagttgcttttcctgttcaaccctgtggctgtagtttgttgttgcttgggcgagtgtgcacgtgtgagcatatgagtgtgcgtgcaagggtgctgtgtgggcctgcacatgtgaacatgt

SEQ ID NO: 473037 - DNA, 120 bp, Artificial Sequence
  ENSG00000159788_72 (sequence is synthesized)
gtgtgtgctcgtgcacacacatgtgcagccgctcaaggttggggtctgtgttttgttccctgctccatccctgtgtgtagaatgcactggcaggtggtaggtgtgctgtgcatagttgtt

SEQ ID NO: 473038 - DNA, 120 bp, Artificial Sequence
  ENSG00000159788_73 (sequence is synthesized)
gactgaatgggtgttggaggggacagagcttgctgcgtgtcccagggtctcctgtgggcgggcagagcagtcactgggccggggcggagggcaggggtgcaggtgctgtctgtgctggtc

SEQ ID NO: 473039 - DNA, 120 bp, Artificial Sequence
  ENSG00000159788_74 (sequence is synthesized)
ccccgtcctggcgtcgctctggtggttggcggtgaccttgggccatgtgtgcagtgagaggccctgttggcgggtcgaggaagcttctctgaatgaataaggaatgccgctgtgtctggg

SEQ ID NO: 473040 - DNA, 120 bp, Artificial Sequence
  ENSG00000159788_75 (sequence is synthesized)
gacacgacctgtcagccagccagagggcagcagggctgctccagaatcttccagagaaaagggctcaatacatttcagcccatgcctacctcaggcctaccccacacagtggcggctgaa

SEQ ID NO: 473041 - DNA, 120 bp, Artificial Sequence
  ENSG00000159788_76 (sequence is synthesized)
catctgtgtcctctcctgcttttcactatccaagtaataggtgtttttggtagaaaatttggaaaatacaatcaagtaaaaataggaacacacaaatgtgctattgggtgtctcccccag

SEQ ID NO: 473042 - DNA, 120 bp, Artificial Sequence
  ENSG00000159788_77 (sequence is synthesized)
tggcagcttggttctctgccagggctttttcctaggtagatgtcagggtccatgtgccttttacatgtgtgtggttttttaaaatgtagtagcatagttggagtagtgagcatttttcaa

SEQ ID NO: 473043 - DNA, 120 bp, Artificial Sequence
  ENSG00000159788_78 (sequence is synthesized)
gttaagattggtatttgatattgggggctgcccattctggatgctctgtcccttttttcttcgcacatctgagacttcctgtaacaaaagttaggcagagagacggctcccagggcgcca

SEQ ID NO: 473044 - DNA, 120 bp, Artificial Sequence
  ENSG00000159788_79 (sequence is synthesized)
gggggtggggctgcagggcccttggcggctcctggccgagctccagacaccagccgggtggttttggcaggtggcagggcagagggcatggagatgcccatgctgaacgctggcgaagat

SEQ ID NO: 473045 - DNA, 120 bp, Artificial Sequence
  ENSG00000159788_80 (sequence is synthesized)
gaggctgttctgtaccaggtgctgaaaagcacataggggagaactgggaagattttcttctctagagatttttgggaaagggattagttttcaggaatgagtgtcctgcctgaaggcagg

SEQ ID NO: 473046 - DNA, 120 bp, Artificial Sequence
  ENSG00000159788_81 (sequence is synthesized)
ggactggcacttagcctgtggtctccaagtttaaatcaggcagtgaggtgattgcgatagcaccagctggcatggccctggtggaggcaggtgagcagggtgctctgcgctccgtggctg

SEQ ID NO: 473047 - DNA, 120 bp, Artificial Sequence
  ENSG00000159788_82 (sequence is synthesized)
cggctcctgtgtgtgccctgcagtgccaagcatttgtgcgtggctgctccccgcctgcagggggaagcgttgttcccggggcgctgaaggacgcgctggtgagggcttgacgtgggcagc

SEQ ID NO: 473048 - DNA, 120 bp, Artificial Sequence
  ENSG00000159788_83 (sequence is synthesized)
cctgagcttctggccatgctgtgaggtgctcttctccgagcaaaggcagctgagagttgcagagttcacctttgtcggaggccacctgggagatggacactatgttattaggtggggcca

SEQ ID NO: 473049 - DNA, 120 bp, Artificial Sequence
  ENSG00000159788_84 (sequence is synthesized)
ggcctcccgagtacctgggagatgggagtgttcgcttcagacagtccatccactcgtgcccatccccatacctggcagatctgcaaagggctttgaaaaccttgatagagccaggcgtgg

SEQ ID NO: 473050 - DNA, 77 bp, Artificial Sequence
  ENSG00000159788_85 (sequence is synthesized)
caggcggattgcctgagctcaggagttggtgaccagcctgggcaacatggtaaggggccaggcacggtggctcatgc

SEQ ID NO: 473051 - DNA, 61 bp, Artificial Sequence
  ENSG00000159788_86 (sequence is synthesized)
attgtgccattgggtgtgatggtgggtactttcagtcccagttacttgggaggctgaggca

SEQ ID NO: 473052 - DNA, 120 bp, Artificial Sequence
  ENSG00000159788_87 (sequence is synthesized)
agtgacctccacttctcgggagtggccaggaggtaccaggttgcccatcacggcagcaccttctcgttcgctcccctggccctggcagccctcgccttggcagagaggaggacagaagtg

SEQ ID NO: 473053 - DNA, 120 bp, Artificial Sequence
  ENSG00000159788_88 (sequence is synthesized)
ggtccttgccaggccgtctgggaggtccccgcaggaaggggttcctgcctagatagcagcagagtgcctgcccagggatcagatcaaacacgggtttgtccagcctctggagctccattc

SEQ ID NO: 473054 - DNA, 120 bp, Artificial Sequence
  ENSG00000159788_89 (sequence is synthesized)
gccctggtgcttccttaccgcctgcttatcactgtgtgtctcccccacgctccttggcggggtctctctcgtccctgccgatgcccagctccctcttacctgtgaaggactggctttctt

SEQ ID NO: 473055 - DNA, 120 bp, Artificial Sequence
  ENSG00000159788_90 (sequence is synthesized)
ttcttctgaggtgggagtggttgtgccttaaatgctattcttgtttgtaatccttatcattgcaatggtttttctgcaatgcatgtaaattctgtatcaatgcaatctatttcatagagc

SEQ ID NO: 473056 - DNA, 120 bp, Artificial Sequence
  ENSG00000159788_91 (sequence is synthesized)
cttctactctctaactaatgaatgatgtattgtcgtgtattgaaatgaaagtagaactttgactttccttctaatgcagggagaggaaagaacactaggcaagtctaattctattaaaat

SEQ ID NO: 473057 - DNA, 120 bp, Artificial Sequence
  ENSG00000159788_92 (sequence is synthesized)
ccctggtgcctttaagccagccaccctgctctcctccagccccttccactgttccaagccccttcctcggaggcgtctccccaaccctcctgctgtctgcaactgtgtctgatggcgagt

SEQ ID NO: 473058 - DNA, 120 bp, Artificial Sequence
  ENSG00000159788_93 (sequence is synthesized)
cctgctggtgaggctggtgagtgttgcacggggcccgggcgtcgtcaccgcaggcactgtctgttccctttggcagcctctgtgttgttcactgaagagggcacaccaagaagcggtgtc

SEQ ID NO: 473059 - DNA, 120 bp, Artificial Sequence
  ENSG00000159788_94 (sequence is synthesized)
ttcccctgatctggttgtcccccttggaggagaggagacagcctctgccatccccagttctcgttctgtgcagtgggagccatcatggtttatttgtaccttggtcattccaaaaagaat

SEQ ID NO: 473060 - DNA, 120 bp, Artificial Sequence
  ENSG00000159788_95 (sequence is synthesized)
agttatttcctgcgccggagttggttgggtcttcagacaccagctgaatgcttagggattctttcatttcctaaagtgcttacaaaattatgaaaaagcacgactttgctgaaaacctgc

SEQ ID NO: 473061 - DNA, 120 bp, Artificial Sequence
  ENSG00000159788_96 (sequence is synthesized)
ttttcttcttttctccttcaagttttaaaaaatgcaagtccaccttgcagatacgtctggctgttttttgagtccctgtggtcccctcccctcctcctctgtagtggtaacccctgtttt

SEQ ID NO: 473062 - DNA, 120 bp, Artificial Sequence
  ENSG00000159788_97 (sequence is synthesized)
agtagacagggcagagagtagcatctctgctgcatggtgggtagagccttgttggtccctgactggcttccagggttaggaagacacatgtgactcgtctccaccagagacggcaaagtg

SEQ ID NO: 473063 - DNA, 120 bp, Artificial Sequence
  ENSG00000159788_98 (sequence is synthesized)
atgcctggtgggggatgggtggggggggcttcctggcgtctgtctgctcagcctaaagggggcagagggttgggagatgtgaccgaataaacagggttctgattgacgtgagtcactgtg

SEQ ID NO: 473064 - DNA, 120 bp, Artificial Sequence
  ENSG00000159788_99 (sequence is synthesized)
gaggcgaccgttgcgcgcgcgggcggtggcgcgggccgaagcgcccggagcgggagcgagcggcgcggcccgggctcaaaatttgggcggggaactggactcactcagccttctcaacgc

SEQ ID NO: 473065 - DNA, 120 bp, Artificial Sequence
  ENSG00000159788_100 (sequence is synthesized)
tgatcttgagtggtccacatgtgccaggagatgtgggaatggctacccctgaagtcatatggagaaatggggtcctcatcgcacaccatacacaaacatcatctcacaaatggattaaag

SEQ ID NO: 473066 - DNA, 120 bp, Artificial Sequence
  ENSG00000159788_101 (sequence is synthesized)
cgatgatttttttttggacatgacactaaaagaacaagcaacaaaactaaaagtaaacaggtgggattacattgaagtaaaaagtttctgcacaacaaaggaaacaaccaacaaaatgaa

SEQ ID NO: 473067 - DNA, 120 bp, Artificial Sequence
  ENSG00000159788_102 (sequence is synthesized)
aaacgaacctgtgaatgggagaaaatacttgcaaactgtatatccagtaaggggttaatatccaaatacataaggaactcatacaactcagtggcaaaaaccaaataacccaattgaaaa

SEQ ID NO: 473068 - DNA, 120 bp, Artificial Sequence
  ENSG00000159788_103 (sequence is synthesized)
gcgcaggagccggccctccttagagcccttgttgagaaccgtgcgtgaggaaggttactcagacccaggaggcatccgcagataaacagaaaggtgtgccagtgaaacagaacacagctg

SEQ ID NO: 473069 - DNA, 120 bp, Artificial Sequence
  ENSG00000159788_104 (sequence is synthesized)
gtcagccgtgtgctgggatcgcgggagaaactgcaataattggcctcctgggagtgtgagctcaggagcaatgtccctgtgtgggacgcaggcctttgctcggggccgcccgggctctgc

SEQ ID NO: 473070 - DNA, 120 bp, Artificial Sequence
  ENSG00000159788_105 (sequence is synthesized)
gtatggactcagaggggtggtttgcagtgcatggttggaagtatttggttaagtggcatcacagtggctcttatcagctctacccagagttgacgggcgccgacctgaaggactgcgtca

SEQ ID NO: 473071 - DNA, 120 bp, Artificial Sequence
  ENSG00000159792_0 (sequence is synthesized)
cgacgctaacgcccgagaatggcggcggcggcggcggcggcggcggccgctgccattgcccggagatggccggcagagccgccgagacgccgaagagcccgccgcccgcgcgaggtgtag

SEQ ID NO: 473072 - DNA, 120 bp, Artificial Sequence
  ENSG00000159792_1 (sequence is synthesized)
gtagacggggcactgccttcagagcaggtcctgccagcctcgctggagaggatgccctcgtgtccgtgatgggctgtgggacaagcaaggtccttcccgagccacccaaggatgtccagc

SEQ ID NO: 473073 - DNA, 120 bp, Artificial Sequence
  ENSG00000159792_2 (sequence is synthesized)
tggatctggtcaagaaggtggagcccttcagtggcactaagagtgacgtgtacaagcacttcatcacagaggtggacagtgttggccctgtcaaagccgggttcccagcagcaagtcagt

SEQ ID NO: 473074 - DNA, 120 bp, Artificial Sequence
  ENSG00000159792_3 (sequence is synthesized)
atgcacacccctgccccggtcccccgactgctggccacacggagcctccctcagaaccaccacgcagggccagggtagctaagtacagggccaagtttgacccacgtgttacagctaagt

SEQ ID NO: 473075 - DNA, 120 bp, Artificial Sequence
  ENSG00000159792_4 (sequence is synthesized)
atgacatcaaggccctaattggccgaggcagcttcagccgagtggtacgtgtagagcaccgggcaacccggcagccgtatgccatcaagatgattgagaccaagtaccgggaggggcggg

SEQ ID NO: 473076 - DNA, 120 bp, Artificial Sequence
  ENSG00000159792_5 (sequence is synthesized)
aggtgtgtgagtcggagctgcgtgtgctgcgtcgggtgcgtcatgccaacatcatccagctggtggaggtgttcgagacacaggagcgggtgtacatggtgatggagctggccactggtg

SEQ ID NO: 473077 - DNA, 120 bp, Artificial Sequence
  ENSG00000159792_6 (sequence is synthesized)
gagagctctttgaccgcatcattgccaagggctccttcaccgagcgtgacgccacgcgggtgctgcagatggtgctggatggcgtccggtatctgcatgcactgggcatcacacaccgag

SEQ ID NO: 473078 - DNA, 120 bp, Artificial Sequence
  ENSG00000159792_7 (sequence is synthesized)
acctcaaacctgagaatctgctctactaccatccgggcactgactccaagatcatcatcaccgacttcggcctggccagtgctcgcaagaagggtgatgactgcttgatgaagaccacct

SEQ ID NO: 473079 - DNA, 120 bp, Artificial Sequence
  ENSG00000159792_8 (sequence is synthesized)
gtggcacgcctgagtacattgccccagaagtcctggtccgcaagccatacaccaactcagtggacatgtgggcgctgggcgtcattgcctacatcctactcagtggcaccatgccgtttg

SEQ ID NO: 473080 - DNA, 120 bp, Artificial Sequence
  ENSG00000159792_9 (sequence is synthesized)
aggatgacaaccgtacccggctgtaccggcagatcctcaggggcaagtacagttactctggggagccctggcctagtgtgtccaacctggccaaggacttcattgaccgcctgctgacag

SEQ ID NO: 473081 - DNA, 120 bp, Artificial Sequence
  ENSG00000159792_10 (sequence is synthesized)
tggaccctggagcccgtatgactgcactgcaggccctgaggcacccgtgggtggtgagcatggctgcctcttcatccatgaagaacctgcaccgctccatatcccagaacctccttaaac

SEQ ID NO: 473082 - DNA, 120 bp, Artificial Sequence
  ENSG00000159792_11 (sequence is synthesized)
gtgcctcctcgcgctgccagagcaccaaatctgcccagtccacgcgttccagccgctccacacgctccaataagtcacgccgtgtgcgggaacgggagctgcgggagctcaacctgcgct

SEQ ID NO: 473083 - DNA, 120 bp, Artificial Sequence
  ENSG00000159792_12 (sequence is synthesized)
accagcagcaatacaatggctgagccgcctggctgtgcacacatgcagcacgacccagcctggccacacactgtggtgccatctgggtccgatgccctctctggagataggcctatgtgg

SEQ ID NO: 473084 - DNA, 120 bp, Artificial Sequence
  ENSG00000159792_13 (sequence is synthesized)
cccacagtaggtgaagaatgtctggctccagccctttctctgtgccttcagcagcccctgtcctcaccatgggcctgggccaggtgtgacagagtagaggtagcacagggggctgtgact

SEQ ID NO: 473085 - DNA, 120 bp, Artificial Sequence
  ENSG00000159792_14 (sequence is synthesized)
ctggcctggcactgatacccctcttggtgggcagctgctctggtggagttgggaagggataggacctggccttcactgtctcccttgccctttgacttttccccaatcaaagggaactgc

SEQ ID NO: 473086 - DNA, 120 bp, Artificial Sequence
  ENSG00000159792_15 (sequence is synthesized)
agtgctgggtggagtgtcctgtggcctcaggaccctttgggacagttacttctgggaccccctttcctccacagagcccttctccctggtttcacacattcccatgcatcctgatcctta

SEQ ID NO: 473087 - DNA, 120 bp, Artificial Sequence
  ENSG00000159792_16 (sequence is synthesized)
agattatgctccagtgggagaccctggtaggcacaaagcttgtgccttgactggacccgtagcccctggctaggtcgaaacagccctccacctcccagccaagatctgtcttccttcatg

SEQ ID NO: 473088 - DNA, 120 bp, Artificial Sequence
  ENSG00000159792_17 (sequence is synthesized)
gtgcctccagggagccttcctggtcccaggacctctggtggagggccatggcgtggaccttcacccttctggactgtgtggccatgctggtcatcggcttgcccaggctccagcctctcc

SEQ ID NO: 473089 - DNA, 120 bp, Artificial Sequence
  ENSG00000159792_18 (sequence is synthesized)
agattctgaggggtctcagcccaccgcccttggtgccttctttgtagagcccaccgctacctccctctccccgttggatgtccattccattccccaggtgcctccttcccaactgggggt

SEQ ID NO: 473090 - DNA, 120 bp, Artificial Sequence
  ENSG00000159792_19 (sequence is synthesized)
ggttaaagggagccccactgctgctacctggggaatggggcacctgggggccaaggcagagggaagggggtcctcccgattagggtcgagtgtcagcctgggttctatcctttggtgcag

SEQ ID NO: 473091 - DNA, 120 bp, Artificial Sequence
  ENSG00000159792_20 (sequence is synthesized)
ccccattgccttttcccttcaggctctgttgctccctcctctgcagctgcacgaaggcgccatctggtgtctgcatgggtgttggcagcctgggagtgatcactgcacgcccatcgtgca

SEQ ID NO: 473092 - DNA, 120 bp, Artificial Sequence
  ENSG00000159792_21 (sequence is synthesized)
cacctgcccatcgtgcacacccacccatggtgcacacctgtagtcctccatgaggacatgggaaggtaggagttgccgccctgggggagggtcccgggctgctcacctctccccttctgc

SEQ ID NO: 473093 - DNA, 120 bp, Artificial Sequence
  ENSG00000159792_22 (sequence is synthesized)
tgagcttctgcgcacccctccctggaacttagccatactgtgtgacctgcctctgaaaccagggtgccaggggcactgccttctcacagctggccttgccccgtccaccctgtgctgctt

SEQ ID NO: 473094 - DNA, 120 bp, Artificial Sequence
  ENSG00000159792_23 (sequence is synthesized)
cccttcacagcattaaccttccagtctgggtcccactgagcctcaagctggaaggagcccctgcgggaggtgggtggggttgggtggctgctttcccagaggcctgagccagaaccatcc

SEQ ID NO: 473095 - DNA, 120 bp, Artificial Sequence
  ENSG00000159792_24 (sequence is synthesized)
ccatttcttttgtggtatctccccctaccacaaaccaggctggaacccaagccccttcctccacagctgccttcagtgggtagaatggggccagggcccagctttggccttagcttgacg

SEQ ID NO: 473096 - DNA, 120 bp, Artificial Sequence
  ENSG00000159792_25 (sequence is synthesized)
gcagggcccctgccattgcaggagggtttggttcccactcagcttctgccggtcggcagcctgggccaggcccttttcctgcatgtgccacctccagtgggaaacaaaactaaagagacc

SEQ ID NO: 473097 - DNA, 120 bp, Artificial Sequence
  ENSG00000159792_26 (sequence is synthesized)
actctgtgccaagtcgactatgccttagacacatcctcctaccgtccccaatgccccctgggcaggaggcagtggagaaccaagccccatggcctcagaatttccccccagttccccaag

SEQ ID NO: 473098 - DNA, 120 bp, Artificial Sequence
  ENSG00000159792_27 (sequence is synthesized)
tgtctctggggacctgaagccctggggcttacgttctctcttgcccagggtgggcctggtcctgagggcaggacagggggtttggagatgtgggcctttgatagacccacttgggccttc

SEQ ID NO: 473099 - DNA, 120 bp, Artificial Sequence
  ENSG00000159792_28 (sequence is synthesized)
atgccatggcctgtggatggagaatgtgcagttatttattatgcgtattcagtttgtaaacgtatcctctgtattcagtaaacaggctgcctctccagggagggctgccattcattccaa

SEQ ID NO: 473100 - DNA, 120 bp, Artificial Sequence
  ENSG00000159792_29 (sequence is synthesized)
ctggatgttggggaggcacctgcgggggcaggtatatcctgcagctctcagtcagaggtatgtcctcagggccatgctcgtgagggccaggcaggtcatataaaagggacaaagtgagac

SEQ ID NO: 473101 - DNA, 120 bp, Artificial Sequence
  ENSG00000159792_30 (sequence is synthesized)
tatcagaatgtagtttgggttccctcaaggtgagccctgagacaaggacttgggagcagatagtttatttgggatgtgatttgagtaactaaaagtgaaggagtgggaaaagtgaggcag

SEQ ID NO: 473102 - DNA, 120 bp, Artificial Sequence
  ENSG00000159792_31 (sequence is synthesized)
gaagggagaaagtcagtagagtatattgagaaatggactgccactgtgggccactgggaaccttggtaataaccatgtggaatgtgcctcatagttgtaccaccaaagagcaggaacgtg

SEQ ID NO: 473103 - DNA, 120 bp, Artificial Sequence
  ENSG00000159792_32 (sequence is synthesized)
cgcgagttgccatgtggaacttcctgtgcatttgggtgagaacagctgcaaatcctgaagagccttgtggaggaatcttttcctcttatgtgaagaaaaataaacaatatttttttttgg

SEQ ID NO: 473104 - DNA, 120 bp, Artificial Sequence
  ENSG00000159840_0 (sequence is synthesized)
gccgaggcggccacccgagacgcggcgcgcacgctccggcctgcgcagcccggcccggccatggcggccccccgcccgtctcccgcgatctccgtttcggtctcggctccggctttttac

SEQ ID NO: 473105 - DNA, 120 bp, Artificial Sequence
  ENSG00000159840_1 (sequence is synthesized)
tctcggctccggctttttacgccccgcagaagaagttcggccctgtggtggccccaaagcccaaagtgaatcccttccggcccggggacagcgagcctcccccggcacccggggcccagc

SEQ ID NO: 473106 - DNA, 120 bp, Artificial Sequence
  ENSG00000159840_2 (sequence is synthesized)
gcgcacagatgggccgggtgggcgagattcccccgccgcccccggaagactttcccctgcctccacctccccttgctggggatggcgacgatgcagagggtgctctgggaggtgccttcc

SEQ ID NO: 473107 - DNA, 120 bp, Artificial Sequence
  ENSG00000159840_3 (sequence is synthesized)
cgccgccccctcccccgatcgaggaatcatttccccctgcgcctctggaggaggagatcttcccttccccgccgcctcctccggaggaggagggagggcctgaggcccccataccgcccc

SEQ ID NO: 473108 - DNA, 120 bp, Artificial Sequence
  ENSG00000159840_4 (sequence is synthesized)
caccacagcccagggagaaggtgagcagtattgatttggagatcgactctctgtcctcactgctggatgacatgaccaagaatgatcctttcaaagcccgggtgtcatctggatatgtgc

SEQ ID NO: 473109 - DNA, 120 bp, Artificial Sequence
  ENSG00000159840_5 (sequence is synthesized)
ccccaccagtggccactccattcagttccaagtccagtaccaagcctgcagccgggggcacagcacccctgcctccttggaagtccccttccagctcccagcctctgccccaggttccgg

SEQ ID NO: 473110 - DNA, 120 bp, Artificial Sequence
  ENSG00000159840_6 (sequence is synthesized)
ctccggctcagagccagacacagttccatgttcagccccagccccagcccaagcctcaggtccaactccatgtccagtcccagacccagcctgtgtctttggctaacacccagccccgag

SEQ ID NO: 473111 - DNA, 120 bp, Artificial Sequence
  ENSG00000159840_7 (sequence is synthesized)
ggcccccagcctcatctccggctccagcccctaagttttctccagtgactcctaagtttactcctgtggcttccaagttcagtcctggagccccaggtggatctgggtcacaaccaaatc

SEQ ID NO: 473112 - DNA, 120 bp, Artificial Sequence
  ENSG00000159840_8 (sequence is synthesized)
aaaaattggggcaccccgaagctctttctgctggcacaggctcccctcaacctcccagcttcacctatgcccagcagagggagaagccccgagtgcaggagaagcagcaccccgtgcccc

SEQ ID NO: 473113 - DNA, 120 bp, Artificial Sequence
  ENSG00000159840_9 (sequence is synthesized)
gaggagctggagcagctgacccagcagctaatgcaggacatggagcatcctcagaggcagaatgtggctgtcaacgaactctgcggccgatgccatcaacccctggcccgggcgcagcca

SEQ ID NO: 473114 - DNA, 120 bp, Artificial Sequence
  ENSG00000159840_10 (sequence is synthesized)
gccgtccgcgctctagggcagctgttccacatcgcctgcttcacctgccaccagtgtgcgcagcagctccagggccagcagttctacagtctggagggggcgccgtactgcgagggctgt

SEQ ID NO: 473115 - DNA, 120 bp, Artificial Sequence
  ENSG00000159840_11 (sequence is synthesized)
tacactgacaccctggagaagtgtaacacctgcggggagcccatcactgaccgcatgctgagggccacgggcaaggcctatcacccgcactgcttcacctgtgtggtctgcgcccgcccc

SEQ ID NO: 473116 - DNA, 120 bp, Artificial Sequence
  ENSG00000159840_12 (sequence is synthesized)
ctggagggcacctccttcatcgtggaccaggccaaccggccccactgtgtccccgactaccacaagcagtacgccccgaggtgctccgtctgctctgagcccatcatgcctgagcctggc

SEQ ID NO: 473117 - DNA, 120 bp, Artificial Sequence
  ENSG00000159840_13 (sequence is synthesized)
cgagatgagactgtgcgagtggtcgccctggacaagaacttccacatgaagtgttacaagtgtgaggactgcgggaagcccctgtcgattgaggcagatgacaatggctgcttccccctg

SEQ ID NO: 473118 - DNA, 120 bp, Artificial Sequence
  ENSG00000159840_14 (sequence is synthesized)
gacggtcacgtgctctgtcggaagtgccacactgctagagcccagacctgagtgaggacaggccctcttcagaccgcagtccatgccccattgtggaccacccacactgagaccacctgc

SEQ ID NO: 473119 - DNA, 120 bp, Artificial Sequence
  ENSG00000159840_15 (sequence is synthesized)
ccccacctcagttattgttttgatgtctagcccctcccatttccaacccctccctagcatcccaggtgccctgacccaggacccaacatggtctagggatgcaggatccccgccctgggg

SEQ ID NO: 473120 - DNA, 120 bp, Artificial Sequence
  ENSG00000159840_16 (sequence is synthesized)
tctggtcctcgcccatcctgcagggattgcccaccgtcttccagacaccccacctgaggggggcaccaggtttagtgctgctgctttcactgctgcacccgcgccctcggccggcccccc

SEQ ID NO: 473121 - DNA, 120 bp, Artificial Sequence
  ENSG00000159840_17 (sequence is synthesized)
gagcagcctttgtactctgcttgcggagggctgggagaccctccaggacattcccaccctcccccatgctgccaagttgtagctatagctacaaataaaaaaaaaccttgttttccagaa

SEQ ID NO: 473122 - DNA, 120 bp, Artificial Sequence
  ENSG00000159840_18 (sequence is synthesized)
agatgttcttacctcatcgtggagctcgtggctgggagccagggctcctgggaccgttccaagtcccccgcctgggagtgggagtcgggaatgtggggcacgaatcttcccctccgggtc

SEQ ID NO: 473123 - DNA, 120 bp, Artificial Sequence
  ENSG00000159840_19 (sequence is synthesized)
ccggtgcttcagtgacccgagctgctgtgtgcgtggcctccgtccgcccagtcattctggcctgtctgtgactgctcagggggtttgggcagagtgggtggaaatgtcttgctgtacgag

SEQ ID NO: 473124 - DNA, 120 bp, Artificial Sequence
  ENSG00000159840_20 (sequence is synthesized)
atccaggcttaggtcccttcccctgttatttgtgtggtgctggggatggcgggggtagggggacgagggagaagctttaagggtcaagcctgagcatctgggacacgagctgggagctaa

SEQ ID NO: 473125 - DNA, 80 bp, Artificial Sequence
  ENSG00000159840_21 (sequence is synthesized)
cccacggggagggggcgcggggcgccgggagggggcgagtgggggtcaccaaggggagctgggaccgcctggggctcctg

SEQ ID NO: 473126 - DNA, 120 bp, Artificial Sequence
  ENSG00000159840_22 (sequence is synthesized)
ggctcctgagcccggctccgcgctgcgtaacccggcgacccaccccagcagcccggcccggccatggcggccccccgcccgtctcccgcgatctccgtttcggtctcggctccggctttt

SEQ ID NO: 473127 - DNA, 120 bp, Artificial Sequence
  ENSG00000159840_23 (sequence is synthesized)
ccttccgtgtgtccctccccgcccggctggaggctgctccggaccgggacgcagagtctgcggacccggcgccgaggcggccacccgagacgcggcgcgcacgctccggcctgcgacttt

SEQ ID NO: 473128 - DNA, 120 bp, Artificial Sequence
  ENSG00000159842_0 (sequence is synthesized)
gccccgcgctcctcccggggacctggttcccggcctcctcgcccctccgcgctcgcaacttcggcctcccccggctcccgcccgctctccctcctttgttgcgcgatgagggtcgggttt

SEQ ID NO: 473129 - DNA, 120 bp, Artificial Sequence
  ENSG00000159842_1 (sequence is synthesized)
cggatctgaccgagccgccgccgcgggatggagccgctcagccaccggggcctgccgcgcctgtcctggatcgacaccctctacagcaacttcagctacgggacggacgagtacgacgga

SEQ ID NO: 473130 - DNA, 120 bp, Artificial Sequence
  ENSG00000159842_2 (sequence is synthesized)
gaggggaatgaggagcagaaggggcccccggagggctcagagaccatgccgtacatcgatgagtcgcccaccatgtccccgcagctcagcgcccgcagccagggcgggggggatggcgtc

SEQ ID NO: 473131 - DNA, 120 bp, Artificial Sequence
  ENSG00000159842_3 (sequence is synthesized)
tccccgactccacctgagggactggctcctggggtggaagcagggaaaggcctggagatgaggaagctggttctctcggggttcttggccagcgaagagatctacattaaccagctggaa

SEQ ID NO: 473132 - DNA, 120 bp, Artificial Sequence
  ENSG00000159842_4 (sequence is synthesized)
gccctgttgctgcccatgaaacccctgaaggccaccgccaccacctcccagcccgtgctcaccatccagcagatcgagaccatcttctacaagatccaggacatctatgagatccacaag

SEQ ID NO: 473133 - DNA, 120 bp, Artificial Sequence
  ENSG00000159842_5 (sequence is synthesized)
gagttctatgacaacctgtgccccaaggtgcaacagtgggacagccaggtcaccatgggccacctcttccagaagctggccagccagctcggtgtgtacaaagcgtttgtcgataactat

SEQ ID NO: 473134 - DNA, 120 bp, Artificial Sequence
  ENSG00000159842_6 (sequence is synthesized)
aaagtcgctctggagacagctgagaagtgcagccagtccaacaaccagttccagaagatctcagaggaactcaaagtgaaaggtcccaaggactccaaggacagccacacgtctgtcacc

SEQ ID NO: 473135 - DNA, 120 bp, Artificial Sequence
  ENSG00000159842_7 (sequence is synthesized)
atggaagctctgctctacaagcccattgaccgggtcactcggagcaccctagtcctacacgacctgctgaagcacacacctgtggaccaccccgactacccgctgctgcaggatgccctc

SEQ ID NO: 473136 - DNA, 120 bp, Artificial Sequence
  ENSG00000159842_8 (sequence is synthesized)
cgcatctcccagaacttcctgtccagcatcaacgaggacatcgacccccgccggactgcagtgacaacgcccaagggggagacgcgacagctggtgaaggacggcttcctggtggaagtg

SEQ ID NO: 473137 - DNA, 120 bp, Artificial Sequence
  ENSG00000159842_9 (sequence is synthesized)
tcagagagctcccggaagctgcggcacgtcttcctctttacagatgtcctactgtgtgccaagctgaagaagacctctgcagggaagcaccagcagtatgactgtaagtggtacatcccc

SEQ ID NO: 473138 - DNA, 120 bp, Artificial Sequence
  ENSG00000159842_10 (sequence is synthesized)
ctggccgacctggtgtttccatcccccgaggagtctgaggccagcccccaggtgcaccccttcccagaccatgagctggaggacatgaagatgaagatctctgccctcaagagtgaaatc

SEQ ID NO: 473139 - DNA, 120 bp, Artificial Sequence
  ENSG00000159842_11 (sequence is synthesized)
cagaaggagaaagccaacaaaggccagagccgggccatcgagcgcctgaagaagaagatgtttgagaatgagttcctgctgctgctcaactcccccacaatcccgttcaggatccacaat

SEQ ID NO: 473140 - DNA, 120 bp, Artificial Sequence
  ENSG00000159842_12 (sequence is synthesized)
cggaatggaaagagttacctgttcctactgtcctcggactacgagaggtcagagtggagagaagcaattcagaaactacagaagaaggatctccaggcctttgtcctgagctcagtggag

SEQ ID NO: 473141 - DNA, 120 bp, Artificial Sequence
  ENSG00000159842_13 (sequence is synthesized)
ctccaggtgctcacaggatcctgtttcaagcttaggactgtacacaacattcctgtcaccagcaataaagacgacgatgagtctccaggactctatggcttccttcatgtcatcgtccac

SEQ ID NO: 473142 - DNA, 120 bp, Artificial Sequence
  ENSG00000159842_14 (sequence is synthesized)
tctgccaagggatttaagcaatcagccaacctgtactgtaccctggaggtggattccttcggctattttgtcagcaaagccaaaaccagggtgttccgggacacagcggagcccaagtgg

SEQ ID NO: 473143 - DNA, 120 bp, Artificial Sequence
  ENSG00000159842_15 (sequence is synthesized)
gatgaggagtttgagatcgagctggagggctcccagtccctgaggatcctgtgctatgagaagtgctatgacaagaccaaggtcaacaaggacaacaatgagatcgtggacaagatcatg

SEQ ID NO: 473144 - DNA, 120 bp, Artificial Sequence
  ENSG00000159842_16 (sequence is synthesized)
ggcaaaggacagatccagctggacccacaaaccgtggagaccaagaactggcacacggacgtgattgagatgaacgggatcaaagtggaattttccatgaaattcaccagccgagatatg

SEQ ID NO: 473145 - DNA, 120 bp, Artificial Sequence
  ENSG00000159842_17 (sequence is synthesized)
agcctgaagaggaccccgtccaaaaagcagaccggcgtcttcggtgtgaagatcagcgtggtgacgaagcgggagcgctccaaggtgccctacatcgtccggcagtgtgtggaggaggtg

SEQ ID NO: 473146 - DNA, 120 bp, Artificial Sequence
  ENSG00000159842_18 (sequence is synthesized)
gagaagaggggtatcgaggaggttggcatctacaggatatcgggcgtggccacggacatccaggcgctcaaggccgtcttcgatgccaataacaaggacatcctgctgatgctgagtgac

SEQ ID NO: 473147 - DNA, 120 bp, Artificial Sequence
  ENSG00000159842_19 (sequence is synthesized)
atggacatcaacgccatcgccgggacgctcaagctgtacttccgggaactgcccgagccgctcctcacggaccgactctacccagccttcatggagggcatcgccctgtcagaccctgct

SEQ ID NO: 473148 - DNA, 120 bp, Artificial Sequence
  ENSG00000159842_20 (sequence is synthesized)
gccaaggaaaactgcatgatgcacctgctccgctccctgcccgaccccaacctcatcaccttcctcttcctgctggaacacttgaaaagggttgccgagaaggagcccatcaacaaaatg

SEQ ID NO: 473149 - DNA, 120 bp, Artificial Sequence
  ENSG00000159842_21 (sequence is synthesized)
tcacttcacaacctggctaccgtgtttggacccacgttactgagaccctcagaagtggagagcaaagcacacctcacctcggctgcggacatctggtcccatgacgtcatggcgcaggtc

SEQ ID NO: 473150 - DNA, 120 bp, Artificial Sequence
  ENSG00000159842_22 (sequence is synthesized)
ctctactacctgcagcacccccccatttccttcgcagaactcaagcggaacacactgtacttctccaccgacgtgtagcccgaggcagggtggctgcgggcgggtggtggaaccagcccc

SEQ ID NO: 473151 - DNA, 120 bp, Artificial Sequence
  ENSG00000159842_23 (sequence is synthesized)
tccagcctggggtccaactcagacttgaaagactgcaatagaaaactcccaaacccagcactccagactcgagggaagccagcttccaagaactggaatgcgtacgtcttttgtgccacc

SEQ ID NO: 473152 - DNA, 120 bp, Artificial Sequence
  ENSG00000159842_24 (sequence is synthesized)
ttgtacaaagccggctgcccagccccagcctcaccaccgcatcccacctcctgccctccatacctctagttgtgtctgatgctccgtgctgttcgggaattgttttatgtacacttgtca

SEQ ID NO: 473153 - DNA, 120 bp, Artificial Sequence
  ENSG00000159842_25 (sequence is synthesized)
ggcagaaaaggtagtgaccggcccggcgtgggcacacagacagcccgctttgttctttcatttcctccagcactttctttccgcctgagtccagcccaaggccttttattttgcgctgtg

SEQ ID NO: 473154 - DNA, 120 bp, Artificial Sequence
  ENSG00000159842_26 (sequence is synthesized)
taactgctgccagcttctctcttggccctgctcccagatggcggtctcctggcagcctcccctcagtcttcctccacccgctcttccttcccagcctgcctgcatgcatgtgcacccttg

SEQ ID NO: 473155 - DNA, 120 bp, Artificial Sequence
  ENSG00000159842_27 (sequence is synthesized)
gtcttcgctccatcgccttgaaagctctgaagaggccctgggttgccgcggcagcagtggtctgtttgatgctgccgtttgccgctgccggcccctcctcagactccgcctttgggagca

SEQ ID NO: 473156 - DNA, 120 bp, Artificial Sequence
  ENSG00000159842_28 (sequence is synthesized)
cacctgctttgccttgctgcctgtgcaaatgttggacaagcagacacactcacactcgtccccagcttagcacagagctggagcgcccatttctggaattttccgtttgggaatctccac

SEQ ID NO: 473157 - DNA, 120 bp, Artificial Sequence
  ENSG00000159842_29 (sequence is synthesized)
ttctggggtttacctgttcggcctcctgtctatcagtgaggcatctctgactgtttcttctactgcttttcagttcccttccctgctgttctatttcctttgagtgtaaagactcacagg

SEQ ID NO: 473158 - DNA, 120 bp, Artificial Sequence
  ENSG00000159842_30 (sequence is synthesized)
tgacctgctatcgagatagccagagggtcaggagagaatgggggaggaggcggtcaggctgctgaggaaacaccacaggctgaacgggggaggaatgcacatgccacgctgggtgtcccg

SEQ ID NO: 473159 - DNA, 120 bp, Artificial Sequence
  ENSG00000159842_31 (sequence is synthesized)
ggtcgcggggaggcagctcagctcttaggagcaagttgtgggggcttttcaagaggggccaggcttcctggagggtgactgatgtggccgaagcaggtgtccaggcaggtaggctgcagc

SEQ ID NO: 473160 - DNA, 120 bp, Artificial Sequence
  ENSG00000159842_32 (sequence is synthesized)
caggagctccctggcaccgcaggacctcgtggtactcttgccttagattttacacacactccacagccaagcactgccacggtcctccaggacctgggaagcaaaggcacaggcccacgg

SEQ ID NO: 473161 - DNA, 120 bp, Artificial Sequence
  ENSG00000159842_33 (sequence is synthesized)
tggccagccattgtggtgccgccccagcttctggatacagccttttgggtaaacactgggaactccagaagttgtggggagagtggggaatcagacagccgcctctaggggctgggttct

SEQ ID NO: 473162 - DNA, 120 bp, Artificial Sequence
  ENSG00000159842_34 (sequence is synthesized)
gctggggcctccttgttggtgctgtaggcacccgccagggagcagggacccgacttgcagacgcattgcccggtactaggaaggagtgaggtgtgttcccaccgtacacttcccacacga

SEQ ID NO: 473163 - DNA, 120 bp, Artificial Sequence
  ENSG00000159842_35 (sequence is synthesized)
gctgcggctgccagcctcgggccatcagcctaggagagcagatgcagctccaggggctcgacttatagccagttacagctccccggctcttctgtgtggcagagcgtcgtttccgggccc

SEQ ID NO: 473164 - DNA, 120 bp, Artificial Sequence
  ENSG00000159842_36 (sequence is synthesized)
tcagggctggggagctcagttcccattgcttgtgctcagggctgagtcttaaagaagggtttgccggccctaacgctgcagcgcgtgcgcggtgagaggccctttttgagcctgtttact

SEQ ID NO: 473165 - DNA, 120 bp, Artificial Sequence
  ENSG00000159842_37 (sequence is synthesized)
cctgtggccttgggcagaacagtaaatactctgtgcacggaggaaagacatgcccaagaggaaggaagtactgaccatcggctgcctgtgagcagcttagcaaggagcccttgctccctg

SEQ ID NO: 473166 - DNA, 120 bp, Artificial Sequence
  ENSG00000159842_38 (sequence is synthesized)
ggaaaggcggtgaacttgagtctaaagatgcagtgcctggcccttcctaaggtccctgcctggcatccgagtgtcggtgtgtggcacagaaggctcctgcttgcttccaaagtgatggac

SEQ ID NO: 473167 - DNA, 120 bp, Artificial Sequence
  ENSG00000159842_39 (sequence is synthesized)
aggaaggggcagagtgagtcacggcccagactgggcaccttcgcgtctcagcctcagggagccccacagccccaagctcgctgaggcaacgtgagaacaggctatgggaaggctgcaaag

SEQ ID NO: 473168 - DNA, 120 bp, Artificial Sequence
  ENSG00000159842_40 (sequence is synthesized)
gctgagaaatgcaaaggctcatatttataaatcccacccccagagtggggagggtcaggtgccagacctggactaaactgcaccaaggaaacacccagcagggtctcctgtgagccgggg

SEQ ID NO: 473169 - DNA, 120 bp, Artificial Sequence
  ENSG00000159842_41 (sequence is synthesized)
accatgcagcccgaaacctccagtcactgcgcccggcaggagtcaggagccagggactgtgcagcctggaacctccagtcactgtgcccagcagggtgggctgtgcccagcaggagtcag

SEQ ID NO: 473170 - DNA, 120 bp, Artificial Sequence
  ENSG00000159842_42 (sequence is synthesized)
gctaagaaacgccaggtctgcctgttcttgctgggcaatggctgatggctgccagtttctgctgatacacaggtaggatgggacccttcatgaatatctgactttaataagttggtaagg

SEQ ID NO: 473171 - DNA, 120 bp, Artificial Sequence
  ENSG00000159842_43 (sequence is synthesized)
atatatttttttgtctatgttctgtttcaacttatgtagattattataaattgatgtaaaccacgtgagaggaaaatgttaataaaaaatgcaaagccccatcatttgcacaaaactcag

SEQ ID NO: 473172 - DNA, 120 bp, Artificial Sequence
  ENSG00000159842_44 (sequence is synthesized)
ttcctgtctgccctccgcgggctccggctgccatggaggaggaagaggaggcgataggcttgctggacaaggttctggaggacgaagatgtgtttctcctggaggagtgcgagctgggaa

SEQ ID NO: 473173 - DNA, 120 bp, Artificial Sequence
  ENSG00000159842_45 (sequence is synthesized)
ggactgcagagggaacttgccttgaagaggcctggtccttaaagagacacagcacacacggcccgaccggcagccccagagcagaggctccactgatggcaggcgcccctggctaggctc

SEQ ID NO: 473174 - DNA, 120 bp, Artificial Sequence
  ENSG00000159842_46 (sequence is synthesized)
tgaggttcctttgccctcgccttgctgaatggtgagccgctgcctctcggagcccgtctccttgacagcctgccctcggctcctgcagccactcctgggcctgatggggacagggccagc

SEQ ID NO: 473175 - DNA, 120 bp, Artificial Sequence
  ENSG00000159842_47 (sequence is synthesized)
ctggtgggtggtgtcagaggtcctggcagagcagcgtaggcctgggatgcgtctgcagaattctggctgaacgagcgaggagcacggccagcttcggggccgtcgtgaccacaggagggc

SEQ ID NO: 473176 - DNA, 120 bp, Artificial Sequence
  ENSG00000159842_48 (sequence is synthesized)
agagggccagcccgtgagctctgaccccagctggacgtgctcttgtttcccttggggctaaggagattggagccactgaactgaatctctgggttttggagacttagagaatccattgga

SEQ ID NO: 473177 - DNA, 120 bp, Artificial Sequence
  ENSG00000159842_49 (sequence is synthesized)
ctaatcagttaccccccgctcggcggtggcagatggccggtgtggatctagagtggccgcagaggcgctcacaggacacttcagaagcacgcgagccagcacctaaacgctggaaggtct

SEQ ID NO: 473178 - DNA, 120 bp, Artificial Sequence
  ENSG00000159842_50 (sequence is synthesized)
cttgtgagatcccagatcgtctgctcctcgtaacaagcgggaagctctgtcagccgggggcctacgtttgggctcggcaccaacggggactggcggcccctcgggaaagggcacgtgtcc

SEQ ID NO: 473179 - DNA, 120 bp, Artificial Sequence
  ENSG00000159842_51 (sequence is synthesized)
cccggttcaccaccaccctggccccttgtctcaggcctgacccacctcctcatgtgggctgcctgctgggcctcctacaagcatctgaatctgggggacgttctttccctagagtctcgg

SEQ ID NO: 473180 - DNA, 120 bp, Artificial Sequence
  ENSG00000159842_52 (sequence is synthesized)
ccttaccttcccaagttcccaaggcttctcctgcccacgtccgtcgatgccccttcggcaggcctcgggtgggctggctggggtggggtgcggtggcctctttctctgccctgcccctgc

SEQ ID NO: 473181 - DNA, 120 bp, Artificial Sequence
  ENSG00000159842_53 (sequence is synthesized)
ccccgccccagctctccatcccaaatgctagaagctctccagggtgtgtgtgtgctgggtgggggttgctacgggagagctgtcgtgggggctgccctccacccatcctcacgctccacc

SEQ ID NO: 473182 - DNA, 120 bp, Artificial Sequence
  ENSG00000159842_54 (sequence is synthesized)
agactggagcttcagcccccacggaaggctgcttgcacccacgctccagcagcagaaggggtggagaaagagaatccaccgctggcaggatatgtccctactggcttaaccttagccaca

SEQ ID NO: 473183 - DNA, 120 bp, Artificial Sequence
  ENSG00000159842_55 (sequence is synthesized)
cagaccagggggtgtcctgttacgagacaggggatgccccagcacccaaggcctatgcagtcagctgcaggaagggggtctgctcccaccagccggcctcctggctgagttaccagtcgt

SEQ ID NO: 473184 - DNA, 120 bp, Artificial Sequence
  ENSG00000159842_56 (sequence is synthesized)
ggactgtacacaacattcctgtcaccagcaataaagacgacctgtactgtaccctggaggtggattccttcggctattttgtcagcaaagccaaaaccagggtgttccgggacacagcgg

SEQ ID NO: 473185 - DNA, 120 bp, Artificial Sequence
  ENSG00000159842_57 (sequence is synthesized)
ggaaagagttacctgttcctactgtcctcggactacgagaggtcagagtggagagaagcaattcagaaactacagaagaagggtaaattcctgcctcttccacgctccccaatgatgtcc

SEQ ID NO: 473186 - DNA, 120 bp, Artificial Sequence
  ENSG00000159842_58 (sequence is synthesized)
gtggcattgatgggccttttgtatttctaagcgtttcatgtccagtatcacgtctttggccctcgcagtcaccctcagaggtgccaggatctccaggcctttgtcctgagctcagtggag

SEQ ID NO: 473187 - DNA, 120 bp, Artificial Sequence
  ENSG00000159842_59 (sequence is synthesized)
gatttaagcaatcagccagtaagtgccctggccaggacgaggttgggtgggccattgtggattctgcactgctctgcccaggatggggccctgccagcacgcctttagacatggggcatt

SEQ ID NO: 473188 - DNA, 120 bp, Artificial Sequence
  ENSG00000159842_60 (sequence is synthesized)
cccctggaggccagaaaccagctcctcttggcagggaggtcacccctggcctttgtctccaaagtcctctttctcaagccctccctgaagctgtctgaaacctaggggccgggcgcggtg

SEQ ID NO: 473189 - DNA, 76 bp, Artificial Sequence
  ENSG00000159842_61 (sequence is synthesized)
tgagctgagatcatggcattgcactccaaaaccgagtgcgacaaacacgtggactccaacttcatatctgagggcg

SEQ ID NO: 473190 - DNA, 120 bp, Artificial Sequence
  ENSG00000159842_62 (sequence is synthesized)
tgcgacaaacacgtggactccaacttcatatctgagggcgacaaacacgtggactccaacttcatatctgcccatgacaagctgtgtgaccttgggcaagtttcttaacctctctgggcc

SEQ ID NO: 473191 - DNA, 120 bp, Artificial Sequence
  ENSG00000159842_63 (sequence is synthesized)
tccactaaaaggcagtcacgcttgtgaattttgacccgagagcaggctgggatatgatcgtgtgtgtgcaacgctggtgtgctgccacgctcatcgctttttctccccttcccccttgtg

SEQ ID NO: 473192 - DNA, 120 bp, Artificial Sequence
  ENSG00000159842_64 (sequence is synthesized)
agaggaagaagacggggaggaggcgcgagggcggaaggggacacttgactttccctctggtctcttcgggggccgcggggaagggtcggcgcggacggagctcggggcatgtgggacccc

SEQ ID NO: 473193 - DNA, 120 bp, Artificial Sequence
  ENSG00000159842_65 (sequence is synthesized)
cgcgcgttcgagcggcgctggcgggccgagttccccggggcggaggcgccggtcccgaggctggagtcggtgcgggacgcggagcgggagctggagcgccgcagactcaacctggagcgg

SEQ ID NO: 473194 - DNA, 120 bp, Artificial Sequence
  ENSG00000159842_66 (sequence is synthesized)
actcaacctggagcggctgcaacaggtgctggcggaggagcagctcaaagcctcgctcccgcaggccgcgctggcccggggcggcggcggagactccggggagcccgggcgccccgaccc

SEQ ID NO: 473195 - DNA, 80 bp, Artificial Sequence
  ENSG00000159842_67 (sequence is synthesized)
gggcccggggcggccggagaagccggcgggggaaggagctgggccgacgccgtccaccggcagctcctgcagccccagct

SEQ ID NO: 473196 - DNA, 120 bp, Artificial Sequence
  ENSG00000159842_68 (sequence is synthesized)
cagctcctgcagccccagctgcggttccgggcccgggaggacgacgcgcccctcggggacccccaggcggctcccggcacggacgaggggggcgacggcggcgaccacgacttcgagatg

SEQ ID NO: 473197 - DNA, 80 bp, Artificial Sequence
  ENSG00000159842_69 (sequence is synthesized)
gatgcacctgatccccggggggcggcggccgcagcgggggacccgcgacctggagcagcgggaggccgaggccaagggcc

SEQ ID NO: 473198 - DNA, 120 bp, Artificial Sequence
  ENSG00000159842_70 (sequence is synthesized)
cgagcacctgcccccgtggcggcgccgcaggttcctgcgggtgcccgagcgggactcgcccggccacagctcgccggagagagacagcgacggcagccggcacagctccgaccgcgagga

SEQ ID NO: 473199 - DNA, 120 bp, Artificial Sequence
  ENSG00000159842_71 (sequence is synthesized)
aactagcgggactggcagccgggactgagcgctccacaggcgccttctctccagcgccgcgtcccgtcccccccggcatgaccgacgtcctgccccagcccgactgcagcccgaaggcgg

SEQ ID NO: 473200 - DNA, 120 bp, Artificial Sequence
  ENSG00000159842_72 (sequence is synthesized)
agctacaaacgtgctcctctttaggatgccagcaggctgctggctccctccctccctacccctcctccccttccccttccctcctctcctcgccacgcgcctccctcccctcccccttgc

SEQ ID NO: 473201 - DNA, 120 bp, Artificial Sequence
  ENSG00000159842_73 (sequence is synthesized)
tggaagagcactccggagcggctgcccgatgctggagtccgtgcggcagcatcagcaaggtggctgagtggccgggctgctggtgggcgccggggagcctggagcgatggctgcacgctc

SEQ ID NO: 473202 - DNA, 120 bp, Artificial Sequence
  ENSG00000159842_74 (sequence is synthesized)
tctggaggtggggcttgagtttctgccaggaaagctgggagagccagggagaagccaagaggcgggagaaagtgcttcaagccgaggacctgccgttgttaaaggcctggaagtgagaac

SEQ ID NO: 473203 - DNA, 120 bp, Artificial Sequence
  ENSG00000159842_75 (sequence is synthesized)
gccccaaggctgccggcacggtgatcttcgtgtctccaggacgccctgcggtgccagctcccgctggcccgcacgagtgctgaagcttacccctgctctgcgatgagtgtgagaggggtg

SEQ ID NO: 473204 - DNA, 120 bp, Artificial Sequence
  ENSG00000159842_76 (sequence is synthesized)
gtgctcgttccatgaaattgggggatgtggatgcttgaacgggctctcagctagtgtgccttccgtgcagaggaggtcccctgaggccttagagatgaatctcccagaagtggcagccgc

SEQ ID NO: 473205 - DNA, 120 bp, Artificial Sequence
  ENSG00000159842_77 (sequence is synthesized)
ggcagggacaccaggatcatgaaggacctgggaggtgaacccgctgctcagttcctggccctcgtcccttagacccagtcctcggagcagaactgggggaagctgagatttctgtgggct

SEQ ID NO: 473206 - DNA, 120 bp, Artificial Sequence
  ENSG00000159842_78 (sequence is synthesized)
tcgttggtcctcccacgcgcccgcccccgagtgggagcagagccatgtgagctgagttggagctgctcgctgccgagaattgcatcagccccgcctggcaggctggagcgggagcctgtt

SEQ ID NO: 473207 - DNA, 120 bp, Artificial Sequence
  ENSG00000159842_79 (sequence is synthesized)
gctatggtgaccaccaggcttcaaaccagtgagaaggatgagatggttgccgggcgaggttttctcaccatgtgatgcgtgtgacaggctgacaggttcggtagacctggacccagccct

SEQ ID NO: 473208 - DNA, 120 bp, Artificial Sequence
  ENSG00000159842_80 (sequence is synthesized)
gtgcagcagccacataccccactgtcaagaaacctgcactggccaggcagggatgaatccgtggggagcctggagtggaggacggggtggggcctgggaactggccggcgttggtgcctc

SEQ ID NO: 473209 - DNA, 120 bp, Artificial Sequence
  ENSG00000159842_81 (sequence is synthesized)
tgtgcagcctagaagctgaggctttgtcggaacatgcttttacgtgtgaaaagtgtgcaatgccttccagagaggggcttagcgatggagaggttccagtcggaaggaagctgcaggcca

SEQ ID NO: 473210 - DNA, 120 bp, Artificial Sequence
  ENSG00000159842_82 (sequence is synthesized)
cccacatagccaccctgagggacaaggagctttgggggctgctcagagcccttggtctcccctccctcgcttgccagtcggtgaagtggttactctaatgggtaacacttagcctgatat

SEQ ID NO: 473211 - DNA, 120 bp, Artificial Sequence
  ENSG00000159842_83 (sequence is synthesized)
ttgctttcttgcacctgacattttccctcttaatagaaaacgatctattttatttatttttttattattctctttcagattagagagaggaacaggggaggcaaaaaaaaaaaaaaaaaa

SEQ ID NO: 473212 - DNA, 120 bp, Artificial Sequence
  ENSG00000159842_84 (sequence is synthesized)
ctgcgtttccccaagttcccaacgagctgagtgagaggttttcagtgcaggggagctcccggtgctccgtgaagctttcatccattcattaatcctctcccctcccaccctcctctccct

SEQ ID NO: 473213 - DNA, 120 bp, Artificial Sequence
  ENSG00000159842_85 (sequence is synthesized)
gtacttccgggaactgcccgagccgctcctcacggaccgactctacccagccttcatggagggcatcggtgaggccctgagggctcctaggactgggctgggccagactgagccaggact

SEQ ID NO: 473214 - DNA, 120 bp, Artificial Sequence
  ENSG00000159842_86 (sequence is synthesized)
ccctgcccggagaagtaaccagcaggagaaatatctgtggcttcctttgctggctgaccttcccagtgcactggggcctgtggctgaggggtccgagggtgaggtgtggcctgctgggac

SEQ ID NO: 473215 - DNA, 120 bp, Artificial Sequence
  ENSG00000159842_87 (sequence is synthesized)
ataaaaagcaaaatggtgactcagagaggagagttggaagcgtcctgcctcttgctcccactgttaatttttacacttggaattaggcagaaggcaaagaaaacagcagcttgaaatacg

SEQ ID NO: 473216 - DNA, 120 bp, Artificial Sequence
  ENSG00000159842_88 (sequence is synthesized)
cggctgacatgctcttcatcgggtagcaacagcagagccgctcctccccgcctcccagcagccccggagcgggcagggcccggtgcctgctggctctcccccgcccctcaccaggcccag

SEQ ID NO: 473217 - DNA, 120 bp, Artificial Sequence
  ENSG00000159842_89 (sequence is synthesized)
ccgcacagcccccgcccgggccaggcgtggatggtgcggccggggccatggctgccgggggccgccgccggcgcccactacgctaccagtccctggcagctctggtggaggattctcagt

SEQ ID NO: 473218 - DNA, 120 bp, Artificial Sequence
  ENSG00000159842_90 (sequence is synthesized)
ctcctttgttgcgcgatgagggtcgggtttcggatctgaccgagccgccgccgcgggatggagccgctcagccaccggggcctgccgcgcctgtcctggatcgacaccctctacagcaga

SEQ ID NO: 473219 - DNA, 120 bp, Artificial Sequence
  ENSG00000159842_91 (sequence is synthesized)
gctgtccttgtgatggttcattctgctttggtttctcaacatcaaaggggcaaagccggatcccctgggcataggtcctgtgccaggtgccgccgctccatctgctccttcccctgcaga

SEQ ID NO: 473220 - DNA, 120 bp, Artificial Sequence
  ENSG00000159842_92 (sequence is synthesized)
gagaccaagaactggcacacggacgtgattgagatgaacggggtgagccggggatgggaatgatcagtggcgtgagccgggaggtggaacgtctgtgcagcagatcaaagtggaattttc

SEQ ID NO: 473221 - DNA, 120 bp, Artificial Sequence
  ENSG00000159842_93 (sequence is synthesized)
ggtcccagagcaggccctgtttgtgctgaggccccgccaggattgggtggatgccttggtgagggccaggaggattctgggctttatgagcactttaatgcaaccagggcaggcagcacc

SEQ ID NO: 473222 - DNA, 120 bp, Artificial Sequence
  ENSG00000159842_94 (sequence is synthesized)
gggaagggccacggccctcaccagccccctctgcggactcgttttcttcttagaaggcggcgcccggcctcttggctttctaggagtctgggagcaagagggcaaggggaggcttaggcc

SEQ ID NO: 473223 - DNA, 120 bp, Artificial Sequence
  ENSG00000159871_0 (sequence is synthesized)
gattcttgggttccgcgtgtagtttcggaaggagacatcgaagcagggcgaggcgcagagggcgttgcggactcatgccccagtcggcagtgcggggtcccaagccctgcagtgctacag

SEQ ID NO: 473224 - DNA, 120 bp, Artificial Sequence
  ENSG00000159871_1 (sequence is synthesized)
ctttgagcacacctactttggcccctttgacctcagggccatgaagctgcccagcatctcctgtcctcatgagtgctttgaggctatcctgtctctggacaccgggtatcgcgcgccggt

SEQ ID NO: 473225 - DNA, 120 bp, Artificial Sequence
  ENSG00000159871_2 (sequence is synthesized)
gaccctggtgcggaagggctgctggaccgggcctcctgcgggccagacgcaatcgaacgcggacgcgctgccgccagactactcggtggtgcgcggctgcacaactgacaaatgcaacgc

SEQ ID NO: 473226 - DNA, 120 bp, Artificial Sequence
  ENSG00000159871_3 (sequence is synthesized)
ccacctcatgactcatgacgccctccccaacctgagccaagcacccgacccgccgacgctcagcggcgccgagtgctacgcctgtatcggggtccaccaggatgactgcgctatcggcag

SEQ ID NO: 473227 - DNA, 120 bp, Artificial Sequence
  ENSG00000159871_4 (sequence is synthesized)
gtcccgacgagtccagtgtcaccaggaccagaccgcctgcttccagggcaatggcagaatgacagttggcaatttctcagtccctgtgtacatcagaacctgccaccggccctcctgcac

SEQ ID NO: 473228 - DNA, 120 bp, Artificial Sequence
  ENSG00000159871_5 (sequence is synthesized)
caccgagggcaccaccagcccctggacagccatcgacctccagggctcctgctgtgaggggtacctctgcaacaggaaatccatgacccagcccttcaccagtgcttcagccaccacccc

SEQ ID NO: 473229 - DNA, 120 bp, Artificial Sequence
  ENSG00000159871_6 (sequence is synthesized)
tccccgagcactacaggtcctggccctgctcctcccagtcctcctgctggtggggctctcagcatagaccgcccctccaggatgctggggacagggctcacacacctcattcttgctgct

SEQ ID NO: 473230 - DNA, 120 bp, Artificial Sequence
  ENSG00000159871_7 (sequence is synthesized)
tcagcccctatcacatagctcactggaaaatgatgttaaagtaagaattgcactcctgtccctctggccttccatctctcccgcccttgtgccccacaacctggccaacagtactggaag

SEQ ID NO: 473231 - DNA, 120 bp, Artificial Sequence
  ENSG00000159871_8 (sequence is synthesized)
accagccaggcaccaggcaccccataacacggcttcctgtgctctccctccagagcctgtcgcagctctaggagggagctatacaatgatgtctttattagtgtcatcatgagaagccca

SEQ ID NO: 473232 - DNA, 120 bp, Artificial Sequence
  ENSG00000159871_9 (sequence is synthesized)
ataagcagtatgccctaacagttagtaggccaggctctggagctaagctgcatgggttcaaatcccagctccaccattcagcctgcagagaccatgagcgagttacttaagccaggctct

SEQ ID NO: 473233 - DNA, 120 bp, Artificial Sequence
  ENSG00000159871_10 (sequence is synthesized)
ggagctaagctgcatgggttcaaatcccagctccagcattcagcctacagagaccatgggtgagttacttaagccaggctctggagctaagctgcatgggttcaaatcccagctccacca

SEQ ID NO: 473234 - DNA, 120 bp, Artificial Sequence
  ENSG00000159871_11 (sequence is synthesized)
ttcagcctgcagagactgtgggtgagttacttgagctctctgtgccaatattttctcacctataaggtggaggtgaaaataaactctataacatgacaagaactacttcacagtagttgc

SEQ ID NO: 473235 - DNA, 120 bp, Artificial Sequence
  ENSG00000159871_12 (sequence is synthesized)
agtgaggattcaacgagatgaacatttagtacttgggacacagcagtggcccagtgtaaatgggctacttgtcataagccctaagtcacaggtcaacaaactgagaggcaaaagcacttg

SEQ ID NO: 473236 - DNA, 120 bp, Artificial Sequence
  ENSG00000159871_13 (sequence is synthesized)
gttgagcttgtgtatctagtgagtatggattcagggaccagattcccagccccacgaactgctaagcaaccccacctcctaaacacatgagtgccgattaacttcacagaaaaacacaca

SEQ ID NO: 473237 - DNA, 120 bp, Artificial Sequence
  ENSG00000159871_14 (sequence is synthesized)
aggcaaagttcagcgaggtgaaattctccaagctataaagatcagggaagacttcctggaggaattcacccttgagcaaaatcctaaaggatcaatagtagctggcaaaaagaagcagga

SEQ ID NO: 473238 - DNA, 120 bp, Artificial Sequence
  ENSG00000159871_15 (sequence is synthesized)
ggaagcgcattctaggtagaggagacagcctggacaaaggtctgagggaggaaggagcacaaggagtgcaggacactttcatgagtgcaggacactttcataactgcatgaacttcatag

SEQ ID NO: 473239 - DNA, 120 bp, Artificial Sequence
  ENSG00000159871_16 (sequence is synthesized)
agatgggatcctttagcatgttctctgtgcacatgcttgaccatgttctttcacatgctttttgccacttgatctttccagcaactcagtgagagaagcaaaaaagtaagttgcatcctg

SEQ ID NO: 473240 - DNA, 120 bp, Artificial Sequence
  ENSG00000159871_17 (sequence is synthesized)
agagaggtcattactctgccatgagacagacacagctgtgaccagctgcaatagcagcacctggtctctcaaggcgtgtcttccctgggagcagaggggccaggcccgtgtgcctgtcat

SEQ ID NO: 473241 - DNA, 120 bp, Artificial Sequence
  ENSG00000159871_18 (sequence is synthesized)
agtaaggagaaccagccaggcagcacatcacagcgggaggagctgtcccaggtggcccagctcagcaatggcaatgggggtccccagagtcattctgctctgcctctttggggctgcgct

SEQ ID NO: 473242 - DNA, 120 bp, Artificial Sequence
  ENSG00000159871_19 (sequence is synthesized)
gtggggcctttgggaggtggtgagatcatgagggtggagcccccatgaataggattagtgcccttataaaagaggccctggagagctgccttgccccttccaccacatgagaacacagcc

SEQ ID NO: 473243 - DNA, 120 bp, Artificial Sequence
  ENSG00000159871_20 (sequence is synthesized)
agcaggtgcctataagcaagaaagtgggttctcaccagccatcgaatctgctggtgcattgattgcagacttcccagactccagagctatgagacataaatttctgttgtgtataagcca

SEQ ID NO: 473244 - DNA, 120 bp, Artificial Sequence
  ENSG00000159871_21 (sequence is synthesized)
agcatgcaacttggcttcacctgtcaaaggcgcttttttcgaagacgcccgggagctcttgcttttgcttgagggtctttggtgttgactgagagcgaattaaaaggttctcagctttcg

SEQ ID NO: 473245 - DNA, 120 bp, Artificial Sequence
  ENSG00000159871_22 (sequence is synthesized)
ctaaggaacgcattctggagtctagaacaggcgaagatgggactggggtgtctggggacttagacgtgagcgagcaagggaatccgggatgttgtaaaagttgttgagttctggatttga

SEQ ID NO: 473246 - DNA, 120 bp, Artificial Sequence
  ENSG00000159871_23 (sequence is synthesized)
ttctcagcttggtcgctgttggtgcatagaagagctactaatttgtgtacgtcggaaactttgccgaattggactacatttctagaaatggattcctgaattaaaagagatgcttctctt

SEQ ID NO: 473247 - DNA, 120 bp, Artificial Sequence
  ENSG00000159871_24 (sequence is synthesized)
aaatatttatgtaaagttactctcagaaaggttgtaagtggattcctcccaccaaaagtattgtgaatgaatatcttcttaaaatttacaattgttttgaccatttcccagtccttaaac

SEQ ID NO: 473248 - DNA, 78 bp, Artificial Sequence
  ENSG00000159871_25 (sequence is synthesized)
ggttcaagcgattctcctccctcagccttcccaagtagctgggactacagtatggggcttctccatgtgggtcaggct

SEQ ID NO: 473249 - DNA, 120 bp, Artificial Sequence
  ENSG00000159871_26 (sequence is synthesized)
atttccatgtcttttatttctcataagcttacatatgcattcaagtatttattggtcattttcaatttttccttctaagagtctatattctttacctatttctacacatttttgtattca

SEQ ID NO: 473250 - DNA, 120 bp, Artificial Sequence
  ENSG00000159871_27 (sequence is synthesized)
attatctgtttgttgtatctgaaatattttcccttagtttatttgctacttaaatttgagggaggcagggaagtttactgaaacatactttatattttctataatttattaactatttac

SEQ ID NO: 473251 - DNA, 120 bp, Artificial Sequence
  ENSG00000159871_28 (sequence is synthesized)
ttcataatttgtgttttggctgtcaagcctacagaccaaaattataataacatcaatttgtaatttgataagcactctggtagtctatttttaagttatacatgtcgtgaacattatttg

SEQ ID NO: 473252 - DNA, 120 bp, Artificial Sequence
  ENSG00000159871_29 (sequence is synthesized)
ttttaatgtgtgagggatggaagttactttatttttccaggtggttaactagttaacacagattattgcttttctgtaatacttttactgagatataattcatatactctaaaactcacc

SEQ ID NO: 473253 - DNA, 82 bp, Artificial Sequence
  ENSG00000159871_30 (sequence is synthesized)
tcaatggcgtgatctcagctcactgagattattgcttttctgtaatacttttactgagatataattcatatactctaaaact

SEQ ID NO: 473254 - DNA, 120 bp, Artificial Sequence
  ENSG00000159871_31 (sequence is synthesized)
attgcttttctgtaatacttttactgagatataattcatatactctaaaactcacccatttaaagtgtacaattcagtagattcttttttatttctttgagacagagttttgctcttgtt

SEQ ID NO: 473255 - DNA, 120 bp, Artificial Sequence
  ENSG00000159871_32 (sequence is synthesized)
cgtgcctggccgaattcagtagtttctagtttattcaaagagctatgcaaccatcatcacaatcaattttagaacattttcattgcccaaaaagacaccaatacccactagcaatcatca

SEQ ID NO: 473256 - DNA, 120 bp, Artificial Sequence
  ENSG00000159871_33 (sequence is synthesized)
ttttcagccactccatgggctacagggatcttttctgttattgcacttgttctatattcatatttcatgtaataaacatgcattgcttttgtaattacaaagtaaaaagaaaaacgtttt

SEQ ID NO: 473257 - DNA, 120 bp, Artificial Sequence
  ENSG00000159871_34 (sequence is synthesized)
ggagatagaaacagagaagcaagacaaggcgcagtggctcacacttgtaattccagcaccttaggaggacgaggcaggaggatggcttgagaccaggagttcgcgaccagcctggcaaca

SEQ ID NO: 473258 - DNA, 120 bp, Artificial Sequence
  ENSG00000159871_35 (sequence is synthesized)
gagacgtgctaggcgcgggctctggcgcagtgcgcagcccgcacgactgtgccagggtaccactgcctgagtgtgcatctacgctctcttgccagcacccgacccgccgacgctcagcgg

SEQ ID NO: 473259 - DNA, 120 bp, Artificial Sequence
  ENSG00000159871_36 (sequence is synthesized)
atcgaagcagggcgaggcgcagagggcgttgcggactcatgccccagtcggcagtgcgggtaagggtgggagaagcaatgaggcgaatgcgagcagccgaagaaggcgacagtgtggctg

SEQ ID NO: 473260 - DNA, 120 bp, Artificial Sequence
  ENSG00000159873_0 (sequence is synthesized)
gagcggcctgaggtggagggttctagaaggcgtgacgtggggtcgagagcgggatccgaggctggcgggttttggcagtagctgtggctgcggctgccgggcctggggacgcgggcggcc

SEQ ID NO: 473261 - DNA, 120 bp, Artificial Sequence
  ENSG00000159873_1 (sequence is synthesized)
gaggccgccgtcgcagcctcctcgtctcgccggctatggctgcgctcggccggcccttcagcggcctccctctgagcggcggctcggacttcctgcagccgccgcagccggccttccccg

SEQ ID NO: 473262 - DNA, 120 bp, Artificial Sequence
  ENSG00000159873_2 (sequence is synthesized)
gccgggccttcccgccgggggctgacggcgccgagttggccccgcggccgggacctcgcgcagtccctagcagtcccgctgggagtgcggcgcgcggacgtgtttctgttcactgtaaaa

SEQ ID NO: 473263 - DNA, 120 bp, Artificial Sequence
  ENSG00000159873_3 (sequence is synthesized)
agaaacacaagcgagaggaggaggaggatgatgattgtccagtaagaaagaaaaggataactgaagcagagctctgtgctggtcctaatgactggattctttgtgcacatcaggatgtag

SEQ ID NO: 473264 - DNA, 120 bp, Artificial Sequence
  ENSG00000159873_4 (sequence is synthesized)
aggggcatggagtaaatcccagtgttagtggcctttccatacctgggatattagatgttatttgtgaagaaatggatcagacaactggagaaccacagtgtgaagttgcccgaaggaagc

SEQ ID NO: 473265 - DNA, 120 bp, Artificial Sequence
  ENSG00000159873_5 (sequence is synthesized)
ttcaggagattgaggacaggataattgatgaagatgaagaagttgaagctgacagaaatgttaaccatctccccagtcttgtcctttctgataccatgaaaacaggtttgaagagggaat

SEQ ID NO: 473266 - DNA, 120 bp, Artificial Sequence
  ENSG00000159873_6 (sequence is synthesized)
ttgatgaagtttttacaaagaaaatgattgagtctatgagccgtccttccatggagcttgttctctggaaacccctccctgaactcctttctgataagccaaagccatcctctaatacta

SEQ ID NO: 473267 - DNA, 120 bp, Artificial Sequence
  ENSG00000159873_7 (sequence is synthesized)
agaactatacaggagagagccaagctaagcatgtagctgctggcactgccttccctcagagaactgaactgttttcggaacctcggccaacagggatgtctctttataatagtttggaga

SEQ ID NO: 473268 - DNA, 120 bp, Artificial Sequence
  ENSG00000159873_8 (sequence is synthesized)
cagctactagcacagaagaagagatggaactctagaaaccaatttctacactaaagttgtcaaatgttagaagaatcctgtgttcagttatgagactctttgcatagtatagggacttga

SEQ ID NO: 473269 - DNA, 120 bp, Artificial Sequence
  ENSG00000159873_9 (sequence is synthesized)
aagttttatgagacgggtgtaataatatctccacctgtgatttgggggtgggactcttattttgggtagccatttattgacttcacctttttgccaaggacgtttgtctcaagggaaaag

SEQ ID NO: 473270 - DNA, 120 bp, Artificial Sequence
  ENSG00000159873_10 (sequence is synthesized)
cagttttctgtggggcttattaaaggaatgttggtttacattgtcttcaaagacaagtatagaagctgtatgtgtaagggtgacttaaatcatatgtcacattgtctaaactattcagac

SEQ ID NO: 473271 - DNA, 120 bp, Artificial Sequence
  ENSG00000159873_11 (sequence is synthesized)
acttggagaatattctccttgaattaaaaaagatgattaagaaggatgctcctacaactgtatcctgacagttaagtcacagcttaatgtgtagatatgagctgtttacagtggtgacta

SEQ ID NO: 473272 - DNA, 120 bp, Artificial Sequence
  ENSG00000159873_12 (sequence is synthesized)
tatataattggggagaagaagggaagagagcagcagtagcttaagcctgttgctaagaaatttaatttcttagcaacttgtaatttagttatcaattcaatatagctctgttgattaaat

SEQ ID NO: 473273 - DNA, 120 bp, Artificial Sequence
  ENSG00000159873_13 (sequence is synthesized)
agccgatagtattgtggctctcctctttgactatgaaaatatagagaaagttttttctttaaggcttttttgccttgtgccactgttgctccttggtttcccttgcgtaattgataagcc

SEQ ID NO: 473274 - DNA, 120 bp, Artificial Sequence
  ENSG00000159873_14 (sequence is synthesized)
cagttattcagtaatgtttacaaattaattgactttgatagttaaaagattatgaggtaacccatctgcaatttgcctgtgggagaagcatcctttagttcatcttaaggaagtgcttta

SEQ ID NO: 473275 - DNA, 120 bp, Artificial Sequence
  ENSG00000159873_15 (sequence is synthesized)
gtgctttatcagctaaacccaacattgataactttggtaatttttttaaaaagttatacttgtattagcaagtttttttttttttcccccaccgcaacctccatctcccgggttcaagca

SEQ ID NO: 473276 - DNA, 120 bp, Artificial Sequence
  ENSG00000159873_16 (sequence is synthesized)
gctgggattacaggcgtgagccacggcacgcagccagcaagttgtttttaaatgttaatatagaaaacagtgaaggattagctgaaaatatatgagcaggtgacattgaggtttactgaa

SEQ ID NO: 473277 - DNA, 120 bp, Artificial Sequence
  ENSG00000159873_17 (sequence is synthesized)
tgagcaggtgacattgaggtttactgaaatagccaatttgactggtgcttagactattgtgcagtaaacctaaaaggtagtggagaattgcttcctgctagcaggaagccttcatcttct

SEQ ID NO: 473278 - DNA, 120 bp, Artificial Sequence
  ENSG00000159873_18 (sequence is synthesized)
tgagtacccaaaccaggcttcaggtgtcctttgaggatagccaggtttgaaatttttagtttctcaggaagagctcttctatgtggcaggggctgatagggcaaaataaaatgacaattt

SEQ ID NO: 473279 - DNA, 120 bp, Artificial Sequence
  ENSG00000159873_19 (sequence is synthesized)
ctttattgctacagagtatcctctataagttattaaacgagtgtaatggtataatgcccttccatcacacaacaggacaccaccccagttttgttttctgggtttcttccccctttgtag

SEQ ID NO: 473280 - DNA, 120 bp, Artificial Sequence
  ENSG00000159873_20 (sequence is synthesized)
gaatcagataccttttgtagaaaaaaatggcttatgccacgtaaaggtgaatttttagaaaccaccttctaggcgtttttggaacccttactgaaatccctccccttgttacagatggcg

SEQ ID NO: 473281 - DNA, 120 bp, Artificial Sequence
  ENSG00000159873_21 (sequence is synthesized)
tagaagtcacaagtctgttaattggactgttgcttctttgcctgttcctgctttctctttctgtctggatagtcaggaaaagatttaatgtttaatatttaaacaaaatatttaatgtct

SEQ ID NO: 473282 - DNA, 120 bp, Artificial Sequence
  ENSG00000159873_22 (sequence is synthesized)
atacagtaaaattattcaaacttcaaaccagtattgaaagcagttggaaaccagctaatagtttcttaatctcagatttcgagatgaatgtaaactgtattcttttgaaatgtgcaagtg

SEQ ID NO: 473283 - DNA, 120 bp, Artificial Sequence
  ENSG00000159873_23 (sequence is synthesized)
tttgattcatgccatttgataaacttctgccttgtagtcattgtttgatgggaccaacttgtaaagtatgagccttaaataaatctccatgctgaaaaatgtgttctaatgcaacacaaa

SEQ ID NO: 473284 - DNA, 120 bp, Artificial Sequence
  ENSG00000159873_24 (sequence is synthesized)
aacatgaagtgactgcccagaggtagagttagtgtttaggtggaaagggagatgacagctttccaaagaaggacctaaaacacaccaagattgtcttctacaggaattgctgggcaggtc

SEQ ID NO: 473285 - DNA, 120 bp, Artificial Sequence
  ENSG00000159873_25 (sequence is synthesized)
tccgactaaaggtcttatgatgaaaaggaagaaacaagcccccaacacaaggctctgatactactggtaaatgtaggagagaattaagaatctgttaattaaaatccaaacagagcttat

SEQ ID NO: 473286 - DNA, 120 bp, Artificial Sequence
  ENSG00000159873_26 (sequence is synthesized)
ttcagtagtcaagttacctgacatgataattatttctgcaggataattgatgttttatgttcttttttggactttatcttcttgcaaaaatttctacaaaaattgttttcttcatccttg

SEQ ID NO: 473287 - DNA, 120 bp, Artificial Sequence
  ENSG00000159873_27 (sequence is synthesized)
tggtgcttattcatctgagccgtctccacagtcccaatgcctctgctttttgttttacttttgtagcataaggtttttgcttttgctttgccttaagagttccctagggagttaccaggg

SEQ ID NO: 473288 - DNA, 120 bp, Artificial Sequence
  ENSG00000159873_28 (sequence is synthesized)
cttttcgttttgtgtagcttttgcagcatggatcaaacattggcttactgtgctaatgtgtgaagagaaaaaattctctaaagcaggtgagctttaatgaacaaatgtgtattttatctg

SEQ ID NO: 473289 - DNA, 120 bp, Artificial Sequence
  ENSG00000159873_29 (sequence is synthesized)
gttttttgggttttttttttttttttgtaattatatgaagaaagtccagttctcataaatattgatcacttaaaaaacttactctttcttgaaaaggtacacatgtaaaatttaggaaaa

SEQ ID NO: 473290 - DNA, 120 bp, Artificial Sequence
  ENSG00000159873_30 (sequence is synthesized)
aaaggtacacatgtaaaatttaggaaaataactaaagtaggggctggaaccataagaagaatgtttatcagcacgttcatttattattttggatttggaacttggctttgtttttcaata

SEQ ID NO: 473291 - DNA, 120 bp, Artificial Sequence
  ENSG00000159873_31 (sequence is synthesized)
gtgacaagaatggttcagttctaggaatgttctggaagatgctgttaattttactttaaaatgagaatctggtgttactgtattttatcgttttcaataaaacttcttaagtgttttgga

SEQ ID NO: 473292 - DNA, 120 bp, Artificial Sequence
  ENSG00000159873_32 (sequence is synthesized)
ggcaggctgggcgcccctcgcggcgggcgcgggcaggggcgcgggctccgcgccggggctttttgactccctccccacggccctccgcgggagcttcgcagcccagtttacagatgaaga

SEQ ID NO: 473293 - DNA, 120 bp, Artificial Sequence
  ENSG00000159873_33 (sequence is synthesized)
acatagcccaggagtccggtccgaacctcagctcgactgcggcccggagaagtgagactttcccagttggaacctgggcgactcggtctgggtgccccctcggcgcggccgctgttagtg

SEQ ID NO: 473294 - DNA, 120 bp, Artificial Sequence
  ENSG00000159882_0 (sequence is synthesized)
gtgtgagcctgcggttgctacataaccgcgtagtttgagccatttctgcgtctggcgggtccttctgaacttgtcaccttcgcttggggtcgcaacgacccgatgatcgatgatccaagc

SEQ ID NO: 473295 - DNA, 120 bp, Artificial Sequence
  ENSG00000159882_1 (sequence is synthesized)
aagggaaaagaagccttggcggagagcggaggcacaattccaccttcctttgtgctccattactcaagacactgaagactccaaaaagtagtaggaaaaatgaccacattcaaggaggca

SEQ ID NO: 473296 - DNA, 120 bp, Artificial Sequence
  ENSG00000159882_2 (sequence is synthesized)
gtgaccttcaaggatgtggctgtgttcttcactgaggaggaactggggctactggaccctgcccagaggaagctgtaccaagacgtgatgcttgagaacttcacgaacctgctgtcagtg

SEQ ID NO: 473297 - DNA, 120 bp, Artificial Sequence
  ENSG00000159882_3 (sequence is synthesized)
gggcatcaaccattccaccctttccacttcctaagggaagaaaagttttggatgatggagacagcaacccaaagagaaggaaattcaggcggcaagactattgcggaagcaggaccacat

SEQ ID NO: 473298 - DNA, 120 bp, Artificial Sequence
  ENSG00000159882_4 (sequence is synthesized)
gaagactgcccttgccagcaaatctgggaacaaactgcaagtgacttaacccagtctcaagactccatcataaataattctcacttctttgaacaaggtgatgtcccctcccaggttgag

SEQ ID NO: 473299 - DNA, 120 bp, Artificial Sequence
  ENSG00000159882_5 (sequence is synthesized)
gcaggactatctataattcatacaggacagaaaccttcacagaatgggaagtgtaaacagtccttcagtgatgttgccatctttgatcctcctcagcagttccactcaggagagaagtct

SEQ ID NO: 473300 - DNA, 120 bp, Artificial Sequence
  ENSG00000159882_6 (sequence is synthesized)
catacatgcaatgagtgtggaaaaagcttctgttacatctcagctcttcgtattcaccagagagttcacttgagagagaaactctctaagtgtgacatgcgtggtaaggaattcagtcag

SEQ ID NO: 473301 - DNA, 120 bp, Artificial Sequence
  ENSG00000159882_7 (sequence is synthesized)
agctcatgtctgcaaactcgtgagagagtccacactggagagaaaccattcaaatgtgagcaatgtgggaaaggcttcagatgtagagcgatacttcaagttcactgcaaattacacaca

SEQ ID NO: 473302 - DNA, 120 bp, Artificial Sequence
  ENSG00000159882_8 (sequence is synthesized)
ggagagaaaccttatatttgtgagaaatgtgggagggccttcattcacgatttccagcttcagaaacatcagataattcatactggggagaagccgttcaaatgtgaaatatgtggtaag

SEQ ID NO: 473303 - DNA, 120 bp, Artificial Sequence
  ENSG00000159882_9 (sequence is synthesized)
agcttctgccttaggtcaagtcttaataggcattgcatggtccacacagcagagaaactgtacaaatctgaggagtgtggaaaaggcttcactgatagcctagatttgcataagcatcag

SEQ ID NO: 473304 - DNA, 120 bp, Artificial Sequence
  ENSG00000159882_10 (sequence is synthesized)
ataattcacacaggacagaaaccgtacaattgtaaagaatgtgggaagagcttcagatggtcctcatatcttttgatccatcagcgaatccacagtggagaaaaaccatacagatgtgag

SEQ ID NO: 473305 - DNA, 120 bp, Artificial Sequence
  ENSG00000159882_11 (sequence is synthesized)
gagtgtgggaagggctacattagtaagtcaggtcttaacttgcaccagagggtccatactggagagagaccttataattgtaaggaatgtgggaagagctttagccgggcttcaagtatt

SEQ ID NO: 473306 - DNA, 120 bp, Artificial Sequence
  ENSG00000159882_12 (sequence is synthesized)
ttgaatcataagaaactccactgccggaaaaaacccttcaaatgtgaggattgtggaaagaggcttgtacaccggtctttctgtaaagaccaacaaggagaccacaatggagaaaactca

SEQ ID NO: 473307 - DNA, 120 bp, Artificial Sequence
  ENSG00000159882_13 (sequence is synthesized)
tccaaatgtgaggactgtgggaagcgctacaagaggcgcttgaatctggatataattttatcattatttttaaatgatatgtaagttgtacatatatatgggatatggtatgaaatttta

SEQ ID NO: 473308 - DNA, 120 bp, Artificial Sequence
  ENSG00000159882_14 (sequence is synthesized)
atatgtgtatataatacgtaatgatcaaattgatgtaattagtgtattaccttaaacaattaacatttctttgttttgggaaaattcaaaatccattgttctagcgatttgaaaagaaac

SEQ ID NO: 473309 - DNA, 120 bp, Artificial Sequence
  ENSG00000159882_15 (sequence is synthesized)
aataaattattgttgattatagtcacctttggtgctttagaacactagaatgtatttctcctatctagcagtacttatgtatcttgttacccaatctttggctatctcacctaaccccta

SEQ ID NO: 473310 - DNA, 120 bp, Artificial Sequence
  ENSG00000159882_16 (sequence is synthesized)
cacttccctgcttctagaaccactgttttactcactaattctatgaaatcaacttttttagcttccatatgtgtgtgaggacagttagtatttatcttaccttgcttagcttatattgtt

SEQ ID NO: 473311 - DNA, 120 bp, Artificial Sequence
  ENSG00000159882_17 (sequence is synthesized)
atgttgccacaaatgacacaattttgttttctttttatgcccaaagagtattctattgtgtatatatgccaccttttcttcatttatctattgatggacacataggtgggttccatatct

SEQ ID NO: 473312 - DNA, 120 bp, Artificial Sequence
  ENSG00000159882_18 (sequence is synthesized)
taactattgtgaagaatagtgctccaatgaacatggtagtgtagatatctgatccacatactgatttcctttgctttggatatactcaatagtgggattgctagatcactcgaatcttat

SEQ ID NO: 473313 - DNA, 120 bp, Artificial Sequence
  ENSG00000159882_19 (sequence is synthesized)
gcctcagaggcttgacacaagagcaaaactatggaagtgtggctagggtgatatggcttcataccacctcaggcctcaagtcctcaactgcaccagagtgtccacgttggacagaatcct

SEQ ID NO: 473314 - DNA, 120 bp, Artificial Sequence
  ENSG00000159882_20 (sequence is synthesized)
tagtaatgaggtgtgtgataaagtctctgctcagttgtctataatctcatttgagagttcacaaaggggcaaaacattaaaaagaggcatatggtaagcacttcagtgtgtgtttatatc

SEQ ID NO: 473315 - DNA, 120 bp, Artificial Sequence
  ENSG00000159882_21 (sequence is synthesized)
ataatttatcacagtccatactgataatatatttcatccaggcttgtaggacagaaaacatttgtttaagttaaattcagtgtttcaccatagctcagcattctcccatcatcctaggac

SEQ ID NO: 473316 - DNA, 120 bp, Artificial Sequence
  ENSG00000159882_22 (sequence is synthesized)
catcgtagtagagaactcttgtaaattgtgcagtagggttgcaaacagaacttacgcttgtcattcaggagacaggccttagaataagagtttgttcacacatttacaaaaccctaatga

SEQ ID NO: 473317 - DNA, 120 bp, Artificial Sequence
  ENSG00000159882_23 (sequence is synthesized)
tgaacatgtcaaaagtggtgaccactagaatgtcaactacaggtaccttgttttctgcatcctcaggaccttaacactgattagcacttacatgtttagtatgtgttaaatgactcaaaa

SEQ ID NO: 473318 - DNA, 120 bp, Artificial Sequence
  ENSG00000159882_24 (sequence is synthesized)
ggagaaaatatgatattttaaaattgcatctaggagagaaaatctacaaaaaataattcagggacacgagttaaaatgcagaatacactcagttctgcaatccaaagcattattttgggt

SEQ ID NO: 473319 - DNA, 120 bp, Artificial Sequence
  ENSG00000159882_25 (sequence is synthesized)
aatcttaccctgttgcacttggctgctggcttcccctcatcctctgttctgaagtttactactagtggctttgtctaatgctccattggttgcatacaatataaattcaacaatcatttg

SEQ ID NO: 473320 - DNA, 120 bp, Artificial Sequence
  ENSG00000159882_26 (sequence is synthesized)
taactcttctcacactacaggctgaaaatggtttgttaacttgtcaataacagtccactgcatatatcacaattacatttttttcaacagtgttaaggcaaaatttatagtaatactttt

SEQ ID NO: 473321 - DNA, 120 bp, Artificial Sequence
  ENSG00000159882_27 (sequence is synthesized)
tacgtggcagatgtagttacgttggaaaaaacttccttagttctgaattctcatgattgcttctgtatttccatgcaggccttgatataatggccttctaattgtggtagcatttatttt

SEQ ID NO: 473322 - DNA, 120 bp, Artificial Sequence
  ENSG00000159882_28 (sequence is synthesized)
atcaaacaactcaggtagaagctatgccaatttgacaatttttggaaacctaacctaatattctcttcctatctctatgaaataccaagagaaacctatcggagtttggtaatttcatga

SEQ ID NO: 473323 - DNA, 120 bp, Artificial Sequence
  ENSG00000159882_29 (sequence is synthesized)
aatgtatccatgattggggtaggagtgacatttacatgctcttctttattgttggcagtaaaaataagtcttttgtaagcagtgtatatcagaatgtataaggtacaagtgttttacctg

SEQ ID NO: 473324 - DNA, 120 bp, Artificial Sequence
  ENSG00000159882_30 (sequence is synthesized)
gaaatgatgggataggaaattatgattatgatgttaaaactgtgaaaagtagaaaaccacatggatgatatcaccccattttaaaatggaataagtattcaacaagaatttgtgtgaaat

SEQ ID NO: 473325 - DNA, 120 bp, Artificial Sequence
  ENSG00000159882_31 (sequence is synthesized)
gcatttattcctataacataagaccaataaaatgagggaaccagacatacagtaaaaggagaaaaacataatgtgagctttgtgaaatctgactgtaaccttcataacataatcaaatat

SEQ ID NO: 473326 - DNA, 120 bp, Artificial Sequence
  ENSG00000159882_32 (sequence is synthesized)
ctttgtgtgtttctgggactttttaatgtgtatatacgtaatttgtgaacaactattctttcctctggcaatgaatatttgctggtatttttccattttataattttatgcattttttct

SEQ ID NO: 473327 - DNA, 120 bp, Artificial Sequence
  ENSG00000159882_33 (sequence is synthesized)
cagtgaacatcagttttatcaaagcagtaaatttagtgcaataaatttgcaaacttattaacgttaatcacttacctaccaggactcagaatctcagaataaaattgctctatattgtca

SEQ ID NO: 473328 - DNA, 120 bp, Artificial Sequence
  ENSG00000159882_34 (sequence is synthesized)
gggaaaagaagccttggcggagagcggaggtttggtgggggcggggaatggggtttttttcccgtccacggaagctttctgggatgggggtgctgtgctcgcatcccgggggttggaatt

SEQ ID NO: 473329 - DNA, 120 bp, Artificial Sequence
  ENSG00000159882_35 (sequence is synthesized)
ggcggggtcctctgtgccctgctgtgagcgtttccaggactttgacctcgctcagcctgcctctctccaccctacctgtgcgaccgctttctcgcagtgtgacgtggagtgttactcaat

SEQ ID NO: 473330 - DNA, 120 bp, Artificial Sequence
  ENSG00000159882_36 (sequence is synthesized)
gtccttatactttccattgctgtttttggtaatggggacattagaaccatcctagtagaatcgtttttgggaactgaaagagataacgcaaatgagaaccttaaagcagtccctgtcact

SEQ ID NO: 473331 - DNA, 120 bp, Artificial Sequence
  ENSG00000159882_37 (sequence is synthesized)
tggtgactggtggtctcttgttaacttcccgaagaggtcaggtccccgggtggagtcatagcttcagctgcaggggccctggtccttctccctaatccctgcaggacgctggatgatccc

SEQ ID NO: 473332 - DNA, 120 bp, Artificial Sequence
  ENSG00000159882_38 (sequence is synthesized)
gggaggccttctgacctctttttaggaaagcgagttgcgtccgcttccacgaagggcggggagcatttaacttttatgggggaccgcgatgcagtcagggtatttcacaactttcgcctt

SEQ ID NO: 473333 - DNA, 120 bp, Artificial Sequence
  ENSG00000159882_39 (sequence is synthesized)
ccccagcctgacctttctaaaagagctgcagggaggggacttcttggctactgagggcaaatctctatgtgattggtccttggcttttttcctttatagagatgttcacccaaccgagag

SEQ ID NO: 473334 - DNA, 120 bp, Artificial Sequence
  ENSG00000159882_40 (sequence is synthesized)
ctttgttttaaaaatgagagtgagacacagggtgcatagcagccaactagtgagaggtagagctggggttggcacctaggcagtccaggtcagagcctgagttgatcacctcttggatac

SEQ ID NO: 473335 - DNA, 120 bp, Artificial Sequence
  ENSG00000159882_41 (sequence is synthesized)
attctcattgaggcagaggaactagctggactcgtagggaaagcaagttaggacctgattgaaaggacgttgagagcaaggctcgtgggcttggacgtctaggaatttttaaaaatttct

SEQ ID NO: 473336 - DNA, 120 bp, Artificial Sequence
  ENSG00000159882_42 (sequence is synthesized)
caactattttgtttcatgttttccaagtatttcgtactgttgtggaactgtatcattgtggaaaagtctgaaataggagaaatgagagtagaaaaagttttttaattacccatgtatcca

SEQ ID NO: 473337 - DNA, 120 bp, Artificial Sequence
  ENSG00000159882_43 (sequence is synthesized)
agatgtaaaggtagtaactgttaagcttctaattgatttcttttgtctttctttgtgtctacttctatatttgttgataaacatttttttaaaaattgttatattttaatgtgttttccc

SEQ ID NO: 473338 - DNA, 120 bp, Artificial Sequence
  ENSG00000159882_44 (sequence is synthesized)
aaattgttatattttaatgtgttttcccatatgtcttttaactatagaaaattttaaatattgctaatagagactaaactagtgaggctggttgtggtggctcatgcctataatcccagc

SEQ ID NO: 473339 - DNA, 120 bp, Artificial Sequence
  ENSG00000159882_45 (sequence is synthesized)
tgactttctttcccatttgttttacttctgaccatgcccacttatatcaccctgatctaaattgcccaatctctttcctggtttattacaacccctttctggctggtggtcctgttccct

SEQ ID NO: 473340 - DNA, 120 bp, Artificial Sequence
  ENSG00000159882_46 (sequence is synthesized)
tataaatggaatcatctaatccatggattttggtgactggcttctttctcttatgatgtttccaaggtttgtgcatgttgtagcatgggttggtacttcattccttttaatttccaaatt

SEQ ID NO: 473341 - DNA, 120 bp, Artificial Sequence
  ENSG00000159882_47 (sequence is synthesized)
agattccattatatggatatgccatgatttttctatccatttacccagaggaaggcattttggttgtgcacagttttggggttagtatgaataatgctgctgtgatcattcataatacat

SEQ ID NO: 473342 - DNA, 120 bp, Artificial Sequence
  ENSG00000159884_0 (sequence is synthesized)
gctcgcgtgcgcgtgcgcgttggggcggccggccaatgccggaccgcttcggcaccgcccgcccgatccctccacccgtgggccggcaatggcgggcgcagtttcgctcttgggtgtggt

SEQ ID NO: 473343 - DNA, 120 bp, Artificial Sequence
  ENSG00000159884_1 (sequence is synthesized)
ggggctgctgcttgtgtctgcgctgtccggggtcctaggagaccgcgccaatcccgacctccgggcacacccagggaacgcagcccaccccggctctggagccacggaaccccggcggcg

SEQ ID NO: 473344 - DNA, 120 bp, Artificial Sequence
  ENSG00000159884_2 (sequence is synthesized)
accaccgctcaaggatcaacgcgagcggacccgggccgggtcgctgcctctgggggcgctgtacaccgcggccgtcgcggcttttgtgctgtacaagtgtttgcaggggaaagatgaaac

SEQ ID NO: 473345 - DNA, 120 bp, Artificial Sequence
  ENSG00000159884_3 (sequence is synthesized)
tgcggttctccacgaggaggcaagcaagcagcagccactgcagtcagagcaacagctggcccagttgacacaacagctggcccagacagagcagcacctgaacaacctgatggcccagct

SEQ ID NO: 473346 - DNA, 120 bp, Artificial Sequence
  ENSG00000159884_4 (sequence is synthesized)
ggaccccctttttgagcgtgtgactactctggctggagcccagcaggagcttctgaacatgaagctatggaccatccacgagctgctgcaagatagcaagccggacaaggatatggaggc

SEQ ID NO: 473347 - DNA, 120 bp, Artificial Sequence
  ENSG00000159884_5 (sequence is synthesized)
ggaacattcctgatctctccccacacagaggccagcagacctcttcctgaggacttctgtttaaaggaggacgaggaggagattggtgacagtcaggcctgggaggagcccacaaactgg

SEQ ID NO: 473348 - DNA, 120 bp, Artificial Sequence
  ENSG00000159884_6 (sequence is synthesized)
agcacagagacatggaacctagctacttcctgggaggtggggcggggactacggagaaggtgcagccaggctgtggcaaagggccccagtcacagccttggctgggaaggagggacgaca

SEQ ID NO: 473349 - DNA, 120 bp, Artificial Sequence
  ENSG00000159884_7 (sequence is synthesized)
gctgaaggtcgactaaaacaaagtctgttttcatgatggagtgctcctgtgtgttttttcgatcctagttggttgtacacacccatactaggtgcctaaggacaactgggccttcttgaa

SEQ ID NO: 473350 - DNA, 120 bp, Artificial Sequence
  ENSG00000159884_8 (sequence is synthesized)
gagctgtccttattaggacaaaaagaggctgccttccagtgtgacagcagagaagatagagggagctccagctcttttcctcgtattcctgaggccaccagcatgcccgcgttcagggcc

SEQ ID NO: 473351 - DNA, 120 bp, Artificial Sequence
  ENSG00000159884_9 (sequence is synthesized)
caaaaatcccttttctcatagcaaaactgagacagaagggtctttcccaaaaaaaagaaaaaaaactttactcaaatccagtggaaaaataaatgatagaaactatacacaacataaaaa

SEQ ID NO: 473352 - DNA, 120 bp, Artificial Sequence
  ENSG00000159884_10 (sequence is synthesized)
aagcagcagccactgcagtcaggtgggtttagcagaagtctgtgctgggtcgggggagtttaggggacagcagaagatacataaccacttctgcccccttttttcccttatccccagagc

SEQ ID NO: 473353 - DNA, 120 bp, Artificial Sequence
  ENSG00000159885_0 (sequence is synthesized)
gtagtttgagtcatttccacatcttgcgagtccttccgaacgagtctcctttccttggggctcgcaaccacccaatgatcgattcaggagaaaagaagcctgggcggagagcagagcccg

SEQ ID NO: 473354 - DNA, 120 bp, Artificial Sequence
  ENSG00000159885_1 (sequence is synthesized)
acctttctaaaagagctgcaggaagggacttcttggctactgatggcaaagctctacgaggcagtgaccttcaaggatgtggctgtgatcttcactgaggaggagctggggctgctggac

SEQ ID NO: 473355 - DNA, 120 bp, Artificial Sequence
  ENSG00000159885_2 (sequence is synthesized)
cctgcccagaggaagctgtaccgagatgtgatgcttgagaacttcaggaacctgctctcagtgggaggcaagatccaaactgagatggagactgttccagaagcaggaacacatgaagaa

SEQ ID NO: 473356 - DNA, 120 bp, Artificial Sequence
  ENSG00000159885_3 (sequence is synthesized)
ttttcctgcaagcaaatttgggaacaaattgcaagtgacttaaccaggtctcaagataccaccataagtaactctcagttatttgaacaagatgacaacccctcccagattaaagcaaga

SEQ ID NO: 473357 - DNA, 120 bp, Artificial Sequence
  ENSG00000159885_4 (sequence is synthesized)
ctatctacagttcacacaagagaaaaacctttccagggtgaaaattgtaaacagttcttcagtgatgtttccttctttgatcttcctcagcagttatattcaggagagaagtctcatacc

SEQ ID NO: 473358 - DNA, 120 bp, Artificial Sequence
  ENSG00000159885_5 (sequence is synthesized)
tgtgatgagtgtggaaaaagcttctgttacatctcagcccttcatattcatcagagggtccacatgggagtgaaatgctataagtgtgatgtgtgtggtaaggaatttagtcagagctca

SEQ ID NO: 473359 - DNA, 120 bp, Artificial Sequence
  ENSG00000159885_6 (sequence is synthesized)
accattcaaatgtgagcagtgtgggaaaggcttcagatgtagatcagcacttaaagttcattgcaaattacacatgagagagaaaccttataattgtgagaaatgtgggaaggctttcat

SEQ ID NO: 473360 - DNA, 120 bp, Artificial Sequence
  ENSG00000159885_7 (sequence is synthesized)
gcacaatttccagcttcagaaacatcacagaattcatactggggagaagccattcaaatgtgaaatatgtggtaagagcttctgtcttaggtcaagtcttaataggcattgcatggtcca

SEQ ID NO: 473361 - DNA, 120 bp, Artificial Sequence
  ENSG00000159885_8 (sequence is synthesized)
cacagcagagaaactgtacaaatctgaaaagtatggaagaggtttcattgataggctagatttgcataagcatcagatgattcatatgggacagaaaccatataattgtaaagaatgtgg

SEQ ID NO: 473362 - DNA, 120 bp, Artificial Sequence
  ENSG00000159885_9 (sequence is synthesized)
gaagagcttcaaatggtcctcatatcttttggtccatcaacgagtccacactggagaaaagccatacaaatgtgaggagtgtgggaagggctacattagtaagtcaggtcttgacttcca

SEQ ID NO: 473363 - DNA, 120 bp, Artificial Sequence
  ENSG00000159885_10 (sequence is synthesized)
ccatagaacccacacgggagagagatcttataactgtgataactgcgggaagagctttagacatgcttctagtattttgaatcataagaaactccactgccaaagaaagccattgaaatg

SEQ ID NO: 473364 - DNA, 120 bp, Artificial Sequence
  ENSG00000159885_11 (sequence is synthesized)
tgaagactgtggaaagaggcttgtatgccggtcatactgtaaagaccaacaaagagaccacagtggagaaaacccatccaaatgtgaggactgtgggaagcgctacaagaggcgcttgaa

SEQ ID NO: 473365 - DNA, 120 bp, Artificial Sequence
  ENSG00000159885_12 (sequence is synthesized)
tctggatataattttatcattatttttaaatgacatataagttatacatatttatggagtgtgaaatttgatacatgtatataatgtgtgctgattaaatcagtttaatttcacctgaaa

SEQ ID NO: 473366 - DNA, 120 bp, Artificial Sequence
  ENSG00000159885_13 (sequence is synthesized)
ccatggagatactttccacttcctaagggaagaaaagttttgggtgatggggacaacaagccaaagagaagggaatttgggaggcaagatccaaactgagatggagactgttccagaagc

SEQ ID NO: 473367 - DNA, 120 bp, Artificial Sequence
  ENSG00000159885_14 (sequence is synthesized)
agggaatttggagttacccaggttttaccctcaagcaaagagactctcctcaggcatgacacttcaagatcctagagattacctctcagatgctgacgacaacgtcctgacctctttcaa

SEQ ID NO: 473368 - DNA, 120 bp, Artificial Sequence
  ENSG00000159885_15 (sequence is synthesized)
ttagctggctagtgacctcaatggcatctgtagctttaatctcccttgctgtggaacataacgtgttcataggttctgaggactggatgtagacatctttcaggaatgattattttctct

SEQ ID NO: 473369 - DNA, 120 bp, Artificial Sequence
  ENSG00000159899_0 (sequence is synthesized)
tccccctgccaccccgttctcagtcctcagtccttgccctaggctggtagcccactccttgcccgccccccgccttcctcccatctccccctcctctccccggcccccagcaccttctgc

SEQ ID NO: 473370 - DNA, 120 bp, Artificial Sequence
  ENSG00000159899_1 (sequence is synthesized)
atcccagcctacctagcctactcctcctcttcctggccctcttccccaggctccaggctggggggtgctcgcgtctcccctgtaggccagagcagccccaagttctgggggcggtggggc

SEQ ID NO: 473371 - DNA, 120 bp, Artificial Sequence
  ENSG00000159899_2 (sequence is synthesized)
tgctgctttatccccatggcgctgccatcacttctgctgttggtggcagccctggcaggtggggtgcgtcctcccggggcgcggaacctgacgctggcggtggtgctgccagaacacaac

SEQ ID NO: 473372 - DNA, 120 bp, Artificial Sequence
  ENSG00000159899_3 (sequence is synthesized)
ctgagctatgcctgggcctggccacgggtgggacccgctgtggcactagctgtggaggctctgggccgggcactgcccgtggacctgcggtttgtcagctccgaactggaaggcgcctgc

SEQ ID NO: 473373 - DNA, 120 bp, Artificial Sequence
  ENSG00000159899_4 (sequence is synthesized)
tctgagtacctggcaccgctgagcgctgtggacctcaagctgtaccatgaccccgacctgctgttaggtcccggttgcgtgtaccctgctgcctctgtggcccgctttgcctcccactgg

SEQ ID NO: 473374 - DNA, 120 bp, Artificial Sequence
  ENSG00000159899_5 (sequence is synthesized)
cgccttcccctgctgactgcgggtgctgtggcctctggtttttcggctaagaatgaccattatcgtaccctggttcgcactggcccctctgctcccaagctgggtgagtttgtggtgaca

SEQ ID NO: 473375 - DNA, 120 bp, Artificial Sequence
  ENSG00000159899_6 (sequence is synthesized)
ctacacgggcacttcaattggactgcccgtgctgccttgctgtacctggatgctcgcacagatgaccggcctcactacttcaccatcgagggcgtctttgaggccctgcagggcagcaac

SEQ ID NO: 473376 - DNA, 120 bp, Artificial Sequence
  ENSG00000159899_7 (sequence is synthesized)
ctcagtgtgcagcaccaggtgtatgcccgagagccagggggccccgagcaggccacccacttcatccgggccaacgggcgcattgtgtatatctgcggccctctggagatgctgcatgag

SEQ ID NO: 473377 - DNA, 120 bp, Artificial Sequence
  ENSG00000159899_8 (sequence is synthesized)
atcctgcttcaggcccagagggagaatctgaccaatggggattatgtcttcttttacctggatgtctttggggagagtctccgtgcaggccccacacgtgctacaggccggccctggcag

SEQ ID NO: 473378 - DNA, 120 bp, Artificial Sequence
  ENSG00000159899_9 (sequence is synthesized)
gacaatcgcacccgggaacaggcccaggccctcagagaggcctttcagactgtattggtgatcacgtaccgagaacccccaaatcctgagtatcaggaattccagaatcgtctgctgata

SEQ ID NO: 473379 - DNA, 120 bp, Artificial Sequence
  ENSG00000159899_10 (sequence is synthesized)
agagcccgggaagactttggtgtggagctgggcccttccctgatgaacctcatcgctggctgcttctatgatgggatcctgctatatgctgaagtcctgaatgagacaatacaggaagga

SEQ ID NO: 473380 - DNA, 120 bp, Artificial Sequence
  ENSG00000159899_11 (sequence is synthesized)
ggcacccgggaggatggacttcgaattgtggaaaagatgcagggacgaagatatcacggtgtaactgggctggttgtcatggacaagaacaatgaccgagagactgactttgtcctctgg

SEQ ID NO: 473381 - DNA, 120 bp, Artificial Sequence
  ENSG00000159899_12 (sequence is synthesized)
gccatgggagacctggattctggggactttcagcctgcagcccactactcgggagctgagaagcagatttggtggacgggacggcctattccctgggtgaagggggctcctccctcggac

SEQ ID NO: 473382 - DNA, 120 bp, Artificial Sequence
  ENSG00000159899_13 (sequence is synthesized)
aatcccccctgtgcctttgacttggacgacccatcctgtgataaaactccactttcaaccctggcaattgtggctctgggcacaggaatcaccttcatcatgtttggtgtttccagcttc

SEQ ID NO: 473383 - DNA, 120 bp, Artificial Sequence
  ENSG00000159899_14 (sequence is synthesized)
ctaattttccgaaagctgatgctggagaaggagctggctagcatgttgtggcgtattcgctgggaagaactgcagtttggcaactcagagcgttatcacaaaggtgcaggcagtcgcctc

SEQ ID NO: 473384 - DNA, 120 bp, Artificial Sequence
  ENSG00000159899_15 (sequence is synthesized)
gggaaatgttgtcgccatcaaacatgtgaataagaagcgcattgagctgacccggcaggttctgtttgaactcaaacatatgagagatgttcagttcaaccatctcactcgcttcattgg

SEQ ID NO: 473385 - DNA, 120 bp, Artificial Sequence
  ENSG00000159899_16 (sequence is synthesized)
cgcctgcatagaccctcccaacatttgcattgtcactgaatactgtcctcgtgggagtttacaggatattctagaaaatgacagcatcaacttggactggatgtttcgttattcactcat

SEQ ID NO: 473386 - DNA, 120 bp, Artificial Sequence
  ENSG00000159899_17 (sequence is synthesized)
taatgaccttgttaagggcatggcctttctccacaacagcattatttcatcgcatgggagtctcaagtcctccaactgtgtggtggatagtcgttttgtgctcaaaatcacagactatgg

SEQ ID NO: 473387 - DNA, 120 bp, Artificial Sequence
  ENSG00000159899_18 (sequence is synthesized)
cctggccagcttccgatcaactgctgaacctgatgacagccatgccctctatgccaagaagctgtggactgccccagaactgctcagtgggaaccccttgccaaccacaggcatgcagaa

SEQ ID NO: 473388 - DNA, 120 bp, Artificial Sequence
  ENSG00000159899_19 (sequence is synthesized)
ggctgacgtctatagctttgggatcatcctgcaggagatagcacttcgcagtggtcctttctacttggagggcctggacctcagccccaaagagattgtccagaaggtacgaaatggtca

SEQ ID NO: 473389 - DNA, 120 bp, Artificial Sequence
  ENSG00000159899_20 (sequence is synthesized)
gcggccatatttccggccaagcattgaccggacccaactgaatgaagagctagttttgctgatggagcgatgttgggctcaggacccagctgagcggccagactttggacagattaaggg

SEQ ID NO: 473390 - DNA, 120 bp, Artificial Sequence
  ENSG00000159899_21 (sequence is synthesized)
cttcattcggcgctttaacaaggagggtggcaccagcatattggacaacctcctgctgcgcatggaacagtatgccaataacttggagaagctggtggaggaacgcacacaggcctatct

SEQ ID NO: 473391 - DNA, 120 bp, Artificial Sequence
  ENSG00000159899_22 (sequence is synthesized)
ggaggaaaaacgcaaggctgaagctctgctctaccaaatcctaccccattcagtggcagagcagttaaaacggggagagactgtacaggctgaggcctttgacagtgttaccatctactt

SEQ ID NO: 473392 - DNA, 120 bp, Artificial Sequence
  ENSG00000159899_23 (sequence is synthesized)
cagtgacattgttggcttcacagcattgtcagcagagagcacccccatgcaggtagtgacacttcttaatgacctgtatacctgctttgatgccataattgacaactttgatgtctacaa

SEQ ID NO: 473393 - DNA, 120 bp, Artificial Sequence
  ENSG00000159899_24 (sequence is synthesized)
ggtggagacgattggggatgcttacatggtggtatctggcctcccaggccgaaatggtcaacgccatgcaccagaaattgctcgtatggccctagcattactagatgcagtttcttcctt

SEQ ID NO: 473394 - DNA, 120 bp, Artificial Sequence
  ENSG00000159899_25 (sequence is synthesized)
tcgcatccgccaccgaccccatgaccagctgaggctacgcataggggtccatactgggccagtctgtgctggggttgttggcctgaagatgccccgttattgtctttttggagacacagt

SEQ ID NO: 473395 - DNA, 120 bp, Artificial Sequence
  ENSG00000159899_26 (sequence is synthesized)
gaacactgcttctcgaatggagtctaatggtcaagcgctgaagatccatgtctcctctaccaccaaggatgccctagatgagctaggatgcttccagctagagcttcggggggatgtgga

SEQ ID NO: 473396 - DNA, 120 bp, Artificial Sequence
  ENSG00000159899_27 (sequence is synthesized)
aatgaagggaaaaggaaagatgcgaacatactggctcttaggagagcggaaaggacctcctggactcctgtaaacccccattctttccaagtcagatagtcttctgctgctggtacctgg

SEQ ID NO: 473397 - DNA, 120 bp, Artificial Sequence
  ENSG00000159899_28 (sequence is synthesized)
gtgggcaatggccaccatgtctgcacacaccagaaatggacattttcatatgcaatggaaaacagccacaaaaaaacctaccttatatggaagttgtagccctctgcagctcagccctgt

SEQ ID NO: 473398 - DNA, 120 bp, Artificial Sequence
  ENSG00000159899_29 (sequence is synthesized)
acatatacctgtccctctctggcttggtccccttcctccctactttctgtaaatatctgtatctaaaccagaatattttggtcaaatataaaacaataataaaaaaagttctgatgtcat

SEQ ID NO: 473399 - DNA, 120 bp, Artificial Sequence
  ENSG00000159899_30 (sequence is synthesized)
gaccccatgaccagctgaggctacgcataggggtccatactggtaaggctgactctcactccagccctagtctccacctttcccagactctcccaacctgtttcttctcaaagggccagt

SEQ ID NO: 473400 - DNA, 120 bp, Artificial Sequence
  ENSG00000159905_0 (sequence is synthesized)
gcgggagctacggctgcgggagttaccctttattctgtgatattttgagctgttctgcgtctcgcaggcccttctgaatttcctggacctactctcggaaccctcaacgagctagcgata

SEQ ID NO: 473401 - DNA, 120 bp, Artificial Sequence
  ENSG00000159905_1 (sequence is synthesized)
gatttagaggaaaggaagcaccgtcggaaagcaaagggatttctggaagcttgaacttaagagtgataacttagggtacctggcaaaagaaatttctgagcagcaaagcattcaagaagt

SEQ ID NO: 473402 - DNA, 120 bp, Artificial Sequence
  ENSG00000159905_2 (sequence is synthesized)
ggcctggctgcctcactgcttcaaacagcctacaattatatatgggagcaaaaaaatgacttaaagttggaatttatatttaaaaggcatgatttcaccttcacttgaactgcttcattc

SEQ ID NO: 473403 - DNA, 120 bp, Artificial Sequence
  ENSG00000159905_3 (sequence is synthesized)
aggactctgcaaattccctgaagtagaaggaaaaatgaccacattcaaagaggcagtgacattcaaggatgtggctgtggtcttcactgaggaggagctggggctgctggaccctgccca

SEQ ID NO: 473404 - DNA, 120 bp, Artificial Sequence
  ENSG00000159905_4 (sequence is synthesized)
gaggaagctgtaccgagatgtgatgctagagaacttcaggaacctgctctcagtagggaatcaaccattccaccaagatactttccacttcttagggaaggaaaagttttggaagatgaa

SEQ ID NO: 473405 - DNA, 120 bp, Artificial Sequence
  ENSG00000159905_5 (sequence is synthesized)
gacaacaagccaaagagaagggaattcaggaggcaagatccaaattgagatggagactgttccagaagcaggaccacatgaagagtggtcctgtcagcaaatatgggaacaaattgcaag

SEQ ID NO: 473406 - DNA, 120 bp, Artificial Sequence
  ENSG00000159905_6 (sequence is synthesized)
tgacctaaccaggtctcaaaactccataaggaacagctctcagttcttcaaagaaggtgatgtcccctgccagattgaggcaagactatctataagtcacgtgcaacagaaaccttaccg

SEQ ID NO: 473407 - DNA, 120 bp, Artificial Sequence
  ENSG00000159905_7 (sequence is synthesized)
ttgtaatgaatgtaaacagtccttcagtgatgtttctgtctttgatcttcatcaacaatcacactcaggagagaaatctcatacatgtggtgagtgtggaaaaagcttctgttacagccc

SEQ ID NO: 473408 - DNA, 120 bp, Artificial Sequence
  ENSG00000159905_8 (sequence is synthesized)
agcccttcatattcatcagagagtccatatgggagaaaaatgctataagtgtgatgtgtgtggtaaggaatttaatcagagctcacatctgcaaactcatcagagagtccatactggaga

SEQ ID NO: 473409 - DNA, 120 bp, Artificial Sequence
  ENSG00000159905_9 (sequence is synthesized)
gaaaccattcaaatgtgggcaatgtgggaaaggcttccatagtagatcagcacttaatgttcattgcaaattgcacacaggagagaaaccttataattgtgaggaatgtgggaaagcctt

SEQ ID NO: 473410 - DNA, 120 bp, Artificial Sequence
  ENSG00000159905_10 (sequence is synthesized)
gcttcaagaacatcagagaatccatactggggagaagccattcaaatgtgatatatgtggtaagagcttccgtgttagatcaagacttaataggcattccatggttcacacaggagaaaa

SEQ ID NO: 473411 - DNA, 120 bp, Artificial Sequence
  ENSG00000159905_11 (sequence is synthesized)
accattcagatgtgatacatgtggcaagaactttcgtcagagatcagcacttaatagtcattccatggtccacatagaagagaagccatacaaatgtgagcaatgtggaaaaggcttcat

SEQ ID NO: 473412 - DNA, 120 bp, Artificial Sequence
  ENSG00000159905_12 (sequence is synthesized)
ttgtaggcgagatttttgtaagcatcagatggtccacacaggagagaaaccatataattgtaaagaatgtgggaagaccttcagatggtcctcatgtcttttgaaccatcagcaagtcca

SEQ ID NO: 473413 - DNA, 120 bp, Artificial Sequence
  ENSG00000159905_13 (sequence is synthesized)
cagtggacaaaaatccttcaaatgtgaagaatgtgggaagggattttatacaaattcacgacgatcttcccatcagagatcccacaatggagaaaagccatataactgtgaggagtgtgg

SEQ ID NO: 473414 - DNA, 120 bp, Artificial Sequence
  ENSG00000159905_14 (sequence is synthesized)
taaggactataaaaggaggttggatcttgagtttcaccagagggtccacacgggtgagagaccctataattgtaaggaatgtggcaagagctttggctgggcctcctgtcttttgaaaca

SEQ ID NO: 473415 - DNA, 120 bp, Artificial Sequence
  ENSG00000159905_15 (sequence is synthesized)
tcagagactccacagtggggaaaaacctttcaaatgtgaagagtgtggaaagagatttactcagagttcacaacttcattcccatcagacatgccatactggagaaaagctatacaaatg

SEQ ID NO: 473416 - DNA, 120 bp, Artificial Sequence
  ENSG00000159905_16 (sequence is synthesized)
tgagcagtgtgagaaggggtacaacagtaaatttaatcttgacatgcaccagagggtccacgggggagagcgaccctataattgtaaggaatgtggaaagagctttggctgggcttcatg

SEQ ID NO: 473417 - DNA, 120 bp, Artificial Sequence
  ENSG00000159905_17 (sequence is synthesized)
tcttttgaaacatcagagactccacagtggagaaaagccattgaaatctggagtgtgggaagagatctactcagaattcacagcttcatttacatcagtaagtctatgtgggagaaaagc

SEQ ID NO: 473418 - DNA, 120 bp, Artificial Sequence
  ENSG00000159905_18 (sequence is synthesized)
catataaatgtgagaagtgtgggaagggctttggctgggcctcaactcatctgacccatcaattctccacagcagagaaaaaccattcaaatatgagaactgtgggaagagctttgtaca

SEQ ID NO: 473419 - DNA, 70 bp, Artificial Sequence
  ENSG00000159905_19 (sequence is synthesized)
aaccattcaaatatgagaactgtgggaagagctttgtacatagatcatgactgcagtggcgctatctcag

SEQ ID NO: 473420 - DNA, 120 bp, Artificial Sequence
  ENSG00000159905_20 (sequence is synthesized)
ggctgcctcactgcttcaaacagcctacaattatatatgggagcaaaaaaatgacttaaagttggaatttatatttaaaaggttcagattatgcattgttggtgtggataccacagaagt

SEQ ID NO: 473421 - DNA, 120 bp, Artificial Sequence
  ENSG00000159905_21 (sequence is synthesized)
gttgaagtgtcataacaggggccaaatgatgtctgtttttcccttcattggagatctcaactttgttcacttggccaagatgatatctttcagatttttccactgaaaggcatgatttca

SEQ ID NO: 473422 - DNA, 120 bp, Artificial Sequence
  ENSG00000159915_0 (sequence is synthesized)
ctatcccctctgggaggtgagtcagcgcggaacctctgcatctacggcgagctttcctggcctgggcgttggactcgcagttctgccttcccaggaccctgcccttccccagaaggagca

SEQ ID NO: 473423 - DNA, 120 bp, Artificial Sequence
  ENSG00000159915_1 (sequence is synthesized)
ggagaaaatgaccaagtttcaggagatggtgacattcaaggatgtggctgtggtcttcaccagggaggagctggggttgctggaccttgcccagagaaagctgtaccaagatgtgatgct

SEQ ID NO: 473424 - DNA, 120 bp, Artificial Sequence
  ENSG00000159915_2 (sequence is synthesized)
ggagaacttcaggaacctgctgtcagtgggctatcaacccttcaaactagatgtgatattacagttgggaaaagaagacaagcttcggatgatggagacagaaatccaaggagatgggtg

SEQ ID NO: 473425 - DNA, 120 bp, Artificial Sequence
  ENSG00000159915_3 (sequence is synthesized)
ttcaggacacaagaatcaaaatgagatagatacccttcaagaagtaagattaagattcctttcatatgaagaccttatatgctggcaaatatgggaacaatttacaagtaaattaaccag

SEQ ID NO: 473426 - DNA, 120 bp, Artificial Sequence
  ENSG00000159915_4 (sequence is synthesized)
taatcaagacctaataataaatcttcaaggcaagaggtccaagttgctaaaacaaggtgattccccctgtcaggtgtggacaggagaatctagtcaggtctctgaagatgagaactatgt

SEQ ID NO: 473427 - DNA, 120 bp, Artificial Sequence
  ENSG00000159915_5 (sequence is synthesized)
aataaagctacaaggggagagttcaaatagcataaaaaatcaagagcttccattgaggaccacctgggatttctggaggaaaatgtatctgagagaaccacagaattatcagagtaggtg

SEQ ID NO: 473428 - DNA, 120 bp, Artificial Sequence
  ENSG00000159915_6 (sequence is synthesized)
tcagcaaattgatgtaaaaaataagctctgtaaatgtgatcattgtgttaggcaaagaattgctcatcaacatgatgatcatggagtacacaaaagagagaaagcttttagccacaataa

SEQ ID NO: 473429 - DNA, 120 bp, Artificial Sequence
  ENSG00000159915_7 (sequence is synthesized)
ttgtggaaaagactgtgtgaaggaatcatcccagcatagcataatccaatcaggagagcaaacctctgatgaaaatggaaaaggcttaagtgttggctctaatcttgaacttcaccagca

SEQ ID NO: 473430 - DNA, 120 bp, Artificial Sequence
  ENSG00000159915_8 (sequence is synthesized)
actacacttaagagacaagcctcatgtaaatgttgagtacgggaagggcataggttacagctcagggcttcccaggcatcagtgtttccacataggagagaaatgctataggaatggtga

SEQ ID NO: 473431 - DNA, 120 bp, Artificial Sequence
  ENSG00000159915_9 (sequence is synthesized)
cagtggtgagggcttcagtcagggctcacatctgcaacctcatcagagagtcagcacaggagagaacctctacagatgtcaggtatatgcccggagctccaaccagaactcctgtcttcc

SEQ ID NO: 473432 - DNA, 120 bp, Artificial Sequence
  ENSG00000159915_10 (sequence is synthesized)
ctctcatgagcttactcacccaggagagaagttgtgtacatgtggcaggtgtgggaagggcttccatcatagcttagattttgacattcactgtgtagacagtgctggagagagagcctg

SEQ ID NO: 473433 - DNA, 120 bp, Artificial Sequence
  ENSG00000159915_11 (sequence is synthesized)
cttcagtcagacatcacaacttcaagcccatcagagaggtcactctagagacaagacatacaaatgggaagtaagtgacaggatatttaataggaattctggtcttcaccagagagttca

SEQ ID NO: 473434 - DNA, 120 bp, Artificial Sequence
  ENSG00000159915_12 (sequence is synthesized)
cactggagagaaaccatataaatgtgaggtatgtgataagggcttcagtaaggcctcaaatcttcaagcccatcagagaatccacactggagagaaaccctacaaatgtgatgtgtgtga

SEQ ID NO: 473435 - DNA, 120 bp, Artificial Sequence
  ENSG00000159915_13 (sequence is synthesized)
taagaacttcagccgtaattcccaccttcaggcccatcagagagtccatacaggagagaaaccctacaaatgtgacacatgtgggaaggacttcagtcagatctctcatcttcaggccca

SEQ ID NO: 473436 - DNA, 120 bp, Artificial Sequence
  ENSG00000159915_14 (sequence is synthesized)
tcagagagttcacaaaggagagaagccatacaaatgtgagacatgtgggaagggctttagtcagagttcgcatctccaagaccatcagcaagtccatactggagagaatccctacaaatg

SEQ ID NO: 473437 - DNA, 120 bp, Artificial Sequence
  ENSG00000159915_15 (sequence is synthesized)
tgatgtgtgtgggaaaggcttcagttggagttcacatcttcaagcccatcagagagtccacacaggagagaaaccatacaaatgtgaagaatgtaggaaaggcttcatctggaactcata

SEQ ID NO: 473438 - DNA, 120 bp, Artificial Sequence
  ENSG00000159915_16 (sequence is synthesized)
tcttcatgttcatcagaggatccacacgggagagaaaccctataaatgtggcatgtgtggtaagagcttcagtcagacttcacatcttcaagcccatcagagagtccatactggagagaa

SEQ ID NO: 473439 - DNA, 120 bp, Artificial Sequence
  ENSG00000159915_17 (sequence is synthesized)
accatacaaatgttttgtgtgtggtaagggctttagtaagagttcgttgtcttcagattcatcagagagtccatgatggtgatgaatctattaatcatgatgagtgtgataggggtgctc

SEQ ID NO: 473440 - DNA, 120 bp, Artificial Sequence
  ENSG00000159915_18 (sequence is synthesized)
ttcaagacttagacttcccattttcctcagaaaatccacacagcacagaatatttataaaatgtcatgttttaagaattcatgagctgagtttttatagttatctgaattccattgaaga

SEQ ID NO: 473441 - DNA, 120 bp, Artificial Sequence
  ENSG00000159915_19 (sequence is synthesized)
aaacctatttttgtatgaatatgaccagtttcaagcagagcccaaaatgtcacagttgtcaagagaacacacaacagagaaaccctataaagaatgatacaatatgtttcaatcagaacc

SEQ ID NO: 473442 - DNA, 120 bp, Artificial Sequence
  ENSG00000159915_20 (sequence is synthesized)
ttcacatccaataagcaatatgcaggagtgaagccttcaaaatgataagtaaggtcagaatttagcaaaagtataatgagggacatgacaaaatctgtgtccactagaatctaagctcca

SEQ ID NO: 473443 - DNA, 120 bp, Artificial Sequence
  ENSG00000159915_21 (sequence is synthesized)
tgcaggaacattgtttactgctgcatgatcgtgaccttgaacaagtacctaagaaatagtggcttccctggaattgtttaacttgataggaaaaatctatcatatataggacatatattt

SEQ ID NO: 473444 - DNA, 120 bp, Artificial Sequence
  ENSG00000159915_22 (sequence is synthesized)
gaatattttagtgagctcagccccaattcgtcattataattgtactgggaaaaggattcttgcaagaagccttaaaatgaattcaaggaaatgacatttaattaaaacacataaaaccaa

SEQ ID NO: 473445 - DNA, 120 bp, Artificial Sequence
  ENSG00000159915_23 (sequence is synthesized)
gggcgaagcagccgtcatctatcccctctgggaggtgagtcagcgcggaacctctgcatctacggcgagctttcctggcctgggcgttggactcgcaggtgcctgccctcgctctcagtg

SEQ ID NO: 473446 - DNA, 120 bp, Artificial Sequence
  ENSG00000159915_24 (sequence is synthesized)
aagggaagtcgcagagggcggggacgacggtttgcttgccctttgtttttagggcggtgcatgggtctccaagttgggaatggctcctggtcgcacgtttggtttgaaggtctcccgggc

SEQ ID NO: 473447 - DNA, 120 bp, Artificial Sequence
  ENSG00000159915_25 (sequence is synthesized)
tcacctcagcctcctgagtagctgggatgggactacaggcacttgccactatgctggactaattttaaaactatgtatatatacatgtttttttttttttggtagagatgaggtctcacc

SEQ ID NO: 473448 - DNA, 120 bp, Artificial Sequence
  ENSG00000159915_26 (sequence is synthesized)
ttacaggcatgagccactgtgcccggcatacatgtatttctttctacctgaagccttttgctcttctgtctgcctgggatgttcttacctcatacatcctcttggctcccagcctacttc

SEQ ID NO: 473449 - DNA, 120 bp, Artificial Sequence
  ENSG00000159915_27 (sequence is synthesized)
gttcttacctcatacatcctcttggctcccagcctacttcctttatgtctggtcagatgtcatctcatcacagaaacctgcttttttttttcttttagacggagtcttgctctgtcgcca

SEQ ID NO: 473450 - DNA, 89 bp, Artificial Sequence
  ENSG00000159915_28 (sequence is synthesized)
tggctcactgcaacctctgactccctggaaaactgctttgactaccctgtttaaaatacctatccttggctgggcgtgatggctcatct

SEQ ID NO: 473451 - DNA, 90 bp, Artificial Sequence
  ENSG00000159915_29 (sequence is synthesized)
cagtgagaccgcacctctataaaaaaatttaaaaaattagctcacagctataactgtgccactgcactgtagcctgggcgacagagcaag

SEQ ID NO: 473452 - DNA, 60 bp, Artificial Sequence
  ENSG00000159915_30 (sequence is synthesized)
gcacctctataaaaaaatttaaaaaattagctcacagctataactgtgccactgcactgt

SEQ ID NO: 473453 - DNA, 120 bp, Artificial Sequence
  ENSG00000159915_31 (sequence is synthesized)
tctgagtctttgcggggtacagcctagtcctctcctcctcaccacctcctcagccaccagcctggcccaagaccccagaattcatcgccctggtttactgcagcagcttgcacatgacct

SEQ ID NO: 473454 - DNA, 120 bp, Artificial Sequence
  ENSG00000159917_0 (sequence is synthesized)
ggaggcacttccgctccaggaaggcgaggtcggatctgagatatctcccagggaggttcacttccccggaactctgccttttcccagaaggaggaggggaaaaatgaccaagttccagga

SEQ ID NO: 473455 - DNA, 120 bp, Artificial Sequence
  ENSG00000159917_1 (sequence is synthesized)
ggcagtgacattcaaggatgtggctgtggccttcactgaggaggagctggggctgctggactctgcccagaggaagctgtaccgagatgtgatgctggagaactttaggaacctggtttc

SEQ ID NO: 473456 - DNA, 120 bp, Artificial Sequence
  ENSG00000159917_2 (sequence is synthesized)
agtgggacatcagtccttcaaaccagatatgatatcccagttggagagggaagaaaagctttggatgaaggagcttcaaacccaaagaggtaagcattcaggagacaggaatcaaaatga

SEQ ID NO: 473457 - DNA, 120 bp, Artificial Sequence
  ENSG00000159917_3 (sequence is synthesized)
gatggcaactcttcacaaagcaggattaaggtgcttttcactgggagagctttcatgctggcaaatcaagagacacattgcgagcaaattagccagaagtcaagactccatgataaatat

SEQ ID NO: 473458 - DNA, 120 bp, Artificial Sequence
  ENSG00000159917_4 (sequence is synthesized)
tgaaggaaagagctctcagttccccaagcaccatgattccccctgtcaagtgggagcaggagaatctattcaagcttctgtggatgacaactgtctagtgaatcacataggggatcattc

SEQ ID NO: 473459 - DNA, 120 bp, Artificial Sequence
  ENSG00000159917_5 (sequence is synthesized)
cagtatcattgaaaatcaagaatttccaactgggaaagttccgaattcttggagtaaaatatatctgaatgagacacagaattatcagagaagttgtaagcagactcagatgaaaaacaa

SEQ ID NO: 473460 - DNA, 120 bp, Artificial Sequence
  ENSG00000159917_6 (sequence is synthesized)
actatgtatatttgctccatatgttgacattttcagttgtatttcacaccaccatgatgataatatagtgcacaaaagagataaagttcatagcaatagtgattgtggtaaagataccct

SEQ ID NO: 473461 - DNA, 120 bp, Artificial Sequence
  ENSG00000159917_7 (sequence is synthesized)
aaaggtatcacctcttacccagcgtagtattcacacaggacagaaaacctaccagggtaatgaatgtgaagaagccttcaatgatagctccagtcttgaacttcataaacaggtacactt

SEQ ID NO: 473462 - DNA, 120 bp, Artificial Sequence
  ENSG00000159917_8 (sequence is synthesized)
gggaaagaagtctccagcgtgtagtacacatgagaaggacaccagttatagctcaggtattcctgttcaacaaagtgttcgtactgggaaaaaacgctattggtgtcatgaatgtggtaa

SEQ ID NO: 473463 - DNA, 120 bp, Artificial Sequence
  ENSG00000159917_9 (sequence is synthesized)
aggtttcagtcagagctcaaatctgcaaactcatcagagagtccacacaggggagaaaccctatacatgccacgagtgtggtaagagctttaatcagagctcacatctttatgctcattt

SEQ ID NO: 473464 - DNA, 120 bp, Artificial Sequence
  ENSG00000159917_10 (sequence is synthesized)
gcctattcacacaggagagaagccctatagatgtgacagttgtgggaagggcttcagtcgtagcacagatcttaacattcattgcagagttcacactggagagaaaccttataaatgtga

SEQ ID NO: 473465 - DNA, 120 bp, Artificial Sequence
  ENSG00000159917_11 (sequence is synthesized)
ggtgtgtgggaagggcttcactcagagatcacatcttcaggcccatgaaagaattcacactggagagaaaccatataaatgtggggattgtggtaaacgctttagttgtagctcaaatct

SEQ ID NO: 473466 - DNA, 120 bp, Artificial Sequence
  ENSG00000159917_12 (sequence is synthesized)
tcatacccatcagagagtccacactgaagaaaaaccatacaaatgtgatgagtgtggtaagtgctttagtttgagctttaatcttcatagtcatcaacgagtccacacaggagaaaaacc

SEQ ID NO: 473467 - DNA, 120 bp, Artificial Sequence
  ENSG00000159917_13 (sequence is synthesized)
acaggagagaaaccatttcgatgcaacgtgtgtgggaaaggcttcagtcagagttcatactttcaagcacatcagagagtccacactggagaaaaaccatacaaatgtgaagtgtgtggg

SEQ ID NO: 473468 - DNA, 120 bp, Artificial Sequence
  ENSG00000159917_14 (sequence is synthesized)
aagcgcttcaattggagcttgaatcttcacaatcatcagagagtccacaccggagagaaaccctacaaatgtgaagagtgtggtaagggtttcagtcaggcttcaaatcttcaagcccat

SEQ ID NO: 473469 - DNA, 120 bp, Artificial Sequence
  ENSG00000159917_15 (sequence is synthesized)
cagagcgtccacactggggaaaaaccattcaagtgtgatgcatgtcagaagcgattcagtcaggcctcacaccttcaagcccatcagagagtccacaccggagagaaaccatataaatgt

SEQ ID NO: 473470 - DNA, 120 bp, Artificial Sequence
  ENSG00000159917_16 (sequence is synthesized)
gacacttgtggtaaggccttcagccagaggtcaaatcttcaagtccatcagataattcacactggagagaaaccatttaaatgtgaggaatgtgggaaagaattcagttggagtgctggt

SEQ ID NO: 473471 - DNA, 120 bp, Artificial Sequence
  ENSG00000159917_17 (sequence is synthesized)
ctcagtgcccatcagagggtccacacaggagagaaaccctatacgtgtcagcagtgtgggaagggcttcagtcaggcctcacattttcacacacaccagagagtccacactggagagagg

SEQ ID NO: 473472 - DNA, 120 bp, Artificial Sequence
  ENSG00000159917_18 (sequence is synthesized)
ccttacatatgtgatgtctgttgtaagggcttcagtcagaggtcacatctcatctaccatcagagagtccacactggagggaatctgtagaaatgagaggtgtggttcagccttcagtta

SEQ ID NO: 473473 - DNA, 120 bp, Artificial Sequence
  ENSG00000159917_19 (sequence is synthesized)
gagctcacatctttgtctccgttgggaagtccatgctgatgattgtgaaaagttcctttaaaactagaagcttcaaagaatcttgacaggaaagaagtctctcaaatgctgtgttttaga

SEQ ID NO: 473474 - DNA, 120 bp, Artificial Sequence
  ENSG00000159917_20 (sequence is synthesized)
cttggttaggacatgaattctttacaaacgtcatatttcacagatgcgagaaaactttgttctgtaaatatgatcagtgtttatatcagagtaccaggtgtcccggttctcaagatgtaa

SEQ ID NO: 473475 - DNA, 120 bp, Artificial Sequence
  ENSG00000159917_21 (sequence is synthesized)
cacagcagaaaagtcttgtcggagtctgcacaggagagaggccttcctttaacaaaagtatgattgacagaaaaaatggatgtcaactaaaatgtaacctctatgtaaggaggtgttttt

SEQ ID NO: 473476 - DNA, 120 bp, Artificial Sequence
  ENSG00000159917_22 (sequence is synthesized)
caccactctatctctaccatgtagaattgtgcttggctcataatagggcccagcaattactgaagaaagtgaagaaaatacctataattaggacaaatacttgaaaattctagtctgttt

SEQ ID NO: 473477 - DNA, 120 bp, Artificial Sequence
  ENSG00000159917_23 (sequence is synthesized)
tctactctaaatttatattaatttatattcaaaaggaatcctgcaagtagccttaataacgttagtttcagtaagtactgaaaagtatataatactgccatccatactaacacaaatttg

SEQ ID NO: 473478 - DNA, 120 bp, Artificial Sequence
  ENSG00000159917_24 (sequence is synthesized)
gaaaaaagacatgaatggctcccatccttcagccttagttctttgtacagtgtatcatcagttgtgtacagtatgatttttagtgtcagtttatagactgaacaatactgtttttatcta

SEQ ID NO: 473479 - DNA, 120 bp, Artificial Sequence
  ENSG00000159917_25 (sequence is synthesized)
atgtgaccctgcaatttacatgattagaatttttggacactaagctgtactgtaactctgaaagtgttaaaagtagttactgatgacaaaaagtttcttagtaaacttgaattgttaata

SEQ ID NO: 473480 - DNA, 120 bp, Artificial Sequence
  ENSG00000159917_26 (sequence is synthesized)
gagtcagctccgggtctccaagacttctccgagccctctttgcctaggcgtggggccagcaatgaacccgtccttggcttggggaagagaagccgcggccagcgctggagggcggggttg

SEQ ID NO: 473481 - DNA, 120 bp, Artificial Sequence
  ENSG00000159917_27 (sequence is synthesized)
ggaggctgcgggagtttgcgtcccctcggcagaacctcttgcgtgggaggcgggctcgcgtcgtccttcgaggttgagggtctgctgccctagccgtcctcacgcacctaccagccagtc

SEQ ID NO: 473482 - DNA, 90 bp, Artificial Sequence
  ENSG00000159917_28 (sequence is synthesized)
gaggcgggggttgcagtgagccgagaacatgccactatactccagcctgagtggcagagcaaaactccatttgtgggccttgatgttcaa

SEQ ID NO: 473483 - DNA, 120 bp, Artificial Sequence
  ENSG00000159917_29 (sequence is synthesized)
aaacaaaactgtgggccttgatgttcaagtcgataattccagcctctgtggagctggtgtcctcagggcttgccatgtccttttttatcaactattctggcttaatttttggcttctcct

SEQ ID NO: 473484 - DNA, 120 bp, Artificial Sequence
  ENSG00000159917_30 (sequence is synthesized)
ggttggccatttccaaagacaagtgtcttttcccaatgtcatcaaccctctcaatcctgggaaagttctggtagtctttgagcagcgtataaggggacaggtcatcatcttggctgggct

SEQ ID NO: 473485 - DNA, 120 bp, Artificial Sequence
  ENSG00000159917_31 (sequence is synthesized)
ggactggtttctggatggcatatccacaggtggcctggaggaagaaacttggaggataccagcaccactggttggaaggaagcctggtgctccctccttttggcttctcaaaaactggag

SEQ ID NO: 473486 - DNA, 120 bp, Artificial Sequence
  ENSG00000159917_32 (sequence is synthesized)
cttgggtctcagtggaacttagcacctttcacacagcccttggcatggtgacttctgacccccaaggggccagggcagctgtccctttcacagcacggactcagttacatgagtgccacc

SEQ ID NO: 473487 - DNA, 120 bp, Artificial Sequence
  ENSG00000159917_33 (sequence is synthesized)
acatatcttcctacttggtttactagctgttggaaaggggtattgaaatctccagctataaatatggatttgtctatcagttattttgagcatgtttctagatgtgcaggttgtataatg

SEQ ID NO: 473488 - DNA, 120 bp, Artificial Sequence
  ENSG00000159917_34 (sequence is synthesized)
agagcctataattgaggcatatattttgcctgatttatgtagttgctacttacgattcagttgctgtagccaaagaagaggtgacttttaatttaccattcttataggcaaagaagtcaa

SEQ ID NO: 473489 - DNA, 120 bp, Artificial Sequence
  ENSG00000159917_35 (sequence is synthesized)
tttttcctttctaagtacttactgagatatcattttgttgttctgcagttggctggtttctacctcttgtcctattcttagatctgtagttctgtgtttcgagaggcaaataaaatccag

SEQ ID NO: 473490 - DNA, 120 bp, Artificial Sequence
  ENSG00000159917_36 (sequence is synthesized)
gaaaatctgtgatggtaaagataagctgaaagtttccatcatgaactaaagcctgataccgaaggaactatgtgtaaaatttggaaacatctggacaaagcattcactttggagttgtgt

SEQ ID NO: 473491 - DNA, 120 bp, Artificial Sequence
  ENSG00000159917_37 (sequence is synthesized)
atactggagaatacacacaggcagcaagactcatactcagaaaagacccaagatacaccttaaccataccctgggctgatctcaaattttctatcttaaatatggctttttaaaacattt

SEQ ID NO: 473492 - DNA, 120 bp, Artificial Sequence
  ENSG00000159917_38 (sequence is synthesized)
ggtgttctcttggttgcagctgcttttcagagttcctataaatttatttcagccagtctagttgtttttttgacgtttccatggggaaaatgagagcttagatcttaattctctactttg

SEQ ID NO: 473493 - DNA, 120 bp, Artificial Sequence
  ENSG00000159917_39 (sequence is synthesized)
ttgaaactggtcatattcatacaaaaataggttttcttcaatggaattcagataactataaaaactcagctcatgaattcttaaaacatgacattttataaatattctgtgctgtgtgga

SEQ ID NO: 473494 - DNA, 120 bp, Artificial Sequence
  ENSG00000159917_40 (sequence is synthesized)
tcctcacatatatggggtttctctcccgtgtggaccctctgatgatggcgaagattcaagctcctaccaaagcctttcccacactcttcacatttgtaaggtttttctccagtgtggcct

SEQ ID NO: 473495 - DNA, 120 bp, Artificial Sequence
  ENSG00000159917_41 (sequence is synthesized)
ctctgatggtatataaactgcgaactgtatctaaagccctttccacacacatcacatttgtatggcttttcccccgtgtggactctctgatgggattgaagaccagaggactgactgaag

SEQ ID NO: 473496 - DNA, 120 bp, Artificial Sequence
  ENSG00000159917_42 (sequence is synthesized)
cccttaccacagacaccacatttgtatggcttctctccagtatggactctctgatgtacccgaaaatctatggcctgactgaagctcttatcacactgctcacatttatagggtttttct

SEQ ID NO: 473497 - DNA, 120 bp, Artificial Sequence
  ENSG00000159917_43 (sequence is synthesized)
cctgagtgaactctttgatgtgcatgaagatttgatctccaactgaagcccttcccacattcctcacatttatatggtttttctccagtgtgaattacttggtgtagtttaagatttgaa

SEQ ID NO: 473498 - DNA, 120 bp, Artificial Sequence
  ENSG00000159917_44 (sequence is synthesized)
aagcattcagaaacctgaatagagtcaccttgtaataactgggaactcttcccctgaagacacctggttaattcacttgcaacctgtttccagatttgccagcaggacagctcttgattt

SEQ ID NO: 473499 - DNA, 120 bp, Artificial Sequence
  ENSG00000159917_45 (sequence is synthesized)
gaaagggttttgcaactgcagcactactattttggactggccaattctctgttgggggcactgtcctgtgcactgtaggagattttgcagaattcctggatactacccacaaaatgccaa

SEQ ID NO: 473500 - DNA, 120 bp, Artificial Sequence
  ENSG00000159917_46 (sequence is synthesized)
tagcacccctctgtcaggtgtgacaaccatttccagacattgccaaatatcttctgggggcgaaatcacccatggttgagaaccagcaatttaaaaggacagaattttgcctgagcagaa

SEQ ID NO: 473501 - DNA, 120 bp, Artificial Sequence
  ENSG00000159921_0 (sequence is synthesized)
aactctattttaagaacctctcaaaacgaaacaagcaaatcatggagaagaatggaaataaccgaaagctgcgggtttgtgttgctacttgtaaccgtgcagattattctaaacttgccc

SEQ ID NO: 473502 - DNA, 120 bp, Artificial Sequence
  ENSG00000159921_1 (sequence is synthesized)
cgatcatgtttggcattaaaaccgaacctgagttctttgaacttgatgttgtggtacttggctctcacctgatagatgactatggaaatacatatcgaatgattgaacaagatgactttg

SEQ ID NO: 473503 - DNA, 120 bp, Artificial Sequence
  ENSG00000159921_2 (sequence is synthesized)
acattaacaccaggctacacacaattgtgaggggagaagatgaggcagccatggtggagtcagtaggcctggccctagtgaagctgccagatgtccttaatcgcctgaagcctgatatca

SEQ ID NO: 473504 - DNA, 120 bp, Artificial Sequence
  ENSG00000159921_3 (sequence is synthesized)
tgattgttcatggagacaggtttgatgccctggctctggccacatctgctgccttgatgaacatccgaatccttcacattgaaggtggggaagtcagtgggaccattgatgactctatca

SEQ ID NO: 473505 - DNA, 120 bp, Artificial Sequence
  ENSG00000159921_4 (sequence is synthesized)
gacatgccataacaaaactggctcattatcatgtgtgctgcacccgcagtgcagagcagcacctgatatccatgtgtgaggaccatgatcgcatccttttggcaggctgcccttcctatg

SEQ ID NO: 473506 - DNA, 120 bp, Artificial Sequence
  ENSG00000159921_5 (sequence is synthesized)
acaaacttctctcagccaagaacaaagactacatgagcatcattcgcatgtggctaggtgatgatgtaaaatctaaagattacattgttgcactacagcaccctgtgaccactgacatta

SEQ ID NO: 473507 - DNA, 120 bp, Artificial Sequence
  ENSG00000159921_6 (sequence is synthesized)
agcattccataaaaatgtttgaattaacattggatgcacttatctcatttaacaagcggaccctagtcctgtttccaaatattgacgcagggagcaaagagatggttcgagtgatgcgga

SEQ ID NO: 473508 - DNA, 120 bp, Artificial Sequence
  ENSG00000159921_7 (sequence is synthesized)
agaagggcattgagcatcatcccaactttcgtgcagttaaacacgtcccatttgaccagtttatacagttggttgcccatgctggctgtatgattgggaacagcagctgtggggttcgag

SEQ ID NO: 473509 - DNA, 120 bp, Artificial Sequence
  ENSG00000159921_8 (sequence is synthesized)
aagttggagcttttggaacacctgtgatcaacctgggaacacgtcagattggaagagaaacaggggagaatgttcttcatgtccgggatgctgacacccaagacaaaatattgcaagcac

SEQ ID NO: 473510 - DNA, 120 bp, Artificial Sequence
  ENSG00000159921_9 (sequence is synthesized)
tgcaccttcagtttggtaaacagtacccttgttcaaagatatatggggatggaaatgctgttccaaggattttgaagtttctcaaatctatcgatcttcaagagccactgcaaaagaaat

SEQ ID NO: 473511 - DNA, 120 bp, Artificial Sequence
  ENSG00000159921_10 (sequence is synthesized)
tctgctttcctcctgtgaaggagaatatctctcaagatattgaccatattcttgaaactctaagtgccttggccgttgatcttggcgggacgaacctccgagttgcaatagtcagcatga

SEQ ID NO: 473512 - DNA, 120 bp, Artificial Sequence
  ENSG00000159921_11 (sequence is synthesized)
agggtgaaatagttaagaagtatactcagttcaatcctaaaacctatgaagagaggattaatttaatcctacagatgtgtgtggaagctgcagcagaagctgtaaaactgaactgcagaa

SEQ ID NO: 473513 - DNA, 120 bp, Artificial Sequence
  ENSG00000159921_12 (sequence is synthesized)
ttttgggagtaggcatttccacaggtggccgtgtaaatcctcgggaaggaattgtgctgcattcaaccaaactgatccaagagtggaactctgtggaccttaggacccccctttctgaca

SEQ ID NO: 473514 - DNA, 120 bp, Artificial Sequence
  ENSG00000159921_13 (sequence is synthesized)
ctttgcatctccctgtgtgggtagacaatgatggcaactgtgctgccctggcggaaaggaaatttggccaaggaaagggactggaaaactttgttacacttatcacaggcacaggaatcg

SEQ ID NO: 473515 - DNA, 120 bp, Artificial Sequence
  ENSG00000159921_14 (sequence is synthesized)
gtggtggaattatccatcagcatgaattgatccacggaagctccttctgtgctgcagaactgggccaccttgttgtgtctctggatgggcctgattgttcctgtggaagccatgggtgca

SEQ ID NO: 473516 - DNA, 120 bp, Artificial Sequence
  ENSG00000159921_15 (sequence is synthesized)
aggacctgctcttggtggaagggatgtcagtgccaaaagatgaggctgtgggtgcgctccatctcatccaagctgcgaaacttggcaatgcgaaggcccagagcatcctaagaacagctg

SEQ ID NO: 473517 - DNA, 120 bp, Artificial Sequence
  ENSG00000159921_16 (sequence is synthesized)
gaacagctttgggtcttggggttgtgaacatcctccataccatgaatccctcccttgtgatcctctccggagtcctggccagtcactatatccacattgtcaaagacgtcattcgccagc

SEQ ID NO: 473518 - DNA, 120 bp, Artificial Sequence
  ENSG00000159921_17 (sequence is synthesized)
aggccttgtcctccgtgcaggacgtggatgtggtggtttcggatttggttgaccccgccctgctgggtgctgccagcatggttctggactacacaacacgcaggatctactagacctcca

SEQ ID NO: 473519 - DNA, 120 bp, Artificial Sequence
  ENSG00000159921_18 (sequence is synthesized)
ggaacagacatggaccttctctccagagctcctgagtggaatcaagttcttgtctttaggatgaccgtttcttaacaatcaaatctggtattgaactgcaggtgactttggcagagaaat

SEQ ID NO: 473520 - DNA, 120 bp, Artificial Sequence
  ENSG00000159921_19 (sequence is synthesized)
gttttcacttttggtctcctcttccagagtcacctttccccactcctatttttgtagatgctattctttctgatgtcttcttactaggggtcattttagctcaaaccctgtaagttacag

SEQ ID NO: 473521 - DNA, 120 bp, Artificial Sequence
  ENSG00000159921_20 (sequence is synthesized)
tcacaattttctgtgccaaagcagctacaataatagagaggaagccttcttagaactctgcttactaatgtattaataccactgagaccttcaggccttgcctgggatatcacttcatcc

SEQ ID NO: 473522 - DNA, 62 bp, Artificial Sequence
  ENSG00000159921_21 (sequence is synthesized)
actgagaccttcaggccttgcctgggatatcacttcatcctgaagtttgcattaataatcct

SEQ ID NO: 473523 - DNA, 62 bp, Artificial Sequence
  ENSG00000159921_22 (sequence is synthesized)
tgaggcaggagaatggcatgaaccccaggctggagtgcagtggctcaatgcaacctctgccc

SEQ ID NO: 473524 - DNA, 120 bp, Artificial Sequence
  ENSG00000159921_23 (sequence is synthesized)
cctagtgacaggtttttatgggtacttttagatgatctaagaaatcatgtgcatatatctttcagatttctattttgggaaaatgaaggtttctacaacatattgtttcagtgttcaaat

SEQ ID NO: 473525 - DNA, 120 bp, Artificial Sequence
  ENSG00000159921_24 (sequence is synthesized)
aaactgaaggactcaacattacatttgaactatatccttcctagtgggttagtgtgaaaaagagtttggctgattcctaaaactctgccagccctgcagtaatctccagggcctggttat

SEQ ID NO: 473526 - DNA, 120 bp, Artificial Sequence
  ENSG00000159921_25 (sequence is synthesized)
tgttcagacattccatggtgattcctgggaaggaagcttggctgctcagtttctgagtctggggtgagataatgttctgggaagggacatctgttctttggtgtaatctctcatggtgaa

SEQ ID NO: 473527 - DNA, 120 bp, Artificial Sequence
  ENSG00000159921_26 (sequence is synthesized)
atctgctctgtacatcagacaattgcattgctaccaagtttcataccaaatatttgaaaggatggtattgaatctaaaaccaaatattagtttttattaaactcatgggaaggctaatat

SEQ ID NO: 473528 - DNA, 120 bp, Artificial Sequence
  ENSG00000159921_27 (sequence is synthesized)
attccaacgtaaattattacatatggttaagtaattgcatgttaatttattttaatgtaaatatttttgttactgttctgagccaaattctaaagaaaaaataaatacatttccttgttg

SEQ ID NO: 473529 - DNA, 120 bp, Artificial Sequence
  ENSG00000159921_28 (sequence is synthesized)
gtctacccgcgcgcccgagcgcggaaaccgaggggcaggctcgcgctctgcctgcttcgtggcgcttggttcgtccctcgcccgaggagcgcggtggcggcgtgggagggagcctctgac

SEQ ID NO: 473530 - DNA, 60 bp, Artificial Sequence
  ENSG00000159921_29 (sequence is synthesized)
aaattagctgggtgtggtggcggcagtgaactgagaccgcaccactgcactccagcctgg

SEQ ID NO: 473531 - DNA, 120 bp, Artificial Sequence
  ENSG00000159921_30 (sequence is synthesized)
acacacacacacacacacacacacatccttcctcctctaaccccaaactaagatcacagaaggtgatccagtcagagaacagagggaaatcttaccaggaagggcttaagtacacttttt

SEQ ID NO: 473532 - DNA, 120 bp, Artificial Sequence
  ENSG00000159921_31 (sequence is synthesized)
cacttttttttaaaacagctttattgtttttaaagcctacaatttgataagccttgacatatgtatacctgtgaaagcatcaccacaatcaagacactggacatatctatcactccccca

SEQ ID NO: 473533 - DNA, 120 bp, Artificial Sequence
  ENSG00000159921_32 (sequence is synthesized)
tctcagatatcccccctaatcctggataccatttgttgaaagatgttattactctagctgaacttacaagagactttagaccagggatctaaattacagtggccttagtgaccttgtcct

SEQ ID NO: 473534 - DNA, 120 bp, Artificial Sequence
  ENSG00000159921_33 (sequence is synthesized)
tatcttcttaggacagctgagaagccactgggacttagagcctttaaaaggagattaactgtcccaaaaggatctttgctactgaccagcagacacttcttccttcagtagcctttcata

SEQ ID NO: 473535 - DNA, 120 bp, Artificial Sequence
  ENSG00000159921_34 (sequence is synthesized)
ctgtgttgagtaacaccctagggtgtccattaaagttttgagttttacctagagcccagagccatgaatcaggattctgtctacatgattcgtgttttcattggtgtcaaaatacaaaag

SEQ ID NO: 473536 - DNA, 120 bp, Artificial Sequence
  ENSG00000159921_35 (sequence is synthesized)
ccaaagttctggctatgaattgttaacttggaagaaatactaactgccaccacttattaagtgcctactgtgtgccaggctctgaactaggtgcttcatatacattatcctaaattatct

SEQ ID NO: 473537 - DNA, 120 bp, Artificial Sequence
  ENSG00000159921_36 (sequence is synthesized)
caacatatgaggtaggtgttttaatttttattttatagaacttggtgtgtttgactgttaagctatggggctagagagagggtttgatcccaggtccctctgtgcttttgctgctgagcc

SEQ ID NO: 473538 - DNA, 120 bp, Artificial Sequence
  ENSG00000159921_37 (sequence is synthesized)
acacaacctctcatttcaaaaacactttcaaaatgctaacatattctaattcactctaggccaccaaaaactttaatactaatatctgatttgtaaatgacttaatgtatccttgaccct

SEQ ID NO: 473539 - DNA, 120 bp, Artificial Sequence
  ENSG00000159921_38 (sequence is synthesized)
agtctggaattcagatgcctattggtgactgctccgtggcagctaaaccaagaaaacagctgctctgctcattatttcaaaccacactagggtacagagctcgtgcttcgggatggaaac

SEQ ID NO: 473540 - DNA, 120 bp, Artificial Sequence
  ENSG00000159921_39 (sequence is synthesized)
accacactagggtacagagctcgtgcttcgggatggaaacctatggttatctgcagagggagtcatgctttcaaggacctcataaaacaacatggcagacatcacaatgttaccgggggt

SEQ ID NO: 473541 - DNA, 120 bp, Artificial Sequence
  ENSG00000159921_40 (sequence is synthesized)
ccgggggtccttgctcccagagctcccaacatggtggcgggttgcttccaagatggcagcaagcctctcgttctctgacctggggttcttggccccacggattccaaggaatggaatctt

SEQ ID NO: 473542 - DNA, 120 bp, Artificial Sequence
  ENSG00000159921_41 (sequence is synthesized)
ccgtagaacccagcgactagtgttcatctcaattaggacgaacccaggcacttgccgtgcaggaacaacggcaagccttcagcccgatcgggagcagcagtgggcgcctcgctggatcag

SEQ ID NO: 473543 - DNA, 120 bp, Artificial Sequence
  ENSG00000159921_42 (sequence is synthesized)
gagcacagcagacaccctgccagatccggaggggtggaagtcagcggcgggtctgcgactgcggcaaacagcagtggtggacaacgagcgaaagcttagcttgagcggtaacaaacacgg

SEQ ID NO: 473544 - DNA, 120 bp, Artificial Sequence
  ENSG00000159958_0 (sequence is synthesized)
cagctcagcctcagtccccgcagcttgtgcggcggcgtcggcaccatgaggcgagggccccggagcctgcggggcagggacgcgccagcccccacgccctgcgtcccggccgagtgcttc

SEQ ID NO: 473545 - DNA, 120 bp, Artificial Sequence
  ENSG00000159958_1 (sequence is synthesized)
cttcgacctgctggtccgccactgcgtggcctgcgggctcctgcgcacgccgcggccgaaaccggccggggccagcagccctgcgcccaggacggcgctgcagccgcaggagtcggtggg

SEQ ID NO: 473546 - DNA, 120 bp, Artificial Sequence
  ENSG00000159958_2 (sequence is synthesized)
gcggcgctgcccctgcccgggctgctctttggcgcccccgcgctgctgggcctggcactggtcctggcgctggtcctggtgggtctggtgagctggaggcggcgacagcggcggcttcgc

SEQ ID NO: 473547 - DNA, 120 bp, Artificial Sequence
  ENSG00000159958_3 (sequence is synthesized)
cggcggcttcgcggcgcgtcctccgcagaggcccccgacggagacaaggacgccccagagcccctggacaaggtcatcattctgtctccgggaatctctgatgccacagctcctgcctgg

SEQ ID NO: 473548 - DNA, 120 bp, Artificial Sequence
  ENSG00000159958_4 (sequence is synthesized)
cctcctcctggggaagacccaggaaccaccccacctggccacagtgtccctgtgccagccacagagctgggctccactgaactggtgaccaccaagacggccggccctgagcaacaatag

SEQ ID NO: 473549 - DNA, 120 bp, Artificial Sequence
  ENSG00000159958_5 (sequence is synthesized)
cagggagccggcaggaggtggcccctgccctccctctggacccccagccaggggcttggaaatcaaattcagctcttcactccagcatgcacatgccctctttctgggaccaggctaact

SEQ ID NO: 473550 - DNA, 120 bp, Artificial Sequence
  ENSG00000159958_6 (sequence is synthesized)
ctgcagaagcacagacactacagaccacagcattcagcccccatggagtttggtgtgcttgcctttggcttcagacctcaccatctttgacagcccttgaaggtggtagcccagctcctg

SEQ ID NO: 473551 - DNA, 120 bp, Artificial Sequence
  ENSG00000159958_7 (sequence is synthesized)
ttcctgtgccttcaaaaggctggggcactatgagtaaaagaccgcttttaaaatggggaaggcaccattaagccaaaatgaatctgaaaaaagaccaagtgggaggatgcctaatttgta

SEQ ID NO: 473552 - DNA, 61 bp, Artificial Sequence
  ENSG00000159958_8 (sequence is synthesized)
tttgtgttttggttttttttgagacagggtcttgctgtatcacgcaggctggagtgcaacg

SEQ ID NO: 473553 - DNA, 120 bp, Artificial Sequence
  ENSG00000159958_9 (sequence is synthesized)
tttgagacagggtcttgctgtatcacgcaggctggagtgcaacgatgggtccccagctaattgcagcctgggctcaagcaatctttctgcttcagcctcctgagtaggtgggactacagg

SEQ ID NO: 473554 - DNA, 78 bp, Artificial Sequence
  ENSG00000159958_10 (sequence is synthesized)
tttttttttttttaaagacagggtctcggtatgttgcccaggccagtctcaaactcctggcctcaggcagtcctcccc

SEQ ID NO: 473555 - DNA, 120 bp, Artificial Sequence
  ENSG00000159958_11 (sequence is synthesized)
caggccagtctcaaactcctggcctcaggcagtcctccccgaagggctgggattataggcaggaggcgccgggcctggcctctatttctttaatacctgccctcagagccgtcctgcttt

SEQ ID NO: 473556 - DNA, 120 bp, Artificial Sequence
  ENSG00000159958_12 (sequence is synthesized)
gctggattttgctgattctcaggtatctgtaccccagggtcaaccctgagattggcccaatctgccagaacctaagatgccattttgaccccagtggcagcttccagagccacaagcctg

SEQ ID NO: 473557 - DNA, 120 bp, Artificial Sequence
  ENSG00000159958_13 (sequence is synthesized)
catttgggaggaggtgcgcagcctccagggctggactccaaactcgagctgaaggaacatgctggcaggtagctctctcagggtccacctggggttccagctgctccaagacacagcaca

SEQ ID NO: 473558 - DNA, 120 bp, Artificial Sequence
  ENSG00000159958_14 (sequence is synthesized)
tttagccataaacatggaagggctgggacctacaggaggctcctttgtgtagaggccagggcaggcgtgtgaccttgaaccaggtggacatgaggtcccttgaactcccttctctctctg

SEQ ID NO: 473559 - DNA, 120 bp, Artificial Sequence
  ENSG00000159958_15 (sequence is synthesized)
gcttgttcccctgaagcactggccccccagtgctgggcttatttggccatcctgtgccagccccctggtcacccaccgtcacagtggaagctgctccctcctcttacaatggtgttcctt

SEQ ID NO: 473560 - DNA, 120 bp, Artificial Sequence
  ENSG00000159958_16 (sequence is synthesized)
gctctggggtctggggacaagaccatctctttccactcctggacgacactgtgcactcagtcagccgcctcctacctgccctcctgcacagggtcagaacctcctgacctggacttcgcc

SEQ ID NO: 473561 - DNA, 120 bp, Artificial Sequence
  ENSG00000159958_17 (sequence is synthesized)
ctgggcagcttccttggaacttgttgcagcttagcatctttggaagggagcactggactaggagtcagaaggtggagttctgggtgctgttttcccactcttgggccctgggcatgttct

SEQ ID NO: 473562 - DNA, 120 bp, Artificial Sequence
  ENSG00000159958_18 (sequence is synthesized)
gttctgtgcatcagatgttttctgcctgcctccccctgagctgccaccagagccacctgtagacccctgcttctcctgcccctcctgtcccttgccaggcctctggactcagtgcttcct

SEQ ID NO: 473563 - DNA, 120 bp, Artificial Sequence
  ENSG00000159958_19 (sequence is synthesized)
gtcccaaggacctgttgtgtgcccagcttggaagacagtggccactcacatccaggtctctgcctggctatttgctccatgaacccatctcagatgcccctgcccccagggagccaggtg

SEQ ID NO: 473564 - DNA, 120 bp, Artificial Sequence
  ENSG00000159958_20 (sequence is synthesized)
acagggtgaggtcaagtgacaagcagtaggtgtgggagaggtttggtggggtcaggcccacatgggcccagccatccactccccttccatctggagttgggggagtctgagctgctcctg

SEQ ID NO: 473565 - DNA, 120 bp, Artificial Sequence
  ENSG00000159958_21 (sequence is synthesized)
gccaccccatctgccccaccccatcttttcctggccaccccagctcccaccccatcttctcctggccaccccatctcccaccccatcttctcttgacaccccatctcccaccccatcttc

SEQ ID NO: 473566 - DNA, 120 bp, Artificial Sequence
  ENSG00000159958_22 (sequence is synthesized)
tcctggccaccccatctcccaccccatcttctcctggccaccccatcttctcctggccaccccatctcccccaccccatcttctcctggacacccccatctcccaccccatcttttgcta

SEQ ID NO: 473567 - DNA, 120 bp, Artificial Sequence
  ENSG00000159958_23 (sequence is synthesized)
cagccagggttagctcagcaggtgaaaaccccgagggtgggtgaaacccctctggggctcagacatgcaaaccttgggcatctctctgtcccagctggccccgccagccggtaggaagtt

SEQ ID NO: 473568 - DNA, 120 bp, Artificial Sequence
  ENSG00000159958_24 (sequence is synthesized)
tcccctgagttctcagttttttcttctgaaaaatgaggggttgtatgcaaggttctcctcctggcctgtggtccccagagaagggcaggaaggaaccttagataattctcatatgcattt

SEQ ID NO: 473569 - DNA, 120 bp, Artificial Sequence
  ENSG00000159958_25 (sequence is synthesized)
aacagacgaggaaactgagacccagagccgtcacatcaatacctcatttgatcttcataagagcacctggaggaggggggtggggtgtttgtgtttgtttaaatttttttttgtgaaaaa

SEQ ID NO: 473570 - DNA, 120 bp, Artificial Sequence
  ENSG00000159958_26 (sequence is synthesized)
aatgaagataggcattttgtagacaatctggaagttctggaccggaatccatgatgtagtcagggaagaaatgacccgtgtccagtaaccccaggcctcgagtgtgtggtgtatttttct

SEQ ID NO: 473571 - DNA, 120 bp, Artificial Sequence
  ENSG00000159958_27 (sequence is synthesized)
acataattgtaatcattctatacatacaaattcatgtcttgaccatcatattaatatttggtaagtttctctctctttagagactccacaataaagttttcaacatggtaaggttttcca

SEQ ID NO: 473572 - DNA, 120 bp, Artificial Sequence
  ENSG00000159961_0 (sequence is synthesized)
atgtccttacagaaactcatggagccagaagctgggaccaataggaccgctgttgctgagttcattctactgggcctagtgcaaacagaagagatgcagccagttgtctttgtgctcctc

SEQ ID NO: 473573 - DNA, 120 bp, Artificial Sequence
  ENSG00000159961_1 (sequence is synthesized)
ctctttgcctatctggtcacaactgggggcaacctcagcatcctggcagccgtcttggtggagcccaaactccacgcccccatgtacttcttcctggggaacctgtcagtgctggatgtc

SEQ ID NO: 473574 - DNA, 120 bp, Artificial Sequence
  ENSG00000159961_2 (sequence is synthesized)
ggatgtatcactgtcactgttcctgcaatgttgggtcgtctcttgtcccacaagtccacaatttcctatgacgcctgcctctcccagctcttcttcttccaccttctggctgggatggac

SEQ ID NO: 473575 - DNA, 120 bp, Artificial Sequence
  ENSG00000159961_3 (sequence is synthesized)
tgcttcctgctgaccgccatggcctatgaccgactcctggccatctgccagcccctcacctacagcacccgcatgagtcagacagtccagaggatgttggtggctgcgtcctgggcttgt

SEQ ID NO: 473576 - DNA, 120 bp, Artificial Sequence
  ENSG00000159961_4 (sequence is synthesized)
accaacgcactgacccacactgtggccatgtccacgctcaacttctgtggccccaatgaggtcaatcacttctactgtgacctcccacagctcttccagctctcctgctccagcacccaa

SEQ ID NO: 473577 - DNA, 120 bp, Artificial Sequence
  ENSG00000159961_5 (sequence is synthesized)
ctcaatgagctgctgctctttgtagcagcagccttcatggctgtggcacccttggtcttcatcagtgtgtcctatgcccatgtggtagctgctgtgctgcaaatccgctctgctgagggc

SEQ ID NO: 473578 - DNA, 120 bp, Artificial Sequence
  ENSG00000159961_6 (sequence is synthesized)
agaaagaaggccttctccacatgtggctcccacctcactgtggtgggcatcttctatgggacaggtgtcttcagctacatgaggctgggttcagtggaatcttcagacaaggataagggg

SEQ ID NO: 473579 - DNA, 120 bp, Artificial Sequence
  ENSG00000159961_7 (sequence is synthesized)
gttggggttttcatgactgtgatcaaccccatgctgaacccacttatctacagcctcagaaatactgatgttcagggcgctctgtgtcagctacttgtggggaagcgatcactgacctga

SEQ ID NO: 473580 - DNA, 72 bp, Artificial Sequence
  ENSG00000159961_8 (sequence is synthesized)
ccaagacaagttcaggaatttgcttgtctctgctcaaatgccctggttgatatctgagaaagaagaggcgag

SEQ ID NO: 473581 - DNA, 120 bp, Artificial Sequence
  ENSG00000159961_9 (sequence is synthesized)
ccagtttctgagtgccccagaggagaatgctgtagtgaacacagccctgtacagagaagacagcagcttgattcctctcatttctcagtcattagcccctcactcgctctccgggaggat

SEQ ID NO: 473582 - DNA, 120 bp, Artificial Sequence
  ENSG00000159961_10 (sequence is synthesized)
aaccaacaaaccttgtttataaccattatttctatctcctgatgcctgaggagtggtgttatgtgtttggcctacaaggaaaccctatataattcattcatttattcattcaacaaatat

SEQ ID NO: 473583 - DNA, 120 bp, Artificial Sequence
  ENSG00000159961_11 (sequence is synthesized)
ttattaaattacttctatgatccaaacaatcttctagggcattggtgagcaaaatggacaaaagtctctgcactcaagcaaatcacatgctataaaggtaggctaaataaataaataagc

SEQ ID NO: 473584 - DNA, 120 bp, Artificial Sequence
  ENSG00000159961_12 (sequence is synthesized)
atcatatatagtataccacatggtgatacactctatagaaaaaagctggtaagacaggaagacatgaagtgagcttctgccaaccaggcctcctgggcaagttggtaccttgctttgggc

SEQ ID NO: 473585 - DNA, 120 bp, Artificial Sequence
  ENSG00000159961_13 (sequence is synthesized)
tgtgcccgctttctcggtagagctgaaatcttggcagcactttatgcctgagcagcaatgtcctacaggaaagggccacttcatcccagcctaggtaaccaagaatatcactgcaaagtt

SEQ ID NO: 473586 - DNA, 120 bp, Artificial Sequence
  ENSG00000159961_14 (sequence is synthesized)
atttcatgctactgttcacctttcacctcccataaaatcagttccctcgctttaataccacacgggaatcccataggacgatcaggcaacaggtggggtctagagaaggaaagagctact

SEQ ID NO: 473587 - DNA, 120 bp, Artificial Sequence
  ENSG00000159961_15 (sequence is synthesized)
aaataaaaactatgttaatacataagtgatataccttaagatcaaaaagggaatgtcctatttccatcccctgcggtatctttctgtcttatttgataaatcatcttcctgacacatatg

SEQ ID NO: 473588 - DNA, 120 bp, Artificial Sequence
  ENSG00000159961_16 (sequence is synthesized)
atactttttgaaacagtaagcgtttatgttccaactaggtcctcagaattttattgtagaatacccaatacaacattctcctccaaagtcttacttttctatcccaaaccttctagcctg

SEQ ID NO: 473589 - DNA, 120 bp, Artificial Sequence
  ENSG00000159961_17 (sequence is synthesized)
aaaatacacacccataaatgcagtccctgggagtgacacctccttctaactttaactttatttgattaatacatcaatactgctgcaacccagagcatttcctcatcttgatgtctatcc

SEQ ID NO: 473590 - DNA, 120 bp, Artificial Sequence
  ENSG00000159961_18 (sequence is synthesized)
aggtttcagcccattaattcctgattctctccagcccctctaggaagactgtttactgcgtcctagcaacactactgtccctctgctgttcatccctaaaactgtccatgggtgcacctg

SEQ ID NO: 473591 - DNA, 120 bp, Artificial Sequence
  ENSG00000159961_19 (sequence is synthesized)
aaccttggcttctctgtgatttcctcttggggttgactggaaggatgggctgagataaggttgtgaagacaagatgtgagagtgggaggtaggaacggattggagcggagcaatgaagat

SEQ ID NO: 473592 - DNA, 120 bp, Artificial Sequence
  ENSG00000159961_20 (sequence is synthesized)
gaaatgagcatatcgagagggatgggacagggtgatgagcaaaagtggtaagaaggaaggatggaagtaatgaaggaaatgatgcaatgagagaatgggaagagagaagtatgtctctta

SEQ ID NO: 473593 - DNA, 120 bp, Artificial Sequence
  ENSG00000159961_21 (sequence is synthesized)
cctgatgctcttgggtgtccagacactttaacgttaaagaacttgagcttcccttaagggcaaagttcttgtgaatgaaaatcacggacacgggttgtaatcacatcattcctactcatc

SEQ ID NO: 473594 - DNA, 120 bp, Artificial Sequence
  ENSG00000159961_22 (sequence is synthesized)
cactgctctgtgatcttagaaagttccttaccatggttgggcttgtgtccacctgtaccataagggactgggacaagattttctatccacggttcctcacatttaatgacctctgatcat

SEQ ID NO: 473595 - DNA, 120 bp, Artificial Sequence
  ENSG00000159961_23 (sequence is synthesized)
aatagtctgaatgagctcttccctgggtctgaacacatcacaaacattttgagagcattaccaccaccatttccaccactccatctacgccgtgagcatctaacgcttgtctatgacccc

SEQ ID NO: 473596 - DNA, 120 bp, Artificial Sequence
  ENSG00000159961_24 (sequence is synthesized)
caaagatcccaggccctggcactgcctcctgtgtggcattgccacctcctttcctgtgttccacctgtcctccaacactgaggggtttcctgaacaagtgagaaagatgtacttccttgg

SEQ ID NO: 473597 - DNA, 120 bp, Artificial Sequence
  ENSG00000159961_25 (sequence is synthesized)
gagtttctctctttgtgctctcaaatataaatatacctatttttaaatgtttcagaaatattatacctgatagtggaaacattcagaaaatattattctttcaaatgggaaataaaaatc

SEQ ID NO: 473598 - DNA, 120 bp, Artificial Sequence
  ENSG00000159961_26 (sequence is synthesized)
aatccaattattccttcacctcgccaaaaacctcatcagagttaactcctcttaagaatttgatgaccaggcatggtggctcacgcctgtcatcccagtgctttgggaggccaaggcagg

SEQ ID NO: 473599 - DNA, 120 bp, Artificial Sequence
  ENSG00000159961_27 (sequence is synthesized)
aagaaaaaaaaaaaaaaaaagaacttggtgtttaatcctccaaagatttcctatatatatgatatgcctacttcacatctgtagaaacatactgttctgtgatctgctttatgattttcc

SEQ ID NO: 473600 - DNA, 120 bp, Artificial Sequence
  ENSG00000160007_0 (sequence is synthesized)
atgatgatggcaagaaagcaagatgtccgaattcccacctacaacatcagtgtggtgggattatctgggaccgagaaggaaaagggccagtgtgggattggaaagtcttgtttgtgcaac

SEQ ID NO: 473601 - DNA, 120 bp, Artificial Sequence
  ENSG00000160007_1 (sequence is synthesized)
cgcttcgtgcgcccgagtgctgacgagtttcacttggaccatacctccgtcctcagcaccagtgactttggagggcgagtggtcaataatgaccactttctctactggggagaagttagc

SEQ ID NO: 473602 - DNA, 120 bp, Artificial Sequence
  ENSG00000160007_2 (sequence is synthesized)
cgctccctggaggattgtgtggaatgtaagatgcacattgtggagcagactgaatttattgatgatcagacttttcaacctcatcgaagcacggccctgcagccctatatcaagagagct

SEQ ID NO: 473603 - DNA, 120 bp, Artificial Sequence
  ENSG00000160007_3 (sequence is synthesized)
gctgcgaccaagcttgcatcagctgaaaaactcatgtacttttgcactgaccagctggggctggagcaggactttgagcagaaacaaatgccagacggaaagctgctggttgatggtttt

SEQ ID NO: 473604 - DNA, 120 bp, Artificial Sequence
  ENSG00000160007_4 (sequence is synthesized)
cttcttggtattgatgttagcaggggcatgaataggaactttgatgaccagctcaagtttgtctccaatctctacaatcagcttgcaaaaacaaaaaagcccatagtggtggtcctgact

SEQ ID NO: 473605 - DNA, 120 bp, Artificial Sequence
  ENSG00000160007_5 (sequence is synthesized)
aagtgtgacgaaggtgttgagcggtacattagagatgcacatacttttgccttaagcaaaaagaacctccaggttgtggagacctcagcgagatccaatgtaaacgtggacttggctttc

SEQ ID NO: 473606 - DNA, 120 bp, Artificial Sequence
  ENSG00000160007_6 (sequence is synthesized)
agcaccttagtgcaactcattgataaaagtcggggaaagacaaaaatcattccttattttgaagctctcaagcagcagagtcagcagatagctacagcaaaagacaagtatgagtggctg

SEQ ID NO: 473607 - DNA, 120 bp, Artificial Sequence
  ENSG00000160007_7 (sequence is synthesized)
gtgagtcgcattgtgaaaaaccacaatgagaactggctgagtgtcagccgaaagatgcaggcctctccagaataccaggactatgtctacctggaagggactcagaaagccaagaagctg

SEQ ID NO: 473608 - DNA, 120 bp, Artificial Sequence
  ENSG00000160007_8 (sequence is synthesized)
tttctacagcacatccaccgcctcaagcatgagcatatcgagcgtaggagaaagctgtacctggcagccctgccattagcttttgaagctcttatacctaatctagatgaaatagaccac

SEQ ID NO: 473609 - DNA, 120 bp, Artificial Sequence
  ENSG00000160007_9 (sequence is synthesized)
ctaagctgcataaaagccaaaaagctcttagaaaccaagccagaattcttgaagtggtttgttgtgcttgaagagaccccatgggatgccaccagtcacattgacaacatggaaaacgaa

SEQ ID NO: 473610 - DNA, 120 bp, Artificial Sequence
  ENSG00000160007_10 (sequence is synthesized)
cggattccctttgatttaatggataccgtccctgcagagcagctatacgaggcccacttagagaagctgaggaacgaaaggaaaagagttgagatgcgaagggcgtttaaagaaaacctg

SEQ ID NO: 473611 - DNA, 120 bp, Artificial Sequence
  ENSG00000160007_11 (sequence is synthesized)
gagacttctcctttcataactcccggaaagccttgggaagaggcccgtagttttattatgaatgaggatttctaccagtggctggaggaatctgtatacatggatatttatggcaaacac

SEQ ID NO: 473612 - DNA, 120 bp, Artificial Sequence
  ENSG00000160007_12 (sequence is synthesized)
caaaagcaaattatagataaagcaaaggaagaatttcaggagttgcttttggaatattcagaattgttttatgaactggagctggatgctaagcccagcaaggagaagatgggtgttatt

SEQ ID NO: 473613 - DNA, 120 bp, Artificial Sequence
  ENSG00000160007_13 (sequence is synthesized)
caggatgttctgggagaggaacagcgatttaaagcattacaaaagctccaagcagagcgtgatgcccttattctgaaacacattcattttgtgtaccacccaacaaaggagacatgcccc

SEQ ID NO: 473614 - DNA, 120 bp, Artificial Sequence
  ENSG00000160007_14 (sequence is synthesized)
agctgcccagcttgtgtggacgctaagattgagcacttgattagttctcggtttatccggccgtctgaccggaatcagaaaaattcactctctgaccctaacattgatagaatcaacttg

SEQ ID NO: 473615 - DNA, 120 bp, Artificial Sequence
  ENSG00000160007_15 (sequence is synthesized)
gttatattgggcaaagacggccttgcccgagagttggccaatgagattcgagctctttgtacaaatgatgacaagtatgtgatagatggtaaaatgtatgagctttccctgaggccaata

SEQ ID NO: 473616 - DNA, 120 bp, Artificial Sequence
  ENSG00000160007_16 (sequence is synthesized)
gaggggaatgtcaggcttcctgtgaactctttccagacgccaacatttcagccccacggctgtctctgcctttacaattcaaaggaatcgctatcctatgtagtggaaagtatagagaag

SEQ ID NO: 473617 - DNA, 120 bp, Artificial Sequence
  ENSG00000160007_17 (sequence is synthesized)
agtagagagtccacgctgggccggcgggataatcatttagtccatctcccccttacattaattttggttaacaagagaggagacaccagtggagagactctgcatagcttaatacagcaa

SEQ ID NO: 473618 - DNA, 120 bp, Artificial Sequence
  ENSG00000160007_18 (sequence is synthesized)
ggtcaacaaattgctagcaaacttcagtgtgtctttctcgaccctgcttctgctggcattggttacggacgcaacattaatgaaaagcaaatcagtcaagttttgaagggactcctggac

SEQ ID NO: 473619 - DNA, 120 bp, Artificial Sequence
  ENSG00000160007_19 (sequence is synthesized)
tctaagcgtaacttaaacctggtcagttctactgctagcatcaaagatttggctgatgttgatctgcgaattgttatgtgtctgatgtgtggagatccttttagtgcagatgacatactt

SEQ ID NO: 473620 - DNA, 120 bp, Artificial Sequence
  ENSG00000160007_20 (sequence is synthesized)
tttcctgtccttcagtcccaaacctgtaaatcttcccattgtggaagcaacaactctgttttacttgaactaccaatcggactgcacaagaagcggattgaactgtctgttctttcatac

SEQ ID NO: 473621 - DNA, 120 bp, Artificial Sequence
  ENSG00000160007_21 (sequence is synthesized)
cattcctcctttagcatcagaaagagccggttggttcatgggtacattgttttttattcagccaaacgtaaggcctctttggctatgttacgtgcctttctttgtgaagtgcaggatatt

SEQ ID NO: 473622 - DNA, 120 bp, Artificial Sequence
  ENSG00000160007_22 (sequence is synthesized)
atccctattcagcttgtagcactcactgatggcgctgtagatgtcctggacaatgacttaagtagggaacagctaactgagggggaggagattgctcaagaaattgacggaaggttcaca

SEQ ID NO: 473623 - DNA, 120 bp, Artificial Sequence
  ENSG00000160007_23 (sequence is synthesized)
agcatcccctgtagccaaccccagcataaacttgagatctttcacccattttttaaagatgtggtggaaaaaaagaacataatcgaggctactcatatgtacgataatgctgccgaggcc

SEQ ID NO: 473624 - DNA, 120 bp, Artificial Sequence
  ENSG00000160007_24 (sequence is synthesized)
tgtagcaccaccgaagaggtgtttaactccccccgggcaggatcaccgctctgcaactcaaacctgcaggattcagaagaagatatcgagccatcttacagcctgtttcgagaagacaca

SEQ ID NO: 473625 - DNA, 120 bp, Artificial Sequence
  ENSG00000160007_25 (sequence is synthesized)
tcactgccttctctgtccaaagaccattctaagctctctatggaactggagggaaatgatgggctgtctttcattatgagcaattttgagagtaaactgaacaacaaagtacctccgcca

SEQ ID NO: 473626 - DNA, 120 bp, Artificial Sequence
  ENSG00000160007_26 (sequence is synthesized)
gtcaaaccaaagcctcctgtccattttgaaattacaaagggggatctatcttatttagaccaaggccatagggatggacagaggaagtctgtgtcttctagcccctggctgcctcaggat

SEQ ID NO: 473627 - DNA, 120 bp, Artificial Sequence
  ENSG00000160007_27 (sequence is synthesized)
gggtttgatccttctgactatgctgaacccatggatgctgtggtgaagccaaggaatgaagaagaaaacatatactccgtgccccatgacagcacccaaggcaaaatcatcaccattcgg

SEQ ID NO: 473628 - DNA, 120 bp, Artificial Sequence
  ENSG00000160007_28 (sequence is synthesized)
aatatcaacaaagcccagtccaacggcagcgggaatggttctgacagtgaaatggacaccagctctctagagcgagggcgcaaggtttccatcgtgagcaagccagtgctgtacaggacg

SEQ ID NO: 473629 - DNA, 120 bp, Artificial Sequence
  ENSG00000160007_29 (sequence is synthesized)
agatgcacccggctggggcggtttgctagttaccggaccagcttcagcgtggggagtgatgatgagctggggcccatccggaagaaagaggaggatcaggcatcccagggttataaaggg

SEQ ID NO: 473630 - DNA, 120 bp, Artificial Sequence
  ENSG00000160007_30 (sequence is synthesized)
gacaatgctgtcattccatacgaaacagacgaagacccgcggaggaggaatattcttcgcagcctaaggaggaacactaagaaaccaaagcccaaaccccggccatccatcacaaaggca

SEQ ID NO: 473631 - DNA, 120 bp, Artificial Sequence
  ENSG00000160007_31 (sequence is synthesized)
acctgggagagtaactattttggggtgcccttaacaactgtcgtgactccagagaagccgatccccatttttattgaaagatgtattgagtacattgaagccacaggactgagcacggaa

SEQ ID NO: 473632 - DNA, 120 bp, Artificial Sequence
  ENSG00000160007_32 (sequence is synthesized)
ggcatctaccgggtcagcgggaacaagtctgagatggagagtctgcagagacagtttgatcaagaccacaacctggacctggcagagaaagactttacggtgaataccgtggctggtgcc

SEQ ID NO: 473633 - DNA, 120 bp, Artificial Sequence
  ENSG00000160007_33 (sequence is synthesized)
atgaagagctttttctcagaactgcctgaccccctggtcccgtataacatgcagatcgacttggtggaagcacacaaaatcaacgaccgggagcagaagttgcatgcccttaaggaggta

SEQ ID NO: 473634 - DNA, 120 bp, Artificial Sequence
  ENSG00000160007_34 (sequence is synthesized)
ttaaagaaatttccaaaggaaaaccacgaagtcttcaagtatgtcatctctcacctaaacaaggtcagccacaacaacaaggtgaatctcatgaccagcgagaacctctccatctgcttc

SEQ ID NO: 473635 - DNA, 120 bp, Artificial Sequence
  ENSG00000160007_35 (sequence is synthesized)
tggcccaccttgatgagacctgatttcagcactatggacgccctcacagccacgcgcacctaccagacaatcattgaactctttatccagcagtgccccttcttcttctacaatcggccc

SEQ ID NO: 473636 - DNA, 120 bp, Artificial Sequence
  ENSG00000160007_36 (sequence is synthesized)
ccccccagtccccaatgcagccactgcttccctcccagcttcaagccgaacacacgctgtgagccaccaagacctggggcgacaggagaaccggtcctctctctgacggggtggcatttg

SEQ ID NO: 473637 - DNA, 120 bp, Artificial Sequence
  ENSG00000160007_37 (sequence is synthesized)
gccttgaacaaaaccaagtccactggggacagaggcaggggcaagtggctctccccattaccttctcaagacctcagtgggagcaccagccaatggtaccatcggctgggctgccaggta

SEQ ID NO: 473638 - DNA, 120 bp, Artificial Sequence
  ENSG00000160007_38 (sequence is synthesized)
ccctgggcctggcgctgcagacctgagctggcttggacccatttgaggactgaactaggcaggcaatggctccagtgccctccctctgttccctggaccaccaccccacgtagctgctca

SEQ ID NO: 473639 - DNA, 120 bp, Artificial Sequence
  ENSG00000160007_39 (sequence is synthesized)
caccagcctccgggtgcctccctctgcttgtacagagcccatggtcgggacagtgccctggcctttgccggggaggaggatgctctgagattcagggtggggctggcaacccctgaagag

SEQ ID NO: 473640 - DNA, 120 bp, Artificial Sequence
  ENSG00000160007_40 (sequence is synthesized)
aacacttcctgttggtctgtctcttcccaccttccatctgcacacacccccaaggtaagggtacagcccggctggcggcctccttgggaacgtgtaggccacggctctgccaccactagg

SEQ ID NO: 473641 - DNA, 120 bp, Artificial Sequence
  ENSG00000160007_41 (sequence is synthesized)
tacctgctgagggcgctggctctgcagatcagaacaacggaggatagctttgtgcctggacccagagagtgtgggactccccgcttcatccccaccgtcccactccacagccttcccgaa

SEQ ID NO: 473642 - DNA, 120 bp, Artificial Sequence
  ENSG00000160007_42 (sequence is synthesized)
acattccctggcaaacaaaggaacactaggagaaaaaatggaaaaacccttccagtaattaaaaaggaagaaaccacagaaagaaaactacagacctcaagattccactctgtgcccgcc

SEQ ID NO: 473643 - DNA, 120 bp, Artificial Sequence
  ENSG00000160007_43 (sequence is synthesized)
tctgccgggagggagggaggcacacaggtggagctgaccctcgtctttgtggcagcaaaaccaggatgcctggagctgtggcctgagggcctgctggggtcccactcacccacttaggtc

SEQ ID NO: 473644 - DNA, 120 bp, Artificial Sequence
  ENSG00000160007_44 (sequence is synthesized)
tagtcgctagatcccccgttttcccaagaagagggttcgagcccttggtggggacagctggggagatggcagtgcaggctggaacctgggctgccccagaacacagtccattacgataga

SEQ ID NO: 473645 - DNA, 120 bp, Artificial Sequence
  ENSG00000160007_45 (sequence is synthesized)
aacactaattgagcatgtgcgtggggtgggggtgtgtgtgcacatgtgagtgtgagtgtgtgtgggcgcttggtggggggttggggacagctggaaggtgccaggtgcacttggggttgg

SEQ ID NO: 473646 - DNA, 120 bp, Artificial Sequence
  ENSG00000160007_46 (sequence is synthesized)
ggttggtgtgttgggtgttgaagtggaatcgtttcatcccagccatggaggccaccagcaggagtgttcatggggatgtgggcgaggtggggcactttgaaggaatggcggtctgctggt

SEQ ID NO: 473647 - DNA, 120 bp, Artificial Sequence
  ENSG00000160007_47 (sequence is synthesized)
gccctcgaaggggcatccttcctggtcttcgctgacccagaggcgctgtgcctgcatatcatccaccaccaccctagcccagccttcccactgccccaggaaaagctcttctcctggcca

SEQ ID NO: 473648 - DNA, 120 bp, Artificial Sequence
  ENSG00000160007_48 (sequence is synthesized)
cctctgccccccagcacctcaaacttgcatggctgggctgtggcctctgcggccaggaagcctgacactaggcaccccccaggcgagagctagtggggtgcagagggccccatgccagac

SEQ ID NO: 473649 - DNA, 120 bp, Artificial Sequence
  ENSG00000160007_49 (sequence is synthesized)
agcccttggggctcgttgcactttaagaaataggatctgtggtgtattccagggggcctgatggacacctttcccgggcgtctgcagctgccctgcccgtgcccgcctgcagtggttgga

SEQ ID NO: 473650 - DNA, 120 bp, Artificial Sequence
  ENSG00000160007_50 (sequence is synthesized)
gacgggagtggcccttcggctcccgagctccctctggggacggctggctcactgtctccagttctcaatggccaacgaaggtgcttggaaacacctaaccttgcaagttttaccgccttt

SEQ ID NO: 473651 - DNA, 120 bp, Artificial Sequence
  ENSG00000160007_51 (sequence is synthesized)
tgaggaacacaaatcggagaacaaacccagggttcaggcgtgttttctgtgaatgttggatgatgaatttttgtctcttctggtggagctgtgcctggccctgtaggcccagggttggct

SEQ ID NO: 473652 - DNA, 120 bp, Artificial Sequence
  ENSG00000160007_52 (sequence is synthesized)
ggaaggtgacatctgtgtttcgttttagctgaggttggcagaaacgttcccaaactcccccagccctggaccccagcagatgaggaaacggccccatttactgaccccgcccccttttcg

SEQ ID NO: 473653 - DNA, 120 bp, Artificial Sequence
  ENSG00000160007_53 (sequence is synthesized)
aggttatgctcacctggtcagctcctcacgtaattgggggtggagggaaagcatggtggtgccctgggccgtccctgtgtgaacgcaggcaaaagcagcccagtccccctcactgcttga

SEQ ID NO: 473654 - DNA, 120 bp, Artificial Sequence
  ENSG00000160007_54 (sequence is synthesized)
gctaacactgccacctcttttgtgtgagcacaaaagccacgtcccaagccacctggcccgattccacagatgtatgtgcggccagtgacttccccaggagtgtggagggggtggtgagga

SEQ ID NO: 473655 - DNA, 120 bp, Artificial Sequence
  ENSG00000160007_55 (sequence is synthesized)
ggagcacctgggctctctacccctctcctcacagaagtacctgaaactaggtctggggcactcccaatgcagcgccttgtcagccaaggtgggcaggcagggactgtggcagcttatgtc

SEQ ID NO: 473656 - DNA, 120 bp, Artificial Sequence
  ENSG00000160007_56 (sequence is synthesized)
caaagggagcccccatgcacaggaagccacagggttcctcttgtttcccccgctaacttcagcctctcatctgctgctccgggctgagggactagaggacatctcggtcgtttgaggggc

SEQ ID NO: 473657 - DNA, 120 bp, Artificial Sequence
  ENSG00000160007_57 (sequence is synthesized)
atggccagtcgtggcaggccggccttcagcgtccggtcagggaagcgtgcagcccaaatgggcacttgcatgggagccacagaggagcgtccctggggattgttgggaccatgctgcccc

SEQ ID NO: 473658 - DNA, 120 bp, Artificial Sequence
  ENSG00000160007_58 (sequence is synthesized)
cactcccgcttttgttggggctctaagttctggaaggtgtgtgcacagagggtgctcatgggactcgcatgcagctctcagcactgggtgggagggcgttggcttgtccagaatggggac

SEQ ID NO: 473659 - DNA, 120 bp, Artificial Sequence
  ENSG00000160007_59 (sequence is synthesized)
gtggggcagccacccctgcccagcgagagcgcagacaccgtgtgaggggacagcagcccttggtgcaaagccagagactgatcctggctctgacggctgaagagggaagacccaaggctg

SEQ ID NO: 473660 - DNA, 120 bp, Artificial Sequence
  ENSG00000160007_60 (sequence is synthesized)
ggtggcgtggctcgtgaatccacttagaattcttggcttgtgtcgcatactgggtgtcacggcacacatttactctgcattgtccccgtctttcccatcgcctagcgtttggggaggaac

SEQ ID NO: 473661 - DNA, 120 bp, Artificial Sequence
  ENSG00000160007_61 (sequence is synthesized)
agggagagagcttcggggcgtctgtctccgtgctctcctgcctccaccgccttggttttgcttcctgctggaggcagggcacctgctgcgacccagattcttctgcaggatgtgtctgtc

SEQ ID NO: 473662 - DNA, 120 bp, Artificial Sequence
  ENSG00000160007_62 (sequence is synthesized)
tttgtcacggtggacagagggtgacatcataggagcagctcgctggccagaaggggatgggggcatccctgtgcctcactcagctcctgctgctcttagggaaaggaggcctgggtcaag

SEQ ID NO: 473663 - DNA, 87 bp, Artificial Sequence
  ENSG00000160007_63 (sequence is synthesized)
cagctcctgctgctcttagggaaaggaggcctgggtcaagccagcatccccttggtaaagacccccgcaggccaccaggcattctgg

SEQ ID NO: 473664 - DNA, 120 bp, Artificial Sequence
  ENSG00000160007_64 (sequence is synthesized)
caagagtcacctcagctgcgcccccctcccatcctttcctatgagaagccactgctttgggggcgccggctagaaaaagtagggtgcggtggccaggagggcccctgccgcgcggggggc

SEQ ID NO: 473665 - DNA, 120 bp, Artificial Sequence
  ENSG00000160007_65 (sequence is synthesized)
tgggtctggttgagtcgctgctttcccgagggcagcgcagggatccggggaagctgcggcagggagcgggcgccggcttcgtggctctgaggtgtaacgggggtgggctccctccctcgg

SEQ ID NO: 473666 - DNA, 120 bp, Artificial Sequence
  ENSG00000160007_66 (sequence is synthesized)
aggacatcgtctgtgtccaggtcagaaagtggcccaggaagggggcagtttctgtcgcgggtccggtgggggcgcggccgcggtgcggtcggtgcagcgtggccaatgcgcggcgcgcgc

SEQ ID NO: 473667 - DNA, 120 bp, Artificial Sequence
  ENSG00000160007_67 (sequence is synthesized)
gggggacagagcaggaggcggtctgtcacctcggccactgctgacctgggctggcctcccccagccctcccgtggcggagccggcagcgatgctacaggcctaagttattgtttgcataa

SEQ ID NO: 473668 - DNA, 120 bp, Artificial Sequence
  ENSG00000160007_68 (sequence is synthesized)
aaagaatcatgttccctgtgtacatttaagaaaaaaacaaaaaaacggaaatgtcagaattgtatggaaataaaacttgtttgaaaatttggaatagtgctgctgccagcttatttttct

SEQ ID NO: 473669 - DNA, 120 bp, Artificial Sequence
  ENSG00000160007_69 (sequence is synthesized)
ggtacttgtattttcacatgttaaatgatctttatatatgttgaattaacaaatattttgagtttctgagaaaaaacaaaacatattaatggtattgaaatgtgttagtagtctggctgt

SEQ ID NO: 473670 - DNA, 120 bp, Artificial Sequence
  ENSG00000160007_70 (sequence is synthesized)
gtgcccaaaattctgtttcgcagcaaaagtgaagacctgtatgtaaagaaagtataacaattatttctttgtattttaggggctttaaccggaacatcgtctagctggtgttaggaatgt

SEQ ID NO: 473671 - DNA, 120 bp, Artificial Sequence
  ENSG00000160007_71 (sequence is synthesized)
ttgcttaatttccagacttttttttaaaaacacatcgtgggttttttgaggctccaacctgattagtgcatggtcagccctcaatgaaggctgaggcatctctgactgaggtgtttttgt

SEQ ID NO: 473672 - DNA, 120 bp, Artificial Sequence
  ENSG00000160007_72 (sequence is synthesized)
ttggttttgttttttaaaatcatgtatttgctacaaagtattgtacttgtctcaatgggaatggtgtaaaaaacaaaaggccttatgtgatctgtatcatagttaataaatgaatcttgt

SEQ ID NO: 473673 - DNA, 120 bp, Artificial Sequence
  ENSG00000160007_73 (sequence is synthesized)
cttcagcgggggcctgggacacagaggtgggccagacccctgggccagtgccactgccagaaatcaacgaccgggagcagaagttgcatgcccttaaggaggtattaaagaaatttccaa

SEQ ID NO: 473674 - DNA, 120 bp, Artificial Sequence
  ENSG00000160007_74 (sequence is synthesized)
aggaaaaccacgaagtcttcaagtatgtcatctctcacctaaacaagtaagtcgcagggccttctggttggtttttcctcctgaaaattgacagccagggtcagtgtgtcgcagaacaag

SEQ ID NO: 473675 - DNA, 120 bp, Artificial Sequence
  ENSG00000160007_75 (sequence is synthesized)
gcctctgcctctcgcccatcctcaggcctccctcctgctcctgtctgagggcagcccacgtggcctcaaacctgcctaacaccagatagggcacttagctccagcgggcatggggcctct

SEQ ID NO: 473676 - DNA, 120 bp, Artificial Sequence
  ENSG00000160007_76 (sequence is synthesized)
tgtaggcctgtgtcccaaagctggcagagagagaagatcttctggttggtactgatgctccagaaatcttctcctgaatcaaaaacacctcagagtccctgaaagtcctctcacagcatt

SEQ ID NO: 473677 - DNA, 120 bp, Artificial Sequence
  ENSG00000160007_77 (sequence is synthesized)
cgggaacaagtctgagatggagagtctgcagagacagtttgatcaaggtaaagtgcagcctggccaggcatccgaggccagagctggtcaaggcagacacagctgcctcggtgaactgtc

SEQ ID NO: 473678 - DNA, 120 bp, Artificial Sequence
  ENSG00000160007_78 (sequence is synthesized)
tgtggggcttcggagcactcctgccagcacagacccaaagccacgaggtgctgagactgagaaagagaccatgtgtggctgcagcggggaggaggggaccgggtcctgtcagtgaaccga

SEQ ID NO: 473679 - DNA, 120 bp, Artificial Sequence
  ENSG00000160007_79 (sequence is synthesized)
agcaccatccctgcccaagctgggtcatgtaggccactccccacactgccactcacagatgctcttccaggttgcccgggcacatgcctccctcaccacactgaagagctttgcctgttt

SEQ ID NO: 473680 - DNA, 120 bp, Artificial Sequence
  ENSG00000160007_80 (sequence is synthesized)
tcccatgcagagctagttgcaggcacatgatatacaagtcgggttgagatgtgatcctgttttgccagggcctcagatctaccctcctcacaaagtcccagcaccagagaaagtgaggga

SEQ ID NO: 473681 - DNA, 120 bp, Artificial Sequence
  ENSG00000160007_81 (sequence is synthesized)
ccatcgtgtgaggagctgagcccttgggacagagacccaagttacatagctcttggcagggactcccttctcctaagctgagccagcttcaagaggcctaaagtcaggcagccaaactac

SEQ ID NO: 473682 - DNA, 120 bp, Artificial Sequence
  ENSG00000160007_82 (sequence is synthesized)
ctcttggaattgcccacactgtgggatgagaagccacgtcccccagtgccagaagcaaaagcaccagagcagggcacattcccatctatcagcagccagggcaggaggcaccacccagag

SEQ ID NO: 473683 - DNA, 120 bp, Artificial Sequence
  ENSG00000160007_83 (sequence is synthesized)
tggacaccacacccacttcccaggtgggcggcccttgcgccttgcagcaccgcagtcgggctcagctggccggcagcaggcagaggggaccgcaggacagggaaacgcctgctaatctgt

SEQ ID NO: 473684 - DNA, 120 bp, Artificial Sequence
  ENSG00000160007_84 (sequence is synthesized)
gggagacacgaggccaaagtgagggtagagcccccagtgtgggatgcatttgtatatatgggagatcctgtaccagcttacctcccccatagtggaacctggtactgtccatctgtagag

SEQ ID NO: 473685 - DNA, 120 bp, Artificial Sequence
  ENSG00000160007_85 (sequence is synthesized)
atttcttcgtcatcaggaacgcactgaagtatgtatgcaatgagaaggaaagcatgacatgggtcagcggtgcctgtggctgggaagggccagagagagaaaaaatgagcctatttgccc

SEQ ID NO: 473686 - DNA, 120 bp, Artificial Sequence
  ENSG00000160007_86 (sequence is synthesized)
tcccaccataggggacaaggatggaggcagcagtcacagtggttgctaacatctttgtgacctacctggaaagcgagccaccctttaggaaagccgcctccttcttctgtgatgggaagg

SEQ ID NO: 473687 - DNA, 120 bp, Artificial Sequence
  ENSG00000160007_87 (sequence is synthesized)
gagtaaggaagaggcaacagcatatcaaagccagatgaaggcaagctcctggcaccaaaaaccagcatgtgggggtagcacccctgccccgagagtggtagaaggggcagttcagcagtc

SEQ ID NO: 473688 - DNA, 120 bp, Artificial Sequence
  ENSG00000160007_88 (sequence is synthesized)
gtctctggctccttgaggtttctctagcctctcctgagccccgagttgtcctgatgcttctgcctggcttagaatggtttggcctcactctcctgacttcctttcagaccacaacctgga

SEQ ID NO: 473689 - DNA, 120 bp, Artificial Sequence
  ENSG00000160007_89 (sequence is synthesized)
ctgggacacagaggtgggccagacccctgggccagtgccactgccaggtgtgccagccttgggcacaggctttgggggaaagagtggggttagtgtcatccaaaagccctgggctgtcct

SEQ ID NO: 473690 - DNA, 120 bp, Artificial Sequence
  ENSG00000160007_90 (sequence is synthesized)
cagagaaggcccatcacagagcacgccctggggtggccaccagcctcggccatgaaaggcaaggctttggttttctctctcctcagaaatcaacgaccgggagcagaagttgcatgccct

SEQ ID NO: 473691 - DNA, 120 bp, Artificial Sequence
  ENSG00000160007_91 (sequence is synthesized)
taccgtggctggtgccatgaagagctttttctcagaactgcctgaccccctggtcccgtataacatgcagatcgacttggtggaagcacacagtgtcaccgaatgaaggaggcactgtcc

SEQ ID NO: 473692 - DNA, 120 bp, Artificial Sequence
  ENSG00000160007_92 (sequence is synthesized)
tctggactccagaccaccacaggaccttcctccctgctcagcgtgcccgtcattggcattctgtctgctcttccaagtctcactctcaccagggtgcttgtgcaactcccccaactctga

SEQ ID NO: 473693 - DNA, 120 bp, Artificial Sequence
  ENSG00000160007_93 (sequence is synthesized)
caggaggaggtggaggaggcggaggagggaacccgcgagggagggtccgcccggccccccgccgccggagccgccgccgccgcctcagccgccgctggactaggagcaggggaacatggc

SEQ ID NO: 473694 - DNA, 120 bp, Artificial Sequence
  ENSG00000160007_94 (sequence is synthesized)
cgctggactaggagcaggggaacatggcgccggggcccccgtcgttgctgccgggattttggaggccggggccgcgctgagggcgcccagctggaagaaatgttggctatttggcgatga

SEQ ID NO: 473695 - DNA, 120 bp, Artificial Sequence
  ENSG00000160007_95 (sequence is synthesized)
gaggtggtgaacagtgaccatactggtatacaacactatgggacctggcatttttgctgcatgtccagcccacccccactaataatgtaggaagctgtctggtccattggaaacactaat

SEQ ID NO: 473696 - DNA, 120 bp, Artificial Sequence
  ENSG00000160013_0 (sequence is synthesized)
acacagaccgacacaggcagcgagagacacgaggagcaaagcaagtgaaggcacagacgcacgggacaggagagcctgggcaagactggagagcccagacctgggatggcggattcgtgc

SEQ ID NO: 473697 - DNA, 120 bp, Artificial Sequence
  ENSG00000160013_1 (sequence is synthesized)
aggaacctcacctacgtgcggggctcggtggggccggccaccagcaccctgatgttcgtggccggtgtggtgggcaacgggctggccctgggcatcctgagcgcacggcgaccggcgcgc

SEQ ID NO: 473698 - DNA, 120 bp, Artificial Sequence
  ENSG00000160013_2 (sequence is synthesized)
ccctcggccttcgcggtgctggtgaccggactggcggccaccgacctgctgggcaccagcttcctgagcccggccgtgttcgtggcctatgcgcgcaacagctccctgctgggcctggcc

SEQ ID NO: 473699 - DNA, 120 bp, Artificial Sequence
  ENSG00000160013_3 (sequence is synthesized)
cgaggcggccccgccctgtgcgatgccttcgccttcgccatgaccttcttcggcctggcgtccatgctcatcctctttgccatggccgtggagcgctgcctggcgctgagccacccctac

SEQ ID NO: 473700 - DNA, 120 bp, Artificial Sequence
  ENSG00000160013_4 (sequence is synthesized)
ctctacgcgcagctggacgggccccgctgcgcccgcctggcgctgccagccatctacgccttctgcgtcctcttctgcgcgctgcccctgctgggcctgggccaacaccagcagtactgc

SEQ ID NO: 473701 - DNA, 120 bp, Artificial Sequence
  ENSG00000160013_5 (sequence is synthesized)
cccggcagctggtgcttcctccgcatgcgctgggcccagccgggcggcgccgccttctcgctggcctacgccggcctggtggccctgctggtggctgccatcttcctctgcaacggctcg

SEQ ID NO: 473702 - DNA, 120 bp, Artificial Sequence
  ENSG00000160013_6 (sequence is synthesized)
gtcaccctcagcctctgccgcatgtaccgccagcagaagcgccaccagggctctctgggtccacggccgcgcaccggagaggacgaggtggaccacctgatcctgctggccctcatgaca

SEQ ID NO: 473703 - DNA, 120 bp, Artificial Sequence
  ENSG00000160013_7 (sequence is synthesized)
gtggtcatggccgtgtgctccctgcctctcacgatccgctgcttcacccaggctgtcgcccctgacagcagcagtgagatgggggacctccttgccttccgcttctacgccttcaacccc

SEQ ID NO: 473704 - DNA, 120 bp, Artificial Sequence
  ENSG00000160013_8 (sequence is synthesized)
tgtcttccagcgactcaagctctgggtctgctgcctgtgcctcgggcctgcccacggagactcgcagacacccctttcccagctcgcctcagggaggagggacccaagggccccctctgc

SEQ ID NO: 473705 - DNA, 120 bp, Artificial Sequence
  ENSG00000160013_9 (sequence is synthesized)
tcctgtgggaaaggaggggagctgcgtgcctttgtcggcttggggcgaggggcaggtggagcccttgcctcccacacagcagtccagcggcagcgccgtgggaacgtcgtccaaagcaga

SEQ ID NO: 473706 - DNA, 120 bp, Artificial Sequence
  ENSG00000160013_10 (sequence is synthesized)
agccagcgtcgcctgctccctctgctgacatttcaagctgaccctgtgatctctgccctgtcttcgggcgacaggagccagaaaatcagggacatggctgatggctgcggatgctggaac

SEQ ID NO: 473707 - DNA, 120 bp, Artificial Sequence
  ENSG00000160013_11 (sequence is synthesized)
cttggcccccaaactctggggccgatcagctgctgtttctcctgcggcagggcagtcgctgctggctctgggaagagagtgagggacagaggaaacgtttatcctggagtgcagaaagaa

SEQ ID NO: 473708 - DNA, 120 bp, Artificial Sequence
  ENSG00000160013_12 (sequence is synthesized)
tggttctctcaaaataaccagtggcctggccgacctgctctggccctggattccccatccatctcattgtctaaatatttagaaggcggagaagttcccagaggcttctgtacagtcagg

SEQ ID NO: 473709 - DNA, 120 bp, Artificial Sequence
  ENSG00000160013_13 (sequence is synthesized)
tctgctctggtctgggtgctggctccaatctgcgtccacttaggaggcccaactgcccaccccaagtccccaggggatggccctccccctctaccaagccactccaagagccagcccctt

SEQ ID NO: 473710 - DNA, 120 bp, Artificial Sequence
  ENSG00000160013_14 (sequence is synthesized)
tctgctccacaaaaaccacagttattggaaaagctccctgccttcccttgccgctggtcccccaccaggcttgggagccctggcatcccaaaggggcaacgggaggaaggggaggctgct

SEQ ID NO: 473711 - DNA, 120 bp, Artificial Sequence
  ENSG00000160013_15 (sequence is synthesized)
gcattgtgggtgatgacgtaggacatgtgcttggtacaaaaagggcctgagacattccacctagcttgactggctgcaagatgagaactgggggggtgcaggtggtggggagacagatgg

SEQ ID NO: 473712 - DNA, 120 bp, Artificial Sequence
  ENSG00000160013_16 (sequence is synthesized)
agaagctggcagatgaagggtgggggctgcggatcccagggactgccccagaacacaaacctaagtcctgtgcctgtccccagggtcctgaataaataaaagcctccttgcagagcctga

SEQ ID NO: 473713 - DNA, 120 bp, Artificial Sequence
  ENSG00000160013_17 (sequence is synthesized)
acaacagagtgagactctgtctcaaaagaaacgaaagaaaagaaagagagaaagagaaacaggaaggtggggagagacagagagagatactggagaagccagaggggagaggactgcata

SEQ ID NO: 473714 - DNA, 120 bp, Artificial Sequence
  ENSG00000160013_18 (sequence is synthesized)
gaggactgcatacccgcacacacaggagaactgggggttggctgggaggccccagctgccaaaaggactggccagcagggacatctgagtgggctgggtggtgggggtagccctggctcc

SEQ ID NO: 473715 - DNA, 120 bp, Artificial Sequence
  ENSG00000160013_19 (sequence is synthesized)
gctgggaggagtggggagaggaggagggcagctctgtgggttgtgcccatgtcacagatggggagactgaggctcaaaagaggtgagacatcgtgggcatggtggctcacgcctgtaatc

SEQ ID NO: 473716 - DNA, 67 bp, Artificial Sequence
  ENSG00000160013_20 (sequence is synthesized)
ccctgtctctactaaaaatacaacaaataaataaataaaaagtagccggacgtagtggcacacggag

SEQ ID NO: 473717 - DNA, 75 bp, Artificial Sequence
  ENSG00000160013_21 (sequence is synthesized)
gtgagctgagatcgtgccactgcactatagcctgggtgacagagtgagaccccgtgcgaggcaggacgatcactt

SEQ ID NO: 473718 - DNA, 72 bp, Artificial Sequence
  ENSG00000160013_22 (sequence is synthesized)
acatttaaaaattagcctggcatgatggcctgtgcctgtggtctcagctacttgtgaggctgaggtgggagg

SEQ ID NO: 473719 - DNA, 120 bp, Artificial Sequence
  ENSG00000160013_23 (sequence is synthesized)
cagcgagagacacgaggagcaaagcaagtgaaggcacagacgcacgggacaggagagcctgggcaagactggagaggtgcggtgaggggctggggatgcagcaacacagagcaggagcag

SEQ ID NO: 473720 - DNA, 120 bp, Artificial Sequence
  ENSG00000160013_24 (sequence is synthesized)
atacatttgttacttagtctttatcttatctccttcccctctgacatgtcacccctacctcatccctggtaagcaagtgggaggagggagccagggtggggaggctgaggactcctgggt

SEQ ID NO: 473721 - DNA, 120 bp, Artificial Sequence
  ENSG00000160014_0 (sequence is synthesized)
agtgagtgtggaggcgcggacgcgcggcggagctggaactgctgcagctgctgccgccgccggaggaaccttgatccccgtgctccggacaccccgggcctcgccatggctgaccagctg

SEQ ID NO: 473722 - DNA, 120 bp, Artificial Sequence
  ENSG00000160014_1 (sequence is synthesized)
actgaggagcagattgcagagttcaaggaggccttctccctctttgacaaggatggagatggcactatcaccaccaaggagttggggacagtgatgagatccctgggacagaaccccact

SEQ ID NO: 473723 - DNA, 120 bp, Artificial Sequence
  ENSG00000160014_2 (sequence is synthesized)
gaagcagagctgcaggatatgatcaatgaggtggatgcagatgggaacgggaccattgacttcccggagttcctgaccatgatggccagaaagatgaaggacacagacagtgaggaggag

SEQ ID NO: 473724 - DNA, 120 bp, Artificial Sequence
  ENSG00000160014_3 (sequence is synthesized)
atccgagaggcgttccgtgtctttgacaaggatgggaatggctacatcagcgccgcagagctgcgtcacgtaatgacgaacctgggggagaagctgaccgatgaggaggtggatgagatg

SEQ ID NO: 473725 - DNA, 120 bp, Artificial Sequence
  ENSG00000160014_4 (sequence is synthesized)
atcagggaggctgacatcgatggagatggccaggtcaattatgaagagtttgtacagatgatgactgcaaagtgaaggccccccgggcagctggcgatgcccgttctcttgatctctctc

SEQ ID NO: 473726 - DNA, 120 bp, Artificial Sequence
  ENSG00000160014_5 (sequence is synthesized)
ttctcgcgcgcgcactctctcttcaacactcccctgcgtaccccggttctagcaaacaccaattgattgactgagaatctgataaagcaacaaaagatttgtcccaagctgcatgattgc

SEQ ID NO: 473727 - DNA, 120 bp, Artificial Sequence
  ENSG00000160014_6 (sequence is synthesized)
tctttctccttcttccctgagtctctctccatgcccctcatctcttccttttgccctcgcctcttccatccatgtcttccaaggcctgatgcattcataagttgaagccctccccagatc

SEQ ID NO: 473728 - DNA, 120 bp, Artificial Sequence
  ENSG00000160014_7 (sequence is synthesized)
cccttggggagcctctgccctcctccagcccggatggctctcctccattttggtttgtttcctcttgtttgtcatcttattttgggtgctggggtggctgccagccctgtcccgggacct

SEQ ID NO: 473729 - DNA, 120 bp, Artificial Sequence
  ENSG00000160014_8 (sequence is synthesized)
gctgggagggacaagaggccctcccccaggcagaagagcatgccctttgccgttgcatgcaaccagccctgtgattccacgtgcagatcccagcagcctgttggggcaggggtgccaaga

SEQ ID NO: 473730 - DNA, 120 bp, Artificial Sequence
  ENSG00000160014_9 (sequence is synthesized)
ggcgttgaggaattgtggcgttgactggatgtggcccaggagggggtcgagggggccaactcacagaaggggactgacagtgggcaacactcacatcccactggctgctgttctgaaacc

SEQ ID NO: 473731 - DNA, 120 bp, Artificial Sequence
  ENSG00000160014_10 (sequence is synthesized)
atctgattggctttctgaggtttggctgggtggggactgctcatttggccactctgcaaattggacttgcccgcgttcctgaagcgctctcgagctgttctgtaaatacctggtgctaac

SEQ ID NO: 473732 - DNA, 120 bp, Artificial Sequence
  ENSG00000160014_11 (sequence is synthesized)
atcccatgccgctccctcctcacgatgcacccaccgccctgagggcccgtcctaggaatggatgtggggatggtcgctttgtaatgtgctggttctctttttttttctttcccctctatg

SEQ ID NO: 473733 - DNA, 120 bp, Artificial Sequence
  ENSG00000160014_12 (sequence is synthesized)
gcccttaagactttcattttgttcagaaccatgctgggctagctaaagggtggggagagggaagatgggccccaccacgctctcaagagaacgcacctgcaataaaacagtcttgtcggc

SEQ ID NO: 473734 - DNA, 120 bp, Artificial Sequence
  ENSG00000160014_13 (sequence is synthesized)
cagctgcccaggggacggcagctacagcagcctctgcgtcctggtccgccagcacctcccgcttctccgtggtgacttggcgccgcttcctcacatctgtgctccgtgccctcttccctg

SEQ ID NO: 473735 - DNA, 120 bp, Artificial Sequence
  ENSG00000160014_14 (sequence is synthesized)
cctcttccctcgcccacctgcctgcccccatactcccccagcggagagcatgatccgtgcccttgcttctgactttcgcctctgggacaagtaagtcaatgtgggcagttcagtcgtctg

SEQ ID NO: 473736 - DNA, 120 bp, Artificial Sequence
  ENSG00000160014_15 (sequence is synthesized)
ggttttttccccttttctgttcatttcatctggctccccccaccacctccccaccccaccccccaccccctgcttcccctcactgcccaggtcgatcaagtggcttttcctgggacctgc

SEQ ID NO: 473737 - DNA, 120 bp, Artificial Sequence
  ENSG00000160014_16 (sequence is synthesized)
ccagctttgagaatctcttctcatccaccctctggcacccagcctctgagggaaggagggatggggcatagtgggagacccagccaagagctgagggtaagggcaggtaggcgtgaggct

SEQ ID NO: 473738 - DNA, 120 bp, Artificial Sequence
  ENSG00000160014_17 (sequence is synthesized)
gtggacattttcggaatgttttggttttgttttttttaaaccgggcaatattgtgttcagttcaagctgtgaagaaaaatatatatcaatgttttccaataaaatacagtgactacctga

SEQ ID NO: 473739 - DNA, 120 bp, Artificial Sequence
  ENSG00000160014_18 (sequence is synthesized)
actgcagaggaggaggagggtgaggtgcaagcttatgggaggaagagcctggggtgggtggcagcggagattagaagatactcttgaaggcttccgggacggagaaggatcagggtcgtg

SEQ ID NO: 473740 - DNA, 120 bp, Artificial Sequence
  ENSG00000160014_19 (sequence is synthesized)
gcaggtgagtctgctatccccctcatcttagctcaggaaagcctccacatccccagccaaatcttagccactgaggagtgacatctgatgggtgaacctgtgtatcccttgtgtcaccta

SEQ ID NO: 473741 - DNA, 120 bp, Artificial Sequence
  ENSG00000160014_20 (sequence is synthesized)
acactatgccttgtgcctagaatgctgataaatgtgtgtaagagcacaccagtgccccaatgacacgaagccccatggccctgagacaggcctttaccagacaccaaaggctgtgttcct

SEQ ID NO: 473742 - DNA, 120 bp, Artificial Sequence
  ENSG00000160014_21 (sequence is synthesized)
ctcctgggcctgggtcatctaggggcttgatatcagtggctgcaggacgagcccaactctctctcccagcttcagccaggttggcttagaaggtgagctccctgcctccctgtggggcct

SEQ ID NO: 473743 - DNA, 120 bp, Artificial Sequence
  ENSG00000160014_22 (sequence is synthesized)
gcagagctcctgtcccactttaggagccgcccaggagctggctcgtcactcccacctctgcgcttgcctgcgctttgcacttcctttcgcatgtgcctgcgcctgcctgttctgctggcg

SEQ ID NO: 473744 - DNA, 120 bp, Artificial Sequence
  ENSG00000160014_23 (sequence is synthesized)
gaagtgcctccccagtgctttgcatgggcagctccttcccgtcccttagctcagatgtcccctcggggaggccttccctgacccccatctcaagtacacagccttcctttactctccttc

SEQ ID NO: 473745 - DNA, 120 bp, Artificial Sequence
  ENSG00000160014_24 (sequence is synthesized)
acatcactttattttcttcataacctttctcgctgtctgaaattattttcttatgtcttcacctgttgtatctcctgttactagatgtgagttccattgagtttgggacttggttttgtt

SEQ ID NO: 473746 - DNA, 120 bp, Artificial Sequence
  ENSG00000160014_25 (sequence is synthesized)
ggtccctgctatagccttaatgcctgcctagaacgtagtaggtcctccgcaaacttttgctggctaaacaaacatctctctctcagcaagctagaagaaatccctggatcccatctaatt

SEQ ID NO: 473747 - DNA, 120 bp, Artificial Sequence
  ENSG00000160014_26 (sequence is synthesized)
catttttctaacccctccaaaaccccagaagggtcagctacaggaactattgtgtaattacagatccgtgcctgcctacccgcccatactgagctgcccgaggacagagagcaactcttg

SEQ ID NO: 473748 - DNA, 120 bp, Artificial Sequence
  ENSG00000160014_27 (sequence is synthesized)
gtttatctccatagccaggggccagcacacagtagaccagagtagcgatccagagaatgggcctctgctccccaccagctacccagcccccagctctgctgtcaggttcaaccggctgtg

SEQ ID NO: 473749 - DNA, 120 bp, Artificial Sequence
  ENSG00000160014_28 (sequence is synthesized)
taacaagtactaaaggcccagcttctgcggtgggaggcaggaacggacttgccttctctcctttctcccctcaacccgcatcacagagtcacctttgcagcttcaaaattttggccctgg

SEQ ID NO: 473750 - DNA, 120 bp, Artificial Sequence
  ENSG00000160014_29 (sequence is synthesized)
gtggctatggagacccctgaggaaagccagaagatggcctggtttagtgatcatgagctcggggtgccccatgacccactcactacctgccctccccaagaacaacaaggcctcagcaca

SEQ ID NO: 473751 - DNA, 120 bp, Artificial Sequence
  ENSG00000160014_30 (sequence is synthesized)
catgtccctcccaatgcacctgccacccatctcccaactctggccttgtgcaacataaacggtctgcttttcaccctgtccccattagcaaactgtccaccgcctcaccccagcccacac

SEQ ID NO: 473752 - DNA, 120 bp, Artificial Sequence
  ENSG00000160014_31 (sequence is synthesized)
cctctgggaataggctgccggacatctgtttttggagggcttgggggtagaggagcaccaggtgccaaaatgggcccagtgggagggcaagagccatgtgcttttctccctgcccctgat

SEQ ID NO: 473753 - DNA, 120 bp, Artificial Sequence
  ENSG00000160014_32 (sequence is synthesized)
gcggccccagctgtggccttcccactcagcactgctagctcctcatcctcctggcttggcagccgtcccctcgctttccatccccccatcaaccccacgcactgtccgtcagccatgttc

SEQ ID NO: 473754 - DNA, 120 bp, Artificial Sequence
  ENSG00000160014_33 (sequence is synthesized)
tgctgccgaccacccccacgctcaccacacgcagtggctcagctcctttggaagctggtagcacccacggcaaggaacagggctgccagtcagaagggagtggatgcctgcatttcctct

SEQ ID NO: 473755 - DNA, 120 bp, Artificial Sequence
  ENSG00000160014_34 (sequence is synthesized)
tcaggccggccagaggcattctgcagcctcccctcctcgtcccagccagccaaccctggctaacacactcagacaaagaatcctttcggctctcattcactccatgactttggttcattt

SEQ ID NO: 473756 - DNA, 120 bp, Artificial Sequence
  ENSG00000160014_35 (sequence is synthesized)
catcatttcaagggagaagtcaaagccagggaccaaacagaaatgtagaatcatctaaggacagctgtcagaccattttccccactgtcttcactggctggccagaaaaatagcttcacc

SEQ ID NO: 473757 - DNA, 120 bp, Artificial Sequence
  ENSG00000160014_36 (sequence is synthesized)
tagcacagtgttgatgttcaataactgttgaatgaaggttggaagggctttgccctgagcactgaggagagagagctggttgcgtgggacttgaagtctgtctcagtttctttaggtggg

SEQ ID NO: 473758 - DNA, 120 bp, Artificial Sequence
  ENSG00000160014_37 (sequence is synthesized)
gacaaggtaagcagccctctccaggggcggctctgagactgacgccagccttcaggcagacaggcggaactggagccacggagctaccacttccaggaggtccgggtcccggtgccagcc

SEQ ID NO: 473759 - DNA, 120 bp, Artificial Sequence
  ENSG00000160014_38 (sequence is synthesized)
tcattgccaacctgctctgccacctcaggcagcctccctcactgtgctcactgctgagggatggtgatgacagccacccctctcactgcctctctccccaccgggagaagtgcccagtga

SEQ ID NO: 473760 - DNA, 120 bp, Artificial Sequence
  ENSG00000160014_39 (sequence is synthesized)
gcctgcctccagcctgaccagagttctttaggtgcttgagcaactcgggccgccggttaggagaatttttgccacttgggtggactctgcctgagccaaccgcctccaaataggctgacc

SEQ ID NO: 473761 - DNA, 120 bp, Artificial Sequence
  ENSG00000160014_40 (sequence is synthesized)
aactgctgcagctgctgccgccgccggaggaaccttgatccccgtgctccggacaccccgggcctcgccatggctgaccagctgactgaggagcagattgcaggaggccttctccctctt

SEQ ID NO: 473762 - DNA, 120 bp, Artificial Sequence
  ENSG00000160014_41 (sequence is synthesized)
agtgagtgtggaggcgcggacgcgcggcggagctggaactgctgcagctgctgccgccgccggaggaaccttgatccccgtgctccggacaccccgggcctcgccatgagttcaaggagg

SEQ ID NO: 473763 - DNA, 120 bp, Artificial Sequence
  ENSG00000160049_0 (sequence is synthesized)
gtcgagtagaaggaccgccgctccggcctcccgcgacttctcgaaggtgggcaggtcccaccttgtggaggatggaggtgaccggggacgccggggtaccagaatctggcgagatccgga

SEQ ID NO: 473764 - DNA, 120 bp, Artificial Sequence
  ENSG00000160049_1 (sequence is synthesized)
ctctaaagccgtgtctgctgcgccgcaactacagccgcgaacagcacggcgtggccgcctcctgcctcgaagacctgaggagcaaggcctgtgacattctggccattgataagtccctga

SEQ ID NO: 473765 - DNA, 120 bp, Artificial Sequence
  ENSG00000160049_2 (sequence is synthesized)
caccagtcaccctggtcctggcagaggatggcaccatagtggatgatgacgattactttctgtgtctaccttccaatactaagtttgtggcattggctagtaatgagaaatgggcataca

SEQ ID NO: 473766 - DNA, 120 bp, Artificial Sequence
  ENSG00000160049_3 (sequence is synthesized)
acaattcagatggaggtacagcttggatttcccaagagtcctttgatgtagatgaaacagacagcggggcagggttgaagtggaagaatgtggccaggcagctgaaagaagatctgtcca

SEQ ID NO: 473767 - DNA, 120 bp, Artificial Sequence
  ENSG00000160049_4 (sequence is synthesized)
gcatcatcctcctatcagaggaggacctccagatgcttgttgacgctccctgctcagacctggctcaggaactacgtcagagttgtgccaccgtccagcggctgcagcacacactccaac

SEQ ID NO: 473768 - DNA, 120 bp, Artificial Sequence
  ENSG00000160049_5 (sequence is synthesized)
aggtgcttgaccaaagagaggaagtgcgtcagtccaagcagctcctgcagctgtacctccaggctttggagaaagagggcagcctcttgtcaaagcaggaagagtccaaagctgcctttg

SEQ ID NO: 473769 - DNA, 120 bp, Artificial Sequence
  ENSG00000160049_6 (sequence is synthesized)
gtgaggaggtggatgcagtagacacgggtatcagcagagagacctcctcggacgttgcgctggcgagccacatccttactgcactgagggagaagcaggctccagagctgagcttatcta

SEQ ID NO: 473770 - DNA, 120 bp, Artificial Sequence
  ENSG00000160049_7 (sequence is synthesized)
gtcaggatttggagttggttaccaaggaagaccccaaagcactggctgttgccttgaactgggacataaagaagacggagactgttcaggaggcctgtgagcgggagctcgccctgcgcc

SEQ ID NO: 473771 - DNA, 120 bp, Artificial Sequence
  ENSG00000160049_8 (sequence is synthesized)
tgcagcagacgcagagcttgcattctctccggagcatctcagcaagcaaggcctcaccacctggtgacctgcagaatcctaagcgagccagacaggatcccacatagcagcagcgggaag

SEQ ID NO: 473772 - DNA, 120 bp, Artificial Sequence
  ENSG00000160049_9 (sequence is synthesized)
tgtgccaaggaagctctgtggcgttgtgttattggtagacaccctcagcctcatcatttgactacctatgtactactctaccccctgccttagagcaccttccagagaagctattccagg

SEQ ID NO: 473773 - DNA, 120 bp, Artificial Sequence
  ENSG00000160049_10 (sequence is synthesized)
tctcaacatacgccgttccaccaattttttttttagccccaccagcttcaggacttctgccaattttgaatgatatagctgcaccaacaatatcccgcctcctctaattacatatgatgt

SEQ ID NO: 473774 - DNA, 66 bp, Artificial Sequence
  ENSG00000160049_11 (sequence is synthesized)
gcaccaacaatatcccgcctcctctaattacatatgatgttctctgttcaaaagtaattggcagtg

SEQ ID NO: 473775 - DNA, 67 bp, Artificial Sequence
  ENSG00000160049_12 (sequence is synthesized)
ttggcagtgactatgggcgcactgcctaacatttagccctgccccatatggaacatgttaaaaaaaa

SEQ ID NO: 473776 - DNA, 120 bp, Artificial Sequence
  ENSG00000160049_13 (sequence is synthesized)
agtaattggcagtgactatgggcgcactgcctaacatttagccctgccccatatggaacatgttaaaaaaaaaaaaagccaggccgagcgtgttggctcacgcttgtaatcccagcactt

SEQ ID NO: 473777 - DNA, 87 bp, Artificial Sequence
  ENSG00000160049_14 (sequence is synthesized)
ctctgtctcaaaaaaaaaaaaaaaaaggacaggcacgacagtggctcacacctttgatcccagcactttggaggccgatgcaacctg

SEQ ID NO: 473778 - DNA, 76 bp, Artificial Sequence
  ENSG00000160049_15 (sequence is synthesized)
cctgtaatcccagctactcggtaggcagaggttgcagtgagctgagaatctcaagaaaaaaaaaaagttttgtttt

SEQ ID NO: 473779 - DNA, 74 bp, Artificial Sequence
  ENSG00000160049_16 (sequence is synthesized)
agcctgggtgacagagctagactccgtatctcaagaaaaaaaaaatctggagtgcagtggcacattctcggctc

SEQ ID NO: 473780 - DNA, 61 bp, Artificial Sequence
  ENSG00000160049_17 (sequence is synthesized)
gaaaaaaaagcttttaaataaagtaattgtcagcttaggcaacatagcaagaccctgtctc

SEQ ID NO: 473781 - DNA, 120 bp, Artificial Sequence
  ENSG00000160049_18 (sequence is synthesized)
agcaagaccctgtctctacaaaaaaaaaatttaagttagccaggcatggtggcactgacctataatcctagctactctggaggctaaggcgagagtatcacttgagcccaggagctcaag

SEQ ID NO: 473782 - DNA, 120 bp, Artificial Sequence
  ENSG00000160049_19 (sequence is synthesized)
gctgatcatgccaccatactccagcctggatgatagagtaagaccctacttttttttttttttttttaaaaaggtaaccatcaagggcaatgaaaagaaatggtcgtatttccaattcat

SEQ ID NO: 473783 - DNA, 120 bp, Artificial Sequence
  ENSG00000160049_20 (sequence is synthesized)
tatccttattctgaagatagtacggcagaattttaagcagagatagtggtgaagatggtgacattatagagtgttgactatggccacaatcttgtttctccagttaatgaatttttttat

SEQ ID NO: 473784 - DNA, 120 bp, Artificial Sequence
  ENSG00000160049_21 (sequence is synthesized)
catagggacatacggagagtccattgctaatatctcactcagtattgtgaaattctatctcaccaccgtgaaactcttcagttttctaattgctttatcagcagggggtataaaaggtca

SEQ ID NO: 473785 - DNA, 120 bp, Artificial Sequence
  ENSG00000160049_22 (sequence is synthesized)
tgaaagcaatttccacatgctgtggctccaggtctctgggtgtgaagcagagcaagcctggtttgtcctcctcctgtctccacacagacggcttctgcaggtttggtaatctacagtaca

SEQ ID NO: 473786 - DNA, 120 bp, Artificial Sequence
  ENSG00000160049_23 (sequence is synthesized)
ctccttgcagggaaaaggtgatgagtcatcatggacttatttgaccactttttatgcatgcttagaggaaaacagaatactgttaagagattcatctgctagttattaagtaaagaaata

SEQ ID NO: 473787 - DNA, 120 bp, Artificial Sequence
  ENSG00000160049_24 (sequence is synthesized)
tggaggtgagccgaaattgtgccactgtactccagcctgcaacagagtgagacactgtcacacaaaaaagaaagaaatatcacaatatgtcacaataggccgggcgcagtggctcacacc

SEQ ID NO: 473788 - DNA, 120 bp, Artificial Sequence
  ENSG00000160049_25 (sequence is synthesized)
aaaaaaaaaaaaaagaaaatcacaataagtcctagggtaaagatgggggtacagaaaacaattaaatagaacaaaaacaactgtttccttttcctgtgattcaagaagggcttagatctt

SEQ ID NO: 473789 - DNA, 120 bp, Artificial Sequence
  ENSG00000160049_26 (sequence is synthesized)
tagatcttctactcagcatccttttactaatgccctccattggctctcaccccaacatttccttttttatagcttattttgtaatgcctccttaattatcctttaatagaagccaccgct

SEQ ID NO: 473790 - DNA, 120 bp, Artificial Sequence
  ENSG00000160049_27 (sequence is synthesized)
gataagctacctacactcatacagaagcattaatataatgccccagatgtactgtttcagggcaaaaaggaaaataatttccaacaaagtggtgtgtgtttcactgtcagatgcttgcac

SEQ ID NO: 473791 - DNA, 120 bp, Artificial Sequence
  ENSG00000160049_28 (sequence is synthesized)
ttacacacggaatcgctgtgcatccgacagaggctgattggcacatggggcacggggattgtcagctcaaacaccgtcagcagcgttgcccttggaaatgggatttcccagaacagtaaa

SEQ ID NO: 473792 - DNA, 120 bp, Artificial Sequence
  ENSG00000160049_29 (sequence is synthesized)
cgtgtctgtccttgatttacagagtagctacattcctaggaaatccagggtacattaaaactcaccatgttacccaggctggtctcaaactccaggcctcaagcaatcctcccacatcag

SEQ ID NO: 473793 - DNA, 120 bp, Artificial Sequence
  ENSG00000160049_30 (sequence is synthesized)
gcatgagccaccacacccagccagaatattttatttctgttagacacacagagcgttcgttgactcgtctgggcgttagtgttaatattctgtacttgaagcaagcccaccaagcggctg

SEQ ID NO: 473794 - DNA, 120 bp, Artificial Sequence
  ENSG00000160049_31 (sequence is synthesized)
tgaagcaagcccaccaagcggctgaactgggtggataatggaaaatgtcctgtggatttgggagtgagacaaaccggcttgagtctaacctctcagttagtctaaggctccaagcttgaa

SEQ ID NO: 473795 - DNA, 120 bp, Artificial Sequence
  ENSG00000160049_32 (sequence is synthesized)
gagtctaacctctcagttagtctaaggctccaagcttgaaagggttaaatgaagtactatatttgttttgtttcgttttcgttttgtttgaggctttgctctgttgcccaggctggagtg

SEQ ID NO: 473796 - DNA, 120 bp, Artificial Sequence
  ENSG00000160049_33 (sequence is synthesized)
cttggcctcccaaagtgctgggagtataggtggtgagccaccacgcctggcctaaatgaagtaccacatgaccgacagaccgacctggggaacatagcaagaccccatctctacaaaaat

SEQ ID NO: 473797 - DNA, 120 bp, Artificial Sequence
  ENSG00000160049_34 (sequence is synthesized)
cgacctggggaacatagcaagaccccatctctacaaaaatgtaaaaaataaaaattagccgggtgtagtggtacatgcctgtaatcctagatactcgggaggctaaggcagaaggatcac

SEQ ID NO: 473798 - DNA, 120 bp, Artificial Sequence
  ENSG00000160049_35 (sequence is synthesized)
ttgagcccaggagttcgaggctacaatgagctgtgatcgtgccactgcactccatcctgggtggcagagtgaggccctgtctcaaaataaataatccagtcccccccaagaaaggaatga

SEQ ID NO: 473799 - DNA, 120 bp, Artificial Sequence
  ENSG00000160049_36 (sequence is synthesized)
agtgctataatgagaaaaatcctagtacctaacatatagtagacagtggagagtggttctctttcgtttctcaggggcagacagatggggtgctggagtcctctatcaaagagtcagagc

SEQ ID NO: 473800 - DNA, 120 bp, Artificial Sequence
  ENSG00000160049_37 (sequence is synthesized)
tctatcccagatgtgtaatgaacgtggtcacagacatattgtcccattaccatttaccttccctataaccactgtgcctccagccttgtagaatagacacataggagcgcagcaatacgt

SEQ ID NO: 473801 - DNA, 120 bp, Artificial Sequence
  ENSG00000160049_38 (sequence is synthesized)
ctaaaaataggagtgagagagggcagggcatgcccgttcttgtggtagaagaaaagaatgtcaaagaaagcagctgggactaatgaactttacattagccatattccattatttcagctt

SEQ ID NO: 473802 - DNA, 120 bp, Artificial Sequence
  ENSG00000160049_39 (sequence is synthesized)
aagtcaaatgtcggtcctcatgaggcaactggctttgacaggagctacgctaattaccacttaccaacctttaatttctgggtaaaagcaaaagagaaaaactaatggatttttcatttt

SEQ ID NO: 473803 - DNA, 120 bp, Artificial Sequence
  ENSG00000160049_40 (sequence is synthesized)
ccagagagacaagaataaaataatagtagtctgtagaaaaaagaaaacctgcatcaattacaagaattattaatgtatctttaataaataaccacattatttagctgtttaatttcctaa

SEQ ID NO: 473804 - DNA, 120 bp, Artificial Sequence
  ENSG00000160049_41 (sequence is synthesized)
accagggtcactgagctacagaggaggacatgccctgggatgtagtagtatcatgcagagttggttaccaaggaagaccccaaagcactggctgttgccttgaactgggacataaagaag

SEQ ID NO: 473805 - DNA, 120 bp, Artificial Sequence
  ENSG00000160049_42 (sequence is synthesized)
ctagctgccagtttgcctattatatgccaaggcatttgcaaaaatctcattaatctaaatcaaaatagctttaaagaaaaatgcatacacttcctcagatcatcaaacagactctggtcc

SEQ ID NO: 473806 - DNA, 120 bp, Artificial Sequence
  ENSG00000160049_43 (sequence is synthesized)
aaggttggtaatgaaatgactgttcctgacagggaggaatagcagggcccaatcttctgagatggcttctgggtctttccatggtcagagaagatctatagtccgtcctgaggtctgtca

SEQ ID NO: 473807 - DNA, 120 bp, Artificial Sequence
  ENSG00000160049_44 (sequence is synthesized)
atgtcacaggaaaaggcaaacttgaggggatcgtcgcctgctggctaagaccagggagctaaaaacttgaggaagggaacctgcctgggtgggtgctacttctgattcattgtccttgtc

SEQ ID NO: 473808 - DNA, 120 bp, Artificial Sequence
  ENSG00000160049_45 (sequence is synthesized)
cctgtcataagtacctccctattgtagatagaagggaaggaaactgttgacttgagcttggctaaatttcctgaaggtggaggaccttagagttgctccaagtaaactttccaaggactt

SEQ ID NO: 473809 - DNA, 120 bp, Artificial Sequence
  ENSG00000160050_0 (sequence is synthesized)
aaagccaccaccattttgtaaggaactgtagcttctctctgaaactgccgggaaagggaaaatctttttaaaatagacatcacacaaccaacagggtcccctaggttcaggcggggaggt

SEQ ID NO: 473810 - DNA, 120 bp, Artificial Sequence
  ENSG00000160050_1 (sequence is synthesized)
gaggtcgagtgagaggaactgcttagcatacgcggggatgctcctcccatctcaccccaccgcgctaaggagaaggtcactttctctttaaatgcaaatgaactccctccagcttagctt

SEQ ID NO: 473811 - DNA, 120 bp, Artificial Sequence
  ENSG00000160050_2 (sequence is synthesized)
tcacccggtggtgttcccgggaggagagggcggagggcggagggaacttgcaccgaagcatcactcgagaccccaaacctccaggcctgaggcccagccagcgcccaatggatgacaaaa

SEQ ID NO: 473812 - DNA, 120 bp, Artificial Sequence
  ENSG00000160050_3 (sequence is synthesized)
agaagaaacggagtcccaagccctgcctggcccagccagcccaggccccaggcacactacggagggtccctgtgcctaccagccacagcggctccttggccctaggacttcctcatctgc

SEQ ID NO: 473813 - DNA, 120 bp, Artificial Sequence
  ENSG00000160050_4 (sequence is synthesized)
agcagcgggccaagttcaagagagtaggcaaagagaagtgccgcccagtcctggctggaggtggaagcggctctgcaggcacgcccctgcagcactccttcctgaccgaggtgactgatg

SEQ ID NO: 473814 - DNA, 120 bp, Artificial Sequence
  ENSG00000160050_5 (sequence is synthesized)
tctatgagatggaggggggactcctgaacctgctcaatgatttccactctggccggctgcaggccttcgggaaggaatgctcctttgagcagctggagcacgttcgggagatgcaggaga

SEQ ID NO: 473815 - DNA, 120 bp, Artificial Sequence
  ENSG00000160050_6 (sequence is synthesized)
agctagcccggctgcacttcagcctggatgtgtgtggggaggaggaggacgatgaagaggaagaggatggggtcactgaggggctgccagaggagcagaagaagacaatggctgaccgta

SEQ ID NO: 473816 - DNA, 120 bp, Artificial Sequence
  ENSG00000160050_7 (sequence is synthesized)
acctggaccagctgcttagcaatctggaagacctcagtaattctatccagaagctgcacctggccgagaacgccgagcctgaggagcagtccgctgcgtaggcgtcccacgcaggcccac

SEQ ID NO: 473817 - DNA, 120 bp, Artificial Sequence
  ENSG00000160050_8 (sequence is synthesized)
actgcccctctcattctcttcaaactgtgactttttacagactcgggcgggtgttctgcggccccccaggtgctatgggggaggggggcgttgaatggaattaaaccagaaagaaagcaa

SEQ ID NO: 473818 - DNA, 120 bp, Artificial Sequence
  ENSG00000160050_9 (sequence is synthesized)
caggcagaaggggaattaggttgggccttagaaggtccttcaagtgtacatccacgatcccagcagcagacactggcatctggctctgcccctaccgtatagatgaggtgacaagctgga

SEQ ID NO: 473819 - DNA, 120 bp, Artificial Sequence
  ENSG00000160050_10 (sequence is synthesized)
aggtcccagggcccttccttggtgcagctctcagggatttctgggtgaagggctaactttgcccctggctatctttgtggggttgcttccctcctaggcctgaggcccagccagcgccca

SEQ ID NO: 473820 - DNA, 120 bp, Artificial Sequence
  ENSG00000160050_11 (sequence is synthesized)
aggtgggtcactgggatcacatagcgtgaggattcgcctcagaggagggagtgagcaactctgcaagaaagtgaatgttccacgctgagaggcttacctggtataaatatggaagaaagc

SEQ ID NO: 473821 - DNA, 120 bp, Artificial Sequence
  ENSG00000160050_12 (sequence is synthesized)
tattacctgaaaggtttcaggaaccacaggtggtttgggggccctggagtatcagggaacaggaaatggtgaggaaatacctgggggcacaatttgaattctctgttgaattttttttat

SEQ ID NO: 473822 - DNA, 120 bp, Artificial Sequence
  ENSG00000160050_13 (sequence is synthesized)
atgtttgttccccactaaatacaatgtattctttctccagttgctccagataagaccactgtgtttccccctggttttgcacaccacttgcctaaggggcatgaagctcaaggctgtggg

SEQ ID NO: 473823 - DNA, 120 bp, Artificial Sequence
  ENSG00000160050_14 (sequence is synthesized)
gagagtagcaggaaaggcaactgggaaggcaggagggccaggctggcaggggcattcaattttatcctgagagcagtggaaattttaagacagtttttttggtttattggtttggctttg

SEQ ID NO: 473824 - DNA, 120 bp, Artificial Sequence
  ENSG00000160050_15 (sequence is synthesized)
ttttctatgtatttttgtttttgtttaaaagagtttttaaatagaagagggttggctgggcatggtggctcagcctataatcccagcacttggggacgctgaggcaggcagatcacctga

SEQ ID NO: 473825 - DNA, 120 bp, Artificial Sequence
  ENSG00000160050_16 (sequence is synthesized)
ggtcagaagtttgagaccagcttggtcaacatggtgaaacctcatctctgttaaaaatacaaaagttagccaggcgtgatggtgggtgcctataatcccagcaacttgggaggctgaggc

SEQ ID NO: 473826 - DNA, 120 bp, Artificial Sequence
  ENSG00000160050_17 (sequence is synthesized)
cagtttcctcctctccagccctccaggagtattcacacacaaccaacttccccacctcttgcagtcctgtcagatttagccacagactgcccaaacccaggtacaggaatttagaatttc

SEQ ID NO: 473827 - DNA, 120 bp, Artificial Sequence
  ENSG00000160050_18 (sequence is synthesized)
cccaaaattagaagaaaagtggttgtaggggatgttttactactgatcaaaatctttgtgagtactttagctgacatcaatcatagcaaagcttgtccgatgtcctcctatcctttcagc

SEQ ID NO: 473828 - DNA, 120 bp, Artificial Sequence
  ENSG00000160050_19 (sequence is synthesized)
attgaacaattatttttactaatttacactaccacctcacctggtcctcagtcagaaacagcgcgagtgcgcgcgcacacaccccagtgtgtctgacctgcacgatctggatgaagagag

SEQ ID NO: 473829 - DNA, 120 bp, Artificial Sequence
  ENSG00000160050_20 (sequence is synthesized)
agggggtgagagagggcaggcggggactgcaacctcagtccacagacggcccgagaccctcgtccccggccctttgcacaggtgagggaactaaacctgtgcaagatgggagaccggggt

SEQ ID NO: 473830 - DNA, 120 bp, Artificial Sequence
  ENSG00000160051_0 (sequence is synthesized)
cgggcctggcagttggcgcccatggagccagagctgctggttcggaaggtgtctgcattgcaggcctgcgtccggggcttcttggtccgacgccagttccagagcctgcgagctgagtat

SEQ ID NO: 473831 - DNA, 120 bp, Artificial Sequence
  ENSG00000160051_1 (sequence is synthesized)
gaggcgattgtacgagaggtcgagggcgacctgggcacgcttcagtggaccgagggccgcattcccaggccgcgattcctcccagagaaggcaaaatcccatcagacctggaaagcagga

SEQ ID NO: 473832 - DNA, 120 bp, Artificial Sequence
  ENSG00000160051_2 (sequence is synthesized)
gacagggtagcaaatccagagcaggggctgtggaaccacttcccatgtgaagagtctgagggagaggccacctgggaggagatggtgctgaagaagtcaggagagagctcagcaaatcaa

SEQ ID NO: 473833 - DNA, 120 bp, Artificial Sequence
  ENSG00000160051_3 (sequence is synthesized)
ggaagcctctgcagagatcacagctcctggcttcagatgaagcagaacaggaaacccagccaagagaagaccagagacacgacaaggatggagaatccagaagccacagatcaaagactg

SEQ ID NO: 473834 - DNA, 120 bp, Artificial Sequence
  ENSG00000160051_4 (sequence is synthesized)
ccccacagccaacctcagcttcaagagcttcagtaccaccgcagccacttggccatggaattgctgtggctgcaacaggccatcaatagccgtaaggagtacctacttcttaaacaaaca

SEQ ID NO: 473835 - DNA, 120 bp, Artificial Sequence
  ENSG00000160051_5 (sequence is synthesized)
ctgagatccccagaggcgggcccgatcagagaggaaccccgcgtgttcctagaacatggggaacaggcctgtgagagggaccagtcacaaccaagcgcaccactggaggaccagtcctac

SEQ ID NO: 473836 - DNA, 120 bp, Artificial Sequence
  ENSG00000160051_6 (sequence is synthesized)
agagacaggaccactggagagctagaacaggaggatgactcctgtcacagggtcaaatcaccccacagatccccaggaagtttggccactacacaaaaaaacattgctggggctaagtgc

SEQ ID NO: 473837 - DNA, 120 bp, Artificial Sequence
  ENSG00000160051_7 (sequence is synthesized)
agagaaccatgctacagcaagtctggaccaccgtcgtctataccatcaaacagccaggccttgggggacaggctcaccaaagggccagacgatggaagacagacctttggagggacctgc

SEQ ID NO: 473838 - DNA, 120 bp, Artificial Sequence
  ENSG00000160051_8 (sequence is synthesized)
aaatattaaggagatgtctcccagaaaactagaccacaaagagcctgactgccgaacagtcaggacacaagagttgggcctctcagaggaccacatcatctgggatggtaccttgggggg

SEQ ID NO: 473839 - DNA, 120 bp, Artificial Sequence
  ENSG00000160051_9 (sequence is synthesized)
gccagagcatagtgtcctcgatctctggaggactaaaccacccaaaggccaggcccccactgatagaagctccagagatggaacctccaatgagcctagtcatgaaggacagaaaaagca

SEQ ID NO: 473840 - DNA, 120 bp, Artificial Sequence
  ENSG00000160051_10 (sequence is synthesized)
gaggactataccatggagatcaaagtcacctgagattctgtcttctacaaaggcaggctgtacaggagaggaacagtggaggggcaggccatggaaaacagaaccacctggctagaccct

SEQ ID NO: 473841 - DNA, 120 bp, Artificial Sequence
  ENSG00000160051_11 (sequence is synthesized)
aggaagccaggagaggatcaggttccaaaggggaatgctatgaaagggcagtgagacaagacctcatcctacctccctgaccagctctggcttctgctcctgcccctggccattggtgac

SEQ ID NO: 473842 - DNA, 120 bp, Artificial Sequence
  ENSG00000160051_12 (sequence is synthesized)
tagtggggccaagagaagctggagcagagagctggcatgagtatagggaaggaggaaggacacattttcaatcctctgcctgtagctcaatccaaatttgtggataaggggccgggtgca

SEQ ID NO: 473843 - DNA, 120 bp, Artificial Sequence
  ENSG00000160051_13 (sequence is synthesized)
cactccagcctgggctacagagcgagacacggtctcaaaaaacaaatgtgtggctaaggagttacctgggggaagtagaatgagaggtctgttgggaataaaggtttttcttagattctg

SEQ ID NO: 473844 - DNA, 120 bp, Artificial Sequence
  ENSG00000160051_14 (sequence is synthesized)
agttggcgcccatggagccagagctgctggttcggaaggtgtctgcattgcaggtgcgggggcgggcgcggggttcacaggatttttcctttagggaaatcatggggtctcgtacctgga

SEQ ID NO: 473845 - DNA, 120 bp, Artificial Sequence
  ENSG00000160051_15 (sequence is synthesized)
cctcccagcgagatgctaccacgttcagtcccctaactgcgcgccaacctctggagataccggctgtccccaaccgcgctgaggaaagctgggacccacggactccctgccctgcgcgtc

SEQ ID NO: 473846 - DNA, 120 bp, Artificial Sequence
  ENSG00000160051_16 (sequence is synthesized)
ggtggaacccacccttcccagtgataagcttttctcactggaagaggcagtagactcacctcctcacaccccactccttaaccctcaccaacttgtctgctagatcatggtgcccagata

SEQ ID NO: 473847 - DNA, 120 bp, Artificial Sequence
  ENSG00000160055_0 (sequence is synthesized)
gccatggcggcgtctctggggcaggtgttggctctggtgctggtggccgctctgtggggtggcacgcagccgctgctgaagcgggcctccgccggcctgcagcgggttcatgagccgacc

SEQ ID NO: 473848 - DNA, 120 bp, Artificial Sequence
  ENSG00000160055_1 (sequence is synthesized)
tgggcccagcagttgctacaggagatgaagaccctcttcttgaatactgagtacctgatgccctttctcctcaaccagtgtggatcccttctctattacctcaccttggcatcgacagat

SEQ ID NO: 473849 - DNA, 120 bp, Artificial Sequence
  ENSG00000160055_2 (sequence is synthesized)
ctgaccctggctgtgcccatctgtaactctctggctatcatcttcacactgattgttgggaaggcccttggagaagatattggtggaaaacgagcagttgctggcatggtgctcaccgtg

SEQ ID NO: 473850 - DNA, 120 bp, Artificial Sequence
  ENSG00000160055_3 (sequence is synthesized)
ataggaatttcactctgcatcacaagctcagtgagtaagacccaggggcaacagtctaccctttgagtgggccgaacccacttccagctctgctgcctccaggaagcccctgggccatga

SEQ ID NO: 473851 - DNA, 120 bp, Artificial Sequence
  ENSG00000160055_4 (sequence is synthesized)
tgctggcagtgagcggatggacctagcacttcccctctctggccttagcttcctcctctcttatggggataacagctacctcatggatcacaataagagaacaagagtgaaagagttttg

SEQ ID NO: 473852 - DNA, 120 bp, Artificial Sequence
  ENSG00000160055_5 (sequence is synthesized)
taaccttcaagtgctgttcagctgcggggatttagcacaggagactctacgctcaccctcagcaacctttctgccccagcagctctcttcctgctaacatctcaggctcccagcccagcc

SEQ ID NO: 473853 - DNA, 120 bp, Artificial Sequence
  ENSG00000160055_6 (sequence is synthesized)
accattactgtggcctgatctggactatcatggtggcaggttccatggactgcagaactccagctgcatggaaagggccagctgcagactttgagccagaaatgcaaacgggaggcctct

SEQ ID NO: 473854 - DNA, 120 bp, Artificial Sequence
  ENSG00000160055_7 (sequence is synthesized)
gggactcagtcagagcgctttggctgaatgaggggtggaaccgagggaagaaggtgcgtcggagtggcagatgcaggaaatgagctgtctattagccttgcctgccccacccatgaggta

SEQ ID NO: 473855 - DNA, 120 bp, Artificial Sequence
  ENSG00000160055_8 (sequence is synthesized)
ggcagaaatcctcactgccagcccctcttaaacaggtagagagctgtgagccccagccccacctgactccagcacacctggcgagtagtagctgtcaataaatctatggtaaacagacaa

SEQ ID NO: 473856 - DNA, 120 bp, Artificial Sequence
  ENSG00000160055_9 (sequence is synthesized)
gcggcgtctctgggtaggtagccggccccgcccttccatggatttcccgaccctcgcctcgaattcatttcctgctccacatccaccctctaaccccgacccctgctacaaccccagagg

SEQ ID NO: 473857 - DNA, 120 bp, Artificial Sequence
  ENSG00000160055_10 (sequence is synthesized)
ccggactcctggattcatctccctagcttccctgggcctgccttagccgccagtcgcagccgaggcgaagagagcgaaggagggaagtgggggcggctagctggggctagaaggccagga

SEQ ID NO: 473858 - DNA, 120 bp, Artificial Sequence
  ENSG00000160055_11 (sequence is synthesized)
gatgatgatggaagtgttttgtgcctagaaaggcatttgttgcatctcaggcattcttttcattctgaccacccagatctgaccctggctgtgcccatctgtaactctctggctatcatc

SEQ ID NO: 473859 - DNA, 120 bp, Artificial Sequence
  ENSG00000160055_12 (sequence is synthesized)
gctctgctcagaggaagggaaggctgggctgtgggtttaggagcaggagaacggggagggctgaggaggccgcagtgtaccctgtgagcccagcggaggtgctggctcctgaggaacaag

SEQ ID NO: 473860 - DNA, 120 bp, Artificial Sequence
  ENSG00000160055_13 (sequence is synthesized)
ctgctggaggctaaggacaaaaggtggccagagtagtggtccccagttgccctctggagctgctggctctcaagatggcagagctggggctgaggctgagatagcagccccagccccagg

SEQ ID NO: 473861 - DNA, 120 bp, Artificial Sequence
  ENSG00000160055_14 (sequence is synthesized)
tactgcgagtgcgggacgcagctctgtggatctcgacatacctgtgttagttccttcccagaacccatctccccagagtgggtgaggacacggccttttcccatcctgccctttcctctg

SEQ ID NO: 473862 - DNA, 120 bp, Artificial Sequence
  ENSG00000160055_15 (sequence is synthesized)
cagctgttttgcttccttgtggccatcagagttcccttcccctggacagtctggagaaagacagaggctggggtttgggattgaagaccagaccccatctgagcccttcctccagccctg

SEQ ID NO: 473863 - DNA, 120 bp, Artificial Sequence
  ENSG00000160055_16 (sequence is synthesized)
gaggtggaaggccatacagaatggagccgtgagtatggccagcctccagctctcagccaggaggtccccaaccccaaggaaggaagaaactggaaattaggaactgcttcctcatttaac

SEQ ID NO: 473864 - DNA, 120 bp, Artificial Sequence
  ENSG00000160055_17 (sequence is synthesized)
cccctgacgcctgcaggaacatggcagaggagacaccgtctgtcttcacaaagtacgtcctccctccttgctgcctcttcccaccagcctgacttatccagggacagagcagtagatgcc

SEQ ID NO: 473865 - DNA, 120 bp, Artificial Sequence
  ENSG00000160055_18 (sequence is synthesized)
tggcactcctcgatgcccagtgaaaccagactgtgcttccccacccccaccaccatgccccatgctcactggctcatttcttgggagggcttagagctggataatataagttcccttgga

SEQ ID NO: 473866 - DNA, 120 bp, Artificial Sequence
  ENSG00000160055_19 (sequence is synthesized)
ggggcagctggagacagttatgatgagtgccggctttgtgtctgagcattctgctcccatggacatccccaacaacagcagggaccaacctatgtcactgtcaaagggcagctgagaagg

SEQ ID NO: 473867 - DNA, 120 bp, Artificial Sequence
  ENSG00000160055_20 (sequence is synthesized)
gcctgagccccagggacccctcacctgatgggaatgagagtgtggggagcttgcttcttggctgaatggtctgctggggtctggcatagaaagcagatggcttaattcggtctggttcct

SEQ ID NO: 473868 - DNA, 120 bp, Artificial Sequence
  ENSG00000160055_21 (sequence is synthesized)
ttggagagggctgggttacctgggccctgtggccttgggcctagagaagggacactgggcttggaccctgattgctggccattcttacctttcctactccccagttcaggcttcagagag

SEQ ID NO: 473869 - DNA, 120 bp, Artificial Sequence
  ENSG00000160055_22 (sequence is synthesized)
tgtcttcatcatctgctacttccagggcccccgctgtctccttccttcggtggggagctccatatactcctataactcctaaagaggggaggcagcactgggtgatgcccaggctgaaga

SEQ ID NO: 473870 - DNA, 120 bp, Artificial Sequence
  ENSG00000160055_23 (sequence is synthesized)
gccctcagcattcctgccctggaccttcatgctagcccctttccctcccctgaacctggttctgcattccccaccacctcccaggatggcaaggaagtgagaggtgggcctttggtccca

SEQ ID NO: 473871 - DNA, 120 bp, Artificial Sequence
  ENSG00000160058_0 (sequence is synthesized)
ggtcagtaaatagtggtgatgtcatgcaggcaagatggcggaaggggaggacgtgggatggtggcggagctggctgcagcagagctaccaagcagtcaaagagaagtcctctgaagcctt

SEQ ID NO: 473872 - DNA, 120 bp, Artificial Sequence
  ENSG00000160058_1 (sequence is synthesized)
ggagtttatgaagcgggacctgacggagtttacccaggtggtgcagcatgacacggcctgtaccatcgcagccacggccagcgtggtcaaggagaagctggctacggaaggctcctcagg

SEQ ID NO: 473873 - DNA, 120 bp, Artificial Sequence
  ENSG00000160058_2 (sequence is synthesized)
agcaacagagaagatgaagaaagggttatctgacttcctaggggtgatctcagacacctttgccccttcgccagacaaaaccatcgactgcgatgtcatcaccctgatgggcacaccgtc

SEQ ID NO: 473874 - DNA, 120 bp, Artificial Sequence
  ENSG00000160058_3 (sequence is synthesized)
tggcacagctgagccctatgatggcaccaaggctcgcctctatagcctgcagtcggacccagcaacctactgtaatgaaccagatgggcccccggaattgtttgacgcctggctttccca

SEQ ID NO: 473875 - DNA, 120 bp, Artificial Sequence
  ENSG00000160058_4 (sequence is synthesized)
gttctgcttggaggagaagaagggggagatctcagagctccttgtaggcagcccctccatccgggccctctacaccaagatggttccagcagctgtttcccattcagaattctggcatcg

SEQ ID NO: 473876 - DNA, 120 bp, Artificial Sequence
  ENSG00000160058_5 (sequence is synthesized)
gtatttctataaagtccatcagttagagcaggagcaggcccggagggacgccctgaagcagcgggcggaacagagcatctctgaagagcccggctgggaggaggaggaagaggagctcat

SEQ ID NO: 473877 - DNA, 120 bp, Artificial Sequence
  ENSG00000160058_6 (sequence is synthesized)
gggcatttcacccatatctccaaaagaggcaaaggttcctgtggccaaaatttctacattccctgaaggagaacctggcccccagagcccctgtgaagagaatctggtgacttcagttga

SEQ ID NO: 473878 - DNA, 120 bp, Artificial Sequence
  ENSG00000160058_7 (sequence is synthesized)
gcccccagcagaggtgactccatcagagagcagtgagagcatctccctcgtgacacagatcgccaacccggccactgcacctgaggcacgagtgctacccaaggacctgtcccaaaagct

SEQ ID NO: 473879 - DNA, 120 bp, Artificial Sequence
  ENSG00000160058_8 (sequence is synthesized)
gctagaggcatccttggaggaacagggcctggctgtggatgtgggtgagactggaccctcaccccctattcactccaagcccctaacgcctgctggccacaccggcggcccagagcccag

SEQ ID NO: 473880 - DNA, 120 bp, Artificial Sequence
  ENSG00000160058_9 (sequence is synthesized)
gcctccagccagagtagagactctgagggaggaggcgcccacagacttacgggtgtttgagctgaactcggatagtgggaagtctacaccctccaacaatggaaagaaaggctcaagcac

SEQ ID NO: 473881 - DNA, 120 bp, Artificial Sequence
  ENSG00000160058_10 (sequence is synthesized)
ggacatcagtgaggactgggagaaagactttgacttggacatgactgaagaggaggtgcagatggcactttccaaagtggatgcctccggggagctggaagatgtagagtgggaggactg

SEQ ID NO: 473882 - DNA, 120 bp, Artificial Sequence
  ENSG00000160058_11 (sequence is synthesized)
agaatgttcccccaaatctcctctgccaaccagagctctgggcacagattctggtggctccctgctggccctcttgggcctctgctcacacctgggaaggggctctctaaatcccggcca

SEQ ID NO: 473883 - DNA, 120 bp, Artificial Sequence
  ENSG00000160058_12 (sequence is synthesized)
gaaactctgacttgtgccaacaataggatgacccaagggagaggaaacctatcctcctcaccagaagagcctgtgtttttctgctgaacacccactgttcctgaggactcctgctgggaa

SEQ ID NO: 473884 - DNA, 120 bp, Artificial Sequence
  ENSG00000160058_13 (sequence is synthesized)
gtcccaagggatagttctagcccttctgcctgtgtagacagaagctaaaccaccagtctctctcggaggaagctgagacaacatactctgtccatacataagcaggcagggagggccatg

SEQ ID NO: 473885 - DNA, 120 bp, Artificial Sequence
  ENSG00000160058_14 (sequence is synthesized)
ccacctacccttggctaaacagggacagtgaacacattttggttcctatcccagtgggtaagaggcacttatctctgggaaatttgcctctcttgggactctccccctcccaggcatttt

SEQ ID NO: 473886 - DNA, 120 bp, Artificial Sequence
  ENSG00000160058_15 (sequence is synthesized)
ccattcctggaaaggctcctttggggttcagaatccagagaccaaaccctgacccacctccttcctttcctccagcccacgctggtctgtccccatgccttcccagggcttcttcatgtc

SEQ ID NO: 473887 - DNA, 120 bp, Artificial Sequence
  ENSG00000160058_16 (sequence is synthesized)
ggatgcacccaagtccttagcccagctgtgccacctgcaggagttcgctcttgcgtttcttcccctccccaagaagggagggggctacttcaggcccttctgtgtgttgcctggcaggat

SEQ ID NO: 473888 - DNA, 120 bp, Artificial Sequence
  ENSG00000160058_17 (sequence is synthesized)
accttgtccaaccagctacccacctcaactcccctgtagtttaggacacaaaacagctaccagcggtacagagcggtgatcaaagccgagtacttacaactctggtaagcctagcttctc

SEQ ID NO: 473889 - DNA, 120 bp, Artificial Sequence
  ENSG00000160058_18 (sequence is synthesized)
cgcctcagcccttctgcttctggaagggctatcctgggggtgaacttgaaactctcatcaggcttctgcaaaagctcttcttcctgaagacagacccagcctttgtgctctcaccctcca

SEQ ID NO: 473890 - DNA, 120 bp, Artificial Sequence
  ENSG00000160058_19 (sequence is synthesized)
ctctggtaaagctgcacctctgggggaatgaggggctgcaggaatctctggagagcctggtgcttcacgatgctgctctggtgattcttgtacctaatctggtgtgctcaccaatgagtg

SEQ ID NO: 473891 - DNA, 120 bp, Artificial Sequence
  ENSG00000160058_20 (sequence is synthesized)
aaagggatcgtgggtcagggacaccgagagagtgaggtcacttccacttcaaaccttcagtgagggggtgggatggagagaatgctgaatcttttttttgacgggatggggtttttctct

SEQ ID NO: 473892 - DNA, 120 bp, Artificial Sequence
  ENSG00000160058_21 (sequence is synthesized)
ttgtaattatttctttagtttaattaaccttttggttgtttgtgcaatattatatattttaaattataatgcatctccccagagtattttgtagctgggaaaagaaaaaaggaaaaaaag

SEQ ID NO: 473893 - DNA, 120 bp, Artificial Sequence
  ENSG00000160058_22 (sequence is synthesized)
aaaaaaagattctaacagctgttagttttataattaaaaaagaaagaaaaaagaactttgtcctgaaccttttacagacttgccgttaacagcattaaagtgattcacccgaagctgaaa

SEQ ID NO: 473894 - DNA, 120 bp, Artificial Sequence
  ENSG00000160058_23 (sequence is synthesized)
agtctggtactggaggagttcagagaaagaaggaatctctggacatctgcggtgcttcactgaggagacaagcctcgtataggagagttggctcaagcacggacatcagtgaggactggg

SEQ ID NO: 473895 - DNA, 120 bp, Artificial Sequence
  ENSG00000160058_24 (sequence is synthesized)
ccagccagcccagctgtcccctcaggagggtccctgctcctgtctgaggtgacaggtggtgggaaaggagctggagcttcctgctcagacccacaacattggtcatcagcaggctgcact

SEQ ID NO: 473896 - DNA, 120 bp, Artificial Sequence
  ENSG00000160058_25 (sequence is synthesized)
tttcctcagttccagggtggatagagggtcaagttcttgaccttagctctgtatcaaaattgcctgagaaactgcttaagaaaacagatgtcatgctgagcgcggtggctcacacctgta

SEQ ID NO: 473897 - DNA, 120 bp, Artificial Sequence
  ENSG00000160058_26 (sequence is synthesized)
cttttcctcccattttgaaagaattgtgtctggcaaccaaacaagctgcatattttaagtaataattagttttcccacttctgtattgttttagcaaatgttttccattagcaaagtcat

SEQ ID NO: 473898 - DNA, 120 bp, Artificial Sequence
  ENSG00000160058_27 (sequence is synthesized)
tcatgttgacaatttagaaaacacagacaagtgaaagaaaagagaaagaatgagaaaaggaagagagagagagaaagacctagagacatccataattccatcttccaaagatagctactg

SEQ ID NO: 473899 - DNA, 120 bp, Artificial Sequence
  ENSG00000160058_28 (sequence is synthesized)
gatgtcatgcaggcaagatggcggaagggtgagcttgtcgttttgctcctaggcgttggggcctgaattctcccagggttggggtgctgggcgagagtcccggtggggaacgtgagatca

SEQ ID NO: 473900 - DNA, 120 bp, Artificial Sequence
  ENSG00000160058_29 (sequence is synthesized)
gcgggggcgtggactgatctgaaagggcagagtggagtcgcattgtgagggggtgggcaagcggtctgcgaagcctcggcccgcagggtacatctgagcggggaacaaaccggatccttg

SEQ ID NO: 473901 - DNA, 86 bp, Artificial Sequence
  ENSG00000160058_30 (sequence is synthesized)
catcaaaccctgcctgaccttctgagttgtggtcctcaggtatgaggcctgagtatatacttggccttggagacaaaagaccagtg

SEQ ID NO: 473902 - DNA, 120 bp, Artificial Sequence
  ENSG00000160058_31 (sequence is synthesized)
gcctgagtatatacttggccttggagacaaaagaccagtgtgatcaagggcaagggcaagttacttaacctgagcccctggttcctcatctaaaacatggaattgatcattataagacct

SEQ ID NO: 473903 - DNA, 120 bp, Artificial Sequence
  ENSG00000160058_32 (sequence is synthesized)
ggctataagctgtaatgaggtgatccatgtagacaccttagggctattgcctgagacatggtgaccagcactcaggagacattagtgataaaccccacaaaacccattccagttattaag

SEQ ID NO: 473904 - DNA, 120 bp, Artificial Sequence
  ENSG00000160058_33 (sequence is synthesized)
ctcaaggaggccttagtactgttattcttcactacctctcagaatcaaaagtggctcatttagattgagaggctggaacagtccaaagctctcccagctaataagtgacaggactgaggc

SEQ ID NO: 473905 - DNA, 120 bp, Artificial Sequence
  ENSG00000160058_34 (sequence is synthesized)
tgcaacccagacatctgattcatgtcagcgttagttccactgtcacataagaaccacatgagtccttccatcatgtaacttatgagcctgttagaaagaggtggacagattagagagaca

SEQ ID NO: 473906 - DNA, 120 bp, Artificial Sequence
  ENSG00000160058_35 (sequence is synthesized)
ttgggggagtattttacctactcaggagtattttgcacttgtgactacctcactatacccaggacagagaaagcccatagtgccctgtcaggccacaggggcttgctggctttttgtgtc

SEQ ID NO: 473907 - DNA, 120 bp, Artificial Sequence
  ENSG00000160058_36 (sequence is synthesized)
tttgcagccccctttaaaacctgacgtgcagtacacgtgagcattctagaacctgctataccagggcttagccgacagcaggccaagagtaggaacaaagcaagaaaacgttccgtgggg

SEQ ID NO: 473908 - DNA, 120 bp, Artificial Sequence
  ENSG00000160058_37 (sequence is synthesized)
agacttgagctgggaattagggtgttggtgcccctagtgaagacctagtgggcatctgtaggccactgccacctctgcttttggccacagtgccactcaggcagtggcctccattcaccc

SEQ ID NO: 473909 - DNA, 120 bp, Artificial Sequence
  ENSG00000160058_38 (sequence is synthesized)
aaagactaagtaacttgcccttgattacactggtcttttgtgtccagggccaagtatctgctcaggcctcctgagttctctgcttctcagagccatggcattatctgctcagcaggaggc

SEQ ID NO: 473910 - DNA, 120 bp, Artificial Sequence
  ENSG00000160058_39 (sequence is synthesized)
aagttctccttaaaggactgaggctgacttggttcctgtaggcagccatcaccttgtggtgtctggtgttggttgggggaagtgtttcctttaggtctgaggtaatcagagcatcaggcc

SEQ ID NO: 473911 - DNA, 120 bp, Artificial Sequence
  ENSG00000160058_40 (sequence is synthesized)
cacccctcaggcagagggcagctctgcccctcagacacattccttaagactaggggttcactctcagtgggacctcagagtatggcctggggtaggggatgggaggtggctctgctcagc

SEQ ID NO: 473912 - DNA, 120 bp, Artificial Sequence
  ENSG00000160058_41 (sequence is synthesized)
aagtggaggttaggtctgggcctgactcaggagtaactatgtgtttgtgatttccattaccccctcccatttgcagctggaagatgtagagtgggaggactgggagtgagggagccagag

SEQ ID NO: 473913 - DNA, 120 bp, Artificial Sequence
  ENSG00000160058_42 (sequence is synthesized)
aaatagtggtgatgtcatgcaggcaagatggcggaaggggaggacgtgggatggtggcggagctggctgcagcagagctaccaagcagtcaaagagaaggctcgcctctatagcctgcag

SEQ ID NO: 473914 - DNA, 120 bp, Artificial Sequence
  ENSG00000160058_43 (sequence is synthesized)
ggctgatcatcgtccatagaggccaccgtacccgacgtttgcggacagtgacaaagagtcaagcttggtggagcctgaggacaggactgaatgacgattgaactgagagttcaggggcgg

SEQ ID NO: 473915 - DNA, 120 bp, Artificial Sequence
  ENSG00000160058_44 (sequence is synthesized)
agtttgagggcgaactcgggacagagactggatagagttcagggaggcgggacctaatgatggcgcagggaggggattgggctgagggcggtgccggcgcgaggattgggccgagcgcct

SEQ ID NO: 473916 - DNA, 120 bp, Artificial Sequence
  ENSG00000160058_45 (sequence is synthesized)
atgcaggcaagatggcggaaggggaggacgtgggatggtggcggagctggctgcagcagagctaccaagcagtcaaagagaaggtaagccgggcccgtgcccttcttccctcagcagggc

SEQ ID NO: 473917 - DNA, 120 bp, Artificial Sequence
  ENSG00000160058_46 (sequence is synthesized)
cctgcgccgcctcaatgcaacctggtccaaccagccccgcccaacttttgcgggcgctaagtctcaaggatgaggctgacctgggcctttcttttagcctctaccggtccacgggaagac

SEQ ID NO: 473918 - DNA, 120 bp, Artificial Sequence
  ENSG00000160058_47 (sequence is synthesized)
ggaatccataggaaggagcaatttattccagctcaggaaattcagtttcttcgtgaaagagagagcatttgatacaggtcttgaaggaaaagattctagcagtaaaaaaacttactcgta

SEQ ID NO: 473919 - DNA, 120 bp, Artificial Sequence
  ENSG00000160058_48 (sequence is synthesized)
tagtcattcaaatattagagtatatgcgacaaccagcactctgataggtcttgaggatacagacttcagccaaacagatgtaatcctgggccttacaaagctcacagtctagtggagaga

SEQ ID NO: 473920 - DNA, 120 bp, Artificial Sequence
  ENSG00000160058_49 (sequence is synthesized)
atgcaggcaagatggcggaaggggaggacgtgggatggtggcggagctggctgcagcagagctaccaagcagtcaaagagaaggggtgatctcagacacctttgccccttcgccagacaa

SEQ ID NO: 473921 - DNA, 120 bp, Artificial Sequence
  ENSG00000160062_0 (sequence is synthesized)
agcaaataccttttgtttctctcacgttggggctacttgttttagggcgcaaaggaacggcctcgaaagggggtccttccccagccgagaaccaggaatcttccctcggcccgcgcgcgc

SEQ ID NO: 473922 - DNA, 120 bp, Artificial Sequence
  ENSG00000160062_1 (sequence is synthesized)
gaccggccggtgcgccgcggcccgcggacaatcctccaaacacagactgtttgacttagaatcttcccttttttactccattcaagagcagcattcataaatttccagaatggagatctc

SEQ ID NO: 473923 - DNA, 120 bp, Artificial Sequence
  ENSG00000160062_2 (sequence is synthesized)
ctctcatcagtctcacctcctgcagcaactgaacgagcagcgcaggcaagatgtattttgtgactgcagtattctagttgaagggaaggtcttcaaagcacatcgaaatgtattattcgc

SEQ ID NO: 473924 - DNA, 120 bp, Artificial Sequence
  ENSG00000160062_3 (sequence is synthesized)
tagtagcggctactttaaaatgcttctttctcagaattcaaaggagacgagtcagccaaccacagctacatttcaggctttctcccctgacacttttacagttatcttggacttcgtata

SEQ ID NO: 473925 - DNA, 120 bp, Artificial Sequence
  ENSG00000160062_4 (sequence is synthesized)
ttctggcaaactgtctcttactggtcagaatgtcatagaagtgatgtcggctgctagcttccttcagatgactgatgtcataagtgtatgtaagacttttattaaatcttccttagacat

SEQ ID NO: 473926 - DNA, 120 bp, Artificial Sequence
  ENSG00000160062_5 (sequence is synthesized)
tagtgagaaagaaaaagatcgctatttcagtctctcagataaagatgccaattctaatggtgtagaacgttcctctttttatagtggtggctggcaagaaggaagcagttctccacgttc

SEQ ID NO: 473927 - DNA, 120 bp, Artificial Sequence
  ENSG00000160062_6 (sequence is synthesized)
tcacctaagcccagagcaaggaacaggtataataagtggaaaatcttggaataagtataattatcatccagcctcccagaagaatactcaacaacccttggccaagcatgaaccaaggaa

SEQ ID NO: 473928 - DNA, 120 bp, Artificial Sequence
  ENSG00000160062_7 (sequence is synthesized)
agagtccattaaaaagaccaaacatttgagattgtcacagccttctgaagttactcattataagtcaagcaaacgagaagtacgaacatctgattcttccagccatgtttcccagtctga

SEQ ID NO: 473929 - DNA, 120 bp, Artificial Sequence
  ENSG00000160062_8 (sequence is synthesized)
agaacaagcacagattgatgctgaaatggactctactcctgttggctatcagtacggtcaaggatctgatgtcacatccaaaagctttccagatgatctgcctcggatgcgattcaagtg

SEQ ID NO: 473930 - DNA, 120 bp, Artificial Sequence
  ENSG00000160062_9 (sequence is synthesized)
cccgtactgcacacatgtggtgaagcggaaggcagacctaaagcgccaccttcgttgtcatacaggagaaaggccctatccatgtcaagcttgtggaaaaagatttagcaggctagacca

SEQ ID NO: 473931 - DNA, 120 bp, Artificial Sequence
  ENSG00000160062_10 (sequence is synthesized)
tctaagtagccattttcgaacaattcaccaggcatgtaaactcatctgcagaaaatgtaaacgtcatgtgacagatctaacagggcaagtggtacaggagggaaccaggcgctacagact

SEQ ID NO: 473932 - DNA, 120 bp, Artificial Sequence
  ENSG00000160062_11 (sequence is synthesized)
gtgtaatgagtgtcttgcagaatttggcatagacagcctccccattgacttggaagctgaacaacatcttatgtccccatcagatggagataaggattccagatggcacttgagtgaaga

SEQ ID NO: 473933 - DNA, 120 bp, Artificial Sequence
  ENSG00000160062_12 (sequence is synthesized)
tgagaatagatcctatgtggagattgtagaagatgggtctgctgatctggtcatccaacaggttgatgatagtgaagaagaagaagaaaaagaaattaagcccaacattaggtagctgta

SEQ ID NO: 473934 - DNA, 120 bp, Artificial Sequence
  ENSG00000160062_13 (sequence is synthesized)
atgtgaaccaacagagctggcatgtctgcaatttacattgacttcctgtatctctctctttctatggtcggagtctagttaacaaatttatcacactgactttaaagaaatgatctgata

SEQ ID NO: 473935 - DNA, 120 bp, Artificial Sequence
  ENSG00000160062_14 (sequence is synthesized)
taacttgcatgctttctgaacaggccattgtatccattctgaactttgttgccctaaaatgtgttgctgcactggaaagaaagaactagcttgagttggcttgatggatgaacaattatc

SEQ ID NO: 473936 - DNA, 120 bp, Artificial Sequence
  ENSG00000160062_15 (sequence is synthesized)
ctcttactttcattacaatcctcttactttattccagagatacctttttcttttaatattggaggatctacttagcaaacttttttcaaagaaaatactttaaataaattcaccacaacc

SEQ ID NO: 473937 - DNA, 120 bp, Artificial Sequence
  ENSG00000160062_16 (sequence is synthesized)
aaactttatgtaagacaatttcaaggtgtttcaaaaacacataactaccaatgtttaatttcacagggaaccagttaagagcacatttaaggatctggcaacccaccttactaaacaaat

SEQ ID NO: 473938 - DNA, 120 bp, Artificial Sequence
  ENSG00000160062_17 (sequence is synthesized)
tagtctttctattaatttgagatctgaaacaacctgtcattactctgatatcctgaacgtttaaggattatggaagaagactaaagtgtttgaaatcattcatatttgaaatttttatca

SEQ ID NO: 473939 - DNA, 120 bp, Artificial Sequence
  ENSG00000160062_18 (sequence is synthesized)
ttagcttaaaaattactctcagtattgttaaaaaaaaaaaaaagtagaggctggccaaagattatatacagatattttcttaaagcaggaaactaatgttgcctaaaagtcaaggtagtt

SEQ ID NO: 473940 - DNA, 120 bp, Artificial Sequence
  ENSG00000160062_19 (sequence is synthesized)
gcctaaaagtcaaggtagtttgtgaagacaatctgtcaatatggttgtccatctctctaaagaaaagcaggctgggcgctgtggctcatgcctataatcccaatactttgggaggccgag

SEQ ID NO: 473941 - DNA, 120 bp, Artificial Sequence
  ENSG00000160062_20 (sequence is synthesized)
cttaccatatgtgagtgatttctaacgtttatgtagtgctatattatttataaagtactctctcatgtattttctcagtgaggtggatactatctccgatttacaaatgaggaaattaag

SEQ ID NO: 473942 - DNA, 120 bp, Artificial Sequence
  ENSG00000160062_21 (sequence is synthesized)
gtcagaaagtctgagagagaaaactgatgattggacaggatctgattttaaacaatcctctttcagccttctctccctgtatgtctcctgaaatggcaaagaatagaagtcaaacctcac

SEQ ID NO: 473943 - DNA, 120 bp, Artificial Sequence
  ENSG00000160062_22 (sequence is synthesized)
cagttggcagtcattataaaaataagccaatcagaattagaaagtatgaaaggaggaattgaatcattttcaacaacatacaatatcttgatctagagattttcaaataatgctaagtaa

SEQ ID NO: 473944 - DNA, 120 bp, Artificial Sequence
  ENSG00000160062_23 (sequence is synthesized)
tgtccctacagtacctattggtatgtttttatgtcacgttatttatatgtaaatttaaagtataaaactatttgaacaaattattcacttaaatatgttgaacatttttgcttctcttgt

SEQ ID NO: 473945 - DNA, 120 bp, Artificial Sequence
  ENSG00000160062_24 (sequence is synthesized)
ttaaatatgttgaacatttttgcttctcttgtttatataatattttcaaaacaaacttttctcctagtatacaaagtttaaacttctcccctttgggctgggcccagtggctcacgcctg

SEQ ID NO: 473946 - DNA, 61 bp, Artificial Sequence
  ENSG00000160062_25 (sequence is synthesized)
agctactcagaaggctgaggcaggaggatagcttgaacccaggaggcagaggctgcggtgg

SEQ ID NO: 473947 - DNA, 120 bp, Artificial Sequence
  ENSG00000160062_26 (sequence is synthesized)
aagaactgagcttcataaaggtctcttctgcaagttatcacagtgaagcttgatagaatttcactgtatatggagaggctccatctattttactgttttcttttttgtttttgttttttt

SEQ ID NO: 473948 - DNA, 120 bp, Artificial Sequence
  ENSG00000160062_27 (sequence is synthesized)
cgtgagccactgcgcccagccaattttactgtatttttaaatgccatgacatacctcaaaattatcctttttatgttactattttctcttgttctttcattaattattgtccttgatacc

SEQ ID NO: 473949 - DNA, 120 bp, Artificial Sequence
  ENSG00000160062_28 (sequence is synthesized)
ttgataccaatttctaggctaaattggttactttcttttaaaaaatttaaaaatagatgaataaccacttgtttcatggtacttaattgagactttttcaagattcccctgatggcacat

SEQ ID NO: 473950 - DNA, 120 bp, Artificial Sequence
  ENSG00000160062_29 (sequence is synthesized)
ttgcagttgcttcaagactggatgatgtgcattgagttctctgttctcccaacatggctgttcctaaatcaggattctggtttttttgagatggactctcgctctgttgtccaagctgga

SEQ ID NO: 473951 - DNA, 120 bp, Artificial Sequence
  ENSG00000160062_30 (sequence is synthesized)
ccggcctaaatcaggattcttaacaattaaagtgtatctgaatgaggaaggaaacgcttgtcattctctagtcttacccaattaatactgacaccttttgaaattaaaacctgatttttt

SEQ ID NO: 473952 - DNA, 120 bp, Artificial Sequence
  ENSG00000160062_31 (sequence is synthesized)
agttgttggagccagtaggaaaaatggctgatttgaacttttttcctataaatgaagtagtgcttgcatgtgtgtactctaatgcactttagtctatgatctaaatgtccttttatgcta

SEQ ID NO: 473953 - DNA, 120 bp, Artificial Sequence
  ENSG00000160062_32 (sequence is synthesized)
ttatcttctgcatgcaaactttacatacatcagcatgaatatccaacattcactgaacacagtgccaccagcacttgtaattgccttttcagaaataatgctttctcataattgtttata

SEQ ID NO: 473954 - DNA, 120 bp, Artificial Sequence
  ENSG00000160062_33 (sequence is synthesized)
acgagcatcaaactatccccacaaaatgatcaagttcaccaaactagacaaagaatctgttgtatcattttaacatcatagaagaacatttaagacatgtttgtaagttgtaaataatga

SEQ ID NO: 473955 - DNA, 120 bp, Artificial Sequence
  ENSG00000160062_34 (sequence is synthesized)
ctccagttatagcatatatatctaagacgttagagaccagttattttctagagtgaaactgtctattgatgattgagaaaattgaattctttggtttttacatgtgggcaaatgttacat

SEQ ID NO: 473956 - DNA, 120 bp, Artificial Sequence
  ENSG00000160062_35 (sequence is synthesized)
aggggtataatctgtttaaataagctttatttatgccaaggattttttttttaatatcaagacttggttagaccaaagtttgctcttgcaggaatgccatttatcagcttctgaatgccc

SEQ ID NO: 473957 - DNA, 120 bp, Artificial Sequence
  ENSG00000160062_36 (sequence is synthesized)
ttctaactccattaccctcaagagtgtctgggtataggatgaagcattacaaaaagaaagcaccactgcagtcatgcctagtgtctgggagaaacaaaatggactagacctgcagtttaa

SEQ ID NO: 473958 - DNA, 120 bp, Artificial Sequence
  ENSG00000160062_37 (sequence is synthesized)
aataatttaacccgagaaactcttcaaatgaattgtttcctaaagatgctcaaatttaagggataaactctaaaatcagagctgctgtggttaaagtcccccacaaacctttccccagac

SEQ ID NO: 473959 - DNA, 120 bp, Artificial Sequence
  ENSG00000160062_38 (sequence is synthesized)
acctctgcagaactcaggtgcacaatgttgaaaaccatggaattagacaacttcctgaattccctttgagccttgcagcctcatttcgttactcctgttactcacggtgcttataagcag

SEQ ID NO: 473960 - DNA, 120 bp, Artificial Sequence
  ENSG00000160062_39 (sequence is synthesized)
gtaaccatatggtctcttagtgaagcaaatcacatccttagcacatgatgttccttctatgggtatcagatcttaagactttttaaaatttaggaacaaatgtttcaatattatattttc

SEQ ID NO: 473961 - DNA, 120 bp, Artificial Sequence
  ENSG00000160062_40 (sequence is synthesized)
agtaatgcaatcaaaataagcatagttactgttttctgtacggctaagtactgcctaatggatgaaagaagtttggtgcttcaattatttatgagctcagaactcaattcattaaagtta

SEQ ID NO: 473962 - DNA, 120 bp, Artificial Sequence
  ENSG00000160062_41 (sequence is synthesized)
ttttgccaagtcatgccaagatatattgaaatttccactcatattggtttttaaaattttttttagtcctaaaattaataagtatggaaaatcactaaaagcagtgtaggataaggtgtg

SEQ ID NO: 473963 - DNA, 84 bp, Artificial Sequence
  ENSG00000160062_42 (sequence is synthesized)
tttaactgggaagggtgataataatagaataataggtacaggaggaccaaactttagattataaaccagaaagttttgttattt

SEQ ID NO: 473964 - DNA, 120 bp, Artificial Sequence
  ENSG00000160062_43 (sequence is synthesized)
taggtacaggaggaccaaactttagattataaaccagaaagttttgttattttatataagtgtatcagtattactatttatcatttatatagcattttatatttgcaaagtgtttaataa

SEQ ID NO: 473965 - DNA, 120 bp, Artificial Sequence
  ENSG00000160062_44 (sequence is synthesized)
tttttgttattctttacatatatatgaaataggacagttatcccacatgaacggtaaataaattgaggcacagaacagtaaaaaaacctcagggtcaggcgtggtggctcacacctgtaa

SEQ ID NO: 473966 - DNA, 120 bp, Artificial Sequence
  ENSG00000160062_45 (sequence is synthesized)
aaaaaaaaaaaaaaaaagaacctaagacaacccagtgaaatggtagcaaaaaataggaaatataatgatcacattttctgaatcctagaccatcagcctaattcactgaggtgtgttgtg

SEQ ID NO: 473967 - DNA, 120 bp, Artificial Sequence
  ENSG00000160062_46 (sequence is synthesized)
aggtgtgttgtgtatcactctattttatagatgattttatataagtaacagtggattgttttaaagctgacgtcattgtatgtggatacattctatatggaataaatgttatgtaaagga

SEQ ID NO: 473968 - DNA, 120 bp, Artificial Sequence
  ENSG00000160072_0 (sequence is synthesized)
cctggccaccggctcgcggcgcgtggaggctgctcccagccgcgcccgagtcagactcgggtgggggtcccggcggcggtagcggcggcggcggtgcgagcatgtcgtggctcttcggcg

SEQ ID NO: 473969 - DNA, 120 bp, Artificial Sequence
  ENSG00000160072_1 (sequence is synthesized)
ccaagggtgaaggcgcggggccgccgccgcctttgccgcccgcgcagcccggggccgagggcggcggggaccgcggtttgggagaccggccggcgcccaaggacaaatggagcaacttcg

SEQ ID NO: 473970 - DNA, 120 bp, Artificial Sequence
  ENSG00000160072_2 (sequence is synthesized)
ggagcaacttcgaccccaccggcctggagcgcgccgccaaggcggcgcgcgagctggagcactcgcgttacgccaaggaggccctgaatctggcgcagatgcaggagcagacgctgcagt

SEQ ID NO: 473971 - DNA, 120 bp, Artificial Sequence
  ENSG00000160072_3 (sequence is synthesized)
tggagcaacagtccaagctcaaacaacttctcaatgaggagaatttacggaagcaggaggagtccgcgtccgagcaccgtcagaccgtcttggagtccatcaggacggctggcaccttgt

SEQ ID NO: 473972 - DNA, 120 bp, Artificial Sequence
  ENSG00000160072_4 (sequence is synthesized)
ttggggaaggattccgtgcctttgtgacagaccgggacaaagtgacagccacggtggctgggctgacgctgctggctgtcggggtctactcagccaagaatgcgacagccgtcactggcc

SEQ ID NO: 473973 - DNA, 120 bp, Artificial Sequence
  ENSG00000160072_5 (sequence is synthesized)
gcttcatcgaggctcggctggggaagccgtccctagtgagggagacgtcccgcatcacggtgctggaggcgctgcggcaccccatccaggtcagccggcggctcctcagtcgaccccagg

SEQ ID NO: 473974 - DNA, 120 bp, Artificial Sequence
  ENSG00000160072_6 (sequence is synthesized)
acgtgctggagggtgttgtgcttagtcccagcctggaagcacgggtgcgcgacatcgccatagcaaccaggaacaccaagaagaaccggggcctgtacaggcacatcctgctgtatgggc

SEQ ID NO: 473975 - DNA, 120 bp, Artificial Sequence
  ENSG00000160072_7 (sequence is synthesized)
caccaggcaccgggaagacgctgtttgccaagaaactcgccctgcactcaggcatggactacgccatcatgacaggcggggacgtggcccccatggggcgggaaggcgtgaccgccatgc

SEQ ID NO: 473976 - DNA, 120 bp, Artificial Sequence
  ENSG00000160072_8 (sequence is synthesized)
cggaagcgagccactgaggagataagcaaggacctcagagccacactgaacgccttcctgtaccacatgggccaacacagcaacaaattcatgctggtcctggccagcaatctgcctgag

SEQ ID NO: 473977 - DNA, 120 bp, Artificial Sequence
  ENSG00000160072_9 (sequence is synthesized)
cagttcgactgtgccatcaacagccgcattgacgtgatggtccacttcgacctgccgcagcaggaggagcgggagcgcctggtgagactgcattttgacaactgtgttcttaagccggcc

SEQ ID NO: 473978 - DNA, 120 bp, Artificial Sequence
  ENSG00000160072_10 (sequence is synthesized)
acagaaggaaaacggcgcctgaagctggcccagtttgactacgggaggaagtgctcggaggtcgctcggctgacggagggcatgtcgggccgggagatcgctcagctggccgtgtcctgg

SEQ ID NO: 473979 - DNA, 120 bp, Artificial Sequence
  ENSG00000160072_11 (sequence is synthesized)
caggccacggcatatgcctccaaggacggggtcctcactgaggccatgatggacgcctgtgtgcaagatgctgtccagcagtaccgacagaagatgcgctggctgaaggcggaggggcct

SEQ ID NO: 473980 - DNA, 120 bp, Artificial Sequence
  ENSG00000160072_12 (sequence is synthesized)
gggcgcggggtcgagcaccccctatccggagtccaaggcgagaccctcacctcatggagcctggccacggacccctcctacccctgccttgccggcccctgcacatttaggatatgctcc

SEQ ID NO: 473981 - DNA, 120 bp, Artificial Sequence
  ENSG00000160072_13 (sequence is synthesized)
tggatggggactgggctgtgcccagggcctctgtcccccaggatgtcttgtggtggcggtcggccgttctgccccccagggcaccccctgttgtaggcactggctagggaggggcaggcc

SEQ ID NO: 473982 - DNA, 120 bp, Artificial Sequence
  ENSG00000160072_14 (sequence is synthesized)
tccttcctgcccctcgagacactcttgggagatgcattttccgtctggctcacagggggagggtgaggctttgtaccccagcccctgcccaggccactgtgagggtgggtgctggctgag

SEQ ID NO: 473983 - DNA, 120 bp, Artificial Sequence
  ENSG00000160072_15 (sequence is synthesized)
cccctggggcagaaggagtggggcaggcggggtctttgttctcggctcccacagcagagccaggtgagggggggcctgccaggactagacagaagtggggcggcctgaaccctgcttcca

SEQ ID NO: 473984 - DNA, 120 bp, Artificial Sequence
  ENSG00000160072_16 (sequence is synthesized)
gccatggccaggggccacggaacccggcaggggtgtctgaggccgccctgtcagctggccggtccaagcctgtggctggagctggtgtgtgtttatctaataaagtcccacaggtgcctc

SEQ ID NO: 473985 - DNA, 120 bp, Artificial Sequence
  ENSG00000160072_17 (sequence is synthesized)
agggcccagtatcaagacaagctggcccggcagcgctacgaggaccaactgaagcagcagcaacttctcaatgaggagaatttacggaagcaggaggagtccgtgcagaagcaggaagcc

SEQ ID NO: 473986 - DNA, 120 bp, Artificial Sequence
  ENSG00000160072_18 (sequence is synthesized)
ctgcgagtggagaccgaggcccgggcgcgcgccaaggccgagcgggagaatgcagacatcatccgcgagcagatccgcctgaaggcgtccgagcaccgtcagaccgtcttggagtccatc

SEQ ID NO: 473987 - DNA, 85 bp, Artificial Sequence
  ENSG00000160072_19 (sequence is synthesized)
ctactaaaaatacaaaaattggccgggcctcgtggcacaggtctgtattagctgagtgtggtgacctgagcctgtaatcccagtc

SEQ ID NO: 473988 - DNA, 120 bp, Artificial Sequence
  ENSG00000160072_20 (sequence is synthesized)
caagatggcaccattgcactccagcctggccacagaacaaaaccctttctctaaaaacaaagtcaagggcgcattaagcagctccttcatgtcctcaggtgacaccgtctcaccaacatg

SEQ ID NO: 473989 - DNA, 120 bp, Artificial Sequence
  ENSG00000160072_21 (sequence is synthesized)
aggtgacaccgtctcaccaacatggcaacaccacctgcaacattcaccgtcacgctgaccaggccaccggcaggtgctgcagtcacagcagtgggcgccggcaccacggcagagcaagtg

SEQ ID NO: 473990 - DNA, 120 bp, Artificial Sequence
  ENSG00000160072_22 (sequence is synthesized)
cccactcagtgccgggcacctactgtgtgctgggcggggtggggggacggaggacacagccatgtgcgacctggggcgccaccacagcaggccagagcctgggcacaaaagagcgaggct

SEQ ID NO: 473991 - DNA, 120 bp, Artificial Sequence
  ENSG00000160072_23 (sequence is synthesized)
ttaaacgagagaagaatctgaacttcaaactctcagggttttattccgaataacgaaagtttttgcgaaatggagtcgggttcgctttctgggtctttgatttttttttttttgagacag

SEQ ID NO: 473992 - DNA, 89 bp, Artificial Sequence
  ENSG00000160072_24 (sequence is synthesized)
tttttttttgagacagagtctcactttcaagtgtgctgctcaagtgcagtggcgcgatctcgactcactgtcagcttcgcctcttggag

SEQ ID NO: 473993 - DNA, 69 bp, Artificial Sequence
  ENSG00000160072_25 (sequence is synthesized)
ctccggagtagctgggactacaggtgtctgcctgttagccaagatggtttcgatctcctgacctcgtga

SEQ ID NO: 473994 - DNA, 120 bp, Artificial Sequence
  ENSG00000160072_26 (sequence is synthesized)
gggattacgggcgtgagccaccgtgctcagccacagccagctaattttttcatgtttttagtagagacgaggtttttccaggttggttaggctggtcttgaactccaacctctggtgata

SEQ ID NO: 473995 - DNA, 120 bp, Artificial Sequence
  ENSG00000160072_27 (sequence is synthesized)
cctcccaaagtgctgggattacagacctggccagcctaaacgatttttaaaacaagttagagattttgggttagtcttgttttccaggaataaagtaccatttttagtggccaaggatgt

SEQ ID NO: 473996 - DNA, 120 bp, Artificial Sequence
  ENSG00000160072_28 (sequence is synthesized)
tagtggccaaggatgtaccagagggtgtggccctgtgacatccagctgggtctgcccagggccccgctcagcgaccgaggctttctaggatttatgctgccagttgcagagaaaatggcc

SEQ ID NO: 473997 - DNA, 120 bp, Artificial Sequence
  ENSG00000160072_29 (sequence is synthesized)
ctgagtgagggcgttatgactgccccacctgcctcctgtaaccgcgtggctgtgggattcggggctgggaattcgggttcctgtggggccagcacacggccctgtgcttctccctcaggc

SEQ ID NO: 473998 - DNA, 120 bp, Artificial Sequence
  ENSG00000160072_30 (sequence is synthesized)
ggagagagggtgggggcagccccgtgcgtctcctgctctaggagggagggacggtgggggccggtgcgccagtgcggtgtctctgctgcaggtggctgggctgacgctgctggctgtcgg

SEQ ID NO: 473999 - DNA, 81 bp, Artificial Sequence
  ENSG00000160072_31 (sequence is synthesized)
tcctgcctcagccttccgagcagctgggactacaggagcctgccaccacatctggcgaatttttgtatttttagtagagaa

SEQ ID NO: 474000 - DNA, 120 bp, Artificial Sequence
  ENSG00000160072_32 (sequence is synthesized)
cctcagccttccgagcagctgggactacaggagcctgccaccacatctggcgaatttttgtatttttagtagagaagggggttcagcatgttgtccaggttggtcttgaactcctgacct

SEQ ID NO: 474001 - DNA, 120 bp, Artificial Sequence
  ENSG00000160072_33 (sequence is synthesized)
ggattataggcaagagcgatggcgcccggcccactcagcaggattcctagaatgggcacgagctctgccctcatcacagtccaaaagtgagcacctgcctggagctgcccagaaacagcc

SEQ ID NO: 474002 - DNA, 120 bp, Artificial Sequence
  ENSG00000160072_34 (sequence is synthesized)
ttgtggggtggggttggtgtctgacctccctccccgggggccttcgcaggcttctctgctggtgcttctgtgcctgtgggtctggattcctccagggcctgatcctgggtgcagatgcag

SEQ ID NO: 474003 - DNA, 120 bp, Artificial Sequence
  ENSG00000160072_35 (sequence is synthesized)
ctggaagccctgaacctgctgcacacactagtctgggcacggagtctctgccgtgccggagctgtgcagacacaggagcggctgtcaggcagtgccagccctgagcaagtgccagctggt

SEQ ID NO: 474004 - DNA, 120 bp, Artificial Sequence
  ENSG00000160072_36 (sequence is synthesized)
gagtgctgtgctctgcaggagtatgaggccgccgtggagcagctcaagagcgagcagatccgggcgcaggctgaggagaggaggaagaccctgagcgaggagacccggcagcaccaggcc

SEQ ID NO: 474005 - DNA, 120 bp, Artificial Sequence
  ENSG00000160072_37 (sequence is synthesized)
agaggctggagctttctggagaatttactgatcacagagcggtgtgcttcacatcagcctcgcgccacatccgagttggggtctgaatgctgcccgggactgccgcctgcgccccaccag

SEQ ID NO: 474006 - DNA, 120 bp, Artificial Sequence
  ENSG00000160072_38 (sequence is synthesized)
cccctccctcctgaaggaggggcaccccgagaagaatgaggctgcagagtgatgtgggggccagcggtgacttcatgaccacactgcgcccaggtgtaagagggcacgcttctgcccagg

SEQ ID NO: 474007 - DNA, 120 bp, Artificial Sequence
  ENSG00000160072_39 (sequence is synthesized)
catcgtccatggaagacacgcagtcggccactgcagcctcggtcctgggtgccctggggctgggtcactgggggccacaggccacactgggagaccacagtcctggcatgccatgcagct

SEQ ID NO: 474008 - DNA, 120 bp, Artificial Sequence
  ENSG00000160072_40 (sequence is synthesized)
ccctgtccccagaggtctgctcagatgcagagagctcaggaaccacactcgctgcctgaattctgggagcagagcgtggtacccactgcctggctggggcctactctgggactgcagccc

SEQ ID NO: 474009 - DNA, 120 bp, Artificial Sequence
  ENSG00000160072_41 (sequence is synthesized)
ctgtccccgctggcccaggcttccggaggcagctgcgtccctgtcttggctcaaggtcaggccggaggccaggctgtccacctgcatctggaacctgcacagtcactcctccaggtcctc

SEQ ID NO: 474010 - DNA, 120 bp, Artificial Sequence
  ENSG00000160072_42 (sequence is synthesized)
gctgctggaggactctcagacaggaaacctttgctttgggggcagggtggggtgcaggggtggttgggggaatcacagcaacgagacagcacagtgccatggcgcagagcctcatattgg

SEQ ID NO: 474011 - DNA, 120 bp, Artificial Sequence
  ENSG00000160072_43 (sequence is synthesized)
tcgatgaaacaatgctttctgaactttgtgtccttaggaagggtgtaggctgttggttgaagtaggaaacagaagaggagcctgggcacgcaacggtcccatcggagagcagacccctcg

SEQ ID NO: 474012 - DNA, 120 bp, Artificial Sequence
  ENSG00000160072_44 (sequence is synthesized)
gagctgcagtgcttggaggggggcggtctacctctgctcgctctctccatttctctctctacctctgctcgctctctccatttctctctttttccttttagagatgggttcttactctga

SEQ ID NO: 474013 - DNA, 77 bp, Artificial Sequence
  ENSG00000160072_45 (sequence is synthesized)
gtccagtagccataccctactaggccctaattagccccagaggcgtgcaccaccacgcccgctaatgctaaaaattt

SEQ ID NO: 474014 - DNA, 120 bp, Artificial Sequence
  ENSG00000160072_46 (sequence is synthesized)
cagaggcgtgcaccaccacgcccgctaatgctaaaaatttgttgtagagaccgagtcttgctataatgcccaggctggtctccaactcttggcctcaggagatcctcccgcctctacagg

SEQ ID NO: 474015 - DNA, 120 bp, Artificial Sequence
  ENSG00000160072_47 (sequence is synthesized)
atgagccaccaagcctggcctcaattcctctttaaaggaattgcctaaatcttaaaccagcaatcaatactttgtatttaaaattaagccaggttagactgggctaggtggctcacgcct

SEQ ID NO: 474016 - DNA, 120 bp, Artificial Sequence
  ENSG00000160072_48 (sequence is synthesized)
ctgtggcccttgctagcgctcgtggtggcgcccaggagcttttgggtcctgagatgcaactgcttggactgtgccggggatagataggctgcccacgagctgggcggcttcctgaggagc

SEQ ID NO: 474017 - DNA, 120 bp, Artificial Sequence
  ENSG00000160072_49 (sequence is synthesized)
ctcagagccacactgaacgccttcctgtaccacatgggccaacacagcaacaagtgagggagcccctcgggtcctgagcccccgggcagggctgtgcagccgtcgcccttggttcccact

SEQ ID NO: 474018 - DNA, 120 bp, Artificial Sequence
  ENSG00000160072_50 (sequence is synthesized)
gagggtccctggctcacagtgctgggcaccagctgtggcctcagtgtgcccacctcagatgtcccctgggaacggcccagctcgggacagcacggggtgtcattgaggaacatgcagggg

SEQ ID NO: 474019 - DNA, 120 bp, Artificial Sequence
  ENSG00000160072_51 (sequence is synthesized)
cctcccgggcagagctggggtcagtcctgtcttcacggccctgtgcgccgccgccccagcttgcaggtccctctgcccctagatttctgcggtcctgtgcctgcaagggaggtggtctga

SEQ ID NO: 474020 - DNA, 120 bp, Artificial Sequence
  ENSG00000160072_52 (sequence is synthesized)
ttgctgccgcccagaggtccccagtagggtgaccggccctatgtccaggctccctcttccctcccaaatcccttaattttgagttttcttggtctcctgggcccctccagccccagtcac

SEQ ID NO: 474021 - DNA, 120 bp, Artificial Sequence
  ENSG00000160072_53 (sequence is synthesized)
acggaggatcaagtcctgctggtcggccgtggctgactcttcaggcacgttgggctcctgggtcagctgctgccgttcgacgctccctggagccctgactcaggtccttcccagagaggc

SEQ ID NO: 474022 - DNA, 120 bp, Artificial Sequence
  ENSG00000160072_54 (sequence is synthesized)
aaggctggggccctgctgagcctctgctgaacccgggcccccgaggtcctgcttctggctcgcatggccataatcttgacagggactctgggtcccgcatccctgctcccagcacagcgg

SEQ ID NO: 474023 - DNA, 120 bp, Artificial Sequence
  ENSG00000160072_55 (sequence is synthesized)
ggctcaggtagcaggagggagtggtgttcccggcactgcctatcaggctgggcgagggtcagcggggaagtaccacacagggcaagaacagaggcccgagaagccgggcggggggcagct

SEQ ID NO: 474024 - DNA, 120 bp, Artificial Sequence
  ENSG00000160072_56 (sequence is synthesized)
gggcgtggtggggcaggcaggcgggtgaccagggctgtggctgcgttctccccatgtttcctgtgctcacaagctgccgctttagattctcccaaaaagtctccccgagggggctgagga

SEQ ID NO: 474025 - DNA, 120 bp, Artificial Sequence
  ENSG00000160072_57 (sequence is synthesized)
gtgtcccgcctcacccggcccccaatccaggcaccatatggcatgggtgtaggccagctgcctgtcttccggcctccacctcatggtgtggggtccgcggccttggctgcctcacttggg

SEQ ID NO: 474026 - DNA, 80 bp, Artificial Sequence
  ENSG00000160075_0 (sequence is synthesized)
gtgacgctcagccgggccttgtggagtgcgggtctctgctgcggacgccgggggccggcgcggcgttggccgcccccggc

SEQ ID NO: 474027 - DNA, 120 bp, Artificial Sequence
  ENSG00000160075_1 (sequence is synthesized)
agggtgggcggggaggccgccgcgcagtcgccgcacgctacaccgccggcgccgtcgtttcgcgtcgcccgcttccggccaccgcggccgccattttgttcgcgcggaagcgccgcggta

SEQ ID NO: 474028 - DNA, 120 bp, Artificial Sequence
  ENSG00000160075_2 (sequence is synthesized)
cgcgcggaagcgccgcggtagggtgggaacccaagcgggagagccgcgggatttgcggccgccgccatgccgtcgtccccgctgcgggtggcggtggtgtgctcgagcaaccagaaccgg

SEQ ID NO: 474029 - DNA, 120 bp, Artificial Sequence
  ENSG00000160075_3 (sequence is synthesized)
agcatggaggcgcacaacatcctcagcaaacggggattcagcgtccgatcctttggaacagggactcacgtgaagcttccaggaccagctcccgacaagcccaatgtttatgatttcaaa

SEQ ID NO: 474030 - DNA, 120 bp, Artificial Sequence
  ENSG00000160075_4 (sequence is synthesized)
accacatatgaccagatgtacaatgatcttcttaggaaagacaaagaactctatacacagaatgggattttacatatgctggacagaaataagagaatcaagccccggccagaaagattc

SEQ ID NO: 474031 - DNA, 120 bp, Artificial Sequence
  ENSG00000160075_5 (sequence is synthesized)
gaacaggagacctgccagcctgtgcacgtggtcaatgtggacatccaggacaaccacgaggaggccaccctgggggcgtttctcatctgtgagctctgccagtgtatccagcacacggaa

SEQ ID NO: 474032 - DNA, 120 bp, Artificial Sequence
  ENSG00000160075_6 (sequence is synthesized)
gacatggagaacgagatcgacgagctgctgcaggagttcgaggagaagagtggccgcacctttctgcacaccgtctgcttctactgagcccagcgcccgcatggagccgcctctggagct

SEQ ID NO: 474033 - DNA, 120 bp, Artificial Sequence
  ENSG00000160075_7 (sequence is synthesized)
tcctgttgttcatactttttccttcctgacatttgtttttacttacaggtgttctgctggtgacggtagcattacccaaataaactgtgcatatgaaatgggagaggagatgccaaaacg

SEQ ID NO: 474034 - DNA, 120 bp, Artificial Sequence
  ENSG00000160075_8 (sequence is synthesized)
ccagatgaaagcaatcaagtttcttcttttccacttttacttatgagcaggatattgattacaaagtttttcttctttaaccaaaaaggaaagacaacggtttgtgtgcacttcccgaca

SEQ ID NO: 474035 - DNA, 120 bp, Artificial Sequence
  ENSG00000160075_9 (sequence is synthesized)
tacctgtgtcttcgtgtgcctgccttccctccctcctccccaccgggccggactgtacagagccctgctgcggcgtgttaggaatgacctggaattgtcaataaacagatgctgctgtca

SEQ ID NO: 474036 - DNA, 120 bp, Artificial Sequence
  ENSG00000160075_10 (sequence is synthesized)
gacaaagaactgtatcccagcgggttgccctttaaaaaccccccgtgtggtcctccctggaaggtgttacgtgtggctcgggcacaggaggcgtgtcaccctgtgcagtgcacacactgg

SEQ ID NO: 474037 - DNA, 120 bp, Artificial Sequence
  ENSG00000160075_11 (sequence is synthesized)
ctcctctgtctttgcgagagcttggtttctattcctggtgcacgtcggatcgtccacgggttagttccagtgccacccatggcagtaggcgtggtgaggcgcacagacacggtgtggggt

SEQ ID NO: 474038 - DNA, 120 bp, Artificial Sequence
  ENSG00000160075_12 (sequence is synthesized)
tcaccctgacgtggttcagcagagggtcgtgacatagcgtagaccagggatgcttaggtgaggaggtggaacccacaaaatcccattgcttttcacactgcagggctgccccgttatttc

SEQ ID NO: 474039 - DNA, 120 bp, Artificial Sequence
  ENSG00000160075_13 (sequence is synthesized)
ctttgcaggttggtgtgcgtgcgtgtgtgcgtgcgtgcctgatacacatggagccgggctgcttcacacatctggtgaggtcgttagaaggtcagataaagaagagggcggagcttgcta

SEQ ID NO: 474040 - DNA, 120 bp, Artificial Sequence
  ENSG00000160075_14 (sequence is synthesized)
accaagctgttagaagaaataatgggagagaacattccttcatttcaggaggacacagagcaggctaggtctgccgcgaagactcctatagagagaagagtattcttaaactagattctg

SEQ ID NO: 474041 - DNA, 120 bp, Artificial Sequence
  ENSG00000160075_15 (sequence is synthesized)
atggacgcaacaccagttgcataatggttatgacaatcagtgcccgggtttttgaccaggcatttcatggtcacccccacgctaatggaaagtttctggatcttattttgttatagtgag

SEQ ID NO: 474042 - DNA, 120 bp, Artificial Sequence
  ENSG00000160075_16 (sequence is synthesized)
tgatttgtagttttcagaacggaggccaggccaaacgtattccaaatgaaaagagaataggtgtcaaatgctaaaccttttatcttcgtgttggcactgttgccatccccgccctctccc

SEQ ID NO: 474043 - DNA, 120 bp, Artificial Sequence
  ENSG00000160075_17 (sequence is synthesized)
gacatccccgcccttgaccagcatctctggccttgcccagcattgtctatgtattggcactcttgccatccccgccctttcccagcagagtctcactgtgtcaccccggctggagtgcag

SEQ ID NO: 474044 - DNA, 89 bp, Artificial Sequence
  ENSG00000160075_18 (sequence is synthesized)
ttttttttttttttgagatggagtcagagtctcaccctgttgcccaaggtggagtgtagcggctaagttcaagcgattctctgcctcag

SEQ ID NO: 474045 - DNA, 65 bp, Artificial Sequence
  ENSG00000160075_19 (sequence is synthesized)
cctcccgaatagctgggattacaggcatccgctaccaaactggtcttgaactcttgacctcgtga

SEQ ID NO: 474046 - DNA, 75 bp, Artificial Sequence
  ENSG00000160075_20 (sequence is synthesized)
cctcggcctctggaatatttaataagctaaaaaattcttatacacaggtagattaattaggtagccaggagtggc

SEQ ID NO: 474047 - DNA, 120 bp, Artificial Sequence
  ENSG00000160075_21 (sequence is synthesized)
tcttatacacaggtagattaattaggtagccaggagtggcccctgaaagtatgtctggcaaaacctagaactgcatcctagccatcactgtaccttctgccctccctgctgtctcctctg

SEQ ID NO: 474048 - DNA, 120 bp, Artificial Sequence
  ENSG00000160075_22 (sequence is synthesized)
ccagttacagttaaaaggttgtgggtgaggacgctgggcagagtcccaggcgtctgctgtcagctccccagcccggcctgcctgccgagccatctgggcgtcccacggtggagagtgtgg

SEQ ID NO: 474049 - DNA, 120 bp, Artificial Sequence
  ENSG00000160075_23 (sequence is synthesized)
cctgctgcccctctctctgcagaagccctggtaacctgcgtttggaaaaatctctaaggatttctgaggagctgtcaggccatgtccttgtccaccctgtgtggggcacggcttcgacat

SEQ ID NO: 474050 - DNA, 120 bp, Artificial Sequence
  ENSG00000160075_24 (sequence is synthesized)
ggctctgctcccgtcgtgggctgagaaggagcaggtggggctgtgccttggaaaggaggccctcccgacatgcctttgtgcgaggtccctgtccatgctgtctccatcccggagccttac

SEQ ID NO: 474051 - DNA, 120 bp, Artificial Sequence
  ENSG00000160075_25 (sequence is synthesized)
ggcgatgggtggccacagagcctattccaagagtctggtttagggctgggtcttcccatcttcacctctgagtcttaggcgatgcgtgaccacgcagccccttccaggagtctggtttag

SEQ ID NO: 474052 - DNA, 120 bp, Artificial Sequence
  ENSG00000160075_26 (sequence is synthesized)
ggctgggtcttcccatcttcacctctgagtcttaggcggtgcatgaccacgcagccccttcccggagtctggtttagggctgcgtgctcaagagtctggtttggggctgggtcttcccat

SEQ ID NO: 474053 - DNA, 120 bp, Artificial Sequence
  ENSG00000160075_27 (sequence is synthesized)
cgccctggaggaggcttttgtctcatctcatgattcacattaaactctgtgccatgaagcttagcctgacatcctgtttttgacaattactcttcagttagcactgtttatttttaagtt

SEQ ID NO: 474054 - DNA, 120 bp, Artificial Sequence
  ENSG00000160075_28 (sequence is synthesized)
cttgtatattcagtaagagaaagaaaagcagagagtgacgcacatcctcacactcccttgattggtgtaagctcagccccttcatgtcagcccactgtgacctcctgggttccagacctg

SEQ ID NO: 474055 - DNA, 120 bp, Artificial Sequence
  ENSG00000160075_29 (sequence is synthesized)
ggaagtacttgccacgttctgcaaggactgagtccagcttcagcagtctcatccggaaggacttggtataggcagaggatgagcctgtctctggtcattctaaaagaaggagctgagccc

SEQ ID NO: 474056 - DNA, 120 bp, Artificial Sequence
  ENSG00000160075_30 (sequence is synthesized)
agtgtcccagaattcggaagctcctcctttacagagggactgtaggggttggtgatctcccaggaagcatcggcccagaagaaccccgcgtgcgtgtgtgtgctcttggtgtgtggtggg

SEQ ID NO: 474057 - DNA, 120 bp, Artificial Sequence
  ENSG00000160075_31 (sequence is synthesized)
gggaaggagtggcagcaggggtggcgctgggacactgtcagccacgggctctgctttggggacctcgtgtgggaaaggcattgcctgtggtggcccctcaggaggctctaggaggagcgt

SEQ ID NO: 474058 - DNA, 120 bp, Artificial Sequence
  ENSG00000160075_32 (sequence is synthesized)
gccttcattaccttatttcactcggggggcgtctttgccccctaggtgggggcagaaggtgcagaatgggaagcctgccacttagctaaagctcttgcacatgatgcccttggcctggag

SEQ ID NO: 474059 - DNA, 120 bp, Artificial Sequence
  ENSG00000160075_33 (sequence is synthesized)
aggagtgaagtccccaggcagttccctgtggacactggcacgatgccgggtggggcctcaggggtgttgagatgtgcaggtcgggaggaccccgataacgtttcctggttagtgatgggt

SEQ ID NO: 474060 - DNA, 120 bp, Artificial Sequence
  ENSG00000160075_34 (sequence is synthesized)
gcaggggggccgcgggaagtgactgttacaagtgagagcccgaaagcaaatctgccccacagcagccggtgcgttggcagaagtcatcgccgtaaactgcagtggaagcaagacggggtt

SEQ ID NO: 474061 - DNA, 120 bp, Artificial Sequence
  ENSG00000160075_35 (sequence is synthesized)
agtggaagcaagacggggttcaagatgcggcccaaagataagacgcagcacttggtcgagtgttcacagcgtcaagacaaaggacgggccggcgcggtgactcaggcctgtaatcccagc

SEQ ID NO: 474062 - DNA, 65 bp, Artificial Sequence
  ENSG00000160075_36 (sequence is synthesized)
ggagagttgcttgaacctgggaggcagagcctgcagtgagccgagatcgcgcggaaggacagtgt

SEQ ID NO: 474063 - DNA, 120 bp, Artificial Sequence
  ENSG00000160075_37 (sequence is synthesized)
gaaggacagtgtgacttgggaggaaaatgctgcttgttcagaggcagggccggggtcgagggggaccccaccactgccatctgcctacttgccatgtggccagggcttaggtttctctgt

SEQ ID NO: 474064 - DNA, 120 bp, Artificial Sequence
  ENSG00000160075_38 (sequence is synthesized)
gcatgcccacctcgcagaatttctgataattaaataaattaggacatgcacacactgagcccgagacagtgttttaaagccttcaataaattttggccagttgtcctattagtattgaaa

SEQ ID NO: 474065 - DNA, 120 bp, Artificial Sequence
  ENSG00000160075_39 (sequence is synthesized)
accaggtggtggaaggtgaggaggcggctgcgtgctgggctgggctccagcagctctcacagggtctggggatgcctgcagggccccaccatgaccagtacagcccgtctagagtggcgg

SEQ ID NO: 474066 - DNA, 120 bp, Artificial Sequence
  ENSG00000160075_40 (sequence is synthesized)
gggccggggagcagacctgagtgtgaagcaccctggaaggcaggcagggccgctggtcgctgaaccacccatgtgctggctgcagcctcatgggcttcaaggggcctcttttctccttgg

SEQ ID NO: 474067 - DNA, 120 bp, Artificial Sequence
  ENSG00000160075_41 (sequence is synthesized)
ttgattctcagcggctgaaggactaagttccccagagatggacccgggtgtcatagctgcttccaggggcctcggggacacaggcgggactccaatgtgcaggaggagacacacgtcagg

SEQ ID NO: 474068 - DNA, 120 bp, Artificial Sequence
  ENSG00000160075_42 (sequence is synthesized)
ggtgggtgtgtgacttccacgctgctgacagtgacccaaggatgcagctcagggtcagatgccgttagatcaaccacttcaatgtattataaaactattataaaaactatttttgctacc

SEQ ID NO: 474069 - DNA, 120 bp, Artificial Sequence
  ENSG00000160075_43 (sequence is synthesized)
caggaaggtagctgagttcacttagaattcctgtcagctaggctgtttatctgaaagtggttacttgtccctgaccatctggaatggctcaaatgagctcctgcagaccacagagctcat

SEQ ID NO: 474070 - DNA, 120 bp, Artificial Sequence
  ENSG00000160075_44 (sequence is synthesized)
ctttgggaacccagtctctctttttggggaagtgagccccttccttgggaacccctgaggccaggcatggccactgtggatggtgggaggatgccccaccctgaggaccccagaggctcc

SEQ ID NO: 474071 - DNA, 120 bp, Artificial Sequence
  ENSG00000160075_45 (sequence is synthesized)
tgtggccccttcctgggactgctggggccggtgtgtgtcagcgttcaccccaaggccccctttcagctgggctggacgccaagtgccttcaggcctcatcctgccctccaccatcccata

SEQ ID NO: 474072 - DNA, 120 bp, Artificial Sequence
  ENSG00000160075_46 (sequence is synthesized)
gtcagtgaggctgtggcatctccctcctcgactgtcttgccctcttggtttttgtatcagcgttttccaggctgattgctgctgaaccttctgtttttttttctttttctttttgagaca

SEQ ID NO: 474073 - DNA, 62 bp, Artificial Sequence
  ENSG00000160075_47 (sequence is synthesized)
cttggctcactgcaacctcagcctcccgattagctgggattgcaggcatgtgccactatgtc

SEQ ID NO: 474074 - DNA, 120 bp, Artificial Sequence
  ENSG00000160075_48 (sequence is synthesized)
tggagcttcctttctttgggttttccgatgttcttgactctgttgtagctgagctagactggggactgggtttccgggtttgctttgtctctgctgaagggctgaggtttcagagccagc

SEQ ID NO: 474075 - DNA, 120 bp, Artificial Sequence
  ENSG00000160075_49 (sequence is synthesized)
gccgggccagcagtgaggggagaggtctgggtagaaggtgtcatgctgggcgggggcggggggtgtcctgcgggccttgggtctttttgccgagttgggggacagcgaggagcaagcacc

SEQ ID NO: 474076 - DNA, 120 bp, Artificial Sequence
  ENSG00000160075_50 (sequence is synthesized)
tgccatcgcccactttgttttctgtgggacctcctaggacagtgaggcccctgcctcaccagggcatggcccactccgctgtccaggccttcgtcccggctgcctctgctgtggggcagg

SEQ ID NO: 474077 - DNA, 120 bp, Artificial Sequence
  ENSG00000160075_51 (sequence is synthesized)
gaaggggctgggtgtccaggacacaggcgcttccaggcttcatacacagatgccttttctctgacgttccttaactcccatgtgtagctatacacagaatgggattttacatatgctgga

SEQ ID NO: 474078 - DNA, 120 bp, Artificial Sequence
  ENSG00000160087_0 (sequence is synthesized)
cggaccgcgcaccggaagcagaagctaggctggttccgccccgcgagcggccatcttggaggctgaggcggcggcggcggcgctgcggcgggttcggtgggcccaatcccggggcggtgc

SEQ ID NO: 474079 - DNA, 120 bp, Artificial Sequence
  ENSG00000160087_1 (sequence is synthesized)
ggctgtttcgggcgcgggccccgcttttccgcaccctgctccggcctcgactacggcgagcctgagcgcggcggcggcccacgcgcagcgacagggagagatgagcagcaccagcagtaa

SEQ ID NO: 474080 - DNA, 120 bp, Artificial Sequence
  ENSG00000160087_2 (sequence is synthesized)
gagggctccgaccacggcaacccagaggctgaagcaggactaccttcgcattaagaaagacccggtgccttacatctgtgccgagcccctcccttcgaatattctcgagtggcactatgt

SEQ ID NO: 474081 - DNA, 120 bp, Artificial Sequence
  ENSG00000160087_3 (sequence is synthesized)
cgtccgaggcccagagatgaccccttatgaaggtggctattatcatggaaaactaatttttcccagagaatttcctttcaaacctcccagtatctatatgatcactcccaacgggaggtt

SEQ ID NO: 474082 - DNA, 120 bp, Artificial Sequence
  ENSG00000160087_4 (sequence is synthesized)
taagtgcaacaccaggctgtgtctttctatcacggatttccacccggacacgtggaacccggcctggtctgtctccaccatcctgactgggctcctgagcttcatggtggagaagggccc

SEQ ID NO: 474083 - DNA, 120 bp, Artificial Sequence
  ENSG00000160087_5 (sequence is synthesized)
caccctgggcagtatagagacgtcggacttcacgaaaagacaactggcagtgcagagtttagcatttaatttgaaagataaagtcttttgtgaattatttcctgaagtcgtggaggagat

SEQ ID NO: 474084 - DNA, 120 bp, Artificial Sequence
  ENSG00000160087_6 (sequence is synthesized)
taaacaaaaacagaaagcacaagacgaactcagtagcagaccccagactctccccttgccagacgtggttccagacggggagacgcacctcgtccagaacgggattcagctgctcaacgg

SEQ ID NO: 474085 - DNA, 120 bp, Artificial Sequence
  ENSG00000160087_7 (sequence is synthesized)
accacggactcctgggtggcgccctggcgaacttgtttgtgatagttgggtttgcagcctttgcttacacggtcaagtacgtgctgaggagcatcgcgcaggagtgaggcccaggcgccg

SEQ ID NO: 474086 - DNA, 120 bp, Artificial Sequence
  ENSG00000160087_8 (sequence is synthesized)
agacccaaggcgccactgagggcaccgcgcaccagagcgtgacctcggcaggctggacacactgcccagcacaggcagacccaccaggctcctaggtttagcttttaaaaacctgaaagg

SEQ ID NO: 474087 - DNA, 120 bp, Artificial Sequence
  ENSG00000160087_9 (sequence is synthesized)
ggaagcaaaaaccaaaatgtgtgactgggctttggaggagactggagcctcagccctgtcctggccacgggccgctggggctggtgtgggtgggccttgtgtgctggatttgtagcttat

SEQ ID NO: 474088 - DNA, 120 bp, Artificial Sequence
  ENSG00000160087_10 (sequence is synthesized)
cttccgtgttgtctttggacctgttttagtaaacccgtttttcattttattagatgtggtcacttagaaatgcaaacttgctgccgaccgcgggctgctcctgcgttcttggagctcctg

SEQ ID NO: 474089 - DNA, 120 bp, Artificial Sequence
  ENSG00000160087_11 (sequence is synthesized)
gcgcgtttctcggagctcccggctcctcagcgggtgggaacctcggggcccaggggtggagctggcgtccgcgggtgctggtctggcctggccgtgtggtgatgaggcttagcggggcca

SEQ ID NO: 474090 - DNA, 120 bp, Artificial Sequence
  ENSG00000160087_12 (sequence is synthesized)
gtgacggccgtggctcaggatccataagtcggggtttggtctcagcatttacaaatgtgtttacagtcagaatgaaacacattccttctagaaagtgcttgggggtttttgctgccctgg

SEQ ID NO: 474091 - DNA, 120 bp, Artificial Sequence
  ENSG00000160087_13 (sequence is synthesized)
aagccaggagcctgctcactccaaccacaagtcgcccttgactgcggcggccgcgagcggggcgggggctgccggtgccctccgcaggccgggcctcctgggcgcccctcggtgctgcag

SEQ ID NO: 474092 - DNA, 120 bp, Artificial Sequence
  ENSG00000160087_14 (sequence is synthesized)
gcggcccggggctgctggggaccctgcgcgacgcttctccgttcgcgcccgccgcccgcggggccccggcccgagcctgcctgcgcggaacccgagatgagcagcaccagcagtaagagg

SEQ ID NO: 474093 - DNA, 120 bp, Artificial Sequence
  ENSG00000160087_15 (sequence is synthesized)
cgggtcagggtcatgtcggggacttgaccactcggccgggtttcccgtcagctgggacacttgcagctgccccaggacgggcagcctcgatcctggttcgtcagtggatcacgggagtct

SEQ ID NO: 474094 - DNA, 120 bp, Artificial Sequence
  ENSG00000160087_16 (sequence is synthesized)
gtgtcgggggagggctgccgtcgagcccgccgtcgcctcgcccctgaactgttagactccagactgccccgtaaaccccgagagaaacgagcgtgcccgggactgtgcttagggccagcg

SEQ ID NO: 474095 - DNA, 120 bp, Artificial Sequence
  ENSG00000160087_17 (sequence is synthesized)
tttctgggaaacccgggcggtgacagtgggagaccaccgccggccggcgagtgagacacgagcccggaacaagtctctaagcggcgccgggcctcgccatccacacctgccagttccctg

SEQ ID NO: 474096 - DNA, 120 bp, Artificial Sequence
  ENSG00000160087_18 (sequence is synthesized)
tcctggcgtccttttcagtgcctgccacttagtgcgtgtgtatttaactctagtccggttgccatcctcttgccagacccagataggaagcggctgaaaggtcgggcctcagcccggtgg

SEQ ID NO: 474097 - DNA, 120 bp, Artificial Sequence
  ENSG00000160087_19 (sequence is synthesized)
gaggtgggcagcgaagagtgtacagcgggcttggctggggcaggtcggtggccccgcgccctgctccaggggaaccagactgtgtaatctggcttccgaagaaaggatcatgagcagcac

SEQ ID NO: 474098 - DNA, 120 bp, Artificial Sequence
  ENSG00000160087_20 (sequence is synthesized)
cgggagaaaagatatttcagtgagttgaaaggaaatgtgtttcggcttggtcaggggtccaccttctctggctcacagaggaggcccagcccaggcaggcggaggatacccagggtgagg

SEQ ID NO: 474099 - DNA, 120 bp, Artificial Sequence
  ENSG00000160087_21 (sequence is synthesized)
tggaactcctcctcgtctgcttctccacacgctggaagtgtttgctctgctgatgtgtctcagcctgcagggccgcctgtagcgtctgtgttcaccagcctctgacaccatagggccata

SEQ ID NO: 474100 - DNA, 120 bp, Artificial Sequence
  ENSG00000160087_22 (sequence is synthesized)
gctgagaaaaccagaccggggtaaacactgaagctggcctgttctactatttcttaagacccagtgcatatcatcaaaggaaaggcacatatattcagttattcagtgtgccttctgtgc

SEQ ID NO: 474101 - DNA, 120 bp, Artificial Sequence
  ENSG00000160087_23 (sequence is synthesized)
tgggcgcccccagggtttcgcaatccccaggacggtctctgagctaagtggaagtacccctgtgtggtggcacctggggcttcggtaggctgcaggacctgtccagcacctcagcccttc

SEQ ID NO: 474102 - DNA, 120 bp, Artificial Sequence
  ENSG00000160087_24 (sequence is synthesized)
gagtacatctgtagggtgggccctccatcatcgtgtcattgcccatgaccagcgttggggatgccagcaggccgtggtgagataaggcccgggagcaggtgtccagggcgtgttaaagta

SEQ ID NO: 474103 - DNA, 120 bp, Artificial Sequence
  ENSG00000160087_25 (sequence is synthesized)
cccacggtagaagagacgggggttttgaagccgtgtggctgtgtgacatttcaccttcatttgttcactgcctgaatgtgaatgtaattttggctgggttctataaaccccaggcttgga

SEQ ID NO: 474104 - DNA, 120 bp, Artificial Sequence
  ENSG00000160087_26 (sequence is synthesized)
atgctggtggaaggcggaggaccggagtccctgcagaaggccccgtgcactcgggggcctccctcacatcccgtgccccctgcgctggccttcacagtaggtaatggctccggcccgggt

SEQ ID NO: 474105 - DNA, 120 bp, Artificial Sequence
  ENSG00000160087_27 (sequence is synthesized)
gttcgctgtccacggaacatggcagaggggcaccccggcccggaaagacgccagagccagcaggggctgtttcgggccgcgtggctccccgggtctcggccgtctcccctcttctgcgtc

SEQ ID NO: 474106 - DNA, 120 bp, Artificial Sequence
  ENSG00000160087_28 (sequence is synthesized)
tgttccgtgacttcgcctgggtgggatgtaccgcaggtgcatcgcgtcgaggtggggcacggccgccggcaagaaacccaccctgtccggaggcgggcgtgagacaagcccagcccgcac

SEQ ID NO: 474107 - DNA, 120 bp, Artificial Sequence
  ENSG00000160087_29 (sequence is synthesized)
gcgctcatctttcttcgttttttgatcagtttattcagaattgctctataatttaccaattgtatgtatttaacctattcttgtggaaaaaaaaggtctttcattatatctttatttctg

SEQ ID NO: 474108 - DNA, 120 bp, Artificial Sequence
  ENSG00000160087_30 (sequence is synthesized)
aataggaatcaagtgtgatatcatgaattgatggggggaagattaagaaggctttgtaagactataagttagtttgctgtgaagagtgtgcttattaaatgctttctgcaacacgaagac

SEQ ID NO: 474109 - DNA, 120 bp, Artificial Sequence
  ENSG00000160087_31 (sequence is synthesized)
tgcagcccttgactttgaaatcatctgtttttagaatcttgaaagaattgaaattagttttctggctgattcccttcccttccttcctagaaaagacaactggcagtgcagagtttagca

SEQ ID NO: 474110 - DNA, 120 bp, Artificial Sequence
  ENSG00000160087_32 (sequence is synthesized)
gctcccggagctccgggtcagggtcatgtcggggacttgaccactcggccgggtttcccgtcagctgggacacttgcagctgccccaggacgggcagcctcgatcctgatgagcagcacc

SEQ ID NO: 474111 - DNA, 120 bp, Artificial Sequence
  ENSG00000160094_0 (sequence is synthesized)
atgagtagaagttcaccaagtgggaaaggacactctaggatggccgagcctcgatttaacaacccctacttctggccccctcctcccaccatgcccagccagctggacaacctggttctg

SEQ ID NO: 474112 - DNA, 120 bp, Artificial Sequence
  ENSG00000160094_1 (sequence is synthesized)
attaacaagatcaaggagcagctgatggccgagaagatcaggccgcctcacctgccgcccacgtcggcctcgtcgcagcagccgttgctagtgccgccggcacccgccgagagcagccag

SEQ ID NO: 474113 - DNA, 120 bp, Artificial Sequence
  ENSG00000160094_2 (sequence is synthesized)
gccgtcatgtcgctgcccaagctgcagcaggtgccggggctgcatccacaggcggtgccgcagcccgacgtggcgctgcacgcacggccggccaccagcaccgtcacaggtctggggctg

SEQ ID NO: 474114 - DNA, 120 bp, Artificial Sequence
  ENSG00000160094_3 (sequence is synthesized)
tccacccggaccccgtctgtgagcacttctgagtcaagcgcgggcgcgggcacgggcacgggtaccagcaccccgtccacacccaccaccaccagccagagccgcctcatcgcctcgtcc

SEQ ID NO: 474115 - DNA, 120 bp, Artificial Sequence
  ENSG00000160094_4 (sequence is synthesized)
cccaccctcatctcagggatcaccagcccccctctcctggactccatcaagacaatccagggccacggcctgcttggcccccccaagtccgaacgcggccgcaaaaagatcaaggcggag

SEQ ID NO: 474116 - DNA, 120 bp, Artificial Sequence
  ENSG00000160094_5 (sequence is synthesized)
aacccggggggtccgcctgtccttgtagtcccctatcccatcctggcctcgggcgagactgccaaggagggcaagacgtacaggtgtaaggtatgcccactgacctttttcaccaagtca

SEQ ID NO: 474117 - DNA, 120 bp, Artificial Sequence
  ENSG00000160094_6 (sequence is synthesized)
gagatgcagatccactccaagtcgcacacagaggccaagccccacaagtgcccgcactgctccaagtcctttgccaacgcctcctacctggcccagcacctgcgcatccacctgggcgtc

SEQ ID NO: 474118 - DNA, 120 bp, Artificial Sequence
  ENSG00000160094_7 (sequence is synthesized)
aagccctaccactgctcctactgtgataagtccttccggcagctctcccacctccagcagcacaccagaatccacacaggcgacagaccctacaagtgcccacatcctggctgcgagaag

SEQ ID NO: 474119 - DNA, 120 bp, Artificial Sequence
  ENSG00000160094_8 (sequence is synthesized)
gctttcactcagctctccaacctccagtctcaccagcgccagcacaacaaggacaagccctacaagtgtcccaactgctaccgggcctattcggactccgcttctttgcagatccacctc

SEQ ID NO: 474120 - DNA, 120 bp, Artificial Sequence
  ENSG00000160094_9 (sequence is synthesized)
tcggcccacgccatcaagcacgccaaggcctactgctgcagcatgtgtgggcgggcctacacctcggagacctacctgatgaagcacatgtccaaacacacggtggtggagcacctggtg

SEQ ID NO: 474121 - DNA, 120 bp, Artificial Sequence
  ENSG00000160094_10 (sequence is synthesized)
agccatcactcgccccagaggacggagtcccccggcatcccggtgcgaatctctctcatctgagcccactggaggcgccgccccacccggcccactggcagacacagacccaggcagcac

SEQ ID NO: 474122 - DNA, 120 bp, Artificial Sequence
  ENSG00000160094_11 (sequence is synthesized)
caggccccagctccctccgggggccctccaggaaccaccaagctctctcacgaccttcccaatcttccagaaagcttggtccgcagaagccctgcctggtccagtccgggggcggccagg

SEQ ID NO: 474123 - DNA, 120 bp, Artificial Sequence
  ENSG00000160094_12 (sequence is synthesized)
ggactgttttggtggcatccaaagacgatctcagagcactttgaacctctctgttgagttttctttttgttccccacccttcacttgcttcactgtttttttttttttcgtttttttttt

SEQ ID NO: 474124 - DNA, 120 bp, Artificial Sequence
  ENSG00000160094_13 (sequence is synthesized)
ccaggaagttggtgctgctaagaccgagaaatttaaagaatcggacagatggacgcagagaaccagagggcaatgtgggaccttctcttgccatggcctcaggtcttgagggaaggctcg

SEQ ID NO: 474125 - DNA, 120 bp, Artificial Sequence
  ENSG00000160094_14 (sequence is synthesized)
ggcctaggtttctggactgcaaaggggacccccaggtgggaggggcaggaagcagccggagtgagcccttcgcccctgagtgcctggctcgcacctctcgagctgtgccctgggcatcac

SEQ ID NO: 474126 - DNA, 120 bp, Artificial Sequence
  ENSG00000160094_15 (sequence is synthesized)
tgagcagaggggtgcggcagcttcaggaggcagaaacgagaggggtgggagatccacaggaccaaagggtgcagtgatgggctgggtggcgggcccagggaaatggggtggggatgggct

SEQ ID NO: 474127 - DNA, 120 bp, Artificial Sequence
  ENSG00000160094_16 (sequence is synthesized)
gggtaagacctggccctcccctgctgccctgaagaccaccccagtctacctcggtgctggccaggaaacctttcggctacctctcccaccatcccagactgtgggcagggggatggggag

SEQ ID NO: 474128 - DNA, 120 bp, Artificial Sequence
  ENSG00000160094_17 (sequence is synthesized)
ggagtgggcctggatctgggacctccctccagaatttcctccagatgggggcagtgcccagggaggggttatttgtcttccctgccatggagtgggaatccccagccgaggccctaggcc

SEQ ID NO: 474129 - DNA, 120 bp, Artificial Sequence
  ENSG00000160094_18 (sequence is synthesized)
cctcagcagggaagggatccccggggaggcaggtcccaggagcagaccctgcccccagcccccacagacacaccccaatctgaaagccatgcgtgtcggtgtatataggaaccatgtaca

SEQ ID NO: 474130 - DNA, 120 bp, Artificial Sequence
  ENSG00000160094_19 (sequence is synthesized)
gagcccagagaagccccctacatccccccgggaaaaaaaagaaaactagacagaaactcatctatatattctgtatctggagttccgttttgaatattaactgtgttatttttatacact

SEQ ID NO: 474131 - DNA, 120 bp, Artificial Sequence
  ENSG00000160094_20 (sequence is synthesized)
ttttaagccttaactcgccattgatttaccagtttaacgtttcctggggtttctttgcccatggggttctctgcccccacccccggccctttgtttgacttgcgtcgtctgatactcagt

SEQ ID NO: 474132 - DNA, 120 bp, Artificial Sequence
  ENSG00000160094_21 (sequence is synthesized)
attgtagctttttgtccgcatgttactccctgtaaatacgctgttatacatactgttaacacccctttgctttttctatgggacctccaggccaccatatttagaactagttaccttatt

SEQ ID NO: 474133 - DNA, 120 bp, Artificial Sequence
  ENSG00000160094_22 (sequence is synthesized)
aaaaaagaaaaaacagtctgttggcttctcagtctgcatcttggaggcagggaggtgagggcaggtgcccctcagacacttcaggaaggtagtttgcattctatttaaaaaagggagtgg

SEQ ID NO: 474134 - DNA, 120 bp, Artificial Sequence
  ENSG00000160094_23 (sequence is synthesized)
ggagcaaatgaaaatcaaatgtggggggaaaacactaaagggggcaagaaacaaaggaattacaaaccctctgctctttgtatttctctgttgtgaagaataaactgtacctgcacccgg

SEQ ID NO: 474135 - DNA, 120 bp, Artificial Sequence
  ENSG00000160094_24 (sequence is synthesized)
agaagtgaacagcaggcgacccggaaggtttgcgcgcggctccgcagcgagccagagccggagcccgagcccggagcctgtgccggagccccagcccggccctgctcgggccgccgggcg

SEQ ID NO: 474136 - DNA, 120 bp, Artificial Sequence
  ENSG00000160094_25 (sequence is synthesized)
cggggctgcggccgcgtcccggaggcgccgccagcacagccaggtgctgttgggaacacagaggaagtgactggctgggggttcagggaaagctccgtagaagagggaacacttgagctg

SEQ ID NO: 474137 - DNA, 120 bp, Artificial Sequence
  ENSG00000160094_26 (sequence is synthesized)
cagcacccgtggcctggcacatggagccagtgcaaggaggggcaaggaccttctccaggtgcccattgccctcggggtcacggcccttgtggacctcactggcctcagctgttgttactg

SEQ ID NO: 474138 - DNA, 120 bp, Artificial Sequence
  ENSG00000160094_27 (sequence is synthesized)
gagcctgtgccggagccccagcccggccctgctcgggccgccgggcgcggggctgcggccgcgtcccggaggcgccgccagcacagccaggatggccgagcctcgatttaacaaccccta

SEQ ID NO: 474139 - DNA, 120 bp, Artificial Sequence
  ENSG00000160097_0 (sequence is synthesized)
aagagaaaagagagagagaggtgctctggctccggggctcttctcccaaacgggtcgaggtcccagctgaggctctcccaggacaagtccctcagccccagtgaacgtcaccgtcaggca

SEQ ID NO: 474140 - DNA, 120 bp, Artificial Sequence
  ENSG00000160097_1 (sequence is synthesized)
cctcaaggccaactctgcagtggtgagctgggatgttctggaggatgaggttgtcatcggatttgccatctcccagcagaagaaggatgtgcggatgctgcgcttcatccaggaggtgaa

SEQ ID NO: 474141 - DNA, 120 bp, Artificial Sequence
  ENSG00000160097_2 (sequence is synthesized)
caccaccacccgctcatgtgccctctgggacctggaggaggatacggagtacatagtccacgtgcaggccatctccattcagggccagagcccagccagcgagcctgtgctcttcaagac

SEQ ID NO: 474142 - DNA, 120 bp, Artificial Sequence
  ENSG00000160097_3 (sequence is synthesized)
catgtgggcaggtgtcattgccctcttctgccgccagtatgacatcatcaaggacaatgaacccaataacaacaaggaaaaaaccaagagtgcatcagaaaccagcacaccagagcacca

SEQ ID NO: 474143 - DNA, 120 bp, Artificial Sequence
  ENSG00000160097_4 (sequence is synthesized)
gggcggggggcttctccgcagcaaggtgagggcaagacctgggcctgggtgggccaccctgtgcctcatgctctggtaatccctggactgcagagggggtcagctcggggactggcatgg

SEQ ID NO: 474144 - DNA, 120 bp, Artificial Sequence
  ENSG00000160097_5 (sequence is synthesized)
cgacagctgggcagagccagacttggctgctgcctgtgtgacacagggacactgcaagttgattttggatcctctccttttgcagggtgccaggggccagtggtgatttgaagaaaaaaa

SEQ ID NO: 474145 - DNA, 120 bp, Artificial Sequence
  ENSG00000160097_6 (sequence is synthesized)
gctaccaaaacaccccttctggagtagaagctgctggaaggcaggcctgagccattcaccacggacaggaagagcagctctggctatcaccactggcctctggggtcttcatatcttgcc

SEQ ID NO: 474146 - DNA, 120 bp, Artificial Sequence
  ENSG00000160097_7 (sequence is synthesized)
aggtgacaggtctctctctccactgcccctttctggtttaaaaaaatggtccttacctctgatccacttagagcaataaccactttttaaatgtaaaataaaaagacaaatgaaaaggca

SEQ ID NO: 474147 - DNA, 120 bp, Artificial Sequence
  ENSG00000160097_8 (sequence is synthesized)
atacaccccgggtcgccgagcgcctggccgccccgcgcccgcgccgcgctccgcctgtggctgggctgcgtctgcttcgcgctggtgcaggcggacagtccctcagccccagtgaacgtc

SEQ ID NO: 474148 - DNA, 120 bp, Artificial Sequence
  ENSG00000160097_9 (sequence is synthesized)
ccaacaaacatctggccctctctacatctcttccctccatctccttgtaccctctggcttactgtcctctctctggcgcactttcctgaagcctcttattaactcccatctccagaagca

SEQ ID NO: 474149 - DNA, 120 bp, Artificial Sequence
  ENSG00000160097_10 (sequence is synthesized)
cctcaacaatgtcagtggctgaggctgcactcagagggatgactgctgggggtagactgggtgccaggggccatgggcccaggacccagtcttggccattcagttgagtgaggctgaagg

SEQ ID NO: 474150 - DNA, 120 bp, Artificial Sequence
  ENSG00000160097_11 (sequence is synthesized)
ctgggtttgaaaaggcaaaaagacaagacatccaggcagggcttctcttttctttccacaagggacaagagcttggcttatttaggctacagccctgctgctgctcccttccttcttctg

SEQ ID NO: 474151 - DNA, 120 bp, Artificial Sequence
  ENSG00000160097_12 (sequence is synthesized)
tcctgtttccagccttgcaagaaggctattcacaattaggcctggctgcttctctcatttttttcctcccagtttccaaacaagccctcagtgaacatcattgaagcgtgactgcctgtc

SEQ ID NO: 474152 - DNA, 120 bp, Artificial Sequence
  ENSG00000160097_13 (sequence is synthesized)
acagttctctcttctccttgtcctagtcagatgaaggaggctgcactacaaacccaaattctgcaaaaaaataaaaataagccacaaaactaaaaggcctggccccattctggaaaaggc

SEQ ID NO: 474153 - DNA, 120 bp, Artificial Sequence
  ENSG00000160097_14 (sequence is synthesized)
aaagctgcatgagacacagccttctgcctcctcgcctctcctggactggcttcctctttgagaaaatgcacaaagccctgggagatgacaagcacaaggactgactcaagctgtgtcttt

SEQ ID NO: 474154 - DNA, 120 bp, Artificial Sequence
  ENSG00000160097_15 (sequence is synthesized)
cagaccaaggaacatcagagaagctgtggggctgcctgccaggcaggatcatggctgccatcaagccttttctggatccagccatcaaggacatgtttgtggtgtgatgcacacttttgc

SEQ ID NO: 474155 - DNA, 120 bp, Artificial Sequence
  ENSG00000160097_16 (sequence is synthesized)
aagcgtgtaagatgttacctggtttgtctcttttggaaaacaaaaatcagaaggctgcattctagagggcagagaaattcccccgaagactgagctggttgcctgcatcctctatcttct

SEQ ID NO: 474156 - DNA, 120 bp, Artificial Sequence
  ENSG00000160097_17 (sequence is synthesized)
ttgacccttatgactgaaagatcatcagtttggaaggtactggtccaatttatttaggaagtatctcttggagtttcagaaatgctagcttggacaactgaaaagtcacatcacagctgg

SEQ ID NO: 474157 - DNA, 120 bp, Artificial Sequence
  ENSG00000160097_18 (sequence is synthesized)
aaaatggtgcttgatgagggaaggtagactcttccctaggactgacgagttacggctgccagatgcctgcatgggaagaggtggacatctgcatcttccattggtggtcaaggatgggtg

SEQ ID NO: 474158 - DNA, 120 bp, Artificial Sequence
  ENSG00000160097_19 (sequence is synthesized)
tgggagaaccacacctagtgcaagcctggtactcagtaaatatttgttgaaatgaatgataagagcattggtccccaagccagagagccagaagccatcacccaatgaccgccccttcct

SEQ ID NO: 474159 - DNA, 120 bp, Artificial Sequence
  ENSG00000160097_20 (sequence is synthesized)
tccggtctacaagagctctcaaggctgggtctgccaccactctgctttgcccaagtgtgacagcactggggaggagagacaggataaagggcagatgtcagcaatactaagggcttcctc

SEQ ID NO: 474160 - DNA, 120 bp, Artificial Sequence
  ENSG00000160097_21 (sequence is synthesized)
atgggagggcatgaggctccactcattgtcttgtgacttccatccctgctgaatggggctgcaaggccaaggctccttaggggagaggtccttacctctgatccacttagagcaataacc

SEQ ID NO: 474161 - DNA, 120 bp, Artificial Sequence
  ENSG00000160097_22 (sequence is synthesized)
gcatcagaaaccagcacaccagagcaccagggcggggggcttctccgcagcaagtttccaaacaagccctcagtgaacatcattgaagcgtgactgcctgtctgcagggagaaggattcc

SEQ ID NO: 474162 - DNA, 80 bp, Artificial Sequence
  ENSG00000160097_23 (sequence is synthesized)
gcccgacgtggacgcggccgccgccaccgccgccgcgcgggagtcgctgtccgcggagccgacatgcaggcggctcgggg

SEQ ID NO: 474163 - DNA, 120 bp, Artificial Sequence
  ENSG00000160111_0 (sequence is synthesized)
cctggccctggcccagccctggcccggccccctccccaggcgcggcgccccccaggagccgaaaaatgagcggcgccctgctctggccgttgctcccgctcctgctcctgctgctgtcgg

SEQ ID NO: 474164 - DNA, 120 bp, Artificial Sequence
  ENSG00000160111_1 (sequence is synthesized)
tgcgcgccgcgcagcctcaggccccgggttacttgattgcagctccctctgtttttcgcgcgggcgtggaggaagtcatcagcgtgaccatctttaactctccaagggaagtcacggtcc

SEQ ID NO: 474165 - DNA, 120 bp, Artificial Sequence
  ENSG00000160111_2 (sequence is synthesized)
aggctcagctggtggcccagggtgagccggtggtgcagagccagggagccatcctggataaagggacaatcaaactcaaggtgcccacgggcctccggggccaagcgcttctgaaagtgt

SEQ ID NO: 474166 - DNA, 120 bp, Artificial Sequence
  ENSG00000160111_3 (sequence is synthesized)
ggggccgcggctggcaggcggaggaggggcccctctttcacaaccagacctcggtgaccgtggacggccggggcgcttctgtattcatccagacggacaagcctgtgtacagaccccagc

SEQ ID NO: 474167 - DNA, 120 bp, Artificial Sequence
  ENSG00000160111_4 (sequence is synthesized)
accgagtgctcataagcatcttcaccgtctctccaaatctgaggcctgtcaacgagaagctggaagcctacatcctggacccccgaggctctcggatgatagagtggagacacttaaagc

SEQ ID NO: 474168 - DNA, 120 bp, Artificial Sequence
  ENSG00000160111_5 (sequence is synthesized)
cgttctgctgcggcatcaccaacatgagcttccccttgtccgaccagcctgtgttgggagaatggttcatttttgttgaaatgcaaggccacgcgtacaacaagtcttttgaagttcaga

SEQ ID NO: 474169 - DNA, 120 bp, Artificial Sequence
  ENSG00000160111_6 (sequence is synthesized)
agtatgtgttgcccaagtttgagcttctgattgacccgccccggtatatccaagacctggacgcctgtgagacaggcactgtgcgggccaggtatacctttgggaaacctgtggctggtg

SEQ ID NO: 474170 - DNA, 120 bp, Artificial Sequence
  ENSG00000160111_7 (sequence is synthesized)
ccttaatgatcaacatgactgttaatggtgtagggtactacagccacgaggtgggacgccctgtcctcagaacaaccaagatcctcggctcccgggacttcgacatctgcgtgagggaca

SEQ ID NO: 474171 - DNA, 120 bp, Artificial Sequence
  ENSG00000160111_8 (sequence is synthesized)
tgatcccagcggacgtccctgagcacttccggggcagggtcagcatctgggccatggtgaccagtgtggacgggagccagcaggtcgcgttcgatgactccacccccgtgcagaggcagc

SEQ ID NO: 474172 - DNA, 120 bp, Artificial Sequence
  ENSG00000160111_9 (sequence is synthesized)
tggtggacatccggtactccaaggacacgaggaagcagttcaagccgggcctggcctacgtggggaaggtggagctatcctaccccgatggcagcccagctgagggggtgacggtccaga

SEQ ID NO: 474173 - DNA, 120 bp, Artificial Sequence
  ENSG00000160111_10 (sequence is synthesized)
ttaaggcagagctgacaccaaaggataacatctacaccagtgaagttgtgtcccagcgtggactagtggggtttgaaatcccctccatccccacgtcagcccagcacgtgtggctggaga

SEQ ID NO: 474174 - DNA, 120 bp, Artificial Sequence
  ENSG00000160111_11 (sequence is synthesized)
ccaaggtgatggcactgaacgggaagcctgtgggggctcagtacctgcccagctacctctccctcggcagctggtactcccccagccagtgctacctgcagctgcagccaccctcccacc

SEQ ID NO: 474175 - DNA, 120 bp, Artificial Sequence
  ENSG00000160111_12 (sequence is synthesized)
cactgcaggttggggaagaagcctatttttctgtgaagtccacatgtccctgcaactttaccctgtactacgaggtggctgcacggggcaatattgtgctatcgggccagcagcctgccc

SEQ ID NO: 474176 - DNA, 120 bp, Artificial Sequence
  ENSG00000160111_13 (sequence is synthesized)
acaccacccagcagcgaagcaagcgggcggcccctgccctggagaaaccgattcgtttaacacacctttctgagacagagcccccaccagccccagaagctgaggtcgacgtgtgtgtga

SEQ ID NO: 474177 - DNA, 120 bp, Artificial Sequence
  ENSG00000160111_14 (sequence is synthesized)
cctctcttcatctggccgtgacccccagcatggtcccccttggtcgcctgctggtcttctacgtcagggagaatggagaaggggtcgccgacagccttcagtttgcagtcgagaccttct

SEQ ID NO: 474178 - DNA, 120 bp, Artificial Sequence
  ENSG00000160111_15 (sequence is synthesized)
tcgaaaaccaggtttcagtgacgtattcagcaaatgagacccaacctggggaggttgtcgacctgcggatcagggctgcaaggggcagctgtgtgtgcgtcgccgcagttgataagagtg

SEQ ID NO: 474179 - DNA, 120 bp, Artificial Sequence
  ENSG00000160111_16 (sequence is synthesized)
tctacctgctcaggtctgggttccggctgactcctgcccaggttttccaggaactggaagattatgatgtttctgattcctttggcgtgtccagggaggatggtcctttttggtgggctg

SEQ ID NO: 474180 - DNA, 120 bp, Artificial Sequence
  ENSG00000160111_17 (sequence is synthesized)
ggctgacggcacaacgacgccggcgctcctctgtcttcccgtggccttggggcatcaccaaggactctgggtttgccttcaccgaaacgggactggtggtgatgaccgaccgagtgagcc

SEQ ID NO: 474181 - DNA, 120 bp, Artificial Sequence
  ENSG00000160111_18 (sequence is synthesized)
tgaaccaccggcaggacggtggcctctacaccgatgaggctgtccccgctttccagccccacacagggagcctggtggcagtggctccttccaggcacccccccagaacagagaagagaa

SEQ ID NO: 474182 - DNA, 120 bp, Artificial Sequence
  ENSG00000160111_19 (sequence is synthesized)
aaaggactttcttccccgaaacatggatttggcattgtctcaacatcagtgacccatctggtgaggggacactcagtgtgaaggtcccggactccatcaccagctgggtgggtgaggccg

SEQ ID NO: 474183 - DNA, 120 bp, Artificial Sequence
  ENSG00000160111_20 (sequence is synthesized)
tggccctgtccacctctcagggcttaggcatcgccgagccctccctgctgaagaccttcaagcccttcttcgtggacttcatgctccccgctctcatcatccgtggggagcaggtcaaga

SEQ ID NO: 474184 - DNA, 120 bp, Artificial Sequence
  ENSG00000160111_21 (sequence is synthesized)
tcccgctcagtgtctacaactacatgggcacctgcgctgaggtgtacatgaagctctcggttcccaagggcatccagtttgttgggcatcctggcaaacgccatgtgaccaagaagatgt

SEQ ID NO: 474185 - DNA, 120 bp, Artificial Sequence
  ENSG00000160111_22 (sequence is synthesized)
gtgtggcccccggggaggctgagcccatctgggtcgttctgtccttcagcgacctgggactcaacaacatcacggccaaagcccttgcttacggagacacaaattgctgccgggatggga

SEQ ID NO: 474186 - DNA, 120 bp, Artificial Sequence
  ENSG00000160111_23 (sequence is synthesized)
cgtacacctacagcgcattcttctgtcccagtgagagagtccacatctccacccccaacaagtatgagttccagtatgtgcagcggccactgcgcctcacccgctttgatgtggctgtgc

SEQ ID NO: 474187 - DNA, 120 bp, Artificial Sequence
  ENSG00000160111_24 (sequence is synthesized)
gagctcacaatgatgcccgtgtggccttgtcttctgggccccaggacacagcaggcatgatcgagatcgtcctgggggggcatcagaacaccaggtcatggatctccaccagcaagatgg

SEQ ID NO: 474188 - DNA, 120 bp, Artificial Sequence
  ENSG00000160111_25 (sequence is synthesized)
gagagcccgtggccagtgcacacacggccaagatcctctcctgggatgaattcagaacattctggatcagctggcgtggtggccttatccaggttggccatggtccagagccatccaatg

SEQ ID NO: 474189 - DNA, 120 bp, Artificial Sequence
  ENSG00000160111_26 (sequence is synthesized)
agtctgtcattgtggcctggaccctcccgaggccaccagaggtccagttcattggcttttccaccggctggggctccatgggtgaattccgaatctggaggaagatggaggtggacgaga

SEQ ID NO: 474190 - DNA, 120 bp, Artificial Sequence
  ENSG00000160111_27 (sequence is synthesized)
gctacagcgaggccttcaccctgggggtcccacacggcgccatccctgggtctgagcgagccaccgcctccatcatcggggacgtcatggggccaaccctgaaccacctcaacaacctcc

SEQ ID NO: 474191 - DNA, 120 bp, Artificial Sequence
  ENSG00000160111_28 (sequence is synthesized)
tgcggctgccgtttggctgtggagagcagaacatgatccactttgcacccaacgtctttgtcttgaagtatcttcagaaaacccagcagctcagccctgaggtggagagagagaccaccg

SEQ ID NO: 474192 - DNA, 120 bp, Artificial Sequence
  ENSG00000160111_29 (sequence is synthesized)
actacctagtacaaggctaccagcgccagctgacctacaagcgccaggatggctcctacagcgcgtttggggagcgggacgcatcggggagcatgtggctcacagcctttgtcctgaagt

SEQ ID NO: 474193 - DNA, 120 bp, Artificial Sequence
  ENSG00000160111_30 (sequence is synthesized)
ccttcgcacaggctcgcagctttatcttcgtggacccccgggagctggctgccgccaagagctggatcatccagcagcagcaggccgatggctccttcctggccgtgggcagggtcctga

SEQ ID NO: 474194 - DNA, 120 bp, Artificial Sequence
  ENSG00000160111_31 (sequence is synthesized)
acaaggacatccagggtgggatccacggcactgtcccgctgacagcctacgtggtggttgctctcctggaaacaggcacagcctcagaggaggagagaggctccactgacaaagcgaggc

SEQ ID NO: 474195 - DNA, 120 bp, Artificial Sequence
  ENSG00000160111_32 (sequence is synthesized)
acttcctggagtctgctgcgcccctggccatggacccttatagctgtgccctgactacctacgcgctgaccctgctccgcagcccggcagcccctgaggcactgcgcaagctccgtagcc

SEQ ID NO: 474196 - DNA, 120 bp, Artificial Sequence
  ENSG00000160111_33 (sequence is synthesized)
tggccatcatgcgagatggggtcacccactggagcctgtcaaattcctgggacgtggacaagggcacattcttgagcttcagtgacagggtctctcagtcagtggtctcggccgaggtgg

SEQ ID NO: 474197 - DNA, 120 bp, Artificial Sequence
  ENSG00000160111_34 (sequence is synthesized)
aaatgacagcctacgcccttctgacctacactctgctgggtgacgtggctgccgccctgcctgtggtgaagtggctgtcccagcagcgaaatgcacttgggggcttctcctccactcagg

SEQ ID NO: 474198 - DNA, 120 bp, Artificial Sequence
  ENSG00000160111_35 (sequence is synthesized)
acacctgcgtggctctgcaggccttggctgaatatgccatcttgtcctatgctggaggcatcaacctcactgtctccctggcctccaccaacctggactaccaggaaaccttcgagctgc

SEQ ID NO: 474199 - DNA, 120 bp, Artificial Sequence
  ENSG00000160111_36 (sequence is synthesized)
acaggaccaaccagaaggttctgcagacagcagcgatccccagcctccccacggggctgtttgtgagtgccaagggggacggctgctgcctgatgcagattgatgtcacctacaatgtgc

SEQ ID NO: 474200 - DNA, 120 bp, Artificial Sequence
  ENSG00000160111_37 (sequence is synthesized)
ctgacccggtggccaagccagctttccagctgctcgtaagcctccaggagcctgaggcccagggacgcccgccccccatgcctgcctccgcagctgagggttcccgaggagactggcccc

SEQ ID NO: 474201 - DNA, 120 bp, Artificial Sequence
  ENSG00000160111_38 (sequence is synthesized)
cagctgacgatgatgacccagcggccgatcagcatcaccaggaatacaaggtgatgctggaggtgtgcaccaggtggctgcatgcagggtcttccaatatggctgtcctggaggtgcccc

SEQ ID NO: 474202 - DNA, 120 bp, Artificial Sequence
  ENSG00000160111_39 (sequence is synthesized)
tgctgtcaggcttccgggcagacatcgagagcctggagcagctgctccttgacaagcacatggggatgaagaggtatgaagtggctggacgccgagtgctcttctactttgatgagatcc

SEQ ID NO: 474203 - DNA, 120 bp, Artificial Sequence
  ENSG00000160111_40 (sequence is synthesized)
ccagccggtgcctgacgtgcgtgcggttccgtgctctccgggagtgcgtggtgggcaggacgtcggcgctgccagtctccgtgtacgactactacgaacccgccttcgaggccactcgct

SEQ ID NO: 474204 - DNA, 120 bp, Artificial Sequence
  ENSG00000160111_41 (sequence is synthesized)
tctacaacgtcagcacccacagcccactcgcccgggaactgtgcgccggacccgcgtgcaacgaagtggagcgcgcccctgcccggggcccgggctggttccccggcgagtcgggccctg

SEQ ID NO: 474205 - DNA, 120 bp, Artificial Sequence
  ENSG00000160111_42 (sequence is synthesized)
ccgtggcccctgaggagggggcggcgatcgcgcgatgcggctgcgaccacgactgcggcgcccaggggaacccggtgtgcggctccgacggggtggtctacgccagcgcctgccgcctgc

SEQ ID NO: 474206 - DNA, 120 bp, Artificial Sequence
  ENSG00000160111_43 (sequence is synthesized)
gggaggccgcctgccgccaggccgcgcccctggagcccgcgcctcccagctgctgcgccctcgagcagcggctgccggcctcgtcgtcctccacctacggggatgacctggcttctgtgg

SEQ ID NO: 474207 - DNA, 120 bp, Artificial Sequence
  ENSG00000160111_44 (sequence is synthesized)
ccccggggcctttacagcaggacgtgaagctgaatggagccggccttgaggtggaggactcagaccctgagcctgaaggggaggcggaggacagggtcacagccgggcctcggcctcctg

SEQ ID NO: 474208 - DNA, 120 bp, Artificial Sequence
  ENSG00000160111_45 (sequence is synthesized)
tgagcagcgggaacctggaaagcagcacccagagcgccagcccgttccacagatggggccagactccggcccctcagagacatagtggccgggtggtgggggcccacaggccagggcttc

SEQ ID NO: 474209 - DNA, 120 bp, Artificial Sequence
  ENSG00000160111_46 (sequence is synthesized)
tgagccctgtcttcgtctacagcccagcctttcagagtggtggggaggagggtttatggatgtcaaacacctgcaccttgagataatcctacaaccacatgcagttgtgggaccgcagtt

SEQ ID NO: 474210 - DNA, 120 bp, Artificial Sequence
  ENSG00000160111_47 (sequence is synthesized)
tggtcctggggaccattcatacccacacacccagcttgtgcctgtggttaacatctcagaaaactctggtaaatgatcactccaggatattgacaagaatacacgttactgatcttactc

SEQ ID NO: 474211 - DNA, 120 bp, Artificial Sequence
  ENSG00000160111_48 (sequence is synthesized)
agtgcggaggaggcgcggcaggggacggggctgttgttgcagggcggcccagacaggacgccctgtctcctttctctcctacaaccgctttttaaaagtctgtttctgtttttagcagcg

SEQ ID NO: 474212 - DNA, 120 bp, Artificial Sequence
  ENSG00000160111_49 (sequence is synthesized)
ctcccccgacgacctgccccgactcctccgccccgccccgaccccccactggcagtgggagtgactcagggtcagaggctcagagttcctggggacaaagtgggacattcatcctccctc

SEQ ID NO: 474213 - DNA, 89 bp, Artificial Sequence
  ENSG00000160111_50 (sequence is synthesized)
cagagttcctggggacaaagtgggacattcatcctccctccaccctggcccacgcaacacccaccagcgaacagctgtgcgcgggcgca

SEQ ID NO: 474214 - DNA, 120 bp, Artificial Sequence
  ENSG00000160111_51 (sequence is synthesized)
gaaatagatgcagcccacaaaatccccagggctgctcagcagagtggtgtggatgggtacagtgtcaacctcggtggtggccaggtgctgtggtcctcagacaccttgcaccggtgtcag

SEQ ID NO: 474215 - DNA, 120 bp, Artificial Sequence
  ENSG00000160111_52 (sequence is synthesized)
aggtgggacgccctgtcctcagaacaaccaaggtgagaaacagggaccccttctaccccctgacccaacccccaggttcacctccaccagcacacattttattttactttctcttattgt

SEQ ID NO: 474216 - DNA, 76 bp, Artificial Sequence
  ENSG00000160111_53 (sequence is synthesized)
cctccaccagcacacattttattttactttctcttattgttattattttatttactgcctttaaaaagtttttgaa

SEQ ID NO: 474217 - DNA, 120 bp, Artificial Sequence
  ENSG00000160111_54 (sequence is synthesized)
ccaggtgacacctgcctctaaatgaacccaaggaacagaatgacagagatctgcccgtccctaggatgagactcttgggacccaggtgtgggctcagcagtcaccggtgtggtgcagggg

SEQ ID NO: 474218 - DNA, 120 bp, Artificial Sequence
  ENSG00000160111_55 (sequence is synthesized)
ggacagctggaggtcccttgggagatcccccaccttcctagctacagctggagctccaagcaccccaaccccccagccttggagctgggcatcattttcctggggccacggcagctccca

SEQ ID NO: 474219 - DNA, 120 bp, Artificial Sequence
  ENSG00000160111_56 (sequence is synthesized)
cagcctgacattctgttcccgggagaagaaacattcccagaaagcactcgtgtggccaaaagcctctttctgagcaaacacgatgtggactaaattagcaaaacatccagccggtgggca

SEQ ID NO: 474220 - DNA, 120 bp, Artificial Sequence
  ENSG00000160111_57 (sequence is synthesized)
acttcaaaacggaacaggctgcgtttctctgaaacacaaagccccggcctccctttggggcacccaggaccccaaattgccctaagactgtcccagctctcgcaccctctgccttcgccc

SEQ ID NO: 474221 - DNA, 120 bp, Artificial Sequence
  ENSG00000160111_58 (sequence is synthesized)
gtgtttcggatttcagattttttcacatttcagaatgcttgcattatatagttagctaaggttcagcatccctaatctaaaaatctgaaatgccccaatgagcattgcctttgagcacgt

SEQ ID NO: 474222 - DNA, 120 bp, Artificial Sequence
  ENSG00000160111_59 (sequence is synthesized)
caagtcgctgctcaaaaagacttggattttggaacatttcagatttaggatttttggactagggaagttttgcctgtagttaacagtgtgcggtttcctcatgggcagatttgtgtaatc

SEQ ID NO: 474223 - DNA, 120 bp, Artificial Sequence
  ENSG00000160111_60 (sequence is synthesized)
tcaaccatagtcaacaaacagcccatctgcacaggatccttccagctgctcttccataacttcatctctcccctcaacacctgcaaccactaagccattttccccctacccgtctgtaat

SEQ ID NO: 474224 - DNA, 120 bp, Artificial Sequence
  ENSG00000160111_61 (sequence is synthesized)
tttgttattttgagaatgccaggtaaatggaatcagagcggataatctttggagcatgattcccttgcattcacctgtgttgtttcgtgtatccatagtttattctttttttaatctggg

SEQ ID NO: 474225 - DNA, 60 bp, Artificial Sequence
  ENSG00000160111_62 (sequence is synthesized)
agtttattctttttttaatctaagctgggattacaggggcccgccaccatgcccggctaa

SEQ ID NO: 474226 - DNA, 85 bp, Artificial Sequence
  ENSG00000160111_63 (sequence is synthesized)
gcgctggtattgcaggcatgagccaccatgccaggcctattcttttatttttcaaacgaggtctcactgtgttgcccaggctgga

SEQ ID NO: 474227 - DNA, 120 bp, Artificial Sequence
  ENSG00000160111_64 (sequence is synthesized)
ttgcaggcatgagccaccatgccaggcctattcttttatttttcaaacgaggtctcactgtgttgcccaggctggagtgtagtggcgtggtcatggctcactgcagccttgacctcctga

SEQ ID NO: 474228 - DNA, 77 bp, Artificial Sequence
  ENSG00000160111_65 (sequence is synthesized)
agatggggtctctgtatgttgcccaagctggagtgccatggctgttcatagacatgatcattgtgcactgcagcctc

SEQ ID NO: 474229 - DNA, 73 bp, Artificial Sequence
  ENSG00000160111_66 (sequence is synthesized)
tagagatggggtctctgtatgttgcccaagctggagtgccatggctgttcatagacatgatcattgttctccc

SEQ ID NO: 474230 - DNA, 120 bp, Artificial Sequence
  ENSG00000160111_67 (sequence is synthesized)
ttgttcttttgtattgctgggtagtgtgctatgggtagcttttcgatttggttggtggtctgacacaagctactcccctcttaccgcacatggacacccagagcccatcactgtggtcca

SEQ ID NO: 474231 - DNA, 120 bp, Artificial Sequence
  ENSG00000160111_68 (sequence is synthesized)
ctggaaggggaaaggaggcagagttgtacagtgccaggcctgggccatgtgtcccccatccagttggggttctgccatctaaatgaggaggtggcagctggcctgagccccgtggagttg

SEQ ID NO: 474232 - DNA, 120 bp, Artificial Sequence
  ENSG00000160111_69 (sequence is synthesized)
ggttcaggaaaggggtgtggggtcccatcccgaagtcctggcggccccataggaatctttctcctctcctggccagtcagagcggcttctcttcctaacggctgccctgctgagagcagg

SEQ ID NO: 474233 - DNA, 120 bp, Artificial Sequence
  ENSG00000160111_70 (sequence is synthesized)
tctcagcaaatgcactttcagcttccggctgccggggctgggtgaccccggtgcttcctcaccgtgagttcctgatgtcctcgtgcccagaggaccagcccactcccagggcccccaggc

SEQ ID NO: 474234 - DNA, 120 bp, Artificial Sequence
  ENSG00000160111_71 (sequence is synthesized)
ccagaacctgcctgccttggggggccctaccagctgcctgccaccagtaccagcagactttgattcccctttgtgacccctggcacctgcttatgtctgcatttgcccatcttctccggg

SEQ ID NO: 474235 - DNA, 120 bp, Artificial Sequence
  ENSG00000160111_72 (sequence is synthesized)
gtggtatttatttcagccaacaccgctcagccctgatctctgccagcacggaggcccctcgctgcctgtgagatcaaggtctgaggctgccctggccggtgggttccccacccctggcac

SEQ ID NO: 474236 - DNA, 120 bp, Artificial Sequence
  ENSG00000160111_73 (sequence is synthesized)
cctacaagcgacaggccctgtggctccttcctcagcccgaggccccgtgcccacttgctgtagaggatgttgtaagataaaacctcatctccagggtcacagccgggcctcggcctcctg

SEQ ID NO: 474237 - DNA, 120 bp, Artificial Sequence
  ENSG00000160111_74 (sequence is synthesized)
agtgcggaggaggcgcggcaggggacggggctgttgttgcagggcggcccagacaggacgccctgtctcctttctctcctacaaccgctttttaaaagtctgtttctgtttttgctggtt

SEQ ID NO: 474238 - DNA, 120 bp, Artificial Sequence
  ENSG00000160111_75 (sequence is synthesized)
gttgttgcagggcggcccagacaggacgccctgtctcctttctctcctacaaccgctttttaaaagtctgtttctgtttttgtaagtattaggcaaatacctgcgtgaaattccataagg

SEQ ID NO: 474239 - DNA, 120 bp, Artificial Sequence
  ENSG00000160111_76 (sequence is synthesized)
ccagggctcaggacctcccattaactgtcgcgccccaagacccaccgagggggtagtgggcccgggacccagggacatcttccccacccccaggttctgtgggggcgcgggcaaggttca

SEQ ID NO: 474240 - DNA, 120 bp, Artificial Sequence
  ENSG00000160111_77 (sequence is synthesized)
cagtggccacagggtgattcattcccttatgcttctgggggctgtcagcatccacttccccaccaatggtttgggtgttgtctgttgcctaggaaacgggactggtggtgatgaccgacc

SEQ ID NO: 474241 - DNA, 120 bp, Artificial Sequence
  ENSG00000160111_78 (sequence is synthesized)
agagcctccggtgagatgggcaggcctgataccaacatctgagcaagacactgtgcatctttttctaacacacaaaacttcaagccatgaagccagccttgagtcccgctgcacatttgg

SEQ ID NO: 474242 - DNA, 120 bp, Artificial Sequence
  ENSG00000160111_79 (sequence is synthesized)
acgtttgcctgtgaaatatgaaatgcaagggctttgtgcctcttataactccctcttggggttactctatctgctctgtttgtataacgagctcattaaaatgattacagttccctggaa

SEQ ID NO: 474243 - DNA, 120 bp, Artificial Sequence
  ENSG00000160111_80 (sequence is synthesized)
ggtaggcccgcgcgcccgcacccccggcccggcccggtccctgacccgtcgcgcctgcacttggtcacccgccaccctcgtcccgtagccttcgaggccactcgcttctacaacgtcagc

SEQ ID NO: 474244 - DNA, 120 bp, Artificial Sequence
  ENSG00000160113_0 (sequence is synthesized)
gcgaatggaacgctgtgtgtcaaaccggccgcagcgcgaggccggcgcgcggggtcggtggcggtggcggcggcgagagcgaggcttgggcccaggcgcaggcccaggccaggcaggagc

SEQ ID NO: 474245 - DNA, 80 bp, Artificial Sequence
  ENSG00000160113_1 (sequence is synthesized)
cgcccctccccccccgccacgggcggccgcgcaacttgcggccaaactttccccccggcctcccgcgctcggatggcggc

SEQ ID NO: 474246 - DNA, 120 bp, Artificial Sequence
  ENSG00000160113_2 (sequence is synthesized)
cccggccccgggcccggccccgcgcacgcgtgggaaagttggcctggaaccggcccgaccagttccgcccgggcgcgaggaccggccgcaggaagttgctgcaaaacttttttggggggt

SEQ ID NO: 474247 - DNA, 120 bp, Artificial Sequence
  ENSG00000160113_3 (sequence is synthesized)
tgctgcaaaacttttttggggggtgcagcccgtgccccccgcgcgccggggccgaatgcgcgccgcgtagggtcccccgggccgagaggggtgcccggagggaagagcgcggtgggggcg

SEQ ID NO: 474248 - DNA, 80 bp, Artificial Sequence
  ENSG00000160113_4 (sequence is synthesized)
atggccatggtgaccggcggctggggcggccccggcggcgacacgaacggcgtggacaaggcgggcggctacccgcgcgc

SEQ ID NO: 474249 - DNA, 120 bp, Artificial Sequence
  ENSG00000160113_5 (sequence is synthesized)
gacgccgagccgggcgacgaggagcggccggggctgcaggtggactgcgtggtgtgcggggacaagtcgagcggcaagcattacggtgtcttcacctgcgagggctgcaagagctttttc

SEQ ID NO: 474250 - DNA, 120 bp, Artificial Sequence
  ENSG00000160113_6 (sequence is synthesized)
aagcgaagcatccgccgcaacctcagctacacctgccggtccaaccgtgactgccagatcgaccagcaccaccggaaccagtgccagtactgccgtctcaagaagtgcttccgggtgggc

SEQ ID NO: 474251 - DNA, 120 bp, Artificial Sequence
  ENSG00000160113_7 (sequence is synthesized)
agaagtgcttccgggtgggcatgaggaaggaggcggtgcagcgcggccgcatcccgcactcgctgcctggtgccgtggccgcctcctcgggcagccccccgggctcggcgctggcggcag

SEQ ID NO: 474252 - DNA, 120 bp, Artificial Sequence
  ENSG00000160113_8 (sequence is synthesized)
cggggcagccggtgtccgaactgatcgcgcagctgctgcgcgctgagccctaccctgcggcggccggacgcttcggcgcagggggcggcgcggcgggcgcggtgctgggcatcgacaacg

SEQ ID NO: 474253 - DNA, 120 bp, Artificial Sequence
  ENSG00000160113_9 (sequence is synthesized)
tgtgcgagctggcggcgcggctgctcttcagcaccgtggagtgggcgcgccacgcgcccttcttccccgagctgccggtggccgaccaggtggcgctgctgcgcctgagctggagcgagc

SEQ ID NO: 474254 - DNA, 120 bp, Artificial Sequence
  ENSG00000160113_10 (sequence is synthesized)
tcttcgtgctgaacgcggcgcaggcggcgctgcccctgcacacggcgccgctactggccgccgccggcctccacgccgcgcctatggccgccgagcgcgccgtggctttcatggaccagg

SEQ ID NO: 474255 - DNA, 120 bp, Artificial Sequence
  ENSG00000160113_11 (sequence is synthesized)
tgcgcgccttccaggagcaggtggacaagctgggccgcctgcaggtcgactcggccgagtatggctgcctcaaggccatcgcgctcttcacgcccgacgcctgtggcctctcagacccgg

SEQ ID NO: 474256 - DNA, 120 bp, Artificial Sequence
  ENSG00000160113_12 (sequence is synthesized)
cccacgttgagagcctgcaggagaaggcgcaggtggccctcaccgagtatgtgcgggcgcagtacccgtcccagccccagcgcttcgggcgcctgctgctgcggctccccgccctgcgcg

SEQ ID NO: 474257 - DNA, 120 bp, Artificial Sequence
  ENSG00000160113_13 (sequence is synthesized)
cggtccctgcctccctcatctcccagctgttcttcatgcgcctggtggggaagacgcccattgagacactgatcagagacatgctgctgtcggggagtaccttcaactggccctacggct

SEQ ID NO: 474258 - DNA, 120 bp, Artificial Sequence
  ENSG00000160113_14 (sequence is synthesized)
cgggccagtgaccatgacggggccacgtgtgctgtggccaggcctgcagacagacctcaagggacagggaatgctgaggcctcgaggggcctcccggggcccaggactctggcttctctc

SEQ ID NO: 474259 - DNA, 120 bp, Artificial Sequence
  ENSG00000160113_15 (sequence is synthesized)
ctcagacttctattttttaaagactgtgaaatgtttgtcttttctgttttttaaatgatcatgaaaccaaaaagagactgatcatccaggcctcagcctcatcctccccaggacccctgt

SEQ ID NO: 474260 - DNA, 120 bp, Artificial Sequence
  ENSG00000160113_16 (sequence is synthesized)
ccaggatggagggtccaatcctaggacagccttgttcctcagcacccctagcatgaacttgtgggatggtggggttggcttccctggcatgatggacaaaggcctggcgtcggccagagg

SEQ ID NO: 474261 - DNA, 120 bp, Artificial Sequence
  ENSG00000160113_17 (sequence is synthesized)
ggctgctccagtgggcaggggtagctagcgtgtgccaggcagatcctctggacacgtaacctatgtcagacactacatgatgactcaaggccaataataaagacatttcctacctgcaca

SEQ ID NO: 474262 - DNA, 120 bp, Artificial Sequence
  ENSG00000160113_18 (sequence is synthesized)
cggccgcgcggatcgatacggcgcgcccttggggtcaaatatcacttccaaagtcgctgtggctacggaggcggcagacggagggaggctggggtggcacggggcggccttcttcgcatg

SEQ ID NO: 474263 - DNA, 120 bp, Artificial Sequence
  ENSG00000160113_19 (sequence is synthesized)
aggggcccagcggtgggggtgggggtgggagctgggcttgcccatctcagggaacccctctgggctcactctgggccttgggtcaccggaaatcgccactggaaggccggcagggccacc

SEQ ID NO: 474264 - DNA, 120 bp, Artificial Sequence
  ENSG00000160117_0 (sequence is synthesized)
agtggcacacccggtggcatcctcccacccgggctcttatcggcggtcccagaccctgcttgagcgcctccgggtgtcaagggcccctgaggacactaaagctctcgaaccccgatgtgg

SEQ ID NO: 474265 - DNA, 120 bp, Artificial Sequence
  ENSG00000160117_1 (sequence is synthesized)
acccccgtgcggcgcggggcagcctggctgggaaccctgctcggccctggagaggggccccccgagccgaggggaggagcggcgcatgcccacaagccccccgcgggaagtaggaaatcg

SEQ ID NO: 474266 - DNA, 120 bp, Artificial Sequence
  ENSG00000160117_2 (sequence is synthesized)
accgaccaggcggtgcgcttcggacccagccagggcatgtgctcggaggcccgcctggctcgcaggttgcgggatgcgctgcgggaggaggagccgtgggcagtagaggagctgctgcgc

SEQ ID NO: 474267 - DNA, 120 bp, Artificial Sequence
  ENSG00000160117_3 (sequence is synthesized)
tgcggcgcggaccctaatttggtgctagaggacggcgcagcggctgtgcacttggcggccggagcccggcacccgcgcggcctgcgttgcctcggggccctactgcgccaaggcggggac

SEQ ID NO: 474268 - DNA, 120 bp, Artificial Sequence
  ENSG00000160117_4 (sequence is synthesized)
cccaacgctcgatctgtcgaggcactgacgccgctgcatgtggccgccgcgtggggctgccgccgcggcctggagctgctgctgagccaaggagcggacccggcgctgcgcgaccaggac

SEQ ID NO: 474269 - DNA, 120 bp, Artificial Sequence
  ENSG00000160117_5 (sequence is synthesized)
ggactccggccgctggacctggccctgcagcagggacacctggagtgcgcgcgagtcctgcaggatctcgacacgcggaccaggacccggacccggatcggggcagagactcaggagccc

SEQ ID NO: 474270 - DNA, 120 bp, Artificial Sequence
  ENSG00000160117_6 (sequence is synthesized)
gagcctgcacctggcaccccaggcctctctggacctaccgatgagacgctggactccatagcactccaaaagcagccatgcagaggtgacaacagggacattggcttggaggctgaccca

SEQ ID NO: 474271 - DNA, 120 bp, Artificial Sequence
  ENSG00000160117_7 (sequence is synthesized)
ggaccccccagcctccctgttccccttgaaactgtggacaaacatgggagctcggcgtcccctccagggcactgggattacagctcagacgcctctttcgtcacagcggttgaggtctct

SEQ ID NO: 474272 - DNA, 120 bp, Artificial Sequence
  ENSG00000160117_8 (sequence is synthesized)
ggagctgaggacccagcctcggacactcccccctgggctgggtcattgccaccgaccaggcagggacttctgcatgttgtccatgccaaccagagggtacctaggtctcagggcacggag

SEQ ID NO: 474273 - DNA, 120 bp, Artificial Sequence
  ENSG00000160117_9 (sequence is synthesized)
gcagaactgaatgcccgtctgcaggccctgactctgaccccaccaaatgctgctggcttccagtcctccccttcctccatgcctctcctggacaggagtccagctcatagccccccacgg

SEQ ID NO: 474274 - DNA, 120 bp, Artificial Sequence
  ENSG00000160117_10 (sequence is synthesized)
acaccaacccctggagcttctgactgccactgcctgtgggagcaccagacatccattgatagtgacatggccacgctctggctgacagaggatgaggcaagctctacaggtggcagggaa

SEQ ID NO: 474275 - DNA, 120 bp, Artificial Sequence
  ENSG00000160117_11 (sequence is synthesized)
cctgtcggcccttgccggcacctgccagtctccactgtgtctgacttggagttgctgaagggactccgagcacttggtgagaatcctcaccccatcacacccttcaccaggcagttgtac

SEQ ID NO: 474276 - DNA, 120 bp, Artificial Sequence
  ENSG00000160117_12 (sequence is synthesized)
caccagcagctggaagaagcccagattgctcctggcccagagttttcagggcacagcctagaactggctgcagccctgcggacgggctgtattccagatgtccaggcagatgaagacgcg

SEQ ID NO: 474277 - DNA, 120 bp, Artificial Sequence
  ENSG00000160117_13 (sequence is synthesized)
tcaggacctgccagcccgagccttctcactgaccccagctgagcgccttcagactttcatccgtgccatcttctacgtgggcaaagggacgagggcccggccatatgtccacctctggga

SEQ ID NO: 474278 - DNA, 120 bp, Artificial Sequence
  ENSG00000160117_14 (sequence is synthesized)
ggcccttggtcaccatgggcggtcaagaaaacagccccaccaggcctgccccaaggtgcgtcagatcttggacatctgggccagtggttgcggtgttgtgtccctacattgcttccagca

SEQ ID NO: 474279 - DNA, 120 bp, Artificial Sequence
  ENSG00000160117_15 (sequence is synthesized)
cgtggtcgctgtggaggcttatacacgggaggcgtgtattgtggaagccctagggatccagacgctcaccaaccagaagcaagggcactgctatggagtggtggcaggctggccacctgc

SEQ ID NO: 474280 - DNA, 120 bp, Artificial Sequence
  ENSG00000160117_16 (sequence is synthesized)
tcgtcgccggcgcttgggggtgcacctgctgcaccgtgccctccttgtcttcctggctgaaggcgagcgacagcttcatccccaggacatccaggcccggggctgagtgctggggagttg

SEQ ID NO: 474281 - DNA, 120 bp, Artificial Sequence
  ENSG00000160117_17 (sequence is synthesized)
ggctgagtgctggggagttggccatccagcctggggagaaatgtttgaatgttccagctgccccatgctgacagcagcccccatctctggtttcagaaggggtgtgtgtgtgtgtgtgtg

SEQ ID NO: 474282 - DNA, 120 bp, Artificial Sequence
  ENSG00000160117_18 (sequence is synthesized)
tgtgtttgtgtgtgtgtgtgtgtgtgtagggagcacccaggcagatctcccccaggctgagagaggactttgttacagatggtactgctggagaggtagtaagtagtgagctccccatcg

SEQ ID NO: 474283 - DNA, 120 bp, Artificial Sequence
  ENSG00000160117_19 (sequence is synthesized)
atcgtgggaggaggacaagaagggaagcagaaggtgctttggaacagtccggtgcttctgtaagaggcgtttgaacctgggcaactccacctggaataggagctgggtaaaatgaggctg

SEQ ID NO: 474284 - DNA, 88 bp, Artificial Sequence
  ENSG00000160117_20 (sequence is synthesized)
ctactgggctgcattcccagatggttaaagcattctaagtcacgggatcaggtaggaggtcagcacaagataacgggtcataaagaac

SEQ ID NO: 474285 - DNA, 74 bp, Artificial Sequence
  ENSG00000160117_21 (sequence is synthesized)
agtaaagaagccggccaaaacccaccaataccaagatggcgacaagagtgacctctggtcgtcctcatggccag

SEQ ID NO: 474286 - DNA, 78 bp, Artificial Sequence
  ENSG00000160117_22 (sequence is synthesized)
ggcaacagagcgagagtctgtctcaaacaaacaaacaaaaaaacaaatgccacatcaacatcaggacgttaaccttta

SEQ ID NO: 474287 - DNA, 120 bp, Artificial Sequence
  ENSG00000160117_23 (sequence is synthesized)
ccagggtcttccccaccccacccattggttctgaccgtctcacatccactatttgtggccagctctttcggcctcagacactctgatctcctttttctgtttgatcctattctcatcgct

SEQ ID NO: 474288 - DNA, 120 bp, Artificial Sequence
  ENSG00000160124_0 (sequence is synthesized)
gtccaatatggcggcgcccagtggcggtgtgaactgtgaggagttcgccgagttccaggaattactcaaggtgatgaggacaattgatgacagaatagtacatgaattaaacactacggt

SEQ ID NO: 474289 - DNA, 120 bp, Artificial Sequence
  ENSG00000160124_1 (sequence is synthesized)
tccaacagcttcctttgcagggaaaattgatgccagccaaacctgtaaacaactttatgagtctttgatggcagctcatgccagtagagacagagtcataaaaaactgtatagcccagac

SEQ ID NO: 474290 - DNA, 120 bp, Artificial Sequence
  ENSG00000160124_2 (sequence is synthesized)
ttcagcagtagtaaaaaacctccgagaagagagagaaaagaatttggacgatttaacgttattaaaacaacttagaaaagagcagacaaagttgaaatggatgcagtcagaactgaatgt

SEQ ID NO: 474291 - DNA, 120 bp, Artificial Sequence
  ENSG00000160124_3 (sequence is synthesized)
ctgaatgttgaagaagtggtaaatgacaggagctggaaggtgtttaatgaacgctgccgaattcacttcaagcctccaaagaatgaataaagagagattctttttttttttttttttttt

SEQ ID NO: 474292 - DNA, 120 bp, Artificial Sequence
  ENSG00000160124_4 (sequence is synthesized)
aaggactgggtcatctcataagagctaagcatgacagatatcaacagggcgggctttctaggatgatttctgagccaacagtccaagaccttttgttgatttcagccccacttagccaag

SEQ ID NO: 474293 - DNA, 120 bp, Artificial Sequence
  ENSG00000160124_5 (sequence is synthesized)
acctcaagtataaataattctgataattatggagaaatcaactgctattttatactgattctgtaaaaaaaaaaaaaaaaaatttttgtaactattaaaataattttctgactcagtgta

SEQ ID NO: 474294 - DNA, 120 bp, Artificial Sequence
  ENSG00000160124_6 (sequence is synthesized)
aatatggcggcgcccagtggcggtgtgaactgtgaggagttcgccgagttccaggtgatggggttttcctcatgtggcaggaattactcaaggtgatgaggacaattgatgacagaatag

SEQ ID NO: 474295 - DNA, 120 bp, Artificial Sequence
  ENSG00000160124_7 (sequence is synthesized)
agacaaaggtaagttgaacagaattaacatttctcaggcaaagtttttccaattgtagccttcaaagtaagatttttaatatgaaaattttggcatataatatggcagttacttaaaaaa

SEQ ID NO: 474296 - DNA, 120 bp, Artificial Sequence
  ENSG00000160124_8 (sequence is synthesized)
atgatcaagagattagtgcttcatttttagtgagctttattttattatgtttagttattaattggtaaattaatgtgcacttcttgaacaaatgcagcatagcagctttgtctaaaataa

SEQ ID NO: 474297 - DNA, 120 bp, Artificial Sequence
  ENSG00000160124_9 (sequence is synthesized)
gcacagtcataatttattttcatttctttgtttctttcccactattaaagacaagggatcactacaggtgaagtaccacatcagaaattctggggaaatcacatctgtacagtatctgcc

SEQ ID NO: 474298 - DNA, 120 bp, Artificial Sequence
  ENSG00000160124_10 (sequence is synthesized)
gttgcatgaggtttgctttctagcttgataacatatagggttgggggtaaccatggggtagtacataagcaaataaggaaatgtgaattttttttttcaattttcaagtttgctatgaag

SEQ ID NO: 474299 - DNA, 120 bp, Artificial Sequence
  ENSG00000160124_11 (sequence is synthesized)
attatggaatcagagagagctcttggagatggtacagctctacctcttcattttctatctgaggaaaaagactcagagatacttgagatactaactgacacccccaaagccacaagctat

SEQ ID NO: 474300 - DNA, 66 bp, Artificial Sequence
  ENSG00000160124_12 (sequence is synthesized)
tcacacctgacttcatgtttgtattttaagatggcataataggtgacttacggatccttgtgggat

SEQ ID NO: 474301 - DNA, 120 bp, Artificial Sequence
  ENSG00000160124_13 (sequence is synthesized)
taagatggcataataggtgacttacggatccttgtgggattgagtcatgcttttcatactgcacagtcatgaagtttgccctttgtttagtagatgtagctgaactttgaaaaggggacc

SEQ ID NO: 474302 - DNA, 120 bp, Artificial Sequence
  ENSG00000160124_14 (sequence is synthesized)
tcgtcatctattgaaaactattagtagaaaagaaaagaaacctctttccttgtagctggctgcacacaagggcccagatagaatcaccaggatgaccactgcaaggagggtttagaaacc

SEQ ID NO: 474303 - DNA, 120 bp, Artificial Sequence
  ENSG00000160131_0 (sequence is synthesized)
ctacttccggtgcgaaccgcctcggccgttccctcgcggagcttactgagcgcggccgccgagcccagctccgccgccgagcgcctgtgccggcacggctacaccatggagcgcccggat

SEQ ID NO: 474304 - DNA, 120 bp, Artificial Sequence
  ENSG00000160131_1 (sequence is synthesized)
aaggcggcgctgaacgcactgcagcctcctgagttcagaaatgaaagctcattagcatctacactgaagacgctcctgttcttcacagctttaatgatcactgttcctattgggttatat

SEQ ID NO: 474305 - DNA, 120 bp, Artificial Sequence
  ENSG00000160131_2 (sequence is synthesized)
ttcacaactaaatcttacatatttgaaggcgcccttgggatgtccaatagggacagctatttttacgctgctattgttgcagtggtcgccgtccatgtggtgctggccctctttgtgtat

SEQ ID NO: 474306 - DNA, 120 bp, Artificial Sequence
  ENSG00000160131_3 (sequence is synthesized)
gtggcctggaatgaaggctcacgacagtggcgtgaaggcaaacaggattaaagtgaacatcacctttttatagcattaaattcattttttaaaatgataaatgctggagggggccatctg

SEQ ID NO: 474307 - DNA, 120 bp, Artificial Sequence
  ENSG00000160131_4 (sequence is synthesized)
atttgaataaagttgaaagaacatgttaaagtcagtcttaaggagtcacgtttgagtatgtaaattttgatctttctaatatgttggtttgtatattcagttttaactgtatgaatctga

SEQ ID NO: 474308 - DNA, 120 bp, Artificial Sequence
  ENSG00000160131_5 (sequence is synthesized)
tttgcaaatgagaatttggaaaagttagttacaaagaaatatgttaatttaattagacaatactctggaaggaattttatcttctttcaacaaaacatgttttatagtattctgacttac

SEQ ID NO: 474309 - DNA, 120 bp, Artificial Sequence
  ENSG00000160131_6 (sequence is synthesized)
ggttgcttttgagttttactcatttggatatattaagatgcacacagtgaagcaaattaaactccactttacgctggaatgctttctttagcatgaaaataccaggtccttggatttggg

SEQ ID NO: 474310 - DNA, 120 bp, Artificial Sequence
  ENSG00000160131_7 (sequence is synthesized)
attttaatttcctatggaaagttgcttaaattgtggacactggaattaatctgaatgtcactgaggaatttcacatgaagtgtaatccctagtcaataagaattatccattacattattt

SEQ ID NO: 474311 - DNA, 120 bp, Artificial Sequence
  ENSG00000160131_8 (sequence is synthesized)
tatgggaaaactaggctaaattacatccattcaggtaaaaggaccttagcttactgaaggatctaaagagcaaagcaaagatctcactactcaaacactcagcctgcttccttcaagtcc

SEQ ID NO: 474312 - DNA, 120 bp, Artificial Sequence
  ENSG00000160131_9 (sequence is synthesized)
ccttgcaggccagctttgtgctttgcagaccaactttttaatgagatactttgcttcctcattcaacattgaagctaggcttcaattaaaaggttcgaggaagctccatttaaaattgtt

SEQ ID NO: 474313 - DNA, 120 bp, Artificial Sequence
  ENSG00000160131_10 (sequence is synthesized)
ttttttactattttttaaaattgtagtgtatatgataggaatttgcatttaaatatgttcatttttgcatatgttaggagtggaaacaatctggaaaacatttttttttcatccaaaaag

SEQ ID NO: 474314 - DNA, 120 bp, Artificial Sequence
  ENSG00000160131_11 (sequence is synthesized)
tattctccttgggcatatctgatggaaaaaaaccttgattttattttcgtatctttagtctgtgttctttctagttatttggtactaattatgtgcaatctaaaaacactcccacaagta

SEQ ID NO: 474315 - DNA, 120 bp, Artificial Sequence
  ENSG00000160131_12 (sequence is synthesized)
tttgttttttaattataaaatcatagtatatgttctttgtagaaaactggaaaaatacatattcaaacaggaaaaaaaatcaaaattccccataatgttgccatctaaaaataacctcta

SEQ ID NO: 474316 - DNA, 120 bp, Artificial Sequence
  ENSG00000160131_13 (sequence is synthesized)
ttttagttgatatcccgtattcatttttgaaagccattccttaatgctagtttgatacacactaaaagtttagcttacaagttcaaattctgccagcttttcctgacagctatttgcatt

SEQ ID NO: 474317 - DNA, 79 bp, Artificial Sequence
  ENSG00000160131_14 (sequence is synthesized)
gttcaaattctgccagcttttcctgacagctatttgcatttttttcagatgagtgattattggccattttctttttctt

SEQ ID NO: 474318 - DNA, 120 bp, Artificial Sequence
  ENSG00000160131_15 (sequence is synthesized)
ccattttctaaataagcacattctatctttattctcttaaaattcaaattttctgttactgataatcctaatactaggattcttgcttaagtatgtgaaaccattaccgatttgttgttc

SEQ ID NO: 474319 - DNA, 120 bp, Artificial Sequence
  ENSG00000160131_16 (sequence is synthesized)
acatttattttttatgttgtgaaactggactaaaggaatagagggatgattagtcataaaagtcaaatagcatttgtgtttaactgttgagaaaagtgaaagatcagtatgattattatg

SEQ ID NO: 474320 - DNA, 120 bp, Artificial Sequence
  ENSG00000160131_17 (sequence is synthesized)
agtataatgacatttgagtctagggtagtatgtggtagatttctagatggtccctaattaagaagtattgttgtatttagaattgtccacctaatttctttttatataatgccaaggtat

SEQ ID NO: 474321 - DNA, 120 bp, Artificial Sequence
  ENSG00000160131_18 (sequence is synthesized)
ttcttgtgcttttgggatcttatgctgtttgtaaaatgttactgtccaatgttggattattgttttggtttcaggcatttgctgaataggtgatgatacatgggtatttttctgcaagta

SEQ ID NO: 474322 - DNA, 120 bp, Artificial Sequence
  ENSG00000160131_19 (sequence is synthesized)
tttaaaccaggggcatatgcaaaggcagttgtaatttcctcttggaaaaagcgccaaatgtttgaaggttaaaatcaaatgctagggttgatatttaggcttataacaaaataggcttgt

SEQ ID NO: 474323 - DNA, 120 bp, Artificial Sequence
  ENSG00000160131_20 (sequence is synthesized)
tttcaaagcagttttttcctagagttttaactgttaactcactagtttgctgctgtttttaactatgttaaataacatatggtatttggcaaatagatttatttttcaaaatgtctcact

SEQ ID NO: 474324 - DNA, 120 bp, Artificial Sequence
  ENSG00000160131_21 (sequence is synthesized)
agtttccttttacacaatgtatatacttcaagatgtatagaaaggaaagctacagttgagcccttatacatgttttaaggtagaaatatgttccctattgtttgaaaactgattgtaaga

SEQ ID NO: 474325 - DNA, 120 bp, Artificial Sequence
  ENSG00000160131_22 (sequence is synthesized)
ataacctcagttaggagatataacttgaagtgtcagtccaaactactgatttaaccctatttacggtaacacattaccttcctcacctcctgtttggccctggagaatgtagtccttttt

SEQ ID NO: 474326 - DNA, 120 bp, Artificial Sequence
  ENSG00000160131_23 (sequence is synthesized)
ctcatttgtgttgagaaatgaaaagtctgctgtagaatgtatctgatgtcattagttcttcaaatggataccattgtacatataacagtagaatttggtttggggttgttagtgaaaaaa

SEQ ID NO: 474327 - DNA, 120 bp, Artificial Sequence
  ENSG00000160131_24 (sequence is synthesized)
tggggttgttagtgaaaaaaaatttaaacctgccattaaaaatccccatgtttcatggaaatctaacagaaatacattgtaataattagaacattttgttttcttttttctttttttttt

SEQ ID NO: 474328 - DNA, 68 bp, Artificial Sequence
  ENSG00000160131_25 (sequence is synthesized)
ttcttttttctttttttttttttcgagacggagttttgcccttcttgcccaggctggagtgcaagggc

SEQ ID NO: 474329 - DNA, 120 bp, Artificial Sequence
  ENSG00000160131_26 (sequence is synthesized)
tacaggtatcagccaccgtgcctggcctaataattggaacattttcatcatgaaaatgtcatcagctttgccaaaagaaacaaccaattgacttgtttggcgtttgttttccattttcat

SEQ ID NO: 474330 - DNA, 120 bp, Artificial Sequence
  ENSG00000160131_27 (sequence is synthesized)
gtcaattttatgtatacagttagaatacccaaggagaccactaaaatcagttaaacaagtagggtatatacaaagaaagatgaaacccgaaagtacataaaaaggatttaaatccgattt

SEQ ID NO: 474331 - DNA, 120 bp, Artificial Sequence
  ENSG00000160131_28 (sequence is synthesized)
tagatgtacctagtgtgtatttcttatctctagacaagttcatgtttattgtttaatttatgcccaagtgaagttgtaaacttatggttcaactctgacacagaatttgtcacttgtctg

SEQ ID NO: 474332 - DNA, 120 bp, Artificial Sequence
  ENSG00000160131_29 (sequence is synthesized)
aggtcagtggcaggtttctctgctgtcaagcactctgtgtcacccaccagattagtataactattaattcagactgtactcctatgtttaagataatttttacaagagctggctgaagca

SEQ ID NO: 474333 - DNA, 120 bp, Artificial Sequence
  ENSG00000160131_30 (sequence is synthesized)
gcacattagtaacctgacaagatttctttttcccttttcagggggaaagggtcaccttaaaaataaattattttcagggactttgggaatctaatgataaatattacacataatctatga

SEQ ID NO: 474334 - DNA, 120 bp, Artificial Sequence
  ENSG00000160131_31 (sequence is synthesized)
atagcttaatcctttatatattccttaaaataggaattcctcgacatcactcctggccacactttccttgcctgtgttgttgctatgtgtatttgaaagtaatatctgcattccttttaa

SEQ ID NO: 474335 - DNA, 120 bp, Artificial Sequence
  ENSG00000160131_32 (sequence is synthesized)
gatgttctgtaagtcatatttgtcagttatacagagtagtcttccttttccccacgttcagtgtaatctcactgaacagtaataatagcaatagctaacaacatctgcacagcaccttac

SEQ ID NO: 474336 - DNA, 120 bp, Artificial Sequence
  ENSG00000160131_33 (sequence is synthesized)
agtttgcaaagaacgttcacacattctcatttgagttttgcatagtgaacctgttacgagatgtctcttgacgtcgatgctaaaagtgttagaatctttacatcactagagtcattgaat

SEQ ID NO: 474337 - DNA, 120 bp, Artificial Sequence
  ENSG00000160131_34 (sequence is synthesized)
atgctgtagtattgaatagtgccctgactagggggaggatttggatgtgctgcatttcaagccgtgtataatcatcaaaatggggggcttgagttctttagctacttgaatccgatttac

SEQ ID NO: 474338 - DNA, 120 bp, Artificial Sequence
  ENSG00000160131_35 (sequence is synthesized)
ttctgttaagtgatgcttttctaaccgttttctggatggattttgtattcactatattgtagcttgtaatttgtataaatgtaccatctgatgtcattaaaaaaagtgtttgtagtgcta

SEQ ID NO: 474339 - DNA, 120 bp, Artificial Sequence
  ENSG00000160131_36 (sequence is synthesized)
gggtcactggcatcgagtctggaacagtcattctcagcaagagctctttgaactctgacattctctagttttacggactcggcaccacagccctctggctggtagtccctcttcgcggct

SEQ ID NO: 474340 - DNA, 120 bp, Artificial Sequence
  ENSG00000160131_37 (sequence is synthesized)
catatgctcgggtctccttgcggcccccagctcagcgaccgagacgcagacgaggaccagtgttcacgcgagttcagggggcggcgtagccgccgcccgcccaggaggaccatgttgcgc

SEQ ID NO: 474341 - DNA, 120 bp, Artificial Sequence
  ENSG00000160131_38 (sequence is synthesized)
ggctttctgagcagctgcaaaatatgtttttaacttttaagtggaagttgggggtcactggcatcgagtctggaacagtcattctcagcaagagctctttgaactctgacattctctagt

SEQ ID NO: 474342 - DNA, 120 bp, Artificial Sequence
  ENSG00000160145_0 (sequence is synthesized)
gcaggcatttgcttagagcaggctgtgtgcgagcccagcgtcaagtgattccggcctcctcgagtcagcggtggtgggatgaggctctgccgaggggactggctgtgaaggatgagttca

SEQ ID NO: 474343 - DNA, 120 bp, Artificial Sequence
  ENSG00000160145_1 (sequence is synthesized)
gggtgggatgacggaccgcttctgggaccagtggtatctctggtatctccgcttgctccggctgctggatcgagggtcttttcggaatgatggtttgaaagcttctgatgtccttcctat

SEQ ID NO: 474344 - DNA, 120 bp, Artificial Sequence
  ENSG00000160145_2 (sequence is synthesized)
cctaaaggaaaaggtggccttcgtgtctgggggtcgtgataagcgaggcggacccatcctgaccttccctgctcgcagcaatcatgacagaataagacaggaagacctgcggaaactcgt

SEQ ID NO: 474345 - DNA, 120 bp, Artificial Sequence
  ENSG00000160145_3 (sequence is synthesized)
gacgtatttggccagcgtgccaagtgaggacgtgtgcaaacgtggcttcactgtcatcatcgacatgcggggctccaagtgggacctcatcaagcccctcctcaaaacgctgcaggaagc

SEQ ID NO: 474346 - DNA, 120 bp, Artificial Sequence
  ENSG00000160145_4 (sequence is synthesized)
ctttccagctgagatccatgtggccctcatcattaaacccgacaacttctggcagaaacagaagaccaactttggcagctccaaattcatctttgagacgagcatggtatctgtggaggg

SEQ ID NO: 474347 - DNA, 120 bp, Artificial Sequence
  ENSG00000160145_5 (sequence is synthesized)
cctcacaaagctggtggacccctcccagctgacggaggagtttgatggctccctggactacaaccatgaggagtggatcgaactgcggctctccctggaggagttcttcaacagcgccgt

SEQ ID NO: 474348 - DNA, 120 bp, Artificial Sequence
  ENSG00000160145_6 (sequence is synthesized)
gcacctgctctcgcgcctcgaggacctccaggagatgctagcccggaaggagtttcctgtggatgtggagggctctcggcggctcattgacgaacacacacagctcaagaaaaaggtgct

SEQ ID NO: 474349 - DNA, 120 bp, Artificial Sequence
  ENSG00000160145_7 (sequence is synthesized)
gaaggcccctgtggaggagctggaccgggaggggcagcggctgctgcagtgcatccgctgcagcgacggcttctcaggacgcaactgcatcccgggcagtgctgacttccagagcctggt

SEQ ID NO: 474350 - DNA, 120 bp, Artificial Sequence
  ENSG00000160145_8 (sequence is synthesized)
gcccaagatcaccagtctcctggacaagctgcactccacccggcagcacctgcaccagatgtggcatgtgcgcaagctcaagctggaccagtgctttcagctgcggctcttcgagcagga

SEQ ID NO: 474351 - DNA, 120 bp, Artificial Sequence
  ENSG00000160145_9 (sequence is synthesized)
tgctgagaagatgtttgactggataagccacaacaaggagttattcctccagagccacacggagatcggagtcagctaccagtacgcccttgacctccagacgcagcacaatcactttgc

SEQ ID NO: 474352 - DNA, 120 bp, Artificial Sequence
  ENSG00000160145_10 (sequence is synthesized)
catgaactccatgaatgcctatgtcaacatcaaccgcatcatgtccgtggcttcccgcctctctgaggccggtcattatgcctcacaacaaatcaagcagatctccacccagctggacca

SEQ ID NO: 474353 - DNA, 120 bp, Artificial Sequence
  ENSG00000160145_11 (sequence is synthesized)
ggagtggaagagcttcgctgctgccctggatgaacgcagcaccatcctcgccatgtctgctgtgttccaccagaaggctgagcagttcctgtcgggagtggatgcctggtgcaagatgtg

SEQ ID NO: 474354 - DNA, 120 bp, Artificial Sequence
  ENSG00000160145_12 (sequence is synthesized)
cagtgaaggtggtctgccatccgagatgcaagacctagagctggcaatccaccaccaccagaccttgtatgagcaggtgacccaagcctacacagaggtcagccaggatggcaaagcact

SEQ ID NO: 474355 - DNA, 120 bp, Artificial Sequence
  ENSG00000160145_13 (sequence is synthesized)
acttgatgtgctgcagcggcccctgagccctgggaactccgaatccctcacggccacagccaactactccaaggcagtgcaccaggtgctggacgtggtgcatgaggtgttacatcacca

SEQ ID NO: 474356 - DNA, 120 bp, Artificial Sequence
  ENSG00000160145_14 (sequence is synthesized)
gcgacggctggagagcatctggcagcaccgcaaggtgcggctccaccagcggctgcagctctgcgtcttccagcaggatgtacagcaggtgttggactggattgaaaaccatggtgaggc

SEQ ID NO: 474357 - DNA, 120 bp, Artificial Sequence
  ENSG00000160145_15 (sequence is synthesized)
ctttctcagcaaacacactggagttgggaagtccctacatcgagcccgggccctgcagaagaggcatgatgactttgaagaggtggctcagaatacgtacaccaatgcggacaagctcct

SEQ ID NO: 474358 - DNA, 120 bp, Artificial Sequence
  ENSG00000160145_16 (sequence is synthesized)
agaagcagcagagcagttggctcagacgggggaatgtgaccccgaggagatctacaaggcagctcgacacctggaggtgcgcatccaagacttcgtgcgcagggtggagcagcggaagct

SEQ ID NO: 474359 - DNA, 120 bp, Artificial Sequence
  ENSG00000160145_17 (sequence is synthesized)
tctcctggacatgtctgtttccttccacacacacaccaaagagttgtggacatggatggaagaccttcagaaggagatgttggaggatgtctgtgcagattctgtggatgcagtccagga

SEQ ID NO: 474360 - DNA, 120 bp, Artificial Sequence
  ENSG00000160145_18 (sequence is synthesized)
actgatcaagcagttccagcagcagcagaccgccactctagatgccacactcaatgtcatcaaggaaggcgaagaccttatccagcagctcaggtcagcgcctccctccctcggggagcc

SEQ ID NO: 474361 - DNA, 120 bp, Artificial Sequence
  ENSG00000160145_19 (sequence is synthesized)
cagcgaggccagggactcggctgtgtccaacaacaaaacaccccacagcagctccatcagccacatcgagtcggtcctgcagcagcttgatgatgcccaggtgcagatggaggagctgtt

SEQ ID NO: 474362 - DNA, 120 bp, Artificial Sequence
  ENSG00000160145_20 (sequence is synthesized)
ccacgagcggaagatcaagctggacatcttcctgcaactgcgcatctttgagcagtacaccatcgaggtgacagcagagctagacgcctggaatgaagacttgcttcggcagatgaatga

SEQ ID NO: 474363 - DNA, 120 bp, Artificial Sequence
  ENSG00000160145_21 (sequence is synthesized)
cttcaacacagaggacctaaccctggcagaacagcggctgcagcgccacacagaacggaagctagccatgaacaacatgacctttgaggttatccagcagggacaggatctgcaccagta

SEQ ID NO: 474364 - DNA, 120 bp, Artificial Sequence
  ENSG00000160145_22 (sequence is synthesized)
catcacggaggtccaggcatcaggaattgagttgatctgtgaaaaagacattgatctggcagcccaggtgcaagagttattggaatttctccatgagaagcagcatgaattggagctcaa

SEQ ID NO: 474365 - DNA, 120 bp, Artificial Sequence
  ENSG00000160145_23 (sequence is synthesized)
tgcagagcagactcataagcggctagagcagtgcctccaattacgtcacctccaggctgaagtcaaacaggttctgggatggatccgcaatggagagtcaatgctcaacgccagcctggt

SEQ ID NO: 474366 - DNA, 120 bp, Artificial Sequence
  ENSG00000160145_24 (sequence is synthesized)
caatgccagctctttgtcggaagcagagcagctgcagcgggagcacgagcagttccaactggccatcgagtccctctttcatgccacttccttgcagaagacgcaccagagtgccctgca

SEQ ID NO: 474367 - DNA, 120 bp, Artificial Sequence
  ENSG00000160145_25 (sequence is synthesized)
ggtacagcagaaagccgaggtgctgctccaggccggccactacgatgccgatgccatccgggaatgtgctgagaaggtggccctccactggcagcagctcatgctgaagatggaagaccg

SEQ ID NO: 474368 - DNA, 120 bp, Artificial Sequence
  ENSG00000160145_26 (sequence is synthesized)
gctaaaattggtcaatgcctctgtggccttttacaaaacttctgaacaggtgtgtagtgtcctggagagcttagagcaagaataccggagagatgaggactggtgtggtggacgagataa

SEQ ID NO: 474369 - DNA, 120 bp, Artificial Sequence
  ENSG00000160145_27 (sequence is synthesized)
gctggggccagcagcagagatcgaccatgtcattcccctcatcagcaaacatttggaacaaaaggaggcctttcttaaggcctgcaccctggctcggcggaatgctgaggtgtttctcaa

SEQ ID NO: 474370 - DNA, 120 bp, Artificial Sequence
  ENSG00000160145_28 (sequence is synthesized)
gtacatccacaggaacaacgtcagcatgcccagtgtcgccagccacactcggggacccgagcaacaagtgaaagccatcctgagtgagctcctgcagagggagaatcgcgtgctgcattt

SEQ ID NO: 474371 - DNA, 120 bp, Artificial Sequence
  ENSG00000160145_29 (sequence is synthesized)
ctggaccttgaagaagcggcggttagaccaatgccagcaatatgtggtgttcgagcgcagcgctaagcaggcgcttgactggatccaagaaacaggtgaattttacctctcaacacatac

SEQ ID NO: 474372 - DNA, 120 bp, Artificial Sequence
  ENSG00000160145_30 (sequence is synthesized)
ctccactggagagaccacagaggagactcaggaactgctgaaagaatatggggaattcagggtgcctgccaagcaaacaaaggagaaggtgaagcttctgattcagctggccgatagctt

SEQ ID NO: 474373 - DNA, 120 bp, Artificial Sequence
  ENSG00000160145_31 (sequence is synthesized)
tgtggaaaaaggccacattcatgccacggagataaggaaatgggtgaccacggtggacaagcactacagagatttctccctgaggatgggaaagtaccgatactcactggagaaagccct

SEQ ID NO: 474374 - DNA, 120 bp, Artificial Sequence
  ENSG00000160145_32 (sequence is synthesized)
aggagtcaacacagaggataataaggacctggagctggatattatcccagcaagcctttcggatcgggaggtcaagctgcgggacgccaaccacgaagtcaatgaagagaagcggaagtc

SEQ ID NO: 474375 - DNA, 120 bp, Artificial Sequence
  ENSG00000160145_33 (sequence is synthesized)
agcccggaagaaagaatttattatggctgaactactccagacagagaaggcttatgtaagggatttgcatgagtgcttagagacctacctgtgggaaatgaccagtggtgtggaggagat

SEQ ID NO: 474376 - DNA, 120 bp, Artificial Sequence
  ENSG00000160145_34 (sequence is synthesized)
cccccctgggatcctcaataaagagcatatcatctttggcaacatccaagagatctacgatttccataacaacatcttcctcaaagagctggagaagtacgagcaactgcctgaggatgt

SEQ ID NO: 474377 - DNA, 120 bp, Artificial Sequence
  ENSG00000160145_35 (sequence is synthesized)
gggacactgctttgttacctgggcagacaaatttcagatgtatgtcacctactgtaaaaacaagcctgattccaaccagcttatcctggagcatgcgggcaccttctttgatgagataca

SEQ ID NO: 474378 - DNA, 120 bp, Artificial Sequence
  ENSG00000160145_36 (sequence is synthesized)
acagcggcatggtctggccaactccatctcttcctacctaattaagcctgtccaaaggatcaccaaatatcaactgctcctgaaggaacttttaacttgctgtgaagaagggaaagggga

SEQ ID NO: 474379 - DNA, 120 bp, Artificial Sequence
  ENSG00000160145_37 (sequence is synthesized)
gctcaaggatggcctggaggtgatgctcagtgtcccaaagaaagccaatgatgccatgcatgtcagcatgctggaagggttcgacgagaacctggatgtgcagggggagttgattctcca

SEQ ID NO: 474380 - DNA, 120 bp, Artificial Sequence
  ENSG00000160145_38 (sequence is synthesized)
ggatgcctttcaagtgtgggacccgaagtcgctgatccggaaggggcgggagcggcacttgttcctctttgagatctccttggtttttagcaaggagatcaaagattcttcaggacacac

SEQ ID NO: 474381 - DNA, 120 bp, Artificial Sequence
  ENSG00000160145_39 (sequence is synthesized)
gaaatatgtttacaagaacaagctactgacctcagagctgggtgtgaccgagcacgtggagggcgatccctgcaaattcgccttgtggtctgggcgcaccccatcctcagacaataaaac

SEQ ID NO: 474382 - DNA, 120 bp, Artificial Sequence
  ENSG00000160145_40 (sequence is synthesized)
agtgctgaaagcctccaacattgaaaccaagcaggagtggatcaagaacattcgagaagtgattcaagaaaggatcattcacctgaaaggagctttaaaggagccacttcagctccccaa

SEQ ID NO: 474383 - DNA, 120 bp, Artificial Sequence
  ENSG00000160145_41 (sequence is synthesized)
aacaccagccaaacagaggaacaatagtaagagggatggagtggaggatattgacagccagggggatgggagcagccaaccagacaccatctccattgcttctaggacctctcagaacac

SEQ ID NO: 474384 - DNA, 120 bp, Artificial Sequence
  ENSG00000160145_42 (sequence is synthesized)
agtggacagtgacaagctctctggtggatgtgagctgacagtggtcctccaggacttcagtgcgggccacagcagtgagctgaccatccaggtggggcagacggtagagctgctggagcg

SEQ ID NO: 474385 - DNA, 120 bp, Artificial Sequence
  ENSG00000160145_43 (sequence is synthesized)
gcccagcgagcggcctggttggtgtctggtccgtaccaccgaacggagcccgcccttggagggtctggtccccagcagcgccctgtgcatctcacactcccgaagcagcgtggagatgga

SEQ ID NO: 474386 - DNA, 120 bp, Artificial Sequence
  ENSG00000160145_44 (sequence is synthesized)
ctgcttcttccccttggtgaaagatgcatactctcattcctcaagcgagaatggaggcaagtccgagtccgtggccaacctgcaggcccagccctccctgaactccatccacagttcccc

SEQ ID NO: 474387 - DNA, 120 bp, Artificial Sequence
  ENSG00000160145_45 (sequence is synthesized)
caagcgctccaccaacactcttaagaagtggctgacgagtcctgtgcgtcggcttaacagcgggaaggcagatggaaacatcaaaaagcagaagaaagttcgcgatggtcggaagagctt

SEQ ID NO: 474388 - DNA, 120 bp, Artificial Sequence
  ENSG00000160145_46 (sequence is synthesized)
tgacctgggatctcccaagcctggggatgaaacaacccctcagggagacagcgctgatgagaagagcaagaaaggttggggtgaagatgagccggatgaagagtcacacacacccctccc

SEQ ID NO: 474389 - DNA, 120 bp, Artificial Sequence
  ENSG00000160145_47 (sequence is synthesized)
accacctatgaagatttttgacaacgaccctacacaggatgaaatgtcctcctctttgctagcagcccggcaggcttccactgaagtacctactgctgcagaccttgtcaatgcaataga

SEQ ID NO: 474390 - DNA, 120 bp, Artificial Sequence
  ENSG00000160145_48 (sequence is synthesized)
aaagttggtcaaaaacaagctgagtctagaaggaagctcataccgggggagcttgaaagaccctgcaggctgcctgaatgaggggatggccccacccacacctcctaaaaacccagaaga

SEQ ID NO: 474391 - DNA, 120 bp, Artificial Sequence
  ENSG00000160145_49 (sequence is synthesized)
agaacagaaagccaaggccctgagaggcaggatgtttgtcctgaatgagctggtacagacagagaaagactatgtcaaggatctgggcattgtggtggagggcttcatgaagagaataga

SEQ ID NO: 474392 - DNA, 120 bp, Artificial Sequence
  ENSG00000160145_50 (sequence is synthesized)
agaaaagggtgtccctgaggatatgcgaggaaaggacaaaatcgtgtttggaaatattcatcagatttatgactggcataaggattttttcctggcggaactggaaaagtgtatccagga

SEQ ID NO: 474393 - DNA, 120 bp, Artificial Sequence
  ENSG00000160145_51 (sequence is synthesized)
gcaagacagattggcacagctctttattaagcacgagcggaagctgcacatctacgtgtggtattgtcagaataagccgcgctcagagtacatcgttgctgagtatgacgcctactttga

SEQ ID NO: 474394 - DNA, 120 bp, Artificial Sequence
  ENSG00000160145_52 (sequence is synthesized)
ggaggtaaaacaggagataaatcagaggctgacactgagtgacttcctcatcaagcccattcagagaataacaaaataccagttgctcctcaaggacttcctgagatacagtgagaaggc

SEQ ID NO: 474395 - DNA, 120 bp, Artificial Sequence
  ENSG00000160145_53 (sequence is synthesized)
tggtttggagtgttcagatattgagaaagcagtggagttaatgtgccttgttcccaaacgctgcaatgacatgatgaatctaggacgtctgcagggctttgagggcactctgactgctca

SEQ ID NO: 474396 - DNA, 120 bp, Artificial Sequence
  ENSG00000160145_54 (sequence is synthesized)
ggggaagctgctgcagcaggacacattctatgtgatcgagctggatgcaggcatgcagtcccggaccaaagagaggcgcgtgttcctcttcgagcagattgtcatcttcagtgaactgct

SEQ ID NO: 474397 - DNA, 120 bp, Artificial Sequence
  ENSG00000160145_55 (sequence is synthesized)
caggaagggatccctcacccctggctacatgttcaaaaggagcatcaagatgaattacttggtcctggaggagaatgtggacaatgatccctgcaagtttgcactcatgaacagagagac

SEQ ID NO: 474398 - DNA, 120 bp, Artificial Sequence
  ENSG00000160145_56 (sequence is synthesized)
ttctgagagggttgttctgcaagccgccaacgctgacatccagcaggcctgggtgcaggacatcaatcaagtcttagaaacacagcgagactttttgaatgcactgcaatcgcccattga

SEQ ID NO: 474399 - DNA, 120 bp, Artificial Sequence
  ENSG00000160145_57 (sequence is synthesized)
gtatcaacggaaagaaaggagcacagctgtgatgaggtctcaacctgccaggcttccccaagccagccccaggccctactcctctgttcctgcgggctcagagaagcccccaaagggctc

SEQ ID NO: 474400 - DNA, 120 bp, Artificial Sequence
  ENSG00000160145_58 (sequence is synthesized)
cagctataacccacctctgcctcccctgaagatatctacctccaatggcagtccagggtttgaataccaccagcctggggacaagttcgaagccagcaagcagaacgacctgggaggctg

SEQ ID NO: 474401 - DNA, 120 bp, Artificial Sequence
  ENSG00000160145_59 (sequence is synthesized)
caatgggacctcgtccatggccgtgatcaaagattactatgcactgaaggagaatgaaatctgtgtgagccaaggtgaggtggtccaggtcctcgccgtcaaccagcagaacatgtgtct

SEQ ID NO: 474402 - DNA, 120 bp, Artificial Sequence
  ENSG00000160145_60 (sequence is synthesized)
ggtgtaccagcctgccagcgaccattcccccgccgccgagggctgggtcccaggcagcatcctggcgcccctcaccaaagccacagcagcagaaagtagtgacgggagcatcaagaagtc

SEQ ID NO: 474403 - DNA, 120 bp, Artificial Sequence
  ENSG00000160145_61 (sequence is synthesized)
atgttcatggcatactctacgcatgagaaagcgggcggaagtggagaacacgggtaaaaatgaagccacagggcctcgtaaacccaaggatattctgggcaacaaagtctctgttaaaga

SEQ ID NO: 474404 - DNA, 120 bp, Artificial Sequence
  ENSG00000160145_62 (sequence is synthesized)
gacgaacagttccgaggaatcagagtgtgatgatcttgaccctaatactagcatggagatcttaaatccaaatttcatccaagaagtggccccagaattccttgtgcccttggtggatgt

SEQ ID NO: 474405 - DNA, 120 bp, Artificial Sequence
  ENSG00000160145_63 (sequence is synthesized)
gacctgcttgcttggggacacagtgatactgcagtgcaaagtctgtgggcggccaaagcccaccatcacttggaagggtccagaccagaacatccttgacactgataacagctcagccac

SEQ ID NO: 474406 - DNA, 120 bp, Artificial Sequence
  ENSG00000160145_64 (sequence is synthesized)
atacacggtctcctcttgtgattctggagaaatcaccctgaagatctgtaatctgatgccccaagacagtgggatttatacctgcatagcaacaaatgaccacgggaccacatcaacgtc

SEQ ID NO: 474407 - DNA, 120 bp, Artificial Sequence
  ENSG00000160145_65 (sequence is synthesized)
tgcaacagtcaaagtgcaaggtgttccagcagcccctaaccgccccattgcccaggagagaagctgcacctccgtgattctccgctggctgcccccctccagcacaggaaactgcactat

SEQ ID NO: 474408 - DNA, 120 bp, Artificial Sequence
  ENSG00000160145_66 (sequence is synthesized)
ttctggttacactgtggagtacagagaggaaggttctcagatctggcagcagtcagtggcttcgaccttggacacttacctcgtcatcgaagaccttagtcccgggtgtccttatcagtt

SEQ ID NO: 474409 - DNA, 120 bp, Artificial Sequence
  ENSG00000160145_67 (sequence is synthesized)
cagagtcagtgccagtaacccctggggaatcagccttcccagcgagccctcggagtttgtgcgacttccagaatatgatgctgctgctgatggtgccaccatttcttggaaggaaaattt

SEQ ID NO: 474410 - DNA, 120 bp, Artificial Sequence
  ENSG00000160145_68 (sequence is synthesized)
tgactcagcttacactgagctgaatgaaattggaagaggccgtttctctatagtaaagaaatgcattcacaaagctacccgcaaagatgtggctgtgaaatttgttagcaaaaaaatgaa

SEQ ID NO: 474411 - DNA, 120 bp, Artificial Sequence
  ENSG00000160145_69 (sequence is synthesized)
gaagaaagaacaggctgcccacgaggctgccctgcttcagcacctacagcacccccagtacatcactctccatgacacctatgagtcccccacatcctacatcctgatcttggaactgat

SEQ ID NO: 474412 - DNA, 120 bp, Artificial Sequence
  ENSG00000160145_70 (sequence is synthesized)
ggatgatggccggctcttagactaccttatgaatcatgatgaactgatggaggaaaaagtagctttctatatccgagacatcatggaggctctgcagtaccttcacaactgcagggttgc

SEQ ID NO: 474413 - DNA, 120 bp, Artificial Sequence
  ENSG00000160145_71 (sequence is synthesized)
acatttggacataaagcctgaaaacctgctcattgacctacggattccagtgcctcgagtgaagctcattgacttggaggatgctgtccagatctcgggtcacttccacattcaccacct

SEQ ID NO: 474414 - DNA, 120 bp, Artificial Sequence
  ENSG00000160145_72 (sequence is synthesized)
gctggggaaccctgagtttgctgccccagaagtcattcaaggcatccccgtctccctggggacagacatctggagcatcggggttctgacatatgtcatgctgagtggggtctccccctt

SEQ ID NO: 474415 - DNA, 120 bp, Artificial Sequence
  ENSG00000160145_73 (sequence is synthesized)
cttggatgagagcaaagaggagacatgtatcaacgtatgcagggtggatttcagcttcccccatgaatacttctgtggtgtgagcaatgctgccagagatttcatcaatgtgatcttaca

SEQ ID NO: 474416 - DNA, 120 bp, Artificial Sequence
  ENSG00000160145_74 (sequence is synthesized)
ggaagattttcggaggcggcccacagcagccacatgcttgcagcatccatggctgcagccccataatggcagctactctaagatccccctggacacctcccgcctagcatgcttcataga

SEQ ID NO: 474417 - DNA, 120 bp, Artificial Sequence
  ENSG00000160145_75 (sequence is synthesized)
acgtcgcaagcaccagaatgatgtgcggcctattcccaatgtcaagagctacattgtcaaccgggtgaaccaagggacgtagccatctcccagcccctatggtttcacatagacgtgcag

SEQ ID NO: 474418 - DNA, 120 bp, Artificial Sequence
  ENSG00000160145_76 (sequence is synthesized)
tgtgaaccaaagcaagactgaatgtgactgtaaataattctgttcatcatttcactccgtgcagttctctgaattgagagatgtacctcttaaacctcgtcagtggttattcagggtctg

SEQ ID NO: 474419 - DNA, 120 bp, Artificial Sequence
  ENSG00000160145_77 (sequence is synthesized)
agcagcagtaaaagtcaccctaaatcaaggggcttttcagaaggtcattctgaagaaataaagaggcaaagggtcacagaagtgttcagaagaagggcaaagataagaacaatattagct

SEQ ID NO: 474420 - DNA, 120 bp, Artificial Sequence
  ENSG00000160145_78 (sequence is synthesized)
gttacgaaattttaactgtatcttccaaaatgagtggttaactgggcaaaccttaagctcacaagagtataaaagatctctggctttgctgaaattttaagcaagaagttctatttaatg

SEQ ID NO: 474421 - DNA, 120 bp, Artificial Sequence
  ENSG00000160145_79 (sequence is synthesized)
gagatgtcatgtatatcaactattctggtttagataacttagatatagtttcttaataggatagatacccacatacagtataatatatcccattcaggtttcagagttttctaatataga

SEQ ID NO: 474422 - DNA, 120 bp, Artificial Sequence
  ENSG00000160145_80 (sequence is synthesized)
gatatatatattaaatcaatcacaagtaattttgagtgctccagttaagacagtaatttatttaccgaatcattacattgttttgactaagcacaattagatgacaagtttttttagagc

SEQ ID NO: 474423 - DNA, 120 bp, Artificial Sequence
  ENSG00000160145_81 (sequence is synthesized)
attttatagatcttgtatagaaatcttttaccagaacctgtgcattaagagaaagcaatgttgcccttttgaatgagaaaattttttctgtcaatcgcaggttatttgattaagataggt

SEQ ID NO: 474424 - DNA, 120 bp, Artificial Sequence
  ENSG00000160145_82 (sequence is synthesized)
tctttctgtatatgaaacgctccccgcaaattcactggcagctcagaattattctggaaagaaagcctgccaggaaataaattcaaatacagtatgagctgcggggatatttttgtgtct

SEQ ID NO: 474425 - DNA, 120 bp, Artificial Sequence
  ENSG00000160145_83 (sequence is synthesized)
acaccaggtttgaaataagtaaacaaatacaagaggttcatataaaagggcaaatgaaaacctttcctacagttcctatgaacaacgtaccaacactttctgatttcttctacagctgta

SEQ ID NO: 474426 - DNA, 120 bp, Artificial Sequence
  ENSG00000160145_84 (sequence is synthesized)
gaataccatctttcagaaagttggctggctttatttctaactccttattgaagctaaggggtgcttactaaaaggaggcagccatataggccttttaaaggcctggttctaagtcctttt

SEQ ID NO: 474427 - DNA, 120 bp, Artificial Sequence
  ENSG00000160145_85 (sequence is synthesized)
taaagccatggaacaaaacctgatacatcaccctaacagagcattaagttgtaactgagattgcaatacctgtcaccatgcagccgctgatagttctctgaactaaaaggactaattgta

SEQ ID NO: 474428 - DNA, 120 bp, Artificial Sequence
  ENSG00000160145_86 (sequence is synthesized)
ctttgaggccaatgctgctttctggtgtatattctccatacaagattattattaactgctctttttccctctggtggaaaaaaaattaaacctgggcatttcatgggttttctttcttta

SEQ ID NO: 474429 - DNA, 120 bp, Artificial Sequence
  ENSG00000160145_87 (sequence is synthesized)
tttttgttcatttgttttggagggagggagcttgttttttgtgtttgtacatgatccacccttagttttctagaatgtgtgttgaaaattgcgattatacaagtaagattttaaaaatgt

SEQ ID NO: 474430 - DNA, 120 bp, Artificial Sequence
  ENSG00000160145_88 (sequence is synthesized)
aactcaagtgtttgttcaaatcaggtttaatggtgttgcttctctcctataatgggatagagaaaattaaaatcacgtagtacagaagtgcaagaagagaatttatgaaggatgaataga

SEQ ID NO: 474431 - DNA, 120 bp, Artificial Sequence
  ENSG00000160145_89 (sequence is synthesized)
actacaaacctatctaaatgaaaaagaaatggtggaaactaagcctgaactttaacatataaaaaacacttattcccacagagaaaatgtaaaattaaaaatcatcatctttttttttcc

SEQ ID NO: 474432 - DNA, 120 bp, Artificial Sequence
  ENSG00000160145_90 (sequence is synthesized)
agtgagcactgggatgtggcaaggcagatccctgcttcagagctgcctgggaggactgagctgccagaaccagttcagccccaccacagcccaactcaaattgaaatccactttattatt

SEQ ID NO: 474433 - DNA, 120 bp, Artificial Sequence
  ENSG00000160145_91 (sequence is synthesized)
gggaattactactgcttattctcaacagtaccacagaaccagtgtttgagtgctgacaccatatgcaacatggggcatccgggctggagtgatccagttttttagttggtggtggcgatg

SEQ ID NO: 474434 - DNA, 120 bp, Artificial Sequence
  ENSG00000160145_92 (sequence is synthesized)
atttttctttccttttggtttataattttctgttcatttttccccctttctcccccacattcattaagaaccctactgaaaccctaggtgacaaaaggtgtgccttctgttgccacattt

SEQ ID NO: 474435 - DNA, 120 bp, Artificial Sequence
  ENSG00000160145_93 (sequence is synthesized)
gacccaccacaggactcactggactggacttctatttatattgtattaagtaactgatatatatatatatatatatttttgattgacaccaaaaaattaccttggcacaaatgccagacc

SEQ ID NO: 474436 - DNA, 120 bp, Artificial Sequence
  ENSG00000160145_94 (sequence is synthesized)
tgtgaaggtcagaggcccgctgcttttcccaggagggagggaactttttggttgtctgtggcaattcctctgtacagattgtaactttttaaaaatttcccttcaccccgtcacttgaat

SEQ ID NO: 474437 - DNA, 120 bp, Artificial Sequence
  ENSG00000160145_95 (sequence is synthesized)
atatgttcatagtaatttgtaagatacttcttttccttattttggttgcaagacccttccgaacacattcctgtataaagtattttgcactatttaaagaaacccatatggatgaagtca

SEQ ID NO: 474438 - DNA, 120 bp, Artificial Sequence
  ENSG00000160145_96 (sequence is synthesized)
ggatgtgcaatatgatggcgtcacagtgctcatcgttgtacctgtaatgtaactaatcagtttaaatgtactattttaaatatgtaaaataaattttcaccatgagcatgttttaatgaa

SEQ ID NO: 474439 - DNA, 120 bp, Artificial Sequence
  ENSG00000160145_97 (sequence is synthesized)
gttgcattctatgttgccagtgttcctgctgccagaattggatccaacccattgttccagacaagatcagggcaactagtatggaaaacataacctcaagtatctttgatgtaatctcca

SEQ ID NO: 474440 - DNA, 120 bp, Artificial Sequence
  ENSG00000160145_98 (sequence is synthesized)
cttgtgtgagcttcggtttctttatctgtaagatgtaaaaatgcctgcaccatactcaacttgaatctagaataaaatagtaaatggaaaagctttaatgtttcaaagaattatttatca

SEQ ID NO: 474441 - DNA, 120 bp, Artificial Sequence
  ENSG00000160145_99 (sequence is synthesized)
gggagccggctctcgggcggcggcgctgaagtttccttcccgccgcgctctcaccccgggctggcgccccgtgccatgcgggagcgctggggcggcggggcaacatgaagggcggcgaca

SEQ ID NO: 474442 - DNA, 120 bp, Artificial Sequence
  ENSG00000160145_100 (sequence is synthesized)
cgctggggcggcggggcaacatgaagggcggcgacagggcttacacccgaggtccctctttggggtggctctttgctaagtgctgctgttgcttcccgtgtagagatgcatactctcatt

SEQ ID NO: 474443 - DNA, 120 bp, Artificial Sequence
  ENSG00000160145_101 (sequence is synthesized)
ggttattttttttttttcccagtatgggtaccagaggggaagtagtttagcaggattttgcatgcaagatcaatttattttttatcttttatttctcctggcaacttcaattcaagtaag

SEQ ID NO: 474444 - DNA, 120 bp, Artificial Sequence
  ENSG00000160145_102 (sequence is synthesized)
taccttttttttcttttatacctttctctttatactgtgcagatgttttacagcaaaattatctgcagcattctcttaaaaatgtgagatgcttgattcatattaaatttatcaaagctg

SEQ ID NO: 474445 - DNA, 120 bp, Artificial Sequence
  ENSG00000160145_103 (sequence is synthesized)
ctgctggatcgagctttggcttctttaagaggttttggcaagaatgagatcaaactcctgatggaaaagatggccctggggaagccttgctatacagcccaaggtgtattcatctctgtg

SEQ ID NO: 474446 - DNA, 120 bp, Artificial Sequence
  ENSG00000160145_104 (sequence is synthesized)
aggaatagtcttggtgtgccgggagatcaataccaggtggaagcagacagctgcacagagcaggtgaaacagggcccttatcaggggagaaatcaaagatggaggaaaccaaaccagcac

SEQ ID NO: 474447 - DNA, 120 bp, Artificial Sequence
  ENSG00000160145_105 (sequence is synthesized)
acactaaaagcagtttctcactagcaccgagaaacaggccagtgggagcccagacttgagatgagggcgttaagaagggcatcagaacttcacactgatgaagattatagactgggagaa

SEQ ID NO: 474448 - DNA, 120 bp, Artificial Sequence
  ENSG00000160145_106 (sequence is synthesized)
gggagaagagaccactagatgtgaatcctccttatctttgtgacctcagaaatgcttgaatccatgagtcacaaacttaggctcaagttctggctccattgccttctaagtgcccttgaa

SEQ ID NO: 474449 - DNA, 120 bp, Artificial Sequence
  ENSG00000160145_107 (sequence is synthesized)
taaatggctaagggttagaagacaggtcccagtcttcctaatgaggcattgaaagtctaggtggaatagatgcttgctggagcctgtggatattataaaagaaagagctcactgccttaa

SEQ ID NO: 474450 - DNA, 120 bp, Artificial Sequence
  ENSG00000160145_108 (sequence is synthesized)
tgtggtcaggagaggcaggagtgagagccagtgtgaaggtgtgggagttggaaggaacttggaactcaacttcttttggcccctcaacttgagattcacaaagaaaaaaagcaatgtctc

SEQ ID NO: 474451 - DNA, 120 bp, Artificial Sequence
  ENSG00000160145_109 (sequence is synthesized)
ctcgctgaaagcaaaatggaagctcctccttgcacagtgcagccccttcctcactgtaggttattccaagtgagaagagtaaacatgacttctaaatgccatctaacgatatatgcatat

SEQ ID NO: 474452 - DNA, 120 bp, Artificial Sequence
  ENSG00000160145_110 (sequence is synthesized)
ctaaaggagacaaggatgactgaatgcatcttcatgtgtaggaagtgaagtgtctgttgacattaagtacttcttcatgagtgagaggaggcccatgatggagatgacaccagtacctcc

SEQ ID NO: 474453 - DNA, 120 bp, Artificial Sequence
  ENSG00000160145_111 (sequence is synthesized)
ttctagcactctgaattcccaatgtttactactgctgtctctgaaactgcagcatcctcaccaggaccacacagggaacaaaggcaagacacctgaaatccctttagccatattcacaac

SEQ ID NO: 474454 - DNA, 120 bp, Artificial Sequence
  ENSG00000160145_112 (sequence is synthesized)
ctcttggtatcctagtatgagtgcctgaaagtgcacattggctagaaggtttcatgtgagcatcagccccagggtccagaagacactcttggcaagcctggagagtgagtatgttgaaca

SEQ ID NO: 474455 - DNA, 120 bp, Artificial Sequence
  ENSG00000160145_113 (sequence is synthesized)
ggcaatggaagcatccatgaaaggcaggcaactgcgcacgactttccaacagatggctggtcagttgcacagagggaaggagccatggattccatgataatgacacttgtgccagctttt

SEQ ID NO: 474456 - DNA, 120 bp, Artificial Sequence
  ENSG00000160145_114 (sequence is synthesized)
gtgtttccagaagttttgaagatataagggaaccaccacatgtagagtatgtgaagtcttacagagacgaggtcctaaggtatttattttgacaaatcacgttgcaagtaatgtgaaagc

SEQ ID NO: 474457 - DNA, 120 bp, Artificial Sequence
  ENSG00000160145_115 (sequence is synthesized)
agtttgaagaaaaaatgtccccatctaatgctgcattatggcatgcatttctttagcctaaatctgtcagtgacatgaaaatacatgttttgctggacacataataggttgaacacataa

SEQ ID NO: 474458 - DNA, 120 bp, Artificial Sequence
  ENSG00000160145_116 (sequence is synthesized)
taggttctaacatggatctgcataaagaagaaagaagaaaggctataaaggtagaagaataaatgtataaatattacaacaggacactgagctgagtggctctttaccatagaccttgct

SEQ ID NO: 474459 - DNA, 120 bp, Artificial Sequence
  ENSG00000160145_117 (sequence is synthesized)
catagttctcactacaggcttgctctgagccaacttccaagttctctccttctccttccaaacttccctgtatgtcatcttgctcctgggccacctgactgatgtttaatgcctggatat

SEQ ID NO: 474460 - DNA, 120 bp, Artificial Sequence
  ENSG00000160145_118 (sequence is synthesized)
ttgctttcacctctgcatgaccaagccttggccaagtcactgttgactcagttgcaacatctgtcccctgctgagggctgttgtagctttcatagctcacagtccagcttgaatctaacc

SEQ ID NO: 474461 - DNA, 120 bp, Artificial Sequence
  ENSG00000160145_119 (sequence is synthesized)
ttttctgtggtcattcagagtagcaagaagcattgtgttttggatttactgcagaactcacacacttaactgtacacagtcagtttttatagctatcactgcatccagattggacagtga

SEQ ID NO: 474462 - DNA, 120 bp, Artificial Sequence
  ENSG00000160145_120 (sequence is synthesized)
ccttggctgagacatcctttacctctgtttcagattaatttaggcggcatataaaatctctgtgcactgccaggggaaagtaaagacttcatgaagaaatggagaagagccgaatagttg

SEQ ID NO: 474463 - DNA, 120 bp, Artificial Sequence
  ENSG00000160145_121 (sequence is synthesized)
accattgttgctgtataaatcttggatccagggctaaaaggtggcagtataaatgcagatggtgctgctgccatattttcctggcacacctttaagcagcacatttcaagccttcagggt

SEQ ID NO: 474464 - DNA, 120 bp, Artificial Sequence
  ENSG00000160145_122 (sequence is synthesized)
tggaatggcatttccaaatatagactcaaaaaatcctcagatgtttgattctagaatagagctgggaattctgtcctgcaaatgccttctgcagcatgggagcaaacccactcttctgtg

SEQ ID NO: 474465 - DNA, 120 bp, Artificial Sequence
  ENSG00000160145_123 (sequence is synthesized)
tctgttgcttcaaactctctattttctggaaactggagaaagatgtgggtctacattttgaaatatatgccttgaacaagaattatgcacctatagaaaacttgtcatacattgaataaa

SEQ ID NO: 474466 - DNA, 120 bp, Artificial Sequence
  ENSG00000160145_124 (sequence is synthesized)
ctctcagtttacagaaatctatggaaatatcaaaataaaacatcagaaggagcagtaactatagaggttattaactaaggggataacctgaaaaataaagttatatttgctaaaaactgt

SEQ ID NO: 474467 - DNA, 120 bp, Artificial Sequence
  ENSG00000160145_125 (sequence is synthesized)
aactagggttggggataatagaagtgggggtgggcaagtgacacctcaaagctaaggcccagagactctactgagccatgggcctcttttgggaatggcagcatcacgtgggcattgaga

SEQ ID NO: 474468 - DNA, 120 bp, Artificial Sequence
  ENSG00000160145_126 (sequence is synthesized)
agcaaattctatcatgaaagtagacccagaatctcaaagacgcatggtctcctcaagtgcatgcacatgtgtgaccaagagggaagaaagcagggagtggcttgtgggaccagctcagca

SEQ ID NO: 474469 - DNA, 120 bp, Artificial Sequence
  ENSG00000160145_127 (sequence is synthesized)
gctggggtatggaggttctctacgctctccccacttctttccagggacactgcacctctgagaaatcccaggggtggatgaggcacctagctggtgcccgcctgcaggctgctcgcttgc

SEQ ID NO: 474470 - DNA, 120 bp, Artificial Sequence
  ENSG00000160145_128 (sequence is synthesized)
tgagaggcggcgtgccagctccgcgcaccgcgcctcagtgccagatcagggagctgtcagctcagcgcccacgcccctccgcttcagctccggggagccccagggtgggctgctggaagg

SEQ ID NO: 474471 - DNA, 120 bp, Artificial Sequence
  ENSG00000160145_129 (sequence is synthesized)
tgttcctcggtggcacctgggacctggagatcctttctccacttacgtttagcgcgcatcctgggacttgtccctgcagctcaccgggttagccgtggcaccgttgggacctcccaccag

SEQ ID NO: 474472 - DNA, 120 bp, Artificial Sequence
  ENSG00000160145_130 (sequence is synthesized)
gactccaatcacccacctctcttgagacttctctggcagggctggtgtggggtgcagcctttgctcagagggcaacatgttccaagcaaaatctccccgcctgggccatgggctcaccct

SEQ ID NO: 474473 - DNA, 120 bp, Artificial Sequence
  ENSG00000160145_131 (sequence is synthesized)
cggggctcccttcttctctactgggtgcaattcgaggttgctgagcttctctccaaagtctaaaatggtggggcagtagggacctgtgagaggcccaatggcccaatgtacttcccccag

SEQ ID NO: 474474 - DNA, 120 bp, Artificial Sequence
  ENSG00000160145_132 (sequence is synthesized)
atcccactcagaacagcaggtacgcccaggctcctgctgccctagaggtctgcaacatgagtgaagaggttaattagagggacacacttatctctgaagtttttctccaggctgaacatt

SEQ ID NO: 474475 - DNA, 120 bp, Artificial Sequence
  ENSG00000160145_133 (sequence is synthesized)
tctattatcagtggcccctaatctggaaaaacccatcattctaatctagcttgtatccccacatcatgagaaagagggaagaagaagaagggatgatgtgtggtagagaagatgagggtt

SEQ ID NO: 474476 - DNA, 120 bp, Artificial Sequence
  ENSG00000160145_134 (sequence is synthesized)
aactttagcctttcccaaacactggcaacaaccacttcctcaacaatttttctatttgcttcagcctactcagattttttcaggtttttctagctcctccataacctcactccctcccga

SEQ ID NO: 474477 - DNA, 120 bp, Artificial Sequence
  ENSG00000160145_135 (sequence is synthesized)
ggtctctggttcaaagaccaccctaccagcccctatttgcttcaggttatcctgttgagggtgggtgggaagagtgagaagatataaatgaaaaactggccacatgttgataattgttga

SEQ ID NO: 474478 - DNA, 120 bp, Artificial Sequence
  ENSG00000160145_136 (sequence is synthesized)
aactagatgatggtacgtggacattcattataccattctccccacttctgtatttgtttgcaatttttcataataaaaaagttttaaaagtcctccagtttccaacacactcaagagaga

SEQ ID NO: 474479 - DNA, 120 bp, Artificial Sequence
  ENSG00000160145_137 (sequence is synthesized)
gccccaaccccaaacacagagtttcatggaaaccccacaccaaggcaagaggcagagatgatgattccatttcatatatacactcattttctaactttttttaaaggcccactgctttat

SEQ ID NO: 474480 - DNA, 120 bp, Artificial Sequence
  ENSG00000160145_138 (sequence is synthesized)
tttcaatagattaaacctgatttctgagaggtcctgaagttgggcttatttccctggctgggttatgggggagggcagggtaaagggatccttaaaaaagtttacacttctatgtatctc

SEQ ID NO: 474481 - DNA, 120 bp, Artificial Sequence
  ENSG00000160145_139 (sequence is synthesized)
acaatcttattgtgaggatgtgacttgttcagtgttctgaacttttcgaaggaatcgtgctctcaatgcaaagtgtcattctctggaattgcacctggctcaggaaaggactgtctttgt

SEQ ID NO: 474482 - DNA, 120 bp, Artificial Sequence
  ENSG00000160145_140 (sequence is synthesized)
acttgaatttaaatccaatggagaactttaacacgggcatttgcatgactgagaattgctgctgtcttttttccgtatgtcactttcttgaatgtgttctaataaaatgattctaaagca

SEQ ID NO: 474483 - DNA, 120 bp, Artificial Sequence
  ENSG00000160145_141 (sequence is synthesized)
atagcacttagtatttttgggattaaccaaatatatggaaaccgactccgactgtatttgtttcttaattttcaaatggccctgggtcataaagcctcactccctcagaggtctctcgac

SEQ ID NO: 474484 - DNA, 120 bp, Artificial Sequence
  ENSG00000160145_142 (sequence is synthesized)
taacccctatagtcttcatttggacctttatgtatttacaaacactctatgatacaatacataaaaatttaaaacatacattaaacatggttactaaaatttttcaaaatgtaaaacata

SEQ ID NO: 474485 - DNA, 120 bp, Artificial Sequence
  ENSG00000160145_143 (sequence is synthesized)
gtaaaaaaattttagtaaacatgttttcattgtgtttaaaaaatttaaaacatatttactaaaaatccttttagtaaacagtttactaaaaccctttcaataaacatgtcttcattatgg

SEQ ID NO: 474486 - DNA, 82 bp, Artificial Sequence
  ENSG00000160145_144 (sequence is synthesized)
aacagtttactaaaaccctttcaataaacatgtcttcattatggtatacagcataaaagaggaaagcctgagccgggcgcgg

SEQ ID NO: 474487 - DNA, 120 bp, Artificial Sequence
  ENSG00000160145_145 (sequence is synthesized)
cactctagcctgggcaataagagcaaaattctgtctcgaaaaaaaaggaaagcctggcccatagggtttgtcatgggacaaactgtaggctctgaggattcccaatatccataaagtcca

SEQ ID NO: 474488 - DNA, 120 bp, Artificial Sequence
  ENSG00000160145_146 (sequence is synthesized)
gtaggctctgaggattcccaatatccataaagtccagcttggcaagttctgttctgtccactgtggatgacctgaatcaagatccccctgctgagccattctgagtttttataacaagtt

SEQ ID NO: 474489 - DNA, 120 bp, Artificial Sequence
  ENSG00000160145_147 (sequence is synthesized)
gagtttctgcttgagaaggccagggcccagaacaatggtgtgcagaccacggcaggtgggggacaaggagggtatttttgaaattatgttatgggggcagttgacagaatgttagacaga

SEQ ID NO: 474490 - DNA, 120 bp, Artificial Sequence
  ENSG00000160145_148 (sequence is synthesized)
ccccaagctttcatatcagcttttacaacagagttgggaggatccagatgtggggttgcatggaattcccccaagtacacatatttgggaagtgagaagacaggaaaggagggacctaga

SEQ ID NO: 474491 - DNA, 120 bp, Artificial Sequence
  ENSG00000160145_149 (sequence is synthesized)
aatgaaaagtaggatgattttgttaactggagccaaggtacaatcattagactagaatgaacttaatagaggccccaagagaaagggggtatattttatatagtttgataacggagggaa

SEQ ID NO: 474492 - DNA, 120 bp, Artificial Sequence
  ENSG00000160145_150 (sequence is synthesized)
actaacagggaggctccctgtctgcaaagctcctggtccctcccaacagagataagagagtagtcttggttcaagagttctccacagcaagttggaaataacaaggaatcccagatgatg

SEQ ID NO: 474493 - DNA, 120 bp, Artificial Sequence
  ENSG00000160145_151 (sequence is synthesized)
atgatcctggggaatgtactttaggttgctctgagggcaaccgtgcttagggaaaaaggatcaggggccactcttgttcctgttttggcggagagatttattacttggtagtaaagaaga

SEQ ID NO: 474494 - DNA, 120 bp, Artificial Sequence
  ENSG00000160145_152 (sequence is synthesized)
gaggagagaagagaaaatggtccatttctatcattatgatggtagttcacagtgggagtgaactttcagctgaaatgggaaaaacaaacaatggtcaaggtcacaagtttcttgcttggc

SEQ ID NO: 474495 - DNA, 120 bp, Artificial Sequence
  ENSG00000160145_153 (sequence is synthesized)
ttttattcattgcatagggttttgagctttttgttttgttttgttttgtaagggtgggatacagaaagaatgaaaagatcagggacaacccataataacttttaagaagtattaatataa

SEQ ID NO: 474496 - DNA, 120 bp, Artificial Sequence
  ENSG00000160145_154 (sequence is synthesized)
tgatttcctacatcttttacatttgtttcaaattaaatagatatatatccacttacagctgaatgtggtaaaatttttaagaaaaaaatggtaatgttggagatatccttcaggtctctc

SEQ ID NO: 474497 - DNA, 120 bp, Artificial Sequence
  ENSG00000160145_155 (sequence is synthesized)
tcagccataaacaatgtaagggggagtagaggaagcagaggagaaagctagcttcactgctttgtggtccacaaagcctttataaatagtagtgcctttcagaggggaggatgggagata

SEQ ID NO: 474498 - DNA, 120 bp, Artificial Sequence
  ENSG00000160145_156 (sequence is synthesized)
aagaagttcattgcatttagatgtactgatattgcagcattttttctttactttaaaatatcttgtaaatgaaaacatctgaatataggggtgggaccaggaatgtttgagtttcaatct

SEQ ID NO: 474499 - DNA, 120 bp, Artificial Sequence
  ENSG00000160145_157 (sequence is synthesized)
cagctattcctgattcatcttttcttacagaaagtctttgtttttccttccccaaatgtccccattggtaaaatgggagttgggggatggggaaggagggaggacattaatcttacagga

SEQ ID NO: 474500 - DNA, 120 bp, Artificial Sequence
  ENSG00000160145_158 (sequence is synthesized)
atgttgagaaataaccttggtggggacatctataaaatactttgatttttttaagtgctacacactgccagtgctaagaattttattgatagtaactttgaacattccaggttttcaata

SEQ ID NO: 474501 - DNA, 120 bp, Artificial Sequence
  ENSG00000160145_159 (sequence is synthesized)
ttcacgtctttagataccaattataaactcatgagattaaattctgtaaattgttttcagttggaagtatcaggtgctctttgtctaaatgttatttggtcttagcctataatttcgatc

SEQ ID NO: 474502 - DNA, 120 bp, Artificial Sequence
  ENSG00000160145_160 (sequence is synthesized)
atttaagagcttgtctaccgaaaagggttaggagagctgatgaagtcttatgtccataagttgttttctccagtatttcttatggcagatgcgaagagtaaaatgcccttgaaagcaact

SEQ ID NO: 474503 - DNA, 120 bp, Artificial Sequence
  ENSG00000160145_161 (sequence is synthesized)
gctaccttccttctcaagctttatgctctggaaaaaaggacagagaagaacccaacaaccactttcttcacttgggagggcagaagtgagaagaaaatatcttctcataccacaatttat

SEQ ID NO: 474504 - DNA, 120 bp, Artificial Sequence
  ENSG00000160145_162 (sequence is synthesized)
ttttcacagcctcacaggaatctaagagacaaattaaatgcacaggcaaattaaatgcatagaaatgaattggactgctcatttttggaggacaaaccttgaatcttttttttttttttt

SEQ ID NO: 474505 - DNA, 120 bp, Artificial Sequence
  ENSG00000160145_163 (sequence is synthesized)
aggtggttaggtcttttaggagttgcatatttgctatcccataacctccatgattagagcccacgagttaggcattacttttttcttgcctctgtggaagagcatggcaatttagatttg

SEQ ID NO: 474506 - DNA, 120 bp, Artificial Sequence
  ENSG00000160145_164 (sequence is synthesized)
tgagaatatgagggagcaaatatgatataaactaaattttgcattaactaaaactttgtcccatgcatttaatacaggaggaaattattttgtacgtaagaggtctttgtagtagggcaa

SEQ ID NO: 474507 - DNA, 120 bp, Artificial Sequence
  ENSG00000160145_165 (sequence is synthesized)
agttcaaactcaccatgtccttattcagtatggtcaatgaattgtgctggatgagtttcgaggaatgtagaccttcttcctttctctcctgggtcgcacctctgtggagtctgggttaga

SEQ ID NO: 474508 - DNA, 120 bp, Artificial Sequence
  ENSG00000160145_166 (sequence is synthesized)
caaatgcaatatgtgacctttcagtgaatttatttataaaactgcaccttgatttttcctcactatttaaagcctagggatgatttgatgatgaatgattaaacccatggtgggcttaga

SEQ ID NO: 474509 - DNA, 120 bp, Artificial Sequence
  ENSG00000160145_167 (sequence is synthesized)
gacgacagagctcacacacgctccatcaagaaaaggaaagctactatgttaatatttattttctaaaaatattaaggctctcagttgtttcattaattctaaagggttaaaaagggctga

SEQ ID NO: 474510 - DNA, 120 bp, Artificial Sequence
  ENSG00000160145_168 (sequence is synthesized)
aatttgtttatagcactaaatgtttttaataggaaatttactcacataaaaaatttaagcagaagtagtagaatacagattatcataaaacatattttctatgaaaggcatttcttcctc

SEQ ID NO: 474511 - DNA, 120 bp, Artificial Sequence
  ENSG00000160145_169 (sequence is synthesized)
atcttcaataaatatgaagaagttagaggagaggaaaaagcaatcactctaagacaacttttcgtctttgagggacattatgataagcctgaaattaatacgcacaggctattgcatttt

SEQ ID NO: 474512 - DNA, 120 bp, Artificial Sequence
  ENSG00000160145_170 (sequence is synthesized)
tctgtgagaaatgtgcccctttgctgtgagattctaaaatgtgttcagatttagtttttattcaaatgatcaagataacgcattagttagataactgctatttcagatagtgaggttagc

SEQ ID NO: 474513 - DNA, 120 bp, Artificial Sequence
  ENSG00000160145_171 (sequence is synthesized)
tgagaaaaggaagcatggtagaagaaatgcaaataacaattcttggaatgccaactcctgaggcttagtttaaccaagctaatttgttggcccagggatggccatcatatgagtttccat

SEQ ID NO: 474514 - DNA, 120 bp, Artificial Sequence
  ENSG00000160145_172 (sequence is synthesized)
caatacctgacttccatcaacaactgaatccatgttctggagtattacagagactgttactatgacctcaaagactgtggctacgaatctgaagttaacaagacatacatcttctcttac

SEQ ID NO: 474515 - DNA, 120 bp, Artificial Sequence
  ENSG00000160145_173 (sequence is synthesized)
taacttaagccatatctgtcaactctatgtttgatttttctgaccctggtgcttttacttctgtttctgccaaacttcagcctactctatggggaaggtgagtaaaactagtagttagaa

SEQ ID NO: 474516 - DNA, 120 bp, Artificial Sequence
  ENSG00000160145_174 (sequence is synthesized)
caaatatgaagactgaaaaaaactaaacatactcttcataatgagatcctgttcagagaacagtagtgatcaaagtgcaaactgttggaaaatatggatatatgtacatctgtacatgta

SEQ ID NO: 474517 - DNA, 120 bp, Artificial Sequence
  ENSG00000160145_175 (sequence is synthesized)
tatagtgtataatatgtatgtatatgttattgctcatatgcagaaatctatccatttgcagacagcccaggtgggtcaatgtttctaatggaaaaccatttagggccattcaaaaccatt

SEQ ID NO: 474518 - DNA, 120 bp, Artificial Sequence
  ENSG00000160145_176 (sequence is synthesized)
agggctaatttgtggagacgaattctactcattctggaattaatttgctgtcttttgacatccacaaagccaaactaacaaagtgtgaaacataaaggggccatcatttagtttattctg

SEQ ID NO: 474519 - DNA, 120 bp, Artificial Sequence
  ENSG00000160145_177 (sequence is synthesized)
tttatctggacttataactatctttacatttgaactattaatagttgatttgcaaactgtattggcatctcttggttttgagtgacccctgcccccctcaagtcttttgagaatttggag

SEQ ID NO: 474520 - DNA, 120 bp, Artificial Sequence
  ENSG00000160145_178 (sequence is synthesized)
tgggcttcactggccattcagacaaagggccttattcataagtggacaggtttccccatagggaccatcgcacatatacatataagtacatacttccatcaggcttgtaacaattgattt

SEQ ID NO: 474521 - DNA, 120 bp, Artificial Sequence
  ENSG00000160145_179 (sequence is synthesized)
aaaatcactccacagtattgataaatagctctatattttcaaggtgcagaagaattccacagccttaattatttcagtgtcttgctggtctgccttaagtgtatcttctgggtttttggt

SEQ ID NO: 474522 - DNA, 120 bp, Artificial Sequence
  ENSG00000160145_180 (sequence is synthesized)
tattttattatttttaaatttttctgctgttgttcattttgtatgcacacaatgtcgttttgtaaaggtaggttgtaaatattttatttgtaagtcaaaatcactcatgtgtaatgttgt

SEQ ID NO: 474523 - DNA, 120 bp, Artificial Sequence
  ENSG00000160145_181 (sequence is synthesized)
aaagtgatgacctgctgtcttgttactgctacagtaaatgttataagttatggatgaaacttcaaaatgtacatctcacatgttatgcattcctataaatatactatactaaagatacta

SEQ ID NO: 474524 - DNA, 120 bp, Artificial Sequence
  ENSG00000160145_182 (sequence is synthesized)
gaccagtgagtcccatggcctccactcaccatttccgaggcaggctgtggtcattattatgtggatttatcttgtcctttccctcatcctatttctgccctgttcttcccctgacatcac

SEQ ID NO: 474525 - DNA, 120 bp, Artificial Sequence
  ENSG00000160145_183 (sequence is synthesized)
gtatctccgcttgctccggctgctggatcgagttccatctatgttgctgcaaatgacaggatttcctttttataggttgtctcttcactctgttgattgtttcccttgctgtgcagaagc

SEQ ID NO: 474526 - DNA, 120 bp, Artificial Sequence
  ENSG00000160145_184 (sequence is synthesized)
tttttagtttcaacaagggtgccaagaacatatattgggaaaaggacatccttttcaataagtggtgctgggaaaatgggatatctatattcagaagaatgaaattagacccctatctct

SEQ ID NO: 474527 - DNA, 120 bp, Artificial Sequence
  ENSG00000160145_185 (sequence is synthesized)
gaagtggcatgaagttagacaaggtgcaaggctggaagagagaagaaatgacaagtagttacataggcccttgtcatgtgagaggggctccacaaggaccaatttggctagcaccctgct

SEQ ID NO: 474528 - DNA, 120 bp, Artificial Sequence
  ENSG00000160145_186 (sequence is synthesized)
tctaggaaggaccaggcctaagccactggaggttatgtggacatgttgctgcccatgagacagtccaggacaggccatcaccctcactgttgatgtgctagagcttccaacctacagcag

SEQ ID NO: 474529 - DNA, 120 bp, Artificial Sequence
  ENSG00000160145_187 (sequence is synthesized)
tcttgttagtctgcatagcatctgcattacattgccttggtcatcacaatgaatagaaagcctgatcacataaacacacacagacacacatacacacaaaacataccatcttcagcctta

SEQ ID NO: 474530 - DNA, 120 bp, Artificial Sequence
  ENSG00000160145_188 (sequence is synthesized)
tgctctttttttgttattatggtaaaatatacataatatgtataacataaatttaccattttaaccatttttgaatgtacagttcggtggcattaaatacattcacattcttgtgcaacc

SEQ ID NO: 474531 - DNA, 120 bp, Artificial Sequence
  ENSG00000160145_189 (sequence is synthesized)
atttttcctctttattccccttctcttcctccttacctctgctctcacacatccttcgtcccctctcaccaaccctctcccatatttctccccccttcctccatgccctcctgttctact

SEQ ID NO: 474532 - DNA, 120 bp, Artificial Sequence
  ENSG00000160145_190 (sequence is synthesized)
aactttgcttcccttccctggcttgagctttggactttctgttttatttcctgatcactgttccttattctttgctaatctgcttttcctctgctgcccgatgtcttgcagtcctcctct

SEQ ID NO: 474533 - DNA, 120 bp, Artificial Sequence
  ENSG00000160145_191 (sequence is synthesized)
atttatggaatgtaagggctctgctctgagcttgtcttcataggtctgtgaagaagttgctcccaagaccctttgtgggaagaaagaagttaggatgaaaggcctattgaaaagccattg

SEQ ID NO: 474534 - DNA, 120 bp, Artificial Sequence
  ENSG00000160145_192 (sequence is synthesized)
ctgctctcacctccctgggagcacacattagttcttgtcccaatagggaagctctaggacctctacaggctgacaaagccatatattcacaaacactgagtgatatggagaatatagacc

SEQ ID NO: 474535 - DNA, 120 bp, Artificial Sequence
  ENSG00000160145_193 (sequence is synthesized)
gcatggaggtagaagcagctattgttgtcctatttcctacaatgattgccttttttgatgtgttctgtaacagtgaccttgctaaaatgaccagccattcaaagataaattgtgatgttg

SEQ ID NO: 474536 - DNA, 120 bp, Artificial Sequence
  ENSG00000160145_194 (sequence is synthesized)
gggcatctctgggtatcccatcccagctataaaagaaacaaacaaaaacataattcagttcagtgttggtagaaaactctacctagatttttttaaaaaacaaaaacttgttatcttgaa

SEQ ID NO: 474537 - DNA, 120 bp, Artificial Sequence
  ENSG00000160161_0 (sequence is synthesized)
agtcccagcggccgccagacccgccggagttggacccgagcacgccgcggagcccggaccctccctcggacgctctgccccggccatggcgtcgctgctgccactgctctgtctctgtgt

SEQ ID NO: 474538 - DNA, 120 bp, Artificial Sequence
  ENSG00000160161_1 (sequence is synthesized)
cgtcgctgcgcacctggcgggggcccgagacgccacccccaccgaggagccaatggcgactgcactgggcctggaaagacggtccgtgtacaccggccagccctcaccagccctggagga

SEQ ID NO: 474539 - DNA, 120 bp, Artificial Sequence
  ENSG00000160161_2 (sequence is synthesized)
ctgggaagaggccagcgagtggacgtcctggttcaacgtggaccaccccggaggcgacggcgacttcgagagcctggctgccatccgcttctactacgggccagcgcgcgtgtgcccgcg

SEQ ID NO: 474540 - DNA, 120 bp, Artificial Sequence
  ENSG00000160161_3 (sequence is synthesized)
accgctggcgctggaagcgcgcaccacggactgggccctgccgtccgccgtcggcgagcgcgtgcacttgaaccccacgcgcggcttctggtgcctcaaccgcgagcaaccgcgtggccg

SEQ ID NO: 474541 - DNA, 120 bp, Artificial Sequence
  ENSG00000160161_4 (sequence is synthesized)
ccgctgctccaactaccacgtgcgcttccgctgcccactagaagcctcgtggggcgcgtggggcccgtggggtccctgctcggggagctgtgggccaggccgtcgcttgcgccgccgcca

SEQ ID NO: 474542 - DNA, 120 bp, Artificial Sequence
  ENSG00000160161_5 (sequence is synthesized)
ctgcccaagccccgctggggatgcgtgtcccgggcgtcctctggaggcgcagaagtgcgtgcggcctcggtgtccagggtgcagccttgacacctgtgaatgcccggaccacatcctcct

SEQ ID NO: 474543 - DNA, 120 bp, Artificial Sequence
  ENSG00000160161_6 (sequence is synthesized)
gggctcggtggtcaccccatctgggcaaccactgctaggagccagggtctccctgcgagaccagcctggcactgtggccaccagcgatgctcacggaaccttccgggtgcctggtgtctg

SEQ ID NO: 474544 - DNA, 120 bp, Artificial Sequence
  ENSG00000160161_7 (sequence is synthesized)
tgctgacagccgcgccaacatcagggcccagatggatggcttctctgcaggggaggcccaggcccaggccaacggatccatctctgtggtcaccatcatccttgataagttggagaagcc

SEQ ID NO: 474545 - DNA, 120 bp, Artificial Sequence
  ENSG00000160161_8 (sequence is synthesized)
gtacctggtgaaacaccctgagtcccgagtgcgagaggctggccagaatgtgactttctgctgcaaagcctccgggacccccatgcccaagaaatactcctggttccacaatgggaccct

SEQ ID NO: 474546 - DNA, 120 bp, Artificial Sequence
  ENSG00000160161_9 (sequence is synthesized)
gctggacaggcgagctcatgggtacggggcccacctggagctgcggggactgcgcccagaccaggctggcatctaccactgcaaggcatggaatgaggcgggtgccgtgcgctcgggcac

SEQ ID NO: 474547 - DNA, 120 bp, Artificial Sequence
  ENSG00000160161_10 (sequence is synthesized)
tgcccggctcactgtacttgccccaggccagccagcctgcgacccccggccccgagagtacctgatcaagctccctgaggactgtggtcagccaggtagtggccctgcctacctggatgt

SEQ ID NO: 474548 - DNA, 120 bp, Artificial Sequence
  ENSG00000160161_11 (sequence is synthesized)
gggcctctgtcccgacacccgctgccccagcctggcaggctccagcccccgctgcggggacgccagctcccgctgctgctctgtgcgccgtctggagagaagggagattcactgccctgg

SEQ ID NO: 474549 - DNA, 120 bp, Artificial Sequence
  ENSG00000160161_12 (sequence is synthesized)
ctacgtcctcccagtgaaggtggtggcagagtgtggctgccagaagtgtctgccccctcgggggctggtccggggccgtgttgtggctgctgactccggggagccgctacgcttcgccag

SEQ ID NO: 474550 - DNA, 120 bp, Artificial Sequence
  ENSG00000160161_13 (sequence is synthesized)
gattctgctgggccaggagcccatcggcttcaccgcctaccagggcgactttaccattgaggtgccgccctccacccagcggctggtggtgacttttgtggaccccagcggtgagttcat

SEQ ID NO: 474551 - DNA, 120 bp, Artificial Sequence
  ENSG00000160161_14 (sequence is synthesized)
ggacgctgtccgggtcttgccttttgatcctcgaggtgccggcgtgtaccacgaggtcaaggccatgcggaagaaagccccggtcattttacataccagccagagcaacacgatccccct

SEQ ID NO: 474552 - DNA, 120 bp, Artificial Sequence
  ENSG00000160161_15 (sequence is synthesized)
gggcgagctggaagatgaggcgcccctgggcgagctggtcctgccttctggcgctttccgcagagccgacggcaaaccctactcggggcctgtggaggcccgggtgacgttcgtggaccc

SEQ ID NO: 474553 - DNA, 120 bp, Artificial Sequence
  ENSG00000160161_16 (sequence is synthesized)
ccgagacctcacctcggcggcgtctgcccccagtgacctgcgcttcgtggacagcgacggcgagctggctccactgcgcacctacggcatgttctccgtggacctccgtgcgcccggctc

SEQ ID NO: 474554 - DNA, 120 bp, Artificial Sequence
  ENSG00000160161_17 (sequence is synthesized)
aggaggagagcggcttccggcgcgaggggtcctcgggcccccgggtgcgccgggaggagcgcgtcttcctggtgggcaacgtggagatccgggagcggcgcctgttcaatctggacgtgc

SEQ ID NO: 474555 - DNA, 120 bp, Artificial Sequence
  ENSG00000160161_18 (sequence is synthesized)
ctgagcgccgccgctgcttcgtgaaggtgcgcgcctacgccaacgacaagttcacccccagcgagcaggtggagggcgtggtggtcacgctggtcaatctggagcccgcccccggcttct

SEQ ID NO: 474556 - DNA, 120 bp, Artificial Sequence
  ENSG00000160161_19 (sequence is synthesized)
ccgccaacccccgtgcctggggccgctttgacagcgcggtcaccggccccaatggcgcctgcctccccgccttctgcgacgccgacaggccagacgcctacaccgccctggtcaccgcca

SEQ ID NO: 474557 - DNA, 120 bp, Artificial Sequence
  ENSG00000160161_20 (sequence is synthesized)
ccctgggcggcgaggagctggagccggccccttccttgccccgcccactcccggccaccgtgggcgtcacccagccctacctggacaggctggggtaccgtcggacggaccacgacgatc

SEQ ID NO: 474558 - DNA, 120 bp, Artificial Sequence
  ENSG00000160161_21 (sequence is synthesized)
ccgccttcaagcgtaacggcttccgcatcaacctcgccaagcccaggccaggtgaccccgccgaggccaatgggcctgtgtacccgtggcgcagcctgcgggaatgccagggggccccgg

SEQ ID NO: 474559 - DNA, 120 bp, Artificial Sequence
  ENSG00000160161_22 (sequence is synthesized)
tgactgccagccacttccgcttcgccagggtggaggcggacaagtacgagtacaacgtggtccccttccgagagggcacacctgcctcctggactggcgatctcctggcctggtggccca

SEQ ID NO: 474560 - DNA, 120 bp, Artificial Sequence
  ENSG00000160161_23 (sequence is synthesized)
acccgcaggagttccgggcctgcttcctcaaggtgaagatccagggtccccaggagtatatggtccgctcccacaacgcagggggcagccacccacgcacccgcggccagctctacggac

SEQ ID NO: 474561 - DNA, 120 bp, Artificial Sequence
  ENSG00000160161_24 (sequence is synthesized)
ttcgggatgcccggagtgtgcgagaccccgagcgtccgggcacctcggcagcctgcgtggagttcaagtgcagcgggatgctgttcgaccagcggcaggtggacaggacgctggtgacca

SEQ ID NO: 474562 - DNA, 120 bp, Artificial Sequence
  ENSG00000160161_25 (sequence is synthesized)
ttatgccccagggcagctgccggcgcgtggccgtcaacggactccttcgggattacctgacccggcaccccccaccggtgcccgcggaggacccagctgccttctccatgctggcccccc

SEQ ID NO: 474563 - DNA, 120 bp, Artificial Sequence
  ENSG00000160161_26 (sequence is synthesized)
tagaccctctgggccacaactatggcgtctacactgtcactgaccagagcccacgcttggccaaggagatcgccattggccgctgctttgatggttcctctgacggcttctccagagaga

SEQ ID NO: 474564 - DNA, 120 bp, Artificial Sequence
  ENSG00000160161_27 (sequence is synthesized)
tgaaggctgatgccggcacagccgtcaccttccagtgccgggagccaccggccggacgacccagcctcttccagaggctgctggagtccccggcgacagcacttggtgacatccgcaggg

SEQ ID NO: 474565 - DNA, 120 bp, Artificial Sequence
  ENSG00000160161_28 (sequence is synthesized)
agatgagcgaggcggcgcaggcacaggcccgggcctcaggtcccctccgcacccgccggggtagggtccggcagtgacctgggcaggggcctcgctttcccacctccctccagactcctt

SEQ ID NO: 474566 - DNA, 120 bp, Artificial Sequence
  ENSG00000160161_29 (sequence is synthesized)
tgaccccaggaagttttgcccctccttcttctccagacagccccctccccaggtgtctgggtcccctttcccgcccctttccagaactcagagtcagacaagaacccagagcatccgatg

SEQ ID NO: 474567 - DNA, 120 bp, Artificial Sequence
  ENSG00000160161_30 (sequence is synthesized)
gtagaaacaccaggaagacaattgttgctgtgtggtatggaatggagtttgcggtgactctggggccagcacccaggggacgacgttcaaccctagcctgaagggacccgctcccagctc

SEQ ID NO: 474568 - DNA, 120 bp, Artificial Sequence
  ENSG00000160161_31 (sequence is synthesized)
agaagccgtctctgacttctcgtgcgtattttgaccctgatttcaatcttctacccttgggagttctggcgtttggcacaaagtcccctctgcctgtttggagctcagtgctagaccagg

SEQ ID NO: 474569 - DNA, 120 bp, Artificial Sequence
  ENSG00000160161_32 (sequence is synthesized)
tcccctgccccgagctttgtttttggggttatttattgaaacaaagtgtggggagctggttgtgggtgtgagtgggggtgtggggtccaggctgggcccagtgaaaaggaggaaggggtt

SEQ ID NO: 474570 - DNA, 120 bp, Artificial Sequence
  ENSG00000160161_33 (sequence is synthesized)
cccatgcgggggaggctctggggctgaggggaacaattctcacgtgtttggtgcttagagacctgcccggggcgttgggcaggccctccgggggctgaattaaaaatgctttatttccaa

SEQ ID NO: 474571 - DNA, 120 bp, Artificial Sequence
  ENSG00000160161_34 (sequence is synthesized)
gcttttgaagagaggcgctgggaacagcgcggggcccaagtgcaccgtcaggaggcccagcgggtcaggacccatgtccggccccctggaacgcatctccctcccgctgccctcatttga

SEQ ID NO: 474572 - DNA, 80 bp, Artificial Sequence
  ENSG00000160179_0 (sequence is synthesized)
gagccggagccggatcccagccggagcccaagcgcagcccgcaccccgcgcagcggctgagccgggagccagcgcagcct

SEQ ID NO: 474573 - DNA, 120 bp, Artificial Sequence
  ENSG00000160179_1 (sequence is synthesized)
ccgccgccgccgccgcccccggggcatggcctgtctgatggccgctttctcggtcggcaccgccatgaatgccagcagttactctgcagagatgacggagcccaagtcggtgtgtgtctc

SEQ ID NO: 474574 - DNA, 120 bp, Artificial Sequence
  ENSG00000160179_2 (sequence is synthesized)
ggtggatgaggtggtgtccagcaacatggaggccactgagacggacctgctgaatggacatctgaaaaaagtagataataacctcacggaagcccagcgcttctcctccttgcctcggag

SEQ ID NO: 474575 - DNA, 120 bp, Artificial Sequence
  ENSG00000160179_3 (sequence is synthesized)
ggcagctgtgaacattgaattcagggacctttcctattcggttcctgaaggaccctggtggaggaagaaaggatacaagaccctcctgaaaggaatttccgggaagttcaatagtggtga

SEQ ID NO: 474576 - DNA, 120 bp, Artificial Sequence
  ENSG00000160179_4 (sequence is synthesized)
gttggtggccattatgggtccttccggggccgggaagtccacgctgatgaacatcctggctggatacagggagacgggcatgaagggggccgtcctcatcaacggcctgccccgggacct

SEQ ID NO: 474577 - DNA, 120 bp, Artificial Sequence
  ENSG00000160179_5 (sequence is synthesized)
gcgctgcttccggaaggtgtcctgctacatcatgcaggatgacatgctgctgccgcatctcactgtgcaggaggccatgatggtgtcggcacatctgaagcttcaggagaaggatgaagg

SEQ ID NO: 474578 - DNA, 120 bp, Artificial Sequence
  ENSG00000160179_6 (sequence is synthesized)
cagaagggaaatggtcaaggagatactgacagcgctgggcttgctgtcttgcgccaacacgcggaccgggagcctgtcaggtggtcagcgcaagcgcctggccatcgcgctggagctggt

SEQ ID NO: 474579 - DNA, 120 bp, Artificial Sequence
  ENSG00000160179_7 (sequence is synthesized)
gaacaaccctccagtcatgttcttcgatgagcccaccagcggcctggacagcgcctcctgcttccaggtggtctcgctgatgaaagggctcgctcaagggggtcgctccatcatttgcac

SEQ ID NO: 474580 - DNA, 120 bp, Artificial Sequence
  ENSG00000160179_8 (sequence is synthesized)
catccaccagcccagcgccaaactcttcgagctgttcgaccagctttacgtcctgagtcaaggacaatgtgtgtaccggggaaaagtctgcaatcttgtgccatatttgagggatttggg

SEQ ID NO: 474581 - DNA, 120 bp, Artificial Sequence
  ENSG00000160179_9 (sequence is synthesized)
tctgaactgcccaacctaccacaacccagcagattttgtcatggaggttgcatccggcgagtacggtgatcagaacagtcggctggtgagagcggttcgggagggcatgtgtgactcaga

SEQ ID NO: 474582 - DNA, 120 bp, Artificial Sequence
  ENSG00000160179_10 (sequence is synthesized)
ccacaagagagacctcgggggtgatgccgaggtgaacccttttctttggcaccggccctctgaagaggactcctcgtccatggaaggctgccacagcttctctgccagctgcctcacgca

SEQ ID NO: 474583 - DNA, 120 bp, Artificial Sequence
  ENSG00000160179_11 (sequence is synthesized)
gttctgcatcctcttcaagaggaccttcctcagcatcatgagggactcggtcctgacacacctgcgcatcacctcgcacattgggatcggcctcctcattggcctgctgtacttggggat

SEQ ID NO: 474584 - DNA, 120 bp, Artificial Sequence
  ENSG00000160179_12 (sequence is synthesized)
tttcttcgggaacacctgaactactggtacagcctgaaggcctactacctggccaagaccatggcagacgtgccctttcagatcatgttcccagtggcctactgcagcatcgtgtactgg

SEQ ID NO: 474585 - DNA, 120 bp, Artificial Sequence
  ENSG00000160179_13 (sequence is synthesized)
atgacgtcgcagccgtccgacgccgtgcgctttgtgctgtttgccgcgctgggcaccatgacctccctggtggcacagtccctgggcctgctgatcggagccgcctccacgtccctgcag

SEQ ID NO: 474586 - DNA, 120 bp, Artificial Sequence
  ENSG00000160179_14 (sequence is synthesized)
gtggccactttcgtgggcccagtgacagccatcccggtgctcctgttctcggggttcttcgtcagcttcgacaccatccccacgtacctacagtggatgtcctacatctcctatgtcagg

SEQ ID NO: 474587 - DNA, 120 bp, Artificial Sequence
  ENSG00000160179_15 (sequence is synthesized)
tatgggttcgaaggggtcatcctctccatctatggcttagaccgggaagatctgcactgtgacatcgacgagacgtgccacttccagaagtcggaggccatcctgcgggagctggacgtg

SEQ ID NO: 474588 - DNA, 120 bp, Artificial Sequence
  ENSG00000160179_16 (sequence is synthesized)
gaaaatgccaagctgtacctggacttcatcgtactcgggattttcttcatctccctccgcctcattgcctattttgtcctcaggtacaaaatccgggcagagaggtaaaacacctgaatg

SEQ ID NO: 474589 - DNA, 120 bp, Artificial Sequence
  ENSG00000160179_17 (sequence is synthesized)
ccaggaaacaggaagattagacactgtggccgagggcacgtctagaatcgaggaggcaagcctgtgcccgaccgacgacacagagactcttctgatccaacccctagaaccgcgttgggt

SEQ ID NO: 474590 - DNA, 120 bp, Artificial Sequence
  ENSG00000160179_18 (sequence is synthesized)
ttgtgggtgtctcgtgctcagccactctgcccagctgggttggatcttctctccattcccctttctagctttaactaggaagatgtaggcagattggtggtttttttttttttaacatac

SEQ ID NO: 474591 - DNA, 120 bp, Artificial Sequence
  ENSG00000160179_19 (sequence is synthesized)
agaattttaaataccacaactggggcagaatttaaagctgcaacacagctggtgatgagaggcttcctcagtccagtcgctccttagcaccaggcaccgtgggtcctggatggggaactg

SEQ ID NO: 474592 - DNA, 120 bp, Artificial Sequence
  ENSG00000160179_20 (sequence is synthesized)
caagcagcctctcagctgatggctgcacagtcagatgtctggtggcagagagtccgagcatggagcgattccattttatgactgttgtttttcacattttcatctttctaaggtgtgtct

SEQ ID NO: 474593 - DNA, 120 bp, Artificial Sequence
  ENSG00000160179_21 (sequence is synthesized)
cttttccaatgagaagtcatttttgcaagccaaaagtcgatcaatcgcattcattttaagaaattatacctttttagtacttgctgaagaatgattcagggtaaatcacatactttgttt

SEQ ID NO: 474594 - DNA, 120 bp, Artificial Sequence
  ENSG00000160179_22 (sequence is synthesized)
agagaggcgaggggtttaaccgagtcacccagctggtctcatacatagacagcacttgtgaaggattgaatgcaggttccaggtggagggaagacgtggacaccatctccactgagccat

SEQ ID NO: 474595 - DNA, 120 bp, Artificial Sequence
  ENSG00000160179_23 (sequence is synthesized)
gcagacatttttaaaagctatacaaaaaattgtgagaagacattggccaactctttcaaagtctttctttttccacgtgcttcttattttaagcgaaatatattgtttgtttcttcctaa

SEQ ID NO: 474596 - DNA, 120 bp, Artificial Sequence
  ENSG00000160179_24 (sequence is synthesized)
tttaacaggcggtttgtggaattcctaactcgcaccactggttccgcccaggctggtcgccaagcccctgatgcctggggctttcttacctctaaatggcccacatctgacttctctcct

SEQ ID NO: 474597 - DNA, 120 bp, Artificial Sequence
  ENSG00000160179_25 (sequence is synthesized)
gggtacagcagagaattcaactgagatagcaggaagcatcgcacatggactgctctcctgccatcctaccattgttaaagcaggggcatcggaagccaagaactccttgggttttccatg

SEQ ID NO: 474598 - DNA, 120 bp, Artificial Sequence
  ENSG00000160179_26 (sequence is synthesized)
atgatcagctagctgcacggtggctagtggcaccgtggctagctgcatggtggctagttgcaccgtggctagtggccttatgcctagctgcactgtggatagctgcaccgtgactagtgg

SEQ ID NO: 474599 - DNA, 120 bp, Artificial Sequence
  ENSG00000160179_27 (sequence is synthesized)
caccgtggctagctgcaccgtggctagcggcattgtggctagctgcactgtgggtagctgcaccgtggctagtggcactgtggctagctgcatcttggctagctgcaccgtggcctgcag

SEQ ID NO: 474600 - DNA, 120 bp, Artificial Sequence
  ENSG00000160179_28 (sequence is synthesized)
acttcagagggcagcagctggactacctatgtttgtggcgctacaccaacctgaacttcgcttcctgagacctaagattcagccccgtgctcagcagacatcagggatcaccgactctgt

SEQ ID NO: 474601 - DNA, 120 bp, Artificial Sequence
  ENSG00000160179_29 (sequence is synthesized)
gccaggagctgttcttgatgctgggaacgcaggggtggacaaaacagagaaagccctgccctcagtgagaaatatgctgtcatgtaaattgctttttcccctatagaatgccagcagtta

SEQ ID NO: 474602 - DNA, 120 bp, Artificial Sequence
  ENSG00000160179_30 (sequence is synthesized)
agcctgcgactgcactcccggggacaccctctcccggacccactcggggaggcggcggcgaaggcccggggagacccgcgaggggcaagcccggattcctgccggccgcctttctgcgcg

SEQ ID NO: 474603 - DNA, 120 bp, Artificial Sequence
  ENSG00000160179_31 (sequence is synthesized)
cgccggagagagagacgcggtggggacagggatgcgcatttcacttccccgagctccggagagggatggcggggtgtcggcgagttcactgctggacacagttactaatgccagcagtta

SEQ ID NO: 474604 - DNA, 120 bp, Artificial Sequence
  ENSG00000160179_32 (sequence is synthesized)
agacactgaatcatcatttgtagtttggggggctttacatgcctgcagtggtgaaaactgaaattttgtcccacttaagggagtttcttcttccctttattaattgcaaaataaatatat

SEQ ID NO: 474605 - DNA, 85 bp, Artificial Sequence
  ENSG00000160179_33 (sequence is synthesized)
cgccatgatcatgaggcttccccagccacatggaactaatgccagcagttactctgcagagatgacggagcccaagtcggtgtgt

SEQ ID NO: 474606 - DNA, 120 bp, Artificial Sequence
  ENSG00000160179_34 (sequence is synthesized)
agaaaggtaatgcaaatcccgaagccccctgggggaggctgcacgtggcaccgtgcactgctgcatgagagctctttccgagcaagaaggagccgtggctccggactggctttcacccgc

SEQ ID NO: 474607 - DNA, 120 bp, Artificial Sequence
  ENSG00000160179_35 (sequence is synthesized)
gggctgctggccaagagcagattacacatctgaggatccaggccttccatcttcctgctagttccacctcctcctaccctcaccaacacacacacactaaacaaggaggccacacaaacc

SEQ ID NO: 474608 - DNA, 120 bp, Artificial Sequence
  ENSG00000160179_36 (sequence is synthesized)
agcgcttcacacccggagagccatggcaggaccaagtgttctggacgttgccgagagctgccttcggtggaagcgcttccatcttttaggaacgttcttcctccccgaagtgccgagtgc

SEQ ID NO: 474609 - DNA, 88 bp, Artificial Sequence
  ENSG00000160179_37 (sequence is synthesized)
atcttttaggaacgttcttcctccccgaagtgccgagtgctcctaacaagtgctgattgtaaaacctttataagaaatctggtgggag

SEQ ID NO: 474610 - DNA, 120 bp, Artificial Sequence
  ENSG00000160179_38 (sequence is synthesized)
atggcgaaaccccgtctccactaaaaacacaaaacaattaggtgggcttggtggcgcgcgactgtaattctagctactccggaggctgaggcgggagggcgggaagatcccttgaacctg

SEQ ID NO: 474611 - DNA, 120 bp, Artificial Sequence
  ENSG00000160179_39 (sequence is synthesized)
ttctttccaagggtctctgggtgaggcccgtgaccttcccaagcctctccctgtcttgtgaaacctgggcgtgatatacctcccttttagggctgctgcgatcatttaggcagattaaac

SEQ ID NO: 474612 - DNA, 120 bp, Artificial Sequence
  ENSG00000160179_40 (sequence is synthesized)
ctcataagtggtttcccatacaagaaagatgctagcagtgcaacagacagaacacttacctgcctgccctcccgccaggaggtggtcttccaacttttgcccggagtctacagagggtgg

SEQ ID NO: 474613 - DNA, 120 bp, Artificial Sequence
  ENSG00000160179_41 (sequence is synthesized)
gccctctctgctggggctccgggacatggtcaggagaggttggtctgtctgtaccgccattctcttggccagactgtggtgtctggtccctactcacaccttcctgtcagagtatccaga

SEQ ID NO: 474614 - DNA, 120 bp, Artificial Sequence
  ENSG00000160179_42 (sequence is synthesized)
ggccgcagagtatccacaccctggctgggtgtactggctacagatggctgtggctccaggtcacctgcgtgcctgggtgatgagaaataatgtcacaacaaatatcccatctgcattctc

SEQ ID NO: 474615 - DNA, 120 bp, Artificial Sequence
  ENSG00000160179_43 (sequence is synthesized)
tgggacactgacccatgaagagaaagcagttctcacagtttttacaggcacagccacagccgtgcatgtacaggtggcagctttagcttctgctaaactggagagctcagtgtttgtgac

SEQ ID NO: 474616 - DNA, 120 bp, Artificial Sequence
  ENSG00000160179_44 (sequence is synthesized)
agactgcgtgtcctgcaaaatcgaaaatgtctgtgattcagctcttcagggaaaaagggtgccgatgtctggcctacagggctcaagcattgtcatcatgcccccatccaaccgtccact

SEQ ID NO: 474617 - DNA, 120 bp, Artificial Sequence
  ENSG00000160179_45 (sequence is synthesized)
cgccagtgcggcatcctgcacgtggtcagtccaagtccagggagggccccatcacctgggggtggtcgctatcagtggcaaagtcttgtcagcagctcatggggcaggaagggcctatgg

SEQ ID NO: 474618 - DNA, 120 bp, Artificial Sequence
  ENSG00000160179_46 (sequence is synthesized)
gacagaaaggggattttcctcctctgtgggtctcacttttagctgacgcccccaactcagaaaccacttgactaccacaaatagctcaagtgtcatccagttataaaacgtttaaagaac

SEQ ID NO: 474619 - DNA, 120 bp, Artificial Sequence
  ENSG00000160180_0 (sequence is synthesized)
cgctccccagtagaggacccggaaccagaactggaatccgcccttaccgcttgctgccaaaacagtgggggctgaactgacctctcccctttgggagagaaaaactgtctgggagcttga

SEQ ID NO: 474620 - DNA, 120 bp, Artificial Sequence
  ENSG00000160180_1 (sequence is synthesized)
caaaggcatgcaggagagaacaggagcagccacagccaggagggagagccttccccaagcaaacaatccagagcagctgtgcaaacaacggtgcataaatgaggcctcctggaccatgaa

SEQ ID NO: 474621 - DNA, 120 bp, Artificial Sequence
  ENSG00000160180_2 (sequence is synthesized)
gcgagtcctgagctgcgtcccggagcccacggtggtcatggctgccagagcgctctgcatgctggggctggtcctggccttgctgtcctccagctctgctgaggagtacgtgggcctgtc

SEQ ID NO: 474622 - DNA, 120 bp, Artificial Sequence
  ENSG00000160180_3 (sequence is synthesized)
tgcaaaccagtgtgccgtgccagccaaggacagggtggactgcggctacccccatgtcacccccaaggagtgcaacaaccggggctgctgctttgactccaggatccctggagtgccttg

SEQ ID NO: 474623 - DNA, 120 bp, Artificial Sequence
  ENSG00000160180_4 (sequence is synthesized)
gcaccttctgaggcacctccagctgcccccggccgggggatgcgaggctcggagcacccttgcccggctgtgattgctgccaggcactgttcatctcagcttttctgtccctttgctccc

SEQ ID NO: 474624 - DNA, 120 bp, Artificial Sequence
  ENSG00000160180_5 (sequence is synthesized)
ggcaagcgcttctgctgaaagttcatatctggagcctgatgtcttaacgaataaaggtcccatgctccacccgaggacagttcttcgtgcctgagactttctgaggttgtgctttatttc

SEQ ID NO: 474625 - DNA, 120 bp, Artificial Sequence
  ENSG00000160180_6 (sequence is synthesized)
tgctgcgtcgtgggagagggcgggagggtgtcaggggagagtctgcccaggcctcaagggcaggaaaagactccctaaggagctgcagtgcatgcaaggatattttgaatccagactggc

SEQ ID NO: 474626 - DNA, 120 bp, Artificial Sequence
  ENSG00000160180_7 (sequence is synthesized)
acccacgtcacaggaaagcctaggaacactgtaagtgccgcttcctcgggaaagcagaaaaaatacatttcaggtagaagttttcaaaaatcacaagtctttcttggtgaagacagcaag

SEQ ID NO: 474627 - DNA, 120 bp, Artificial Sequence
  ENSG00000160180_8 (sequence is synthesized)
ccaataaaactgtcttccaaagtggtcctttatttcacaaccactctcgctactgttcaatacttgtactattcctgggttttgtttctttgtacagtaaacattatgaacaaacaggca

SEQ ID NO: 474628 - DNA, 120 bp, Artificial Sequence
  ENSG00000160181_0 (sequence is synthesized)
attctgcaagccaccctggggtgcagctgagctagacatgggacggcgagacgcccagctcctggcagcgctcctcgtcctggggctatgtgccctggcggggagtgagaaaccctcccc

SEQ ID NO: 474629 - DNA, 120 bp, Artificial Sequence
  ENSG00000160181_1 (sequence is synthesized)
ctgccagtgctccaggctgagcccccataacaggacgaactgcggcttccctggaatcaccagtgaccagtgttttgacaatggatgctgtttcgactccagtgtcactggggtcccctg

SEQ ID NO: 474630 - DNA, 120 bp, Artificial Sequence
  ENSG00000160181_2 (sequence is synthesized)
tttccaccccctcccaaagcaagagtcggatcagtgcgtcatggaggtctcagaccgaagaaactgtggctacccgggcatcagccccgaggaatgcgcctctcggaagtgctgcttctc

SEQ ID NO: 474631 - DNA, 120 bp, Artificial Sequence
  ENSG00000160181_3 (sequence is synthesized)
caacttcatctttgaagtgccctggtgcttcttcccgaagtctgtggaagactgccattactaagagaggctggttccagaggatgcatctggctcaccgggtgttccgaaaccaaagaa

SEQ ID NO: 474632 - DNA, 120 bp, Artificial Sequence
  ENSG00000160181_4 (sequence is synthesized)
gaaacttcgccttatcagcttcatacttcatgaaatcctgggttttcttaaccatcttttcctcattttcaatggtttaacatataatttctttaaataaaacccttaaaatctgctaaa

SEQ ID NO: 474633 - DNA, 120 bp, Artificial Sequence
  ENSG00000160181_5 (sequence is synthesized)
attctgcaagccaccctggggtgcagctgagctagacatgggacggcgagacgcccagctcctggcagcgctcctcgtcctggggctatgtgccctggcggggagtgagaaaccctagat

SEQ ID NO: 474634 - DNA, 120 bp, Artificial Sequence
  ENSG00000160181_6 (sequence is synthesized)
tgcattctgcaagccaccctggggtgcagctgagctagacatgggacggcgagacgcccagctcctggcagcgctcctcgtcctggggctatgtgccctggcggggagtgagaaaccctg

SEQ ID NO: 474635 - DNA, 120 bp, Artificial Sequence
  ENSG00000160182_0 (sequence is synthesized)
atccctgactcggggtcgcctttggagcagagaggaggcaatggccaccatggagaacaaggtgatctgcgccctggtcctggtgtccatgctggccctcggcaccctggccgaggccca

SEQ ID NO: 474636 - DNA, 120 bp, Artificial Sequence
  ENSG00000160182_1 (sequence is synthesized)
gacagagacgtgtacagtggccccccgtgaaagacagaattgtggttttcctggtgtcacgccctcccagtgtgcaaataagggctgctgtttcgacgacaccgttcgtggggtcccctg

SEQ ID NO: 474637 - DNA, 120 bp, Artificial Sequence
  ENSG00000160182_2 (sequence is synthesized)
taataccatcgacgtccctccagaagaggagtgtgaattttagacacttctgcagggatctgcctgcatcctgacgcggtgccgtccccagcacggtgattagtcccagagctcggctgc

SEQ ID NO: 474638 - DNA, 120 bp, Artificial Sequence
  ENSG00000160182_3 (sequence is synthesized)
cacctccaccggacacctcagacacgcttctgcagctgtgcctcggctcacaacacagattgactgctctgactttgactactcaaaattggcctaaaaattaaaagagatcgatattaa

SEQ ID NO: 474639 - DNA, 120 bp, Artificial Sequence
  ENSG00000160183_0 (sequence is synthesized)
aggtcatgcccgtgtgagccaggaaagggctgtgtttatgggaagccagtaacactgtggcctactatctcttccgtggtgccatctacatttttgggactcgggaattatgaggtagag

SEQ ID NO: 474640 - DNA, 120 bp, Artificial Sequence
  ENSG00000160183_1 (sequence is synthesized)
gtggaggcggagccggatgtcagaggtcctgaaatagtcaccatgggggaaaatgatccgcctgctgttgaagcccccttctcattccgatcgctttttggccttgatgatttgaaaata

SEQ ID NO: 474641 - DNA, 120 bp, Artificial Sequence
  ENSG00000160183_2 (sequence is synthesized)
agtcctgttgcaccagatgcagatgctgttgctgcacagatcctgtcactgctgccattgaagttttttccaatcatcgtcattgggatcattgcattgatattagcactggccattggt

SEQ ID NO: 474642 - DNA, 120 bp, Artificial Sequence
  ENSG00000160183_3 (sequence is synthesized)
ctgggcatccacttcgactgctcagggaagtacagatgtcgctcatcctttaagtgtatcgagctgatagctcgatgtgacggagtctcggattgcaaagacggggaggacgagtaccgc

SEQ ID NO: 474643 - DNA, 120 bp, Artificial Sequence
  ENSG00000160183_4 (sequence is synthesized)
tgtgtccgggtgggtggtcagaatgccgtgctccaggtgttcacagctgcttcgtggaagaccatgtgctccgatgactggaagggtcactacgcaaatgttgcctgtgcccaactgggt

SEQ ID NO: 474644 - DNA, 120 bp, Artificial Sequence
  ENSG00000160183_5 (sequence is synthesized)
ttcccaagctatgtgagttcagataacctcagagtgagctcgctggaggggcagttccgggaggagtttgtgtccatcgatcacctcttgccagatgacaaggtgactgcattacaccac

SEQ ID NO: 474645 - DNA, 120 bp, Artificial Sequence
  ENSG00000160183_6 (sequence is synthesized)
tcagtatatgtgagggagggatgtgcctctggccacgtggttaccttgcagtgcacagcctgtggtcatagaaggggctacagctcacgcatcgtgggtggaaacatgtccttgctctcg

SEQ ID NO: 474646 - DNA, 120 bp, Artificial Sequence
  ENSG00000160183_7 (sequence is synthesized)
cagtggccctggcaggccagccttcagttccagggctaccacctgtgcgggggctctgtcatcacgcccctgtggatcatcactgctgcacactgtgtttatgacttgtacctccccaag

SEQ ID NO: 474647 - DNA, 120 bp, Artificial Sequence
  ENSG00000160183_8 (sequence is synthesized)
tcatggaccatccaggtgggtctagtttccctgttggacaatccagccccatcccacttggtggagaagattgtctaccacagcaagtacaagccaaagaggctgggcaatgacatcgcc

SEQ ID NO: 474648 - DNA, 120 bp, Artificial Sequence
  ENSG00000160183_9 (sequence is synthesized)
cttatgaagctggccgggccactcacgttcaatgaaatgatccagcctgtgtgcctgcccaactctgaagagaacttccccgatggaaaagtgtgctggacgtcaggatggggggccaca

SEQ ID NO: 474649 - DNA, 120 bp, Artificial Sequence
  ENSG00000160183_10 (sequence is synthesized)
ggatggagcaggtgacgcctcccctgtcctgaaccacgcggccgtccctttgatttccaacaagatctgcaaccacagggacgtgtacggtggcatcatctccccctccatgctctgcgc

SEQ ID NO: 474650 - DNA, 120 bp, Artificial Sequence
  ENSG00000160183_11 (sequence is synthesized)
gggctacctgacgggtggcgtggacagctgccagggggacagcggggggcccctggtgtgtcaagagaggaggctgtggaagttagtgggagcgaccagctttggcatcggctgcgcaga

SEQ ID NO: 474651 - DNA, 120 bp, Artificial Sequence
  ENSG00000160183_12 (sequence is synthesized)
ggtgaacaagcctggggtgtacacccgtgtcacctccttcctggactggatccacgagcagatggagagagacctaaaaacctgaagaggaaggggacaagtagccacctgagttcctga

SEQ ID NO: 474652 - DNA, 120 bp, Artificial Sequence
  ENSG00000160183_13 (sequence is synthesized)
ggtgatgaagacagcccgatcctcccctggactcccgtgtaggaacctgcacacgagcagacacccttggagctctgagttccggcaccagtagcaggcccgaaagaggcacccttccat

SEQ ID NO: 474653 - DNA, 67 bp, Artificial Sequence
  ENSG00000160183_14 (sequence is synthesized)
tccggcaccagtagcaggcccgaaagaggcacccttccatctgattccagcacaaccttcaagctgc

SEQ ID NO: 474654 - DNA, 76 bp, Artificial Sequence
  ENSG00000160183_15 (sequence is synthesized)
tagcctcacgctcctttctgatcttcactaagaacaaaagaagcagcaacttgcaagggcggcctttcccactggt

SEQ ID NO: 474655 - DNA, 120 bp, Artificial Sequence
  ENSG00000160183_16 (sequence is synthesized)
aaagaagcagcaacttgcaagggcggcctttcccactggtccatctggttttctctccaggggtcttgcaaaattcctgacgagataagcagttatgtgacctcacgtgcaaagccacca

SEQ ID NO: 474656 - DNA, 120 bp, Artificial Sequence
  ENSG00000160183_17 (sequence is synthesized)
acagccactcagaaaagacgcaccagcccagaagtgcagaactgcagtcactgcacgttttcatctctagggaccagaaccaaacccaccctttctacttccaagacttattttcacatg

SEQ ID NO: 474657 - DNA, 120 bp, Artificial Sequence
  ENSG00000160183_18 (sequence is synthesized)
tggggaggttaatctaggaatgactcgtttaaggcctattttcatgatttctttgtagcatttggtgcttgacgtattattgtcctttgattccaaataatatgtttccttccctcattg

SEQ ID NO: 474658 - DNA, 120 bp, Artificial Sequence
  ENSG00000160183_19 (sequence is synthesized)
atgtgagtaccgaaactacttatgcttatggtaggtgtaccacacgcacagggaaagaattgcgtttatgtgggacaggtgaaaacaatcgcaaaaaagcaatggaaagggctttgagag

SEQ ID NO: 474659 - DNA, 120 bp, Artificial Sequence
  ENSG00000160183_20 (sequence is synthesized)
taatttatcttctgaacaatagcaatatggcaacttctaaatggtgagagggagtccctctaaagcaatcgatttgaagattggttggacaaacaatgggaaagtcattgtcttagcaga

SEQ ID NO: 474660 - DNA, 120 bp, Artificial Sequence
  ENSG00000160183_21 (sequence is synthesized)
ttttttttttttttttttgctaattctagaagcttttctgttatctgctgtagctcagacgaaaatgcattctcaccagatgactgtttttggttaatcgatactgaatgcgctttgtgt

SEQ ID NO: 474661 - DNA, 120 bp, Artificial Sequence
  ENSG00000160183_22 (sequence is synthesized)
tgaatgcgctttgtgtggactgtcgaatttcaaagatttaccgtatgaccaagatgcacctgatgctacaagtataaataggggaacaaatgctttctgttcttcctcggctaaggaggt

SEQ ID NO: 474662 - DNA, 120 bp, Artificial Sequence
  ENSG00000160183_23 (sequence is synthesized)
aggtcatgcccgtgtgagccaggaaagggctgtgtttatgggaagccagtaacactgtggcctactatctcttccgtggtgccatctacatttttgggactcgggaattataagcttttc

SEQ ID NO: 474663 - DNA, 120 bp, Artificial Sequence
  ENSG00000160183_24 (sequence is synthesized)
gccacgttggattagggcccaccctaatgactcattttaactagatgactctgtaaagactctccaggccatctccaaataagatgccattctgaggtactaagagttaagacctcaacg

SEQ ID NO: 474664 - DNA, 120 bp, Artificial Sequence
  ENSG00000160183_25 (sequence is synthesized)
tgtctttctgggggatactattcaacccatagcacatcccctcatcccccatggaataaccgggtcagaggtggagcaggtaggactgaactagagaatgtgccccttggtgggtggccc

SEQ ID NO: 474665 - DNA, 120 bp, Artificial Sequence
  ENSG00000160183_26 (sequence is synthesized)
tttccctaattaaggcacctttctttgggctgagacttctctgcaaagaggggagggggaaaggatagttaaatttgtaagtttcatggcactccaagtcaggttctgtggctttctgct

SEQ ID NO: 474666 - DNA, 120 bp, Artificial Sequence
  ENSG00000160183_27 (sequence is synthesized)
tgaagcattcttatgatggctgctttataatccttgtcagatattaataattccaactcctgattcatgttggtgttggcatcagttgattatcttttctcattaaaattgtgatgctcc

SEQ ID NO: 474667 - DNA, 120 bp, Artificial Sequence
  ENSG00000160183_28 (sequence is synthesized)
attagcagcggacaggaccaaggcccatgatgtcccatcactctgaagagccttgagtccctgactcagttcccacttcctccttacacgtgcacagtgcccactccaggcctcgggcag

SEQ ID NO: 474668 - DNA, 120 bp, Artificial Sequence
  ENSG00000160183_29 (sequence is synthesized)
tgcccctcgttcctggcagaggggagtgttcacaccacaagggtggggtctggagcagtcagggaggtgcgtgcaccagcggcagtgaggagggggctgcagaaggttcctgcctgctcc

SEQ ID NO: 474669 - DNA, 120 bp, Artificial Sequence
  ENSG00000160183_30 (sequence is synthesized)
tgacatcccagggtgttgtcatcactgggggaataggatggggagtggtgctgccaatgctgggcactgaccaagcagggcaggtgcttttcccaccgcatcctccacagcacccaccat

SEQ ID NO: 474670 - DNA, 120 bp, Artificial Sequence
  ENSG00000160183_31 (sequence is synthesized)
cctcaggtctccccaagagcctgaccacctcccctgctgagctcccccttgcagcacttgtcttagagctgctgtgagctctgggagcaggggcagtgagggtggggagagaggagcagg

SEQ ID NO: 474671 - DNA, 120 bp, Artificial Sequence
  ENSG00000160183_32 (sequence is synthesized)
tgcatggtggtgacaccatgtcccccaaagaagtctgcagggtggacccacaagcctttgttcccctccatagcctgtggtcatagaaggggctacagctcacgcatcgtgggtggaaac

SEQ ID NO: 474672 - DNA, 120 bp, Artificial Sequence
  ENSG00000160183_33 (sequence is synthesized)
tgagtgctgctgaccatcttcccagacccctgttcactcctgggtcatgtcagggtggggctgctttgggtggtgagaagcgggtccagagggaagacagagagactaacctccaagtaa

SEQ ID NO: 474673 - DNA, 120 bp, Artificial Sequence
  ENSG00000160183_34 (sequence is synthesized)
tgtacagttggagaggagtctccagcctcactgtggacccatcatcatcagctgggggtaacttgtgaccctgagcttgttttaaggattgtagctcctagagaaagggcagacagaaga

SEQ ID NO: 474674 - DNA, 120 bp, Artificial Sequence
  ENSG00000160183_35 (sequence is synthesized)
ggaaggaagctcctgtgctggaggaaacccacaaaaatgaaaggacctagaccttcccatagctaattccagtggaccatgttatggcagagacagggtgagacggtggtgcgggaggct

SEQ ID NO: 474675 - DNA, 120 bp, Artificial Sequence
  ENSG00000160183_36 (sequence is synthesized)
agagggaatatgttgggggccaggtactgggtctcttcttaaaatctcaggagtttagagtgcaagaaaactacagaaaagacttccaaacacaatggttctccctgatatttttacccc

SEQ ID NO: 474676 - DNA, 120 bp, Artificial Sequence
  ENSG00000160183_37 (sequence is synthesized)
ctattttgttgctgtttgatgaacagtagtgcctgatagactccttgcagtgaccaatgttgagttcagccctcaaatgccaagacgacctcagaggtgctgagagtgaggtctgggaaa

SEQ ID NO: 474677 - DNA, 120 bp, Artificial Sequence
  ENSG00000160183_38 (sequence is synthesized)
cacatggggtgtgggtctgtgtttctgtagggcgtggcagtgcagttgcatatacagcataaacaagcagggtgatgggaccacatcttgcctgataacctctcccaccatcttcctagg

SEQ ID NO: 474678 - DNA, 120 bp, Artificial Sequence
  ENSG00000160185_0 (sequence is synthesized)
agcctcagccttgcctctccccctcttgctttatctcctcatttctgtgtgcaggcgagcttcttggcctaagggcaggaagagatggcagcgggggagacgcagctctacgccaaggtc

SEQ ID NO: 474679 - DNA, 120 bp, Artificial Sequence
  ENSG00000160185_1 (sequence is synthesized)
tccaacaagctcaagagccgcagcagcccctcgctcctggagcccctcctggccatgggcttcccggtgcacaccgcgctgaaagcgttggcagccacggggaggaagacggcggaggag

SEQ ID NO: 474680 - DNA, 120 bp, Artificial Sequence
  ENSG00000160185_2 (sequence is synthesized)
gccttggcctggctgcatgatcattgcaatgacccttccctagacgaccccatcccccaggagtatgcccttttcctctgtccaacggggcccctgctggaaaaacttcaagagttctgg

SEQ ID NO: 474681 - DNA, 120 bp, Artificial Sequence
  ENSG00000160185_3 (sequence is synthesized)
agagagagcaagcgccagtgtgcaaagaacagagctcatgaggtcttcccacacgtgacactctgtgacttcttcacgtgtgaagaccagaaggtggaatgcctgtacgaggcgctgaag

SEQ ID NO: 474682 - DNA, 120 bp, Artificial Sequence
  ENSG00000160185_4 (sequence is synthesized)
agagctggagacaggctcctgggctccttccccacggccgtgcctctggctctccactcctccatcagctacctcggcttcttcgtcagtggcagccccgcagacgtcatccgggaattc

SEQ ID NO: 474683 - DNA, 120 bp, Artificial Sequence
  ENSG00000160185_5 (sequence is synthesized)
gccatgaccttcgccacggaagcatctctcttagcagactgctccgtgaagccttgcaccaaacagctgcatctgaccttggcccacaagttctacccccaccaccagaggacgctggag

SEQ ID NO: 474684 - DNA, 120 bp, Artificial Sequence
  ENSG00000160185_6 (sequence is synthesized)
cagctggccagagccatccccctgggccacagctgccagtggaccgcagcactctactcccgagacatgcgctttgtgcactaccagaccctgagagccctattccagtacaaaccccag

SEQ ID NO: 474685 - DNA, 120 bp, Artificial Sequence
  ENSG00000160185_7 (sequence is synthesized)
aacgtggatgagctgacgctaagtcctggtgactacatctttgtggaccccacgcagcaggacgaagccagcgagggctgggtgattgggatctcacagcggacgggctgccggggcttc

SEQ ID NO: 474686 - DNA, 120 bp, Artificial Sequence
  ENSG00000160185_8 (sequence is synthesized)
tgaactccagaaaggatggtgaagccagcagcagatgcagcggggaatttcttccacaaacggcaaggagtcttagcagcttacaggccttgcaggctaccgttgcaaggaagagcgtgc

SEQ ID NO: 474687 - DNA, 120 bp, Artificial Sequence
  ENSG00000160185_9 (sequence is synthesized)
tggtggttcgccacggggagagagtggatcagatcttcgggaaggcatggctgcagcaatgctccactcctgatgggaaatactacaggccagacctgaatttcccctgcagtctgccaa

SEQ ID NO: 474688 - DNA, 120 bp, Artificial Sequence
  ENSG00000160185_10 (sequence is synthesized)
gacggagtcgtgggatcaaagactttgaaaacgatcccccattatcatcgtgtggcattttccagtccagaattgcaggggacgcgctactggacagtggtatcagaatcagctctgtgt

SEQ ID NO: 474689 - DNA, 120 bp, Artificial Sequence
  ENSG00000160185_11 (sequence is synthesized)
ttgcctccccagccctccgctgtgtgcagacggccaaactcatcctggaagaactcaaactggagaaaaaaatcaagatacgagtggaacctggaatctttgaatggacaaaatgggaag

SEQ ID NO: 474690 - DNA, 120 bp, Artificial Sequence
  ENSG00000160185_12 (sequence is synthesized)
ctggcaaaaccaccccaaccctcatgagcctggaagagctgaaagaggcaaatttcaacattgacactgattacaggcccgcgtttcccctgtccgccctcatgccggccgagagctacc

SEQ ID NO: 474691 - DNA, 120 bp, Artificial Sequence
  ENSG00000160185_13 (sequence is synthesized)
aggagtacatggacaggtgcacggcgagcatggtgcaaatcgtcaacacctgtccacaggacacgggtgtcatcctaattgtgagtcacggctccactctggactcctgcacgcggccac

SEQ ID NO: 474692 - DNA, 120 bp, Artificial Sequence
  ENSG00000160185_14 (sequence is synthesized)
tgctcgggctgccgccccgggaatgtggggattttgcccaactcgtgagaaagatcccttccctgggcatgtgcttctgtgaagaaaataaagaggaaggaaaatgggagttggtgaacc

SEQ ID NO: 474693 - DNA, 120 bp, Artificial Sequence
  ENSG00000160185_15 (sequence is synthesized)
caccggtgaagaccctgacccacggggcgaacgcagcatttaactggaggaactggatctcaggcaactgagagccacggtgatgttgtcataacctcagagtggagaggcagaaaccat

SEQ ID NO: 474694 - DNA, 120 bp, Artificial Sequence
  ENSG00000160185_16 (sequence is synthesized)
cttccgtttcccgcttctggattttcagccaggtgcctggacatggccctaacctgaggctgagcaatttaactagagcctccttcgtgagccactacatccttcaaaaatactgctccg

SEQ ID NO: 474695 - DNA, 120 bp, Artificial Sequence
  ENSG00000160185_17 (sequence is synthesized)
tttatatcccggaatatttccctccggctttcgcctttgtaactcccatctgtggacccatcgtccaccagcccagctgcggggagcacagggcaggtggctgggtgaggatgccgccct

SEQ ID NO: 474696 - DNA, 120 bp, Artificial Sequence
  ENSG00000160185_18 (sequence is synthesized)
gcagcatgtacaccgagtgtctgcagctggggacacaactgcccgggactctaacttccaggaattaaagactcaccacacacgaaggatctaaccacttcattttccatggtctaatca

SEQ ID NO: 474697 - DNA, 120 bp, Artificial Sequence
  ENSG00000160185_19 (sequence is synthesized)
ttaaattcccaatcgttttttctttttctgggtccatcactctttagccatatccacatgggctaaaacaggtgtaatagtcaataaaatggtcccagaaaaccatcgaccaggtcaaaa

SEQ ID NO: 474698 - DNA, 120 bp, Artificial Sequence
  ENSG00000160185_20 (sequence is synthesized)
cttcacgggaccagccgtctgattcagaaaaaaaatggcccagtgggtagctccacagcaaaacacaatggcccagcaggcagctctacaggggcaccgggaagacaagaagaatgtggg

SEQ ID NO: 474699 - DNA, 120 bp, Artificial Sequence
  ENSG00000160185_21 (sequence is synthesized)
agctgctcaggagaaaagaaggagaagggagagacagacagccactgctctactcagctccgccagaggggcttaaggaagggcacacccacttctgctaccgcggcctggccccaactc

SEQ ID NO: 474700 - DNA, 120 bp, Artificial Sequence
  ENSG00000160185_22 (sequence is synthesized)
tgctgttggcaaactgatttgttccacccatttcaaggaattccatcagggcccaaggaaccctccattccaacaccaggcccctcggtgctggatggaaaggaggaatgcaaacctctg

SEQ ID NO: 474701 - DNA, 120 bp, Artificial Sequence
  ENSG00000160185_23 (sequence is synthesized)
aagggaaaagatttctggaagatgtcccaggagaagcagtaccttccaaagcctccaaccaccaccccggattgcccgagacttgcagggatccccagagcacaagactaaacctggaaa

SEQ ID NO: 474702 - DNA, 120 bp, Artificial Sequence
  ENSG00000160185_24 (sequence is synthesized)
catgagcctgccttgaggcagagccatcctggaagaacgttctccttccccagctaactgcagctgagccttcctaatccctacgaaagtgccagggcagcagcctctccttctcatcct

SEQ ID NO: 474703 - DNA, 120 bp, Artificial Sequence
  ENSG00000160185_25 (sequence is synthesized)
ggccatgggcttcccggtgcacaccgcgtgagtactgcccagagaccccggggcccagccagtaaggctggtgccagaccctgctgcggcccccggcatggagctgcaggggtgtagggt

SEQ ID NO: 474704 - DNA, 120 bp, Artificial Sequence
  ENSG00000160185_26 (sequence is synthesized)
ctgaggaggctggggcacagagaggttaagcaacttgcccaaggtcacacagcaagaaagtggcaatgtagaggtttgatctaggaatggatgattcaggaagttggcaggaatgaaaga

SEQ ID NO: 474705 - DNA, 120 bp, Artificial Sequence
  ENSG00000160185_27 (sequence is synthesized)
aaggcatggaaagaacaagagaggggaggaaaaatcaacaaccaaggagctccaaggagctcacttttcaaatggaaaaccacatcctctcattcgttggttttatttcaaaatctgtca

SEQ ID NO: 474706 - DNA, 120 bp, Artificial Sequence
  ENSG00000160185_28 (sequence is synthesized)
ctttgggcttttgtttcatgtctggcggttctgcttctacgtgactgagtttatgtaaacagaagagaccattgagttcatcgagtcttcatttcctaaattcagaaaatggaatccaga

SEQ ID NO: 474707 - DNA, 120 bp, Artificial Sequence
  ENSG00000160185_29 (sequence is synthesized)
gaagcaagttacaccaatggttaactgcagagacccccacggcccactcgcccagggccccactcagagccctccgctgtgtgcagacggccaaactcatcctggaaggtcagtgagaac

SEQ ID NO: 474708 - DNA, 120 bp, Artificial Sequence
  ENSG00000160188_0 (sequence is synthesized)
agaggcgctgcggctgtgatccaggctggggcgagaccatgtcggacctgggctcggaggagttggaggaggagggagagaatgatattggggaatatgaggggggtcggaatgaggcag

SEQ ID NO: 474709 - DNA, 120 bp, Artificial Sequence
  ENSG00000160188_1 (sequence is synthesized)
gcgaaaggcacggacgtgggagggcacggctacccaacggggacacctacgaagggagctacgaattcggtaaaagacatggccaggggatctacaaatttaaaaatggtgctcgatata

SEQ ID NO: 474710 - DNA, 120 bp, Artificial Sequence
  ENSG00000160188_2 (sequence is synthesized)
tcggagaatatgttagaaataaaaagcacggtcaaggcacttttatatatccagatggatccagatatgaaggagagtgggcaaatgacctgcggcacggccatggcgtatactactaca

SEQ ID NO: 474711 - DNA, 120 bp, Artificial Sequence
  ENSG00000160188_3 (sequence is synthesized)
tcaataatgacacctacactggagagtggtttgctcatcaaaggcatgggcaaggcacctatttatacgcggagacgggcagtaagtatgttggcacctgggtgaacggacagcaggagg

SEQ ID NO: 474712 - DNA, 120 bp, Artificial Sequence
  ENSG00000160188_4 (sequence is synthesized)
gcacggccgagctcattcacctgaaccacaggtaccagggcaagttcttgaacaaaaatcctgttggccctggaaagtatgtatttgatgttgggtgtgaacaacatggtgaatatcgtt

SEQ ID NO: 474713 - DNA, 120 bp, Artificial Sequence
  ENSG00000160188_5 (sequence is synthesized)
accaactctccccaaaaagccgacctctacggatggacctggccaagacgctccaggagctgagagtgcaggagaacccggggaggaggcccaggctctgctggagggcttcgagggtga

SEQ ID NO: 474714 - DNA, 120 bp, Artificial Sequence
  ENSG00000160188_6 (sequence is synthesized)
gatggacatgaggcctggagatgaagatgcagacgtcctccgggaagagagccgggagtatgaccaggaggagttccgctatgacatggatgagggaaacattaattctgaagaagaaga

SEQ ID NO: 474715 - DNA, 120 bp, Artificial Sequence
  ENSG00000160188_7 (sequence is synthesized)
aactagacagtcagacctccaggactaagatgaagtgagccgagaggagatcgtatcataagaatgcttctgtcgttagccgggtgcagtgctgtgtgtatctagttccagctacttgag

SEQ ID NO: 474716 - DNA, 79 bp, Artificial Sequence
  ENSG00000160188_8 (sequence is synthesized)
gttgcagtgagtggagatcgcgccactgctaaacaaaaacaaaatgcttctgtcagttaacaatctttattagagggtt

SEQ ID NO: 474717 - DNA, 120 bp, Artificial Sequence
  ENSG00000160188_9 (sequence is synthesized)
caaaatgcttctgtcagttaacaatctttattagagggtttttagtctttctttctcagctgtatgttaagttgattgacaaatgcaaataaacgtctttattatcctttctttctgaaa

SEQ ID NO: 474718 - DNA, 120 bp, Artificial Sequence
  ENSG00000160188_10 (sequence is synthesized)
gtctgcagattgtttacacttactgaggaacagaatcataacaaaagcccagttaccaactctgccaggcaggtccaatctttctatggctttgaggcaaggatgcctttctgtgcaagt

SEQ ID NO: 474719 - DNA, 120 bp, Artificial Sequence
  ENSG00000160188_11 (sequence is synthesized)
gtagactcaagtatctgacatctgcacctcagttggggcagagcacgtgagtctttcacccaagagtcccagggagtggagggcacagaagagccactgggggacctgagccacagctcc

SEQ ID NO: 474720 - DNA, 120 bp, Artificial Sequence
  ENSG00000160188_12 (sequence is synthesized)
cactagctctgcctcttccctggggaaagcagctgacacacaggaggcttgcctctgtccagctggcctgtcctctgtgcctctggcaatgtcctgtgcttggggcacactgagcaaggg

SEQ ID NO: 474721 - DNA, 120 bp, Artificial Sequence
  ENSG00000160188_13 (sequence is synthesized)
gcaccttctgactggacacagatatagaagctacatcgcttgtgagcctgcaacagcctgggcctccctcaatgtcaatgtctgtgttttaaacctgggagatttttcactgtgctggaa

SEQ ID NO: 474722 - DNA, 120 bp, Artificial Sequence
  ENSG00000160188_14 (sequence is synthesized)
tcattcacctgaaccacaggtaccagggcaagttcttgaacaaaaatgtaagtccatgggaagtgacatttgccaatgaagtacaaaataaccccctctggcagcctgtgcaaatgtgtg

SEQ ID NO: 474723 - DNA, 120 bp, Artificial Sequence
  ENSG00000160188_15 (sequence is synthesized)
accagagaataccaaaaactcagagaaaactgagtccggcctattcaaatgtggagaacaggacagctgtgccattctctgagcctctggtacccacagagcacagaattgggggaaggg

SEQ ID NO: 474724 - DNA, 120 bp, Artificial Sequence
  ENSG00000160188_16 (sequence is synthesized)
agggattggcccgtttctctggatctcagtacaaattcccactgtctttcagcggggacctgttgcattgttatataacacgagagggcatctgaacctcttgtgtgtattccttctcat

SEQ ID NO: 474725 - DNA, 120 bp, Artificial Sequence
  ENSG00000160188_17 (sequence is synthesized)
gggtaaatcagataccaaatatctatttcctgcaattgagcatagaggtgtttgggttttgtttccctggaaggggaggtgcgacatccctggggaggaagacccccagctccctcctca

SEQ ID NO: 474726 - DNA, 120 bp, Artificial Sequence
  ENSG00000160188_18 (sequence is synthesized)
tgctacaggccagcctgcgtgctcctagttgtggtgggaattaaggctgccaagggcctggccctgcgtctggaggcttgccagcttctagcacccatggtgggccgtttctgtttggaa

SEQ ID NO: 474727 - DNA, 120 bp, Artificial Sequence
  ENSG00000160188_19 (sequence is synthesized)
gactcggtggttcctcttgcccttattgtacagagaaaccttgaataattcagaagctaatactcaggccatcgtggtagctttgatcaggggttgagcagaaactttccctgaagagag

SEQ ID NO: 474728 - DNA, 120 bp, Artificial Sequence
  ENSG00000160188_20 (sequence is synthesized)
aatttgcggagcaaattgatggtgttagaagttgacagagggaatgtttagctgatacaacgaagtctcttcagactctcttagaacccagttttcatttacgtataattcatgccctaa

SEQ ID NO: 474729 - DNA, 120 bp, Artificial Sequence
  ENSG00000160188_21 (sequence is synthesized)
ccacagattttacttttagtcttcatcaaaacagcacattcccctcaaacccatacattgtttatataattcccagcaaactttctgtgggtctttttggaggagatgggaaggtggttg

SEQ ID NO: 474730 - DNA, 120 bp, Artificial Sequence
  ENSG00000160188_22 (sequence is synthesized)
cagaggaagagaatttgatgaaaatgaatctggaagaatcaatcagcttgtccagcctaaaccagtctgaaaaatcgggcctgttggccctggaaagtatgtatttgatgttgggtgtga

SEQ ID NO: 474731 - DNA, 120 bp, Artificial Sequence
  ENSG00000160190_0 (sequence is synthesized)
cgcacctgcggggcagccggcgctcaggcgccgcagccgctcagcacctgcggcgccctcagggagccgggcgcggggccctgcgcactcggagctcggctcctctccttccttttcttt

SEQ ID NO: 474732 - DNA, 120 bp, Artificial Sequence
  ENSG00000160190_1 (sequence is synthesized)
ttttcttttttttcggggggaggtgggggctggtttggatgttttccgagagccggggacggtctcaagctattttcgcggagggaagtctttgaaatacgacatctagaagagtggccc

SEQ ID NO: 474733 - DNA, 120 bp, Artificial Sequence
  ENSG00000160190_2 (sequence is synthesized)
tcggcgacaatgccgggcgttcccggaccggggcaacgctgggattccggggaagtggaggcagagggagcgggcacggggccggcagccgctccacggagtccccggcaggggcgagct

SEQ ID NO: 474734 - DNA, 120 bp, Artificial Sequence
  ENSG00000160190_3 (sequence is synthesized)
tagctgtccagccgggtcccctgcccaccccggcccgggccgcggtgacagctgagggtccagagagccggcaggaggggaccctgcgcattgtctgccgcgatggggacgtgggcgtgc

SEQ ID NO: 474735 - DNA, 120 bp, Artificial Sequence
  ENSG00000160190_4 (sequence is synthesized)
ccgcggaattcacctcctccggggaccagccgcccagggaggagccggcacagaacgctggctcggagcgccggcaccctgggcctttgcgttgtttgtcggctgagcagctggttcccg

SEQ ID NO: 474736 - DNA, 120 bp, Artificial Sequence
  ENSG00000160190_5 (sequence is synthesized)
gagcccgtgggcctcctggccaatgcgagtgacagcgaccttctgggtttataataaagggcttgacgcgccggaaagtcccctcgccgctggccaccagccttccagcccttacggccc

SEQ ID NO: 474737 - DNA, 120 bp, Artificial Sequence
  ENSG00000160190_6 (sequence is synthesized)
acgccgtaatcctggtgaccgagaagagagcagagccactgccagaaggaaggggacaagacccagcaggacaccttctttccacgctttccagcctgtgggagcggcaggggcaacaga

SEQ ID NO: 474738 - DNA, 120 bp, Artificial Sequence
  ENSG00000160190_7 (sequence is synthesized)
gagaggatctggagccaggattaatgactcatttatgaagcatcttattctgcgaccgaggctcagtggtcagtggcgacgtaaatggctcgactccccgctggcattcgcttcatcatc

SEQ ID NO: 474739 - DNA, 120 bp, Artificial Sequence
  ENSG00000160190_8 (sequence is synthesized)
tcattctccagggatcagtggtacagagccttcatttttattttgacatttctgctgtatgcaagttttcacttatctcgaaagcctatcagcatagttaagggtgagctccacaagtac

SEQ ID NO: 474740 - DNA, 120 bp, Artificial Sequence
  ENSG00000160190_9 (sequence is synthesized)
tgcactgcttgggatgaagctgacgtcaggttcagcagccagaacaggaagtctgggtccgctgccccccaccagctccctgacaatgagaccgactgtggctgggcaccgtttgataag

SEQ ID NO: 474741 - DNA, 120 bp, Artificial Sequence
  ENSG00000160190_10 (sequence is synthesized)
aacaactatcagcagctgcttggggccctggactactccttcctgtgcgcctatgccgtggggatgtacctcagtggcatcattggggagcgcctgccgattaggtattacctaactttc

SEQ ID NO: 474742 - DNA, 120 bp, Artificial Sequence
  ENSG00000160190_11 (sequence is synthesized)
gggatgctcgccagcggagccttcaccgccctgttcggcttagggtatttctacaacatccacagtttcggattctacgtggtaactcaggtcatcaacgggctggtgcagaccaccggc

SEQ ID NO: 474743 - DNA, 120 bp, Artificial Sequence
  ENSG00000160190_12 (sequence is synthesized)
tggcccagcgtcgtcacctgcctcggcaactggtttggaaaaggaaggagaggtttgattatgggggtctggaactcccacacctccgtgggcaacatcttggggtcattgatcgctggc

SEQ ID NO: 474744 - DNA, 120 bp, Artificial Sequence
  ENSG00000160190_13 (sequence is synthesized)
tactgggtgtccacatgctggggcctgtccttcgtcgtgcctggagccatcgtggcagccatggggatagtgtgctttctcttcctcattgaacatccgaacgacgtcaggtgctcctcc

SEQ ID NO: 474745 - DNA, 120 bp, Artificial Sequence
  ENSG00000160190_14 (sequence is synthesized)
tgctgctctcagatgggaagggctccatccacccgaaccacgtcgtcattctccccggggacggtgggagtggcacggccgccatcagcttcacaggggccttgaaaattccaggcgtga

SEQ ID NO: 474746 - DNA, 120 bp, Artificial Sequence
  ENSG00000160190_15 (sequence is synthesized)
tagagttctcactgtgtctgctgtttgccaagctggtcagctatactttcctcttctggctgcccctgtacatcacgaatgtggatcaccttgatgccaaaaaggcgggggagctctcca

SEQ ID NO: 474747 - DNA, 120 bp, Artificial Sequence
  ENSG00000160190_16 (sequence is synthesized)
ccctgtttgacgtgggcggaatctttggtgggatcctggcaggtgtgatctcagaccgactggagaaaagggcctccacctgcggcctgatgctgctgctcgcggcccccacgctctaca

SEQ ID NO: 474748 - DNA, 120 bp, Artificial Sequence
  ENSG00000160190_17 (sequence is synthesized)
tcttctccaccgtcagcaagatggggcttgaggccaccatcgccatgctgctgctcagcggagccctggtcagtgggccctacacactcatcaccaccgccgtctccgccgacctgggga

SEQ ID NO: 474749 - DNA, 120 bp, Artificial Sequence
  ENSG00000160190_18 (sequence is synthesized)
ctcataaaagtctgaaaggcaacgcgcacgccctctccaccgtgacggccatcattgacgggacgggctctgtaggagcagccctgggccccctgctggctgggctcctctccccgtccg

SEQ ID NO: 474750 - DNA, 120 bp, Artificial Sequence
  ENSG00000160190_19 (sequence is synthesized)
gctggagcaatgtgttttacatgctgatgtttgcagatgcctgtgccttactgttcctgatccgcctcatacacaaggagctgagctgcccagggtcagctacgggggaccaagttccat

SEQ ID NO: 474751 - DNA, 120 bp, Artificial Sequence
  ENSG00000160190_20 (sequence is synthesized)
ttaaggaacagtgacaccccaccccagtcccgtggagggggtctgggcccacccttcacaactgcctttcaaggacagttcagacaaagggccctgcatggaaagagtgacctccctttg

SEQ ID NO: 474752 - DNA, 120 bp, Artificial Sequence
  ENSG00000160190_21 (sequence is synthesized)
ccttttgcacacgcacctggaaaagacacagaagccaacctgagaacccctggtgctattttaaaggagacatattgctgaacagcagtgagaaaagtctgcaggaactgctgcctgagc

SEQ ID NO: 474753 - DNA, 120 bp, Artificial Sequence
  ENSG00000160190_22 (sequence is synthesized)
caagccagagaaccgaagacccggccggccctggcctcacaggcgtgtgcccatgcagccacccaaatgcacgcgtgacaacaaggccgggagggtggggggggtgcacaggtagccccg

SEQ ID NO: 474754 - DNA, 120 bp, Artificial Sequence
  ENSG00000160190_23 (sequence is synthesized)
accctctcaggcattccagccacagaacatcaaagtgagcgagtactgcgctggctgtggcttcagagaacctgtatgtgccacatggaaaaacaggacaccagagcccaccagacagtg

SEQ ID NO: 474755 - DNA, 120 bp, Artificial Sequence
  ENSG00000160190_24 (sequence is synthesized)
ccggccagcagagaagcagagagccagcgccacacaacatcaagaaggccgacaaccaggttggaaaccaagacggagctcagacccaccacatcgccccagaggcttttccagcaccca

SEQ ID NO: 474756 - DNA, 120 bp, Artificial Sequence
  ENSG00000160190_25 (sequence is synthesized)
tgatgtttcggactgacctaaaaactaattgtcgagaagccaagggtgaggaggcaggaagcacctccggttggaggcacccaggcttgccagccacagagcgccccaaagtcaccgtca

SEQ ID NO: 474757 - DNA, 120 bp, Artificial Sequence
  ENSG00000160190_26 (sequence is synthesized)
tcccagcccctggccttcctgctgccctccggggccatggcactgctgttcagctcaggcacaggggcacagcagaggtttgggaagcggtctccccaccggcactgggattggcgggtc

SEQ ID NO: 474758 - DNA, 120 bp, Artificial Sequence
  ENSG00000160190_27 (sequence is synthesized)
caagcccagcaaccggcttcgctccacaacacacaccacacctgggactgtttttaatacatagcaacagactgggttatttatttaagatgtgtattgtgtcatatgaagtttaagaga

SEQ ID NO: 474759 - DNA, 120 bp, Artificial Sequence
  ENSG00000160190_28 (sequence is synthesized)
cataaatggcattttgttatttattaagacaaactccaattgttctctggctgtttttttcagttgtgtctagcaaaatacttatctgccctttgaaataaaatgtttttgtttaaaaaa

SEQ ID NO: 474760 - DNA, 120 bp, Artificial Sequence
  ENSG00000160190_29 (sequence is synthesized)
tgggaagttcgcgcaagtgcggctctgcagggaggagggagggccgaggggaaggccctcgagagagtggagggcaacagtggccacggttcctctgtacttcgtttcttccctttatag

SEQ ID NO: 474761 - DNA, 120 bp, Artificial Sequence
  ENSG00000160190_30 (sequence is synthesized)
aattgagagattgctgagcctaaatacatgttgctgcattgcctccgagaatggccggacctatccccactctcaccaaaacagagtgtgggactcactgctccctcgcctactagagca

SEQ ID NO: 474762 - DNA, 120 bp, Artificial Sequence
  ENSG00000160190_31 (sequence is synthesized)
ggggagctgtggctcagacctctggtttctgcgcctcctcactctccaaacccaacctcgaggttcccccgccgctgcgcaccctgggaagccctttctcaccaggagctctcaccccaa

SEQ ID NO: 474763 - DNA, 120 bp, Artificial Sequence
  ENSG00000160190_32 (sequence is synthesized)
cttaccatctctctggttgtgcttctgacgcattccctacacaactggaacgtgtttccaggtcagcctccctaagcacctcccaaggcctccaccccacagtgtcgcacagaacttgac

SEQ ID NO: 474764 - DNA, 120 bp, Artificial Sequence
  ENSG00000160190_33 (sequence is synthesized)
acataccagatgctccaattattaaatattactgagtacttttagaaaattgggaacatacaataaagtataatgaagaaaataaagaaaaccaataatctcacttcccaaagataataa

SEQ ID NO: 474765 - DNA, 120 bp, Artificial Sequence
  ENSG00000160190_34 (sequence is synthesized)
gattcgcggctagctgtgatgtgtccgccaagatctcttctcttgtctgtaaacaacttcactctcaaggaggcagctctggcctctcagcaggtgcggcctacagtgatgtccgtccgg

SEQ ID NO: 474766 - DNA, 120 bp, Artificial Sequence
  ENSG00000160190_35 (sequence is synthesized)
gttttacatccttccccgacctcgacatgagtcccagccccctcgggcctctgactctcaggtgtcccctacgatcgccgtcctctcctctcgctcctggctcccctacactgtcacaca

SEQ ID NO: 474767 - DNA, 120 bp, Artificial Sequence
  ENSG00000160190_36 (sequence is synthesized)
cccacacaatcacagacgcacacgcatgtacacgtgcaggcttggaaatctgctttacctgacgcactccgcctgccgaaggcccctcacatctcccatttcctctgccatcatcccaga

SEQ ID NO: 474768 - DNA, 120 bp, Artificial Sequence
  ENSG00000160190_37 (sequence is synthesized)
ctgcaaagctgtgttatttgttgttgctgcaggagctggggaggagtgactgaataactataggatttggtcttgatgggagaatcccagaagccaaatccacgcggtgaataagctgct

SEQ ID NO: 474769 - DNA, 120 bp, Artificial Sequence
  ENSG00000160190_38 (sequence is synthesized)
aatatgaaaggttacaaccataacccatcatcaggcccaaatatattacttactgaataaatacacaagttacaacaacacacgagattccaaaattatgtcgttttttagatgcaaaga

SEQ ID NO: 474770 - DNA, 120 bp, Artificial Sequence
  ENSG00000160190_39 (sequence is synthesized)
taaaaatgttgtaaacaccaaaatttaacagcttttcttatggggaaaagtggggagttagggataacagatgattattattttcttctctacatattggcagttacccagttactacaa

SEQ ID NO: 474771 - DNA, 120 bp, Artificial Sequence
  ENSG00000160190_40 (sequence is synthesized)
ttaagcatgtcctatttttataataaaatgccagaagcattttaaatgttagaaatctagaatggtaacataagtatatgcaaataaatactcgttttttacatttaaaatgtcagaaat

SEQ ID NO: 474772 - DNA, 120 bp, Artificial Sequence
  ENSG00000160190_41 (sequence is synthesized)
ttagctttcaaatttgtcctaacaatgacagtaaccagtgtttactaagttctgacactgtgtgtgggcactgttttaagaattttatgagttatcttattaaatcctcactatcattcc

SEQ ID NO: 474773 - DNA, 120 bp, Artificial Sequence
  ENSG00000160190_42 (sequence is synthesized)
tccattgaacatctaaggaaagggagttatagggggttataaactaaaaataacctcctaagccccaccacagccaactgaatggacccctcttggccaagagggccccagaaaccttaa

SEQ ID NO: 474774 - DNA, 120 bp, Artificial Sequence
  ENSG00000160190_43 (sequence is synthesized)
aaactgcgttctcagccatgatgggaagggaggtcgaacatgcctcactaatacccttgtgcagtttagacacaacaactaacaagcattaatgttaaaatagagatcataagactgaca

SEQ ID NO: 474775 - DNA, 120 bp, Artificial Sequence
  ENSG00000160190_44 (sequence is synthesized)
gaatggacgctgtggcagtaagataccaacttacaaacaggacctaaggccatgccaggcatgagttaagtcatgcatccctacacttaaaagaataaactatattttaactacctggag

SEQ ID NO: 474776 - DNA, 120 bp, Artificial Sequence
  ENSG00000160190_45 (sequence is synthesized)
gtggggcagaggatggggatggtagcaggtacatggggaaacagattatgtagaaacaagttattctgctgctttggcttttcggtttccctttgctaaaattaaagtcttttaaatgtt

SEQ ID NO: 474777 - DNA, 120 bp, Artificial Sequence
  ENSG00000160190_46 (sequence is synthesized)
aacttactaggtttaaatggctgttctttggatcatctgtgggttcttttaatgcctgaatgttctaatgaagcctccagatggatttccactaagtagcagtaaaattcctgtcattac

SEQ ID NO: 474778 - DNA, 120 bp, Artificial Sequence
  ENSG00000160190_47 (sequence is synthesized)
gacggtaaggaccctgttttcttgtccttttctagaacagtgtgcggttctgaccacttccccagcctgctcctgcctgtgcggtgtcagacagaaacacacagggtagacagaagtccc

SEQ ID NO: 474779 - DNA, 120 bp, Artificial Sequence
  ENSG00000160190_48 (sequence is synthesized)
tccagatgaaggacttcatgctaaggggaaccaaaggctgggccctggccaggcctcctcaggagtggagacctcctggtttccccaggggcctcagtgtgacggggaaaaacgcacgtg

SEQ ID NO: 474780 - DNA, 120 bp, Artificial Sequence
  ENSG00000160190_49 (sequence is synthesized)
tcagctgcctgccatcacttaagttggtggctgcacgtctcaggtggccgagaggtctgcccagcacgccattccttctcttctgtacccctgcccagctcagccagcgtaggccctgca

SEQ ID NO: 474781 - DNA, 120 bp, Artificial Sequence
  ENSG00000160190_50 (sequence is synthesized)
ggcaggattgctgaccacgttggctgccatgaatgagccctgccctagctgcctccacccgcagccagtcaccactggccactttcccacctggctaaggccagccctcccgcggtaccg

SEQ ID NO: 474782 - DNA, 120 bp, Artificial Sequence
  ENSG00000160191_0 (sequence is synthesized)
cctcccccgcctcccgcggcggctggcgtcgggaaagtacagtaaaaagtccgagtgcagccgccgggcgcaggatgggatccggctcctccagctaccggcccaaggccatctacctgg

SEQ ID NO: 474783 - DNA, 120 bp, Artificial Sequence
  ENSG00000160191_1 (sequence is synthesized)
acatcgatggacgcattcagaaggtaatcttcagcaagtactgcaactccagcgacatcatggacctgttctgcatcgccaccggcctgcctcggaacacgaccatctccctgctgacca

SEQ ID NO: 474784 - DNA, 120 bp, Artificial Sequence
  ENSG00000160191_2 (sequence is synthesized)
ccgacgacgccatggtctccatcgaccccaccatgcccgcgaattcagaacgcactccgtacaaagtgagacctgtggccatcaagcaactctccgctggtgtcgaggacaagagaacca

SEQ ID NO: 474785 - DNA, 120 bp, Artificial Sequence
  ENSG00000160191_3 (sequence is synthesized)
caagccgtggccagtctgctgagagaccactgagggacagacgggttgtgggcctggagcagccccggagggaaggagcatttgaaagtggacaggtagagcccaggcccagagagcccc

SEQ ID NO: 474786 - DNA, 120 bp, Artificial Sequence
  ENSG00000160191_4 (sequence is synthesized)
agggctgctaccaggaaggccagcgcatccctccagagagagaagaattaatccagagcgtgctggcgcaggttgcagagcagttctcaagagcattcaaaatcaatgaactgaaagctg

SEQ ID NO: 474787 - DNA, 120 bp, Artificial Sequence
  ENSG00000160191_5 (sequence is synthesized)
aagttgcaaatcacttggctgtcctagagaaacgcgtggaattggaaggactaaaagtggtggagattgagaaatgcaagagtgacattaagaagatgagggaggagctggcggccagaa

SEQ ID NO: 474788 - DNA, 120 bp, Artificial Sequence
  ENSG00000160191_6 (sequence is synthesized)
gcagcaggaccaactgcccctgtaagtacagttttttggataaccacaagaagttgactcctcgacgcgatgttcccacttaccccaagtacctgctctctccagagaccatcgaggccc

SEQ ID NO: 474789 - DNA, 120 bp, Artificial Sequence
  ENSG00000160191_7 (sequence is synthesized)
tgcggaagccgacctttgacgtctggctttgggagcccaatgagatgctgagctgcctggagcacatgtaccacgacctcgggctggtcagggacttcagcatcaaccctgtcaccctca

SEQ ID NO: 474790 - DNA, 120 bp, Artificial Sequence
  ENSG00000160191_8 (sequence is synthesized)
agaaacaaccccttccacaacttccggcactgcttctgcgtggcccagatgatgtacagcatggtctggctctgcagtctccaggagaagttctcacaaacggatatcctgatcctaatg

SEQ ID NO: 474791 - DNA, 120 bp, Artificial Sequence
  ENSG00000160191_9 (sequence is synthesized)
acagcggccatctgccacgatctggaccatcccggctacaacaacacgtaccagatcaatgcccgcacagagctggcggtccgctacaatgacatctcaccgctggagaaccaccactgc

SEQ ID NO: 474792 - DNA, 120 bp, Artificial Sequence
  ENSG00000160191_10 (sequence is synthesized)
gccgtggccttccagatcctcgccgagcctgagtgcaacatcttctccaacatcccacctgatgggttcaagcagatccgacagggaatgatcacattaatcttggccactgacatggca

SEQ ID NO: 474793 - DNA, 120 bp, Artificial Sequence
  ENSG00000160191_11 (sequence is synthesized)
agacatgcagaaattatggattctttcaaagagaaaatggagaattttgactacagcaacgaggagcacatgaccctgctgaagatgattttgataaaatgctgtgatatctctaacgag

SEQ ID NO: 474794 - DNA, 120 bp, Artificial Sequence
  ENSG00000160191_12 (sequence is synthesized)
gtccgtccaatggaagtcgcagagccttgggtggactgtttattagaggaatattttatgcagagcgaccgtgagaagtcagaaggccttcctgtggcaccgttcatggaccgagacaaa

SEQ ID NO: 474795 - DNA, 120 bp, Artificial Sequence
  ENSG00000160191_13 (sequence is synthesized)
gtgaccaaggccacagcccagattgggttcatcaagtttgtcctgatcccaatgtttgaaacagtgaccaagctcttccccatggttgaggagatcatgctgcagccactttgggaatcc

SEQ ID NO: 474796 - DNA, 120 bp, Artificial Sequence
  ENSG00000160191_14 (sequence is synthesized)
cgagatcgctacgaggagctgaagcggatagatgacgccatgaaagagttacagaagaagactgacagcttgacgtctggggccaccgagaagtccagagagagaagcagagatgtgaaa

SEQ ID NO: 474797 - DNA, 120 bp, Artificial Sequence
  ENSG00000160191_15 (sequence is synthesized)
aacagtgaaggagactgtgcctgaggaaagcggggggcgtggctgcagttctggacgggctggccgagctgcgcgggatccttgtgcagggaagagctgccctgggcacctggcaccaca

SEQ ID NO: 474798 - DNA, 120 bp, Artificial Sequence
  ENSG00000160191_16 (sequence is synthesized)
agaccatgttttctaagaaccattttgttcactgatacaaaaaaaaaaaaaggaattcatgatgctgtacagaattttatttttaaactgtcttttaaataatatattcttatacggaaa

SEQ ID NO: 474799 - DNA, 120 bp, Artificial Sequence
  ENSG00000160191_17 (sequence is synthesized)
ggatgggatccggctcctccagctaccggcccaaggccatctacctggacatcgatggacgcattcagaagcactccgtacaaagtgagacctgtggccatcaagcaactctccgagcat

SEQ ID NO: 474800 - DNA, 120 bp, Artificial Sequence
  ENSG00000160191_18 (sequence is synthesized)
gcgaattcagaacggaatgagctcattctctatacatcactccgtaacttgttgtttttacctagtaaggagtcatgggcgtcccaccagcactccgtacaaagtgagacctgtggccat

SEQ ID NO: 474801 - DNA, 120 bp, Artificial Sequence
  ENSG00000160191_19 (sequence is synthesized)
ggatgggatccggctcctccagctaccggcccaaggccatctacctggacatcgatggacgcattcagaagcactccgtacaaagtgagacctgtggccatcaagcaactctccgagaga

SEQ ID NO: 474802 - DNA, 120 bp, Artificial Sequence
  ENSG00000160191_20 (sequence is synthesized)
acagtaaaaagtccgagtgcagccgccgggcgcaggatgggatccggctcctccagctaccggcccaaggccatctacctggacatcgatggacgcattcagaaggaacacgaccatctc

SEQ ID NO: 474803 - DNA, 120 bp, Artificial Sequence
  ENSG00000160191_21 (sequence is synthesized)
gtaagagtcttgcagagcaatcaagcctccagccactcttattagccccacttagtaagggtttgcgttaaacgagcacgcctgggtggtcccgcatattccccgggctgccgacagttc

SEQ ID NO: 474804 - DNA, 120 bp, Artificial Sequence
  ENSG00000160191_22 (sequence is synthesized)
tacatgtcttaaaacaacagcacaccatcttgactaccgtagataaatagtaggtcttgaaatcaggtactctaagttatctctggtttcttttttctttttcaaaaatgttattgcttt

SEQ ID NO: 474805 - DNA, 120 bp, Artificial Sequence
  ENSG00000160191_23 (sequence is synthesized)
tattttcaaataaattttagaatcagtctatgaattgcttccaaaaaaacagtctgctaggattttgactgaagttgcattaaatatacagaccaatgtgggaagaattaatatcttaag

SEQ ID NO: 474806 - DNA, 120 bp, Artificial Sequence
  ENSG00000160191_24 (sequence is synthesized)
aatgttgagtcttctggttcataaatatggtctatctccccattcatttgggtttcctttaatgtttctcaataatgtgttaccattgttaatatgaagtacttaataaatactgataaa

SEQ ID NO: 474807 - DNA, 120 bp, Artificial Sequence
  ENSG00000160191_25 (sequence is synthesized)
acagtaaaaagtccgagtgcagccgccgggcgcaggatgggatccggctcctccagctaccggcccaaggccatctacctggacatcgatggacgcattcagaagagcattcaaaatcaa

SEQ ID NO: 474808 - DNA, 120 bp, Artificial Sequence
  ENSG00000160191_26 (sequence is synthesized)
ctgccgccacatgcgggaactgctggctccctcgtgcccgcccggggctgaggactgcacgtgcagccacagatgcatccggccctcctgccccacagcctctatgaaggccacataaat

SEQ ID NO: 474809 - DNA, 120 bp, Artificial Sequence
  ENSG00000160191_27 (sequence is synthesized)
ggcaccaagtgtctctgtctgccgatcagcatcccctcttggcttcacagcagacgcatctgcctttcaggactgccttgaacaacatctgggctggtcaggtggagagcgaggagtttc

SEQ ID NO: 474810 - DNA, 120 bp, Artificial Sequence
  ENSG00000160191_28 (sequence is synthesized)
caggttgcagcccctatggtcctgagggctggcgtccaggatggtgggggtccagcagctctgggcagcgaggcccctggctgggtgatccaggtggcagctgaccagtggcctgggagc

SEQ ID NO: 474811 - DNA, 120 bp, Artificial Sequence
  ENSG00000160191_29 (sequence is synthesized)
cagccctcctgtcctcacgtggggccccatctccaaaagccagtgcagtgccctgcacattatccaacctacatctgtactgtctccccaaggaaaacgagtgtgtggttcacgtgcttt

SEQ ID NO: 474812 - DNA, 120 bp, Artificial Sequence
  ENSG00000160191_30 (sequence is synthesized)
aaggacgtttcccaggtgacattccaagctcccatctgtggccgcaagtgggggagtttccagttttccagatagattttctgccatgccagagaaccctccgcctccttcagagccatc

SEQ ID NO: 474813 - DNA, 120 bp, Artificial Sequence
  ENSG00000160191_31 (sequence is synthesized)
tcatcaatgcagtgatcgcaagcttcgatttacaaaaactcgcctcccttgcagcatttccaggtttcacacacagcgtaacaagtaaaaatggatttttgggcagcacgcctgtcctag

SEQ ID NO: 474814 - DNA, 120 bp, Artificial Sequence
  ENSG00000160191_32 (sequence is synthesized)
tttgctgaggctgccataacaaagtaccagagactggggtggcgtcagcagcaaaagttgattcctcagttctggagctggaagtccaggatcaaggtgctgccaggttcggcttctccg

SEQ ID NO: 474815 - DNA, 120 bp, Artificial Sequence
  ENSG00000160191_33 (sequence is synthesized)
gaggcctcggtccctggtctgggaccttcttgctggggcctcggtccctggtgtgggaccttcttgctgggacctcggtccctggtgtgggaccttcttcctggccagcaagatggccgc

SEQ ID NO: 474816 - DNA, 120 bp, Artificial Sequence
  ENSG00000160191_34 (sequence is synthesized)
cttcttgctgggtcctcatgtggcctgttctctcggcacatgcatcccaggtgctcttcctcctctaatgaagacactagtcccatgggaccaaggcctcaccctgactagatggaaact

SEQ ID NO: 474817 - DNA, 120 bp, Artificial Sequence
  ENSG00000160191_35 (sequence is synthesized)
tcattacctccgtaaaggccccgtctccaaatagccccactggggtcggggctttaccatgttgacctggggaagggggcagttcagttcgtaacatgcccttttgggaggagaaagtca

SEQ ID NO: 474818 - DNA, 120 bp, Artificial Sequence
  ENSG00000160191_36 (sequence is synthesized)
ggcaatgagcagacacaggcaggaagccacgccgggctccagcagggatggcccagtgccctgtacaggcagcaggcagctgggctggaggtgggccctgggtggaggacacctaccagg

SEQ ID NO: 474819 - DNA, 120 bp, Artificial Sequence
  ENSG00000160191_37 (sequence is synthesized)
tgtgtctaaactgcccctttcctacacatcttccttcgcactgggctcgccacccaagacctgctttttccagaaagcaaagcctactttggtcaaactctcatttttaaaaatcacttc

SEQ ID NO: 474820 - DNA, 120 bp, Artificial Sequence
  ENSG00000160191_38 (sequence is synthesized)
atcttttcctccctaacttaattagctccaaagcactgagctgtattgaaatagatcaccacaatgacaatcctctttgggactgaaaacaaaatctatttcaacttgaacagggatatt

SEQ ID NO: 474821 - DNA, 120 bp, Artificial Sequence
  ENSG00000160191_39 (sequence is synthesized)
gatagaagacagggctccatgaaaaagggttaggaggagccgcttgctggggcaggggccgcatctgggcactgcagttaagatgttaaagtgtcttcggtcccagggggccgcagatga

SEQ ID NO: 474822 - DNA, 120 bp, Artificial Sequence
  ENSG00000160191_40 (sequence is synthesized)
cctcgggcaaggaaagggcctttctctctgtgatgccacctgtgctcaggtgtgcactggatggaactgtgtcctagacccctcagctgtgatattgatccgctgagattgtttttcatc

SEQ ID NO: 474823 - DNA, 120 bp, Artificial Sequence
  ENSG00000160191_41 (sequence is synthesized)
tgtagaaatcaataaattcctttttggtgcagtgttttgtgaacgggtgcactctctcacccggtcgctgtcctaagaattctccttgacttcggaactggccctccacgccccaggatc

SEQ ID NO: 474824 - DNA, 120 bp, Artificial Sequence
  ENSG00000160191_42 (sequence is synthesized)
cacctgccaggagacccccagtgtgctctcaaacccccacccatctgagtggcctggaaaggctggtctgaagacctctcttcccatgtctgccgaccaggctttgctctccagggactt

SEQ ID NO: 474825 - DNA, 120 bp, Artificial Sequence
  ENSG00000160191_43 (sequence is synthesized)
tctgggagggggagaacccacctcctgccaacggccctgctggcactccgaggacagcagagggaaggaagccaggggctggggagccggccacacaactgcccagtgcctatccttctc

SEQ ID NO: 474826 - DNA, 120 bp, Artificial Sequence
  ENSG00000160191_44 (sequence is synthesized)
acagtaaaaagtccgagtgcagccgccgggcgcaggatgggatccggctcctccagctaccggcccaaggccatctacctggacatcgatggacgcattcagaagagagagaagaattaa

SEQ ID NO: 474827 - DNA, 120 bp, Artificial Sequence
  ENSG00000160193_0 (sequence is synthesized)
ctggcacatgtgtatggcggtgaggcgggcgggtacatggcgggctctgtgggactggcgttgtgcgggcagacgttggtggtgcggggcggcagccgattcctggccacctccatagca

SEQ ID NO: 474828 - DNA, 120 bp, Artificial Sequence
  ENSG00000160193_1 (sequence is synthesized)
agcagtgatgatgacagcctcttcatctatgactgcagtgctgcagaaaagaagtcacaagaaaataaaggggaggacgcgcccttggaccaggggagcggtgcgattctggcgtccacc

SEQ ID NO: 474829 - DNA, 120 bp, Artificial Sequence
  ENSG00000160193_2 (sequence is synthesized)
ttctccaagtctggcagctattttgctttaaccgatgacagtaagcgtctgattcttttccgtacaaaaccatggcaatgtctgagtgtcaggaccgtggcaaggaggtgtacagccctg

SEQ ID NO: 474830 - DNA, 120 bp, Artificial Sequence
  ENSG00000160193_3 (sequence is synthesized)
actttcatagcctcggaggagaaggtcttggtggccgacaagtctggagacgtctactccttttcggtgctggagccacacgggtgtggccgtctagagctggggcacctgtctatgctg

SEQ ID NO: 474831 - DNA, 120 bp, Artificial Sequence
  ENSG00000160193_4 (sequence is synthesized)
ttagatgtggctgtgagtcctgatgaccgcttcatcctcactgccgaccgggacgagaagatccgagtcagctgggccgcggcgccccatagcatcgagtccttctgcttggggcacaca

SEQ ID NO: 474832 - DNA, 120 bp, Artificial Sequence
  ENSG00000160193_5 (sequence is synthesized)
gagtttgtgagccgtatctccgtggtgccaactcagcccgggctgcttctgtcctcctctggggacggcaccctgaggctctgggagtacaggagcggccgccagctgcactgctgtcac

SEQ ID NO: 474833 - DNA, 120 bp, Artificial Sequence
  ENSG00000160193_6 (sequence is synthesized)
aggccccccagaagtttgccgcgtccaggattgcattctggtgccaggagaactgcgtggcgctcctgtgcgacggcactcctgtggtctacatcttccagctggacgcccgcagacagc

SEQ ID NO: 474834 - DNA, 120 bp, Artificial Sequence
  ENSG00000160193_7 (sequence is synthesized)
agttggtgtacaggcagcagctggcgttccagcaccaagtgtgggacgtggctttcgaggagacccaggggctgtgggtgctccaggactgccaggaagcccccctggtgctctacaggc

SEQ ID NO: 474835 - DNA, 120 bp, Artificial Sequence
  ENSG00000160193_8 (sequence is synthesized)
ctgtgggcgaccagtggcagtctgttcctgagagcaccgtgttaaagaaagtctctggtgttcttcgtgggaactgggccatgctggaaggctctgccggcgcagacgccagcttcagca

SEQ ID NO: 474836 - DNA, 120 bp, Artificial Sequence
  ENSG00000160193_9 (sequence is synthesized)
gtctctacaaggccacgttcgacaacgtgacctcctacctgaagaagaaagaggagagactgcagcagcagctagagaagaagcagcggcgccggagtcccccgcctgggcccgacgggc

SEQ ID NO: 474837 - DNA, 120 bp, Artificial Sequence
  ENSG00000160193_10 (sequence is synthesized)
atgccaagaagatgagaccgggggaggcgacgctaagttgctgatcgtggcggtctgtttctgtcgactgtggaccacttatgtgcgatccgtggaccacttgcgtgcgatctgtcggcc

SEQ ID NO: 474838 - DNA, 120 bp, Artificial Sequence
  ENSG00000160193_11 (sequence is synthesized)
gacgatgagcttgttcggatgtagctccatcgtaagtcgaggagcatctgtgatttgtcctctgcttatgggatatgtttttccgctactgagtctgtgtagtaaatttttgactaggaa

SEQ ID NO: 474839 - DNA, 120 bp, Artificial Sequence
  ENSG00000160193_12 (sequence is synthesized)
cgacgctaagttgctgatcgtggcggtcagtggtgtctctcacctcaaattaggaaaagctttttaacttgttcccctgcatcctggcatgtcccttcaagaaggaaaaggtgacatcag

SEQ ID NO: 474840 - DNA, 120 bp, Artificial Sequence
  ENSG00000160193_13 (sequence is synthesized)
ttgtgaccagctcagaggatggggctgtcccctgggctctagaaagaacattctgtgtcaccagcacaggctcttgctgggtgcctgtgccccctttctggttgaagggaagccagacca

SEQ ID NO: 474841 - DNA, 120 bp, Artificial Sequence
  ENSG00000160193_14 (sequence is synthesized)
gtggagtggaagctcttgaagcactttcttttcatgtcggaggctgcgtgtgagccggtggtggcggcagctgtctgtgtttctcctgttctcataccgcccttcgtgtccgctgcatct

SEQ ID NO: 474842 - DNA, 120 bp, Artificial Sequence
  ENSG00000160193_15 (sequence is synthesized)
tcctctaggagcatctgtgggctgacgtttctggcatggtggatgttttcatgttgttccgccgtctcagcatccaggtgacgtgctgtcccgcagtagctgctcgccacacaggctgtt

SEQ ID NO: 474843 - DNA, 120 bp, Artificial Sequence
  ENSG00000160193_16 (sequence is synthesized)
gaaactcagcacgaatgcttgagcctgccccagccccagccgtagcccttgtgctcaggagctgctcctggagagtggctcccttgtgggaagtgagaaacacgtttcggagtcgcaggg

SEQ ID NO: 474844 - DNA, 120 bp, Artificial Sequence
  ENSG00000160193_17 (sequence is synthesized)
agctctgtctggcatcggtggcacagatggtgaacttgtttcaggaagtgtgagcacgggcctggctggcacccggtttacagggaggtgattgaggacgtcgttatgatttgatttgac

SEQ ID NO: 474845 - DNA, 120 bp, Artificial Sequence
  ENSG00000160193_18 (sequence is synthesized)
cttggcacacactgcagagccacagggatgttgctgaatttcaatcaccgatcagcaaggatgaaccttctcaacttcctaggaatgtttagcagcaaccgaatataccaggcaaaactc

SEQ ID NO: 474846 - DNA, 120 bp, Artificial Sequence
  ENSG00000160193_19 (sequence is synthesized)
gaggcgggcgggtacatggcgggctctgtgggactggcgttgtgcgggcagacgttggtggtgcggggcggcagccgattcctggccacctccatagcaagcaggtgagggggccttggt

SEQ ID NO: 474847 - DNA, 120 bp, Artificial Sequence
  ENSG00000160193_20 (sequence is synthesized)
cttggaacagggagaccaggctgcgggcgcgcgtcgggtcctggcgaccccgcttctcccgcaccgcctggtcgcacccactctggggtgaccccggggaactccgctccagcccacgag

SEQ ID NO: 474848 - DNA, 120 bp, Artificial Sequence
  ENSG00000160193_21 (sequence is synthesized)
tcctccgccgcagtctcggcctggccgcgtctctgcgcctggagggtccgctttcgccgtccgctctcggcgtccgctccccggctccggcgcgctccttgcactagatggctggtctgc

SEQ ID NO: 474849 - DNA, 120 bp, Artificial Sequence
  ENSG00000160194_0 (sequence is synthesized)
ggctgttcaggcgcgggtgcgcgcgcagctgctgtggccctgcttggtgcgcccgctgtcaccgccatggctgccccgtgtttgctgcggcaaggacgagccggggcgctgaagactatg

SEQ ID NO: 474850 - DNA, 120 bp, Artificial Sequence
  ENSG00000160194_1 (sequence is synthesized)
ctccaggaagcccaggtgtttcgaggacttgcttctacggtttctttgtctgcggaatcagggaagagtgaaaagggtcagccacagaattccaagaagcaaagtccaccaaaaaagcca

SEQ ID NO: 474851 - DNA, 120 bp, Artificial Sequence
  ENSG00000160194_2 (sequence is synthesized)
gccccagtgcctgctgagccgtttgacaacactacctacaagaacctgcagcatcatgactacagcacgtacaccttcttagacctcaacctcgaactctcaaaattcaggatgcctcag

SEQ ID NO: 474852 - DNA, 120 bp, Artificial Sequence
  ENSG00000160194_3 (sequence is synthesized)
ccctcctcaggccgggagtcacctcgacactgagggccctcggtgtgaagatgaaccttccaccgtcttcactgcatcctggagtgcaaaaataaaatccactcaagagtcacaaggccc

SEQ ID NO: 474853 - DNA, 63 bp, Artificial Sequence
  ENSG00000160194_4 (sequence is synthesized)
tcacactttttacagtgagtggtgaattagcaacagtaacactgattatccaacatatatttt

SEQ ID NO: 474854 - DNA, 120 bp, Artificial Sequence
  ENSG00000160194_5 (sequence is synthesized)
gaattagcaacagtaacactgattatccaacatatattttggaatatctactatgtgcaaggaatttttcttaaactctaaggttatgaatcactgggcaaatccatataattagagaat

SEQ ID NO: 474855 - DNA, 120 bp, Artificial Sequence
  ENSG00000160194_6 (sequence is synthesized)
tttaagtgctttagagcggtgtgattctactgtgctcagcctagtcaatttcgcattaaactgattatcagctgagtatcaataatgtaatagtgacttcttttattttttttgagatgg

SEQ ID NO: 474856 - DNA, 79 bp, Artificial Sequence
  ENSG00000160194_7 (sequence is synthesized)
aataatgtaatagtgacttcttttattttttttgagatggagtctctgtttcccaggctggagtccagcggcacaatct

SEQ ID NO: 474857 - DNA, 120 bp, Artificial Sequence
  ENSG00000160194_8 (sequence is synthesized)
ttataggcgtgagccactgcacccagccagtaatagtgacttctaatcctacagccctggtttttgatcattagaaacaggagttttggccaggtgcagtggataattcctgtaatccca

SEQ ID NO: 474858 - DNA, 120 bp, Artificial Sequence
  ENSG00000160194_9 (sequence is synthesized)
agaaacaggagttttggccaggtgcagtggataattcctgtaatcccagcgctttgggagggcgaggcgggtggagcacctgaggtcaggagttgagaccggcctggccaacatagtgaa

SEQ ID NO: 474859 - DNA, 120 bp, Artificial Sequence
  ENSG00000160194_10 (sequence is synthesized)
agtgaaactcaatcaaaaaaaaggaacaggaatgttactaattttaactactgcattgcaaacaaattgtattgcagtattttaccatcagaaaaggaagggaattgttttgtttgcctc

SEQ ID NO: 474860 - DNA, 120 bp, Artificial Sequence
  ENSG00000160194_11 (sequence is synthesized)
tgttagatattttatataaacttgaggacattttcattggtgagattcggaagaggtgaagtttcttgcagtacagggacgaagtaggaagaggtgaagtttcgtgcagtacagggacgg

SEQ ID NO: 474861 - DNA, 120 bp, Artificial Sequence
  ENSG00000160194_12 (sequence is synthesized)
agtaggaagaggtgaagtttcgtgcagtacagggacggagtaggaagaggtgaagtttcgtgcggtgcagggacggagtaggaagaggtgaagtttcgtgcggtgcagggacggagtagg

SEQ ID NO: 474862 - DNA, 120 bp, Artificial Sequence
  ENSG00000160194_13 (sequence is synthesized)
aagaggtgaagtttcgtgcggtgcagggacggagtaggaagaggtgaagttttgtgcggtgcagggacgaagttgctccccgctggccacaggcactcaatgagctattttacctattta

SEQ ID NO: 474863 - DNA, 120 bp, Artificial Sequence
  ENSG00000160194_14 (sequence is synthesized)
gggtttctgggttggccaagtaacctcccatcccttgtgatagataactttaagtcacacctttgggggcaatgtggggggctcctgtgcatcacatggagcacgctcccccagcactct

SEQ ID NO: 474864 - DNA, 120 bp, Artificial Sequence
  ENSG00000160194_15 (sequence is synthesized)
gaatcgcttgaacccgggaggcggggtttgcagtaagccgagatcatgccattgcattcagtctgggtgacagcgtgagactgcatctcaaaaaaaaatttttttttttaaatatcaaaa

SEQ ID NO: 474865 - DNA, 120 bp, Artificial Sequence
  ENSG00000160194_16 (sequence is synthesized)
tatcaaaattgaaaactagtattgtggtcatctgcctcaaattgtgttaccacacgggagacttagcaactcagccagattcttctaaacacattttttataataaaagtggtaaaacta

SEQ ID NO: 474866 - DNA, 90 bp, Artificial Sequence
  ENSG00000160194_17 (sequence is synthesized)
tcttctaaacacattttttataataaaagtggtaaaactacattaccaaaaagaaaatagtaaacttacctaaaatccactatgctaacc

SEQ ID NO: 474867 - DNA, 120 bp, Artificial Sequence
  ENSG00000160194_18 (sequence is synthesized)
gatctcagctcactgcagcctcgtcctcccaggcccaagcaatcctcccatctcagcccactttgtagctgggactgtaggcactggccaccatgtccgcctaatttttctattttttgt

SEQ ID NO: 474868 - DNA, 120 bp, Artificial Sequence
  ENSG00000160194_19 (sequence is synthesized)
agagacagggttcaagagatctgcctgcctcggccccagaaagttctgggattgcaggcgtgagcccccattcccagccattaacatcttacaggattccccagtggtggtggtaggtgt

SEQ ID NO: 474869 - DNA, 120 bp, Artificial Sequence
  ENSG00000160194_20 (sequence is synthesized)
aaccattttaatgtacctacaacttttctatcctgctatttgcattttttggtttttcatttaatagttctcaagctgggatccgtggaactactgtgatgggcggtgatgctttggaaa

SEQ ID NO: 474870 - DNA, 120 bp, Artificial Sequence
  ENSG00000160194_21 (sequence is synthesized)
gaaatggaaattcccttaatattaaaatgaacatgaatatattttgatttgcatatatttttaagataaagcatgagacttgtataaagttctttcctggctgggcgcggtggctcatgc

SEQ ID NO: 474871 - DNA, 120 bp, Artificial Sequence
  ENSG00000160194_22 (sequence is synthesized)
agcaaaactccgtctcaaaaaaataaagttcttcccttagaactagtcctgttgggctagtctttctgggattttggtttactctcctccacccattggaagggcttaaaaccgaatagc

SEQ ID NO: 474872 - DNA, 120 bp, Artificial Sequence
  ENSG00000160194_23 (sequence is synthesized)
cagcaccaagcacagctctgcattttgtagctatcactgcagatgatttcttgatagtccatctggtggcaatacagtggtcacccaaggggccattgtttgggtctatgtgatttccca

SEQ ID NO: 474873 - DNA, 120 bp, Artificial Sequence
  ENSG00000160194_24 (sequence is synthesized)
aaaaataaattaattaattaaattaaataagtgggtgttttaagtgctcagcttccttggttctaccaccttctctccctgaccctccttccctttccccctgaccttggcctttattct

SEQ ID NO: 474874 - DNA, 120 bp, Artificial Sequence
  ENSG00000160194_25 (sequence is synthesized)
agaacggatctgaagcaataggatataaaaaattcacaactgctaaaacagtgttccttctagtgtaattttcacccttagagacctgtctgtaataaacattatttgaaatgcctacta

SEQ ID NO: 474875 - DNA, 120 bp, Artificial Sequence
  ENSG00000160194_26 (sequence is synthesized)
agcagctgaattgtctaaaaacttatcttcacccagttcttacccgccagctgtgaataagggcaggaaggtagctagtcccagtcccagtggcagcgtgctattcacagatgaaggggt

SEQ ID NO: 474876 - DNA, 120 bp, Artificial Sequence
  ENSG00000160194_27 (sequence is synthesized)
tccgaaatttttgtcaagaaagactttggtagagtttccacagaaagttctgtctccattcagaaaacagggctctgattcagaagctcgtcaggtgggtcggaaagtgacgtcgccttc

SEQ ID NO: 474877 - DNA, 120 bp, Artificial Sequence
  ENSG00000160194_28 (sequence is synthesized)
gtcttcatcctcttccagctcctctgattctgaatctgatgatgaggctgacgtttcagaggtcactcctcgagtggtgagcaaaggcagaggggggcttcgaaaaccagaggcctctca

SEQ ID NO: 474878 - DNA, 120 bp, Artificial Sequence
  ENSG00000160194_29 (sequence is synthesized)
ttcctttgaaaacagagccccccgagttacagtatcagcaaaagagaaaaccttgctgcagaagccgcatgtggacattactgatccagagaagccccaccagccaaagaagaaagggtc

SEQ ID NO: 474879 - DNA, 120 bp, Artificial Sequence
  ENSG00000160194_30 (sequence is synthesized)
ccctgctaagccatcagaaggcagggaaaatgcgagaccaaaaaccacaatgcccagatctcaagtagatgaagagtttttgaagcaaagtttaaaggaaaaacaattgcagaaaacatt

SEQ ID NO: 474880 - DNA, 120 bp, Artificial Sequence
  ENSG00000160194_31 (sequence is synthesized)
tagattaaatgaaatagataaagaaagccaaaagccatttgaagttaaaggacccttacctgtccacacaaaatcagggttgtctgcgccaccgaagggcagcccagcgcctgctgtgtt

SEQ ID NO: 474881 - DNA, 120 bp, Artificial Sequence
  ENSG00000160194_32 (sequence is synthesized)
ggcagaagaggccagagcagaggggcagctgcaagccagtcctcctggggcggcagaggggcatctggaaaaacccgtgccagagccccagcgcaaggcggcccctcccctgcccagaaa

SEQ ID NO: 474882 - DNA, 120 bp, Artificial Sequence
  ENSG00000160194_33 (sequence is synthesized)
ggaaacctcagggacgcagggaatagaaggccacctgaagggtggacaggcaatcgtggaagatcagataccaccaagcaatttggagacagttcctgttgagaataaccacggtttcca

SEQ ID NO: 474883 - DNA, 120 bp, Artificial Sequence
  ENSG00000160194_34 (sequence is synthesized)
gtgaaaggtgctgtgaccgccctccgggttgtggctggtggccttcggtgtttcgggtttggcagttcactcaccaaggtgatctgatggagtgcacttcgcacgattccaagtacttgc

SEQ ID NO: 474884 - DNA, 120 bp, Artificial Sequence
  ENSG00000160194_35 (sequence is synthesized)
ctaatgttcatcctttcctctagacggggtagggctggttctggatctttttccgcggtagctggagagacgtaggacctgatgatggctactagatgcctgagaagggagaagacagag

SEQ ID NO: 474885 - DNA, 120 bp, Artificial Sequence
  ENSG00000160194_36 (sequence is synthesized)
gagaatgccagatgaagacagaaacagagattgaagttatgtggccataattcaaggattgctggcaacaccagaagccaagagaaagatgaggaagaattctcccctagacctttcaga

SEQ ID NO: 474886 - DNA, 120 bp, Artificial Sequence
  ENSG00000160194_37 (sequence is synthesized)
aggagcgtggcccagccaacaccctgacttcagacttctggcctccagaactcagcctcctggccggggatagccaatagccccagcccactgaaagcctggtgagcagaaagggaagag

SEQ ID NO: 474887 - DNA, 120 bp, Artificial Sequence
  ENSG00000160199_0 (sequence is synthesized)
gtgtcgcgtggcccagcgtcggcgtgacggttggacgcgggcgcggcactgcgggtcccgattgctgcagccgcttgtcagtgtgatgaagattggcacccagacaccattcgcttttca

SEQ ID NO: 474888 - DNA, 120 bp, Artificial Sequence
  ENSG00000160199_1 (sequence is synthesized)
cccaagatgatttgatgtcttataaaactctgatgaaccatgatggctacacagacattaagtatagacagctatcaagatgggcaacagatgcaagtagtaacagagttaaagacagaa

SEQ ID NO: 474889 - DNA, 120 bp, Artificial Sequence
  ENSG00000160199_2 (sequence is synthesized)
caagatccaaactgctctgaacccgatgcagaaggagtgagccctccccctgtggagtctcagaccccgatggatgtggacaagcaggccatttataggcatccactatttccattatta

SEQ ID NO: 474890 - DNA, 120 bp, Artificial Sequence
  ENSG00000160199_3 (sequence is synthesized)
gctttgttgtttgaaaaatgtgaacaatctacacagggctctgaaggcacaacttctgccagttttgatgtagacatcgaaaattttgtaagaaagcaagagaaggaagggaaacctttc

SEQ ID NO: 474891 - DNA, 120 bp, Artificial Sequence
  ENSG00000160199_4 (sequence is synthesized)
ttttgtgaagatccagaaactgataatttaatggtaaaagcaatccaggttttgcgcattcatcttcttgagctggaaaaggttaacgaactctgcaaagatttctgcagtcgatacatt

SEQ ID NO: 474892 - DNA, 120 bp, Artificial Sequence
  ENSG00000160199_5 (sequence is synthesized)
gcttgtctgaaaacaaaaatgaacagtgaaactctgttgagtggagagcctggaagcccgtactcaccagtgcagtcccagcagattcaaagtgccatcacaggcaccatcagccctcag

SEQ ID NO: 474893 - DNA, 120 bp, Artificial Sequence
  ENSG00000160199_6 (sequence is synthesized)
ggaattgtggtgccggcgtccgcgctgcagcagggaaacgtagccatggcgacggtggcaggtggcacagtgtatcagcctgtcacggtcgtcactccccaaggccaagtggtcacacag

SEQ ID NO: 474894 - DNA, 120 bp, Artificial Sequence
  ENSG00000160199_7 (sequence is synthesized)
acattgtcgcctgggacaattaggatccagaactcccagcttcagttacagttaaaccaagatctcagcatcttgcatcaagatgatggttcatctaagaacaagaggggcgtcctgcca

SEQ ID NO: 474895 - DNA, 120 bp, Artificial Sequence
  ENSG00000160199_8 (sequence is synthesized)
aagcatgccacgaacgtgatgcggtcctggctcttccagcacatcgggcatccctacccaacagaggatgagaaaaaacagattgctgctcagacaaatttgacactactccaagtcaac

SEQ ID NO: 474896 - DNA, 120 bp, Artificial Sequence
  ENSG00000160199_9 (sequence is synthesized)
aactggttcatcaatgccagaagacgaattcttcagccaatgttggattcaagttgttcagagacccccaaaacaaagaaaaaaactgctcagaaccggccagttcagaggttttggcct

SEQ ID NO: 474897 - DNA, 120 bp, Artificial Sequence
  ENSG00000160199_10 (sequence is synthesized)
gattctattgcatcaggagtcgcacagccaccgccgagcgagctcaccatgtcggaaggagctgttgtcaccatcaccacgcccgtgaacatgaacgtggacagccttcagtctctgtcc

SEQ ID NO: 474898 - DNA, 120 bp, Artificial Sequence
  ENSG00000160199_11 (sequence is synthesized)
tcggacggggccaccctggcggtgcagcaggtcatgatggcagggcagagcgaggacgagtctgtggacagcacagaggaggatgcgggtgccctggcccctgcccacatcagcgggctg

SEQ ID NO: 474899 - DNA, 120 bp, Artificial Sequence
  ENSG00000160199_12 (sequence is synthesized)
gtcttggagaacagtgactccctgcagtaggggcaggagcagacgcacctgactttttggagtttgcacagcaaacattttacacagttttatttctaatatgttttatatgtagatata

SEQ ID NO: 474900 - DNA, 120 bp, Artificial Sequence
  ENSG00000160199_13 (sequence is synthesized)
tttctaatatgttttatatgtagatatagaagagtgcacttttgtatttcatagtaagcttaaagcgcgtctttgccggtgcagcgacttctttcaagtgtgtgtgtgtgtgtgtgtgtg

SEQ ID NO: 474901 - DNA, 120 bp, Artificial Sequence
  ENSG00000160199_14 (sequence is synthesized)
gatttttaaagaaattctttaaaggtttaacgctagattgtgaggaatgacacaccactccctccccaccttgaatccctaattagattaaggaatagcgctgccattttctaaaccgtg

SEQ ID NO: 474902 - DNA, 120 bp, Artificial Sequence
  ENSG00000160199_15 (sequence is synthesized)
atgcggttgtcacttagttctgtggttccagcagatctcagtgggctggttgatttgtgtggcccatggatttgaaagaagctgctgcacccgaaactgccagtgtgcggtgacaacggc

SEQ ID NO: 474903 - DNA, 120 bp, Artificial Sequence
  ENSG00000160199_16 (sequence is synthesized)
acacgcctagactgagtgtggtttcgtcgtgagtggatggacggcaagcttagcaagcctaagtcccctcatgttcagtgagcctgtttcatttgctatatagaaaaagaaactcctatt

SEQ ID NO: 474904 - DNA, 120 bp, Artificial Sequence
  ENSG00000160199_17 (sequence is synthesized)
tttaccttgctggaattattggataaaaaagctatttttataaattcgttatgaattggatgatgactatattgaggataaaatttctagagaagaaacaatacatgcttgctattaata

SEQ ID NO: 474905 - DNA, 120 bp, Artificial Sequence
  ENSG00000160199_18 (sequence is synthesized)
tttcaatttggaatgttctgaattgaccaaatttaatgaacctgcccaaagttagctaccgttccatggttctttgctctccccgggtagtgatgaacatttactactataaaagaaaca

SEQ ID NO: 474906 - DNA, 120 bp, Artificial Sequence
  ENSG00000160199_19 (sequence is synthesized)
gctatttaatgaaattttgatatctgcaaatttttgttgatatgtaatgctcagattgcattttacacttgatctaaacatatatcgaaagatatctgctaaacaggacttcaggtaagt

SEQ ID NO: 474907 - DNA, 120 bp, Artificial Sequence
  ENSG00000160199_20 (sequence is synthesized)
gaggtgaaatggtagccagtgacccgttaggagctctcaccgtacatactccagtctaatttaaatctgaccacagttgcatggtcgctttaccatgttagctgtgtattgttttaaaag

SEQ ID NO: 474908 - DNA, 120 bp, Artificial Sequence
  ENSG00000160199_21 (sequence is synthesized)
ttttaacttcaaaatatgttatgcacagaatgtttattataaactaatataaaatgtgctctaccccattggctcagagctagggcaaacagcagatattcagactttattacttaacta

SEQ ID NO: 474909 - DNA, 120 bp, Artificial Sequence
  ENSG00000160199_22 (sequence is synthesized)
agcagcgagctggtctggcgagggcacctcggcagcccccacgggttggctcctacgtttgcgtttgtggctggtctcctggtgtcagtgttctcttgtacgttgttgctttcgactttt

SEQ ID NO: 474910 - DNA, 120 bp, Artificial Sequence
  ENSG00000160199_23 (sequence is synthesized)
cagagccctcctgctcacttgaccacgtgagatttggaataactgtaggacttctgtttcctggtaacaagatgaaccgagagagtgggctgggttctgttttctttggttttgatttgt

SEQ ID NO: 474911 - DNA, 120 bp, Artificial Sequence
  ENSG00000160199_24 (sequence is synthesized)
tttcattgtttacttaggagtggtgctttttctcagaaaacaggccacggtgtttcatacagaatgtcttcatatcatctgaaatggtatggctgaagttcatttgtttacagggtcggg

SEQ ID NO: 474912 - DNA, 120 bp, Artificial Sequence
  ENSG00000160199_25 (sequence is synthesized)
aatgtcttcagttcttgagagtcaacagtaatgattggttgtaagccaagggacattttaagctagtgaagagttttttctggaattgatttttcccaaaagaatatattaattgaggtt

SEQ ID NO: 474913 - DNA, 120 bp, Artificial Sequence
  ENSG00000160199_26 (sequence is synthesized)
aagaagtcagtgggaaacacacagaaatttgttttaaaatctttcaggagctttactgaaagacttggttatcaagtcttttggggagagaatgacattttttttttgagacagagtttt

SEQ ID NO: 474914 - DNA, 120 bp, Artificial Sequence
  ENSG00000160199_27 (sequence is synthesized)
aggtgtgagccaccgcgcccggccgagaatgacatcttaaagccaccattgcgttcctcatttgtgaactgtcttctcatattttaagtcaagtctataagatcatttttaacctaagtt

SEQ ID NO: 474915 - DNA, 120 bp, Artificial Sequence
  ENSG00000160199_28 (sequence is synthesized)
agttccaactttgttggactccttaaaataagcacccatgaaagccagccagcccttcctccttccctcaccaccctccgtctcttcggctgcttgctctttagtgtagattagtggaag

SEQ ID NO: 474916 - DNA, 120 bp, Artificial Sequence
  ENSG00000160199_29 (sequence is synthesized)
ccattcacagaatgtagactcatgtataggtcaccgtttctttcccccactagaaatcacattcactaagcagtggattgaatttaagagtgctgcccctgcccggcgcagtagggcgtg

SEQ ID NO: 474917 - DNA, 120 bp, Artificial Sequence
  ENSG00000160199_30 (sequence is synthesized)
cctctagttccagctactcgggagtctgaggcagaggatggcatgtgccaggagtttgaggctgcagtgcactatgcttgcacctgtgaatagccactgcactccatcttgggcaacaca

SEQ ID NO: 474918 - DNA, 120 bp, Artificial Sequence
  ENSG00000160199_31 (sequence is synthesized)
gtgagacccccatctataaaaagagagcactgcctgaacctcggtggcactgggaagctctggcctgagagttaaacacccatgctgaatgatacagtgtgcattctctccagctgcaaa

SEQ ID NO: 474919 - DNA, 120 bp, Artificial Sequence
  ENSG00000160199_32 (sequence is synthesized)
ctttcttcaactttcctaaattcttactaaattcagaggaataggataaagatcacttagagaaagggtgcttatggacatagcctgagtttcctttaacctctctgcaatgggtgcttt

SEQ ID NO: 474920 - DNA, 120 bp, Artificial Sequence
  ENSG00000160199_33 (sequence is synthesized)
taactagcttctacatggcaagctgtttcagtttgcaaaatcactgcccagcatgtttgaggtcagttggcaccttaaaacacctgttctccagcccttggacagtggagagaatctgta

SEQ ID NO: 474921 - DNA, 120 bp, Artificial Sequence
  ENSG00000160199_34 (sequence is synthesized)
aaagtgtgaccccctctaagatttcgttttaaatgatcagattcggttccagttttattcttgttgagtttttccctatgaaggctccttttgaatgtgtcttgagacccaaattgagca

SEQ ID NO: 474922 - DNA, 120 bp, Artificial Sequence
  ENSG00000160199_35 (sequence is synthesized)
tgttgctgttattcctgccctgcacctgtggagcaggagtggcagggctggctgtgctgggttccagctcgctcccaccgagggactagcttggcctttgcgctttgattccagatagta

SEQ ID NO: 474923 - DNA, 120 bp, Artificial Sequence
  ENSG00000160199_36 (sequence is synthesized)
agatgagtggaagtgtttatcgagcatgcaaaagaaaccctcacggctaagggctctgggagttgtgtctgtgtgacctgagagtgatccatctcctgcctgtgtgaggtagcagtgggc

SEQ ID NO: 474924 - DNA, 120 bp, Artificial Sequence
  ENSG00000160199_37 (sequence is synthesized)
acttttcattgagacaaactccagggtgtccagagggggttctgccccttgtgaaggcccattcctggcacttagagacagaaagaactcagcaatctttcgttctagttatattcggtc

SEQ ID NO: 474925 - DNA, 120 bp, Artificial Sequence
  ENSG00000160199_38 (sequence is synthesized)
tttgaaactgacaatctttgaaatgtgaatactgtaacaatatgttttcttggattgttgtctttaaaaaggatttttgtgaagcaattgatttatcaaagcaaaaaaattaaaaataga

SEQ ID NO: 474926 - DNA, 120 bp, Artificial Sequence
  ENSG00000160199_39 (sequence is synthesized)
aacttgctttatggatgttttattttataaagctcatgtcaccaaaagctgcttctccattttatgtaaaacattgagaatgttttcatgttttctggtgacatgtagggtctgtagtca

SEQ ID NO: 474927 - DNA, 120 bp, Artificial Sequence
  ENSG00000160199_40 (sequence is synthesized)
cccctgcatattgagaaactaggaccacactgcatcggactagtcaggtccatttacatgtccaagaatcttttcttaaattccttactttgttcattcattggctgttcaggcagaaaa

SEQ ID NO: 474928 - DNA, 120 bp, Artificial Sequence
  ENSG00000160199_41 (sequence is synthesized)
tggaaacaggtagcttttatgttttttattatagttttccacaaatctaattattttgatagttacaagaagataatgattcatcagtaagctaacataatccctttcatagttcatatt

SEQ ID NO: 474929 - DNA, 120 bp, Artificial Sequence
  ENSG00000160199_42 (sequence is synthesized)
aaacatcagtccacacagggttcccgtgcatgggcctcgactacaatcatttccctgtccgatccttggctgttttctccacctgcagttgtaagtacttggatatgtgagaatttccta

SEQ ID NO: 474930 - DNA, 120 bp, Artificial Sequence
  ENSG00000160199_43 (sequence is synthesized)
agtgaaactcggtctcaaaaaaaaaaaatttgatgttatggaatgagggagacaaaaaatgctctacaactattaactgatgcttttctggttttgttctccagacaccattcgcttttc

SEQ ID NO: 474931 - DNA, 120 bp, Artificial Sequence
  ENSG00000160199_44 (sequence is synthesized)
ttgcagaaaatggtcctgtgtgttagaatgacagtataaatataatttcaagttcatgccattttctaatatagcaatgttagaagctagaggtctctgaatgcctctttcttgttaata

SEQ ID NO: 474932 - DNA, 120 bp, Artificial Sequence
  ENSG00000160199_45 (sequence is synthesized)
accaaaaatatattggaaagaaaaaaggttttatgtaggaattgaaaatatacaccaaaaaccagttgtcattttcaaataacatagctttttgttgtgcttttaatagcaccgtgaaaa

SEQ ID NO: 474933 - DNA, 120 bp, Artificial Sequence
  ENSG00000160199_46 (sequence is synthesized)
tcttaagttttatcattaattgatgacaaataaaaatgcagtcttagcattggtattacttgtagaacaaaaccgttacaggaaagggacagattccagagttccctgatgcgtagagaa

SEQ ID NO: 474934 - DNA, 120 bp, Artificial Sequence
  ENSG00000160199_47 (sequence is synthesized)
cattgaaaacacaaagcatcatggaaatgggacacggcaaagagggaggggtagaaatttacaccaaagacctcacataatagcacaaagggaaacctcagtgggaaaaaaaaaagcacc

SEQ ID NO: 474935 - DNA, 120 bp, Artificial Sequence
  ENSG00000160199_48 (sequence is synthesized)
attgatccaaaaatataactagaattaaaatagttattatttagtacccttggccaaatccttaacatgtgctaattttaggaaatagtagaaagcagaggctagcaaaaggaagggagc

SEQ ID NO: 474936 - DNA, 120 bp, Artificial Sequence
  ENSG00000160199_49 (sequence is synthesized)
cctcacaccccaggtcagttggtggtgtgtgagccgggctgtgtgggctgccaggcacatagcgcccacccacctgcccacccactgctgcaggtgcccgagtagcccacccagggagtt

SEQ ID NO: 474937 - DNA, 120 bp, Artificial Sequence
  ENSG00000160199_50 (sequence is synthesized)
tgttttgatactttatagtgacaagtcaactggcaaaggattgttgatcttttgaaatgattaaaaagctcatcaaaccagggattttattccttttgtaagtatatcaagaagagggct

SEQ ID NO: 474938 - DNA, 71 bp, Artificial Sequence
  ENSG00000160199_51 (sequence is synthesized)
gggattttattccttttgtaagtatatcaagaagagggctggtcgcagtggttgaagccaggagttagaga

SEQ ID NO: 474939 - DNA, 120 bp, Artificial Sequence
  ENSG00000160199_52 (sequence is synthesized)
attgcttgtggcagaggctcccgggccagaacgcatccacccatcctctttatatggatgtagtttattgttcataagttaaagttcaataaagttgataaagaatctatagattgtatc

SEQ ID NO: 474940 - DNA, 120 bp, Artificial Sequence
  ENSG00000160199_53 (sequence is synthesized)
aagcctggtgtagactcaccgctggactgcatagctgctcctcatgatgtcgctgctgttatcgtcaccgctgaaccgttaaacgtggggggcggtctgccttggcctatgcactaacca

SEQ ID NO: 474941 - DNA, 120 bp, Artificial Sequence
  ENSG00000160199_54 (sequence is synthesized)
gtgagaaggaatttaacaaagaaatgccattcacatctttttcttttaaaatgaagttggcagagtagcctacgctttcctgggtgacaggagggaagcttcagttacagttaaaccaag

SEQ ID NO: 474942 - DNA, 120 bp, Artificial Sequence
  ENSG00000160200_0 (sequence is synthesized)
tcccgggcccgcgacacacgccctcggggtcggtcctcgaggacgcgcagggccccccacccaccaggacgcacgtttcaagctcatcagtaaaggttccttaaattcccgaagggcaag

SEQ ID NO: 474943 - DNA, 120 bp, Artificial Sequence
  ENSG00000160200_1 (sequence is synthesized)
aagttaaccaagtaaaacagcatcggaacaccaggatcccatgacagattctgttgtcacgtctccttacagagtttgagcggtgctgaactgtcagcaccatctgtccggtcccagcat

SEQ ID NO: 474944 - DNA, 120 bp, Artificial Sequence
  ENSG00000160200_2 (sequence is synthesized)
gccttctgagaccccccaggcagaagtggggcccacaggctgcccccaccgctcagggccacactcggcgaaggggagcctggagaaggggtccccagaggataaggaagccaaggagcc

SEQ ID NO: 474945 - DNA, 120 bp, Artificial Sequence
  ENSG00000160200_3 (sequence is synthesized)
cctgtggatccggcccgatgctccgagcaggtgcacctggcagctgggccggcctgcctccgagtccccacatcaccacactgccccggcaaaatctccaaaaatcttgccagatattct

SEQ ID NO: 474946 - DNA, 120 bp, Artificial Sequence
  ENSG00000160200_4 (sequence is synthesized)
gaagaaaatcggggacacccctatggtcagaatcaacaagattgggaagaagttcggcctgaagtgtgagctcttggccaagtgtgagttcttcaacgcgggcgggagcgtgaaggaccg

SEQ ID NO: 474947 - DNA, 120 bp, Artificial Sequence
  ENSG00000160200_5 (sequence is synthesized)
catcagcctgcggatgattgaggatgctgagcgcgacgggacgctgaagcccggggacacgattatcgagccgacatccgggaacaccgggatcgggctggccctggctgcggcagtgag

SEQ ID NO: 474948 - DNA, 120 bp, Artificial Sequence
  ENSG00000160200_6 (sequence is synthesized)
gggctatcgctgcatcatcgtgatgccagagaagatgagctccgagaaggtggacgtgctgcgggcactgggggctgagattgtgaggacgcccaccaatgccaggttcgactccccgga

SEQ ID NO: 474949 - DNA, 120 bp, Artificial Sequence
  ENSG00000160200_7 (sequence is synthesized)
gtcacacgtgggggtggcctggcggctgaagaacgaaatccccaattctcacatcctagaccagtaccgcaacgccagcaaccccctggctcactacgacaccaccgctgatgagatcct

SEQ ID NO: 474950 - DNA, 120 bp, Artificial Sequence
  ENSG00000160200_8 (sequence is synthesized)
gcagcagtgtgatgggaagctggacatgctggtggcttcagtgggcacgggcggcaccatcacgggcattgccaggaagctgaaggagaagtgtcctggatgcaggatcattggggtgga

SEQ ID NO: 474951 - DNA, 120 bp, Artificial Sequence
  ENSG00000160200_9 (sequence is synthesized)
tcccgaagggtccatcctcgcagagccggaggagctgaaccagacggagcagacaacctacgaggtggaagggatcggctacgacttcatccccacggtgctggacaggacggtggtgga

SEQ ID NO: 474952 - DNA, 120 bp, Artificial Sequence
  ENSG00000160200_10 (sequence is synthesized)
ggggctgctgtgcggtggcagtgctggcagcacggtggcggtggccgtgaaggccgcgcaggagctgcaggagggccagcgctgcgtggtcattctgcccgactcagtgcggaactacat

SEQ ID NO: 474953 - DNA, 120 bp, Artificial Sequence
  ENSG00000160200_11 (sequence is synthesized)
gaccaagttcctgagcgacaggtggatgctgcagaagggctttctgaaggaggaggacctcacggagaagaagccctggtggtggcacctccgtgttcaggagctgggcctgtcagcccc

SEQ ID NO: 474954 - DNA, 120 bp, Artificial Sequence
  ENSG00000160200_12 (sequence is synthesized)
gctgaccgtgctcccgaccatcacctgtgggcacaccatcgagatcctccgggagaagggcttcgaccaggcgcccgtggtggatgaggcgggggtaatcctgggaatggtgacgcttgg

SEQ ID NO: 474955 - DNA, 120 bp, Artificial Sequence
  ENSG00000160200_13 (sequence is synthesized)
gaacatgctctcgtccctgcttgccgggaaggtgcagccgtcagaccaagttggcaaagtcatctacaagcagttcaaacagatccgcctcacggacacgctgggcaggctctcgcacat

SEQ ID NO: 474956 - DNA, 120 bp, Artificial Sequence
  ENSG00000160200_14 (sequence is synthesized)
cctggagatggaccacttcgccctggtggtgcacgagcagatccagtaccacagcaccgggaagtccagtcagcggcagatggtgttcggggtggtcaccgccattgacttgctgaactt

SEQ ID NO: 474957 - DNA, 120 bp, Artificial Sequence
  ENSG00000160200_15 (sequence is synthesized)
cgtggccgcccaggagcgggaccagaagtgaagtccggagcgctgggcggtgcggagcgggcccgccacccttgcccacttctccttcgctttcctgagccctaaacacacgcgtgattg

SEQ ID NO: 474958 - DNA, 120 bp, Artificial Sequence
  ENSG00000160200_16 (sequence is synthesized)
gtaactgcctggcctggcaccgttatccctgcacacggcacagagcatccgtctcccctcgttaacacatggcttcctaaatggccctgtttacggcctatgagatgaaatatgtgattt

SEQ ID NO: 474959 - DNA, 120 bp, Artificial Sequence
  ENSG00000160200_17 (sequence is synthesized)
tctctaatgtaacttcctcttaggatgtttcaccaaggaaatattgagagagaagtcggccaggtaggatgaacacaggcaatgactgcgcagagtggattaaaggcaaaagagagaaga

SEQ ID NO: 474960 - DNA, 120 bp, Artificial Sequence
  ENSG00000160200_18 (sequence is synthesized)
gtccaggaaggggcggggagaagcctgggtggctcagcatcctccacgggctgcgccgtctgctcggggctgagctggcgggagcagtttgcgtgtttgggttttttaattgagatgaaa

SEQ ID NO: 474961 - DNA, 120 bp, Artificial Sequence
  ENSG00000160200_19 (sequence is synthesized)
ttcaaataacctaaaaatcaatcacttgaaagtgaacaatcagcggcatttagtacatccagaaagttgtgtaggcaccacctctgtcacgttctggaacattctgtcatcaccccgtga

SEQ ID NO: 474962 - DNA, 120 bp, Artificial Sequence
  ENSG00000160200_20 (sequence is synthesized)
agcaatcatttcccctcccgtcttcctcctcccctggcaactgctgatcgactttgtgtctctgttgtctaaaataggttttccctgttctggacatttcatataaatggaatcacacaa

SEQ ID NO: 474963 - DNA, 80 bp, Artificial Sequence
  ENSG00000160200_21 (sequence is synthesized)
gtgctctgccacgagacattggccggcgccggcctccgcccccgcctctccgccaatcaccgcccgcctgctcccctcgc

SEQ ID NO: 474964 - DNA, 120 bp, Artificial Sequence
  ENSG00000160200_22 (sequence is synthesized)
ggcctggctggtgggtgcccccagttgggttccccagtgtggggtgattcacatctggtgcccagggtcaagatgccctgtgcagggctcctgcccacccccgtcagtgcaagaacacca

SEQ ID NO: 474965 - DNA, 120 bp, Artificial Sequence
  ENSG00000160200_23 (sequence is synthesized)
tctccccacatacttggccagcctgccatgtgtacctgtgcgtgtgagtgtgtgaggggcagagagcgagcatgagaggacgtgtttatctgagtgcctgagcgatggctgtgtgcatgc

SEQ ID NO: 474966 - DNA, 120 bp, Artificial Sequence
  ENSG00000160200_24 (sequence is synthesized)
tcacacacgcttgttggccatgggggcgggaagtccagcccccaggcttccccctggggcttccagccagcacttgggggtctctgctgcaccagtgaggtccaggagaggggctgggca

SEQ ID NO: 474967 - DNA, 120 bp, Artificial Sequence
  ENSG00000160200_25 (sequence is synthesized)
tcttgggtttctcatcctgcctctgaggctgggaacaggccaccacccacaggcagatcattaacaggcagttgttaacggcggtattggccactcccataatagaatatcgaggcatgt

SEQ ID NO: 474968 - DNA, 120 bp, Artificial Sequence
  ENSG00000160200_26 (sequence is synthesized)
aggcagagatggctagggggcactggggatggctgggggcgcaccctcagtcagccaccgacctgcatgtgtaagacagcagttctgaggagtgtcactgcggcggccacgagcctcagg

SEQ ID NO: 474969 - DNA, 120 bp, Artificial Sequence
  ENSG00000160200_27 (sequence is synthesized)
tgttgtctgcctgcccagtgtggtcacctgctcaggtgagggcaggaggccatggggcggggcttcgagctgccttccagaatgtgtttctagaacaaggctgaagctctcatggcactt

SEQ ID NO: 474970 - DNA, 120 bp, Artificial Sequence
  ENSG00000160200_28 (sequence is synthesized)
attgtttctaatcaagtccaccagggcccctggggcggtggctctgcattgacggggcccatggccgggactgggtgctgcgagcaccctggagcagctggggaggggactggagcctga

SEQ ID NO: 474971 - DNA, 120 bp, Artificial Sequence
  ENSG00000160200_29 (sequence is synthesized)
taaaggttccttaaattcccgaagggcaagaagttaaccaagtaaaacagcatcggaacaccaggtgagatccggccccaccgagactcgctcccctctctggacagaggatctcaactg

SEQ ID NO: 474972 - DNA, 120 bp, Artificial Sequence
  ENSG00000160200_30 (sequence is synthesized)
ggtcccggtttccctctccgcgcctccgcccagagttgcatcatctgcaccgaaaggcggcgagacagggtctcccaagacccccgccccaccggcgcccacgcctgcggtcttgaccgc

SEQ ID NO: 474973 - DNA, 120 bp, Artificial Sequence
  ENSG00000160200_31 (sequence is synthesized)
ccagaagatgggggctggccgtgcacgtggccccgggctcccaccccagcccccgcgccggcggagtggaccccactggcggcgagtcctggagcgtggagcagggacgcggggtgggaa

SEQ ID NO: 474974 - DNA, 120 bp, Artificial Sequence
  ENSG00000160200_32 (sequence is synthesized)
gagatgcacgtttcggtgcccagcattgagttcgctgcattgtggatgggaaatggctgtttgcaaatcgccctttttggcggaccgtgtggggtggcggtaaacgctgtcgttgcgcgg

SEQ ID NO: 474975 - DNA, 120 bp, Artificial Sequence
  ENSG00000160200_33 (sequence is synthesized)
gcggcacgcgaggtgggtgcccgctgggggagggacgcggggctctgcccaggttgcgttcgggggatggaggttttcctgggacctcacttccctgagccccaggcgagaccgcagctg

SEQ ID NO: 474976 - DNA, 120 bp, Artificial Sequence
  ENSG00000160200_34 (sequence is synthesized)
agctgtaggatgcaagcgggaggcggagcgtgggtgggagagcggagcgcgaaattctcggcttcccgaggatcttctgggcttacttgtccccagctttgtcccaaagtgtcgcttccg

SEQ ID NO: 474977 - DNA, 120 bp, Artificial Sequence
  ENSG00000160200_35 (sequence is synthesized)
gggatcagaaaactcgctggttaatgagtggccaagaacatatcagcttaagtttgggaaaaacacacaacagggcattgtgtcagagggtgaccaaagtgactccccagcagatggacc

SEQ ID NO: 474978 - DNA, 120 bp, Artificial Sequence
  ENSG00000160200_36 (sequence is synthesized)
agggaacgaacaggtgacctttgaactgaggccggagtggaagcagcgagggtgtgaagggccgggtgagggtcaaaggcagaagcaagcaggtggggagggttagcgtcatgcctgcta

SEQ ID NO: 474979 - DNA, 120 bp, Artificial Sequence
  ENSG00000160200_37 (sequence is synthesized)
aggagcagtggacgggtcctagcacgtgctgtgagccacccgctgtccagggagcggttacctctgtcttgccagcttcgtggggacagatagttcagctcatcatttatgagacagaga

SEQ ID NO: 474980 - DNA, 120 bp, Artificial Sequence
  ENSG00000160200_38 (sequence is synthesized)
atgggaatttggagggtctgtggctggcctcgtcctgggtgcgcagggggtcacctgaggtgtggtctgaggcctccggggaagggcatttctttgcaggacgcagtttccaggctcaag

SEQ ID NO: 474981 - DNA, 120 bp, Artificial Sequence
  ENSG00000160200_39 (sequence is synthesized)
aacgtggagggaattcctaagggtcgctcttcaccaagagcgcagagccctggtagacctcagcatcgtcacagagaaagctgtgggtgcagaggccttggggacaaggcggggacggaa

SEQ ID NO: 474982 - DNA, 120 bp, Artificial Sequence
  ENSG00000160200_40 (sequence is synthesized)
gttttaggggtcgagtgtcactgagcaaagactgggctggggtgccccaggctgcctgtttctgaggctttcacagaccaagggcagcaacgagggctgctccaactggagaagaagttt

SEQ ID NO: 474983 - DNA, 120 bp, Artificial Sequence
  ENSG00000160200_41 (sequence is synthesized)
ttcttttgaactttttggttacccaccgtggtttgggctgagtgtgttttcaatgattattactatgagtgatgggctggccaggcagggacccaagaatgttatccgtccaccagggaa

SEQ ID NO: 474984 - DNA, 120 bp, Artificial Sequence
  ENSG00000160200_42 (sequence is synthesized)
tggagatggaccacttcgccctggtggtgcacgagcagatccagtcgcaggaccaggcctgggcaggcgtggtgggggggcctgcagggtccccaaatcaagtcttcctggagcatgtcc

SEQ ID NO: 474985 - DNA, 120 bp, Artificial Sequence
  ENSG00000160200_43 (sequence is synthesized)
acgcttgtcaccaccgtctgtggctgctttcaagcacgtcagggctgcgtgctcataacagagacggcacggcccccaagacctaaaataccaccagctggcccttgtcggaaagtcccc

SEQ ID NO: 474986 - DNA, 120 bp, Artificial Sequence
  ENSG00000160200_44 (sequence is synthesized)
tggctggccctagtccattgactctgggccgagctgccagggccacagaagcctgcggcactcagggctcccagggctcccttctccaacagttgctgtgcctccgtttccccaaaatgc

SEQ ID NO: 474987 - DNA, 120 bp, Artificial Sequence
  ENSG00000160200_45 (sequence is synthesized)
ttccagggtcctggacccacccccaagcttgggtaggagggatccccctcttaatctcacatttacttgtgtttgaacatctcagaaaaaaaaaaagatgcaaattccaatgtcagggtc

SEQ ID NO: 474988 - DNA, 120 bp, Artificial Sequence
  ENSG00000160200_46 (sequence is synthesized)
agtgggccaccccaagggacctctgcctacaaagagaggagtgacagccgtggcggagttgggacgggctccgagggctcttcctcacccgcaccttgctcacccctctgtgcctcatga

SEQ ID NO: 474989 - DNA, 120 bp, Artificial Sequence
  ENSG00000160200_47 (sequence is synthesized)
cagctggtgtagggtcctgtggagacgcaggaccaagaggatgtgtggggagcggggagagagagggaacgagatctgtgttaaggaactggatcatgagatcacggaggctgacaaacc

SEQ ID NO: 474990 - DNA, 120 bp, Artificial Sequence
  ENSG00000160200_48 (sequence is synthesized)
ctgagatctgcagggtgaggcggcaggccggagactggagagccagcagttcaagccccaaggcaggaaattccacctttggttctattcaggccttcaactgcttgggtgaggccctcc

SEQ ID NO: 474991 - DNA, 120 bp, Artificial Sequence
  ENSG00000160200_49 (sequence is synthesized)
acagtagcacacgttatctgcctcttgactcttgtgctaatccggaatcccctcacacatgcccagaacgacgtgtgaccaatgcctgggctcccacggccccgttaatctgtattaaaa

SEQ ID NO: 474992 - DNA, 120 bp, Artificial Sequence
  ENSG00000160200_50 (sequence is synthesized)
cgtgagccaccgcgcccggcctatttgttacaattaatgagccaattccacgatcacataaccattgttgacattaaccaaagtccgcgcttgagtcagatttgcagagttttctcctca

SEQ ID NO: 474993 - DNA, 120 bp, Artificial Sequence
  ENSG00000160200_51 (sequence is synthesized)
tgaagtgtgagctctgtgagtgccctggctttggagaggggcttcctccatctacactgggctccgtgggcctggggggtcctggggggtcctgggatggatcccttaggcaaggccctg

SEQ ID NO: 474994 - DNA, 120 bp, Artificial Sequence
  ENSG00000160200_52 (sequence is synthesized)
agttcctgccagtggacatttaattctaattcacgtctcactccctcccctactgtgagccccacgtggcagagaccgcggcggagctgcgcgggccggaggaggctgcggagcatcgct

SEQ ID NO: 474995 - DNA, 120 bp, Artificial Sequence
  ENSG00000160201_0 (sequence is synthesized)
cgtcgtcgcgtccgggtgacgtctcccgagggcgtcggcagggtcggcggcgtcggcagcagtgtcgacggcagcggcggcggcgggtgggaaatggcggagtatctggcctccatcttc

SEQ ID NO: 474996 - DNA, 120 bp, Artificial Sequence
  ENSG00000160201_1 (sequence is synthesized)
ggcaccgagaaagacaaagtcaactgttcattttatttcaaaattggagcatgtcgtcatggagacaggtgctctcggttgcacaataaaccgacgtttagccagaccattgccctcttg

SEQ ID NO: 474997 - DNA, 120 bp, Artificial Sequence
  ENSG00000160201_2 (sequence is synthesized)
aacatttaccgtaaccctcaaaactcttcccagtctgctgacggtttgcgctgtgccgtgagcgatgtggagatgcaggaacactatgatgagttttttgaggaggtttttacagaaatg

SEQ ID NO: 474998 - DNA, 120 bp, Artificial Sequence
  ENSG00000160201_3 (sequence is synthesized)
gaggagaagtatggggaagtagaggagatgaacgtctgtgacaacctgggagaccacctggtggggaacgtgtacgtcaagtttcgccgtgaggaagatgcggaaaaggctgtgattgac

SEQ ID NO: 474999 - DNA, 120 bp, Artificial Sequence
  ENSG00000160201_4 (sequence is synthesized)
gaataaccgttggtttaatggacagccgatccacgccgagctgtcacccgtgacggacttcagagaagcctgctgccgtcagtatgagatgggagaatgcacacgaggcggcttctgcaa

SEQ ID NO: 475000 - DNA, 120 bp, Artificial Sequence
  ENSG00000160201_5 (sequence is synthesized)
cttcatgcatttgaagcccatttccagagagctgcggcgggagctgtatggccgccgtcgcaagaagcatagatcaagatcccgatcccgggagcgtcgttctcggtctagagaccgtgg

SEQ ID NO: 475001 - DNA, 120 bp, Artificial Sequence
  ENSG00000160201_6 (sequence is synthesized)
tcgtggcggtggcggtggcggtggtggaggtggcggcggacgggagcgtgacaggaggcggtcgagagatcgtgaaagatctgggcgattctgagccatgccatttttaccttatgtctg

SEQ ID NO: 475002 - DNA, 120 bp, Artificial Sequence
  ENSG00000160201_7 (sequence is synthesized)
ctagaaagtgttgtagttgattgaccaaaccagttcataaggggaattttttttaaaaaacaacaaaaaaaaaaacatacaaagatgggtttctgaataaaatttgtagtgataacagta

SEQ ID NO: 475003 - DNA, 120 bp, Artificial Sequence
  ENSG00000160201_8 (sequence is synthesized)
agttggagaaatttttttaaaacaatggtgttaaagagcccactcttaattgagacaaataatgttggcttctgagctgctgacatagagctgttgcaaacaggacaaggtgctggaact

SEQ ID NO: 475004 - DNA, 120 bp, Artificial Sequence
  ENSG00000160201_9 (sequence is synthesized)
ccttggcgcacacagcaagaacttgatacttggccacgttcaggaggcttatcccttctagggagggtcactggcccggccacctccattgattgacatttgtcatgagagcaggtccgt

SEQ ID NO: 475005 - DNA, 120 bp, Artificial Sequence
  ENSG00000160201_10 (sequence is synthesized)
ccatgtgaaacggatttcaacattttgagccattcattggtctttacagtgactgaacccctggcctttattaagttctttgtgtaaaattaaaactcttaggaatattaaggaatcaat

SEQ ID NO: 475006 - DNA, 120 bp, Artificial Sequence
  ENSG00000160201_11 (sequence is synthesized)
aaggtaagttgcccagtaagtgtgggttttatttcaccattataatttttcctccaggaagtggagatttcatgatatgtaacaattgtatttctctaatacagtaattttttccatcag

SEQ ID NO: 475007 - DNA, 120 bp, Artificial Sequence
  ENSG00000160201_12 (sequence is synthesized)
tttatgtaagcattattctttccgagttcattaaaaattttctgccacatctaagaacattttggtgctagcctggcaaactatttgtgcttttacctgaattggaattttgaaaaggag

SEQ ID NO: 475008 - DNA, 120 bp, Artificial Sequence
  ENSG00000160201_13 (sequence is synthesized)
agttttcacgttctgtaagcagaagtacaagatgggcatatcatgagacctccgttacaccgcagtgttagggattcaaggcagccgccaactgagaaaacgcctctgcttctccagaaa

SEQ ID NO: 475009 - DNA, 120 bp, Artificial Sequence
  ENSG00000160201_14 (sequence is synthesized)
ataacttgctctcttttcagcactgaatctcaactgaagcacttgccagaggcagccggttaagtgtttacctttaattttccataatataaagttgttgcgttttgtatttcagaccat

SEQ ID NO: 475010 - DNA, 120 bp, Artificial Sequence
  ENSG00000160201_15 (sequence is synthesized)
tgccctcttgaacatttaccgtaaccctcaaaactcttcccagtctgctgacggtttgcgctgtaagttcatacaagttccttccccggttccctgggcttgcgtgtcagagctcagtgt

SEQ ID NO: 475011 - DNA, 120 bp, Artificial Sequence
  ENSG00000160201_16 (sequence is synthesized)
ccactccatctggtctgccgtgctagtgtcaaggaccgcgtttcactagaggtggcaaggagctttcgtcccactgaccccatggaaacctcttttggagatttgaactcccaccgtgtg

SEQ ID NO: 475012 - DNA, 87 bp, Artificial Sequence
  ENSG00000160201_17 (sequence is synthesized)
catggaaacctcttttggagatttgaactcccaccgtgtgttaaaagggaaaaagtaactggaaagggtgccctttaaaacagtcta

SEQ ID NO: 475013 - DNA, 120 bp, Artificial Sequence
  ENSG00000160201_18 (sequence is synthesized)
ctgctgctgccccttcttcctttactttggccgtcatcctagagggaatgtactggaattaaacgtcgagtcatattcttccctcttagagcaacaaaatttgaatgtttctctcacttt

SEQ ID NO: 475014 - DNA, 120 bp, Artificial Sequence
  ENSG00000160201_19 (sequence is synthesized)
ctggaatttttaaaaagcaaactttttaagttattttttcagattttatttctcattagccttttttccttgaactccattttggagtgcaccctgtagttgtaagagcattgtgctgag

SEQ ID NO: 475015 - DNA, 120 bp, Artificial Sequence
  ENSG00000160201_20 (sequence is synthesized)
tgagggtctgcagcttgcactgacccctgagttcctcacccaccagccccgtgccgacccgtctaacccgtgtgggggtgctccactcaaataggcccttggcagaaaagattgtccgtt

SEQ ID NO: 475016 - DNA, 120 bp, Artificial Sequence
  ENSG00000160201_21 (sequence is synthesized)
ctgtccacacactgcctggatacagtctccagctctaggagatggaattggtttgctccatttagaaatagatcaaaactgggcattcagtagatggtaccaatatcttcctgtactggg

SEQ ID NO: 475017 - DNA, 80 bp, Artificial Sequence
  ENSG00000160201_22 (sequence is synthesized)
aatgataatgttcagaaaactaaaatttgatttttacagccatccaactatagaatcattagaatttagtcatttatgga

SEQ ID NO: 475018 - DNA, 120 bp, Artificial Sequence
  ENSG00000160201_23 (sequence is synthesized)
tatagaatcattagaatttagtcatttatggataaattaaaatgaacacctggactcttgttaaaatcagaaagtccaaaccaaagataggcacttcccattcaccattctgttttaaag

SEQ ID NO: 475019 - DNA, 120 bp, Artificial Sequence
  ENSG00000160201_24 (sequence is synthesized)
cagtaaaaattgaggtgcccttggatatccacaagcctaaattgagtacacccttgaaccagagcccctcagttaatggggtgaccgacatggggtagctgatcccagggggcattcccc

SEQ ID NO: 475020 - DNA, 120 bp, Artificial Sequence
  ENSG00000160201_25 (sequence is synthesized)
tctcgagctggccctgcactgggtggcctggggattgtgcttccttgcacagtggtgcacatttctatgtgtggatgagattttcttgtcaacttttcctgccaagacactaaatgcttt

SEQ ID NO: 475021 - DNA, 120 bp, Artificial Sequence
  ENSG00000160201_26 (sequence is synthesized)
tcagtgctaatactgacctgatagtagagatttctttccctgagtcggatggtagcaggatttacttggtaacccttggtttaaaatacctgtttttttgtttgtttgttttcttttgtt

SEQ ID NO: 475022 - DNA, 120 bp, Artificial Sequence
  ENSG00000160201_27 (sequence is synthesized)
ttttaaggaaataagatcaataggcggagggaaattgtttctatatgcacttattaaataatttttgttaacaaccctgccctgggataaaagtgaatggaagtacatgactgagtaaca

SEQ ID NO: 475023 - DNA, 120 bp, Artificial Sequence
  ENSG00000160201_28 (sequence is synthesized)
gtaattaattctttgccctgatcgtttatttggggactgtatatgctttcttgactgacaatagaatgttgtattagttttcattgtgtctttatttgcagttcacagcacttttgtttt

SEQ ID NO: 475024 - DNA, 120 bp, Artificial Sequence
  ENSG00000160201_29 (sequence is synthesized)
gcatatgctacaaactaaaagtttagcaattacgttatattccaattctggagtccagattgtacaaattagatgaaattctaattcgtcattttaggaagaaatcaattacctaaaatt

SEQ ID NO: 475025 - DNA, 120 bp, Artificial Sequence
  ENSG00000160201_30 (sequence is synthesized)
actggctcttttcaacataccctttagtatgtaaaaaaataagcttcaaatgcgtgggttaaagttaactatcaatcccagtttaagaatgatatttctgtaagaaaactgctttatttt

SEQ ID NO: 475026 - DNA, 120 bp, Artificial Sequence
  ENSG00000160201_31 (sequence is synthesized)
ccaagttgtagtatttaacataggctgagtcacaaataagtttttaattgtatcttaatgcagttgtctctgcctttcaagtcactttgattgaaacattttaagcagaacaaatatagc

SEQ ID NO: 475027 - DNA, 120 bp, Artificial Sequence
  ENSG00000160201_32 (sequence is synthesized)
caataatttaaaataatcaccccaaaaccatttctcaaacctgctaaaactttgagcatgtgaataattttctcctcttcacattcttcttatgtgggaaggaagtgaatttgaaatatt

SEQ ID NO: 475028 - DNA, 120 bp, Artificial Sequence
  ENSG00000160201_33 (sequence is synthesized)
aaaatctgccctttggaataggctactttggccgtttataacttgatttctactcggggaggaaggtacattcccaatagctttccaattgggatatcctgtgatatgattggcaggctg

SEQ ID NO: 475029 - DNA, 120 bp, Artificial Sequence
  ENSG00000160201_34 (sequence is synthesized)
tccgagtagttacacttaataaaatttgggttcgaaagcagattcctggaagttcaaaaataactaaaacagccccggataggttagaaagtgaacttaaatcattctcagaattagaaa

SEQ ID NO: 475030 - DNA, 62 bp, Artificial Sequence
  ENSG00000160201_35 (sequence is synthesized)
gaaaataagaagttattttttatcttcaaagataaaaagtggatcacgaggtcgagagattg

SEQ ID NO: 475031 - DNA, 120 bp, Artificial Sequence
  ENSG00000160201_36 (sequence is synthesized)
ccctccctgacattgctggcacacaggcatgattgctggttccattggatatggatctggattgtcagcgtatttgaacagtattaagggagggttttgcagtagagacagaaggtgacg

SEQ ID NO: 475032 - DNA, 120 bp, Artificial Sequence
  ENSG00000160201_37 (sequence is synthesized)
taaggtggttcctaaggtgggttcggtcagtcccctaatagtttgttttcagtgtattgagaccaggagaattgatttacttcagacctattttttgaaactccctgttggtctggtgtc

SEQ ID NO: 475033 - DNA, 120 bp, Artificial Sequence
  ENSG00000160201_38 (sequence is synthesized)
atgcgtttagagagactctgaacttcgttttctgttttccttagataatgatagcacttcatgagcaccatatgtgaagcacacatacgttctgtctgactctcagaacagtgccacatt

SEQ ID NO: 475034 - DNA, 120 bp, Artificial Sequence
  ENSG00000160201_39 (sequence is synthesized)
ggcattgtcatcatttacagatgacatctgagagctagggtgacttgcccaagcccaagcagctggtagcagagttgggatcttaaccctcaccacaccggtgttttcaagagagaactt

SEQ ID NO: 475035 - DNA, 120 bp, Artificial Sequence
  ENSG00000160201_40 (sequence is synthesized)
ggtcgtggagaactggagaacagatactgcctaagttacatttagttttagactaatttaatactccatttaagaaacaaacagaacagctgtgcagttaggaaagtggaggggatttga

SEQ ID NO: 475036 - DNA, 120 bp, Artificial Sequence
  ENSG00000160201_41 (sequence is synthesized)
atgaggaggaggcgggttagagttagaaccgtctttgctgaacaagtagtgtgtttgcagaaagggaagttgaagttacgttgtcctaaaatacagcaaggaagaggaggtgcttaatac

SEQ ID NO: 475037 - DNA, 120 bp, Artificial Sequence
  ENSG00000160201_42 (sequence is synthesized)
cgggtgtccatgacagttgacagacctgtttggtgtgcctgttttgctaggagaccagagaacttgatgtactgcagacagctgagttacgcatttggttttgaaaaattatcttgtgtg

SEQ ID NO: 475038 - DNA, 120 bp, Artificial Sequence
  ENSG00000160201_43 (sequence is synthesized)
aggaatatgattataacgtgaatttttccacatcttggtgtctgctagcttgaagtacaagaaaatattagtattctactatttatcttgcattaaaacactttaacattgaaaacgtgg

SEQ ID NO: 475039 - DNA, 120 bp, Artificial Sequence
  ENSG00000160201_44 (sequence is synthesized)
aaacaatacagtttcttcttggttgctggctgacttgacccaagtcactgctcaaactctgttttcataatatgatggttttggtgtactcttcagaagacaaatgtctgacttgcggga

SEQ ID NO: 475040 - DNA, 120 bp, Artificial Sequence
  ENSG00000160201_45 (sequence is synthesized)
aaaaaacaaacgtttagccatttgcaaacaaattgtctctttgcaattgtctaatatatgcacagcagccagtagaattcccctttttatttttttttccccgcagaccatcttgattca

SEQ ID NO: 475041 - DNA, 120 bp, Artificial Sequence
  ENSG00000160201_46 (sequence is synthesized)
aagtcattttttctctcgtagttgtattttccatttgtgttcataagtgtgttcttttatttaaataatagtgaggcaggtgatcgacttccagtggaaggtctgagaccaccactcctt

SEQ ID NO: 475042 - DNA, 120 bp, Artificial Sequence
  ENSG00000160201_47 (sequence is synthesized)
gtttttatcattagagaaactttaaaaatcagtttttgatgtttgtgtgttggctgtgcctgatatttgctgccctgccatcttccctaccccctctgatagacatgggtccagaggggg

SEQ ID NO: 475043 - DNA, 120 bp, Artificial Sequence
  ENSG00000160201_48 (sequence is synthesized)
tggccgtgccagccttgggttagcctcctccaggcaccagtggacacggagtgggctttctgctctttgctgtctccagacagtagaggtgatggagccaccttccaagttagcgtgatt

SEQ ID NO: 475044 - DNA, 120 bp, Artificial Sequence
  ENSG00000160201_49 (sequence is synthesized)
gtcaccaggcccatcatgctgctcgagcttctctggctgcgtcctcactttcacatccctagctgaggaaacagcgagtcgcatcacgtcatggaaacatgaaaaattaagctgaaaggt

SEQ ID NO: 475045 - DNA, 120 bp, Artificial Sequence
  ENSG00000160201_50 (sequence is synthesized)
agaaaatgggccgtaaattgctcttagcgggtctgtttggttaattgaggagtgcctgttatcttgggcttagatccgctctgagttcagttcaatcaaaagttgtgagttttgatagtt

SEQ ID NO: 475046 - DNA, 120 bp, Artificial Sequence
  ENSG00000160201_51 (sequence is synthesized)
ttatttttggttagttgaagaaaaggcaaaggttggtacactataaaggatcacttacggattaaagggagaaggcacctctaatcggagcagaaaacttgtgcccacgttgatgagaac

SEQ ID NO: 475047 - DNA, 120 bp, Artificial Sequence
  ENSG00000160201_52 (sequence is synthesized)
atttgaaatttgaaaatcgatgcccaagtctttccagatggagggctggggaactccttccaacccacccttgaagtctaaatgtgcagcctctgagctgttgagtagctattatgcgtg

SEQ ID NO: 475048 - DNA, 120 bp, Artificial Sequence
  ENSG00000160201_53 (sequence is synthesized)
gtccctgggagctgccaggctctgcctttgagctcacatctgtctgtatacgttttcctgtaagcatttaagaaaatctaccactttgtgtaagtgagctgggagaaggaaacatgggtt

SEQ ID NO: 475049 - DNA, 120 bp, Artificial Sequence
  ENSG00000160201_54 (sequence is synthesized)
ttttccggttgaagcccatggacgaccccacagcacacagtgtttttagaagggaagaggatgatggcttttccctccattatgctaattaccaagtggttagtataatagcagtctgtc

SEQ ID NO: 475050 - DNA, 120 bp, Artificial Sequence
  ENSG00000160201_55 (sequence is synthesized)
ttttgatagctctgaacatgagtttctttttacaaatttcaaaatcttggagaactagctttacattttctgtgtattgcaattgttttttctttaatgttttgatttatgaaccgaatc

SEQ ID NO: 475051 - DNA, 120 bp, Artificial Sequence
  ENSG00000160201_56 (sequence is synthesized)
tcccctaactaaaccagtggccatggattgtggtataaccaagcatcttaagtgaccacccagttctttgattttggggggtgtcccaagtgttgggctgagagaaatcaactgttccct

SEQ ID NO: 475052 - DNA, 120 bp, Artificial Sequence
  ENSG00000160201_57 (sequence is synthesized)
attctaaaagttttctttaatctggctggaggcactttctttatgtttttctggatcatagattacctgagaatgtgaaatgtgaagttaatttaggcattccaggtcagtgctggggag

SEQ ID NO: 475053 - DNA, 120 bp, Artificial Sequence
  ENSG00000160201_58 (sequence is synthesized)
agcccattggagctcgatggggtcagtagtatgtgtcagcttaagcatcctagtttgatgcgtgggtttgttttggttggttttaggcaatcctagccacccttggctttcccattagac

SEQ ID NO: 475054 - DNA, 120 bp, Artificial Sequence
  ENSG00000160201_59 (sequence is synthesized)
tgcattgcctctttacgttaagcttccttcattaaatagccactgccagaatacctgagtgagaccaactgaattttactgttgaataattgggctcagtttagcttttcatcagggttg

SEQ ID NO: 475055 - DNA, 120 bp, Artificial Sequence
  ENSG00000160201_60 (sequence is synthesized)
tcatggtacggtcatttcagttcaaagctgagtcaagtcagctttgggaagcctcccaggcctgagttcagttgactcagggctgtacttggcggcttatggaagaaacggggccctgat

SEQ ID NO: 475056 - DNA, 120 bp, Artificial Sequence
  ENSG00000160201_61 (sequence is synthesized)
gcaggtctgagtggttcagtgtggacagtttgtcagacctccctcttaggtggggtgggcttcccagctgcacacctttgactgaggaactcttcatacaaccactcccctttaaacaga

SEQ ID NO: 475057 - DNA, 120 bp, Artificial Sequence
  ENSG00000160201_62 (sequence is synthesized)
gctagaaatggagctggctggttttataaaaccaccacttacaaaactgcttcacgtggatattgttgagactaaacatttatttttctaaatcatgcgagtgattgctttagcttgtaa

SEQ ID NO: 475058 - DNA, 120 bp, Artificial Sequence
  ENSG00000160201_63 (sequence is synthesized)
tcagggtgggtttctttataagctgcttacagtgatatggacgttaagattcatgtaatatattagcctactaacttaaacatggtttgttttttcagacaacttgattttaagaagaac

SEQ ID NO: 475059 - DNA, 120 bp, Artificial Sequence
  ENSG00000160201_64 (sequence is synthesized)
ggtacagtgtaaggtttcaagtctgcctgatccagtttaaagcacaagggctaaaaggattttttttccttaaaagaaggatcggaaaagagcaaatgttttaagctattgtattatgta

SEQ ID NO: 475060 - DNA, 66 bp, Artificial Sequence
  ENSG00000160201_65 (sequence is synthesized)
caggagttcaagaccagcctgccaacgtggtgaaaccctgtctgtactaaaaattaactccagagg

SEQ ID NO: 475061 - DNA, 120 bp, Artificial Sequence
  ENSG00000160201_66 (sequence is synthesized)
tccagcctgggcgacagagccagactgcatcttgtgggtgtaaaaaaaaaatttgtagtttgagagtcaactttttcctcacagtttctgaaaatgtggcccttttgatgctgattaaag

SEQ ID NO: 475062 - DNA, 120 bp, Artificial Sequence
  ENSG00000160201_67 (sequence is synthesized)
acagtttctgaaaatgtggcccttttgatgctgattaaagctggttgtgattttaacaccttagtagccagaatcgagactgtcatggggacatttaaaatctcaccacacttgacacca

SEQ ID NO: 475063 - DNA, 120 bp, Artificial Sequence
  ENSG00000160201_68 (sequence is synthesized)
ttcacaagtagccatgtggctcagtctcctgagtgctcctgcagagtgcagctctgccaggcttttctctagataatctcgtgtgtgttactgtagcagtttgagtttaaacacaagagt

SEQ ID NO: 475064 - DNA, 120 bp, Artificial Sequence
  ENSG00000160201_69 (sequence is synthesized)
tcactcggttaacatgttctaaccagcaagatttctgttgtttgcaggtgccgtgagcgatgtggagatgcaggaacactatgatgagttttttgaggtgagagaactgaactctgtgac

SEQ ID NO: 475065 - DNA, 120 bp, Artificial Sequence
  ENSG00000160201_70 (sequence is synthesized)
tgatagacctgttgatcttctgtatctgtttggaaggatttaaaatgtttctctgctaataaacatacatgagttatatctaatgacactttgtaatgtataacgagtcttaaaccactg

SEQ ID NO: 475066 - DNA, 120 bp, Artificial Sequence
  ENSG00000160201_71 (sequence is synthesized)
tggtctcccttcaggaggtttttacagaaatggaggagaagtatggggaagtagaggagatgaacgtctgtgacaacctgggagaccacctggtggggaacgtgtacgtcaaggtaggag

SEQ ID NO: 475067 - DNA, 120 bp, Artificial Sequence
  ENSG00000160201_72 (sequence is synthesized)
ccagggcgagacggcggcgtggccgcttagtgtgccagggccaaggccaacaggcgaaagcgagacagtggtgcagccgcttagtgtgccggggccaaggccgacagaggatggggtgcc

SEQ ID NO: 475068 - DNA, 120 bp, Artificial Sequence
  ENSG00000160201_73 (sequence is synthesized)
tgtcgccatgcaccttgagatcctggatgctcaggcgcacagcagggctcaggtgcactggctcggcgcctaccagctgcgtcatatgtggcggtggccagcccacacgtgcgcccagcc

SEQ ID NO: 475069 - DNA, 120 bp, Artificial Sequence
  ENSG00000160201_74 (sequence is synthesized)
agcagaactgaaggacggaccgtacaccacagccatcgttatttcagtgtagaatatttagtacctgttggtttagaagctgtgtggactaaggaaaagttaggtttactcacatgtttg

SEQ ID NO: 475070 - DNA, 120 bp, Artificial Sequence
  ENSG00000160201_75 (sequence is synthesized)
gtttcttttttcttttttagtgaataaaactttatttgcctacacagccatatttgctcctttaaccagttgaatttgaaaaatgaaggcaacatttggcaaaatcttggactatcttga

SEQ ID NO: 475071 - DNA, 120 bp, Artificial Sequence
  ENSG00000160201_76 (sequence is synthesized)
agttaatctcattgaaaataaaggatttttcaattatcctgtaatactattccaccttactatacctgagtgtgtatatctctctctgatatacttggattggtaattgagaaagtctta

SEQ ID NO: 475072 - DNA, 120 bp, Artificial Sequence
  ENSG00000160201_77 (sequence is synthesized)
ttccagagagctgcggcgggagctgtatggccgccgtcgcaagaagtgagtattcctgtgcccgttgttaagctcagtggcttctttctcccctcacaaccctcccccttccaaaaaaaa

SEQ ID NO: 475073 - DNA, 120 bp, Artificial Sequence
  ENSG00000160201_78 (sequence is synthesized)
aattttggcataggtgtcgtttctgttttttaaaaggcagtgcttagaacatagtacatatttttaaatatccaaatgtcctctttggagaagaatattcacctgcacacaggtaacttc

SEQ ID NO: 475074 - DNA, 120 bp, Artificial Sequence
  ENSG00000160201_79 (sequence is synthesized)
attatccaacttctcaagtagagatcagatcttagtaatcaagcaagagggcggttagctgggcagccgcggacatgaggctcgtggtgaaagtgggcatgcagtttattctcccagata

SEQ ID NO: 475075 - DNA, 120 bp, Artificial Sequence
  ENSG00000160201_80 (sequence is synthesized)
ttacgaagaagaagaatagatgttgtaacctcctttagatcagggatggcttccctgggacacattggaagaagaattgtcttgggtcacaaataaaatacactaatgatagctgataac

SEQ ID NO: 475076 - DNA, 120 bp, Artificial Sequence
  ENSG00000160201_81 (sequence is synthesized)
tttttttttaattgcaaaaaaaatctcataatgttttaagcaagttgatgaatttgtgttgggctgcaggttggacaagcttttgctttacatatttcacatgtccactggggtttcttt

SEQ ID NO: 475077 - DNA, 120 bp, Artificial Sequence
  ENSG00000160201_82 (sequence is synthesized)
tggttttgcttgttggttttagggcatttcattatgtcttgggatcgctggcatcctcccttcgggacactggcagaatcaggcccagcggtcacatctctctgatcctacatttaaatg

SEQ ID NO: 475078 - DNA, 120 bp, Artificial Sequence
  ENSG00000160201_83 (sequence is synthesized)
tacgacaggtcacagagcagagaaaatcaagacgtcagaatcgaaccgattgagttctgagtctggagaggttctcatccctcttctgttaaacatggactagtaaatagatgggtggcg

SEQ ID NO: 475079 - DNA, 120 bp, Artificial Sequence
  ENSG00000160201_84 (sequence is synthesized)
attgttttattgtcagcattcaagaagcataagagaaaaacaggcctgctctccccagcccaaaaacctgatggacacagtagctatgagcgcctgaagcgtggggtcagtgagggttga

SEQ ID NO: 475080 - DNA, 120 bp, Artificial Sequence
  ENSG00000160201_85 (sequence is synthesized)
agatggtatgtgtccagctcattttgattatgatttcctgtgaccatttgagttggttctagaagaagacagaagatgcaaggtattacacctgttcacttctaagttgcacattttttt

SEQ ID NO: 475081 - DNA, 120 bp, Artificial Sequence
  ENSG00000160201_86 (sequence is synthesized)
ctcctgaaacttttcacacctgaaatcagggtgtgtctcagtcacggcgtgcagtctcttcagcagtgtttttccttatcagtgccgttggcttgaggagctgcgcgtgttgagagagtg

SEQ ID NO: 475082 - DNA, 120 bp, Artificial Sequence
  ENSG00000160201_87 (sequence is synthesized)
ggtgtggttctgtgctgcgtgccgtggtttggatggcacggttttctttattttccttggttgcaggcatagatcaagatcccgatcccgggagcgtcgttctcggtctagagaccgtgg

SEQ ID NO: 475083 - DNA, 120 bp, Artificial Sequence
  ENSG00000160202_0 (sequence is synthesized)
agggagggctcggccttggctccacactgcgctgcccagaggccccgctgactcctgccagcctccaggtccccgtggtaccaaagctgaacatggacgtgaccatccagcacccctggt

SEQ ID NO: 475084 - DNA, 120 bp, Artificial Sequence
  ENSG00000160202_1 (sequence is synthesized)
tcaagcgcaccctggggcccttctaccccagccggctgttcgaccagtttttcggcgagggcctttttgagtatgacctgctgcccttcctgtcgtccaccatcagcccctactaccgcc

SEQ ID NO: 475085 - DNA, 120 bp, Artificial Sequence
  ENSG00000160202_2 (sequence is synthesized)
agtccctcttccgcaccgtgctggactccggcatctctgaggttcgatccgaccgggacaagttcgtcatcttcctcgatgtgaagcacttctccccggaggacctcaccgtgaaggtgc

SEQ ID NO: 475086 - DNA, 120 bp, Artificial Sequence
  ENSG00000160202_3 (sequence is synthesized)
aggacgactttgtggagatccacggaaagcacaacgagcgccaggacgaccacggctacatttcccgtgagttccaccgccgctaccgcctgccgtccaacgtggaccagtcggccctct

SEQ ID NO: 475087 - DNA, 120 bp, Artificial Sequence
  ENSG00000160202_4 (sequence is synthesized)
ctggatgccacccacgccgagcgagccatccccgtgtcgcgggaggagaagcccacctcggctccctcgtcctaagcaggcattgcctcggctggctcccctgcagccctggcccatcat

SEQ ID NO: 475088 - DNA, 120 bp, Artificial Sequence
  ENSG00000160202_5 (sequence is synthesized)
ggggggagcaccctgagggcggggtgtctgtcttcctttgcttcccttttttcctttccaccttctcacatggaatgagggtttgagagagcagccaggagagcttagggtctcagggtg

SEQ ID NO: 475089 - DNA, 120 bp, Artificial Sequence
  ENSG00000160202_6 (sequence is synthesized)
tcccagaccccgacaccggccagtggcggaagtgaccgcacctcacactcctttagatagcagcctggctcccctggggtgcaggcgcctcaactctgctgagggtccagaaggaggggg

SEQ ID NO: 475090 - DNA, 120 bp, Artificial Sequence
  ENSG00000160202_7 (sequence is synthesized)
tgacctccggccaggtgcctcctgacacacctgcagcctccctccgcggcgggccctgcccacacctcctggggcgcgtgaggcccgtggggccggggcttctgtgcacctgggctctcg

SEQ ID NO: 475091 - DNA, 120 bp, Artificial Sequence
  ENSG00000160202_8 (sequence is synthesized)
cggcctcttctctcagaccgtcttcctccaacccctctatgtagtgccgctcttggggacatgggtcgcccatgagagcgcagcccgcggcaatcaataaacagcaggtgatacaagcaa

SEQ ID NO: 475092 - DNA, 120 bp, Artificial Sequence
  ENSG00000160202_9 (sequence is synthesized)
cttatctataaccagccacctgaccatagccaaacaaccagccggcccaccagtagcattcagcccctcagctggccctgagggtttggagacaggtcgagggtcatgcctgtctgtcca

SEQ ID NO: 475093 - DNA, 120 bp, Artificial Sequence
  ENSG00000160202_10 (sequence is synthesized)
ggagacagtcacaggcccccgaaagctctgccccacttggtgtgtgggagaagaggccggcaggtgaccgaagcatctctgttctgataaccgggacccgccctgtctctgccaacccca

SEQ ID NO: 475094 - DNA, 120 bp, Artificial Sequence
  ENSG00000160202_11 (sequence is synthesized)
gcatgcgtggtggcgaatgccagctcccgggttcctctggtctcctgagtcccggagacctgggagcaggtgggggtcatagtcctgaaagccagagagcagggcgttcctagcacctcc

SEQ ID NO: 475095 - DNA, 120 bp, Artificial Sequence
  ENSG00000160202_12 (sequence is synthesized)
tccaatgagctcggcctgcccacggctagcaaagctcttggcaagtttacttaggtgccctgccaaggctaaaaggacaggcaatggacgcccccccccccacccaaccacaggcctcct

SEQ ID NO: 475096 - DNA, 120 bp, Artificial Sequence
  ENSG00000160207_0 (sequence is synthesized)
gagcgcggcagtggccctggcagctggcggagcggcccagcccgtgtgcacgtggcgccggcgctgcctttcggttgccaaaattcaggctgtagacggcgagataacaagtttaaaacc

SEQ ID NO: 475097 - DNA, 120 bp, Artificial Sequence
  ENSG00000160207_1 (sequence is synthesized)
ccggctaagccagaagagccaaagagggacctcgccaaggccactcctcgctctctaggccgagaatactgcgcaaattctgggaggtttgggcctggcggctctccgttcccgaccccc

SEQ ID NO: 475098 - DNA, 120 bp, Artificial Sequence
  ENSG00000160207_2 (sequence is synthesized)
ggcgtggattcgttcccgcgctttctggcgtgaggggtcagagggcgcgccgacgctcaggcgaacggagcggaggcggcagcggccatgggcgaagcgggcgccgctgaggaggcctgc

SEQ ID NO: 475099 - DNA, 120 bp, Artificial Sequence
  ENSG00000160207_3 (sequence is synthesized)
cggcacatgggaactaaagaggaatttgttaaagtcagaaagaaggatctggaacggctgacaactgaagtgatgcaaatacgggacttcttacccagaatactaaatggggaggtgctg

SEQ ID NO: 475100 - DNA, 120 bp, Artificial Sequence
  ENSG00000160207_4 (sequence is synthesized)
gagagcttccagaaattaaagattgtagaaaaaaacctggaaaggaaagagcaagaattagagcagctgaaaatggattgtgagcactttaaagcccgcctggaaaccgtgcaggccgac

SEQ ID NO: 475101 - DNA, 120 bp, Artificial Sequence
  ENSG00000160207_5 (sequence is synthesized)
aacataagagagaagaaggagaaactggctcttcgacagcagttgaatgaagcgaagcagcaactcctgcagcaggcagagtattgtacagaaatgggagcagcagcgtgtaccctcttg

SEQ ID NO: 475102 - DNA, 120 bp, Artificial Sequence
  ENSG00000160207_6 (sequence is synthesized)
tggggtgtctccagcagtgaggaagtcgtcaaggccattttgggaggagataaagctttgaagtttttcagcatcactggtcaaacaatggagagttttgtgaagtcgttagacggtgat

SEQ ID NO: 475103 - DNA, 120 bp, Artificial Sequence
  ENSG00000160207_7 (sequence is synthesized)
attcaagccgggtgctcttggacaccatattgcagcttctgggagacttgaagccaggacagtgtaccaaactcaaagtgctaatgctgatgtccctatacaatgtaagcatcaatttga

SEQ ID NO: 475104 - DNA, 120 bp, Artificial Sequence
  ENSG00000160207_8 (sequence is synthesized)
aaggcttgaaatacatcagcgagagtccaggattcatccctttgctgtggtggcttttgagtgatccagatgcagaggtgtgccttcatgtactgaggcttgtccagtctgtggttctgg

SEQ ID NO: 475105 - DNA, 120 bp, Artificial Sequence
  ENSG00000160207_9 (sequence is synthesized)
aacctgaagtcttctccaagtcggcctctgagttccggagctccctgcccctgcaacgcatcctggcaatgtccaagagccgcaacccccgcctgcaaaccgcagcccaggagctcctgg

SEQ ID NO: 475106 - DNA, 120 bp, Artificial Sequence
  ENSG00000160207_10 (sequence is synthesized)
aagatctccgcactctggagcataatgtgtaggtgtgctcggccaccagggttttggtgaaaatgccggtgtcccttctccccagatccctcatttgatactccaaaaccatcaccatgt

SEQ ID NO: 475107 - DNA, 120 bp, Artificial Sequence
  ENSG00000160207_11 (sequence is synthesized)
accatgtgttagagttggcaaaatgtgattgactagagatggacatgaattgatatgtatcccacataactttgtcttggaagtgagagtgcttgtaggtggttggttaagcttgccaaa

SEQ ID NO: 475108 - DNA, 120 bp, Artificial Sequence
  ENSG00000160207_12 (sequence is synthesized)
ggagaggccatgaaagaacctgtccttctggaaaagtggtccatgtctgtgctggctggaagagggcttgcttagggcagcttcttgctgctcagcagaccatgacctgtaggttcacct

SEQ ID NO: 475109 - DNA, 120 bp, Artificial Sequence
  ENSG00000160207_13 (sequence is synthesized)
ataaaacagggaaattgaataaccatctaccccattagtcagcattttcttgagatacatttctttgaaaagcaattcattctctctctagtaattgtaattaatccccccaaaatgcaa

SEQ ID NO: 475110 - DNA, 120 bp, Artificial Sequence
  ENSG00000160207_14 (sequence is synthesized)
gtttacttttataaccttttggtgaacctgctatttcggatgacattgggcattttagttctatattttttgtgcctcttttatttttgaataaagaaaatcagaagagttgtattacga

SEQ ID NO: 475111 - DNA, 120 bp, Artificial Sequence
  ENSG00000160208_0 (sequence is synthesized)
cggacggtggctggctgctccgcagcgctcggctggctgcagcggcaccgcgggttgcgcggccggggatgctccagcgggcgcgatggcccccgccatgcagccggccgagatccaatt

SEQ ID NO: 475112 - DNA, 120 bp, Artificial Sequence
  ENSG00000160208_1 (sequence is synthesized)
cagccggccgagatccaatttgcccagcggctggcgtccagcgagaagggcatccgggaccgagcggtgaagaagctgcgccagtacatcagcgtgaagacgcagagggagacaggaggt

SEQ ID NO: 475113 - DNA, 120 bp, Artificial Sequence
  ENSG00000160208_2 (sequence is synthesized)
ttcagtcaggaagaacttctgaaaatctggaaggggctcttctactgcatgtgggtgcaggatgaaccccttctacaggaagagctcgccaacaccattgcacagctagtccatgctgtt

SEQ ID NO: 475114 - DNA, 120 bp, Artificial Sequence
  ENSG00000160208_3 (sequence is synthesized)
aacaactcagcggctcaacacctgttcattcagaccttttggcaaaccatgaatcgagaatggaaaggaatagacaggctacgcctggacaaatactatatgctgattcgtctggtcctg

SEQ ID NO: 475115 - DNA, 120 bp, Artificial Sequence
  ENSG00000160208_4 (sequence is synthesized)
aggcagtcctttgaagtcttgaagcgaaatggctgggaagaaagccgaatcaaggttttcttggatgtcctgatgaaggaggtcctgtgtcctgagagtcagtctcctaatggagtgaga

SEQ ID NO: 475116 - DNA, 120 bp, Artificial Sequence
  ENSG00000160208_5 (sequence is synthesized)
ttccacttcattgatatttacctggatgaactctccaaagtcggggggaaggagcttttagcagatcagaatctcaagtttatcgatccattctgcaaaattgctgcgaagacgaaggac

SEQ ID NO: 475117 - DNA, 120 bp, Artificial Sequence
  ENSG00000160208_6 (sequence is synthesized)
cacaccctggtacagaccatagctcggggtgtcttcgaagctatcgtagatcagtctccttttgtgcctgaagagacgatggaggaacagaagacaaaagtgggtgatggtgacctctct

SEQ ID NO: 475118 - DNA, 120 bp, Artificial Sequence
  ENSG00000160208_7 (sequence is synthesized)
gctgaggagatacctgaaaatgaggtatccttgagaagagctgtcagtaaaaagaagacagcactgggcaaaaaccattccagaaaagatggactcagtgatgaaagaggaagagatgac

SEQ ID NO: 475119 - DNA, 120 bp, Artificial Sequence
  ENSG00000160208_8 (sequence is synthesized)
tgtggaacctttgaggacacagggccccttctccagtttgactataaggctgttgctgatcgactcctggaaatgaccagcaggaagaacacgccccacttcaacaggaagcgcctctcc

SEQ ID NO: 475120 - DNA, 120 bp, Artificial Sequence
  ENSG00000160208_9 (sequence is synthesized)
aaactcatcaagaaattccaagacctttctgaaggaagcagtatatctcaactcagttttgcggaggacatttctgctgatgaagatgaccaaatcctcagtcaaggaaagcataagaag

SEQ ID NO: 475121 - DNA, 120 bp, Artificial Sequence
  ENSG00000160208_10 (sequence is synthesized)
aaaggaaataaacttttagagaaaactaacttggaaaaggagaaaggaagcagagtcttttgtgtagaggaagaggacagtgaaagcagtcttcaaaagagaagaaggaagaagaagaag

SEQ ID NO: 475122 - DNA, 120 bp, Artificial Sequence
  ENSG00000160208_11 (sequence is synthesized)
aagcaccacctgcagcctgaaaatccaggcccagggggtgcagccccatccctggaacagaaccggggcagggagcccgaggcctctgggctgaaagccctgaaggcacgtgtggccgag

SEQ ID NO: 475123 - DNA, 120 bp, Artificial Sequence
  ENSG00000160208_12 (sequence is synthesized)
ccaggtgcagaggccacgtccagcactggggaggagagtggctccgagcatcctccagccgtccccatgcacaataaaaggaaacggccacggaagaagagcccgagggcccacagggaa

SEQ ID NO: 475124 - DNA, 120 bp, Artificial Sequence
  ENSG00000160208_13 (sequence is synthesized)
atgttggaatcagcagtgttgcccccagaggacatgtctcagagtggcccgagtggcagtcatcctcagggacctagagggtccccgacaggtggagcccaactcctaaaaaggaagcgg

SEQ ID NO: 475125 - DNA, 120 bp, Artificial Sequence
  ENSG00000160208_14 (sequence is synthesized)
aaacttggagttgtgcccgtcaatggcagtggcctgtccacgccggcctggcctccattgcagcaggaaggccctcccacaggccccgcagagggggcgaacagccacaccacgctgccc

SEQ ID NO: 475126 - DNA, 120 bp, Artificial Sequence
  ENSG00000160208_15 (sequence is synthesized)
cagcgcaggaggctgcagaaaaagaaggcagggcccggcagcctggagctctgtggcctgcccagccagaaaacagcaagtttgaaaaagaggaagaaaatgagagtgatgtcaaacttg

SEQ ID NO: 475127 - DNA, 120 bp, Artificial Sequence
  ENSG00000160208_16 (sequence is synthesized)
gtggagcacaacggggtgctggagtccgaagctgggcaaccccaggctctgggaagcagtgggacttgcagttccctgaagaagcagaagctgagggcagagagcgactttgtgaagttt

SEQ ID NO: 475128 - DNA, 120 bp, Artificial Sequence
  ENSG00000160208_17 (sequence is synthesized)
gacacccccttcttaccaaagcccctgttcttcagaagagccaagagcagcactgccacccaccctccaggccctgccgtccagctaaacaagacaccatccagctccaagaaagtcacc

SEQ ID NO: 475129 - DNA, 120 bp, Artificial Sequence
  ENSG00000160208_18 (sequence is synthesized)
tttgggctgaacagaaacatgactgccgaattcaagaagacagacaagagtatcttggtcagtcccacgggcccttctcgagtggccttcgaccctgaacagaagcccctccacggggtg

SEQ ID NO: 475130 - DNA, 120 bp, Artificial Sequence
  ENSG00000160208_19 (sequence is synthesized)
ctgaagacccccaccagctcacctgccagctcacccctggtggccaagaagcccctgaccaccacaccaaggagaaggcccagggctatggatttcttctgaggagcagcagagtccctt

SEQ ID NO: 475131 - DNA, 120 bp, Artificial Sequence
  ENSG00000160208_20 (sequence is synthesized)
gtaaaagactgcttttgtacagaatgcgctataaattatacctttaagaatgtggggccttttttatgattttgtaagttcccataagttgtgtgcacgaggttctgagagtgcccgcag

SEQ ID NO: 475132 - DNA, 120 bp, Artificial Sequence
  ENSG00000160208_21 (sequence is synthesized)
tcttggttgaatcttttgctacaaaccatgtttgcgtttgagctctccaggattttacatttttgggtaacctcagtgattcccattggtgtaggaaatgagaccctctctgaagctgag

SEQ ID NO: 475133 - DNA, 120 bp, Artificial Sequence
  ENSG00000160208_22 (sequence is synthesized)
gagagcacgttgatctgaactttaaatcaatcagtgctgctggcacaatgaaaggtggaactgcacttctgttgagctctcagttctgcggaatttggtactcattaccgtattcgccgt

SEQ ID NO: 475134 - DNA, 120 bp, Artificial Sequence
  ENSG00000160208_23 (sequence is synthesized)
actaagttggtttctgttagtcttaacagtctgttttcttttaaaagcatgtagggcttcattgccatgttctgtgggtgtttggcaggttaccgatggggaagattcttgtcacagaat

SEQ ID NO: 475135 - DNA, 120 bp, Artificial Sequence
  ENSG00000160208_24 (sequence is synthesized)
cagcaataccatagtttttctacatgtgctcagctgggggtgtggacaggtaggggtggggaaagaagaggctctgcgttctgggggctttttcttctcctccccctacccggtttccct

SEQ ID NO: 475136 - DNA, 120 bp, Artificial Sequence
  ENSG00000160208_25 (sequence is synthesized)
ccctgttttcctacctctacggcaagcccaaagtgtcttcccgggagcccagcgcagcccccggctcttacccaggaccccgccccgtgctgagccttctgctgaggtccttgcgtggag

SEQ ID NO: 475137 - DNA, 120 bp, Artificial Sequence
  ENSG00000160208_26 (sequence is synthesized)
cacactcattcctccaagcccttgcgctcccgtttctctctctctccgtccacgttccagccgagtcactgcctgaccggctccatggcagctccccatcttccctagaggctgcctgcg

SEQ ID NO: 475138 - DNA, 120 bp, Artificial Sequence
  ENSG00000160208_27 (sequence is synthesized)
catctggagcctgcgctccggctcagcgacctttcctctcaaatgcggaagcgtgcacttacagttcagaccgttctcctgtaagttcattacaaacacgggcggaaggcactcaggctt

SEQ ID NO: 475139 - DNA, 120 bp, Artificial Sequence
  ENSG00000160208_28 (sequence is synthesized)
tcgttggagaaacagaaataaggccttcttttgagcagcgattgctggatcattgatctgtttgaggaagtgtctgacctgggcctgagagctggagaaggtgcagattcaaagtgagcg

SEQ ID NO: 475140 - DNA, 120 bp, Artificial Sequence
  ENSG00000160208_29 (sequence is synthesized)
gctcctgaggagagccgccaaggctgctcgccttctccgtggcttccgcagctaccgtctgcacggtgagagggcacgggcacacggttcgggctggcgtgcagctctcccagccagcca

SEQ ID NO: 475141 - DNA, 120 bp, Artificial Sequence
  ENSG00000160208_30 (sequence is synthesized)
cgctctgctcaggcctggaagtgaaagccgcctccttcccgttatgccccccatacaggagcctcggtttttcagcaaaacgcggccagtccccttctccactgctgcctcccagcagag

SEQ ID NO: 475142 - DNA, 120 bp, Artificial Sequence
  ENSG00000160208_31 (sequence is synthesized)
ggccccaggatctccaaggtcccagctatggctttggacaacgtggcttcggcccctggggttgcagagcttgcattgggtttacctcggtctcattcattcatggagccaagggtgggg

SEQ ID NO: 475143 - DNA, 120 bp, Artificial Sequence
  ENSG00000160208_32 (sequence is synthesized)
tttcacctgcgaacatcagactgacttgctggcgtcaagagcagttgactcactgatgaaggccctggtgaggagaaagcactctgttcttcgcctactctgtaatcgttttgtcataat

SEQ ID NO: 475144 - DNA, 120 bp, Artificial Sequence
  ENSG00000160208_33 (sequence is synthesized)
gagccatgaaaaaagtaatgaacttgtgctgttaatcgtcactgtaatgagaagtcttacgtacaacatagctgtggtggcttaatggctgcattagataggatcctcacatcccattca

SEQ ID NO: 475145 - DNA, 120 bp, Artificial Sequence
  ENSG00000160208_34 (sequence is synthesized)
gaaccaaaactgatacagtgaaacaattaaggtgagcaaatagttttaacttttcttttttttttttaagtttcattcttcctagaatatttttctaacaatttttatttcagctttaaa

SEQ ID NO: 475146 - DNA, 120 bp, Artificial Sequence
  ENSG00000160208_35 (sequence is synthesized)
gatgggtcatatagccaaacgggccatataatccaacattgttgagatgtcttaggacatctaaggcaaaactggcacatttgttctgcagactattgcaggaatgttttttcctagcat

SEQ ID NO: 475147 - DNA, 120 bp, Artificial Sequence
  ENSG00000160208_36 (sequence is synthesized)
ttctatattatctgtccattctgaggaaccagtgaatgtcctataaatgcacctcctgtcaaaaccatgcctgagaggtcccggctgggagtgacagggtgcttcttagattctattggt

SEQ ID NO: 475148 - DNA, 120 bp, Artificial Sequence
  ENSG00000160208_37 (sequence is synthesized)
ccttctctcattctccgaacttactcctttttatgggtaagtcaactaggtttacagtcccttatttttaatgcctaagttttgacagcaggaagaaaacaattttttaaaaattctcat

SEQ ID NO: 475149 - DNA, 120 bp, Artificial Sequence
  ENSG00000160208_38 (sequence is synthesized)
tacatagacgcacaagaatatgtcacataaagaaaatgtgtttagaatactggttttctatttacgcatgatattttcctaagtaaaattgccaagtggacttggaagtccagaaaggaa

SEQ ID NO: 475150 - DNA, 120 bp, Artificial Sequence
  ENSG00000160208_39 (sequence is synthesized)
aataatttaaattaatgctggtgatcttaacaatattttgtaaaatgatgcttcccccttctccatggtctagtcaattttgtacaattaggtatctgactttacaagtttgttatcctt

SEQ ID NO: 475151 - DNA, 120 bp, Artificial Sequence
  ENSG00000160208_40 (sequence is synthesized)
tctaatttttactgaactgaaagcacaaagaagactacacagaaaatctggaaacagttgcaggtgttgggaggaagatgaaatcgagctgtcttttaacttttgtatgtgttttatcag

SEQ ID NO: 475152 - DNA, 120 bp, Artificial Sequence
  ENSG00000160208_41 (sequence is synthesized)
aatttgctggactatgctggcaaggactttgtttacgatcaaattgtactagtgtctgcagggtttgtcagtactcgtcaaagccaagtccaattaaaaaaaaaagtctttgccctccaa

SEQ ID NO: 475153 - DNA, 120 bp, Artificial Sequence
  ENSG00000160208_42 (sequence is synthesized)
agaccagcccttacctagtcataccgcagtacagcgtgggaagtgatgcaagcctagggctccctgcagcctgcccaccttcctatcctgggctctccctaaccaccaaagcaagagggc

SEQ ID NO: 475154 - DNA, 120 bp, Artificial Sequence
  ENSG00000160208_43 (sequence is synthesized)
agactgctctcatgtgtgggtactgcgatgttttggtttggtttttattattttaactagatggattttcaatggcctaggaaggttttaattggatactctatgaaggtaaaaaatgta

SEQ ID NO: 475155 - DNA, 120 bp, Artificial Sequence
  ENSG00000160208_44 (sequence is synthesized)
atttctcaggatccctttcatttgctcttatggtcaatggtccccccgggaaaggctgatgctgtaagctttgttacatttggacaagtcagtgaagttaccccatacccgtcattcact

SEQ ID NO: 475156 - DNA, 120 bp, Artificial Sequence
  ENSG00000160208_45 (sequence is synthesized)
agggacacttggaattgggaaaggcaccagcaagctggttggaatgcagagactgcattagccaagcgtccggggtccagccatggagggtgtcaccgagggcttgtgatcccttgcctt

SEQ ID NO: 475157 - DNA, 120 bp, Artificial Sequence
  ENSG00000160208_46 (sequence is synthesized)
gccttggttgagaaatccacaaagcttttttaagtctgtaattcctgtgtcagcagcgctcaggtttgggtgggagaaacggtgaggaacgatgatgatgaggcagaaattgggaggggt

SEQ ID NO: 475158 - DNA, 120 bp, Artificial Sequence
  ENSG00000160209_0 (sequence is synthesized)
gtcagaaggaggcgtctgcgctgatcgggtccgccgcgcgccagagccagagtcgcagccgaggggagccggggccggagcccgagcccgagccgagccggagcccgagcgagcggcgga

SEQ ID NO: 475159 - DNA, 120 bp, Artificial Sequence
  ENSG00000160209_1 (sequence is synthesized)
gaccgtgcccccgcctcggccccgcgccgccgcggccaggcccggcatggaggaggagtgccgggtgctctccatacagagccacgtcatccgcggctacgtgggcaaccgggcggccac

SEQ ID NO: 475160 - DNA, 120 bp, Artificial Sequence
  ENSG00000160209_2 (sequence is synthesized)
gttcccgctgcaggttttgggatttgagattgacgcggtgaactctgtccagttttcaaaccacacaggctatgcccactggaagggccaagtgctgaattcagatgagctccaggagtt

SEQ ID NO: 475161 - DNA, 120 bp, Artificial Sequence
  ENSG00000160209_3 (sequence is synthesized)
gtacgaaggcctgaggctgaacaacatgaataaatatgactacgtgctcacaggttatacgagggacaagtcgttcctggccatggtggtggacattgtgcaggagctgaagcagcagaa

SEQ ID NO: 475162 - DNA, 120 bp, Artificial Sequence
  ENSG00000160209_4 (sequence is synthesized)
ccccaggctggtgtacgtgtgtgatccagtcttgggtgacaagtgggacggcgaaggctcgatgtacgtcccggaggacctccttcccgtctacaaagaaaaagtggtgccgcttgcaga

SEQ ID NO: 475163 - DNA, 120 bp, Artificial Sequence
  ENSG00000160209_5 (sequence is synthesized)
cattatcacgcccaaccagtttgaggccgagttactgagtggccggaagatccacagccaggaggaagccttgcgggtgatggacatgctgcactctatgggccccgacaccgtggtcat

SEQ ID NO: 475164 - DNA, 120 bp, Artificial Sequence
  ENSG00000160209_6 (sequence is synthesized)
caccagctccgacctgccctccccgcagggcagcaactacctgattgtgctggggagtcagaggaggaggaatcccgctggctccgtggtgatggaacgcatccggatggacattcgcaa

SEQ ID NO: 475165 - DNA, 120 bp, Artificial Sequence
  ENSG00000160209_7 (sequence is synthesized)
agtggacgccgtctttgtgggcactggggacctgtttgctgccatgctcctggcgtggacacacaagcaccccaataacctcaaggtggcctgtgagaagaccgtgtctaccttgcacca

SEQ ID NO: 475166 - DNA, 120 bp, Artificial Sequence
  ENSG00000160209_8 (sequence is synthesized)
cgttctgcagaggaccatccagtgtgcaaaagcccaggccggggaaggagtgaggcccagccccatgcagctggagctgcggatggtgcagagcaaaagggacatcgaggacccagagat

SEQ ID NO: 475167 - DNA, 120 bp, Artificial Sequence
  ENSG00000160209_9 (sequence is synthesized)
cgtcgtccaggccacggtgctgtgagggccccgccgcttgcccgtgacacgcagcgcgttggtgtctccgtgtttgtccctgtgaaaacatgtaacgtctgccttagagccatgaccgaa

SEQ ID NO: 475168 - DNA, 120 bp, Artificial Sequence
  ENSG00000160209_10 (sequence is synthesized)
acttgatatttttttctttcatgagtgtccggcatctgctggtcttcattgtgaaacgtgccagtcgtgctttgtgaaaaataacaaagtggtcacagaaatttgtgatctgaaaacccg

SEQ ID NO: 475169 - DNA, 120 bp, Artificial Sequence
  ENSG00000160209_11 (sequence is synthesized)
gctcccttccccacaaggctcctgggcctccgggaagacgggcccctgtttgccatctcgggggtgttccctgtgggagggtgagtgggtgaggccgagcctgctgcgtgtggagcctcg

SEQ ID NO: 475170 - DNA, 120 bp, Artificial Sequence
  ENSG00000160209_12 (sequence is synthesized)
agtgggccctggctgccactaccgtacagaggccgtgtcgcgctgggctgggcctgggtggcctctgtctttgcatctctgagaaggagtcgggtggtaacggttggggtcaggaagaat

SEQ ID NO: 475171 - DNA, 120 bp, Artificial Sequence
  ENSG00000160209_13 (sequence is synthesized)
tctgccaagtatctttactgtcattctgaccatagcctctttgttcccgcattcgaacttttggttcttactttgctgctcgtttagtccctggggatttcagatcttaggctgttgttt

SEQ ID NO: 475172 - DNA, 120 bp, Artificial Sequence
  ENSG00000160209_14 (sequence is synthesized)
caccgtatgggagggttgatgtgagcttgcttggagacacacggtgcagcatcagggaccttcccaggccccagcaaattcaagtcggtctgcagacctctcagctacccgcgggacctc

SEQ ID NO: 475173 - DNA, 120 bp, Artificial Sequence
  ENSG00000160209_15 (sequence is synthesized)
ttgtaacccatcggcatcttccaggaatccgccgagtgacttgaggaagatgctaacgcagtaaggtctgtgctgggccaagagcagctttgaagctccagagaaccaccccgtcaggtt

SEQ ID NO: 475174 - DNA, 120 bp, Artificial Sequence
  ENSG00000160209_16 (sequence is synthesized)
ccttgtggaagctcccctcatccgtggtgcagcaggctgagcactgcgcgtttgccacgtgctgcccgtgacagcacattgagccacagcatttgtagacaggacagaggggtgcctgcc

SEQ ID NO: 475175 - DNA, 120 bp, Artificial Sequence
  ENSG00000160209_17 (sequence is synthesized)
ccctgcccctgctggcacatttaacccttgtcccctgacctcagttctgtgccccaccaaatgcccaggggcaagaggccaccctggaagctgccaatcttccaaggtgggtgtggggca

SEQ ID NO: 475176 - DNA, 120 bp, Artificial Sequence
  ENSG00000160209_18 (sequence is synthesized)
cggtgggggcgggcagctcccaggcccttgggcaggctggggtgacggcagaggccacagcaccagctctgacaagtcctatcatcctctgctcagcagtgacctccctggccccacttt

SEQ ID NO: 475177 - DNA, 120 bp, Artificial Sequence
  ENSG00000160209_19 (sequence is synthesized)
gcccagagtttggggtccccccaggtatagctataggcggcagtgcctgtccctggcctgccttgatttcagccacacccctgcagccctgcatcccagctctggggtgtgcagaggttt

SEQ ID NO: 475178 - DNA, 120 bp, Artificial Sequence
  ENSG00000160209_20 (sequence is synthesized)
gtgtctccagggaacccacggctggagagaaatagggagatgcaggaagtgggggcccatggggcccccaagaagcggactctccaaggggtacccccaccccgctaccttccccacgga

SEQ ID NO: 475179 - DNA, 120 bp, Artificial Sequence
  ENSG00000160209_21 (sequence is synthesized)
cgggcccctcctggagcccataccctcctgtgaggccattccagtgtcttctagaaagactcgcttgccaggagtgcgttctttgttgaaaaatgccctgaagcgaaaagatgcaggttt

SEQ ID NO: 475180 - DNA, 120 bp, Artificial Sequence
  ENSG00000160209_22 (sequence is synthesized)
atatggaacccccaccccctcccccactctcccactctgttcgttctgaatgtcttcacgagcgtgcatcagggcgcctggctcccccacctcagccagtgagtcagacacgggtttcgc

SEQ ID NO: 475181 - DNA, 120 bp, Artificial Sequence
  ENSG00000160209_23 (sequence is synthesized)
agccatgtttcctggctccgaggacacgggtggcaggcccgttgcagcccagagccactggtccctacagggcgccgccacaccagcaggaaggaggatggctgtgtccggagcctggcg

SEQ ID NO: 475182 - DNA, 120 bp, Artificial Sequence
  ENSG00000160209_24 (sequence is synthesized)
gggaggcggcctccccagtatgtgagtgcagggatctgccagaaccacctggccctctgtagggcgtttaactggaaataccctcactgccaagtggagactggggcgtgtgccacattg

SEQ ID NO: 475183 - DNA, 120 bp, Artificial Sequence
  ENSG00000160209_25 (sequence is synthesized)
tctttttcttttttttttttttttaaacaccaagagcacgtatagcatgggggaaagaacctaaatgtctctctgtcctgtgagctggtgaaaaacccagcatgagaacgcagtgtcagg

SEQ ID NO: 475184 - DNA, 120 bp, Artificial Sequence
  ENSG00000160209_26 (sequence is synthesized)
catgagaacgcagtgtcaggtgtgggactccttctgcccctgcagtgggtgttacgggcggtgtgccctggcgagcaagctttgattcttggttctttgagctcgtttcagaggctgagt

SEQ ID NO: 475185 - DNA, 120 bp, Artificial Sequence
  ENSG00000160209_27 (sequence is synthesized)
ccccacatcagctttagttcttggacttccctgtattaagcaagaattaggagaatggctgtccctgcaggcgcctcccgtaaatcctgagctctctggcgcaatctgaaacttctcttc

SEQ ID NO: 475186 - DNA, 120 bp, Artificial Sequence
  ENSG00000160209_28 (sequence is synthesized)
tgttttctttggctgtatcagccgaaccaggagaggcctgggctgcgactaaggagaaagaaatcgggggtttctgagagcagatggtgcctttgtgggtgcagggcttttgtggaaatt

SEQ ID NO: 475187 - DNA, 120 bp, Artificial Sequence
  ENSG00000160209_29 (sequence is synthesized)
gtcagcctctacgggcagagtccggcatcccctccccagactgcctgctgtcaaaccacggagcagctggagcctgccctgtccacggcccgtttccacccgggcatgttcgtctctcct

SEQ ID NO: 475188 - DNA, 120 bp, Artificial Sequence
  ENSG00000160209_30 (sequence is synthesized)
tggccttcagtttcagtttctcatccaggaaggtaaccttgggcattggcagtgggtttccctatggcttggatccagattagaattgatctttgttttcactttccatagttaataaca

SEQ ID NO: 475189 - DNA, 120 bp, Artificial Sequence
  ENSG00000160209_31 (sequence is synthesized)
tgcaaaataatgagaagaatttattttaaggtgacagctatactggtccaacatcgcctgcttattgtcagggtacagaagtttaatactttcttaatccagtttttcaaacttctccct

SEQ ID NO: 475190 - DNA, 120 bp, Artificial Sequence
  ENSG00000160209_32 (sequence is synthesized)
gtagaccgtaaggatgaattccacaataggatcctttttaaaatcgattttaaattgttgcctagtcctgccaaggttattatgtgcatctgttatttttccaatacatgtaaacagttg

SEQ ID NO: 475191 - DNA, 120 bp, Artificial Sequence
  ENSG00000160209_33 (sequence is synthesized)
cagcatgatgctttgtttaatgtcctgttcttaagctcgttagagccagttttgaaacgtttggtcttaccgtgaacggaggctggcttggcttagccacgctgatgagtaagtgaggga

SEQ ID NO: 475192 - DNA, 120 bp, Artificial Sequence
  ENSG00000160209_34 (sequence is synthesized)
tgtctccatcttgagatcaccaggcaagagagttgcctgcaccaggtaagaggccaaagcccctggggtaacagtccccaccgctacccgaggtaaaacaataaaagctatgtggttgag

SEQ ID NO: 475193 - DNA, 120 bp, Artificial Sequence
  ENSG00000160209_35 (sequence is synthesized)
ctcaggcctctcgtgcctggtgtcagagaaggcagagcccacagtaggtgcacggtgcaaggccctgggagggcactggccagggaaggtggtatagatggccctcagattgcggggccc

SEQ ID NO: 475194 - DNA, 120 bp, Artificial Sequence
  ENSG00000160209_36 (sequence is synthesized)
cgagcagctccccactctgcccgtccaccttccctggctccagcctcattctctctttagtttaactatgcaaagagaggaggttgagagtgttctggcagctggagctcttttccttgt

SEQ ID NO: 475195 - DNA, 120 bp, Artificial Sequence
  ENSG00000160209_37 (sequence is synthesized)
ccttcctgccctccgatggggccacctgtgtcggggcagcagtgtccatgtttatggagatcagaggtgtccccactgtgtggctggactgtactctgctgcccgggtagccaggagtct

SEQ ID NO: 475196 - DNA, 120 bp, Artificial Sequence
  ENSG00000160209_38 (sequence is synthesized)
ctccctctctcccctgccgcctgcctggtctcatgggcctccttcacacacccctccctgtggatcgcctgcctgggcccagagcaggggaactggagtttgtgagtgagcagagcaggt

SEQ ID NO: 475197 - DNA, 120 bp, Artificial Sequence
  ENSG00000160209_39 (sequence is synthesized)
tatgtgcagacagggaaacgagaactttggacctggctttctgagtccaggtgagagctgtgtggccccccgatgccactctgcccgccggagggatgtgcctgctgagccttttccttc

SEQ ID NO: 475198 - DNA, 120 bp, Artificial Sequence
  ENSG00000160209_40 (sequence is synthesized)
cacgccgcctctcactgccaggccagcggcttccgctgagactcgctggagaggcggctcccgtgtccgtccaccgagcactcagatggatgctgatcaccagggccgagggggctccca

SEQ ID NO: 475199 - DNA, 120 bp, Artificial Sequence
  ENSG00000160209_41 (sequence is synthesized)
gaaggaccccaggccctggggagggtggctgtgggaggccaagtccactgcccggaagtcttgtcagccctaagccagggaagcctggagcgtggcctggcgggtctgggtggacaccgt

SEQ ID NO: 475200 - DNA, 120 bp, Artificial Sequence
  ENSG00000160209_42 (sequence is synthesized)
ccccactccggactcccagcacaggggaggatacctgagcctgtatggccctgtagccctgggcagagctgggcctgtcgtgtgttcctgcctggcaggtgcaggtgctggccatctgca

SEQ ID NO: 475201 - DNA, 82 bp, Artificial Sequence
  ENSG00000160209_43 (sequence is synthesized)
tgtgttcctgcctggcaggtgcaggtgctggccatctgcaggtggaaggaggtgggaatcgtgaagtctcgctctgacaccc

SEQ ID NO: 475202 - DNA, 60 bp, Artificial Sequence
  ENSG00000160209_44 (sequence is synthesized)
gtgtgatctcggctcactgcaaactccgcttcctgggttcaagtgggatttttgtatttt

SEQ ID NO: 475203 - DNA, 71 bp, Artificial Sequence
  ENSG00000160209_45 (sequence is synthesized)
acccggcggaatcttggaatttttatagacagcacctcagtttctgactccagccgcacacctcctgcctc

SEQ ID NO: 475204 - DNA, 120 bp, Artificial Sequence
  ENSG00000160209_46 (sequence is synthesized)
gcacctcagtttctgactccagccgcacacctcctgcctctgccagcaggggttgccgccagaccagagccagggccaggtccctgcgtccatcccccccggtaggatggacgtgagcca

SEQ ID NO: 475205 - DNA, 120 bp, Artificial Sequence
  ENSG00000160209_47 (sequence is synthesized)
tccttctaggggacttttttcagtgtgcgactcgtctctgttaggtggtaggagccagtttgtgtggcctgtgccacgctccacagtgcgtggctgggctctgtgtgtggcctgtgtccc

SEQ ID NO: 475206 - DNA, 120 bp, Artificial Sequence
  ENSG00000160209_48 (sequence is synthesized)
ctgtccctgcaggacccagcaggcatcgtggcgtgacagctgtgtccaagccactgcccgggcatcccatcacccaccagggtgcacggtctctcctgctgggggctttctgtcgcatgt

SEQ ID NO: 475207 - DNA, 120 bp, Artificial Sequence
  ENSG00000160209_49 (sequence is synthesized)
gtgtctcctgtcgactctgcagtttgttctcagagcagaatgtttcctgttctcagtgcacaaagacactggttttcaatcggcgtctaaaaccacgttcctgcctttcattgcaacacg

SEQ ID NO: 475208 - DNA, 120 bp, Artificial Sequence
  ENSG00000160209_50 (sequence is synthesized)
gtgtgttcatttgtttaaaacagtttaatgagtaagtttagatgactggtcaatatcttaaaaatgtatattagtaagaagttcttcctggaatttttctttcgattctggcagaataaa

SEQ ID NO: 475209 - DNA, 120 bp, Artificial Sequence
  ENSG00000160209_51 (sequence is synthesized)
caggtgtttttagttttcccactgtctgagccaagcaggaccctgtcccagagcaagagatgtccccttccatctctgacccttgcctgggacaagctttgatggggggccccagcttca

SEQ ID NO: 475210 - DNA, 120 bp, Artificial Sequence
  ENSG00000160209_52 (sequence is synthesized)
aggctgtggtgggaacagcacccccaaatgccagcctctcctttcttcccatccaccagtatactgcggggccatttctggtctttgtccaacaggaaacccatttctggtgggatatgc

SEQ ID NO: 475211 - DNA, 120 bp, Artificial Sequence
  ENSG00000160209_53 (sequence is synthesized)
cttccagtgccacagggccactcaccccatgcatctctgtcctgcccgtcagtgctgggacggacagcaagggcaagcccagtgtctggcggataggtgggtgggaacagagaggggaga

SEQ ID NO: 475212 - DNA, 120 bp, Artificial Sequence
  ENSG00000160209_54 (sequence is synthesized)
atgccgtcctaagcttctgcttggggatcccccacacgacctgggtactgcctgggaaacctgtcctaagtaaaactatggacctcgcctcgcccaccggcctgcgaagccagcatctcc

SEQ ID NO: 475213 - DNA, 120 bp, Artificial Sequence
  ENSG00000160209_55 (sequence is synthesized)
gtgaaggtggatggaagcgcctttgtcctcattttgagctgcaagctgggtcagcggctctgaagccctcgagtgactttctaacccaagacccagcccctggcaggaggagggtgggtg

SEQ ID NO: 475214 - DNA, 120 bp, Artificial Sequence
  ENSG00000160209_56 (sequence is synthesized)
cagggctggtgggacaaaaagaggcctcagcaggcctggaagacccttccagtacatcccacagcgtgtcgagcagctgggagaacctgtgtcaagctcgagccgtcataggtccccatg

SEQ ID NO: 475215 - DNA, 120 bp, Artificial Sequence
  ENSG00000160209_57 (sequence is synthesized)
aggtgtctgaagccccttcttggtgatgggaggcagaggtgctgacgttctggagcatggacgtgagtcctcagctggctccgcgtgggcccttggagggtgccaggtgtgtggtgacct

SEQ ID NO: 475216 - DNA, 120 bp, Artificial Sequence
  ENSG00000160209_58 (sequence is synthesized)
tctggatgcctttaacttcatggctgcgtcattcctgatttagaactttaaccggagcttcatctagtgattgcaaaactggaccaatgggaggacggcggcgcagcccgctccctccgt

SEQ ID NO: 475217 - DNA, 120 bp, Artificial Sequence
  ENSG00000160209_59 (sequence is synthesized)
ggaatggagctcagctcttcggaggcatcaaagcacctgtcgcctccgtggtccccctgctgagggagtgcggcctctgcaaggttcgggggtggcttcgtttgcctggagtggccggcc

SEQ ID NO: 475218 - DNA, 120 bp, Artificial Sequence
  ENSG00000160209_60 (sequence is synthesized)
ctgcttgtgccatgtggatgtttgtgagcctcggtcctacagcactgtgtaggctgcatctgtttcgtgctggtcctgttgacttgtatgatatccacaaataaatattttcatggcggt

SEQ ID NO: 475219 - DNA, 120 bp, Artificial Sequence
  ENSG00000160209_61 (sequence is synthesized)
ggggggctcgaggcgtcccatgtgggcagccgttgggacctgccaagcactgcgcctagtgatctccttcgggtttgagccagtccatggggaggagccgtccaccaggcaggctatgcc

SEQ ID NO: 475220 - DNA, 120 bp, Artificial Sequence
  ENSG00000160209_62 (sequence is synthesized)
gctcactgcagccttgacctcctgggctgaagcaatctttctgcctccacctcccgagtggctgggactatagttgtgcaccagcacgcccacctcctgcccagggttgttactggggtg

SEQ ID NO: 475221 - DNA, 120 bp, Artificial Sequence
  ENSG00000160209_63 (sequence is synthesized)
cccacctcctgcccagggttgttactggggtggtcacgtgggcagcttctgcctgggatgggccacaaagccagactcccggcagggacacgggtgttccacacaagctgcgttgttggt

SEQ ID NO: 475222 - DNA, 120 bp, Artificial Sequence
  ENSG00000160209_64 (sequence is synthesized)
tccctgacgcccttcaggctggggggtgggaaagccgatcccccaagtgcctgcagagcccacctggcgcaggcctcgccgcctcgaggctgctgctcgcacttctgccccttcccccgg

SEQ ID NO: 475223 - DNA, 120 bp, Artificial Sequence
  ENSG00000160209_65 (sequence is synthesized)
ccaggcccccgttccttgaggccgtaccacaaggtgcgttcatttttccacaccgtgagctgggcttggcagagcctccaccttgtggccagtattcccagtggcccctttgagaggatt

SEQ ID NO: 475224 - DNA, 120 bp, Artificial Sequence
  ENSG00000160209_66 (sequence is synthesized)
tcctggagctccctgtctgagcttcccggactgagggcactgggaaggagcctgcggagctggaggtcagcgggtggacgggttgcgctgtcctggctttcggagtgtagagccagaggg

SEQ ID NO: 475225 - DNA, 120 bp, Artificial Sequence
  ENSG00000160209_67 (sequence is synthesized)
gatgggacaggtgccctgctgctgggcttggtggtccctgctgcagggaaggggcagctggtgtgaacacaaggagctgcggggctggagaaggccagggccaggagcctgccgacggac

SEQ ID NO: 475226 - DNA, 120 bp, Artificial Sequence
  ENSG00000160209_68 (sequence is synthesized)
acaggagtgccaggctccttgggccgcccgaggaaccgcttgtttgcctgtgctttttcatctgtaaatggaatgagttggacacaagatccaagcgccctcccctgttggagaaggttc

SEQ ID NO: 475227 - DNA, 120 bp, Artificial Sequence
  ENSG00000160209_69 (sequence is synthesized)
ttgtgggctctgggcccatcccacatcccacagtgggcaggaggccaccaagaggtgcaagaccatgccctctgtttcgataggaagctgggcctcagaggggcctggggcctgtgtctg

SEQ ID NO: 475228 - DNA, 120 bp, Artificial Sequence
  ENSG00000160209_70 (sequence is synthesized)
agacccggccaagtgctggacgtctccccttcctcatggctgttatggctgaattacgtccccccaaattctcatgttgcagccttaaccccagcacctcagtgtgggactgggtttgga

SEQ ID NO: 475229 - DNA, 120 bp, Artificial Sequence
  ENSG00000160209_71 (sequence is synthesized)
gatggagcccctacagaggtcagcaggttaaaagaggccatcagggctctgggtgggccctgatccaagctgcttggtgtccttgtaagaagaagagatgaggacacagacacacacaga

SEQ ID NO: 475230 - DNA, 120 bp, Artificial Sequence
  ENSG00000160209_72 (sequence is synthesized)
gggacagccccatgaggaaacagggaggcaatgccgtctgcaagcccagggcagaggcctcaggaaccagccctggtgacacctggaccttggacccccgtgcccaggacagtaggagaa

SEQ ID NO: 475231 - DNA, 120 bp, Artificial Sequence
  ENSG00000160209_73 (sequence is synthesized)
ttggagccgcctggctgcagtccttcccgatggcaccctgtattagtccgttctcacactgctaattgttgggaaaagggcttgtggaatgcctgtataaactggccatgaaaatatggg

SEQ ID NO: 475232 - DNA, 120 bp, Artificial Sequence
  ENSG00000160209_74 (sequence is synthesized)
aaagcctcctaattgccatcatgttcgcatgctcagggcgagacctgctgtcttatctgtaaacaccgtgttcaaggagaaagacattccttcgaagcactggactgtggacagacacac

SEQ ID NO: 475233 - DNA, 120 bp, Artificial Sequence
  ENSG00000160209_75 (sequence is synthesized)
aagacattccttcgaagcactggactgtggacagacacacgagctcctggttaagcccgctcccaccagctcctgtccgataagttaaagatacgctgtttgagcacaaaggagattcat

SEQ ID NO: 475234 - DNA, 120 bp, Artificial Sequence
  ENSG00000160209_76 (sequence is synthesized)
tgaaaccgctattgctgtagattacgcctgtgacgcactgcctccctttcactgtttcgccctgaatatctgcttctcagatctaagtgactgtactcaataaatagcgtggagaccaga

SEQ ID NO: 475235 - DNA, 120 bp, Artificial Sequence
  ENSG00000160209_77 (sequence is synthesized)
ggcgtcccatgtgggcagccgttgggacctgccaagcactgcgcctagtgatctccttcgggtttgagccagtccatggggaggagccgtccaccaggcagcctcagggagagtgggcgg

SEQ ID NO: 475236 - DNA, 120 bp, Artificial Sequence
  ENSG00000160209_78 (sequence is synthesized)
gtgtcaagggaagcccacggccccagctggcccccttgtgtctgagcccccatggcttcctctgcctctaggctatgcccactggaagggccaagtgctgaattcagatgagctccagga

SEQ ID NO: 475237 - DNA, 120 bp, Artificial Sequence
  ENSG00000160209_79 (sequence is synthesized)
aggaagggagctgctgcacctgcttgggtgacaaacagtgatgaatagcacctcacagcaattaggatgactgtcatcaaagacacagaaaatagcaagtgtgagcgaggatgcagaaac

SEQ ID NO: 475238 - DNA, 120 bp, Artificial Sequence
  ENSG00000160209_80 (sequence is synthesized)
gggaggaggactgcgggctgcgcctgggcaggggatgagcttgtgtcgcgggcggcagggggaagggagtcggagagctcctgcggtccagccggatgactgatgaggttgaaagcactt

SEQ ID NO: 475239 - DNA, 120 bp, Artificial Sequence
  ENSG00000160209_81 (sequence is synthesized)
ccgctgcggcccccgcaggaagttcccaggaggaagttgcgaccctttctaagccatcccactggcctggactctgctgggattattttgaccccccagggcagagtgtagccatctgac

SEQ ID NO: 475240 - DNA, 120 bp, Artificial Sequence
  ENSG00000160209_82 (sequence is synthesized)
accccaataacctcaaggtagctgggaccgggcatctgctcagccctccgggctctccgtggtgggcagtccgcagcctgtcctccagggttcagcacgtgcattggcggagccggctcc

SEQ ID NO: 475241 - DNA, 120 bp, Artificial Sequence
  ENSG00000160209_83 (sequence is synthesized)
aagccatcccactggcctggactctgctgggattattttgaccccccagggcagagtgtagccatctgactggctttctctctcggcaggagacggggcgcacgcctgcaggcttcagtt

SEQ ID NO: 475242 - DNA, 120 bp, Artificial Sequence
  ENSG00000160209_84 (sequence is synthesized)
tcacattcttggtacctcctggtggtgcctgggagggagccactgctgtacagagatgccaattccagaggcatggtccggcacagagcgctggcttccagctgaaggacatgtgtaaca

SEQ ID NO: 475243 - DNA, 120 bp, Artificial Sequence
  ENSG00000160209_85 (sequence is synthesized)
gcaggagatacctttctctggggtcccaggctcccgtcctggaccttggcaccccgccccccgtgcattgtcgtcttctgagtctggctttgtctggcacatgaagttggatgggtagac

SEQ ID NO: 475244 - DNA, 120 bp, Artificial Sequence
  ENSG00000160209_86 (sequence is synthesized)
tctggaagcgtccagaccagcttgcgatgctgatgaataagctgattttgatggggtgtgtgaaacggagatgccagcccaggggctcagcttgctcgtgctctcatttaaaagcagaaa

SEQ ID NO: 475245 - DNA, 120 bp, Artificial Sequence
  ENSG00000160209_87 (sequence is synthesized)
atagcgacttcattctcggatacgtttgccagccccaaaggattaattatctacacacccagaagcagtggagcagaatattttggcaggattttcaggatttgtgtcatcgttgcttaa

SEQ ID NO: 475246 - DNA, 120 bp, Artificial Sequence
  ENSG00000160209_88 (sequence is synthesized)
aatctggaaggagccttcagagaaatttgaaagtggcataaaccaaggggtgaattaaaggcccagaagttgatgacgtcaagacgtcctttttggaagtgaggggagcagcacagctgt

SEQ ID NO: 475247 - DNA, 120 bp, Artificial Sequence
  ENSG00000160209_89 (sequence is synthesized)
gagtctccaaactgggctgtgcagagattgtcccaagcacgtctgaggccagtagctgccctgtggggagaggcaagcctgtcctgtcactgtgcatcccgtccagatggacaggtagta

SEQ ID NO: 475248 - DNA, 120 bp, Artificial Sequence
  ENSG00000160209_90 (sequence is synthesized)
gattcccgctggctgggtgatatccgtgtccttcatctgtcagcctctggagccgccgaggctgggtgccaggcactgccgcctgggacacatgtgacctccgtgctgcaggaccacagt

SEQ ID NO: 475249 - DNA, 120 bp, Artificial Sequence
  ENSG00000160209_91 (sequence is synthesized)
ggggggctcgcggggggctcgcgggggggctcgcggggggctcgcggggggctcgaggcgtcccatgtgggcagccgttgggacctgccaagcactgcgcctagtgatctccttcgggtt

SEQ ID NO: 475250 - DNA, 90 bp, Artificial Sequence
  ENSG00000160209_92 (sequence is synthesized)
tctggcttaagcctaggagttcaaaaccagcctcggcaacatggtgagaacccatctgtacaaatcatttaaaagctagctgggtgtgct

SEQ ID NO: 475251 - DNA, 120 bp, Artificial Sequence
  ENSG00000160209_93 (sequence is synthesized)
cccatctgtacaaatcatttaaaagctagctgggtgtgctgctgcatgcctgtggtctcagccacttgggagggtgaggcaggaggatcgcccgagcctggaagatcgaggttgcagtga

SEQ ID NO: 475252 - DNA, 120 bp, Artificial Sequence
  ENSG00000160209_94 (sequence is synthesized)
agcctggacaacagagcaagaccctgtcttaaaaaaagaagaaagaaatgtggagggtttcttactcgtcagctgtagcctttgctgataagatgcccttgtgtctctgcagtgtgtgat

SEQ ID NO: 475253 - DNA, 120 bp, Artificial Sequence
  ENSG00000160209_95 (sequence is synthesized)
cgtgtgtgatccagtcttgggtgacaagtgggacggcgaaggctcgatgagcaagaccccatctcaaaaaacaaaagaaaaatctagaaaccacttaacccatgagctgtgtagtaacag

SEQ ID NO: 475254 - DNA, 120 bp, Artificial Sequence
  ENSG00000160209_96 (sequence is synthesized)
gccaggctcagggtacacctattgccagggagctcccactgattccttgtgagtgtagcacagatttgttgcgactggaccatctgcacgtctgggcttcagagctgttctccccagctg

SEQ ID NO: 475255 - DNA, 120 bp, Artificial Sequence
  ENSG00000160211_0 (sequence is synthesized)
ggaaacggtcgtacacttcggggctgcgagcgcggagggcgacgacgacgaagcgcagacagcgtcatggcagagcaggtggccctgagccggacccaggtgtgcgggatcctgcgggaa

SEQ ID NO: 475256 - DNA, 120 bp, Artificial Sequence
  ENSG00000160211_1 (sequence is synthesized)
gagcttttccagggcgatgccttccatcagtcggatacacacatattcatcatcatgggtgcatcgggtgacctggccaagaagaagatctaccccaccatctggtggctgttccgggat

SEQ ID NO: 475257 - DNA, 120 bp, Artificial Sequence
  ENSG00000160211_2 (sequence is synthesized)
ggccttctgcccgaaaacaccttcatcgtgggctatgcccgttcccgcctcacagtggctgacatccgcaaacagagtgagcccttcttcaaggccaccccagaggagaagctcaagctg

SEQ ID NO: 475258 - DNA, 120 bp, Artificial Sequence
  ENSG00000160211_3 (sequence is synthesized)
gaggacttctttgcccgcaactcctatgtggctggccagtacgatgatgcagcctcctaccagcgcctcaacagccacatgaatgccctccacctggggtcacaggccaaccgcctcttc

SEQ ID NO: 475259 - DNA, 120 bp, Artificial Sequence
  ENSG00000160211_4 (sequence is synthesized)
tacctggccttgcccccgaccgtctacgaggccgtcaccaagaacattcacgagtcctgcatgagccagataggctggaaccgcatcatcgtggagaagcccttcgggagggacctgcag

SEQ ID NO: 475260 - DNA, 120 bp, Artificial Sequence
  ENSG00000160211_5 (sequence is synthesized)
agctctgaccggctgtccaaccacatctcctccctgttccgtgaggaccagatctaccgcatcgaccactacctgggcaaggagatggtgcagaacctcatggtgctgagatttgccaac

SEQ ID NO: 475261 - DNA, 120 bp, Artificial Sequence
  ENSG00000160211_6 (sequence is synthesized)
aggatcttcggccccatctggaaccgggacaacatcgcctgcgttatcctcaccttcaaggagccctttggcactgagggtcgcgggggctatttcgatgaatttgggatcatccgggac

SEQ ID NO: 475262 - DNA, 120 bp, Artificial Sequence
  ENSG00000160211_7 (sequence is synthesized)
gtgatgcagaaccacctactgcagatgctgtgtctggtggccatggagaagcccgcctccaccaactcagatgacgtccgtgatgagaaggtcaaggtgttgaaatgcatctcagaggtg

SEQ ID NO: 475263 - DNA, 120 bp, Artificial Sequence
  ENSG00000160211_8 (sequence is synthesized)
caggccaacaatgtggtcctgggccagtacgtggggaaccccgatggagagggcgaggccaccaaagggtacctggacgaccccacggtgccccgcgggtccaccaccgccacttttgca

SEQ ID NO: 475264 - DNA, 120 bp, Artificial Sequence
  ENSG00000160211_9 (sequence is synthesized)
aaggccctgaacgagcgcaaggccgaggtgaggctgcagttccatgatgtggccggcgacatcttccaccagcagtgcaagcgcaacgagctggtgatccgcgtgcagcccaacgaggcc

SEQ ID NO: 475265 - DNA, 120 bp, Artificial Sequence
  ENSG00000160211_10 (sequence is synthesized)
gtgtacaccaagatgatgaccaagaagccgggcatgttcttcaaccccgaggagtcggagctggacctgacctacggcaacagatacaagaacgtgaagctccctgacgcctatgagcgc

SEQ ID NO: 475266 - DNA, 120 bp, Artificial Sequence
  ENSG00000160211_11 (sequence is synthesized)
ctcatcctggacgtcttctgcgggagccagatgcacttcgtgcgcagcgacgagctccgtgaggcctggcgtattttcaccccactgctgcaccagattgagctggagaagcccaagccc

SEQ ID NO: 475267 - DNA, 120 bp, Artificial Sequence
  ENSG00000160211_12 (sequence is synthesized)
atcccctatatttatggcagccgaggccccacggaggcagacgagctgatgaagagagtgggtttccagtatgagggcacctacaagtgggtgaacccccacaagctctgagccctgggc

SEQ ID NO: 475268 - DNA, 120 bp, Artificial Sequence
  ENSG00000160211_13 (sequence is synthesized)
acccacctccacccccgccacggccaccctccttcccgccgcccgaccccgagtcgggaggactccgggaccattgacctcagctgcacattcctggccccgggctctggccaccctggc

SEQ ID NO: 475269 - DNA, 120 bp, Artificial Sequence
  ENSG00000160211_14 (sequence is synthesized)
ccgcccctcgctgctgctactacccgagcccagctacattcctcagctgccaagcactcgagaccatcctggcccctccagaccctgcctgagcccaggagctgagtcacctcctccact

SEQ ID NO: 475270 - DNA, 120 bp, Artificial Sequence
  ENSG00000160211_15 (sequence is synthesized)
cactccagcccaacagaaggaaggaggagggcgcccattcgtctgtcccagagcttattggccactgggtctcactcctgagtggggccagggtgggagggagggacgagggggaggaaa

SEQ ID NO: 475271 - DNA, 120 bp, Artificial Sequence
  ENSG00000160211_16 (sequence is synthesized)
ggggcgagcacccacgtgagagaatctgcctgtggccttgcccgccagcctcagtgccacttgacattccttgtcaccagcaacatctcgagccccctggatgtcccctgtcccaccaac

SEQ ID NO: 475272 - DNA, 120 bp, Artificial Sequence
  ENSG00000160211_17 (sequence is synthesized)
tctgcactccatggccaccccgtgccacccgtaggcagcctctctgctataagaaaagcagacgcagcagctgggacccctcccaacctcaatgccctgccattaaatccgcaaacagcc

SEQ ID NO: 475273 - DNA, 120 bp, Artificial Sequence
  ENSG00000160211_18 (sequence is synthesized)
cgagaactcgggaagccggcgagaagtgtgaggccgcggtagggccgcatcccgctccggagagaagtctgagtccgccaggctctgcaggcccgcggaagctcgacagcgtcatggcag

SEQ ID NO: 475274 - DNA, 120 bp, Artificial Sequence
  ENSG00000160211_19 (sequence is synthesized)
cattcacgagtcctgcatgagccagatgtaaggcttgccgttgccctcccttcccgcctgccaggctggcccaggcagtgctcccaccactctatgagcgtgtccggggccggggatctg

SEQ ID NO: 475275 - DNA, 120 bp, Artificial Sequence
  ENSG00000160211_20 (sequence is synthesized)
ccgggatgctctcctcctctcctgccccgccccgcctgctctcgtacttccttgagacccccattaccagcccccgtgaccaggacccacaggtcccctcctgctgtgctctgctgcgtt

SEQ ID NO: 475276 - DNA, 120 bp, Artificial Sequence
  ENSG00000160211_21 (sequence is synthesized)
ctccatgcctcagcttttccaactaattgttgcagggccccacaggctctgctaagttgagctcctcctcccgctcctgctagtgcgccaggatcatcccggctctacctggtgtgcata

SEQ ID NO: 475277 - DNA, 80 bp, Artificial Sequence
  ENSG00000160211_22 (sequence is synthesized)
tagtgcgccaggatcatcccggctctacctggtgtgcatatgcacttgcaagaggtcgcccaggatggggtgcagtggcg

SEQ ID NO: 475278 - DNA, 120 bp, Artificial Sequence
  ENSG00000160211_23 (sequence is synthesized)
ccggcgagaagtgtgaggccgcggtagggccgcatcccgctccggagagaagtctgagtccgccaggctctgcaggcccgcggaagctcgcgtcatggcagagcaggtggccctgagccg

SEQ ID NO: 475279 - DNA, 120 bp, Artificial Sequence
  ENSG00000160211_24 (sequence is synthesized)
ccccaggagcatgccctgtcgcaggcccatctgtgacgaggcactgagctggggtgtgcatgcagagcaggtgtcctcaaccccggagaagtcaccacctctgagcacagcgtggcctcc

SEQ ID NO: 475280 - DNA, 120 bp, Artificial Sequence
  ENSG00000160211_25 (sequence is synthesized)
cggaggtgacctggactggcagtcatgaagcccaagttgtcatgtcccaggcctgacagtcactatgtgaccagggaaggccattgcctctctgggcctcagcttgttcatcagaataga

SEQ ID NO: 475281 - DNA, 120 bp, Artificial Sequence
  ENSG00000160211_26 (sequence is synthesized)
gagaggtgggatggtaggtgatgccttcgaggcccagcaaggcagaactgggcatgccctgtgtgcgggcactggagctcccactgagacactcacgcactggtccacaccctgagagag

SEQ ID NO: 475282 - DNA, 120 bp, Artificial Sequence
  ENSG00000160211_27 (sequence is synthesized)
ctatatttatggcaggtgaggaaagggtgggggctggggacagagcccagcgggcaggggcggggtgagggtggagctacctcatgcctctcctccacccgtcactctccagccgaggcc

SEQ ID NO: 475283 - DNA, 120 bp, Artificial Sequence
  ENSG00000160213_0 (sequence is synthesized)
cgcgtcccttcttgcggggccaccgcgaccccgcaggggactccgaagccaaagtgcctcctccccgccccttggttccgcccgcgcgtcacgtgaccccagcgcctacttgggctgagg

SEQ ID NO: 475284 - DNA, 120 bp, Artificial Sequence
  ENSG00000160213_1 (sequence is synthesized)
agccgccgcgtcccctcgccgagtcccctcgccagattccctccgtcgccgccaagatgatgtgcggggcgccctccgccacgcagccggccaccgccgagacccagcacatcgccgacc

SEQ ID NO: 475285 - DNA, 120 bp, Artificial Sequence
  ENSG00000160213_2 (sequence is synthesized)
aggtgaggtcccagcttgaagagaaagaaaacaagaagttccctgtgtttaaggccgtgtcattcaagagccaggtggtcgcggggacaaactacttcatcaaggtgcacgtcggcgacg

SEQ ID NO: 475286 - DNA, 120 bp, Artificial Sequence
  ENSG00000160213_3 (sequence is synthesized)
aggacttcgtacacctgcgagtgttccaatctctccctcatgaaaacaagcccttgaccttatctaactaccagaccaacaaagccaagcatgatgagctgacctatttctgatcctgac

SEQ ID NO: 475287 - DNA, 120 bp, Artificial Sequence
  ENSG00000160213_4 (sequence is synthesized)
tttggacaaggcccttcagccagaagactgacaaagtcatcctccgtctaccagagcgtgcacttgtgatcctaaaataagcttcatctccgggctgtgccccttggggtggaaggggca

SEQ ID NO: 475288 - DNA, 120 bp, Artificial Sequence
  ENSG00000160213_5 (sequence is synthesized)
ggattctgcagctgcttttgcatttctcttcctaaatttcattgtgttgatttctttccttcccaataggtgatcttaattactttcagaatattttcaaaatagatatatttttaaaat

SEQ ID NO: 475289 - DNA, 120 bp, Artificial Sequence
  ENSG00000160213_6 (sequence is synthesized)
ccttacagattgcctcctttgttttagacttttttcttcgtctgaaccaccccgggcaggtccttcccctcgggggcatggagggcggagagactgcctggctcacacagcaagcaggtg

SEQ ID NO: 475290 - DNA, 120 bp, Artificial Sequence
  ENSG00000160213_7 (sequence is synthesized)
gtggacccaggattcacacctgcccactccggcccgcgttcctaaccaccactctttacatgttggtgctttgactcttaggtcctggccccaagcttcagtttctcccataaaataaaa

SEQ ID NO: 475291 - DNA, 120 bp, Artificial Sequence
  ENSG00000160213_8 (sequence is synthesized)
gagtgtgagtaaatccaattccagagcataactggctccagatctcagatacattcacgcactttatgctctggtacggagaggcagccacacagtgtcgtgcacgtgcagaatagcctg

SEQ ID NO: 475292 - DNA, 120 bp, Artificial Sequence
  ENSG00000160213_9 (sequence is synthesized)
ctcactgagtgccctgtggtgcgggaggcttcccatggagccacgtgggcttctaaagggaggtatcttaggagagcgtggctgtttttaaaaacaccttctagttttcaacagggatta

SEQ ID NO: 475293 - DNA, 120 bp, Artificial Sequence
  ENSG00000160213_10 (sequence is synthesized)
cttcccattcatggaattggtccggtgccttcccaactgtgattctatgttaaataggacagaagagggagcatcatacatgataagagctaagactgggggtgaaagtctctgtgcacc

SEQ ID NO: 475294 - DNA, 120 bp, Artificial Sequence
  ENSG00000160213_11 (sequence is synthesized)
ggggtcatgatgtgaacgtgttcctgagggtgtcctgagctgcgctttgcctccgaggcgtccggcagcgtatgccagaactgcagctgcagggttcaggctgtccagatcgtgggggat

SEQ ID NO: 475295 - DNA, 120 bp, Artificial Sequence
  ENSG00000160213_12 (sequence is synthesized)
ctgtgaagactaaggagggatctaccagtgagtccacagagctttgaaagtgatgttaggaaattctgaatcaggccgggcgcggtggctcacacctagaatcccaacactttgggaggc

SEQ ID NO: 475296 - DNA, 77 bp, Artificial Sequence
  ENSG00000160213_13 (sequence is synthesized)
tgggaggccaaggtgggtggatcactctgaggtcaggagttctaggaaaaaattagctgggcgttgtggcaggcgcc

SEQ ID NO: 475297 - DNA, 90 bp, Artificial Sequence
  ENSG00000160213_14 (sequence is synthesized)
cacttggactcgggaggtggtgggtgcagtgagccgagatcgtacctctgcactccagcctgggtgggtgacagagtgagatcctatctc

SEQ ID NO: 475298 - DNA, 120 bp, Artificial Sequence
  ENSG00000160213_15 (sequence is synthesized)
aaaaaaaaaccaaaaagaaaactgaatcatggactgtgtgtattctacactcttaacatgaactctgagactaagcttttataacatgcaaaacagaatcaagcagttttgcattgaaag

SEQ ID NO: 475299 - DNA, 120 bp, Artificial Sequence
  ENSG00000160213_16 (sequence is synthesized)
gaaaacccgttgtatttcccacttgagaatttccagcggaaggcaggtgggggaggggctgtttaggggaccacgcagcgggagagccatccccaacaggaagggagcggttgtctgcag

SEQ ID NO: 475300 - DNA, 120 bp, Artificial Sequence
  ENSG00000160213_17 (sequence is synthesized)
gagcagtgaccaggaactcctatggggcacctgggttgggggaagctggatttagggttagaagcttgtgtgtaaacaggaaatatcagtgtaaaacagaaaataaaatatgtaattaat

SEQ ID NO: 475301 - DNA, 120 bp, Artificial Sequence
  ENSG00000160213_18 (sequence is synthesized)
cgcagccggccaccgccgagacccagcacatcgccgaccaggtgggtgggccgcggggacggggccggcccggagtcctgccttagcctcagggcgcggccgcggctcctggagcgaaag

SEQ ID NO: 475302 - DNA, 120 bp, Artificial Sequence
  ENSG00000160213_19 (sequence is synthesized)
cggccgcggctcctggagcgaaagaagccgctttggccccgctgcgcacccctgggctggcccgggctgtggccgtgagaggcctccctccgctcgggcgctgcgcgcgagtgagcagcg

SEQ ID NO: 475303 - DNA, 120 bp, Artificial Sequence
  ENSG00000160213_20 (sequence is synthesized)
gggggccgcgcctggggcgccgctggggagacattgggctccgctgaatacagcaagggcgagtgggaattgatagcccggagcagggtgcggtccctgcatggacagtctctgagagga

SEQ ID NO: 475304 - DNA, 120 bp, Artificial Sequence
  ENSG00000160213_21 (sequence is synthesized)
aaccccagggatgaggcgcttctggtttcaggcaggcagggtgatcgggcgtcgccggcgatggcgcaggtgagcagccggctccgatctccacggtgatccgatagcaagcgggtggga

SEQ ID NO: 475305 - DNA, 120 bp, Artificial Sequence
  ENSG00000160213_22 (sequence is synthesized)
agggtctggctaaactgacttagccaggcttcttgctaaaagtggattttacaaggaagtgcgcaggtggcctaggcgcttcaggagcccgactacagtttggccaagcaagaatctttg

SEQ ID NO: 475306 - DNA, 120 bp, Artificial Sequence
  ENSG00000160213_23 (sequence is synthesized)
tcaatatcctcatctagttcgggaaaaaaatcatgagagagagtgcaagaggtccccagtgataaggcacatgggttaaaaacttaagtgtatctgcataaaaggtccacaggtttcttt

SEQ ID NO: 475307 - DNA, 120 bp, Artificial Sequence
  ENSG00000160213_24 (sequence is synthesized)
acatgcttccgattctagcactgtttcaaactgtaagtctaaataaaaagttaaaacacagaaaaacaagataaaaaccgggctgggttgcagatggcaaccttccctgtgtctcggttt

SEQ ID NO: 475308 - DNA, 120 bp, Artificial Sequence
  ENSG00000160213_25 (sequence is synthesized)
cctcgtctgtaaaatggacgtcctgttgctctgcgcctgccagaagattctggaggggctgaaatgagcaggtcatctgtgcaagaagccccctccggtggagcacaggccaggcccgcc

SEQ ID NO: 475309 - DNA, 120 bp, Artificial Sequence
  ENSG00000160213_26 (sequence is synthesized)
tcgctgtcatggttggtgaccgacgggatgccccaagcaagaacaggtccaggcgatgctgaggcctgtgttttttttttttgtttttgagactcagtctcactcttgcccagggtggag

SEQ ID NO: 475310 - DNA, 120 bp, Artificial Sequence
  ENSG00000160213_27 (sequence is synthesized)
cccagctggaactgtttttttctactttattattaggctgacagtttaaatgtcccttcagttgtaagagacaattgtgtgaagagccagtgtcagaatcgtgtgtgtgctcacatgcgt

SEQ ID NO: 475311 - DNA, 120 bp, Artificial Sequence
  ENSG00000160213_28 (sequence is synthesized)
gctgtgtggtcttaggtgctggggcgccctgtggctgccccctgagataagcatcctactgtgtgtgtccatcggcctttcaggaggactagggcttctggggagctaagaaccccaagg

SEQ ID NO: 475312 - DNA, 120 bp, Artificial Sequence
  ENSG00000160213_29 (sequence is synthesized)
cccctgcacatgcaggagaagacaagattgtcttcagctggctgctaatgacctggaggggcgcagcaaggtgacttgggatcagaggcttcgctcactccgctctcttcccaggtgcac

SEQ ID NO: 475313 - DNA, 120 bp, Artificial Sequence
  ENSG00000160214_0 (sequence is synthesized)
agtgtgctgggtaccaggcgactccgggacagggggtctcggccgtcggcgtcatggtttcgcgcgtgcagctcccgcctgagatccagctggctcagcgcctggcggggaatgagcagg

SEQ ID NO: 475314 - DNA, 120 bp, Artificial Sequence
  ENSG00000160214_1 (sequence is synthesized)
tgacccgggaccgggcggtgaggaagctccggaaatacatcgtcgccaggactcagcgggccgcaggtggttttacgcacgacgagctgctgaaggtgtggaaaggactgttttattgca

SEQ ID NO: 475315 - DNA, 120 bp, Artificial Sequence
  ENSG00000160214_2 (sequence is synthesized)
tgtggatgcaggacaagccactcctccaggaagaattaggaaggactatttcccagctcgttcatgcttttcagaccacggaggcgcagcacctgttccttcaggccttctggcagacca

SEQ ID NO: 475316 - DNA, 120 bp, Artificial Sequence
  ENSG00000160214_3 (sequence is synthesized)
tgaatcgcgagtggacgggcattgacaggctgcgcctggataaattctacatgctcatgcggatggtcctgaacgagtccttgaaggttctgaagatgcaaggctgggaagaaagacaga

SEQ ID NO: 475317 - DNA, 120 bp, Artificial Sequence
  ENSG00000160214_4 (sequence is synthesized)
tcgaggagctgctagagctgctgatgactgagatcctgcaccccagcagccaggcccccaacggtgtgaagagccacttcatcgagatcttcctggaggagctgaccaaagtgggcgccg

SEQ ID NO: 475318 - DNA, 120 bp, Artificial Sequence
  ENSG00000160214_5 (sequence is synthesized)
aggagcttacggcagaccagaacctgaagttcatcgaccccttctgcagaattgctgcccggaccaaggattccttggttttgaacaacatcactcgaggcatctttgagacgattgtgg

SEQ ID NO: 475319 - DNA, 120 bp, Artificial Sequence
  ENSG00000160214_6 (sequence is synthesized)
agcaggccccgcttgccattgaagacctcctgaatgaactggacacacaggatgaggaggtggcgtcggacagtgatgagtcctctgagggtggtgagcgtggagacgcgctgtcccaga

SEQ ID NO: 475320 - DNA, 120 bp, Artificial Sequence
  ENSG00000160214_7 (sequence is synthesized)
agaggtctgagaagccgcccgcaggctccatctgcagggctgaacctgaggctggtgaggagcaggcaggtgacgacagggacagtggcggccccgttctccagtttgactacgaggcag

SEQ ID NO: 475321 - DNA, 120 bp, Artificial Sequence
  ENSG00000160214_8 (sequence is synthesized)
ttgctaacagactgtttgaaatggccagccgccagagcaccccttctcagaacagaaagcgtctctacaaagtgatccggaagctgcaggacctggcaggaggcattttccctgaagatg

SEQ ID NO: 475322 - DNA, 120 bp, Artificial Sequence
  ENSG00000160214_9 (sequence is synthesized)
agatcccagagaaggcctgcaggcgcctgcttgaagggaggcggcagaagaagacgaagaagcagaagcgtctgctcaggttgcagcaggagagagggaaaggtgagaaggagcccccga

SEQ ID NO: 475323 - DNA, 120 bp, Artificial Sequence
  ENSG00000160214_10 (sequence is synthesized)
gcccgggcatggagaggaagaggagcaggaggaggggtgtaggggccgaccccgaggcgcgggcagaggctggtgagcagccaggcacagctgagcgggccctgctccgagatcagccca

SEQ ID NO: 475324 - DNA, 120 bp, Artificial Sequence
  ENSG00000160214_11 (sequence is synthesized)
ggggccgtggccagagaggggctcgccagagaaggaggacacctcggcccctgaccagtgcccgagcaaaggcggccaatgtccaggagccggagaagaagaagaaacgcagggagtgat

SEQ ID NO: 475325 - DNA, 120 bp, Artificial Sequence
  ENSG00000160214_12 (sequence is synthesized)
tagactcaggaccgtggctccagaactcctgtgccaggcgggagggaagggcggcactggagagatgggcccatcattaggggccagcatcccaggaactggacctttccccagagcctc

SEQ ID NO: 475326 - DNA, 120 bp, Artificial Sequence
  ENSG00000160214_13 (sequence is synthesized)
cgcctgtggctgtgatgaccttgggccagaaggtcaaactccgaagactgaaactctgcctgcagcaggactggccgcccctgctgtggggggttcagaaaataaaatgccgcgcagccc

SEQ ID NO: 475327 - DNA, 120 bp, Artificial Sequence
  ENSG00000160214_14 (sequence is synthesized)
ttgccaggggaagtgtcgcttcaggtgtgtcctacggacgtgtgggaggtggcaggcgccagcctccgagcagtgtggtggtttatattcatgtttgtggaaaaatcttgcaagacattt

SEQ ID NO: 475328 - DNA, 120 bp, Artificial Sequence
  ENSG00000160214_15 (sequence is synthesized)
ctcctttcacagaactgcccaggtgttaacagggctgtctggacggggctcttttgcttccccctcaatctggggtctagagttgtgcaaggaattcagctccagtaaggcctggattgc

SEQ ID NO: 475329 - DNA, 120 bp, Artificial Sequence
  ENSG00000160214_16 (sequence is synthesized)
ccggggtgagcgtgtgtgtggtgggaagacctggcttccgcgagagccttgttcctggaggcaggagcgccccgccatcctgggtacccgcgggtccgcaggctgcgcacctctttccct

SEQ ID NO: 475330 - DNA, 120 bp, Artificial Sequence
  ENSG00000160214_17 (sequence is synthesized)
cagccaggtcaccctcagcgtcctccctgcccctctccccttcacacctgctggagcctgtgagggaggtggcgggtccccactgtggcgacggagagctgacagtagcccagggctttc

SEQ ID NO: 475331 - DNA, 120 bp, Artificial Sequence
  ENSG00000160214_18 (sequence is synthesized)
cacctgcatggaacaagggcctgtctgccgccagcgctgtggccacagcctgcataggtgacaaggggccgctgcgttgggttttgcccgcatcttctgttccatgggtgcccagccagc

SEQ ID NO: 475332 - DNA, 120 bp, Artificial Sequence
  ENSG00000160214_19 (sequence is synthesized)
caggccgtgtgggatccagcgagaggccagggcttggagtgggcctgggaccaggaaggacctctaggctgtggctggccttgtgcagaccctggactgcatccggttccccaaagccct

SEQ ID NO: 475333 - DNA, 120 bp, Artificial Sequence
  ENSG00000160214_20 (sequence is synthesized)
gctgcattcgagtgtcccccaaccccgggcaggtggcacctggtgacacctccttcagtcccactcagctgggcggccggggcaggcttagggcacagttaggggccaaggagagggaag

SEQ ID NO: 475334 - DNA, 120 bp, Artificial Sequence
  ENSG00000160214_21 (sequence is synthesized)
tagggcacagttaggggccaaggagagggaaggccagggcccctgttctaggggttagggttctttccccaaaggaacttaaaaagacaagcgtggccaggcacagtggctcacacctgt

SEQ ID NO: 475335 - DNA, 120 bp, Artificial Sequence
  ENSG00000160214_22 (sequence is synthesized)
caaaaccctcatttcgagcctaatgggctaatatcttacactttaaaaataaagtgaaaagccaggataatgtcaccaagagattggactgaattccgcctgatggtcctgaggttcctg

SEQ ID NO: 475336 - DNA, 120 bp, Artificial Sequence
  ENSG00000160214_23 (sequence is synthesized)
cagttgatttttctgactcctctgttctctggtgaccggagttgagaagttcttaccctgcctgtctgtaggactcacttgaggagcctctaaaaatcctcatgtccagatcctggtcca

SEQ ID NO: 475337 - DNA, 120 bp, Artificial Sequence
  ENSG00000160214_24 (sequence is synthesized)
gcaagatccagttctgggggtagggcctgggcatcagcattttttatctatagctatgtaaagaacgggttcctccatgttctcacctccctccccagagtggcttcgtgctcctcagtg

SEQ ID NO: 475338 - DNA, 120 bp, Artificial Sequence
  ENSG00000160214_25 (sequence is synthesized)
cacactcagcctgagaaccactgctgcaggaacaggttgccagacacataggacttcagtgaatgtcaactgagtaatgttttaaattaaaattttttgttatttttctgagtgagacag

SEQ ID NO: 475339 - DNA, 120 bp, Artificial Sequence
  ENSG00000160214_26 (sequence is synthesized)
acctcactgtcatccgtggtggaggagtgcattggcacgattacagctcactgcagcctctacctcccaggctcaagtgagcctcccatctcagcctccccaatagctgggactactggc

SEQ ID NO: 475340 - DNA, 73 bp, Artificial Sequence
  ENSG00000160214_27 (sequence is synthesized)
tgggactactggcaccgtgcggccaggccagctaagttttgtattttttgtacaaattggggtcttgcctcag

SEQ ID NO: 475341 - DNA, 120 bp, Artificial Sequence
  ENSG00000160214_28 (sequence is synthesized)
cgcacctggcctcagtaatttctgtttctctcgtagtctgaatgcctgagttcactttcttcttttagtatttgagatatattacaggagagtgcagaagccctcagtataatgctggat

SEQ ID NO: 475342 - DNA, 120 bp, Artificial Sequence
  ENSG00000160214_29 (sequence is synthesized)
gaattatcaccaacagattaaccttgtggccactgtccagcttaggaaaccgtcaaggtggttttacgcacgacgagctgctgaaggtgtggaaaggactgttttattgcatgtggatgc

SEQ ID NO: 475343 - DNA, 120 bp, Artificial Sequence
  ENSG00000160214_30 (sequence is synthesized)
tagatgtcagaacctctgagcatcagagccaccagacccaggaggtttgtgttctcaaatccagagtaaggaatgcctaagggcaagagagcgccagctggtgtctgtgggtgcttagca

SEQ ID NO: 475344 - DNA, 80 bp, Artificial Sequence
  ENSG00000160216_0 (sequence is synthesized)
gccagagcggggccgcggaggcgacgccggggacgcccgcgcgacgagcaggtggcggcggctgcaggcttgtccagccg

SEQ ID NO: 475345 - DNA, 120 bp, Artificial Sequence
  ENSG00000160216_1 (sequence is synthesized)
caggcttgtccagccggaagccctgagggcagctgttcccactggctctgctgaccttgtgccttggacggctgtcctcagcgaggggccgtgcacccgctcctgagcagcgccatgggc

SEQ ID NO: 475346 - DNA, 120 bp, Artificial Sequence
  ENSG00000160216_2 (sequence is synthesized)
ctgctggccttcctgaagacccagttcgtgctgcacctgctggtcggctttgtcttcgtggtgagtggtctggtcatcaacttcgtccagctgtgcacgctggcgctctggccggtcagc

SEQ ID NO: 475347 - DNA, 120 bp, Artificial Sequence
  ENSG00000160216_3 (sequence is synthesized)
aagcagctctaccgccgcctcaactgccgcctcgcctactcactctggagccaactggtcatgctgctggagtggtggtcctgcacggagtgtacactgttcacggaccaggccacggta

SEQ ID NO: 475348 - DNA, 120 bp, Artificial Sequence
  ENSG00000160216_4 (sequence is synthesized)
gagcgctttgggaaggagcacgcagtcatcatcctcaaccacaacttcgagatcgacttcctctgtgggtggaccatgtgtgagcgcttcggagtgctggggagctccaaggtcctcgct

SEQ ID NO: 475349 - DNA, 120 bp, Artificial Sequence
  ENSG00000160216_5 (sequence is synthesized)
aagaaggagctgctctacgtgcccctcatcggctggacgtggtactttctggagattgtgttctgcaagcggaagtgggaggaggaccgggacaccgtggtcgaagggctgaggcgcctg

SEQ ID NO: 475350 - DNA, 120 bp, Artificial Sequence
  ENSG00000160216_6 (sequence is synthesized)
tcggactaccccgagtacatgtggtttctcctgtactgcgaggggacgcgcttcacggagaccaagcaccgcgttagcatggaggtggcggctgctaaggggcttcctgtcctcaagtac

SEQ ID NO: 475351 - DNA, 120 bp, Artificial Sequence
  ENSG00000160216_7 (sequence is synthesized)
cacctgctgccgcggaccaagggcttcaccaccgcagtcaagtgcctccgggggacagtcgcagctgtctatgatgtaaccctgaacttcagaggaaacaagaacccgtccctgctgggg

SEQ ID NO: 475352 - DNA, 120 bp, Artificial Sequence
  ENSG00000160216_8 (sequence is synthesized)
atcctctacgggaagaagtacgaggcggacatgtgcgtgaggagatttcctctggaagacatcccgctggatgaaaaggaagcagctcagtggcttcataaactgtaccaggagaaggac

SEQ ID NO: 475353 - DNA, 120 bp, Artificial Sequence
  ENSG00000160216_9 (sequence is synthesized)
gcgctccaggagatatataatcagaagggcatgtttccaggggagcagtttaagcctgcccggaggccgtggaccctcctgaacttcctgtcctgggccaccattctcctgtctcccctc

SEQ ID NO: 475354 - DNA, 120 bp, Artificial Sequence
  ENSG00000160216_10 (sequence is synthesized)
ttcagttttgtcttgggcgtctttgccagcggatcacctctcctgatcctgactttcttggggtttgtgggagcagcttcctttggagttcgcagactgataggagtaactgagatagaa

SEQ ID NO: 475355 - DNA, 120 bp, Artificial Sequence
  ENSG00000160216_11 (sequence is synthesized)
aaaggctccagctacggaaaccaagagtttaagaaaaaggaataattaatggctgtgactgaacacacgcggccctgacggtggtatccagttaactcaaaaccaacacacagagtgcag

SEQ ID NO: 475356 - DNA, 120 bp, Artificial Sequence
  ENSG00000160216_12 (sequence is synthesized)
gaaaagacaattagaaactatttttcttattaactggtgactaatattaacaaaacttgagccaagagtaaagaattcagaaggcctgtcaggtgaagtcttcagcctcccacagcgcag

SEQ ID NO: 475357 - DNA, 120 bp, Artificial Sequence
  ENSG00000160216_13 (sequence is synthesized)
ggtcccagcatctccacgcgcgcccgtgggaggtgggtccggccggagaggcctcccgcggacgccgtctctccagaactccgcttccaagagggagcctttggctgctttctctcctta

SEQ ID NO: 475358 - DNA, 120 bp, Artificial Sequence
  ENSG00000160216_14 (sequence is synthesized)
aacttagatcaaattttttggtttttaatcagttatcttgggaacttaacctggcccctcacctcttctgcaccccccgcccccgaaactgtctcgtaatgaatttctgctgtcctcctg

SEQ ID NO: 475359 - DNA, 120 bp, Artificial Sequence
  ENSG00000160216_15 (sequence is synthesized)
ggagtggacggccgggtcccgtcccccgggagcatcgctcggctcagcaccttggctcccagtgggggccccgtggagggcgcccgtagtgataagcacaccggcacgaacgtcaggtcc

SEQ ID NO: 475360 - DNA, 120 bp, Artificial Sequence
  ENSG00000160216_16 (sequence is synthesized)
attcctcgaagtcggagccctcactctgccctgtcctggggctggctgagggcgaacgccccacctcactttctagagccctgtctgtcctagctcctatctgaccttgtgtgtaaatac

SEQ ID NO: 475361 - DNA, 120 bp, Artificial Sequence
  ENSG00000160216_17 (sequence is synthesized)
gtacatctgtttttaaagtggatgggcccctgagaactcagtgaaatgcagagttctccatgcacctaaagctcctttgtcgctctcatggctgtcagatcctggtccctccacactggg

SEQ ID NO: 475362 - DNA, 120 bp, Artificial Sequence
  ENSG00000160216_18 (sequence is synthesized)
tgctggggagggaggaccctcggggctaccgcgcgcccccccatcccacagatcaggagccaaggagggagaacagggcagcctgtgggactctaggatgcttcagaagaagcgacggca

SEQ ID NO: 475363 - DNA, 120 bp, Artificial Sequence
  ENSG00000160216_19 (sequence is synthesized)
ccgtcaaccctctgttttttaaaggtggttggagactgttaacactgagctcattgacttctagagattttatttttactggttgatctcttggtggttttcaacttcctgctggaaact

SEQ ID NO: 475364 - DNA, 120 bp, Artificial Sequence
  ENSG00000160216_20 (sequence is synthesized)
agaggtggggcaccccccaccccccagcctcgcactgtgtccttggggaaggcccgcccccatcctggccggtgtcactgtggcccggccacccctgagcgcccagctccctacctcctg

SEQ ID NO: 475365 - DNA, 120 bp, Artificial Sequence
  ENSG00000160216_21 (sequence is synthesized)
gacgtctctgagagtccaggcagagcagagggcagcgctcggccggtcatgctggctcccttggccttgcagcgagcccctggcccacgccgagcgagggatgcttctccctacagcatg

SEQ ID NO: 475366 - DNA, 120 bp, Artificial Sequence
  ENSG00000160216_22 (sequence is synthesized)
tccactcccccggcatggccaggtggggcccctggggcaatggcagtggtagaacgctcaacttggttgcggtaccatcagcccacctgcatttggctttcgacttgcttgttctaagtc

SEQ ID NO: 475367 - DNA, 120 bp, Artificial Sequence
  ENSG00000160216_23 (sequence is synthesized)
acagcgccctcatctttttagcaaggtaaaaaaaccaaaatgggtgttatctctgatatcttgaaaccagcgttctgaatagaggtaggttgagttttctaggggaaaacaaatggagaa

SEQ ID NO: 475368 - DNA, 120 bp, Artificial Sequence
  ENSG00000160216_24 (sequence is synthesized)
aagaggcatgaagaaaagtaaaccgagaacataattaggcatcgggcctaagtgtcctggggagattggaggggacggcagcgttctgcatgatggaggcgctgccgggccccgggtctg

SEQ ID NO: 475369 - DNA, 120 bp, Artificial Sequence
  ENSG00000160216_25 (sequence is synthesized)
tgggggccgtgctctcagggcgtgtgcgggacgccacctgtgcacacctgctcagagcacggctcctcgcaggggtgaaggggcagaccaacgaaaccagatgagaccaacgacaccatg

SEQ ID NO: 475370 - DNA, 120 bp, Artificial Sequence
  ENSG00000160216_26 (sequence is synthesized)
cgagacacgcttgcagacactgttgttttggaaatgtgcttccctccatctgaaatctcatccctccacccgcccactcgggcagctgtgccgtgggcagggcatgcgctcccctggctg

SEQ ID NO: 475371 - DNA, 120 bp, Artificial Sequence
  ENSG00000160216_27 (sequence is synthesized)
gactcactaacacctgcaaaatctttaaggaaaaaagctgaagggtacgaccatgcacatatgtgacctggaaaatgcaaatttagatcttttatgatttaattattattgtttcccata

SEQ ID NO: 475372 - DNA, 120 bp, Artificial Sequence
  ENSG00000160216_28 (sequence is synthesized)
gaagttccctccctttgaaattaatatataatgtataaattctgcactgagccatggcggagctgggcagcccctaggttagagtggagacggaggcccaggcgcaggggtcacacctca

SEQ ID NO: 475373 - DNA, 120 bp, Artificial Sequence
  ENSG00000160216_29 (sequence is synthesized)
tctggtttccttcccatctcacagcttagcttgtgcttctcaacaccaagtctttaagagcaataaaaactacaccatgaatgtttgaattttttttttttgggggggggagggtggatt

SEQ ID NO: 475374 - DNA, 120 bp, Artificial Sequence
  ENSG00000160216_30 (sequence is synthesized)
ttgcttttcatccagaaggaaaaggggaggagagctcctttacattttttaaattaaattcataaatcccagaacagtcttttttttttctttttcctttacaccctacttctgagctta

SEQ ID NO: 475375 - DNA, 120 bp, Artificial Sequence
  ENSG00000160216_31 (sequence is synthesized)
attcagttgatgttatgtccaaattcaggctgagtgctcaggctgaagcaactctgtagcccacagtccgtgctggccactgtcggggtgaggcacattctaggcctggcatcgctgatg

SEQ ID NO: 475376 - DNA, 120 bp, Artificial Sequence
  ENSG00000160216_32 (sequence is synthesized)
ccctctgcacccagtccttgagccaggccgaggacaggaagggcattgctggcctgtagctcctgttacccacccagagccaggcgccacactggaggctcccaggcgggagggcccagg

SEQ ID NO: 475377 - DNA, 120 bp, Artificial Sequence
  ENSG00000160216_33 (sequence is synthesized)
cccacccacgggcgtctggccggtcaagctcccagcctgggccgtggtctcctggggacgccgctggcctcccagcttaggcccaggtgccaggtgtcatggggtctcctgcccatcttc

SEQ ID NO: 475378 - DNA, 120 bp, Artificial Sequence
  ENSG00000160216_34 (sequence is synthesized)
ccaaggatgccattgctgtcttcatcgtcttcccccgtgtgagacactggttgtctggtactcggcgacagtgtaccagacgcgcaccctatgtgaggtgctttaaggtccctgtcctca

SEQ ID NO: 475379 - DNA, 120 bp, Artificial Sequence
  ENSG00000160216_35 (sequence is synthesized)
ggaagcgcagtctggtggaagagatgagcgctgaacaaatcactaaataacacaaaacaacaatgtaagcagcactttcttgtgtaaaaaaaaaaaaaaagcacgtcctgtcgatgaatt

SEQ ID NO: 475380 - DNA, 120 bp, Artificial Sequence
  ENSG00000160216_36 (sequence is synthesized)
ttgagtctctctgccttgcctgtcccgactccctttcgcgcaccgtggcatgagaatctttcctcacgctgttcgttgcggtattgctgagcattgatgttgatttgaaggaaaagccgt

SEQ ID NO: 475381 - DNA, 120 bp, Artificial Sequence
  ENSG00000160216_37 (sequence is synthesized)
ggttggacccagctgtgtgtttcactcacgtgcaattgagtagctgttgccaggctgtccatgcctgttgtgactaccggttggggtcagatttggggtgaagaatgagtaagtttctgc

SEQ ID NO: 475382 - DNA, 120 bp, Artificial Sequence
  ENSG00000160216_38 (sequence is synthesized)
atgctttgtctctacctgagacacttctacaacaagccaagtataatctctccagccctgcagattttcacctgacttgttcagccccatgcgtagactcccgctgcaggcctctggcct

SEQ ID NO: 475383 - DNA, 120 bp, Artificial Sequence
  ENSG00000160216_39 (sequence is synthesized)
gtggctcactgcatgcagcccctggcgtgcaatactagtgctccacggcgcgatgtgcttctagcccttgcactgcacctaggctcagggttcaaacggccagcccgaaaagcctgcctg

SEQ ID NO: 475384 - DNA, 120 bp, Artificial Sequence
  ENSG00000160216_40 (sequence is synthesized)
ccttctttctggaaacagcacgtccccggccgtgtgcctgcccctttctctactgagctagtccccaaaccaaaggcaagccccctcgggcctcgggggatggggccggccacacccctg

SEQ ID NO: 475385 - DNA, 120 bp, Artificial Sequence
  ENSG00000160216_41 (sequence is synthesized)
actccgccctggctctgccccatacccctgccgtggggccgacctgggggatgcagacatccggctccgtattcctgcctatcggggccaggatgcaaaaacaatttttgcgtaaaagat

SEQ ID NO: 475386 - DNA, 120 bp, Artificial Sequence
  ENSG00000160216_42 (sequence is synthesized)
gtcacactgatctgctggagtggggtggacacatgaattcagttttatcatgaacactcgccactggctgcttgttaattcagggataatggtggcattcttacaaactgctcgggaaat

SEQ ID NO: 475387 - DNA, 120 bp, Artificial Sequence
  ENSG00000160216_43 (sequence is synthesized)
agaatgacgggaacacttttagggagcccaggaagttaccagggacattggtgtcgccggcccaggcaacagcagcgtacgcttttcaaagatcattgagttgtcttagaatttgaagct

SEQ ID NO: 475388 - DNA, 120 bp, Artificial Sequence
  ENSG00000160216_44 (sequence is synthesized)
gtgtaatgacaatgtcacctggagttcgtctccatttcttaactttttgttgcacaagtatttggacagaagtcgaactgtgaatgagatactgaaatgcactaaattgtattacattaa

SEQ ID NO: 475389 - DNA, 120 bp, Artificial Sequence
  ENSG00000160216_45 (sequence is synthesized)
actggagttacttgatacaatgaagaaatgcatctgatctacttgtatttattgtctcagaattgtacgttgtgacaatcaaatgttacttgcctaaatgccaggaaattcaactggcct

SEQ ID NO: 475390 - DNA, 120 bp, Artificial Sequence
  ENSG00000160216_46 (sequence is synthesized)
tttaatcagcaagatcgccagcaagtactgtaactgtaaaggaaaatctctctctctggagaacccacacaaaccattgacctgagtgcgcatgacagccactggcttctttttctatga

SEQ ID NO: 475391 - DNA, 120 bp, Artificial Sequence
  ENSG00000160216_47 (sequence is synthesized)
ttgaaaatctgccatcgctgactgttggccagtttcaaagggacccattgtatacagggtgcaaatgtattatacggatgtttccttttgtacacttcatttttacaagttttgctactc

SEQ ID NO: 475392 - DNA, 120 bp, Artificial Sequence
  ENSG00000160216_48 (sequence is synthesized)
acaagctttatgtagtggaggatagaggtatttttggtctttagaagcttgtcggggtgagggctgctaacttacacttcagaggcctgtgtcccaaaggcctggctgcgtttgccgtgc

SEQ ID NO: 475393 - DNA, 120 bp, Artificial Sequence
  ENSG00000160216_49 (sequence is synthesized)
tgtgcgaggacctgtgtacacaggcaggtgtgcgcctgcccgagcgcgagtagctcttgtgtagtggtgaaatgctgcaggcatctgtttattaaaattgctgctgtgaaagacagggat

SEQ ID NO: 475394 - DNA, 120 bp, Artificial Sequence
  ENSG00000160216_50 (sequence is synthesized)
aaaatatccacaatataagagaaagcgactccgtgcctccttctgtttcttcgtttccagtctgcatagatgtctccaaggggaaaccagggccaccaggcactcctgtcccatggggcc

SEQ ID NO: 475395 - DNA, 120 bp, Artificial Sequence
  ENSG00000160216_51 (sequence is synthesized)
acccaccttcagagcccactcccacgggctctgtttccttggaggccatcctgccgatggcacttttcaaggccctcccttccctacgagttgctttctgggaggggaaattgaaaagga

SEQ ID NO: 475396 - DNA, 120 bp, Artificial Sequence
  ENSG00000160216_52 (sequence is synthesized)
gagcggtcacctggcaaaaacacaggggaaatcagccagtccacaaaaatacgcaaaatgacctgatgatgtccaaaaaagggttttaaaagcgatcaaggacaaaaggttttcctaagt

SEQ ID NO: 475397 - DNA, 120 bp, Artificial Sequence
  ENSG00000160216_53 (sequence is synthesized)
ggcatgtatacatccaaaactactctttttttgtaaaaacattcatctgtggagaaaaccaaggaacccctttctcttctttattaaaaagcaaaacaaaaactcttgttagaaccaaaa

SEQ ID NO: 475398 - DNA, 120 bp, Artificial Sequence
  ENSG00000160216_54 (sequence is synthesized)
attgtgcagtcatcaggccctgggagctttccacatccctccacctcccacccaacatcaccactctccggccagtgagaccatcacagcaccccagaggagacaaattctggagctcag

SEQ ID NO: 475399 - DNA, 120 bp, Artificial Sequence
  ENSG00000160216_55 (sequence is synthesized)
agagctgggtggctcctgcaccttcagacactgcctcctcaccgagggagggaagaacgacaaaggacctccaggacgtagaggttgatgatccgggcaggtggccttcagcgagggagc

SEQ ID NO: 475400 - DNA, 120 bp, Artificial Sequence
  ENSG00000160216_56 (sequence is synthesized)
acgtcaaaaggctgtgggccgtgcagacagctgggggacaccgtcccgggtgtgaccttgggccacacggcagggtggtggacttgctcctagaattgggctccagggctgaagccagcc

SEQ ID NO: 475401 - DNA, 120 bp, Artificial Sequence
  ENSG00000160216_57 (sequence is synthesized)
cctctgatctggcactggccggctccattcaccctttttggggcttactgccgcagagacttcctttgaggagagctggacccaagacgccagagttccgggggcactgagtgctgtgtg

SEQ ID NO: 475402 - DNA, 120 bp, Artificial Sequence
  ENSG00000160216_58 (sequence is synthesized)
gcacccgggccaggagaaacatgtgccagagggcaggcgtgggctctccggggagtctctgcgtagactttctagcccagaggttcaggtgatggaccagagactggccgctttgtgaca

SEQ ID NO: 475403 - DNA, 120 bp, Artificial Sequence
  ENSG00000160216_59 (sequence is synthesized)
ccgaggacggttgataaagtggattctcgaggggaagctgcatccacacagaggctgggacgtgaatgtgcatcacggctctatctgtggcccccaaaggctgggtgccagctgcctgtc

SEQ ID NO: 475404 - DNA, 120 bp, Artificial Sequence
  ENSG00000160216_60 (sequence is synthesized)
ggcagggagcgtatcaccgtggcacgtccatgccgtgggggtcactcagcagccacggatgcgccctgggtgctgtcccggggccgtctcagaagcaccgcgctggaccggctgggccag

SEQ ID NO: 475405 - DNA, 120 bp, Artificial Sequence
  ENSG00000160216_61 (sequence is synthesized)
cgccgacacatggtcgttcgacttctggcttggcctcttttgtgagtgtggggcctggtcatatcctcttggtcagtgtctctgtgatgatgagaacgggaagacggccacggtgcccac

SEQ ID NO: 475406 - DNA, 120 bp, Artificial Sequence
  ENSG00000160216_62 (sequence is synthesized)
cctggcaggactctctcccctcgctggcgctggctcagctgccgtgagcggccgtaggcactgtcccgggccctcctgtggttgctcccagccatgctgctggctgcttctgccgtcctg

SEQ ID NO: 475407 - DNA, 120 bp, Artificial Sequence
  ENSG00000160216_63 (sequence is synthesized)
gcttgcagagactctgggtcatgcggggaagagggcagagtcctcctccctgctcaggcaagagaggatccagcaagatttcttcctccccaccctcctgcccctcccagtctgggcagc

SEQ ID NO: 475408 - DNA, 120 bp, Artificial Sequence
  ENSG00000160216_64 (sequence is synthesized)
agataaaagccagggccccacacttctgccacctcctgctgctcacacactccagccagggacctgcccccggggtccaacaaggacggctgtcctcagcgaggggccgtgcacccgctc

SEQ ID NO: 475409 - DNA, 120 bp, Artificial Sequence
  ENSG00000160216_65 (sequence is synthesized)
cacgctggcgctctggccggtcagcaagcagctctaccgccgcctcaactgccgcctcgcctactcactctggagcctagcacaaaactagaagcaacccaagcacctgtcactggagac

SEQ ID NO: 475410 - DNA, 120 bp, Artificial Sequence
  ENSG00000160216_66 (sequence is synthesized)
taattatgcggcacccatacagggaccctctgcggccatcatggagagccttcatcttgcccgtacagttttaagcgaaaaaggaagtatacaacaaagtccataaactggtcatgctgc

SEQ ID NO: 475411 - DNA, 120 bp, Artificial Sequence
  ENSG00000160216_67 (sequence is synthesized)
atcctcctgcctcagcctgctgggctgctgggattacaggctgagccaccgcaccagccacagtgttttctgatgaccctgaaccacggttttattttcaattcttcattcctgttctca

SEQ ID NO: 475412 - DNA, 120 bp, Artificial Sequence
  ENSG00000160216_68 (sequence is synthesized)
ttccttaatgctgggtgccttcttgctgcccattttgaactcactgccagtgtgtctctgctgtcatctgatgtgcagagctataggtgctgcggcgaagggtgcaggtttggagccgtt

SEQ ID NO: 475413 - DNA, 120 bp, Artificial Sequence
  ENSG00000160216_69 (sequence is synthesized)
taaacaacctggcccagcctcctcactccctgctgaccttggtcaaggcttcagtctctaaacctcagctttctcatctgcagagcacagacaaaaccacctgcctttgagctgtcttat

SEQ ID NO: 475414 - DNA, 120 bp, Artificial Sequence
  ENSG00000160216_70 (sequence is synthesized)
gagctgtcttataaagcctaaatcaatgcgcacagcaggtacacagcaatgcttgataaattgttactattattgggtgaattttaggttttttttgttgttgttgttgttttgagacag

SEQ ID NO: 475415 - DNA, 89 bp, Artificial Sequence
  ENSG00000160216_71 (sequence is synthesized)
ttgttgttgttttgagacagagtctctctgttgtcctggctggagcacagcatctgaggttcaagtgattctcgtgccccagcctccca

SEQ ID NO: 475416 - DNA, 66 bp, Artificial Sequence
  ENSG00000160216_72 (sequence is synthesized)
cctgccaccacatccagctaattttttttatttttaagtagagatgggcttttgccatgcttcccc

SEQ ID NO: 475417 - DNA, 120 bp, Artificial Sequence
  ENSG00000160216_73 (sequence is synthesized)
aggcttgagccaccgcacccgtccagaattttagatttttttaaatccgtggttgaaaaataggctatggctggcttactcattgtgctttagggaagcatgtatttgagtgaaggaaat

SEQ ID NO: 475418 - DNA, 120 bp, Artificial Sequence
  ENSG00000160216_74 (sequence is synthesized)
gataaaaggaatttcatatcgggcccaggcgccgcccaccctgcaagacagtttacagatgcctgccctgacagctgtctgcagttagccagcgtcagccgaggggtcctgagatccgct

SEQ ID NO: 475419 - DNA, 120 bp, Artificial Sequence
  ENSG00000160216_75 (sequence is synthesized)
gaaggctgcctttgcatgccgacagcaagggaaaagtgccacatgtccctgggcttgccacaggtgacctttggatgggaccattctccagacagcgcagctcgtctttccagaacactc

SEQ ID NO: 475420 - DNA, 120 bp, Artificial Sequence
  ENSG00000160216_76 (sequence is synthesized)
atggggagtgtgcctgtgtctggctggctgtgtgggctcccattcagttcattccccttctccagcctttaggcatgaccctaaaggcagaggtctcaagcacttgccaggggtgagcca

SEQ ID NO: 475421 - DNA, 120 bp, Artificial Sequence
  ENSG00000160216_77 (sequence is synthesized)
gcggtgggggcgcccctgccagggcaggcctgctgtgggggcttggtcagcgagtcttctccccacacgcaggatttcctcccgtccactgcctctgcccacaggtgacctttctctttt

SEQ ID NO: 475422 - DNA, 120 bp, Artificial Sequence
  ENSG00000160216_78 (sequence is synthesized)
aaaggaattggggtcccttggtacccccacaaaccctgagttccctctctcctttctgcgtcctttctgctcgcctgcatgtgcctgcagcatcatgaccgctgggaagacacttccctg

SEQ ID NO: 475423 - DNA, 120 bp, Artificial Sequence
  ENSG00000160216_79 (sequence is synthesized)
cacctgcacgctgtctgcaggcgtctctggccatcctgggctgagctgcgtgatctcgggtagcggccctttgttcacccgtgcaggatgtctttggaattggtctctagtgtcctttat

SEQ ID NO: 475424 - DNA, 120 bp, Artificial Sequence
  ENSG00000160216_80 (sequence is synthesized)
aaataactggtataaaagaaccccgggcaatggccttgcagaaagcccacacttcagagctgggctggtgtccagcgcgagaagcctgaggccgtcctgagctggaagccgcgtcctggt

SEQ ID NO: 475425 - DNA, 120 bp, Artificial Sequence
  ENSG00000160216_81 (sequence is synthesized)
ggactaactccctctgaggcccacgtgtgacaaagatgcaccgttctcaccacggaactcttcagccctgcagttctcccgaaggtgaatgagggcatcccagagtccccatcaggagac

SEQ ID NO: 475426 - DNA, 120 bp, Artificial Sequence
  ENSG00000160216_82 (sequence is synthesized)
agacgatgctgcgttcccagcagccccagagccctcccaggcgtgcaggtctcctgccggcaaacagatctcccggcacgagcccctccacacttctgggaagagtgtcttcagctcacc

SEQ ID NO: 475427 - DNA, 120 bp, Artificial Sequence
  ENSG00000160216_83 (sequence is synthesized)
aggccggagccaggggaagagaccaagggaggaggctccaagaacccctgggtgggggggacaagcactcaaagccaggactggcacccctcacatgccagcacccacggggtcaggtgt

SEQ ID NO: 475428 - DNA, 120 bp, Artificial Sequence
  ENSG00000160216_84 (sequence is synthesized)
gccctgctgtctctggggaccccgcaggcctctggccacctgcccagcagcaagccccgtcgagcacccccagccggccttcctgggggcgggctaggcctcacatggcttttttttaaa

SEQ ID NO: 475429 - DNA, 120 bp, Artificial Sequence
  ENSG00000160216_85 (sequence is synthesized)
tatggaaaaccagtgtaaccccaaagcaagttttaggagaaaatataattcctattactctgtcgtctataattccattctgctcttaactcttcattttttcccactgtctgttctgca

SEQ ID NO: 475430 - DNA, 120 bp, Artificial Sequence
  ENSG00000160216_86 (sequence is synthesized)
gacatacgatggttgttttctgcttcctaatcatctagtgacatttttcatcttctgcacctctcacggggcgtggctgtgcggtactcggccacaccaaggtgcacgtgagaagcgtaa

SEQ ID NO: 475431 - DNA, 120 bp, Artificial Sequence
  ENSG00000160216_87 (sequence is synthesized)
ttgggcgtaaagatcagcgtctccatgcagagtggcggttctctccctttctgctgctaccttccatctgtctcctcccaactgttgcttagagaaagttattgtaatttcataaaacgt

SEQ ID NO: 475432 - DNA, 120 bp, Artificial Sequence
  ENSG00000160216_88 (sequence is synthesized)
actcagtgtaagtcatcaaaactcatgtttagcagagacttcctctctggacaaaaatactgtaggtgtctcctgtgggcgctccctgaccatcccaggaggaggggtcctaccagtgcc

SEQ ID NO: 475433 - DNA, 120 bp, Artificial Sequence
  ENSG00000160216_89 (sequence is synthesized)
ggcgttagcctgtgcctgttacaactcgcttcttgtatccatttctgacacgtgactgatacacctgcctcccatcccctccgcactttgacctcgtaaacaagtgatctgacacaacag

SEQ ID NO: 475434 - DNA, 120 bp, Artificial Sequence
  ENSG00000160216_90 (sequence is synthesized)
aactcccacctccacagacccgtccgggtgctgaaagtccacggatgctatccctggtcaaatcagagccccgcttaggctctcacattgcagaccccacggcagagcccctagtgcttg

SEQ ID NO: 475435 - DNA, 120 bp, Artificial Sequence
  ENSG00000160216_91 (sequence is synthesized)
gcactgaagagccagtgcaggcccgttgtcaccatcaaaacccacctctggtatcgccggtggactggtgtttctagatcgcagcgtgggacgtgattggctacatttgactgtttcctt

SEQ ID NO: 475436 - DNA, 120 bp, Artificial Sequence
  ENSG00000160216_92 (sequence is synthesized)
atatgtctgacagccttgtgtgcttatttcttgcccgcgtgttctgtctcgggttggaagggacacgcacgtctcctgccttcacatgctgagatgggtttctgtagcatccccagaatt

SEQ ID NO: 475437 - DNA, 120 bp, Artificial Sequence
  ENSG00000160216_93 (sequence is synthesized)
ggtttgtgggagcaggtaatggacactgtcgctaacagctcacactctgacgggcctcacagtatcagccacagggtccgggacctggtgactcatcacagtggctgtgggaggcagggg

SEQ ID NO: 475438 - DNA, 120 bp, Artificial Sequence
  ENSG00000160216_94 (sequence is synthesized)
cctggctgttatggaccctggagccaggatccccccacggcctgcgggcctcagagcctggattcttgcactgagctgagggtcgcctccccagagagccgaacggccgccacctggcgc

SEQ ID NO: 475439 - DNA, 120 bp, Artificial Sequence
  ENSG00000160216_95 (sequence is synthesized)
gagaccatcacagcaccccagaggagacaaattctggagctcagagagctgggagggcagctgctggtgtgacctcagctgctccccagaccctaaggggatctgggaccttccaccttc

SEQ ID NO: 475440 - DNA, 120 bp, Artificial Sequence
  ENSG00000160216_96 (sequence is synthesized)
tatggtttcacgctcccacagtggctcctgcaccttcagacactgcctcctcaccgagggagggaagaacgacaaaggacggctgtcctcagcgaggggccgtgcacccgctcctgagca

SEQ ID NO: 475441 - DNA, 120 bp, Artificial Sequence
  ENSG00000160216_97 (sequence is synthesized)
tgggagctttccacatccctccacctcccacccaacatcaccactctccggccagtgagaccatcacagcaccccagaggagacaaattctggagctcagagagctggggacggctgtcc

SEQ ID NO: 475442 - DNA, 120 bp, Artificial Sequence
  ENSG00000160216_98 (sequence is synthesized)
gtgctgtcagcggcatgcctgccttctgcaagcccctcttccctgttccccagcccgcacttccaatgagctgtgggccaggaaaccagcccgtcacacttgtccacgctgcgtttaaag

SEQ ID NO: 475443 - DNA, 80 bp, Artificial Sequence
  ENSG00000160218_0 (sequence is synthesized)
ggcgccgaggccggaagtggctgaggccggcagcagcgggcggcagctgcggcgcaaccggctccggagctgcctggcgc

SEQ ID NO: 475444 - DNA, 120 bp, Artificial Sequence
  ENSG00000160218_1 (sequence is synthesized)
ggcccggcgcggcctcggggctgcccatggggcgcggggggccgggccggtgacgccggacgcccatggacgcctctgaggagccgctgccgccggtgatctacaccatggagaacaagc

SEQ ID NO: 475445 - DNA, 120 bp, Artificial Sequence
  ENSG00000160218_2 (sequence is synthesized)
ccatcgtcacctgtgctggagatcagaatttatttacctctgtttatccaacgctctctcagcagcttccaagagaaccaatggaatggagaaggtcctatggccgggctccgaagatga

SEQ ID NO: 475446 - DNA, 120 bp, Artificial Sequence
  ENSG00000160218_3 (sequence is synthesized)
ttcacctagagtctaactttgttcaattcaaagaggagctgctgcccaaagaaggaaacaaagctctgctcacgtttcccttcctccatatttactggacagagtgctgtgataccgaag

SEQ ID NO: 475447 - DNA, 120 bp, Artificial Sequence
  ENSG00000160218_4 (sequence is synthesized)
tgtataaagctacagtaaaagatgacctcaccaagtggcagaatgttctgaaggctcatagctctgtggactggttaatagtgatagttgaaaatgatgccaagaaaaaaaacaaaacca

SEQ ID NO: 475448 - DNA, 120 bp, Artificial Sequence
  ENSG00000160218_5 (sequence is synthesized)
acatccttccccgaacctctattgtggacaaaataagaaatgatttttgtaataaacagagtgacaggtgtgttgtgctctccgaccccttgaaggactcttctcgaactcaggaatcct

SEQ ID NO: 475449 - DNA, 120 bp, Artificial Sequence
  ENSG00000160218_6 (sequence is synthesized)
ggaatgccttcctgaccaaactcaggacattgcttcttatgtcttttaccaaaaacctaggcaagtttgaggatgacatgagaaccttgagggagaagaggactgagccaggctggagct

SEQ ID NO: 475450 - DNA, 120 bp, Artificial Sequence
  ENSG00000160218_7 (sequence is synthesized)
tttgtgaatatttcatggttcaggaggagcttgcctttgttttcgagatgctgcagcagttcgaggacgccctggtgcagtacgacgaactggacgccctcttctctcagtatgtggtca

SEQ ID NO: 475451 - DNA, 120 bp, Artificial Sequence
  ENSG00000160218_8 (sequence is synthesized)
acttcggggccggggatggtgccaactggctgacttttttctgccagccagtgaagagctggaacggattgatcctccgaaaacccatagatatggagaagcgggaatcgatccagaggc

SEQ ID NO: 475452 - DNA, 120 bp, Artificial Sequence
  ENSG00000160218_9 (sequence is synthesized)
gagaagccaccctgttagatctgcgcagttacctgttctctcgccagtgcaccttgctgctcttcctgcagaggccgtgggaggtggcccagcgcgccctagagctgctgcacaactgcg

SEQ ID NO: 475453 - DNA, 120 bp, Artificial Sequence
  ENSG00000160218_10 (sequence is synthesized)
tgcaggaactgaagctcttagaagtctctgtcccacctggtgctctggactgctgggtgtttctgagctgtctggaggtgttgcagaggatagaaggctgctgtgaccgggcacagatcg

SEQ ID NO: 475454 - DNA, 120 bp, Artificial Sequence
  ENSG00000160218_11 (sequence is synthesized)
actcaaacattgcccacactgtggggctatggagctatgccacagaaaagttaaagtccttgggctatctatgtggacttgtgtcagagaaaggacctaactcagaagatctcaacagga

SEQ ID NO: 475455 - DNA, 120 bp, Artificial Sequence
  ENSG00000160218_12 (sequence is synthesized)
cagttgaccttttggcaggtttgggagctgagcgaccagaaacagccaacacagctcagagtccttataagaaactgaaagaagcattatcgtcagtggaagcttttgaaaaacactact

SEQ ID NO: 475456 - DNA, 120 bp, Artificial Sequence
  ENSG00000160218_13 (sequence is synthesized)
tagatttgtcccatgccaccattgaaatgtatacaagcattgggaggattcgatctgctaagtttgttggaaaagatctggcagagttttacatgaggaaaaaggctccacaaaaggcag

SEQ ID NO: 475457 - DNA, 120 bp, Artificial Sequence
  ENSG00000160218_14 (sequence is synthesized)
aaatctatcttcaaggagcactgaaaaactacctggctgagggctgggcactccccatcacacacacaaggaagcagctggccgaatgtcaaaagcaccttggacaaattgaaaactacc

SEQ ID NO: 475458 - DNA, 120 bp, Artificial Sequence
  ENSG00000160218_15 (sequence is synthesized)
tgcagaccagcagcctcttagccagtgaccaccacctcactgaagaggagcgcaagcacttctgccaggagatacttgactttgccagccagccgtcagacagcccaggtcataagatag

SEQ ID NO: 475459 - DNA, 120 bp, Artificial Sequence
  ENSG00000160218_16 (sequence is synthesized)
tgctacccatgcattcctttgcacaactgcgagatctccattttgatccctccaatgccgtggtccacgtgggcggcgttttgtgcgttgagataaccatgtacagccagatgcctgtgc

SEQ ID NO: 475460 - DNA, 120 bp, Artificial Sequence
  ENSG00000160218_17 (sequence is synthesized)
ctgttcacgtggagcagattgtggtcaatgtccacttcagcattgagaaaaacagctaccggaagactgcggagtggcttaccaagcacaagacgtccaatgggatcattaactttccac

SEQ ID NO: 475461 - DNA, 120 bp, Artificial Sequence
  ENSG00000160218_18 (sequence is synthesized)
ccgagaccgcacctttccctgtatcccaaaacagtttgcccgcgctggagttgtatgaaatgtttgagagaagcccatctgataactccttgaacacgactgggattatctgcagaaacg

SEQ ID NO: 475462 - DNA, 120 bp, Artificial Sequence
  ENSG00000160218_19 (sequence is synthesized)
tccacatgctcctgagaaggcaggagagcagctcctctctagagatgccctcaggggtggctctggaggagggtgcccacgtgctgaggtgcagccacgtgaccctggaaccaggggcca

SEQ ID NO: 475463 - DNA, 120 bp, Artificial Sequence
  ENSG00000160218_20 (sequence is synthesized)
accagataacattcaggactcaggccaaggaacctggaacgtatacactcaggcagctgtgcgcctcggtgggctccgtgtggttcgtcctccctcacatctaccccattgtgcagtacg

SEQ ID NO: 475464 - DNA, 120 bp, Artificial Sequence
  ENSG00000160218_21 (sequence is synthesized)
acgtgtactcacaggagccccagctgcacgtggagccgctggctgatagccttctggcaggcattcctcagagagtcaagttcactgtcactaccggccattatacgataaagaatggag

SEQ ID NO: 475465 - DNA, 120 bp, Artificial Sequence
  ENSG00000160218_22 (sequence is synthesized)
acagcctgcagcttagcaatgccgaagccatgctcatcctgtgccaggcggagagcagggctgtggtctactccaacacgagagaacagtcttctgaggccgcgctccggattcagtcct

SEQ ID NO: 475466 - DNA, 120 bp, Artificial Sequence
  ENSG00000160218_23 (sequence is synthesized)
ccgacaaggtcacgagcatcagtctgcctgttgcgcctgcgtaccacgtgatcgaatttgaactggaagttctctctttaccttcagccccagcactcggaggggagagtgacatgctgg

SEQ ID NO: 475467 - DNA, 120 bp, Artificial Sequence
  ENSG00000160218_24 (sequence is synthesized)
ggatggcagagccccacaggaagcataaggacaaacagagaactggccgctgcatggttaccacagaccacaaagtgtcgattgactgcccgtggtccatctactccacagtcatcgcac

SEQ ID NO: 475468 - DNA, 120 bp, Artificial Sequence
  ENSG00000160218_25 (sequence is synthesized)
tgaccttcagcgtacccttcaggaccacacacagcctcctgtcctcaggaacacggaaatatgttcaagtttgtgtccagaatttgtcagaacttgactttcagctgtcagatagttatc

SEQ ID NO: 475469 - DNA, 120 bp, Artificial Sequence
  ENSG00000160218_26 (sequence is synthesized)
ttgtagataccggtgatagtaccgacctgcaactagtaccactgaacacgcagtcccagcagcccatctacagcaagcagtcggtgttcttcgtctgggaactcaagtggacagaagagc

SEQ ID NO: 475470 - DNA, 120 bp, Artificial Sequence
  ENSG00000160218_27 (sequence is synthesized)
ctcccccttctctgcattgccggttctctgttggattttccccagcttctgaggaacagctgtctatctccttaaagccgtatacttatgaatttaaagtggaaaatttttttacattat

SEQ ID NO: 475471 - DNA, 120 bp, Artificial Sequence
  ENSG00000160218_28 (sequence is synthesized)
acaacgtgaaggctgagatctttcccccttcgggaatggagtattgcagaacaggctccctctgctccctggaggttttgatcacgaggctctcagacctcttggaggtggataaagatg

SEQ ID NO: 475472 - DNA, 120 bp, Artificial Sequence
  ENSG00000160218_29 (sequence is synthesized)
ttttcgacaaagcttatgtatgaagttgtcgacaacagtagcaactgggcagtgtgtgggaaaagctgcggtgtcatctccatgccagtggctgctcgggccactcacagggtccacatg

SEQ ID NO: 475473 - DNA, 120 bp, Artificial Sequence
  ENSG00000160218_30 (sequence is synthesized)
gaagtgatgccgctcttcgccgggtatctccccctgcccgacgtcaggctgttcaagtacctcccccatcattctgcacactcctcccaactggacgctgacagctggatagaaaacgac

SEQ ID NO: 475474 - DNA, 120 bp, Artificial Sequence
  ENSG00000160218_31 (sequence is synthesized)
agcctgtcagtagacaagcacggggacgaccagccggacagcagcagcctcaagagcaggggcagcgtgcattcggcctgcagcagcgagcacaaaggcctacccatgccccggctgcag

SEQ ID NO: 475475 - DNA, 120 bp, Artificial Sequence
  ENSG00000160218_32 (sequence is synthesized)
gcactgccggccggccaggtcttcaactccagctcgggcacacaagtcctggtcatccccagccaagatgaccacgtcctggaagtcagtgtaacatgacaacgccagggtgaacacacg

SEQ ID NO: 475476 - DNA, 120 bp, Artificial Sequence
  ENSG00000160218_33 (sequence is synthesized)
ccacttcccagctaggagtgcactttatgggactgtgactggactcttccgttctggctccagccagaccttcagtggtcctgcctggccgtggggacatcagagagtgtcatcacgcag

SEQ ID NO: 475477 - DNA, 120 bp, Artificial Sequence
  ENSG00000160218_34 (sequence is synthesized)
ctggccagctgagttctgttgttgttttcatgccgcctgtgatctcagattcctgcttttctcaccccgtccccatgctggtgtccgacgccgcttactcagagccctggcctccctccc

SEQ ID NO: 475478 - DNA, 120 bp, Artificial Sequence
  ENSG00000160218_35 (sequence is synthesized)
cctacctcacacgctgctcatgaaagtttccacccacgctgtctccacggaacagcctccgtctgctggctcttcgtggaaggccatttgtctttcaggtagacactcagcagccctcac

SEQ ID NO: 475479 - DNA, 120 bp, Artificial Sequence
  ENSG00000160218_36 (sequence is synthesized)
ggtcttagtgacgtgtgtgcctttctggtcacacagctgcccagtttcctgatcggggtggatttgtgtcccctaaggggtaaaacagccgtttaccgcagatcctctcattgtgctttt

SEQ ID NO: 475480 - DNA, 120 bp, Artificial Sequence
  ENSG00000160218_37 (sequence is synthesized)
ctagaataacacccttctaggggaggcgggtgggggagggagggatcataaccccttctgtgccttgggatgccggagctgggggacctggaggcccatcagccggagccacgtgaaagg

SEQ ID NO: 475481 - DNA, 120 bp, Artificial Sequence
  ENSG00000160218_38 (sequence is synthesized)
tactgaagaaagctgagacccggctgtgaggagcgcctcagcggtgaggtggtttagggataaatgtttctggaaccctgtggtcccccataatgttgatagaatatcatatgcactggg

SEQ ID NO: 475482 - DNA, 120 bp, Artificial Sequence
  ENSG00000160218_39 (sequence is synthesized)
agttaaatatatttaatttaatgatcattatatatgtgggggttaatatgttgtttttctgtccctttaaagtctttacatgtaattgtagctgtataatcgttatttttcttttgcatc

SEQ ID NO: 475483 - DNA, 120 bp, Artificial Sequence
  ENSG00000160218_40 (sequence is synthesized)
ttaagtcttagaaattaagatattccatcgtgaggatgagagaggtcctcagtgtgtttttggtctggttgtagggaaggactcaagtcctggaatgtcctccactggtctactgagttg

SEQ ID NO: 475484 - DNA, 120 bp, Artificial Sequence
  ENSG00000160218_41 (sequence is synthesized)
cagtcacactgttccaatggattatttgctttcggttgtaaatttaattgtacatatggttgatttattatttttaaaaatacagactaactgatgtaatgtttatgtataagttgcacc

SEQ ID NO: 475485 - DNA, 120 bp, Artificial Sequence
  ENSG00000160218_42 (sequence is synthesized)
aaaaatcaaggacaaaaataagtgtgtttgtttttacaggtgtgaaagtcacagcttgtaaataagtgttgtatgtattaaaccttttccagttctccaaagcgatgtatttttgtacac

SEQ ID NO: 475486 - DNA, 120 bp, Artificial Sequence
  ENSG00000160218_43 (sequence is synthesized)
ttgaaatagagtactcttaatttactgggcaaatgtgcttggaattgaacttgacaagattagctcaagcagatagagtcgggtccagcagtgggtggccctcgtgtgaatccccgtgga

SEQ ID NO: 475487 - DNA, 120 bp, Artificial Sequence
  ENSG00000160218_44 (sequence is synthesized)
tgtgcaagttgtggagagaaggagcaccgggttcctgcccagcactgtgcttgcgggaggcggtggggcatgggaggaaggaggcacagaccggggaaatatgacagccgtcatttccag

SEQ ID NO: 475488 - DNA, 120 bp, Artificial Sequence
  ENSG00000160218_45 (sequence is synthesized)
tattctctgtgttgtcttttagctcattcaataaataaaggtggtgtgatttttttttcctcctgtctttttcatttgtagaaactggagacgtgtaaagaagataaataattgtgtaat

SEQ ID NO: 475489 - DNA, 120 bp, Artificial Sequence
  ENSG00000160218_46 (sequence is synthesized)
taaactttccagaaatttatcttcctcatgtgcagtttaacaaacttggtcaaactagttagcaaattagaacttcagaatctaatgatagtttagggtttctaaaataaggttttttat

SEQ ID NO: 475490 - DNA, 120 bp, Artificial Sequence
  ENSG00000160218_47 (sequence is synthesized)
tgtaaaaattgacgattgccctgcatttctaccaagtcctgtgaataaagagatgggagatttgattccgtcagaagagactgtaatccgtgtcgtcagcctgggagccttccccagtgt

SEQ ID NO: 475491 - DNA, 120 bp, Artificial Sequence
  ENSG00000160218_48 (sequence is synthesized)
aatgtagctttctctcttaccttctggaagagggaatgtttcatttattactgtttgattttcttgtatctggttctactcccaggatgaaattatccaactacatatatatttagagga

SEQ ID NO: 475492 - DNA, 120 bp, Artificial Sequence
  ENSG00000160218_49 (sequence is synthesized)
agaaagtgaaggggaaatttaaaatgtttacggcgcttaattgcctggaaatgaaatgaaatcaaatttatcagtttttttccccctaattacccaaaagatcttttgcaaactatgtta

SEQ ID NO: 475493 - DNA, 120 bp, Artificial Sequence
  ENSG00000160218_50 (sequence is synthesized)
catgaatgcttctgcctctttaagacaaagaagaatgtcacccaaaattgtcatttttttcttaatgttcatcataaaagtcctaaaagagtaactgtaattggatgtttattgttttta

SEQ ID NO: 475494 - DNA, 120 bp, Artificial Sequence
  ENSG00000160218_51 (sequence is synthesized)
tctaaagtaaggtgtatgtgtttgagacaagctggttttgttgataaagagatgttaaataattgtgaagccagatatgcaatgtgtatctgaaaagcaaggaatttgcagccgttttac

SEQ ID NO: 475495 - DNA, 120 bp, Artificial Sequence
  ENSG00000160218_52 (sequence is synthesized)
aaatatctgtggaacatgtaaatactgtcaaatggaaaataaaataagttataatttttgtgaatttcatgggatgtcctatgattggaaaaattataactcttctgattctaatgtgga

SEQ ID NO: 475496 - DNA, 120 bp, Artificial Sequence
  ENSG00000160218_53 (sequence is synthesized)
aattgttgtatttaatctgaaaatgactttacctacaacagttccattgtcagcacagcctaggaaggtcagatcctgtattaattactcttagtggagatgccagatatcccatacaga

SEQ ID NO: 475497 - DNA, 120 bp, Artificial Sequence
  ENSG00000160218_54 (sequence is synthesized)
attagcagagaaaatacacacaggcttctattcaaattttctttagtgcttaaaattaagttttaaaatgaaatcagacactgcaggtttgtatataaaatgaaaagctatactactttt

SEQ ID NO: 475498 - DNA, 120 bp, Artificial Sequence
  ENSG00000160218_55 (sequence is synthesized)
tacaaaagggcaaactgggctgatgtaaatgttttactttcaactgtgttctttaaaataaatcctacctggtttttaaattttatttttcatgaaaatgctcctttctctacatttatt

SEQ ID NO: 475499 - DNA, 120 bp, Artificial Sequence
  ENSG00000160218_56 (sequence is synthesized)
catcctatatacatcaggctgtaagaccccccccagtcatcattaatacaatgtgttgggattctgtgactggaaaaggtgacaagttggtgactttgacactgcaggtattccattttc

SEQ ID NO: 475500 - DNA, 120 bp, Artificial Sequence
  ENSG00000160218_57 (sequence is synthesized)
ccattttcatggtttactatgaaaagtcatttttcatattatgtaatatattgttagattaaaaccattgtattaagactttaaaatgtaagcattgtaattctgaaaatacacatttta

SEQ ID NO: 475501 - DNA, 120 bp, Artificial Sequence
  ENSG00000160218_58 (sequence is synthesized)
gtccctttgccttccatccaggggttatctttggaatgctcgagtgctcattgctgtgaacttataaaatgcccttgggtgttcatctttcttttgcacttttaaataatatcttaagct

SEQ ID NO: 475502 - DNA, 120 bp, Artificial Sequence
  ENSG00000160218_59 (sequence is synthesized)
cctttacaattaaagaattagcacagtgaaaccatacacagagagaaacattggttattgtcctcagtgtttttcgctgatacttattttgatgaaagtgataccacgttatatagctgt

SEQ ID NO: 475503 - DNA, 120 bp, Artificial Sequence
  ENSG00000160218_60 (sequence is synthesized)
ttctctgtcgctcctttttgttactcacagcccatcctgggcatctctccaggttagcaggtggggtttggagttgtttttgttacaattggtattcctggcttgattccattacctggt

SEQ ID NO: 475504 - DNA, 120 bp, Artificial Sequence
  ENSG00000160218_61 (sequence is synthesized)
gttggacattgggttcttttatgcttcttgccaccacaagcagtgctgtagtgggcatctctgccaggtgttctttttgagaacccttgtcaccatgtgtgaaggaaggagtaattttga

SEQ ID NO: 475505 - DNA, 120 bp, Artificial Sequence
  ENSG00000160218_62 (sequence is synthesized)
ggagccctggtgtcagcaggagaacctggagggagatgaagtgtggggacggtcagttctagctgtgagcactgtcctcactctggaactcatcagtggcgccgatggatactggctcat

SEQ ID NO: 475506 - DNA, 120 bp, Artificial Sequence
  ENSG00000160218_63 (sequence is synthesized)
agtgcttctgaagatcaggtctggatatctcactctcctgagatgccagtatagacacagaaccaaagcaaagtgtttactaagtaaaaaaataaaataaaaaaacacttctatttctta

SEQ ID NO: 475507 - DNA, 120 bp, Artificial Sequence
  ENSG00000160218_64 (sequence is synthesized)
catgacgatgctttcctccctgcagggtggccctggcccccttgccagattccagctggccgtcagtgctcgcgtgtctctctgaagaggctctgcggttctggtccctgtgcctgagct

SEQ ID NO: 475508 - DNA, 120 bp, Artificial Sequence
  ENSG00000160218_65 (sequence is synthesized)
ccaggtgccgccaggtgaggcccctgctgctcgccttgggctgtgctttcccccagccactctccttcccagatgcagcccagagcagcgttcaggcacacgcaggtctcatcacacccc

SEQ ID NO: 475509 - DNA, 120 bp, Artificial Sequence
  ENSG00000160218_66 (sequence is synthesized)
actgtgtcctactgcaactctgggtgtccttcaagccctgaggcaaatctgcattctttgctggattcagaaacattcagactgtgccccagccagaagcttctgaggaggaggtatttc

SEQ ID NO: 475510 - DNA, 120 bp, Artificial Sequence
  ENSG00000160218_67 (sequence is synthesized)
agtgggcctctagcacagtgttctactgcttcagttcccaggacctacgggcacccgggcccacggctggcacttttgcatctgtgtatttgggatcttttctgccctgtggcttgagag

SEQ ID NO: 475511 - DNA, 120 bp, Artificial Sequence
  ENSG00000160218_68 (sequence is synthesized)
ccccaggaagtcccagcatggcccctcttgagactggtgggagtttgtcccatgtccgaacagaggtaattgggcatttggtaggagatcacctagaaaggccgctcttgggactgctgt

SEQ ID NO: 475512 - DNA, 120 bp, Artificial Sequence
  ENSG00000160218_69 (sequence is synthesized)
ttaggctgtgaactcccataaaacggcttcatcttggcctcagactccagacaaatgcttcttaatatactgaaatctcttctttgaacattttacaatgccaatagaacactttttaag

SEQ ID NO: 475513 - DNA, 120 bp, Artificial Sequence
  ENSG00000160218_70 (sequence is synthesized)
tcaagctatactgtattacacacgctcgcgcgcacacacaacgcttcccctcagaagtggaactgccaggttgtagtgcatgagccctttttcatcttggcagtggcagatgtgttttga

SEQ ID NO: 475514 - DNA, 120 bp, Artificial Sequence
  ENSG00000160218_71 (sequence is synthesized)
tcgtttgtcatgggtggtggtagaatgttaagcatgtttgaatagccaccgagaataggttgattatggaaagaaaacacggacaaagtagattatggactgaattgggttataccaagg

SEQ ID NO: 475515 - DNA, 120 bp, Artificial Sequence
  ENSG00000160218_72 (sequence is synthesized)
aattcctgttgcttttgctagttgtaataatagcattgtgttttggtaagaaaaaggccttagtgtttagtaatgcatactgaagcagatggggcaaaataacaggttgtctgaaatttg

SEQ ID NO: 475516 - DNA, 89 bp, Artificial Sequence
  ENSG00000160218_73 (sequence is synthesized)
atggggcaaaataacaggttgtctgaaatttggacaagagtcttgctctgtcacccaggctacagtgcagtggtgcgatctcagctcac

SEQ ID NO: 475517 - DNA, 84 bp, Artificial Sequence
  ENSG00000160218_74 (sequence is synthesized)
ttcgctttaaattacctcaggcaaatacagaaatgtccatggcttgataagaggatgctgaggcagcaagatgctgagatctca

SEQ ID NO: 475518 - DNA, 120 bp, Artificial Sequence
  ENSG00000160218_75 (sequence is synthesized)
tgataagaggatgctgaggcagcaagatgctgagatctcaggatctgggtgataggcggctggaagggctctgtgctatcctttcttcctgtggttgaaaatgttcataatttaaagaag

SEQ ID NO: 475519 - DNA, 120 bp, Artificial Sequence
  ENSG00000160218_76 (sequence is synthesized)
gatgttaaggttcggagtgtaggacttccgaaaacattgcatctccagtgggaattattgagagtgagtggcgacagttgctctaaggccagccgagcagataggtgtctatcctcagct

SEQ ID NO: 475520 - DNA, 120 bp, Artificial Sequence
  ENSG00000160218_77 (sequence is synthesized)
tattaaggagagaaaagtcctaacttatacatatgtattgtatagaaaatgaatgaaatgtctagtcgattttttataatctaattttgagccctagtaacttaaaaaaaaaaagccctt

SEQ ID NO: 475521 - DNA, 120 bp, Artificial Sequence
  ENSG00000160218_78 (sequence is synthesized)
ctggcacttttcggtgtgaaatctgaagggaaacttatgcaacaacttagcttactttgctttgttgcttttttgattccccaggcagagagggtctccttaacaaagctaagatatatt

SEQ ID NO: 475522 - DNA, 120 bp, Artificial Sequence
  ENSG00000160218_79 (sequence is synthesized)
cgatgccctgggcatgtgtttagcagttctgtctgtctgtgaatcaccctttcttagataaggggtgcattttttgcaagggcagagacaagccagctctacctttccctctcagttcca

SEQ ID NO: 475523 - DNA, 120 bp, Artificial Sequence
  ENSG00000160218_80 (sequence is synthesized)
ggggccagggagtttgctgtaagaggttagggccggcttaggcatgaggggcgtaaaacttgggtcatgtccattagaccggtgacgaggccagaggaggtctgtgtcgtgtgtgcctcg

SEQ ID NO: 475524 - DNA, 120 bp, Artificial Sequence
  ENSG00000160218_81 (sequence is synthesized)
gtgtctgtccactgaaactcataagctcagccacggaggagctgtctcattttaggctttggtgctggtacttactgacagttacttgagaaagatgtgatttcggtcccagagccacag

SEQ ID NO: 475525 - DNA, 120 bp, Artificial Sequence
  ENSG00000160218_82 (sequence is synthesized)
gatatcagctcatggaatgtgtcgctgcatcatgttactcagggtgtgcccaagtctcgtagcccagaaatcaatcctgagggccctgaaacagcccaggggccgcagtatacgcccaag

SEQ ID NO: 475526 - DNA, 120 bp, Artificial Sequence
  ENSG00000160218_83 (sequence is synthesized)
agcagcgggggcaaagggcaaggcatgccgtctttccaaagcacggagtcaccagacaagtccacgcctgaagacgaatgttgtaatgttcagcttttgaagaacctgaggaagtgtctt

SEQ ID NO: 475527 - DNA, 120 bp, Artificial Sequence
  ENSG00000160218_84 (sequence is synthesized)
tcccttaactcacacagacgttcaccattcacgaaggtggcgcttagctcagcaggagcgcgcagcactggtggcacctgtgctatgtgccgtgttatcccgctcttccctggcgctggt

SEQ ID NO: 475528 - DNA, 120 bp, Artificial Sequence
  ENSG00000160218_85 (sequence is synthesized)
ggcacctgtgctgtgtgccgtgttatcccactcttccctggcgctggcggcacctgtgctgtgtgccatgttatcccactcttccctgacactggcggcacctgtgctatgtgccgtgtt

SEQ ID NO: 475529 - DNA, 120 bp, Artificial Sequence
  ENSG00000160218_86 (sequence is synthesized)
atcctctcttccctggcgctggcggcacctgtgctgtgtgccgtgttatcccactcttctctggcgctggcggcacctgtgctgtgtgccgtgttatcctcttttccctggcactggcgg

SEQ ID NO: 475530 - DNA, 120 bp, Artificial Sequence
  ENSG00000160218_87 (sequence is synthesized)
cacctgtgctgtgtgccgtgttaccccgctcttccctggcgctggtggcacctgtgctatgtgccgtgttatcctctcttccctggcgctggtggcacctgtgctatgtgccgtgttatc

SEQ ID NO: 475531 - DNA, 120 bp, Artificial Sequence
  ENSG00000160218_88 (sequence is synthesized)
ctctcttccctggcgctggtggcacctgtgctgtgtgctgtgttatcctctcttccctggcgctggtggcacctgtgctatgtgccgtgttatcctctcttccctggcactggcggcacg

SEQ ID NO: 475532 - DNA, 120 bp, Artificial Sequence
  ENSG00000160218_89 (sequence is synthesized)
cacgctgtgtgctggggtattcacctcttccctgtggggaataaggcttgagacttgcttccttcctgcccttaagggatgtaatagctttgtcctcactgtgcccctaaactgatttgg

SEQ ID NO: 475533 - DNA, 120 bp, Artificial Sequence
  ENSG00000160218_90 (sequence is synthesized)
ttttcagttacatattcagcctcacatggattaaatgcttagataattcattaactatggagtagttactgattggctaatgtcatctggaaatacatgactgaaagcactttgtcaaaa

SEQ ID NO: 475534 - DNA, 120 bp, Artificial Sequence
  ENSG00000160218_91 (sequence is synthesized)
ccctgtgcacattgcaacatgcatggctccgcggccctgcgtgtatgggagcagcaggtgggtctgctgcttagaggacggctgtgctcttccgccgttgaggtgactctggtgatgtgt

SEQ ID NO: 475535 - DNA, 120 bp, Artificial Sequence
  ENSG00000160218_92 (sequence is synthesized)
gcatgtcttgccagttctgcgttcgtttctcttgtctgtatgcatagcttcctgtttctcgttggtttgtgtatgtgttgggtaaggctttgcttcctggataatgagtggttgaagcca

SEQ ID NO: 475536 - DNA, 120 bp, Artificial Sequence
  ENSG00000160218_93 (sequence is synthesized)
taataaaatgtctagggcgtgggcgggcactgcaggtgagtctgggcagcagtggtggtggctgtgctgtccgtcggcgagtggtctgagagtgtctttgtgcttcctcctcaggtgtcg

SEQ ID NO: 475537 - DNA, 120 bp, Artificial Sequence
  ENSG00000160218_94 (sequence is synthesized)
atggctccgcggccctgcgtgtatgggagcagcaggtgggtctgctgcttagaggacggctgtgctcttccgccgttgaggtgtcgattgactgcccgtggtccatctactccacagtca

SEQ ID NO: 475538 - DNA, 120 bp, Artificial Sequence
  ENSG00000160218_95 (sequence is synthesized)
agcttgactcagggacgtgacgtggttgagttagggaaataaggaaggaatatgtaatctaaggaagaccaaaaaacaccaggatggtcagagcaggctgcactccagcccacagatggt

SEQ ID NO: 475539 - DNA, 120 bp, Artificial Sequence
  ENSG00000160219_0 (sequence is synthesized)
cccagctggaggaagcggcggcggcggccacgatgagtgcgggcgacgcagtgtgcaccggctggctcgttaagtcgccccccgagaggaagctacagcgctacgcctggcgcaagcgct

SEQ ID NO: 475540 - DNA, 120 bp, Artificial Sequence
  ENSG00000160219_1 (sequence is synthesized)
ggtttgtcctccggcgaggccgcatgagcggcaaccccgatgtcttggagtactacaggaacaagcactccagcaagcccatccgggtgatagacctcagcgagtgtgcagtgtggaagc

SEQ ID NO: 475541 - DNA, 120 bp, Artificial Sequence
  ENSG00000160219_2 (sequence is synthesized)
atgtgggccccagctttgttcggaaggaatttcagaataatttcgtgttcattgtcaagactacttcccgtacattctacctggtggccaaaactgagcaagaaatgcaggtgtgggtgc

SEQ ID NO: 475542 - DNA, 120 bp, Artificial Sequence
  ENSG00000160219_3 (sequence is synthesized)
acagcatcagtcaggtctgcaaccttggccacctggaggatggtgcagattccatggagagcctctcttacacgccctcctccctgcagccatcctctgccagctcccttcttaccgccc

SEQ ID NO: 475543 - DNA, 120 bp, Artificial Sequence
  ENSG00000160219_4 (sequence is synthesized)
atgctgccagctcctctttgccaagagatgacccaaacactaatgccgtagccactgaggaaaccagaagtgagtcagagcttctcttccttccagattatctggttttgtccaactgcg

SEQ ID NO: 475544 - DNA, 120 bp, Artificial Sequence
  ENSG00000160219_5 (sequence is synthesized)
agactggaagactgcaccataccagtctacccaccagatgtgatagctggtcaaactcagaccgttcattggaacaggcttcatttgatgatgtttttgttgactgcctgcagccgctcc

SEQ ID NO: 475545 - DNA, 120 bp, Artificial Sequence
  ENSG00000160219_6 (sequence is synthesized)
cctccagtcatttggtccacccctcatgccatggcagtggagctcaggaggtgccatcctcgaggcctcaggctgccctgatctggagtagagaaatcaatgggccacccagggaccact

SEQ ID NO: 475546 - DNA, 120 bp, Artificial Sequence
  ENSG00000160219_7 (sequence is synthesized)
tgtcttcttcaccattgctggaaagttccttaagttccaccattcaggtagataaaaatcaaggttccttaccctgtggagcaaaagaactagacattatgtccaacactccacctcccc

SEQ ID NO: 475547 - DNA, 120 bp, Artificial Sequence
  ENSG00000160219_8 (sequence is synthesized)
gcccccctaagccaagccatctgtctgaacggcgccaagaggagtggagtacacacagtggtagcaagaagccagaatgcactctggttccaagaagaatctccctctctggtttagaca

SEQ ID NO: 475548 - DNA, 120 bp, Artificial Sequence
  ENSG00000160219_9 (sequence is synthesized)
acatgagaacctggaaagctgatgtagaaggccaatccttaagacaccgagacaagcggcttagtttgaatttgccatgcaggttctccccgatgtaccccacagcttcagccagtatcg

SEQ ID NO: 475549 - DNA, 120 bp, Artificial Sequence
  ENSG00000160219_10 (sequence is synthesized)
aagacagctatgtgcccatgagcccccaggctggtgcctctggtcttggaccccactgcagccctgatgactacattccaatgaactcaggaagcatctcaagcccgttgcctgagctgc

SEQ ID NO: 475550 - DNA, 120 bp, Artificial Sequence
  ENSG00000160219_11 (sequence is synthesized)
ctgcaaacctggaacctcccccagtgaatagagatctcaagcctcagaggaaatcacggccacctcctctggacctgagaaacctctcgatcatccgggaacatgcatctcttaccagga

SEQ ID NO: 475551 - DNA, 120 bp, Artificial Sequence
  ENSG00000160219_12 (sequence is synthesized)
cccgcactgtgccttgcagtcgaaccagctttctctctccagaaagaaatggtattaattctgcaagattttttgctaatcctgtttccagagaagacgaagaaagctacatcgaaatgg

SEQ ID NO: 475552 - DNA, 120 bp, Artificial Sequence
  ENSG00000160219_13 (sequence is synthesized)
aggagcaccgaacagccagttccctgagcagtggtgcccttacgtggacaaagaaattcagcctagattatttggccctggacttcaattcagcatcaccagcccccatgcagcagaaac

SEQ ID NO: 475553 - DNA, 120 bp, Artificial Sequence
  ENSG00000160219_14 (sequence is synthesized)
ttctcctttcagaagaacaaagagtagactatgtccaagtggatgagcagaagacacaggctctccagagcacaaaacaggagtggacggatgaaaggcaatccaaagtatgagaggtgc

SEQ ID NO: 475554 - DNA, 88 bp, Artificial Sequence
  ENSG00000160219_15 (sequence is synthesized)
ccactaaaaacacactgatggtcaacacaggtcaaaaccaagagagaatgtgtagttttcaaggtcttggccagaacctttaggaaag

SEQ ID NO: 475555 - DNA, 120 bp, Artificial Sequence
  ENSG00000160219_16 (sequence is synthesized)
tgtgtagttttcaaggtcttggccagaacctttaggaaagaagacctgtttatacattgaaggaagaaaagaaggaagcagttgccttccggagggggctctgagagaatctagcctccc

SEQ ID NO: 475556 - DNA, 120 bp, Artificial Sequence
  ENSG00000160219_17 (sequence is synthesized)
ctctgtcctattggagcaaagattggagtgagtgttgccaccaacaggattttatcgtttgactccaatacctgaaattctgacttctctcctgtgcttcaatgagaatgataaattatc

SEQ ID NO: 475557 - DNA, 120 bp, Artificial Sequence
  ENSG00000160219_18 (sequence is synthesized)
ctagcaaaggggcctctggagaccatcttgttccagcctctgaagacagttgaggagatcaagcccagcaatggtggcagaatcttactccacagacttcagcagactagtcatttcaat

SEQ ID NO: 475558 - DNA, 120 bp, Artificial Sequence
  ENSG00000160219_19 (sequence is synthesized)
ggctctgagataagtatatcagatgacactggtggctctaaggatattgcaattaagcagctacctgtagccaggtattctgctgctcttggccttttcccacgcatcgtctcgtgtctt

SEQ ID NO: 475559 - DNA, 120 bp, Artificial Sequence
  ENSG00000160219_20 (sequence is synthesized)
ctccgaaagaccttggaagataggcctggaagagactgttgatgccactttgaagaaaagaacactgagaactagaggagggaacactttgcccaagattactcacaaagccaagaccca

SEQ ID NO: 475560 - DNA, 120 bp, Artificial Sequence
  ENSG00000160219_21 (sequence is synthesized)
gagtccagcttagagaatagagttgttcaggctgccaattgcaagctcattcctctacctcatacttcctctgaggattttgacaaaatggattaattgggtgagccttggagacatgtg

SEQ ID NO: 475561 - DNA, 120 bp, Artificial Sequence
  ENSG00000160219_22 (sequence is synthesized)
ggaaacacctgcagacacaaaatgagtagtcatcctgtctccctttcaatagggatctgaacaggtgttttgatacttgaaagatgtgcatgtcaagtgagggtttctttctgcgatgtt

SEQ ID NO: 475562 - DNA, 120 bp, Artificial Sequence
  ENSG00000160219_23 (sequence is synthesized)
caactggaactctcccatcagtagttacaattagaaatacctactgatggttagtctgaaggccattctcatggtcacctatacagtgtgtttccctgtgagctagcagacacaatgacc

SEQ ID NO: 475563 - DNA, 120 bp, Artificial Sequence
  ENSG00000160219_24 (sequence is synthesized)
aggaaaaaacctatgaattccattcttaggtttcccagccaattgctcccttctgctttagaagtgactaggtactgagagtacaaacactcccactttataatgaaggcgtcatgtcac

SEQ ID NO: 475564 - DNA, 120 bp, Artificial Sequence
  ENSG00000160219_25 (sequence is synthesized)
cccttcctttacaggtcctggggtccaggagacccagaatgaaggtgtcagttgggcatgaagtgttatttagtgtccattcttgatccttctgagcacctacagctggaaactaagcag

SEQ ID NO: 475565 - DNA, 120 bp, Artificial Sequence
  ENSG00000160219_26 (sequence is synthesized)
atactggtcctgcattctgactgagattgtgtcttctttatgaggatagatcaaattggcagtcaggcccatgatagtcagtgcagttggggcagttgtagactttgctacaggatttca

SEQ ID NO: 475566 - DNA, 120 bp, Artificial Sequence
  ENSG00000160219_27 (sequence is synthesized)
gggtttccaatcaccccacaggtaagtgaatgccaaagtcttcttttttcagaccatacaagaagtcattttgattttcaaagaagccgttttgattttcaaagaagcaggttctggtga

SEQ ID NO: 475567 - DNA, 120 bp, Artificial Sequence
  ENSG00000160219_28 (sequence is synthesized)
cattattttcttccttggacaaagtggggggaaatttctaagtattttaactgagttcagggtccttagtgagcctggacagagcaaggagagggctccccactccctaagccccacagc

SEQ ID NO: 475568 - DNA, 120 bp, Artificial Sequence
  ENSG00000160219_29 (sequence is synthesized)
cagctctgcatcaccacacacagccagagcctgtgaggagctgccttcttccccatgtgacttgcaaagagtctcaggcaagaaaccagggcttcaaactgctagttcccatggagggta

SEQ ID NO: 475569 - DNA, 120 bp, Artificial Sequence
  ENSG00000160219_30 (sequence is synthesized)
gttccctcgtgtggagcacttgtgttaggatcactgattatctgacaaaggctggtgcagaaaaaaaattgtaggcccaagtgtcaagaaccacaccagattggagatagaaaagaatag

SEQ ID NO: 475570 - DNA, 120 bp, Artificial Sequence
  ENSG00000160219_31 (sequence is synthesized)
ctgaaattatgtcagtagtgaaatgtcactccattgacccaccgaaaaaagaaaagaaatctgtttctaccaaacatttccagaaacgtatttatagcatgaagaaacacacatgggtag

SEQ ID NO: 475571 - DNA, 120 bp, Artificial Sequence
  ENSG00000160219_32 (sequence is synthesized)
tgtgacctgtttggatgtgattacttaaaaatggaatgctctgaataggcactctctacattaaaggtatggaaggcgataggggtcagaattttaaaaatttaattttgaaaaaggtga

SEQ ID NO: 475572 - DNA, 120 bp, Artificial Sequence
  ENSG00000160219_33 (sequence is synthesized)
ctcacccctcatttccagagtgtaggcaattatgtcctgctttgataaaactgctagaggatggctatgcaaaagcataacgattcaaggaaacaaagtacaggtagtttttgagctgac

SEQ ID NO: 475573 - DNA, 120 bp, Artificial Sequence
  ENSG00000160219_34 (sequence is synthesized)
agcagcaaaggcaccataagtcaaaatattggttttggtggagatgatcgatgtgtgtgtgtgagagagagctatgtttctaaccaagggcctaatgtttgttacagaaatgatcccaga

SEQ ID NO: 475574 - DNA, 120 bp, Artificial Sequence
  ENSG00000160219_35 (sequence is synthesized)
gacctacaagatgtgggaatcagcataacagggcaatgcagcaattaaccccacatcgttttctgtagttcctttttgtttcattttcttctgtctcacctcgttagaaaattcctccca

SEQ ID NO: 475575 - DNA, 120 bp, Artificial Sequence
  ENSG00000160219_36 (sequence is synthesized)
gtcaggggtcgtccagtgcaggacgggggacccaagggtctcaagcctgcaagtccagaaggtgacaaacccaggagcactgggagttaagctttccttggggagggaagagccttgatg

SEQ ID NO: 475576 - DNA, 120 bp, Artificial Sequence
  ENSG00000160219_37 (sequence is synthesized)
tccagcacacagcctggctataaagacacgaagcgacctacccactgtacagtccacttcacaggatcagctgaatcatgacctttaaaagttccgagttgaaactgaaggctctcctca

SEQ ID NO: 475577 - DNA, 120 bp, Artificial Sequence
  ENSG00000160219_38 (sequence is synthesized)
gacctggctttttcctcagtccctgttcataccatctctgcacccacaatcacactgatttttcaaattcattttgtttttgctgtttcatttctggcattaataaaagtcttataagga

SEQ ID NO: 475578 - DNA, 120 bp, Artificial Sequence
  ENSG00000160219_39 (sequence is synthesized)
cagtggtgcccttacgtggacaaagaaattcagcctagattatttggccctggacttcaattcagcatcaccagcccccatgcagcaggccagagcctttgtgttccaggtcatctccag

SEQ ID NO: 475579 - DNA, 120 bp, Artificial Sequence
  ENSG00000160219_40 (sequence is synthesized)
agagattgcagaatcacagaatacctctttctccttaggattggaacatgtcacttcctttttgttattattgttttgttttcttgagtcaagatctcactctgtcactcaggctggagt

SEQ ID NO: 475580 - DNA, 89 bp, Artificial Sequence
  ENSG00000160219_41 (sequence is synthesized)
gcagcctcgatctcctgggctaaagtttactacagttgcacatcatcacccacggctgttttttattttttaataaaaaatgatcttga

SEQ ID NO: 475581 - DNA, 120 bp, Artificial Sequence
  ENSG00000160221_0 (sequence is synthesized)
gctgtcctcaccgcaatggcggctgtgagggtcctggtggcctcgaggctcgctgcggcatctgcattcacgtccctgtcccccggcggtcggacgccttcccagcgcgcagcccttcac

SEQ ID NO: 475582 - DNA, 120 bp, Artificial Sequence
  ENSG00000160221_1 (sequence is synthesized)
ctctccgtgccgcgccccgcggccagggtcgcgctggtgctgtctggatgcggagtctacgatgggaccgagatccacgaggcctcggcgatcctggtgcacctgagccgtggaggggct

SEQ ID NO: 475583 - DNA, 120 bp, Artificial Sequence
  ENSG00000160221_2 (sequence is synthesized)
gaagtccagatctttgctcctgacgtccctcagatgcacgtgattgaccacaccaaggggcagccgtccgaaggcgagagcaggaatgttttgaccgagtctgcgaggatcgcccgtggc

SEQ ID NO: 475584 - DNA, 120 bp, Artificial Sequence
  ENSG00000160221_3 (sequence is synthesized)
aaaatcacagacctggccaacctcagtgcagccaaccatgatgctgccatctttccaggaggctttggagcggctaaaaacctgagcacgtttgccgtggacgggaaagattgcaaggtg

SEQ ID NO: 475585 - DNA, 120 bp, Artificial Sequence
  ENSG00000160221_4 (sequence is synthesized)
aataaagaagtggagcgtgtcctgaaggagttccaccaggccgggaagcccatcggcttgtgctgcattgcacctgtcctcgcggccaaggtgctcagaggcgtcgaggtgactgtgggc

SEQ ID NO: 475586 - DNA, 120 bp, Artificial Sequence
  ENSG00000160221_5 (sequence is synthesized)
cacgagcaggaggaaggtggcaagtggccttatgccgggaccgcagaggccatcaaggccctgggtgccaagcactgcgtgaaggaagtggtcgaagctcacgtggaccagaaaaacaag

SEQ ID NO: 475587 - DNA, 120 bp, Artificial Sequence
  ENSG00000160221_6 (sequence is synthesized)
tgcgagacggcactccactacatccatgatgggatcggagccatggtgaggaaggtgctggaactcactggaaagtgacgcgcatggacggggcccagctaggcgccaggacttggcctc

SEQ ID NO: 475588 - DNA, 120 bp, Artificial Sequence
  ENSG00000160221_7 (sequence is synthesized)
accctctggctgaggagctgtcggctgctttccatccagctgggagtctggcaggcccttttttttttttctttgccgaaacctgcaggcgttctctctctaaggaggatgtgctgcagt

SEQ ID NO: 475589 - DNA, 120 bp, Artificial Sequence
  ENSG00000160221_8 (sequence is synthesized)
gcatgggggatgtttcttcctgggtgtggctgggctgctctcacatacagaggccgaggggccaattcgttctctgccacagggacttgcctcactgtgtcccaaaaacaaatcgcagcc

SEQ ID NO: 475590 - DNA, 120 bp, Artificial Sequence
  ENSG00000160221_9 (sequence is synthesized)
agcttttccagaaatagaaaattctgccgtctgaggttttatacttcaggttagttagtttttggaaggaagaacatttttaggtttgcaagcctcctgatcaggaaaccagaaatacca

SEQ ID NO: 475591 - DNA, 120 bp, Artificial Sequence
  ENSG00000160221_10 (sequence is synthesized)
catttatggaccatgaaaggttggttcttgactctgaagggacttttgagttaatcagcgtaaggggatttctaaagcaggcaatccctgtagccgcagagaataaacgccttcccaaaa

SEQ ID NO: 475592 - DNA, 120 bp, Artificial Sequence
  ENSG00000160221_11 (sequence is synthesized)
tggcaacttcccacagccacatttcagacctgctgagactgctgagtgaggaatggcagtgaggtttcttcaattagtctcagttctcttaattttcaggaagaaagggaaattgcagcc

SEQ ID NO: 475593 - DNA, 120 bp, Artificial Sequence
  ENSG00000160221_12 (sequence is synthesized)
cctcagcccccaggattgacctctggggagtgatggtagcgttggtgccaggccgtgggttcaggtgtggcagaagcttgcagatgcgtccgaagggaaataaagtgtgttggcgttaga

SEQ ID NO: 475594 - DNA, 120 bp, Artificial Sequence
  ENSG00000160221_13 (sequence is synthesized)
ctctctggccctctccctccctgggggcagctgctctcagccctccctgcccccacatcgccatcctgcctgtccttctgggcctgcacgtttgttgtgtttggaaggagccaccaagga

SEQ ID NO: 475595 - DNA, 120 bp, Artificial Sequence
  ENSG00000160221_14 (sequence is synthesized)
ggaggatgtcaatgtgcaagttctcagggaagcaggccccgcagcctccgtcagtgtcttccgtccgcaggaagaacccaggcctgggtgattcatcggggcctcagggccgggaggcac

SEQ ID NO: 475596 - DNA, 120 bp, Artificial Sequence
  ENSG00000160221_15 (sequence is synthesized)
taaatcttctgcagatgtggtggtgtgggctgtgtggatttcggatgtgggcccataacatagccacactgctgcaaagcaagtgagtctgaggcaagaagaaggcccaaccttgggagg

SEQ ID NO: 475597 - DNA, 120 bp, Artificial Sequence
  ENSG00000160221_16 (sequence is synthesized)
ctgacctggagggcaggcagaggcaggtggtaaggacctgccttacctgttgaggtgacagtgggggacatattgcaaggaaggaggccctggatcctcaggatgtggatggtgggtaga

SEQ ID NO: 475598 - DNA, 120 bp, Artificial Sequence
  ENSG00000160221_17 (sequence is synthesized)
agggtgacagctaatggatgtccacctgcacagatgcccacctgcatgagtgcccacctgcatgagtgcccacttgtaccaatgtccacctgtacagatgtccacatgcaaatgcccatc

SEQ ID NO: 475599 - DNA, 120 bp, Artificial Sequence
  ENSG00000160221_18 (sequence is synthesized)
tgcactgatatccacctgcacagatgcctacctgcatgaatacccacttgcctgaaagcccacctgcacccatgtccactggcacaaatgcccacctgcacccgtgtccactggcacaaa

SEQ ID NO: 475600 - DNA, 120 bp, Artificial Sequence
  ENSG00000160221_19 (sequence is synthesized)
atacccacctgcacagatgcccacctgcacggatgcccacctgtacaaaggcctacctgcgtgaatgtccacctgcatggatgcccacccgcacggatgcccacctgcacagttatccat

SEQ ID NO: 475601 - DNA, 120 bp, Artificial Sequence
  ENSG00000160221_20 (sequence is synthesized)
ctgaacagccctctggtgcctccttttgcttgcacatgttcaaatcctcccagtcctacagtcgattgttcctagttggggtcattctgggcatgttattctaaaacttgttttttcccg

SEQ ID NO: 475602 - DNA, 120 bp, Artificial Sequence
  ENSG00000160221_21 (sequence is synthesized)
tctccacatcaaaggagaaaggtctagcttgcttctttgctatagagcagggcctgagtgaggtcaggaccacagagcagaccctatgagtgttggtcaggacacagagcaggacccctt

SEQ ID NO: 475603 - DNA, 120 bp, Artificial Sequence
  ENSG00000160221_22 (sequence is synthesized)
cagggtctggaagagggttccccaagctcctgttcaacctgagtgagaggctcaggctgcccccaacacactgcacagaaaaatgggccattgattcagagccacccacgctaacagcag

SEQ ID NO: 475604 - DNA, 120 bp, Artificial Sequence
  ENSG00000160221_23 (sequence is synthesized)
ttcagctgcagccctccggcaggcaggtcctgggaacactaggaacctgagaccctgtcccttcctgatagcggggtgtggtgacatgaggagagactgggtacctccattctgctcatg

SEQ ID NO: 475605 - DNA, 120 bp, Artificial Sequence
  ENSG00000160221_24 (sequence is synthesized)
aaagtcacagaggggaccggggaccccaggcccctagcgataccagcaccccacacaatgcctttctgggatacacccccccaacatggcctgcccaaggcatcaggagctgtgtagagg

SEQ ID NO: 475606 - DNA, 120 bp, Artificial Sequence
  ENSG00000160221_25 (sequence is synthesized)
agtcagctgggggtggcagagccccagggaacaatcatgggtcgctggcagataagccatgcgcccacacagcacaggccctcacccctgcagctgggggagccctccttgggagcgggc

SEQ ID NO: 475607 - DNA, 120 bp, Artificial Sequence
  ENSG00000160221_26 (sequence is synthesized)
ccaggatccgggcaaaatgacacagaccggatccaggagcagactgagcaaaagtggcaaaagtattctccaggttaagggaatattttcaccaattgagagaccagctgtccctccaga

SEQ ID NO: 475608 - DNA, 120 bp, Artificial Sequence
  ENSG00000160221_27 (sequence is synthesized)
cccaagggttccacatccctggaggcaaccaagccagatgcaaaatatttgaaaaagaaaaatgaaaaaaagaacaatacagcaataaaaaagaacacaaataaaaaatacagtatagct

SEQ ID NO: 475609 - DNA, 120 bp, Artificial Sequence
  ENSG00000160221_28 (sequence is synthesized)
gtgaggtcagctcccgcctccagagatcagccttcgctgttctctgcccaaggtcggcccctcttcctaggtccgctcccgccgccccacgtcggctccttcaccccaagtcagctcctg

SEQ ID NO: 475610 - DNA, 120 bp, Artificial Sequence
  ENSG00000160221_29 (sequence is synthesized)
cggcccaggtcggccccattttcccgggtcagcgcccgcggcccaggtcggcccctttccccccagtcaactcccgccgcccaggtcggcccctttcccccgggtcagctcccgctcctc

SEQ ID NO: 475611 - DNA, 120 bp, Artificial Sequence
  ENSG00000160221_30 (sequence is synthesized)
cagaattctgtctgctttagacactcggagagacttccatttcccatgggccttgactgcagaagattcagagtgatttggcgcaggttctgaagtgctgatcggaagagcccagcatag

SEQ ID NO: 475612 - DNA, 120 bp, Artificial Sequence
  ENSG00000160221_31 (sequence is synthesized)
ttccatgtggagcagatgggaagggggtgcacctgtctgctgtccaatgtggtcagtggagcggcgatgggagggggtggtgataggagcagtctctgggtttagggtctgggcagggca

SEQ ID NO: 475613 - DNA, 120 bp, Artificial Sequence
  ENSG00000160221_32 (sequence is synthesized)
cgtgcctgccctctgacttgggagctgttcttagggttgggtcttaggtagcgttgtagcgagccatgcttttgtttctgcttctctgctgcctcttctctcagcattcctggtacccag

SEQ ID NO: 475614 - DNA, 62 bp, Artificial Sequence
  ENSG00000160221_33 (sequence is synthesized)
catgtgcgagacggcactccactacatccatgatgggatcggagccatggcaagcgacttga

SEQ ID NO: 475615 - DNA, 120 bp, Artificial Sequence
  ENSG00000160221_34 (sequence is synthesized)
agatgggaagatcacttgagcccagcaggtcgagtctgcaggaagccgtgatcacatcaccgcactccagctgggatgacagagcaagatcttgtctcaattcatccgtccatccataca

SEQ ID NO: 475616 - DNA, 120 bp, Artificial Sequence
  ENSG00000160221_35 (sequence is synthesized)
tccatgtgtcactcagtttaaaagaacaaaaaccaaagaaatctgaaaagcttacaacgaaaagacgctcagtattctcttctcctccctggattagctgggtgggcgccaggtcatcac

SEQ ID NO: 475617 - DNA, 120 bp, Artificial Sequence
  ENSG00000160221_36 (sequence is synthesized)
agggtccttgtaagaggaaggcaaggggtcagagtcgggcagaggaagccaaggtcagaggggaggagaggctgctgactttgaagatggaagagaggcctgagccaaggggtgcagcgg

SEQ ID NO: 475618 - DNA, 120 bp, Artificial Sequence
  ENSG00000160221_37 (sequence is synthesized)
atcctagaaatggtaagagggacacagatcctcccctagcgcctccaggaggagtggaacccagccaacacctggatcggagcttctgacctccagggctataggagaataaatgtgtgt

SEQ ID NO: 475619 - DNA, 120 bp, Artificial Sequence
  ENSG00000160221_38 (sequence is synthesized)
tgctgaagccactgactagtcagctactgcaaccgttggaaactacagctattatcacaatgcccataaaacacgctccagcagcgtgagaacaaagacagttgtgtggtggttatgaaa

SEQ ID NO: 475620 - DNA, 120 bp, Artificial Sequence
  ENSG00000160221_39 (sequence is synthesized)
cctcacctaacaagaccatgtttaagaaaagccaaataaaaacaagaagtaattatttaagcggtatcctaataaacggcttgcaaaaatatgtgagcaaatgaagtggtctccatccag

SEQ ID NO: 475621 - DNA, 120 bp, Artificial Sequence
  ENSG00000160221_40 (sequence is synthesized)
acctgcctggtcactgtccagggaggcccctaaagtggagcctcaggaagaggtgcaggctcagagctcctgaaggaggtccctgctgcagccgtgtcacagccggggtgaaggtttcgc

SEQ ID NO: 475622 - DNA, 120 bp, Artificial Sequence
  ENSG00000160221_41 (sequence is synthesized)
ccatggtctccacctcgggatcccgtccttgtcagagaagtgttccttggatgagcgcccagagggaggagcccatggccctttcttctgtgactgattaaaaatctcgatgaaacaaga

SEQ ID NO: 475623 - DNA, 120 bp, Artificial Sequence
  ENSG00000160221_42 (sequence is synthesized)
catctttccaggaggctttggagcggctaaaaacctagacagtgtctcactgtggacgtccagcctctggaactgtgagaggtacatgtctgttatgtaggctgcccaggctgtggaact

SEQ ID NO: 475624 - DNA, 120 bp, Artificial Sequence
  ENSG00000160221_43 (sequence is synthesized)
gtgtcatagtggcctgagtgacttaagcacctgcctgtaggccaggactgtggctccacagcccagcttcaagcctggccgaccaggggtttggcatgaagaccccggcagggctggggc

SEQ ID NO: 475625 - DNA, 120 bp, Artificial Sequence
  ENSG00000160221_44 (sequence is synthesized)
gccacagcacagggggccaacgcaagctgggatcgtcagacgttaggaaatcccaaggaagaagagaaaggggacacattcgggagacgtcggcacacgctcgaagcagcggacaggcac

SEQ ID NO: 475626 - DNA, 120 bp, Artificial Sequence
  ENSG00000160221_45 (sequence is synthesized)
ctctctgtggacaaggcagactgggcggccgagattccgcatagatgcctgcttcctccacgacctccacgtgtggctggcccagtccgggtccccctcacctcctctgtctgtcttggt

SEQ ID NO: 475627 - DNA, 120 bp, Artificial Sequence
  ENSG00000160221_46 (sequence is synthesized)
ggcctcacgccgtgggctgtgatgccggctacgctgcttgggtggccaagggtctgagctgcaagacgcccagcctgggtctctcccgagctctcccacgtcctgtctgctcctcctccg

SEQ ID NO: 475628 - DNA, 120 bp, Artificial Sequence
  ENSG00000160221_47 (sequence is synthesized)
agctcccggttgactctcacgactgcaccagcctctcccccaggaaggcgtggaaacaacctccttctcccaggcccgctctgcctcctgcgtttcaaggcaaatccgttcctccaggag

SEQ ID NO: 475629 - DNA, 120 bp, Artificial Sequence
  ENSG00000160221_48 (sequence is synthesized)
atgatgcaaccacatcctgttggagcccagagaagtgcggatgcagcccggggctctttctttcctagaaccctgcctgggagtggcttccctgaactaaggacagagactttgtcttcg

SEQ ID NO: 475630 - DNA, 120 bp, Artificial Sequence
  ENSG00000160221_49 (sequence is synthesized)
ttgcctctcggcctgtgggcactgagcatacagtaggtgctcagtaaatgcttgcaggccgatgcccagagccattagccctcatcatggtgagctcggcagccggtgttggggctgggc

SEQ ID NO: 475631 - DNA, 120 bp, Artificial Sequence
  ENSG00000160221_50 (sequence is synthesized)
cacctcctgggaccttcccttcatgtatggtcccagcggcatgcgggcctggtggaggaggtcctggcctgccgcccagggatggccggtccaggcgcagggccgattgtccacttctgg

SEQ ID NO: 475632 - DNA, 120 bp, Artificial Sequence
  ENSG00000160221_51 (sequence is synthesized)
cccctgaggtaccgggagggctggtgagcagcatgtctcgctctgagaccggccaggctgctggggcaggcatctgatgtacagtagttcccacacgtggcaatgtcaccagcaagagcc

SEQ ID NO: 475633 - DNA, 120 bp, Artificial Sequence
  ENSG00000160221_52 (sequence is synthesized)
acgtatgataaattcaggccgtccaccgtggcaacactgggaaggctgattctgtaggaaaggattggccttgggccatcactgttcaaagaagaagaaatccctggatcactgtctgat

SEQ ID NO: 475634 - DNA, 120 bp, Artificial Sequence
  ENSG00000160221_53 (sequence is synthesized)
ccaactccagacagacactccacacaggattcctcctggggatcacggctcttctcttggcggagaagaaggagggagaatgagcccatgtcgggggcctctaggcagcccgccacagcc

SEQ ID NO: 475635 - DNA, 120 bp, Artificial Sequence
  ENSG00000160221_54 (sequence is synthesized)
ctacaactcaaagaaaactcaccagtccctggtcactcggatgtccttggaggcgcttggatttactgcagggaccccaagagtcggccacggcagagccccgtctgccagcccaccgag

SEQ ID NO: 475636 - DNA, 120 bp, Artificial Sequence
  ENSG00000160221_55 (sequence is synthesized)
cggggagggagggaggagggtgcgtgggcccgcggcctctgttctcagccaggagctgccgctgatcctgaaaactcacagctgcttttcttgttttaactgaggggatttcacacgatg

SEQ ID NO: 475637 - DNA, 120 bp, Artificial Sequence
  ENSG00000160221_56 (sequence is synthesized)
tcactggtgacttaacaggaaggagaggcacagtgcacttccctagaggaggcctggaattctcttggctcccagaggtgtccctaggcagtccctcaggacccctatcctttaccagac

SEQ ID NO: 475638 - DNA, 120 bp, Artificial Sequence
  ENSG00000160221_57 (sequence is synthesized)
ttcctcaatgcccagagctttgggatacttcgtggtggctctccgggatccaggtggccaccgtcctccctggctctctgtgttgcccactcctgaggccctggctcctggatgcttcag

SEQ ID NO: 475639 - DNA, 120 bp, Artificial Sequence
  ENSG00000160221_58 (sequence is synthesized)
cctacgtgtgcctcctcgctctgttttcgtgggtgctacccctacgcagggcccacctcctggcttcagcccctgcccactctttgagcaggggtggatctccccaacactctggcccac

SEQ ID NO: 475640 - DNA, 120 bp, Artificial Sequence
  ENSG00000160221_59 (sequence is synthesized)
tcgggtgtgatgcttccacgagcctcccggcacctgctccttggtggtcctggaacgcggcgctgtgctgtccaggtctcagctgcgtctggtgctggcagggcgagagccgcacttgcg

SEQ ID NO: 475641 - DNA, 120 bp, Artificial Sequence
  ENSG00000160221_60 (sequence is synthesized)
tgggtgaacatcagtgaggcgcactcgcgatggccgctcactaccgagttctgtcagccgaacaaggatgaggatctatcggaatcctctgtctccccatccacagtcactcacttaagg

SEQ ID NO: 475642 - DNA, 120 bp, Artificial Sequence
  ENSG00000160223_0 (sequence is synthesized)
gcgcagttagagccgatctcccgcgccccgaggttgctcctctccgaggtctcccgcggcccaagttctccgcgccccgaggtctccgcgccccgaggtctccgcggcccgaggtctccg

SEQ ID NO: 475643 - DNA, 120 bp, Artificial Sequence
  ENSG00000160223_1 (sequence is synthesized)
cccgcaccatgcggctgggcagtcctggactgctcttcctgctcttcagcagccttcgagctgatactcaggagaaggaagtcagagcgatggtaggcagcgacgtggagctcagctgcg

SEQ ID NO: 475644 - DNA, 120 bp, Artificial Sequence
  ENSG00000160223_2 (sequence is synthesized)
cttgccctgaaggaagccgttttgatttaaatgatgtttacgtatattggcaaaccagtgagtcgaaaaccgtggtgacctaccacatcccacagaacagctccttggaaaacgtggaca

SEQ ID NO: 475645 - DNA, 120 bp, Artificial Sequence
  ENSG00000160223_3 (sequence is synthesized)
gccgctaccggaaccgagccctgatgtcaccggccggcatgctgcggggcgacttctccctgcgcttgttcaacgtcaccccccaggacgagcagaagtttcactgcctggtgttgagcc

SEQ ID NO: 475646 - DNA, 120 bp, Artificial Sequence
  ENSG00000160223_4 (sequence is synthesized)
aatccctgggattccaggaggttttgagcgttgaggttacactgcatgtggcagcaaacttcagcgtgcccgtcgtcagcgccccccacagcccctcccaggatgagctcaccttcacgt

SEQ ID NO: 475647 - DNA, 120 bp, Artificial Sequence
  ENSG00000160223_5 (sequence is synthesized)
gtacatccataaacggctaccccaggcccaacgtgtactggatcaataagacggacaacagcctgctggaccaggctctgcagaatgacaccgtcttcttgaacatgcggggcttgtatg

SEQ ID NO: 475648 - DNA, 120 bp, Artificial Sequence
  ENSG00000160223_6 (sequence is synthesized)
acgtggtcagcgtgctgaggatcgcacggacccccagcgtgaacattggctgctgcatagagaacgtgcttctgcagcagaacctgactgtcggcagccagacaggaaatgacatcggag

SEQ ID NO: 475649 - DNA, 120 bp, Artificial Sequence
  ENSG00000160223_7 (sequence is synthesized)
agagagacaagatcacagagaatccagtcagtaccggcgagaaaaacgcggccacgtggagcatcctggctgtcctgtgcctgcttgtggtcgtggcggtggccataggctgggtgtgca

SEQ ID NO: 475650 - DNA, 120 bp, Artificial Sequence
  ENSG00000160223_8 (sequence is synthesized)
gggaccgatgcctccaacacagctatgcaggtgcctgggctgtgagtccggagacagagctcactggccacgtttgaccggagctcaccgcccagagcgtggacagggcttccgtgagac

SEQ ID NO: 475651 - DNA, 120 bp, Artificial Sequence
  ENSG00000160223_9 (sequence is synthesized)
gccaccgtgagaggccaggtggcagcttgagcatggactcccagactgcaggggagcacttggggcagcccccagaaggaccactgctggatcccagggagaacctgctggcgttggctg

SEQ ID NO: 475652 - DNA, 120 bp, Artificial Sequence
  ENSG00000160223_10 (sequence is synthesized)
tgatcctggaatgaggccctttcaaaagcgtcatccacaccaaaggcaaatgtccccaagtgagtgggctccccgctgtcactgccagtcacccacaggaagggactggtgatgggctgt

SEQ ID NO: 475653 - DNA, 120 bp, Artificial Sequence
  ENSG00000160223_11 (sequence is synthesized)
ctctacccggagcgtgcgggattcagcaccaggctcttcccagtaccccagacccactgtgggtcttcccgtgggatgcgggatcctgagaccgaagggtgtttggtttaaaaagaagac

SEQ ID NO: 475654 - DNA, 120 bp, Artificial Sequence
  ENSG00000160223_12 (sequence is synthesized)
tgggcgtccgctcttccaggacggcctctgtgctgctggggtcacgcgaggctgtttgcaggggacacggtcacaggagctcttctgccctgaacgctcccaacctgcctcccgcccgga

SEQ ID NO: 475655 - DNA, 120 bp, Artificial Sequence
  ENSG00000160223_13 (sequence is synthesized)
agccacaggacccactcatgtgtgtgcccacaagtgtagttagccgtccacaccgaggagcccccggaagtccccactgggcttcagtgtcctctgccacattccctgggaggaacaatg

SEQ ID NO: 475656 - DNA, 120 bp, Artificial Sequence
  ENSG00000160223_14 (sequence is synthesized)
tccctcggctgttccggtgaaaagttgagccacctttggaagacgcacgggtggagtttgccagaagaaaggctgtgccagggccgtgtttggctacaggggctgccggggctcttggct

SEQ ID NO: 475657 - DNA, 120 bp, Artificial Sequence
  ENSG00000160223_15 (sequence is synthesized)
ctgcagcgagaaagacacagcccagcagggctggagacgcccatgtccagcaggcgcaggcctggcaacacggtccccagagtcctgagcagcagttaggtgcatggagagggtatcacc

SEQ ID NO: 475658 - DNA, 120 bp, Artificial Sequence
  ENSG00000160223_16 (sequence is synthesized)
tggtggccacagtcccccttctcacctcagcaatgatccccaaagtgagaggtggctcccccggcccccaccaccctcagcagccccaccccactcaaccctgagggtccccagggtcct

SEQ ID NO: 475659 - DNA, 120 bp, Artificial Sequence
  ENSG00000160223_17 (sequence is synthesized)
gatgaagacctccgaccccagcgccaggctcctcggagcccaacagtcccaagggggcaggagacggggtggtccagtgctgaggggtacagccctgggccctgaccagccccggcacct

SEQ ID NO: 475660 - DNA, 120 bp, Artificial Sequence
  ENSG00000160223_18 (sequence is synthesized)
gccatgctggttcccggaatgaatcagctgctgactgtctccagaagggctggaaaggatgctgccaggtgacccgaggtgcactcgccccagggagatggagtagacagcctggcctgg

SEQ ID NO: 475661 - DNA, 120 bp, Artificial Sequence
  ENSG00000160223_19 (sequence is synthesized)
ccctcgggacacattgtctgccccggggctatgggcaaatgcccctccttcttacttcccagaatcccctgacattcccagggtcagccaggacctgttacagccctggtcacttggaac

SEQ ID NO: 475662 - DNA, 120 bp, Artificial Sequence
  ENSG00000160223_20 (sequence is synthesized)
tgacagctgtgtgaggcctgcacttctcagacccagacttagaacaaaaggaggagtgaggactcaaggctacaatgaggttccagtacttgttacaagaaattggttttctgcaaaaaa

SEQ ID NO: 475663 - DNA, 120 bp, Artificial Sequence
  ENSG00000160223_21 (sequence is synthesized)
agtccctacctgagcctttaggtgaatgtgggatccactcccgcttttaacatgaaagcattagaagatgtgtggtgtttataaaagaacagttgtcatcaccgggcattgattggcagg

SEQ ID NO: 475664 - DNA, 120 bp, Artificial Sequence
  ENSG00000160223_22 (sequence is synthesized)
gacaaggagctgcttgggtgtggaaagttggggcgttggaaagtgggctgtggtgcccatttgcagtgactgtgaagtgactccaggacggacctgcgggggcacccagaggtcctaagc

SEQ ID NO: 475665 - DNA, 120 bp, Artificial Sequence
  ENSG00000160223_23 (sequence is synthesized)
cccaggactgagggtcgtgcatcaccactcgggtgtcccgggaggtgccctgggcccggggacctcacaggcaggacggcgacactaatgcagggagagggagtctggccccagcttttc

SEQ ID NO: 475666 - DNA, 120 bp, Artificial Sequence
  ENSG00000160223_24 (sequence is synthesized)
ctatcagaggcgattttccttcaccaggggatgggcaggaaagaggcaggggccccagaagcttctgtccctcatgcctgagggcacgggggacacttggaggctgctgtcaccactgtg

SEQ ID NO: 475667 - DNA, 120 bp, Artificial Sequence
  ENSG00000160223_25 (sequence is synthesized)
cgtccaaggccatgctctctgcgggtcagtgcctgagtctcgcctccctgctggtccctgaagccccctcagaagccctgcctgtcacgtcggcatttgtgagacctaccctgtaacgcc

SEQ ID NO: 475668 - DNA, 120 bp, Artificial Sequence
  ENSG00000160223_26 (sequence is synthesized)
tgcccctctcagcccaacatcagcttcctctttctcccttgctgtagacaggctggattccagtgttgggacagccatctccagaaacctgacttaagagagtaagatgcaaatcgtgcc

SEQ ID NO: 475669 - DNA, 120 bp, Artificial Sequence
  ENSG00000160223_27 (sequence is synthesized)
tgtatccagtggctttggtgggtgcagggagtcttgggcacagccagctcagctgtctgtggtatgagcaggaacaggtgccactcctgctcaggggaccctgccctacaccaggctgtt

SEQ ID NO: 475670 - DNA, 120 bp, Artificial Sequence
  ENSG00000160223_28 (sequence is synthesized)
ccgtccccctggaggacatggggccaggtctggaggcattttgggttgtcacagctgggggctgttcctcggcttcagcgggtggaagcctcagatgctgttcaacatcttctggacacg

SEQ ID NO: 475671 - DNA, 120 bp, Artificial Sequence
  ENSG00000160223_29 (sequence is synthesized)
ggaggccccgacagagagaagcgtccacccgcaagtccacagtctgaggtctcccctcagagaccctgccctgcacacccacctccagccaaaggtcctgcctgccccagggctcagggg

SEQ ID NO: 475672 - DNA, 120 bp, Artificial Sequence
  ENSG00000160223_30 (sequence is synthesized)
aaccttgccggtctgtggaacaggagaggggactctcgccagctgcaccaccctgcacgtagtaggtgtgcggtaaacatccaccagggaggctccagtcaaggctggcagatggggcgg

SEQ ID NO: 475673 - DNA, 120 bp, Artificial Sequence
  ENSG00000160223_31 (sequence is synthesized)
tccatccctagggcaggtgacagaagggaaaaggctgcctgctggcccccgagccaggtagcacatgcttgtgcctcagtttcccctcctgtaaagtgaggcgctggatccaggttctgt

SEQ ID NO: 475674 - DNA, 120 bp, Artificial Sequence
  ENSG00000160223_32 (sequence is synthesized)
ctactgggctctgcagcttggacgctcctaagaccaagcgacccaccctggggagggcagctatggctttggaatagctgtccaggcccgggtgcctccaagacggccaccacaccctgc

SEQ ID NO: 475675 - DNA, 120 bp, Artificial Sequence
  ENSG00000160223_33 (sequence is synthesized)
ctgtgctgcaggggtgcaggggtaaggggcaagactccagaggcctcctctctgcatctccttgtcttcagtggccggaggtgaggcctgagctcaggggaggggcttctgccacgaacc

SEQ ID NO: 475676 - DNA, 120 bp, Artificial Sequence
  ENSG00000160223_34 (sequence is synthesized)
ctatggcggggcacagcacacttttcccagggaggacccctgggccccctgcattatccccagcggagtgtggggtcaccttccaagagcgacattgagaagctccagctctaggagtgt

SEQ ID NO: 475677 - DNA, 120 bp, Artificial Sequence
  ENSG00000160223_35 (sequence is synthesized)
gcagactcttaaccaggcaggcccaggccctggggcacacaaaggcggggcctgctctccccagctgcccctgccaatgggggctggactgtcctaccctcctcccttctacctccccac

SEQ ID NO: 475678 - DNA, 120 bp, Artificial Sequence
  ENSG00000160223_36 (sequence is synthesized)
tgtcttccctctccactgtcaccactgcctccctcttccactgtcctccatgcactgccctccctccaccttcccccacccccaccactccccatgctgtccccaggctccccccgctct

SEQ ID NO: 475679 - DNA, 120 bp, Artificial Sequence
  ENSG00000160223_37 (sequence is synthesized)
cccccctccccactgtccccctccccatgctgtacccagctcaccccgctctcccctctccccactgtcccccctcccactccccatgctgtccccagctcaccctacatggacttggcg

SEQ ID NO: 475680 - DNA, 120 bp, Artificial Sequence
  ENSG00000160223_38 (sequence is synthesized)
atgtccttccatggctcaccggtctgaatttccatgatgagccgggcctgcagctttgctcccctatccctgcccaggctgcagctgtccatgcagggagcgagctccagcacctgcgga

SEQ ID NO: 475681 - DNA, 120 bp, Artificial Sequence
  ENSG00000160223_39 (sequence is synthesized)
gtccttccgtgggggcctctccgtgccacagcagccagggacctcaggtgcctgtgcatgacaccaccgcccatcctcatcctgagccagcctctcaggatcaggacttggtttggcggc

SEQ ID NO: 475682 - DNA, 120 bp, Artificial Sequence
  ENSG00000160223_40 (sequence is synthesized)
gttaaccttagagcctgcaaggggcttcctcctggtgggtctggccgtagcctggggaggccacagctccaggccactccagacctcccttcctctgggccttccatgtggtggcaacca

SEQ ID NO: 475683 - DNA, 120 bp, Artificial Sequence
  ENSG00000160223_41 (sequence is synthesized)
ccgcagctgtaagggagggaaaatggagcgtttgttctcgggctgggctggggtctgggggaagccatgggcgtgaagactggagtattatttgatggagaagcggccactcctggagac

SEQ ID NO: 475684 - DNA, 120 bp, Artificial Sequence
  ENSG00000160223_42 (sequence is synthesized)
cggcggcaaacacagaagcacagcgtggaaggtgctggtgtcagcccacacgggtgatggggtcagactcaggagtcacactcaggagtcaccaggctcaaagggcccaggcaccgcaag

SEQ ID NO: 475685 - DNA, 120 bp, Artificial Sequence
  ENSG00000160223_43 (sequence is synthesized)
tcctgctcagccccagacacaatgcattcctgttgccctcgccctcagccaggccccacgcaggccagggagcactggcaaagcttggcaaccctctgggggccagccttcatccaggcc

SEQ ID NO: 475686 - DNA, 120 bp, Artificial Sequence
  ENSG00000160223_44 (sequence is synthesized)
gaaggtggtcagtggcccaccatggcccaggtagaaaactcacggattaagatttcatgcccgactccaaaggcaagagactttattattttattttttttgagccagagtatcgctctg

SEQ ID NO: 475687 - DNA, 120 bp, Artificial Sequence
  ENSG00000160223_45 (sequence is synthesized)
ctttattattttattttttttgagccagagtatcgctctgtcacctaggctggagtgcaatctctgctcattgcaacatctgcctcccgaactcaagcaattctgcctcagcctcccaag

SEQ ID NO: 475688 - DNA, 84 bp, Artificial Sequence
  ENSG00000160223_46 (sequence is synthesized)
agacacttcagagttacaggcggaggtgcagggggagttaaacaaacaaacaaaataaacaggccgggtgcggtggctcatgcc

SEQ ID NO: 475689 - DNA, 89 bp, Artificial Sequence
  ENSG00000160223_47 (sequence is synthesized)
tgcctgtaatcccagcactttaggaggcctaggtgggtggatcacgagatcaggggttcaagaccagcctggccgagatggtaggccag

SEQ ID NO: 475690 - DNA, 87 bp, Artificial Sequence
  ENSG00000160223_48 (sequence is synthesized)
gacaagagcgaaactctgactaaaaaagaaagaaagaaagaaaaaaattagttgggcacggtggcaggcgcctgtaatcccaggtac

SEQ ID NO: 475691 - DNA, 120 bp, Artificial Sequence
  ENSG00000160223_49 (sequence is synthesized)
gatacattgtaatacctcaaatacttgtaagtgaagcaccccagttcccatagagctgccgcactcagaggcttctgtaacctgcctgctcccagcattctatttagggtctggtatgtc

SEQ ID NO: 475692 - DNA, 120 bp, Artificial Sequence
  ENSG00000160223_50 (sequence is synthesized)
cagaatttgcagacacagcaattcctgcagcagcagtgcaccatgtggaaggggccccatgaccagcccactgtgagctcacacgtgatgactgaggcttcttcacacagcagggctctg

SEQ ID NO: 475693 - DNA, 120 bp, Artificial Sequence
  ENSG00000160223_51 (sequence is synthesized)
ggtgtgatacccagggcacacgcgtttgcacaggcacaggccacacaagttctcacatgctcagccccataagccgtgctggacaggcatggccatttacacccaggatcctgctgagaa

SEQ ID NO: 475694 - DNA, 120 bp, Artificial Sequence
  ENSG00000160223_52 (sequence is synthesized)
cagcaaccaactcaccaccctcgcatcatgatccttgccacacaggggctctggtggctttggtggcctgggctgtggctctgctgccagccaccttgagtgaagatccgggttctctgg

SEQ ID NO: 475695 - DNA, 120 bp, Artificial Sequence
  ENSG00000160223_53 (sequence is synthesized)
gtgctactcagctgctatgtggggagctggcccctggggtgatgagggcccttcccaacccgccctcagcccttggacagccaggatcacccggggctgtctgcatacagacttctcagg

SEQ ID NO: 475696 - DNA, 120 bp, Artificial Sequence
  ENSG00000160223_54 (sequence is synthesized)
ggagttctcagcttggacccttatctccccagaatcctggaacctgctccttctgctctcgtgactgactgtgttctctatgcaacttccaataaaacctcttcatttgaaaggaaaaaa

SEQ ID NO: 475697 - DNA, 120 bp, Artificial Sequence
  ENSG00000160223_55 (sequence is synthesized)
ctgggctgtgagtccggagacagagctcactgaatcctggaacctgctccttctgctctcgtgactgactgtgttctctatgcaacttccaataaaacctcttcatttgaaaggaaaaaa

SEQ ID NO: 475698 - DNA, 120 bp, Artificial Sequence
  ENSG00000160223_56 (sequence is synthesized)
gccagctgtctttcagagtttcaaaaaactttcaaaaggcaaaagtcccttgccttgaacaactgttgttcctggagacgcagcgaagccctcgatggtgcgcatggcatttcctgcagc

SEQ ID NO: 475699 - DNA, 120 bp, Artificial Sequence
  ENSG00000160223_57 (sequence is synthesized)
ctccccttggcatgggatggcatcctggtgtgcactttgtcacactgcgatgggattttcccaacatgcacagaagcagagagacgagtgctagacccccgcgctccccagtgcccagcc

SEQ ID NO: 475700 - DNA, 120 bp, Artificial Sequence
  ENSG00000160223_58 (sequence is synthesized)
cgagtgctagacccccgcgctccccagtgcccagccccgaccagggtgtccagggcgggtccaggcaccggcgcccagcccccatggggtgtccggagtgggtccaggcaccggcgccca

SEQ ID NO: 475701 - DNA, 120 bp, Artificial Sequence
  ENSG00000160223_59 (sequence is synthesized)
gcgcccagcccctgtggggtgtccggagtgggtccgggcaccgccagcttctctctgtggcagccactcctgcagctctcgtttgcccctcagttccaggagcaacatagatgtggattc

SEQ ID NO: 475702 - DNA, 120 bp, Artificial Sequence
  ENSG00000160223_60 (sequence is synthesized)
ctgtccaatttgggaaaaatgtccacacacggtcacccacctggcaggtgcctctggctgcaaggggcgctgggcttcgcaggcaggccagccgggctccccgccatgggccaggatccc

SEQ ID NO: 475703 - DNA, 120 bp, Artificial Sequence
  ENSG00000160223_61 (sequence is synthesized)
ctccgagccctgtttgccgcccaggagaaggggttccccggggacagtgggctcagggtgtgcgcagccaccatgctgtggtgtcacctgtggacccaggcgagctgatggccgaccgca

SEQ ID NO: 475704 - DNA, 120 bp, Artificial Sequence
  ENSG00000160223_62 (sequence is synthesized)
gaaacgcacttccaaggccaggtcggcccatccagatgatgcaggaacacagcttgctaaaaacacggccggcctgttcccgtcggagccagtcgaagttccctgaacaggccgctgttt

SEQ ID NO: 475705 - DNA, 120 bp, Artificial Sequence
  ENSG00000160223_63 (sequence is synthesized)
ccgaagctttaaaccctgtgtttccaccaagctgagtcctgagaaaaccgacgtctgcctgcagaagggaaaggggtgcttcatgttcctctctctccttcatctcccttccaaggccac

SEQ ID NO: 475706 - DNA, 120 bp, Artificial Sequence
  ENSG00000160223_64 (sequence is synthesized)
gtgcctgggctgtgagtccggagacagagctcactgtctcaagacatggctttgagcaaactacagatgtgcttcctttcatcttgaaatccagcctgggagcaagctgtgagcctactg

SEQ ID NO: 475707 - DNA, 120 bp, Artificial Sequence
  ENSG00000160223_65 (sequence is synthesized)
ccttccctctcccacctgcagctcccgggccctgtgcacatttgtttatctggatgcttgctgagtgcacaccatgctcacctgtctggtcatctatttcctagaagctttgggggccag

SEQ ID NO: 475708 - DNA, 120 bp, Artificial Sequence
  ENSG00000160223_66 (sequence is synthesized)
atcctgggacgaaccaggcatctccagaattccttccccagcaggcgggttactttgaggccagagcttactcctggctaaagactcactgcaagattgactgtgattgatttctaatct

SEQ ID NO: 475709 - DNA, 120 bp, Artificial Sequence
  ENSG00000160223_67 (sequence is synthesized)
gggggcgacccgcgatggcgcagccccttcaccagatgtgtttgtggtggaagttatccaagtgacacggcaccaaaacctgtgatcggtggcaaatccgtacaggtctgcggcagccgc

SEQ ID NO: 475710 - DNA, 120 bp, Artificial Sequence
  ENSG00000160223_68 (sequence is synthesized)
aattctcacctcctcagaagaaagaattcgaccaaggggcagaaggcagaagaagagaccgagacaagttttagagcaggagtgacatttattaaaaagctttagagcaggaatgaaagg

SEQ ID NO: 475711 - DNA, 83 bp, Artificial Sequence
  ENSG00000160223_69 (sequence is synthesized)
agcaggtgacttgaaggacaggtgtgtggtttgaccttcgacttggggttttatatgttggcacgcttccggggtctggcctg

SEQ ID NO: 475712 - DNA, 120 bp, Artificial Sequence
  ENSG00000160223_70 (sequence is synthesized)
tatgtgtttactggagttgcgcgcctgcttacctgaggcgttgttcccttacctgtcaaatgtccctaggaggccatagaccagttacactccacaattttgccttttaatacacatgct

SEQ ID NO: 475713 - DNA, 120 bp, Artificial Sequence
  ENSG00000160223_71 (sequence is synthesized)
tgagcccactcacccaatgcctgaggtcttatggggaaggatttttctgtctgttgggaggctgcctttccctggcgttggctgtgaccaattattattttagagagacagttaacagcc

SEQ ID NO: 475714 - DNA, 120 bp, Artificial Sequence
  ENSG00000160223_72 (sequence is synthesized)
acccgaccaacactgatggtcgcctgacattcctggttgggagggccctctcctgccctgctcatgtctgaccagctgcctactgtaacagatggaacaataactcaagagaagccatca

SEQ ID NO: 475715 - DNA, 120 bp, Artificial Sequence
  ENSG00000160223_73 (sequence is synthesized)
gagcaggtcacctggcacctcctggcccctgcctcgcctgcattccagaccccctctacacgtccctctacaaattgaagagtggccatttttggaaaggattccggccaatctccccct

SEQ ID NO: 475716 - DNA, 80 bp, Artificial Sequence
  ENSG00000160224_0 (sequence is synthesized)
agacgggcgggcgcacagccggcgcggaggccccacagccccgccgggacccgaggccaagcgaggggctgccagtgtcc

SEQ ID NO: 475717 - DNA, 120 bp, Artificial Sequence
  ENSG00000160224_1 (sequence is synthesized)
gcgcccaccccatggcgacggacgcggcgctacgccggcttctgaggctgcaccgcacggagatcgcggtggccgtggacagcgccttcccactgctgcacgcgctggctgaccacgacg

SEQ ID NO: 475718 - DNA, 120 bp, Artificial Sequence
  ENSG00000160224_2 (sequence is synthesized)
tggtccccgaggacaagtttcaggagacgcttcatctgaaggaaaaggagggctgcccccaggccttccacgccctcctgtcctggctgctgacccaggactccacagccatcctggact

SEQ ID NO: 475719 - DNA, 120 bp, Artificial Sequence
  ENSG00000160224_3 (sequence is synthesized)
tctggagggtgctgttcaaggactacaacctggagcgctatggccggctgcagcccatcctggacagcttccccaaagatgtggacctcagccagccccggaaggggaggaagcccccgg

SEQ ID NO: 475720 - DNA, 120 bp, Artificial Sequence
  ENSG00000160224_4 (sequence is synthesized)
ccgtccccaaggctttggtaccgccacccagactccccaccaagaggaaggcctcagaagaggctcgagctgccgcgccagcagccctgactccaaggggcaccgccagcccaggctctc

SEQ ID NO: 475721 - DNA, 120 bp, Artificial Sequence
  ENSG00000160224_5 (sequence is synthesized)
aactgaaggccaagccccccaagaagccggagagcagcgcagagcagcagcgccttccactcgggaacgggattcagaccatgtcagcttcagtccagagagctgtggccatgtcctccg

SEQ ID NO: 475722 - DNA, 120 bp, Artificial Sequence
  ENSG00000160224_6 (sequence is synthesized)
gggacgtcccgggagcccgaggggccgtggaggggatcctcatccagcaggtgtttgagtcaggcggctccaagaagtgcatccaggttggcggggagttctacactcccagcaagttcg

SEQ ID NO: 475723 - DNA, 120 bp, Artificial Sequence
  ENSG00000160224_7 (sequence is synthesized)
aagactccggcagtgggaagaacaaggcccgcagcagcagtggcccgaagcctctggttcgagccaagggagcccagggcgctgcccccggtggaggtgaggctaggctgggccagcagg

SEQ ID NO: 475724 - DNA, 120 bp, Artificial Sequence
  ENSG00000160224_8 (sequence is synthesized)
gcagcgttcccgcccctctggccctccccagtgacccccagctccaccagaagaatgaggacgagtgtgccgtgtgtcgggacggcggggagctcatctgctgtgacggctgccctcggg

SEQ ID NO: 475725 - DNA, 120 bp, Artificial Sequence
  ENSG00000160224_9 (sequence is synthesized)
ccttccacctggcctgcctgtcccctccgctccgggagatccccagtgggacctggaggtgctccagctgcctgcaggcaacagtccaggaggtgcagccccgggcagaggagccccggc

SEQ ID NO: 475726 - DNA, 120 bp, Artificial Sequence
  ENSG00000160224_10 (sequence is synthesized)
cccaggagccacccgtggagaccccgctccccccggggcttaggtcggcgggagaggaggtaagaggtccacctggggaacccctagccggcatggacacgactcttgtctacaagcacc

SEQ ID NO: 475727 - DNA, 120 bp, Artificial Sequence
  ENSG00000160224_11 (sequence is synthesized)
ctgcaccccctactgtgtgtgggtcctgagggtcagcagaacctggctcctggtgcgcgttgcggggtgtgcggagatggtacggacgtgctgcggtgtactcactgcgccgctgccttc

SEQ ID NO: 475728 - DNA, 120 bp, Artificial Sequence
  ENSG00000160224_12 (sequence is synthesized)
cactggcgctgccacttcccagccggcacctcccggcccgggacgggcctgcgctgcagatcctgctcaggagacgtgaccccagcccctgtggagggggtgctggcccccagccccgcc

SEQ ID NO: 475729 - DNA, 120 bp, Artificial Sequence
  ENSG00000160224_13 (sequence is synthesized)
cgcctggcccctgggcctgccaaggatgacactgccagtcacgagcccgctctgcacagggatgacctggagtcccttctgagcgagcacaccttcgatggcatcctgcagtgggccatc

SEQ ID NO: 475730 - DNA, 120 bp, Artificial Sequence
  ENSG00000160224_14 (sequence is synthesized)
cagagcatggcccgtccggcggcccccttcccctcctgaccccagatggccgggacatgcagctctgatgagagagtgctgagaaggacacctccttcctcagtcctggaagccggccgg

SEQ ID NO: 475731 - DNA, 120 bp, Artificial Sequence
  ENSG00000160224_15 (sequence is synthesized)
ctgggatcaagaaggggacagcgccacctcttgtcagtgctcggctgtaaacagctctgtgtttctggggacaccagccatcatgtgcctggaaattaaaccctgccccacttctctact

SEQ ID NO: 475732 - DNA, 75 bp, Artificial Sequence
  ENSG00000160224_16 (sequence is synthesized)
tcatgtgcctggaaattaaaccctgccccacttctctactctggaagtccccgggagcctctccttgcctggtga

SEQ ID NO: 475733 - DNA, 78 bp, Artificial Sequence
  ENSG00000160224_17 (sequence is synthesized)
gccactgcactccagtctggtcggcccacataacataaatttatcatctcgaccacttttcagttcagtggcattcac

SEQ ID NO: 475734 - DNA, 120 bp, Artificial Sequence
  ENSG00000160224_18 (sequence is synthesized)
atttatcatctcgaccacttttcagttcagtggcattcacatctcatgtaaccattgccaccaccatctgcagagctgttccagcttcctgaatggaaactctggccccatgaaacactc

SEQ ID NO: 475735 - DNA, 120 bp, Artificial Sequence
  ENSG00000160224_19 (sequence is synthesized)
actccccattcccctcccaacccctggcaccctccactctactttctgtctctatgacttctccagggacctcatggaagtggaatcacacagtatctgtccttttgtgtctgtcttatt

SEQ ID NO: 475736 - DNA, 120 bp, Artificial Sequence
  ENSG00000160224_20 (sequence is synthesized)
ttactcagcatggtggccccaaggttcatccatgttgtagcatgtgccgaaatctgcttccttttttaaggctgagtaatattccagcacatggatggactgcattgtgttcatctatgc

SEQ ID NO: 475737 - DNA, 120 bp, Artificial Sequence
  ENSG00000160224_21 (sequence is synthesized)
tttcctcagcagacacctgggtgcttccaccttttggctgttgtgagtaatgctgctatgaatatgtgtgtgcaaatatctgtgtgagtctttgagtaaaatcgctggatcacatggtaa

SEQ ID NO: 475738 - DNA, 120 bp, Artificial Sequence
  ENSG00000160224_22 (sequence is synthesized)
gtcgggagagacctccctgggcctggccccactgccctgtgaggaagggttcatgtggttggtgtacagttccggggcccctggaacgcagcagcctgcaagaaaccgggttttcttccc

SEQ ID NO: 475739 - DNA, 120 bp, Artificial Sequence
  ENSG00000160224_23 (sequence is synthesized)
aatagggatggccccggggggtgtctgttggagaccagatggatggggaacaggtggtcagggcagaatttcaggccctggcagcatgggagcagggcagagactggggagttcaggtac

SEQ ID NO: 475740 - DNA, 120 bp, Artificial Sequence
  ENSG00000160224_24 (sequence is synthesized)
ccagagatgctgctgggggagctgttttgggaaggaggtggctctcaggagggtgctgcaccccagcccagtctgcatgggcgtctcttgcctgtgccagaagaatgaggacgagtgtgc

SEQ ID NO: 475741 - DNA, 120 bp, Artificial Sequence
  ENSG00000160224_25 (sequence is synthesized)
ggtgtggggccagcctgcctggggctgtgggggtctcctctgggtactagacccacacactggaccagcctctcagctccctcctgcctgaaggctgagctccccggagctggtgaagta

SEQ ID NO: 475742 - DNA, 120 bp, Artificial Sequence
  ENSG00000160224_26 (sequence is synthesized)
ggcgggcgggtctcatttcccttttactgatgagaaaccagagcccggcaaagggactacccagcactggaccgccccctccacgccctcccaccgcgggcccctgcccaccggcactca

SEQ ID NO: 475743 - DNA, 120 bp, Artificial Sequence
  ENSG00000160224_27 (sequence is synthesized)
tgggggtacccctgtgctccttgttcctgggctcaggacccaccgctccagcctctgcttctgtggtctcacagctgtctcccacgtgtcctctttataaggacaccagtcattgaactt

SEQ ID NO: 475744 - DNA, 120 bp, Artificial Sequence
  ENSG00000160224_28 (sequence is synthesized)
tcaggtagacgctgtggcggggagatggggctgatggggagacccaggctccaagatggaaggaggaccacgcccctttgcatcctggtggtcccacagcagaccggactgttgctcagg

SEQ ID NO: 475745 - DNA, 120 bp, Artificial Sequence
  ENSG00000160224_29 (sequence is synthesized)
tagccagagtttctgcctgtggttctgctgactttggaggaggagggtgagcactgaagtctccctgtcgggggaccttctgcaaggccagcggtccaggcccacatccccacccgggat

SEQ ID NO: 475746 - DNA, 120 bp, Artificial Sequence
  ENSG00000160224_30 (sequence is synthesized)
gtacagcactccccagtcacctccatccatgtgcatgggccctcctgggccatggggttgcatccttagaaagttctgcctgtgctgctgagaccctccagggtatcggcattcttcaac

SEQ ID NO: 475747 - DNA, 120 bp, Artificial Sequence
  ENSG00000160224_31 (sequence is synthesized)
caggacagcctgtagcatagcgtccttgccccccataccctggccagcctgcagcatcctcgcccgccattccctggccagccgctgaccccatgcaatcaccagtgccatctgaccagg

SEQ ID NO: 475748 - DNA, 120 bp, Artificial Sequence
  ENSG00000160224_32 (sequence is synthesized)
gcacagcagggccgctggtggcagacccaccgtgccatcggggcattccatctcaagtccctgacacggtgtctcctcggtgctggacatgggctgggaacaccaagcacagccagggcc

SEQ ID NO: 475749 - DNA, 120 bp, Artificial Sequence
  ENSG00000160224_33 (sequence is synthesized)
ctggtcttgcacctctggatggtcccaaggcccactgtgttacttcctaaggctgttggttaaattggcacaaactgggaggcttgaaatgacagaaatgccaacatcgaggtgtctcgg

SEQ ID NO: 475750 - DNA, 120 bp, Artificial Sequence
  ENSG00000160224_34 (sequence is synthesized)
aagaccctgatttcaagtaaggtcacactctgaggttctgggtggacgtgaacttcgggggacgctgttgaacaccctggtgtagatccaggacaatccccgggccccagactcgactgg

SEQ ID NO: 475751 - DNA, 120 bp, Artificial Sequence
  ENSG00000160224_35 (sequence is synthesized)
ggtgggggcgggctggaggaatgcaggctgtgggaactccacctgtctctgctagaccccaccctggggcctacacgactgccaaggcaggtcctgctgggcgggtgagccaggaccagc

SEQ ID NO: 475752 - DNA, 120 bp, Artificial Sequence
  ENSG00000160226_0 (sequence is synthesized)
agagccaacgtgtcagcggcgcccaagcggccccagcgggctcgcgtcgccccgctctcctcaccgagccgccaatcggctcaggatccgcccctgacgacgcgggccccgcccctggag

SEQ ID NO: 475753 - DNA, 120 bp, Artificial Sequence
  ENSG00000160226_1 (sequence is synthesized)
acacgcgccgcgcagtcgtcacccgcccgggatcaggaggccgggggcgcccgccggtcgggcctgggcggccgccatgaagctgacgcggaagatggttctgacccgggccaaggcctc

SEQ ID NO: 475754 - DNA, 120 bp, Artificial Sequence
  ENSG00000160226_2 (sequence is synthesized)
ggagctgcacagcgtgcgcaagctcaactgctggggcagccgcctcacagatatctccatttgccaggagatgcccagcctggaggtgatcacgctcagtgtcaacagcatctccaccct

SEQ ID NO: 475755 - DNA, 120 bp, Artificial Sequence
  ENSG00000160226_3 (sequence is synthesized)
ggagcctgtgagccggtgccagcgcctgagtgagctgtacctgcggaggaaccgcatccccagcctggctgagctcttctacctgaaggggctgccgcgtctgcgggtgctgtggctggc

SEQ ID NO: 475756 - DNA, 120 bp, Artificial Sequence
  ENSG00000160226_4 (sequence is synthesized)
cgagaacccgtgctgcggcaccagcccccaccgctaccgcatgaccgtgctgcgcaccctgccgcgcctacagaagctggacaaccaggctgtgacggaggaggagctgtcccgtgcact

SEQ ID NO: 475757 - DNA, 120 bp, Artificial Sequence
  ENSG00000160226_5 (sequence is synthesized)
gagtgagggagaggagatcactgcggccccagagagagagggcacaggccacggcggccccaagctatgctgcacactgagctccctcagctccgctgctgagactggccgggacccgct

SEQ ID NO: 475758 - DNA, 120 bp, Artificial Sequence
  ENSG00000160226_6 (sequence is synthesized)
ggacagcgaggaggaggcaaccagcggcgcccaggatgaacgtggcctgaagccgccttcccggggccagtttccttccctctcagccagggatgcctcgagcagccacaggggcaggaa

SEQ ID NO: 475759 - DNA, 120 bp, Artificial Sequence
  ENSG00000160226_7 (sequence is synthesized)
cgtcctgactgccatcctgctgctgctgcgggagctggatgcagaggggctggaggccgtgcagcagactgtgggcagccggctgcaggccctgcgtggggaagaggtgcaggagcacgc

SEQ ID NO: 475760 - DNA, 120 bp, Artificial Sequence
  ENSG00000160226_8 (sequence is synthesized)
cgagtgaccgcaggacctgaacgccgctccagcctccacggggaccccagcgtcttccccagcccccgggagctggagggtggctgccatggccgcagccccggccccacacaaaagcct

SEQ ID NO: 475761 - DNA, 120 bp, Artificial Sequence
  ENSG00000160226_9 (sequence is synthesized)
gtggagatgcctgtctacaccagtcctgtccccaggactccccttctgtggtctggaggttctaggctggcctgggctcttaaagggaggattttgcaggctgtcctccctaataaaaga

SEQ ID NO: 475762 - DNA, 120 bp, Artificial Sequence
  ENSG00000160226_10 (sequence is synthesized)
ttttcccaaggttgatctggaggtgacgtttcccaaggcatggttgtgacagtcttcctgaaagcaagggccgtttctccacagaatgaggaggtcttcacggatggctttgccgattcc

SEQ ID NO: 475763 - DNA, 120 bp, Artificial Sequence
  ENSG00000160226_11 (sequence is synthesized)
agcccttggtccttggatagatttctgttgggcaagggagacttcgagaatgctggcacccatagcgacatctgccctgagctgctcagcaggcaggcagcagcctcccgcacccatggg

SEQ ID NO: 475764 - DNA, 120 bp, Artificial Sequence
  ENSG00000160226_12 (sequence is synthesized)
agagagttttgttttcttggccgggctgggcaggtgcgccttcctttctctctcctgtgaagaactgcaggagggccctcagctgtgaggttgtggatgaacaggcctgttcgccctggg

SEQ ID NO: 475765 - DNA, 120 bp, Artificial Sequence
  ENSG00000160226_13 (sequence is synthesized)
gtccgggcctggcacaggaagcagctagactaggggagtccttggagcatctgagaggggttttctttcctctgggaagagtcgcaagtcttatgaggatgccacaatctgggcagtgac

SEQ ID NO: 475766 - DNA, 120 bp, Artificial Sequence
  ENSG00000160226_14 (sequence is synthesized)
ccgtggccctggggaccttcctagtgccccccaaaaccaaggaagcattcacgtgagatggggagtcagccttccagctggtgtgtaggaaagccaggtccctgggcccttgtcccatgt

SEQ ID NO: 475767 - DNA, 120 bp, Artificial Sequence
  ENSG00000160226_15 (sequence is synthesized)
ggggttgagatccagatctccatgagatattcccatcctccgccgagcggtgatgcgtgaccgtgtgtgcaggccgctgttctcccaagctcggggccatgccgtgccaccgtcaccaga

SEQ ID NO: 475768 - DNA, 120 bp, Artificial Sequence
  ENSG00000160226_16 (sequence is synthesized)
gccagctgcagcactggggcagccactgtcgccggacttggggaagcccagggtgaagacagtcactcatccgtgcaagctctccagaagggatgcaagctctccagaaggggtgtgatc

SEQ ID NO: 475769 - DNA, 120 bp, Artificial Sequence
  ENSG00000160226_17 (sequence is synthesized)
tctgagcagtggggagtggagtcaccactcgggacatagagggtggacagttcaggcctgtgtctgcctccttgggactgtggagtgggtgccctcagtaaagcgctttgttggaatggt

SEQ ID NO: 475770 - DNA, 120 bp, Artificial Sequence
  ENSG00000160226_18 (sequence is synthesized)
cttccctctcagccagggatgcctcgagcagccacaggggcagggtgagtggcgggccgctaggggccgcggctgcctctgcccactgcacccactgcacagaaaccgtggggagggagc

SEQ ID NO: 475771 - DNA, 120 bp, Artificial Sequence
  ENSG00000160226_19 (sequence is synthesized)
atggagcctcacagggccccgtggggagggagcatggagcctcacagggccttgaagagctgtgccccagggggagctgcgtgtgcgggtctgtgaatgcgcacacacgtgtaacacgtg

SEQ ID NO: 475772 - DNA, 120 bp, Artificial Sequence
  ENSG00000160226_20 (sequence is synthesized)
ccccgcacggagccgtcctggcccctcagcctctcctgctgtcctggtctgtggaatgtgggcccgggccctgctgggctgagggcaacaggagtcacgtggaagaggtgccacacacgc

SEQ ID NO: 475773 - DNA, 120 bp, Artificial Sequence
  ENSG00000160226_21 (sequence is synthesized)
tcagcagagtgaccgcgccgtgtcaactggcctcaccgtgcaggcgggtgtgggggtcagcgagagcagacgcttcctcccaggggtgtccgcagactgcccagagggcagccgcctcac

SEQ ID NO: 475774 - DNA, 120 bp, Artificial Sequence
  ENSG00000160226_22 (sequence is synthesized)
agattagagatggagtttcactgtgtcggccaggctggtctcaaaccccctgagttcaggtgatccacctgcctcagcctcgcaaagtattggaattacagatctccatttgccaggaga

SEQ ID NO: 475775 - DNA, 120 bp, Artificial Sequence
  ENSG00000160226_23 (sequence is synthesized)
tttgagttcagggcctggccttcctacagctctctcctcggcccaggtcctgctgcacgtgacttgtgacatccgatttaggcttctcaggagagggcagggacacaggtcccatgagtg

SEQ ID NO: 475776 - DNA, 80 bp, Artificial Sequence
  ENSG00000160226_24 (sequence is synthesized)
ggcgagggcggcgaaggagccgcgggtgagggaggggaggaggccgggggtcggggtcgcctgggcccccccccatttcc

SEQ ID NO: 475777 - DNA, 120 bp, Artificial Sequence
  ENSG00000160226_25 (sequence is synthesized)
ccatttcccggcccgcctttgccccgggtgccctgtgggctgggtctgttgtctggggttgccagcagtcactgggaccaagtcgaataggagagagaactgagctttccaggactgagt

SEQ ID NO: 475778 - DNA, 120 bp, Artificial Sequence
  ENSG00000160226_26 (sequence is synthesized)
caggaaacacgttggtaatcagtactgggggcggccgttcccagggtactcctagcaggtgacaggaagggacgtgggtgcggtgggacccaggcaggctgaaaggcaggtaatgctgag

SEQ ID NO: 475779 - DNA, 120 bp, Artificial Sequence
  ENSG00000160226_27 (sequence is synthesized)
gaggtgatcacgctcaggtacctcgctcctgctgtcatgctcagcctggggcctggaagccggggcagagcctcacgtccctccagtgggacccagcactgtgacataacctggaaacct

SEQ ID NO: 475780 - DNA, 120 bp, Artificial Sequence
  ENSG00000160226_28 (sequence is synthesized)
ccaacacagactgagggcggcttccagaaggggaggggccgggacagcgagagctgggcctaccctgtggcccccatgttcagccctccttcctcagagcctcacctgggcctcctgatg

SEQ ID NO: 475781 - DNA, 120 bp, Artificial Sequence
  ENSG00000160226_29 (sequence is synthesized)
gctcctgtcccctgcctgccctgctgtacgcctgcccacccttggcctgtgtgctccgataagccattgctgtgttcactgggccagtcggtggtggagccctcctaaggattcacggtg

SEQ ID NO: 475782 - DNA, 120 bp, Artificial Sequence
  ENSG00000160226_30 (sequence is synthesized)
gcccgccctggccgcccccacggtggccacatctgccctgggacccccagagtcctggcctcttctgccccccagtgccaccactgcctaccagtttctctgcaccccatgacctgtgcc

SEQ ID NO: 475783 - DNA, 120 bp, Artificial Sequence
  ENSG00000160226_31 (sequence is synthesized)
cgtcttctggggtcactgccctcccagcagactaagggaagcttgaatgaacaaatgttactggactttcaggcagttggggtgtatttgggggctctggggaagagaagagctcccttt

SEQ ID NO: 475784 - DNA, 120 bp, Artificial Sequence
  ENSG00000160226_32 (sequence is synthesized)
atccctgaattccctcctgcctactgtgggacccacggagggagcagacgctcatggctcaccactgcccaccagacgctggatgggcgccttctgtgggtttccgcatttaaaagctca

SEQ ID NO: 475785 - DNA, 120 bp, Artificial Sequence
  ENSG00000160226_33 (sequence is synthesized)
caagggtttaaaccctgtggggaaggcccacccctctggcagctcagaagtctctagggcttgccctctgagagtgggtattgcaggcccctggtccctgactgtgacctaccttcttga

SEQ ID NO: 475786 - DNA, 120 bp, Artificial Sequence
  ENSG00000160226_34 (sequence is synthesized)
tctcacaggcagccacggggtaggccagcccctgcccatcctccgtaatgccctctgaggttggcattgccatgttgatgcccgtgcccagcctgctgcccgccatgggctgaggccagt

SEQ ID NO: 475787 - DNA, 120 bp, Artificial Sequence
  ENSG00000160226_35 (sequence is synthesized)
ccatctggtgttcaggcatccccagcgcgggcaccagcctgtcctgcccgagccttgctgaatgaatgaaatgggcttggaggcatgctcatgggtcaaatctcagccctcccatctatt

SEQ ID NO: 475788 - DNA, 120 bp, Artificial Sequence
  ENSG00000160226_36 (sequence is synthesized)
ggctggctaaccttgggcgaggcatggccctctctgtgcctcagtttcctttctgtaacatggaggtattacaagtgcccaccccacagggagatgaggaggagatggagcccgagtcca

SEQ ID NO: 475789 - DNA, 120 bp, Artificial Sequence
  ENSG00000160226_37 (sequence is synthesized)
gaggttgagcaggggtgcgcgtgcccgcccagaggttgagcggggggggggggggggtgcgcgtgcccgcccagaggttgagggggggtgcgcgtgcctgccgcggggctcgtttcacta

SEQ ID NO: 475790 - DNA, 120 bp, Artificial Sequence
  ENSG00000160226_38 (sequence is synthesized)
gtcaggcgacacagtgaggctgggatttcaggcctgcctccgaaaggcttacctgacagggaaacgtggagcttgtggttcccacggtggcaggaagcttggggcggggctgtggatcca

SEQ ID NO: 475791 - DNA, 120 bp, Artificial Sequence
  ENSG00000160226_39 (sequence is synthesized)
gccctatccctgccgctcactgagtcacccaggggccacagggcctccgagcatcaggccgctcgtgtgtggggccatttctgtcacatctcgggagggacaggaccccaggggtgttga

SEQ ID NO: 475792 - DNA, 120 bp, Artificial Sequence
  ENSG00000160226_40 (sequence is synthesized)
gcggggactccgcagcccatccctgtcccccagggtcctcccacggggagtgaatggggcttcccgtgagctgcgtctctgggaagtgagggacagggattatccggggggagtgtctgt

SEQ ID NO: 475793 - DNA, 120 bp, Artificial Sequence
  ENSG00000160226_41 (sequence is synthesized)
tctcatccatattctctgggagtgactcagtgcccaggtagtgatttcagtggcaggtccatgttttgcccaacagcggatgtgccagggagcaggagagggggtgagccaggccccgtg

SEQ ID NO: 475794 - DNA, 120 bp, Artificial Sequence
  ENSG00000160226_42 (sequence is synthesized)
ccctggcacagagaaggctcacagcaccagagctcgtgaggtgcagggagcccctggtggggggggtggcctagggccacagtgactggaatggtttgtgggcacggccatcagtgcccg

SEQ ID NO: 475795 - DNA, 120 bp, Artificial Sequence
  ENSG00000160226_43 (sequence is synthesized)
tatggccttgggcctgggggccgtggaggggccacagggctgactctgcagtgagacgccggcgcctcccagggcagttggcagcgggtcacgaacgcatttgacagaagctgggcactt

SEQ ID NO: 475796 - DNA, 120 bp, Artificial Sequence
  ENSG00000160226_44 (sequence is synthesized)
ctctcctgcttggcagatcacacccgctgctggtgcctgtggtgggggcatcgggatgtgatctctgttaggcatctgccatccggcacagggcctgaccccatggtcaggagctctccc

SEQ ID NO: 475797 - DNA, 120 bp, Artificial Sequence
  ENSG00000160226_45 (sequence is synthesized)
ccggcatttgtgtgttcgggtgccccccaccctgcccctgaagccctgggtggaaggtgttacagctggggagccccagggtgccgggagggcgccccacaggtgaagtaagtgccgggc

SEQ ID NO: 475798 - DNA, 120 bp, Artificial Sequence
  ENSG00000160226_46 (sequence is synthesized)
tctccaggagctgccatctgtagcccctgacctcccaggagttgcctcccttctcttgcccccgtgtgccaggtgggatttgtatgagcccctcctttgcttggatgcgacccgcagaca

SEQ ID NO: 475799 - DNA, 120 bp, Artificial Sequence
  ENSG00000160226_47 (sequence is synthesized)
gggtttgcagaggcccccccggtgccacgagccccctgaccctcacacgcctttgtctccctctcagcagcggcgcccaggatgaacgtggcctgaagccgccttcccggggccagtttc

SEQ ID NO: 475800 - DNA, 120 bp, Artificial Sequence
  ENSG00000160229_0 (sequence is synthesized)
gtctctccctgcagctggagctccaggtcgtctgttcactgctctctgtcttcttctcctagaggcccagcctctgtggccctgtgtcctgcaggtattgggagatccacagctaagacg

SEQ ID NO: 475801 - DNA, 85 bp, Artificial Sequence
  ENSG00000160229_1 (sequence is synthesized)
cctgtgtcctgcaggtattgggagatccacagctaagacgccaggaccccctggaagcctagaaatggggccattgcaatttaga

SEQ ID NO: 475802 - DNA, 120 bp, Artificial Sequence
  ENSG00000160229_2 (sequence is synthesized)
atgttagagaactacagaaacctggtctttcttggtattgttgtctcaaagccagacctcatcacccatctggagcaaggaaaaaaaccttcgactatgcagagacatgagatggtagcc

SEQ ID NO: 475803 - DNA, 120 bp, Artificial Sequence
  ENSG00000160229_3 (sequence is synthesized)
aacccctcagttttgtgttctcattttaaccaagacctttggccagagcagagcataaaagattctttccaaaaactgatactgagaaggcataaaaaatgtggacatgataatttgcag

SEQ ID NO: 475804 - DNA, 120 bp, Artificial Sequence
  ENSG00000160229_4 (sequence is synthesized)
ttaaaaaaaggctgtgaaagtgtggataagtgtaaagtgcacaaaagaggttataatggacttaaccaatgtttgacaactacccaaagcaaaatgtttcaatgtgataaacatgggaaa

SEQ ID NO: 475805 - DNA, 120 bp, Artificial Sequence
  ENSG00000160229_5 (sequence is synthesized)
gtctttcatcaattttcaaatacaaacagacataagataagacatactggaaaaaacccttgcaaatttacagaatgtggcaaagcttttaaccggtcctcaacctttactacacataag

SEQ ID NO: 475806 - DNA, 82 bp, Artificial Sequence
  ENSG00000160229_6 (sequence is synthesized)
ttaaccggtcctcaaccttttaaatgtatagaatgtggcaaagccttcaaccggtcctcacaccttactacacataagataa

SEQ ID NO: 475807 - DNA, 76 bp, Artificial Sequence
  ENSG00000160229_7 (sequence is synthesized)
taagataattcatactggagagaaacggtacaaatgtgaagactgtggcaaagcctttaaccgctcctctaacctt

SEQ ID NO: 475808 - DNA, 63 bp, Artificial Sequence
  ENSG00000160229_8 (sequence is synthesized)
tacaaatgtgaagaatgtggcaaagtttttaagtacctttcttcccttaaagccttcaactgg

SEQ ID NO: 475809 - DNA, 80 bp, Artificial Sequence
  ENSG00000160229_9 (sequence is synthesized)
tacaaatgtgaagaatgtggcaaaggctttaagtactcctctacccttactaaacataaaataatgaagcctttaagtac

SEQ ID NO: 475810 - DNA, 66 bp, Artificial Sequence
  ENSG00000160229_10 (sequence is synthesized)
gttcccttactgcactgtttaagcactcctctcccctttctaaacataagagaattcatactggag

SEQ ID NO: 475811 - DNA, 120 bp, Artificial Sequence
  ENSG00000160229_11 (sequence is synthesized)
gccttcagtcggtcctctattcttactacacataagataattcacactggagagaaaccctacgaatgtgaagactgtggcaaagcctttaaccgctcctctaaccttactaaacacaag

SEQ ID NO: 475812 - DNA, 120 bp, Artificial Sequence
  ENSG00000160229_12 (sequence is synthesized)
aaaattcatactggagagaagccttacaaatgtgaagaatgtggcaaggcctttaagtgctcctctattcttactacacataagagaattcatactgcagataaaccctacaaatgtgaa

SEQ ID NO: 475813 - DNA, 120 bp, Artificial Sequence
  ENSG00000160229_13 (sequence is synthesized)
gaatgtggcaaagactttaagtactcctctacccttactagacataagaaaattcatactggagggaaaccacacaagtgcaataaatgtggcaaagcctttatttcatcctcaaacctt

SEQ ID NO: 475814 - DNA, 120 bp, Artificial Sequence
  ENSG00000160229_14 (sequence is synthesized)
caaaccttagtagacatgagataattcatatgggagggaatccctacaaatgtgaaaatgtggcaaagccttagacactcctctacccttactagacataagataattcatactggagag

SEQ ID NO: 475815 - DNA, 120 bp, Artificial Sequence
  ENSG00000160229_15 (sequence is synthesized)
tgagtttgatgaatgtgggaaagactttaaccagctatcaacttttactaaatatgagaatttatggaacacaaacactacaaatataaagaatgtgacaaagcttttaggaagttctca

SEQ ID NO: 475816 - DNA, 120 bp, Artificial Sequence
  ENSG00000160229_16 (sequence is synthesized)
acccttattacacataattcatactggatagaaaccctacacctgtgaagaatgtggcatagcctataacaattttcaatcaattctttttttttttttttgagatgaagtttcatgctt

SEQ ID NO: 475817 - DNA, 85 bp, Artificial Sequence
  ENSG00000160229_17 (sequence is synthesized)
gttcaagccattttcctgcctcagcttgtctagtagatgagattatggggggtggagccaagatggctgaataggtacagctcct

SEQ ID NO: 475818 - DNA, 88 bp, Artificial Sequence
  ENSG00000160229_18 (sequence is synthesized)
atctcactagggagtgccagacagtggctgcaggacagtgggtgcagtgcactgtgcatacgaagcgcaaggagtcagggagttccct

SEQ ID NO: 475819 - DNA, 120 bp, Artificial Sequence
  ENSG00000160229_19 (sequence is synthesized)
tgacagatggcacctggaaaattgggttactcccaccctaatactgcgcaattccaatgggcttaaaaaatggcacaccagattatatcctgcagctggctcagagggtcctatgcccat

SEQ ID NO: 475820 - DNA, 120 bp, Artificial Sequence
  ENSG00000160229_20 (sequence is synthesized)
gcacaccccagtaggggcagactgacacttcacacggctgggtactcctcatataaaacttccagaggaccgatcaggcagcagcatttgtggttcatgaaaatccgctgttctacagcc

SEQ ID NO: 475821 - DNA, 120 bp, Artificial Sequence
  ENSG00000160229_21 (sequence is synthesized)
ttgttttttgtttttgtttttgttgttttaaattttgctgtcacaaaggggcatattgtcttatgcttctaaattctctaaaaattctacttttctctcagtgagcttccttcacattca

SEQ ID NO: 475822 - DNA, 120 bp, Artificial Sequence
  ENSG00000160229_22 (sequence is synthesized)
cacattcacagtgagagccaaagtcctcttcatgacatataagagacagcacaatccagctgctttttcattgttttggggacacacaaatatcttcctaattttgagaaactgaaacta

SEQ ID NO: 475823 - DNA, 120 bp, Artificial Sequence
  ENSG00000160229_23 (sequence is synthesized)
ttttttagttttctttttgtatccggtctgaaatttgtgagagtagtagtttctgttgcatttttttttgttcatttttgtgcacagtccattctatttttattactatatagtcttgaa

SEQ ID NO: 475824 - DNA, 120 bp, Artificial Sequence
  ENSG00000160229_24 (sequence is synthesized)
atatagtttgaaattgtaagtacgatattctgttttcttctttttcctcaagattgctttggctattcaaagtttattttagtttcatgtaaattttagaattgtattttccattattgt

SEQ ID NO: 475825 - DNA, 120 bp, Artificial Sequence
  ENSG00000160229_25 (sequence is synthesized)
agtttcatgtaaattttagaattgtattttccattattgtaaaaaaaaacactgcaattttaataggaagattattgagtctgtaaatcactttggataatatgattctttaataatatt

SEQ ID NO: 475826 - DNA, 70 bp, Artificial Sequence
  ENSG00000160229_26 (sequence is synthesized)
agtgatcgccaaggtaatttttgtgtttttagtagaaatggtatttcaccatgttggccaggctcgtctc

SEQ ID NO: 475827 - DNA, 80 bp, Artificial Sequence
  ENSG00000160233_0 (sequence is synthesized)
ggagtcgcggcctccccagctagtggtcgcgggcgcggtcgcaggggcagcggggtggccgccgcgccaggcgtggagct

SEQ ID NO: 475828 - DNA, 120 bp, Artificial Sequence
  ENSG00000160233_1 (sequence is synthesized)
agcagcctccggccgccgccgcgcagagctgccagagtggactgcactgcttctcccagcggggcaggatggcggtttcatgtctggttggataaggccttgcctgcggaaaccagctcc

SEQ ID NO: 475829 - DNA, 120 bp, Artificial Sequence
  ENSG00000160233_2 (sequence is synthesized)
atccccaggccctagcagaggctcgcgtgtccccgtccccaggtcaggtcaggatgggcaccgtgcgcccacctcgcccctcgctcctgctggtctccacccgggagtcttgtctcttcc

SEQ ID NO: 475830 - DNA, 120 bp, Artificial Sequence
  ENSG00000160233_3 (sequence is synthesized)
tcctcttctgcctgcacctgggcgccgcctgcccacagccctgccggtgccctgaccacgcaggggctgtggctgtcttctgcagcttgcggggccttcaggaggtccccgaggacatcc

SEQ ID NO: 475831 - DNA, 120 bp, Artificial Sequence
  ENSG00000160233_4 (sequence is synthesized)
cggccaacaccgtgctcctgaagctcgatgccaacaagatctcccacctcccggacggggccttccagcacctgcaccggctcagggagctggatctgtctcacaacgccatcgaggcca

SEQ ID NO: 475832 - DNA, 120 bp, Artificial Sequence
  ENSG00000160233_5 (sequence is synthesized)
tcggctccgccaccttcgcgggcctggccgggggcctgcggctgctggacctgtcttacaaccgcatccagaggatccccaaggacgccctgggcaaactcagcgccaagatacgcctgt

SEQ ID NO: 475833 - DNA, 120 bp, Artificial Sequence
  ENSG00000160233_6 (sequence is synthesized)
cccacaaccccctgcactgcgagtgcgccctgcaggaggccctgtgggagctgaagctggaccccgactctgtggacgagatcgcctgccacacctcagtgcaggaggagtttgtgggga

SEQ ID NO: 475834 - DNA, 120 bp, Artificial Sequence
  ENSG00000160233_7 (sequence is synthesized)
agcctctggttcaggctctggatgcgggtgccagcctctgcagcgtcccccacaggaccacagacgtggccatgctggtcaccatgttcggctggttcgccatggtgatcgcctacgtcg

SEQ ID NO: 475835 - DNA, 120 bp, Artificial Sequence
  ENSG00000160233_8 (sequence is synthesized)
tgtactatgtgcgccacaaccaggaggatgcccggaggcacctggagtacctgaagtctctgcccagcgcccccgcctccaaggaccccatcggcccggggccctagcgcctgttccggc

SEQ ID NO: 475836 - DNA, 120 bp, Artificial Sequence
  ENSG00000160233_9 (sequence is synthesized)
agacccccgccggtggctgctgtcacttttgtagtaggtggtgactgatgctgcttttgctcttccctgaggcaggtgtcacagccatgtgtgctccccactgttgcactcaggcacagc

SEQ ID NO: 475837 - DNA, 120 bp, Artificial Sequence
  ENSG00000160233_10 (sequence is synthesized)
agcacctccaggctgggtggttttgccacacatccgtgtgacggatgaggaacctgaagcttagaggaacggaatgactgcccgtgacgataccatcaggaaattatcccagtggaactt

SEQ ID NO: 475838 - DNA, 120 bp, Artificial Sequence
  ENSG00000160233_11 (sequence is synthesized)
caacccgggctgtccatcgtgacattccgcctccttccaccatgccagcctctcccacacggggccctgcaggctgtggatatgcactcagaggactaagggggtgctctgcaagcgaga

SEQ ID NO: 475839 - DNA, 120 bp, Artificial Sequence
  ENSG00000160233_12 (sequence is synthesized)
gggttcaccagagggagcttgggtgcaggttcacccgctgaaggcgctgataagtcctgtgctgaggagctgacttgcccttgtttacttacaaagtgcattgtaggtaaacatgagcct

SEQ ID NO: 475840 - DNA, 120 bp, Artificial Sequence
  ENSG00000160233_13 (sequence is synthesized)
tgttccagtgttcgaagtacattggaacgtaagccctgtttccagagcaaagtaacagagaccaggtttttctagagagctaagtgggatgtgtagctcaaacaaactgtcctacccttt

SEQ ID NO: 475841 - DNA, 120 bp, Artificial Sequence
  ENSG00000160233_14 (sequence is synthesized)
tttattctcaaatgtttgttttgagtaaccgtagtgccaaaatttcagttcagtaatggggtgaacaatatggagagagacctgggaaaagtccagggtagcttgcccaggggaagacag

SEQ ID NO: 475842 - DNA, 120 bp, Artificial Sequence
  ENSG00000160233_15 (sequence is synthesized)
gcttgcccaggggaagacagcagccacatacctgggggcccgcctgcttcctgcccctctgggtgtgcctgatgcgggaggccctgccccagggcgatctcagctcactgcaacctttgc

SEQ ID NO: 475843 - DNA, 87 bp, Artificial Sequence
  ENSG00000160233_16 (sequence is synthesized)
tgtgccttgctttttctactcactaagatataaaacagctctttttccaaggcccggagtactggggattgatgtttcaaggccaat

SEQ ID NO: 475844 - DNA, 120 bp, Artificial Sequence
  ENSG00000160233_17 (sequence is synthesized)
caaggcccggagtactggggattgatgtttcaaggccaatcaatgggatgcttcgttttctccagcaacaggaactctctcttttcacctttgctgccaggaatctcagagataatttag

SEQ ID NO: 475845 - DNA, 120 bp, Artificial Sequence
  ENSG00000160233_18 (sequence is synthesized)
tgctcaatttactaaccttacttcacattcaggttagatgttacctccacctatatgatagtaattcctaattttattttttattgtcctttttatgagtgtttatattttaaagtactt

SEQ ID NO: 475846 - DNA, 120 bp, Artificial Sequence
  ENSG00000160233_19 (sequence is synthesized)
tgagtatttttggggggggtgtaaatgagtgatcagtgtacattgtgtgtggactgaagtgtaggtatgtagagatgcttcgccaaacagatgcttaaaaatgaatggaagttgagggtg

SEQ ID NO: 475847 - DNA, 120 bp, Artificial Sequence
  ENSG00000160233_20 (sequence is synthesized)
gtttctctttggaaagtatcaggtgacttggaaggtgagagcctgtccagggtgtgtgcactggttctgaggtaccccgtgtgtgcagtgtgagtcacgggggtgtctgtgttgtgaggt

SEQ ID NO: 475848 - DNA, 120 bp, Artificial Sequence
  ENSG00000160233_21 (sequence is synthesized)
gcttggtaggctttgctctgcccacagtgcagacgcggggtgggtgaggggccaggcccagtgtatgagtggaggcagccccaggctccgcctgcttccctcacgccacgctgcctgagt

SEQ ID NO: 475849 - DNA, 120 bp, Artificial Sequence
  ENSG00000160233_22 (sequence is synthesized)
gtcgccatgctcggaggacagagacctccacggaaactggcagcgccactcacccttccagtgagagctagaaccaagtgccagcccccgggggtgcacccgtgctggtgtggggccacg

SEQ ID NO: 475850 - DNA, 120 bp, Artificial Sequence
  ENSG00000160233_23 (sequence is synthesized)
tgccctgggcccgtggggatttccttccagaggacacgtggctgaaagcataggataaggatgtataggtgaatgactggtgccatccctggctgtctgatagatgcaggtagggcaggt

SEQ ID NO: 475851 - DNA, 120 bp, Artificial Sequence
  ENSG00000160233_24 (sequence is synthesized)
gaactgttgctggcctggccagcaggcctagggtcacatggtgattggcgtcctcctgccaccccttctccatgccagggtgcctgtggtgggtttgcccagcacgcatgaccccaggtc

SEQ ID NO: 475852 - DNA, 120 bp, Artificial Sequence
  ENSG00000160233_25 (sequence is synthesized)
ccaaggagagtgtgaactgaggcctgggtggtgaaggcagggcctctcctcagccctgtgtcctgtgggtgccagccagtcccatctcgcattttggggtgccctttccctgctgccagg

SEQ ID NO: 475853 - DNA, 120 bp, Artificial Sequence
  ENSG00000160233_26 (sequence is synthesized)
ggactcttcatttgtccttaccctagaatcagcccagacactggacatcacccagacgtggcccttcaggaggtgcacagggcaggggcaggcccgtccctccctgccccaatttgctgg

SEQ ID NO: 475854 - DNA, 120 bp, Artificial Sequence
  ENSG00000160233_27 (sequence is synthesized)
gctgcctcagcccagggtctggccttctccttggtgaaggtctgctgggcccctgtccacctcctgctgggaggaggagatggggagaggaccaggaggacaccggaggccctgtcccct

SEQ ID NO: 475855 - DNA, 120 bp, Artificial Sequence
  ENSG00000160233_28 (sequence is synthesized)
gcactgtgagctcagtcaggtccatgagctgcccaccgtcctggccttactgtgccccctgccccaccaacataggtgaaagcacctcccctctaaggaagaccatagagaccccaacac

SEQ ID NO: 475856 - DNA, 120 bp, Artificial Sequence
  ENSG00000160233_29 (sequence is synthesized)
tgtgggaccccaaagctccttcatgctcactggagctcccaccgtgggtgcttgcaagtcctcagcgctcccggggtacagccctccccttcctgccctctaatgtcctcccctcccttg

SEQ ID NO: 475857 - DNA, 120 bp, Artificial Sequence
  ENSG00000160233_30 (sequence is synthesized)
cccttccctccacttcctttctctgccgtcccctcctctcccatcttgtgacctctttactggcggggcctggagcccatgatggacacttgcggaaggaggggtggcggagcacccctg

SEQ ID NO: 475858 - DNA, 120 bp, Artificial Sequence
  ENSG00000160233_31 (sequence is synthesized)
agatgacatcgctgcctgccccagagcaccccgcctctccctgtgactcagttctttgcagcccagatgtgagcatgtgcaccctgggacctgctgcccgttgggatgcccaggccaaat

SEQ ID NO: 475859 - DNA, 120 bp, Artificial Sequence
  ENSG00000160233_32 (sequence is synthesized)
cagcccctctgcctccatgctgcactgattgcaagagtttcccacatctgcagaggccgtgggctcagccccacaccagccaggccaccagtgttgatagcggtgaggcggggacaaagg

SEQ ID NO: 475860 - DNA, 120 bp, Artificial Sequence
  ENSG00000160233_33 (sequence is synthesized)
gaatgtctcagttcacagtgtggacatggtggaggtctcggccttgcgagacaaggcagggggaggggataggaaattgggggtattctgtgactcctgggccaccggggagccagaatc

SEQ ID NO: 475861 - DNA, 120 bp, Artificial Sequence
  ENSG00000160233_34 (sequence is synthesized)
ttccagccagactggatgggcagggcttagcttcctgatgccgcccattcaccactttcaccccgggaacctacctgggcatcatgggaggcagagcctgaaccccaacccaaccctaac

SEQ ID NO: 475862 - DNA, 120 bp, Artificial Sequence
  ENSG00000160233_35 (sequence is synthesized)
tctaatgctaacccctaaaccatcccccaccctaacccaatcctcgccctaaccctaatgctaacccctgacccgacccaatcctaaccctgatgctaacccctgactcaactctcaccc

SEQ ID NO: 475863 - DNA, 120 bp, Artificial Sequence
  ENSG00000160233_36 (sequence is synthesized)
taaccctgatgctaacccctgacccaatcctcaccctaaccctgatactaacccttaacctaacccaacccagccctaactccaactctaaagctaactcctaaccctaggagaggagcc

SEQ ID NO: 475864 - DNA, 120 bp, Artificial Sequence
  ENSG00000160233_37 (sequence is synthesized)
caggccgggccctctccctgctggtttcctgttgggctttggagccccagatgcctgcccagaggcttccttgtgcggggtggggtccagcagtgggggatgggcccagagctggtatag

SEQ ID NO: 475865 - DNA, 120 bp, Artificial Sequence
  ENSG00000160233_38 (sequence is synthesized)
ccaccagcagagccatcctgatccacaggaccatccctggtggggtggggccccctggggcaggaaggccactgaggccagggagactcccaggcccactcacggcgcaggccccacagg

SEQ ID NO: 475866 - DNA, 120 bp, Artificial Sequence
  ENSG00000160233_39 (sequence is synthesized)
agctggctggaggctatgggtgcggggcgtgggcctgccgggggttgcgtgacaggcagtggggagtgggttgtgctggcagctgtgggtgagtgaggaggctcctctcatgaagggccc

SEQ ID NO: 475867 - DNA, 120 bp, Artificial Sequence
  ENSG00000160233_40 (sequence is synthesized)
tggggaagtggaatctggccctgagagacccccggcctcctctgcaggggctgctggcaggaggggaaccggggaccacctcccgccacagagcctggggcccccagccttgcctacagg

SEQ ID NO: 475868 - DNA, 120 bp, Artificial Sequence
  ENSG00000160233_41 (sequence is synthesized)
gagggtagatgagagtgtaaactgcatatgaggttgggctaaacctggacatgtgtttcataaccaaagcagccaggaatctccggctctgcccagtgatcatctgggcaggacatgggg

SEQ ID NO: 475869 - DNA, 120 bp, Artificial Sequence
  ENSG00000160233_42 (sequence is synthesized)
acgagtgtccaggctgaagtcagggcccggccagcagagggccattttgtattgagctccacagctggtcacattctgtggaatgtgcagacgtgcacggcccatcagacagggtctgga

SEQ ID NO: 475870 - DNA, 120 bp, Artificial Sequence
  ENSG00000160233_43 (sequence is synthesized)
gtggggctgccgtcttgggcagctcctcccgggtgtctgcaaaatgcagaggtcaccagagccaaggcagcaaggcaaggagcccggcttctaaggaactctgagcaggtgtggtccatg

SEQ ID NO: 475871 - DNA, 120 bp, Artificial Sequence
  ENSG00000160233_44 (sequence is synthesized)
gctgggaggcagctggccccacagcacatagcacggagggcggcgcggagtcctggacgctcttggcaggtcccctcatggaggatgtgggggattggcttaggcctggtctggctggcc

SEQ ID NO: 475872 - DNA, 120 bp, Artificial Sequence
  ENSG00000160233_45 (sequence is synthesized)
ttcctggaccgcagtggccaggagctgaaaaccgtgaccccagtctccctgcagctgttcttgatgggatttctgttcgccagtcagatgcatttgcacaggacttggatcctgaactgt

SEQ ID NO: 475873 - DNA, 120 bp, Artificial Sequence
  ENSG00000160233_46 (sequence is synthesized)
gtaacctggagaggcaggtgtgagcgggccatgctgctggcccagcctgtgccggtgtctgtttctgttgtctctcggcccttctgtgagccctcagtaaagctcttcgtgcttcagtca

SEQ ID NO: 475874 - DNA, 120 bp, Artificial Sequence
  ENSG00000160255_0 (sequence is synthesized)
atccagggtgaggaaggcagcccacacttttcttggagacacatccccaaagaagtcctcacgtggctccgtttgggcagaaaccatgaattgaacgggaaaagaaatatgtcaagtatc

SEQ ID NO: 475875 - DNA, 120 bp, Artificial Sequence
  ENSG00000160255_1 (sequence is synthesized)
agaaagaagagtggcatgctttgacagcaagtggactccgagtccagggcagagcctcagttagggacatgctgggcctgcgccccccactgctcgccctggtggggctgctctccctcg

SEQ ID NO: 475876 - DNA, 120 bp, Artificial Sequence
  ENSG00000160255_2 (sequence is synthesized)
ggtgcgtcctctctcaggagtgcacgaagttcaaggtcagcagctgccgggaatgcatcgagtcggggcccggctgcacctggtgccagaagctgaacttcacagggccgggggatcctg

SEQ ID NO: 475877 - DNA, 120 bp, Artificial Sequence
  ENSG00000160255_3 (sequence is synthesized)
actccattcgctgcgacacccggccacagctgctcatgaggggctgtgcggctgacgacatcatggaccccacaagcctcgctgaaacccaggaagaccacaatgggggccagaagcagc

SEQ ID NO: 475878 - DNA, 120 bp, Artificial Sequence
  ENSG00000160255_4 (sequence is synthesized)
tgtccccacaaaaagtgacgctttacctgcgaccaggccaggcagcagcgttcaacgtgaccttccggcgggccaagggctaccccatcgacctgtactatctgatggacctctcctact

SEQ ID NO: 475879 - DNA, 120 bp, Artificial Sequence
  ENSG00000160255_5 (sequence is synthesized)
ccatgcttgatgacctcaggaatgtcaagaagctaggtggcgacctgctccgggccctcaacgagatcaccgagtccggccgcattggcttcgggtccttcgtggacaagaccgtgctgc

SEQ ID NO: 475880 - DNA, 120 bp, Artificial Sequence
  ENSG00000160255_6 (sequence is synthesized)
cgttcgtgaacacgcaccctgataagctgcgaaacccatgccccaacaaggagaaagagtgccagcccccgtttgccttcaggcacgtgctgaagctgaccaacaactccaaccagtttc

SEQ ID NO: 475881 - DNA, 120 bp, Artificial Sequence
  ENSG00000160255_7 (sequence is synthesized)
agaccgaggtcgggaagcagctgatttccggaaacctggatgcacccgagggtgggctggacgccatgatgcaggtcgccgcctgcccggaggaaatcggctggcgcaacgtcacgcggc

SEQ ID NO: 475882 - DNA, 120 bp, Artificial Sequence
  ENSG00000160255_8 (sequence is synthesized)
tgctggtgtttgccactgatgacggcttccatttcgcgggcgacgggaagctgggcgccatcctgacccccaacgacggccgctgtcacctggaggacaacttgtacaagaggagcaacg

SEQ ID NO: 475883 - DNA, 120 bp, Artificial Sequence
  ENSG00000160255_9 (sequence is synthesized)
aattcgactacccatcggtgggccagctggcgcacaagctggctgaaaacaacatccagcccatcttcgcggtgaccagtaggatggtgaagacctacgagaaactcaccgagatcatcc

SEQ ID NO: 475884 - DNA, 120 bp, Artificial Sequence
  ENSG00000160255_10 (sequence is synthesized)
ccaagtcagccgtgggggagctgtctgaggactccagcaatgtggtccatctcattaagaatgcttacaataaactctcctccagggtcttcctggatcacaacgccctccccgacaccc

SEQ ID NO: 475885 - DNA, 120 bp, Artificial Sequence
  ENSG00000160255_11 (sequence is synthesized)
tgaaagtcacctacgactccttctgcagcaatggagtgacgcacaggaaccagcccagaggtgactgtgatggcgtgcagatcaatgtcccgatcaccttccaggtgaaggtcacggcca

SEQ ID NO: 475886 - DNA, 120 bp, Artificial Sequence
  ENSG00000160255_12 (sequence is synthesized)
gggcgctgggcttcacggacatagtgaccgtgcaggttcttccccagtgtgagtgccggtgccgggaccagagcagagaccgcagcctctgccatggcaagggcttcttggagtgcggca

SEQ ID NO: 475887 - DNA, 120 bp, Artificial Sequence
  ENSG00000160255_13 (sequence is synthesized)
tctgcaggtgtgacactggctacattgggaaaaactgtgagtgccagacacagggccggagcagccaggagctggaaggaagctgccggaaggacaacaactccatcatctgctcagggc

SEQ ID NO: 475888 - DNA, 120 bp, Artificial Sequence
  ENSG00000160255_14 (sequence is synthesized)
tgggggactgtgtctgcgggcagtgcctgtgccacaccagcgacgtccccggcaagctgatatacgggcagtactgcgagtgtgacaccatcaactgtgagcgctacaacggccaggtct

SEQ ID NO: 475889 - DNA, 120 bp, Artificial Sequence
  ENSG00000160255_15 (sequence is synthesized)
gcggcggcccggggagggggctctgcttctgcgggaagtgccgctgccacccgggctttgagggctcagcgtgccagtgcgagaggaccactgagggctgcctgaacccgcggcgtgttg

SEQ ID NO: 475890 - DNA, 120 bp, Artificial Sequence
  ENSG00000160255_16 (sequence is synthesized)
agtgtagtggtcgtggccggtgccgctgcaacgtatgcgagtgccattcaggctaccagctgcctctgtgccaggagtgccccggctgcccctcaccctgtggcaagtacatctcctgcg

SEQ ID NO: 475891 - DNA, 120 bp, Artificial Sequence
  ENSG00000160255_17 (sequence is synthesized)
ccgagtgcctgaagttcgaaaagggcccctttgggaagaactgcagcgcggcgtgtccgggcctgcagctgtcgaacaaccccgtgaagggcaggacctgcaaggagagggactcagagg

SEQ ID NO: 475892 - DNA, 120 bp, Artificial Sequence
  ENSG00000160255_18 (sequence is synthesized)
gctgctgggtggcctacacgctggagcagcaggacgggatggaccgctacctcatctatgtggatgagagccgagagtgtgtggcaggccccaacatcgccgccatcgtcgggggcaccg

SEQ ID NO: 475893 - DNA, 120 bp, Artificial Sequence
  ENSG00000160255_19 (sequence is synthesized)
tggcaggcatcgtgctgatcggcattctcctgctggtcatctggaaggctctgatccacctgagcgacctccgggagtacaggcgctttgagaaggagaagctcaagtcccagtggaaca

SEQ ID NO: 475894 - DNA, 120 bp, Artificial Sequence
  ENSG00000160255_20 (sequence is synthesized)
atgataatccccttttcaagagcgccaccacgacggtcatgaaccccaagtttgctgagagttaggagcacttggtgaagacaaggccgtcaggacccaccatgtctgccccatcacgcg

SEQ ID NO: 475895 - DNA, 120 bp, Artificial Sequence
  ENSG00000160255_21 (sequence is synthesized)
gccgagacatggcttgccacagctcttgaggatgtcaccaattaaccagaaatccagttattttccgccctcaaaatgacagccatggccggccgggtgcttctgggggctcgtcggggg

SEQ ID NO: 475896 - DNA, 120 bp, Artificial Sequence
  ENSG00000160255_22 (sequence is synthesized)
gacagctccactctgactggcacagtctttgcatggagacttgaggagggagggcttgaggttggtgaggttaggtgcgtgtttcctgtgcaagtcaggacatcagtctgattaaaggtg

SEQ ID NO: 475897 - DNA, 120 bp, Artificial Sequence
  ENSG00000160255_23 (sequence is synthesized)
gtgccaatttatttacatttaaacttgtcagggtataaaatgacatcccattaattatattgttaatcaatcacgtgtatagaaaaaaaataaaacttcaatacaggctgtccatggaaa

SEQ ID NO: 475898 - DNA, 120 bp, Artificial Sequence
  ENSG00000160255_24 (sequence is synthesized)
agctgctgtagagcggagaggggcaggggtgaagggccacggtggtgcaacccaccacttcctccaaggaggagctgagaggaacaggaagtgtcaggactttacgacccgcgcctccag

SEQ ID NO: 475899 - DNA, 120 bp, Artificial Sequence
  ENSG00000160255_25 (sequence is synthesized)
ctgaggtttctagacgtgacccagggcagactggtagcaaagcccccacgcccagccaggagcaccgccgaggactccagcacaccgagggacatgctgggcctgcgccccccactgctc

SEQ ID NO: 475900 - DNA, 120 bp, Artificial Sequence
  ENSG00000160255_26 (sequence is synthesized)
gacagggccaagcccagctctcctccaagcacaggctctgctcacggaggacctggggcacactggggcagagtgcacacaccgggacatgctgggcctgcgccccccactgctcgccct

SEQ ID NO: 475901 - DNA, 120 bp, Artificial Sequence
  ENSG00000160255_27 (sequence is synthesized)
tccatctcattaagaatgcttacaatgtgagtctcccgcaccactcagctgggacccatggggtggccagcaatctccccactgcaggtcagctcctgctgcaggtcagcaggagggtgg

SEQ ID NO: 475902 - DNA, 120 bp, Artificial Sequence
  ENSG00000160255_28 (sequence is synthesized)
tctgggaggaaagcccctgccccgtgggccagctgcagcctcccgacctgccctcaggcctccaggacaccctggcccggcacttccacggggagctctgggtcctctctcgttgatgtt

SEQ ID NO: 475903 - DNA, 120 bp, Artificial Sequence
  ENSG00000160255_29 (sequence is synthesized)
gtgggcgatgctccctgaaacctgagctccggactcttcattccagactcttctctgcgggtctctatggagaagggaggtggacagctctggtggcaaacagtgcagctggggcaggag

SEQ ID NO: 475904 - DNA, 120 bp, Artificial Sequence
  ENSG00000160255_30 (sequence is synthesized)
gaggccacaggaaacccccacagtggacttgggccctgggaagacaccctggggggtggaattcctcttgctctgttcacctgtcctgggcaagctccagagaagcccttaacccctgaa

SEQ ID NO: 475905 - DNA, 120 bp, Artificial Sequence
  ENSG00000160255_31 (sequence is synthesized)
tttctccctggtgcacggcccatcgagctgcaccctgggctgctcccctggggagcccatggccctggtgggcataggtaggcataggtgcgcactaggtgccattcagggccccaggca

SEQ ID NO: 475906 - DNA, 120 bp, Artificial Sequence
  ENSG00000160255_32 (sequence is synthesized)
ccagaggtcccgactgctctggaaatctacccccaggtgagagatgttctcagaattctggcctggatccttctaggccaaaggtcctgctggcttgagggagctcagcacgttagcgcc

SEQ ID NO: 475907 - DNA, 120 bp, Artificial Sequence
  ENSG00000160255_33 (sequence is synthesized)
tccgacaaacgttgggtcattgaattaaactgaaggcccgtggaggaggtgccatttgcttctcgtagcctcccgtgagccccaaacccccagagcagaccctcctgggtgccagccact

SEQ ID NO: 475908 - DNA, 120 bp, Artificial Sequence
  ENSG00000160255_34 (sequence is synthesized)
gcccgaggtgtttctgtccttacacagaggatgcaggtgacgccactgccctggccattcacccgatgcccctatgaacctgtccctctgcctcctctcaatttccgtctgtctctcagt

SEQ ID NO: 475909 - DNA, 120 bp, Artificial Sequence
  ENSG00000160255_35 (sequence is synthesized)
ctttgtctctctttctctgtctctctctgtctgtctctctctgtctctgccccatctctgtctgtctctgtctctgcctctctctgtttctctccatctctctgtctctggctctggctc

SEQ ID NO: 475910 - DNA, 120 bp, Artificial Sequence
  ENSG00000160255_36 (sequence is synthesized)
caaggctgaggagcagcagaagctcccacccctgaggctcacaccctggctccatgctagtccctgtggtcaggctgtctcgagggcaggactgtggccctggcagccctgccatcctca

SEQ ID NO: 475911 - DNA, 120 bp, Artificial Sequence
  ENSG00000160255_37 (sequence is synthesized)
gcacatcctgctgtgctctcctctgtgtcattagctgacactggggacttgcactgagaggagaagtggagacgggtctaaaccgctgggccaggcagggccaggacaacagaaacactc

SEQ ID NO: 475912 - DNA, 120 bp, Artificial Sequence
  ENSG00000160255_38 (sequence is synthesized)
gggtccccatcccagcacactgaggggtcctggggacagccagaaggagccagggtccccatcccagcactctgacgggggcagggaggggcacacaggcatcagaggctgtctgggagc

SEQ ID NO: 475913 - DNA, 120 bp, Artificial Sequence
  ENSG00000160255_39 (sequence is synthesized)
aggcagcatccactggaaggaccctgtttctttccttcacatcctctctgccgaggccagacgctttccttgtgaagctgatgtcaggaacgtcagtgagagggtgccgagagggtgctt

SEQ ID NO: 475914 - DNA, 120 bp, Artificial Sequence
  ENSG00000160255_40 (sequence is synthesized)
ctcagtgagagggtgctgggagggttcttcacacacgccttggcccccaagagtcctactcatcaacctggagcccaaatccctgggtcaggccactgcagactgagggatggagtgatg

SEQ ID NO: 475915 - DNA, 120 bp, Artificial Sequence
  ENSG00000160255_41 (sequence is synthesized)
gctgcgccccctgggggcagacgccggacacacagaacaggcgcaaacggcaaacctggatcaccttccaggtgaaggtcacggccacagagtgcatccaggagcagtcgtttgtcatcc

SEQ ID NO: 475916 - DNA, 120 bp, Artificial Sequence
  ENSG00000160255_42 (sequence is synthesized)
gacattccaatcagggagaacagggcctgccctcactttcccatagacagaagttcccgggaggctggggaaggaccttgccactgggggtaggtcggggactcaggcctcgtctccgca

SEQ ID NO: 475917 - DNA, 120 bp, Artificial Sequence
  ENSG00000160255_43 (sequence is synthesized)
cgtgccaggaggctgtagctgtgctgtttcccgagggcccctctttgcacctgggggtggtggcgaatgcggggtctcctcctggaggctgcctccctgtctttttgggcctcctctgac

SEQ ID NO: 475918 - DNA, 120 bp, Artificial Sequence
  ENSG00000160255_44 (sequence is synthesized)
tcagctttctttgtctttcctgtccttgggcgtttctgaggaagtcaggagagcagctttgtagcatgaccctcgggggtcttgtctggagtttcctctgcctggactcaggtgtgcttt

SEQ ID NO: 475919 - DNA, 120 bp, Artificial Sequence
  ENSG00000160255_45 (sequence is synthesized)
gcggccgccgtgcccctgtgtccctcctccctcctgtgcgcacctgccgcgggccctgggatcaggcttccagttcacccgctgcacccgcatctgccccacttgggccccctccttggc

SEQ ID NO: 475920 - DNA, 120 bp, Artificial Sequence
  ENSG00000160255_46 (sequence is synthesized)
ctgagggcgccccaaccccacctgccccccctggtggacacacacccaagcccgagcccccgttgccggagcccccgcacaccctggcaccgatgctcacacctggctccccgcagctcc

SEQ ID NO: 475921 - DNA, 120 bp, Artificial Sequence
  ENSG00000160255_47 (sequence is synthesized)
aagggcgactctgatgcaaggttctgagaggcctgtggggctgtggattcctaagcagcctcagctttgggttttgcaccttaggtcttggacatgctgggcctgcgccccccactgctc

SEQ ID NO: 475922 - DNA, 120 bp, Artificial Sequence
  ENSG00000160255_48 (sequence is synthesized)
agccacgttccagggcacctggctgggacctgccgcagcctctgcgcgcagcgggctccatcccccgggccacggattgggagactgaggcaggcgcgaagcccgccgcccagcctccgc

SEQ ID NO: 475923 - DNA, 120 bp, Artificial Sequence
  ENSG00000160255_49 (sequence is synthesized)
atgcatgtatatgtgtggtgtgtgcatgcacgtggtgtgtacatgcagtcaggcacacatctgtatgcacgtacacgtgcatgtgtggtgtgtgtacacgtctgcatgtgtgtgtgtgcc

SEQ ID NO: 475924 - DNA, 120 bp, Artificial Sequence
  ENSG00000160255_50 (sequence is synthesized)
gtcctcggactgagcagggtggccaggccccaggtggaaactaccttggtcaggctgggttttttccctcccctttctggaggttttcagctcctctgaaataaacacctttcagtgaga

SEQ ID NO: 475925 - DNA, 120 bp, Artificial Sequence
  ENSG00000160255_51 (sequence is synthesized)
actttacgacccgcgcctccagctgaggtttctagacgtgacccagggcagactggtagcaaagcccccacgcccagccaggagcaccgccgaggactccagcacaccgagggccaggca

SEQ ID NO: 475926 - DNA, 120 bp, Artificial Sequence
  ENSG00000160255_52 (sequence is synthesized)
agcaaagcccccacgcccagccaggagcaccgccgaggactccagcacaccgagggacatgctgggcctgcgccccccactgctcgccctggtggggctgctctccctcgggtgcgggcg

SEQ ID NO: 475927 - DNA, 120 bp, Artificial Sequence
  ENSG00000160256_0 (sequence is synthesized)
agcttccgggaggcgctccgcacgtttgccgtgctccgccgggaagatggggaaagtgagggggttgcgcgcccgagtgcaccaggctgccgtgaggccgaaaggggaggccgcccccgg

SEQ ID NO: 475928 - DNA, 120 bp, Artificial Sequence
  ENSG00000160256_1 (sequence is synthesized)
ccccgcgccccctgccccggaggcgacccctccgccggcctcggccgcggggaaggactgggcgttcatcaacaccaacatctttgccaggaccaagatagaccccagcgccttggtgca

SEQ ID NO: 475929 - DNA, 120 bp, Artificial Sequence
  ENSG00000160256_2 (sequence is synthesized)
gaagctggagctggacgtgaggagtgtcacttccgtcaggagaggtgcagaggccaagaccgttttgcccaagaaggagaaaatgaagctgaggcgtgagcaatggttgcagaaaatcga

SEQ ID NO: 475930 - DNA, 120 bp, Artificial Sequence
  ENSG00000160256_3 (sequence is synthesized)
aggcggagggccacggtggtggtgggggacctgcaccctctcagggatgccctgcccgagctgctggggctcgaggctggcagccggcgccaagcccgcagcagggagagcaacaagccc

SEQ ID NO: 475931 - DNA, 120 bp, Artificial Sequence
  ENSG00000160256_4 (sequence is synthesized)
cggccctcagagctcagccggatgagcgcagcccagagacagcagcttctcgaggaagaaaggacccggtttcaggagctgctggccagtccggcctacagagccagccccctggtggcc

SEQ ID NO: 475932 - DNA, 120 bp, Artificial Sequence
  ENSG00000160256_5 (sequence is synthesized)
atcgggcagacgctggcccggcagatgcagctggaagatggcggccagctctgaccagggcagcgggcatgccacaactcctcaggacacatgtgggccaagtagagagcgccggcccct

SEQ ID NO: 475933 - DNA, 120 bp, Artificial Sequence
  ENSG00000160256_6 (sequence is synthesized)
caaggaccatggcctgagcctggtggacgcccttccctctggtcggttgtggggctcaataaatggctctgtgaacttcccctgcactgccagggccgttcccatgagctgcttccctga

SEQ ID NO: 475934 - DNA, 120 bp, Artificial Sequence
  ENSG00000160256_7 (sequence is synthesized)
ccatcctttcatggcccagctgcccaggctcgagggtggcaggtcacgcgctgcaggcccaggcagctccaggctggcatcccgcggcggaggcaccagagcactgggtccagaatagga

SEQ ID NO: 475935 - DNA, 120 bp, Artificial Sequence
  ENSG00000160256_8 (sequence is synthesized)
ggaacttgtggttctgcagtggtttggtcacctctggccaccacgacgtctgctctaagaagggaggagccagcctctgcccacgggaaggtgtttaggggatgctggatgctgactcac

SEQ ID NO: 475936 - DNA, 120 bp, Artificial Sequence
  ENSG00000160256_9 (sequence is synthesized)
gggatctgggtttggggcgaggcccaggacagtagcagctcccgacacccttgcttgaggcccagcatctgcactcccagcccggccctcctccaagctggcatttctgctgcacccacg

SEQ ID NO: 475937 - DNA, 80 bp, Artificial Sequence
  ENSG00000160271_0 (sequence is synthesized)
gcgcccgcgctgcgagccttccatggtgcagcgcatgtgggccgaggcggccgggcctgctggcggcgccgagccgctgt

SEQ ID NO: 475938 - DNA, 120 bp, Artificial Sequence
  ENSG00000160271_1 (sequence is synthesized)
ctgctggcggcgccgagccgctgtttccgggctcccggcggagccgcagcgtgtgggacgccgtgcgcctggaggtgggcgtccccgacagctgcccggtggtgctgcacagcttcacgc

SEQ ID NO: 475939 - DNA, 120 bp, Artificial Sequence
  ENSG00000160271_2 (sequence is synthesized)
agctagaccccgacctgccgcgcccggagagctccacgcaggagatcggtgaggagctgatcaacggagtcatctactccatctccctgcgcaaggtgcagctgcaccacggaggcaaca

SEQ ID NO: 475940 - DNA, 120 bp, Artificial Sequence
  ENSG00000160271_3 (sequence is synthesized)
aggggcagcgctggctcgggtatgagaatgagtcggccctgaacctttatgagacttgcaaggtgcggaccgtgaaggctggcacgctggagaagctggtggagcacctggtgccagcct

SEQ ID NO: 475941 - DNA, 120 bp, Artificial Sequence
  ENSG00000160271_4 (sequence is synthesized)
tccagggcagcgacctctcctacgtcaccatcttcctgtgtacctatagagccttcaccaccacccaacaggtcctggacctgctgttcaaaaggtacggtagatgtgacgccctcacgg

SEQ ID NO: 475942 - DNA, 120 bp, Artificial Sequence
  ENSG00000160271_5 (sequence is synthesized)
cctcctctagatacggctgcatcctcccctattccgacgaggatggtggaccccaggaccaacttaaaaatgccatctcctccatcctgggcacctggctggaccagtactcggaggatt

SEQ ID NO: 475943 - DNA, 120 bp, Artificial Sequence
  ENSG00000160271_6 (sequence is synthesized)
tctgtcaacctccggactttccctgcctcaagcagctggtggcctacgtgcagctcaacatgccaggctcagacctggagcgccgtgcccaccttctcctggcccagctggagcactcgg

SEQ ID NO: 475944 - DNA, 120 bp, Artificial Sequence
  ENSG00000160271_7 (sequence is synthesized)
aacccattgaggcagagcctgaggctctgtcaccagtgccagctctaaaaccaactccagagctcgagctagctctaacaccagctcgagcacccagcccagtgccggctccagccccgg

SEQ ID NO: 475945 - DNA, 120 bp, Artificial Sequence
  ENSG00000160271_8 (sequence is synthesized)
agccagagccagctccaacaccagctccaggttcagagctagaagtagctccagcaccagctccggagctccagcaggctccagagccagctgtgggactagaatcggctccagcgccag

SEQ ID NO: 475946 - DNA, 120 bp, Artificial Sequence
  ENSG00000160271_9 (sequence is synthesized)
ctctggaactagagccagctccagaacaggatccagctccctcacaaactctagagctggagccagctccagcaccagttccatcattacagccttcctggccttcacctgtggttgcag

SEQ ID NO: 475947 - DNA, 120 bp, Artificial Sequence
  ENSG00000160271_10 (sequence is synthesized)
agaacgggctgagtgaggagaagcctcacctcttggtgttccctccagatctggtggcagagcagtttacactgatggatgcggaactgttcaagaaggtggtgccctaccactgcctgg

SEQ ID NO: 475948 - DNA, 120 bp, Artificial Sequence
  ENSG00000160271_11 (sequence is synthesized)
gctccatctggtcccagcgggacaagaagggcaaggagcacctggcgcccaccatccgcgccactgtcacccagttcaacagtgtggccaactgtgtcatcaccacctgcctcgggaacc

SEQ ID NO: 475949 - DNA, 120 bp, Artificial Sequence
  ENSG00000160271_12 (sequence is synthesized)
gaagcacgaaagccccagacagggccagggtggtggagcactggatcgaggtggccagggagtgccggatcctcaagaacttctcgtcactgtatgccatcctctctgccctgcagagca

SEQ ID NO: 475950 - DNA, 120 bp, Artificial Sequence
  ENSG00000160271_13 (sequence is synthesized)
actccatccaccgtctgaagaagacgtgggaagacgtttccagggacagtttccggatctttcagaagctgtcagagatcttctcagatgagaacaactactcattgagccgggagctgc

SEQ ID NO: 475951 - DNA, 120 bp, Artificial Sequence
  ENSG00000160271_14 (sequence is synthesized)
tcatcaaggagggcacctccaagtttgccaccctggagatgaaccccaagagagcccagaaacggccgaaggagacgggcatcatccagggcaccgttccctacctgggcacgttcctca

SEQ ID NO: 475952 - DNA, 120 bp, Artificial Sequence
  ENSG00000160271_15 (sequence is synthesized)
agatcaagctgctgcagtcggcctgcaacaactacagcatcgcgccagatgagcaatttggggcctggttccgggccgtggagcggctcagcgagactgagagctacaacctgtcgtgcg

SEQ ID NO: 475953 - DNA, 120 bp, Artificial Sequence
  ENSG00000160271_16 (sequence is synthesized)
agctggagcccccatccgagtcagccagcaacaccctcaggaccaagaagaacacagccattgtcaagcgctggagcgaccgccaggcccccagcactgagctcagtaccagtggcagct

SEQ ID NO: 475954 - DNA, 120 bp, Artificial Sequence
  ENSG00000160271_17 (sequence is synthesized)
cccactccaagtcctgtgaccagctcaggtgtggcccctacctcagcagcggggacatcgctgacgcgctcagcgtgcactcggccggctcctctagctccgacgtggaggagatcaaca

SEQ ID NO: 475955 - DNA, 120 bp, Artificial Sequence
  ENSG00000160271_18 (sequence is synthesized)
tcagcttcgtcccggagtctcctgatggccaggaaaagaagttctgggaatcagcctcacagtcatccccggagacctccggcatcagctcagcctccagcagcacctcgtcctcctcag

SEQ ID NO: 475956 - DNA, 120 bp, Artificial Sequence
  ENSG00000160271_19 (sequence is synthesized)
cctccaccacgcccgtggctgccacacgcacccacaagcgctctgtctcagggctctgcaactccagctccgcgctgccgctctacaaccagcaggtgggcgactgctgtatcatccgcg

SEQ ID NO: 475957 - DNA, 120 bp, Artificial Sequence
  ENSG00000160271_20 (sequence is synthesized)
tcagcctggacgtggacaatggcaacatgtacaagagcatcctggtgaccagccaagataaggctccggctgtaatccgcaaggccatggacaaacacaacctggaggaggaggagccgg

SEQ ID NO: 475958 - DNA, 120 bp, Artificial Sequence
  ENSG00000160271_21 (sequence is synthesized)
aggactatgagctgctgcagattctctcagatgaccggaagctgaagatccctgaaaacgccaacgtcttctatgccatgaactctaccgccaactatgactttgtcctcaagaagcgga

SEQ ID NO: 475959 - DNA, 120 bp, Artificial Sequence
  ENSG00000160271_22 (sequence is synthesized)
ccttcaccaagggagtgaaggtcaagcacggagccagctccaccctccctcgcatgaagcagaaaggactcaagattgccaagggcatcttctgagggcatcctcccagggtctggctgg

SEQ ID NO: 475960 - DNA, 120 bp, Artificial Sequence
  ENSG00000160271_23 (sequence is synthesized)
ctggtagccaagcacttatggaccagagtggcccaggccagctgggcgccttcctcccacctgccagcccagggtaccccagactccagtttcatcctgaacctctcccgctgctgggat

SEQ ID NO: 475961 - DNA, 120 bp, Artificial Sequence
  ENSG00000160271_24 (sequence is synthesized)
tgacgcctgccattggtcaggctgacctggcctcccgtggaccactcgctgccttaggtgccttctgctctctggaaccagaggactagctgacttttgccaaggagcagtgccaacggg

SEQ ID NO: 475962 - DNA, 120 bp, Artificial Sequence
  ENSG00000160271_25 (sequence is synthesized)
catggcatggtgccctgcctgcccccgggcgccacctctgtacacttccctgacaccttcccaggtgtgggtcactgccacctgtgcccatgggcaccccagagcacccactgtgaccac

SEQ ID NO: 475963 - DNA, 120 bp, Artificial Sequence
  ENSG00000160271_26 (sequence is synthesized)
tgcagttctctcatgcccacaggcactggcctgtgaccttcgcaggggtcccggcccctcccaccactctagcctttctcaggctgcaccaaagattccatcatcagggccaactgagag

SEQ ID NO: 475964 - DNA, 120 bp, Artificial Sequence
  ENSG00000160271_27 (sequence is synthesized)
tgagggagtctcacccaccgcttaccccagccctcccctgggagcagagagagaaaccctcttcatggaccagactctgcacccggtgagtgaggacagtcccagctgagtcccatcgat

SEQ ID NO: 475965 - DNA, 120 bp, Artificial Sequence
  ENSG00000160271_28 (sequence is synthesized)
gttgaatctcatgccactgcaagtgccattcaccactgcgtcctgggctttacgagaccatgcaagacgggggttagtgaggaaggaggatttggggtgggggtggggtgattgaatatt

SEQ ID NO: 475966 - DNA, 120 bp, Artificial Sequence
  ENSG00000160271_29 (sequence is synthesized)
tgtataaaaagcaaaaagaaaaaaaaaatgtttgtttactgattggggaggggcaatatttatttgttgtaaatagcaaatgctagacttgaatattatattaaaatcctgtttctacta

SEQ ID NO: 475967 - DNA, 120 bp, Artificial Sequence
  ENSG00000160271_30 (sequence is synthesized)
agtgtctgggcgggaagccgggccccagggcctgatgtgcctgtgggggcactccacagcccctgcccacaccctctcctccccgcctctgctgttctgctccctgccctgtgccctcca

SEQ ID NO: 475968 - DNA, 120 bp, Artificial Sequence
  ENSG00000160271_31 (sequence is synthesized)
actccactagggcacgcaggcgacgagcacactggcagagggcctcccgcagggcccactccccacctggctctcgccccaccatggcccgggaagcaggccaggtttgtgccaggcctg

SEQ ID NO: 475969 - DNA, 120 bp, Artificial Sequence
  ENSG00000160271_32 (sequence is synthesized)
ccgtgcccagggggaggaagggctctgtgttctttgcctgtgtctctgtggtgaccgccaggagaagggccgtcgcccgtcgtgccgctctccaaagcccgacaccttggctggcacctc

SEQ ID NO: 475970 - DNA, 80 bp, Artificial Sequence
  ENSG00000160271_33 (sequence is synthesized)
cgcagacaatgggagcggcgctggcggctgccggggcggccccgagggccgcagagtcctgggcccggcggggaccggag

SEQ ID NO: 475971 - DNA, 120 bp, Artificial Sequence
  ENSG00000160271_34 (sequence is synthesized)
cgcagccgggcgcacccctgcgccgcgcgcgggcccaggcgagcggcctctgcgagccccgggtcccgccctggggccggcgatgtgccaccgaggctgaggatgatggtagattgccag

SEQ ID NO: 475972 - DNA, 120 bp, Artificial Sequence
  ENSG00000160271_35 (sequence is synthesized)
atatcctttcccatctccccactccaaatccatgcatggggccaggaagccctggatcctgaacacagcttctagaaggttccccatctggcagctggcctggggtgcccccacagggca

SEQ ID NO: 475973 - DNA, 120 bp, Artificial Sequence
  ENSG00000160271_36 (sequence is synthesized)
ggtgcctccctccactggcggcaaatgcaccctgaacacagtgcaccatccctgccctcccggggtctaccttgtagttggcggggaaggacagatgtcagccaggtacagaaatgaaga

SEQ ID NO: 475974 - DNA, 120 bp, Artificial Sequence
  ENSG00000160271_37 (sequence is synthesized)
aggtagtgatcagggacaaggctggcctgagggcagagggggaggaaaggagcagccgtgcaaagcccccaggagctgaaggggcggtgctgtaggggaggtgaggtcagggaagtatcc

SEQ ID NO: 475975 - DNA, 120 bp, Artificial Sequence
  ENSG00000160271_38 (sequence is synthesized)
agggcctggccacataggccctgagccctgccaggacctcgactttctcggggaggaagacaggagcaatgatggctggcttctctgtctggtgtgggctggtaccagagccgcaggggt

SEQ ID NO: 475976 - DNA, 120 bp, Artificial Sequence
  ENSG00000160271_39 (sequence is synthesized)
gttggttaggaggccgctgtggcaaccaggctgggagccctggaaggggccagcagggtcagagtctagacaggatttggagacagcagatgggaattgctcacagaatgggtttgcctg

SEQ ID NO: 475977 - DNA, 120 bp, Artificial Sequence
  ENSG00000160271_40 (sequence is synthesized)
ggggctctttcttcatcctccaggtgtcctgcgacagatgaaccatttgtaacccccaccctctgtaccccagccctgggtcaggtgccccattattcacacacgctcctgacccctcat

SEQ ID NO: 475978 - DNA, 120 bp, Artificial Sequence
  ENSG00000160271_41 (sequence is synthesized)
tgccaggagctagcatggttgtcattaagcagtcacctgtggccctatgtccgagttccgcctgtgctctggccctcagggtcaaggtagcaggggcctggcctatgctgaccacactga

SEQ ID NO: 475979 - DNA, 120 bp, Artificial Sequence
  ENSG00000160271_42 (sequence is synthesized)
gcatcctggccggcccctcctttcttacctccagggcttggactagggactgtctgttccccaggctcagtgatgctgttatcctggaggggcaagtgcttctcaaggaagtgtgggagg

SEQ ID NO: 475980 - DNA, 120 bp, Artificial Sequence
  ENSG00000160271_43 (sequence is synthesized)
agggaacagtctcttacaggagaagcagggtaggcactgctgggacagacccctcctcattccatggaggcctcacatggggaacagaaggacggaggcctcacttggggagtaggagaa

SEQ ID NO: 475981 - DNA, 120 bp, Artificial Sequence
  ENSG00000160271_44 (sequence is synthesized)
ggtgctgaggggactccagagggtccttggccactgcactctgggggagccgctccagggtcttttccctgatggtccatcccccgccgcgatgcaggtgaccagccaagataaggctcc

SEQ ID NO: 475982 - DNA, 120 bp, Artificial Sequence
  ENSG00000160271_45 (sequence is synthesized)
agagggggcaggtccacaccactccccagccccaggttggaagcctttggccccagaaaattcaccagcagagtgtgggtagacactgtggacagggcagccctggctgcccccattgtc

SEQ ID NO: 475983 - DNA, 120 bp, Artificial Sequence
  ENSG00000160271_46 (sequence is synthesized)
tgcttgctgtccccagcaaccactggacctccccagtgtgtgcccttccctaggcgtgaacaggcagttcaaagctcacatcagtgaggagcaaagagaaaaggcatttttcactgggac

SEQ ID NO: 475984 - DNA, 120 bp, Artificial Sequence
  ENSG00000160271_47 (sequence is synthesized)
aggttagccacgtggcccactggaagggactctttctggctaagacaagaaaacatgtgctctacaaagaatggtgacagctgtggaccaaagtgtcaagtgttaaaatccatgagtgtg

SEQ ID NO: 475985 - DNA, 120 bp, Artificial Sequence
  ENSG00000160271_48 (sequence is synthesized)
tgattctaaaagcagaacaggctactaggaggccaactcagtattctagaaactgggaaagtgtcaagaaccagtgcaggctcagagtggggtatcctgggcctggagacgctgggcaag

SEQ ID NO: 475986 - DNA, 120 bp, Artificial Sequence
  ENSG00000160271_49 (sequence is synthesized)
ctccttaagccctctgtgcttgtcttctcatcccccaaatggaaatgaaagtagccagtgtgttcatcatatatgtaaaaatctatatgtatgtatatatgtgtatatgtatgtatatat

SEQ ID NO: 475987 - DNA, 120 bp, Artificial Sequence
  ENSG00000160271_50 (sequence is synthesized)
gtgtatatatatgcatgtatatgtgtgtgtatatatatgcatgtatatgtgtgtgtatatatatgcatgtatatataaagcatctatgtgcaccataaaagttaactataaatactatca

SEQ ID NO: 475988 - DNA, 120 bp, Artificial Sequence
  ENSG00000160271_51 (sequence is synthesized)
tcgctgttttctttccagtgagctgaacaccacctcccaccattagcccagacagtaagcaatgactcctgtgatccctagaagttacagtctaaatcctctggcagcttcttgcaccat

SEQ ID NO: 475989 - DNA, 120 bp, Artificial Sequence
  ENSG00000160271_52 (sequence is synthesized)
ttcggttaggtgggcagggtaggcgggacccccatcttacagaaaaggaagactgaggcctagagaggttaaagatgacgaaaagccacacgatgtcggcaggagcacaaatcgagccca

SEQ ID NO: 475990 - DNA, 120 bp, Artificial Sequence
  ENSG00000160271_53 (sequence is synthesized)
gctctggtttatagcaggctgtgggccagaggagatggtgggaaatggagccaaaaggaagtgcttgccgggtgccagggttcaaggagtacaggcctccctggaacgggcgccagagcc

SEQ ID NO: 475991 - DNA, 120 bp, Artificial Sequence
  ENSG00000160271_54 (sequence is synthesized)
ctggggcaggcctgtcctttcctggtccttggatcccttgtcctgagtagggcaggattctgggaggtgacctggattctagaaagcctgttccaggtgggcagccagcactgcagtatg

SEQ ID NO: 475992 - DNA, 120 bp, Artificial Sequence
  ENSG00000160271_55 (sequence is synthesized)
ggcaggacggggtgaccctctgccagctcaggccaagccggggggttctggagtcagtccctgtttaaacaagagtcatcaggttttgtgaggacctcagcagagtctgtcctcaggcag

SEQ ID NO: 475993 - DNA, 120 bp, Artificial Sequence
  ENSG00000160271_56 (sequence is synthesized)
gagtcattgagaggggtccttggagttctggagctgtattggaggggatctgaggtctgtggctcaagacagtccttgtatgggctctcaagcggtaggggtatcctgcagggcccccag

SEQ ID NO: 475994 - DNA, 120 bp, Artificial Sequence
  ENSG00000160271_57 (sequence is synthesized)
tgggattacaggcgtgagccaccgcaccatgcagcaggcggagttctcatccgcactttccagagggggaggcaggctcaggaaggccaggccaccggcccaggaccccacactagtgag

SEQ ID NO: 475995 - DNA, 120 bp, Artificial Sequence
  ENSG00000160271_58 (sequence is synthesized)
ggaaggccaggccaccggcccaggaccccacactagtgagtattgatacagggtcagccctggaacccgaccacactggcagcaccccaggtcagggtgcctgagggctgaggggatagg

SEQ ID NO: 475996 - DNA, 120 bp, Artificial Sequence
  ENSG00000160271_59 (sequence is synthesized)
gtggttgcagagaacgggctgagtgaggagaagcctcacctcttggtgttccctccagatctggtggcagagcagtttacactgatggatgcggagtgccggatcctcaagaacttctcg

SEQ ID NO: 475997 - DNA, 120 bp, Artificial Sequence
  ENSG00000160282_0 (sequence is synthesized)
cttccatctgcccagagaggagcatctggatcaaggtgctggccatgtcccagctggtggaatgcgtccccaacttttcggaggggaagaaccaggaggtgatcgacgccatctctggag

SEQ ID NO: 475998 - DNA, 120 bp, Artificial Sequence
  ENSG00000160282_1 (sequence is synthesized)
ccatcacacagaccccgggctgcgtgctgctggatgtggacgcaggcccttccaccaaccgcaccgtgtacaccttcgtggggccgccggagtgcgtggtggagggggccctcaacgctg

SEQ ID NO: 475999 - DNA, 120 bp, Artificial Sequence
  ENSG00000160282_2 (sequence is synthesized)
cccgggtagcttcccgacttatcgacatgagcaggcaccaaggagagcacccccgcatgggggccctagacgtctgccccttcatccccgtgaggggcgtcagcgtggatgagtgtgtgc

SEQ ID NO: 476000 - DNA, 120 bp, Artificial Sequence
  ENSG00000160282_3 (sequence is synthesized)
tctgcgcccaggcctttggccagaggctggcagaggagctggacgtgccagtttacctgtacggcgaggcagccaggatggacagtcgccggaccctgccggccatccgggccggggagt

SEQ ID NO: 476001 - DNA, 120 bp, Artificial Sequence
  ENSG00000160282_4 (sequence is synthesized)
acgaggccctccctaagaagctccagcaggccgactgggcgcccgactttggtcccagctcctttgtccccagttggggggccacggccacgggggcgaggaagttcctcattgctttta

SEQ ID NO: 476002 - DNA, 120 bp, Artificial Sequence
  ENSG00000160282_5 (sequence is synthesized)
acatcaacctgctcggcacaaaggagcaagcccaccgcatcgcgctcaacctgcgggagcagggccgcgggaaggaccagccaggacgtctgaagaaagttcagggcattggctggtacc

SEQ ID NO: 476003 - DNA, 120 bp, Artificial Sequence
  ENSG00000160282_6 (sequence is synthesized)
tggatgagaagaacctggctcaggtgtccaccaatcttctggactttgaggtcacggcactgcacacggtctacgaggagacctgccgagaagcacaggagctgagcctcccagtggtgg

SEQ ID NO: 476004 - DNA, 120 bp, Artificial Sequence
  ENSG00000160282_7 (sequence is synthesized)
ggctggtggtgagccggctgggcctggactccctgtgccccttcagccctaaggagcggatcatcgagtacctggtccctgagcgcgggcctgagcgaggcctgggcagcaagtccctgc

SEQ ID NO: 476005 - DNA, 120 bp, Artificial Sequence
  ENSG00000160282_8 (sequence is synthesized)
ctctgcggcccccgggggcggctcggtggcggcggccgctgcggccatgggtgcggcgctgggctccatggtgggcctcatgacctacgggcggcgccaattccagtccctggacacgac

SEQ ID NO: 476006 - DNA, 120 bp, Artificial Sequence
  ENSG00000160282_9 (sequence is synthesized)
ggcgccaattccagtccctggacacgacgatgcggcgcctgatcccgcccttccgcgaggcttcggccaagctaaccacgctggtggatgccgacgccgaggccttcaccgcctacctgg

SEQ ID NO: 476007 - DNA, 120 bp, Artificial Sequence
  ENSG00000160282_10 (sequence is synthesized)
aagcaatgaggctccccaagaacacacctgaggaaaaggacaggcgcacggcggccctacaggagggtctgaggcgggcagtctctgtgccgctgacgctggcggagacggtggcctcgc

SEQ ID NO: 476008 - DNA, 120 bp, Artificial Sequence
  ENSG00000160282_11 (sequence is synthesized)
tgtggccggccctgcaggaactggcccggtgtgggaacctggcctgccggtcagacctccaggtggcggccaaagccctggagatgggcgtgtttggcgcatatttcaacgtgctcatca

SEQ ID NO: 476009 - DNA, 120 bp, Artificial Sequence
  ENSG00000160282_12 (sequence is synthesized)
acctgagggacatcacagacgaggcatttaaggaccagatccaccatcgtgtttccagcctcctgcaggaagccaagacccaggctgcactggtgctggactgcttggagacccggcagg

SEQ ID NO: 476010 - DNA, 120 bp, Artificial Sequence
  ENSG00000160282_13 (sequence is synthesized)
agtgacgaaaccccagggacagcaggaccttcgacgctggaaggatagcctcgcttcccaggtgcagctcccggcaggtctggacagttccacagagcacggtactggccctgtcctcag

SEQ ID NO: 476011 - DNA, 120 bp, Artificial Sequence
  ENSG00000160282_14 (sequence is synthesized)
ttcccgtccacccttcaaccagtggctcctgggagacttttcctccctgcctcagctccctgcccagccagcctcctgtctccagagaagttctccattaaaaaataatttagcaaatca

SEQ ID NO: 476012 - DNA, 120 bp, Artificial Sequence
  ENSG00000160282_15 (sequence is synthesized)
ttcgtgtggggcccggagggtaggtgggcaggcagcggggcatcgcctgggaatggaggcgctggcagggacagaaggcccctagtcccatgtgacctccagtaaagttttggcaccaaa

SEQ ID NO: 476013 - DNA, 120 bp, Artificial Sequence
  ENSG00000160282_16 (sequence is synthesized)
caactcctttctctgggcctcaggttccccaagggcaactcagggtgatggctgtttccagaagcctgtacggggtgcctgctggggcggggcccacagggctcctggcggggcagaggt

SEQ ID NO: 476014 - DNA, 120 bp, Artificial Sequence
  ENSG00000160282_17 (sequence is synthesized)
cactctccaccccgcccggctgctgtccgtctctgtggggtggggtgggggtcgcatagccaacgtgttctgaatgggtttcccagaatgaattctaatcttaaatgggactgtcacaac

SEQ ID NO: 476015 - DNA, 120 bp, Artificial Sequence
  ENSG00000160282_18 (sequence is synthesized)
tgttcttttgctcttcgaactaaatcttgctgctgcttactctttgggccttcgctacctttacgacctgtaacactcactgccaaggtgtgtagcttcactcctcaagtcagcgagacc

SEQ ID NO: 476016 - DNA, 120 bp, Artificial Sequence
  ENSG00000160282_19 (sequence is synthesized)
accaacccaccgggaggagctaacagctgtgctacgcgccacctgtaagagctgtaacactcgctgcgaaggtcggcggcctcacggggaggaagaaacagctcccgacgcgccacctgt

SEQ ID NO: 476017 - DNA, 120 bp, Artificial Sequence
  ENSG00000160282_20 (sequence is synthesized)
aagagcttaacgctcactgtgaaggtcggcggcctcacggggaggaagaaacagctcccgacgcgccacctgtaagagcttatggctcactgtgaaggtctgcggcctcaccgggaggaa

SEQ ID NO: 476018 - DNA, 120 bp, Artificial Sequence
  ENSG00000160282_21 (sequence is synthesized)
gaaacagctcccgacgcgccacctgtaagagctcactgagaaggtctccggcttcactcctgaagtcaggcaagaccacgaacccgccagaaggaagaaactccggacgtatctgaacat

SEQ ID NO: 476019 - DNA, 120 bp, Artificial Sequence
  ENSG00000160282_22 (sequence is synthesized)
tctgcgcccaggcctttggccagaggctggcagaggagctggacgtgccaggcctgaccgccgggctctcctgcagtttacctgtacggcgaggcagccaggatggacagtcgccggacc

SEQ ID NO: 476020 - DNA, 120 bp, Artificial Sequence
  ENSG00000160284_0 (sequence is synthesized)
gtgctttctgccgtacgtcccttcccatgaggatgagatgacccatctgttgcatcccggctgctgataaaacaagaccctcggagccaagaaacaacactgaggctgatctccccgccc

SEQ ID NO: 476021 - DNA, 120 bp, Artificial Sequence
  ENSG00000160284_1 (sequence is synthesized)
aggctggtctcccccgcaggctggtctcccccgcaagctggtctcctcccccaggctggtctcctcaccaggctggtctcctcccccaggctgatctccccgcccaggctggtctccccc

SEQ ID NO: 476022 - DNA, 120 bp, Artificial Sequence
  ENSG00000160284_2 (sequence is synthesized)
gcaggctggtctcccccacaaggctggtctcctcccccaggctggtctcctcaccaggctggtctcctcccccaggctgatctccccgcccaggctggtctcccccgcaggctggtctcc

SEQ ID NO: 476023 - DNA, 120 bp, Artificial Sequence
  ENSG00000160284_3 (sequence is synthesized)
cccgcaagctggtctcccctgcaggctggtctcctccccaggctggtctcccccgcagactggtctcccccacaagctggtctccccaccaggctggtctcccccacatgctggtctcct

SEQ ID NO: 476024 - DNA, 120 bp, Artificial Sequence
  ENSG00000160284_4 (sequence is synthesized)
cccactgcccttgccagtccctccctcctcaagtgtgggtgccaaggacggaccctgatgaacacctgcacatcagttgctgccctgggtgccagggtccacaggaagctgcactgggaa

SEQ ID NO: 476025 - DNA, 120 bp, Artificial Sequence
  ENSG00000160284_5 (sequence is synthesized)
ccctgtgtcctgggcaggtcctatgggaagtgcagcccacatgttactcgggtgaaggcagcgtccccacccagcttgaggacaccacacagggtggacacccgaccctggctgggccgc

SEQ ID NO: 476026 - DNA, 120 bp, Artificial Sequence
  ENSG00000160284_6 (sequence is synthesized)
tcaatggggagtggcttggacgcccctcttggagtacagtcgctacatcccgtagctgcctaatgtccttggcattctcgggccctggtcataatgtgggagtggctgcctgtgcacgcc

SEQ ID NO: 476027 - DNA, 120 bp, Artificial Sequence
  ENSG00000160284_7 (sequence is synthesized)
acgggcctccagcttcactgcctcaacggggccatgagccatcgcgggggcaggcagggtgctgggcacctcatcactagggcagtgacatcacaaggcgtggaaggcggtggtggctac

SEQ ID NO: 476028 - DNA, 120 bp, Artificial Sequence
  ENSG00000160284_8 (sequence is synthesized)
ggaactccgtgcctgggctgtttctgtggtgcctgcgggctctgggctcccacctccatggggctgcaggagccgtgagggacaaggagggacgcacccgccatggctgaaggcggcgag

SEQ ID NO: 476029 - DNA, 120 bp, Artificial Sequence
  ENSG00000160284_9 (sequence is synthesized)
aacgcggacctgaagaagcaggtgcgcctcctgaaggagaatcagatgctgcggcggctgctcagccagagctgccaggagggcggcggccacgacctgctcccacccagggcgcatgcc

SEQ ID NO: 476030 - DNA, 120 bp, Artificial Sequence
  ENSG00000160284_10 (sequence is synthesized)
taccctgaggccggctcccccgggagcggagttccagatttcggaaggttcacgagtgttgccgacacgccctcccaactgcagacatcctccctggaggacctgctgtgctcacatgcc

SEQ ID NO: 476031 - DNA, 120 bp, Artificial Sequence
  ENSG00000160284_11 (sequence is synthesized)
cccctgtccagcgaggacgacacctccccgggctgtgcagccccctcccaggcacccttcaaggccttcctcagtcccccagagccacatagccaccgaggcaccgacaggaagctgtcc

SEQ ID NO: 476032 - DNA, 120 bp, Artificial Sequence
  ENSG00000160284_12 (sequence is synthesized)
ccgctcctgagccccttgcaagactcactggtggacaagaccctgctggagcccagggagatggtccggcctaagaaggtgtgtttctcggagagcagcctgcccaccggggacaggacc

SEQ ID NO: 476033 - DNA, 120 bp, Artificial Sequence
  ENSG00000160284_13 (sequence is synthesized)
aggaggagctactacctcaatgagatccagagcttcgcgggcgccgagaaggacgcgcgcgtggtgggcgagatcgccttccagctggaccgccgcatcctggcctacgtgttcccgggc

SEQ ID NO: 476034 - DNA, 120 bp, Artificial Sequence
  ENSG00000160284_14 (sequence is synthesized)
gtgacgcggctctacggcttcacggtggccaacatccccgagaagatcgagcagacctccaccaagtctctggacggctccgtggacgagaggaagctgcgcgagctgacgcagcgctac

SEQ ID NO: 476035 - DNA, 120 bp, Artificial Sequence
  ENSG00000160284_15 (sequence is synthesized)
ctggccctgagcgcgcgcctggagaagctgggctacagccgcgacgtgcacccggcgttcagcgagttcctcatcaacacctacggaatcctgaagcagcggcccgacctgcgcgccaac

SEQ ID NO: 476036 - DNA, 120 bp, Artificial Sequence
  ENSG00000160284_16 (sequence is synthesized)
cccctgcacagcagcccggccgcgctgcgcaagctggtcatcgacgtggtgccccccaagttcctgggcgactcgctgctgctgctcaactgcctgtgcgagctctccaaggaggacggc

SEQ ID NO: 476037 - DNA, 120 bp, Artificial Sequence
  ENSG00000160284_17 (sequence is synthesized)
aagcccctcttcgcctggtgagccgccccgcgcccgccgccttgcctgcagtaaacgcgtttgttccaacccggggccgcggtgcctcctgcgcgtccccccggaggggaaagggccgcg

SEQ ID NO: 476038 - DNA, 120 bp, Artificial Sequence
  ENSG00000160284_18 (sequence is synthesized)
tcccccgcgcgcgaggccagagaaggccccgctcccaccggtgctgggccccgaccgcagcccgccgctgcccgcacctgcggagtgcttctcacccctcattaaaatcatccgtttgca

SEQ ID NO: 476039 - DNA, 120 bp, Artificial Sequence
  ENSG00000160284_19 (sequence is synthesized)
ggccggcccactgggttgtgctttctgccgtacgtcccttcccatgaggatgagatgacccatctgttgcatcccggctgctgataaaacaagaccctcggagccaagaaacaacactga

SEQ ID NO: 476040 - DNA, 120 bp, Artificial Sequence
  ENSG00000160285_0 (sequence is synthesized)
gggcggggctgggcggcaggtcccgggtgcggacatctggcagctggcagtgggcggcgtagagcactgcagcagcaatgacggagggcacgtgtctgcggcgccgagggggcccctaca

SEQ ID NO: 476041 - DNA, 120 bp, Artificial Sequence
  ENSG00000160285_1 (sequence is synthesized)
agaccgagcccgccaccgacctcggccgctggcgactcaactgcgagaggggccggcagacgtggacctacctgcaggacgagcgcgccggccgcgagcagaccggcctggaagcctacg

SEQ ID NO: 476042 - DNA, 120 bp, Artificial Sequence
  ENSG00000160285_2 (sequence is synthesized)
ccctggggctggacaccaagaattactttaaggacttgcccaaagcccacaccgcctttgagggggctctgaacgggatgacattttacgtggggctgcaggctgaggatgggcactgga

SEQ ID NO: 476043 - DNA, 120 bp, Artificial Sequence
  ENSG00000160285_3 (sequence is synthesized)
cgggtgattatggtggcccacttttcctcctgccaggcctcctgatcacttgccacgtggcacgcatccctctgccagccggatacagagaagagattgtgcggtacctgcggtcagtgc

SEQ ID NO: 476044 - DNA, 120 bp, Artificial Sequence
  ENSG00000160285_4 (sequence is synthesized)
agctccctgacggtggctggggcctgcacattgaggataagtccaccgtgtttgggactgcgctcaactatgtgtctctcagaattctgggtgttgggcctgacgatcctgacctggtac

SEQ ID NO: 476045 - DNA, 120 bp, Artificial Sequence
  ENSG00000160285_5 (sequence is synthesized)
gagcccggaacattcttcacaagaaaggtggtgctgtggccatcccctcctgggggaagttctggctggctgtcctgaatgtttacagctgggaaggcctcaataccctgttcccagaga

SEQ ID NO: 476046 - DNA, 120 bp, Artificial Sequence
  ENSG00000160285_6 (sequence is synthesized)
tgtggctgtttcctgactgggcaccggcacacccctccacactctggtgccactgccggcaggtgtacctgcccatgagctactgctacgccgttcggctgagtgccgcggaagacccgc

SEQ ID NO: 476047 - DNA, 120 bp, Artificial Sequence
  ENSG00000160285_7 (sequence is synthesized)
tggtccagagcctccgccaggagctctatgtggaggacttcgccagcattgactggctggcgcagaggaacaacgtggcccccgacgagctgtacacgccgcacagctggctgctccgcg

SEQ ID NO: 476048 - DNA, 120 bp, Artificial Sequence
  ENSG00000160285_8 (sequence is synthesized)
tggtatatgcgctcctcaacctgtatgagcaccaccacagtgcccacctgcggcagcgggccgtgcagaagctgtatgaacacattgtggccgacgaccgattcaccaagagcatcagca

SEQ ID NO: 476049 - DNA, 120 bp, Artificial Sequence
  ENSG00000160285_9 (sequence is synthesized)
tcggcccgatctcgaaaaccatcaacatgcttgtgcgctggtatgtggacgggcccgcctccactgccttccaggagcatgtctccagaatcccggactatctctggatgggccttgacg

SEQ ID NO: 476050 - DNA, 120 bp, Artificial Sequence
  ENSG00000160285_10 (sequence is synthesized)
gcatgaaaatgcagggcaccaacggctcacagatctgggacaccgcattcgccatccaggctctgcttgaggcgggcgggcaccacaggcccgagttttcgtcctgcctgcagaaggctc

SEQ ID NO: 476051 - DNA, 120 bp, Artificial Sequence
  ENSG00000160285_11 (sequence is synthesized)
atgagttcctgaggctctcacaggtcccagataaccctcccgactaccagaagtactaccgccagatgcgcaagggtggcttctccttcagtacgctggactgcggctggatcgtttctg

SEQ ID NO: 476052 - DNA, 120 bp, Artificial Sequence
  ENSG00000160285_12 (sequence is synthesized)
gagaaatccagatggagggttcgccacctatgagaccaagcgtggggggcacttgctggagctgctgaacccctcggaggtcttcggggacatcatgattgactacacctatgtggagtg

SEQ ID NO: 476053 - DNA, 120 bp, Artificial Sequence
  ENSG00000160285_13 (sequence is synthesized)
cacctcagccgtgatgcaggcgcttaagtatttccacaagcgtttcccggagcacagggcagcggagatccgggagaccctcacgcagggcttagagttctgtcggcggcagcagagggc

SEQ ID NO: 476054 - DNA, 120 bp, Artificial Sequence
  ENSG00000160285_14 (sequence is synthesized)
cgatggctcctgggaaggctcctggggagtttgcttcacctacggcacctggtttggcctggaggccttcgcctgtatggggcagacctaccgagatgggactgcctgtgcagaggtctc

SEQ ID NO: 476055 - DNA, 120 bp, Artificial Sequence
  ENSG00000160285_15 (sequence is synthesized)
ccgggcctgtgacttcctgctgtcccggcagatggcagacggaggctggggggaggactttgagtcctgcgaggagcggcgttatttgcagagtgcccagtcccagatccataacacatg

SEQ ID NO: 476056 - DNA, 120 bp, Artificial Sequence
  ENSG00000160285_16 (sequence is synthesized)
ctgggccatgatggggctgatggccgttcggcatcctgacatcgaggcccaggagagaggagtccggtgtctacttgagaaacagctccccaatggcgactggccgcaggaaaacattgc

SEQ ID NO: 476057 - DNA, 120 bp, Artificial Sequence
  ENSG00000160285_17 (sequence is synthesized)
tggggtcttcaacaagtcctgtgccatctcctacacgagctacaggaacatcttccccatctgggccctcggccgcttctcccagctgtaccctgagagagcccttgctggccacccctg

SEQ ID NO: 476058 - DNA, 120 bp, Artificial Sequence
  ENSG00000160285_18 (sequence is synthesized)
agaacatgcctacctgctgggtgccgtctgtgcgttccatggccttcaagtcacaggacgcagcgattccctgccctcttcggtgttattacacaggcaggacttcagtgtcagtatccc

SEQ ID NO: 476059 - DNA, 120 bp, Artificial Sequence
  ENSG00000160285_19 (sequence is synthesized)
tgccttcagtcttctttagaaatcacatctgtgttcaatccattgtttagagggagtgtatttttcctgttccacgaagaggactttttgttcacaattggatcacaatgcagaggagtc

SEQ ID NO: 476060 - DNA, 120 bp, Artificial Sequence
  ENSG00000160285_20 (sequence is synthesized)
tgttcctcccccgtcggcttctcggtgctgggagggtgacctgtcccagatgactcatcaccctgacatgctcttgacaaaggacaccaccaagaggagatggcagctgtaccggtgcag

SEQ ID NO: 476061 - DNA, 120 bp, Artificial Sequence
  ENSG00000160285_21 (sequence is synthesized)
cctctgtctgagggggatatttgcctcagtgtgattaaaaatcagtcatgaaagatttttgaattcagattatttttatcaggaacagattttgaacatcctgaaatcttttccctggca

SEQ ID NO: 476062 - DNA, 120 bp, Artificial Sequence
  ENSG00000160285_22 (sequence is synthesized)
tcatattaggttttctttgttcactatgatgtaaagtttcagactcttgatatttttaatatcaacatagacggtaggacaaggaacggtaccagaaatgagtaaagagacaataatgat

SEQ ID NO: 476063 - DNA, 120 bp, Artificial Sequence
  ENSG00000160285_23 (sequence is synthesized)
aagatcgatttatcaagacataacaaccccaaatgtatatgcactaaataacagcttcaaaatacatgaagcaaaatggcagaattgaagagaatgagataaaaacagaattttaacggg

SEQ ID NO: 476064 - DNA, 120 bp, Artificial Sequence
  ENSG00000160285_24 (sequence is synthesized)
tcctggccgggttggggagccctcccataaccctgtcttgggctccaacccctcaacctctatctcatagatgtgaatctgggggccaggctggaggcagggatggggacagggtgggtg

SEQ ID NO: 476065 - DNA, 120 bp, Artificial Sequence
  ENSG00000160285_25 (sequence is synthesized)
ccctgaggaggcacagcgccttctgccacctctgggcacggcctcaaggtagtgaggctaggaggttttttctgaccaatagctgagttcttgggagaggagcagctgtgcctgtgtgat

SEQ ID NO: 476066 - DNA, 120 bp, Artificial Sequence
  ENSG00000160285_26 (sequence is synthesized)
tccttagtgtcgagtgggctctgggctggggtcggccctgggcaggcttctcctgcaccttttgtctgctgggctgagggacacgagggcaaccctgtgacaatggcaggtagtgtgcat

SEQ ID NO: 476067 - DNA, 120 bp, Artificial Sequence
  ENSG00000160285_27 (sequence is synthesized)
ccgtgaatagcccagtgcgggggttgctcatggagcatcctgaggccgtgcagcagggagccccatgcccctgggtcgtgagcttgcctgcgtatggggtggtgtcatggagcctcatgc

SEQ ID NO: 476068 - DNA, 120 bp, Artificial Sequence
  ENSG00000160285_28 (sequence is synthesized)
ccctgggtcgtgagctcgcctgagtatggggtggtgtcatggagccgcatacccctgggttgtgagctcgcctgcatatgcagggtctgtcatggaacatcccaagtctgtgcagcaggg

SEQ ID NO: 476069 - DNA, 120 bp, Artificial Sequence
  ENSG00000160285_29 (sequence is synthesized)
agccccatgcccctgggacatgaacccacctgcgtggaatgctgtttgtgaggtgtctacagggtttatagtagtcttgtggacacagaaatgcacaggggacacttacggacacagaaa

SEQ ID NO: 476070 - DNA, 120 bp, Artificial Sequence
  ENSG00000160285_30 (sequence is synthesized)
tgcacaggggaggccgagcataaccaggggtgaggggcaggcagcagttgtagttactgccgcggggcactgctatgtgcagggacagccagcacccagcccatcaccactccctgggct

SEQ ID NO: 476071 - DNA, 120 bp, Artificial Sequence
  ENSG00000160285_31 (sequence is synthesized)
ggctggcaggtatggcaccctgggagcccggcatatacccagggcacccctacggctgccgccagtctcatgcccaggtgggtgctctgggctggagcgagggccaggttttgggccgag

SEQ ID NO: 476072 - DNA, 120 bp, Artificial Sequence
  ENSG00000160285_32 (sequence is synthesized)
gcttccccaggcaatcctgtgagctcccttctagcctctgacccagtctggtctggcttgcatggatgtagggcttggggtgggaagttcaggtcctggctttgcctttgcctgatgtgg

SEQ ID NO: 476073 - DNA, 120 bp, Artificial Sequence
  ENSG00000160285_33 (sequence is synthesized)
atgagcagctcacatgctcagggccacctgagactgtcactgctctcccctggctactgggaggagtcactgagagcttcgttacccctgctgccttgcccagggcacaccctatacctc

SEQ ID NO: 476074 - DNA, 120 bp, Artificial Sequence
  ENSG00000160285_34 (sequence is synthesized)
cttatctgctcttcccctccctgccgccttctgggcaggtagcagtccctggcctctccccctggctgatcactctccctcaggcagtggagatctgcgtctggacaccctcagatcctg

SEQ ID NO: 476075 - DNA, 120 bp, Artificial Sequence
  ENSG00000160285_35 (sequence is synthesized)
tcattgcctgcccagagtccttcaggggcacccctctgccttggtgtgcagtccagggctctcacccaggtgccgcaccctctggggtcttctgtccagctcccttgccccatgtgctgt

SEQ ID NO: 476076 - DNA, 120 bp, Artificial Sequence
  ENSG00000160285_36 (sequence is synthesized)
cactgactctccttgggactcgcctgcctgctcagagccctgcagggcttggtcagctgcctgttcagtgtcaacacttccctgcacatcttaaaactgggctttattttcgctgaagga

SEQ ID NO: 476077 - DNA, 120 bp, Artificial Sequence
  ENSG00000160285_37 (sequence is synthesized)
actgtgttgggacccttgacatctgtcaggtttgcacatgctgtttttttttctcagcccacgtgttctcccccacgtggggtagcagcaggacagacagtgaatcacagagtctgccct

SEQ ID NO: 476078 - DNA, 120 bp, Artificial Sequence
  ENSG00000160285_38 (sequence is synthesized)
gagcagaggctgctgtccctgggactcctagccatggtcagactgtacaaaacggttttccagaaatgaaatgtaaatccatttttatactgaaaatgttactgaaagtcacttttatga

SEQ ID NO: 476079 - DNA, 120 bp, Artificial Sequence
  ENSG00000160285_39 (sequence is synthesized)
gcatctgccttaataaacagacattgattcccttatcagaagcctgtcacactgtgtttcgtttcatcctggggagaactgcagatttggggtttctggctgtcatacgtcacctgcctg

SEQ ID NO: 476080 - DNA, 120 bp, Artificial Sequence
  ENSG00000160285_40 (sequence is synthesized)
tggggcgagtgggaggcccagcctggtttagggaacaagagtgacgtgaggagtagcagggtgcgtctccagttacctgagggaaaacagatattttaagagataatagcatagcctatt

SEQ ID NO: 476081 - DNA, 120 bp, Artificial Sequence
  ENSG00000160285_41 (sequence is synthesized)
ttaatatgttttaaaggccataagcatatccaggaagataaataaacgtgatacaatgtccacataggaggaactttctttcactgcattgttttccttcacagtggccttcaagtcaca

SEQ ID NO: 476082 - DNA, 120 bp, Artificial Sequence
  ENSG00000160285_42 (sequence is synthesized)
aggggcggggctgggcggcaggtcccgggtgcggacatctggcagctggcagtgggcggcgtagagcactgcagcagcaatgacggagggcacgtgagtcccctcgccccgggctcctga

SEQ ID NO: 476083 - DNA, 120 bp, Artificial Sequence
  ENSG00000160285_43 (sequence is synthesized)
cgaatgcggggtggtcctaggtgctgaggagagcgcgactggggcagtgggccggcggccggcgttggggcggggcctgggtcgctgatggccggtggtcctcaggtgtctgcggcgccg

SEQ ID NO: 476084 - DNA, 120 bp, Artificial Sequence
  ENSG00000160285_44 (sequence is synthesized)
aagggagaccattctcattcttttgagaccctggaaaggatggaattgggataggtaaactgctgttttaccagaatgttcactggaccaatctcgtgttccagggagaccctcacgcag

SEQ ID NO: 476085 - DNA, 120 bp, Artificial Sequence
  ENSG00000160285_45 (sequence is synthesized)
acatacgcatgcacaggcacgtgtgtacacacatgcagatacacccacagcatgccatctgtgacacacacagacgtaggtacatggagacacatgcacacacaggtctgtgcacacaca

SEQ ID NO: 476086 - DNA, 120 bp, Artificial Sequence
  ENSG00000160285_46 (sequence is synthesized)
cacacacatacgcatgcacaggcacctatgtacacacatgcagatacacccacagcatcccatctgtgccacacacagacataggtacatgaagacagatgcacacacaggtctatgcac

SEQ ID NO: 476087 - DNA, 120 bp, Artificial Sequence
  ENSG00000160285_47 (sequence is synthesized)
gcatgcacaggcacctgtgtacacacatgcagatgcacccacagtatcccatctgtgccacacacagacatacgtacatggagacagatgcacatacaggtctatgcacacatgtacaca

SEQ ID NO: 476088 - DNA, 120 bp, Artificial Sequence
  ENSG00000160285_48 (sequence is synthesized)
tgcacaggcacctgtgtacacacatgcagatgcacccgcagtatcccatctgtgccatacacagacatacgtacatggagacagatgcacatacaggtctatgcacacatgtacacatgc

SEQ ID NO: 476089 - DNA, 120 bp, Artificial Sequence
  ENSG00000160285_49 (sequence is synthesized)
acacatgcacaggcacctgtgcacacatatgcagatgcacccgcagtatcccatctgtgccacacacagacatacgtacatggagacagatgtacacacaggtctatgcacacatgtaca

SEQ ID NO: 476090 - DNA, 120 bp, Artificial Sequence
  ENSG00000160285_50 (sequence is synthesized)
tatgcacacatgtacacatgcacaggcacctgtgtacacacatgcagatgcacccgcagtatcccatctgtgccacacacagacatacgtacatggagacagatgcacacacaggtctat

SEQ ID NO: 476091 - DNA, 120 bp, Artificial Sequence
  ENSG00000160285_51 (sequence is synthesized)
acatgcacaggcacctgtgcacacatatgcagatgcacccgcagtatcgcatctgtgccacacagacatacgtacatggagacagatgtacatacaggtctatgcacacatgtacacatg

SEQ ID NO: 476092 - DNA, 120 bp, Artificial Sequence
  ENSG00000160285_52 (sequence is synthesized)
tgcacacatacatacagatgcacccgcaacatcccgtctgtgctgccctattaggtttgtggccatttggggaatcttcctaaaaccctaaaagctagggcaggtctgcttgagcaggag

SEQ ID NO: 476093 - DNA, 120 bp, Artificial Sequence
  ENSG00000160285_53 (sequence is synthesized)
cagcagggtctgggggacccctgagggcaggacagtcagggacccacagttgagctgggcccgctgagccctggatccttcttggtgtcttatcctggccagcaagcaagtgtgagctcc

SEQ ID NO: 476094 - DNA, 120 bp, Artificial Sequence
  ENSG00000160285_54 (sequence is synthesized)
tgtgggtctccagaggcccatgaggaccagtgggccagttgggaacaaggcttggcgtcctcttcaggggggaacaccagggcaggcctgaggaggcctgtgtccccagcctgtcattgc

SEQ ID NO: 476095 - DNA, 120 bp, Artificial Sequence
  ENSG00000160285_55 (sequence is synthesized)
tgtggctccgcttctcagggagcctaggaagaaggtgtggcaagagcccgaggcgctggctgcacctggcggggcctgtgggcgtcagtttagacccatccattctcactgcagcattcc

SEQ ID NO: 476096 - DNA, 120 bp, Artificial Sequence
  ENSG00000160285_56 (sequence is synthesized)
ctgccaggtaggagtatgctgccccagcctgatggtatggccaccctggatcacccttgggatcctggcccagcctggtctagggttttgatgaagcaggtgaaaatccaggggctcaca

SEQ ID NO: 476097 - DNA, 120 bp, Artificial Sequence
  ENSG00000160285_57 (sequence is synthesized)
agaaaagggctggcaaactctgccctatgtcagagtcgtcctgctattggtctaggggatcagctagccttgccagtgtagggtgacaggctctctgataagagaagcaagtggttctct

SEQ ID NO: 476098 - DNA, 120 bp, Artificial Sequence
  ENSG00000160293_0 (sequence is synthesized)
gccatggagcagtggcggcagtgcggccgctggctcatcgattgcaaggtcctgccgcccaaccaccgggtggtgtggccctcggccgtggtcttcgacctggcgcaggcgctgcgcgac

SEQ ID NO: 476099 - DNA, 120 bp, Artificial Sequence
  ENSG00000160293_1 (sequence is synthesized)
ggggtccttctgtgccagctgctgcacaacctctcccccggctccatcgacctcaaggacatcaacttccggccgcagatgtcccagtttctgtgtttgaagaacatacgcaccttcctg

SEQ ID NO: 476100 - DNA, 120 bp, Artificial Sequence
  ENSG00000160293_2 (sequence is synthesized)
aaagtctgccacgataaatttggattaaggaacagcgagctgtttgacccctttgacctcttcgatgtgcgagactttggaaaggtcatctccgcggtgtcgaggctctccctgcacagc

SEQ ID NO: 476101 - DNA, 120 bp, Artificial Sequence
  ENSG00000160293_3 (sequence is synthesized)
atcgcgcagaacaaagggatcaggccttttccctcagaggagaccacagagaatgacgatgacgtctaccgcagcctggaggagctggccgacgagcatgacctgggggaggacatctac

SEQ ID NO: 476102 - DNA, 120 bp, Artificial Sequence
  ENSG00000160293_4 (sequence is synthesized)
gactgcgtcccgtgtgaggatggaggggacgacatctacgaggacatcatcaaggtggaggtgcagcagcccatgaaaatgggcatgactgaagatgacaagaggaactgctgcctgctg

SEQ ID NO: 476103 - DNA, 120 bp, Artificial Sequence
  ENSG00000160293_5 (sequence is synthesized)
gagatccaggagaccgaggccaagtactaccgcaccctggaggacattgagaagaactacatgagccccctgcggctggtgctgagcccggcggacatggcagctgtcttcattaacctg

SEQ ID NO: 476104 - DNA, 120 bp, Artificial Sequence
  ENSG00000160293_6 (sequence is synthesized)
gaggacctgatcaaggtgcatcacagcttcctgagggccatcgacgtgtccgtgatggtggggggcagcacgctggccaaggtcttcctcgatttcaaggaaaggcttctgatctacggg

SEQ ID NO: 476105 - DNA, 120 bp, Artificial Sequence
  ENSG00000160293_7 (sequence is synthesized)
gagtactgcagccacatggagcacgcccagaacacactgaaccagctcctggccagccgggaggacttcaggcagaaagtcgaggagtgcacactgaaggtccaggatggaaaatttaag

SEQ ID NO: 476106 - DNA, 120 bp, Artificial Sequence
  ENSG00000160293_8 (sequence is synthesized)
ctgcaagacctgctggtggtccccatgcagagggtgctcaaataccacctgctcttgaaggagcttctgagccattctgcggaacggcctgagaggcagcagctcaaagaagcactggaa

SEQ ID NO: 476107 - DNA, 120 bp, Artificial Sequence
  ENSG00000160293_9 (sequence is synthesized)
gccatgcaggacttggcgatgtacatcaatgaagttaaacgggacaaggagaccttgaggaaaatcagcgaatttcagagttctatagaaaatttgcaagtgaaactggaggaatttgga

SEQ ID NO: 476108 - DNA, 120 bp, Artificial Sequence
  ENSG00000160293_10 (sequence is synthesized)
agaccaaagattgacggggaactgaaagtccggtccatagtcaaccacaccaagcaggacaggtacttgttcctgtttgacaaggtggtcatcgtctgcaagcggaagggctacagctac

SEQ ID NO: 476109 - DNA, 120 bp, Artificial Sequence
  ENSG00000160293_11 (sequence is synthesized)
gagctcaaggagatcatcgagctgctgttccacaagatgaccgacgaccccatgaacaacaaggacgtcaagaagtggtcctacggcttctacctaattcaccttcaaggaaagcagggc

SEQ ID NO: 476110 - DNA, 120 bp, Artificial Sequence
  ENSG00000160293_12 (sequence is synthesized)
ttccagtttttctgcaaaacagaagatatgaagaggaagtggatggagcagtttgagatggccatgtcaaacatcaagccagacaaagccaatgccaaccaccacagtttccagatgtac

SEQ ID NO: 476111 - DNA, 120 bp, Artificial Sequence
  ENSG00000160293_13 (sequence is synthesized)
acgtttgacaagaccaccaactgcaaagcctgcaaaatgttcctcaggggcaccttctaccagggatacatgtgtaccaagtgtggcgtcggggcacacaaggagtgcctggaagtgata

SEQ ID NO: 476112 - DNA, 120 bp, Artificial Sequence
  ENSG00000160293_14 (sequence is synthesized)
cctccctgcaagttcacttctcctgcagatctggacgcctccggagcgggaccaggtcccaagatggtggccatgcagaattaccatggcaacccagcccctcccgggaagcctgtgctg

SEQ ID NO: 476113 - DNA, 120 bp, Artificial Sequence
  ENSG00000160293_15 (sequence is synthesized)
accttccagacgggcgacgtgcttgagctgctgaggggcgaccctgagtctccgtggtgggagggtcgtctggtacaaaccaggaagtcagggtatttccccagctcatctgtgaagccc

SEQ ID NO: 476114 - DNA, 120 bp, Artificial Sequence
  ENSG00000160293_16 (sequence is synthesized)
tgccctgtggatggaaggccgcccatcagccggccgccatcccgggagatcgactacactgcatacccctggtttgcaggtaacatggagaggcagcagacggacaacctgctcaagtcc

SEQ ID NO: 476115 - DNA, 120 bp, Artificial Sequence
  ENSG00000160293_17 (sequence is synthesized)
cacgccagcgggacctacctgatcagggagcggcctgccgaggctgagcgctttgcaataagcatcaagttcaatgatgaggtgaagcacatcaaggtggtggagaaggacaactggatc

SEQ ID NO: 476116 - DNA, 120 bp, Artificial Sequence
  ENSG00000160293_18 (sequence is synthesized)
cacatcacagaggccaagaaattcgacagcctcctggagttggtggagtactaccagtgccactcactgaaggagagcttcaagcagctggacaccacactcaagtacccctacaagtcc

SEQ ID NO: 476117 - DNA, 120 bp, Artificial Sequence
  ENSG00000160293_19 (sequence is synthesized)
ggcctccagggcctccagccggtccccagtgttcacgccccgcgtcatcggcacagctgtggccaggtataactttgccgcccgagatatgagggagctttcgctgcgggagggtgacgt

SEQ ID NO: 476118 - DNA, 120 bp, Artificial Sequence
  ENSG00000160293_20 (sequence is synthesized)
ggtgaggatctacagccgcatcggcggagaccagggctggtggaagggcgagaccaacggacggattggctggtttccttcaacgtacgtagaagaggagggcatccagtgacggcagga

SEQ ID NO: 476119 - DNA, 120 bp, Artificial Sequence
  ENSG00000160293_21 (sequence is synthesized)
acgtggacaagactcgcagattttcttgggagagtcactccagccctgaagtctgtctctagctcctctgtgactcagaggggaaataccaacctcccagtcttccactgcccacaggga

SEQ ID NO: 476120 - DNA, 120 bp, Artificial Sequence
  ENSG00000160293_22 (sequence is synthesized)
tagggagggtgttgagaatcctaaactcgaaccgtttcactgtcagcctgccctcggcgacccatcactgggtatgctattgtacatagaggaaacctgggctagccccacccagagcgc

SEQ ID NO: 476121 - DNA, 120 bp, Artificial Sequence
  ENSG00000160293_23 (sequence is synthesized)
agaggagggggcaccgacagcgctgcgagccaggctctgggtagtggctgaggccagaggcccatcgcctgcccctgtccaactgagatggccttcaggagcctaggtttgaacagcaga

SEQ ID NO: 476122 - DNA, 120 bp, Artificial Sequence
  ENSG00000160293_24 (sequence is synthesized)
tgctgtcccaggaagggctagggacatcggaggggacctgcccccacaccctctgctcagcccctggactcagccttgcctgtcttttcctgctgctcccagggggaggtgtcagacctc

SEQ ID NO: 476123 - DNA, 120 bp, Artificial Sequence
  ENSG00000160293_25 (sequence is synthesized)
gggaggcagacgggaccagagccaggctgttcactgtgggcccacttgccccactgtgctagggcgcgggaggagagagcactgtggtcgccctctgcagccactctggctcccaagact

SEQ ID NO: 476124 - DNA, 120 bp, Artificial Sequence
  ENSG00000160293_26 (sequence is synthesized)
tccctgactcccccactcccctccttgccaggggcacacccggaccccacacggcaggcccctctcttgggaggggcctttggaatgatgaaattccaaccctgctgcccggtcagcggt

SEQ ID NO: 476125 - DNA, 120 bp, Artificial Sequence
  ENSG00000160293_27 (sequence is synthesized)
accgtttcctgccctctctctgagaggccctttctggagtcctgggaaggtgtctgcctggccgcgctgccagatcagtacatcttttgtaaaaaccctgaaatgggcagggaagaaaac

SEQ ID NO: 476126 - DNA, 120 bp, Artificial Sequence
  ENSG00000160293_28 (sequence is synthesized)
agggatttcccctctctagatccctgccaggtccctctccaggaggcccctctgctctcctgaagggtggtccctgagggtctgcccagccttggcacgagaggttggttccagcccctg

SEQ ID NO: 476127 - DNA, 120 bp, Artificial Sequence
  ENSG00000160293_29 (sequence is synthesized)
gcagggcttccttccaagggcccctgcagcctacaaactgggcctcgggcgactcaaaataagtgctcttgggggtggctctaccccattacctcccccagccacaactcctggccttcg

SEQ ID NO: 476128 - DNA, 120 bp, Artificial Sequence
  ENSG00000160293_30 (sequence is synthesized)
acttctggctgggttagccagaccctggtttctctaccctgatgttgcatgagacctggtaacagtgtctccctcccagctccttgccaaagcctctgttgagacctgggcttcttgtag

SEQ ID NO: 476129 - DNA, 120 bp, Artificial Sequence
  ENSG00000160293_31 (sequence is synthesized)
ccccttctccctctggccagctgcacagcctgtgggaggtgcccggcccaggctgggtgtgggggaagctggtccctgctgtgggtggcgctggggacctaggggctccttctgaggttg

SEQ ID NO: 476130 - DNA, 120 bp, Artificial Sequence
  ENSG00000160293_32 (sequence is synthesized)
gccttgtggcctctgggctgtatgcctctggggtgtagggaagaggcgggaggagtcatggggatggggagcggcagggggagagaggggccctcgacaaaggcttgggaaatgagggga

SEQ ID NO: 476131 - DNA, 120 bp, Artificial Sequence
  ENSG00000160293_33 (sequence is synthesized)
ggtggaggcagggcaggggaagcgaagagtcagccttggagagagcaccctggggcctccgtgtcggggtacacccagcactttgcgacctgcggcccagcaggcgcggaggatggcggg

SEQ ID NO: 476132 - DNA, 120 bp, Artificial Sequence
  ENSG00000160293_34 (sequence is synthesized)
gaggaagccagcagcccctgtgtttactgtcgtcagaaaggtcttgtgttttggttttggggtttttgttttgtttgtgttttgtttggcttgtttgttttttaaggggaaaaaagtttg

SEQ ID NO: 476133 - DNA, 120 bp, Artificial Sequence
  ENSG00000160293_35 (sequence is synthesized)
taattatttcatccaaatctcccgttatatatctgtgaataataagagattttataatagcaagaaaatgatgtatattttagtttgttgacaaataagtcatcatgatcacgaaggaca

SEQ ID NO: 476134 - DNA, 120 bp, Artificial Sequence
  ENSG00000160293_36 (sequence is synthesized)
ctgagaaaaaataatttagaaccctggtttttgtgaatttttttgttttgtgtttctttgttttgagatttgtgtttggtttggtttttgcactgcactaaggcaggagggttggagggc

SEQ ID NO: 476135 - DNA, 120 bp, Artificial Sequence
  ENSG00000160293_37 (sequence is synthesized)
tgggtgcagcctgggagtccgatggttttcagcaggagacggggtgtcccctgcagggggctaaactgcaggggcctgagattagctgtgaacatgtgggagcccgatgcatgtgggtca

SEQ ID NO: 476136 - DNA, 120 bp, Artificial Sequence
  ENSG00000160293_38 (sequence is synthesized)
gggatctgggggcccccccagctggcgggaaccccaaatggacacaaactgtacatttgccaatgggtttttttcagaccatggtttttacttgcaaataaacctgagttcttttctgca

SEQ ID NO: 476137 - DNA, 80 bp, Artificial Sequence
  ENSG00000160293_39 (sequence is synthesized)
cgcggattggggagcgctgcggcgactggctgcgtggagcccggcccggggcccgcaggcacttgcgtgtgtgaagcggg

SEQ ID NO: 476138 - DNA, 80 bp, Artificial Sequence
  ENSG00000160293_40 (sequence is synthesized)
cgtgggcgggagcggcggcccgagaggagcccgaggagtaggaggaggaagaggaggggacgcacggcggcgcagcgggg

SEQ ID NO: 476139 - DNA, 120 bp, Artificial Sequence
  ENSG00000160293_41 (sequence is synthesized)
ctccatcgacaccagcgtgccttgtcacagatactggggttggaagcagatgccctctgcctgtgtctttatcatgcatttgcagcgtgttgtcgcgtaacccgttggcggctgcaggaa

SEQ ID NO: 476140 - DNA, 120 bp, Artificial Sequence
  ENSG00000160293_42 (sequence is synthesized)
atcccttgatctccatgccagtggtgtgaggacttggctctgggaagaggggcctctgggtggcagtggtggcagcagcccacgcttcaggacgcactaggagcagaggaggtgtgctca

SEQ ID NO: 476141 - DNA, 120 bp, Artificial Sequence
  ENSG00000160293_43 (sequence is synthesized)
ggccctgccattgtttctcatttgcccccaagacattaattgtgtctgttggagcctgacaatttgatgtttgcagcaaaaaagccaaatgagaccaagaaggagaaaagaaaaaaaaat

SEQ ID NO: 476142 - DNA, 120 bp, Artificial Sequence
  ENSG00000160294_0 (sequence is synthesized)
atcttaaaggatcacgctttaaacctctgtaacaaagtaattatttgtaccactctctaccccaccctccaacaaaataacctatcggctctcagaaaataataaccctttgcctgcctt

SEQ ID NO: 476143 - DNA, 120 bp, Artificial Sequence
  ENSG00000160294_1 (sequence is synthesized)
tgaaatagttatccttttagtatgacagtgttcaaaaattcttttcttagacttgtagcagaacatagctatgatgatctgaatttttctctttcagcttgttctaaagacgaaggggaa

SEQ ID NO: 476144 - DNA, 120 bp, Artificial Sequence
  ENSG00000160294_2 (sequence is synthesized)
ctccctagtgctacaggctgtttcaggaagccaattaattttgtacacataatacttaattaccttctaataattggagcagaagatgaacccaactaatcctttcagtgggcagcagcc

SEQ ID NO: 476145 - DNA, 120 bp, Artificial Sequence
  ENSG00000160294_3 (sequence is synthesized)
tagtgctttttcggcgtcttctagtaatgtaggaacacttccatctaagccgccatttcgatttggtcaaccttctctttttggacaaaacagtaccttatctgggaagagctcgggatt

SEQ ID NO: 476146 - DNA, 120 bp, Artificial Sequence
  ENSG00000160294_4 (sequence is synthesized)
ttcacaggtatccagctttccagcgtcttctggagtaagtcattcctcttcagtgcaaacattagggttcacccaaacctcaagtgttggacccttttctggacttgagcacacttccac

SEQ ID NO: 476147 - DNA, 120 bp, Artificial Sequence
  ENSG00000160294_5 (sequence is synthesized)
ctttgtggctacctctgggccttcaagttcatctgtgctgggaaacacaggatttagttttaaatcacccaccagtgttggggctttcccaagcacttctgcttttggacaagaagctgg

SEQ ID NO: 476148 - DNA, 120 bp, Artificial Sequence
  ENSG00000160294_6 (sequence is synthesized)
agaaatagtgaactctggttttgggaaaacagaattcagctttaaacctctggaaaatgcagtgttcaaaccaatactgggggctgaatctgagccagagaaaacccagagccaaattgc

SEQ ID NO: 476149 - DNA, 120 bp, Artificial Sequence
  ENSG00000160294_7 (sequence is synthesized)
ttctgggttttttacattttcccacccaattagtagtgcacctggaggcctggcccctttctcttttcctcaagtaacaagtagttcagctaccacttcaaattttaccttttcaaaacc

SEQ ID NO: 476150 - DNA, 120 bp, Artificial Sequence
  ENSG00000160294_8 (sequence is synthesized)
tgttagtagtaataattcattatctgcctttacccctgctttgtcaaaccaaaatgtagaggaagagaagagaggacctaagtcaatatttggaagttctaataatagcttcagtagctt

SEQ ID NO: 476151 - DNA, 120 bp, Artificial Sequence
  ENSG00000160294_9 (sequence is synthesized)
ccctgtatcatctgcggttttgggcgaacctttccaggctagcaaagcaggtgtcaggcaggggtgtgaagaagctgtttcccaggtggaaccacttcccagcctaatgaaaggactgaa

SEQ ID NO: 476152 - DNA, 120 bp, Artificial Sequence
  ENSG00000160294_10 (sequence is synthesized)
aaggaaggaggaccaggatcgctccccaaggagacatggccacgagccagcagaagattcggatcctctgtcccggggcgatcatcctccagacaaacgacctgtccgcctgaatcgacc

SEQ ID NO: 476153 - DNA, 120 bp, Artificial Sequence
  ENSG00000160294_11 (sequence is synthesized)
ccggggaggtactttatttggtcggacgatacaggatgttttcaaaagcaataaggaagtaggtcgtctgggcaacaaggaggccaaaaaggaaactggctttgttgagtctgcagaaag

SEQ ID NO: 476154 - DNA, 120 bp, Artificial Sequence
  ENSG00000160294_12 (sequence is synthesized)
tgaccacatggctatcccaggagggaatcagtctgtcctggcaccttcccggattccaggtgtgaataaagaggaagaaactgaaagtagagagaagaaagaagattctctaagaggaac

SEQ ID NO: 476155 - DNA, 120 bp, Artificial Sequence
  ENSG00000160294_13 (sequence is synthesized)
tccggcgcgtcagagtaacagaagcgagagcacagacagtcttgggggcttgtctccctctgaagtcacagccatccagtgcaagaacatccctgactacctcaacgacaggaccattct

SEQ ID NO: 476156 - DNA, 120 bp, Artificial Sequence
  ENSG00000160294_14 (sequence is synthesized)
ggagaaccattttggcaaaattgctaaagtgcagcgcatctttaccaggcgcagcaaaaagcttgcagtggtacatttctttgatcatgcatctgcagccctggctagaaagaaggggaa

SEQ ID NO: 476157 - DNA, 120 bp, Artificial Sequence
  ENSG00000160294_15 (sequence is synthesized)
aagtttgcataaagacatggctatcttttggcacaggaagaaaataagccccaataagaaacccttttccctgaaggagaagaaaccaggtgacggtgaagtcagcccgagcacagagga

SEQ ID NO: 476158 - DNA, 120 bp, Artificial Sequence
  ENSG00000160294_16 (sequence is synthesized)
tgcaccctttcagcactctcctcttggcaaggccgcagggaggactggtgctagcagcctcctgaataaaagctctccagtgaagaagccaagtcttctaaaggcccaccaattcgaggg

SEQ ID NO: 476159 - DNA, 120 bp, Artificial Sequence
  ENSG00000160294_17 (sequence is synthesized)
agactcttttgactcagcctccgagggctccgagggcctcgggccatgtgtgctctccctcagtaccctgataggcactgtggctgagacatccaaggagaagtaccgcctgcttgacca

SEQ ID NO: 476160 - DNA, 120 bp, Artificial Sequence
  ENSG00000160294_18 (sequence is synthesized)
gagagacaggatcatgcggcaagctcgggtgaagagaaccgatctggacaaagcgaggacttttgttggcacctgcctggatatgtgtcctgagaaggagaggtacatgcgggagacccg

SEQ ID NO: 476161 - DNA, 120 bp, Artificial Sequence
  ENSG00000160294_19 (sequence is synthesized)
tagccagctgagcgtgttcgaagtggtcccagggactgaccaggtggaccacgcagcagctgtgaaagagtacagtcggtcctcggcggatcaggaggagcccctgccccacgagctgcg

SEQ ID NO: 476162 - DNA, 120 bp, Artificial Sequence
  ENSG00000160294_20 (sequence is synthesized)
gcccttgccagtgctcagcaggaccatggactacctggtgacccagatcatggaccagaaggagggcagcctgcgggattggtatgacttcgtgtggaaccgcacgcgtggcatacggaa

SEQ ID NO: 476163 - DNA, 120 bp, Artificial Sequence
  ENSG00000160294_21 (sequence is synthesized)
ggatatcacgcagcagcacctctgtgaccccctgacggtgtccctgattgagaagtgcacccggtttcacatccactgtgcccacttcatgtgtgaggagcccatgtcctcctttgatgc

SEQ ID NO: 476164 - DNA, 120 bp, Artificial Sequence
  ENSG00000160294_22 (sequence is synthesized)
caagatcaataatgagaacatgaccaagtgcctgcagagcctgaaggagatgtaccaggacctgagaaacaagggtgtcttctgtgccagcgaagcggagttccagggctacaatgttct

SEQ ID NO: 476165 - DNA, 120 bp, Artificial Sequence
  ENSG00000160294_23 (sequence is synthesized)
gctcagtctcaacaagggagacatcctaagagaagtacaacagttccatcctgctgttagaaactcatctgaggtgaaatttgctgttcaggcttttgctgcattgaacagtaataattt

SEQ ID NO: 476166 - DNA, 120 bp, Artificial Sequence
  ENSG00000160294_24 (sequence is synthesized)
tgtgagatttttcaaactggtccagtcagcttcttacctgaacgcttgtcttttacactgttacttcagtcagatccgcaaggatgctctccgggcgctcaactttgcgtacacggtgag

SEQ ID NO: 476167 - DNA, 120 bp, Artificial Sequence
  ENSG00000160294_25 (sequence is synthesized)
cacacagcgatctaccatctttcccctggatggtgtggtgcgcatgctgctgttcagagactgtgaagaggccaccgacttcctcacctgccacggcctcaccgtttccgacggctgtgt

SEQ ID NO: 476168 - DNA, 120 bp, Artificial Sequence
  ENSG00000160294_26 (sequence is synthesized)
aagaccaggaagtcggtgtttattactaggaagctgacggtgtcagtcggggaaattgtgaacggagggccattgccccccgtccctcgtcatacccctgtgtgcagcttcaactcccag

SEQ ID NO: 476169 - DNA, 120 bp, Artificial Sequence
  ENSG00000160294_27 (sequence is synthesized)
aacaagtacatcggggagagcctggccgcggagctgcccgtcagcacccagagacccggctccgacacagtgggcggagggagaggagaggagtgtggtgtagagccggatgcacccctg

SEQ ID NO: 476170 - DNA, 120 bp, Artificial Sequence
  ENSG00000160294_28 (sequence is synthesized)
tccagtctcccacagtctctaccagcccctgcgccctcaccagtgcctctgcctcctgtcctggcactgaccccgtctgtggcgcccagcctcttccagctgtctgtgcagcctgaacca

SEQ ID NO: 476171 - DNA, 120 bp, Artificial Sequence
  ENSG00000160294_29 (sequence is synthesized)
ccgcctccagagcccgtgcccatgtactctgacgaggacctggcgcaggtggtggacgagctcatccaggaggccctgcagagggactgtgaggaagttggctctgcgggtgctgcctac

SEQ ID NO: 476172 - DNA, 120 bp, Artificial Sequence
  ENSG00000160294_30 (sequence is synthesized)
gcagctgccgccctgggtgtttctaatgctgctatggaggatttgttaacagctgcaaccacgggcattttgaggcacattgcagctgaagaagtgtctaaggaaagagagcgaagggag

SEQ ID NO: 476173 - DNA, 120 bp, Artificial Sequence
  ENSG00000160294_31 (sequence is synthesized)
caggagaggcagcgggctgaagaggaaaggttgaaacaagagagagagctggtgttaagtgagctgagccagggcctggccgtggagctgatggaacgcgtgatgatggagtttgtgagg

SEQ ID NO: 476174 - DNA, 120 bp, Artificial Sequence
  ENSG00000160294_32 (sequence is synthesized)
gaaacctgctcccaggagttgaagaatgcagtagagacagaccagagggtccgtgtggcccgttgctgtgaggatgtctgtgcccacttagtggacttgtttctcgtggaggaaatcttc

SEQ ID NO: 476175 - DNA, 120 bp, Artificial Sequence
  ENSG00000160294_33 (sequence is synthesized)
cagactgcaaaggagaccctccaggagcttcagtgcttctgcaagtatctacagcggtggagggaagctgtcacagcccgcaagaaactgaggcgccaaatgcgggctttccctgctgcg

SEQ ID NO: 476176 - DNA, 120 bp, Artificial Sequence
  ENSG00000160294_34 (sequence is synthesized)
ccctgctgcgtggacgtgagcgaccggctgagggcgctggcgcccagcgcagagtgccccattgctgaagagaacctggccaggggcctcctggacctgggccatgcagggagattgggc

SEQ ID NO: 476177 - DNA, 120 bp, Artificial Sequence
  ENSG00000160294_35 (sequence is synthesized)
atctcctgcaccaggttaaggcggctcagaaacaagacagctcaccagatgaaggttcagcacttctaccagcagctgctgagtgatgtggcatgggcgtctctggacctgccatccctc

SEQ ID NO: 476178 - DNA, 120 bp, Artificial Sequence
  ENSG00000160294_36 (sequence is synthesized)
gtggctgagcacctccctgggaggcaggagcatgtgttttggaagctggtgctggtgttgccggatgtagaggagcagtccccagagagttgtggcagaattctagcaaattggttaaaa

SEQ ID NO: 476179 - DNA, 120 bp, Artificial Sequence
  ENSG00000160294_37 (sequence is synthesized)
gtcaagttcatgggagatgaaggctcagtggatgacacatccagcgatgctggtgggattcagacgctttcgcttttcaactcacttagcagcaaaggggatcagatgatttctgttaac

SEQ ID NO: 476180 - DNA, 120 bp, Artificial Sequence
  ENSG00000160294_38 (sequence is synthesized)
gtgtgtataaaggtggcccatggcgccctcagtgatggtgccattgatgctgtggagacacagaaggacctcctgggagccagtgggctcatgctgctgcttccccccaaaatgaagagt

SEQ ID NO: 476181 - DNA, 120 bp, Artificial Sequence
  ENSG00000160294_39 (sequence is synthesized)
gaggacatggcagaggaggacgtgtactggctgtcggccttgctgcagctcaagcagctcctgcaggctaagcccttccagcctgcgcttcctctggtggttcttgtgcctagcccagga

SEQ ID NO: 476182 - DNA, 120 bp, Artificial Sequence
  ENSG00000160294_40 (sequence is synthesized)
ggggacgccgttgagaaggaagtagaagatggtctgatgctacaggacttggtttcagctaagctgatttcagattacactgttaccgagatccctgataccattaatgatctacaaggt

SEQ ID NO: 476183 - DNA, 120 bp, Artificial Sequence
  ENSG00000160294_41 (sequence is synthesized)
tcaactaaggttttgcaagcagtgcagtggctggtttcccactgcccccattcccttgacctctgctgccagactctcattcagtacgtcgaagacgggattggccatgagtttagtggc

SEQ ID NO: 476184 - DNA, 120 bp, Artificial Sequence
  ENSG00000160294_42 (sequence is synthesized)
cgctttttccatgacagaagagagaggcgtctgggcggtcttgcttctcaggagcctggcgccatcattgagctgtttaacagtgtgctgcagttcctggcttctgtggtgtcctctgaa

SEQ ID NO: 476185 - DNA, 120 bp, Artificial Sequence
  ENSG00000160294_43 (sequence is synthesized)
cagctgtgtgacctgtcctggcctgtcactgagtttgctgaggcagggggcagccggctgcttcctcacctgcactggaatgccccagagcacctggcctggctgaagcaggctgtgctc

SEQ ID NO: 476186 - DNA, 120 bp, Artificial Sequence
  ENSG00000160294_44 (sequence is synthesized)
gggttccagcttccgcagatggaccttccacccctgggggccccctggctccccgtgtgctccatggttgtccagtacgcctcccagatccccagctcacgccagacacagcctgtcctc

SEQ ID NO: 476187 - DNA, 120 bp, Artificial Sequence
  ENSG00000160294_45 (sequence is synthesized)
cagtcccaggtggagaacctgctccacagaacctactgtaggtggaagagcaagagtccctccccagtccatggggcaggcccctcggtcatggagatcccatgggatgatcttatcgcc

SEQ ID NO: 476188 - DNA, 120 bp, Artificial Sequence
  ENSG00000160294_46 (sequence is synthesized)
ttgtgtatcaaccacaagctgagagactggacgcccccccggcttcctgttacatcagaggcgctgagtgaagatggtcagatatgtgtgtatttttttaaaaacgatttgaaaaaatat

SEQ ID NO: 476189 - DNA, 120 bp, Artificial Sequence
  ENSG00000160294_47 (sequence is synthesized)
gatgttcctttgtcgtgggaacaagccaggttgcagacgcagaaggagctacagctgagagagggacgtttggcaataaagccttttcatccttctgcaaacaattttcccataccattg

SEQ ID NO: 476190 - DNA, 120 bp, Artificial Sequence
  ENSG00000160294_48 (sequence is synthesized)
cttcacatgcaccgtaactggaagaggagcacagagtgtgctcaagaggggaggattcccagcacagaggatctgatgcgaggagcttctgctgaggagctcttggcgcagtgtttgtcg

SEQ ID NO: 476191 - DNA, 120 bp, Artificial Sequence
  ENSG00000160294_49 (sequence is synthesized)
agcagtctgctgctggagaaagaagagaacaagaggtttgaagatcagcttcagcaatggttgtctgaagactcaggagcatttacggatttaacttcccttcccctctatcttcctcag

SEQ ID NO: 476192 - DNA, 120 bp, Artificial Sequence
  ENSG00000160294_50 (sequence is synthesized)
actctagtgtctctttctcacactattgaacctgtgatgaaaacatctgtaactactagcccacagagtgacatgatgagggagcaactgcagctgtcagaggcgacaggaacgtgtcta

SEQ ID NO: 476193 - DNA, 120 bp, Artificial Sequence
  ENSG00000160294_51 (sequence is synthesized)
ggcgaacgactaaagcacctggaaaggctgatccggagttcaagggaagaggaagttgcctctgagctccatctctctgcgctgctagacatggtggacatttgagcagcctgacctgtg

SEQ ID NO: 476194 - DNA, 120 bp, Artificial Sequence
  ENSG00000160294_52 (sequence is synthesized)
gggagggggtctctcccgaagagtttctgtttttactcaaaataatgttattctcagatgcttgatgcactgttggaaatgtgattaatttaatcatgcagataaaccatttaaatgtca

SEQ ID NO: 476195 - DNA, 120 bp, Artificial Sequence
  ENSG00000160294_53 (sequence is synthesized)
agtgctgagcgaaccggaagtcggtccgcggcgttttctgcccgcggtgcgcagcgctgagtgtcgcggcagcagcctgtgcttgcgcctcaagtctttccgaggggccagtgggcagcg

SEQ ID NO: 476196 - DNA, 68 bp, Artificial Sequence
  ENSG00000160294_54 (sequence is synthesized)
gactcttgcacttttcaagcaagccctcagtgtctgtgggccccaagtgcagtgtcttccatgctgat

SEQ ID NO: 476197 - DNA, 120 bp, Artificial Sequence
  ENSG00000160294_55 (sequence is synthesized)
cctgtctccttttttcttgttaattctgatgaagggctgtgaagggctggctgcttgcctgacttgaagaaggtgcattccctctgccatgcaggtgaacacacgagactcagaatggct

SEQ ID NO: 476198 - DNA, 120 bp, Artificial Sequence
  ENSG00000160294_56 (sequence is synthesized)
gggggtgttcccaaggtcacatcctggctgtcagcacattgagggctcagaccaagttctttgtgactccaaaatcagtccttttcatgacttgctgacaaacctaaagataaaagttag

SEQ ID NO: 476199 - DNA, 120 bp, Artificial Sequence
  ENSG00000160294_57 (sequence is synthesized)
ggccttctttattctttcccttgactgcctttgccagccaatgacggacaacctctgacggctgggatggaggcacccgcaggccagccggagtcttctccggtacttaccagtcagagt

SEQ ID NO: 476200 - DNA, 120 bp, Artificial Sequence
  ENSG00000160294_58 (sequence is synthesized)
ggtgagactcacagacgctctctcagaaactggcagcttacactcaacacccggtgcctagttccccaccctgtctcctctaactcctcacctgcctcctgcctgtctcctccttccagt

SEQ ID NO: 476201 - DNA, 120 bp, Artificial Sequence
  ENSG00000160294_59 (sequence is synthesized)
tctgtctccttctagttctgtctcctccttccagttctgtcctcagaaaattagacggttttgggtgagccagcaaggaggcaggagtgagtcagcgtgcgtctgttaacacgctgggct

SEQ ID NO: 476202 - DNA, 120 bp, Artificial Sequence
  ENSG00000160294_60 (sequence is synthesized)
tagtggttctagggacctacagaggctccagggtgggcggcagtgggacctggcgcctgtgctttctgttatttacacatggctgtggtgacacccaaggggcttgcagtactcggcagg

SEQ ID NO: 476203 - DNA, 120 bp, Artificial Sequence
  ENSG00000160294_61 (sequence is synthesized)
ctccgagggaagccagcttgttctaaagacgaaggggaactccctagtgctacaggctgtttcaggaagccaattaattttgtacacataatacttaattaccttctaataattggagca

SEQ ID NO: 476204 - DNA, 78 bp, Artificial Sequence
  ENSG00000160294_62 (sequence is synthesized)
aggcgtgagccaccacacccagccccattgtcttttttttaagacactggaggcttactgcagcctcaacctcttggg

SEQ ID NO: 476205 - DNA, 120 bp, Artificial Sequence
  ENSG00000160294_63 (sequence is synthesized)
tgggctcaagcagtcctcccactttagcctcccatgttgctgggaccacaggtgcatgccaccaagccccactaattaaaacaaatttttttttatagagaataggatgtagctatgttg

SEQ ID NO: 476206 - DNA, 75 bp, Artificial Sequence
  ENSG00000160294_64 (sequence is synthesized)
cacctggtctctgtcttctttttttttttttaaggctcttgttagaatgccgtgaacagttgtctccaactatta

SEQ ID NO: 476207 - DNA, 120 bp, Artificial Sequence
  ENSG00000160294_65 (sequence is synthesized)
ctcttgttagaatgccgtgaacagttgtctccaactattatatgtcattccacgggattggtttcctgctggcattccatggtctccggggtcctctgcagcaccttcctggccttttgt

SEQ ID NO: 476208 - DNA, 120 bp, Artificial Sequence
  ENSG00000160294_66 (sequence is synthesized)
catgtggatgctgcacagctgacttcacctggtcttgttgatggacagtttgtttcatgatttctcttatgaataaaaccttcacaagccatccttctctatgagagtgtttgcttggca

SEQ ID NO: 476209 - DNA, 120 bp, Artificial Sequence
  ENSG00000160294_67 (sequence is synthesized)
cgcattcctgagcactgcccctgagcagaccgcctatgatctctaagcttgggttccgtgttgccaaagcgccttctggtggactcagcccaggaggagcccatgtgccccacgctggcc

SEQ ID NO: 476210 - DNA, 120 bp, Artificial Sequence
  ENSG00000160294_68 (sequence is synthesized)
atggctgtggtcatgggctgactgcatgtgtctgactgggccttcgtctgagactgcagtgatttcgctcctcctctcagatccgcaaggatgctctccgggcgctcaactttgcgtaca

SEQ ID NO: 476211 - DNA, 120 bp, Artificial Sequence
  ENSG00000160294_69 (sequence is synthesized)
gtccagtagtgttggggtcaggaatcactgagacagcaacccctgtggtgactgtccactgcaggactgggtggggtcagcacagtgagatatgttagcaggtgtgctgacagcagaatg

SEQ ID NO: 476212 - DNA, 120 bp, Artificial Sequence
  ENSG00000160294_70 (sequence is synthesized)
cttgcagagttggaagaaagcaggtggttcttgtgctgtttgggtgctttcttattccaagcttttcaaaggaggtctcaggctgatgctgtgtcacccttgcagcagccccacgaaggg

SEQ ID NO: 476213 - DNA, 120 bp, Artificial Sequence
  ENSG00000160294_71 (sequence is synthesized)
gtgtgtgtttggagggtgaagataggtgaagcctggaggcgaagataggtgaagcctggaggcgaggacaggcacagggttgcattttgaaggttgtctcccacagttgtggacatgtga

SEQ ID NO: 476214 - DNA, 120 bp, Artificial Sequence
  ENSG00000160294_72 (sequence is synthesized)
cttgttccactggcaaagcagagctctgagttcaccttgaaagactcagcgtcctggtgcctgagtctgactctgcatcacgtgttcttttcctgctcgtcccagtttaagtacctgcca

SEQ ID NO: 476215 - DNA, 120 bp, Artificial Sequence
  ENSG00000160294_73 (sequence is synthesized)
gggcctcggggtcctggggcgagacggtgagcgtgggggctgggccggcgccaggggcgccgtttccttcccccacgcagctccgcgcgcccgggcctccacatcgtcgctaacggagcg

SEQ ID NO: 476216 - DNA, 120 bp, Artificial Sequence
  ENSG00000160294_74 (sequence is synthesized)
acggagcgttgcggcgccggcgacccctggcgagcccggggcgggacagtggccaggccggcctgggcccagcgcgtggcctccgccgtttcgggctgtgctgggtggaagattaggctc

SEQ ID NO: 476217 - DNA, 120 bp, Artificial Sequence
  ENSG00000160294_75 (sequence is synthesized)
cccgggcacgccgtccccgccgagaggcctcagcttcgtggcagcgccctcgtccttccagcccgctcgagggtggccgccagggcgcgatgaaggaatgtgagaaagtgcttagcgctc

SEQ ID NO: 476218 - DNA, 120 bp, Artificial Sequence
  ENSG00000160298_0 (sequence is synthesized)
gcggcaaaaagttcgcgctgctggtcccgcgcgggcggcccctgggctttgtgtccaccaggacagcgggccgggctccctgcaggcgcgggcggcgccgaacggtgctcagcaaccacc

SEQ ID NO: 476219 - DNA, 120 bp, Artificial Sequence
  ENSG00000160298_1 (sequence is synthesized)
cggacagggccaggccgttttctcccgctcaggcattagtcgttggctgtgggccgccgcgggaagttgaggcctaccacggaggaggctgctgaggtggatctcaggggatccgcaagg

SEQ ID NO: 476220 - DNA, 120 bp, Artificial Sequence
  ENSG00000160298_2 (sequence is synthesized)
gctccctcacccttgccgggaccctgggaacccgaaacaaaatcctacgccaccagcccgccgaatgcgccccctcggccgggggtcctgggtcttcagagaagaactcggccgaatgcg

SEQ ID NO: 476221 - DNA, 120 bp, Artificial Sequence
  ENSG00000160298_3 (sequence is synthesized)
gtcagaaagcccgcgaaccgcctggacctgcaggccccgccgcttggagctcccgcctttcccgaccgagcccgtgtctgctcgtgtgtctcactgatgtcttaggtctcaaaaaaaaaa

SEQ ID NO: 476222 - DNA, 120 bp, Artificial Sequence
  ENSG00000160298_4 (sequence is synthesized)
gaaaagaaaaggtttttagtagacagaagagaaatggggccgtgggttcgtggtcccagggggaaactgacgtcgcatgaggtcgtcgtccctcagcttgagctcagcggaacataagct

SEQ ID NO: 476223 - DNA, 120 bp, Artificial Sequence
  ENSG00000160298_5 (sequence is synthesized)
tgcagaggtggaaaccacggaaggtttgggtgtcttggagctctctggacaccgaagcccggacacagtcccggggtccgcaccgcctgtgacctgtggcgggaccgccggggtgggcgt

SEQ ID NO: 476224 - DNA, 120 bp, Artificial Sequence
  ENSG00000160298_6 (sequence is synthesized)
tttctcagctggcgcgcgcgtaggtggaacttgggaaactaactggagcgaagtggcaaaaaaccaagacagggccggtgacctcgcgcaggccgtccttaactgtggagtattccttca

SEQ ID NO: 476225 - DNA, 120 bp, Artificial Sequence
  ENSG00000160298_7 (sequence is synthesized)
gctaacccctttatttcatgtgtccaagtctggtttctgggtttctttgtagtcctccgggcctgttcgtgcgccttcacttgcaaaaggttcgtcgtggagggccgtgtgcttgtttgc

SEQ ID NO: 476226 - DNA, 120 bp, Artificial Sequence
  ENSG00000160298_8 (sequence is synthesized)
agcagtaacgatgcccttcccgagcgtgctggagtggctcctcgctgacgcaagctcaccttgcagcctcctcagcaactgcaacttaaacgcgccctcaggaagccctggaatctcgct

SEQ ID NO: 476227 - DNA, 120 bp, Artificial Sequence
  ENSG00000160298_9 (sequence is synthesized)
cagaattttttttctttttttgagacagtctcgctgcgacgcccaggctatagcgcaatggcgcgatctcggctccctgcaacctccctcaggaagccgtggaagctcgaccgccagaaa

SEQ ID NO: 476228 - DNA, 120 bp, Artificial Sequence
  ENSG00000160298_10 (sequence is synthesized)
cttccttctcctgactcaggccacagtcttctgtgtggctggtctccaggaggtaaggcccgccctgcaggcaacaccggtgcttgggctcctgctgagcagttctttcctgcgagtaac

SEQ ID NO: 476229 - DNA, 120 bp, Artificial Sequence
  ENSG00000160298_11 (sequence is synthesized)
agaaccagggagggaggtgggctgtggcctcccctgcccctacagtcgtctcctgcagctcccaccatgctggactcatcagcagcagagcaagtgacccgactgacgctgaagctcttg

SEQ ID NO: 476230 - DNA, 120 bp, Artificial Sequence
  ENSG00000160298_12 (sequence is synthesized)
gcagactgctctgaagagaaggagggaccttctgcagagactccgggaacaacacctcctggacgagctctctcgggcccaggcctggagcgggccaagcagaggagccctcgggtcagc

SEQ ID NO: 476231 - DNA, 120 bp, Artificial Sequence
  ENSG00000160298_13 (sequence is synthesized)
cctgcccccagagctgccccccacgggcatcctacccactgcctccccatccccgctggccccagacccgccaaggatcatcctgcctacggtcccccagcctcctgccaccatcattca

SEQ ID NO: 476232 - DNA, 120 bp, Artificial Sequence
  ENSG00000160298_14 (sequence is synthesized)
gcagctccctcagcagccactcatagcacagattcctcctccccaggccttccctactcaacggtcaggaagtattaaggaagacatggtggagctgctgctgctgcagaacgcacaggt

SEQ ID NO: 476233 - DNA, 120 bp, Artificial Sequence
  ENSG00000160298_15 (sequence is synthesized)
gcaccagttggtcctgcagaactggatgctcaaggccctgcccccagccctgcaggacccgccacatgtgcccccgagggtcccacgagctgccaggccaaggctgcctgccgtgcacca

SEQ ID NO: 476234 - DNA, 120 bp, Artificial Sequence
  ENSG00000160298_16 (sequence is synthesized)
ccaccaccaccaccaccatgctgtgtggccacctggggctgccactgtcctccagcccgcccccagcctgtggacgcctggcccaccctgagtgtgagtcacagagaccctggccggggc

SEQ ID NO: 476235 - DNA, 120 bp, Artificial Sequence
  ENSG00000160298_17 (sequence is synthesized)
accctccacccccaggcttcctcagggctgtgggctgtggcgggactatggaagggagcagggagagaccctgccaccacccggagtggctacgcgagtgtggactgcaggctcctcctg

SEQ ID NO: 476236 - DNA, 120 bp, Artificial Sequence
  ENSG00000160298_18 (sequence is synthesized)
gggaagctgggcaggctcgctttctggtcacggggccattccagggggcatcccttgctccgggtcccctgcagtgaggggcctgtgaaccccaccagggcaacagcccctcccagggac

SEQ ID NO: 476237 - DNA, 120 bp, Artificial Sequence
  ENSG00000160298_19 (sequence is synthesized)
ccctcctttcctgtagggcggcgccggcccacctgggagcctcagatccccctcttccatcacggaggtaaagttgaggccgtggacgccaccagcctgatgaaataaagatttcatcca

SEQ ID NO: 476238 - DNA, 120 bp, Artificial Sequence
  ENSG00000160298_20 (sequence is synthesized)
gaaagagtttaagaaaatctcagctcaggagccagaacagaaaagatcaatagctttagccacatggaagtgtgaacatcctgatggggaaaataccacaaagtctaatttaataactag

SEQ ID NO: 476239 - DNA, 120 bp, Artificial Sequence
  ENSG00000160298_21 (sequence is synthesized)
ctgatggggaaaataccacaaagtctaatttaataactagggacacctgtgtccacagctgtggcacagactcccactaaagaagtaggggtgcatggctcatgcctgtaatcccagcac

SEQ ID NO: 476240 - DNA, 90 bp, Artificial Sequence
  ENSG00000160298_22 (sequence is synthesized)
ctgggtcaaatttaaaaaactagccaggtgtggtgatatgcgcctgttatctcagcagctctgggggctgaggtgggaggattgcttgag

SEQ ID NO: 476241 - DNA, 120 bp, Artificial Sequence
  ENSG00000160298_23 (sequence is synthesized)
ggattgcttgagcccaggagttagaagctgcagtgagctctgatggaaccactgcactatagcctggaccacagagcaggcccctgtctcaaaaataaaataaaaaagtgaaagaagcaa

SEQ ID NO: 476242 - DNA, 120 bp, Artificial Sequence
  ENSG00000160298_24 (sequence is synthesized)
ttcagggtccctacatggatgtgggttggaagacaggacaggcacacaaccatagatactgatggacatgggccatttacagaactgagggcaagagagcaattttggccactgaggcaa

SEQ ID NO: 476243 - DNA, 120 bp, Artificial Sequence
  ENSG00000160298_25 (sequence is synthesized)
gttcctgggttagctgcaccgaggagggtgctgacctctgcccctcgggtccacaggtctgggcccctgctgctgacatcccccacatgtcagtctgcctgctagtgggattgactaact

SEQ ID NO: 476244 - DNA, 120 bp, Artificial Sequence
  ENSG00000160298_26 (sequence is synthesized)
catcaacgtggagtttaatgcccaaccaagtgcagaccacgctcctgttttgcgtcaccctctgcgaagcttcctgcaaacttgactccctgcccagtgcccccagccccaaggtgggac

SEQ ID NO: 476245 - DNA, 120 bp, Artificial Sequence
  ENSG00000160298_27 (sequence is synthesized)
atatcccctgggcaccccctctggtcctgctaaagcccagcccctctgcaggtcacaacccctcctctgtcctaccccttctgctgcctgcaatttcctgaactccttggtaggcagtct

SEQ ID NO: 476246 - DNA, 120 bp, Artificial Sequence
  ENSG00000160298_28 (sequence is synthesized)
cctcaccctgtcctcccagtgtctccccaccctgtcttccctgcttgctctgagggtccctaggagggaggtattaacaccctggaggcagtacacaggtggggcgccctcccctgacac

SEQ ID NO: 476247 - DNA, 120 bp, Artificial Sequence
  ENSG00000160298_29 (sequence is synthesized)
acaggttcttctggactgggtcctgaggctggtggtgcatagggggtcacgactgcccttcccccaggtctgagggttctgcccctctgcctcagctgctgcccacttttttgccttccc

SEQ ID NO: 476248 - DNA, 120 bp, Artificial Sequence
  ENSG00000160298_30 (sequence is synthesized)
atgaagcccagctggccacacctggggatgagtgtttaccggtagcctgaggacgcacagtggaaacctggcaacctggggcctccctgtgtctggcagcctggcaactgtcacgcggcg

SEQ ID NO: 476249 - DNA, 120 bp, Artificial Sequence
  ENSG00000160298_31 (sequence is synthesized)
gaccttctgcagagactccgggaggccaccctcatgcacataaccctggaagggtcttccagtcatggccatcctgcccggagaggcgcctgtacctggcccaggctggcctgagcctga

SEQ ID NO: 476250 - DNA, 120 bp, Artificial Sequence
  ENSG00000160298_32 (sequence is synthesized)
aaagaggagaggaaaaaaagttaaccagttcaacgaaaaggagaatctggcaaggaagcatctctgatgtgggcagagcctgcagcagcagatgtggagggcttctcacaagtgacagca

SEQ ID NO: 476251 - DNA, 120 bp, Artificial Sequence
  ENSG00000160298_33 (sequence is synthesized)
attctttcattcctgaagttccgcacaaggaggaaccctgtcccagtgcttccatctttgaaagtttgcaggtaggagacaggatgaccagagagttgccactgagctgcagagctcccc

SEQ ID NO: 476252 - DNA, 120 bp, Artificial Sequence
  ENSG00000160298_34 (sequence is synthesized)
agggacagccacctggtgctgacatggacgggcaggtgtgaacaccgaagggcccagcgcagctactggcagtaacactcacttctctcagaaccatcttttcgtgcctcttgaaggtga

SEQ ID NO: 476253 - DNA, 120 bp, Artificial Sequence
  ENSG00000160298_35 (sequence is synthesized)
ttccagagactctgtgctctcgttaaaagctcaaaccaaagctcagactccatttcctcttttcaaggtgactttccagcatggcatttctttctttctattaaaaatgtttttttttga

SEQ ID NO: 476254 - DNA, 120 bp, Artificial Sequence
  ENSG00000160298_36 (sequence is synthesized)
ggccctgcaccctctgagcgaacctggctgagctcactgtagcagagatagctgctcagccttaaggcaccaggtcggggagtattagggaagacctttccagactctcagggccaggcc

SEQ ID NO: 476255 - DNA, 120 bp, Artificial Sequence
  ENSG00000160298_37 (sequence is synthesized)
ccagcaaggacactgttagcttagagacctgcctgggtgcaggtttccatcaggactggaaatgttgagtaagggcccaattccaggaggacctgaaattctgggatgcctggaggtttg

SEQ ID NO: 476256 - DNA, 120 bp, Artificial Sequence
  ENSG00000160298_38 (sequence is synthesized)
ctcccacggcactcaccaaagatgcatccgagtggcagagatgcaggggaggtggggccgcttttctagggggagacctagaaaaaagtaggcctggaactggcttgaaagagagaacag

SEQ ID NO: 476257 - DNA, 120 bp, Artificial Sequence
  ENSG00000160299_0 (sequence is synthesized)
agtgtaaatagagcgaaggctgctctgtgtcagccccgtcaccgccgggcggcccgcgcggagtctgagggagatggaagttgagcaagagcagcggcgcagaaaggtggaggccgggag

SEQ ID NO: 476258 - DNA, 120 bp, Artificial Sequence
  ENSG00000160299_1 (sequence is synthesized)
gacgaagcttgctcacttccgacagagaaaaacaaaaggtgacagttcgcattcggagaaaaagacggcgaagaggaagggctcggctgtcgatgcgtctgtccaggaggagagtccggt

SEQ ID NO: 476259 - DNA, 120 bp, Artificial Sequence
  ENSG00000160299_2 (sequence is synthesized)
aaccaaggaggacagcgcactctgtggaggaggggacatttgcaaaagcacatcatgtgacgacacccctgatggggcaggaggggcctttgcagctcagccggaggactgtgatggaga

SEQ ID NO: 476260 - DNA, 120 bp, Artificial Sequence
  ENSG00000160299_3 (sequence is synthesized)
gaagagagaggacttggaacagctgcagcagaagcaagtcaatgaccatcctccagagcagtgtgggatgttcacagtcagtgaccacccaccagaacagcatgggatgttcacagtcgg

SEQ ID NO: 476261 - DNA, 120 bp, Artificial Sequence
  ENSG00000160299_4 (sequence is synthesized)
tgaccacccaccagaacagcgtgggatgttcacagtcagtgaccacccaccagaacagcatgggatgttcacagtcagtgaccacccaccagaacagcgtgggatgttcacaatcagtga

SEQ ID NO: 476262 - DNA, 120 bp, Artificial Sequence
  ENSG00000160299_5 (sequence is synthesized)
ccaccaaccggaacagcgtgggatgttcacagtcagtgaccacacaccagaacagcgtgggatcttcacaatcagtgaccacccagcagaacagcgtgggatgttcacaaaggagtgtga

SEQ ID NO: 476263 - DNA, 120 bp, Artificial Sequence
  ENSG00000160299_6 (sequence is synthesized)
acaagaatgtgaacttgccattactgacctggagagcggccgtgaagatgaggctggcctgcatcagagtcaggccgtgcatggccttgagctggaggcgctgcgcctgagtctgagcaa

SEQ ID NO: 476264 - DNA, 120 bp, Artificial Sequence
  ENSG00000160299_7 (sequence is synthesized)
catgcacacggcgcagctggagctgacacaggccaacctccagaaggagaaggagacggcattgacggagctgcgggagatgctcaacagccggcgtgcccaggagctggccctgctaca

SEQ ID NO: 476265 - DNA, 120 bp, Artificial Sequence
  ENSG00000160299_8 (sequence is synthesized)
gagcaggcagcagcacgagctggagctcctcagggagcagcacgcacgggagaaggaggaggtggtgctcaggtgtggacaggaagcagctgagctgaaggagaagttacaatcagaaat

SEQ ID NO: 476266 - DNA, 120 bp, Artificial Sequence
  ENSG00000160299_9 (sequence is synthesized)
ggagaaaaacgcccagatagtaaagaccctgaaggaagattgggaatctgaaaaagatttatgtttagaaaatctacgcaaagaactgtctgcaaagcatcaatcagaaatggaggattt

SEQ ID NO: 476267 - DNA, 120 bp, Artificial Sequence
  ENSG00000160299_10 (sequence is synthesized)
acaaaaccagtttcagaaagaattggcagaacagagagctgagttggagaagatttttcaagacaaaaaccaggctgaacgggcccttaggaacctggagagtcatcatcaagcagccat

SEQ ID NO: 476268 - DNA, 120 bp, Artificial Sequence
  ENSG00000160299_11 (sequence is synthesized)
tgagaagttacgtgaagacctgcagtccgagcacggccggtgtttagaagacttggagttcaagttcaaagagagcgagaaagaaaaacagctggagttagagaatcttcaagcatcata

SEQ ID NO: 476269 - DNA, 120 bp, Artificial Sequence
  ENSG00000160299_12 (sequence is synthesized)
tgaagacctgaaggcacaatcacaagaagagatcaggcgcttgtggtcccagcttgattctgccaggaccagtagacaggaattgagtgagctacatgagcaactcctggcgcgcacctc

SEQ ID NO: 476270 - DNA, 120 bp, Artificial Sequence
  ENSG00000160299_13 (sequence is synthesized)
tcgtgtggaagatttagaacagctgaagcagcgagaaaaaacccagcatgagtccgaactggagcaactgaggatttattttgaaaagaagttaagggatgctgagaaaacttaccaaga

SEQ ID NO: 476271 - DNA, 120 bp, Artificial Sequence
  ENSG00000160299_14 (sequence is synthesized)
agacctaaccctgttacagcagaggctgcagggggcgagggaagatgctcttctggactctgtggaagttgggttgtcctgtgtgggtttagaagagaaacctgagaaaggaagaaaaga

SEQ ID NO: 476272 - DNA, 120 bp, Artificial Sequence
  ENSG00000160299_15 (sequence is synthesized)
tcacgttgatgaactcgagcctgagcgacataaggagagcctgccacgcttccaggcggagttagaagaaagccacaggcaccagctggaagcgctggagtctcccctctgcatccagca

SEQ ID NO: 476273 - DNA, 120 bp, Artificial Sequence
  ENSG00000160299_16 (sequence is synthesized)
cgaggggcatgtctcagacagatgctgcgtagagacttcagcattgggacacgagtggcgtctggaaccctctgaagggcacagccaagagcttccctgggtgcatctccagggtgtgca

SEQ ID NO: 476274 - DNA, 120 bp, Artificial Sequence
  ENSG00000160299_17 (sequence is synthesized)
ggacggggacttggaggccgacacagagcgggcagccagagtcttgggtctggaaactgagcacaaggtgcaactttcgcttcttcagactgagctcaaagaagaaattgaactcctaaa

SEQ ID NO: 476275 - DNA, 120 bp, Artificial Sequence
  ENSG00000160299_18 (sequence is synthesized)
aatagaaaatagaaatttgtatgggaagttgcagcatgaaactcgtctgaaggacgatttggagaaggtaaaacacaatctaattgaagaccaccagaaggaactaaataatgctaagca

SEQ ID NO: 476276 - DNA, 120 bp, Artificial Sequence
  ENSG00000160299_19 (sequence is synthesized)
aaagactgagctgatgaaacaggaattccaaagaaaagaaacggactggaaagttatgaaggaggagctacagcgggaagctgaggagaagttaacattgatgctacttgaactgagaga

SEQ ID NO: 476277 - DNA, 120 bp, Artificial Sequence
  ENSG00000160299_20 (sequence is synthesized)
aaaggctgaatccgagaaacagaccatcataaacaagtttgagcttcgagaagctgaaatgaggcagcttcaggaccaacaggcagcccagatcctggatctggagaggtccttgacgga

SEQ ID NO: 476278 - DNA, 120 bp, Artificial Sequence
  ENSG00000160299_21 (sequence is synthesized)
gcagcagggccgcctgcagcagctggaacaggacctcacttcagacgacgccctgcattgcagccagtgtgggcgggagccgcccacagcccaggacggggagcttgctgcgctccacgt

SEQ ID NO: 476279 - DNA, 120 bp, Artificial Sequence
  ENSG00000160299_22 (sequence is synthesized)
gaaggaagactgcgccctgcagctgatgctggcccggagcaggtttttagaggaacgtaaagagatcaccgagaaattcagtgcggaacaagatgccttcctgcaggaggcccaggagca

SEQ ID NO: 476280 - DNA, 120 bp, Artificial Sequence
  ENSG00000160299_23 (sequence is synthesized)
gcatgcccgtgagctgcagctcctccaggagagacaccagcagcagctcctgtcagtgacggcggagctcgaggccagacaccaggccgcgttgggcgagctgacagcctccttagagag

SEQ ID NO: 476281 - DNA, 120 bp, Artificial Sequence
  ENSG00000160299_24 (sequence is synthesized)
caagcagggggctctgctggctgcacgtgtggccgaactgcagacaaaacacgctgccgacctcggcgctctggagaccagacatctgtccagccttgattctttggaatcctgttacct

SEQ ID NO: 476282 - DNA, 120 bp, Artificial Sequence
  ENSG00000160299_25 (sequence is synthesized)
ctctgaatttcagaccatccgtgaggagcacaggcaggccctagagctcttacgagcagactttgaggaacaactgtggaaaaaggactctcttcaccaaacgattttgactcaagagtt

SEQ ID NO: 476283 - DNA, 120 bp, Artificial Sequence
  ENSG00000160299_26 (sequence is synthesized)
ggagaaactgaagcggaaacacgaaggggagctacagtctgtgcgggaccacctgcgaaccgaagtgagcacagagctcgccggaaccgtggctcacgagctgcagggagtgcaccaggg

SEQ ID NO: 476284 - DNA, 120 bp, Artificial Sequence
  ENSG00000160299_27 (sequence is synthesized)
tgaatttggaagtgaaaagaaaactgctttgcatgaaaaagaggagacacttcggcttcagagtgcacaggcacagccttttcaccaagaggagaaagagtctttgtctctgcagcttca

SEQ ID NO: 476285 - DNA, 120 bp, Artificial Sequence
  ENSG00000160299_28 (sequence is synthesized)
aaagaagaatcaccaagtccagcagctgaaagaccaggttttatccttaagtcacgagatagaagagtgccgctccgagttggaggtgctgcagcagaggcgggagcgggagaaccggga

SEQ ID NO: 476286 - DNA, 120 bp, Artificial Sequence
  ENSG00000160299_29 (sequence is synthesized)
aggcgcaaacctcctctccatgctcaaggccgacgtcaacctgtcccacagcgaaagaggggccctccaggacgccctgcgcaggctgctgggtttgtttggagagacgctgagggcagc

SEQ ID NO: 476287 - DNA, 120 bp, Artificial Sequence
  ENSG00000160299_30 (sequence is synthesized)
cgtcaccctgaggagccggatcggggagcgcgtggggctctgcctggatgacgcgggcgcaggcctggccctgtcgacagctccggcgctggaggagacatggtctgatgtggccctccc

SEQ ID NO: 476288 - DNA, 120 bp, Artificial Sequence
  ENSG00000160299_31 (sequence is synthesized)
ggagttggacagaactttgtctgaatgtgcagagatgtcttccgtggctgaaattagcagccacatgcgtgaaagctttctcatgagcccagaaagtgtgcgggagtgtgagcagcccat

SEQ ID NO: 476289 - DNA, 120 bp, Artificial Sequence
  ENSG00000160299_32 (sequence is synthesized)
ccggagggtcttccagagcctcagcctggccgtggacggcctcatggagatggccctggactccagcaggcagctggaagaagcacgccaaattcattctcgttttgaaaaagaatttag

SEQ ID NO: 476290 - DNA, 120 bp, Artificial Sequence
  ENSG00000160299_33 (sequence is synthesized)
ttttaagaatgaggagacagcacaggttgtcaggaagcaccaggagctgctggagtgtttgaaggaggagagcgcagcaaaggcagagctggcgctggagctgcacaagactcagggtac

SEQ ID NO: 476291 - DNA, 120 bp, Artificial Sequence
  ENSG00000160299_34 (sequence is synthesized)
ccttgagggattcaaggtggagacagcagatctgaaggaggtgctggccgggaaggaggattccgagcaccgtctggtgctggagctggagagcctgagacggcagctgcagcaggcggc

SEQ ID NO: 476292 - DNA, 120 bp, Artificial Sequence
  ENSG00000160299_35 (sequence is synthesized)
ccaggagcaggcggcgctgagggaggagtgcacccgtctgtggagtcggggggaggccacagccacggacgccgaggccagagaagctgctctccggaaggaagtggaggatctgaccaa

SEQ ID NO: 476293 - DNA, 120 bp, Artificial Sequence
  ENSG00000160299_36 (sequence is synthesized)
agaacagtcggagaccaggaagcaggctgagaaggaccgctcagccctgctctcccagatgaagattttggagtctgagttagaagaacagctgtctcagcatcgcgggtgtgccaagca

SEQ ID NO: 476294 - DNA, 120 bp, Artificial Sequence
  ENSG00000160299_37 (sequence is synthesized)
ggcggaggccgtcactgccctggaacagcaggtggcatctctggacaagcatttgcgcaaccagcggcaattcatggatgagcaggcagccgagcgggagcacgagcgcgaggagttcca

SEQ ID NO: 476295 - DNA, 120 bp, Artificial Sequence
  ENSG00000160299_38 (sequence is synthesized)
gcaggagattcagaggctggaggggcagctccgccaggcggccaagccgcagccctggggccctcgcgacagccagcaggcgccgctggatggagaggttgagttgttacaacaaaagtt

SEQ ID NO: 476296 - DNA, 120 bp, Artificial Sequence
  ENSG00000160299_39 (sequence is synthesized)
gagagaaaagttggatgaatttaatgaattggctatacagaaagagtcggcagatagacaagtgttaatgcaggaagaagaaattaaacgtctggaggagatgaacatcaacatcaggaa

SEQ ID NO: 476297 - DNA, 120 bp, Artificial Sequence
  ENSG00000160299_40 (sequence is synthesized)
aaaagtggcccagctccaggaagaagtggaaaaacagaaaaacatcgtgaaagggctggaacaggataaagaggtgttaaagaaacagcagatgagtagcttgcttctggcgtccacgtt

SEQ ID NO: 476298 - DNA, 120 bp, Artificial Sequence
  ENSG00000160299_41 (sequence is synthesized)
gcagtctacactagatgcaggcagatgtcccgagcctccttcgggcagccctcctgagggtccagaaatacagttagaggtgacacagagagcactcctgcggcgcgagagcgaggtttt

SEQ ID NO: 476299 - DNA, 120 bp, Artificial Sequence
  ENSG00000160299_42 (sequence is synthesized)
ggacttaaaagaacagctagaaaagatgaaaggtgacttagaaagtaaaaatgaagaaatactacatctgaacttaaaattggacatgcagaacagccagactgctgtcagcctcagaga

SEQ ID NO: 476300 - DNA, 120 bp, Artificial Sequence
  ENSG00000160299_43 (sequence is synthesized)
aagagaatcagaaacgattacaaaaggagaaagcagaggaaattgaacaactccatgaagtcattgagaagctgcagcacgagctgtccctcatggggcctgtggtgcacgaagtcagcg

SEQ ID NO: 476301 - DNA, 120 bp, Artificial Sequence
  ENSG00000160299_44 (sequence is synthesized)
acagtcaggctggcagtctgcagagcgagctgctctgctcccaggccgggggccctcgtgggcaggccctacagggcgagctcgaggctgcgctggaagccaaggaggccctgagccggc

SEQ ID NO: 476302 - DNA, 120 bp, Artificial Sequence
  ENSG00000160299_45 (sequence is synthesized)
tgctggctgaccaggagcgcaggcacagccaggccctggaggccctgcagcagcgcctccagggcgcagaggaggctgcggagctacagctggctgagctggagcgcaatgtagccctca

SEQ ID NO: 476303 - DNA, 120 bp, Artificial Sequence
  ENSG00000160299_46 (sequence is synthesized)
gggaggctgaggtcgaagacatggcctcccggatccaggagttcgaagcggccctgaaagcaaaggaagcgacgattgccgagagaaatttagaaatcgacgctctgaaccagcggaagg

SEQ ID NO: 476304 - DNA, 120 bp, Artificial Sequence
  ENSG00000160299_47 (sequence is synthesized)
cggcccactctgccgagctggaggccgtcctgttggccttggcccgcatccgccgcgccctggagcagcagcccctggcagccggggcggcgcctcccgagctgcagtggctccgagcgc

SEQ ID NO: 476305 - DNA, 120 bp, Artificial Sequence
  ENSG00000160299_48 (sequence is synthesized)
agtgtgcccgcctcagccgccagctgcaggtgctgcaccagcggttcctgaggtgccaggtggagctggacaggcggcaggcccgcagagccacagctcacacacgggtgcccggggccc

SEQ ID NO: 476306 - DNA, 120 bp, Artificial Sequence
  ENSG00000160299_49 (sequence is synthesized)
acccacagcctcgcatggatggtggcgccaaggcccaggtcaccggcgacgtggaggcctcccatgatgctgctttggagccggttgtccctgacccacagggtgatctgcagcctgtcc

SEQ ID NO: 476307 - DNA, 120 bp, Artificial Sequence
  ENSG00000160299_50 (sequence is synthesized)
tggtgacgttgaaggatgcacctctctgcaagcaagaaggcgtgatgtcagtgctcaccgtctgccagaggcagctgcagtcggagctgctcttggtgaaaaatgaaatgcgcctgagtc

SEQ ID NO: 476308 - DNA, 120 bp, Artificial Sequence
  ENSG00000160299_51 (sequence is synthesized)
tggaggacggcggcaagggtaaagaaaaagtactggaagattgtcagctgccgaaggtcgatctcgtagctcaggtgaaacagcttcaggaaaaactgaaccgtttgctgtattccatga

SEQ ID NO: 476309 - DNA, 120 bp, Artificial Sequence
  ENSG00000160299_52 (sequence is synthesized)
ccttccagaatgtggatgctgccgacaccaaatctctgtggcccatggcctcagcacacctgttggagagcagctggagtgatgattcctgtgacggagaagagcctgacatatcacccc

SEQ ID NO: 476310 - DNA, 120 bp, Artificial Sequence
  ENSG00000160299_53 (sequence is synthesized)
acatagacacatgtgatgccaatacagccacggggggtgtaactgatgttatcaaaaatcaggccatagacgcgtgtgatgccaatacaaccccagggggtgtaactgatgttatcaaaa

SEQ ID NO: 476311 - DNA, 120 bp, Artificial Sequence
  ENSG00000160299_54 (sequence is synthesized)
attgggattccttgataccagatgaaatgccagattctcccattcaagaaaaatcagaatgtcaggacatgtctctttcttcaccgaccagcgtacttggtggctcccgccaccagagcc

SEQ ID NO: 476312 - DNA, 120 bp, Artificial Sequence
  ENSG00000160299_55 (sequence is synthesized)
acactgcagaggctgggccccggaagagcccggtcgggatgctggacctgtcttcctggagctcccctgaggtcctcaggaaggactggaccctggagccctggcccagcctccccgtga

SEQ ID NO: 476313 - DNA, 120 bp, Artificial Sequence
  ENSG00000160299_56 (sequence is synthesized)
caccccactcaggagccctgagcctgtgcagtgccgacacatccctgggggacagggcggacacctcgctgccacagacccaggggccggggctgctttgttccccaggcgtgtctgcag

SEQ ID NO: 476314 - DNA, 120 bp, Artificial Sequence
  ENSG00000160299_57 (sequence is synthesized)
cagcgctggcactgcagtgggccgagtctccgccggctgacgaccaccatgtgcagaggacggctgtggagaaagatgtcgaagattttatcacaacatcctttgattctcaagaaacat

SEQ ID NO: 476315 - DNA, 120 bp, Artificial Sequence
  ENSG00000160299_58 (sequence is synthesized)
taagttcacctcctcctggattagaaggaaaagctgatagaagtgagaaaagtgacggctcgggttttggagcaagactgagcccggggtcaggaggccctgaggctcaaactgctggtc

SEQ ID NO: 476316 - DNA, 120 bp, Artificial Sequence
  ENSG00000160299_59 (sequence is synthesized)
ctgtgacccctgcttccatctctggaaggtttcagccgctgccggaagccatgaaggagaaggaagtgcgtccgaagcacgtgaaggctttactgcagatggtgcgtgacgagagccacc

SEQ ID NO: 476317 - DNA, 120 bp, Artificial Sequence
  ENSG00000160299_60 (sequence is synthesized)
agatcctggcgctgtcagaaggccttgcacccccaagcggcgagccacacccaccccggaaggaagacgagatacaggacatctcgctccatgggggaaagacgcaggaagtgcccaccg

SEQ ID NO: 476318 - DNA, 120 bp, Artificial Sequence
  ENSG00000160299_61 (sequence is synthesized)
cgtgccccgattggagaggggaccttctgcaggttgtgcaagaggcctttgaaaaagagcaggagatgcagggggttgagctgcagccccgactcagtggctcagatctggggggtcaca

SEQ ID NO: 476319 - DNA, 120 bp, Artificial Sequence
  ENSG00000160299_62 (sequence is synthesized)
gctccctgctcgaaaggctggagaagatcatccgtgagcagggagacctgcaggaaaagtccctggagcatcttcgcttgccggaccggagcagcctgctgtccgagatccaggcgctgc

SEQ ID NO: 476320 - DNA, 120 bp, Artificial Sequence
  ENSG00000160299_63 (sequence is synthesized)
gtgcccagctgcgcatgacgcacctgcagaaccaggagaagctgcagcacttgcgcacggcgctgacaagcgcagaggcgcgcgggagccagcaggagcaccagctgcgcaggcaggttg

SEQ ID NO: 476321 - DNA, 120 bp, Artificial Sequence
  ENSG00000160299_64 (sequence is synthesized)
aactgctggcttataaagtagagcaggagaagtgcattgctggtgacttgcagaagacgctgagtgaagagcaagagaaggcaaacagcgtgcagaagctcctggcggcggagcagactg

SEQ ID NO: 476322 - DNA, 120 bp, Artificial Sequence
  ENSG00000160299_65 (sequence is synthesized)
tagtgcgagatttgaagtccgacctctgtgagagcaggcagaagagcgaacagctgtcccggtccctctgcgaggtgcagcaggaggtcctccagctgagatccatgctgagcagtaagg

SEQ ID NO: 476323 - DNA, 120 bp, Artificial Sequence
  ENSG00000160299_66 (sequence is synthesized)
agaacgagctgaaggccgcgcttcaggagctggagagtgagcaggggaaggggcgtgccctgcagagccagctggaggaggagcagctgcggcacctgcagagggagagccagagtgcca

SEQ ID NO: 476324 - DNA, 120 bp, Artificial Sequence
  ENSG00000160299_67 (sequence is synthesized)
aggccctggaggagctgcgggcgtctttggagacacagcgtgctcagagcagtcgactctgcgtggcactgaaacacgagcagacggccaaggacaacctgcagaaggagctgcgtatcg

SEQ ID NO: 476325 - DNA, 120 bp, Artificial Sequence
  ENSG00000160299_68 (sequence is synthesized)
agcactcacgctgcgaggccttgctggctcaggagcggagccagctctctgagctccagaaggaccttgcggctgagaagagccgcaccctggagctgtcagaggccttgcggcacgagc

SEQ ID NO: 476326 - DNA, 120 bp, Artificial Sequence
  ENSG00000160299_69 (sequence is synthesized)
ggctcctgaccgagcagctgagccagaggacacaggaggcttgcgtgcaccaggacacacaggcccatcacgctctgctgcagaagctgaaggaggagaagtcccgggtggtggacttgc

SEQ ID NO: 476327 - DNA, 120 bp, Artificial Sequence
  ENSG00000160299_70 (sequence is synthesized)
aagcgatgcttgaaaaggtgcagcagcaagccctgcattctcagcagcagcttgaggctgaggctcagaagcactgtgaggcgctcaggagagagaaggaggtaagtgccacactgaagt

SEQ ID NO: 476328 - DNA, 120 bp, Artificial Sequence
  ENSG00000160299_71 (sequence is synthesized)
cgacggtggaagccctgcacacccaaaaacgagagctgagatgctctctggagagagagagggagaaaccagcgtggttgcaggcagaattagagcagtcacacccacggttgaaagagc

SEQ ID NO: 476329 - DNA, 120 bp, Artificial Sequence
  ENSG00000160299_72 (sequence is synthesized)
aagaaggacgcaaggctgcgaggaggagcgcggaggccaggcagagcccagcggctgcggagcagtggaggaagtggcagagagacaaggagaagctgcgagaattagaactgcagcgtc

SEQ ID NO: 476330 - DNA, 120 bp, Artificial Sequence
  ENSG00000160299_73 (sequence is synthesized)
agcgtgacttgcataagatcaagcagcttcagcagacagtgagagacctggagtcgaaggacgaggtgcctggcagccgcctccacctaggttctgcccgcagggctgccggctcggatg

SEQ ID NO: 476331 - DNA, 120 bp, Artificial Sequence
  ENSG00000160299_74 (sequence is synthesized)
cggaccacctccgggaacagcagcgagagctggaggcgatgaggcagcggctgctctctgccgcccggcttctcaccagcttcaccagccaggccgtggacaggacagttaatgattgga

SEQ ID NO: 476332 - DNA, 120 bp, Artificial Sequence
  ENSG00000160299_75 (sequence is synthesized)
cgtcatccaatgagaaagcagtgatgtctttactgcacacgttggaggagctgaagtctgacttgagcaggcccacctcctcccagaaaaaaatggcagcagagctgcagttccagtttg

SEQ ID NO: 476333 - DNA, 120 bp, Artificial Sequence
  ENSG00000160299_76 (sequence is synthesized)
tggacgtcctgctgaaagacaatgtttccctcacaaaagcgctcagcacggtgacccaggagaagctggagctgagcagagccgtgtctaagcttgagaagttgctgaagcaccatctgc

SEQ ID NO: 476334 - DNA, 120 bp, Artificial Sequence
  ENSG00000160299_77 (sequence is synthesized)
agaagggctgcagcccaagcaggtcggaaaggtctgcttggaagccagacgaaacggctccacagagttccctgaggcgcccagaccccggccggcttccaccagctgccagcgaggaag

SEQ ID NO: 476335 - DNA, 120 bp, Artificial Sequence
  ENSG00000160299_78 (sequence is synthesized)
cacacaccagcaatgtcaagatggaaaaattgtacctgcattacttgagagcagagagctttagaaaagctctgatttatcaaaagaagtatcttttgctgttgattggtggattccagg

SEQ ID NO: 476336 - DNA, 120 bp, Artificial Sequence
  ENSG00000160299_79 (sequence is synthesized)
attctgaacaagaaacactctccatgattgcccatttgggggtatttccttccaaagcagaacggaaaatcacatctcgtcctttcaccaggttccgcacggccgtcagggtggtcattg

SEQ ID NO: 476337 - DNA, 120 bp, Artificial Sequence
  ENSG00000160299_80 (sequence is synthesized)
caatattaagattacgttttttggttaagaaatggcaagaagtagatcggaaaggagctctggcacaaggcaaagcccctcgcccagggccccgagcacgacagccgcagtctccaccca

SEQ ID NO: 476338 - DNA, 120 bp, Artificial Sequence
  ENSG00000160299_81 (sequence is synthesized)
gaaccagagagtcccccccaacccgggatgtaccctctggccacaccagggaccctgccagaggccgcagactggcagcagcagcctccccacacagtgggggaagagccactccatccc

SEQ ID NO: 476339 - DNA, 120 bp, Artificial Sequence
  ENSG00000160299_82 (sequence is synthesized)
caaattcaagattagaaagatccctgactgcttctcaagatccagaacattccttgacagagtatattcaccatttagaagtgatccagcaaagattgggaggggtactaccagattcta

SEQ ID NO: 476340 - DNA, 120 bp, Artificial Sequence
  ENSG00000160299_83 (sequence is synthesized)
cttcaaagaaatcctgccacccgatgattaaacagtgaataaaatgtcatggctctttcctgcgacaattctatttgaggaaaagatttgtttttcccttttcccaaggaagctcgtggg

SEQ ID NO: 476341 - DNA, 120 bp, Artificial Sequence
  ENSG00000160299_84 (sequence is synthesized)
acagcatgggcactactcttcatgtgcggtgacaccagcccccagatgccttgaattaagtgtcctcacctttatgcatgactgcaaagccagctggagcattttctatggagcctccgt

SEQ ID NO: 476342 - DNA, 120 bp, Artificial Sequence
  ENSG00000160299_85 (sequence is synthesized)
atgttttaggcccatgaccttcgtgaggtgacgggcactcactcccatgagccctggctgtgtgctgttgtgtgcctatcggcagatccatccttcctgcctccaaggaggatacacaga

SEQ ID NO: 476343 - DNA, 120 bp, Artificial Sequence
  ENSG00000160299_86 (sequence is synthesized)
gaatggcttcctgttgttttgtttattttcttaacgtgtacagatggaaacttcatttaaaaataaaaacaaaacaactcaaaaaggaataaaatttaatcactgttttgtttgtgaata

SEQ ID NO: 476344 - DNA, 120 bp, Artificial Sequence
  ENSG00000160299_87 (sequence is synthesized)
gcgttgcagtccttactgtgtgaaaggcccccgcggcgctcccggccgccgtcttcttcccgcgcccttgggctcgcgtcctgcccgtccgggcctggcgtacgctgccgggaacccacg

SEQ ID NO: 476345 - DNA, 120 bp, Artificial Sequence
  ENSG00000160299_88 (sequence is synthesized)
cggcgctggcgccgggcgccttcaagggacgcgctcccgtctttctcccgccccgggtttctccgtgaaaaagcgctcggtttgatggccactgtcctaggtttcgtgggaataaagcgc

SEQ ID NO: 476346 - DNA, 120 bp, Artificial Sequence
  ENSG00000160299_89 (sequence is synthesized)
ggtcatttttcagtgttgatggggacgtaataaagcacggtaagaaaatccgtgaattccgtcagagcagtcgtccagagggaaggcgcgcccggcgtagggaggtcagagctcatgtta

SEQ ID NO: 476347 - DNA, 120 bp, Artificial Sequence
  ENSG00000160299_90 (sequence is synthesized)
atgctcaatatattgattatttaatagtgtttagcaaaatggtctttttttattccttaaatcaactgaaactcacttcacgtctctttccttgtagagcatcatgcttatttctggctc

SEQ ID NO: 476348 - DNA, 120 bp, Artificial Sequence
  ENSG00000160299_91 (sequence is synthesized)
actcacatctttgtctcgggagttctctgccgagccattgccccctacagcagagagcacagctggctgcactagtgctgaaggagccagccccagagcagggcatttccaggggctctt

SEQ ID NO: 476349 - DNA, 120 bp, Artificial Sequence
  ENSG00000160299_92 (sequence is synthesized)
gtcccagagcggcaggcgttgtgtgcagagaacgcccctcccacgcagcacagagaacgcggggtgggtgtgtggctccgggcctgtggggcttaggctgcctgaaccaccgccgactgg

SEQ ID NO: 476350 - DNA, 120 bp, Artificial Sequence
  ENSG00000160305_0 (sequence is synthesized)
cagcggcggcgcggcggagccatccgcgctcgtgcccgcgcgggtgcgttgctgtcctggccgcgcccctgtcccgccgcctcccgctcctcgcctggcggatgtaggttgttggcctga

SEQ ID NO: 476351 - DNA, 120 bp, Artificial Sequence
  ENSG00000160305_1 (sequence is synthesized)
cgctcctcgcctggcggatgtaggttgttggcctgaggggagctacgtagccgaggtttgcgctgccgccgccaggcccggtccggttccagcctctgcccggacgctagccggcctggc

SEQ ID NO: 476352 - DNA, 120 bp, Artificial Sequence
  ENSG00000160305_2 (sequence is synthesized)
catggctgaccgcgggtgcccgctggaggcggcgccgctgcctgccgaggtgcgggagagcctggctgagctggagctggagctgtcggaaggtgacatcactcaaaaaggatatgaaaa

SEQ ID NO: 476353 - DNA, 120 bp, Artificial Sequence
  ENSG00000160305_3 (sequence is synthesized)
gaaaagggcaaagctgcttgcacgttatataccgcttattcaaggaatagacccatctctgcaagcagagaatagaattcctgggccctcacaaaccacggccgctgcacccaagcagca

SEQ ID NO: 476354 - DNA, 120 bp, Artificial Sequence
  ENSG00000160305_4 (sequence is synthesized)
gaagtctcggcccaccgcctcgagggatgagcgcttccggtcagatgtccacactgaagccgtgcaagcagctttggccaaatacaaagagaggaagatgcctatgccttcgaagagacg

SEQ ID NO: 476355 - DNA, 120 bp, Artificial Sequence
  ENSG00000160305_5 (sequence is synthesized)
ttctgtccttgtgcattcgtctgtggaaacctacacccctccagacacgtcgtctgcctcagaagatgagggctctttacggcgacccgggcgactcacctccactccgctccagagcca

SEQ ID NO: 476356 - DNA, 120 bp, Artificial Sequence
  ENSG00000160305_6 (sequence is synthesized)
ttccagcgtcgagccctggctcgaccgggtcattcagggctcgtccacctcatcctctgcatcctccacctcatctcacccgggagggagacccaccactgctcccagtgctgcagccac

SEQ ID NO: 476357 - DNA, 120 bp, Artificial Sequence
  ENSG00000160305_7 (sequence is synthesized)
gccgggggccgccgctaccactgcactcgcaggcctcgaggcccacacccacatagatctgcattctgcccctcctgatgtcaccacgggcctcgtggagcattcgtactttgagcgtcc

SEQ ID NO: 476358 - DNA, 120 bp, Artificial Sequence
  ENSG00000160305_8 (sequence is synthesized)
acaggtggcttctgtgagaagtgttcctcgggggtgcagcgggagcatgctggaaacagcagatggtgtccctgtgaacagcagagtgtcctccaaaatccagcagcttctgaacaccct

SEQ ID NO: 476359 - DNA, 120 bp, Artificial Sequence
  ENSG00000160305_9 (sequence is synthesized)
gaagaggccaaagcgccctccactgaaggagttctttgtggatgattttgaggaattgttggaagttcagcaaccagatccaaatcagccaaagcctgagggaagcgagacgagtgtgct

SEQ ID NO: 476360 - DNA, 120 bp, Artificial Sequence
  ENSG00000160305_10 (sequence is synthesized)
gagaggggagcctctcactgcaggtgtcccccgaccgccgtcgctgttggccaccttgcagcgctggggcacaacacagcccaaatccccctgtctgactgccttggatacaactgggaa

SEQ ID NO: 476361 - DNA, 120 bp, Artificial Sequence
  ENSG00000160305_11 (sequence is synthesized)
agccgtctacactctcacctatggtaaactttggagtcggagtttaaaactagcttatactctacttaataaactgacaagtaagaatgaacctctacttaaacctggagacagagtggc

SEQ ID NO: 476362 - DNA, 120 bp, Artificial Sequence
  ENSG00000160305_12 (sequence is synthesized)
gctcgtgtttccgaatagtgaccctgtgatgttcatggttgcattttatgggtgtctcctggcagagctggttcctgtccccatagaagtgccattaacaagaaaggatgcaggcagcca

SEQ ID NO: 476363 - DNA, 120 bp, Artificial Sequence
  ENSG00000160305_13 (sequence is synthesized)
gcaggttgggtttctgctgggcagctgtggagtcttcttggccctgaccacagacgcttgtcagaaaggcctccccaaggcacagacaggagaggtggcagctttcaaaggttggccccc

SEQ ID NO: 476364 - DNA, 120 bp, Artificial Sequence
  ENSG00000160305_14 (sequence is synthesized)
gctctcctggctagtgattgatgggaagcatctagccaagcccccaaaggactggcaccctctggcccaggacacagggactgggactgcctacattgagtataaaaccagcaaagaagg

SEQ ID NO: 476365 - DNA, 120 bp, Artificial Sequence
  ENSG00000160305_15 (sequence is synthesized)
cagtacggtgggggtcacagtgtcccacgcatccctgctggcacagtgccgggctctgacccaggcgtgcgggtactcagaagctgaaacattaacaaacgtgctggatttcaaaaggga

SEQ ID NO: 476366 - DNA, 120 bp, Artificial Sequence
  ENSG00000160305_16 (sequence is synthesized)
tgctggtctgtggcatggcgtgttaacaagcgtcatgaacaggatgcacgtggtcagcgtcccctacgcgctgatgaaggcgaacccactctcctggatccagaaagtgtgcttctataa

SEQ ID NO: 476367 - DNA, 120 bp, Artificial Sequence
  ENSG00000160305_17 (sequence is synthesized)
agctcgggccgcgctggtgaagtcgcgagacatgcactggtctctcctagctcagcggggccagagggacgtcagcctcagctcactgcgcatgctgattgtggccgatggtgccaaccc

SEQ ID NO: 476368 - DNA, 120 bp, Artificial Sequence
  ENSG00000160305_18 (sequence is synthesized)
gtggtcgatctcctcctgtgacgccttcctcaacgtcttccagtccagaggtctgaggccagaggtcatctgtccttgtgcaagttctcctgaggcgctgactgtcgccatccgcaggcc

SEQ ID NO: 476369 - DNA, 120 bp, Artificial Sequence
  ENSG00000160305_19 (sequence is synthesized)
acctgatctgggaggaccacctccaagaaaagcagtcctgtcgatgaacggtctaagttatggtgttatcagagtggatactgaagaaaagttgtcagtccttactgttcaggacgttgg

SEQ ID NO: 476370 - DNA, 120 bp, Artificial Sequence
  ENSG00000160305_20 (sequence is synthesized)
tcaggtgatgcctggagctaatgtatgtgttgtgaagttagaaggtaccccttatctttgtaaaactgatgaagtgggagaaatatgcgtcagttccagtgcaactggcacagcgtacta

SEQ ID NO: 476371 - DNA, 120 bp, Artificial Sequence
  ENSG00000160305_21 (sequence is synthesized)
tggattgcttggaatcacgaagaatgtgtttgaggcagttccggtcaccacaggaggagcacccatctttgacaggccattcaccaggacaggcctgctgggcttcatcgggcctgacaa

SEQ ID NO: 476372 - DNA, 120 bp, Artificial Sequence
  ENSG00000160305_22 (sequence is synthesized)
cctggtcttcatcgtgggcaaactggacgggctgatggtcactggagttcgcagacacaatgcagatgacgttgtggccaccgcactggccgtggagcccatgaagtttgtctacagagg

SEQ ID NO: 476373 - DNA, 120 bp, Artificial Sequence
  ENSG00000160305_23 (sequence is synthesized)
caggatcgctgtgttctctgtgaccgtgctgcacgacgaccggattgtcctggtggctgagcagcggccggatgcctcggaggaggacagcttccagtggatgagccgtgtgctgcaggc

SEQ ID NO: 476374 - DNA, 120 bp, Artificial Sequence
  ENSG00000160305_24 (sequence is synthesized)
cattgatagcatccaccaggtgggcgtgtactgtctggccctggttcctgccaacaccttgcccaaggctcctctcggagggattcacatttctgaaaccaaacagcgctttctggaagg

SEQ ID NO: 476375 - DNA, 120 bp, Artificial Sequence
  ENSG00000160305_25 (sequence is synthesized)
gacgctgcacccgtgtaatgtgctgatgtgccctcacacctgtgttaccaacctccccaaacctcgtcagaaacaaccagaggttggaccagcctcaatgatcgtggggaacctggttgc

SEQ ID NO: 476376 - DNA, 120 bp, Artificial Sequence
  ENSG00000160305_26 (sequence is synthesized)
tgggaagagaatcgctcaggcttccgggagagagctcgcccacctggaggacagcgaccaggcacggaagttcctgttcctggctgacgtgctgcagtggcgtgcccacaccactcctga

SEQ ID NO: 476377 - DNA, 120 bp, Artificial Sequence
  ENSG00000160305_27 (sequence is synthesized)
ccacccgctgttcttgctgctgaacgccaagggcaccgtcacaagcactgcaacctgtgtccagctgcacaaaagggctgagagagtggccgcggctctgatggagaagggaagactgag

SEQ ID NO: 476378 - DNA, 120 bp, Artificial Sequence
  ENSG00000160305_28 (sequence is synthesized)
tgttggggaccatgtggctctggtctacccaccaggggtggacctcattgccgcgttctatggctgcttgtactgtggctgcgtgcctgtcaccgtgcggcccccgcaccctcagaacct

SEQ ID NO: 476379 - DNA, 120 bp, Artificial Sequence
  ENSG00000160305_29 (sequence is synthesized)
cggcaccacactgcccaccgtcaagatgatcgtggaggtcagcaagtctgcatgcgtcctcaccacgcaggctgtcacacggctgctcaggtccaaggaggctgctgctgccgtggacat

SEQ ID NO: 476380 - DNA, 120 bp, Artificial Sequence
  ENSG00000160305_30 (sequence is synthesized)
tgacatcccaaaaaagaagatagcaagcgttttcaggcccccctcccccgatgtcctcgcatacttggacttcagcgtgtcaaccactgggatattagcgggagtgaagatgtcgcacgc

SEQ ID NO: 476381 - DNA, 120 bp, Artificial Sequence
  ENSG00000160305_31 (sequence is synthesized)
ggccacaagcgccttatgccgctccataaagctgcagtgtgagctgtacccctcgcggcagatcgccatctgcctcgacccctactgtggccttggttttgccctgtggtgtctgtgcag

SEQ ID NO: 476382 - DNA, 120 bp, Artificial Sequence
  ENSG00000160305_32 (sequence is synthesized)
tgtctactcgggacaccaatcagtgctggtgcccccgctggagctggagagcaacgtgtccctgtggctgtcggccgtcagccagtacaaggcccgcgtcaccttctgctcctactctgt

SEQ ID NO: 476383 - DNA, 120 bp, Artificial Sequence
  ENSG00000160305_33 (sequence is synthesized)
gatggagatgtgcaccaagggcctaggcgcacagacgggtgtcctcaggatgaagggggtgaacctgtcatgtgtgcgcacgtgcatggtggtcgccgaggagcggcccaggattgcgct

SEQ ID NO: 476384 - DNA, 120 bp, Artificial Sequence
  ENSG00000160305_34 (sequence is synthesized)
gacccagtccttctccaagctcttcaaggacctgggcctgccggcccgcgccgtaagcaccacgttcgggtgcagggtcaacgtggccatctgcctccagggcacagctggcccggaccc

SEQ ID NO: 476385 - DNA, 120 bp, Artificial Sequence
  ENSG00000160305_35 (sequence is synthesized)
cacaaccgtctacgtggacatgcgggcactgcgccatgacagggttcgtttggtagaacggggttctccgcacagcctgccattgatggagtctggaaagatcctccccggcgtgaaggt

SEQ ID NO: 476386 - DNA, 120 bp, Artificial Sequence
  ENSG00000160305_36 (sequence is synthesized)
catcatcgcacacaccgagaccaaaggacccttgggagactcacacctgggagagatctgggtaagcagcccccacaatgccaccgggtactacaccgtttacggggaggaggcgcttca

SEQ ID NO: 476387 - DNA, 120 bp, Artificial Sequence
  ENSG00000160305_37 (sequence is synthesized)
tgccgaccacttcagtgcccggctgagttttggagacacacagaccatctgggcaaggaccggctaccttggcttccttcggcgaacagagctcactgatgccagtggagggcggcacga

SEQ ID NO: 476388 - DNA, 120 bp, Artificial Sequence
  ENSG00000160305_38 (sequence is synthesized)
tgcactgtatgtggttgggtctctggatgaaactctggagctcagaggcatgcggtaccaccccatcgacattgagacctctgtcatccgagcacacaggagcatcgctgagtgtgccgt

SEQ ID NO: 476389 - DNA, 120 bp, Artificial Sequence
  ENSG00000160305_39 (sequence is synthesized)
attcacctggaccaacctgctggtggtggtggtggagctggatgggctagagcaggatgccctggacctggtggccctggtgaccaacgtggtgctggaggagcactacctggtcgtggg

SEQ ID NO: 476390 - DNA, 120 bp, Artificial Sequence
  ENSG00000160305_40 (sequence is synthesized)
agtggtggtcatcgtggacccaggggtgatccctatcaactctcggggtgagaagcagcgcatgcacctgcgggacggcttcctggctgaccagctggaccccatctatgtcgcctacaa

SEQ ID NO: 476391 - DNA, 120 bp, Artificial Sequence
  ENSG00000160305_41 (sequence is synthesized)
catgtgagcgcagcacaccggcccaggtgccggagatgaatgagccccagcagtccaaggtgtgatgtgggaagacaccgcagagctcactcaccgggactcgcccttcctgtgctctta

SEQ ID NO: 476392 - DNA, 120 bp, Artificial Sequence
  ENSG00000160305_42 (sequence is synthesized)
cagatccctctcaacaatccccgcatctccttttagaaagcacttcctgaattatttaaagaaatattttgaatctgccaagtacatttacaaaaacacggatgctggtattttaacaga

SEQ ID NO: 476393 - DNA, 120 bp, Artificial Sequence
  ENSG00000160305_43 (sequence is synthesized)
tggagagacaaggaaaggaaaggaaaggcctggcatgggcattgtgaggaatcacaggcaccgaggttgttctctgctgtactgcaagtttgcactttctttaggctaaaaatatagttc

SEQ ID NO: 476394 - DNA, 120 bp, Artificial Sequence
  ENSG00000160305_44 (sequence is synthesized)
ctgatttttaaaattcagttatttattcccacttcaaatgacaagttcatatatagaatttacgggagaaacttgagaccatttacggggagaaacttgattctgggaagatagcagagt

SEQ ID NO: 476395 - DNA, 120 bp, Artificial Sequence
  ENSG00000160305_45 (sequence is synthesized)
acaaaccagctgcctcacttctgtttcacagggaggctgatggaaaaaggaagcaagctggacccatcctccctgctcacagagggcactgtggtcacacacagtgcctcctctgccagt

SEQ ID NO: 476396 - DNA, 69 bp, Artificial Sequence
  ENSG00000160305_46 (sequence is synthesized)
agagggcactgtggtcacacacagtgcctcctctgccagttcctttattgaaagaggtgtgctggctgg

SEQ ID NO: 476397 - DNA, 120 bp, Artificial Sequence
  ENSG00000160305_47 (sequence is synthesized)
cgctactgcactccagcctgggtgacagcacgagatgccgtcttaaaaaaacaaaaaagaggtgtgctgcttgtcagcatgtattgtcacggacactcaataagtgccattttggactgt

SEQ ID NO: 476398 - DNA, 120 bp, Artificial Sequence
  ENSG00000160305_48 (sequence is synthesized)
taagtgccattttggactgtcaaatttagatgctttgtttcagaaagataagccagcatttagttttaaatcactttcctggtttgtaacttgatgctgtttagttaaattgctagtttt

SEQ ID NO: 476399 - DNA, 120 bp, Artificial Sequence
  ENSG00000160305_49 (sequence is synthesized)
cctaacactacaatattaattcttctcgtggaagtgtactgatttattatttttattccaagtcagcagatttggaagcattgtggtaaagtctaaggttttcatatccatagtgctgtt

SEQ ID NO: 476400 - DNA, 120 bp, Artificial Sequence
  ENSG00000160305_50 (sequence is synthesized)
tggtgagtaccggcagtacagttgaggggagcagggaacagcattgccccgtattgaaggtggagatggttacattcttcactgctttttgcattttgagttgtgtgcctataaaatttg

SEQ ID NO: 476401 - DNA, 120 bp, Artificial Sequence
  ENSG00000160305_51 (sequence is synthesized)
gccaaaccattttattattttgttcaaacttgactaagctgagtgatctaaaattatacagaacctaaatcaaagaagagaatgtaaagtcctttagttacttctaagaatttgaagtca

SEQ ID NO: 476402 - DNA, 120 bp, Artificial Sequence
  ENSG00000160305_52 (sequence is synthesized)
agcacgaatctaagacatagattatttttatatagctaatgaagagtatgttacgaaattgttgggtttttggggtattgagggtggcaaattttgtgaatcatgcatgcttcacagaaa

SEQ ID NO: 476403 - DNA, 120 bp, Artificial Sequence
  ENSG00000160305_53 (sequence is synthesized)
caaccaggtttttccagaattagtctggatcagtgcctaacaaagctgttattaattctccacacatgagtctggctaactgggccagctctcatgttttactcctgtctggctacaaat

SEQ ID NO: 476404 - DNA, 120 bp, Artificial Sequence
  ENSG00000160305_54 (sequence is synthesized)
agcactgtgcatagtagccctgtttccccatggtgttggactgtggtaaagtatgttgtgacatactggaattctaataatcctgttgtaagtatgtacagaatctatgtaacttattgt

SEQ ID NO: 476405 - DNA, 120 bp, Artificial Sequence
  ENSG00000160305_55 (sequence is synthesized)
tgacatacagaggtttgggaagtagtctaatggacattccttacaatagaatggctgggaagggaaagaaaaaaaaaaaaaaactacctaactccaatcttaatgttgtagttttatagc

SEQ ID NO: 476406 - DNA, 120 bp, Artificial Sequence
  ENSG00000160305_56 (sequence is synthesized)
aaacaaaaattgtcagctttttgtattgaaaggtcagtggtggtaagacaaggtgtcttgtaaattaagattttaagaagtgcattaaaatgttttagaattactctgggaattctgtat

SEQ ID NO: 476407 - DNA, 120 bp, Artificial Sequence
  ENSG00000160305_57 (sequence is synthesized)
atcacactaaaatttttatatcattatgttaataaaagttattgactttgtaattctgcattttgaaatgtgtgaaaagggtctttaaattaccccgaataggttgtatcttattttgct

SEQ ID NO: 476408 - DNA, 120 bp, Artificial Sequence
  ENSG00000160305_58 (sequence is synthesized)
ttttttctgactataaaagcagttatgcttatagcataaaatctagaaagcacattaaagtataaagaaaattaaaatttcttataattctacctctgagtaaacagcagcattcgtatg

SEQ ID NO: 476409 - DNA, 120 bp, Artificial Sequence
  ENSG00000160305_59 (sequence is synthesized)
tatgtaacataaaccctctcagggatttattttttctttttaaaaattttttacaaaattaggatcaagtgcttttttaaataatttgcttttgtacttaataaattatagactttaaaa

SEQ ID NO: 476410 - DNA, 120 bp, Artificial Sequence
  ENSG00000160305_60 (sequence is synthesized)
ttgcttatttctattaacatctcttatttctttcaaaattcaaagtcaaatttggagcggcctctaaacttcctgacctgacatgagcacatcagtcctgcaggccagcttctgagggac

SEQ ID NO: 476411 - DNA, 120 bp, Artificial Sequence
  ENSG00000160305_61 (sequence is synthesized)
ctccagctttgtttatctgtatttttcattgcaaattgacaaattacagctgtatgtatttacgggatacaaagtgatgttataatttatgaatacaatatagaataattaatatatcca

SEQ ID NO: 476412 - DNA, 120 bp, Artificial Sequence
  ENSG00000160305_62 (sequence is synthesized)
caatacagtggagtgatgtaacctggagtgctggggagggggctttgaatggaactgggtagcaggggctatgaagaatgatgcccagtggctcaaggcaggaaaggaggccagtgtggt

SEQ ID NO: 476413 - DNA, 120 bp, Artificial Sequence
  ENSG00000160305_63 (sequence is synthesized)
gggggccaggtggtcccaggtaggggatgcagataaggctgggggtcgctgggttttccctaaggatgcagtgggatcccagaccttgcgggctttgagtcccagtccagatctcaggtt

SEQ ID NO: 476414 - DNA, 120 bp, Artificial Sequence
  ENSG00000160305_64 (sequence is synthesized)
ctgtcctgatggggccctgactcatatggactggcaaagcttccgggatttggaatctcaggatctgcccagcccttgtgcctggacacagcacataagtgcgtccactggtctctctct

SEQ ID NO: 476415 - DNA, 120 bp, Artificial Sequence
  ENSG00000160305_65 (sequence is synthesized)
tccactgccttctgtcagtagaagccaccaatcgagaaacagggagttttgatgttacactggtctgctctggagttttatatttattagactgaattgcactttttatcttcttaagaa

SEQ ID NO: 476416 - DNA, 120 bp, Artificial Sequence
  ENSG00000160305_66 (sequence is synthesized)
ggactaaaaaagctgcgaggcctggcaggggatcagggaggatgagtgtcctgagcagagaggtagggttaccaggtatttctgtttgccttgaactggtcacatagccccagtgcccct

SEQ ID NO: 476417 - DNA, 120 bp, Artificial Sequence
  ENSG00000160305_67 (sequence is synthesized)
cagcagagagacagggtgaatgaaggagctggtgtagtcagtcctagaggagacacacagatgcctctgagaaagccggttgcagatgacacacgcccaggctcagtgcaggtgacctgt

SEQ ID NO: 476418 - DNA, 120 bp, Artificial Sequence
  ENSG00000160305_68 (sequence is synthesized)
gggcatggaaagtagtacaattcagggatgtttgcttatcgcttattatgtatttataatggtgtcgtatggaatattttattgaaaaggccagaaaggtcttctttacccacgtgtttc

SEQ ID NO: 476419 - DNA, 120 bp, Artificial Sequence
  ENSG00000160305_69 (sequence is synthesized)
tggctctgccctgggtgaatggagtgcccgcatctctccctcttagctgggaccacacaggagatacttgcatgcctgtcccttcactgctagtgagagagtacagatggtgagaaaaga

SEQ ID NO: 476420 - DNA, 120 bp, Artificial Sequence
  ENSG00000160305_70 (sequence is synthesized)
ccatctctaccaaaaaaaagacaccagccgtacgtctaggactgacacattgtcattatcatggacgctaatcacaaggtgtcgtgtgcagtggcgtgcaggtggtgtgcacgcagatct

SEQ ID NO: 476421 - DNA, 120 bp, Artificial Sequence
  ENSG00000160305_71 (sequence is synthesized)
gccatctgcctccaggtgaggtgcctggggctgcggttctcgaaagctggctgttggcagcatggagacccagtttcccagttgttaatgtgccgttttgtagccgcctgatctatttct

SEQ ID NO: 476422 - DNA, 120 bp, Artificial Sequence
  ENSG00000160305_72 (sequence is synthesized)
ccttctctgggcctttgatatctcatttccatgtaacattttagcttcaagggttttatttttaaagatgttctattctagttggagaaaggcttatttggaaaaaaaacacattgtttt

SEQ ID NO: 476423 - DNA, 120 bp, Artificial Sequence
  ENSG00000160305_73 (sequence is synthesized)
tgaacagtgactaataactgtaagactctctaagttagatataaaacacagctaagttcttaaagcaagattgaacttactgttttaagatatctagcaatattaaattgaaacattaat

SEQ ID NO: 476424 - DNA, 120 bp, Artificial Sequence
  ENSG00000160305_74 (sequence is synthesized)
ataggatctgacttagtttcatcttgatgaacgatggtggtgcatacagtgtgtgcttgctggtctgtggtcagatgtgtatcagggcccctcccagctttgaagctcagatcccagtcc

SEQ ID NO: 476425 - DNA, 120 bp, Artificial Sequence
  ENSG00000160305_75 (sequence is synthesized)
tggattctcaagtatggccacactgtagcttgatgtaaacactaggtttagcttactgggtgccaggggcttgctgggttcagggaggacctaaacgaaatgtagagtgagctgctgtga

SEQ ID NO: 476426 - DNA, 120 bp, Artificial Sequence
  ENSG00000160305_76 (sequence is synthesized)
gcacatggggtgggtggcgagtgcatgcgggtggcggcacttgggaccgcagcgtggttggggtgtccctgccattcatggcaggtgtgctgtggaaaggttgacatcctgactgttgtc

SEQ ID NO: 476427 - DNA, 120 bp, Artificial Sequence
  ENSG00000160305_77 (sequence is synthesized)
aacagaccctcagagtgatcatttccaacgtcatgatctgccctttcagacattactacctgtgtagtaaattttgtactgaaattgttcccttaatttttagggttcgtttggtagaac

SEQ ID NO: 476428 - DNA, 120 bp, Artificial Sequence
  ENSG00000160305_78 (sequence is synthesized)
ctcccatgtggccttggtcggtggcgctgacctccctgcccatcaccctacctgtgtgcagggccatccacacctccgagactggtgcacagtcctgcacacaggcctgagtcgggggtc

SEQ ID NO: 476429 - DNA, 120 bp, Artificial Sequence
  ENSG00000160305_79 (sequence is synthesized)
cccggggtggatgaggatgttttgctttttatatggagtggcaggtttgtgagtattcattatatcattctttaccattttggatgtctaaactattcaaaaataaatgcttctatttgt

SEQ ID NO: 476430 - DNA, 120 bp, Artificial Sequence
  ENSG00000160305_80 (sequence is synthesized)
ttgcagctcgggaagtctttgtgcagtagatggaaagcccagcaaacttgaattcacaaagcctaaaaattgttgtacatcagaaaactcctaaagtaaaaggaaaatatttgcagcaat

SEQ ID NO: 476431 - DNA, 120 bp, Artificial Sequence
  ENSG00000160305_81 (sequence is synthesized)
tctatgacacggaacatcttggtgattcactggtttatcccatgcatgtttattaggccactaaatttaaaagcaattttaatatgcttgatgaaaggtacatgccttaatgagagtcat

SEQ ID NO: 476432 - DNA, 120 bp, Artificial Sequence
  ENSG00000160305_82 (sequence is synthesized)
ctttcttaagaaattaccagattgtgctgtggcctggggttcctgtttctctttaggcctcatccccaccctcctgccctttgtcctggtgcccccacgtctctggcttctggcttcact

SEQ ID NO: 476433 - DNA, 120 bp, Artificial Sequence
  ENSG00000160305_83 (sequence is synthesized)
tctcccaccaggacccaaccattctccctcctggtttgcctgggtgtcccccacatcctcccaggaggagctccctatggctgctgcctgaccacgtagggcctcctgcgtacggtggtc

SEQ ID NO: 476434 - DNA, 120 bp, Artificial Sequence
  ENSG00000160305_84 (sequence is synthesized)
tgaatgggaactgctttgtcaaggctgcacacgtgagctctggggcccaggactgtccagggtctgactcagtacctcctctggggaagcctcaggtgatgctggtcacacaggggctcc

SEQ ID NO: 476435 - DNA, 120 bp, Artificial Sequence
  ENSG00000160305_85 (sequence is synthesized)
tgttgcagcacacacctgttgaccaggtattaggggttttcttgtttgttaacctgcatcattgtctatgcactggagactaccctgcatcagaagctgatgtttcatcttatcccctct

SEQ ID NO: 476436 - DNA, 120 bp, Artificial Sequence
  ENSG00000160305_86 (sequence is synthesized)
ccagtgtggccgacaccccatctcttgggaggtcaccccacctttgagcacccccagagcctctcattctcttggtccacacctgagccaggcagggcctgcttctgggttctgcagcac

SEQ ID NO: 476437 - DNA, 120 bp, Artificial Sequence
  ENSG00000160305_87 (sequence is synthesized)
tgctcaggtctctgcgtctccaccccaggcgcaccgccactccgtggtccccatggtggagtcagagtgtgcacctcctctccagtgcctcttcccatggcactcccctgttgctgcacc

SEQ ID NO: 476438 - DNA, 120 bp, Artificial Sequence
  ENSG00000160305_88 (sequence is synthesized)
tgatttcctttaaagataccatcttccttgaagaacatgaagtctgagggtacctgtgaaggggccccttccttctgctgatgcagccctgtggttccgatggccgcaggctgcgctaac

SEQ ID NO: 476439 - DNA, 120 bp, Artificial Sequence
  ENSG00000160305_89 (sequence is synthesized)
ctgtgtccagttgcacccagggaggcagtggtgtctggctcatggggccacgagaacttgatgaagcacgcagaacccagagcccgtccacagctattcttgctgtggtcgggactcggc

SEQ ID NO: 476440 - DNA, 120 bp, Artificial Sequence
  ENSG00000160305_90 (sequence is synthesized)
tcatctgggctttgccataggctctgtgacttttggcaaatccctagtcctctaatctttcctactggtcagtgacgtgatgcctcccctcttcgccctgcctcgtcccccatccccaca

SEQ ID NO: 476441 - DNA, 120 bp, Artificial Sequence
  ENSG00000160305_91 (sequence is synthesized)
ggctcagtgtggtcttggtgggaccgggtagcgtttccatgaagaatgaaatacgctttcctgagcacgcacagcctgcatcgtcacggccccactcccgtctgagctcactctctgcag

SEQ ID NO: 476442 - DNA, 120 bp, Artificial Sequence
  ENSG00000160305_92 (sequence is synthesized)
gactcccaaggacaaatcatgtgtcgcctcttgcctgtgaaagcccagagcgttcagaatacatgtgggaacactaatgttgctggtgtctcctgtttaacagatgacatcccaaaaaag

SEQ ID NO: 476443 - DNA, 120 bp, Artificial Sequence
  ENSG00000160305_93 (sequence is synthesized)
aagatagcaagcgttttcaggcccccctcccccgatgtcctcgcatacttggacttcagcgtgtcaaccactgggatattagcgggagtgaaggtaggtcctctgaaatcttgtttgctt

SEQ ID NO: 476444 - DNA, 120 bp, Artificial Sequence
  ENSG00000160305_94 (sequence is synthesized)
cagcccctagaaatcaggaggagtggacagaaaggatgtcagatgcagatttaaactgacaggtccttcttatgcaaagcacaaagcaacaattttgcttcttaagatttgtgttaaata

SEQ ID NO: 476445 - DNA, 120 bp, Artificial Sequence
  ENSG00000160305_95 (sequence is synthesized)
ccaataaatgctaagatgtgattagcctgagagtaatgcgttttctgatgcattatggttatgtctaaactttctgatttatgactgtctagcttacaggaactggtggctttgaagaat

SEQ ID NO: 476446 - DNA, 82 bp, Artificial Sequence
  ENSG00000160305_96 (sequence is synthesized)
atgactgtctagcttacaggaactggtggctttgaagaatctcttaccttgctgggagtcaatagctcaattaaaatttttc

SEQ ID NO: 476447 - DNA, 120 bp, Artificial Sequence
  ENSG00000160305_97 (sequence is synthesized)
taccctgaaattttgtttcaaagatttttagtgtaccatttcttgggtattatttaggttatatggggatttgagccaaccgtcttttaaggaaataaatatgatgtttggtagttcgga

SEQ ID NO: 476448 - DNA, 120 bp, Artificial Sequence
  ENSG00000160305_98 (sequence is synthesized)
agggcccctgctgcctgccaggtgggagcagctcgtgtggctcttaggaaccttggccttctaaggcaccttttctgggtgctcaggaagccgatgagatgtgtgtgagtgggtttgttt

SEQ ID NO: 476449 - DNA, 120 bp, Artificial Sequence
  ENSG00000160305_99 (sequence is synthesized)
ggggatgaagtgggttggagtctgagtctgaaattgagtgaaaatacatttttcattaaatacactgtccgttatcagtacttgggaagaatctgcttgattccttcaaacactagaaag

SEQ ID NO: 476450 - DNA, 120 bp, Artificial Sequence
  ENSG00000160305_100 (sequence is synthesized)
tggcgatccgtctctagaagtgaatgcctctggagtggtgtccccggatcctctccaagtgttcggagcagagctcagaaccccgtgcctgccatcccccaaccttcaccctgtggcatg

SEQ ID NO: 476451 - DNA, 120 bp, Artificial Sequence
  ENSG00000160305_101 (sequence is synthesized)
ttttccaccaaacccccccacttggcgtcagaacagaaatcatgcccctgttgtggctggaaaagaagtgttcttgaggaagggaagagtggagtgcccagggtgctgggtgggcgggcg

SEQ ID NO: 476452 - DNA, 120 bp, Artificial Sequence
  ENSG00000160305_102 (sequence is synthesized)
tgaaacattaataaatgtggtaatttgtgttgactcaaattcatttctgaaaccatgaaatgtcttattaaaaggaagcaccaagtttcaggccaggagtggtggctcatgcctataatc

SEQ ID NO: 476453 - DNA, 77 bp, Artificial Sequence
  ENSG00000160305_103 (sequence is synthesized)
tggacaatatggtggtgcgcgcctgttgtcccggctacttgggaggttgaggcacaagaatcgcttgaacctggcaa

SEQ ID NO: 476454 - DNA, 120 bp, Artificial Sequence
  ENSG00000160305_104 (sequence is synthesized)
aaattagctggctggtggtgcgcgcctgttgtcccggctacttgggaggttgaggcacaagaatcgcttgaacctggcaagaggaggttgcagcgagccaagatctcaccactgcactcc

SEQ ID NO: 476455 - DNA, 120 bp, Artificial Sequence
  ENSG00000160307_0 (sequence is synthesized)
gccgcccaggacccgcagcagagacgacgcctgcagcaaggagaccaggaaggggtgagacaaggaagaggatgtctgagctggagaaggccatggtggccctcatcgacgttttccacc

SEQ ID NO: 476456 - DNA, 120 bp, Artificial Sequence
  ENSG00000160307_1 (sequence is synthesized)
aatattctggaagggagggagacaagcacaagctgaagaaatccgaactgaaggagctcatcaacaatgagctttcccatttcttagaggaaatcaaagagcaggaggttgtggacaaag

SEQ ID NO: 476457 - DNA, 120 bp, Artificial Sequence
  ENSG00000160307_2 (sequence is synthesized)
tcatggaaacactggacaatgatggagacggcgaatgtgacttccaggaattcatggcctttgttgccatggttactactgcctgccacgagttctttgaacatgagtgagattagaaag

SEQ ID NO: 476458 - DNA, 120 bp, Artificial Sequence
  ENSG00000160307_3 (sequence is synthesized)
cagccaaacctttcctgtaacagagacggtcatgcaagaaagcagacagcaagggcttgcagcctagtaggagctgagctttccagccgtgttgtagctaattaggaagcttgatttgct

SEQ ID NO: 476459 - DNA, 120 bp, Artificial Sequence
  ENSG00000160307_4 (sequence is synthesized)
caaaggctgttttaacggcctgcatcattctttctgctatattaggcctgtgtgtaagctgactggccccagggactcttgttaacagtaacttaggagtcaggtctcagtgataaagcg

SEQ ID NO: 476460 - DNA, 120 bp, Artificial Sequence
  ENSG00000160307_5 (sequence is synthesized)
tgcaccgtgcagcccgccatggccgtgtagaccctaacccggagggaaccctgactacagaaattaccccggggcacccttaaaacttccactacctttaaaaaacaaagccttatccag

SEQ ID NO: 476461 - DNA, 120 bp, Artificial Sequence
  ENSG00000160307_6 (sequence is synthesized)
cattatttgaaaacactgctgttctttaaatgcgttcctcatccatgcagataacagctggttggccggtgtggccctgcaagggcgtggtggcttcggcctgcttcccgggatgcgcct

SEQ ID NO: 476462 - DNA, 120 bp, Artificial Sequence
  ENSG00000160307_7 (sequence is synthesized)
gatcaccaggtgaacgctcagcgctggcagcgctcctggaaaaagcaactccatcagaactcgcaatccgagccagctctgggggctccagcgtggcctccgtgacccatgcgattcaag

SEQ ID NO: 476463 - DNA, 120 bp, Artificial Sequence
  ENSG00000160307_8 (sequence is synthesized)
tcgcggctgcaggatccttgcctccaacgtgcctccagcacatgcggcttccgagggcactaccgggggctctgagccaccgcgagggcctgcgttcaataaaaagagcgcagcttggga

SEQ ID NO: 476464 - DNA, 120 bp, Artificial Sequence
  ENSG00000160307_9 (sequence is synthesized)
ttgctcctagtcactgtctcactttcagattgattttaacagcttgcagttgatggtttgctcacctgcactctaccacctcatcttggagccttgcaggaacagagagggaccctgtgg

SEQ ID NO: 476465 - DNA, 120 bp, Artificial Sequence
  ENSG00000160307_10 (sequence is synthesized)
ggattaattcaggggaaattaatccctgaattcccttgctgctctgcctctgtatttttgccagtttccctgttggcccaacccagccagaattcagagggcatgggaatatatccccgt

SEQ ID NO: 476466 - DNA, 120 bp, Artificial Sequence
  ENSG00000160307_11 (sequence is synthesized)
ggcccacacggacagagaaggcaggcccacagctgtctaagaggccggtggaaggattatgataaaagtgcaaattcccagaatgcccctccaggccatgcctgctgctctgagcttgaa

SEQ ID NO: 476467 - DNA, 120 bp, Artificial Sequence
  ENSG00000160307_12 (sequence is synthesized)
cctggcagccctgccacccccgccttcggctcccattggctgccacggcctgcagtgggctgcaccagggttcatccatcctccctgggcagagggaataagaggctgcctctgcccacc

SEQ ID NO: 476468 - DNA, 120 bp, Artificial Sequence
  ENSG00000160310_0 (sequence is synthesized)
gagggcggtggctcaggctcctggaaaggaccgtccacccctccgcgctggcggtgtggacgcggaactcagcggagaaacgcgattgagagcagtgtgtggattacactatcactggaa

SEQ ID NO: 476469 - DNA, 120 bp, Artificial Sequence
  ENSG00000160310_1 (sequence is synthesized)
aaatacgaattgagaagaaggaaaagactggaagatgcagaccttggttcctgttagtggaaacactgtaaggtcccagaaatggaaaagaaaatgaaataaatcagcagttatgaggca

SEQ ID NO: 476470 - DNA, 120 bp, Artificial Sequence
  ENSG00000160310_2 (sequence is synthesized)
gagcctaagagaactatggcaacatcaggtgactgtcccagaagtgaatcgcagggagaagagcctgctgagtgcagtgaggccggtctcctgcaggagggagtacagccagaggagttt

SEQ ID NO: 476471 - DNA, 120 bp, Artificial Sequence
  ENSG00000160310_3 (sequence is synthesized)
gtggccatcgcggactacgctgccaccgatgagacccagctcagttttttgagaggagaaaaaattcttatcctgagacaaaccactgcagattggtggtggggtgagcgtgcgggctgc

SEQ ID NO: 476472 - DNA, 120 bp, Artificial Sequence
  ENSG00000160310_4 (sequence is synthesized)
tgtgggtacattccggcaaaccatgtggggaagcacgtggatgagtacgaccccgaggacacgtggcaggatgaagagtacttcggcagctatggaactctgaaactccacttggagatg

SEQ ID NO: 476473 - DNA, 120 bp, Artificial Sequence
  ENSG00000160310_5 (sequence is synthesized)
ttggcagaccagccacgaacaactaaataccacagtgtcatcctgcagaataaagaatccctgacggataaagtcatcctggacgtgggctgtgggactgggatcatcagtctcttctgt

SEQ ID NO: 476474 - DNA, 120 bp, Artificial Sequence
  ENSG00000160310_6 (sequence is synthesized)
gcacactatgcgcggcctagagcggtgtacgcggtggaggccagtgagatggcacagcacacggggcagctggtcctgcagaacggctttgctgacatcatcaccgtgtaccagcagaag

SEQ ID NO: 476475 - DNA, 120 bp, Artificial Sequence
  ENSG00000160310_7 (sequence is synthesized)
gtggaggatgtggtgctgcccgagaaggtggacgtgctggtgtctgagtggatggggacctgcctgctgtttgagttcatgatcgagtccatcctgtatgcccgggatgcctggctgaag

SEQ ID NO: 476476 - DNA, 120 bp, Artificial Sequence
  ENSG00000160310_8 (sequence is synthesized)
gaggacggggtcatttggcccaccatggctgcgttgcaccttgtgccctgcagtgctgataaggattatcgtagcaaggtgctcttctgggacaacgcgtacgagttcaacctcagcgct

SEQ ID NO: 476477 - DNA, 120 bp, Artificial Sequence
  ENSG00000160310_9 (sequence is synthesized)
ctctgaaccgtgcactatattgcagttggacatgagaaccgtgcaaatttctgatctagagaccctgaggggcgagctgcgcttcgacatcaggaaggcggggaccctgcacggcttcac

SEQ ID NO: 476478 - DNA, 120 bp, Artificial Sequence
  ENSG00000160310_10 (sequence is synthesized)
ggcctggtttagcgtccacttccagagcctgcaggaggggcagccgccgcaggtgctcagcaccgggcccttccaccccaccacacactggaagcagacgctgttcatgatggacgaccc

SEQ ID NO: 476479 - DNA, 120 bp, Artificial Sequence
  ENSG00000160310_11 (sequence is synthesized)
agtccctgtccatacaggagacgtggtcacgggttcagttgtgttgcagagaaacccagtgtggagaaggcacatgtctgtggctctgagctgggctgtcacttccagacaagaccccac

SEQ ID NO: 476480 - DNA, 120 bp, Artificial Sequence
  ENSG00000160310_12 (sequence is synthesized)
atctcaaaaagttggagaaaaagtcttccccatctggagatgacagttgatgctttatttggaaagcagtgtgcatatcttgaggggtgatgaacacaagcaaaccaagttgcacctggc

SEQ ID NO: 476481 - DNA, 120 bp, Artificial Sequence
  ENSG00000160310_13 (sequence is synthesized)
ttctgcacactcctgcgaaagtcggtgaacattcactccacattgacccctccctagcctggcaggtgacgtcagggtccttcacagacaaacacgcttgggctcggcaggagctgccgt

SEQ ID NO: 476482 - DNA, 120 bp, Artificial Sequence
  ENSG00000160310_14 (sequence is synthesized)
ggccacccccgctgcccagtgtctgccctctagaagtaggctgtgtttccaggtgttcacccgtggtgcccacagtgccgacccgtggctgggtcggagctccatgttcctaagctaggt

SEQ ID NO: 476483 - DNA, 120 bp, Artificial Sequence
  ENSG00000160310_15 (sequence is synthesized)
ctaggtctacactcctaggacgcacgcatatcagcccgtgtaccctgtgacagtgactgtccccacctcctatgttagtggtgcccttactgccgtcgctcatccactcgtgtgggacgt

SEQ ID NO: 476484 - DNA, 120 bp, Artificial Sequence
  ENSG00000160310_16 (sequence is synthesized)
aggattgcacagggctgtgccagtggcgtgtagggaacactgccctggctcagcgtgcgagctaaggtggtgatgtatgcgatgggactctgcatgggatagtacagttgtgtagacgtc

SEQ ID NO: 476485 - DNA, 120 bp, Artificial Sequence
  ENSG00000160310_17 (sequence is synthesized)
ttccaaataaattatgtgttggtccatcgcacatgctcaataaatatttttaaatgagtgaatgtcattgtgtatcctgttttatgcatatatgttattttttgtaattacaggatcata

SEQ ID NO: 476486 - DNA, 120 bp, Artificial Sequence
  ENSG00000160310_18 (sequence is synthesized)
ctatatgcattgctttataagtttttctcaatattgtgaaaaaacttccacatcagtagatacatgtccataatttttttttgtattgttttgatttttattaaattttattgaaatata

SEQ ID NO: 476487 - DNA, 120 bp, Artificial Sequence
  ENSG00000160310_19 (sequence is synthesized)
gcgtgcactgcgcttgcgcgggttgagggcggtggctcaggctcctggaaaggaccgtccacccctccgcgctggcggtgtggacgcggaactcagcggagaaacgcgattgaggtaggt

SEQ ID NO: 476488 - DNA, 120 bp, Artificial Sequence
  ENSG00000160310_20 (sequence is synthesized)
gtcctgatgggcagctcagatggctggactgcacgtaaggaaggacaggccaggtgaggcgtcctcgcactgcgtgtgcgtcgctggcggacagaggcctccgcccccttttgggacctc

SEQ ID NO: 476489 - DNA, 120 bp, Artificial Sequence
  ENSG00000160310_21 (sequence is synthesized)
cgagcgccttcgcgatctcagccactttccctggcgtccaaacgggagctcggtccccgtcacacccttccctgcgtgccgcaccccttcccggccactcccgccgtccagcgccttcta

SEQ ID NO: 476490 - DNA, 120 bp, Artificial Sequence
  ENSG00000160310_22 (sequence is synthesized)
cggccacgcccaccccaccaccatctctgtcacgcccttcgcggccacgcccacctgcctggcggcccctgccccgaagctcgcggcgctgtcccagcctgaccctctcgtgcccctgcg

SEQ ID NO: 476491 - DNA, 120 bp, Artificial Sequence
  ENSG00000160310_23 (sequence is synthesized)
tccacgcgtggccctctcgcttcctgcccccttctcaccccccttcactggccacctgttccaaccctccatgatcctgttcctcccgagggcatcttaggagggcagggtcctgcgcgc

SEQ ID NO: 476492 - DNA, 120 bp, Artificial Sequence
  ENSG00000160310_24 (sequence is synthesized)
actgcggcctccactccgaccccgtcccagtttggacccaggtcttccaatgaaaatataattatgcaaatcagtaagcatttgtaactacgaatatcacaaaaataagcttcaagtctg

SEQ ID NO: 476493 - DNA, 120 bp, Artificial Sequence
  ENSG00000160310_25 (sequence is synthesized)
cgggccctgggcggggccttcccggctgacggcctgcgtgcactgcgcttgcgcgggttgagggcggtggctcaggctcctggaaaggaccgtccacccctccgcgctggcggtgtggac

SEQ ID NO: 476494 - DNA, 120 bp, Artificial Sequence
  ENSG00000160310_26 (sequence is synthesized)
tttcatcaaaactaaaaatgactgctctgcaaaaggatgatgctaagagaataaaaaagacaagctaagattaggagaaaatattgcaaagaacatatccagtgtgtgttctgaatatac

SEQ ID NO: 476495 - DNA, 120 bp, Artificial Sequence
  ENSG00000160310_27 (sequence is synthesized)
agagaaatctcaaaactcaacaggaagaaaacaagccaattgaaaatgggcaaaatacttgaacagacactttaccaaagtggatatacagatatcaaatacacacatgaaaagatgttc

SEQ ID NO: 476496 - DNA, 120 bp, Artificial Sequence
  ENSG00000160310_28 (sequence is synthesized)
agcatagccatcagggaaatgcacattaaagccacagtgagatatcacttacacccattgaaaaatgactacaataaaaaaaaaatctgatagtaataccaactgtcatcgaggatgagg

SEQ ID NO: 476497 - DNA, 120 bp, Artificial Sequence
  ENSG00000160310_29 (sequence is synthesized)
aacagctgaaagtcatgcattgctggagggaacatgccactgtggaaacaggtgggtgctttcttatagacttgtatgtgcactcaccttatgcccaggagtccctctcctgtgtgttca

SEQ ID NO: 476498 - DNA, 120 bp, Artificial Sequence
  ENSG00000160310_30 (sequence is synthesized)
acccagagatatgcaagctgtgttcacacaaaaacctgtatgtgaatgattatactagctctctttataattgcaaaaaaaaaaaaaacaaaacctggaaacaacccaagtgtccttcat

SEQ ID NO: 476499 - DNA, 120 bp, Artificial Sequence
  ENSG00000160310_31 (sequence is synthesized)
ctggataatccttaaggataaactggtgcgtccacacagtggaataccactgagcagtgaagaggagccagttattgaaacaggtaatttggaggaaccccagaaacggtacagtgagtg

SEQ ID NO: 476500 - DNA, 120 bp, Artificial Sequence
  ENSG00000160310_32 (sequence is synthesized)
aaagaaacttgtcttgaaaggttatgtactgtttggttccatttgtatgatattctcaaaaagacacaagaccatggggatggagaccagatcggtggctggagaggctggggtcgggga

SEQ ID NO: 476501 - DNA, 120 bp, Artificial Sequence
  ENSG00000160310_33 (sequence is synthesized)
gggcatgaccaccagagaaaagggtgaagagtgttttgggtggcagagctgtgtgtatgctggctgtggttgtgaggacaaaatccacacaagcgctcaagttcgtaggctgtacgccag

SEQ ID NO: 476502 - DNA, 120 bp, Artificial Sequence
  ENSG00000160310_34 (sequence is synthesized)
aaaagctgtttcactacataactgaaaaaataagattgaaaaataagatgtatatattttttgtgtgcgtgtgtagaaaaatacttgaaggtaaactgcagagtgataacagtggttcct

SEQ ID NO: 476503 - DNA, 120 bp, Artificial Sequence
  ENSG00000160310_35 (sequence is synthesized)
tctaggtactgggttaatatgtgatttttatgtttgtttgagcttttctaagttttctacattttccgtacaaaacatgtattacttctgtaataaaagcagcttgagattatttaagga

SEQ ID NO: 476504 - DNA, 120 bp, Artificial Sequence
  ENSG00000160310_36 (sequence is synthesized)
agcaaaacacttctgttgtttctcatcaactacaggatgaagtgcaggctccctgggtggtttgcaggggccacaggccttggccccacctcgctggtgctccctctactcctttctgtg

SEQ ID NO: 476505 - DNA, 120 bp, Artificial Sequence
  ENSG00000160310_37 (sequence is synthesized)
tttgaagcaagttctggttcagacagaaagcctggcctttgagggcgttgggtccccacttcctcagtcatagatgtgatgtgcttcccttgacttgggaccttctgagggatgcaaggt

SEQ ID NO: 476506 - DNA, 120 bp, Artificial Sequence
  ENSG00000160310_38 (sequence is synthesized)
ggaccaaaggacccgtgaatggccagggcatgcctgcgtggctttcggtttcttaagcagtgatttcagtccacttaaagggtgtgaaaattctgagaatgctacggaccaaatatattt

SEQ ID NO: 476507 - DNA, 120 bp, Artificial Sequence
  ENSG00000160310_39 (sequence is synthesized)
tatgtaacagttgggacccggcaacacttcagggctctttcaaaatctggtagctacgagctcttccgtgactgagatgggacaagagtgaagatttgtccttgcttttagctctgctcc

SEQ ID NO: 476508 - DNA, 120 bp, Artificial Sequence
  ENSG00000160310_40 (sequence is synthesized)
agttcatagttctaatgggaaattatgtgacttaaacccaggctgtgagatgcatcagtgacgtgtgggcataaaataaaccctcgagatgttctcttgcatggtacactggcctaggca

SEQ ID NO: 476509 - DNA, 120 bp, Artificial Sequence
  ENSG00000160310_41 (sequence is synthesized)
ggaatattcttgaggctaaaactgtagaactgtcagactagtgttacgaatgtggtggtgagaggcctgtgcagccgcggggcctgtgatgtgtctcctgtgtgtctttcactcctatgc

SEQ ID NO: 476510 - DNA, 120 bp, Artificial Sequence
  ENSG00000160310_42 (sequence is synthesized)
agaaaaagatgaattgctccttacattcgataatcagtgaccacgaaacactcagaccagagcctggcttatcaaaaaccttcagtgagtgctgggggtgtgagtgaataactaattatt

SEQ ID NO: 476511 - DNA, 120 bp, Artificial Sequence
  ENSG00000160310_43 (sequence is synthesized)
ttattatgcaaataagtgaatttataaaacgtttgctactgattttttccagtcttttttcttttttacgttctattttgattctttcatattgtacaccattttatgtctccagcgtct

SEQ ID NO: 476512 - DNA, 120 bp, Artificial Sequence
  ENSG00000160310_44 (sequence is synthesized)
tcattttagatttatgtttaatattctcagcatcttcaaaatcaaataaattatatttcgtttcattatggtatttgcattacagtttttttcaagtattttaagccactcttcatgaca

SEQ ID NO: 476513 - DNA, 120 bp, Artificial Sequence
  ENSG00000160310_45 (sequence is synthesized)
gaatcgttagaattccctccgtgaatccctgtctgtggccgcgcggtggcgctcgtgggctctgggcggtttccccgcgcccccgccctgcctggcgccccagctggcgccgcgtctgga

SEQ ID NO: 476514 - DNA, 120 bp, Artificial Sequence
  ENSG00000160310_46 (sequence is synthesized)
gatggggcgggcgcggtggcgccggcgcgctttggtttttagttcgttctgctgtggaaaggcccagcctggagctctccaactccttaactggaagagctgagcgccgaaaagattccg

SEQ ID NO: 476515 - DNA, 120 bp, Artificial Sequence
  ENSG00000160310_47 (sequence is synthesized)
cagaatctggggtagaaaattgggcgcaagaagctcagatgcttgaaacgtttctgactgaagcctctgaactcacgatgcgggttttgggggtggtttccccaggctggggggcttttc

SEQ ID NO: 476516 - DNA, 120 bp, Artificial Sequence
  ENSG00000160310_48 (sequence is synthesized)
tacggttcctgacgcattcagcgtctgcgcggggcgcgtggagggggccgccccaacccgggccctgcggtgccacgcggtgcccacgcgtgccttgtcatctgcttgacccagaccctg

SEQ ID NO: 476517 - DNA, 120 bp, Artificial Sequence
  ENSG00000160310_49 (sequence is synthesized)
gctggggggcttctgagcacgggctcggctgggccaacctcaggatctcaagggtcgtgcgtgattcattttgatgttttccctaatgtgaggtctaattaatttcttgtgtggacattg

SEQ ID NO: 476518 - DNA, 120 bp, Artificial Sequence
  ENSG00000160310_50 (sequence is synthesized)
cttgtggggcctcctggtccacagtctgcaggtgggccaaggccctgggagatcccatacgacggttggataaatgagggtacctgtgcacccagataggacaatctgttgtagcattgg

SEQ ID NO: 476519 - DNA, 120 bp, Artificial Sequence
  ENSG00000160310_51 (sequence is synthesized)
agtaattaaagcagtatggtgctataacaagacagatgggcagagcagggtagaatgcaaggaacaaaaattttcgtatgtgaaaaaggtggcattacgattaggagggagtgagggcca

SEQ ID NO: 476520 - DNA, 120 bp, Artificial Sequence
  ENSG00000160310_52 (sequence is synthesized)
agtcagcaaattattctggagcagttgattagcccttgttctctcacgccatacgtgaaaacttaattctgcatggaatcagcgtcagcgacagacatccatgggggcctgtgtgcacca

SEQ ID NO: 476521 - DNA, 120 bp, Artificial Sequence
  ENSG00000160310_53 (sequence is synthesized)
tcttaggtggagaaatgagcagcaacaatggatggaatggaccctgggctagatagaatctggcagtctatgtggcagaaatcagcaaaaacacgattgtaaaagcaaacaagtaattag

SEQ ID NO: 476522 - DNA, 120 bp, Artificial Sequence
  ENSG00000160310_54 (sequence is synthesized)
cctgtttctgacttcttgctttgatgttctcttttagggtccagataatttttttttttagaaaagaaatgtagagtgaaggtgacagcctttgattatagtagtaaagatgatccaaat

SEQ ID NO: 476523 - DNA, 120 bp, Artificial Sequence
  ENSG00000160310_55 (sequence is synthesized)
agtttgtataataaatacttggacacatgaatctgtatttgaaatttgaaaccatcctaataatatagccaaaaaaaaaaaaaaaaagctccagcgtcctctcctcacgctttccttggc

SEQ ID NO: 476524 - DNA, 120 bp, Artificial Sequence
  ENSG00000160310_56 (sequence is synthesized)
acctgcctgctgttgttacaggatcttgcttgttctcctgaggccacgccacgatttccgagaagcaggttgcacactcagcagtctcccactagccagtggcactgcaggtgcaggggc

SEQ ID NO: 476525 - DNA, 120 bp, Artificial Sequence
  ENSG00000160310_57 (sequence is synthesized)
cagtgtcatcctgcagaataaagaatccctgacggataaagtcatcctggacgtgggctgtgggactgggatcatcagtctcttctgtgcacactatgcgcggcctagagcggagagtag

SEQ ID NO: 476526 - DNA, 120 bp, Artificial Sequence
  ENSG00000160310_58 (sequence is synthesized)
gatgtccaggccttccatagtcttccataggggtgttggggtcaggggtcatcagctgtggctctgaccctccatctcagtccagacctcagcatggctctaggtcacaggcagtgattc

SEQ ID NO: 476527 - DNA, 120 bp, Artificial Sequence
  ENSG00000160310_59 (sequence is synthesized)
tgcacctgtgcgtctggccctcttcacgtcctcctggcctgctgtctgcctctcccctgcacctgtgcgtctgtccctcttcatgtcctccttgcctgctgtctgcctgttctcagagcc

SEQ ID NO: 476528 - DNA, 120 bp, Artificial Sequence
  ENSG00000160310_60 (sequence is synthesized)
cctcagccctcaggccttcatctctcctggcccatcttcctactctgacgctgacatgtagtaaaagtctgaagacagagaagagtgcatgtgcgtttagcataggaggggcagctttca

SEQ ID NO: 476529 - DNA, 120 bp, Artificial Sequence
  ENSG00000160310_61 (sequence is synthesized)
gtcagtgcagcaagggcatgtagttgttcagagatggtgctggaacgactgatttggagaaaagaggcccttcttcacaccatctgctaaaataaacctcagatgggctcaagagttaaa

SEQ ID NO: 476530 - DNA, 120 bp, Artificial Sequence
  ENSG00000160310_62 (sequence is synthesized)
tatttaagaaaaggaggaaacaaaaaaattgctacaagtttatttgttgttaggatgggaaaggtttttctaagaaccaagttcataatgaagctgtcaaataaaatacttgacaaaaaa

SEQ ID NO: 476531 - DNA, 120 bp, Artificial Sequence
  ENSG00000160318_0 (sequence is synthesized)
gtctctctgggctctgtgtctaaggagccctagggcactgggtgtgagtcacttaggtgggcctgtgtggaggggtgtctggggaggacattgaacaggctgggctgaaagggcgttcgg

SEQ ID NO: 476532 - DNA, 120 bp, Artificial Sequence
  ENSG00000160318_1 (sequence is synthesized)
ctgtcgggggaggtctctgggaagacaggttcctcacagcaaagcctgtggtgaaggtctcagaggcctctcaggggaagtctcaaggtctccagtaaggggaacgaggtctggagggag

SEQ ID NO: 476533 - DNA, 120 bp, Artificial Sequence
  ENSG00000160318_2 (sequence is synthesized)
gaggttgtggatcctcaggcagggttgttgagggaggggggtctccaggtccccagaagcagggacctcaggcaggagtaccaggggaggagtgtggaggaagcgggctcctcagctggg

SEQ ID NO: 476534 - DNA, 120 bp, Artificial Sequence
  ENSG00000160318_3 (sequence is synthesized)
ggcctcggggtaggaaaggcctgggcccatcctgcccttgtggcccccggctgcagcctcagtggcatgggggtgaagcggagcctccagagtgggggcattctgctcagcctcgtggcc

SEQ ID NO: 476535 - DNA, 120 bp, Artificial Sequence
  ENSG00000160318_4 (sequence is synthesized)
gctctccacggccaccaactactggacccgccaacaagagggccacagtggcctgtggcaggaatgcaaccacggcatctgctccagcatcccctgccagaccacgctggcggtgactgt

SEQ ID NO: 476536 - DNA, 120 bp, Artificial Sequence
  ENSG00000160318_5 (sequence is synthesized)
ggcgtgcatggtgctggcggtgggtgtcggcgtggtgggcatggtgatgggactgcggattcggtgcgacgagggcgagtcgctgcggggccagaccacgagcgccttcctcttcctcgg

SEQ ID NO: 476537 - DNA, 120 bp, Artificial Sequence
  ENSG00000160318_6 (sequence is synthesized)
cggactgctgctgctgaccgccttgataggctacaccgtgaagaatgcgtggaagaacaacgtcttcttctcttggtcctatttttctgggtggctggccttacccttctcaattctcgc

SEQ ID NO: 476538 - DNA, 120 bp, Artificial Sequence
  ENSG00000160318_7 (sequence is synthesized)
gggcttctgctttctgctggcagacatgatcatgcagagcaccgacgccatcagtggattccccgtgtgtctgtgactgcagcctgcctggggcagaataaaggaacggctttttttagc

SEQ ID NO: 476539 - DNA, 120 bp, Artificial Sequence
  ENSG00000160318_8 (sequence is synthesized)
taacgactcccgcagacccggcagagacccccttggagccccaaaccccagtccccggggccctcccggccatccgccccagggcccaccttcctctccctgctccgcacccccgtcccc

SEQ ID NO: 476540 - DNA, 120 bp, Artificial Sequence
  ENSG00000160318_9 (sequence is synthesized)
ccaggcttctgctttctgctggcagacatgatcatgcagagcaccgacgccatcagtggattccccgtgtgtctgtgactgcagcctgcctggggcagaataaaggaacggcttttttta

SEQ ID NO: 476541 - DNA, 120 bp, Artificial Sequence
  ENSG00000160321_0 (sequence is synthesized)
cctttgtctctcgctgcagccggaggtcaaggtctcgtccttactgctgtgtgtcctctgctcctagagtcccagcctctgtggccctatgacctgcaggtattgggagatccacaacta

SEQ ID NO: 476542 - DNA, 78 bp, Artificial Sequence
  ENSG00000160321_1 (sequence is synthesized)
gtggccctatgacctgcaggtattgggagatccacaactaagtcgccaggaccccctggaagcctagaaatgggatca

SEQ ID NO: 476543 - DNA, 120 bp, Artificial Sequence
  ENSG00000160321_2 (sequence is synthesized)
atgtgatgttagagaactacagaaacctggtcttcctgggtattgctgcctttaagccagacctgatcatttttctggaggaaggaaaagagtcctggaatatgaagagacatgagatgg

SEQ ID NO: 476544 - DNA, 120 bp, Artificial Sequence
  ENSG00000160321_3 (sequence is synthesized)
tggaagaatccccagttatatgttctcattttgctcaagatctttggccagagcagggcatagaagattctttccaaaaagtgatattgagaaggtatgaaaaatgtggacatgagaatt

SEQ ID NO: 476545 - DNA, 120 bp, Artificial Sequence
  ENSG00000160321_4 (sequence is synthesized)
tacacttaaaaattggttataccaatgtggatgagtgtaaggtgcacaaagaaggttataataaacttaaccagagtttgacaactacacagagcaaagtatttcaacgtggcaaatatg

SEQ ID NO: 476546 - DNA, 120 bp, Artificial Sequence
  ENSG00000160321_5 (sequence is synthesized)
caaatgtctttcataaatgttcaaattcaaacagacataagataaggcatactggaaagaaacatttgcaatgtaaagaatacgtcagatcattttgcatgctttcacacctatctcaac

SEQ ID NO: 476547 - DNA, 120 bp, Artificial Sequence
  ENSG00000160321_6 (sequence is synthesized)
ataaaagaatttatactagagagaattcctacaaatgtgaagaaggtggcaaagcttttaactggtcctcaacccttacttattataagagtgctcatactggagagaaaccctacagat

SEQ ID NO: 476548 - DNA, 86 bp, Artificial Sequence
  ENSG00000160321_7 (sequence is synthesized)
tattataagagtgctcatactggagagaaaccctacagatgtaaagaatgtggcaaagcctttagtaagttctcaatccttcctac

SEQ ID NO: 476549 - DNA, 89 bp, Artificial Sequence
  ENSG00000160321_8 (sequence is synthesized)
cataaggtctcgactcttactacacataaggcaattcatgctggagagaagccctacaaatgtaaagaatgtggcaaagccttcagtaa

SEQ ID NO: 476550 - DNA, 120 bp, Artificial Sequence
  ENSG00000160321_9 (sequence is synthesized)
agccctacaaatgtaaagaatgtggcaaagccttcagtaaggtctcaacccttattacacataaggcaattcatgctggagagaagccctacaaatgtaaagaatgtggcaaagccttta

SEQ ID NO: 476551 - DNA, 65 bp, Artificial Sequence
  ENSG00000160321_10 (sequence is synthesized)
tcctggcaaagcctataagtggccctcaacccttagttatcataagaaaattcatactggagaga

SEQ ID NO: 476552 - DNA, 68 bp, Artificial Sequence
  ENSG00000160321_11 (sequence is synthesized)
ctacaaatgtgaagaatgtggcaaaggttttagtatgttctcaatccttactaaacatgaggtaactg

SEQ ID NO: 476553 - DNA, 90 bp, Artificial Sequence
  ENSG00000160321_12 (sequence is synthesized)
aaatgtgaagaatgtggcaaagctttcaactggtcctcaaaccttatggaacataagaaaattcacactggagagacctttagtatgttc

SEQ ID NO: 476554 - DNA, 87 bp, Artificial Sequence
  ENSG00000160321_13 (sequence is synthesized)
tgtggcaaaggctttagtatgttctcaatccttactaaacataaggtaattcataataaggcaactcatgctggagagaaaccctac

SEQ ID NO: 476555 - DNA, 62 bp, Artificial Sequence
  ENSG00000160321_14 (sequence is synthesized)
tcaaaccttatggcttcagtacattctcaatccttactaaacataaggtaattcatactgga

SEQ ID NO: 476556 - DNA, 73 bp, Artificial Sequence
  ENSG00000160321_15 (sequence is synthesized)
aaatgtgaagaatgtggcaaagcctataagtggtcctcaacccttagttatcataagaaaattcatactgtct

SEQ ID NO: 476557 - DNA, 85 bp, Artificial Sequence
  ENSG00000160321_16 (sequence is synthesized)
tggcctttagtaaggtctcaacccttactacacataaggcaattcatgctggagagaagccctacaaatgtaaagaatgtggcaa

SEQ ID NO: 476558 - DNA, 120 bp, Artificial Sequence
  ENSG00000160321_17 (sequence is synthesized)
atgctggagagaagccctacaaatgtaaagaatgtggcaaaacctttattaaggtctcaacccttactacacataaggcaattcatgctggagagaagccctacaaatgtaaagaatgtg

SEQ ID NO: 476559 - DNA, 68 bp, Artificial Sequence
  ENSG00000160321_18 (sequence is synthesized)
attcatgctggagagaagccctacaaatgtaaagaatgtggcaaagcctttagtaagttctcaatcct

SEQ ID NO: 476560 - DNA, 62 bp, Artificial Sequence
  ENSG00000160321_19 (sequence is synthesized)
tcaaaccttatggctttagtacattctcagtccttactaaacataaggtaattcatactgga

SEQ ID NO: 476561 - DNA, 74 bp, Artificial Sequence
  ENSG00000160321_20 (sequence is synthesized)
aaatgtgaagaatgtggcaaagcctataagtggtcctcaacccttagttatcataagaaaattcatactgatct

SEQ ID NO: 476562 - DNA, 120 bp, Artificial Sequence
  ENSG00000160321_21 (sequence is synthesized)
ctacaaatgtgaagaatgtggcaaaacctttagtaaggtctcaacccttactacacataaggcaattcatgctggagaaaagccctacaaatgtaaagaatgtggcaaagcctttagtaa

SEQ ID NO: 476563 - DNA, 120 bp, Artificial Sequence
  ENSG00000160321_22 (sequence is synthesized)
tcaacccttactacacataaggcaattcatgctggagaaaagccctacaaatgtaaagaatgtggcaaagcctttagtaagttctcaatccttactaaacataaggtaattcatactgga

SEQ ID NO: 476564 - DNA, 63 bp, Artificial Sequence
  ENSG00000160321_23 (sequence is synthesized)
tagttattttagtatgttctccatccttactaaacatgaggtaattcatactggagagaaacc

SEQ ID NO: 476565 - DNA, 120 bp, Artificial Sequence
  ENSG00000160321_24 (sequence is synthesized)
aaatgtgaagaatgtggcaaagccttcagctggttgtcagtctttagtaaacataagaaaactcatgctggagagaaattctacaaatgtgaagcatgtggcaaagcctataagtcatcc

SEQ ID NO: 476566 - DNA, 120 bp, Artificial Sequence
  ENSG00000160321_25 (sequence is synthesized)
gcaaagcctataagtcatcctcaacccttagttatcataagaaaattcatactgaagagaaaccttacaaatatgaagaatgtggcaaaggctttagtacattctcaatccttactaaac

SEQ ID NO: 476567 - DNA, 120 bp, Artificial Sequence
  ENSG00000160321_26 (sequence is synthesized)
aaatgtgaagaatgtggcaaagctttcaactggtcatcaaaccttatggaacataagaaaattcacactggagagacaccctacaaatgtgaagaatgtgacaaagccttcagctggccc

SEQ ID NO: 476568 - DNA, 120 bp, Artificial Sequence
  ENSG00000160321_27 (sequence is synthesized)
attcacactggagagacaccctacaaatgtgaagaatgtgacaaagccttcagctggccctcaagccttactgaacataaggcaactcatgctggagaaaaaccctacaaatgtgaagaa

SEQ ID NO: 476569 - DNA, 85 bp, Artificial Sequence
  ENSG00000160321_28 (sequence is synthesized)
aaatgtgaagaatgtggcaaagccttcagctggccctcaagacttactgaacataaggcaactcatgctggagaggaactggtcc

SEQ ID NO: 476570 - DNA, 62 bp, Artificial Sequence
  ENSG00000160321_29 (sequence is synthesized)
tcaaaccttatggctttagtacgttctcaatccttactaaacataaggtaattcatactgga

SEQ ID NO: 476571 - DNA, 83 bp, Artificial Sequence
  ENSG00000160321_30 (sequence is synthesized)
aaatgtgaagaatgtggcaaagcctataagtggtcctcaacccttagttatcataagaaaattcatactgctttgttatgttc

SEQ ID NO: 476572 - DNA, 60 bp, Artificial Sequence
  ENSG00000160321_31 (sequence is synthesized)
aaatgtgaagaatgtggcaaagcctataagtggccctcaacccttagatatcatacgttc

SEQ ID NO: 476573 - DNA, 90 bp, Artificial Sequence
  ENSG00000160321_32 (sequence is synthesized)
tcttcagtatctagaaatgtgaagaatgtggcaaagcctataagtggccctcaacccttagttatcataagaaaattcatactggagaga

SEQ ID NO: 476574 - DNA, 120 bp, Artificial Sequence
  ENSG00000160321_33 (sequence is synthesized)
gtgaagaatgtggtgaggctttcaactggtcctcaaaccttatggaacataagagaattcatactggagagacaccctacaaatgtgaagaatgtggtaaaggctttagtatgttctcaa

SEQ ID NO: 476575 - DNA, 77 bp, Artificial Sequence
  ENSG00000160321_34 (sequence is synthesized)
attcatactggagagaaaccatacaaatgcaaagaatgtggcaaagcctataagtggtcctcaaccctcagttatca

SEQ ID NO: 476576 - DNA, 120 bp, Artificial Sequence
  ENSG00000160321_35 (sequence is synthesized)
accctacaaatgtgaagaaagtggcaaagccttcagctggttctcagtctttagtaaacataagaaaattcatgctggagagaaattctaaaaatgtgaagaatttggcaaagcttttaa

SEQ ID NO: 476577 - DNA, 120 bp, Artificial Sequence
  ENSG00000160321_36 (sequence is synthesized)
cctcaaaccttatggaacataagagaattcatactggtgagaagccctacaaatgtgaagaatgtgataaagacttcaactggtcctcacaccttactactcataaaagaattcatactg

SEQ ID NO: 476578 - DNA, 120 bp, Artificial Sequence
  ENSG00000160321_37 (sequence is synthesized)
gaggaaaaaccctacaaatatgaaaaatgtggcaaaactattaattaattctcaacgcttactgaacataagggaatttgtacaggagggaaaccctacaaatctgaagaatgtggcaag

SEQ ID NO: 476579 - DNA, 120 bp, Artificial Sequence
  ENSG00000160321_38 (sequence is synthesized)
ccttttagctattcctcaatccttactaaacattcatgtaattcatactggagggaattcctacaattgtgtggaatgttgcaatgcccttaaccagtccttaaggcttactacatataa

SEQ ID NO: 476580 - DNA, 120 bp, Artificial Sequence
  ENSG00000160321_39 (sequence is synthesized)
gacaactcatactggagagaaaccatgcatgtgtgaagaatgtgggaaagcctctaatagatcctcaattcttaagagacataagctaattcatacacaagagagactctacaaacctga

SEQ ID NO: 476581 - DNA, 120 bp, Artificial Sequence
  ENSG00000160321_40 (sequence is synthesized)
aagatgtgacaatgcttttggcaacacctcagacttttctgaatataaaagaaatcgtacagatgagaaatcctagaaaagtgaagaatatgacaaagcctttaagtggctgtcacactt

SEQ ID NO: 476582 - DNA, 120 bp, Artificial Sequence
  ENSG00000160321_41 (sequence is synthesized)
gattgtaggtaagataactcatactggagaaaactactgtaataaacaatgtgacaaacatttaaccagtgctcatgccttattgcaaaggaaagcatttacactagcctgggcaacaga

SEQ ID NO: 476583 - DNA, 120 bp, Artificial Sequence
  ENSG00000160321_42 (sequence is synthesized)
gagagactgtctggaaaaaaaaatttttgttaatgccagtaatatcttctcacagcttattaaacatcagagagttcatactaaataaaagtattaaaagtgcaatcactgtcactagat

SEQ ID NO: 476584 - DNA, 120 bp, Artificial Sequence
  ENSG00000160321_43 (sequence is synthesized)
ctttcagaaaataaaagctgttaaagtacagaagaatatttattttgaggaaacacattataaatattaagagggttgtagtacatgtacttgtatcacagattttattgtacacatttt

SEQ ID NO: 476585 - DNA, 120 bp, Artificial Sequence
  ENSG00000160321_44 (sequence is synthesized)
gtactacaggaaaacctgaggtagttgttccaactttgctcaacatcagggaatttatattgaagaataaccctgcaaatttaataaatttggaaaaacattttttcaaaaactacagat

SEQ ID NO: 476586 - DNA, 120 bp, Artificial Sequence
  ENSG00000160321_45 (sequence is synthesized)
tataaaacacaaatgcgtttatactaaaatatgtttttgcagatacagtaaatataaaaaatatttaatccaaaattaagtttatgtaaatatcagctaattcacagtagaaatacctgt

SEQ ID NO: 476587 - DNA, 120 bp, Artificial Sequence
  ENSG00000160321_46 (sequence is synthesized)
cactcaaacttcagatattacactaaatcagactgctgagtataggaaaaaatccaaaactaaagttggcaaaaagaagaattatttgtatataactttaaaagaagtagatctttgaag

SEQ ID NO: 476588 - DNA, 120 bp, Artificial Sequence
  ENSG00000160321_47 (sequence is synthesized)
agttataattaaatttaaagtatacttttttcttcaaaacacagattttttttttttccagacacattggcttactgtggccaatactttgtgatgccaaggtgggcagatcacctgagg

SEQ ID NO: 476589 - DNA, 120 bp, Artificial Sequence
  ENSG00000160321_48 (sequence is synthesized)
gagttcaagaccagccttgccaacatagtggaactaaaaagaaatgtttactaaacatgtttactaaaaagaaataaagaaattagccaaggtctagcttccaggttcatgccattctcc

SEQ ID NO: 476590 - DNA, 67 bp, Artificial Sequence
  ENSG00000160321_49 (sequence is synthesized)
ccgccgagccaggacggtctctatctcctgacctcatgatatgcccaccttggccacccaaagtcct

SEQ ID NO: 476591 - DNA, 120 bp, Artificial Sequence
  ENSG00000160321_50 (sequence is synthesized)
ctgacctcatgatatgcccaccttggccacccaaagtcctgggattgcaggcatgagccacagtgcctggcctaataacagaagtctttagcagagcaaaaatgtataaaatgtataatg

SEQ ID NO: 476592 - DNA, 120 bp, Artificial Sequence
  ENSG00000160321_51 (sequence is synthesized)
acattgtataagtaataataaacctactaaccataaaaagccctggatcatatgaaatcacagcgaagttttaccacattgcaaagagttttacctaagcctactgaatgcattcgaaaa

SEQ ID NO: 476593 - DNA, 120 bp, Artificial Sequence
  ENSG00000160321_52 (sequence is synthesized)
aatcaaggtgggatttcaccctaacttgttatattaaatcagtgaaatatatgaaactaaaatctagtgaaggcaccacaaaaaaaggaaagtacaggtcaatattctgggtgaatattg

SEQ ID NO: 476594 - DNA, 120 bp, Artificial Sequence
  ENSG00000160321_53 (sequence is synthesized)
gaataataatcctccatgaaatactagcaaactgaattcaaaagcaaatcagaaagttattttgctacattaatgtgagcttttccatatatatgaaggtgtttcatgatatggaagtca

SEQ ID NO: 476595 - DNA, 120 bp, Artificial Sequence
  ENSG00000160321_54 (sequence is synthesized)
ataagtgtgattcaccatgtaaagataattaaaagaaaaaaaaataacagtaggggcagaaaaagcattcaagaaaacccaatattaactcaaaaatgttgtcaacacactggacattga

SEQ ID NO: 476596 - DNA, 120 bp, Artificial Sequence
  ENSG00000160321_55 (sequence is synthesized)
tgaaaatatcttaataagagtcatctatgacaaatccttagccaacatcatactaaaagagcaaaaactggaagcattctccatgagaataaaaataagaatatccattctaaacagtcc

SEQ ID NO: 476597 - DNA, 120 bp, Artificial Sequence
  ENSG00000160321_56 (sequence is synthesized)
tattgaagttatgaaatcctagccagagaataaaaggaatccaaacagaaaacaaagaaagtcaaattatctttactgatgaaagaattgtccacctagaatactttaaaggtttcacca

SEQ ID NO: 476598 - DNA, 120 bp, Artificial Sequence
  ENSG00000160321_57 (sequence is synthesized)
aaagagttctaagcctggaaaaagacttcaaaaaaaatcttagaatacaaaatcagcacaaatgcatagcatttctgtacaccaataatattcaaactgagaacaaaataaaaaacacag

SEQ ID NO: 476599 - DNA, 120 bp, Artificial Sequence
  ENSG00000160321_58 (sequence is synthesized)
ctctatttacaatagcaacaaacacacaaaaaaatacctagaaatacattaaatcaagggggtaaaatatctctacaaagaacaacaaaacattgctgaaagaaacgagagacaatgcaa

SEQ ID NO: 476600 - DNA, 120 bp, Artificial Sequence
  ENSG00000160321_59 (sequence is synthesized)
ataaatggaaaaatattgctcatggattcaaataatataattaaaatggtcattctgcctaaagcaacctacagattaagtgctatttttatcagactatccatgacgatttttattgaa

SEQ ID NO: 476601 - DNA, 120 bp, Artificial Sequence
  ENSG00000160321_60 (sequence is synthesized)
ttagaaaaagaaaactattctaaaatacattcaaaagaattaaagagctcaaatagccaagaaaacttcagactaaaagaataaatctgggccaagcatggtggctcatgcctgtcatct

SEQ ID NO: 476602 - DNA, 65 bp, Artificial Sequence
  ENSG00000160321_61 (sequence is synthesized)
ataaatctgggccaagcatggtggctcatgcctgtcatctcagccctttgggaggctgagatgga

SEQ ID NO: 476603 - DNA, 75 bp, Artificial Sequence
  ENSG00000160321_62 (sequence is synthesized)
agaaccagaataaccagtataacatggttctggtacaaaaataaacatctagaccaatgaaatggaagagagagt

SEQ ID NO: 476604 - DNA, 120 bp, Artificial Sequence
  ENSG00000160321_63 (sequence is synthesized)
caaaaataaacatctagaccaatgaaatggaagagagagtactgaattaagctatactttgcaatcaggttatttttacaaagccaacagaaataaacaaaaggggaattaactccctat

SEQ ID NO: 476605 - DNA, 120 bp, Artificial Sequence
  ENSG00000160321_64 (sequence is synthesized)
ttagtaagtaatactgggaaaactggttagtcatatgtggaagaaaactgtactacctttttctataaaaaaaaaacaactcaatatagattaaagacttgatctgtgagtctccaagct

SEQ ID NO: 476606 - DNA, 120 bp, Artificial Sequence
  ENSG00000160321_65 (sequence is synthesized)
acaaaaatcttagaataacacttagataatactggcctctgtaaagaatttatgactaacatctaacatgagtgcaacaaaaataaaaataaaaaatggcatctaagccaaagagcttct

SEQ ID NO: 476607 - DNA, 120 bp, Artificial Sequence
  ENSG00000160321_66 (sequence is synthesized)
gcacagtaaaagaaactatcagcaaagtaaacagatgacctacagtatgaaataaaatatttgcaaactgcagacaatgaaggattaatgtacagaatctataatacatttaataaaaaa

SEQ ID NO: 476608 - DNA, 120 bp, Artificial Sequence
  ENSG00000160321_67 (sequence is synthesized)
gcaaacatgatatgaatagccagcttcttctcaaaggaagacataagagctgccaataaacatgtaaaaattgctcaacgttcctaattatcagaaagatgtaaatcaaagtgacagtgt

SEQ ID NO: 476609 - DNA, 120 bp, Artificial Sequence
  ENSG00000160321_68 (sequence is synthesized)
gatactatttcataccagtaagaatgacttattaaaagtaagataaataagatgttgaagttgtagagataaggaaatctttctacactgttggtgggaatgcaaattaattcagaacct

SEQ ID NO: 476610 - DNA, 120 bp, Artificial Sequence
  ENSG00000160321_69 (sequence is synthesized)
gtgcaaagcagtttggggacttctcaaagaactagaaatagaattgccatttgaccaatcaagccgattactggatatctgcccccaaaaagaataaataattttgccaaagagacacca

SEQ ID NO: 476611 - DNA, 120 bp, Artificial Sequence
  ENSG00000160321_70 (sequence is synthesized)
tgcagcactattcacaatagcaaaaacagaatttaaccagttacccatgaatcttttattggataagaaaaatgatgtacttatacaacctccaatactatgcagcaacagaagagaatg

SEQ ID NO: 476612 - DNA, 120 bp, Artificial Sequence
  ENSG00000160321_71 (sequence is synthesized)
gcaacagaagagaatgaagtaacgtcttttgcagcaacatgaatgcagctctgcttcaggccattctaagcaaattattgcatcagaaaaacaaatgccacatgttctcactcatacatg

SEQ ID NO: 476613 - DNA, 120 bp, Artificial Sequence
  ENSG00000160321_72 (sequence is synthesized)
gatgctaaaaattgggcgcacatggaaacaaagatgaaaacaataaacactgagaattctaaaaagaaggaggaaggatgggagacaagcatagaaaatctgcttaggtatgatgtacac

SEQ ID NO: 476614 - DNA, 120 bp, Artificial Sequence
  ENSG00000160321_73 (sequence is synthesized)
tacttgggcaatggaattattaagtatccaaacctcaacatcatgtagtctacctgttttacaaatctgcacatgtaccttaaatataaaataaaaataataaaatgttttttggtataa

SEQ ID NO: 476615 - DNA, 62 bp, Artificial Sequence
  ENSG00000160321_74 (sequence is synthesized)
gggagatccacaactaagtcgccaggaccccctggaagcctagaaatcacctgcttcggcct

SEQ ID NO: 476616 - DNA, 120 bp, Artificial Sequence
  ENSG00000160321_75 (sequence is synthesized)
catggcatacaagagagtgcacaatctttttgtttgtttgtttttgtggacacacagatatctgcatgattttaagatactccatgttaaactatcttataagttctctctttccatcat

SEQ ID NO: 476617 - DNA, 120 bp, Artificial Sequence
  ENSG00000160321_76 (sequence is synthesized)
ctctgaaatgtgtgagagtagtagtttctgtatctttggggtttttttgttcatttttctgtacatttcatcctgtttttattactgtagtcttgaaatatagtttgaaattataaagta

SEQ ID NO: 476618 - DNA, 120 bp, Artificial Sequence
  ENSG00000160321_77 (sequence is synthesized)
tggaagaatccccagggatggtgggatccagtggaccagaatcgtcagcaccttaccatgttcactgctgtcctttcgttctgtcactaagattagtttccgagactcatcaactctttc

SEQ ID NO: 476619 - DNA, 120 bp, Artificial Sequence
  ENSG00000160321_78 (sequence is synthesized)
tatcatgatgtgaactgttttgcactgcgttagcgtctgcctttggtttctgctaattttctttgactttcatttttcttgtccttctctggtgtttgctttgctgctccactttgagga

SEQ ID NO: 476620 - DNA, 120 bp, Artificial Sequence
  ENSG00000160321_79 (sequence is synthesized)
gtttgggcagcttcaccctcagccgctccagcagttcctccatttggctgaagctctccgttcttctgttcttggcgtctgacatttgtcagcaaggcctggtttacagggaccacggct

SEQ ID NO: 476621 - DNA, 120 bp, Artificial Sequence
  ENSG00000160321_80 (sequence is synthesized)
accgcctcctctgcggggcacctccttcacttccggagggcgccagttccagtcgtgacccagctgagcacagcaggaaccgccgcagcagccggagcgcccacgcccacggtcgcccag

SEQ ID NO: 476622 - DNA, 120 bp, Artificial Sequence
  ENSG00000160321_81 (sequence is synthesized)
cccggggatgcctcggctcaaagccggggtcgcggctcagcttagtgcgcagaaatccgaggtcaaccagagcatttcccacagctggccgagccctcctcgacctgcggggccagtttc

SEQ ID NO: 476623 - DNA, 120 bp, Artificial Sequence
  ENSG00000160321_82 (sequence is synthesized)
gccgggcaggctcaagcccagcgcacggccgcacccctcacgcctgagcagagatcagccactgccaccgcggggaggacagagggacccaggatcccccagccagcctccctctgcgtc

SEQ ID NO: 476624 - DNA, 120 bp, Artificial Sequence
  ENSG00000160321_83 (sequence is synthesized)
aggagaggagggaactatttccaaaatatatatagagagagagagtagaactggcatatctgacccaatcgagttttcagtttttcttttctttttcgccttttcctctcaaattatgct

SEQ ID NO: 476625 - DNA, 120 bp, Artificial Sequence
  ENSG00000160321_84 (sequence is synthesized)
cgcctaaagtgagagttcatttttcattctcacgtggcaatttaattttttaatggtcacaaacttagagactaaaatttttactctattttacctaagaatgatgaggtaacatcaaac

SEQ ID NO: 476626 - DNA, 120 bp, Artificial Sequence
  ENSG00000160321_85 (sequence is synthesized)
ttttaatagtgctttctgaattttacagtttattaccttagatttgattctatcaactaaacaataataactaaaaaagtcttggtttgcatagcttgaccatttacaaaggggatgtat

SEQ ID NO: 476627 - DNA, 120 bp, Artificial Sequence
  ENSG00000160321_86 (sequence is synthesized)
ttattcatttaaatgataaatgtgtgttgagcacacacgttgtgccatacttcttgctagctttaggagataaaatggagaaaaaaaatattgctctttactcttataaaactttcagtc

SEQ ID NO: 476628 - DNA, 120 bp, Artificial Sequence
  ENSG00000160321_87 (sequence is synthesized)
aaaaaaaatattgctctttactcttataaaactttcagtcttgctacataaaattggccaggttgttctcgaactccccacctcgtgatctgccacctcagcctcccaaagtggtgggat

SEQ ID NO: 476629 - DNA, 120 bp, Artificial Sequence
  ENSG00000160321_88 (sequence is synthesized)
ttaaatcctcgatatacatgaacaatttttgtgttagttgctttgcaaggatccaatctacctaggtagaaccaatagtttagctattagtttattgactagttctgcttttccagtata

SEQ ID NO: 476630 - DNA, 120 bp, Artificial Sequence
  ENSG00000160321_89 (sequence is synthesized)
attgtgtaactgatttctcattttaacctgttggctgaaaccatggatgcaatgtttaataaaaatcttgaacaccaacataattattatgtttatgacattaaaagacaaactttcagt

SEQ ID NO: 476631 - DNA, 120 bp, Artificial Sequence
  ENSG00000160321_90 (sequence is synthesized)
attctttaattttctctcacacaggggcatcttcggtcttacacttttaaaatttctaagaattcttctttcccttcagtaatcttccttcaagtttacagtgacagccaaagtactgtt

SEQ ID NO: 476632 - DNA, 120 bp, Artificial Sequence
  ENSG00000160321_91 (sequence is synthesized)
gaatgtggcaaagccttcagctggttatcagtcttcagtaaacataagaaaattcatactggagttcccaaccctcctacacataagaaaattcatgctggagagaaactctacaaatga

SEQ ID NO: 476633 - DNA, 120 bp, Artificial Sequence
  ENSG00000160321_92 (sequence is synthesized)
atgaatcaccatcctacttgtggccaaatgcatatatgacagttacaactctaactgcagactgcatcggcatgtaaaatttaggtcaccagtgggctctctccatgtttgaatgtggtg

SEQ ID NO: 476634 - DNA, 120 bp, Artificial Sequence
  ENSG00000160321_93 (sequence is synthesized)
attctaatggtcagcgaggtgtgcataggagagtcacaatctcatcttcaggtgggccttgtatcagcactctctctactaccttaagactgtatgacacatgggtgagctaaaaatgtt

SEQ ID NO: 476635 - DNA, 69 bp, Artificial Sequence
  ENSG00000160321_94 (sequence is synthesized)
gtggccctatgacctgcaggtattgggagatccacaactaagtcgccaggaccccctggaagcctagaa

SEQ ID NO: 476636 - DNA, 72 bp, Artificial Sequence
  ENSG00000160321_95 (sequence is synthesized)
tacaggcataagccaccatgcctggcacacaattaattctgtatgatggatcatgcctggacactgcacagc

SEQ ID NO: 476637 - DNA, 120 bp, Artificial Sequence
  ENSG00000160323_0 (sequence is synthesized)
aaccacgatgtctttggcacagcctctcatctgtcagatgggagcggggaccccggagagggagtcagccgaggtcctggcattccttgtgaacccccgtctgtgggtttctggtccagt

SEQ ID NO: 476638 - DNA, 120 bp, Artificial Sequence
  ENSG00000160323_1 (sequence is synthesized)
gtcccttctccagattagatggcttaggcctcctctaagggggtgggcgtgcacatccggagagctgtctggtgtgcaggactgggctgcaggttaccctgaactgcaaccatcttagag

SEQ ID NO: 476639 - DNA, 120 bp, Artificial Sequence
  ENSG00000160323_2 (sequence is synthesized)
caaggcccagcttgcagcaggaggagctgcaggccgcccaccctagccacggcccctgccctggcaggaagcttccaagagtaaacactgcctaatcgtcccgcccagtagtgagcaggc

SEQ ID NO: 476640 - DNA, 120 bp, Artificial Sequence
  ENSG00000160323_3 (sequence is synthesized)
ctgtcccattccatactgaccagattcccagtcaccaaggccccctctcactccgctccactcctcgggctggctctcctgaggatgcaccagcgtcacccccgggcaagatgccctccc

SEQ ID NO: 476641 - DNA, 120 bp, Artificial Sequence
  ENSG00000160323_4 (sequence is synthesized)
ctctgtgtggccggaatccttgcctgtggctttctcctgggctgctggggaccctcccatttccagcagagttgtcttcaggctttggagccacaggccgtgtcttcttacttgagccct

SEQ ID NO: 476642 - DNA, 120 bp, Artificial Sequence
  ENSG00000160323_5 (sequence is synthesized)
ggtgctcccttaaaaggccgccctccttcccctggcttccagaggcagaggcagaggcagaggcgggctgcaggcggcatcctacacctggagctgctggtggccgtgggccccgatgtc

SEQ ID NO: 476643 - DNA, 120 bp, Artificial Sequence
  ENSG00000160323_6 (sequence is synthesized)
ttccaggctcaccaggaggacacagagcgctatgtgctcaccaacctcaacatcggggcagaactgcttcgggacccgtccctgggggctcagtttcgggtgcacctggtgaagatggtc

SEQ ID NO: 476644 - DNA, 120 bp, Artificial Sequence
  ENSG00000160323_7 (sequence is synthesized)
attctgacagagcctgagggtgctccaaatatcacagccaacctcacctcgtccctgctgagcgtctgtgggtggagccagaccatcaaccctgaggacgacacggatcctggccatgct

SEQ ID NO: 476645 - DNA, 120 bp, Artificial Sequence
  ENSG00000160323_8 (sequence is synthesized)
gacctggtcctctatatcactaggtttgacctggagttgcctgatggtaaccggcaggtgcggggcgtcacccagctgggcggtgcctgctccccaacctggagctgcctcattaccgag

SEQ ID NO: 476646 - DNA, 120 bp, Artificial Sequence
  ENSG00000160323_9 (sequence is synthesized)
gacactggcttcgacctgggagtcaccattgcccatgagattgggcacagcttcggcctggagcacgacggcgcgcccggcagcggctgcggccccagcggacacgtgatggcttcggac

SEQ ID NO: 476647 - DNA, 120 bp, Artificial Sequence
  ENSG00000160323_10 (sequence is synthesized)
gccgccggcagctgctgagcctgctcagcgcaggacgggcgcgctgcgtgtgggacccgccgcggcctcaacccgggtccgcggggcacccgccggatgcgcagcctggcctctactaca

SEQ ID NO: 476648 - DNA, 120 bp, Artificial Sequence
  ENSG00000160323_11 (sequence is synthesized)
gcggggcacccgccggatgcgcagcctggcctctactacagcgccaacgagcagtgccgcgtggccttcggccccaaggctgtcgcctgcaccttcgccagggagcacctggatatgtgc

SEQ ID NO: 476649 - DNA, 120 bp, Artificial Sequence
  ENSG00000160323_12 (sequence is synthesized)
caggccctctcctgccacacagacccgctggaccaaagcagctgcagccgcctcctcgttcctctcctggatgggacagaatgtggcgtggagaagtggtgctccaagggtcgctgccgc

SEQ ID NO: 476650 - DNA, 120 bp, Artificial Sequence
  ENSG00000160323_13 (sequence is synthesized)
tccctggtggagctgacccccatagcagcagtgcatgggcgctggtctagctggggtccccgaagtccttgctcccgctcctgcggaggaggtgtggtcaccaggaggcggcagtgcaac

SEQ ID NO: 476651 - DNA, 120 bp, Artificial Sequence
  ENSG00000160323_14 (sequence is synthesized)
aaccccagacctgcctttggggggcgtgcatgtgttggtgctgacctccaggccgagatgtgcaacactcaggcctgcgagaagacccagctggagttcatgtcgcaacagtgcgccagg

SEQ ID NO: 476652 - DNA, 120 bp, Artificial Sequence
  ENSG00000160323_15 (sequence is synthesized)
accgacggccagccgctgcgctcctcccctggcggcgcctccttctaccactggggtgctgctgtaccacacagccaaggggatgctctgtgcagacacatgtgccgggccattggcgag

SEQ ID NO: 476653 - DNA, 120 bp, Artificial Sequence
  ENSG00000160323_16 (sequence is synthesized)
agcttcatcatgaagcgtggagacagcttcctcgatgggacccggtgtatgccaagtggcccccgggaggacgggaccctgagcctgtgtgtgtcgggcagctgcaggacatttggctgt

SEQ ID NO: 476654 - DNA, 120 bp, Artificial Sequence
  ENSG00000160323_17 (sequence is synthesized)
gatggtaggatggactcccagcaggtatgggacaggtgccaggtgtgtggtggggacaacagcacgtgcagcccacggaagggctctttcacagctggcagagcgagagaatatgtcacg

SEQ ID NO: 476655 - DNA, 120 bp, Artificial Sequence
  ENSG00000160323_18 (sequence is synthesized)
tttctgacagttacccccaacctgaccagtgtctacattgccaaccacaggcctctcttcacacacttggcggtgaggatcggagggcgctatgtcgtggctgggaagatgagcatctcc

SEQ ID NO: 476656 - DNA, 120 bp, Artificial Sequence
  ENSG00000160323_19 (sequence is synthesized)
cctaacaccacctacccctccctcctggaggatggtcgtgtcgagtacagagtggccctcaccgaggaccggctgccccgcctggaggagatccgcatctggggacccctccaggaagat

SEQ ID NO: 476657 - DNA, 120 bp, Artificial Sequence
  ENSG00000160323_20 (sequence is synthesized)
ttacaggcggtatggcgaggagtatggcaacctcacccgcccagacatcaccttcacctacttccagcctaagccacggcaggcctgggtgtgggccgctgtgcgtgggccctgctcggt

SEQ ID NO: 476658 - DNA, 120 bp, Artificial Sequence
  ENSG00000160323_21 (sequence is synthesized)
gagctgtggggcagggctgcgctgggtaaactacagctgcctggaccaggccaggaaggagttggtggagactgtccagtgccaagggagccagcagccaccagcgtggccagaggcctg

SEQ ID NO: 476659 - DNA, 120 bp, Artificial Sequence
  ENSG00000160323_22 (sequence is synthesized)
cgtgctcgaaccctgccctccctactgggcggtgggagacttcggcccatgcagcgcctcctgtgggggtggcctgcgggagcggccagtgcgctgcgtggaggcccagggcagcctcct

SEQ ID NO: 476660 - DNA, 120 bp, Artificial Sequence
  ENSG00000160323_23 (sequence is synthesized)
gaagacattgcccccagcccggtgcagagcaggggcccagcagccagctgtggcgctggaaacctgcaacccccagccctgccctgccaggtgggaggtgtcagagcccagctcatgcac

SEQ ID NO: 476661 - DNA, 120 bp, Artificial Sequence
  ENSG00000160323_24 (sequence is synthesized)
atcagctggtggagcaggcctggccttggagaacgagacctgtgtgccaggggcagatggcctggaggctccagtgactgaggggcctggctccgtagatgagaagctgcctgcccctga

SEQ ID NO: 476662 - DNA, 120 bp, Artificial Sequence
  ENSG00000160323_25 (sequence is synthesized)
gccctgtgtcgggatgtcatgtcctccaggctggggccatctggatgccacctctgcaggggagaaggctccctccccatggggcagcatcaggacgggggctcaagctgcacacgtgtg

SEQ ID NO: 476663 - DNA, 120 bp, Artificial Sequence
  ENSG00000160323_26 (sequence is synthesized)
gacccctgcggcagggtcgtgctccgtctcctgcgggcgaggtctgatggagctgcgtttcctgtgcatggactctgccctcagggtgcctgtccaggaagagctgtgtggcctggcaag

SEQ ID NO: 476664 - DNA, 120 bp, Artificial Sequence
  ENSG00000160323_27 (sequence is synthesized)
caagcctgggagccggcgggaggtctgccaggctgtcccgtgccctgctcggtggcagtacaagctggcggcctgcagcgtgagctgtgggagaggggtcgtgcggaggatcctgtattg

SEQ ID NO: 476665 - DNA, 120 bp, Artificial Sequence
  ENSG00000160323_28 (sequence is synthesized)
tgcccgggcccatggggaggacgatggtgaggagatcctgttggacacccagtgccaggggctgcctcgcccggaaccccaggaggcctgcagcctggagccctgcccacctaggtggaa

SEQ ID NO: 476666 - DNA, 120 bp, Artificial Sequence
  ENSG00000160323_29 (sequence is synthesized)
agtcatgtcccttggcccatgttcggccagctgtggccttggcactgctagacgctcggtggcctgtgtgcagctcgaccaaggccaggacgtggaggtggacgaggcggcctgtgcggc

SEQ ID NO: 476667 - DNA, 120 bp, Artificial Sequence
  ENSG00000160323_30 (sequence is synthesized)
gctggtgcggcccgaggccagtgtcccctgtctcattgccgactgcacctaccgctggcatgttggcacctggatggagtgctctgtttcctgtggggatggcatccagcgccggcgtga

SEQ ID NO: 476668 - DNA, 120 bp, Artificial Sequence
  ENSG00000160323_31 (sequence is synthesized)
cacctgcctcggaccccaggcccaggcgcctgtgccagctgatttctgccagcacttgcccaagccggtgactgtgcgtggctgctgggctgggccctgtgtgggacagggtacgcccag

SEQ ID NO: 476669 - DNA, 120 bp, Artificial Sequence
  ENSG00000160323_32 (sequence is synthesized)
cctggtgccccacgaagaagccgctgctccaggacggaccacagccacccctgctggtgcctccctggagtggtcccaggcccggggcctgctcttctccccggctccccagcctcggcg

SEQ ID NO: 476670 - DNA, 120 bp, Artificial Sequence
  ENSG00000160323_33 (sequence is synthesized)
gctcctgcccgggccccaggaaaactcagtgcagtccagtgcctgtggcaggcagcaccttgagccaacaggaaccattgacatgcgaggcccagggcaggcagactgtgcagtggccat

SEQ ID NO: 476671 - DNA, 120 bp, Artificial Sequence
  ENSG00000160323_34 (sequence is synthesized)
tgggcggcccctcggggaggtggtgaccctccgcgtccttgagagttctctcaactgcagtgcgggggacatgttgctgctttggggccggctcacctggaggaagatgtgcaggaagct

SEQ ID NO: 476672 - DNA, 120 bp, Artificial Sequence
  ENSG00000160323_35 (sequence is synthesized)
gttggacatgactttcagctccaagaccaacacgctggtggtgaggcagcgctgcgggcggccaggaggtggggtgctgctgcggtatgggagccagcttgctcctgaaaccttctacag

SEQ ID NO: 476673 - DNA, 120 bp, Artificial Sequence
  ENSG00000160323_36 (sequence is synthesized)
agaatgtgacatgcagctctttgggccctggggtgaaatcgtgagcccctcgctgagtccagccacgagtaatgcagggggctgccggctcttcattaatgtggctccgcacgcacggat

SEQ ID NO: 476674 - DNA, 120 bp, Artificial Sequence
  ENSG00000160323_37 (sequence is synthesized)
tgccatccatgccctggccaccaacatgggcgctgggaccgagggagccaatgccagctacatcttgatccgggacacccacagcttgaggaccacagcgttccatgggcagcaggtgct

SEQ ID NO: 476675 - DNA, 120 bp, Artificial Sequence
  ENSG00000160323_38 (sequence is synthesized)
ctactgggagtcagagagcagccaggctgagatggagttcagcgagggcttcctgaaggctcaggccagcctgcggggccagtactggaccctccaatcatgggtaccggagatgcagga

SEQ ID NO: 476676 - DNA, 120 bp, Artificial Sequence
  ENSG00000160323_39 (sequence is synthesized)
ccctcagtcctggaagggaaaggaaggaacctgagggtcattgaacatttgttccgtgtctggccagccctggagggttgacccctggtctcagtgctttccaattcgaactttttccaa

SEQ ID NO: 476677 - DNA, 120 bp, Artificial Sequence
  ENSG00000160323_40 (sequence is synthesized)
tcttaggtatctactttagagtcttctccaatgtccaaaaggctagggggttggaggtggggactctggaaaagcagcccccatttcctcgggtaccaataaataaaacatgcaggctga

SEQ ID NO: 476678 - DNA, 120 bp, Artificial Sequence
  ENSG00000160323_41 (sequence is synthesized)
ggtgggcaaaggcatcttcctctgggaaggactggcacaagcacttggtccctgggttgtgtgcctgggaggccgggatcagggctggccctctttctccctggcaaagcaaaacctccc

SEQ ID NO: 476679 - DNA, 120 bp, Artificial Sequence
  ENSG00000160323_42 (sequence is synthesized)
agccgccggcagctgctgagcctgctcagacccgtccctccgtcgccgctccctctgctggccacccacctctgcgccggcaggagccttagtcttggtcccagccaagagccggctcct

SEQ ID NO: 476680 - DNA, 120 bp, Artificial Sequence
  ENSG00000160323_43 (sequence is synthesized)
ggtggggggcgcgggccgagaactcctgttcccactcacaaaaggccacgcttccaaacgcttccatcctcgtgcccactcctccgtcccgcctcctcccggtgtacaccccgggactga

SEQ ID NO: 476681 - DNA, 120 bp, Artificial Sequence
  ENSG00000160323_44 (sequence is synthesized)
caactggcgagaagcagggacaggcctcatacttgggtctttctggcttcagcacgctttccttccacacacgtgtactggcacccactaaatgctgagctctgctcaacgctcggaaga

SEQ ID NO: 476682 - DNA, 120 bp, Artificial Sequence
  ENSG00000160323_45 (sequence is synthesized)
agcaggccctgccttatcatgcgcacactctaggggaaaacaagtaacagcgagtaaacaaaggaacagacgacatcagggtaaagtgatggagagactgcggtgaggccaccagcctcc

SEQ ID NO: 476683 - DNA, 120 bp, Artificial Sequence
  ENSG00000160325_0 (sequence is synthesized)
acaaggcagcgcgccggctcggacgcggccggctaccgagccctttgtgagggctgtgagctgcgcctgacggtggcaccatgagcagctcaggtggggcgcccggggcgtccgccagct

SEQ ID NO: 476684 - DNA, 120 bp, Artificial Sequence
  ENSG00000160325_1 (sequence is synthesized)
ctgcgccgcccgcgcaggaagagggcatgacgtggtggtaccgctggctgtgtcgcctgtctggggtgctgggggcagtctcttgcgcgatctctggcctcttcaactgcatcaccatcc

SEQ ID NO: 476685 - DNA, 120 bp, Artificial Sequence
  ENSG00000160325_2 (sequence is synthesized)
accctctgaacattgcggccggcgtgtggatgatcatgaatgccttcatcttgttgctgtgtgaggcgcccttctgctgccagttcatcgagtttgcaaacacagtggcggagaaggtgg

SEQ ID NO: 476686 - DNA, 120 bp, Artificial Sequence
  ENSG00000160325_3 (sequence is synthesized)
accggctgcgctcctggcagaaggctgtcttctactgcgggatggcggtcgttcccatcgtcatcagcctgaccctgaccacgctgctgggcaacgccatcgcctttgctacgggggtgc

SEQ ID NO: 476687 - DNA, 120 bp, Artificial Sequence
  ENSG00000160325_4 (sequence is synthesized)
tgtacggactctctgctctgggcaaaaagggcgatgcgatctcctatgccaggatccagcagcagaggcagcaggcggatgaggagaagctcgcggagaccctggagggggagctgtgaa

SEQ ID NO: 476688 - DNA, 120 bp, Artificial Sequence
  ENSG00000160325_5 (sequence is synthesized)
gggctgggcgcccctccctccctgtcccctcttctggctctgtgtgggtccaagtgaggcctggactgtccacgctgaggcacagcctggagaggggcctttgcacgtgtccctacacct

SEQ ID NO: 476689 - DNA, 120 bp, Artificial Sequence
  ENSG00000160325_6 (sequence is synthesized)
ggagtcctctgctcctttctccagactggcttaagccaggagccactggctgctggtgtgagggtctgggctgctggacttgaggcagagcctgcagcagctgtgtggacactacccagc

SEQ ID NO: 476690 - DNA, 120 bp, Artificial Sequence
  ENSG00000160325_7 (sequence is synthesized)
cctactcctctgctgggtgggtctgcagatctcacaccacagacagggctgcctgtgacctgctgtgacctgggagcagcttcccctggagatgctggtcctggcttgaggggaggggca

SEQ ID NO: 476691 - DNA, 120 bp, Artificial Sequence
  ENSG00000160325_8 (sequence is synthesized)
agtgggaccctgccacctgggcactgagcagagggacctcccccagctctcttagcaggtggagccccagggcctgggacagcctgccgctgccagcaacctcccactgctgcctagggt

SEQ ID NO: 476692 - DNA, 120 bp, Artificial Sequence
  ENSG00000160325_9 (sequence is synthesized)
gcagcgcccactgtcaccctgccttctgaagaagcccacagggctcctaaggtgcaccccggtacctggaactgcagccttggcagtgactggacagctgggtgggggatgctccctgct

SEQ ID NO: 476693 - DNA, 120 bp, Artificial Sequence
  ENSG00000160325_10 (sequence is synthesized)
ggccctgggaaccttggacaggccacctcaaggcccctcggctgcccctcctccctgggcctgctggggcccctaggttctgcccatcaccccccgcccctgctggccttggtgctaagg

SEQ ID NO: 476694 - DNA, 120 bp, Artificial Sequence
  ENSG00000160325_11 (sequence is synthesized)
gtgcccaccctctccctggtgtggccccgtcaacatcagccacagcccagccccattagtgggttagtgggtctgacctcagccccactcaggtgctcctgctggcctgcccaagccctg

SEQ ID NO: 476695 - DNA, 120 bp, Artificial Sequence
  ENSG00000160325_12 (sequence is synthesized)
ccctcagggagcttctgccttttaagaactgggcagaggccacagtcacctccccacacagagctgtccccactgccctgggtgccaggctgtccggagccaggcctacccagggaggat

SEQ ID NO: 476696 - DNA, 120 bp, Artificial Sequence
  ENSG00000160325_13 (sequence is synthesized)
gcagagagctggtgcccaggatgtgcacccccatattccctctgccctgtggcctcagcccgctggcctctctgaccgtgaggctggctctcagccatcgggcaggtgcctggtcgggcc

SEQ ID NO: 476697 - DNA, 120 bp, Artificial Sequence
  ENSG00000160325_14 (sequence is synthesized)
tggcttagcccaggtggggtttggcagaagcgggcgggtgtggaagatattccatctggggccaaccccaggctgggcctgcgctgagcttctggagcgcaggtactgggtcttgctaag

SEQ ID NO: 476698 - DNA, 120 bp, Artificial Sequence
  ENSG00000160325_15 (sequence is synthesized)
tgaactgtttcccaggaacacctctcgggcccatctgcgtctgaggctgggagtggcatctgaggccgggagtggcatctgaggccaggagtggcaggctggtgggctgggcgtggggtt

SEQ ID NO: 476699 - DNA, 120 bp, Artificial Sequence
  ENSG00000160325_16 (sequence is synthesized)
ttctgggccctgcccagtactgccctggggacttggtgggctcctgggtcagcagcatcccacccctgggagtctggccagctgagccccagggtggcaggggcattatagcctggtgga

SEQ ID NO: 476700 - DNA, 120 bp, Artificial Sequence
  ENSG00000160325_17 (sequence is synthesized)
agccccagggtggcaggggcattatagcctggtggacatgtgccttcagggttcctccggggccaccttcctcaggccagtgctgggttcaaagggctgtgtgtgtgtgtgtgtgtgtgt

SEQ ID NO: 476701 - DNA, 120 bp, Artificial Sequence
  ENSG00000160325_18 (sequence is synthesized)
acatctgtcccatgtatgcagtgagacctgtctacctcccacaaggagcaagggctctgcccgccctctgctcattcctacccaggtagtgggaccccgggcccccttctgcctggcttg

SEQ ID NO: 476702 - DNA, 120 bp, Artificial Sequence
  ENSG00000160325_19 (sequence is synthesized)
cctgcttctgccctttccagaggggtctcactgacagccagagacagcaggagaagggttggctgtggatcaaggaaggctgcccctgtaccctgtggggaaatggtgggtgcatggctg

SEQ ID NO: 476703 - DNA, 120 bp, Artificial Sequence
  ENSG00000160325_20 (sequence is synthesized)
gatgcagaggtggaaggccctgggccacaggcgagagtgggcgtgtcacctgtcccaggttcccagcaagtctgcagctgtgcagtcctggggtccctgaccctgtcgcccagggggcgt

SEQ ID NO: 476704 - DNA, 120 bp, Artificial Sequence
  ENSG00000160325_21 (sequence is synthesized)
gctgtccagcaggggccctgccttgcaaggaacgtctcttccggcggctgggccgctcctgcctggtctgggctgtgtgtggcgccctttcctccttgtttgttcctctgtgttctgtgt

SEQ ID NO: 476705 - DNA, 120 bp, Artificial Sequence
  ENSG00000160325_22 (sequence is synthesized)
gcgtcttaagcaataaagcgtggccgtggctcgcgtgcctgccctctgctcccttctgccttggtgcctgtgtgtgagtgtggaagccaggcaggagccgctggcccaggaaataactac

SEQ ID NO: 476706 - DNA, 120 bp, Artificial Sequence
  ENSG00000160325_23 (sequence is synthesized)
atcgcctttgctacgggggtgctgtacggactctctgctctgggcaaaaaagcccagactgaggctggttccttcgcagcccagcatcccagggagcctgggccattctcagaggggaca

SEQ ID NO: 476707 - DNA, 120 bp, Artificial Sequence
  ENSG00000160325_24 (sequence is synthesized)
ccactgacaaaataggacccaaaagtcaggtgagggtgggcagtgtattcagttcctctctgtggaagtgtaaactgggattgcctttgtgcacagtgatttgctcatagctgccaaaac

SEQ ID NO: 476708 - DNA, 120 bp, Artificial Sequence
  ENSG00000160325_25 (sequence is synthesized)
gtgccccagtggttctgcgcccaggaactcagctgtcgctgtgccgtagtcactggaaggttcagaggtatatgagcatgtgtggcagcatccgtgcagtggagagaaagtgggaagcgt

SEQ ID NO: 476709 - DNA, 120 bp, Artificial Sequence
  ENSG00000160325_26 (sequence is synthesized)
ctggaattttggtccgtccactgggagttgttaaccagatgatagtaggtctgtaggacatgtttctctgcagcctttccgaagagtgggttcatctagatgtcctgacgtgaaggggga

SEQ ID NO: 476710 - DNA, 120 bp, Artificial Sequence
  ENSG00000160326_0 (sequence is synthesized)
agtctgagcgccctccgctcgccccgagagagacccggccatgcaggagccgctgctgggagccgagggcccggactacgacaccttccccgagaagccgcccccgtcgccaggggacag

SEQ ID NO: 476711 - DNA, 120 bp, Artificial Sequence
  ENSG00000160326_1 (sequence is synthesized)
ggcgcgggtcgggaccctgcagaacaaaagggtgttcctggccaccttcgccgcagtgctcggcaatttcagctttgggtatgccctggtctacacatcccctgtcatcccagccctgga

SEQ ID NO: 476712 - DNA, 120 bp, Artificial Sequence
  ENSG00000160326_2 (sequence is synthesized)
gcgctccttggatcctgacctgcatctgaccaaatcccaggcatcctggtttgggtccgtgttcaccctgggagcagcggccggaggcctgagtgccatgatcctcaacgacctcctggg

SEQ ID NO: 476713 - DNA, 120 bp, Artificial Sequence
  ENSG00000160326_3 (sequence is synthesized)
ccggaagctgagcatcatgttctcagctgtgccgtcggcggccggctatgcgctcatggcgggtgcgcacggcctctggatgctgctgctcggaaggacgctgacgggcttcgccggggg

SEQ ID NO: 476714 - DNA, 120 bp, Artificial Sequence
  ENSG00000160326_4 (sequence is synthesized)
gctcacagctgcctgcatcccggtgtacgtgtctgagattgctcccccaggcgttcgtggggctctgggggccacaccccagctcatggcagtgttcggatccctgtccctctacgccct

SEQ ID NO: 476715 - DNA, 120 bp, Artificial Sequence
  ENSG00000160326_5 (sequence is synthesized)
tggcctcctgctgccgtggcgctggctggctgtggccggggaggcgcctgtgctcatcatgatcctgctgctcagcttcatgcccaactcgccgcgcttcctgctctctcggggcaggga

SEQ ID NO: 476716 - DNA, 120 bp, Artificial Sequence
  ENSG00000160326_6 (sequence is synthesized)
cgaagaggccctgcgggcgctggcctggctgcgtgggacggacgtcgatgtccactgggagttcgagcagatccaggacaacgtccggagacagagcagccgagtatcgtgggctgaggc

SEQ ID NO: 476717 - DNA, 120 bp, Artificial Sequence
  ENSG00000160326_7 (sequence is synthesized)
acgggccccacacgtgtgccggcccatcaccgtggccttgctgatgcgcctcctgcagcagctgacgggcatcacgcccatcctggtctacctgcagtccatcttcgacagcaccgctgt

SEQ ID NO: 476718 - DNA, 120 bp, Artificial Sequence
  ENSG00000160326_8 (sequence is synthesized)
cctgctgccccccaaggacgacgcagccatcgttggggccgtgcggctcctgtccgtgctgatcgccgccctcaccatggacctcgcaggccgcaaggtgctgctcttcgtctcagcggc

SEQ ID NO: 476719 - DNA, 120 bp, Artificial Sequence
  ENSG00000160326_9 (sequence is synthesized)
catcatgtttgctgccaacctgactctggggctgtacatccactttggccccaggcctctgagccccaacagcactgcgggcctggaaagcgagtcctggggggacttggcgcagcccct

SEQ ID NO: 476720 - DNA, 120 bp, Artificial Sequence
  ENSG00000160326_10 (sequence is synthesized)
tggctgctcatgtctgaggtcctgcccctgcgtgcccgtggcgtggcctcagggctctgcgtgctggccagctggctcaccgccttcgtcctcaccaagtccttcctgccagtggtgagc

SEQ ID NO: 476721 - DNA, 120 bp, Artificial Sequence
  ENSG00000160326_11 (sequence is synthesized)
accttcggcctccaggtgcctttcttcttcttcgcggccatctgcttggtgagcctggtgttcacaggctgctgtgtgcccgagaccaagggacggtccctggagcagatcgagtccttc

SEQ ID NO: 476722 - DNA, 120 bp, Artificial Sequence
  ENSG00000160326_12 (sequence is synthesized)
ttccgcacggggagaaggtccttcttgcgctaggtcaaggtccccgcctggagggggccaaacccccagtggctgggcctctgtgttggctacaaacctgcaccctgggaccaagaggca

SEQ ID NO: 476723 - DNA, 120 bp, Artificial Sequence
  ENSG00000160326_13 (sequence is synthesized)
gcagtcatccctgccaccagccagagcacaggaagagcagtgtgatggggcctcagcagcgggtgcccctggctcgggacaggtagcactgctgtccagccacagccccagcccaggcag

SEQ ID NO: 476724 - DNA, 120 bp, Artificial Sequence
  ENSG00000160326_14 (sequence is synthesized)
cccacagtgctgcacgtagccatgggccgcaggagtgcatacaaccctgcatccagggacacggccctgctgggtgacctcaggcctagtccctttcccttgcgtgaaggacacgcccca

SEQ ID NO: 476725 - DNA, 120 bp, Artificial Sequence
  ENSG00000160326_15 (sequence is synthesized)
cagaaggctacggggaggactgagaggacagggctggaggcagccaagtaacgtagtcatatcatcgcgctctgatctggtggcatctggctgtgcaaggaagacccggctttgccctca

SEQ ID NO: 476726 - DNA, 87 bp, Artificial Sequence
  ENSG00000160326_16 (sequence is synthesized)
tggcatctggctgtgcaaggaagacccggctttgccctcacaagtcttatgggcaccacagggaacatcctggacttaaaaagccag

SEQ ID NO: 476727 - DNA, 72 bp, Artificial Sequence
  ENSG00000160326_17 (sequence is synthesized)
cccaccccctgccaaaaaaaaaaaaaaaaaagccagggcaaaggacctggcgtggccacttcctcctgcccc

SEQ ID NO: 476728 - DNA, 120 bp, Artificial Sequence
  ENSG00000160326_18 (sequence is synthesized)
ccagggcaaaggacctggcgtggccacttcctcctgccccagcccaacctctgggaacaggcagctcctatctgcaaactgtgttcacccttttgtaaaaataaaggaactggacctgta

SEQ ID NO: 476729 - DNA, 120 bp, Artificial Sequence
  ENSG00000160326_19 (sequence is synthesized)
gcgggtcgggtgagagtcgctaggttgggggctgcgggtggggcctgggggtggccctggttccctccagccggcggcaggctcccgccctgggcctcccctgacctagtcgccaccgag

SEQ ID NO: 476730 - DNA, 120 bp, Artificial Sequence
  ENSG00000160326_20 (sequence is synthesized)
gggccatctggctccctcctgtcccagacacgctactcctatttaaggaactggtccccctaagggaaggaacgatccacgagagtaccgggcccagccccccactgccacagacagtga

SEQ ID NO: 476731 - DNA, 120 bp, Artificial Sequence
  ENSG00000160326_21 (sequence is synthesized)
gactgaggccccagcgagcaggggttctgcctgaggtcacacagcaagcctccagccgccgccctgggggcagaaccagagcctcctcttccggagaaaaggccccagcaccagaggctc

SEQ ID NO: 476732 - DNA, 120 bp, Artificial Sequence
  ENSG00000160326_22 (sequence is synthesized)
agccactgcggatgagctaacaatggcctgggaatttcccaggggagctggggctcaggccctgggaacgtgaatggccttggacccaggcctccctagcactgcccgctgagccgggca

SEQ ID NO: 476733 - DNA, 120 bp, Artificial Sequence
  ENSG00000160326_23 (sequence is synthesized)
ctgcctccctagcatcggcagggccctggcccaggccagtggtccagaaaggtccgctggggctccgagtggacacactggctgtgacactccacggtgggagcctaacacgcggctgga

SEQ ID NO: 476734 - DNA, 120 bp, Artificial Sequence
  ENSG00000160326_24 (sequence is synthesized)
gacagagcttgctgccctgctgggggtctctagtcccagacacgagctggaccacgcaagtatcaaggggctctgcagaaggagctctgagagaaacagctggctcagagggtcctggcc

SEQ ID NO: 476735 - DNA, 120 bp, Artificial Sequence
  ENSG00000160326_25 (sequence is synthesized)
cgagagagacccggccatgcaggagccgctgctgggagccgagggcccggactacgacaccttccccgagaagccgcccccgtcgccaggggacagggcgcgggtcggtccgtgttcacc

SEQ ID NO: 476736 - DNA, 120 bp, Artificial Sequence
  ENSG00000160326_26 (sequence is synthesized)
accagtattttcagcaaaacctggtgcggcggctgtgtcttgcaggtgtacgtgtctgagattgctcccccaggcgttcgtggggctctgggggccacaccccagctcatggcagtgttc

SEQ ID NO: 476737 - DNA, 120 bp, Artificial Sequence
  ENSG00000160326_27 (sequence is synthesized)
ggatccctgtccctctacgcccttggcaaggacgaagaggccctgcgggcgctggcctggctgcgtgggacggacgtcgatgtccactgggagttcgagcagatccaggacaacgtccgg

SEQ ID NO: 476738 - DNA, 72 bp, Artificial Sequence
  ENSG00000160336_0 (sequence is synthesized)
gggatcccacgtagctgagattacaggattgacttctaaagactcttggtacgtgaggaagaaacccggaag

SEQ ID NO: 476739 - DNA, 120 bp, Artificial Sequence
  ENSG00000160336_1 (sequence is synthesized)
gagattacaggattgacttctaaagactcttggtacgtgaggaagaaacccggaagaggaagaggagagcaaaggagtcagggatggctttttctcagggtctattgacattcagggatg

SEQ ID NO: 476740 - DNA, 89 bp, Artificial Sequence
  ENSG00000160336_2 (sequence is synthesized)
ctatacagggacgtgatgatatctcttccaaatgcacgatgaaggagttcttgtcaacagcgcaaggcaacagagaagtgttccatgca

SEQ ID NO: 476741 - DNA, 120 bp, Artificial Sequence
  ENSG00000160336_3 (sequence is synthesized)
cttgtcaacagcgcaaggcaacagagaagtgttccatgcagggacattgcaaatacatgaaagtcatcacaatggagatttttgctaccaggatgttgataaagatattcatgactatga

SEQ ID NO: 476742 - DNA, 120 bp, Artificial Sequence
  ENSG00000160336_4 (sequence is synthesized)
atttcaatggcaagaagatgaaagaaatggccatgaagcacccatgacaaaaatcaaaaagttgacaggtattacagaacgatatgatcaaagtcatgctagaaacaagcctattaaaga

SEQ ID NO: 476743 - DNA, 120 bp, Artificial Sequence
  ENSG00000160336_5 (sequence is synthesized)
tcagcttggatcaagctttcattcgcatctgcctgaaatgcacatatttcagaccgaagagaaaattgataatcaagttgtgaagtctgtccacgatgcttccttggtttcaacagccca

SEQ ID NO: 476744 - DNA, 120 bp, Artificial Sequence
  ENSG00000160336_6 (sequence is synthesized)
aagaatttcttgtaggcccaaaacccatatatctaataaccatgggaataatttctggaattcttcattactcacacaaaaacaggaagtacacatgagagaaaaatctttccaatgtaa

SEQ ID NO: 476745 - DNA, 120 bp, Artificial Sequence
  ENSG00000160336_7 (sequence is synthesized)
tgagagtggcaaagcctttaattacagctcactcttaaggaaacatcagataatccatttagcagacaaatataaatgtgatgtatgtggcaagctctttaatcagaagcgaaacctagc

SEQ ID NO: 476746 - DNA, 81 bp, Artificial Sequence
  ENSG00000160336_8 (sequence is synthesized)
atgtatgtggcaagctctttaatcagaagcgaaacctagcatgccatcgtagatgtcacactggtgagaatacgtcatccc

SEQ ID NO: 476747 - DNA, 120 bp, Artificial Sequence
  ENSG00000160336_9 (sequence is synthesized)
caaatgtgaagaatgtgacaaagctttccatttcaaatcaatacttgaaagacataggataattcatactgaagagaaaccatataagtgtaatgagtgtggcaagacctttaggcagaa

SEQ ID NO: 476748 - DNA, 67 bp, Artificial Sequence
  ENSG00000160336_10 (sequence is synthesized)
catataagtgtaatgagtgtggcaagacctttaggcagaagtcaatccttacacgccatcatcagtc

SEQ ID NO: 476749 - DNA, 89 bp, Artificial Sequence
  ENSG00000160336_11 (sequence is synthesized)
tcccttacatgccatcatagactgagtgtggcaagacctttagtcacaagtcatcccttacatgccatcgtagacttcatactggagag

SEQ ID NO: 476750 - DNA, 120 bp, Artificial Sequence
  ENSG00000160336_12 (sequence is synthesized)
ttacagtttcagatcaaattttgaaatacatcggaaaattcatactgaagacaatgcttacaagtgtaatgagtgtggaaagacctttagccggacatcatcccttacatgccatcgtag

SEQ ID NO: 476751 - DNA, 89 bp, Artificial Sequence
  ENSG00000160336_13 (sequence is synthesized)
gtagacgtcatactggagagctttccgtttcaaatcaaaccttgaaagacataggagaattcatactggagagaaaccatacaagtgta

SEQ ID NO: 476752 - DNA, 80 bp, Artificial Sequence
  ENSG00000160336_14 (sequence is synthesized)
catcatacggcaagacctttagttggaagtcatcccttacctgccatcgtagacttcattctggagagaaaccttacaag

SEQ ID NO: 476753 - DNA, 120 bp, Artificial Sequence
  ENSG00000160336_15 (sequence is synthesized)
atagtggagagaacccttacaaatgtgaagatagtgacaaagcttacagtttcaaatcaaaccttgaaatacatcagaaaattcatactgaagagaatccttacaagtgtaatgagtgtg

SEQ ID NO: 476754 - DNA, 83 bp, Artificial Sequence
  ENSG00000160336_16 (sequence is synthesized)
attcatactgaagagaatggacgtcatcccttacatgccatcgtagacttcataccggagagaaaccttacaaatgtgaagaa

SEQ ID NO: 476755 - DNA, 88 bp, Artificial Sequence
  ENSG00000160336_17 (sequence is synthesized)
aagtgtaatgagtgtggcaagacctttagtcggaagtcatattttatatgctaagtgtaatgagtgtggcaagaactttagtcagaag

SEQ ID NO: 476756 - DNA, 82 bp, Artificial Sequence
  ENSG00000160336_18 (sequence is synthesized)
tagacttcatactggagagaaaccttataagtgtaatgagtgtggcaagaactttagtcagaagtcatcccttatatgccac

SEQ ID NO: 476757 - DNA, 120 bp, Artificial Sequence
  ENSG00000160336_19 (sequence is synthesized)
accttacatgccatcgtagacttcatactggagaaaaacaagtgtaatgaatgtggtgaggtttttaatcaacaagcacaccttgcaggtcatcatagaattcatactggggagaaacct

SEQ ID NO: 476758 - DNA, 120 bp, Artificial Sequence
  ENSG00000160336_20 (sequence is synthesized)
tagaaatgtgaagcatgtgataaagtttacagtggcaaatcaagcctcagaagacaggagaattcatactggagagaaagcttataaatgtgaagaatgtcacaaagtttacagtcgcac

SEQ ID NO: 476759 - DNA, 120 bp, Artificial Sequence
  ENSG00000160336_21 (sequence is synthesized)
atcaaaccgtgaaagacaggagaattcatactggagagaaaccataaaaatgtaagagtttgtgacaaggcttttgggcatgattcgcacctggcacaacatgctagaattcacactgga

SEQ ID NO: 476760 - DNA, 120 bp, Artificial Sequence
  ENSG00000160336_22 (sequence is synthesized)
aaccttaccagtgtaatgagtgtggcaaagcctttagtaggcagtcaacacttgtttaccgtcaggcaatccatggtgtagggaaactttactaaggtaatgattgtcacaaagtcttca

SEQ ID NO: 476761 - DNA, 120 bp, Artificial Sequence
  ENSG00000160336_23 (sequence is synthesized)
ttcagtaatgctacaaccattgtgaatcactggagaatccataaggaagagagatcatactagggtaataaatgtggcagatttttcagacattgttcataccttgcagttcatcggtga

SEQ ID NO: 476762 - DNA, 120 bp, Artificial Sequence
  ENSG00000160336_24 (sequence is synthesized)
actcaacgctggagagaaaccttacaaatgtcatgactgtggcaaggtcttcagtcaagcttcatcctatgcaaaacataggagaattcatacaggagagaaacctcacatgtgtgatga

SEQ ID NO: 476763 - DNA, 120 bp, Artificial Sequence
  ENSG00000160336_25 (sequence is synthesized)
tagtggcaaagccttcacttcacacctcatgagacatcagagaatgcatactggacagaaatcttacaaatgtcatcaatgtgccaaggtcttcagtctgagttcactccttgcagaata

SEQ ID NO: 476764 - DNA, 120 bp, Artificial Sequence
  ENSG00000160336_26 (sequence is synthesized)
tgagaaaattcattttggaggtagttggtccatatgcaatgagtagagcaaaccatcaagcattaattgacattagggtcaattcagcattgacttgagtttgtattgacttaacattga

SEQ ID NO: 476765 - DNA, 120 bp, Artificial Sequence
  ENSG00000160336_27 (sequence is synthesized)
attgacttaacattgagttcaagcattaattgacattagtgtttatgttaagaggattgggccaggcacatcagcttacacctgtaatctgagcgctttgggaggccaaggtgggtagat

SEQ ID NO: 476766 - DNA, 120 bp, Artificial Sequence
  ENSG00000160336_28 (sequence is synthesized)
tttgagatcagcctggccaacagacgtgagccattttcccagcctgttttttgtttctttaaaaaaactgatagggatttttatggatatcatgttgaatctaaatcacattgggttatt

SEQ ID NO: 476767 - DNA, 120 bp, Artificial Sequence
  ENSG00000160336_29 (sequence is synthesized)
atataatcatttcacaatattaatttttccaagctatcaatatgggttgtagctcaatgtttttaatcattttgatcaatgtttgtagatttcaaggtacaaacttctgacctttgtacg

SEQ ID NO: 476768 - DNA, 120 bp, Artificial Sequence
  ENSG00000160336_30 (sequence is synthesized)
tttatttctaagtatttctttaagttctccagcaaatggaagtgttttaaaattttcttttaaaattgtttattgttaaagtatggaaattcaactaatttttggtgctgatactgtatt

SEQ ID NO: 476769 - DNA, 120 bp, Artificial Sequence
  ENSG00000160336_31 (sequence is synthesized)
gtgcaaatccactgactatgttacttagttccagtagtattttggttggctctttgtgattttctacacagaagattatgtcatctacaaacaaatataattttacttcttactttctga

SEQ ID NO: 476770 - DNA, 120 bp, Artificial Sequence
  ENSG00000160336_32 (sequence is synthesized)
agttctacagctgaccctctttcgctattttcaaggtcaatagctgtgtgttcacacttctgcattttataaatgttactgtgattttcttgaggtggcgtgttgattctgagcaataaa

SEQ ID NO: 476771 - DNA, 66 bp, Artificial Sequence
  ENSG00000160336_33 (sequence is synthesized)
tgagattacaggtgccaaccaccatacctaattattggcttttatttttaagatttttgcatatgt

SEQ ID NO: 476772 - DNA, 64 bp, Artificial Sequence
  ENSG00000160336_34 (sequence is synthesized)
tagccgggtatgaacctgggaatcggaggttgcagtgagccaagatcaccactgcacatctgcc

SEQ ID NO: 476773 - DNA, 77 bp, Artificial Sequence
  ENSG00000160336_35 (sequence is synthesized)
tgggaggctgaagcaggaggatcacatgaacctgggaatcggaggttgcagtgagccaagatcaccactgcacatct

SEQ ID NO: 476774 - DNA, 120 bp, Artificial Sequence
  ENSG00000160339_0 (sequence is synthesized)
agaccagaagagatggagctggacagagctgtgggggtcctgggcgctgccaccctgctgctctctttcctgggcatggcctgggctctccaggcggcagacacctgtccagaggtgaag

SEQ ID NO: 476775 - DNA, 120 bp, Artificial Sequence
  ENSG00000160339_1 (sequence is synthesized)
atggtgggcctggagggctctgacaagctcaccattctccgaggctgtccggggctgcctggggcccctgggcccaagggagaggcaggcaccaatggaaagagaggagaacgtggcccc

SEQ ID NO: 476776 - DNA, 120 bp, Artificial Sequence
  ENSG00000160339_2 (sequence is synthesized)
cctggacctcctgggaaggcaggaccacctgggcccaacggagcacctggggagccccagccgtgcctgacaggcccgcgtacctgcaaggacctgctagaccgagggcacttcctgagc

SEQ ID NO: 476777 - DNA, 120 bp, Artificial Sequence
  ENSG00000160339_3 (sequence is synthesized)
ggctggcacaccatctacctgcccgactgccggcccctgactgtgctctgtgacatggacacggacggagggggctggaccgttttccagcggagggtggatggctctgtggacttctac

SEQ ID NO: 476778 - DNA, 120 bp, Artificial Sequence
  ENSG00000160339_4 (sequence is synthesized)
ctccgtgtagacctggtggactttgaggacaactaccagtttgctaagtacagatcattcaaggtggccgacgaggcggagaagtacaatctggtcctgggggccttcgtggagggcagt

SEQ ID NO: 476779 - DNA, 120 bp, Artificial Sequence
  ENSG00000160339_5 (sequence is synthesized)
gcgggagattccctgacgttccacaacaaccagtccttctccaccaaagaccaggacaatgatcttaacaccggaaattgtgctgtgatgtttcagggagcttggtggtacaaaaactgc

SEQ ID NO: 476780 - DNA, 120 bp, Artificial Sequence
  ENSG00000160339_6 (sequence is synthesized)
catgtgtcaaacctgaatggtcgctacctcagggggactcatggcagctttgcaaatggcatcaactggaagtcggggaaaggatacaattatagctacaaggtgtcagagatgaaggtg

SEQ ID NO: 476781 - DNA, 120 bp, Artificial Sequence
  ENSG00000160339_7 (sequence is synthesized)
cgacctgcctagcccaggccggcctcagggtcaggacgcctccacacatagttggttggggggtagggttgggagcttggccctacggtttgtaaaagaaacacatgtcgtgattctaaa

SEQ ID NO: 476782 - DNA, 120 bp, Artificial Sequence
  ENSG00000160339_8 (sequence is synthesized)
accagaagagatggagctggacagagctgtgggggtcctgggcgctgccaccctgctgctctctttcctgggcatggcctgggctctccaggcggcagacacctgtccaggagaacgtgg

SEQ ID NO: 476783 - DNA, 120 bp, Artificial Sequence
  ENSG00000160345_0 (sequence is synthesized)
gcttctcctccaggcacaatggctgaggaatgccccagagcgtgcgcggagcctgtggcgcccaaggccacggccccgccggagaggaccagcgactactaccgcgtgagcgcggacctg

SEQ ID NO: 476784 - DNA, 120 bp, Artificial Sequence
  ENSG00000160345_1 (sequence is synthesized)
ccgggcaggttcaacaacccggggtggttccggggctacaggacccagaaggctgtctccgtgtacaggaccagtaaccaggcttacgggagcagagcccccaccgtgcacgagatgcct

SEQ ID NO: 476785 - DNA, 120 bp, Artificial Sequence
  ENSG00000160345_2 (sequence is synthesized)
aatgtttacctggagaaaagcatcgtgactggccccgataactgcatcacctcctgtgaccggctcaacttccaccccagttacaacatcaacaggccatccatctgcgattgaggggct

SEQ ID NO: 476786 - DNA, 120 bp, Artificial Sequence
  ENSG00000160345_3 (sequence is synthesized)
ggaaactccctctaggagtcctctgaccccagggcctcctggaaaatcatcatccctcatcacccacagtcgcccgattgtgacggcacagactgcgctgccttccctgaaaatattatt

SEQ ID NO: 476787 - DNA, 120 bp, Artificial Sequence
  ENSG00000160345_4 (sequence is synthesized)
cgtctgcggagtaggaaaatatgcaaacggggccgtgaagtcctgccatttcacatctaataagtacatgggaaagatgctaatggttgactttgcattaaaaacgttgtcacatcctga

SEQ ID NO: 476788 - DNA, 120 bp, Artificial Sequence
  ENSG00000160345_5 (sequence is synthesized)
gtggggagccgggagcccagcagccccaggaaagacctggaagcacagggaccttttcaggaaacagagggctggagccaggttctgatcccgaccttgctcctggtcacgtgacctggc

SEQ ID NO: 476789 - DNA, 120 bp, Artificial Sequence
  ENSG00000160345_6 (sequence is synthesized)
ggtctggaggccaagcctccgctcctgacaagctaggttacccagaaattgcagcatgtgccgaggccctgccagggctggggatcagcacttgctggctgcctgctctttagggctttg

SEQ ID NO: 476790 - DNA, 120 bp, Artificial Sequence
  ENSG00000160345_7 (sequence is synthesized)
gcctgccttggaagagcagggacagtggcaagcagagggggccggggaggccgggccattcagaacggtcatcagccaggtactcccagaggctgccttcgaggccacatcaccagcccg

SEQ ID NO: 476791 - DNA, 120 bp, Artificial Sequence
  ENSG00000160345_8 (sequence is synthesized)
tttccatgggggcatttccaggggagtgccgtcaaccaaatacaaggctgtggcttgtgcagaattagagtaaatgaatgaaaatagagtgtttctcatctaccaggacccagaaggctg

SEQ ID NO: 476792 - DNA, 120 bp, Artificial Sequence
  ENSG00000160345_9 (sequence is synthesized)
agtctcgggcggggagtggagccacggtcctcgccctgcagctcgccccgccctgctaatgggaccggccagcccgggaggcccctgacccttggggaagcccgctgggcgatggggacc

SEQ ID NO: 476793 - DNA, 120 bp, Artificial Sequence
  ENSG00000160345_10 (sequence is synthesized)
ctcgcctcccgccaagtgagctgtgaaccacgtcctgcgcaacctctcgctctccaaaactgtttgtaatatttaaacgatatttggcttaggagaatttcataaagttagccagatctc

SEQ ID NO: 476794 - DNA, 120 bp, Artificial Sequence
  ENSG00000160345_11 (sequence is synthesized)
gggtctcaatttagactcggggtgctggggggcatagcatccctggagtacattggacagcaaaagtccaatcgttgcctgccgagtggacctgcagtgcttaaaccccgtcacccggct

SEQ ID NO: 476795 - DNA, 120 bp, Artificial Sequence
  ENSG00000160345_12 (sequence is synthesized)
ggcggggtcccaggccctggggtttctttcgcccgggagtccacgccctgatgctggggtggcccggtccccccgcgggtggctgggggcctggggctgcctcacacgacggtcccagca

SEQ ID NO: 476796 - DNA, 120 bp, Artificial Sequence
  ENSG00000160345_13 (sequence is synthesized)
gggaatctctcgccgtcccgaccttcccggcccttggggagtcgcccggcaggttccggacccacccgcagaggaacccggcccacgcgcggcgcctttaaggcccctccgctcgctccc

SEQ ID NO: 476797 - DNA, 120 bp, Artificial Sequence
  ENSG00000160349_0 (sequence is synthesized)
acagcctctcccagccccagcaagcgacctgtcaggcggccgtggactcagactccggagatgaagcccctgctcctggccgtcagccttggcctcattgctgccctgcaggcccaccac

SEQ ID NO: 476798 - DNA, 120 bp, Artificial Sequence
  ENSG00000160349_1 (sequence is synthesized)
ctcctggcctcagacgaggagattcaggatgtgtcagggacgtggtatctgaaggccatgacggtggacagggagttccctgagatgaatctggaatcggtgacacccatgaccctcacg

SEQ ID NO: 476799 - DNA, 120 bp, Artificial Sequence
  ENSG00000160349_2 (sequence is synthesized)
accctggaagggggcaacctggaagccaaggtcaccatgctgataagtggccggtgccaggaggtgaaggccgtcctggagaaaactgacgagccgggaaaatacacggccgacgggggc

SEQ ID NO: 476800 - DNA, 120 bp, Artificial Sequence
  ENSG00000160349_3 (sequence is synthesized)
tgagggcgagctgcacgggaagccggtccgaggggtgaagctcgtgggcagagaccccaagaacaacctggaagccttggaggactttgagaaagccgcaggagcccgcggactcagcac

SEQ ID NO: 476801 - DNA, 120 bp, Artificial Sequence
  ENSG00000160349_4 (sequence is synthesized)
ggagagcatcctcatccccaggcagagcgaaacctgctctccagggagcgattagggggacaccttggctcctcagcagcccaaggacggcaccatccagcacctccgtcattcacaggg

SEQ ID NO: 476802 - DNA, 120 bp, Artificial Sequence
  ENSG00000160349_5 (sequence is synthesized)
acatggaaaaagctccccacccctgcagaacgcggctggctgcaccccttcctaccaccccccgccttccccctgccctgcgccccctctcctggttctccataaagagcttcagcagtt

SEQ ID NO: 476803 - DNA, 120 bp, Artificial Sequence
  ENSG00000160352_0 (sequence is synthesized)
gtctctcgctgcagctggagctgcaggtctcgccttcactgccctgtgtcctctgctcgcagaggcccagcctctgtggccctgtgacctgcaggtattgagagatccacagctaagacg

SEQ ID NO: 476804 - DNA, 120 bp, Artificial Sequence
  ENSG00000160352_1 (sequence is synthesized)
ccaggtaccccggaagcctagaaatgggcgacctgaggtctggagtgtatcctctcaagggagcaagtggatccctggggcagagaggaagcttctagtgtactcttactttgaaaagga

SEQ ID NO: 476805 - DNA, 120 bp, Artificial Sequence
  ENSG00000160352_2 (sequence is synthesized)
catagaattctctctggaggagtgggaatgcctgaaccctgctcagcagaatttatatatgaatgtgatgttagagaactacaaaaacctggtcttcttggcaggtattgctgtctctaa

SEQ ID NO: 476806 - DNA, 120 bp, Artificial Sequence
  ENSG00000160352_3 (sequence is synthesized)
cttggcaggtattgctgtctctaagcaagacccgatcaccagtctagagcaagaaaaagagccctggaatatgaagatatgtgagatggtggatgaatccccagctatgtgttcttcttt

SEQ ID NO: 476807 - DNA, 120 bp, Artificial Sequence
  ENSG00000160352_4 (sequence is synthesized)
taccagagacctttggccagagcaagacataaaagattcttttcaacaagtgatactgagaagacatggcaaatgtgaacatgagaatttacagttaagaaaaggctccgcaaatgtggt

SEQ ID NO: 476808 - DNA, 120 bp, Artificial Sequence
  ENSG00000160352_5 (sequence is synthesized)
tgagtgtaaggtgtacaaaaaaggttataatgaactaaaccagtgtttgacaactacccagagcaaaatatttccatgtgataaatatataaaagtctttcataaaattttcaattcaaa

SEQ ID NO: 476809 - DNA, 120 bp, Artificial Sequence
  ENSG00000160352_6 (sequence is synthesized)
tagacacaagacaagacatactggagagaaacctttcaaatgtaaaaaatgtgatgaatcattttgcatgcttttacacctacatcaacataaaagaattcatattagagagaattctta

SEQ ID NO: 476810 - DNA, 120 bp, Artificial Sequence
  ENSG00000160352_7 (sequence is synthesized)
aattcttaccaatgtgaagaatgtgacaaagtgtttaagcggttctcaacccttactagacacaagagagttcatactggagagaaacccttcaaatgtgaagaatgtggcaaagctttt

SEQ ID NO: 476811 - DNA, 120 bp, Artificial Sequence
  ENSG00000160352_8 (sequence is synthesized)
ctcaacccttactacacataagatgattcatactggagagaaaccctacagatgtgaagaatgtggcaaagccttctaccattcttcacaccttactacacataaggtaattcatactgg

SEQ ID NO: 476812 - DNA, 120 bp, Artificial Sequence
  ENSG00000160352_9 (sequence is synthesized)
agagaagcccttcaaatgtgaagaatgtggtaaagcttttaaccacccttcagcccttactacacataagttcattcatgttaaagaaaaaccctacaaatgtgaagaatgtgacaaagc

SEQ ID NO: 476813 - DNA, 120 bp, Artificial Sequence
  ENSG00000160352_10 (sequence is synthesized)
ttttaaccgattctcataccttactaaacataagataattcattctggagagaaatcttacaaatgtgaacaatgtggcaaaggctttaactggtcttcaacccttacaaaacataaaag

SEQ ID NO: 476814 - DNA, 63 bp, Artificial Sequence
  ENSG00000160352_11 (sequence is synthesized)
tgtgaagaatgtggcaaagcctttaatgtgtcttcacaccttactacacataagatctcctca

SEQ ID NO: 476815 - DNA, 120 bp, Artificial Sequence
  ENSG00000160352_12 (sequence is synthesized)
caaatgtgaagaatgtggcaaagctttcaaccgatcctcaaaccttactaaacataacataattcatactggagagaaatcttacaaatgtgaagaatgtggtaaagcctttaaccaatc

SEQ ID NO: 476816 - DNA, 75 bp, Artificial Sequence
  ENSG00000160352_13 (sequence is synthesized)
cttacaaatgtgaagaatgtggtaaagcctttaaccaatcctcaactcttactaaacataggaaaattcaactag

SEQ ID NO: 476817 - DNA, 73 bp, Artificial Sequence
  ENSG00000160352_14 (sequence is synthesized)
gcctgggccacaatactggaacgaaaccctacaattgtgaagaatgtgccagtgctttcaaccagtcctcgaa

SEQ ID NO: 476818 - DNA, 120 bp, Artificial Sequence
  ENSG00000160352_15 (sequence is synthesized)
aaagaaaattcatactggaacgaaaccctacaattgtgaagaatgtgccagtgctttcaaccagtcctcgaacctttttaagaaaataatttatactggagagaaattctacaaatgtga

SEQ ID NO: 476819 - DNA, 120 bp, Artificial Sequence
  ENSG00000160352_16 (sequence is synthesized)
ctcttactaggcattaaaaattcatactgtacagaaaccctacgagggtgaaaaacatggcaaagcctttaacaagccctcaattcttaacagacataacataattcatactggaaagaa

SEQ ID NO: 476820 - DNA, 120 bp, Artificial Sequence
  ENSG00000160352_17 (sequence is synthesized)
actctgcaaaccagaaagatctggcaatgcttttgacaacacctcaaacttttctaaccataaaagaaattatactggtgagaaatcttagaaatctgaagaatgagacaaagcctttaa

SEQ ID NO: 476821 - DNA, 120 bp, Artificial Sequence
  ENSG00000160352_18 (sequence is synthesized)
atggttgtcacacttgattgtaggtaagataattcatactggagaaaacacctacatgtgtgaacaatgtggcaaaacttaaccagtgctcacaccttattgcacaggaaagcatttgta

SEQ ID NO: 476822 - DNA, 120 bp, Artificial Sequence
  ENSG00000160352_19 (sequence is synthesized)
cttgagataaattatacaaatataaagactgaaaaagccattaatatatgttcatatctcaacaccagatagttcatacttaataaaagcattataagtacaattactgtcaaaagacct

SEQ ID NO: 476823 - DNA, 65 bp, Artificial Sequence
  ENSG00000160352_20 (sequence is synthesized)
taataaaagcattataagtacaattactgtcaaaagacctttcagaaaatacaagcttttgacca

SEQ ID NO: 476824 - DNA, 61 bp, Artificial Sequence
  ENSG00000160352_21 (sequence is synthesized)
tgcggtgggagggagaggttgcagtgagctgagattgcactctagcctgggccacagagca

SEQ ID NO: 476825 - DNA, 120 bp, Artificial Sequence
  ENSG00000160352_22 (sequence is synthesized)
cagtgagctgagattgcactctagcctgggccacagagcaagactccatctaaaaagtaaaaaaaaaagaaaatatgaactttacagtgaagaatatttattttgaagatgaatgttaca

SEQ ID NO: 476826 - DNA, 120 bp, Artificial Sequence
  ENSG00000160352_23 (sequence is synthesized)
aatataaagtgggtagtagtgcctttacttgtatcacagatcttattgtagacattttttgtagaggaaaaactctgaagcactttcacactttgttcaatatcagggaatttatattga

SEQ ID NO: 476827 - DNA, 120 bp, Artificial Sequence
  ENSG00000160352_24 (sequence is synthesized)
agaaaaatcatgcaaatgtagtaaatttggaaaaacactttttcaaaaactacagcttagaaaacagagttcatactagaatatatttttgcagatgcagtaaaagttaaaaaaaattta

SEQ ID NO: 476828 - DNA, 120 bp, Artificial Sequence
  ENSG00000160352_25 (sequence is synthesized)
atccataagtaagtctgtgtaaatatcagaatttatggtagaaatacataaggcactgacaacatcagatatactaaatcagagggctgagtatagaaaattaaagttggtagaaaaatt

SEQ ID NO: 476829 - DNA, 120 bp, Artificial Sequence
  ENSG00000160352_26 (sequence is synthesized)
atttgtatataactttaagaggatcagaaggttttttgcagttataattacattcaaagtatactttatttcttgaaaaatattacagattttttgaaaagtgaataatgatgtcattca

SEQ ID NO: 476830 - DNA, 120 bp, Artificial Sequence
  ENSG00000160352_27 (sequence is synthesized)
actctgaaattcctgccgtttcttcattcctattggattcacatgtgaaagcatgggatcaattattgctgtatcaaagatatgaaagattctttctttgttttgttctgtttttttgag

SEQ ID NO: 476831 - DNA, 75 bp, Artificial Sequence
  ENSG00000160352_28 (sequence is synthesized)
tatgaaagattctttctttgttttgttctgtttttttgagatggagttttgctctttcgcaatttccagtttcaa

SEQ ID NO: 476832 - DNA, 65 bp, Artificial Sequence
  ENSG00000160352_29 (sequence is synthesized)
tcctgagtagctgggattacaggcgcatatcaccacgcccagctaatttttatgtttctagtacc

SEQ ID NO: 476833 - DNA, 120 bp, Artificial Sequence
  ENSG00000160352_30 (sequence is synthesized)
gtgctgggattacacaggcatgagccactgctcctggcaagagattcttttttattaggtgggcattatttgtgatcttttctattgaaaagtaaaaacattagaatgtaagatgcataa

SEQ ID NO: 476834 - DNA, 120 bp, Artificial Sequence
  ENSG00000160352_31 (sequence is synthesized)
tgaaaatgtaagtggagaggttctttggggttaacttataatattgagtggtgcatgaggttggtgttcagagtaatattctgcattatgaaaaaacatttaattttatttaaaatttag

SEQ ID NO: 476835 - DNA, 120 bp, Artificial Sequence
  ENSG00000160352_32 (sequence is synthesized)
tttatcatactaattgtacttttatataagatgcagtacatttttaaaattttagattgtgtgaagttaatagtttaacatttttaacatgttaaatactattgtgcattcaatgaagca

SEQ ID NO: 476836 - DNA, 120 bp, Artificial Sequence
  ENSG00000160352_33 (sequence is synthesized)
tgccagtggctttaaaccgcaaataagttaaagaatattgtttctgtaggttaaatttttattttgtttttaatcatttaaatttaattttggtgggtacataatatgagtatatattta

SEQ ID NO: 476837 - DNA, 120 bp, Artificial Sequence
  ENSG00000160352_34 (sequence is synthesized)
tgcacttatatggcatattttagtacaggaatacaatatataatagtagcatcagggttaagtgaggcatccttcacccatagcatttctcctttgttttacaaacaatccaaacctaca

SEQ ID NO: 476838 - DNA, 70 bp, Artificial Sequence
  ENSG00000160352_35 (sequence is synthesized)
tagcatttctcctttgttttacaaacaatccaaacctacactttttaaaaattttttgttgttgttgttc

SEQ ID NO: 476839 - DNA, 120 bp, Artificial Sequence
  ENSG00000160352_36 (sequence is synthesized)
ttatttttatggtcataatacaaattatatatgagtataaataaaattcatttctaaactattaatattttttccaaattgttatatatttttctttgaacatgtggcctgtctgcctgc

SEQ ID NO: 476840 - DNA, 120 bp, Artificial Sequence
  ENSG00000160352_37 (sequence is synthesized)
tctttgaacatgtggcctgtctgcctgcaaacatgcagactttttgattcacatagagttaaatatgtattagtctaaagacaaactttaggtgtaagaaaattatggaataagtgtgtg

SEQ ID NO: 476841 - DNA, 120 bp, Artificial Sequence
  ENSG00000160352_38 (sequence is synthesized)
tgtgtgagtatgagtttgtacctattttcagaaaagaacaatatgggaataaaaatcattttaataaggtggctactataaaactaaaaaccttaaaaaatgctgaaagcaaatgtatac

SEQ ID NO: 476842 - DNA, 120 bp, Artificial Sequence
  ENSG00000160352_39 (sequence is synthesized)
tttgtgctttgtattgaatttattactgtacaatccatgacttacagttctgaaccttttcatgcaaattctctgtatatacttgcctggtactcatgctagacccatactttttttgtt

SEQ ID NO: 476843 - DNA, 120 bp, Artificial Sequence
  ENSG00000160352_40 (sequence is synthesized)
tcttacattttttttgttttatggtttaggaagtattcattatatgagctggtctgtgattataagaatttttatgaaatttagtgcacacaaaataatttttagatgtaattccaaaag

SEQ ID NO: 476844 - DNA, 120 bp, Artificial Sequence
  ENSG00000160352_41 (sequence is synthesized)
tagtgtattaagttacattttatttagtgagagcactccattttgttcttttaaggggagaacaatatataagttttcttttctttagtgattgttcctttcactttttataattgacat

SEQ ID NO: 476845 - DNA, 120 bp, Artificial Sequence
  ENSG00000160352_42 (sequence is synthesized)
aagtatatttatttattgagtcaatttgttcaggtaagtactggggggcttcataagtcatgaggatgtttttatatataaatgtagcaaacatacattacagttcttactgtgtaatcg

SEQ ID NO: 476846 - DNA, 120 bp, Artificial Sequence
  ENSG00000160352_43 (sequence is synthesized)
atgctccataataattcacaaatattcctgctggagttagtttgtaatttcaagtcagaaatgaaagatatcagtggtgaagaaataagattgattcttcatatggagtggacatttttt

SEQ ID NO: 476847 - DNA, 120 bp, Artificial Sequence
  ENSG00000160352_44 (sequence is synthesized)
ccagactataaaactgaatcttgctgaatttaaagagaaattctggccgaggcagatggatcacctgaggttaggagtttcagaccagcctggtgaaacccggtctctactaataaacta

SEQ ID NO: 476848 - DNA, 76 bp, Artificial Sequence
  ENSG00000160352_45 (sequence is synthesized)
cagaccagcctggtgaaacccggtctctactaataaactacaaaaattagctgattgtggtggcatccacctgtag

SEQ ID NO: 476849 - DNA, 120 bp, Artificial Sequence
  ENSG00000160352_46 (sequence is synthesized)
ctacagcctgggtgacagaatgagactcataaaaaaaaaaataaattctgcttcttttattttctacttctcttcagatttgtttctcgtatgtattttccaactatgtatgcatcacag

SEQ ID NO: 476850 - DNA, 120 bp, Artificial Sequence
  ENSG00000160352_47 (sequence is synthesized)
cccttctttttctgagttatagctacagttttctgactgttctcttcacgccatttcatttcgcctggtattttgtagattttgatgacaaaattctatttttagtgcacttaaaaatgg

SEQ ID NO: 476851 - DNA, 120 bp, Artificial Sequence
  ENSG00000160352_48 (sequence is synthesized)
attctatttttagtgcacttaaaaatggattttaactggtgagttcgcttatcaatataacattcagattagttaattaagataaaagccaggtgtggtggctcacgcctctaatcccag

SEQ ID NO: 476852 - DNA, 120 bp, Artificial Sequence
  ENSG00000160352_49 (sequence is synthesized)
aaaggcgcacactgtccacaggcaagaggattaaattagcattgcatttctttgtttttaaaagaaaaatcttattagattcttatacaaagtgtggcaaatataaaacttgcttgaaaa

SEQ ID NO: 476853 - DNA, 88 bp, Artificial Sequence
  ENSG00000160352_50 (sequence is synthesized)
aaagtgtggcaaatataaaacttgcttgaaaatatggaaattaaatttttaagagagttaatagtaaacgaatttaaagagacagagt

SEQ ID NO: 476854 - DNA, 120 bp, Artificial Sequence
  ENSG00000160352_51 (sequence is synthesized)
acgaatttaattttctatgatataattacagcacaatttacatttccgtgcagaatcttttaagtgtggtggtaaagattgcaaaataataaaatgacctctgaatttaaaatttagaaa

SEQ ID NO: 476855 - DNA, 120 bp, Artificial Sequence
  ENSG00000160352_52 (sequence is synthesized)
aatatgtcttttctatattgattttacaatttggagaaatttctcttattttttatattttttcttttagtgggagaagtttagtctacggtttttatttttagtcaccaagctgtagcc

SEQ ID NO: 476856 - DNA, 120 bp, Artificial Sequence
  ENSG00000160352_53 (sequence is synthesized)
aactcctgggtcattttctctgaaaaacatttggagatcatgacaagttttggattaaaacattctgttattttgcatgcaaactagtttactgtgttcacagactggccagtcatggga

SEQ ID NO: 476857 - DNA, 120 bp, Artificial Sequence
  ENSG00000160352_54 (sequence is synthesized)
ccataagcaacacctgcccctttagtggctttcataccattaccaccagtaccagaaactccaggtggcccaagcttaaagtaaaaatcctaaagtacattggcttctcccatgcaatgt

SEQ ID NO: 476858 - DNA, 120 bp, Artificial Sequence
  ENSG00000160352_55 (sequence is synthesized)
gctgggtccaaaccatgctgttaaatatcagagttcctatggttatgactgacaaatgacaataatagccccaaaatacatatttttgatactatttagccaagattaccacaaagatac

SEQ ID NO: 476859 - DNA, 120 bp, Artificial Sequence
  ENSG00000160352_56 (sequence is synthesized)
agtatttgacacattcttattctataacattttgaaaatattttctcttgacagataaaaatgtgtactttttctgtagaacataatattttgaacatgctgttaaatatcagagttcct

SEQ ID NO: 476860 - DNA, 120 bp, Artificial Sequence
  ENSG00000160352_57 (sequence is synthesized)
atgattatgactaaaaaattaaatgacaatagtccccaaactatgtattttcatactatttagccaaagtaatcacaaagacacagtatttgacacattgttattcttttatgtcttaaa

SEQ ID NO: 476861 - DNA, 120 bp, Artificial Sequence
  ENSG00000160352_58 (sequence is synthesized)
aatattttctttcaacttgagaaaatgtgtgctttttctgtagaacatattttgaagtatatatacattgttattatttctaggtaattaatacctcacatagttaacatttttgtggtg

SEQ ID NO: 476862 - DNA, 120 bp, Artificial Sequence
  ENSG00000160352_59 (sequence is synthesized)
agaccacgtcttatcatttttcaaaaatccaaatacattattatgaactatagtcaccatgttgtacaataaatctcttgaacttatttctcctatttgactataattacttattatttg

SEQ ID NO: 476863 - DNA, 120 bp, Artificial Sequence
  ENSG00000160352_60 (sequence is synthesized)
acagactttccaaacccccatttcttctaaataccttggcatctgatggtcaccattttactctatacatcaatgggattaagatttttggaatccatgtataggtgaaatcatgaaata

SEQ ID NO: 476864 - DNA, 120 bp, Artificial Sequence
  ENSG00000160352_61 (sequence is synthesized)
ataggtgaaatcatgaaatattaatctttctgtgcctggcctatcccaactaatataatgtcctccagcttaatctatgtaatttaaaataatataatttttttcttttttttttttttt

SEQ ID NO: 476865 - DNA, 74 bp, Artificial Sequence
  ENSG00000160352_62 (sequence is synthesized)
ttttcttttttttttttttttttaaggccaggtgtggtgtcttacacctgtaatcccagcactgtgggaagcca

SEQ ID NO: 476866 - DNA, 61 bp, Artificial Sequence
  ENSG00000160352_63 (sequence is synthesized)
ggatccctggggcagagaggaagcttctagtgtactcttactttgaaaagggtcgcgctgt

SEQ ID NO: 476867 - DNA, 77 bp, Artificial Sequence
  ENSG00000160352_64 (sequence is synthesized)
tgcctctccttcttaaactgctataagataacttccagatgttgccatggcatttataaactatcatagcactggtg

SEQ ID NO: 476868 - DNA, 120 bp, Artificial Sequence
  ENSG00000160352_65 (sequence is synthesized)
tgaccataggtcactctcatcaccatgttaattttggtgggttttatccagcttctaatactgcaaactgtgttatcagccaggtctttgtgacctgtatcttatgctgaccttctatct

SEQ ID NO: 476869 - DNA, 120 bp, Artificial Sequence
  ENSG00000160352_66 (sequence is synthesized)
caccttgtgagttagaatgcctaaccatcttggaatgcagcccagtgggtctcagccttatttttactcaggctctattccaaatggagttgctctggttcaatacgcctctgacagaat

SEQ ID NO: 476870 - DNA, 120 bp, Artificial Sequence
  ENSG00000160352_67 (sequence is synthesized)
ctgtgtctggctatgtgataaataagaaaagagagcaccatctaagtcataatgggaagggtgtttctttccataaactatttctagagaacacaaaggatgaaggattttattaatcac

SEQ ID NO: 476871 - DNA, 120 bp, Artificial Sequence
  ENSG00000160352_68 (sequence is synthesized)
agctatttacccagattatgtttgtgattcatcattccccacctcttttctttgtcatgtacatttcttccatttgacttttcctgggttgtactttttataataaactagtaaacataa

SEQ ID NO: 476872 - DNA, 80 bp, Artificial Sequence
  ENSG00000160360_0 (sequence is synthesized)
acttcctcggcgcctccccgggggaggacgggcgaacgaggcgcggacggacaggcggacagcagggcggacagcaggga

SEQ ID NO: 476873 - DNA, 120 bp, Artificial Sequence
  ENSG00000160360_1 (sequence is synthesized)
gacccatggcgggcccggccccgcccgcggccgacgagctcccgggcccggccgccaggcgcctctactccaggatggaggcgtcctgcctagagctggcgctggagggcgagcgtctgt

SEQ ID NO: 476874 - DNA, 120 bp, Artificial Sequence
  ENSG00000160360_2 (sequence is synthesized)
cctagagctggcgctggagggcgagcgtctgtgcaaggcgggcgacttcaagacaggcgtggccttctttgaggctgctgtgcaggtgggcaccgaggacctgaagacactgagtgccat

SEQ ID NO: 476875 - DNA, 120 bp, Artificial Sequence
  ENSG00000160360_3 (sequence is synthesized)
ctacagccagctgggcaacgcctacttctacctgaaggagcacggccgggcgctggaataccacaagcatgacctcctgctggcgcggaccatcggtgaccgcatgggggaggccaaggc

SEQ ID NO: 476876 - DNA, 120 bp, Artificial Sequence
  ENSG00000160360_4 (sequence is synthesized)
cagtggaaacctgggaaacacactcaaggtcctggggcgcttcgacgaggctgccgtctgctgccagcggcatctgagcatcgcccaagagcagggagacaaggttggggaggcgagggc

SEQ ID NO: 476877 - DNA, 120 bp, Artificial Sequence
  ENSG00000160360_5 (sequence is synthesized)
cctctacaacatcgggaacgtgtaccacgccaaaggcaagcaactgtcctggaacgccgcaaacgccacgcaggaccccgggcacctgccgcccgatgtccgagagaccctgtgcaaggc

SEQ ID NO: 476878 - DNA, 120 bp, Artificial Sequence
  ENSG00000160360_6 (sequence is synthesized)
ctccgagttctacgagaggaacctgtccctggtgaaggagctgggcgaccgtgcggcgcagggcagggcctacggcaacctgggcaacacccactatttgttggggaacttcacagaggc

SEQ ID NO: 476879 - DNA, 120 bp, Artificial Sequence
  ENSG00000160360_7 (sequence is synthesized)
cacgaccttccacaaggagcgcctggccattgctaaggagtttggagacaaggcagccgagaggagggcctacagcaacctggggaacgcccacgtcttcctggggcgctttgacgtggc

SEQ ID NO: 476880 - DNA, 120 bp, Artificial Sequence
  ENSG00000160360_8 (sequence is synthesized)
cgccgagtactacaagaagacgctgcaactgtctcggcagctcagggaccaggcagtggaggcgcaggcctgctacagtctgggcaacacctacacgctgctgcaggactacgagcgcgc

SEQ ID NO: 476881 - DNA, 120 bp, Artificial Sequence
  ENSG00000160360_9 (sequence is synthesized)
ggccgagtaccacctgcggcacctgctcattgcccaggagctggccgacagagtgggcgagggccgggcgtgctggagcctgggaaatgcctacgtgtccatggggcgcccagcgcaggc

SEQ ID NO: 476882 - DNA, 120 bp, Artificial Sequence
  ENSG00000160360_10 (sequence is synthesized)
cctgaccttcgccaagaagcacctgcagatctcccaggagatcggggaccgccatggggagctcacggcccgcatgaacgtggcgcagctgcagctggtgctcggccgcctgaccagccc

SEQ ID NO: 476883 - DNA, 120 bp, Artificial Sequence
  ENSG00000160360_11 (sequence is synthesized)
ggcagcctcagagaagcctgacctggccggctatgaggcccagggggccagacccaagaggacgcagaggctgagcgcggagacctgggacctgctgagactccccctggagcgggagca

SEQ ID NO: 476884 - DNA, 120 bp, Artificial Sequence
  ENSG00000160360_12 (sequence is synthesized)
gaatggagacagccaccattcaggggactggcgggggcccagcagggactcgctacccctccccgtgaggagcaggaagtaccaggaaggcccggacgctgagaggaggccccgggaggg

SEQ ID NO: 476885 - DNA, 120 bp, Artificial Sequence
  ENSG00000160360_13 (sequence is synthesized)
cagccactccccgctggacagcgccgacgtccgggtgcacgtgccacgcacgagcatcccgagggccccgtcttcggacgaggagtgcttctttgacctgttgaccaagttccagagcag

SEQ ID NO: 476886 - DNA, 120 bp, Artificial Sequence
  ENSG00000160360_14 (sequence is synthesized)
tcgcccagccctcgatgacggcctcgccccagaccgaggaattcttcgacctcatcgccagctcccagagccgccggctggacgaccagcgggccagcgtgggcagcctgccggggctgc

SEQ ID NO: 476887 - DNA, 120 bp, Artificial Sequence
  ENSG00000160360_15 (sequence is synthesized)
gaatcacccacagcaatgcagggcacctccgaggccacggcgagccccaggagccgggggacgacttcttcaacatgctcatcaagtaccagtcctccaggatcgatgaccagcgctgcc

SEQ ID NO: 476888 - DNA, 120 bp, Artificial Sequence
  ENSG00000160360_16 (sequence is synthesized)
cgccacctgacgtactgccccggggccctaccatgccggacgaggacttcttcagcctcattcagagggtgcaggctaagcgcatggacgagcagcgggtggacctcgccgggggcccgg

SEQ ID NO: 476889 - DNA, 120 bp, Artificial Sequence
  ENSG00000160360_17 (sequence is synthesized)
agcagggggcaggcggcccgcccgagccccagcagcagtgccagcctggtgcgagctaaggccctgtgcccaccgccaggcccaccctgcccccactcctggacgccggtctcacagtca

SEQ ID NO: 476890 - DNA, 120 bp, Artificial Sequence
  ENSG00000160360_18 (sequence is synthesized)
cagccacgtcctcccgaggccattgccgaggacaggcactgggcatgcagccccacggcctccccgacccagggcgacaggctcaggccaagctgcccgtggtgggagggcgtgcttcca

SEQ ID NO: 476891 - DNA, 120 bp, Artificial Sequence
  ENSG00000160360_19 (sequence is synthesized)
tcccgggctggcccccatggccctcagcttcctcccttctgcccctgccgcaggccggacggggccttcggcatgtcggccccgacctggtgctgtcagactcccgcatcctctccccca

SEQ ID NO: 476892 - DNA, 120 bp, Artificial Sequence
  ENSG00000160360_20 (sequence is synthesized)
agcccttcccgttctgccctgccctgccaaatgtgaaaccctgctgtctcccccaccctccccaaaggtgtctctgagccgcctcttggggccaccaaggacagggccatgttctgtccc

SEQ ID NO: 476893 - DNA, 120 bp, Artificial Sequence
  ENSG00000160360_21 (sequence is synthesized)
cccagagctggtcttgggatggccgtgtgacaggcatgctccacccctccagcttcgtcctggggcagggctccctccaagcctgtctccccactccccggccagaggtcagcaaccaca

SEQ ID NO: 476894 - DNA, 120 bp, Artificial Sequence
  ENSG00000160360_22 (sequence is synthesized)
gaaggccccccagaccacgcatggcagaccaggctgcagtggcagccctgaggtgccccccgccgagtcccagggccctgcaggggcctcgacaggagccgggcctatctctaaagcaga

SEQ ID NO: 476895 - DNA, 120 bp, Artificial Sequence
  ENSG00000160360_23 (sequence is synthesized)
gggaatggctgggcatgaacttcgacattccaaaaccccaagccaggaaaaagggcagggcctggtcctagggatgcttactggcagcaagagcagtgcccagtcagggtgggaggtagc

SEQ ID NO: 476896 - DNA, 120 bp, Artificial Sequence
  ENSG00000160360_24 (sequence is synthesized)
accaggctctgtgaccctcacccaagtgggggggtggtcagtggaagctggggaggcttcactcagctcaaccctgcagaccccccatatgagaacccccctcctcccaccagctggggg

SEQ ID NO: 476897 - DNA, 120 bp, Artificial Sequence
  ENSG00000160360_25 (sequence is synthesized)
agatgacatcactgctctctccatggggagggggctcacagggcaccaagttcgggatcctaggactggcaggacctgctggagcctgagatgggccccaggggcctgaggttgcctcct

SEQ ID NO: 476898 - DNA, 120 bp, Artificial Sequence
  ENSG00000160360_26 (sequence is synthesized)
cctgtccagacccagccttggcacctcccaagactgccaagggccctaccatggccccacagcccccagggctggcagttccatctaggagggtgcctctaggccccactctcaggctag

SEQ ID NO: 476899 - DNA, 120 bp, Artificial Sequence
  ENSG00000160360_27 (sequence is synthesized)
gatggagaggcagatctgggcctggtgaggtgacctgcttctggaggggcagggccgcacccgagagcagggacaggtgcccgaacacagggtctccaggacgtagcgcccccccgcata

SEQ ID NO: 476900 - DNA, 120 bp, Artificial Sequence
  ENSG00000160360_28 (sequence is synthesized)
cttgaatgtatgtgcgtatttattgctcacgtctgtgccatgttgtcaatgggtcctttccaacccaagaggtacatttgtttttctgtttttcctgaaaaataaagtcggccaagtgag

SEQ ID NO: 476901 - DNA, 120 bp, Artificial Sequence
  ENSG00000160360_29 (sequence is synthesized)
gggaggagggcctggggcctggcgatgccatcccctgctggggagggcccgcctctggccctgagcttggcggagaaggccgtgtgcaaggtggtgtatggcgccccccgcccccgcccg

SEQ ID NO: 476902 - DNA, 120 bp, Artificial Sequence
  ENSG00000160360_30 (sequence is synthesized)
ggcggtggtggccctgggcaccttgtgtcctgcctgcgctctgtgtggccaagcacccagcgtggctccctgctgctgtggagacagcctgtgatccgcagcatcccgagggccccgtct

SEQ ID NO: 476903 - DNA, 120 bp, Artificial Sequence
  ENSG00000160360_31 (sequence is synthesized)
agttccagggttgtgggggggtcttgctccccacaggcacggaccgcatcaggagctgcggaggggtgggatcgaggccaggccagcatggcggaggtggcagccgccagaaaatggcgc

SEQ ID NO: 476904 - DNA, 120 bp, Artificial Sequence
  ENSG00000160360_32 (sequence is synthesized)
ctacaagccagttcttcttggcctcagggacagcacaggcctgaggttcaccctgagcccttcccacccgcatcctgagtggcgctgcagggctgctggatgaaggacaggaggtggtcg

SEQ ID NO: 476905 - DNA, 120 bp, Artificial Sequence
  ENSG00000160360_33 (sequence is synthesized)
cctgttgccccactggctgctccagggcctccacccccacctccccctggagccctcggtgcagggagggcttctgtcctcagacccaagtaggagagggctgctgggaggcgagagggc

SEQ ID NO: 476906 - DNA, 120 bp, Artificial Sequence
  ENSG00000160360_34 (sequence is synthesized)
atcagccagagggctgggctgggctgggctgggctgggctgtgggagccctatgtgcctggggcagtaatcaggcaaggcccaaggccatgcgaggccaccgtggtgacctcattcatgg

SEQ ID NO: 476907 - DNA, 120 bp, Artificial Sequence
  ENSG00000160360_35 (sequence is synthesized)
accgctggtcgtcccatgccggtcagcagtgctgcagacacaggacagaacgtcccctgcaaagcgaaaagactaataggtgccaggggggtggtgccaggttgggccgacttcctgagg

SEQ ID NO: 476908 - DNA, 120 bp, Artificial Sequence
  ENSG00000160360_36 (sequence is synthesized)
tggctggcaggtgggtgaggggcaggcttggggggagcagctgccccacccatgtgtcccccactcccaaaggtcttgagtttgccagcccccgagaagggatgcctgcctcccagaacg

SEQ ID NO: 476909 - DNA, 120 bp, Artificial Sequence
  ENSG00000160360_37 (sequence is synthesized)
tacctggtgccccccaggcctgctaaggaccaggctgggaacaccaggcttggatgtggtgctgggctgccggagtttctttttcttatcttatttttaataattaaatgtttttataga

SEQ ID NO: 476910 - DNA, 120 bp, Artificial Sequence
  ENSG00000160360_38 (sequence is synthesized)
ctgtgtagggcatggacacagggagctcatggcagggctgacacagggtgtggtgggcacagggacaggaggcacgggaggcttcccgggatgtctgggaagtgttccaggccaaggctg

SEQ ID NO: 476911 - DNA, 120 bp, Artificial Sequence
  ENSG00000160360_39 (sequence is synthesized)
gggaggctggcccagggcaggtgacggacagaggcctggactggggtagcacccatgagaggggagaagtccggggcagtcggcgggtgccgaggagcatcccgagggccccgtcttcgg

SEQ ID NO: 476912 - DNA, 120 bp, Artificial Sequence
  ENSG00000160360_40 (sequence is synthesized)
gtgacacgttctgggggaggggtagccgacagggggcaggttagagtcccgatcttggccagggtctcagaagtgtgtgtggcctgggcaagcagcccccggtctcgtctgggggtctgc

SEQ ID NO: 476913 - DNA, 120 bp, Artificial Sequence
  ENSG00000160392_0 (sequence is synthesized)
gggcggtcacgtgatggttatggccgcactctcgctggtggcggcctgttggggtagagcggccgcggacgagtcagttcagcttccggcggctccagggagcagtgtcagggccaggga

SEQ ID NO: 476914 - DNA, 120 bp, Artificial Sequence
  ENSG00000160392_1 (sequence is synthesized)
gacgatggtctccgtgactatggccacttccgagtggatccagttctttaaggaagccggcattcctccaggacctgccgtcaattatgccgtgatgtttgtggataataggattcagaa

SEQ ID NO: 476915 - DNA, 120 bp, Artificial Sequence
  ENSG00000160392_2 (sequence is synthesized)
gagcatgctgctggatctcaataaggagataatgaatgagctgggcgtgaccgtggtgggtgacatcatcgccattctcaagcatgccaaagtggtgcaccgtcaggacatgtgcaaagc

SEQ ID NO: 476916 - DNA, 120 bp, Artificial Sequence
  ENSG00000160392_3 (sequence is synthesized)
tgccactgagtcagtaccctgcagccctagcccccttgcaggcgaaattcgccgtggcaccagtgctgcctcccgaatgatcaccaacagcctgaaccatgactctccacccagcacacc

SEQ ID NO: 476917 - DNA, 120 bp, Artificial Sequence
  ENSG00000160392_4 (sequence is synthesized)
ccccaggcgcccggacaccagcacctccaagatctcggtcactgtgtccaacaagatggcagcaaagagtgccaaggccactgcagccctggcccgccgggaggaggagagcctggctgt

SEQ ID NO: 476918 - DNA, 120 bp, Artificial Sequence
  ENSG00000160392_5 (sequence is synthesized)
tcctgccaagcggcgccgggtcactgctgagatggaggggaagtacgtcatcaacatgcccaaaggcaccacaccccgcacccgcaagatcctggagcagcagcaggctgcaaaaggtct

SEQ ID NO: 476919 - DNA, 120 bp, Artificial Sequence
  ENSG00000160392_6 (sequence is synthesized)
ccataggacgtctgtgtttgaccgcctcggcgccgagaccaaggcagacaccacgacagggagtaaacccacaggagtcttcagccgcctgggggccaccccagaaacggacgaggatct

SEQ ID NO: 476920 - DNA, 120 bp, Artificial Sequence
  ENSG00000160392_7 (sequence is synthesized)
ggcttgggacagcgacaatgacagcagcagctctgtcttgcagtatgccggggtcctgaagaagctaggacggggcccagccaaggccagtccccagccagcactgactgtcaaagccaa

SEQ ID NO: 476921 - DNA, 120 bp, Artificial Sequence
  ENSG00000160392_8 (sequence is synthesized)
ggccacaagctcagcgacaacggctgctgccccgacactgcggcgcctggcgctttcctcacggtctgggcttgagaggaagccggagtccttgtctaaagtcagcatcatcaagagact

SEQ ID NO: 476922 - DNA, 120 bp, Artificial Sequence
  ENSG00000160392_9 (sequence is synthesized)
gggcgcagctgcccttgtgcccgaggcccaggacagccaggtcaccagcaccaagagtaagtcctcagccgaggtcaaggtcaccattaagaggactctggtggggccccgggggagcag

SEQ ID NO: 476923 - DNA, 120 bp, Artificial Sequence
  ENSG00000160392_10 (sequence is synthesized)
ctccagcgagggccttggtgcccagatggaccacgcgggcactgtgagcgtgttcaaaagactgggccgcaggaccttctagcccacctgtgggcggggtgcaggcagcagagcctgcgg

SEQ ID NO: 476924 - DNA, 120 bp, Artificial Sequence
  ENSG00000160392_11 (sequence is synthesized)
gcatctgccctggccgccccaggctcctggcttcatcacgcctcccaccagctcctggatgacacagcttgtctccctcgggctctagagctaggcccgagcattcgggggatcacccca

SEQ ID NO: 476925 - DNA, 120 bp, Artificial Sequence
  ENSG00000160392_12 (sequence is synthesized)
tttctcctagcctgggatggtcgtcgcagctggcctggcctgctccaggactccccttctctcatgtcctctgtgctttcttctctggctgtggccttggcagaacccacttttctacct

SEQ ID NO: 476926 - DNA, 120 bp, Artificial Sequence
  ENSG00000160392_13 (sequence is synthesized)
ctcccaagtgccagggggcttcttcctctcctacattccccttcttcccctgagcagggtctgctgcctcagaccccagctcatcagcctccctgtccccctcaactaagtgggtgtcac

SEQ ID NO: 476927 - DNA, 120 bp, Artificial Sequence
  ENSG00000160392_14 (sequence is synthesized)
ctggtgggcctcccttcccccactccccactgacctccctcactcctctgcgcctccccccactgctgtgacttctctctctccctgtcttcactttgttcatttctcttctgttttctg

SEQ ID NO: 476928 - DNA, 120 bp, Artificial Sequence
  ENSG00000160392_15 (sequence is synthesized)
gcgtcctgcccgaccctcctgtacctccggcctcccagcggccccctcgtcggcggtggcgtcgagcctgttgagactgttagccgccctctactcccaggctggagggacctctccaga

SEQ ID NO: 476929 - DNA, 120 bp, Artificial Sequence
  ENSG00000160392_16 (sequence is synthesized)
ccctgggctgcggctgaggcgcatccgttttcctgccctgggcatctgtctctgaaagtgtatggcgggtggtgggcaaggggcactgggaagggaggccagtgcctagagtgaagacag

SEQ ID NO: 476930 - DNA, 120 bp, Artificial Sequence
  ENSG00000160392_17 (sequence is synthesized)
ctgctgttttaatatatttttgtgactttcaaatcatttcccccactccttcagggtgagttgcaggactgtttcacactatgcgcagctgggctggggatggtggcagaggattgggct

SEQ ID NO: 476931 - DNA, 120 bp, Artificial Sequence
  ENSG00000160392_18 (sequence is synthesized)
gtgtctctaaaggtcaggcttcctgcacacacatggtccatgtccctgctgcaagccctgagtcagggggagtaatggccacagtcaccattcagttaggccgccccctgcccccaataa

SEQ ID NO: 476932 - DNA, 120 bp, Artificial Sequence
  ENSG00000160392_19 (sequence is synthesized)
gccgtagtggttttgtcactctatcccctccccccatggatttcacctgcctgctggcacctttccaaatgatgggctccgtttgtgagaccatgagtttccactggtttggtcgcccac

SEQ ID NO: 476933 - DNA, 120 bp, Artificial Sequence
  ENSG00000160392_20 (sequence is synthesized)
ccctccctgctgcacagcgcccctgagccaggcctgtcctaggagctggtagcaggtagtgagcagggcctctccagggatggggtgtaggtaaagcggtggtgctggccaaggaatctg

SEQ ID NO: 476934 - DNA, 120 bp, Artificial Sequence
  ENSG00000160392_21 (sequence is synthesized)
aggagtgggagaaagtggccagggccgcttcagtggttgtggataggaaggccttgcagaaggggtgacatggaggccaagttgggaatgtggcttcatgaagttcaggaggagagcttt

SEQ ID NO: 476935 - DNA, 120 bp, Artificial Sequence
  ENSG00000160392_22 (sequence is synthesized)
cagacagagggacagccaggggcagaggtgctgaggtgggacaaggaacaggaagaaggctggtggctgtgggtgagggtgggccctgcctccagcatgaggcagaggtgggtgggcagg

SEQ ID NO: 476936 - DNA, 120 bp, Artificial Sequence
  ENSG00000160392_23 (sequence is synthesized)
ggctaggtggctgggggtgttgtgatcaaggaggaggaatgtgcacagtgacccgggagtgctggatcgggaggatttggagctgggatgtgctgagctgagtttcatttaggatcatcg

SEQ ID NO: 476937 - DNA, 120 bp, Artificial Sequence
  ENSG00000160392_24 (sequence is synthesized)
ctctggcttctgtgaggagaaggaatggctgggagggctggggtggatgccactgcagcagtccaggcaggaagccaggatggctgcgagggcatggcagtggggagcagggaagagggc

SEQ ID NO: 476938 - DNA, 120 bp, Artificial Sequence
  ENSG00000160392_25 (sequence is synthesized)
cgcttgggctgcttagggtgtgctttggaggaagagctgtgggatgtgctgatgggttggaagttggggctagagaagatgagaatcatagggcccgcctagatgttagaccggagcatc

SEQ ID NO: 476939 - DNA, 120 bp, Artificial Sequence
  ENSG00000160392_26 (sequence is synthesized)
tgggggaacggctgttaacagagaaggggagacgggaggaaggtcaaggaagagggagctgtgttctgactgcattgcgcctgttagggtccccgctggggctcaggcggacacctgggc

SEQ ID NO: 476940 - DNA, 120 bp, Artificial Sequence
  ENSG00000160392_27 (sequence is synthesized)
ggacacctgggctgggggttcatggctgctgacagtgcgcagggtacagctggaatcaaagccaagggccttggctgggcgtggtggcttacgcttgtaatcccagcagtttgggaggcc

SEQ ID NO: 476941 - DNA, 86 bp, Artificial Sequence
  ENSG00000160392_28 (sequence is synthesized)
ggggattacaggtacaccctgccatgcctggcccatgttccataaattttttgttgagatcttctcatattaatgcaggtagatct

SEQ ID NO: 476942 - DNA, 120 bp, Artificial Sequence
  ENSG00000160392_29 (sequence is synthesized)
ttttttgttgagatcttctcatattaatgcaggtagatcttcttcattcttttttcaatggttgtttattatttccagagtattcatataccataatttagtaaccattctattgatggc

SEQ ID NO: 476943 - DNA, 120 bp, Artificial Sequence
  ENSG00000160392_30 (sequence is synthesized)
tattaggttataatttaggggaggatgcactaccactcatcagattctctcagaggtccctgaccccaagaagtgaaaggaacatgcaggcactaagaactcttcccgtgcacacagttc

SEQ ID NO: 476944 - DNA, 120 bp, Artificial Sequence
  ENSG00000160392_31 (sequence is synthesized)
atgagctagtgctgaggtgtagggaatctgccacttgtagctggtctttcccacatttggctctagccagataggggtgggttagggtcagtgtgagccaacagtgtagacataacaccc

SEQ ID NO: 476945 - DNA, 120 bp, Artificial Sequence
  ENSG00000160392_32 (sequence is synthesized)
aactcagcacagtctggccctgcctgtcccagagctactggtgtctgggctgccttggtgtctgtacagagctcagcctaggcctggcccaccggggcctctccctgatggcttcacttc

SEQ ID NO: 476946 - DNA, 120 bp, Artificial Sequence
  ENSG00000160392_33 (sequence is synthesized)
aaaaaaaaaattgagcagaagccagagaagggcaagattaaccctagtgaggatagagaagagagtctcatatgtggggacttagggaaagtgtcacaaagtagatggcagtggagcaga

SEQ ID NO: 476947 - DNA, 120 bp, Artificial Sequence
  ENSG00000160392_34 (sequence is synthesized)
aggaaggataggttgccaggaggagacaggcattccaggcacaggtgacatcctctaaaaactgggaggccggcaaagcacctgtgtggggaaggaggcctggaggatgagaccaggcac

SEQ ID NO: 476948 - DNA, 120 bp, Artificial Sequence
  ENSG00000160392_35 (sequence is synthesized)
aacacctccagggtgcttagtaggcaccaagcactgtctcaagtgcttttattcatagaaactcatccagcccttatagcagtcctctaaggctccagggagcagtgtcagggccaggga

SEQ ID NO: 476949 - DNA, 120 bp, Artificial Sequence
  ENSG00000160392_36 (sequence is synthesized)
gacagttggcgccgccgggagggagggcgggcggcgcgagtgggcgcgggcccggtgggccaggctccagggagcagtgtcagggccagggagacgatggtctccgtgactatgggtgag

SEQ ID NO: 476950 - DNA, 64 bp, Artificial Sequence
  ENSG00000160392_37 (sequence is synthesized)
tcccgaatgatcaccaacagcctgaaccatgactctccacccagcacaccccccaggcgcccgg

SEQ ID NO: 476951 - DNA, 120 bp, Artificial Sequence
  ENSG00000160396_0 (sequence is synthesized)
actcaacagcgctggaacccattcggtggggcctggggcccctcatcccaagccaggagggtttctggggaggggtgcagcccctggcagactgacagtgtggcctgggggtttgggggt

SEQ ID NO: 476952 - DNA, 120 bp, Artificial Sequence
  ENSG00000160396_1 (sequence is synthesized)
gccagggaagcaggggccaacctcataggaggagacacgagtgcggttctctttcccccactggggggcctgctgtgtcagcagccaggcgggaggcctgggcggcagagccagtggtac

SEQ ID NO: 476953 - DNA, 120 bp, Artificial Sequence
  ENSG00000160396_2 (sequence is synthesized)
aggggcctgggcagggcggtgtctggcagcagcggcaccatgtccaccatccagtcggagactgactgctacgacatcatcgaggtcttgggcaaggggaccttcggggaggtagccaag

SEQ ID NO: 476954 - DNA, 120 bp, Artificial Sequence
  ENSG00000160396_3 (sequence is synthesized)
ggctggcggcggagcacgggcgagatggtggccatcaagatcctcaagaatgacgcctaccgcaaccgcatcatcaagaacgagctgaagctgctgcactgcatgcgaggcctagaccct

SEQ ID NO: 476955 - DNA, 120 bp, Artificial Sequence
  ENSG00000160396_4 (sequence is synthesized)
gaagaggcccacgtcatccgcttccttgagttcttccatgacgccctcaagttctacctggtctttgagctgctggagcaaaaccttttcgagttccagaaggagaacaacttcgcgccc

SEQ ID NO: 476956 - DNA, 120 bp, Artificial Sequence
  ENSG00000160396_5 (sequence is synthesized)
ctccccgcccgccacatccgtacagtcaccctgcaggtgctcacagccctggcccggctcaaggagctggctatcatccacgctgatctcaagcctgagaacatcatgctggtggaccag

SEQ ID NO: 476957 - DNA, 120 bp, Artificial Sequence
  ENSG00000160396_6 (sequence is synthesized)
acccgctgccccttcagggtcaaggtgattgacttcggatccgccagcattttcagcgaggtgcgctacgtgaaggagccatacatccagtcgcgcttctaccgggcccctgagatcctg

SEQ ID NO: 476958 - DNA, 120 bp, Artificial Sequence
  ENSG00000160396_7 (sequence is synthesized)
ctggggctgcccttctgcgagaaggtggacgtgtggtccctgggctgcgtcatggctgagctgcacctgggctggcctctctaccccggcaacaacgagtacgaccaggtgcgctacatc

SEQ ID NO: 476959 - DNA, 120 bp, Artificial Sequence
  ENSG00000160396_8 (sequence is synthesized)
tgcgaaacccagggcctgcccaagccacacctgttgcacgccgcctgcaaggcccaccacttcttcaagcgcaacccccaccctgacgctgccaacccctggcagctcaagtcctcggct

SEQ ID NO: 476960 - DNA, 120 bp, Artificial Sequence
  ENSG00000160396_9 (sequence is synthesized)
gactacctggccgagacgaaggtgcgcccattggagcgccgcaagtatatgctcaagtcgttggaccagattgagacagtgaatggtggcagtgtggccagtcggctaaccttccctgac

SEQ ID NO: 476961 - DNA, 120 bp, Artificial Sequence
  ENSG00000160396_10 (sequence is synthesized)
tgatcaagcgcatgctgacctgggagtcacacgaacgcatcagccccagtgctgccctgcgccaccccttcgtgtccatgcagcagctgcgcagtgcccacgagaccacccactactacc

SEQ ID NO: 476962 - DNA, 120 bp, Artificial Sequence
  ENSG00000160396_11 (sequence is synthesized)
agctctcgctgcgcagctaccgcctctcgctgcaagtggaggggaagccccccacgcccgtcgtggccgcagaagatgggaccccctactactgtctggctgaggagaaggaggctgcgg

SEQ ID NO: 476963 - DNA, 120 bp, Artificial Sequence
  ENSG00000160396_12 (sequence is synthesized)
gtatgggcagtgtggccggcagcagccccttcttccgagaggagaaggcaccaggtatgcaaagagccatcgaccagctggatgacctgagtctgcaggaggctgggcatgggctgtggg

SEQ ID NO: 476964 - DNA, 120 bp, Artificial Sequence
  ENSG00000160396_13 (sequence is synthesized)
gtgagacctgcaccaatgcggtctccgacatgatggtccccctcaaggcagccatcactggccaccatgtgcccgactcgggccctgagcccatcctggccttctacagcagccgcctgg

SEQ ID NO: 476965 - DNA, 120 bp, Artificial Sequence
  ENSG00000160396_14 (sequence is synthesized)
caggccgccacaaggcccgcaagccacctgcgggttccaagtccgactccaacttcagcaacctcattcggctgagccaggtctcgcctgaggatgacaggccctgccggggcagcagct

SEQ ID NO: 476966 - DNA, 120 bp, Artificial Sequence
  ENSG00000160396_15 (sequence is synthesized)
gggaggaaggagagcatctcggggcctctgctgagccactggccatcctgcagcgagatgaggatgggcccaacattgacaacatgaccatggaagctgagaggccagaccctgagctct

SEQ ID NO: 476967 - DNA, 120 bp, Artificial Sequence
  ENSG00000160396_16 (sequence is synthesized)
tcgaccccagcagctgtcctggagaatggctgagtgagccagactgcaccctggagagcgtcaggggcccacgggctcaggggctcccaccccgccgctcccaccagcatggtccacccc

SEQ ID NO: 476968 - DNA, 120 bp, Artificial Sequence
  ENSG00000160396_17 (sequence is synthesized)
ggggggccaccagcttcctccagcatgtcaccgggcaccactgatggtgattccacccctgcccatcactgggggctgcgctagctgggctggcattccctcccaacctgaactgctcct

SEQ ID NO: 476969 - DNA, 120 bp, Artificial Sequence
  ENSG00000160396_18 (sequence is synthesized)
cagagccatctcctgaacccacaaattattcttacagaaagatagttatccagaaattctcattccccgtctgcggtgcggtgcgtgcctgcacacctctcctaaacacagcagggcttt

SEQ ID NO: 476970 - DNA, 120 bp, Artificial Sequence
  ENSG00000160396_19 (sequence is synthesized)
ggagtctggcccatgctccttggccagaaggacagcaggaaagggggctgcaccccgctggccctgcgctcgcccttggccctgctgcctctgtctatttcaatatagaactgttcagca

SEQ ID NO: 476971 - DNA, 120 bp, Artificial Sequence
  ENSG00000160401_0 (sequence is synthesized)
acctggcctcttcctggggcctggagccctggttgccatcagccatggctcccaaaaagagtgtgagcaaggcaggcaaggagcttgaagtcaagaagaaagggggcaagaaggagccgg

SEQ ID NO: 476972 - DNA, 120 bp, Artificial Sequence
  ENSG00000160401_1 (sequence is synthesized)
tggtggccgtggagccgcctctggccaaggagatgaaggagttctaccacatccagatccgagacctggaggaccggctagcccggtaccagcggaagtgggatgagctggctgtgcagg

SEQ ID NO: 476973 - DNA, 120 bp, Artificial Sequence
  ENSG00000160401_2 (sequence is synthesized)
agaagatgttccgccaggagtttgagcagctggccaataacaagaaggagattgtggccttcctcaagcgcacgctcaaccagcaggtggatgagatcacagacctcaacgagcagctcc

SEQ ID NO: 476974 - DNA, 120 bp, Artificial Sequence
  ENSG00000160401_3 (sequence is synthesized)
agaacttgcagctagccaaagagatggagaaggatgccttcgaggcgcagctggcccaggtgcgccacgagttccaggagaccaaggaccagctcaccacggagaacatcatccttgggg

SEQ ID NO: 476975 - DNA, 120 bp, Artificial Sequence
  ENSG00000160401_4 (sequence is synthesized)
ggaagctggcagccctggaggagttccggctgcagaaagaggaggtcacggacaagttcacattgctggaggagcaggtgcggaagcaggagaatgagttcagggactatgcatacaacc

SEQ ID NO: 476976 - DNA, 120 bp, Artificial Sequence
  ENSG00000160401_5 (sequence is synthesized)
tggagaagaagtcggtgctggacaaggacagactgaggaaagagatcatccagcgcgtgaacctcgtggccaatgagttccacaaggtgaccacgaaccggatgtgggagacaaccaagc

SEQ ID NO: 476977 - DNA, 120 bp, Artificial Sequence
  ENSG00000160401_6 (sequence is synthesized)
gggccatcaaagagaacaacggcattaccctgcagatggccagggtctcccagcaaggcatgaagctgctgcaggagaatgagcagctcaagggaagacagaacaatctgtgcaaacagc

SEQ ID NO: 476978 - DNA, 120 bp, Artificial Sequence
  ENSG00000160401_7 (sequence is synthesized)
tggagctgctggagaacacccagaaggtcatggccaggcacaaaagaggccaccagaagatcatcctcatgctgactaagaagtgccaggagcagcagcaggacaccaaggaggccgagg

SEQ ID NO: 476979 - DNA, 120 bp, Artificial Sequence
  ENSG00000160401_8 (sequence is synthesized)
agctgcgcctcctgctgagccagttggagcagagatccctgcagctgcaggtggataaccaggcactgaagagccagagagaccagctgagcctgcagctggagcagcagcaggtggatt

SEQ ID NO: 476980 - DNA, 120 bp, Artificial Sequence
  ENSG00000160401_9 (sequence is synthesized)
tgcagcggctacagcaggaactggctaatgagcagaaggttcgggccagcctggaggcggctctggtccaggccacctccttcctacagaacattctgcagatgcaccgcgatgaagagg

SEQ ID NO: 476981 - DNA, 120 bp, Artificial Sequence
  ENSG00000160401_10 (sequence is synthesized)
acagtgacgttgacgtgacgttccagccatggcacaaggagatgctgcagcaactgctggtcatgctcagctccactgtggccacgagacctcagaaggctgcgtgtccccaccaggagt

SEQ ID NO: 476982 - DNA, 120 bp, Artificial Sequence
  ENSG00000160401_11 (sequence is synthesized)
cacagtcccatggcccacccaaggagagccggcccagcatccagctgcccaggactgggtctctgctgccgcagctctctgacatcaccccctaccagccgggggatctaggcctggtac

SEQ ID NO: 476983 - DNA, 120 bp, Artificial Sequence
  ENSG00000160401_12 (sequence is synthesized)
ctcgccaggtccacatcccacccaacccccaggacctcaggctgctgtcatatatcacccgtgtggggaccttccgggcacacagcagccctgagatgcgtgcccctggttctctaaaaa

SEQ ID NO: 476984 - DNA, 120 bp, Artificial Sequence
  ENSG00000160401_13 (sequence is synthesized)
ggcttgaaaagtttagtcttcctgaagttcccctacgtcccaagtaggacacagagagaagaacctactccagaaatggactggtccagtcacagtcacccccactttaatccgcaggca

SEQ ID NO: 476985 - DNA, 120 bp, Artificial Sequence
  ENSG00000160401_14 (sequence is synthesized)
gcctggaacagtctagaggagatttgtataaaaagtagataccaaggctggcgtggcagctctgtggcagtggctgggttggtgggcactacagtcaggcaggcagccatggccactagt

SEQ ID NO: 476986 - DNA, 120 bp, Artificial Sequence
  ENSG00000160401_15 (sequence is synthesized)
gagaagcagcccagcacatgggcctgaaccgcctcagggtgcgccgggcgcccgatacccacccgcagccttggcattgcctgtgggagagccagagaggcccaggaagctttggcgagg

SEQ ID NO: 476987 - DNA, 120 bp, Artificial Sequence
  ENSG00000160401_16 (sequence is synthesized)
tgctgggggacccctggcccacccgacccagttgcacaacaaaagggtagactcacattggagttgaggcagctaatgcaggaacggactccattgtggccccttcaagggatatgggag

SEQ ID NO: 476988 - DNA, 120 bp, Artificial Sequence
  ENSG00000160401_17 (sequence is synthesized)
gggcagttagtgcctccctggggcagtgtccttccacccctccctgccccggctgggtcagagcagcccatttcctgtggagactgggtcagcagccctactccaccccaactgggaggc

SEQ ID NO: 476989 - DNA, 120 bp, Artificial Sequence
  ENSG00000160401_18 (sequence is synthesized)
ctgaagccctatcccaaccctgaccatctcaggacctcacctggcactgccccccagcttcagagccagtctccccaggggcttgtccagctcatcatgcaccaggtagacttcctcggc

SEQ ID NO: 476990 - DNA, 120 bp, Artificial Sequence
  ENSG00000160401_19 (sequence is synthesized)
agtcagcccaaacagctccgcttagcacagggaaacggcagccctggttactgcccatctgcccagagaggcactgtcccgactcccatgatgagggaccacaactaatcccacttcaca

SEQ ID NO: 476991 - DNA, 120 bp, Artificial Sequence
  ENSG00000160401_20 (sequence is synthesized)
tataaagaaactgaggccccccgaagtacccaaagccatgcagcaactggagctcaacaggtacttggaggtgaacccgcggatctgtcacagccagtgctcccctctggcccccgcgcc

SEQ ID NO: 476992 - DNA, 120 bp, Artificial Sequence
  ENSG00000160401_21 (sequence is synthesized)
ccaacccccacccccttggcccgcccgcccacccctggcgctctcaactcaccagcccgggccacgctgcgcccgttggcgttcataagccgccgtggccggagcaggaccagttgggca

SEQ ID NO: 476993 - DNA, 120 bp, Artificial Sequence
  ENSG00000160401_22 (sequence is synthesized)
tcccccagcggggccagggcgaggtcggcggcacagtgccggtcgcgcgtccaactctccgccacacccagccgccgcgccagctgccccagcaccgccatgcccacgctgtgtcgcgtg

SEQ ID NO: 476994 - DNA, 120 bp, Artificial Sequence
  ENSG00000160401_23 (sequence is synthesized)
ccgggcagtccgggattccccaggccagccacctgcgggcggcaccagggaaactgaggcccaacaactctcgccacccccgatctcacagcgtcccgtgggccccaacgcagaggagcg

SEQ ID NO: 476995 - DNA, 120 bp, Artificial Sequence
  ENSG00000160401_24 (sequence is synthesized)
gaaacgcagagcaacgctgcagtggggaaggggcgcgaagaaggggcccagaaacccgacccctgagaactccagaaggctgggcaggcagggcgccctagtgcaggaacggagcttcaa

SEQ ID NO: 476996 - DNA, 120 bp, Artificial Sequence
  ENSG00000160401_25 (sequence is synthesized)
gaagtttggagcccgtcgagcactgaactcaccagttaagaaaacagagcagcaatttgggggcactcggctcccgggacataatggccgaactgaagctagggaccgggagcccctacg

SEQ ID NO: 476997 - DNA, 120 bp, Artificial Sequence
  ENSG00000160401_26 (sequence is synthesized)
tcgccgccccacgccactcaccatccaccgcttccccggggggcgaggctccaaaacacatcggctcatggctctactcagccgctgtccggcgcccaaaaagccgcccggcctcatgct

SEQ ID NO: 476998 - DNA, 120 bp, Artificial Sequence
  ENSG00000160401_27 (sequence is synthesized)
gcccccattcactccgacaccgccccctgacgtcatcaccccgcagcagccaatcgtgttgccaactgtttggcgtccaccgccaacgtccaatccgggccgggctacgtggccgccatg

SEQ ID NO: 476999 - DNA, 120 bp, Artificial Sequence
  ENSG00000160401_28 (sequence is synthesized)
cttctgaggggcggaagcggcgaggcggtggccgagtccgggaacccaggcgccttcagtagcgcggcgtcacagtgtcccttcgggacttgtgtgggacgctcggagctcttgcttgac

SEQ ID NO: 477000 - DNA, 120 bp, Artificial Sequence
  ENSG00000160401_29 (sequence is synthesized)
cttcggttgggaggccttgttatgccccccgctatggccctgacttgcggcgaaaatctggcaagtcctttccccgctgtaggcctcaacctctccagctaataaaagttttctacctcc

SEQ ID NO: 477001 - DNA, 120 bp, Artificial Sequence
  ENSG00000160401_30 (sequence is synthesized)
gaacattctgcaggtgagcagaagggagagagggagggcgcaaggggagggggagtgagcgcaagatggaagctgcttgcagagaaggggctgcctcaggatcagaggcccctcttttcc

SEQ ID NO: 477002 - DNA, 120 bp, Artificial Sequence
  ENSG00000160401_31 (sequence is synthesized)
ctgagagactcctggaaagtctgtccttcgctgattctggccttcaaagatccctccaaggtcttaaaggagctggattccttctctgaggctctgaaaggtcttgggcctcagtcttcc

SEQ ID NO: 477003 - DNA, 120 bp, Artificial Sequence
  ENSG00000160401_32 (sequence is synthesized)
cgactgaagaatgggtatcccaccacagacagggaaaacttcgtggaaatgggcactgaggttggaatttcctggacgagggtgggtactggggccactgtgggcctgctgccaccccac

SEQ ID NO: 477004 - DNA, 120 bp, Artificial Sequence
  ENSG00000160401_33 (sequence is synthesized)
tcctgctgagccagttggagcagagatccctgcagctgcaggtggataaccaggcactgaagtgcgtatggcccacggaggggcgggcggcgggtgcaggctggggccaagctctggccc

SEQ ID NO: 477005 - DNA, 120 bp, Artificial Sequence
  ENSG00000160401_34 (sequence is synthesized)
agctctttccgatcccacgacccaggccagtgacttcccctctctagaggagcctgccagacaggctgaggcttggggcgggatgggggcccctgtgggcttggagagaaatggcagggc

SEQ ID NO: 477006 - DNA, 120 bp, Artificial Sequence
  ENSG00000160401_35 (sequence is synthesized)
catatatcacccgtgtggggaccttccgggcacacagcagccctgagcagggaaagagtgggatccccctgaagaggcctcagcttccaagccagcatctttcttttttttttttttttt

SEQ ID NO: 477007 - DNA, 120 bp, Artificial Sequence
  ENSG00000160404_0 (sequence is synthesized)
tgcgacgcgcggctgccggccctggggctcgctcctcgggctgctcgggctggtctcggccgcggccgccgcctgggacctggcttccctgcgctgcaccttgggcgccttttgcgaatg

SEQ ID NO: 477008 - DNA, 120 bp, Artificial Sequence
  ENSG00000160404_1 (sequence is synthesized)
ctgcgctgcaccttgggcgccttttgcgaatgcgacttccggcccgacttgccgggtctggagtgtgacctggctcagcacctggccggccagcatctggccaaggcgctggtggtgaag

SEQ ID NO: 477009 - DNA, 120 bp, Artificial Sequence
  ENSG00000160404_2 (sequence is synthesized)
gcgctgaaggcctttgtgcgggacccagcccccaccaagccgctggtcctctccctgcacggctggaccggcaccggcaaatcctatgtcagctccctgctggcgcactacctcttccag

SEQ ID NO: 477010 - DNA, 120 bp, Artificial Sequence
  ENSG00000160404_3 (sequence is synthesized)
ggcggcctccgcagcccccgcgtgcaccacttttctcccgtcctccacttcccccaccccagccacatcgagcgctacaagaaggatctgaagagctgggtccaagggaacctcactgcc

SEQ ID NO: 477011 - DNA, 120 bp, Artificial Sequence
  ENSG00000160404_4 (sequence is synthesized)
tgtggccgctccctcttcctcttcgatgagatggacaagatgcccccaggcctgatggaagtcctgcggcctttcctgggctcctcctgggtggtatacgggaccaattaccgcaaagcc

SEQ ID NO: 477012 - DNA, 120 bp, Artificial Sequence
  ENSG00000160404_5 (sequence is synthesized)
atcttcatcttcatcagcaacacgggtggcaagcagatcaaccaggtggcattggaggcgtggcgcagccggcgggaccgcgaggagatcctcctgcaggagctggagccggtcatctcc

SEQ ID NO: 477013 - DNA, 120 bp, Artificial Sequence
  ENSG00000160404_6 (sequence is synthesized)
ctcctagacgcagtggtgcccttcctcccgctccagcggcaccacgtccggcactgcgtgctcaacgagctggcccagctgggcctggagccaagggatgaggttgtccaggctgtgctg

SEQ ID NO: 477014 - DNA, 120 bp, Artificial Sequence
  ENSG00000160404_7 (sequence is synthesized)
gacagcaccaccttcttccctgaagacgagcagctcttctcctccaacggctgcaagaccgtggcctcccgaatcgccttcttcctctgactctctgagtggtgtcctcggcccccctga

SEQ ID NO: 477015 - DNA, 120 bp, Artificial Sequence
  ENSG00000160404_8 (sequence is synthesized)
tggccaggccatgcaggaaaggccaggggcctctgtcacaggaacccagagcaccaagtgagatgaacggagtgtcggctaggccacgggacagatggccaggaagggccctggcctcta

SEQ ID NO: 477016 - DNA, 120 bp, Artificial Sequence
  ENSG00000160404_9 (sequence is synthesized)
aactggctcgagagcatcttggccccggccaccttccccagggaaacccctggtcaccccagaacctcactgagccttgacctccccctgcagcctgagccttcttactgtgaattataa

SEQ ID NO: 477017 - DNA, 120 bp, Artificial Sequence
  ENSG00000160404_10 (sequence is synthesized)
ctcagggactgtggctcgtggcggtgctccctcctcagtctgccacccttgccccttgcctccttggtcgggcaccatacctcctcccctccaccccacaccctgtgtccatatcaagcc

SEQ ID NO: 477018 - DNA, 120 bp, Artificial Sequence
  ENSG00000160404_11 (sequence is synthesized)
aggtggagccttctcagtttccagaaatggagggactcaagctgccacttgggcctggttttagatgtttttaattttgtaaaagaaaacaagtataataaactcagctgtgggaccaga

SEQ ID NO: 477019 - DNA, 120 bp, Artificial Sequence
  ENSG00000160404_12 (sequence is synthesized)
tcaccccacacccaggggccaggctctcccggggtctcatgctttgcccactgacccggcagttctgagcctggctttggcactcccagctttgtgactttgggtgagccttacagcccc

SEQ ID NO: 477020 - DNA, 120 bp, Artificial Sequence
  ENSG00000160404_13 (sequence is synthesized)
tgagtcctacacccagaaggcggctgagggaactgaggccagcatttttcctcctgcccctgggggtttggggccggcttctcccctcttgtgaagcacaaagtcccctccccacctacc

SEQ ID NO: 477021 - DNA, 120 bp, Artificial Sequence
  ENSG00000160404_14 (sequence is synthesized)
ggagcgctgggagccctgggagcccggctggcgccggccagagaagctgaggacccagagggtgggaccgaggggcggggcccgcagacttgggagggtggagggtacccgttgaggtcc

SEQ ID NO: 477022 - DNA, 120 bp, Artificial Sequence
  ENSG00000160404_15 (sequence is synthesized)
aggaggccctgccaacctggagagaggcctcagccagcagaacccttggtggaagttcttgggcctccccggaatggcctggccgtcaaaggagaagtgcagtgcgccttggggatgggc

SEQ ID NO: 477023 - DNA, 120 bp, Artificial Sequence
  ENSG00000160404_16 (sequence is synthesized)
ggggtctgcggctgaccccgttgacagctcgcatttagagctgagtgcaatctagaggaccgcctggtgggggcgctgccgagctgaatcaggcccgaaggtggctcttttccgccacag

SEQ ID NO: 477024 - DNA, 120 bp, Artificial Sequence
  ENSG00000160404_17 (sequence is synthesized)
accccaaggtttgcgtgccatgtgcataggcagcttggacaaacgtaaggacacaggagtcccagaccaggttccagacatgatgttctccttgaacctctgcctcggtgggatgtgtcc

SEQ ID NO: 477025 - DNA, 120 bp, Artificial Sequence
  ENSG00000160404_18 (sequence is synthesized)
gacaggggagtcacctgctccaggccacacacggctgcagccccagccctcaggacccatcctgcacagaacttgggaaggtgtcattctacctggcagggagtactttgattccttggg

SEQ ID NO: 477026 - DNA, 120 bp, Artificial Sequence
  ENSG00000160404_19 (sequence is synthesized)
gcagtaaggaaccctggcagtacctacatgccagggttgttgtgagggacatgagattataccattgcagatatcatttatggagcacctatgtttgtcagataatctgcactgttgtct

SEQ ID NO: 477027 - DNA, 120 bp, Artificial Sequence
  ENSG00000160404_20 (sequence is synthesized)
tgctggaaatcagccccaatttgtggctcagaggaagcatcaggaaatattggctcttactactactgttgttgattgcagggtacccaccaggctgatcagtttcagccgtcaacactg

SEQ ID NO: 477028 - DNA, 120 bp, Artificial Sequence
  ENSG00000160404_21 (sequence is synthesized)
ctgtgtagtttcagggagcaggaaggagccttccccttttatagaaagcagcaagtgtcgtggaaggagctctgaacagggaagtgggaggcttgggtttgagtccctgttctgactggc

SEQ ID NO: 477029 - DNA, 120 bp, Artificial Sequence
  ENSG00000160404_22 (sequence is synthesized)
tgtgtgactttgggcaagtctctgccccaatctgggatacagtttcaccatcagtctcactaagaggttggtgctctctggaagaccacatccttccctagaaaggagattagttttggt

SEQ ID NO: 477030 - DNA, 120 bp, Artificial Sequence
  ENSG00000160404_23 (sequence is synthesized)
ttgcagtgggcacagtgggggggccacttctcagaggttcagctctacagccttagcctgtgctcccagcagaatccagttccccatgggcttagctgggctttcccagtgccctccgcc

SEQ ID NO: 477031 - DNA, 120 bp, Artificial Sequence
  ENSG00000160404_24 (sequence is synthesized)
actctcagagatgacattgtcattccgcctggttgatttccctttggacattctcagcaaattctgggctcagtctttttgatcgccacttctttgtggaagccctgccaggtcaagaag

SEQ ID NO: 477032 - DNA, 120 bp, Artificial Sequence
  ENSG00000160404_25 (sequence is synthesized)
ttttccctcttttgtggtgaggaggacacaggcctgggaaaaataggaacagagttcttgtcctttagtcccagctctcagaatcctcgctgtgtttcctcaggcagcatggctccgcct

SEQ ID NO: 477033 - DNA, 120 bp, Artificial Sequence
  ENSG00000160404_26 (sequence is synthesized)
ctctgagcctctgtctctgcttctgaacagcggggccaataatgatgccccgatgccttcctggaagttcagtgagggaaagtcagttgagggacacaaaagtgttttgtaaactataaa

SEQ ID NO: 477034 - DNA, 120 bp, Artificial Sequence
  ENSG00000160404_27 (sequence is synthesized)
gtacgtggcatgtgtaggtgaattacaggggccatggatgtggacaccatggagggggaagtggagcgttttcagtggagttggctcctccccgcactgagccatgttcctatgtcaggt

SEQ ID NO: 477035 - DNA, 120 bp, Artificial Sequence
  ENSG00000160408_0 (sequence is synthesized)
atggcttgctcgaggccccccagccagtgtgaacccacatccctgcccccagggccacctgcaggacgccgacacctacccctcagcagacgccggagagaaatgagtagcaacaaagag

SEQ ID NO: 477036 - DNA, 120 bp, Artificial Sequence
  ENSG00000160408_1 (sequence is synthesized)
cagcggtcagcagtgttcgtgatcctctttgccctcatcaccatcctcatcctctacagctccaacagtgccaatgaggtcttccattacggctccctgcggggccgtagccgccgacct

SEQ ID NO: 477037 - DNA, 120 bp, Artificial Sequence
  ENSG00000160408_2 (sequence is synthesized)
gtcaacctcaagaagtggagcatcactgacggctatgtccccattctcggcaacaagacactgccctctcggtgccaccagtgtgtgattgtcagcagctccagccacctgctgggcacc

SEQ ID NO: 477038 - DNA, 120 bp, Artificial Sequence
  ENSG00000160408_3 (sequence is synthesized)
aagctgggccctgagatcgagcgggctgagtgtacaatccgcatgaatgatgcacccaccactggctactcagctgatgtgggcaacaagaccacctaccgcgtcgtggcccattccagt

SEQ ID NO: 477039 - DNA, 120 bp, Artificial Sequence
  ENSG00000160408_4 (sequence is synthesized)
gtgttccgcgtgctgaggaggccccaggagtttgtcaaccggacccctgaaaccgtgttcatcttctgggggcccccgagcaagatgcagaagccccagggcagcctcgtgcgtgtgatc

SEQ ID NO: 477040 - DNA, 120 bp, Artificial Sequence
  ENSG00000160408_5 (sequence is synthesized)
cagcgagcgggcctggtgttccccaacatggaagcatatgccgtctctcccggccgcatgcggcaatttgacgacctcttccggggtgagacgggcaaggacagggagaagtctcattcg

SEQ ID NO: 477041 - DNA, 120 bp, Artificial Sequence
  ENSG00000160408_6 (sequence is synthesized)
tggttgagcacaggctggtttaccatggtgatcgcggtggagttgtgtgaccacgtgcatgtctatggcatggtcccccccaactactgcagccagcggccccgcctccagcgcatgccc

SEQ ID NO: 477042 - DNA, 120 bp, Artificial Sequence
  ENSG00000160408_7 (sequence is synthesized)
taccactactacgagcccaaggggccggacgaatgtgtcacctacatccagaatgagcacagtcgcaagggcaaccaccaccgcttcatcaccgagaaaagggtcttctcatcgtgggcc

SEQ ID NO: 477043 - DNA, 120 bp, Artificial Sequence
  ENSG00000160408_8 (sequence is synthesized)
cagctgtatggcatcaccttctcccacccctcctggacctaggccacccagcctgtgggacctcaggagggtcagaggagaagcagcctccgcccagccgctaggccagggaccatcttc

SEQ ID NO: 477044 - DNA, 120 bp, Artificial Sequence
  ENSG00000160408_9 (sequence is synthesized)
tggccaatcaaggcttgctggagtgtctcccagccaatcagggccttgaggaggatgtatcctccagccaatcagggcctggggaatctgttggcgaatcagggatttgggagtctatgc

SEQ ID NO: 477045 - DNA, 120 bp, Artificial Sequence
  ENSG00000160408_10 (sequence is synthesized)
ggttaatcaggggtgtctttcttgtgcagtcagggtctgcgcacagtcaatcagggtagagggggtatttctgagtcaatctgaggctaaggacatgtcctttcccatgaggccttggtt

SEQ ID NO: 477046 - DNA, 120 bp, Artificial Sequence
  ENSG00000160408_11 (sequence is synthesized)
cagagccccaggaatggaccccccaatcactccccactctcctgggataatggggtcctgtcccaaggagctgggaacttggtgttgccccctcaatttccagcaccagaaagagagatt

SEQ ID NO: 477047 - DNA, 120 bp, Artificial Sequence
  ENSG00000160408_12 (sequence is synthesized)
gtgtgggggtagaagctgtctggaggcccggccagagaatttgtggggttgtggaggttgtgggggcggtggggaggtcccagaggtgggaggccggcatccaggtcttggctctgccct

SEQ ID NO: 477048 - DNA, 120 bp, Artificial Sequence
  ENSG00000160408_13 (sequence is synthesized)
gagaccttggacaaacccttccccctctctgggcacccttctgcccacaccagtttccagtgcggagtctgagaccctttccacctcccctacaagtgccctcgggtctgtcctccccgt

SEQ ID NO: 477049 - DNA, 120 bp, Artificial Sequence
  ENSG00000160408_14 (sequence is synthesized)
ctggaccctcccagccactatcccttgctggaaggctcagctctttggggggtctggggtgacctccccacctcctggaaaactttagggtatttttgcgcaaactccttcagggttggg

SEQ ID NO: 477050 - DNA, 120 bp, Artificial Sequence
  ENSG00000160408_15 (sequence is synthesized)
ggactctgaaggaaacgggacaaaaccttaagctgttttcttagcccctcagccagctgccattagcttggctcttaaagggccaggcctccttttctgccctctagcagggaggttttc

SEQ ID NO: 477051 - DNA, 120 bp, Artificial Sequence
  ENSG00000160408_16 (sequence is synthesized)
caactgttggaggcgcctttggggctgcccctttgtctggagtcactgggggcttccgagggtctccctcgaccctctgtcgtcctgggatggctgtcgggagctgtatcacctgggttc

SEQ ID NO: 477052 - DNA, 120 bp, Artificial Sequence
  ENSG00000160408_17 (sequence is synthesized)
tgtcccctggctctgtatcaggcactttattaaagctgggcctcagtggggtgtgtttgtctcctgctcttctggagcctggaaggaaagggcttcaggaggaggctgtgaggctggagg

SEQ ID NO: 477053 - DNA, 120 bp, Artificial Sequence
  ENSG00000160408_18 (sequence is synthesized)
gaccagatggaggaggccagcagctagccattgcacactggggtgatgggtgggggcggtgactgccccagacttggttttgtaatgatttgtacaggaataaacacacctacgctccgg

SEQ ID NO: 477054 - DNA, 120 bp, Artificial Sequence
  ENSG00000160408_19 (sequence is synthesized)
ggctattcctggtggccgtgtaggagtaaacagcggctaggtcaaagggctcagagaatacaggaactgagaggcccctggagcaggggacggagctgaggagggccccctaagccccag

SEQ ID NO: 477055 - DNA, 120 bp, Artificial Sequence
  ENSG00000160408_20 (sequence is synthesized)
atgcgtcagtcacttcctccaggcagatggagatgatccttgacaggtctggtggctggttcggggtctactgaaggctgtcttgatcaggaaactgaagactctctgcttttgccacag

SEQ ID NO: 477056 - DNA, 120 bp, Artificial Sequence
  ENSG00000160408_21 (sequence is synthesized)
gagcccagggcaggagcctccccacagccccagggatcacctgaatctgcagccactctttgggcctctgttttcctgttcataccctggttcctttgcccctcagcagagtggctgagg

SEQ ID NO: 477057 - DNA, 120 bp, Artificial Sequence
  ENSG00000160408_22 (sequence is synthesized)
acctaccctacttcctccaagcccagaggggaagccggggaagcctcacagcccagaggtgtcctaaggggccttttccttagaagggccatggagcctggcccagagctcacgctcacg

SEQ ID NO: 477058 - DNA, 120 bp, Artificial Sequence
  ENSG00000160408_23 (sequence is synthesized)
gttcacacagcttcaccttgtaaggaacaaaatgaaacaaaaaatctcacacacccaggtgagaacaggaacatctggctttgggggactggtgggacccagcgtctaggctcatctagg

SEQ ID NO: 477059 - DNA, 120 bp, Artificial Sequence
  ENSG00000160408_24 (sequence is synthesized)
cccgtctgccctctccagcctctgtgggggaagaggcagtacttcctcgttccagaccctctggccgggagcccaggtcttgggctatggagcagcccctgtgtgcaggcccccacctgc

SEQ ID NO: 477060 - DNA, 120 bp, Artificial Sequence
  ENSG00000160408_25 (sequence is synthesized)
ccgccactctcacaggcctctcctctccagaagcccctcccccagacaaaagcctagagggagagaggccggagtccccaggcctggcttgcagcctggctctgcccacgacccgctgcg

SEQ ID NO: 477061 - DNA, 120 bp, Artificial Sequence
  ENSG00000160408_26 (sequence is synthesized)
gagtcttgggcaagttctattctccctccgacccttgatcttggtttctttgaattgggagctgcggcaggtgaggggtctcttagagctctttccagaataccatggaagggaaaaatc

SEQ ID NO: 477062 - DNA, 120 bp, Artificial Sequence
  ENSG00000160408_27 (sequence is synthesized)
ctaacggctcaaagaagtttgctaagggtcaggaagcaggggatacacgggcctctcctacccgtgtaggaggcaggaagggtcaaagcagaggccagctctcccagactgtgggggaag

SEQ ID NO: 477063 - DNA, 120 bp, Artificial Sequence
  ENSG00000160408_28 (sequence is synthesized)
ggctgggggggggaggcccacgaggactggccacagccaccatgcaggaacgtcctggtgtggcctggcctggctctcacagacccaaggcttccgtgtagaatatgtctgtggttatta

SEQ ID NO: 477064 - DNA, 120 bp, Artificial Sequence
  ENSG00000160408_29 (sequence is synthesized)
cacctgcgtgttctctgagcctcagtttcttcctctggaaagtgggttaaccgcagtacccaactcataggccaccataaggattcaatgaggtgtgtttgcaaagtgcctggcagagag

SEQ ID NO: 477065 - DNA, 120 bp, Artificial Sequence
  ENSG00000160408_30 (sequence is synthesized)
taagctgctctgtttctcatccttgttattactgttattgagatggttgctgtcgttcttggggcccaagaagggaagccagccctgaagcaaatcctgctggagtgagcctgggcccag

SEQ ID NO: 477066 - DNA, 120 bp, Artificial Sequence
  ENSG00000160408_31 (sequence is synthesized)
agacatggcaggcgggacaggcagctccaggcccagatgctgtccaggagcagggccaaagcaccctctcacttctgggtgtttgattcgggtcactggcctgggttagtgagaagggct

SEQ ID NO: 477067 - DNA, 120 bp, Artificial Sequence
  ENSG00000160408_32 (sequence is synthesized)
ggggacaggatgtttccctcctggtgcagcccccagcgccctgggtggccttgggctagaggctctgagtcctcagaagtcaagttcatcaggcctcctgcctgtctgaccgccctgccc

SEQ ID NO: 477068 - DNA, 120 bp, Artificial Sequence
  ENSG00000160408_33 (sequence is synthesized)
ccactccatggttttccatcctgtcacttgtagggcggggtcggcgacctaggagggccatgggtggagcttggtctgaggctcaggaagcggatggaggtgggcaccagggacaggaag

SEQ ID NO: 477069 - DNA, 120 bp, Artificial Sequence
  ENSG00000160408_34 (sequence is synthesized)
cctccaatccacccttgcgggccaccccctccctgcctggtgggcagtgcctttatggcctaaaggctggaccctgggggactactgctgacttttgttttaattggaaacaaactggta

SEQ ID NO: 477070 - DNA, 120 bp, Artificial Sequence
  ENSG00000160408_35 (sequence is synthesized)
ttaacttcccatataagtacagtgcaaacaacctagaagtttataaagggaaaagtgaaggtagcacccaaccgtcctgccccaccttcactttaacagggaatcaactgctggtagtcc

SEQ ID NO: 477071 - DNA, 120 bp, Artificial Sequence
  ENSG00000160408_36 (sequence is synthesized)
caactgctggtagtccttgtgggtccttccagacactttatgtgtgcatttacaaatattatgcatagttatgtatttttaaaaggcaagcaaaggccgggtgcggtggctgatgcctgt

SEQ ID NO: 477072 - DNA, 120 bp, Artificial Sequence
  ENSG00000160408_37 (sequence is synthesized)
gggccgcggggggccgggcgctccccgccggagatgaggaaactgaggctcagagaggtcacatggcttgctcgaggccccccagccagtaagtggtgaaaccgggattcgcactggcag

SEQ ID NO: 477073 - DNA, 120 bp, Artificial Sequence
  ENSG00000160408_38 (sequence is synthesized)
aatcgccggggatggggatggatgcgggtcccccggcggcacccctagaccccttcccccttggtagccgcgccccgaggttccggtcctcgcgcccagggtctgtcgcggggtccgctg

SEQ ID NO: 477074 - DNA, 80 bp, Artificial Sequence
  ENSG00000160408_39 (sequence is synthesized)
gcgctcggctcccggcgccatgtgagggggctcgggggccgcggggggccgggcgctccccgccggagatgaggaaactg

SEQ ID NO: 477075 - DNA, 120 bp, Artificial Sequence
  ENSG00000160410_0 (sequence is synthesized)
gcgggccagccggctcgcccgggggccatggcagcagcggctactgcagccgagggggtccccagtcgggggcctcccggggaagtcattcatctgaatgtgggaggcaagagattcagt

SEQ ID NO: 477076 - DNA, 120 bp, Artificial Sequence
  ENSG00000160410_1 (sequence is synthesized)
acctctcgccagactctcacctggatcccagactccttcttctccagtcttctgagcggacgcatctcgacgctgaaagatgagaccggagcaatcttcatcgacagggaccctacagtc

SEQ ID NO: 477077 - DNA, 120 bp, Artificial Sequence
  ENSG00000160410_2 (sequence is synthesized)
ttcgcccccatcctcaacttcctgcgcaccaaagagttggatcccaggggtgtccacggttccagcctcctccatgaagcccagttctatgggctcactcctctggttcgtcgcctgcag

SEQ ID NO: 477078 - DNA, 120 bp, Artificial Sequence
  ENSG00000160410_3 (sequence is synthesized)
cttcgagaggagttggatcgatcttcttgtggaaacgtcctcttcaatggttacctgccgccaccagtgttcccagtgaagcggcggaaccggcacagcctagtggggcctcagcagcta

SEQ ID NO: 477079 - DNA, 120 bp, Artificial Sequence
  ENSG00000160410_4 (sequence is synthesized)
ggaggacggccagcccctgtccgacggagcaacacgatgccccccaaccttggcaatgcagggctgctgggccgaatgctggatgagaaaacccctccctcaccctcaggacaacctgag

SEQ ID NO: 477080 - DNA, 120 bp, Artificial Sequence
  ENSG00000160410_5 (sequence is synthesized)
gagccggggatggtgcgcctggtgtgtggacaccataattggatcgctgtggcctatacccagtttctagtctgctacaggttgaaggaagcctctggctggcagctggtgttttccagc

SEQ ID NO: 477081 - DNA, 120 bp, Artificial Sequence
  ENSG00000160410_6 (sequence is synthesized)
ccccgcctggactggcccatcgaacgactggcgctcacagcccgggtgcatggtggggctttgggtgaacatgacaagatggtggcagcagccaccggcagcgagatcctgctatgggct

SEQ ID NO: 477082 - DNA, 120 bp, Artificial Sequence
  ENSG00000160410_7 (sequence is synthesized)
ctgcaggcggaaggcggtggctccgagataggggtctttcatctgggggtgcctgtggaggccttgttcttcgtcgggaaccagctcattgctacaagccacacagggcgcatcggggtg

SEQ ID NO: 477083 - DNA, 120 bp, Artificial Sequence
  ENSG00000160410_8 (sequence is synthesized)
tggaatgccgtcaccaagcactggcaggtccaggaggtgcagcccatcaccagttatgacgcggcaggctccttcctcctcctgggctgcaacaacggctccatttactacgtggatgtg

SEQ ID NO: 477084 - DNA, 120 bp, Artificial Sequence
  ENSG00000160410_9 (sequence is synthesized)
cagcggaggatggggtcaccgccctcagtgtctacctcacccccaagaccagtgacagtgggaactggatcgagatcgcctatggcaccagctcagggggcgtgcgggtcatcgtgcagc

SEQ ID NO: 477085 - DNA, 120 bp, Artificial Sequence
  ENSG00000160410_10 (sequence is synthesized)
acccggagactgtgggctcggggcctcagctcttccagaccttcactgtgcaccgcagccctgtcaccaagatcatgctgtcggagaagcacctcatctcagtctgtgccgacaacaacc

SEQ ID NO: 477086 - DNA, 120 bp, Artificial Sequence
  ENSG00000160410_11 (sequence is synthesized)
acgtgcggacatggtctgtgactcgcttccgcggcatgatttccacccagcccggctccaccccactcgcttcctttaagatcctggctctggagtcggcagatgggcatggcggctgca

SEQ ID NO: 477087 - DNA, 120 bp, Artificial Sequence
  ENSG00000160410_12 (sequence is synthesized)
gtgctggcaatgacattggcccctacggtgagcgggacgaccagcaagtgttcatccagaaggtggtgcccagtgccagccagctcttcgtgcgtctctcatctactgggcagcgggtgt

SEQ ID NO: 477088 - DNA, 120 bp, Artificial Sequence
  ENSG00000160410_13 (sequence is synthesized)
gctccgtgcgctccgtggacggctcacccacgacagccttcacagtgctggagtgcgagggctcccggcggctcggctctcggccccggcgctacctgctcactggccaggccaacggca

SEQ ID NO: 477089 - DNA, 120 bp, Artificial Sequence
  ENSG00000160410_14 (sequence is synthesized)
gcttggccatgtgggacctaaccaccgccatggacggcctcggccaggcccctgcaggtggcctgacggagcaagagctgatggaacagctggaacactgtgagctggccccgccggctc

SEQ ID NO: 477090 - DNA, 120 bp, Artificial Sequence
  ENSG00000160410_15 (sequence is synthesized)
cttcagctccctcatggggctgtctccccagcccctcaccccgcatctccctcaccagcctccactcagcctccagcaacacctccttgtctggccaccgtgggagcccaagccccccgc

SEQ ID NO: 477091 - DNA, 120 bp, Artificial Sequence
  ENSG00000160410_16 (sequence is synthesized)
aggctgaggcccggcgccgtggtgggggcagctttgtggaacgctgccaggaactggtgcggagtgggccagacctccgacggccacccacaccagccccgtggccctccagcggtctcg

SEQ ID NO: 477092 - DNA, 120 bp, Artificial Sequence
  ENSG00000160410_17 (sequence is synthesized)
gcactcccctcacacctcccaagatgaagctcaatgaaacttccttttgaacaacgcagctgccatgatgccttgggatgccctggtcctgggggactcaggtgcctccctgattcctgt

SEQ ID NO: 477093 - DNA, 120 bp, Artificial Sequence
  ENSG00000160410_18 (sequence is synthesized)
gggaaccccgggttcagggccagggcctccttggaataaatggttattgttactaggtccccaccttccctcttttctggaagccaaagtcaccctccccaataaagtcctcactgccaa

SEQ ID NO: 477094 - DNA, 120 bp, Artificial Sequence
  ENSG00000160410_19 (sequence is synthesized)
agctaatttttgtgtttttagtagaggcagggttttgccacgttggctaagcaagttttgaactcctgggattctcctctcgtcgtctcccaaagtgctggaattacaggtgacagtggg

SEQ ID NO: 477095 - DNA, 120 bp, Artificial Sequence
  ENSG00000160410_20 (sequence is synthesized)
ttctgtgcctgtttctttctccctgccctggtttctgtctctgtggcccaggccctctcctcatccttggcccctcaccaggtgacagtgggaactggatcgagatcgcctatggcacca

SEQ ID NO: 477096 - DNA, 120 bp, Artificial Sequence
  ENSG00000160410_21 (sequence is synthesized)
tcgacgctgaaagatgagaccggagcagtgagtcggacaagaactgaaatgggatgggggggaggggttggtaggaagaggggcaggaccccactcagtcctgccttttaccccatccat

SEQ ID NO: 477097 - DNA, 120 bp, Artificial Sequence
  ENSG00000160410_22 (sequence is synthesized)
cctctgcccccctttcccgcagatcttcatcgacagggaccctacagtcttcgcccccatcctcaacttcctgcgcaccaaagagttggatcccaggggtgtccacggttccagcctcct

SEQ ID NO: 477098 - DNA, 120 bp, Artificial Sequence
  ENSG00000160410_23 (sequence is synthesized)
tgggctcactcctctgggtaagtgggagcccccagctatcatcctcattgtatagaaaaccaactctgtgatgctacctgcccctcttccccttctctcctgaaagagggctggggtaga

SEQ ID NO: 477099 - DNA, 120 bp, Artificial Sequence
  ENSG00000160410_24 (sequence is synthesized)
ggtgggaggactggttatggccctggccgggtctgtattcgtactgggaggagtattggtactctgtgtagaaagaaatggggagggggaaatggggtggcctcagcatctccctaagtc

SEQ ID NO: 477100 - DNA, 120 bp, Artificial Sequence
  ENSG00000160410_25 (sequence is synthesized)
tctccaggtgatcgggagagcgagtttggggcgagggtaggagggatggagagggcgtgggagacctaatatccactcccccggcccgtgacgcctgctcggtgtcccttccctgcagtc

SEQ ID NO: 477101 - DNA, 120 bp, Artificial Sequence
  ENSG00000160410_26 (sequence is synthesized)
gctccgccccccccccctttggaggcgcgagattctggaaaaacgccgggggagggggaaggggagggaaccctggatcctgcgggagggggacgcattcctcacccgctcctcttcatc

SEQ ID NO: 477102 - DNA, 120 bp, Artificial Sequence
  ENSG00000160410_27 (sequence is synthesized)
agttctttcacctcctctgaatgtccacgtgagctccattctattagaattctcattcagaaccttgatcacaggccgggcgcgccgggattgctcacgcctgtaatcccaacactttgg

SEQ ID NO: 477103 - DNA, 120 bp, Artificial Sequence
  ENSG00000160410_28 (sequence is synthesized)
ggtgggaggatcacttgagcccaggatttggagactagcctgggcaacatagcgagaccccttctctaaaaaagcaaacaggcaaaacttcatgagaatcttgatcatgttaaaatttta

SEQ ID NO: 477104 - DNA, 120 bp, Artificial Sequence
  ENSG00000160410_29 (sequence is synthesized)
agtgtcatttcatgctgtgtcactgcaccacttaaaatcttcacccggagactatgtcccacacatggggaaatcaatcaccgtcatattttaagtgcttgctgtgtgacagccacgatt

SEQ ID NO: 477105 - DNA, 120 bp, Artificial Sequence
  ENSG00000160439_0 (sequence is synthesized)
gcgcctccgctcgcctgtggctgcgtcgcgcgctcttcctcggagctacccaggcggctggtgtgcagcaagctccgcgccgacccctgacgcctgacgcctgtccccggcccggcatga

SEQ ID NO: 477106 - DNA, 120 bp, Artificial Sequence
  ENSG00000160439_1 (sequence is synthesized)
gccgctacctgctgccgctgtcggcgctgggcacggtagcaggcgccgccgtgctgctcaaggactatgtcaccggtggggcttgccccagcaaggccaccatccctgggaagacggtca

SEQ ID NO: 477107 - DNA, 120 bp, Artificial Sequence
  ENSG00000160439_2 (sequence is synthesized)
tcgtgacgggtgccaacacaggcatcgggaagcagaccgccttggaactggccaggagaggaggcaacatcatcctggcctgccgagacatggagaagtgtgaggcggcagcaaaggaca

SEQ ID NO: 477108 - DNA, 120 bp, Artificial Sequence
  ENSG00000160439_3 (sequence is synthesized)
tccgcggggagaccctcaatcaccatgtcaacgcccggcacctggacttggcttccctcaagtctatccgagagtttgcagcaaagatcattgaagaggaggagcgagtggacattctaa

SEQ ID NO: 477109 - DNA, 120 bp, Artificial Sequence
  ENSG00000160439_4 (sequence is synthesized)
tcaacaacgcgggtgtgatgcggtgcccccactggaccaccgaggacggcttcgagatgcagtttggcgttaaccacctgggtcactttctcttgacaaacttgctgctggacaagctga

SEQ ID NO: 477110 - DNA, 120 bp, Artificial Sequence
  ENSG00000160439_5 (sequence is synthesized)
aagcctcagccccttcgcggatcatcaacctctcgtccctggcccatgttgctgggcacatagactttgacgacttgaactggcagacgaggaagtataacaccaaagccgcctactgcc

SEQ ID NO: 477111 - DNA, 120 bp, Artificial Sequence
  ENSG00000160439_6 (sequence is synthesized)
agagcaagctcgccatcgtcctcttcaccaaggagctgagccggcggctgcaaggctctggtgtgactgtcaacgccctgcaccccggcgtggccaggacagagctgggcagacacacgg

SEQ ID NO: 477112 - DNA, 120 bp, Artificial Sequence
  ENSG00000160439_7 (sequence is synthesized)
gctggccgcccagcccagcacatacctggccgtggcggaggaactggcggatgtttccggaaagtacttcgatggactcaaacagaaggccccggcccccgaggctgaggatgaggaggt

SEQ ID NO: 477113 - DNA, 120 bp, Artificial Sequence
  ENSG00000160439_8 (sequence is synthesized)
ggcccggaggctttgggctgaaagtgcccgcctggtgggcttagaggctccctctgtgagggagcagcccctccccagataacctctggagcagatttgaaagccaggatggcgcctcca

SEQ ID NO: 477114 - DNA, 120 bp, Artificial Sequence
  ENSG00000160439_9 (sequence is synthesized)
gaccgaggacagctgtccgccatgcccgcagcttcctggcactacctgagccgggagacccaggactggcggccgccatgcccgcagtaggttctagggggcggtgctggccgcagtgga

SEQ ID NO: 477115 - DNA, 120 bp, Artificial Sequence
  ENSG00000160439_10 (sequence is synthesized)
ctggcctgcaggtgagcactgccctgggctctggctggttccgtctgctctgctgccagcaggggagaggggccatctgatgcttcccctgggaatctaaactgggaatggccgaggagg

SEQ ID NO: 477116 - DNA, 120 bp, Artificial Sequence
  ENSG00000160439_11 (sequence is synthesized)
aaggggctccgtgcacttgcaggccacgtcaggagagccagcggtgcctgtcggggagggttccaaggtgctccgtgaagagcatgggcaagttgtctgacacttggtggattcttgggt

SEQ ID NO: 477117 - DNA, 120 bp, Artificial Sequence
  ENSG00000160439_12 (sequence is synthesized)
ccctgtgggaccttgtgcatgcatggtcctctctgagccttggtttcttcagcagtgagatgctcagaataactgctgtctcccatgatggtgtggtacagcgagctgttgtctggctat

SEQ ID NO: 477118 - DNA, 120 bp, Artificial Sequence
  ENSG00000160439_13 (sequence is synthesized)
ggcatggctgtgccgggggtgtttgctgagggcttcctgtgccagagcccagccagagagcaggtgcaggtgtcatcctgagttcaggctctgcacggcatggagtgggaaccccaccag

SEQ ID NO: 477119 - DNA, 120 bp, Artificial Sequence
  ENSG00000160439_14 (sequence is synthesized)
ctgctgctacaggacctgggattgcctgggactcccaccttcctatcaattctcatggtagtccaaactgcagactctcaaacttgctcatttaaaagaaaaaaaaaagaagaaaatgta

SEQ ID NO: 477120 - DNA, 120 bp, Artificial Sequence
  ENSG00000160439_15 (sequence is synthesized)
gacagcagcagtgaccgtagcagcctagaggtggccgaatgcttactctaatgggctggcccatccctgagtgtctagagttcccagcccgcttaaggaaggaaggaaaacacaggcagc

SEQ ID NO: 477121 - DNA, 120 bp, Artificial Sequence
  ENSG00000160439_16 (sequence is synthesized)
tctaagtgtacgacgagggaggtctcatcggcggtgaggaagcccaggcgggtccccttcccagctgaaaggggttcggaatttcactctgtcgccaggctggaatgcagtagggcaatc

SEQ ID NO: 477122 - DNA, 120 bp, Artificial Sequence
  ENSG00000160439_17 (sequence is synthesized)
cagcggtgtctgctcctggcacctcaggcacagtcaggggtaggaggtggtgatcagatacactcgctgtgagcagtgcaaggggaagcaggtgcccagaggtgcatcccggtttggtgg

SEQ ID NO: 477123 - DNA, 120 bp, Artificial Sequence
  ENSG00000160439_18 (sequence is synthesized)
gggtgacaaacatggacagaactgcgtagcgccttatacgctgcggcaagtgtgacgtcattcgaacaaaccataggccccgcccccggactagccacgcccacaggctcctgaaaccac

SEQ ID NO: 477124 - DNA, 74 bp, Artificial Sequence
  ENSG00000160439_19 (sequence is synthesized)
gactatgtcaccggtggggcttgccccagcaaggccaccatccctgggaagacggtcatcgtgacgggtgccaa

SEQ ID NO: 477125 - DNA, 120 bp, Artificial Sequence
  ENSG00000160439_20 (sequence is synthesized)
caacctccacctcccgagttcaagtgatgctcctgcttcggcctcctgagtagctgggactacagaactgcgtagcgccttatacgctgcggcaagtgtgacgtcattcgaacaaaccat

SEQ ID NO: 477126 - DNA, 120 bp, Artificial Sequence
  ENSG00000160439_21 (sequence is synthesized)
ctgaaaccaccaatcccagctgtgacagcgctcaggaccgatgctcataggtcccgtccctaggatccccgccccctccgcccgcgccccgcccctcgcagcccagttccggacgcgggc

SEQ ID NO: 477127 - DNA, 120 bp, Artificial Sequence
  ENSG00000160439_22 (sequence is synthesized)
gagaagcgttctgggcttttcctgttgtgcagtgtggaagtgctctatcttcattcatatcaaggaaagtcaaaggacaaactaaagccggcagcgtctttctggcttcctagtcaggct

SEQ ID NO: 477128 - DNA, 120 bp, Artificial Sequence
  ENSG00000160439_23 (sequence is synthesized)
gttcggtagcggagtgtcaccctgatttccagccccgcagcacacacagtgagagcctgcctggcgtgattcagaggcaacgtatttcccaaggtggctgtgaaggaaccagggggataa

SEQ ID NO: 477129 - DNA, 120 bp, Artificial Sequence
  ENSG00000160439_24 (sequence is synthesized)
acacagcccgtgaaccgcacgccagaggacaggtccggctgcctgccgcggagtcgtcacggcgtgtcgcgtctgagcgcttctccaaagcacccaagtggcacccggggtgacagttac

SEQ ID NO: 477130 - DNA, 120 bp, Artificial Sequence
  ENSG00000160439_25 (sequence is synthesized)
gagtacagttctctcaaggaaaaagcaagcccagcatcttctgccatggcaaccctggcttggagcctccataagagagaaggccctaagaataataccattttcttgctctaagttgct

SEQ ID NO: 477131 - DNA, 120 bp, Artificial Sequence
  ENSG00000160439_26 (sequence is synthesized)
cttacgggaaagaagtgataatattcttcctaaacgccatcattcgtgcatccttcccacctatatgtgtcaccggatcattctccgcctgggcggggccgtcctgtgcactgcagaatg

SEQ ID NO: 477132 - DNA, 120 bp, Artificial Sequence
  ENSG00000160439_27 (sequence is synthesized)
ctgagcagtgtccttggcttcgaccgaccacatgccaggagcaccccaatttctgccatcgggtgattgacttcactgttgcatttgattttttatgtatcttttaaaaggacccaatag

SEQ ID NO: 477133 - DNA, 120 bp, Artificial Sequence
  ENSG00000160439_28 (sequence is synthesized)
aaggctggttgatattaccttgtgtgtatataccacatgttgtttatccattgttgttgatggacatgtgggtggtttcaccttttggctattgtgaataaagctgctatgaacactgtg

SEQ ID NO: 477134 - DNA, 120 bp, Artificial Sequence
  ENSG00000160439_29 (sequence is synthesized)
agtctgactcagccagtccagggcggaggcagtaaagccctgtcttggcaagtcaccagggaaatccatcaccgaagcacctctctcccccctcggcctggctattctgtcattggcacc

SEQ ID NO: 477135 - DNA, 120 bp, Artificial Sequence
  ENSG00000160439_30 (sequence is synthesized)
ggcgtgagccaccgtgcccggccattgactaaggtcttaaaatagctcttcctgcctgtataatctccattatggcagggctcatataagaagatgacagttcatctgatgaggaagaaa

SEQ ID NO: 477136 - DNA, 120 bp, Artificial Sequence
  ENSG00000160439_31 (sequence is synthesized)
acagttcatctgatgaggaagaaaacttactcctagttagattgggttgaattcttccctgtttccagcggtgtctgctcctggcacctcaggcacagtcaggggtaggaggtggtgatc

SEQ ID NO: 477137 - DNA, 120 bp, Artificial Sequence
  ENSG00000160439_32 (sequence is synthesized)
gccgcagtggactggcctgcagccagcaaaccccaaacaggaacctatggttggtgatggatgtgcgttcagaaagcagggagggagggggagtcagaggtgagggggtcatcagccata

SEQ ID NO: 477138 - DNA, 120 bp, Artificial Sequence
  ENSG00000160439_33 (sequence is synthesized)
aacccttatgacaaatctcatagtattctgcagggataagcatgaaaccactcgttcaataagtgcaaacaaaaacgccaacaattcttaagacatttctaatcttattttaccaataat

SEQ ID NO: 477139 - DNA, 120 bp, Artificial Sequence
  ENSG00000160439_34 (sequence is synthesized)
ttaaaattctatgcagcttaaagcatttataatggataaaactgccaatactgagtgcctgacataatatttgaaaggtggcaggcattcaaccatggtcactgaatgagagatgtaggg

SEQ ID NO: 477140 - DNA, 120 bp, Artificial Sequence
  ENSG00000160439_35 (sequence is synthesized)
atgtagggaagatgatggcagggaggtttttagatatcaacaccctgatagttctcattttaaccacctgtaagtgcacatacaagtcaacggcactggccgggcgcggtggctcatgcc

SEQ ID NO: 477141 - DNA, 65 bp, Artificial Sequence
  ENSG00000160439_36 (sequence is synthesized)
actaggcatgctgggactacaggtgcctgccgccatgcccggctattttttttttgtattttttg

SEQ ID NO: 477142 - DNA, 120 bp, Artificial Sequence
  ENSG00000160439_37 (sequence is synthesized)
aaatacaaaaaatcaactaggcatgctgggactacaggtgcctgccgccatgcccggctattttttttttgtattttttgggggttttactgtgttgcccaggctggtcttgaactgctg

SEQ ID NO: 477143 - DNA, 69 bp, Artificial Sequence
  ENSG00000160439_38 (sequence is synthesized)
tacaggcatgggccaccacgcccggccttatttttatttttgagaccgcaatctctgcctcccaggttc

SEQ ID NO: 477144 - DNA, 120 bp, Artificial Sequence
  ENSG00000160439_39 (sequence is synthesized)
ctaagaaaggtagttcaggcagagttcagggaagatatctctgtgcagggccagacatggggatgagattctgataatttgggaatgaatcaggcccccagcccctcctccctcagactc

SEQ ID NO: 477145 - DNA, 120 bp, Artificial Sequence
  ENSG00000160439_40 (sequence is synthesized)
cccagcccctcctccctcagactcagcagtccaggcacccggccctcctccctcggacccagaagtccatgctcccagcccctcctcccttggacccaggagtccaggcccccagcccct

SEQ ID NO: 477146 - DNA, 120 bp, Artificial Sequence
  ENSG00000160439_41 (sequence is synthesized)
gcccccagccgccttctcctgcaggaccccaggagcttgggtacccacaggctactagatccttgtttctgtgcatggaaattctcaaattatctccaaaagtctatgaagaaggtaaac

SEQ ID NO: 477147 - DNA, 120 bp, Artificial Sequence
  ENSG00000160439_42 (sequence is synthesized)
acacatttccagatgagggaataggctgatatagttgaaagacacacagagggtcacagtctggaattgacagtggtgggattcgaacctatttcactccagaactgcgtagcgccttat

SEQ ID NO: 477148 - DNA, 120 bp, Artificial Sequence
  ENSG00000160439_43 (sequence is synthesized)
gatgggaggccaaacggtggatccagaacagagtcagcaaaagtagagcatgtggaccacgctgcccgcttctggtgcctgaagcagacatcactaatcgatcgttcttctgaggattgt

SEQ ID NO: 477149 - DNA, 120 bp, Artificial Sequence
  ENSG00000160439_44 (sequence is synthesized)
ctgttcatcccaggtggtctagtctgcctggatcagatgtccttccctgctgctgttgggcaggcagctcagccttttggctccagccagctctggtgtgactgtcaacgccctgcaccc

SEQ ID NO: 477150 - DNA, 120 bp, Artificial Sequence
  ENSG00000160439_45 (sequence is synthesized)
ctttctcagcccagggcccaggaccctccctcagagaccgtccctgaggcctcatgcctgctcctcgcctacgtcttctgaggcacagagcacaggtccctttcctccgttgacctggcc

SEQ ID NO: 477151 - DNA, 120 bp, Artificial Sequence
  ENSG00000160439_46 (sequence is synthesized)
tgccagcctctaacagccccgggaagcaggcagagccctgctggcggatgagaaaaccgtgtctcagaggaagaggccgtggagctgacgcctggagtcaggctgtactcaggggcccat

SEQ ID NO: 477152 - DNA, 120 bp, Artificial Sequence
  ENSG00000160439_47 (sequence is synthesized)
actgatggctcccgcctcagcccttccaccccctcccataccctgcatgccagcccaggcagccctccctcctcccacaatatctctcatatgcattcctgtcccatgccttctgcttaa

SEQ ID NO: 477153 - DNA, 120 bp, Artificial Sequence
  ENSG00000160439_48 (sequence is synthesized)
gctgttcccacagcccggagtctcctccctggctgagggaaatcttgccggctcacatggccgtgatccccatcatttcctgcagaaagcttgcccagctctccgacacggggaccttct

SEQ ID NO: 477154 - DNA, 120 bp, Artificial Sequence
  ENSG00000160439_49 (sequence is synthesized)
gcccctcctgagccctgagtcccctccatcttaactgggaggtcacctgtttgcgtggtgtctgctcagcttgcaggcaaggccaccaacaccctcctttcctgtctttccttcctacca

SEQ ID NO: 477155 - DNA, 120 bp, Artificial Sequence
  ENSG00000160439_50 (sequence is synthesized)
gcgctggacacctaattcacgatccccgccgaaaaccacttcgggagcattatgaattccattgtgtcctccacccccaaggataggttgggatcctgaacccccatccctcagcatgtg

SEQ ID NO: 477156 - DNA, 120 bp, Artificial Sequence
  ENSG00000160439_51 (sequence is synthesized)
acttcatttagagaggaggagcgagtggacattctaatcaacaacgcgggtgtgatgcggtgcccccactggaccaccgaggacggcttcgagatgcagtttggcgttaaccacctgggt

SEQ ID NO: 477157 - DNA, 120 bp, Artificial Sequence
  ENSG00000160439_52 (sequence is synthesized)
gagtcacagagaagtgatgtgacttggccaggatcatgcagctggtcggggtggagccaggctttgaacctgtctgtcctgctccagagctggtattcatgacgggtgtgctgcaacccc

SEQ ID NO: 477158 - DNA, 120 bp, Artificial Sequence
  ENSG00000160439_53 (sequence is synthesized)
ccgatgccacaccaaatggctagagggtgtgtttgggatgacctgagtctggtaggcaacttccagtggaccccacggtgcgaccacctccctttgagtgtgggggagatgtagcgactg

SEQ ID NO: 477159 - DNA, 120 bp, Artificial Sequence
  ENSG00000160439_54 (sequence is synthesized)
gcttctagcagtaggatagggcagaagtgacagtaggttagtcttgtggttaggttacaaaactgacctctgtgatggtagcgtccctcgtcagccctcttgtcttgccctctcgctggc

SEQ ID NO: 477160 - DNA, 120 bp, Artificial Sequence
  ENSG00000160439_55 (sequence is synthesized)
tggtggtgatggagccggctgccatggtgagcggccctgtggagaagccagggaggaatggagacaatctggagaaacagaatcacaccaacaaccacgtgcgtgagcttgctgtgtgct

SEQ ID NO: 477161 - DNA, 120 bp, Artificial Sequence
  ENSG00000160439_56 (sequence is synthesized)
cttgcttgggagcaagttacaggttcagcccaagaggagcggaccactccagggtgtaaataccaggagggggaattggaagactaccctaagcatgccgaccggagactgtgtgtgtgt

SEQ ID NO: 477162 - DNA, 120 bp, Artificial Sequence
  ENSG00000160439_57 (sequence is synthesized)
agtaggtatttcttactgggagatcacggaaaagcaagtttgagaaacactcccatcagatgggtgggccgaggataacctcaaagcctttggttctccgaataggtgcgtaggactcac

SEQ ID NO: 477163 - DNA, 120 bp, Artificial Sequence
  ENSG00000160439_58 (sequence is synthesized)
tccgaataggtgcgtaggactcacccaggcactctttccttttttaaattgtggtaaaaactacataacagtggccaggcgtgatggtgcacgcctgtaatcccagctattagggaggct

SEQ ID NO: 477164 - DNA, 120 bp, Artificial Sequence
  ENSG00000160439_59 (sequence is synthesized)
agggggcaccgctcctggctgtaacatgttttcaatatcccccctcttcggtggcacaggggctggccccatatacatgtgcgatggcaactgacagggtccctgataaaccggagtgct

SEQ ID NO: 477165 - DNA, 120 bp, Artificial Sequence
  ENSG00000160439_60 (sequence is synthesized)
ccagaaacaccccattgcgtgggacggaggatgttaggtggccctcctagcgtttgagtttgataaatgagcaaaggaagtggtttttactagaaagccagctttccttttttttttttt

SEQ ID NO: 477166 - DNA, 120 bp, Artificial Sequence
  ENSG00000160439_61 (sequence is synthesized)
tttttttccagccagcaaaccccaaacaggaacctatggttggtgatggatgtgcgttcagaaagcagggagggagggggagtcagaggtgagggggtcatcagccatagctgtccgctg

SEQ ID NO: 477167 - DNA, 79 bp, Artificial Sequence
  ENSG00000160439_62 (sequence is synthesized)
ggtggattgcttgagcccagactctacaaaaaacaaatgttttatttttatttattttagatggagtttcactcttgtt

SEQ ID NO: 477168 - DNA, 120 bp, Artificial Sequence
  ENSG00000160439_63 (sequence is synthesized)
atgtgctggagatacagaggaggaggagacagatgaaaccccagcccttgtgatattgtcatcctagtaggtgtggtggggagataaacaagtagacacctgcatgaataagactttcag

SEQ ID NO: 477169 - DNA, 120 bp, Artificial Sequence
  ENSG00000160439_64 (sequence is synthesized)
attgtggtaaaccctgtggaggaaacgaaacaggtgaaggaacggcgtgactaggagcaggcaggtgcggctgcttcagaatttcactctgtcgccaggctggaatgcagtagggcaatc

SEQ ID NO: 477170 - DNA, 120 bp, Artificial Sequence
  ENSG00000160445_0 (sequence is synthesized)
gggtttgttgacagcggaggcggcggcggctgcaggctccgagccgtaggagccggatcgggggaggggccgggcccaggagcctcagccccgccggcagccctaagggcaaggtaaccg

SEQ ID NO: 477171 - DNA, 120 bp, Artificial Sequence
  ENSG00000160445_1 (sequence is synthesized)
ccacggggtccccgtcgcgaccccctccctcccggagctcccgtccccgggatcccaagctccgccccgccgacccccgtctcccctggaccccggctctagcctgacgagatccccaac

SEQ ID NO: 477172 - DNA, 120 bp, Artificial Sequence
  ENSG00000160445_2 (sequence is synthesized)
ctcctgaggtgctctggccccggattctcccgggctgcattctctgctcctcctcgcctgcgaagcatcacgtccgcttcccgacgctgagggcagccccgtccagggcagtggctctgc

SEQ ID NO: 477173 - DNA, 120 bp, Artificial Sequence
  ENSG00000160445_3 (sequence is synthesized)
caatgatcctgtgagtattcaggaatcactgttgcccctggggatccttgtcctggagtggcccacctgcttgcccccagcatggcgtccgacactcccgagtcgctgatggccctctgt

SEQ ID NO: 477174 - DNA, 120 bp, Artificial Sequence
  ENSG00000160445_4 (sequence is synthesized)
actgacttctgcttgcgcaacctggatggcaccctgggctacctgctggacaaggagaccctgcggctacatccggacatcttcttgcccagcgagatctgtgaccggctcgtcaatgag

SEQ ID NO: 477175 - DNA, 120 bp, Artificial Sequence
  ENSG00000160445_5 (sequence is synthesized)
tatgtggagctggtgaacgctgcctgtaacttcgagccacacgagagcttcttcagcctcttttcggacccccgcagcacccgcctcacgcggatccacctccgtgaggacctggtgcag

SEQ ID NO: 477176 - DNA, 120 bp, Artificial Sequence
  ENSG00000160445_6 (sequence is synthesized)
gaccaggacctggaggccatccgcaagcaggacctggtggagctgtacctgactaactgcgagaagctgtccgccaagagcctgcagacactgaggagcttcagccacaccctggtgtcc

SEQ ID NO: 477177 - DNA, 120 bp, Artificial Sequence
  ENSG00000160445_7 (sequence is synthesized)
ttgagcctcttcggctgtacaaacattttctatgaggaggagaacccagggggctgtgaagatgagtacctcgtcaaccccacctgccaggtgctggttaaggatttcaccttcgagggc

SEQ ID NO: 477178 - DNA, 120 bp, Artificial Sequence
  ENSG00000160445_8 (sequence is synthesized)
ttcagccgcctccgcttcctcaacttgggccgcatgattgattgggtccctgtggagtccctgctgcggccgcttaactccctggctgccttggacctctcaggcattcagacgagcgac

SEQ ID NO: 477179 - DNA, 120 bp, Artificial Sequence
  ENSG00000160445_9 (sequence is synthesized)
gccgccttcctcacccagtggaaagacagcctggtgtccctcgtcctctacaacatggacctgtccgacgaccacatccgggtcatcgtgcagctgcacaagctgcgacacctggacatc

SEQ ID NO: 477180 - DNA, 120 bp, Artificial Sequence
  ENSG00000160445_10 (sequence is synthesized)
tcccgagaccgcctctccagctactacaagttcaagctgactcgggaggtgctgagcctctttgtgcagaagctggggaacctaatgtccctggacatctctggccacatgatcctagag

SEQ ID NO: 477181 - DNA, 120 bp, Artificial Sequence
  ENSG00000160445_11 (sequence is synthesized)
aactgcagcatctccaagatggaagaggaagcggggcagaccagcattgagccttccaagagcagcatcatacctttccgggctctgaagaggccgctgcagttcctcgggctctttgag

SEQ ID NO: 477182 - DNA, 120 bp, Artificial Sequence
  ENSG00000160445_12 (sequence is synthesized)
aactctctgtgccgcctcacgcacattccagcctacaaagtaagtggtgacaaaaacgaagagcaggtgctgaatgccatcgaggcctacacggagcaccggcctgagatcacctcgcgg

SEQ ID NO: 477183 - DNA, 120 bp, Artificial Sequence
  ENSG00000160445_13 (sequence is synthesized)
gccatcaacttgctttttgacatcgcccgcatcgagcgttgcaaccagctgctgcgggccctgaagctggtcatcacggccctcaagtgccacaaatatgacaggaacattcaagtgaca

SEQ ID NO: 477184 - DNA, 120 bp, Artificial Sequence
  ENSG00000160445_14 (sequence is synthesized)
ggcagcgccgctctcttctacctaacaaattccgagtaccgctcagagcagagtgtgaagctgcgccggcaggttatccaggtggtgctgaatggcatggaatcctaccaggaggtgacg

SEQ ID NO: 477185 - DNA, 120 bp, Artificial Sequence
  ENSG00000160445_15 (sequence is synthesized)
gtgcagcggaactgctgcctgacgctctgcaacttcagcatccccgaggagctggaattccagtaccgccgggtcaacgagctcctgctcagcatcctcaaccccacgcggcaggacgag

SEQ ID NO: 477186 - DNA, 120 bp, Artificial Sequence
  ENSG00000160445_16 (sequence is synthesized)
tctatccagcggatcgccgtgcacctgtgcaatgccctggtctgccaggtagacaacgaccacaaggaggccgtgggcaagatgggctttgtcgtgaccatgctgaagctgattcagaag

SEQ ID NO: 477187 - DNA, 120 bp, Artificial Sequence
  ENSG00000160445_17 (sequence is synthesized)
ttcctcaatttcaacggcatgaagctcttcctggactgcctgaaggaattcccagagaagcaggaactgcataggaatatgctaggacttttggggaatgtggcagaagtgaaggagctg

SEQ ID NO: 477188 - DNA, 120 bp, Artificial Sequence
  ENSG00000160445_18 (sequence is synthesized)
aggcctcaactaatgacttcccagttcatcagcgtcttcagcaacctgttggagagcaaggccgatgggatcgaggtttcctacaatgcctgcggcgtcctctcccacatcatgtttgat

SEQ ID NO: 477189 - DNA, 120 bp, Artificial Sequence
  ENSG00000160445_19 (sequence is synthesized)
ggacccgaggcctggggcgtctgtgagccccagcgtgaggaggtggaggaacgcatgtgggctgccatccagagctgggacataaactctcggagaaacatcaattacaggtcatttgaa

SEQ ID NO: 477190 - DNA, 120 bp, Artificial Sequence
  ENSG00000160445_20 (sequence is synthesized)
ccaattctccgcctccttccccagggaatctctcctgtcagccagcactgggcaacctgggccctgtataacctcgtgtctgtctacccggacaagtactgccctctgctgatcaaagaa

SEQ ID NO: 477191 - DNA, 120 bp, Artificial Sequence
  ENSG00000160445_21 (sequence is synthesized)
ggggggatgccccttctgagggacataattaagatggcgaccgcacggcaggagaccaaggaaatggcccgcaaggtgattgagcactgcagtaactttaaagaggagaacatggacacg

SEQ ID NO: 477192 - DNA, 120 bp, Artificial Sequence
  ENSG00000160445_22 (sequence is synthesized)
tctagatagaggcctccgtccccatggccgccaccgctctggaccacaggcggggaggaagcatgctcaagcagcccagcgggcgggccccttccgagggagcctcccacggagtgaaga

SEQ ID NO: 477193 - DNA, 120 bp, Artificial Sequence
  ENSG00000160445_23 (sequence is synthesized)
gacatgggggacttttgcacaaccgacgcttttccttaatgttagtgagatatatatatattatatatatatattttttttttggttaggaagtgtgaagttttgtgtgtatgatttctg

SEQ ID NO: 477194 - DNA, 120 bp, Artificial Sequence
  ENSG00000160445_24 (sequence is synthesized)
tgcaaaaacaaaagcaacactcctgagtccttgcagcttccttggccattctcaaacccactcagccttcatcgctgacacacacactcctaccccaaccagactaaatgcctataacgc

SEQ ID NO: 477195 - DNA, 120 bp, Artificial Sequence
  ENSG00000160445_25 (sequence is synthesized)
tgtgagtgtccagtccttgtccaggaaactcagatcccggcctggcttcctttcatgagaggagcaggccttggacagcgtatcgagcatcctgacccactgcccctgcctgagaacgcc

SEQ ID NO: 477196 - DNA, 120 bp, Artificial Sequence
  ENSG00000160445_26 (sequence is synthesized)
atctcggctcccgggcacagctgatggggtttggggattagaacttaccccactgggtctcccaaaagccttggtgctcccggctgtgggccatctggggcaggaaagtgagccattcct

SEQ ID NO: 477197 - DNA, 120 bp, Artificial Sequence
  ENSG00000160445_27 (sequence is synthesized)
aggctgaggtccaggcagccctgcccctgaagaccctctaggagcagggcacccagtggccctgctgctgtccagccaggcctgcctgaggccacgctgctatggaggctgcctcctagt

SEQ ID NO: 477198 - DNA, 120 bp, Artificial Sequence
  ENSG00000160445_28 (sequence is synthesized)
ctcccaccaggtcccaggctgtggaaagccccagcccagggatggtcagaactcaggggcagattccactgccccttctgccaaacacatccagaacctgccctcagccctggaagctag

SEQ ID NO: 477199 - DNA, 120 bp, Artificial Sequence
  ENSG00000160445_29 (sequence is synthesized)
catcttctggggccaggggcttgcttcctcgctccatagccctcaactgcccaggcgctcccaccagcagaactgagcctgcctcctcctcccagcctgccccgctgcccagaggacccc

SEQ ID NO: 477200 - DNA, 120 bp, Artificial Sequence
  ENSG00000160445_30 (sequence is synthesized)
acgcctctcagaggcagaggtcccatgacagcctttgacccacaacggccacacagccgcctccagaccagcactcggactgccctgcagtggccgcttgggcctccctggcggtcccgc

SEQ ID NO: 477201 - DNA, 120 bp, Artificial Sequence
  ENSG00000160445_31 (sequence is synthesized)
cctgccctaggctttaccttggaagcctgagaggcgccggctctcttgctcctccatcgatggacactgcattgcttctcatcggacacttgtggagcgcaggggcctggggagcagcgc

SEQ ID NO: 477202 - DNA, 120 bp, Artificial Sequence
  ENSG00000160445_32 (sequence is synthesized)
taaccctggaggcagcctttgggtgatggctttttcttcccttttcctcccgcgggcctgttttcaggtgttcctagcatttctgcctccaggcaggacggcaggggtgagcagctttgg

SEQ ID NO: 477203 - DNA, 120 bp, Artificial Sequence
  ENSG00000160445_33 (sequence is synthesized)
gagagacacctggcctttttctcctggagcctctccctcccggccctgggaagtgggcgcagccctgtgttcccccagcttggcagatgggctgcatgcggcgctcccttccttcccacg

SEQ ID NO: 477204 - DNA, 120 bp, Artificial Sequence
  ENSG00000160445_34 (sequence is synthesized)
ctcagcggccccggccagaccctggcagacttcacacctcattgctttaccccctggggcctggggaaatgtctgtactttgggaagtcacagaaatacatttttgtgcaaaatggaaaa

SEQ ID NO: 477205 - DNA, 120 bp, Artificial Sequence
  ENSG00000160445_35 (sequence is synthesized)
aagtgacgcgccccgggtttgttgacagcggaggcggcggcggctgcaggctccgagccgtaggagccggatcgggggaggggccgggcccaggagcctcagccccgccggcagccctaa

SEQ ID NO: 477206 - DNA, 120 bp, Artificial Sequence
  ENSG00000160446_0 (sequence is synthesized)
gcgcttcttccgggtggggccccgggccgaggcgatggcgccctgggcgctcctcagccctggggtcctggtgcggaccgggcacaccgtgctgacctggggaatcacgctggtgctctt

SEQ ID NO: 477207 - DNA, 120 bp, Artificial Sequence
  ENSG00000160446_1 (sequence is synthesized)
cctgcacgataccgagctgcggcaatgggaggagcagggggagctgctcctgcccctcaccttcctgctcctggtgctgggctccctgctgctctacctcgctgtgtcactcatggaccc

SEQ ID NO: 477208 - DNA, 120 bp, Artificial Sequence
  ENSG00000160446_2 (sequence is synthesized)
tggctacgtgaatgtgcagccccagcctcaggaggagctcaaagaggagcagacagccatggttcctccagccatccctcttcggcgctgcagatactgcctggtgctgcagcccctgag

SEQ ID NO: 477209 - DNA, 120 bp, Artificial Sequence
  ENSG00000160446_3 (sequence is synthesized)
ggctcggcactgccgtgagtgccgccgttgcgtccgccgctacgaccaccactgcccctggatggagaactgtgtgggagagcgcaaccacccactctttgtggtctacctggcgctgca

SEQ ID NO: 477210 - DNA, 120 bp, Artificial Sequence
  ENSG00000160446_4 (sequence is synthesized)
tcagtggttgcggtccagcgggctcctgttcgccaccttcctgctgctgtccctcttctcgttggtggccagcctgctcctcgtctcgcacctctacctggtggccagcaacaccaccac

SEQ ID NO: 477211 - DNA, 120 bp, Artificial Sequence
  ENSG00000160446_5 (sequence is synthesized)
ctgggaattcatctcctcacaccgcatcgcctatctccgccagcgccccagcaaccccttcgaccgaggcctgacccgcaacctggcccacttcttctgtggatggccctcagggtcctg

SEQ ID NO: 477212 - DNA, 120 bp, Artificial Sequence
  ENSG00000160446_6 (sequence is synthesized)
ggagaccctctgggctgaggaggaggaagagggcagcagcccagctgtttagggttgctggaggccgggctaccgtcttgtgcctgaaaaccacggggcctgtccccagctggggtgagc

SEQ ID NO: 477213 - DNA, 120 bp, Artificial Sequence
  ENSG00000160446_7 (sequence is synthesized)
gctcagagggcctggggccctcactcctgcccacgcctcccagaccccagaacggagcttcaagtcagacagatccctgccttggtgggcagttctgccttccaaggaagaaggggaaga

SEQ ID NO: 477214 - DNA, 120 bp, Artificial Sequence
  ENSG00000160446_8 (sequence is synthesized)
aaaggacctgtgggtggctcaggcccaagcagaccccgggctccaccccagccccgcccaggctgctgccagtgcacacttttacaaatttaatataaagcaagtccagtcttaaaaaga

SEQ ID NO: 477215 - DNA, 120 bp, Artificial Sequence
  ENSG00000160446_9 (sequence is synthesized)
gccccgggccgaggcgatggcgccctgggcgctcctcagccctggggtcctggtgcggaccgggcacaccgtgctgacctggggaatcacgctggtgctcttcctgcacgataccgataa

SEQ ID NO: 477216 - DNA, 120 bp, Artificial Sequence
  ENSG00000160446_10 (sequence is synthesized)
aagtgcagatgaactgctggccacacacagccactcatggaaccaacatctccaggcctttgctcagccaggaacacacttccccacctccaactgcaccccaaccccacccactcctgt

SEQ ID NO: 477217 - DNA, 120 bp, Artificial Sequence
  ENSG00000160446_11 (sequence is synthesized)
cctgcacgataccggtgagccggaccccgagcgaccccggacccacccgatcccgcgtacttccccagacgttctggtcacactgggtctcccgcctaatccctggagatcctgggattg

SEQ ID NO: 477218 - DNA, 120 bp, Artificial Sequence
  ENSG00000160446_12 (sequence is synthesized)
gcccgatctccaccagctcctgaagccctctccccatctatcattccaagagccacctgctctctgtctgataccccgttgatccctaattaatcccagcatcttcctgatcattgccaa

SEQ ID NO: 477219 - DNA, 120 bp, Artificial Sequence
  ENSG00000160446_13 (sequence is synthesized)
atgccctgtccatcccaggacccagccggtgcccaccagatccaaggaccgacttgagccccatgtcccctgatcctgggacccacatgatccttcccaggaactgaccccaaatcttcc

SEQ ID NO: 477220 - DNA, 120 bp, Artificial Sequence
  ENSG00000160446_14 (sequence is synthesized)
tatccatacgattaggaggctcaactagatgcaaagattggcattctgcccacacccacaccccccacacccccatggccactagctgcccaagtccaggcaaaccctcaggccagagaa

SEQ ID NO: 477221 - DNA, 120 bp, Artificial Sequence
  ENSG00000160446_15 (sequence is synthesized)
cactccatggggtgcggcctgtctcccatcttcccacagattcacccacccacccacctccatttccctcattcctcttagtagccccctacccagcgcctcacctgccacaggcagcct

SEQ ID NO: 477222 - DNA, 120 bp, Artificial Sequence
  ENSG00000160446_16 (sequence is synthesized)
cccccactgtcccccacagcagaccccagccctccttccatggcggtccagcctcagtttctggactggggccccttctggctttcctcccaagacagacctcctccaccaccttcaccc

SEQ ID NO: 477223 - DNA, 120 bp, Artificial Sequence
  ENSG00000160446_17 (sequence is synthesized)
tttagcctaaaaacttgctcaggtctccgtatcagaaaacccccctcaaaacccaccctttcttctctgctcccccttacaaccaagggacacaggatttgtctacactctgctgtctgg

SEQ ID NO: 477224 - DNA, 120 bp, Artificial Sequence
  ENSG00000160446_18 (sequence is synthesized)
tggtctcatgccccctcactccttgccctgcaccctacctccccaaaatcctgtcacctccctgggctgaagcctgctggacccttccgtatgcccctctgcagcatctgagcctgccag

SEQ ID NO: 477225 - DNA, 120 bp, Artificial Sequence
  ENSG00000160446_19 (sequence is synthesized)
ctgcacccttcccactgtatctctctcaggcatttcagacctaaccagtctctcaccattgcagagccagagacgctggacccctcttccctctctcccacatccagtcaggtctggctc

SEQ ID NO: 477226 - DNA, 120 bp, Artificial Sequence
  ENSG00000160446_20 (sequence is synthesized)
ccctgtccattccttcctccctcacttcctgccaggcctttgtagcgactctcttcttcctcctggccagattctctgcccccaggcttcccctgatccatttctttagcaatgaggttt

SEQ ID NO: 477227 - DNA, 120 bp, Artificial Sequence
  ENSG00000160446_21 (sequence is synthesized)
cccctgcaccgcaggtcaggcctccggttcttccagccctggggtcagtggttgcggtccagcgggctcctgttcgccaccttcctgctgctgtccctcttctcgttggtggccagcctg

SEQ ID NO: 477228 - DNA, 120 bp, Artificial Sequence
  ENSG00000160447_0 (sequence is synthesized)
atccctgtccctaactggccggctcccgcgggcgcgcggcggggaaggccagaggacctgggcgcgggcgatgtgcctcctgagcgtccaaaccgggggtgaggcgcggtcacgcccagc

SEQ ID NO: 477229 - DNA, 120 bp, Artificial Sequence
  ENSG00000160447_1 (sequence is synthesized)
gggaaccgcaggcgccgaagcccgggtactgggcccagaatcccgcggaattttggatccgagggaggcgctggggcgcgggacctcgggcgtggggtcccgggcgctggatcggcgcgg

SEQ ID NO: 477230 - DNA, 120 bp, Artificial Sequence
  ENSG00000160447_2 (sequence is synthesized)
acgggaggcggcgctggtcccgcgggccagcgggtctcgggagggggcgcccgatcccgcgtctccggcgccgcttcccgggaagtttcaagtttgaaagtcctggcggagggtctgcgg

SEQ ID NO: 477231 - DNA, 120 bp, Artificial Sequence
  ENSG00000160447_3 (sequence is synthesized)
cttccgggaccggagtggctgagagaagggccccaagcggccggagcggcgccatggaggagggggcgccgcggcagcctgggccgagccagtggcccccagaggatgagaaggaggtga

SEQ ID NO: 477232 - DNA, 120 bp, Artificial Sequence
  ENSG00000160447_4 (sequence is synthesized)
tccgccgggccatccagaaagagctgaagatcaaggagggggtggagaacctgcggcgcgtggccacagaccgccgccacttgggccatgtgcagcagctgctgcggtcctccaaccgcc

SEQ ID NO: 477233 - DNA, 120 bp, Artificial Sequence
  ENSG00000160447_5 (sequence is synthesized)
gcctggagcagctgcatggcgagctgcgggagctgcacgcccgaatcctgctgcccggccctgggcctggcccagctgagcctgtggcctcaggaccccggccgtgggcagagcagctca

SEQ ID NO: 477234 - DNA, 120 bp, Artificial Sequence
  ENSG00000160447_6 (sequence is synthesized)
gggctcggcacctagaggctctccggaggcagctgcatgtggagctgaaggtgaagcagggggctgagaacatgacccacacgtgcgccagtggcacccccaaggagaggaagctcctgg

SEQ ID NO: 477235 - DNA, 120 bp, Artificial Sequence
  ENSG00000160447_7 (sequence is synthesized)
cagctgcccagcagatgctgcgggacagccagctgaaggtggccctgctgcggatgaagatcagcagcctggaggccagtgggtccccggagccagggcctgagctgctggcggaggagc

SEQ ID NO: 477236 - DNA, 120 bp, Artificial Sequence
  ENSG00000160447_8 (sequence is synthesized)
tacagcatcgactgcacgttgaggcagctgtggctgagggcgccaagaacgtggtgaaactgcttagtagccggagaacacaggaccgcaaggcactggctgaggcccaggcccagctac

SEQ ID NO: 477237 - DNA, 120 bp, Artificial Sequence
  ENSG00000160447_9 (sequence is synthesized)
aggagtcctctcagaaactggacctcctgcgcctggccttggagcagctgctggagcaactgcctcctgcccaccctttgcgcagcagagtgacccgagagttgcgggctgcggtgcctg

SEQ ID NO: 477238 - DNA, 120 bp, Artificial Sequence
  ENSG00000160447_10 (sequence is synthesized)
gatacccccagccttcagggacacctgtgaagcccaccgccctaacagggacactgcaggtccgcctcctgggctgtgaacagttgctgacagccgtgcctgggcgctccccagcggccg

SEQ ID NO: 477239 - DNA, 120 bp, Artificial Sequence
  ENSG00000160447_11 (sequence is synthesized)
cactggccagcagcccctccgagggctggcttcggaccaaggccaagcaccagcgtggccgaggcgagcttgccagcgaggtgctggctgtgctaaaggtggacaaccgtgttgtggggc

SEQ ID NO: 477240 - DNA, 120 bp, Artificial Sequence
  ENSG00000160447_12 (sequence is synthesized)
agacgggctgggggcaggtggccgaacagtcctgggaccagacctttgtcatcccactggagcgagcccgtgagctggagattggggtacactggcgggactggcggcagctatgtggcg

SEQ ID NO: 477241 - DNA, 120 bp, Artificial Sequence
  ENSG00000160447_13 (sequence is synthesized)
tggccttcctgagacttgaggacttcctggacaatgcctgtcaccaactgtccctcagcctggtaccgcagggactgctttttgcccaggtgaccttctgcgatcctgtcattgagaggc

SEQ ID NO: 477242 - DNA, 120 bp, Artificial Sequence
  ENSG00000160447_14 (sequence is synthesized)
ctaaacgcagaggccaggacttcctgagggcttcgcagatgaacctcggcatggcggcctgggggcgcctcgtcatgaacctgctgcccccctgcagctccccgagcacaatcagccccc

SEQ ID NO: 477243 - DNA, 120 bp, Artificial Sequence
  ENSG00000160447_15 (sequence is synthesized)
ctaaaggatgccctcggaccccaacaacactgcgagaggcctctgaccctgccactcccagtaatttcctgcccaagaagacccccttgggtgaagagatgacacccccacccaagcccc

SEQ ID NO: 477244 - DNA, 120 bp, Artificial Sequence
  ENSG00000160447_16 (sequence is synthesized)
cacgcctctacctcccccaggagccaacatccgaggagactccgcgcaccaaacgtccccatatggagcctaggactcgacgtgggccatctccaccagcctcccccaccaggaaacccc

SEQ ID NO: 477245 - DNA, 120 bp, Artificial Sequence
  ENSG00000160447_17 (sequence is synthesized)
ctcggcttcaggacttccgctgcttagctgtgctgggccggggacactttgggaaggtcctcctggtccagttcaaggggacagggaaatactacgccatcaaagcactgaagaagcagg

SEQ ID NO: 477246 - DNA, 120 bp, Artificial Sequence
  ENSG00000160447_18 (sequence is synthesized)
aggtgctcagccgggacgagatagagagcctgtactgcgagaagcggatcctggaggctgtgggctgcacagggcaccctttcctgctctccctccttgcctgcttccagacctccagcc

SEQ ID NO: 477247 - DNA, 120 bp, Artificial Sequence
  ENSG00000160447_19 (sequence is synthesized)
atgcctgctttgtgactgagtttgtgcctggtggtgacctcatgatgcagatccacgaggatgtcttccccgagccccaggcccgcttctacgtggcttgtgttgtcctggggctgcagt

SEQ ID NO: 477248 - DNA, 120 bp, Artificial Sequence
  ENSG00000160447_20 (sequence is synthesized)
tcttacacgagaagaagatcatttacagggacctgaagttggataaccttctgctggatgcccagggattcctgaagatcgcagactttggactctgcaaggaagggatcggcttcgggg

SEQ ID NO: 477249 - DNA, 120 bp, Artificial Sequence
  ENSG00000160447_21 (sequence is synthesized)
accggactagcaccttctgtggcaccccggagttcctggctcccgaggtgctgacccaggaggcatacacacgggctgtggactggtgggggctgggtgtgctgctctacgagatgctgg

SEQ ID NO: 477250 - DNA, 120 bp, Artificial Sequence
  ENSG00000160447_22 (sequence is synthesized)
tgggtgagtgcccgttcccaggggacacagaggaagaggtgtttgactgcatcgtcaacatggacgccccctaccccggctttctgtcggtgcaagggcttgagttcattcagaagctcc

SEQ ID NO: 477251 - DNA, 120 bp, Artificial Sequence
  ENSG00000160447_23 (sequence is synthesized)
tccagaagtgcccggagaagcgcctcggggcaggtgagcaggatgccgaggagatcaaggtccagccattcttcaggaccaccaactggcaagccctgctcgcccgcaccatccagcccc

SEQ ID NO: 477252 - DNA, 120 bp, Artificial Sequence
  ENSG00000160447_24 (sequence is synthesized)
ccttcgtgcctaccctgtgtggccctgcggacctgcgctactttgagggcgagttcacagggctgccgcctgccctgaccccacctgcaccccacagcctcctcactgcccgccaacagg

SEQ ID NO: 477253 - DNA, 120 bp, Artificial Sequence
  ENSG00000160447_25 (sequence is synthesized)
ccgccttccgggacttcgactttgtgtcagagcgattcctggaaccctgagggcatctcctggcacctctgtccccttcccccacagactgttagagcctctgctcgttcacccgtgcgc

SEQ ID NO: 477254 - DNA, 120 bp, Artificial Sequence
  ENSG00000160447_26 (sequence is synthesized)
cctgcctggaggtccaggccttgctgggtacttctgagcccttgggattcaaagtggcagccatggggccactgttgtgggctttgctcagtgtcactgggcaaagtgtgtcccttcccc

SEQ ID NO: 477255 - DNA, 120 bp, Artificial Sequence
  ENSG00000160447_27 (sequence is synthesized)
ctccagctcgccctcttctacctcccagcgagacctggcccagaaagggtgccgcagcaaggagtgatatggtttgtctttttaagactggacttgctttatattaaatttgtaaaagtg

SEQ ID NO: 477256 - DNA, 120 bp, Artificial Sequence
  ENSG00000160460_0 (sequence is synthesized)
tatgaccctgtgtgactcagtgacccggagggcaagcaggactgtgggtgacaccttgtgtcatcctctgagcctcaccttccccgatggcgcaggtaccaggggaagtggacaacatgg

SEQ ID NO: 477257 - DNA, 120 bp, Artificial Sequence
  ENSG00000160460_1 (sequence is synthesized)
agggcctgcctgctcctaacaacaaccctgctgcccgctgggagagtccggatcggggctgggagcgggagcagccggctgcgtccaccgcagcggcctcgctctttgagtgctcccgga

SEQ ID NO: 477258 - DNA, 120 bp, Artificial Sequence
  ENSG00000160460_2 (sequence is synthesized)
tcaaggccttggcagatgagcgggaagccgtgcagaagaaaaccttcaccaagtgggtgaactcgcacctcgcccgcgtgggctgccacatcggggacctctatgtggacctccgggacg

SEQ ID NO: 477259 - DNA, 120 bp, Artificial Sequence
  ENSG00000160460_3 (sequence is synthesized)
gcttcgtgctcacgcggctcctggaagtgctgtctggggagcagctgcccaggcccacgcgcggccgcatgcggatccactcactggagaacgtggacaaggcgctgcagtttctgaagg

SEQ ID NO: 477260 - DNA, 120 bp, Artificial Sequence
  ENSG00000160460_4 (sequence is synthesized)
agcagcgcgtgcacctggagaacgtgggttcgcatgacatcgtggatgggaatcaccggctgacgctggggctggtctggaccatcatcctgcgcttccagattcaagtcatcaaaattg

SEQ ID NO: 477261 - DNA, 120 bp, Artificial Sequence
  ENSG00000160460_5 (sequence is synthesized)
agactgaggacaacagagagacacgctcagccaaggatgctctgctcttgtggtgtcagatgaagacagctggttaccctgaggtaaacatccagaatttcaccaccagctggcgggatg

SEQ ID NO: 477262 - DNA, 120 bp, Artificial Sequence
  ENSG00000160460_6 (sequence is synthesized)
gcttggccttcaatgccctcattcaccggcacaggcctgatctcgtggacttcagcaaactcaccaagtccaatgccaactacaacctgcagagagccttccgcacagctgagcagcacc

SEQ ID NO: 477263 - DNA, 120 bp, Artificial Sequence
  ENSG00000160460_7 (sequence is synthesized)
tggggctggcgcggctgctggatcctgaagatgtgaacatggaggctccagatgagaagtccatcatcacctacgtggtctctttctaccactatttctccaagatgaaggctctggctg

SEQ ID NO: 477264 - DNA, 120 bp, Artificial Sequence
  ENSG00000160460_8 (sequence is synthesized)
tggaggggaagcgtatcgggaaggtcttggaccaggtattggaggtggggaagatcatagaacgctacgaggagctggcggctgagctgctggcctggatccaccgcaccgtgggcctca

SEQ ID NO: 477265 - DNA, 120 bp, Artificial Sequence
  ENSG00000160460_9 (sequence is synthesized)
tcagcaatcagaaatttgccaactccttaagtggggtgcagcagcaactccaggctttcacggcctattgcacgctggagaagcctgtcaagttccaggagaaggggaacctagaggtgc

SEQ ID NO: 477266 - DNA, 120 bp, Artificial Sequence
  ENSG00000160460_10 (sequence is synthesized)
tgctcttcagcatccagagcaaactgcgtgcctgcaaccgtcgcctctttgtgcctcgggagggctgtggcatctgggatattgacaaggcatggggtgagctggagaaggctgagcatg

SEQ ID NO: 477267 - DNA, 120 bp, Artificial Sequence
  ENSG00000160460_11 (sequence is synthesized)
agcgggaggctgccctacgggctgagctgattcggcaggagaagctggaactactggcacagaggtttgaccacaaggtggctatgagggagagctggctgaatgagaaccagcgtctgg

SEQ ID NO: 477268 - DNA, 120 bp, Artificial Sequence
  ENSG00000160460_12 (sequence is synthesized)
tctcccaggacaactttgggtatgagctgcccgcagtggaggcagccatgaagaaacacgaagcgatcgaggcagacattgcggcctacgaggagcgggtgcagggtgtggcggagctgg

SEQ ID NO: 477269 - DNA, 120 bp, Artificial Sequence
  ENSG00000160460_13 (sequence is synthesized)
cccaggcattggcagccgaaggctactacgatatccggcgggtggcagcccagcgtgacagcgtcctgcgccagtgggccctgctaactgggcttgtgggtgcccggcggacacgacttg

SEQ ID NO: 477270 - DNA, 120 bp, Artificial Sequence
  ENSG00000160460_14 (sequence is synthesized)
agcagaaccttgccctgcagaaggtcttccaggagatggtgtacatggtggactggatggaggagatgcaggctcagctgctgtcccgggagtgtgggcagcacctggtggaggcagacg

SEQ ID NO: 477271 - DNA, 120 bp, Artificial Sequence
  ENSG00000160460_15 (sequence is synthesized)
acctgttgcagaagcatggactgctggagggagacattgccgcccagagcgagcgggtggaggctctcaatgccgctgccctgcgcttctcccagctgcagggctaccagccctgcgacc

SEQ ID NO: 477272 - DNA, 120 bp, Artificial Sequence
  ENSG00000160460_16 (sequence is synthesized)
cgcaggtcatctgcaaccgcgtgaaccacgtgcacggctgcctggcggagctgcaggagcaggcagcgcggcgacgcgcggagctggaggcttcgcggagcctgtgggcgctgctgcagg

SEQ ID NO: 477273 - DNA, 120 bp, Artificial Sequence
  ENSG00000160460_17 (sequence is synthesized)
caggagctggaggaggccgagagctgggcgcgcgacaaggagcgtctcctggaggctgcgggcggcggcggtgcggcgggcgcagcgggcgcagcgggaacagcgggcggcgcgcatgac

SEQ ID NO: 477274 - DNA, 120 bp, Artificial Sequence
  ENSG00000160460_18 (sequence is synthesized)
ccagcacagcgcgcctcctggcccagcacaagatcctgcagggcgagctgggcgggcggcgagcgttgctgcagcaggccctgcggtgtggcgaggagctggttgcggccggcggtgccg

SEQ ID NO: 477275 - DNA, 120 bp, Artificial Sequence
  ENSG00000160460_19 (sequence is synthesized)
gaggagctggttgcggccggcggtgccgtcggcccgggagcagacaccgtgcacctggtaggcctggcggagcgcgcggcgagcgcccggcgccgctggcagaggctggaagaggcggcg

SEQ ID NO: 477276 - DNA, 120 bp, Artificial Sequence
  ENSG00000160460_20 (sequence is synthesized)
cgcgggcgctgcaccagttcggcgctgacctcgacgggctgctggactggcttcgcgacgcttaccgcctggcagccgccggtgacttcggccacgacgaagcttccagccgccgcctgg

SEQ ID NO: 477277 - DNA, 120 bp, Artificial Sequence
  ENSG00000160460_21 (sequence is synthesized)
ctggcgcgccagcaccgcgcgctcaccggggaggtggaggcacatcgcgggcccgtgagcggcctgcggcgccagctggcgacactcgggggtgccagtggcgcagggccactggtggtg

SEQ ID NO: 477278 - DNA, 120 bp, Artificial Sequence
  ENSG00000160460_22 (sequence is synthesized)
tgcaggtgcgcgtggtggaagcagagcagttgttcgctgaggtgaccgaagtggcggcgctgaggcgccagtggctgcgggacgcgctcgctgtctaccgcatgtttggcgaggtgcacg

SEQ ID NO: 477279 - DNA, 120 bp, Artificial Sequence
  ENSG00000160460_23 (sequence is synthesized)
cgtgtgagctgtggatcggcgagaaggagcaatggctgctctccatgcgtgtgccggattcactcgacgacgtcgaggtggtgcagcaccgattcgagagcctggaccaagagatgaaca

SEQ ID NO: 477280 - DNA, 120 bp, Artificial Sequence
  ENSG00000160460_24 (sequence is synthesized)
gcctgatgggccgcgttctggacgtgaaccacacagtccaggagctggtggaaggaggccaccccagttcagatgaggtgcgttcctgccaggaccacctcaacagcaggtggaaccgca

SEQ ID NO: 477281 - DNA, 120 bp, Artificial Sequence
  ENSG00000160460_25 (sequence is synthesized)
tcgtggagctagtggaacagcgcaaagaggaaatgagcgcggtgctgctggtggagaaccacgtgctggaggtggccgaggtgcgcgcccaggtgcgtgagaagcggagagctgtggaga

SEQ ID NO: 477282 - DNA, 120 bp, Artificial Sequence
  ENSG00000160460_26 (sequence is synthesized)
gagagcgcgccccgggccggcggcgccctgcagtggcgtcttagcggcctagaggccgctctgcaggcgctggagccgcgccaggcggcccttctggaggaggcagccctgctggctgag

SEQ ID NO: 477283 - DNA, 120 bp, Artificial Sequence
  ENSG00000160460_27 (sequence is synthesized)
cggcgcggctgcaccagggcgcggaggagctgggcgccgagtggggcgcgctagctagcgcggctcaggcctgcggcgaggcggtggcggcagcagggcgcctgcagcgcttcctacatg

SEQ ID NO: 477284 - DNA, 120 bp, Artificial Sequence
  ENSG00000160460_28 (sequence is synthesized)
gcttcctacatgacctcgacgctttcctggactggctcgtgcgcgcccaggaggcggcgggcggcagcgaggggcccctgcccaacagcctagaagaggcggacgcgctgctggcgcgcc

SEQ ID NO: 477285 - DNA, 120 bp, Artificial Sequence
  ENSG00000160460_29 (sequence is synthesized)
acgctgcgctcaaggaggaggtggaccagcgcgaggaagactatgctcgcatcgtggcggccagcgaggcgctgctggccgccgacggcgcagagctgggcccgggcctggcactagacg

SEQ ID NO: 477286 - DNA, 120 bp, Artificial Sequence
  ENSG00000160460_30 (sequence is synthesized)
agtggctgccacacctcgaacttggctggcataaactgctcggcttgtgggaggcgcgcagggaggcgctggtccaggcgcacatctaccagctcttcctgcgggatctacgccaggcgc

SEQ ID NO: 477287 - DNA, 120 bp, Artificial Sequence
  ENSG00000160460_31 (sequence is synthesized)
tcgtggtgctgcgtaaccaggagatggcgctgtctggtgcggagctcccgggcacagtggaatcggtggaggaggccttgaaacagcaccgtgactttctcaccaccatggagctgagcc

SEQ ID NO: 477288 - DNA, 120 bp, Artificial Sequence
  ENSG00000160460_32 (sequence is synthesized)
agcaaaagatgcaggtggccgtgcaggctgcagagggcctgctgaggcagggcaacatctacggggagcaggctcaggaggctgtgacccggctgctggagaagaaccaagaaaaccagt

SEQ ID NO: 477289 - DNA, 120 bp, Artificial Sequence
  ENSG00000160460_33 (sequence is synthesized)
tacgggcccagcaatggatgcaaaagctacatgaccaacttgagctgcagcacttcctccgagactgccacgagctggatggctggatccatgagaagatgctgatggcgcgggatggca

SEQ ID NO: 477290 - DNA, 120 bp, Artificial Sequence
  ENSG00000160460_34 (sequence is synthesized)
cgcgggaggacaaccacaagctgcataagagatggctccggcaccaggcattcatggccgagctggctcagaataaggagtggctggagaagatcgagcgggagggccagcaactgatgc

SEQ ID NO: 477291 - DNA, 120 bp, Artificial Sequence
  ENSG00000160460_35 (sequence is synthesized)
aggagaagcccgaactggcggcctccgtgcggaagaagctgggcgagatccgccagtgctgggcggagctggagagcaccacccaggccaaggcacggcagctctttgaggccagcaaag

SEQ ID NO: 477292 - DNA, 120 bp, Artificial Sequence
  ENSG00000160460_36 (sequence is synthesized)
agaagctccttcacatggagagccagctgcaagacgtggaccctggaggagacctggccactgtcaacagtcagctcaagaagctgcagtccatggagtcgcaggtggaggagtggtacc

SEQ ID NO: 477293 - DNA, 120 bp, Artificial Sequence
  ENSG00000160460_37 (sequence is synthesized)
gcgaggtgggagagctgcaggcgcagacggcggcgctgccgctggagccggcgagcaaggagctggtgggtgagcggcagaacgcggtgggcgagcgcctggtgcgcctgctcgagccgt

SEQ ID NO: 477294 - DNA, 120 bp, Artificial Sequence
  ENSG00000160460_38 (sequence is synthesized)
tgcaggagcgccgccgcttgctgctggcttccaaggagttgcaccaggtggcgcacgacctggacgacgagctggcatgggttcaggagcggctgccactggccatgcagacagagcgag

SEQ ID NO: 477295 - DNA, 120 bp, Artificial Sequence
  ENSG00000160460_39 (sequence is synthesized)
gcaacggtttgcaggcggtccagcagcacatcaaaaagaaccagggcctgcggcgggagatccaggcgcatgggccgcgcctggaggaggtgctggagcgcgcgggcgcgctggcgtcgc

SEQ ID NO: 477296 - DNA, 120 bp, Artificial Sequence
  ENSG00000160460_40 (sequence is synthesized)
tgcgcagcccggaggcagaggcagtgcgccggggcctggagcagctgcagagcgcctgggccggactgcgggaggctgccgagcgacggcagcaggtgctggacgccgccttccaggtgg

SEQ ID NO: 477297 - DNA, 120 bp, Artificial Sequence
  ENSG00000160460_41 (sequence is synthesized)
agcagtactacttcgacgtggctgaggtggaggcgtggctgggcgagcaggagctgctcatgatgagtgaggacaagggcaaggacgaacagagcaccctgcagctgctcaagaaacacc

SEQ ID NO: 477298 - DNA, 120 bp, Artificial Sequence
  ENSG00000160460_42 (sequence is synthesized)
tgcagctggagcaaggcgtggagaactacgaggaaagcatcgcgcagctgtcgcgccagtgccgggcgctgctggagatggggcacccggacagcgagcagatcagccggcggcagtctc

SEQ ID NO: 477299 - DNA, 120 bp, Artificial Sequence
  ENSG00000160460_43 (sequence is synthesized)
aggtggaccgcctgtacgtggcgctcaaggagctgggtgaggagcgccgggtggctctggaacagcagtactggctgtaccagctcagccgccaggtgagcgagcttgagcactggattg

SEQ ID NO: 477300 - DNA, 120 bp, Artificial Sequence
  ENSG00000160460_44 (sequence is synthesized)
ccgagaaggaggtggtggctggctcacccgagctcggccaggactttgagcatgtctcggtgctgcaggagaaattctcagagtttgccagcgagacaggtatggcagggcgggaacggc

SEQ ID NO: 477301 - DNA, 120 bp, Artificial Sequence
  ENSG00000160460_45 (sequence is synthesized)
tggcagctgtgaaccagatggtggatgagctgatcgagtgtggccatacagcagcggccaccatggccgagtggaaggacggactgaacgaggcctgggctgagctgctggagctcatgg

SEQ ID NO: 477302 - DNA, 120 bp, Artificial Sequence
  ENSG00000160460_46 (sequence is synthesized)
gcacacgggcccagctgctggccgcctctcgggagcttcataagttcttcagtgacgcccgagagcttcagggacagattgaggagaagcggaggcggctgccccgcctgaccaccccgc

SEQ ID NO: 477303 - DNA, 120 bp, Artificial Sequence
  ENSG00000160460_47 (sequence is synthesized)
ctgagccgagacccagtgccagttccatgcagcggaccctgagagcctttgagcatgacctgcagctcctcgtgtcccaggtacggcagctgcaggagggggcggcccagctgcggacgg

SEQ ID NO: 477304 - DNA, 120 bp, Artificial Sequence
  ENSG00000160460_48 (sequence is synthesized)
tgtatgcgggtgaacatgccgaggccatcgctagccgggagcaggaggtgctgcagggttggaaagagctgctgtcagcctgtgaggatgcccgcctgcatgtcagctccacagccgacg

SEQ ID NO: 477305 - DNA, 120 bp, Artificial Sequence
  ENSG00000160460_49 (sequence is synthesized)
ccctgcgcttccacagccaagtccgcgacctgctctcctggatggatggcatcgccagccagattggggcagccgacaagcccagggacgtgtcatcagtggaggtgctcatgaactacc

SEQ ID NO: 477306 - DNA, 120 bp, Artificial Sequence
  ENSG00000160460_50 (sequence is synthesized)
accagggcctgaagactgagctggaggcgcgggtgcctgagctgaccacctgccaggagctggggcgatctctgctgctcaacaaaagtgccatggctgatgagatccaggcacagctgg

SEQ ID NO: 477307 - DNA, 120 bp, Artificial Sequence
  ENSG00000160460_51 (sequence is synthesized)
acaagctgggaaccaggaaggaggaggtgtcggaaaagtgggaccgccattgggagtggctgcagcagatgctggaggtgcaccagtttgcccaggaggcggtggtggctgatgcctggc

SEQ ID NO: 477308 - DNA, 120 bp, Artificial Sequence
  ENSG00000160460_52 (sequence is synthesized)
tgacagcccaggagccgctcctgcagagccgggagctgggcagcagcgtggatgaggtggagcagcttatccggcgacatgaggccttccgcaaagcggctgcagcctgggaagagaggt

SEQ ID NO: 477309 - DNA, 120 bp, Artificial Sequence
  ENSG00000160460_53 (sequence is synthesized)
tcagctctctgcggcgcctgaccacgatcgagaaaatcaaagcggaacagagcaagcagccgcctaccccactgctggggcgcaagttctttggggaccccacggaactggcggccaagg

SEQ ID NO: 477310 - DNA, 120 bp, Artificial Sequence
  ENSG00000160460_54 (sequence is synthesized)
cggcgcccctgctgcggccagggggctatgaaaggggcttggagcccctggcccgccgagcctcggacacgctctcggccgaggtgcggactcgggtggggtatgtgcgccaggagctca

SEQ ID NO: 477311 - DNA, 120 bp, Artificial Sequence
  ENSG00000160460_55 (sequence is synthesized)
gccaggagctcaagcccgagcgcctccagccgcgcattgaccggctgccggagatcccggggagggtggagcccgcggccctgccggccgcaccagaggacgcggcggagacccccgcga

SEQ ID NO: 477312 - DNA, 120 bp, Artificial Sequence
  ENSG00000160460_56 (sequence is synthesized)
cggagcaggtgcggccacgaccggagcgccaggagtcagctgatcgcgcggaggagctgcccaggaggcggcggcctgagcggcaagagtcagtcgatcaatccgaggaggctgcgcgga

SEQ ID NO: 477313 - DNA, 120 bp, Artificial Sequence
  ENSG00000160460_57 (sequence is synthesized)
ggcggcggccggagcggcaggagtcagcggagcacgaggcggcacacagccttaccctgggccgctatgagcagatggagcggcggcgcgagcggcgtgagcggcgcttggagcggcagg

SEQ ID NO: 477314 - DNA, 120 bp, Artificial Sequence
  ENSG00000160460_58 (sequence is synthesized)
agtccagcgaacaggagatgcccatcagaggagacctggtcaaggggaaggccaccctggctgacattgtggaacagctgcaggagaaagaggcaggcccagggctgcctgctgggccgt

SEQ ID NO: 477315 - DNA, 120 bp, Artificial Sequence
  ENSG00000160460_59 (sequence is synthesized)
ctgctgggccgtcgctgcctcagccacgcgagcttcccccaggtcgcctgcccaacgggcttgagctgcccgagcggacacctcggccggaccggccccgggcgcgggaccggcccaagc

SEQ ID NO: 477316 - DNA, 120 bp, Artificial Sequence
  ENSG00000160460_60 (sequence is synthesized)
agagagggtggtgagggcgggggaagccggcgctcgcgctccgccccggcccagggcggctccgcccccgcgcctccgccaccgcccactcacacagtgcagcacgagggcttcctactg

SEQ ID NO: 477317 - DNA, 120 bp, Artificial Sequence
  ENSG00000160460_61 (sequence is synthesized)
tcctactgcgcaagcgcgagctcgacgctaaccgcaagtcgtccaaccggtcgtgggtgagcctgtactgtgtgcttagtaagggggaactgggcttctacaaggactccaagggcccgg

SEQ ID NO: 477318 - DNA, 120 bp, Artificial Sequence
  ENSG00000160460_62 (sequence is synthesized)
catccgggagcacacacggtggggaaccgctgctcagcctgcacaaggccaccagcgaggtggctagtgactacaagaaaaagaagcatgtcttcaagctccagacccaggatggcagtg

SEQ ID NO: 477319 - DNA, 120 bp, Artificial Sequence
  ENSG00000160460_63 (sequence is synthesized)
agtttttgctccaggcaaaagatgaggaggagatgaacggctggctggaggctgtagcttcctcggtggcggaacacgcagagatcgcccgctggggccagacactacccactacttcat

SEQ ID NO: 477320 - DNA, 120 bp, Artificial Sequence
  ENSG00000160460_64 (sequence is synthesized)
ccacagatgagggcaaccctaagagggaaggcggagatcgcagggccagcgggcgcaggaagtgacttcccacccccaggacctgacacatctcgtctcccctcttttccgcactgtggg

SEQ ID NO: 477321 - DNA, 120 bp, Artificial Sequence
  ENSG00000160460_65 (sequence is synthesized)
cacaaagacactttttcttccgcaggggcgggagcccctagttccaacactgaggacgcgtgacatggtgggcaccggaaaggaggggacttctcctgcaccccaagaagtggtggggag

SEQ ID NO: 477322 - DNA, 120 bp, Artificial Sequence
  ENSG00000160460_66 (sequence is synthesized)
attgctgcccctatagccatatctcggccccttcccactcaccacccccaccccaggtgctgggggtcccttatttttatgcaataactgagcttgatgggggtgggcagggggccagtt

SEQ ID NO: 477323 - DNA, 120 bp, Artificial Sequence
  ENSG00000160460_67 (sequence is synthesized)
gagccaagcccccagccccgatctgcagatcctgccccaagaagctggggtggtgggggcagtaattcctgcccccctctctgccctagggatgggcacgggggcgctggtgaggtcccc

SEQ ID NO: 477324 - DNA, 120 bp, Artificial Sequence
  ENSG00000160460_68 (sequence is synthesized)
tggaccatccagggtgctagggggcagggaggggacaccccctccccgcctttacctcacttccaatgctgccttgatctctgtctgggaggggggagtgaaggggccctagccccctgc

SEQ ID NO: 477325 - DNA, 120 bp, Artificial Sequence
  ENSG00000160460_69 (sequence is synthesized)
actccgccgcctcagagccatgcggttaattcctgacttagtttatttttgcaaaacgtcgatctcctcctcccccgccccgcatccgcgaaggcttttaatgggaggggcgtcaaagct

SEQ ID NO: 477326 - DNA, 120 bp, Artificial Sequence
  ENSG00000160460_70 (sequence is synthesized)
caaaactgttttcctctctcctcccccctccagttgtaaatgccacttcatgaggggaggggcgaggggaagcccacccctgcatgcttctggctggagcacctccctggggagtcgggg

SEQ ID NO: 477327 - DNA, 120 bp, Artificial Sequence
  ENSG00000160460_71 (sequence is synthesized)
gattgggttgtgggcagtccccatggccgcctggagaagccgctggggcccgggggtgtggggcggtgtggcgggcgcacactgtatgtacctataataaaccctttggctttgacggtc

SEQ ID NO: 477328 - DNA, 80 bp, Artificial Sequence
  ENSG00000160460_72 (sequence is synthesized)
cgcggcggcggcgcgagagagggaggcgcggcggcgcatgcggatctggctgagccgcgggccggcggggccgagctgag

SEQ ID NO: 477329 - DNA, 120 bp, Artificial Sequence
  ENSG00000160460_73 (sequence is synthesized)
tgttgggagttggcgcagcgctggaattggacgttgggtgggagaggtcctccttgctgtgtgctggagccctcgaatttggcaagtgggcgggccggaatggggggacacggctcaggg

SEQ ID NO: 477330 - DNA, 120 bp, Artificial Sequence
  ENSG00000160460_74 (sequence is synthesized)
atggttgagagggtggggccaggagcacctggatttgagtgtagtagtggggaccttgtcgggggagaaaagagtaggcgatgtctaggactggggtagagaagaatttactcaggacag

SEQ ID NO: 477331 - DNA, 120 bp, Artificial Sequence
  ENSG00000160460_75 (sequence is synthesized)
gcaaggggctctttctactcagtgtctgggaggacagaaaagcctgtgctgagattggctatggcggtggggctggagacctcctggtgcagtggggtgatgttgcctcgtgtaggcgga

SEQ ID NO: 477332 - DNA, 120 bp, Artificial Sequence
  ENSG00000160460_76 (sequence is synthesized)
tgctgagctccaggcctggaccagggatggaatctgtaaggaggtacagagagagacctctgtccaagtgggctcagagattggggctagaggtgggatgcattggctggggacccaacc

SEQ ID NO: 477333 - DNA, 120 bp, Artificial Sequence
  ENSG00000160460_77 (sequence is synthesized)
cattggctggggacccaacctgggagtccagagtcccaccgaggttcctggataggaggggcgtgagactgagatagaaaccgggtgaggctgccgaggtgggcggatcacttgaggtca

SEQ ID NO: 477334 - DNA, 120 bp, Artificial Sequence
  ENSG00000160460_78 (sequence is synthesized)
cagccgacaagcccaggtgcccctcatccctcctcgggcttcctgcctccccctggtggcctaccccagccacccccagcccattgacagcccccttctcaatggaatgacaacagccaa

SEQ ID NO: 477335 - DNA, 120 bp, Artificial Sequence
  ENSG00000160460_79 (sequence is synthesized)
agctgtccgcggtgctggcgcgggcgggactgaggggccggcccccaagggaggggagcgaagcggggggacttctaagaccacttctaggctggatggctggatccatgagaagatgct

SEQ ID NO: 477336 - DNA, 120 bp, Artificial Sequence
  ENSG00000160460_80 (sequence is synthesized)
atgccacatgggggccaggtcagggtccaaccccactcaaggtatgtcaagtggaggggatttaatacagggatttatttcaaacttgtagaagatgagaaagggaatattgaagcaatc

SEQ ID NO: 477337 - DNA, 120 bp, Artificial Sequence
  ENSG00000160460_81 (sequence is synthesized)
cagctagtaataactgttggaagcagccaccactccctaaggtatggagtacaaagggaaaaggaaggatctagagccacaaagcagtaggtaaatgactagcatgctaaaggtttcaca

SEQ ID NO: 477338 - DNA, 120 bp, Artificial Sequence
  ENSG00000160460_82 (sequence is synthesized)
ggaccctgacactcatttcctggatggagaaaccaaggctcaggggtatgggaatggctttgcatggaataacaatgacattcattgagcatttctctaccagtctctgggccaagcact

SEQ ID NO: 477339 - DNA, 120 bp, Artificial Sequence
  ENSG00000160460_83 (sequence is synthesized)
cactgaactcatcccagccacttctggagattggtactgttattatcctgttttaccaatggggaaactgaggcacagaaagtaaggcacctggcccaaggacacacagctaaccagtgt

SEQ ID NO: 477340 - DNA, 120 bp, Artificial Sequence
  ENSG00000160460_84 (sequence is synthesized)
aagggacactcacaggccagagttatcagggctgtaatgggaaagcccacaggcactgagagcccaaaggaggttcctaacccagtggggagtgggaagggcttcagggagggctgcctg

SEQ ID NO: 477341 - DNA, 120 bp, Artificial Sequence
  ENSG00000160460_85 (sequence is synthesized)
ggagcctcagccttcgccgccgctgccgctgccgtcgcagttgaggggcgagcacccgcccgcccgctgcagggacgccccgccaacgccactgccgcttcagctggatggctggatcca

SEQ ID NO: 477342 - DNA, 120 bp, Artificial Sequence
  ENSG00000160460_86 (sequence is synthesized)
gtgtggcgcctctgtgtgctaggcactgttctaggtgcttcgtgtgtattcagaccccttttttaggcctgtcattggggacttcggtcatggggcatccttctgtccgctgtccttccc

SEQ ID NO: 477343 - DNA, 120 bp, Artificial Sequence
  ENSG00000160460_87 (sequence is synthesized)
agttgcctattattaccctctccatgggatgtcacagcatgaaacaggctaaagacaggatgggcaagggaggtgtgggactgtatttgtgagggtgggtgaagaattctaacaattcca

SEQ ID NO: 477344 - DNA, 120 bp, Artificial Sequence
  ENSG00000160460_88 (sequence is synthesized)
cttcctcgtacctaatgccaaggtaggaataaacaagggcacctagtatgttttgctttgggagggattcctccaggatcgaggctttggatgactggagagacaggaattctttattcc

SEQ ID NO: 477345 - DNA, 120 bp, Artificial Sequence
  ENSG00000160460_89 (sequence is synthesized)
agacagtagaccaatagactttccttgagaaagctccatgagtggggaggattgagtggagcaaaggcttatggaggagacagcttaagacttaccttcaggaaattcagtatgggaggg

SEQ ID NO: 477346 - DNA, 120 bp, Artificial Sequence
  ENSG00000160460_90 (sequence is synthesized)
gataaggaagggaaatctcagcctgggcaaaggcttgatactgagagacttaaatgctcccctcagggcagcaacagccttaaggaagagcattttaggtccaactagggcgcaactagg

SEQ ID NO: 477347 - DNA, 120 bp, Artificial Sequence
  ENSG00000160460_91 (sequence is synthesized)
gcgcaaaggtccagaggtaggaaggctcagacatattcagaccttgaggatgttaatgaagagttattaggcagagtgctgcggctctgccttgagccccatcttgtcgctccaggtcgt

SEQ ID NO: 477348 - DNA, 120 bp, Artificial Sequence
  ENSG00000160469_0 (sequence is synthesized)
ggatggtgatgtcagcgtgccggagagaaaggacgaggtggcggggggaggcggagaggaggaggaggcggaggagagagggcgcgtgggggggcgggggggacctcggcctgcagcatc

SEQ ID NO: 477349 - DNA, 80 bp, Artificial Sequence
  ENSG00000160469_1 (sequence is synthesized)
caggaagcggggggccggccagaaacgggctggggagggggggccccgcagcccccctgggccatgctgactcccggggc

SEQ ID NO: 477350 - DNA, 80 bp, Artificial Sequence
  ENSG00000160469_2 (sequence is synthesized)
cagggggggcggccgggggaccggtcgggccgggaccaagggcaccatgtcgtccggggccaaggagggaggtgggggct

SEQ ID NO: 477351 - DNA, 120 bp, Artificial Sequence
  ENSG00000160469_3 (sequence is synthesized)
ctcccgcctaccacctcccccacccccacccccacccaccccagcacgcccaatatgtgggcccctatcggctggagaagacgctgggcaaaggacagacagggctggttaaactcgggg

SEQ ID NO: 477352 - DNA, 120 bp, Artificial Sequence
  ENSG00000160469_4 (sequence is synthesized)
tccactgcatcacgggtcagaaggtcgccatcaagatcgtgaaccgggagaagctgtcggagtcggtgctgatgaaggtggagcgggagatcgccatcctgaagctcatcgaacacccac

SEQ ID NO: 477353 - DNA, 120 bp, Artificial Sequence
  ENSG00000160469_5 (sequence is synthesized)
atgtcctcaagctccacgacgtctacgagaacaagaaatatttgtacctggttctggagcacgtctcggggggtgagctattcgactacctggtaaagaaggggagactgacgcccaagg

SEQ ID NO: 477354 - DNA, 120 bp, Artificial Sequence
  ENSG00000160469_6 (sequence is synthesized)
aggcccgaaagttcttccgccagattgtgtctgcgctggacttctgccacagctactccatctgccacagagacctaaagcccgagaacctgcttttggatgagaaaaacaacatccgca

SEQ ID NO: 477355 - DNA, 120 bp, Artificial Sequence
  ENSG00000160469_7 (sequence is synthesized)
ttgcagacttcggcatggcgtccctgcaggtgggggacagcctcctggagaccagctgcgggtccccccattatgcgtgtccagaggtgattaagggggaaaaatatgatggccgccggg

SEQ ID NO: 477356 - DNA, 120 bp, Artificial Sequence
  ENSG00000160469_8 (sequence is synthesized)
cagacatgtggagctgtggagtcatcctcttcgccctgctcgtgggggctctgccctttgatgacgacaacctccgccagctgctggagaaggtgaaacggggcgtcttccacatgcccc

SEQ ID NO: 477357 - DNA, 120 bp, Artificial Sequence
  ENSG00000160469_9 (sequence is synthesized)
acttcattcctccagattgccagagcctcctgaggggaatgatcgaagtggagcccgaaaaaaggctcagtctggagcaaattcagaaacatccttggtacctaggcgggaaacacgagc

SEQ ID NO: 477358 - DNA, 120 bp, Artificial Sequence
  ENSG00000160469_10 (sequence is synthesized)
cagacccgtgcctggagccagcccctggccgccgggtagccatgcggagcctgccatccaacggagagctggaccccgacgtcctagagagcatggcatcactgggctgcttcagggacc

SEQ ID NO: 477359 - DNA, 120 bp, Artificial Sequence
  ENSG00000160469_11 (sequence is synthesized)
gcgagaggctgcatcgcgagctgcgcagtgaggaggagaaccaagaaaagatgatatattatctgcttttggatcggaaggagcggtatcccagctgtgaggaccaggacctgcctcccc

SEQ ID NO: 477360 - DNA, 120 bp, Artificial Sequence
  ENSG00000160469_12 (sequence is synthesized)
tcccatgctgagccgtcacgggaagcggcgaccagagcggaagtccatggaagtcctgagcatcaccgatgccgggggtggtggctcccctgtacccacccgacgggccttggagatggc

SEQ ID NO: 477361 - DNA, 120 bp, Artificial Sequence
  ENSG00000160469_13 (sequence is synthesized)
ccagcacagccagagatcccgtagcgtcagtggagcctccacgggtctgtcctccagccctctaagcagcccaaggagtccggtcttttccttttcaccggagccgggggctggagatga

SEQ ID NO: 477362 - DNA, 120 bp, Artificial Sequence
  ENSG00000160469_14 (sequence is synthesized)
atgaggctcgaggcgggggctccccgacttccaaaacgcagacgctgccttctcggggccccaggggtgggggcgccggggagcagcccccgccccccagtgcccgctccacacccctgc

SEQ ID NO: 477363 - DNA, 120 bp, Artificial Sequence
  ENSG00000160469_15 (sequence is synthesized)
gggacccccttgcactcgcctctgcacacgccccgggccagtcccaccgggaccccggggacaacaccaccccccagccccggcggtggcgtcgggggagccgcctggaggagtcgtctc

SEQ ID NO: 477364 - DNA, 120 bp, Artificial Sequence
  ENSG00000160469_16 (sequence is synthesized)
cgggggagccgcctggaggagtcgtctcaactccatccgcaacagcttcctgggctcccctcgctttcaccggcgcaagatgcaggtccctaccgctgaggagatgtccagcttgacgcc

SEQ ID NO: 477365 - DNA, 120 bp, Artificial Sequence
  ENSG00000160469_17 (sequence is synthesized)
agagtcctccccggagctggcaaaacgctcctggttcgggaacttcatctccttggacaaagaagaacaaatattcctcgtgctaaaggacaaacctctcagcagcatcaaagcagacat

SEQ ID NO: 477366 - DNA, 120 bp, Artificial Sequence
  ENSG00000160469_18 (sequence is synthesized)
cgtccatgcctttctgtcgatccccagcctgagtcacagtgtgctgtcacagaccagcttcagggccgagtacaaggccagtggcggcccctccgtcttccaaaagcccgtccgcttcca

SEQ ID NO: 477367 - DNA, 120 bp, Artificial Sequence
  ENSG00000160469_19 (sequence is synthesized)
ggtggacatcagctcctctgagggtccagagccctccccgcgacgggacggcagcggaggtggtggcatctactccgtcaccttcactctcatctcgggtcccagccgtcggttcaagcg

SEQ ID NO: 477368 - DNA, 120 bp, Artificial Sequence
  ENSG00000160469_20 (sequence is synthesized)
agtggtggagaccatccaggcacagctcctgagcactcatgaccagccctccgtgcaggccctggcagacgagaagaacggggcccagacccggcctgctggtgccccaccccgaagcct

SEQ ID NO: 477369 - DNA, 120 bp, Artificial Sequence
  ENSG00000160469_21 (sequence is synthesized)
gcagcccccacccggccgcccagacccagagctgagcagctctccccgccgaggcccccccaaggacaagaagctcctggccaccaacgggacccctctgccctgaccccacggggccgg

SEQ ID NO: 477370 - DNA, 120 bp, Artificial Sequence
  ENSG00000160469_22 (sequence is synthesized)
ggagggaggggacccccctccaccccccttccgtgccccccaactgtgaatctgtaaataaggcccaaggaacatgtcgggaggggggtggacacaaaaaccggccttgccctgcaggga

SEQ ID NO: 477371 - DNA, 120 bp, Artificial Sequence
  ENSG00000160469_23 (sequence is synthesized)
tggggctccacaggccgtgcccaactgggggtggttctaggggaacagggggcgggggagctgtttctattttatttattgattaatttattattttatttattgatcaatctctctgcg

SEQ ID NO: 477372 - DNA, 120 bp, Artificial Sequence
  ENSG00000160469_24 (sequence is synthesized)
gggtggggtgggggagggacgggagctggttggggtggcttagcagatccggacagggccctctgtccctgtgtcgtccccaaccccctcttcccgggcccctcctcccctggtcctccc

SEQ ID NO: 477373 - DNA, 120 bp, Artificial Sequence
  ENSG00000160469_25 (sequence is synthesized)
gtcctccccccacgaccttctgtacggatttgctctccggaaggaattctggtttcgcgtgatcctgcctgcgtccgtgtctctgattccgccggcggcaaaaaaaaaaaaaaaaaaaaa

SEQ ID NO: 477374 - DNA, 120 bp, Artificial Sequence
  ENSG00000160469_26 (sequence is synthesized)
agtctttcattgcgcgcctacatgtgcctacgacctcacttctgcttctctacgactcaccaccctcacagctggagcaaattcagaaacatccttggtacctaggcgggaaacacgagc

SEQ ID NO: 477375 - DNA, 120 bp, Artificial Sequence
  ENSG00000160469_27 (sequence is synthesized)
agcggctgggaggggtgggatgccagggttcctgagaggcaacgggctagggactcggacttatgggtcctgggggaagaggacacagctagagaaggagtctaggggtcagaggcagga

SEQ ID NO: 477376 - DNA, 120 bp, Artificial Sequence
  ENSG00000160469_28 (sequence is synthesized)
gccaggcatggtggcggggttaactttggggaagggcccggagtccccggatggtgatgtcagcgtgccggagagaaaggacgaggtggcggggggaggcggagaggaggaggaggcgga

SEQ ID NO: 477377 - DNA, 120 bp, Artificial Sequence
  ENSG00000160469_29 (sequence is synthesized)
cacagctgagatgtaccctaaaccagagaaactgaccatactgatacctagaaaaaatggaaccatgggcagaaatacagggagcggaggagacctcctctgagcattgatgttggacct

SEQ ID NO: 477378 - DNA, 120 bp, Artificial Sequence
  ENSG00000160469_30 (sequence is synthesized)
gagagtccggtcttttccttttcaccggagccgggggctggagatgaggctcgaggcgggggctccccgacttccaaaacgcagacgctgccttctcggggccccaggggtgggggcgcc

SEQ ID NO: 477379 - DNA, 120 bp, Artificial Sequence
  ENSG00000160471_0 (sequence is synthesized)
gcggactcagaagcgagcggcaccccgggaccatcccacagcagatccagtggccgccaacgtcaggctggagttgcctccttcgtggatgttggatgtggaagcccaggagccccccaa

SEQ ID NO: 477380 - DNA, 120 bp, Artificial Sequence
  ENSG00000160471_1 (sequence is synthesized)
ggggaaatggtcgacgccgcccttcgacccgcgcttccccagccagaaccagatccgtaactgctaccagaacttcctggactaccaccgctgcctcaagaccaggacccgccgcgggaa

SEQ ID NO: 477381 - DNA, 120 bp, Artificial Sequence
  ENSG00000160471_2 (sequence is synthesized)
gagcacgcagccctgcgagtactatttccgcgtgtaccactcgctgtgccccatcagctgggtggagagctggaacgagcagatcaagaacgggattttcgccggcaaaatctgactgcc

SEQ ID NO: 477382 - DNA, 120 bp, Artificial Sequence
  ENSG00000160471_3 (sequence is synthesized)
ccagcgcggcttcctctgaagatgcagtgatcctgcatctttttgtctcgcggagccccgggtctcggttatccacccctacctcccagtgtctaagccacgaataatgccaccagcctt

SEQ ID NO: 477383 - DNA, 120 bp, Artificial Sequence
  ENSG00000160471_4 (sequence is synthesized)
cgagttccttgtttcccttgctctggtctccacgtgtatgatggggttctcaggcccaggcttcgaccagaggaccctctgccaccaccgtttcttcctgtccttgagctaccttggtga

SEQ ID NO: 477384 - DNA, 120 bp, Artificial Sequence
  ENSG00000160471_5 (sequence is synthesized)
actcatgaccccaggcccctgctccaccaggatgtcccccaggtcctgccagctgggaagtgccagcatgaacgcctccaacttcgtggaagccagggtcccctgcagctgagggacgcc

SEQ ID NO: 477385 - DNA, 120 bp, Artificial Sequence
  ENSG00000160471_6 (sequence is synthesized)
acacacctgccctccccagccagctcctgtctgtatgggcgagatgactgagagcgcccacgtccctaaggctgtcctgaccctccatgctgcgacaaggacagggaatggtcggtcact

SEQ ID NO: 477386 - DNA, 120 bp, Artificial Sequence
  ENSG00000160471_7 (sequence is synthesized)
atgggcctggtgtctcccctcccccaccacccggtgctgcccagctcaagccagaagctgactttggccgccatggggacatcaggcaaggtctggagacatttttggttggggcagagg

SEQ ID NO: 477387 - DNA, 120 bp, Artificial Sequence
  ENSG00000160471_8 (sequence is synthesized)
catgctcctggcatcgagtgggtggagaccagagaagccgctcaacatcctgcaatgcatgggacaggccctgcctagaaacaccagctcagcatggcagcagtgcggaggccaggaaac

SEQ ID NO: 477388 - DNA, 77 bp, Artificial Sequence
  ENSG00000160471_9 (sequence is synthesized)
acaccagctcagcatggcagcagtgcggaggccaggaaaccctgatcgccagtttctaacgccctcaccactgtcac

SEQ ID NO: 477389 - DNA, 60 bp, Artificial Sequence
  ENSG00000160471_10 (sequence is synthesized)
ccactagtttttagccctttttgttgggggtggggtgggggcagaggagaggcggataca

SEQ ID NO: 477390 - DNA, 120 bp, Artificial Sequence
  ENSG00000160471_11 (sequence is synthesized)
ttgttgggggtggggtgggggcagaggagaggcggatacagaaacttgtgagaatgtgatgaacgctctgaaccccctataaaaaatgtgcatgtaaatatatactctcaacatttaaaa

SEQ ID NO: 477391 - DNA, 120 bp, Artificial Sequence
  ENSG00000160471_12 (sequence is synthesized)
tccacccatgagtcctcagctgagactccctgctccgctgccctctttgtctaagagctgtggcaacagcacctgaatttcagaaacaaaaggccgggcgcggtggctcacacctgtcat

SEQ ID NO: 477392 - DNA, 120 bp, Artificial Sequence
  ENSG00000160471_13 (sequence is synthesized)
aggaggatcgcttgagctcaggagttcgagactagccttagcaacacagtgagacacaattgctacaaaaagattttaaaattagtttgacggggtggcgtgtgcctatggtcccagcta

SEQ ID NO: 477393 - DNA, 120 bp, Artificial Sequence
  ENSG00000160471_14 (sequence is synthesized)
agggtgaccctagacaagcttcttgacctgtgtgagcccgaggttccccaaggcaaaccaagatggctcagggccccattatcagaggaggacacaccctagatgagccatcccccagga

SEQ ID NO: 477394 - DNA, 120 bp, Artificial Sequence
  ENSG00000160471_15 (sequence is synthesized)
gtggactcaactacaggagggcttcctgttcatgcaacgtccccagagccttgacgaatgcacagaggcgctggcagaaccacgggggcaggacccctctctgagtcacagaatggagct

SEQ ID NO: 477395 - DNA, 120 bp, Artificial Sequence
  ENSG00000160471_16 (sequence is synthesized)
aagttggtgaggtcacccagccgccactgccccactgatgcctgagccaggggcaggggcagacctgcccggcctggcctccagcctggtggaccatcacctgtgcaaactccgaacacc

SEQ ID NO: 477396 - DNA, 120 bp, Artificial Sequence
  ENSG00000160471_17 (sequence is synthesized)
agctacgagccagcccagggtccccagttctcaacactgtcccacccagatggctccaaggccaaggagtgccgcttgacaaagccctagggttccagcctggtcctgctgagggagccg

SEQ ID NO: 477397 - DNA, 120 bp, Artificial Sequence
  ENSG00000160471_18 (sequence is synthesized)
tgagaccagtcagcctggggtgctggttttcccaacgggtactccctgagctatcagccttccagaggggctcctaggagggggaagccccatcctctgactgaagcggtcctatgaggc

SEQ ID NO: 477398 - DNA, 120 bp, Artificial Sequence
  ENSG00000160471_19 (sequence is synthesized)
ccctctctgagtcacagaatggagctaagttggtgaggtcacccaggtaacatcccaagcacagggtgccacacctgtgcagccacagcagcctcctgacctccccagagccgtgtctag

SEQ ID NO: 477399 - DNA, 120 bp, Artificial Sequence
  ENSG00000160471_20 (sequence is synthesized)
gcaggtagatgcctcgcgttgacagctacgagccagcccagggtccccagttctcaacactgtcccacccagatggctccaaggtgctcctgcctccaatcaccacacctacctctcacc

SEQ ID NO: 477400 - DNA, 120 bp, Artificial Sequence
  ENSG00000160471_21 (sequence is synthesized)
tcagtcctttccctactcccctcctgcctggaccatctccccaggctccttccccatcccacccctgatccatcccatctcgggtcctgaggggtcttctttgtaccacccagcgctgac

SEQ ID NO: 477401 - DNA, 120 bp, Artificial Sequence
  ENSG00000160471_22 (sequence is synthesized)
gagatccccatcatgtgagccagcttatttccaacagaatcccctggtgtccacgctttcggcacccgcacccacagccagcctcctgacctccccagagccgtgtctagaacccatttt

SEQ ID NO: 477402 - DNA, 120 bp, Artificial Sequence
  ENSG00000160471_23 (sequence is synthesized)
tgccctgttggccagccttcctccttcctcctcctcccatcatcctatcttcactgcctccagacctcatctcagcacattctcacactcccgaccccctctgcagccgccactgcccca

SEQ ID NO: 477403 - DNA, 120 bp, Artificial Sequence
  ENSG00000160471_24 (sequence is synthesized)
cactcccaccctaagtcccgcggagaccgttagggtgggaggccgggcggggccgggttggtgggggcggggcctggtcgagaaaaggcggggctgagcctggaggggcggggcgaggtt

SEQ ID NO: 477404 - DNA, 120 bp, Artificial Sequence
  ENSG00000160471_25 (sequence is synthesized)
ggtaggggcgaggcctgatctggaaggtgcggggccgagtcgtgaaggtgcggggcgaggtaggtaggggcagggtctgggtaggaggagcagtgtgagggaggtaggggtcggggcctg

SEQ ID NO: 477405 - DNA, 120 bp, Artificial Sequence
  ENSG00000160471_26 (sequence is synthesized)
atcccacagcagatccagtggccgccaacgtcaggctggtgagggcacgacgggtggggttcaggggcgggggtcaggatggggagacgggtcggagcgagggcgccccctcggccccac

SEQ ID NO: 477406 - DNA, 120 bp, Artificial Sequence
  ENSG00000160472_0 (sequence is synthesized)
agtggccccaggggtctggggaggtgacatgttgggctgtgggatcccagcgctgggcctgctcctgctgctgcagggctcggcagacggaaatggaatccagggattcttctacccatg

SEQ ID NO: 477407 - DNA, 120 bp, Artificial Sequence
  ENSG00000160472_1 (sequence is synthesized)
gagctgtgagggtgacatatgggaccgggagagctgtgggggccaggcggccatcgatagccccaacctctgcctgcgtctccggtgctgctaccgcaatggggtctgctaccaccagcg

SEQ ID NO: 477408 - DNA, 120 bp, Artificial Sequence
  ENSG00000160472_2 (sequence is synthesized)
acgaaaacgtgcggaggaagcacatgtgggcgctggtctggacgtgcagcggcctcctcctcctgagctgcagcatctgcttgttctggtgggccaagcgccgggacgtgctgcatatgc

SEQ ID NO: 477409 - DNA, 120 bp, Artificial Sequence
  ENSG00000160472_3 (sequence is synthesized)
ccggtttcctggcgggtccgtgtgacatgtccaagtccgtctcgctgctctccaagcaccgagggaccaagaagacgccgtccacgggcagcgtgccagtcgccctgtccaaagagtcca

SEQ ID NO: 477410 - DNA, 120 bp, Artificial Sequence
  ENSG00000160472_4 (sequence is synthesized)
gggatgtggagggaggcaccgagggggaagggacggaggagggtgaggagacagagggcgaggaagaggaggattaggggagtccccgggggactgctcaatacagatacggtggacgga

SEQ ID NO: 477411 - DNA, 120 bp, Artificial Sequence
  ENSG00000160505_0 (sequence is synthesized)
aaggaccaggaaggcgtggagcggtgagtcagcgcttcgtgctgggctgttcgtctcttctatgtgctgatttcctgggttactttgggtcttccttttctttctcccttttaccctgtc

SEQ ID NO: 477412 - DNA, 120 bp, Artificial Sequence
  ENSG00000160505_1 (sequence is synthesized)
tcctttcttgaggctgatcgatcacagccaggcctctccattctatttacccagcgttttccttctctccagttagtggggtagatgaacgccctgtgtttataaggtgcctcccaggag

SEQ ID NO: 477413 - DNA, 120 bp, Artificial Sequence
  ENSG00000160505_2 (sequence is synthesized)
cctgagacctgtgagaagaatggggggtggaggtgggggagactcgtcacgaagggagaccttggagcttcgagggtgggaatgttcttattagattcttcatctctgttgacacaaaca

SEQ ID NO: 477414 - DNA, 120 bp, Artificial Sequence
  ENSG00000160505_3 (sequence is synthesized)
tgtaggagaagctggagaacatagacagggatgaggttttatttatttattgttcctggtcactgtctctttgaggattggtatctctgctccagaaaagatggcagcctctttcttctc

SEQ ID NO: 477415 - DNA, 120 bp, Artificial Sequence
  ENSG00000160505_4 (sequence is synthesized)
tgattttggtcttatgtggtatctggaggagctcaaaaaggaggagttcaggaaatttaaagaacatctcaagcaaatgactttgcagcttgaactcaagcagattccctggactgaggt

SEQ ID NO: 477416 - DNA, 120 bp, Artificial Sequence
  ENSG00000160505_5 (sequence is synthesized)
caaaaaagcatcccgggaagaacttgcaaacctcttgatcaagcactatgaagaacaacaagcttggaacataaccttaagaatctttcaaaagatggatagaaaggatctctgcatgaa

SEQ ID NO: 477417 - DNA, 120 bp, Artificial Sequence
  ENSG00000160505_6 (sequence is synthesized)
ggtcatgagggagagaacaggatacacaaagacctatcaagctcacgcaaagcagaaattcagccgcttatggtccagcaagtctgtcactgagattcacctatactttgaggaggaagt

SEQ ID NO: 477418 - DNA, 120 bp, Artificial Sequence
  ENSG00000160505_7 (sequence is synthesized)
caagcaagaagaatgtgaccatttggaccgcctttttgctcccaaggaagctgggaaacagccacgtacagtgatcattcaaggaccacaaggaattggaaaaacgacactcctgatgaa

SEQ ID NO: 477419 - DNA, 120 bp, Artificial Sequence
  ENSG00000160505_8 (sequence is synthesized)
gctgatgatggcctggtcggacaacaagatctttcgggataggttcctgtacacgttctatttctgctgcagagaactgagggagttgccgccaacgagtttggctgacttgatttccag

SEQ ID NO: 477420 - DNA, 120 bp, Artificial Sequence
  ENSG00000160505_9 (sequence is synthesized)
agagtggcctgaccccgctgctcctataacagagatcgtgtctcaaccggagagactcttgttcgtcatcgacagcttcgaagagctgcagggcggcttgaacgaacccgattcggatct

SEQ ID NO: 477421 - DNA, 120 bp, Artificial Sequence
  ENSG00000160505_10 (sequence is synthesized)
gtgtggtgacttgatggagaaacggccggtgcaggtgcttctgagcagtttgctgaggaagaagatgctcccggaggcctccctgctcatcgctatcaaacccgtgtgcccgaaggagct

SEQ ID NO: 477422 - DNA, 120 bp, Artificial Sequence
  ENSG00000160505_11 (sequence is synthesized)
ccgggatcaggtgacgatctcagaaatctaccagccccggggattcaacgagagtgataggttagtgtatttctgctgtttcttcaaagacccgaaaagagccatggaagccttcaatct

SEQ ID NO: 477423 - DNA, 120 bp, Artificial Sequence
  ENSG00000160505_12 (sequence is synthesized)
tgtaagagaaagtgaacagctgttttccatatgccaaatcccgctcctctgctggatcctgtgtaccagtctgaagcaagagatgcagaaaggaaaagacctggccctgacctgccagag

SEQ ID NO: 477424 - DNA, 120 bp, Artificial Sequence
  ENSG00000160505_13 (sequence is synthesized)
cactacctctgtgtactcctctttcgtctttaacctgttcacacctgagggtgccgagggcccgactccgcaaacccagcaccagctgaaggccctgtgctccctggctgcagagggtat

SEQ ID NO: 477425 - DNA, 120 bp, Artificial Sequence
  ENSG00000160505_14 (sequence is synthesized)
gtggacagacacatttgagttttgtgaagacgacctccggagaaatggggttgttgacgctgacatccctgcgctgctgggcaccaagatacttctgaagtacggggagcgtgagagctc

SEQ ID NO: 477426 - DNA, 120 bp, Artificial Sequence
  ENSG00000160505_15 (sequence is synthesized)
ttgccaattttgaaaaagcaaggagagcacattggatttttttggggtgttttctaactggccttttaaataaaaaggaacaagaaaaactggatgcgttttttggcttccaactgtccc

SEQ ID NO: 477427 - DNA, 120 bp, Artificial Sequence
  ENSG00000160505_16 (sequence is synthesized)
aagagataaagcagcaaattcaccagtgcctgaagagcttaggggagcgtggcaatcctcagggacaggtggattccttggcgatattttactgtctctttgaaatgcaggatcctgcct

SEQ ID NO: 477428 - DNA, 120 bp, Artificial Sequence
  ENSG00000160505_17 (sequence is synthesized)
ttgtgaagcaggcagtgaacctcctccaagaagctaactttcatattattgacaacgtggacttggtggtttctgcctactgcttaaaatactgctccagcttgaggaaactctgttttt

SEQ ID NO: 477429 - DNA, 120 bp, Artificial Sequence
  ENSG00000160505_18 (sequence is synthesized)
ccgttcaaaatgtctttaagaaagaggatgaacacagctctacgtcggattacagcctcatctgttggcatcacatctgctctgtgctcaccaccagcgggcacctcagagagctccagg

SEQ ID NO: 477430 - DNA, 120 bp, Artificial Sequence
  ENSG00000160505_19 (sequence is synthesized)
tgcaggacagcaccctcagcgagtcgacctttgtgacctggtgtaaccagctgaggcatcccagctgtcgccttcagaagcttggaataaataacgtttccttttctggccagagtgttc

SEQ ID NO: 477431 - DNA, 120 bp, Artificial Sequence
  ENSG00000160505_20 (sequence is synthesized)
tgctctttgaggtgctcttttatcagccagacttgaaatacctgagcttcaccctcacgaaactctctcgtgatgacatcaggtccctctgtgatgccttgaactacccagcaggcaacg

SEQ ID NO: 477432 - DNA, 120 bp, Artificial Sequence
  ENSG00000160505_21 (sequence is synthesized)
tcaaagagctagcgctggtaaattgtcacctctcacccattgattgtgaagtccttgctggccttctaaccaacaacaagaagctgacgtatctgaatgtatcctgcaaccagttagaca

SEQ ID NO: 477433 - DNA, 120 bp, Artificial Sequence
  ENSG00000160505_22 (sequence is synthesized)
caggcgtgccccttttgtgtgaagccctgtgcagcccagacacggtcctggtatacctgatgttggctttctgccacctcagcgagcagtgctgcgaatacatctctgaaatgcttctgc

SEQ ID NO: 477434 - DNA, 120 bp, Artificial Sequence
  ENSG00000160505_23 (sequence is synthesized)
gtaacaagagcgtgcgctatctagacctcagtgccaatgtcctgaaggacgaaggactgaaaactctctgcgaggccttgaaacatccggactgctgcctggattcactgtgtttggtaa

SEQ ID NO: 477435 - DNA, 120 bp, Artificial Sequence
  ENSG00000160505_24 (sequence is synthesized)
aatgttttatcactgctgctggctgtgaagacctcgcctctgctctcatcagcaatcaaaacctgaagattctgcaaattgggtgcaatgaaatcggagatgtgggtgtgcagctgttgt

SEQ ID NO: 477436 - DNA, 120 bp, Artificial Sequence
  ENSG00000160505_25 (sequence is synthesized)
gtcgggctctgacgcatacggattgccgcttagagattcttgggttggaagaatgtgggttaacgagcacctgctgtaaggatctcgcgtctgttctcacctgcagtaagaccctgcagc

SEQ ID NO: 477437 - DNA, 120 bp, Artificial Sequence
  ENSG00000160505_26 (sequence is synthesized)
agctcaacctgaccttgaacaccttggaccacacaggggtggttgtactctgtgaggccctgagacacccagagtgtgccctgcaggtgctcgggctgagaaaaactgattttgatgagg

SEQ ID NO: 477438 - DNA, 120 bp, Artificial Sequence
  ENSG00000160505_27 (sequence is synthesized)
aaacccaggcacttctgacggctgaggaagagagaaatcctaacctgaccatcacagacgactgtgacacaatcacaagggtagagatctgattgcgaggaacctgggctctgactcgaa

SEQ ID NO: 477439 - DNA, 120 bp, Artificial Sequence
  ENSG00000160505_28 (sequence is synthesized)
cacctgcaaaggacagggactgggaccgttacttacatgacactgcacccaggagatacaaatcattgatactctgagttgtgagatttctggcaccccattcatagatttgatatgata

SEQ ID NO: 477440 - DNA, 120 bp, Artificial Sequence
  ENSG00000160505_29 (sequence is synthesized)
cacgtggtttttatgtgctctgtggccttggatgagtcactgaaaggccttcatggtctctcggtctcacaaggacctcttaacccctcaataaagtgttacatttctaaacattggaaa

SEQ ID NO: 477441 - DNA, 120 bp, Artificial Sequence
  ENSG00000160505_30 (sequence is synthesized)
agctgttcagctctgctattcaatcaggaaggctcctgtagacaatatacccgtgaatggtgtagtgagttctaatgaaactttatttacaagaggagactgaccaggtttggcctgggg

SEQ ID NO: 477442 - DNA, 120 bp, Artificial Sequence
  ENSG00000160505_31 (sequence is synthesized)
gccacagtgtgtagacccctggaaagatacatcctgagaagaaaaaaagaatatatgcaggaatgcttaactttgtgggttttctctcctcttgccctcactgactcaggatacacaaag

SEQ ID NO: 477443 - DNA, 120 bp, Artificial Sequence
  ENSG00000160539_0 (sequence is synthesized)
gcagctgtggactcctcacctcccggaggctctgctggtgcaggccccgcattggagggctcgattggctgcccggctggcactgacgtccccttggagctgggtggcagaggagataaa

SEQ ID NO: 477444 - DNA, 120 bp, Artificial Sequence
  ENSG00000160539_1 (sequence is synthesized)
cagccatgtgcaactctccacactatatttaacagctgcggcggagaaggcagggaggcagccacggtggcggctctgggggcagctcttgtcttcggggagaaggcccttggagccggg

SEQ ID NO: 477445 - DNA, 120 bp, Artificial Sequence
  ENSG00000160539_2 (sequence is synthesized)
ctggcatcggccttctcggggtgagcgaggtcaccatgccagcttcccagagccgggcccgtgcccgggaccgcaacaacgtcctcaaccgggctgagttcctgtccctgaaccagcccc

SEQ ID NO: 477446 - DNA, 120 bp, Artificial Sequence
  ENSG00000160539_3 (sequence is synthesized)
ccaaggggggcccggagccccgcagctcgggcagaaaggcctcgggcccatcagcacagcccccacctgctggtgacggggccagagagcgacgccagtcacagcagctgccagaggagg

SEQ ID NO: 477447 - DNA, 120 bp, Artificial Sequence
  ENSG00000160539_4 (sequence is synthesized)
actgcatgcagctgaacccctccttcaagggcatcgccttcaactccctgctggccatcgatatctgtatgtccaagcggctgggggtgtgcgctggccgggcggcgtcctgggccagtg

SEQ ID NO: 477448 - DNA, 120 bp, Artificial Sequence
  ENSG00000160539_5 (sequence is synthesized)
cccgctccatggtcaagctcatcggcatcacgggccacggcatcccctggatcggaggcaccatcctctgcctggtgaagagcagcacactggccggccaggaggtgctcatgaatctgc

SEQ ID NO: 477449 - DNA, 120 bp, Artificial Sequence
  ENSG00000160539_6 (sequence is synthesized)
tcctggccctgctcctggacatcatgacggtggccggcgtgcagaagctcatcaagcggcgcggcccgtacgagacgagccccagcctcctggactacctcaccatggacatctacgcct

SEQ ID NO: 477450 - DNA, 120 bp, Artificial Sequence
  ENSG00000160539_7 (sequence is synthesized)
tcccggccgggcacgccagccgcgccgccatggtgtccaagttcttcctcagccacctggtgctggcggtgcccctgcgtgtgctgctggtgctctgggccctctgcgtgggcctgtccc

SEQ ID NO: 477451 - DNA, 120 bp, Artificial Sequence
  ENSG00000160539_8 (sequence is synthesized)
cacggacgtcctctccggctttgtcatcggctacctccagttccgtctggtggagctggtctggatgccctccagcacctgccagatgctcatctctgcctggtgaagcgcccgccggcc

SEQ ID NO: 477452 - DNA, 120 bp, Artificial Sequence
  ENSG00000160539_9 (sequence is synthesized)
cacacaagcctctgggggcagggctggccctagagaaggggcagggggtggcgaggtggcgggcgtgggtggaacagagcggccaggagtcagagcggccacccccacctcatcttcccc

SEQ ID NO: 477453 - DNA, 120 bp, Artificial Sequence
  ENSG00000160539_10 (sequence is synthesized)
tcctggctggaggctggcgaacccaggccacccctcccggagacaagcgtgtttggcagtgccaggcctcttgcccctttgcttggactccaagtctcctctctaggcagccaggaccca

SEQ ID NO: 477454 - DNA, 120 bp, Artificial Sequence
  ENSG00000160539_11 (sequence is synthesized)
cccatggggacagccctatttagcttctgctctgggaacagcaaaaatcaggatggtgggaggggccgagtcttgtcttgtcctttcatcatcatgactgttgagttcttggctgtgccc

SEQ ID NO: 477455 - DNA, 120 bp, Artificial Sequence
  ENSG00000160539_12 (sequence is synthesized)
atcacgccacagcacgacgcctgccaaaatgcccccaacctactgcctgatgcaggtgccattgccattagcggtcatcgacagcttagggcagcactttccaacgggtgcccatgggac

SEQ ID NO: 477456 - DNA, 120 bp, Artificial Sequence
  ENSG00000160539_13 (sequence is synthesized)
accagcctgcgagatgcttttgggggaaaggggttttgtggttcaataactttcggaagtgctgcacactctgtccccaagttggacattcacaaaggccgttattgccgtaaaggctct

SEQ ID NO: 477457 - DNA, 120 bp, Artificial Sequence
  ENSG00000160539_14 (sequence is synthesized)
gacaagccctatagaaaagcttcttgctaaaccttctttaacccatgttttctaaacttatttgaccacagaacccttttcttggggaacagctattaacccccaaggaattattggttc

SEQ ID NO: 477458 - DNA, 120 bp, Artificial Sequence
  ENSG00000160539_15 (sequence is synthesized)
ctcaagtgcgttttgggagctgctgccagagagctaaagggcctggggtgtgagctgactctcctctggggaggccgggtgcacacgccacagcccgaggaaagtgctggccaccgcccg

SEQ ID NO: 477459 - DNA, 120 bp, Artificial Sequence
  ENSG00000160539_16 (sequence is synthesized)
tgggcatcgatgaggctttggcccccaggggccggactccgtgtgacctaataggtcgtttccaagtcacccgttttggatgtgcatttcatgtgacaatacagatgacatgcaaatggc

SEQ ID NO: 477460 - DNA, 120 bp, Artificial Sequence
  ENSG00000160539_17 (sequence is synthesized)
cccttcgggcaccaccaggtccccaaggtgccccaggaagcttccaccctccacgccaggcccgcatcgatttccttgtctttcccggtgtggccatcatttgagggacatgtgaggtgg

SEQ ID NO: 477461 - DNA, 120 bp, Artificial Sequence
  ENSG00000160539_18 (sequence is synthesized)
aggtctcaggcaaggcaaacattaacaaggggtctcagttccaaaagggcattgggttggaccacggagaacatcagttccagaggaagttacaataaaaacacgtatctccctgctcta

SEQ ID NO: 477462 - DNA, 120 bp, Artificial Sequence
  ENSG00000160539_19 (sequence is synthesized)
ggcccaagcaacaccgtccagtttacaggaccaggtccaagctgcccggcagctggggcaggcaggcctgacttgcaggggtctggacggctcagagggaagctggtaaaagcagggtaa

SEQ ID NO: 477463 - DNA, 120 bp, Artificial Sequence
  ENSG00000160539_20 (sequence is synthesized)
gcccaggtcccacctctgccccttcagaggccaaggccactgcagagtccagagcagccggaggactacatttcccagagtcccccaagcccagggatgagccattggccgatttaaata

SEQ ID NO: 477464 - DNA, 120 bp, Artificial Sequence
  ENSG00000160539_21 (sequence is synthesized)
acctctctgagcttcggttttcggtctctctgaaatgggaggaaccaactagaccagcgtctcaatccctggactcaagccttggacatctcaagtggaatgtcagcgtggtacaggcag

SEQ ID NO: 477465 - DNA, 120 bp, Artificial Sequence
  ENSG00000160539_22 (sequence is synthesized)
tggttgctgtccatttcttctctgctgtgtccccagtgcccagaacagtacctgggacatagctggcattcagtaaatatttataaaatggatggatggaactgggcacggtagctcgca

SEQ ID NO: 477466 - DNA, 87 bp, Artificial Sequence
  ENSG00000160539_23 (sequence is synthesized)
ggccaaggcaggcggatcacttgaggtccggagttcgagagcagcctgatgaacatggtgaaaccccatctctaatgcgcctgtaat

SEQ ID NO: 477467 - DNA, 120 bp, Artificial Sequence
  ENSG00000160539_24 (sequence is synthesized)
gtggatggatggatggatgaactcacctgctggttgtctctgctgagctaacttcacacatatgccagcctcgtttctagaacattccataggctatgaggtacctgttggaaataaatg

SEQ ID NO: 477468 - DNA, 120 bp, Artificial Sequence
  ENSG00000160539_25 (sequence is synthesized)
cagatgtaggtggtcaccctcacagcacattggggccacagcttggaagtcccctggccactgtgtcacctcggacctaggatgcctttccattgagacattcagatggccttagtgcca

SEQ ID NO: 477469 - DNA, 120 bp, Artificial Sequence
  ENSG00000160539_26 (sequence is synthesized)
cagagggacgaggtccgtggacattctggtctccagctttccaggaaacgggaggctcctggcagcgccctggctgccaagacaaggctcctccaagcctggctgactcagcatattctc

SEQ ID NO: 477470 - DNA, 120 bp, Artificial Sequence
  ENSG00000160539_27 (sequence is synthesized)
caggcttctgctgagacaccccttcccggtgatggcccctctggagtccctgtcatgggaacttgtgtgtgggatgcttccttctctttcacggcattgtctgtgcgggttctgcctgag

SEQ ID NO: 477471 - DNA, 120 bp, Artificial Sequence
  ENSG00000160539_28 (sequence is synthesized)
cacatgaagtgcgttcactgtgcccagcatggtgcctggtacacacagggctcaacgcgctccatttgaaggctgtctggagccccctacactgggcccaggtggatcttatcaattcac

SEQ ID NO: 477472 - DNA, 120 bp, Artificial Sequence
  ENSG00000160539_29 (sequence is synthesized)
tcaacaaatatttgctgaactcccatctgggctggctctgcctgtgaggctaggaacgtcaaaaggaacccaggcagccaaccctccaggaccttggggtggtgtgaaggccccagattt

SEQ ID NO: 477473 - DNA, 120 bp, Artificial Sequence
  ENSG00000160539_30 (sequence is synthesized)
ctgaaagtggaacaaagccagaccctgtggccgccaccttctggccaacctcagatggagccttccagacacatcaactcccagggctgtggaaagaaaagatggagtctctacctggcc

SEQ ID NO: 477474 - DNA, 120 bp, Artificial Sequence
  ENSG00000160539_31 (sequence is synthesized)
ggtgccatgacacctgcacacgtggcaacaaagaaaagggaagagaaagactccatgttgactctacctggctcccaggtatcccttctctatcggcacggctgccgacttcgcctgtgc

SEQ ID NO: 477475 - DNA, 120 bp, Artificial Sequence
  ENSG00000160539_32 (sequence is synthesized)
aagtttccagcttgcttacctatgcttgcagcttgatttttcaggccgctttttgttagaaaagaaattagttgggggctgctttattattaaaataaaaaccttactttctgtactctc

SEQ ID NO: 477476 - DNA, 80 bp, Artificial Sequence
  ENSG00000160551_0 (sequence is synthesized)
cttaccaggggtggtgttggtggcggagggctgcgcgtgggcccgcccgccgaggggccgcggcgggggaccgagagggc

SEQ ID NO: 477477 - DNA, 120 bp, Artificial Sequence
  ENSG00000160551_1 (sequence is synthesized)
ggttcccccgaggcggcgacggagacggctcccggcacttccccgcgccatcttaactgagcccaagcgctgagggcgcctcctcgaccccggtcgtcccctcgcccccccccccacccc

SEQ ID NO: 477478 - DNA, 120 bp, Artificial Sequence
  ENSG00000160551_2 (sequence is synthesized)
ccgccgccgccgccccttgttgcagagcttgggctgggcggcttgctggggctcgggggtggggggcggcgatctgtcgccgggccccctcctcctcctcactcctcaccctccagggta

SEQ ID NO: 477479 - DNA, 120 bp, Artificial Sequence
  ENSG00000160551_3 (sequence is synthesized)
gcggctaccggagcgctgcagggggctgcgcctgcctgctccgccccagacctgtcggcgaaaggtagtttatgccaacgtgacttcattcatacagatgaaccaaggatcgggatagca

SEQ ID NO: 477480 - DNA, 120 bp, Artificial Sequence
  ENSG00000160551_4 (sequence is synthesized)
gtataaaattagaatcaagacagctgactgctcagcaggatgccatcaactaacagagcaggcagcctgaaggaccctgaaattgcagagctcttcttcaaagaagatccagagaagctc

SEQ ID NO: 477481 - DNA, 120 bp, Artificial Sequence
  ENSG00000160551_5 (sequence is synthesized)
ttcacagatctcagagaaattggccatggaagctttggagcagtgtattttgcacgagatgtgcgtaccaatgaagtggtggccatcaagaaaatgtcttatagtggaaagcagtctact

SEQ ID NO: 477482 - DNA, 120 bp, Artificial Sequence
  ENSG00000160551_6 (sequence is synthesized)
gagaaatggcaggatattattaaggaagtcaagtttctacaaagaataaaacatcccaacagtatagaatacaaaggctgttatttacgtgaacacacagcatggcttgtaatggaatat

SEQ ID NO: 477483 - DNA, 120 bp, Artificial Sequence
  ENSG00000160551_7 (sequence is synthesized)
tgtttaggatctgcttcggatttactagaagttcacaaaaagccattacaagaagtggaaatagcagcaattacacatggtgctcttcagggattagcctacttacattctcatactatg

SEQ ID NO: 477484 - DNA, 120 bp, Artificial Sequence
  ENSG00000160551_8 (sequence is synthesized)
attcatagagatatcaaagcaggaaatatccttctgacagaaccaggccaggtgaaacttgctgactttggctctgcttccatggcatcacctgccaattcctttgtgggaacgccgtat

SEQ ID NO: 477485 - DNA, 120 bp, Artificial Sequence
  ENSG00000160551_9 (sequence is synthesized)
tggatggccccagaagtaattttagccatggatgaaggacaatatgatggcaaagtagatgtgtggtctcttggaataacatgtattgaactagcggaaaggaagcctcctttatttaat

SEQ ID NO: 477486 - DNA, 120 bp, Artificial Sequence
  ENSG00000160551_10 (sequence is synthesized)
atgaatgcaatgagtgccttatatcacatagcccaaaatgaatcccctacactacagtctaatgaatggtctgattattttcgcaactttgtagattcttgcctccagaaaatccctcaa

SEQ ID NO: 477487 - DNA, 120 bp, Artificial Sequence
  ENSG00000160551_11 (sequence is synthesized)
gatcgacctacatcagaggaacttttaaagcacatatttgttcttcgggagcgccctgaaaccgtgttaatagatctcattcagaggacaaaggatgcagtaagagagctggacaatctg

SEQ ID NO: 477488 - DNA, 120 bp, Artificial Sequence
  ENSG00000160551_12 (sequence is synthesized)
cagtatcgaaagatgaagaaactccttttccaggaggcacataatggaccagcagtagaagcacaggaagaagaagaggaacaagatcatggtgttggccggacaggaacagttaatagt

SEQ ID NO: 477489 - DNA, 120 bp, Artificial Sequence
  ENSG00000160551_13 (sequence is synthesized)
gttggaagtaatcaatccattcccagcatgtccatcagtgccagcagccaaagcagtagtgttaacagtcttccagatgtctcagatgacaagagtgagctagacatgatggagggagac

SEQ ID NO: 477490 - DNA, 120 bp, Artificial Sequence
  ENSG00000160551_14 (sequence is synthesized)
cacacagtgatgtctaacagttctgttatccatttaaaaccagaggaagaaaattacagagaagagggagatcctagaacaagagcatcagatccacaatctccaccccaagtatctcgt

SEQ ID NO: 477491 - DNA, 120 bp, Artificial Sequence
  ENSG00000160551_15 (sequence is synthesized)
cacaaatcacactatcgtaatcgagaacactttgctactatacggacagcatcactggttacgaggcaaatgcaagaacatgagcaggactctgagcttagagaacaaatgtctggctat

SEQ ID NO: 477492 - DNA, 120 bp, Artificial Sequence
  ENSG00000160551_16 (sequence is synthesized)
aagcgaatgaggcgacaacatcaaaagcaactgatgactctggaaaacaagctaaaggctgagatggatgaacatcgcctcagattagacaaagatcttgaaactcagcgtaacaatttt

SEQ ID NO: 477493 - DNA, 120 bp, Artificial Sequence
  ENSG00000160551_17 (sequence is synthesized)
gctgcagaaatggagaaacttatcaagaaacaccaggctgccatggagaaagaggctaaagtgatgtccaatgaagagaaaaaatttcagcaacatattcaggcccaacagaagaaagaa

SEQ ID NO: 477494 - DNA, 120 bp, Artificial Sequence
  ENSG00000160551_18 (sequence is synthesized)
ctgaatagttttctcgagtcccagaaaagagagtataaacttcgaaaagagcagcttaaagaggagctaaatgaaaaccagagtacccccaaaaaagaaaaacaggagtggctttcaaag

SEQ ID NO: 477495 - DNA, 120 bp, Artificial Sequence
  ENSG00000160551_19 (sequence is synthesized)
cagaaggagaatatacagcatttccaagcagaagaagaagctaaccttcttcgacgtcaaagacaatacctagagctggaatgccgtcgcttcaagagaagaatgttacttgggcgtcat

SEQ ID NO: 477496 - DNA, 120 bp, Artificial Sequence
  ENSG00000160551_20 (sequence is synthesized)
aacttagagcaggaccttgtcagggaggagttaaacaaaagacagactcagaaggacttagagcatgccatgctactccgacagcatgaatctatgcaagaactggagttccgccacctc

SEQ ID NO: 477497 - DNA, 120 bp, Artificial Sequence
  ENSG00000160551_21 (sequence is synthesized)
aacacaattcagaagatgcgctgtgagttgatcagattacagcatcaaactgagctcactaaccagctggaatataataagcgaagagaacgagaactaagacgaaagcatgtcatggaa

SEQ ID NO: 477498 - DNA, 120 bp, Artificial Sequence
  ENSG00000160551_22 (sequence is synthesized)
gttcgacaacagcctaagagtttgaagtctaaagaactccaaataaaaaagcagtttcaggatacctgcaaaatccaaaccagacagtacaaagcattaagaaatcacctgctggagact

SEQ ID NO: 477499 - DNA, 120 bp, Artificial Sequence
  ENSG00000160551_23 (sequence is synthesized)
acaccaaagagtgagcacaaagctgttctgaaacggctcaaggaggaacagacccggaaattagctatcttggctgagcagtatgatcacagcattaatgaaatgctctccacacaagcc

SEQ ID NO: 477500 - DNA, 120 bp, Artificial Sequence
  ENSG00000160551_24 (sequence is synthesized)
ctgcgtttggatgaagcacaggaagcagagtgccaggttttgaagatgcagctgcagcaggaactggagctgttgaatgcgtatcagagcaaaatcaagatgcaagctgaggcacaacat

SEQ ID NO: 477501 - DNA, 120 bp, Artificial Sequence
  ENSG00000160551_25 (sequence is synthesized)
gatcgagagcttcgcgagcttgaacagagggtctccctccggagggcactcttagaacaaaagattgaagaagagatgttggctttgcagaatgagcgcacagaacgaatacgaagcctg

SEQ ID NO: 477502 - DNA, 120 bp, Artificial Sequence
  ENSG00000160551_26 (sequence is synthesized)
ttggaacgtcaagccagagagattgaagcttttgactctgaaagcatgagactaggttttagtaatatggtcctttctaatctctcccctgaggcattcagccacagctacccgggagct

SEQ ID NO: 477503 - DNA, 120 bp, Artificial Sequence
  ENSG00000160551_27 (sequence is synthesized)
tctggttggtcacacaaccctactgggggtccaggacctcactggggtcatcccatgggtggcccaccacaagcttggggccatccaatgcaaggtggaccccagccatggggtcaccct

SEQ ID NO: 477504 - DNA, 120 bp, Artificial Sequence
  ENSG00000160551_28 (sequence is synthesized)
tcagggccaatgcaaggggtacctcgaggtagcagtatgggagtccgcaatagcccccaggctctgaggcggacagcttctgggggacggacggagcagggcatgagcagaagcacgagt

SEQ ID NO: 477505 - DNA, 120 bp, Artificial Sequence
  ENSG00000160551_29 (sequence is synthesized)
gtcacttcacaaatatccaatgggtcacacatgtcttatacataacttaataattgagagtggcaattccgctggagctgtctgccaaaagaaactgcctacagacatcatcacagcagc

SEQ ID NO: 477506 - DNA, 120 bp, Artificial Sequence
  ENSG00000160551_30 (sequence is synthesized)
ctcctcacttgggtactacagtgtggaagctgagtgcatatggtatattttattcatttttgtaaagcgttctgttttgtgtttactaattgggatgtcatagtacttggctgccgggtt

SEQ ID NO: 477507 - DNA, 120 bp, Artificial Sequence
  ENSG00000160551_31 (sequence is synthesized)
tgtttgtttttggggaaattttgaaaagtggagttgatattaaaaataaatgtgtatgtgtgtacatatatatacacacacatacacatatattatgcatgtggtgaaaagaattggcta

SEQ ID NO: 477508 - DNA, 120 bp, Artificial Sequence
  ENSG00000160551_32 (sequence is synthesized)
gataggggatttttctgaacactgcaaaaatagaacgtagcaaaatggcttcagttatcacttttgggtgtctgtatcctaagaagtttctgaaaagatctaaagcctttttatcccata

SEQ ID NO: 477509 - DNA, 120 bp, Artificial Sequence
  ENSG00000160551_33 (sequence is synthesized)
tcccaaattcttatgagccactcacagcaggcagcatatgttgaaataagttattactggtacacacctgcattgcctcaccagtgtatttatttgttattaaattgatctgacttctca

SEQ ID NO: 477510 - DNA, 87 bp, Artificial Sequence
  ENSG00000160551_34 (sequence is synthesized)
ccagtgtatttatttgttattaaattgatctgacttctcagcctcatttggactaaaaaaagaaagcagaaatccatgaacacatta

SEQ ID NO: 477511 - DNA, 120 bp, Artificial Sequence
  ENSG00000160551_35 (sequence is synthesized)
agtagaaaacaacttagtttttcttttttcctgaatgcgtcataggcttgtgagtgatttttgtccattcaattgtgccttctttgtattatgataagatgggggtacttaaggagatca

SEQ ID NO: 477512 - DNA, 120 bp, Artificial Sequence
  ENSG00000160551_36 (sequence is synthesized)
caagttgtgtgaggattgcattaacaaacctatgagccttcaatggggaagaccagaagggtgagaggggccctgaaagttcatatggtgggtatgtcccgcagcagagtgaggagatga

SEQ ID NO: 477513 - DNA, 120 bp, Artificial Sequence
  ENSG00000160551_37 (sequence is synthesized)
agcttacgtgtcctgacgttttgttgcttatactgtgatatctcatcctagctaagctctataatgcccaagaccccaaacagtacttttactttgtttgtacaaaaacaaagacatata

SEQ ID NO: 477514 - DNA, 120 bp, Artificial Sequence
  ENSG00000160551_38 (sequence is synthesized)
gccaatacaaatcaaatgccggaggtgtttgatgccatatttgcaaattgccatctattgaaattctcgtcacactacatagacataattgttatctccttttggcttatgtgattttct

SEQ ID NO: 477515 - DNA, 120 bp, Artificial Sequence
  ENSG00000160551_39 (sequence is synthesized)
gtttacaagtagaatagccaattatttaaatgtttagttgccacagtgaaccaggagtcactgagccaatgactttaccagctgctgactaatcttcatcaccactgtagattttgctgc

SEQ ID NO: 477516 - DNA, 120 bp, Artificial Sequence
  ENSG00000160551_40 (sequence is synthesized)
atgtgcaggtcctctatttttaattgctgttttcgttgctgcagtactttacaaacttctagttcgttgagacttagtgaccatttggcatcaagttaacatcacacaataggaaacacc

SEQ ID NO: 477517 - DNA, 120 bp, Artificial Sequence
  ENSG00000160551_41 (sequence is synthesized)
acttccacaagtctcaagcctcagtgctaaagtactactgaaaaggaactaggaagtttggccaattaaaaaaaaaaagtaaaataagttatagtggtcagggaatctcttgacgaaagc

SEQ ID NO: 477518 - DNA, 120 bp, Artificial Sequence
  ENSG00000160551_42 (sequence is synthesized)
taactcttatttttcagggggcacatgttttgttttgttatgttttgttgtacaatgaaggatgaacccaatgctaaaaagtcagttattttcttggttttccatttcttgtatataaat

SEQ ID NO: 477519 - DNA, 120 bp, Artificial Sequence
  ENSG00000160551_43 (sequence is synthesized)
tgtgttggaggtgggtaggaagctgtgagtatgacttgaagaaaaatatccttttcagtgacaaatcagagtttcttacaagttattgtcctgctcccttccaagttgtcttgaagaatc

SEQ ID NO: 477520 - DNA, 120 bp, Artificial Sequence
  ENSG00000160551_44 (sequence is synthesized)
cttgctgctaactctggatcctgcttttcctatagtcagagggctccaaggtagaactctctaagtccctctcaatggcactctttgcctagaccaaactaatgaccaaacagtaatcaa

SEQ ID NO: 477521 - DNA, 120 bp, Artificial Sequence
  ENSG00000160551_45 (sequence is synthesized)
tctatcactgttgaagtcctggttttctcaaccaaattttaagtctttcccaggtatgtcagtcgagttgccatgaatcctcacctgtaggagtttctgggattcattttaaggaaactg

SEQ ID NO: 477522 - DNA, 120 bp, Artificial Sequence
  ENSG00000160551_46 (sequence is synthesized)
gaagaaaattaatgttttaatgtaaatgtttttaaaaccaagatcaccatagagttcacacaaaattttaggcagtgtttcaagaagcactcttatgtgttgttctttcagcccatgctc

SEQ ID NO: 477523 - DNA, 120 bp, Artificial Sequence
  ENSG00000160551_47 (sequence is synthesized)
caggtcaccggtttttaggtaaacatgacatgacatgtacttgtaatatcagtgaaaggggcttttagtcgtctcagtatcttttttgcattcaggtattatagcgtttccaacaaattg

SEQ ID NO: 477524 - DNA, 120 bp, Artificial Sequence
  ENSG00000160551_48 (sequence is synthesized)
agaaattacttatttggtgtaaaatgacgagagagctttagaatttaataaaatgtcaaaaatacaatttgatacccttaaaaattattcatagatctggctgctctgtactactggatg

SEQ ID NO: 477525 - DNA, 120 bp, Artificial Sequence
  ENSG00000160551_49 (sequence is synthesized)
ggtggaatagggaagcagatcacttttgcatacaaaaactctttcaaacccaaaatattattggtggtacattttaaagtccaattgtggacttaaattagtcaaattgagagttactga

SEQ ID NO: 477526 - DNA, 120 bp, Artificial Sequence
  ENSG00000160551_50 (sequence is synthesized)
gtccattcagatctccagtagggttttgtatctaatgtatttggccaccagttttacatgtaggtcatgactatacctggattttatcattaagttaactttaaagtatatacagtttgc

SEQ ID NO: 477527 - DNA, 120 bp, Artificial Sequence
  ENSG00000160551_51 (sequence is synthesized)
cttctgaggaatctcatacatagtaggaaccatcatagagtaaagcttgtagcagaaaaattggaagggttttgagatatcctagagaaagagcaagcactttctgaatcagtggggaaa

SEQ ID NO: 477528 - DNA, 120 bp, Artificial Sequence
  ENSG00000160551_52 (sequence is synthesized)
tatcaatatttgatcaaattaacactacctccttcccagtgttggtgttcactcactatatgtctttaagaaaattaaaactatggaaaatttgtctagcatatcagaagttgtaaatgc

SEQ ID NO: 477529 - DNA, 120 bp, Artificial Sequence
  ENSG00000160551_53 (sequence is synthesized)
tatatctggtatccagaggctggctgtaaaaagttccttggggtcactctatctcacattttttttggttagcattttaaaaatgcaaagccacatactttgaaatatattattccaaat

SEQ ID NO: 477530 - DNA, 120 bp, Artificial Sequence
  ENSG00000160551_54 (sequence is synthesized)
tgagctcccttccctttgcacatattttttcctccccttattgaagtcagctctaaccccaaattctagtatccaaaagtatttttatttgtataatgctatctgaaaaatgtgtttata

SEQ ID NO: 477531 - DNA, 120 bp, Artificial Sequence
  ENSG00000160551_55 (sequence is synthesized)
ttatattttcagagctgcaattcttattcgccatttcaatacctagagatagagagtcttgtatttgaagccacacacactggtgtaatatgcttagtactctaggtcaaggatttgttg

SEQ ID NO: 477532 - DNA, 120 bp, Artificial Sequence
  ENSG00000160551_56 (sequence is synthesized)
gtaaatggaacattttagcatagtcatgatttttggttgcctagacatcaggtaaacattcagtacactaaagaaactatcctggacactccctcctgcttccaccaatttttttctcac

SEQ ID NO: 477533 - DNA, 120 bp, Artificial Sequence
  ENSG00000160551_57 (sequence is synthesized)
ccccttttcaaaaattgaaaactctatgagtgtctttttgagaccataaagcagactttagtaactttctatttctgtaagtactaaatgtctggcattttaaacttttgtagaatacat

SEQ ID NO: 477534 - DNA, 120 bp, Artificial Sequence
  ENSG00000160551_58 (sequence is synthesized)
tatgttggacactggaataatactatttattttcacctgtgaaaaatgacttcattgtacttgaaacacctcctttgcatttctccatttgtgccattcactagtggaaataaattgtat

SEQ ID NO: 477535 - DNA, 120 bp, Artificial Sequence
  ENSG00000160551_59 (sequence is synthesized)
tataccatgatctactggctttttaaaactgtattaaatatgcacatttttggtatagctattatcatttgtatgtatatattgtatatacatatgagtgtctgtatgtgtgtatagatg

SEQ ID NO: 477536 - DNA, 120 bp, Artificial Sequence
  ENSG00000160551_60 (sequence is synthesized)
gatggatgtaactcatactgtacatttccatcagggcacttaaaagttctgttatttttgtttggttttgttatttcagtcctcagttaaggcaagaatgcatgtgtttcttaagaatga

SEQ ID NO: 477537 - DNA, 120 bp, Artificial Sequence
  ENSG00000160551_61 (sequence is synthesized)
gtactctgcgttgatgtttatgagaaggtggtcattagatgcagtcttttcctttttaatcccctcttagcacttctgtgagtggagaggacattaagtaaaatttggaatcataagttg

SEQ ID NO: 477538 - DNA, 120 bp, Artificial Sequence
  ENSG00000160551_62 (sequence is synthesized)
caatgcagtaaaatggtgctggggaaggagccagttagtgtttctgtgagtttgtgttgtgatgcaataagagataagtaatgcagagagaaatgaaccatggaaagtaagaacactgat

SEQ ID NO: 477539 - DNA, 120 bp, Artificial Sequence
  ENSG00000160551_63 (sequence is synthesized)
ggtgattcctctgcaaagatgataagaaaaagaaccaataaatcacacaatctttatgtgctttctatatgtatttcttagtagtgataccattgatcctcttactttttttactccatt

SEQ ID NO: 477540 - DNA, 120 bp, Artificial Sequence
  ENSG00000160551_64 (sequence is synthesized)
aatactaataattatatactttgctgaggatcaaaacagccaagaaaggaattactgctaaagcatctaagattctcctgaactgtaaaatcaacaggaaatggccactgggagagaagg

SEQ ID NO: 477541 - DNA, 120 bp, Artificial Sequence
  ENSG00000160551_65 (sequence is synthesized)
atttggtattgggtgaggggctttctccctttacctgcctcttcttgcttgctaatagtaagttctttgtgcaccttccaccacttctgagccactactattcaagtagagatttgcccc

SEQ ID NO: 477542 - DNA, 120 bp, Artificial Sequence
  ENSG00000160551_66 (sequence is synthesized)
aacacattaactttttccttggagatttatatggtcctgcattttgtcctgtgctcacaatgtgaagtgtcttctgtattcaaatcaaaaaataatatatttaaggtatataagtgtgaa

SEQ ID NO: 477543 - DNA, 120 bp, Artificial Sequence
  ENSG00000160551_67 (sequence is synthesized)
tctcctataatgatggaagaagaggttctcttgtcttagatagaaaagagccttctccaagagcaatgtcaaaacttgggctgtcatctttgagctgtttaccaaaatacagaccattat

SEQ ID NO: 477544 - DNA, 120 bp, Artificial Sequence
  ENSG00000160551_68 (sequence is synthesized)
tgaagaaaaacaaattatctattttgttttcccccatctaacatgatagtgcccccaaccaggttgtagcattgccttttaaaagagactcactcactcttagtttttaagaactggaaa

SEQ ID NO: 477545 - DNA, 120 bp, Artificial Sequence
  ENSG00000160551_69 (sequence is synthesized)
tttcccatcctcagatcccttaaaggatgaagagttggctgtacacttagcggacttgcctcttgtatgcaaggactactgattgaagtctgttttgctgtgtctggttatgttgtctgc

SEQ ID NO: 477546 - DNA, 120 bp, Artificial Sequence
  ENSG00000160551_70 (sequence is synthesized)
acttttatgaaatcactacaataggtctgcattggaaatgactattaatttgtaaagaagtaagttttattaaacactgtctagaaaaagaaagtgaagctgagaactcttcctttattg

SEQ ID NO: 477547 - DNA, 120 bp, Artificial Sequence
  ENSG00000160551_71 (sequence is synthesized)
tgcatttatattttctgctgaattccggtagttccctttaaagtcatgttgactaatgttttcctccttgtttgtattcagatttccaaaatttcactcatacaagggaagagactccat

SEQ ID NO: 477548 - DNA, 120 bp, Artificial Sequence
  ENSG00000160551_72 (sequence is synthesized)
ttagcttaacggtagtctttagatcataagaaatatataaattagtatgcaccttatctgcctgttgtgggtttcttaaacttgcacttcctacccacccaaagatagatatcctttaaa

SEQ ID NO: 477549 - DNA, 120 bp, Artificial Sequence
  ENSG00000160551_73 (sequence is synthesized)
gaaaataaaggcagagaattaaaactggggagccatttactatgtcaccatcactgttaactgtttcccagcaatctaaactttttgaagtttcagaggtgtattttttttttgtatata

SEQ ID NO: 477550 - DNA, 120 bp, Artificial Sequence
  ENSG00000160551_74 (sequence is synthesized)
tgtctgtgtgattgtattgttttgtttctaaatatacaaggaattctttaaatagagaaaaaggttaatcctcactgaaacaccaggatgcccactggatatactaatctgaacatctgt

SEQ ID NO: 477551 - DNA, 120 bp, Artificial Sequence
  ENSG00000160551_75 (sequence is synthesized)
aggtagtttgtcatgaaaaagtggagagaagatgagacttttgaatgaatgaaaaagggtatcttgatacccagaattccccccaaagtacgggtaattcaacctgcacagttttctttc

SEQ ID NO: 477552 - DNA, 120 bp, Artificial Sequence
  ENSG00000160551_76 (sequence is synthesized)
actcaaagtgttcagcacttgtgagtgaaaaatcatgtaattatctgtaaatatgtagctaacaaattgacctagtttctgtatttttttgtttttgtactaaagtttataggtctgtgc

SEQ ID NO: 477553 - DNA, 120 bp, Artificial Sequence
  ENSG00000160551_77 (sequence is synthesized)
cagctagagagaagttgctgtcattaccagttgtggtcctagcatctaaccctgaaaccatcctaggtgacatttttagaattaatacttaaatgttaaacagggggaaatgaagcttaa

SEQ ID NO: 477554 - DNA, 120 bp, Artificial Sequence
  ENSG00000160551_78 (sequence is synthesized)
tcatggtcaggtttgagatcttttgcagtgaaataattttatttaatataaatgatcacatgtcctcaatcatgaatgaggtagggagcctctctcccccagtggccatgtttacaaaag

SEQ ID NO: 477555 - DNA, 120 bp, Artificial Sequence
  ENSG00000160551_79 (sequence is synthesized)
tgtgttttgtctataaagtgcaagtgttttaatgtttatgtaaattatgcaggtgataacatggtttggaactgtttattgggctctttaactgaattttcaaatgaaatgaactatgct

SEQ ID NO: 477556 - DNA, 120 bp, Artificial Sequence
  ENSG00000160551_80 (sequence is synthesized)
tattgctggcacattgatcccatttctggaacatttttcctatttccagagttacatatgttcttttgtcattacccaatttaacctccctttctctgatatgccttgtagccaaagtat

SEQ ID NO: 477557 - DNA, 120 bp, Artificial Sequence
  ENSG00000160551_81 (sequence is synthesized)
taaaggctgatgaacatagacaagggaaatgcatttcttagaaatccgtgaaccctcagttgtatgctttcagtactcgtgttaatatgtttctatggcaactctgaggtcagtggttta

SEQ ID NO: 477558 - DNA, 120 bp, Artificial Sequence
  ENSG00000160551_82 (sequence is synthesized)
gaaatgagataccagtgttaatgaaaagtgtgtgctctttgcttttgcatggcttggcttagtatccaaggtatattagggccacttgaaagcatgaagaccagttatatagggaacagg

SEQ ID NO: 477559 - DNA, 120 bp, Artificial Sequence
  ENSG00000160551_83 (sequence is synthesized)
tttctctcagtggcacattttgctttttctgagccccaaatacattgcctgggcatgaacattgttaccgtaaattgcacatggtcatggactgaattatgtgactttaaaggatgtaac

SEQ ID NO: 477560 - DNA, 120 bp, Artificial Sequence
  ENSG00000160551_84 (sequence is synthesized)
tgcccaacatttgcagattctgggtggtctatgtgaccatttgtctcgtatccaaaaaccccggggctattggaacccttccaacactttttcctttgtcatagacaagtttatatataa

SEQ ID NO: 477561 - DNA, 120 bp, Artificial Sequence
  ENSG00000160551_85 (sequence is synthesized)
cttaccaagatgttggctgtcctggtgtattgccagacagctctcttttggttcccattccaaatgtgctgctgtccttctttgcatttcacaatatcaaagaaaccaccacccttcttc

SEQ ID NO: 477562 - DNA, 120 bp, Artificial Sequence
  ENSG00000160551_86 (sequence is synthesized)
ctaacagcattttatgccttttattccacattaaatgggaattgtgcctacttaggagtgcccctccaattaattacatgtgtccaagaataatccaagctagagacacaaggtgggaaa

SEQ ID NO: 477563 - DNA, 120 bp, Artificial Sequence
  ENSG00000160551_87 (sequence is synthesized)
acatttcaaaaaaaaaaagtcctcttaaggccagtaatttatctgaaaaggtattttatcacaccttgacaccttatatatgagcctattaggagctgcaggtggtttcatagggtaaaa

SEQ ID NO: 477564 - DNA, 120 bp, Artificial Sequence
  ENSG00000160551_88 (sequence is synthesized)
tccaagaaaagagaaggatgtgtggggtttctattagaagataattttgttctcattttaccttttcttttatgatccttctctgctagaacaggttaattctccaaatttgttttgttt

SEQ ID NO: 477565 - DNA, 120 bp, Artificial Sequence
  ENSG00000160551_89 (sequence is synthesized)
tgttttgttattttttagggaactcttttgcaaaagcaatggtcggatgtaaataacatttaaagtatagtgcacataacttccccggactgttccaatctgataatttgtaaatgcttt

SEQ ID NO: 477566 - DNA, 120 bp, Artificial Sequence
  ENSG00000160551_90 (sequence is synthesized)
agagtttttttaattaacacttgtgttgctaaattctatttatgtaagtctgctaaagttttttagcccacttaaaacttaagacaaccatttaaaataatggatgggttactatgagca

SEQ ID NO: 477567 - DNA, 120 bp, Artificial Sequence
  ENSG00000160551_91 (sequence is synthesized)
atttcgctttcagaacccccttgttttagtatatgaaaaagcctaatgcgcattaatgaggttgaagagactatgagaaatatgtatagtgtatattttaaaacagctttgcttgtattg

SEQ ID NO: 477568 - DNA, 120 bp, Artificial Sequence
  ENSG00000160551_92 (sequence is synthesized)
tgaagatttaaaaacaaacttgagatttttaacgtaactattaacacagttttaacataagttatcccactgggtttaagagcatcttgaatgtataatcctttttgtaacccaggttgg

SEQ ID NO: 477569 - DNA, 120 bp, Artificial Sequence
  ENSG00000160551_93 (sequence is synthesized)
tttctacttttaccagtcacccaaacatatttatgtttttagttttatgtactcatttccctttgttttcctcaaacagcatgatttttttgcacatgtagaaattttttaaaagaaaga

SEQ ID NO: 477570 - DNA, 120 bp, Artificial Sequence
  ENSG00000160551_94 (sequence is synthesized)
aattagtacatcattttctctggattttcttcacttccctcttcctttctactaactccttccttaaaggccatatcactccatttgcattatttgtgcaaatgccagggttggttttta

SEQ ID NO: 477571 - DNA, 120 bp, Artificial Sequence
  ENSG00000160551_95 (sequence is synthesized)
tttttatttttgctatttacctaaaaaaagaaaatgcttcagtcaattgcttttttatttaaaaaaaaaaagaaaaaaagctgtaaccttatcatttctgagtagaccattgagcgatga

SEQ ID NO: 477572 - DNA, 120 bp, Artificial Sequence
  ENSG00000160551_96 (sequence is synthesized)
atgcacacctgtagtagcccaggaccagctgtggtggctaaagggaatatgttaattaagcaagaggttcttttctaaaagtggtatctgttatccacaatgtattttagttattcccac

SEQ ID NO: 477573 - DNA, 120 bp, Artificial Sequence
  ENSG00000160551_97 (sequence is synthesized)
aagtcaggggtccagataaaatgagggttatcagctaactgatatgctatcattgaggttcatcaatgaatttgtacatttctagttccctttggtgaagggaaaaatgatgattttgca

SEQ ID NO: 477574 - DNA, 120 bp, Artificial Sequence
  ENSG00000160551_98 (sequence is synthesized)
agacctagattttggcttggtttcttgcctccttttttggcagccttcatcttctcatctcccaaaccccctgagcccgtagggttttcatagtggacaaagaacttgtggtcttttaaa

SEQ ID NO: 477575 - DNA, 120 bp, Artificial Sequence
  ENSG00000160551_99 (sequence is synthesized)
actgggactgatacttttttgagagagtatcgtgtcgaaagtgtgatgttctaccactttaccaataactaattttaaatacacattgtcctctcgatttttggaccaaacagacgctca

SEQ ID NO: 477576 - DNA, 120 bp, Artificial Sequence
  ENSG00000160551_100 (sequence is synthesized)
cagtggaggcttatcaagggttgcattggggaagaagcctctccctctctgtcagcaccagctggtaaaggtgactgtacagatgtgcattttccttttggtataaatggtccacagcac

SEQ ID NO: 477577 - DNA, 120 bp, Artificial Sequence
  ENSG00000160551_101 (sequence is synthesized)
taactggtaaggcttattgtacagtatattgtcagtattcttctggttcagcataccttatagttcatatataacctgtattaattgtatagattgtgcattaaaagctgttaccaagtt

SEQ ID NO: 477578 - DNA, 120 bp, Artificial Sequence
  ENSG00000160551_102 (sequence is synthesized)
gtcagaacataagagcgaaaacaaggtcatatgtaatattttgtttgtaagtatcctttgtatcatagcaaaggaaatgtttaaaaaaatcaactgtaataaagtaattttagtacacag

SEQ ID NO: 477579 - DNA, 120 bp, Artificial Sequence
  ENSG00000160551_103 (sequence is synthesized)
tgtttctaccaataaacagaaactaaaatataaactatgctccaatgaactaatttttttttactgctatttgtcttctcttttagaaaattattactatatgtttatttgaattctgta

SEQ ID NO: 477580 - DNA, 120 bp, Artificial Sequence
  ENSG00000160551_104 (sequence is synthesized)
gttttttgttttctaatttgaatattaattctccttatcccaattgtgagattaccccagcacttaattattttgatttctctttctctatcctatgaattcttgttttatttttatcgt

SEQ ID NO: 477581 - DNA, 120 bp, Artificial Sequence
  ENSG00000160551_105 (sequence is synthesized)
gtcataaaactttccaagcaaattttctgcttattaattatatccaatggtgaccaactcatagaagcattaggataaaattatcttttgttgtttatggtcactaaatgggtattagtt

SEQ ID NO: 477582 - DNA, 120 bp, Artificial Sequence
  ENSG00000160551_106 (sequence is synthesized)
agtttaaatgatgacattgattataatcagttacccttaactgagtcatttagttgagtaggatttaaaatgaatcatttcctgaaaatatactttttttatgtttttattttatattta

SEQ ID NO: 477583 - DNA, 120 bp, Artificial Sequence
  ENSG00000160551_107 (sequence is synthesized)
tttatttatttatttttgagacaaagagtctcgctctgtcacccaggctcgagtgcagtggcgcgctctcggctcacttcaagctctgcctactgggttcacaccattctcctgcctcag

SEQ ID NO: 477584 - DNA, 81 bp, Artificial Sequence
  ENSG00000160551_108 (sequence is synthesized)
ttatgtttttattttttgtgtgtattttttgagacagtcttattctgttccacgggctggagtgcagtggcacaatcatag

SEQ ID NO: 477585 - DNA, 120 bp, Artificial Sequence
  ENSG00000160551_109 (sequence is synthesized)
gcacaatcatagctcactgcagcttcgacctcccgtgctcaagcaatcctgctttagccttccaagtagctgggaacacaagcacacaccaccactcctggctgatttttaaatttattt

SEQ ID NO: 477586 - DNA, 89 bp, Artificial Sequence
  ENSG00000160551_110 (sequence is synthesized)
cacaagcacacaccaccactcctggctgatttttaaatttattttttgtagagacagggtcttgccatgttgcctagtgcctacctcgg

SEQ ID NO: 477587 - DNA, 120 bp, Artificial Sequence
  ENSG00000160551_111 (sequence is synthesized)
ctgatcacatttattactttaaaagtaaacaataatgtcttacttttggatcagaagattataataatttgtttttatgccaatttaaatgtagaataagggagatatttgcttatcagg

SEQ ID NO: 477588 - DNA, 120 bp, Artificial Sequence
  ENSG00000160551_112 (sequence is synthesized)
ttttttttaagtagaatatgctgattatttctttgtggctacagggtttcatatttgtttgccctttcttgtgctgcccggcctcccccctaccccccgctttttttttgagacggaagt

SEQ ID NO: 477589 - DNA, 76 bp, Artificial Sequence
  ENSG00000160551_113 (sequence is synthesized)
ctctgtcatacctccccccaggttgaaaggattctcctgcctcaacccccccgagtagctgggattacaggtgtgt

SEQ ID NO: 477590 - DNA, 87 bp, Artificial Sequence
  ENSG00000160551_114 (sequence is synthesized)
tcaaactcctgacctcagacaatctaagagttagccaccactcccggctcttgtgctgctttttgtttgtttggtttggtttggttt

SEQ ID NO: 477591 - DNA, 76 bp, Artificial Sequence
  ENSG00000160551_115 (sequence is synthesized)
ccaaagtgctgggattacaagagttagccaccactcccggctcttgtgctgctttttgtttgtttggtttggtttg

SEQ ID NO: 477592 - DNA, 120 bp, Artificial Sequence
  ENSG00000160551_116 (sequence is synthesized)
aggcgtgagccaccatgcctggcccgacaacttcttaaagaggatcattattcaagatagtcactaggacagaaaaatgatatgtcttttaatttacccacccccccccccgtcttatag

SEQ ID NO: 477593 - DNA, 120 bp, Artificial Sequence
  ENSG00000160551_117 (sequence is synthesized)
gatgattgaaatttttagttcatataattaattagcatactgtgatacatcgattgattttgataaaataagtataatcaatttgatattaatgatttttgtatgtgtaggaatttgcct

SEQ ID NO: 477594 - DNA, 120 bp, Artificial Sequence
  ENSG00000160551_118 (sequence is synthesized)
tataatcagatatgtatgtcttgttgtgtacctattggtggcacaaagacttgctctataccttgccacgtgagcttcactgacaagatttttacaactctaaatggtataatttgcagt

SEQ ID NO: 477595 - DNA, 120 bp, Artificial Sequence
  ENSG00000160551_119 (sequence is synthesized)
atactcccatgactataattcgaaagccaaactctactggaagtttgagtttgaaacaatagtaaatagagtttccaactataaataaatctccaacaaaatgcagttgttttgttttcc

SEQ ID NO: 477596 - DNA, 120 bp, Artificial Sequence
  ENSG00000160551_120 (sequence is synthesized)
agtgaaatcagactttagctttatggattagtttgtttagataatcctttaggcatataccatatagtcaaacaaataaatgcattttcttttagaagctaagttgttgtgtatgtattt

SEQ ID NO: 477597 - DNA, 120 bp, Artificial Sequence
  ENSG00000160551_121 (sequence is synthesized)
gtgttcatttagaataatgattctcagtagagaggaagggacatatcagagtcttggaggggagagttccctggcagaagattttgaaaaagatacccaggtatggccaggcgcggtggc

SEQ ID NO: 477598 - DNA, 120 bp, Artificial Sequence
  ENSG00000160551_122 (sequence is synthesized)
taaattaaaaaaaataaaaaataaaaaaattagccaagcatggtggcacacaactgtcatcccagctacacaagagggtgaggcaggagaatccctgtaacttggaaggtggaggttgca

SEQ ID NO: 477599 - DNA, 120 bp, Artificial Sequence
  ENSG00000160551_123 (sequence is synthesized)
gaatccctgtaacttggaaggtggaggttgcagtgagctgggccactgcactgcagcctgagcgacagagctagactctgcctcgaaaaagaaaaagataaccaggtatatagtctactt

SEQ ID NO: 477600 - DNA, 120 bp, Artificial Sequence
  ENSG00000160551_124 (sequence is synthesized)
gtgtgcccatgttattcctttctcttcccatagcgtgcatacacataaactcttaagtaataatttatgtgctttttatttttatgtgtttgaatattttattaactaaagggaaagacc

SEQ ID NO: 477601 - DNA, 120 bp, Artificial Sequence
  ENSG00000160551_125 (sequence is synthesized)
atgaatgaggtctagtagtctctgaaaaatgatcctatactaagaaaaatgagctatttatattctaaacaatgttgatggtgttttgttttgctttttttgagacagggtttcgctctg

SEQ ID NO: 477602 - DNA, 120 bp, Artificial Sequence
  ENSG00000160551_126 (sequence is synthesized)
tcacccatgctggagtgcagtggcacaatactgctcactgcagcctttacctcccaggctgaagcagttttcctacctcaccctcccaagtagttgggaccacagacgcataccaccatg

SEQ ID NO: 477603 - DNA, 120 bp, Artificial Sequence
  ENSG00000160551_127 (sequence is synthesized)
cccaagtagttgggaccacagacgcataccaccatgcccagctaattttataatttattttttgtagaaacagtgttgccatattctccaaactggtctcaaactcctgggctcaagcaa

SEQ ID NO: 477604 - DNA, 120 bp, Artificial Sequence
  ENSG00000160551_128 (sequence is synthesized)
agatggatgtgagccaccattcctggccacagaatgctaatactagtatattttttaccaaaagagtatcaaggccagagtggtgggtggcacatgcttataacagcactttgggaggct

SEQ ID NO: 477605 - DNA, 120 bp, Artificial Sequence
  ENSG00000160551_129 (sequence is synthesized)
gttcaagaccagcctgggcaacatgttgagaccctgtgtctagcaaaaaaaaaaaaaaaaatcattagccaggcatggtgggacacacctgtggtcctagctactcagtagtcttaggtg

SEQ ID NO: 477606 - DNA, 120 bp, Artificial Sequence
  ENSG00000160551_130 (sequence is synthesized)
ggtcctagctactcagtagtcttaggtgggaagatcactggaacctgggaggtccatgctgcagggagctgaattcgtgccagtgcattccagcctgggtcacagagtgaaattcgatct

SEQ ID NO: 477607 - DNA, 120 bp, Artificial Sequence
  ENSG00000160551_131 (sequence is synthesized)
gtcccgctcgccctgcgcccttcgcgggccgaaagcactaggcactcgcgaacatctgaggcctcccggccccgggggaccccgccccgccgtccgccggccggcccgcggcctctcttc

SEQ ID NO: 477608 - DNA, 120 bp, Artificial Sequence
  ENSG00000160563_0 (sequence is synthesized)
agagctgctgtggcggcggcaacatggcggacgtgataaatgtcagtgtgaacctggaggccttttcccaggccattagtgccatccaggcgctgcgctccagcgtgagcagggtgttcg

SEQ ID NO: 477609 - DNA, 120 bp, Artificial Sequence
  ENSG00000160563_1 (sequence is synthesized)
actgcctgaaggatgggatgcggaacaaggagacgctggagggccgggagaaggcctttattgcgcacttccaggacaacttacattcggtcaaccgggacctcaatgagctggaacgtc

SEQ ID NO: 477610 - DNA, 120 bp, Artificial Sequence
  ENSG00000160563_2 (sequence is synthesized)
tgagcaatctggtaggcaagccatctgagaaccatcctcttcataacagtgggctgttaagcctggatcctgtgcaggacaaaactcctctctatagtcaactccttcaagcatataagt

SEQ ID NO: 477611 - DNA, 120 bp, Artificial Sequence
  ENSG00000160563_3 (sequence is synthesized)
ggtcaaacaagttgcagtaccatgcaggactagcatctggccttttaaatcagcagtcattgaagcgttccgctaatcagatgggagtatctgccaaacgtagaccaaaggctcagccca

SEQ ID NO: 477612 - DNA, 120 bp, Artificial Sequence
  ENSG00000160563_4 (sequence is synthesized)
caactcttgtcctaccacctcaatatgttgatgatgtgatcagccgcattgacaggatgtttcctgaaatgtccatccacttatccagacccaatggaacatcagcaatgcttctggtga

SEQ ID NO: 477613 - DNA, 120 bp, Artificial Sequence
  ENSG00000160563_5 (sequence is synthesized)
aagggatataacgagaatgtctacacagaagatggcaagcttgatatatggtccaaatccaactatcaagtattccagaaggtgacagaccatgccaccactgccctgctccactatcag

SEQ ID NO: 477614 - DNA, 120 bp, Artificial Sequence
  ENSG00000160563_6 (sequence is synthesized)
ctgccccagatgccggatgtcgtggtccgatccttcatgacctggttaagaagttacataaagctgttccaggccccgtgccagcgctgcgggaagtttctgcaggacggccttcccccg

SEQ ID NO: 477615 - DNA, 120 bp, Artificial Sequence
  ENSG00000160563_7 (sequence is synthesized)
acatggagggatttccgaaccctcgaagccttccatgacacctgccggcagtagcccccacgctggccccagcctcagaccccacccagcaccttcccagacacgcaggaagcccacaga

SEQ ID NO: 477616 - DNA, 120 bp, Artificial Sequence
  ENSG00000160563_8 (sequence is synthesized)
aggctcagctggttcctcactgcccagatgtgtacagctgctcctccctttcataaagcagcgccatgtgtgcagaggccactcttgaagagcagactccctctgtggctgatgggacta

SEQ ID NO: 477617 - DNA, 120 bp, Artificial Sequence
  ENSG00000160563_9 (sequence is synthesized)
attattcccactagccagcggactgaaggcaaagaagacctttctagaacctggtagaaggaagctgtgcagcatgctcctcgtccatgtgtgtcggcagtgctggtgtctgtcgtctcc

SEQ ID NO: 477618 - DNA, 120 bp, Artificial Sequence
  ENSG00000160563_10 (sequence is synthesized)
gcgagctgttactggaatgagcccttgtgttcatgggtatcgtcatgcggggttcttgtgttttgtggggcttgggttttggtaacttatttttataagcaataaaccttttgtatcctg

SEQ ID NO: 477619 - DNA, 120 bp, Artificial Sequence
  ENSG00000160563_11 (sequence is synthesized)
ttggaaagtctgaagacatttcctccctcctgccctcctgaactgttcttattagaatccagttgcttaatgactaagttactgcaaagttcacctctcacatctatctctgaaggtgct

SEQ ID NO: 477620 - DNA, 120 bp, Artificial Sequence
  ENSG00000160563_12 (sequence is synthesized)
cttttctgtttttgcatcatggaactaacagggttggaatcgttttacattgcaacgcagagcctttcctttagggactctgtcctctattaagggtaaactataaggctcaggggagag

SEQ ID NO: 477621 - DNA, 120 bp, Artificial Sequence
  ENSG00000160563_13 (sequence is synthesized)
gcaccatgtccatcttgttccttgctgggagtccccagcaactagcaaggcgcctggtacactgtaatcattcagtgaagattcactgagagaatgaaagaataaatgaatcgaagcgtt

SEQ ID NO: 477622 - DNA, 120 bp, Artificial Sequence
  ENSG00000160563_14 (sequence is synthesized)
ctgatttgtagggatgttgggggaaaaaatggacttcacaattaactctctggtcctgtgttgtaggatctagagaatggggattaaattccaatttgatagtgaataacatagtttctt

SEQ ID NO: 477623 - DNA, 120 bp, Artificial Sequence
  ENSG00000160563_15 (sequence is synthesized)
tactggcattctgtaggttaagaattctgcacattgaaaccttgcttttgaacaaaatttcagaccccatgtaagacttaaccagagaggaaagacactgtaagaccatttcaccttaag

SEQ ID NO: 477624 - DNA, 120 bp, Artificial Sequence
  ENSG00000160563_16 (sequence is synthesized)
tcacttaatgcaacctcccaatgttttggcgaatctgttttctattttccccaaaggagtatagtagacaatagtgatgctcaactgttggatcctgctaaagaaaacactctcgccagg

SEQ ID NO: 477625 - DNA, 120 bp, Artificial Sequence
  ENSG00000160563_17 (sequence is synthesized)
aaaaaaaaagaaaaaaaaagaaaacactctcttaatataaaaccagaatattatgtatttgaagaaagtgttctgagactgatgacttctggttttgctgtttctgattatggtttgctc

SEQ ID NO: 477626 - DNA, 120 bp, Artificial Sequence
  ENSG00000160563_18 (sequence is synthesized)
acttctggttttgctgtttctgattatggtttgctctgaacacatcgcctcataatctcctagaagatgtttgtatttgcatgaattcaccgaagacaggtgtgttttggaaatacagtg

SEQ ID NO: 477627 - DNA, 120 bp, Artificial Sequence
  ENSG00000160563_19 (sequence is synthesized)
ggatagaaatgctaaattatgttattaattaggaaggcatagagacctcaatgatgagaagcttttctagtggtctgtgtaataatacttgtatgtgcttgaagaatacttccctgaaca

SEQ ID NO: 477628 - DNA, 120 bp, Artificial Sequence
  ENSG00000160563_20 (sequence is synthesized)
cagatttttgaggaaccaccacattttataaaaagcagagtttattgaataagaatgatggtttcgatgggcgtcagggaggtaaggttcaggactgggtattttttccatctattctgc

SEQ ID NO: 477629 - DNA, 120 bp, Artificial Sequence
  ENSG00000160563_21 (sequence is synthesized)
tgttgctgctttggagcctagtgtgaactccccatattttagcattttacttgtgtgaaatcttataaatagccagtcacccaggatgagttactgtttactccagccgttcatcttcgg

SEQ ID NO: 477630 - DNA, 120 bp, Artificial Sequence
  ENSG00000160563_22 (sequence is synthesized)
ggagcattgtgtgtgcgtgcgtgttttggtcttaagacaggaaaagatctgggcttgttaaatgtttgttacttcgtttgtgggggaaacaaattagtgacattcacctggataacataa

SEQ ID NO: 477631 - DNA, 120 bp, Artificial Sequence
  ENSG00000160563_23 (sequence is synthesized)
tatttaaaaaatttctttcagttaaaacataaagaaaaggagataatgcgatgtttttttcatagaaaagggaaacagttttcttcatataaaatacatctgtctacagaacacaaaata

SEQ ID NO: 477632 - DNA, 120 bp, Artificial Sequence
  ENSG00000160563_24 (sequence is synthesized)
gtgcccaggctcccatggcatgcagctagcagcggccaagcttagcgcctcgcctaccacatccaccttctgatggcagtgcccaccagtggaacgaactctctccacacctcattattt

SEQ ID NO: 477633 - DNA, 120 bp, Artificial Sequence
  ENSG00000160563_25 (sequence is synthesized)
ctacaaccttgagtgaatttgcaaattaattgatgtgtgggagggaaggcatctgctattgtaaaaacctttaactgtggcagtaaaacttgaaataaaattaagtgttactatagtaaa

SEQ ID NO: 477634 - DNA, 120 bp, Artificial Sequence
  ENSG00000160563_26 (sequence is synthesized)
ccacccatctgttcaccatctctagtggctgcagtcatttccattcctgccagcagtgtgagtgatccagtttctctgcagtatcaccagcgtttggcgttgtcaatatttcttccgtta

SEQ ID NO: 477635 - DNA, 120 bp, Artificial Sequence
  ENSG00000160563_27 (sequence is synthesized)
accattctgataggtatgtagtgatgtcttgtgtcttttatttgcatttctctattggctaataatgttgaagatctttttgtgtgcttatttaccatctggtgtcttaagcaaaatgtc

SEQ ID NO: 477636 - DNA, 120 bp, Artificial Sequence
  ENSG00000160570_0 (sequence is synthesized)
tcccgggctaagcgtcggcaagttctgtagagaaactcgggcaacctttggccgggttctgagcttgttccgcctccctcccccgggaatggcgctatccgggtcgaccccggccccgtg

SEQ ID NO: 477637 - DNA, 120 bp, Artificial Sequence
  ENSG00000160570_1 (sequence is synthesized)
ctgggaggaggatgagtgcctggactactacgggatgctgtcgcttcaccgtatgttcgaggtggtgggcgggcaactgaccgagtgcgagctggagctcctggcctttctgctggatga

SEQ ID NO: 477638 - DNA, 120 bp, Artificial Sequence
  ENSG00000160570_2 (sequence is synthesized)
ggctcctggcgccgccggaggcttagcccgggcccgcagcggcctagagctcctgctggagctggagcgccgcgggcagtgcgacgagagcaacctgcggctgctggggcaactcctgcg

SEQ ID NO: 477639 - DNA, 120 bp, Artificial Sequence
  ENSG00000160570_3 (sequence is synthesized)
cgtgctggcccgccacgacctgctgccgcacctggcgcgcaagcggcgccggccagtgtctccagaacgctatagctatggcacctccagctcttcaaagaggacagagggtagctgccg

SEQ ID NO: 477640 - DNA, 120 bp, Artificial Sequence
  ENSG00000160570_4 (sequence is synthesized)
tcgccgtcggcagtcaagcagttctgcaaattctcagcagggtcagtgggagacaggctcccccccaaccaagcggcagcggcggagtcggggccggcccagtggtggtgccagacggcg

SEQ ID NO: 477641 - DNA, 120 bp, Artificial Sequence
  ENSG00000160570_5 (sequence is synthesized)
gcggagaggggccccagccgcaccccagcagcagtcagagcccgccagaccttcctctgaaggcaaagtgacctgtgacatccggctccgggttcgagcagagtactgcgagcatgggcc

SEQ ID NO: 477642 - DNA, 120 bp, Artificial Sequence
  ENSG00000160570_6 (sequence is synthesized)
agccttggagcagggcgtggcatcccggcggccccaggcgctggcgcggcagctggacgtgtttgggcaggccaccgcagtgctgcgctcaagggacctgggctctgtggtttgtgacat

SEQ ID NO: 477643 - DNA, 120 bp, Artificial Sequence
  ENSG00000160570_7 (sequence is synthesized)
gccctgcgagaggctgtgggccgggaggctgttcgcctgctggtcagtgtggatgaggctgactatgaggctggccggcgccgcctgttgctgatggaggaggaaggggggcggcgcccg

SEQ ID NO: 477644 - DNA, 120 bp, Artificial Sequence
  ENSG00000160570_8 (sequence is synthesized)
acagaggcctcctgatccaggactggcaggattgatcccacctccaagtctccgggccaccttctcctgggaggacgaccatctctacccctagaggactgtcactctagcatctttgag

SEQ ID NO: 477645 - DNA, 120 bp, Artificial Sequence
  ENSG00000160570_9 (sequence is synthesized)
gactgcgacaggaccgggacagcaggccccttgacagcccctcccacaggatgtgggctctgaggcctaaaccatttccagctgagtttccttcccagactcctcctacccccaggtgtg

SEQ ID NO: 477646 - DNA, 120 bp, Artificial Sequence
  ENSG00000160570_10 (sequence is synthesized)
cccccttagcctccggaggcgggggctgggcctgtatctcagaagggaggggcacagctacacactcaccaaaggcccccctgcacattgtatctctgatcttgggctgtctgcactgtc

SEQ ID NO: 477647 - DNA, 120 bp, Artificial Sequence
  ENSG00000160570_11 (sequence is synthesized)
acaggtgcacacactcgctcatgctcacactgcccctgctgagatcttccctgggcctctgccctggcctgcttcccagcacacacttctttggcctaagggcttctctctcaggacctc

SEQ ID NO: 477648 - DNA, 120 bp, Artificial Sequence
  ENSG00000160570_12 (sequence is synthesized)
taatttgaccacaaccaacctgggcttcagccacatcagtgggcactggagctggggtgcacatggggcctgctcaccttgcccacacatctccagccagccagggccctgcccagcttc

SEQ ID NO: 477649 - DNA, 120 bp, Artificial Sequence
  ENSG00000160570_13 (sequence is synthesized)
aatttacagacctgactctcctcaccttcccccctgctgtccagagctgaacatagacttgcacttggatgtcacctggagtgtcacatgggagtgttatggcagcatcataccaaggcc

SEQ ID NO: 477650 - DNA, 120 bp, Artificial Sequence
  ENSG00000160570_14 (sequence is synthesized)
tactgttgcacatggggccaaaaccagtaaacagccaccttcttggaaagggaatgcaaaggctttgggggtgatggaaaagaccttttacaaatgataccaattaaactgccctggaaa

SEQ ID NO: 477651 - DNA, 120 bp, Artificial Sequence
  ENSG00000160570_15 (sequence is synthesized)
gatggggaaacaggctcagagaggtaaggtcacatgcccaaggccccacagcttagagagtggcagagctgggactcacctcaaggtctgttggactccgccacctggccctgcctctgt

SEQ ID NO: 477652 - DNA, 120 bp, Artificial Sequence
  ENSG00000160570_16 (sequence is synthesized)
ggccaaccactcctgggtggcctggaagaggtgctgctcctcccagccccctgctctcccacccacattgattgaggtcatggccagttgcttactggagtcaaggatgcagtcaaggat

SEQ ID NO: 477653 - DNA, 120 bp, Artificial Sequence
  ENSG00000160570_17 (sequence is synthesized)
ctggtcgtctgggtagagacagctgggtctgaatgccatgggagggcctgggggctgaggctgggcaggcttccctgggcgttgggtggagaggatggggttcccctagagccagaaaga

SEQ ID NO: 477654 - DNA, 120 bp, Artificial Sequence
  ENSG00000160570_18 (sequence is synthesized)
taatagagaaggtgccagaaagatccaaaacaagtggctgcggccgtcgcccaggagtcatcggacgccagaatctgtgtctccagaacgctatagctatggcacctccagctcttcaaa

SEQ ID NO: 477655 - DNA, 120 bp, Artificial Sequence
  ENSG00000160570_19 (sequence is synthesized)
ctgtacaagaagcagggtgccagcatctgcttctgttgaggacctccggaagcttccattcatggtggaaggccaaggggagcaggcttgtcacatgacatccggctccgggttcgagca

SEQ ID NO: 477656 - DNA, 120 bp, Artificial Sequence
  ENSG00000160570_20 (sequence is synthesized)
gcatttctctgggtcgctcccgggctaagcgtcggcaagttctgtagagaaactcgggcaacctttgtgtctccagaacgctatagctatggcacctccagctcttcaaagaggacagag

SEQ ID NO: 477657 - DNA, 120 bp, Artificial Sequence
  ENSG00000160570_21 (sequence is synthesized)
aaacaagtggctgcggccgtcgcccaggagtcatcggacgccagaatctggtgaggatccagagaggcctaatggccgggttctgagcttgttccgcctccctcccccgggaatggcgct

SEQ ID NO: 477658 - DNA, 80 bp, Artificial Sequence
  ENSG00000160584_0 (sequence is synthesized)
actgcacaacaagatggcggcggcggcggcgagcggagctggcggggctgccggggccgggactgggggagccgggcccg

SEQ ID NO: 477659 - DNA, 120 bp, Artificial Sequence
  ENSG00000160584_1 (sequence is synthesized)
cgcccccgctgccgtgtcccctgcggccggccagccgcgtcccccagccccggcctcccgcggacccatgcccgcccgtatcggctactacgagatcgaccgcaccatcggcaagggcaa

SEQ ID NO: 477660 - DNA, 120 bp, Artificial Sequence
  ENSG00000160584_2 (sequence is synthesized)
cttcgcggtggtcaagcgggccacgcacctcgtcaccaaggccaaggttgctatcaagatcatagataagacccagctggatgaagaaaacttgaagaagattttccgggaagttcaaat

SEQ ID NO: 477661 - DNA, 120 bp, Artificial Sequence
  ENSG00000160584_3 (sequence is synthesized)
tatgaagatgctttgccacccccatatcatcaggctctaccaggttatggagacagaacggatgatttatctggtgacagaatatgctagtggaggggaaatatttgaccacctggtggc

SEQ ID NO: 477662 - DNA, 120 bp, Artificial Sequence
  ENSG00000160584_4 (sequence is synthesized)
ccatggtagaatggcagaaaaggaggcacgtcggaagttcaaacagatcgtcacagctgtctatttttgtcactgtcggaacattgttcatcgtgatttaaaagctgaaaatttacttct

SEQ ID NO: 477663 - DNA, 120 bp, Artificial Sequence
  ENSG00000160584_5 (sequence is synthesized)
ggatgccaatctgaatatcaaaatagcagattttggtttcagtaacctcttcactcctgggcagctgctgaagacctggtgtggcagccctccctatgctgcacctgaactctttgaagg

SEQ ID NO: 477664 - DNA, 120 bp, Artificial Sequence
  ENSG00000160584_6 (sequence is synthesized)
aaaagaatatgatgggcccaaagtggacatctggagccttggagttgtcctctacgtgcttgtgtgcggtgccctgccatttgatggaagcacactgcagaatctgcgggcccgcgtgct

SEQ ID NO: 477665 - DNA, 120 bp, Artificial Sequence
  ENSG00000160584_7 (sequence is synthesized)
gagtggaaagttccgcatcccattttttatgtccacagaatgtgagcatttgatccgccatatgttggtgttagatcccaataagcgcctctccatggagcagatctgcaagcacaagtg

SEQ ID NO: 477666 - DNA, 120 bp, Artificial Sequence
  ENSG00000160584_8 (sequence is synthesized)
gatgaagctaggggacgccgatcccaactttgacaggttaatagctgaatgccaacaactaaaggaagaaagacaggtggaccccctgaatgaggatgtcctcttggccatggaggacat

SEQ ID NO: 477667 - DNA, 120 bp, Artificial Sequence
  ENSG00000160584_9 (sequence is synthesized)
gggactggacaaagaacagacactgcagtcattaagatcagatgcctatgatcactatagtgcaatctacagcctgctgtgtgatcgacataagagacataaaaccctgcgtctcggagc

SEQ ID NO: 477668 - DNA, 120 bp, Artificial Sequence
  ENSG00000160584_10 (sequence is synthesized)
acttcctagcatgccccgagccctggcctttcaagcaccagtcaatatccaggcggagcaggcaggtactgctatgaacatcagcgttccccaggtgcagctgatcaacccagagaacca

SEQ ID NO: 477669 - DNA, 120 bp, Artificial Sequence
  ENSG00000160584_11 (sequence is synthesized)
aattgtggagccggatgggacactgaatttggacagtgatgagggtgaagagccttcccctgaagcattggtgcgctatttgtcaatgaggaggcacacagtgggtgtggctgacccacg

SEQ ID NO: 477670 - DNA, 120 bp, Artificial Sequence
  ENSG00000160584_12 (sequence is synthesized)
cacggaagttatggaagatctgcagaagctcctacctggctttcctggagtcaacccccaggctccattcctgcaggtggcccctaatgtgaacttcatgcacaacctgttgcctatgca

SEQ ID NO: 477671 - DNA, 120 bp, Artificial Sequence
  ENSG00000160584_13 (sequence is synthesized)
aaacttgcaaccaaccgggcaacttgagtacaaggagcagtctctcctacagccgcccacgctacagctgttgaatggaatgggcccccttggccggagggcatcagatggaggagccaa

SEQ ID NO: 477672 - DNA, 120 bp, Artificial Sequence
  ENSG00000160584_14 (sequence is synthesized)
catccaactgcatgcccagcagctgctgaagcgcccacggggaccctctccgcttgtcaccatgacaccagcagtgccagcagttacccctgtggacgaggagagctcagacggggagcc

SEQ ID NO: 477673 - DNA, 120 bp, Artificial Sequence
  ENSG00000160584_15 (sequence is synthesized)
agaccaggaagctgtgcagagctctacctacaaggactccaacactctgcacctccctacggagcgtttctcccctgtgcgccggttctcagatggggctgcgagcatccaggccttcaa

SEQ ID NO: 477674 - DNA, 120 bp, Artificial Sequence
  ENSG00000160584_16 (sequence is synthesized)
agctcacctggaaaaaatgggcaacaacagcagcatcaaacagctgcagcaggagtgtgagcagctgcagaagatgtacggggggcagattgatgaaagaaccctggagaagacccagca

SEQ ID NO: 477675 - DNA, 120 bp, Artificial Sequence
  ENSG00000160584_17 (sequence is synthesized)
gcagcatatgttataccagcaggagcagcaccatcaaattctccagcaacaaattcaagactctatctgtcctcctcagccatctccacctcttcaggctgcatgtgaaaatcagccagc

SEQ ID NO: 477676 - DNA, 120 bp, Artificial Sequence
  ENSG00000160584_18 (sequence is synthesized)
cctccttacccatcagctccagaggttaaggattcagccttcaagcccaccccccaaccaccccaacaaccatctcttcaggcagcccagtaatagtcctccccccatgagcagtgccat

SEQ ID NO: 477677 - DNA, 120 bp, Artificial Sequence
  ENSG00000160584_19 (sequence is synthesized)
gatccagcctcacggggctgcatcttcttcccagtttcaaggcttaccttcccgcagtgcaatctttcagcagcaacctgagaactgttcctctcctcccaacgtggcactaacctgctt

SEQ ID NO: 477678 - DNA, 120 bp, Artificial Sequence
  ENSG00000160584_20 (sequence is synthesized)
gggtatgcagcagcctgctcagtcacagcaggtcaccatccaagtccaagagcctgttgacatgctcagcaacatgccaggcacagctgcaggctccagtgggcgcggcatctccatcag

SEQ ID NO: 477679 - DNA, 120 bp, Artificial Sequence
  ENSG00000160584_21 (sequence is synthesized)
ccccagtgctggtcagatgcagatgcagcaccgtaccaacctgatggccaccctcagctatgggcaccgtcccttgtccaagcagctgagtgctgacagtgcagaggctcacagcttgaa

SEQ ID NO: 477680 - DNA, 120 bp, Artificial Sequence
  ENSG00000160584_22 (sequence is synthesized)
cgtgaatcggttctcccctgctaactacgaccaggcgcatttacacccccatctgttttcggaccagtcccggggttcccccagcagctacagcccttcaacaggagtggggttctctcc

SEQ ID NO: 477681 - DNA, 120 bp, Artificial Sequence
  ENSG00000160584_23 (sequence is synthesized)
aacccaagccctgaaagtccctccacttgaccaattccccaccttccctcccagtgcacatcagcagccgccacactataccacgtcggcactacagcaggccctgctgtctcccacgcc

SEQ ID NO: 477682 - DNA, 120 bp, Artificial Sequence
  ENSG00000160584_24 (sequence is synthesized)
gccagactatacaagacaccagcaggtaccccacatccttcaaggactgctttctccccggcattcgctcaccggccactcggacatccggctgcccccaacagagtttgcacagctcat

SEQ ID NO: 477683 - DNA, 120 bp, Artificial Sequence
  ENSG00000160584_25 (sequence is synthesized)
ggatgcggggagtctggctcccagccttgggggacagagcatgacagagcgccaggctttatcttatcaaaatgctgactcttatcaccatcacaccagcccccagcatctgctacaaat

SEQ ID NO: 477684 - DNA, 120 bp, Artificial Sequence
  ENSG00000160584_26 (sequence is synthesized)
cagggcacaagaatgtgtctcacaggcttcctcacccaccccgccccacgggtatgctcaccagccggcactgatgcattcagagagcatggaggaggactgctcgtgtgagggggccaa

SEQ ID NO: 477685 - DNA, 120 bp, Artificial Sequence
  ENSG00000160584_27 (sequence is synthesized)
ggatggcttccaagacagtaagagttcaagtacattgaccaaaggttgccatgacagccctctgctcttgagtaccggtggacctggggaccctgaatctttgctaggaactgtgagtca

SEQ ID NO: 477686 - DNA, 120 bp, Artificial Sequence
  ENSG00000160584_28 (sequence is synthesized)
tgcccaagaattggggatacatccctatggtcatcagccaactgctgcattcagtaaaaataaggtgcccagcagagagcctgtcatagggaactgcatggatagaagttctccaggaca

SEQ ID NO: 477687 - DNA, 120 bp, Artificial Sequence
  ENSG00000160584_29 (sequence is synthesized)
agcagtggagctgccggatcacaatgggctcgggtacccagcacgcccctccgtccatgagcaccacaggccccgggccctccagagacaccacacgatccagaacagcgacgatgctta

SEQ ID NO: 477688 - DNA, 120 bp, Artificial Sequence
  ENSG00000160584_30 (sequence is synthesized)
tgtacagctggataacttgccaggaatgagtctcgtggctgggaaagcacttagctctgcccggatgtcggatgcagttctcagtcagtcttcgctcatgggcagccagcagtttcagga

SEQ ID NO: 477689 - DNA, 120 bp, Artificial Sequence
  ENSG00000160584_31 (sequence is synthesized)
tggggaaaatgaggaatgtggggcaagcctgggaggtcatgagcacccagacctgagtgatggcagccagcatttaaactcctcttgctatccatctacgtgtattacagacattctgct

SEQ ID NO: 477690 - DNA, 120 bp, Artificial Sequence
  ENSG00000160584_32 (sequence is synthesized)
cagctacaagcaccccgaagtctccttcagcatggagcaggcaggcgtgtaacaagaaacagagagttttgtgtacagcttgggaatgaaaaggttgattgtaaacccacagtatctagc

SEQ ID NO: 477691 - DNA, 120 bp, Artificial Sequence
  ENSG00000160584_33 (sequence is synthesized)
agcgttgtgccaaattgcccttgtgtttctctccacccaaaatatcacagctgctttcctcacatttggttcatccgtgtgctgttcttttgggttctgagagggttttgccatgtttgc

SEQ ID NO: 477692 - DNA, 120 bp, Artificial Sequence
  ENSG00000160584_34 (sequence is synthesized)
ttgtatgaccaagtcaccaaggaaataaacaggaaggaaatccatgttctccatcttttgtgaaagtatatttgagttggtggttttttgttttgtttgggggtttgtgttttgttttgt

SEQ ID NO: 477693 - DNA, 120 bp, Artificial Sequence
  ENSG00000160584_35 (sequence is synthesized)
ttttggtatgttttcttccagaggtgatatactttcttttttttcttcctttcttttttttctttcgttccttttttgaaacaggagagcaaagcagttagagttcagaggccagcggcc

SEQ ID NO: 477694 - DNA, 120 bp, Artificial Sequence
  ENSG00000160584_36 (sequence is synthesized)
tcagggccactccctccctagccttcatcagcagagcaccctccatccccctgcattgctcttctgtgaaagcaaatactaaaggatgccatcctctggaatcctaatggcaggcaaagg

SEQ ID NO: 477695 - DNA, 120 bp, Artificial Sequence
  ENSG00000160584_37 (sequence is synthesized)
gagagaggaagggtgacggcttctggcacttagaaaacaaaaagaacaaaaaaagagaaacccccaagcctggaacgcagagaggtctttactgctgggatccacggaaaacatgtctgt

SEQ ID NO: 477696 - DNA, 120 bp, Artificial Sequence
  ENSG00000160584_38 (sequence is synthesized)
cctagccaagatcatatgaagagtttggcacggaggctgagaatgacctggcatagatggtttgccagttaggatgtctcaatttgagcctttgcttttggtggataactcagctcccct

SEQ ID NO: 477697 - DNA, 120 bp, Artificial Sequence
  ENSG00000160584_39 (sequence is synthesized)
cttgtaacctggaaagttggttgcctttatcatcctgctggttttatccatggactgaacacccaacagcagtgcactatgctttctatggcatctttcattctcattttatattgtgct

SEQ ID NO: 477698 - DNA, 120 bp, Artificial Sequence
  ENSG00000160584_40 (sequence is synthesized)
tatataatatatatataaaatatatatatatatgctctcctctttcagcctctttgtcacagggaagaagtgtaggaggttgccttgggccctgcctctctcctaacctcctcttcccca

SEQ ID NO: 477699 - DNA, 120 bp, Artificial Sequence
  ENSG00000160584_41 (sequence is synthesized)
ctgggtaccctcagcccctatattttaattcttgatcatgtagaaattgtttttggtaaatgttgatattattgttattatcattattaataaataaagagaaaaggaatttttgtttaa

SEQ ID NO: 477700 - DNA, 120 bp, Artificial Sequence
  ENSG00000160584_42 (sequence is synthesized)
atgagaaatgtttaaccagattctgttctatttgaattgtgacttgcaccttttgttcaaagtatttcctttaggcattgtaattgtgaacagctcttacttgtgccagtgacagatgca

SEQ ID NO: 477701 - DNA, 120 bp, Artificial Sequence
  ENSG00000160584_43 (sequence is synthesized)
gtggtctcctttccccagttgaagcagtgcatacgcagtagctattatttgtgttatctttatttctcttcattgttagaaaccaaagtcttctctgctggctggggctgagagagggtc

SEQ ID NO: 477702 - DNA, 120 bp, Artificial Sequence
  ENSG00000160584_44 (sequence is synthesized)
tgggttatctccttctgatcttcaaaacaagagagagaccttgaatacactgactcttccaccctttttttttctgggaaaggagagcaagaggtcccgagtcccctcctagtctttcat

SEQ ID NO: 477703 - DNA, 120 bp, Artificial Sequence
  ENSG00000160584_45 (sequence is synthesized)
cctgaatttgcacagaggaaagcgggtgcccggcatggccatcctgatgttgctggcgggatccccatgcaccttgtccttctccactgatactggcagctcggctcctggacccaagat

SEQ ID NO: 477704 - DNA, 120 bp, Artificial Sequence
  ENSG00000160584_46 (sequence is synthesized)
cccttgagtggaattctgcagtgcaagagcccttcgtgggagctgtcccatgtttccatggtccccagtctcccctccacttggtggggtcaccaactactcaccagaagggggcttacc

SEQ ID NO: 477705 - DNA, 120 bp, Artificial Sequence
  ENSG00000160584_47 (sequence is synthesized)
aagaaagccctaaaaagctgttgacttatctgcgcttgttccaactcttatgcccccaacctgccctaccaccaccacgcgctcagcctgatgtgtttacatggtactgtatgtatggga

SEQ ID NO: 477706 - DNA, 120 bp, Artificial Sequence
  ENSG00000160584_48 (sequence is synthesized)
gagcagactgcaccctccagcaacaacagatgaaagccagtgagcctactaaccgtgccatcttgcaaactacactttaaaaaaaactcattgctttgtattgtagtaaccaatatgtgc

SEQ ID NO: 477707 - DNA, 120 bp, Artificial Sequence
  ENSG00000160584_49 (sequence is synthesized)
agtatacgttgaatgtatatgaacatactttcctatttctgttctttgaaaatgtcagaaatatttttttctttctcattttatgttgaactaaaaaggattaaaaaaaaaatctccaga

SEQ ID NO: 477708 - DNA, 120 bp, Artificial Sequence
  ENSG00000160584_50 (sequence is synthesized)
gcagaggtacttggcaaataggtccaaaagacatacactggccatgaccaaccctacagctgagatcccaccggacctacaacggcagctaggacagcagcctttccgttcccgggtctg

SEQ ID NO: 477709 - DNA, 120 bp, Artificial Sequence
  ENSG00000160584_51 (sequence is synthesized)
agaccaggaagctgtgcagaggtaatgtgacatctggcagtgcttgcagaagcccctgggcaggctcccctgcaaccagcgaaaggtcacctctgcccaaggaggtggtagagtgcagct

SEQ ID NO: 477710 - DNA, 120 bp, Artificial Sequence
  ENSG00000160584_52 (sequence is synthesized)
tcaacatttgtgtggtctctttgctcaagccagatggcatgttccaccccacatggaagtaacagaagactacccagaaaatgtcatttctgtaagcaccattggaagtcccctaagtga

SEQ ID NO: 477711 - DNA, 120 bp, Artificial Sequence
  ENSG00000160584_53 (sequence is synthesized)
cagcaataaccataagaactttttctttcctccctccttcttccttgtcccctgccttcatattgcaactctgatagtattcacaaggcacaaagcctgctcgtacctgccaagaactgt

SEQ ID NO: 477712 - DNA, 120 bp, Artificial Sequence
  ENSG00000160584_54 (sequence is synthesized)
ttactgaaaaggaattggagatgtgggatgacagtgatcctagctagtctggccatggacctctggcatggacttttcctttccaggagaatgaatacctcttgtactgtttgctgtgtg

SEQ ID NO: 477713 - DNA, 120 bp, Artificial Sequence
  ENSG00000160584_55 (sequence is synthesized)
cttcttccacccccttgtaccaacaaagagatattgaaaaagagaatatgggattcgggccagggacagatgcaaatatccattgtttacagaaccttgttgagagatgcctaactcaca

SEQ ID NO: 477714 - DNA, 120 bp, Artificial Sequence
  ENSG00000160584_56 (sequence is synthesized)
gagaacggcagtgaccatcaggcatgctgtactgttcatttggcctcagttccgttagccctggtccttagctccatgcatgcccccttgtgggagttgattttcttattatccggggag

SEQ ID NO: 477715 - DNA, 120 bp, Artificial Sequence
  ENSG00000160584_57 (sequence is synthesized)
ggggtttcaccagaatccagcatgtattttcccagaaatacaggtgttcttcaagattatatgttttttcctttgagggaagttgaaataaaatggttttcatgggcttttggggaactt

SEQ ID NO: 477716 - DNA, 120 bp, Artificial Sequence
  ENSG00000160584_58 (sequence is synthesized)
tgggtgtctttatccaatggttattaaaacattaatggcttactctttggcaagttcacataacactgattactctacagtctgttaactgattttagctgaaaggggcaagatagttaa

SEQ ID NO: 477717 - DNA, 120 bp, Artificial Sequence
  ENSG00000160584_59 (sequence is synthesized)
gaatgaaatgagaccattttttaagaacctgccagttgctggctaggactctcatcctatccccagtagctctgtgtgagagctgctattcagaaagcagctggtcctatgtggaaagaa

SEQ ID NO: 477718 - DNA, 120 bp, Artificial Sequence
  ENSG00000160584_60 (sequence is synthesized)
aaccatggcaaacaggggtgttggcaggtgggccagctccttctacagcttggccaatagaaggaaaattctggtaacttttttttttccttgatgctgttgtttctatagtttgctgat

SEQ ID NO: 477719 - DNA, 120 bp, Artificial Sequence
  ENSG00000160584_61 (sequence is synthesized)
aagagggtatataaggttacaaatgggccctactgggtcatgaagaaatgagaaatcaggaaatttactgcctttctaccttaaaagagacagcaatattttatcttctttgtcttagac

SEQ ID NO: 477720 - DNA, 120 bp, Artificial Sequence
  ENSG00000160584_62 (sequence is synthesized)
tttccttcctccaggtctaccttctttcttctttagaccaacatttcaagggtataatgcccatcagttttgatgtaataaaaaaggtgtagtgcctcttttattcatgcctccagaaga

SEQ ID NO: 477721 - DNA, 120 bp, Artificial Sequence
  ENSG00000160584_63 (sequence is synthesized)
gcagcagcggtggaggaagtcatccaccagacaaagagggacaatatcttattgatggtattaactaagtgctgggtctgaaagatcttccgaataaaagccatcagtttgggaactctt

SEQ ID NO: 477722 - DNA, 120 bp, Artificial Sequence
  ENSG00000160584_64 (sequence is synthesized)
tgtgcgagctccttgaggctcatcggacaggcacccttctgattagtctcacagcgacggtgactagcatcgtggctttaaatagaagccagctgtcatcctgaactcacatcttctcag

SEQ ID NO: 477723 - DNA, 120 bp, Artificial Sequence
  ENSG00000160584_65 (sequence is synthesized)
ctccttgcagtaagcaatgcacagggcaaaggttttttactgcgccctggagcaatgcgagattcctctctcccattaccttgcagacctgtttattgtctgcatttgattcccatgatt

SEQ ID NO: 477724 - DNA, 120 bp, Artificial Sequence
  ENSG00000160584_66 (sequence is synthesized)
ccccgaagtctccttcagcatggagcaggcaggcgtgtaacaagaaacagagagagagcaaagcagttagagttcagaggccagcggcctcagggccactccctccctagccttcatcag

SEQ ID NO: 477725 - DNA, 120 bp, Artificial Sequence
  ENSG00000160584_67 (sequence is synthesized)
agtaatgttatcttttttcagctagtattctgtgttcctaagaaaaaaagaatttctgagcttcacgaccttcttggggagaagcatgtaggaagtgggtattggtgggcaaggggtcca

SEQ ID NO: 477726 - DNA, 120 bp, Artificial Sequence
  ENSG00000160584_68 (sequence is synthesized)
ttttcaaaatcaaaggaccatgatacaaaattaacacttagtcaataagatagatgatccatttcccttattcataccacagtttcttggaatccagaaattcctgactgccatccaaac

SEQ ID NO: 477727 - DNA, 120 bp, Artificial Sequence
  ENSG00000160584_69 (sequence is synthesized)
agctaactttaaacttgtgcaatagaaaaaaagtcagcccaacataatttagtgtaaatagtgtgggaacaagagtcagagcaccttaattctgctcttgcagctatcataaatacgata

SEQ ID NO: 477728 - DNA, 120 bp, Artificial Sequence
  ENSG00000160584_70 (sequence is synthesized)
actttgtcatttaatccctctgattctgattttcctcatctgtgaagaaggtgttggaggaacaatggagtatcttacggtgtatctgtggagatgaaaacatgtatatatgtgtttgtt

SEQ ID NO: 477729 - DNA, 120 bp, Artificial Sequence
  ENSG00000160584_71 (sequence is synthesized)
tctacataatgtttgcatgagagagagaggcacattcagatcatctgaaatgtttgagttcagtgcataaatgtgaggtattattactctggtcgttttattagtgagctaaatgcagaa

SEQ ID NO: 477730 - DNA, 120 bp, Artificial Sequence
  ENSG00000160584_72 (sequence is synthesized)
tattacagcatcataagggcccccattatcatttcattttgtaccactttataattaatgagtatattcattatcattctgaaggagatcaggattgcaattagtaagttatacttagaa

SEQ ID NO: 477731 - DNA, 120 bp, Artificial Sequence
  ENSG00000160584_73 (sequence is synthesized)
aatatagttccattagcatcacggcattcatcctagacaaaatcaggaatcttgcaatttaccactcctcaccattgccatccaagggaataaaaagcaatttatctgtaaactgtacaa

SEQ ID NO: 477732 - DNA, 120 bp, Artificial Sequence
  ENSG00000160584_74 (sequence is synthesized)
ctgattgtggtcatcgtcgcacaactctgtgaatgcgctaaaagccgctgggcattacactttcaatgcgtgaattgtatgggatatggaatacaagaaatatgttatggccaggtgcag

SEQ ID NO: 477733 - DNA, 90 bp, Artificial Sequence
  ENSG00000160584_75 (sequence is synthesized)
gggatatggaatacaagaaatatgttatggccagcttcggaaggccgaggtgggaggatcatgtgagctcaggagttcgagaccagcctg

SEQ ID NO: 477734 - DNA, 120 bp, Artificial Sequence
  ENSG00000160584_76 (sequence is synthesized)
ggaggtggtagagtgcagcttcaacatttgtgtggtctctttgctcaagccagatggcatgttccaccccacatggaagtaacagaagactacccagaaaatgtcatttctctctaccta

SEQ ID NO: 477735 - DNA, 120 bp, Artificial Sequence
  ENSG00000160584_77 (sequence is synthesized)
aattcatttgttttttgtgttgctgaaccaaatacatgttcgtgctcatttcattagctcactgctgggtcaagcctcaggtagagtctgaaacaaaagccatcattagcaaagacaggg

SEQ ID NO: 477736 - DNA, 120 bp, Artificial Sequence
  ENSG00000160584_78 (sequence is synthesized)
taaaaggctttcacctgctgccagaactctctggatacctctgcacggtcattagattcctcctggtcccgcgctgtctgcattgtatttgaactcgcttgttaacctgcttcctgagct

SEQ ID NO: 477737 - DNA, 120 bp, Artificial Sequence
  ENSG00000160584_79 (sequence is synthesized)
gtggttctgcttcagtcccaaatgaatcactggcaaggtagcacatcatttcatccaaagttcagtgtaatggcatctctgccctggacatgaaaccctgatcctttccatctgctactg

SEQ ID NO: 477738 - DNA, 120 bp, Artificial Sequence
  ENSG00000160584_80 (sequence is synthesized)
gaatgctgctgccttggcagtcttttatctgcttacctcagcccataaacatctctttctgatcatcaggtcacaagagtaggtgttagcttctaaccccgatgctgtcttaggcattcc

SEQ ID NO: 477739 - DNA, 120 bp, Artificial Sequence
  ENSG00000160584_81 (sequence is synthesized)
ttatcaatagcttgttctttctttctgtaagattctggctgtgttccagttgagcagtggggtctttgaaggtaatccatatgattcctctttcattaggaggttgggtgagtgctgctg

SEQ ID NO: 477740 - DNA, 120 bp, Artificial Sequence
  ENSG00000160584_82 (sequence is synthesized)
ctctgagaagttgattttcacagtaggtgaccttatttgttgaccaggtacgtgcaggatctcaaggcccacattccttaagaatttgttgtctccatcccaggatcagaagtcttcatt

SEQ ID NO: 477741 - DNA, 120 bp, Artificial Sequence
  ENSG00000160584_83 (sequence is synthesized)
ttcccccaccccaatcgccaccttctattttctgtcacagaacctatgagttctaggccagacctttgaccacaaaactgactgttgtttccctctggccatacggagatcattgctcag

SEQ ID NO: 477742 - DNA, 120 bp, Artificial Sequence
  ENSG00000160584_84 (sequence is synthesized)
ggaaaactttggctcaaatggtgaatttaaggtttctaaaggcactagatagacatatgattataaaagcaagagcttctgtacagtctggcctggaggatattgagaagcttttctctc

SEQ ID NO: 477743 - DNA, 120 bp, Artificial Sequence
  ENSG00000160584_85 (sequence is synthesized)
tggcctagtgtatttataagaactggatgtacttgatctcgggacctcaccaggcttggaaagtaagccaaccgaaggtaagtagaaatggaagatgtacacctggagccctctaaaggg

SEQ ID NO: 477744 - DNA, 120 bp, Artificial Sequence
  ENSG00000160584_86 (sequence is synthesized)
aagcaggctagggaaacgactgatgtctggaaatggcatgaaagtggcataatatgcagggctacctgggcagccagccgtctttatgttcatctggaacagcagtccctgtgtgatttg

SEQ ID NO: 477745 - DNA, 120 bp, Artificial Sequence
  ENSG00000160584_87 (sequence is synthesized)
attaatgattctgaagtacacttttggcagaggaacaggagcaaaagcttaatcatgtggttgcaacaaaaaaggaatagaaggaaaatagacgacacgctctttccagtttactataaa

SEQ ID NO: 477746 - DNA, 120 bp, Artificial Sequence
  ENSG00000160588_0 (sequence is synthesized)
acttccggtgttacctgtgtcgttaccgggagctgtaaacaaggtgtgcaagcatctgaagagctgccgggatgcagcagagaggagcagctggaagccgtggctgcgctctcttccctc

SEQ ID NO: 477747 - DNA, 120 bp, Artificial Sequence
  ENSG00000160588_1 (sequence is synthesized)
tgctgggcgtcctgttcttccagggtgtttatatcgtcttttccttggagattcgtgcagatgcccatgtccgaggttatgttggagaaaagatcaagttgaaatgcactttcaagtcaa

SEQ ID NO: 477748 - DNA, 120 bp, Artificial Sequence
  ENSG00000160588_2 (sequence is synthesized)
cttcagatgtcactgacaaacttactatagactggacatatcgccctcccagcagcagccacacagtatcaatatttcattatcagtctttccagtacccaaccacagcaggcacatttc

SEQ ID NO: 477749 - DNA, 120 bp, Artificial Sequence
  ENSG00000160588_3 (sequence is synthesized)
gggatcggatttcctgggttggaaatgtatacaaaggggatgcatctataagtataagcaaccctaccataaaggacaatgggacattcagctgtgctgtgaagaatcccccagatgtgc

SEQ ID NO: 477750 - DNA, 120 bp, Artificial Sequence
  ENSG00000160588_4 (sequence is synthesized)
atcataatattcccatgacagagctaacagtcacagaaaggggttttggcaccatgctttcctctgtggcccttctttccatccttgtctttgtgccctcagccgtggtggttgctctgc

SEQ ID NO: 477751 - DNA, 120 bp, Artificial Sequence
  ENSG00000160588_5 (sequence is synthesized)
tgctggtgagaatggggaggaaggctgctgggctgaagaagaggagcaggtctggctataagaagtcatctattgaggtttccgatgacactgatcaggaggaggaagaggcgtgtatgg

SEQ ID NO: 477752 - DNA, 120 bp, Artificial Sequence
  ENSG00000160588_6 (sequence is synthesized)
cgaggctttgtgtccgttgcgctgagtgcctggattcagactatgaagagacatattgatgaaagtctgtatgacacaagaagagtcacctaaagacaggaaacatcccattccactggc

SEQ ID NO: 477753 - DNA, 120 bp, Artificial Sequence
  ENSG00000160588_7 (sequence is synthesized)
agctaaagcctgtcagagaaagtggagctggcctggaccatagcgatggacaatcctggagatcatcagtaaagactttaggaaccacttatttattgaataaatgttcttgttgtattt

SEQ ID NO: 477754 - DNA, 120 bp, Artificial Sequence
  ENSG00000160588_8 (sequence is synthesized)
ataaactgttcaggaactctcataagagactcatgacttcccctttcaatgaattatgctgtaattgaatgaagaaattcttttcctgagcaaaaagatactttttgattcatctttgct

SEQ ID NO: 477755 - DNA, 120 bp, Artificial Sequence
  ENSG00000160588_9 (sequence is synthesized)
ctggaatgtattacatgttttcttccaactgtttgaaggagaattttgaatgtttgccacaccgctgatacccaaataattttttaaatgaagtggagcttgtggcttcctgatgtgtca

SEQ ID NO: 477756 - DNA, 120 bp, Artificial Sequence
  ENSG00000160588_10 (sequence is synthesized)
ccagacaaaatattcgcttgggatatgtattctttgttttttgctccatgtacactttcagctgtgagttagtatagggcgtatacttaccggtttaatgacctcaacctcagttgtgtt

SEQ ID NO: 477757 - DNA, 120 bp, Artificial Sequence
  ENSG00000160588_11 (sequence is synthesized)
tggataacttagggtgtatacccttagtttccttagagttggtaggatcaagtcattggtttgctttgactgggtttttaaagtattaagtacagtgtcatcaatttacagttaaggaaa

SEQ ID NO: 477758 - DNA, 120 bp, Artificial Sequence
  ENSG00000160588_12 (sequence is synthesized)
gtcatcaatttacagttaaggaaaggaatcgtgaagtagaaaaattattttctttagtcttgctggtacaatttgggctaaggagtctttgttattttctgtcttgcttttttttttttt

SEQ ID NO: 477759 - DNA, 120 bp, Artificial Sequence
  ENSG00000160588_13 (sequence is synthesized)
acaggcatgagccactgtgcttggcctgttattttattttcttataactacaacttttcttcttgaattttcaggtcagaggcaagaaaaactctttacaggtttttagtggggggctta

SEQ ID NO: 477760 - DNA, 120 bp, Artificial Sequence
  ENSG00000160588_14 (sequence is synthesized)
caaattaaatcatcttttcacttgtattgtttttcaaaactttgttgatttctaaaatgtgccaactgtgagtaaactatggtatttgcaagtggtttttacataatatttgagatgagg

SEQ ID NO: 477761 - DNA, 120 bp, Artificial Sequence
  ENSG00000160588_15 (sequence is synthesized)
aagtgagattgtgcatgacatacttctcctttgtattctctcagtgccttacagcaggttactccattctgctatgacaacttgtttcaaatgttaatttacataggattttttataagc

SEQ ID NO: 477762 - DNA, 120 bp, Artificial Sequence
  ENSG00000160588_16 (sequence is synthesized)
cattaaggcatatgtatagtatatcagtaaagatggatggtgcatatataaatagtcttctgtaatagtgattggatttacttctcaattatgagagacaaaaattatcccctcacctgt

SEQ ID NO: 477763 - DNA, 120 bp, Artificial Sequence
  ENSG00000160588_17 (sequence is synthesized)
ctctattctttcaacaggttgatcccttttcatgatttttcattaggtggttcaggaagtttccatattacagcgcttcagactgtatatgttagtttaaaaatcacttttctctctctc

SEQ ID NO: 477764 - DNA, 120 bp, Artificial Sequence
  ENSG00000160588_18 (sequence is synthesized)
aacttctttcttttttttttgaagacttaatttaaaaaatttgggttgttagatccgtatcatagatttggcctagcctcttctgttaacctagtccacagatgagcgaatctggttagt

SEQ ID NO: 477765 - DNA, 120 bp, Artificial Sequence
  ENSG00000160588_19 (sequence is synthesized)
tgaaggacattgtgatttgactctggtcacgcgaggaagtagaagggcaaagacaggaccggcagtttacatttccagtggttaaacctcacggtactttgggactgcttgttaactttt

SEQ ID NO: 477766 - DNA, 120 bp, Artificial Sequence
  ENSG00000160588_20 (sequence is synthesized)
gtggttgtctgaggccaatctaacgtgaccatttctgacacctcaacagagagaggaaagcaacttgagcaatgagagtaaataacttgggctctcagagatttgaagatagagatctca

SEQ ID NO: 477767 - DNA, 120 bp, Artificial Sequence
  ENSG00000160588_21 (sequence is synthesized)
ttgtgagggggactattttgcaggtcctcatttctccaagaaagagatggtgttacaggaacccactgaaagccatatcccattaaatgaggaactaattttggctgggccttcttgtaa

SEQ ID NO: 477768 - DNA, 120 bp, Artificial Sequence
  ENSG00000160588_22 (sequence is synthesized)
tgtcctcgcaggtgtgttgtgaagattaatgcagggtagtatgtttgtagattgacacctagtctaaacttgaggtaattggtgctctgtgaatactcagtcgtgttcttttatagcctt

SEQ ID NO: 477769 - DNA, 120 bp, Artificial Sequence
  ENSG00000160588_23 (sequence is synthesized)
aatcatgatttgaactagtcccttgctttttaaatgactgaatgaagtccttcgtggtaagggagtacgttgataacttagtttactatatgggtttgtggtcgcatcccagtcatcagc

SEQ ID NO: 477770 - DNA, 120 bp, Artificial Sequence
  ENSG00000160588_24 (sequence is synthesized)
tgctatcattttccttcttcatcccttatactgagatttgggttacagctttttattcttcgaaggatcacaaagcagtgtacagacacctgccttctttaaggatgaaaggaagataaa

SEQ ID NO: 477771 - DNA, 120 bp, Artificial Sequence
  ENSG00000160588_25 (sequence is synthesized)
gtggtctttttttgtttacttatttgtttcacctcttgtttgagtaacttctaaggtgctattctctctctctttttgctacctcatgagctcttgtcacagccatggaaaccagcctcg

SEQ ID NO: 477772 - DNA, 120 bp, Artificial Sequence
  ENSG00000160588_26 (sequence is synthesized)
tttagaaagggaacttagttcagaaggggttaaaagccttccagaatttttctttagctgctgaagtttttacatgtggttacatgactttaagttttatgcattacgctcttaattcta

SEQ ID NO: 477773 - DNA, 120 bp, Artificial Sequence
  ENSG00000160588_27 (sequence is synthesized)
ttacaaaatgtggactcaccaattgctttgtgttttccatgtgacctgttacttcaggctacttggggaacatcttagtcctctgtagctcctgaacccagcactggtgcttcaagagag

SEQ ID NO: 477774 - DNA, 120 bp, Artificial Sequence
  ENSG00000160588_28 (sequence is synthesized)
aaggtagcacgtctttgttcaaaacaaaacaaaacgacacttctggaggccacatcctgaatatgaatgttctactaagtcactcagttatggttctaaagggaaactgtaagaagaccc

SEQ ID NO: 477775 - DNA, 120 bp, Artificial Sequence
  ENSG00000160588_29 (sequence is synthesized)
acaaggagtggaccaagactattatttaattgcacaacttgaaactttgctgccagaagaggcagctccattcctttgactccagtgttgggctgttaactgctgcacctcattgccttt

SEQ ID NO: 477776 - DNA, 120 bp, Artificial Sequence
  ENSG00000160588_30 (sequence is synthesized)
ttttgtttttgtttttgttttgtaggagggtaggcactgttgggccatatgcacaaatattgtaactcttggtatctttactgcatcatagtcaataaacttctttgtaccctttggcta

SEQ ID NO: 477777 - DNA, 120 bp, Artificial Sequence
  ENSG00000160593_0 (sequence is synthesized)
atcacttggctcttctctgatatgaactgggcagcatctaaatgtatctttcttgattttgttgtctctttgcatagagcatatcttgtgaaaacagaaatatccatgtaatggtttttt

SEQ ID NO: 477778 - DNA, 120 bp, Artificial Sequence
  ENSG00000160593_1 (sequence is synthesized)
cttgtagtgaccgctcgaaattgcttgagcaacatagagataatgggcaggggtccctgtgtgaagcacctagaggctggaaagctgatggcaaagctggaggggtgaggcagggagagg

SEQ ID NO: 477779 - DNA, 120 bp, Artificial Sequence
  ENSG00000160593_2 (sequence is synthesized)
ataaacacagtggaaatgcaggaggaaagctgtgctctgtggtggcctaattacaaggacctgccctacagccagaatcagccagcaaatgcttttgtaaaggaactaaaagaaagggaa

SEQ ID NO: 477780 - DNA, 120 bp, Artificial Sequence
  ENSG00000160593_3 (sequence is synthesized)
aagaggaagtaaacaaaaggtcccttttcagagagggaaccagtgggagatttaagagcaaggaacaacccatttcgtcgttatggtaagtggagattattccttgggcctgaatgactt

SEQ ID NO: 477781 - DNA, 120 bp, Artificial Sequence
  ENSG00000160593_4 (sequence is synthesized)
gaatgtttccccgcctgagctaacagtccatgtgggtgattcagctctgatgggatgtgttttccagagcacagaagacaaatgtatattcaagatagactggactctgtcaccaggaga

SEQ ID NO: 477782 - DNA, 120 bp, Artificial Sequence
  ENSG00000160593_5 (sequence is synthesized)
gcacgccaaggacgaatatgtgctatactattactccaatctcagtgtgcctattgggcgcttccagaaccgcgtacacttgatgggggacatcttatgcaatgatggctctctcctgct

SEQ ID NO: 477783 - DNA, 120 bp, Artificial Sequence
  ENSG00000160593_6 (sequence is synthesized)
ccaagatgtgcaagaggctgaccagggaacctatatctgtgaaatccgcctcaaaggggagagccaggtgttcaagaaggcggtggtactgcatgtgcttccagaggagcccaaagagct

SEQ ID NO: 477784 - DNA, 120 bp, Artificial Sequence
  ENSG00000160593_7 (sequence is synthesized)
catggtccatgtgggtggattgattcagatgggatgtgttttccagagcacagaagtgaaacacgtgaccaaggtagaatggatattttcaggacggcgcgcaaaggaggagattgtatt

SEQ ID NO: 477785 - DNA, 120 bp, Artificial Sequence
  ENSG00000160593_8 (sequence is synthesized)
ccagagctggggccacttccagaatcgtgtgaacctggtgggggacattttccgcaatgacggttccatcatgcttcaaggagtgagggagtcagatggaggaaactacacctgcagtat

SEQ ID NO: 477786 - DNA, 120 bp, Artificial Sequence
  ENSG00000160593_9 (sequence is synthesized)
ccacctagggaacctggtgttcaagaaaaccattgtgctgcatgtcagcccggaagagcctcgaacactggtgaccccggcagccctgaggcctctggtcttgggtggtaatcagttggt

SEQ ID NO: 477787 - DNA, 120 bp, Artificial Sequence
  ENSG00000160593_10 (sequence is synthesized)
gatcattgtgggaattgtctgtgccacaatcctgctgctccctgttctgatattgatcgtgaagaagacctgtggaaataagagttcagtgaattctacagtcttggtgaagaacacgaa

SEQ ID NO: 477788 - DNA, 120 bp, Artificial Sequence
  ENSG00000160593_11 (sequence is synthesized)
gaagactaatccagagataaaagaaaaaccctgccattttgaaagatgtgaaggggagaaacacatttactccccaataattgtacgggaggtgatcgaggaagaagaaccaagtgaaaa

SEQ ID NO: 477789 - DNA, 120 bp, Artificial Sequence
  ENSG00000160593_12 (sequence is synthesized)
atcagaggccacctacatgaccatgcacccagtttggccttctctgaggtcagatcggaacaactcacttgaaaaaaagtcaggtgggggaatgccaaaaacacagcaagccttttgaga

SEQ ID NO: 477790 - DNA, 120 bp, Artificial Sequence
  ENSG00000160593_13 (sequence is synthesized)
agaatggagagtcccttcatctcagcagcggtggagactctctcctgtgtgtgtcctgggccactctaccagtgatttcagactcccgctctcccagctgtcctcctgtctcattgtttg

SEQ ID NO: 477791 - DNA, 120 bp, Artificial Sequence
  ENSG00000160593_14 (sequence is synthesized)
gtcaatacactgaagatggagaatttggagcctggcagagagactggacagctctggaggaacaggcctgctgaggggaggggagcatggacttggcctctggagtgggacactggccct

SEQ ID NO: 477792 - DNA, 120 bp, Artificial Sequence
  ENSG00000160593_15 (sequence is synthesized)
gggaaccaggctgagctgagtggcctcaaaccccccgttggatcagaccctcctgtgggcagggttcttagtggatgagttactgggaagaatcagagataaaaaccaacccaaatcatt

SEQ ID NO: 477793 - DNA, 120 bp, Artificial Sequence
  ENSG00000160593_16 (sequence is synthesized)
agttgagcttggggactgcagctgtggggagatttcagtgcattgcctcccctgggtgctcttcatcttggatttgaaagttgagagcagcatgttttgcccactgaaactcatcctgct

SEQ ID NO: 477794 - DNA, 120 bp, Artificial Sequence
  ENSG00000160593_17 (sequence is synthesized)
aactgaagttcctggaggaaagccaaaccgtgctaacacactagaggctggttttggtcctgggaaaggtttggggtgaatgggttggaagtagggtatgaatacagttttgggatttaa

SEQ ID NO: 477795 - DNA, 120 bp, Artificial Sequence
  ENSG00000160593_18 (sequence is synthesized)
atcagaaaggagagacttctggggtttcccttatttctttagaaaggttgggaggaagaattccagaaaagtgtaaggggctggataggaggagggagccagatagcatttattgtagta

SEQ ID NO: 477796 - DNA, 120 bp, Artificial Sequence
  ENSG00000160593_19 (sequence is synthesized)
agtagatgcaggcctgggccgttctcatacccccgggaaccatatcttacccattgtatgtcgcagcttgcaggccagtgcttggcacagagcagggactcaggaagcctttgtcactaa

SEQ ID NO: 477797 - DNA, 120 bp, Artificial Sequence
  ENSG00000160593_20 (sequence is synthesized)
agtaagagcctctgcggagtacagtgcatggggtcggctgggacagccccaggcagcagatcctggtattgggctgaggaaagagcactgcgcttggagtcagtaagatctgccacctcc

SEQ ID NO: 477798 - DNA, 120 bp, Artificial Sequence
  ENSG00000160593_21 (sequence is synthesized)
ctgagtctcatcagcaaaatgaggataaagataaagatactatagttgcccagcctgcttgacagggttgttgtaaggttcacataagatgatgatatgcaaatgctttgtaatctagga

SEQ ID NO: 477799 - DNA, 120 bp, Artificial Sequence
  ENSG00000160593_22 (sequence is synthesized)
gatcctgggggccagggtgaagggtattttacgggaactctataaagcaggaagaagcaagtttattctttagaccagtagctctcaaccatgatgtggtcgtatatttatgggtcaaca

SEQ ID NO: 477800 - DNA, 120 bp, Artificial Sequence
  ENSG00000160593_23 (sequence is synthesized)
tgtgttgtggggatatcccaagtaacttgttattaataaaagttaagttgcaaaatttagtaaagactaacttttataaattaaaacatattccaggtcatctctctaacaaagtcattt

SEQ ID NO: 477801 - DNA, 120 bp, Artificial Sequence
  ENSG00000160593_24 (sequence is synthesized)
gcacttgattcctctatgctatctgagtgggtcacagtgggtgacatcatgatggagtatggggaattacatctggtcccaggttcacctctgagagcttgccatacatttaaatgtcat

SEQ ID NO: 477802 - DNA, 120 bp, Artificial Sequence
  ENSG00000160593_25 (sequence is synthesized)
ccattgagtgattcacaggagaaaataggatgagaattgacattttgaggttgtgaatttgaatcacgagagacaaaatgttaggggccaggtcacttcattcatgtttgtgtctacaca

SEQ ID NO: 477803 - DNA, 120 bp, Artificial Sequence
  ENSG00000160593_26 (sequence is synthesized)
cccattaacttttcttaaaagctttaaaaaagcaatctacatggctttttttaatgccaatattcatttaacaagttatttttaaagaatctgctatatgaagaatacttaaagccccag

SEQ ID NO: 477804 - DNA, 120 bp, Artificial Sequence
  ENSG00000160593_27 (sequence is synthesized)
tcctgatgggaaacttacaaccaagatggaggagatacatgtaaaataataaagacgtatataatacatcaggcaatagtaagagcctacggggaacaataaagcaggactttgtggttt

SEQ ID NO: 477805 - DNA, 120 bp, Artificial Sequence
  ENSG00000160593_28 (sequence is synthesized)
ttgttatgtgggtgcttggggagccctcactgagatgacatttgaggagagggagtgaaccctgcatatgtgtagggggaagagtgttcttgcagtcatagacagtagcaagtgcaaagg

SEQ ID NO: 477806 - DNA, 120 bp, Artificial Sequence
  ENSG00000160593_29 (sequence is synthesized)
ccttgcagccagtatgcaaggagcagccaagaggtccatgtggctggagcgcagtgacccaagtaggtgagggaagagcaagtagaagttgaagtcagaggtaaagggagatgggctggg

SEQ ID NO: 477807 - DNA, 120 bp, Artificial Sequence
  ENSG00000160593_30 (sequence is synthesized)
tcatgcagggccttgcattttagtagaaatgggagtgggggccatgaagggttttgagcacaggagtaacatgatttaacttacatttttaaaggctcatctgctgaaaatagattgtca

SEQ ID NO: 477808 - DNA, 120 bp, Artificial Sequence
  ENSG00000160593_31 (sequence is synthesized)
tagagaataagcagggagacaagtaagaaagctgttgcaggaatctaggtgagagatgagctggaccagaatggtatcagtggaggaggtgaggactggctggattggggatatattttg

SEQ ID NO: 477809 - DNA, 120 bp, Artificial Sequence
  ENSG00000160593_32 (sequence is synthesized)
agcattgccatgtaccaaaatgggatggactggaaagaactggtttgggggaaagatgaagagttcagttttagacatgtttcaggttcctattggaaatccaactagaaatgtcatcaa

SEQ ID NO: 477810 - DNA, 120 bp, Artificial Sequence
  ENSG00000160593_33 (sequence is synthesized)
gaataaaagtatacttttgctttttttttattggaaaggtgcacaaaatgaaagtcctccttttcttatccctccattcagatggaaaaactgttcatggttttgtgatgtccttcacaa

SEQ ID NO: 477811 - DNA, 120 bp, Artificial Sequence
  ENSG00000160593_34 (sequence is synthesized)
gtacacacgcatgcacatgtgtgtgtacatgactttgtgttatttaatgctttctgataatacccttactgccttcacctagcagggccttggagtcctgagatcttccctcccccattt

SEQ ID NO: 477812 - DNA, 120 bp, Artificial Sequence
  ENSG00000160593_35 (sequence is synthesized)
ctcgaagtatctaacatttggctggggagcattgagggacctcctggctggtgcatggcgccaggactagagtgaggccggagaggttcctaggatgcaaaattgaaggaggcatccctc

SEQ ID NO: 477813 - DNA, 120 bp, Artificial Sequence
  ENSG00000160593_36 (sequence is synthesized)
tcaggtgctgactctggccttgcacaaccctgagaatgatgcctccttagaggtggctcctcaggtgcctggcttgcctcaccctagttctggccctgctgctaggccaaggggagggga

SEQ ID NO: 477814 - DNA, 120 bp, Artificial Sequence
  ENSG00000160593_37 (sequence is synthesized)
gctaatttagtgaataccaatcctctgccagaccccactcattgccagggtcatctactgatgtaaagatacagaagctcagggaaggatcggagttgatgtccaaagtcagcatacttg

SEQ ID NO: 477815 - DNA, 120 bp, Artificial Sequence
  ENSG00000160593_38 (sequence is synthesized)
gtttcaagggaggtgctgtatgtgttagagtggagcgggaaatgatcctaagctagtgagagacagccaggaacagagaggaacatgcaggcaccagaaccaaaaatggagggttttctg

SEQ ID NO: 477816 - DNA, 120 bp, Artificial Sequence
  ENSG00000160593_39 (sequence is synthesized)
atcagaggttctggattctggcaaacagtgtgcatcaaggccagtgctgtgtaggagaggaaagacttgattgtgttgacagagagaggttgataagtgaggggttaaagttaaaccata

SEQ ID NO: 477817 - DNA, 120 bp, Artificial Sequence
  ENSG00000160593_40 (sequence is synthesized)
acccagttagcaatcaggatgtggcctgtggactttgcctgtcgctagggccttcaggagttggctgtggttggctgggggtggggaagatggggtgaggatggaacatacctcatacct

SEQ ID NO: 477818 - DNA, 120 bp, Artificial Sequence
  ENSG00000160593_41 (sequence is synthesized)
caggccagagacctaagtctgtggaggcaccttgtctccagctggagaggggagcacggcaggtctgtgtgcttccttctcagaagtccaattcacagagaaaatcgagccattatgggg

SEQ ID NO: 477819 - DNA, 120 bp, Artificial Sequence
  ENSG00000160593_42 (sequence is synthesized)
gctcatgcagcttctccacccacaaacatatctatgtctcccccattcttatctctgccctgccatcctgaggcagaggaaggtcccttctgctctgggcttatctggccccctgtgccc

SEQ ID NO: 477820 - DNA, 120 bp, Artificial Sequence
  ENSG00000160593_43 (sequence is synthesized)
aggtggtatccttctcaggaaccttacaacatggctctttgagctcactttctgttggtttctaccattcaatggatacgtttgctcaattctactacttaattactccagctccattct

SEQ ID NO: 477821 - DNA, 120 bp, Artificial Sequence
  ENSG00000160593_44 (sequence is synthesized)
atgtctttttttcttcagctccattctgtgtctttctttttcttaagattgttttcctgagatacaattcacataccatacaatttgcccatttaaagcgttcagctcaatggttttagt

SEQ ID NO: 477822 - DNA, 120 bp, Artificial Sequence
  ENSG00000160593_45 (sequence is synthesized)
acattcagagttgaacaaccaccaccacaatcacgtgtttctttctcaacatagccaaatagcttgctaaaggtctgtgtttggtatcttactgtctcatctcccattaactcctcagtg

SEQ ID NO: 477823 - DNA, 120 bp, Artificial Sequence
  ENSG00000160593_46 (sequence is synthesized)
cactgcattctggcttattctacctctactccagcttagatcaccaatggcactgcaattatccatcctcagccttctctccttcagtagcatttatatgcactctatgttggacacagt

SEQ ID NO: 477824 - DNA, 120 bp, Artificial Sequence
  ENSG00000160593_47 (sequence is synthesized)
tccacacacacccatggatatacttagtcaactctacacaagttttccacaaatccttcatatgcaacatgtctaacctacccctgcacacccctcctcagcccatctccccaacctcag

SEQ ID NO: 477825 - DNA, 120 bp, Artificial Sequence
  ENSG00000160593_48 (sequence is synthesized)
ttgtctaactagatgcctgggggtgtgcttgattctttccctttcctagacccctaatctaacaggtcaggtcaacaagtccttgactcctactacagactcttgaagttgtcttccttc

SEQ ID NO: 477826 - DNA, 120 bp, Artificial Sequence
  ENSG00000160593_49 (sequence is synthesized)
cagtctgtcactgccgccttagttctggctgtcttcatctctgtcttgaactgtaggcctctaaccagtctctgctttctctctcagccactgctcctcattcttcacgcggctcttggt

SEQ ID NO: 477827 - DNA, 120 bp, Artificial Sequence
  ENSG00000160593_50 (sequence is synthesized)
gccatctttctaaatcacattaagaactttctcttccactgctaataatctttcaatgttgttttcattgcctgcagaaaaatgccagattcttggttgagatagtcaaggtccttcctg

SEQ ID NO: 477828 - DNA, 120 bp, Artificial Sequence
  ENSG00000160593_51 (sequence is synthesized)
taaaatcatcatcctgtcaggcctccagatctcatgcagaacatcccctctgtccttctccatattgtcttcccaacaaactggatgtttcctgtaagtcttaggttaaactttagaact

SEQ ID NO: 477829 - DNA, 120 bp, Artificial Sequence
  ENSG00000160593_52 (sequence is synthesized)
tttgctggcaaattctcacttgctgcatatagaattggacacccttttttctgtgcccctctgttccccatacagacttctgttgtagcgcctacagcagcctgtggttttctgttgacg

SEQ ID NO: 477830 - DNA, 120 bp, Artificial Sequence
  ENSG00000160593_53 (sequence is synthesized)
tgtttgtcttcttccttggaagcagggaccacacatcatcattcatctctgaatcccctgtacctagtgctgtctggccctgaggaggtgtttgctttatgtatttagaaagaaccatgc

SEQ ID NO: 477831 - DNA, 120 bp, Artificial Sequence
  ENSG00000160593_54 (sequence is synthesized)
agatgagtagaaggttccatatgggcagaagtacctccggaggctttacttggtatcgtcactgtggggctgagtcttgcggcatgagttcttttgaagacaaccacttgccctaaggaa

SEQ ID NO: 477832 - DNA, 120 bp, Artificial Sequence
  ENSG00000160593_55 (sequence is synthesized)
gatcagcagcctctcaaatgcctgttatttctgggtccttgttaagccaaattttagaatagaattgttgatgtgaaaggaaactttactagaggtgaactgctagcctcttctcccacc

SEQ ID NO: 477833 - DNA, 120 bp, Artificial Sequence
  ENSG00000160593_56 (sequence is synthesized)
caccttaatctacattttagggtaaacgagggggttagactttggttctcaatctcatggagacagtgtccctagtgtccagatatggggtggagtctggccttcccctccgcttcgtgg

SEQ ID NO: 477834 - DNA, 120 bp, Artificial Sequence
  ENSG00000160593_57 (sequence is synthesized)
cctggctggtgctacttggtatagggctgtggggctctcagctctttgctaaagtattgagaccctctccttgcttttctactttcccaagcactggtgaccccggcagccctgaggcct

SEQ ID NO: 477835 - DNA, 120 bp, Artificial Sequence
  ENSG00000160593_58 (sequence is synthesized)
tttgtctaaagtctaatggagaattataatacatccaggagttaaggagttctaatgcttaaaatgaaatagtctaagatcttagcaagaaaggattaagaaggacttttctctccatat

SEQ ID NO: 477836 - DNA, 120 bp, Artificial Sequence
  ENSG00000160593_59 (sequence is synthesized)
tgattttgtaatggagttataaataattgcttctagagactgagaaattgattggttttctttaactcctattctttcttttctttctttaattttaaaaaaactctttgaatagttacc

SEQ ID NO: 477837 - DNA, 120 bp, Artificial Sequence
  ENSG00000160593_60 (sequence is synthesized)
tttctctattttgggctgtttttgtcccaagagtaggattttttcccagtagagtgcagtggtccaagaatgggccactggatgatactgctttaccaacgagtgacaggaccatgaacc

SEQ ID NO: 477838 - DNA, 120 bp, Artificial Sequence
  ENSG00000160593_61 (sequence is synthesized)
tcacagttgtgaggttcaatgagggctggccctgccacataaatcctctgagggagatgatgacaattcactgctgattaatgccattctgcctttactgtaattagaaggaaataaccc

SEQ ID NO: 477839 - DNA, 120 bp, Artificial Sequence
  ENSG00000160593_62 (sequence is synthesized)
cagaatacaaggaatttagcaagataaggaacccctgctgctacctaaacatccatctaaacaaagatgtttggcttttgaagcaaagagtttggttcttaagactgtgttctttgacag

SEQ ID NO: 477840 - DNA, 120 bp, Artificial Sequence
  ENSG00000160593_63 (sequence is synthesized)
ttaattttcaagaagactgaagactgaattatcattgttgagaattctctaggtctcagtaaccctctgaaccagcagtttgggtggtcgatgcctagcaaataggagtgggtggccttt

SEQ ID NO: 477841 - DNA, 120 bp, Artificial Sequence
  ENSG00000160593_64 (sequence is synthesized)
gtagacctaaaaacatctgagagcctagaagtgcacagcagtgtgcagatagattgagaggacttggctctgcaggtggacaacactctatttgaaagttgagagcagcatgttttgccc

SEQ ID NO: 477842 - DNA, 120 bp, Artificial Sequence
  ENSG00000160593_65 (sequence is synthesized)
ttggtgcttatcagaactggaccttctcctagcaatttcagctttctggtgggaaagataactccaatgaagaacaagaacaagaagatgatgatgatgcttaactttttggatgccgat

SEQ ID NO: 477843 - DNA, 120 bp, Artificial Sequence
  ENSG00000160602_0 (sequence is synthesized)
acggaagtgaaactctaagaaatgagatggagaagtacgagcggatccgagtggtggggagaggtgccttcgggattgtgcacctgtgcctgcgaaaggctgaccagaagctggtgatca

SEQ ID NO: 477844 - DNA, 120 bp, Artificial Sequence
  ENSG00000160602_1 (sequence is synthesized)
tcaagcagattccagtggaacagatgaccaaggaagagcggcaggcagcccagaatgagtgccaggtcctcaagctgctcaaccaccccaatgtcattgagtactacgagaacttcctgg

SEQ ID NO: 477845 - DNA, 120 bp, Artificial Sequence
  ENSG00000160602_2 (sequence is synthesized)
aagacaaagcccttatgatcgccatggaatatgcaccaggcggcactctggctgagttcatccaaaagcgctgtaattccctgctggaggaggagaccatcctgcacttcttcgtgcaga

SEQ ID NO: 477846 - DNA, 120 bp, Artificial Sequence
  ENSG00000160602_3 (sequence is synthesized)
tcctgcttgcactgcatcatgtgcacacccacctcatcctgcaccgagacctcaagacccagaacatcctgcttgacaaacaccgcatggtcgtcaagatcggtgatttcggcatctcca

SEQ ID NO: 477847 - DNA, 120 bp, Artificial Sequence
  ENSG00000160602_4 (sequence is synthesized)
agatccttagcagcaagagcaaggcctacacggtggtgggtaccccatgctatatctcccctgagctgtgtgagggcaagccctacaaccagaagagtgacatctgggccctgggctgtg

SEQ ID NO: 477848 - DNA, 120 bp, Artificial Sequence
  ENSG00000160602_5 (sequence is synthesized)
tcctctacgagctggccagcctcaagagggctttcgaggctgcgaacttgccagcactggtgctgaagatcatgagtggcacctttgcacctatctctgaccggtacagccctgagcttc

SEQ ID NO: 477849 - DNA, 120 bp, Artificial Sequence
  ENSG00000160602_6 (sequence is synthesized)
gccagctggtcctgagtctactcagcctggagcctgcccagcggccaccactcagccacatcatggcacagcccctctgcatccgtgccctcctcaacctccacaccgacgtgggcagtg

SEQ ID NO: 477850 - DNA, 120 bp, Artificial Sequence
  ENSG00000160602_7 (sequence is synthesized)
tccgcatgcggagggcagagaagtccgtggcccccagcaacacagggagcaggaccaccagtgtccgctgcagaggtatcccccggggacctgtgaggccagccatcccaccaccactgt

SEQ ID NO: 477851 - DNA, 120 bp, Artificial Sequence
  ENSG00000160602_8 (sequence is synthesized)
cgtcagtgtatgcctggggtggtgggctgggcacccccctgcggctgccaatgctcaacacagaggtggtccaggtggcagctgggcgcacgcagaaagccggcgtcacgcgctctgggc

SEQ ID NO: 477852 - DNA, 120 bp, Artificial Sequence
  ENSG00000160602_9 (sequence is synthesized)
gtctcatcctgtgggaggccccacccctaggtgcaggcggaggcagtctccttcctggggcagtggagcagccacagccccagttcatctcgcgtttcctggagggccagtcgggtgtga

SEQ ID NO: 477853 - DNA, 120 bp, Artificial Sequence
  ENSG00000160602_10 (sequence is synthesized)
ccatcaagcacgtggcctgtggggacttcttcactgcctgcctgactgacagaggcatcatcatgacattcggcagcggcagcaatgggtgcctaggccatggcagcctcactgacatca

SEQ ID NO: 477854 - DNA, 120 bp, Artificial Sequence
  ENSG00000160602_11 (sequence is synthesized)
gccagcccaccattgtggaggctttgctgggctatgaaatggtgcaggtggcctgtggggcctctcacgtgctggccctgtccactgagcgagaactatttgcctggggccgtggagaca

SEQ ID NO: 477855 - DNA, 120 bp, Artificial Sequence
  ENSG00000160602_12 (sequence is synthesized)
gcggcagactggggctaggcaccagggagtcccacagctgcccccagcaggtgcccatgcccccaggacaggaagctcagcgagttgtatgtggtatcgattcctccatgatcctcactg

SEQ ID NO: 477856 - DNA, 120 bp, Artificial Sequence
  ENSG00000160602_13 (sequence is synthesized)
tgcctggccaagccctagcctgtgggagcaacaggttcaacaagctgggcctggaccacctctccctgggggaggagcctgtcccccaccagcaagtggaggaggccctgagcttcacac

SEQ ID NO: 477857 - DNA, 120 bp, Artificial Sequence
  ENSG00000160602_14 (sequence is synthesized)
acacttttggcagcaatcagcacggacagttgggcaccaatactcgccgaggcagtcgggcaccctgtaaggtccaaggccttgagggcatcaagatggcaatggtagcctgtggggatg

SEQ ID NO: 477858 - DNA, 120 bp, Artificial Sequence
  ENSG00000160602_15 (sequence is synthesized)
ccttcactgtagctattggggcagagagcgaagtgtactcttggggcaaaggggcgcgaggtcgattgggaaggagggatgaggatgccggactccctcggccagtgcagttggatgaga

SEQ ID NO: 477859 - DNA, 120 bp, Artificial Sequence
  ENSG00000160602_16 (sequence is synthesized)
cacacccttacacggtgacttccgtgtcctgttgccatggaaacaccctcctggctgttcgatcggtcacagatgagccggtccccccctgaggcacccggattcacctctggaccaccc

SEQ ID NO: 477860 - DNA, 120 bp, Artificial Sequence
  ENSG00000160602_17 (sequence is synthesized)
tgatattgcttctcctctgaatgctctgaaaagtgcaggtgcccaaggcatgacttgcagctgtctcctggattgtgtcatcatggggtatcagggctggcaaaacccctgctctgcttt

SEQ ID NO: 477861 - DNA, 120 bp, Artificial Sequence
  ENSG00000160602_18 (sequence is synthesized)
tggccttggatatggaaacctcaaccactttgttctcctaccacctctttgcccttcctaccccttcctcccttcagtcagtgtccccagggtccagcctggctagagttagaaggcaga

SEQ ID NO: 477862 - DNA, 120 bp, Artificial Sequence
  ENSG00000160602_19 (sequence is synthesized)
gtgtccccagggtccagcctggctagagttagaaggcagacctagcctttggaagcagggtggcctccagagccttgccataaaaaggctgaaggcagccgggcgcagtggctcacgcct

SEQ ID NO: 477863 - DNA, 83 bp, Artificial Sequence
  ENSG00000160602_20 (sequence is synthesized)
gaaggctgaaggcagctgtagctccacacagaccctaccctttcccctagcccagttagaaaataagtctgggccggcggcgg

SEQ ID NO: 477864 - DNA, 120 bp, Artificial Sequence
  ENSG00000160602_21 (sequence is synthesized)
cccctagcccagttagaaaataagtctgggccggcggcggtggctcacacctgcataggcagtgctttggccaggaggatcccttgatcccttgtggccaggagttgggagaccagcctg

SEQ ID NO: 477865 - DNA, 120 bp, Artificial Sequence
  ENSG00000160602_22 (sequence is synthesized)
cccttgatcccttgtggccaggagttgggagaccagcctggggaccatagcgagaccgctgtctccaccaaaaaaaaaaaaaaagaagaaaataaggctgggtgcggtggctcacgcctg

SEQ ID NO: 477866 - DNA, 62 bp, Artificial Sequence
  ENSG00000160602_23 (sequence is synthesized)
aatcccagctactctggaggctaaggcaagagaatcccttgaacccgggaggtgctccctct

SEQ ID NO: 477867 - DNA, 120 bp, Artificial Sequence
  ENSG00000160602_24 (sequence is synthesized)
aaaaaaagtatttggtgcttaccgggactctatctccatactttggagcagggcaagccagggcctgcctggactggccattaggcctgcctagcttctgcatagcccggggctgggcgg

SEQ ID NO: 477868 - DNA, 120 bp, Artificial Sequence
  ENSG00000160602_25 (sequence is synthesized)
tccccgggagtgctgccacctcccctacactttcatcctgaggcaggatttgctagacgtcggcttgcctctcttccccagcaggagggcaggagtcactaagtgctgcagaaaagatcc

SEQ ID NO: 477869 - DNA, 120 bp, Artificial Sequence
  ENSG00000160602_26 (sequence is synthesized)
gcgctggagattgcccgtcccccccatgcctttccccagaaacagttgagagaatgggtagctggtgggaccagaccggtttcccagaggacaggaaggccaataaaaatatcagctgcc

SEQ ID NO: 477870 - DNA, 120 bp, Artificial Sequence
  ENSG00000160602_27 (sequence is synthesized)
cactcaccacagcagtgcccagatccccgacacaatggagtgagcgaaggagacgagcaggttgtgccagcgccaggattgtgcacctgtgcctgcgaaaggctgaccagaagctggtga

SEQ ID NO: 477871 - DNA, 120 bp, Artificial Sequence
  ENSG00000160602_28 (sequence is synthesized)
tgtgcagggacagcgagcggtcctgggcggcagggtgtgggcacccagtgggagcacaggaggtctgaggcagagggaaacctggggcaagtcctcccttcctgcatgtaggaatgtcag

SEQ ID NO: 477872 - DNA, 120 bp, Artificial Sequence
  ENSG00000160602_29 (sequence is synthesized)
aagatcggtggtgggtaccccatgctatatctcccctgagctgtgtgagggcaagccctacaaccagaagagtgacatctgggccctgggctgtgtcctctacgagctggccagcctcaa

SEQ ID NO: 477873 - DNA, 120 bp, Artificial Sequence
  ENSG00000160602_30 (sequence is synthesized)
tccccgacacaatggagtgagcgaaggagacgagcaggttgtgccagcgccaggtgcgcagggggtcggcgcgcacgtgcacgggattgtgcacctgtgcctgcgaaaggctgaccagaa

SEQ ID NO: 477874 - DNA, 120 bp, Artificial Sequence
  ENSG00000160602_31 (sequence is synthesized)
tcctcccctccccctaaaaaacccttggccctttggcccctgtttgggtggttctgcaggaggaagccccttggcttgctttgagaagaagctgtccccaaatgggcttatgcacagagc

SEQ ID NO: 477875 - DNA, 120 bp, Artificial Sequence
  ENSG00000160602_32 (sequence is synthesized)
ccctggtcttccctccctgcagggctgtgatcccagcttctatcctgcaggtggtgggtaccccatgctatatctcccctgagctgtgtgagggcaagccctacaaccagaagagtgaca

SEQ ID NO: 477876 - DNA, 120 bp, Artificial Sequence
  ENSG00000160602_33 (sequence is synthesized)
gccaagggttagagttctggtcccaattatctgaccccggctagccccttgtcctctctggtcccagtgccctgttccatacataaaaggagaggggttgttggctgggcacggtggctc

SEQ ID NO: 477877 - DNA, 120 bp, Artificial Sequence
  ENSG00000160606_0 (sequence is synthesized)
ctagagggcttcgccaactgtgtggggctggcggccggcgggagaggcggccggcctggactggcccgagagggatcccggttcccagaacagacctaggaggcggcctcgagggcggac

SEQ ID NO: 477878 - DNA, 120 bp, Artificial Sequence
  ENSG00000160606_1 (sequence is synthesized)
ggcagggagggccagcatgccccgactgctgcaccccgccctgccgctgctcctgggcgccacgctgaccttccgggcgctccggcgcgcgctctgtcgcctgcccctacccgtgcacgt

SEQ ID NO: 477879 - DNA, 120 bp, Artificial Sequence
  ENSG00000160606_2 (sequence is synthesized)
gcgcgccgaccccctgcgcacctggcgctggcacaacctgctcgtctccttcgctcactccattgtgtcggggatctgggcactgctgtgtgtatggcagactcctgacatgttagtgga

SEQ ID NO: 477880 - DNA, 120 bp, Artificial Sequence
  ENSG00000160606_3 (sequence is synthesized)
gattgagacggcgtggtcactttctggctatttgctcgtttgcttctctgcggggtatttcatccacgatacggtggacatcgtggctagcggacagacgcgagcctcttgggaatacct

SEQ ID NO: 477881 - DNA, 120 bp, Artificial Sequence
  ENSG00000160606_4 (sequence is synthesized)
ctggtggaagtcagcaacatcttcctcaccattcgcatgatgatgaaaatcagtaatgcccaggatcatctcctctaccgggttaacaagtatgtgaacctggtcatgtactttctcttc

SEQ ID NO: 477882 - DNA, 120 bp, Artificial Sequence
  ENSG00000160606_5 (sequence is synthesized)
cgcctggcccctcaggcctacctcacccatttcttcttgcgttatgtgaaccagaggaccctgggcaccttcctgctgggtatcctgctcatgctggacgtgatgatcataatctacttt

SEQ ID NO: 477883 - DNA, 120 bp, Artificial Sequence
  ENSG00000160606_6 (sequence is synthesized)
tcccgcctcctccgctctgacttctgccctgagcatgtccccaagaagcaacacaaagacaagttcttgactgagtgaggggcacagagcctgggacaacaaaaacggacaaggccagaa

SEQ ID NO: 477884 - DNA, 120 bp, Artificial Sequence
  ENSG00000160606_7 (sequence is synthesized)
acagcttcatatggacactgggacttagccccaagcctgggtgtcctctgaggccagcctctccaccttctgagcctgcgcccacactattgaaaacactaatgaaagtactcctctgaa

SEQ ID NO: 477885 - DNA, 120 bp, Artificial Sequence
  ENSG00000160606_8 (sequence is synthesized)
ggcaaatcggaggtcttgcttgcccagcctccggggagccgggccgagggccgggactgtctgagggaggactgtgacagccgcccggccccaggagtttaagagccggcgggaagaggt

SEQ ID NO: 477886 - DNA, 120 bp, Artificial Sequence
  ENSG00000160606_9 (sequence is synthesized)
tcggtgggggtgtcttaacactactggtggaagtcagcaacatcttcctcaccattcgcatgatgatgaaaatcagtaatgcccaggatcatctcctctaccgggttaacaaaggaccct

SEQ ID NO: 477887 - DNA, 120 bp, Artificial Sequence
  ENSG00000160613_0 (sequence is synthesized)
aagccgcgagtttccgcagggaggcggcggcagctgcggcggggccggtctgtagcctttgctgagtcaacactactcacagtgaaagtgatgccttttctccatttgcacaacatgagt

SEQ ID NO: 477888 - DNA, 120 bp, Artificial Sequence
  ENSG00000160613_1 (sequence is synthesized)
gtgacgtggttagccagaccaggagctcaacctcatgtagaatccagtccactgctctgatgccgaaggggaggcagaaagtgccacacttggatgcccccctgggcctgcccacctgcc

SEQ ID NO: 477889 - DNA, 120 bp, Artificial Sequence
  ENSG00000160613_2 (sequence is synthesized)
tctggctggaattagccgggctcttcttactggttccctgggtcatgggcctggcagggacaggtgggcctgatggccagggcacaggggggccgagctgggctgtgcacctggaaagcc

SEQ ID NO: 477890 - DNA, 120 bp, Artificial Sequence
  ENSG00000160613_3 (sequence is synthesized)
tggaaggtgacggggaggaagagactctggagcagcaggcggatgccttggcccaggcagcagggctggtgaatgctggacgcatcggagagcttcaggggcactacctctttgtccagc

SEQ ID NO: 477891 - DNA, 120 bp, Artificial Sequence
  ENSG00000160613_4 (sequence is synthesized)
ctgctgggcacaggccggccctggaggtggaggccatccggcagcaggtggaggctgtgttggctgggcatgaagctgtgcgctggcactcagagcagaggctgctaaggcgggccaagc

SEQ ID NO: 477892 - DNA, 120 bp, Artificial Sequence
  ENSG00000160613_5 (sequence is synthesized)
gcagcgtccacttcaacgaccccaagtacccgcagcaatggcacctgaataaccgacggagcccgggcagggacatcaacgtgacgggtgtgtgggaacgcaatgtgactgggcgagggg

SEQ ID NO: 477893 - DNA, 120 bp, Artificial Sequence
  ENSG00000160613_6 (sequence is synthesized)
tgacggtggtggtagtggatgacggagtggaacacaccatccaggacattgcacccaactatagccctgagggtagctatgacctcaactctaatgaccctgaccccatgccccacccgg

SEQ ID NO: 477894 - DNA, 120 bp, Artificial Sequence
  ENSG00000160613_7 (sequence is synthesized)
atgtggagaatggcaaccaccatggcacgcgatgtgcaggagagatcgcggctgtgcccaacaacagcttctgtgccgtgggcgtggcctacgggagccgcatcgcaggtatccgggtac

SEQ ID NO: 477895 - DNA, 120 bp, Artificial Sequence
  ENSG00000160613_8 (sequence is synthesized)
tggatggacctctcacagacagcatggaggcagtggcgttcaacaagcactatcagatcaatgacatctacagctgcagctggggaccagatgacgatgggaagacagtggatggccccc

SEQ ID NO: 477896 - DNA, 120 bp, Artificial Sequence
  ENSG00000160613_9 (sequence is synthesized)
atcagcttggaaaggctgccttacaacatggggtgattgctggtcgccagggctttgggagcatctttgtggtagccagtggcaacggaggccaacacaacgacaactgcaactacgatg

SEQ ID NO: 477897 - DNA, 120 bp, Artificial Sequence
  ENSG00000160613_10 (sequence is synthesized)
gctacgccaactccatctacaccgtcaccataggagctgtggatgaggagggacgcatgcctttctatgcagaagaatgtgcctccatgctggcagtcaccttcagtggtggggacaaga

SEQ ID NO: 477898 - DNA, 120 bp, Artificial Sequence
  ENSG00000160613_11 (sequence is synthesized)
tgcttcggagcattgtgaccactgactgggaccttcagaagggcactggctgcactgagggccacacagggacctcagctgcagcgcctctggcagctggcatgatagccttaatgctgc

SEQ ID NO: 477899 - DNA, 120 bp, Artificial Sequence
  ENSG00000160613_12 (sequence is synthesized)
aggtgcggccctgcctcacgtggcgtgacgtccagcacatcattgtcttcacagccacccggtatgaggatcgccgtgcagagtgggtcaccaacgaggcaggcttcagccatagccacc

SEQ ID NO: 477900 - DNA, 120 bp, Artificial Sequence
  ENSG00000160613_13 (sequence is synthesized)
agcacggtttcggcctcctcaacgcctggaggctcgtgaatgcagccaagatctggacatctgtcccttacttagcatcctacgtcagtcccgtgttaaaagaaaacaaggcgattccgc

SEQ ID NO: 477901 - DNA, 120 bp, Artificial Sequence
  ENSG00000160613_14 (sequence is synthesized)
agtccccccgttccctggaggtcctgtggaatgtcagcaggatggacctggagatgtcagggctgaagaccctggagcatgtggcagtgacagtctccatcactcacccacggcgcggca

SEQ ID NO: 477902 - DNA, 120 bp, Artificial Sequence
  ENSG00000160613_15 (sequence is synthesized)
gcttggagctgaagctgttctgccccagtggcatgatgtccctcatcggcgccccccgcagcatggactcggatcccaacggcttcaatgactggaccttctccactgtgcgatgctggg

SEQ ID NO: 477903 - DNA, 120 bp, Artificial Sequence
  ENSG00000160613_16 (sequence is synthesized)
gggagagagcccgagggacctacaggcttgtcatcagggatgtcggggatgagtcattccaggtcggcatcctccggcaatggcagctgaccctatatggctctgtgtggagtgcagtag

SEQ ID NO: 477904 - DNA, 120 bp, Artificial Sequence
  ENSG00000160613_17 (sequence is synthesized)
tcacccccaacaccctcaagaccctggtgctggtaggctgtttcaccgtcttctggactgtttactacatgctggaagtatatttgagccagaggaatgtggcttccaatcaagtttgta

SEQ ID NO: 477905 - DNA, 120 bp, Artificial Sequence
  ENSG00000160613_18 (sequence is synthesized)
ggagtggaccctgccactggccccatcggagccggaaagccaaggaggaagggacagagctagaatcagtgccactttgcagcagcaaggatccagacgaagtggaaacagagagcaggg

SEQ ID NO: 477906 - DNA, 120 bp, Artificial Sequence
  ENSG00000160613_19 (sequence is synthesized)
gccctcccaccacctctgacctccttgccccagacctgctggagcaaggggactggagcctgtcccagaacaagagcgccctggactgccctcatcagcacctagacgtaccgcacggga

SEQ ID NO: 477907 - DNA, 120 bp, Artificial Sequence
  ENSG00000160613_20 (sequence is synthesized)
aggaggagcagatctgctgacctcagggcctgacagtgtgggacaggctcttctttcccaaaattagggagctcttgacagaaagcagttctgatgcttacatctggaatctgaggcatc

SEQ ID NO: 477908 - DNA, 120 bp, Artificial Sequence
  ENSG00000160613_21 (sequence is synthesized)
ctctgactccactcaaagagggtgagggccttcttaagatacaaatggtggaggattgctgccagagaagtctggtcagagccacagggtctgcctccagccaaacgggagcttttggtg

SEQ ID NO: 477909 - DNA, 120 bp, Artificial Sequence
  ENSG00000160613_22 (sequence is synthesized)
agaaggtgttggacaggggattggcgcccccctttggtttggcctccatcctcatctctcttgggccaagccagctgcctaggtcccccaagcatgggggaccccttcccacatataagt

SEQ ID NO: 477910 - DNA, 120 bp, Artificial Sequence
  ENSG00000160613_23 (sequence is synthesized)
tgagaaggtgcctgccatagccaggagcgcatctcaatggaaacatcactggggtcacttgggaagaggacttcggggtagaggctgggaggagcccctggacatgcctgtcctgaaagc

SEQ ID NO: 477911 - DNA, 120 bp, Artificial Sequence
  ENSG00000160613_24 (sequence is synthesized)
ggctgcctccattatccattcccaagatgcctgatcagaaaccaaccatgaatgaacccctggctccttcaccacccccacgattggtatgatgctgccggcacagctgggatacacacg

SEQ ID NO: 477912 - DNA, 120 bp, Artificial Sequence
  ENSG00000160613_25 (sequence is synthesized)
gctcccccaggcctgagctgcttcactagggaatcctgcggcaggactgcagagcagatggcagatgcacatgttggaggagagagccttgggagccactgccactccagtcctgccacc

SEQ ID NO: 477913 - DNA, 120 bp, Artificial Sequence
  ENSG00000160613_26 (sequence is synthesized)
accctgtcttcctctgcaagtgctcagggaaatggccttcccgccggaggccagctatctgcctgacaggctgtgactcttctctcaaccttggccttctcccctcttctgagctagttg

SEQ ID NO: 477914 - DNA, 120 bp, Artificial Sequence
  ENSG00000160613_27 (sequence is synthesized)
gttgaattttttttaatgcttaagatttgtttttctcttttcacagcaacattttcttgaatttttttctgcacagcttttccaaaataaaaaccttccaaacaattctgccactcgcaa

SEQ ID NO: 477915 - DNA, 120 bp, Artificial Sequence
  ENSG00000160613_28 (sequence is synthesized)
tctctcctttcctctgtctccccaaagccactgcatgctgctgagtggctcctttttcccttcggtccccaagattcactctcctgttctatggcctgtttcctctgaaagaatctgact

SEQ ID NO: 477916 - DNA, 120 bp, Artificial Sequence
  ENSG00000160613_29 (sequence is synthesized)
gtcctggaatcttggcacatgaagggtccttcagaggacggcagccaggaacacatacaagcccgagatgcctgcctgtcccctgcgcagatctgaaaccataacaaaagtgaccagggc

SEQ ID NO: 477917 - DNA, 120 bp, Artificial Sequence
  ENSG00000160613_30 (sequence is synthesized)
aaatcaaactctgccagccaggcctgagaaaagattgattttttttttttttttttgagttccaaccccaaaaatattccaggacaagatagggggcaggctgggctggttcttcttcaa

SEQ ID NO: 477918 - DNA, 120 bp, Artificial Sequence
  ENSG00000160613_31 (sequence is synthesized)
tgggcttttgccgccaaggaggacagtggacttggcccacatccaggctacccccagcccgcttctcccctgcttagcccagggaggagacagtagaggtgatgggggcagccgggaggg

SEQ ID NO: 477919 - DNA, 120 bp, Artificial Sequence
  ENSG00000160613_32 (sequence is synthesized)
aggggccaaggcagtgatgctttcgggtaagaagttgggctgaggctgggggcacagggaggagctgcccaggtgcagttaccattgctcagtgacagagcctcaaagcttggccagggc

SEQ ID NO: 477920 - DNA, 120 bp, Artificial Sequence
  ENSG00000160613_33 (sequence is synthesized)
tgaaggtaccacacgggtgtgggtgaggcaggctaagcgggatggctgcagccaaggagctgggggagggccgggctcagggctagccctctccgctctaactgatgatctgccgaggtc

SEQ ID NO: 477921 - DNA, 68 bp, Artificial Sequence
  ENSG00000160613_34 (sequence is synthesized)
ctccagcttggattcatggagctagtaagtgcccaagagaacaagaataaacctagatccgtgggact

SEQ ID NO: 477922 - DNA, 120 bp, Artificial Sequence
  ENSG00000160613_35 (sequence is synthesized)
ttaacacaatttcctccttccatgagaccccaggggaaaggggcacctgagaagccctcgtggcaccctcccaggttgtttccacggctactacagtaagaaagtgttgctgggggaagg

SEQ ID NO: 477923 - DNA, 120 bp, Artificial Sequence
  ENSG00000160613_36 (sequence is synthesized)
taagtaatcagcacaaagggggttaatcttaggcctgaggtttggggccgggtgacaaggaagttaaactcgtcctccctgccagattctaccccctttcggagctgagctccagccaaa

SEQ ID NO: 477924 - DNA, 120 bp, Artificial Sequence
  ENSG00000160613_37 (sequence is synthesized)
cctgtggagttttctttgaccattttaggacatgttactgcttctgagttggctcccccagctgcttaaacaagacctttctcctgggttcctagtagtgaaaaggagcagcagagcaac

SEQ ID NO: 477925 - DNA, 120 bp, Artificial Sequence
  ENSG00000160613_38 (sequence is synthesized)
tgaggaggagggcgggtgggaggcatgggactggggcttggggaggtcaggcgagaccggggtgagagctcagagaagctcctgtgacttccatgctaagatcttgccagagaactctgg

SEQ ID NO: 477926 - DNA, 120 bp, Artificial Sequence
  ENSG00000160613_39 (sequence is synthesized)
tcagtcctcgggtgtctggatgaagtaaaggagttaggcatttcttcctttgattctctggcttacctaatagagagagtcagatgtggtctgctggggatggacagagggtttgtagaa

SEQ ID NO: 477927 - DNA, 120 bp, Artificial Sequence
  ENSG00000160613_40 (sequence is synthesized)
gtctcctaggctttagtgacccatcctctgcctccgcctccatggtggccagcatgaaccaggattgtctgaaggggttgtatcctctaagccagcgacctggttttatgttgagcgaag

SEQ ID NO: 477928 - DNA, 120 bp, Artificial Sequence
  ENSG00000160613_41 (sequence is synthesized)
aggcggacgccctccctagaggagagtgcagctggatcaggatgcttgtgcagaggatgccctgtctgcacatttaccagcgttttccctacccccagctccttgggggattctttttcc

SEQ ID NO: 477929 - DNA, 120 bp, Artificial Sequence
  ENSG00000160613_42 (sequence is synthesized)
tggagtcatttactactttttgcaaaggaagtatgctatgcttagtgcccaaaccaaaactgtcttcactttttctgtcctcctagaaagtgatcaattgagagccatggcaggagaagg

SEQ ID NO: 477930 - DNA, 120 bp, Artificial Sequence
  ENSG00000160613_43 (sequence is synthesized)
aatggccagagaaggttactcagaagggaggatgaggggtggcttccctcaggtgaaggtttcacagagaagaattgagttttctcctcctaaccacatccagcacttgcccaatttccc

SEQ ID NO: 477931 - DNA, 120 bp, Artificial Sequence
  ENSG00000160613_44 (sequence is synthesized)
tcaatgtggaatgaaacccctgggccagtcactgcatttcccataaaaggaatgttatcttggaaagggcataaagcgtcagccaagtcagagaagttcagaaacatttccaggaatgca

SEQ ID NO: 477932 - DNA, 120 bp, Artificial Sequence
  ENSG00000160613_45 (sequence is synthesized)
gttcatttggaagcccctggctttgcacttgcgtgtcttagagatagtgtgccttcaactttaccttctatccagggctatttcctgttgcatctgtcaaatgagggcagtgacttaaaa

SEQ ID NO: 477933 - DNA, 120 bp, Artificial Sequence
  ENSG00000160613_46 (sequence is synthesized)
gagtaatatggtcttcccagcttcgtcatcctctgcttcctgctgaccaggggacgttgccacggaatgtctaccctaggcattgaggcatctggcaactgcttgcttgtcactaaaaag

SEQ ID NO: 477934 - DNA, 120 bp, Artificial Sequence
  ENSG00000160613_47 (sequence is synthesized)
taagagaaagaaggacagattgcctgggtggagaagagtgggaggtggcctagtggagaaagcaggattaagagaagggagggaaagatttagggagtttggctaatggagccctttacc

SEQ ID NO: 477935 - DNA, 120 bp, Artificial Sequence
  ENSG00000160613_48 (sequence is synthesized)
tgttggaagggcagcaagcaaaagttttaccagagttttccctacccccagctccttgggggattttttgttttgtttcatttttgtttttgtttttttgccttgagtaattttgacatg

SEQ ID NO: 477936 - DNA, 120 bp, Artificial Sequence
  ENSG00000160613_49 (sequence is synthesized)
cagagttattcacaactttttgcaaagtactattttcattggcttttcagagccagtgaagttgccttctcctccaacatgaccacattttcctctgagcagacaaaaacagaacaaata

SEQ ID NO: 477937 - DNA, 120 bp, Artificial Sequence
  ENSG00000160613_50 (sequence is synthesized)
gagcagacaaaaacagaacaaataagtttgtgggcttgcttggaggttgaaagaaataagtccagttaaaatgagagttgagccaggtgccctggctcatgcctgtaatcccagcacttt

SEQ ID NO: 477938 - DNA, 70 bp, Artificial Sequence
  ENSG00000160613_51 (sequence is synthesized)
tcgcaccattgcactccagcctgggcaattgagcagctcagtcccaggaagtcaagaaaccccttctaca

SEQ ID NO: 477939 - DNA, 120 bp, Artificial Sequence
  ENSG00000160613_52 (sequence is synthesized)
gagcagctcagtcccaggaagtcaagaaaccccttctacagccaagttatggttgttttccaccaggacctggttgattcagtgtctgggggctggaaagtgaactttttataaagcaga

SEQ ID NO: 477940 - DNA, 120 bp, Artificial Sequence
  ENSG00000160613_53 (sequence is synthesized)
gggagctgaacatccctgagatagaagaggaggctaaatacctctaagactctagagtagcattgtcccaaagaattttctgcaatgatggaactgttccatgtccatgctgctcagttc

SEQ ID NO: 477941 - DNA, 88 bp, Artificial Sequence
  ENSG00000160613_54 (sequence is synthesized)
tgcaatgatggaactgttccatgtccatgctgctcagttcagtggtcactagtcatctgagtctattgaacatttaaaacatgaccag

SEQ ID NO: 477942 - DNA, 89 bp, Artificial Sequence
  ENSG00000160613_55 (sequence is synthesized)
cctttgggaagctgaggcaggagcattgtttacgctcatgagttcaagaccagcctgaacaacatagtgagaccctatttctacaaaaa

SEQ ID NO: 477943 - DNA, 120 bp, Artificial Sequence
  ENSG00000160613_56 (sequence is synthesized)
tgccaaggctgcagtaagccatggttgcactactgcactctccatcctgggtgacagagcgagaccttgtctcaaaaataataataggctaggcgtggtagctcatacctagcctataat

SEQ ID NO: 477944 - DNA, 63 bp, Artificial Sequence
  ENSG00000160613_57 (sequence is synthesized)
catcgactctactaaaaaaaaaaaaaaaaacgatacaaaaattggctgggcacggtggctcac

SEQ ID NO: 477945 - DNA, 120 bp, Artificial Sequence
  ENSG00000160613_58 (sequence is synthesized)
gactccatctcaaataataataataaggctagtatgactaaggagctaaattttaattttgttatacttcattttaatttagatagccatgtgtggctaagggctaccatattgagaagt

SEQ ID NO: 477946 - DNA, 120 bp, Artificial Sequence
  ENSG00000160613_59 (sequence is synthesized)
gctgctaaagagcaagactgatttttctctctccccgctgacaggaggttatgagggagaggggattggggcctcttggggtttttagatctgacgctggtctgaaatctctacctgagg

SEQ ID NO: 477947 - DNA, 120 bp, Artificial Sequence
  ENSG00000160613_60 (sequence is synthesized)
gtaggagggagagtggggctctggaggagtgtgttattcacactcagagagtctgtgattggaaggtgcctgaacacccacttgcacctctccttttgttgtcgtttgcagtcttgagga

SEQ ID NO: 477948 - DNA, 120 bp, Artificial Sequence
  ENSG00000160613_61 (sequence is synthesized)
tactggctaagcctctgcctacgcagtgagtcctgttccttctcctctccaggtcttccctctttaaccaacatttccctctctgctgattcttcctttctgccttcaaatgcaagtccc

SEQ ID NO: 477949 - DNA, 120 bp, Artificial Sequence
  ENSG00000160613_62 (sequence is synthesized)
tgctacctccaaccaggcaacttttcaaatgaatgaactgaagcaatttctcccctttgtcacacactccctctgccacagaagacttgctttcttactcatagtgcccctttcctgacc

SEQ ID NO: 477950 - DNA, 120 bp, Artificial Sequence
  ENSG00000160613_63 (sequence is synthesized)
ggttcaggggctggttcagagttcatcctttttaacattcttgtcactctgaccctattaatgaggtctttgttgcaacgtctctcctcctgtagcttctgtggcggccttcttggctcc

SEQ ID NO: 477951 - DNA, 120 bp, Artificial Sequence
  ENSG00000160613_64 (sequence is synthesized)
atagccctcctctgccttctctgcctgaggtacttgtttcatactcctgaactgtgagtgtcttctaaggcttgtttcctgactttttcctcactctacatcatcctccttgacagtaca

SEQ ID NO: 477952 - DNA, 120 bp, Artificial Sequence
  ENSG00000160613_65 (sequence is synthesized)
gctatgtttatgaccttagctaccacctctccacaaatgagtcctcgacctaaatctcttattctgatccttcaccagtggaaaggatagaaactagagcatagcttccataagattatg

SEQ ID NO: 477953 - DNA, 72 bp, Artificial Sequence
  ENSG00000160613_66 (sequence is synthesized)
ctccttatgggcaaatagaaccctggcgtcttctgggacagagagtgactgttgaaaaaattccaatttacc

SEQ ID NO: 477954 - DNA, 120 bp, Artificial Sequence
  ENSG00000160613_67 (sequence is synthesized)
ttaactcatttagttctggtagagagagttctagtgtactcatttgcactgccacccaagtccgcatccacaccaagaagtaaatggatgtagcatgccactgcgtacactgcgaacgca

SEQ ID NO: 477955 - DNA, 120 bp, Artificial Sequence
  ENSG00000160613_68 (sequence is synthesized)
gacaagcactccttttgggattcttttccttttgggattctattctgttccataacgtcatttctctcctgtaagccccttctctgccacatcaatgctgtcctctaactatgccataaa

SEQ ID NO: 477956 - DNA, 120 bp, Artificial Sequence
  ENSG00000160613_69 (sequence is synthesized)
tattttccatcatctttctgttcctaaatcactgtgtgctgttgatattccaccaatacagtacacttaacatgtacaaaattttagatttcactatcacctctcaaaagctggcttgct

SEQ ID NO: 477957 - DNA, 120 bp, Artificial Sequence
  ENSG00000160613_70 (sequence is synthesized)
ttctaagattttcccattcgtgtcagtgccgtcaccgttccctaggcccccaaacttgaaacgcgcgagtgtttcatccctctaatatccctcgcctcttcccaggtcttccccagccct

SEQ ID NO: 477958 - DNA, 120 bp, Artificial Sequence
  ENSG00000160613_71 (sequence is synthesized)
ttcccttgcaatttaatctttttgttgttttctgtgaaatatctctcaatcgacttattcattctacaaatattcgaggcctacttcatcccaggcactgtattagttctagagactcgg

SEQ ID NO: 477959 - DNA, 120 bp, Artificial Sequence
  ENSG00000160613_72 (sequence is synthesized)
ggataagacactattcctgccttcaacgagcttacaacctggtagggaagacagtgaggtttataggcatagtgcagtgttataggcactgcaacagggacaacacaggtgctttgagag

SEQ ID NO: 477960 - DNA, 120 bp, Artificial Sequence
  ENSG00000160613_73 (sequence is synthesized)
ctgcaacagggacaacacaggtgctttgagagcacagcagagagatgtctcctgccactaaggaagaaagggaaggtttctcaaagaaactggtggccaggcacagtggctcatgcctct

SEQ ID NO: 477961 - DNA, 89 bp, Artificial Sequence
  ENSG00000160613_74 (sequence is synthesized)
ctctaatcccagcactttgggaggctggagcaggcagattgcttgagctcatgagttcgagaccagcctcgcatacagaaattagctgg

SEQ ID NO: 477962 - DNA, 70 bp, Artificial Sequence
  ENSG00000160613_75 (sequence is synthesized)
tgatgtaattattttgtaaatgtggaggggacgacaactggggaaaaggtgtgggcatgatttgttagat

SEQ ID NO: 477963 - DNA, 120 bp, Artificial Sequence
  ENSG00000160613_76 (sequence is synthesized)
acgacaactggggaaaaggtgtgggcatgatttgttagattctcatctgccataaatgaaagtcaatgcataatgtctcaaattgataagccatgaaatatccataacgcttactgttta

SEQ ID NO: 477964 - DNA, 120 bp, Artificial Sequence
  ENSG00000160613_77 (sequence is synthesized)
gaaacacgaaagtagatcccagaagaaaacaattaaaaacaataaaaaaaaagtttgcttctggggagtagatctcaaaggtggtagggaattttttttttcattataagcactgtagca

SEQ ID NO: 477965 - DNA, 120 bp, Artificial Sequence
  ENSG00000160613_78 (sequence is synthesized)
ccaacttacatttaaattcatgcatactattttaatagaaaaaaatgtcaaggacaattgggaaggtaagaagtagccatcgtgaatctaaacagctttctcaagaattttgacaataca

SEQ ID NO: 477966 - DNA, 120 bp, Artificial Sequence
  ENSG00000160613_79 (sequence is synthesized)
ggaaaagaaataatatctgatacatatgtagccttaacattagctaggtaccattctgaacgctttaggtatattaactgtttaatcctcgtctcaaacctatgaagtaggtactgttac

SEQ ID NO: 477967 - DNA, 120 bp, Artificial Sequence
  ENSG00000160613_80 (sequence is synthesized)
tggccccattttacagatgaggaaacagttctcacagctagtaagtggcagagctgggattagaacccaagcttagtggctccagagcccatgctcttaacactggtaggtggcaggaag

SEQ ID NO: 477968 - DNA, 120 bp, Artificial Sequence
  ENSG00000160613_81 (sequence is synthesized)
tgaagaactgagaaagggtttatttgtttttgtttttcatttgtagtaggaaaggtgctagcaaaaaggtctagccaagaagatggataatcaggctgagccattgtttgacttttgcca

SEQ ID NO: 477969 - DNA, 120 bp, Artificial Sequence
  ENSG00000160613_82 (sequence is synthesized)
agtattgctgtgaaaggacaagaaagtgaagggagcttgagaatgtaaacacacatgttggatgagccatggaatctcagccagttaggagaaaggagcttgaggggttgtgggaaaatg

SEQ ID NO: 477970 - DNA, 120 bp, Artificial Sequence
  ENSG00000160613_83 (sequence is synthesized)
agggggtcaagaagagagtggggaaagtggaaggagagaggttgttttcaaagaaatgggacattggctttgaagaggtgacagatggaattatagaaaatgaggctgggtgtggtggct

SEQ ID NO: 477971 - DNA, 120 bp, Artificial Sequence
  ENSG00000160613_84 (sequence is synthesized)
tgggtgacagagctagactccgtctcaaacaaacaaacacccctgtccttgctcagtcatctataatagctcttagttgcttatttaaaacaaaaatctttaaagcgcatcccaccctag

SEQ ID NO: 477972 - DNA, 120 bp, Artificial Sequence
  ENSG00000160613_85 (sequence is synthesized)
ctaggttacccagcccctactttcagtgcctctctgagctactgtgtctgtaaaatcaaggtattgtactctgccttgcatattggaataatttttttttttgagacaggctctcactct

SEQ ID NO: 477973 - DNA, 76 bp, Artificial Sequence
  ENSG00000160613_86 (sequence is synthesized)
tattggaataatttttttttttgagacaggctctcactctattgcccaggctagagtgcagaggcacagtcatggc

SEQ ID NO: 477974 - DNA, 120 bp, Artificial Sequence
  ENSG00000160613_87 (sequence is synthesized)
atatccagctaattttttatttttttgtaaagatgatgtctcccaggctgaagttatcctccaccatgcctggagtgagccaccatgcctggcctggaataaattaatggaagaaagggt

SEQ ID NO: 477975 - DNA, 80 bp, Artificial Sequence
  ENSG00000160613_88 (sequence is synthesized)
tcgttctcattacagcctaatttcttaatagtccccagttgagtcttcctcttcagtagttttttgtttttgtttttgtt

SEQ ID NO: 477976 - DNA, 120 bp, Artificial Sequence
  ENSG00000160613_89 (sequence is synthesized)
gagtcttcctcttcagtagttttttgtttttgtttttgttttaataattgtagatttacaggaggtttcaaagaaatgtacaagagaagtcccgtgcacccttctcccaatcttaatgtt

SEQ ID NO: 477977 - DNA, 120 bp, Artificial Sequence
  ENSG00000160613_90 (sequence is synthesized)
tcacacaattaaagtataatatcaaaaccaagaaattgacattggtacaatccatagagcttatttggagttcaccagatacacatgctgtcaatatttgtgtatgcgcgtgtgtagctg

SEQ ID NO: 477978 - DNA, 120 bp, Artificial Sequence
  ENSG00000160613_91 (sequence is synthesized)
tatgcaattgtatcacatgtagccttgcataactaccaccacaaccaagatccagaacaattccattatcacaagactcctttgtgttacccctttctggccacacccatcccctcccct

SEQ ID NO: 477979 - DNA, 120 bp, Artificial Sequence
  ENSG00000160613_92 (sequence is synthesized)
gtccctggcccctggcacccatttatctgttatgtatcactgcaggtacttcaattaacatcacctaaatggaattgtgtgctacgcatcctttttctttttttttttttctttgagaca

SEQ ID NO: 477980 - DNA, 84 bp, Artificial Sequence
  ENSG00000160613_93 (sequence is synthesized)
agcatggctcactgcaatccctccccggtagtgggaccacaggtgcacaccaccacacctggctatatgcttcttttgagattg

SEQ ID NO: 477981 - DNA, 120 bp, Artificial Sequence
  ENSG00000160613_94 (sequence is synthesized)
gcacaccaccacacctggctatatgcttcttttgagattgcttttttcactcacataatttgcttgaaatttatccaccagcattttttaaaaattaactgtgcatcatcttcagtgaga

SEQ ID NO: 477982 - DNA, 120 bp, Artificial Sequence
  ENSG00000160613_95 (sequence is synthesized)
tgtgtgcatttcgtctttgttcatgccttttccactgcctagaatgccctctaccaaccctgtctaccgatctgtattcatttccttcagtgtgtctcactgctgtgtgcctaaacccat

SEQ ID NO: 477983 - DNA, 120 bp, Artificial Sequence
  ENSG00000160613_96 (sequence is synthesized)
ctgacttatttctcttcccttatcaattatgtatatttcccataccatatcattttccacttgcaggtaggaggcagggaccacgcccatcttatctttatattcccagcatctagtaca

SEQ ID NO: 477984 - DNA, 120 bp, Artificial Sequence
  ENSG00000160613_97 (sequence is synthesized)
gtgcctgaaatggaggaggtacccagtaaataatgttttggatgaatgaatgattgaagttgctctgctggattcttatattgtgtcttgggtatgtgtcgtcttcccaactgcactcga

SEQ ID NO: 477985 - DNA, 120 bp, Artificial Sequence
  ENSG00000160613_98 (sequence is synthesized)
agctacgttgtaaacttgagagcagcagctccattccatttactagtataggcgaggccctgcacctcacatacatgttctctaatccttctaagaaccccctagattagactttgtaac

SEQ ID NO: 477986 - DNA, 120 bp, Artificial Sequence
  ENSG00000160613_99 (sequence is synthesized)
ctctgctaaagaacagtcacgatgcagccagtagtttgtggaagcgatgtgtgctttgagccctgtgggtggcaacaggggttgctcgcagtgcctgtgagcaactggacctcctgctgg

SEQ ID NO: 477987 - DNA, 120 bp, Artificial Sequence
  ENSG00000160613_100 (sequence is synthesized)
attagctggtgtcgtgaggattggctgtcttgctgtgggaggccatccgctggtgttagtgctggcccacactccacctgggggcttatccctgttggtcagggataaatgtgaacaaaa

SEQ ID NO: 477988 - DNA, 120 bp, Artificial Sequence
  ENSG00000160613_101 (sequence is synthesized)
agagaagatcaaatgtttcacaatttaaaaggcatggcttagggacttccagggggaacacatggatggctcagcatctccctctcagattcctgcagttaccagctctttgatctcttc

SEQ ID NO: 477989 - DNA, 120 bp, Artificial Sequence
  ENSG00000160613_102 (sequence is synthesized)
gatgctgcgggagacccctgagatacaagtggactctcccggggcgcggggaagaagggagagccgactgcgagaaggaaggcgacctgggtgggcaggatcccctctgggaagattaca

SEQ ID NO: 477990 - DNA, 120 bp, Artificial Sequence
  ENSG00000160613_103 (sequence is synthesized)
acctacaggcttgtcatcagggatgtcgggttgccattggaccaagagagttgatgccaagagtgtgcccatccgtgaaatgggcattgctctctgcaactgttcatttatactacctct

SEQ ID NO: 477991 - DNA, 120 bp, Artificial Sequence
  ENSG00000160613_104 (sequence is synthesized)
attctgttaggaggccaggagggttagggtttcctttgccctgccctgctattgggtccttctctggtcaaagattcagctctaacaaaggaagggtccacctgtgagacctgttctgag

SEQ ID NO: 477992 - DNA, 120 bp, Artificial Sequence
  ENSG00000160613_105 (sequence is synthesized)
gaccagccctgtacctttcccccataacaactttgaactcagtctctagcttcttttttaaaaaatattctttttttattttttaaagatgggttctcactcagccacctaggctggagt

SEQ ID NO: 477993 - DNA, 120 bp, Artificial Sequence
  ENSG00000160613_106 (sequence is synthesized)
gcagtggcacagtcataactcctgtgctcaagcaatcctcctgcctgggcctcccaggtagccgggactataggtgcacaccactgtccccagcttgaactcagtctctaacctacttcc

SEQ ID NO: 477994 - DNA, 120 bp, Artificial Sequence
  ENSG00000160613_107 (sequence is synthesized)
gggtatcaggtggccttagattctcaatgtcccaaatgttagatactaagtctctttcagagtccctttcagagttgcatatgtaaagaacaggtgtggggaccccacaaagaccacagg

SEQ ID NO: 477995 - DNA, 120 bp, Artificial Sequence
  ENSG00000160613_108 (sequence is synthesized)
cctaaactcattttatctgcaaaggggagctctggctgtgcctcctggccccttctctagaagcaagccagtggggtggtgacatcatgggctttgaccttttgtcccagcttgccttgg

SEQ ID NO: 477996 - DNA, 120 bp, Artificial Sequence
  ENSG00000160613_109 (sequence is synthesized)
ggaatccattcccagtagccatagtgggagagcgtggactggatcagccagcagggcaagcagggaaaccagagtcagattgttgagactacactggcaatgcaagagactaaccaggac

SEQ ID NO: 477997 - DNA, 120 bp, Artificial Sequence
  ENSG00000160613_110 (sequence is synthesized)
ctctgtcctttcagtatgaggatcgccgtgcagagtgggtcaccaacgaggcaggcttcagccatagccaccagcacggtttcggcctcctcaacgcctggaggctcgtgaatgcagcca

SEQ ID NO: 477998 - DNA, 120 bp, Artificial Sequence
  ENSG00000160613_111 (sequence is synthesized)
ccaaactgcctgggatatcataggtgcctagtaaatgttcattcagttcattgatttaacaacttcaaccttcatcccagctgatatccattttacaaatgagaaagcaggctcaatgct

SEQ ID NO: 477999 - DNA, 120 bp, Artificial Sequence
  ENSG00000160613_112 (sequence is synthesized)
atcactgaagtttccaaactactaatagagtaaatgggacctgagtatgtgtgggactcaggatgctctggttcccctcctccaccctggacacagctgtttcctctggttccttagctg

SEQ ID NO: 478000 - DNA, 120 bp, Artificial Sequence
  ENSG00000160613_113 (sequence is synthesized)
ggggctgtacggagcattccagcgagcaagcaggagctgagggctgaaggaagatgatgaggagtggaaaaataaagacagctaaaccttcaagatcgtattgacaagggcgtgtgtgtt

SEQ ID NO: 478001 - DNA, 120 bp, Artificial Sequence
  ENSG00000160613_114 (sequence is synthesized)
ataatgtgggtgctaatgaggagaggggcacattgcacggagcgatcgaggccgacggagggagaatcgggaaactgacccggtctgtagcctttgctgagtcaacactactcacagtga

SEQ ID NO: 478002 - DNA, 120 bp, Artificial Sequence
  ENSG00000160613_115 (sequence is synthesized)
gaagccgcgagtttccgcagggaggcggcggcagctgcggcggggccgagccgcttgggtgtgtatctgagtactaagccctgccccagggtggacccagtggagagcaaaggcttttaa

SEQ ID NO: 478003 - DNA, 120 bp, Artificial Sequence
  ENSG00000160613_116 (sequence is synthesized)
atgccacccttggagtagtagactcggggactctgaatacatcttgggaatgcttttatcttagaaatttggatttaggacgaatatacatatttttagaaactaagtgtcacatggggc

SEQ ID NO: 478004 - DNA, 120 bp, Artificial Sequence
  ENSG00000160613_117 (sequence is synthesized)
cagcctgggtgacagaacaagactccttctcaaaaaaaaaaaagaaactaagtgtcacatggattaaacaactttttcacactcaaggaaatgcacaaacaacttctttgcagtgtcttc

SEQ ID NO: 478005 - DNA, 120 bp, Artificial Sequence
  ENSG00000160613_118 (sequence is synthesized)
gtgtcttcctttggtaaaatttgggcttttgctaatttctgtggacttaaaaaaaactcctaattccattgcccttcagctcttaggtaaatactgtgagttctggtcatgtgcatcttc

SEQ ID NO: 478006 - DNA, 120 bp, Artificial Sequence
  ENSG00000160613_119 (sequence is synthesized)
aggaggaaagctagtctggttgtcgtttttatgggatgagtgggaagaggagtgggggaatgtctcatgtcaacaccagagagagctctttctctggagctataattggagccatagcaa

SEQ ID NO: 478007 - DNA, 120 bp, Artificial Sequence
  ENSG00000160613_120 (sequence is synthesized)
atgaaattcgagcagggtcatggagcttctctaacctgtggaacccatttaaagaatttgaagacgatcgcctacacccagctgggcttagcgccatcccagcaggtttaaggcaggcct

SEQ ID NO: 478008 - DNA, 120 bp, Artificial Sequence
  ENSG00000160613_121 (sequence is synthesized)
ctagaccatcttcctagagctccctgcctgtccctgttgcccgcaaccatatagtgtgggcataggaggctctaggcaggagctgggctggagccaggtggtatcaaatttctccagtgg

SEQ ID NO: 478009 - DNA, 120 bp, Artificial Sequence
  ENSG00000160613_122 (sequence is synthesized)
ctgagtcgggagatctctctggggccattgggaattaggctgctttgtcttcctgctgggtcaaatttattttccaaaactaaaattttgttatgccaataaatgacttctggtcaacac

SEQ ID NO: 478010 - DNA, 120 bp, Artificial Sequence
  ENSG00000160613_123 (sequence is synthesized)
aatgttccaaggctctgtgccagttgacccctactaccccctcctcccagccccagggagaagagaaaagggagtggactaaagtagagagggaagagaggctgggctgtgtgcacagag

SEQ ID NO: 478011 - DNA, 120 bp, Artificial Sequence
  ENSG00000160613_124 (sequence is synthesized)
ggcacccactgcaggccaggctgggttaggaggaagaacaggaacataccaaactccaccctctagcagaactctagggaacccagctcgccctgcccaggccagggacctaagaaggtt

SEQ ID NO: 478012 - DNA, 120 bp, Artificial Sequence
  ENSG00000160613_125 (sequence is synthesized)
ctacaacataattgtcactcttgctctgctgtacctggcctttctcattttaactcacctcagcttctcaccctcaccaccctcttccatctgaactgtaatttgcccagaaatgaagag

SEQ ID NO: 478013 - DNA, 120 bp, Artificial Sequence
  ENSG00000160613_126 (sequence is synthesized)
atgaccagggcagctgggtagagctgtctttctgagggcagaggctgggggcatatgcttcccaccatttggctccctggggaagcaaagcttctctggacttttcaatgcctgcctgtg

SEQ ID NO: 478014 - DNA, 120 bp, Artificial Sequence
  ENSG00000160613_127 (sequence is synthesized)
gctcctgccaccatagacaagttcgtgggcttcacagccacacttcagactatcactgcaaggctgtttccttaacaggaaaaaaaatcaacccgctcccttgcataaaccaggctccca

SEQ ID NO: 478015 - DNA, 120 bp, Artificial Sequence
  ENSG00000160613_128 (sequence is synthesized)
ctctcattgagacaaccacttggagagtgcttttcccttttttttctgggagtgcgccatggctgggtgaaaattacatctcttggcagctgctctaacagctgggagggaagcagtgag

SEQ ID NO: 478016 - DNA, 120 bp, Artificial Sequence
  ENSG00000160613_129 (sequence is synthesized)
tacagtggagaaagggcagctcttggcagaagtcgccaccctggtatctgacccagaagagaagtttggaagaaagaaattctccggtgttagcactgacaccatgggccaacgatccaa

SEQ ID NO: 478017 - DNA, 120 bp, Artificial Sequence
  ENSG00000160613_130 (sequence is synthesized)
gtgccatagagtggagcagatttaggcagggcccgcctcagctaaaccctctgagtctccaggggtgatgacagccccaaaagagctcgatgccaggcagtcactgcctccccttgcccc

SEQ ID NO: 478018 - DNA, 120 bp, Artificial Sequence
  ENSG00000160613_131 (sequence is synthesized)
attctcgctccccacctcagaaccacacagagagaaggggtttcatggcatctggcccagagcagtgaggcagcttgtcctgttgagagctgtagagccgggcaggcgggccttatagac

SEQ ID NO: 478019 - DNA, 120 bp, Artificial Sequence
  ENSG00000160613_132 (sequence is synthesized)
actgagtccatgcagggctcgggggtgggcaaggacacagtcctctcttgctggaacacactccctgtgttcacgccgacatcattccagcccctgtcgcggagctgccaaattggattt

SEQ ID NO: 478020 - DNA, 120 bp, Artificial Sequence
  ENSG00000160613_133 (sequence is synthesized)
ccttgaatagtgccgtcagtgttgtcccagctccagctgggcccagtagctcccctggccacttcctctgtctagcttggttgtgggggttgaagggtttggagttgggagttgggatag

SEQ ID NO: 478021 - DNA, 120 bp, Artificial Sequence
  ENSG00000160613_134 (sequence is synthesized)
gagttgggatagagaatttaggaatgggagcaagaatattaggagcaaaaatcgggaggcccccccatggtggctcatgcctgttaatcccgacactttgggaggccaaggcaggaagat

SEQ ID NO: 478022 - DNA, 120 bp, Artificial Sequence
  ENSG00000160613_135 (sequence is synthesized)
agaccagcctgggcaacatagtgagatgctgtctctacaaaaaataagaatattagtgtggtgcagtggtacacgcctgtagtcccagctacatgggaagctgaagcaggaggatcgctg

SEQ ID NO: 478023 - DNA, 120 bp, Artificial Sequence
  ENSG00000160613_136 (sequence is synthesized)
cagcctttgcatttcccagctccccagctccccagctcccagtcccactgatggtcacgggctgctctccatccttttgggggagctgagcagccctattcctccctggaggtggttctg

SEQ ID NO: 478024 - DNA, 120 bp, Artificial Sequence
  ENSG00000160613_137 (sequence is synthesized)
tggttctttcacactcaacgtctgtccatcaaggcaaaaggtgaagggaatgaatggggaagccctcaccataactccttatgtgcttgggaacctacagactgaacagactattcctct

SEQ ID NO: 478025 - DNA, 120 bp, Artificial Sequence
  ENSG00000160613_138 (sequence is synthesized)
tatactccagcagagggcagtagctctccataaatgagaccggaggagccagaaaccctgtccaagtcccttctctgaaagtgccacagcactgcagcctgggcgacagagccagacttt

SEQ ID NO: 478026 - DNA, 120 bp, Artificial Sequence
  ENSG00000160613_139 (sequence is synthesized)
gtctctctctatatatatatttttttggtggggggacaagtaatacgtatacatggtgtaaaaatgcaaaatgggctgggcgtgggggctatggggatcacacctgtaatcccagcactt

SEQ ID NO: 478027 - DNA, 120 bp, Artificial Sequence
  ENSG00000160613_140 (sequence is synthesized)
caaaaaaaaaaaaaagcaaaatgtacaaagagcatgtagggaaaaataagtctcccacatatggctccccacctcccagttccccggctaggagaccagcattagtgaggagctgctgtg

SEQ ID NO: 478028 - DNA, 120 bp, Artificial Sequence
  ENSG00000160613_141 (sequence is synthesized)
gccttcattgcctaggtatccgggtactggatggacctctcacagacagcatggaggcagtggcgttcaacaagcactatcagatcaatgacatctacagctgcaggtgaggcagagctg

SEQ ID NO: 478029 - DNA, 120 bp, Artificial Sequence
  ENSG00000160613_142 (sequence is synthesized)
cagatgagagggcaagagcctggagcacctgggacaaatccgccaacaaaatcccaaccagtgggctgacttaggccggagcaggggtctcctcattgggttcagctaataagtccattg

SEQ ID NO: 478030 - DNA, 120 bp, Artificial Sequence
  ENSG00000160613_143 (sequence is synthesized)
ccttcatttctctagattcccagccactgggcactcaaccttaagcccccgtcacccccgtaatcagattgccacatgagaagccctggcctgtgcacatttatttgttttctaaactcc

SEQ ID NO: 478031 - DNA, 120 bp, Artificial Sequence
  ENSG00000160613_144 (sequence is synthesized)
taaggcctctgcaagaaagcgggctttcttctccatccacaggccagctgaatgcccaacaccaatcccccaccccacgccaatgcactgcaccttcagggcatggctgtgctggactgg

SEQ ID NO: 478032 - DNA, 120 bp, Artificial Sequence
  ENSG00000160613_145 (sequence is synthesized)
acaagaaggaaatggggttgggggcccacatggcattgatggcacctgttcctcccccgacatacctcccttaaatccatgacatcatccacagggtacacttcccgatagagacagaat

SEQ ID NO: 478033 - DNA, 120 bp, Artificial Sequence
  ENSG00000160613_146 (sequence is synthesized)
cttcccgatagagacagaatagagaactcctcaacctgagaaccaagagcttccacagaagttcatgggcgctctgccttctaccctacgagttgggccaggtgcggtggctcacgcctg

SEQ ID NO: 478034 - DNA, 89 bp, Artificial Sequence
  ENSG00000160613_147 (sequence is synthesized)
ctgggaggtggaggtggcagtgagccaaagaggaagacgccgtttcaggagaaaaaaaaaaaaaaaaaaaggtctacatgtctctgatc

SEQ ID NO: 478035 - DNA, 120 bp, Artificial Sequence
  ENSG00000160613_148 (sequence is synthesized)
agaaaaaaaaaaaaaaaaaaaggtctacatgtctctgatccctagatcaggagatgagtgacctctgtccctctctgccactatgggctatggggacattcacaaggaaaagaagagcct

SEQ ID NO: 478036 - DNA, 120 bp, Artificial Sequence
  ENSG00000160613_149 (sequence is synthesized)
tagcacacttctgttttccactttggagaggggatggacctttgaaccctgtgccttttaatcacggaagcctttaagtggaacccttgggaggagttaagagctgcaggtcaaagggca

SEQ ID NO: 478037 - DNA, 120 bp, Artificial Sequence
  ENSG00000160613_150 (sequence is synthesized)
gccagctgagactgggaggcgctgggtgggtagccgcagcctggctctggctgtcccctctaggtatttatttctcaacagctggggaccagatgacgatgggaagacagtggatggccc

SEQ ID NO: 478038 - DNA, 120 bp, Artificial Sequence
  ENSG00000160613_151 (sequence is synthesized)
tctaaatgtgtgagcacaataatctctttgggctcagataggactagccctgcttgcagaggaccttgggacttcttagatgtcagcataccctgggaacaccttcaagccatcatctgg

SEQ ID NO: 478039 - DNA, 120 bp, Artificial Sequence
  ENSG00000160613_152 (sequence is synthesized)
agatcaccgagctgcctccaccccaccacagctggttaggcctctgctctggcctgtctttctgtgggccaccttctgcctgctggaagcctcccctgactccccacaggcctaaattaa

SEQ ID NO: 478040 - DNA, 120 bp, Artificial Sequence
  ENSG00000160613_153 (sequence is synthesized)
ctggcacgggtgtgacccacagtagatgggtaatgaatgttgaaaacagtaagcatgtgaatgaataagtgggtatgaaggtagaaggctgccagttgtaccccagagcctactgaaaga

SEQ ID NO: 478041 - DNA, 120 bp, Artificial Sequence
  ENSG00000160613_154 (sequence is synthesized)
atggtattgcggcacagaatgccctctgccacttgagactgcctgttcagaagaggatcaggactgctctgagggacgtgggccgctcagatcatgtttcaaactcaggacagcccccca

SEQ ID NO: 478042 - DNA, 120 bp, Artificial Sequence
  ENSG00000160633_0 (sequence is synthesized)
ggggcgactggagcggttccctcgcaggcggcgccattttgtgctaggagcctgataaaaccggcccggttctgtggaaagtgggcggcggagccagggtccctggaatggcggagactc

SEQ ID NO: 478043 - DNA, 120 bp, Artificial Sequence
  ENSG00000160633_1 (sequence is synthesized)
tgtcaggcctaggtgattctggagcggcgggcgcggcggctctgagctccgcctcgtcagagaccgggacgcggcgcctcagcgacctgcgagtgatcgatctgcgggcggagctgagga

SEQ ID NO: 478044 - DNA, 120 bp, Artificial Sequence
  ENSG00000160633_2 (sequence is synthesized)
aacggaatgtggactcgagcggcaacaagagcgttttgatggagcggctgaagaaggcaattgaagatgaaggtggtaatcctgacgaaattgaaattacctccgagggaaacaagaaaa

SEQ ID NO: 478045 - DNA, 120 bp, Artificial Sequence
  ENSG00000160633_3 (sequence is synthesized)
catcaaagaggtctagcaaagggcgcaaaccagaagaagagggtgtggaagataacgggctggaggaaaactctggggatggacaggaggatgttgagaccagtctggagaacttgcagg

SEQ ID NO: 478046 - DNA, 120 bp, Artificial Sequence
  ENSG00000160633_4 (sequence is synthesized)
acatcgacatcatggatatcagtgtgttggatgaagcagaaattgataatggaagcgttgcagattgtgtcgaagacgatgatgctgataacctccaggagtccctgtcggatagtagag

SEQ ID NO: 478047 - DNA, 120 bp, Artificial Sequence
  ENSG00000160633_5 (sequence is synthesized)
agctagtcgagggggaaatgaaagagcttccggagcagcttcaggaacatgctatagaggacaaagaaactataaacaatttagatacttcatcatctgacttcactatattacaggaaa

SEQ ID NO: 478048 - DNA, 120 bp, Artificial Sequence
  ENSG00000160633_6 (sequence is synthesized)
ttgaagagccatccctggagccagaaaatgagaaaatactcgacattttgggggaaacttgtaaatctgagccagtaaaagaagaaagttccgagctggagcagccatttgcacaggaca

SEQ ID NO: 478049 - DNA, 120 bp, Artificial Sequence
  ENSG00000160633_7 (sequence is synthesized)
caagtagcgtggggccagacagaaagcttgcggaggaagaggacctatttgacagcgcccatccggaagagggtgatttagatttggccagcgagtcaacagcacacgctcagtcgagca

SEQ ID NO: 478050 - DNA, 120 bp, Artificial Sequence
  ENSG00000160633_8 (sequence is synthesized)
aggcagacagcctgttagcggtagtgaaaagggagcccgcggagcagccaggcgatggcgagaggacggactgtgagcctgtagggctagagccggcagttgagcagagtagtgcggcct

SEQ ID NO: 478051 - DNA, 120 bp, Artificial Sequence
  ENSG00000160633_9 (sequence is synthesized)
ccgagctcgcggaggcctctagcgaggagctcgcagaagcacccacggaagccccaagcccagaagccagagatagcaaagaagacgggaggaagtttgattttgacgcttgtaatgaag

SEQ ID NO: 478052 - DNA, 120 bp, Artificial Sequence
  ENSG00000160633_10 (sequence is synthesized)
tccctccggctcctaaagagtcctcaaccagtgagggcgctgatcagaaaatgagttctcccgaagatgactcggatacaaaaaggctttccaaagaggaaaagggtcgcagcagttgtg

SEQ ID NO: 478053 - DNA, 120 bp, Artificial Sequence
  ENSG00000160633_11 (sequence is synthesized)
gtagaaatttctgggttagtggactctcttctacaaccagagctacagatttgaagaatcttttcagcaaatatgggaaggtggtgggcgccaaggttgtgacaaatgcccggagtcctg

SEQ ID NO: 478054 - DNA, 120 bp, Artificial Sequence
  ENSG00000160633_12 (sequence is synthesized)
aggccacaaaatgcattaaccacctgcacaagacggagctccacggaaagatgatctccgtggagaaagccaaaaatgaacctgtgggaaagaaaacctctgacaaaagagacagtgacg

SEQ ID NO: 478055 - DNA, 120 bp, Artificial Sequence
  ENSG00000160633_13 (sequence is synthesized)
ggaaaaaggagaagtcgagcaacagtgacagatctacaaaccttaagagggatgataaatgtgacagaaaagatgatgctaagaagggtgacgacggaagtggagaaaagagtaaggacc

SEQ ID NO: 478056 - DNA, 120 bp, Artificial Sequence
  ENSG00000160633_14 (sequence is synthesized)
aagatgatcagaaacctggcccctcagagcgatctcgagccacaaagtcaggaagtcgagggaccgaacggactgtagtaatggataaatccaaaggggtgcctgtgattagtgtaaaaa

SEQ ID NO: 478057 - DNA, 120 bp, Artificial Sequence
  ENSG00000160633_15 (sequence is synthesized)
cgtccgggtccaaagagagagcttccaaaagccaggatcgcaaatcagccagcagagagaagcggtccgtcgtgtcctttgataaggtcaaggagcctcggaagtcaagagactcagagt

SEQ ID NO: 478058 - DNA, 120 bp, Artificial Sequence
  ENSG00000160633_16 (sequence is synthesized)
cccatagcagggtgcgtgaacgcagtgaacgcgaacaacgcatgcaggcgcagtgggagcgcgaggagcgtgagcggctggagattgcccgagagaggctggccttccagcgccagcggc

SEQ ID NO: 478059 - DNA, 120 bp, Artificial Sequence
  ENSG00000160633_17 (sequence is synthesized)
tggagcgggagcgcatggagcgggaacggctggagcgcgaacgcatgcacgtggagcacgagcgcaggcgcgagcaggagcgcatccaccgtgagcgcgaggagctgaggcgccagcagg

SEQ ID NO: 478060 - DNA, 120 bp, Artificial Sequence
  ENSG00000160633_18 (sequence is synthesized)
aactgcgctatgagcaggagcggcggcccgcggtgcggcggccctacgacctggaccggcgagatgatgcctattggccggaagccaagcgggccgccctggatgagcgctaccattctg

SEQ ID NO: 478061 - DNA, 120 bp, Artificial Sequence
  ENSG00000160633_19 (sequence is synthesized)
actttaaccgccaggaccgcttccacgactttgaccacagggaccgcggccgctaccccgaccactcggtggacaggagagaaggttcaaggtcaatgatgggagaacgagaaggacagc

SEQ ID NO: 478062 - DNA, 120 bp, Artificial Sequence
  ENSG00000160633_20 (sequence is synthesized)
attacccagaacgccatggaggaccagagcgccacggccgggactcccgcgatggctgggggggctatggctctgacaagaggatgagcgagggccgggggctgcctcctccccccagac

SEQ ID NO: 478063 - DNA, 120 bp, Artificial Sequence
  ENSG00000160633_21 (sequence is synthesized)
gtgactggggggaccatggccgaagagaggatgaccggtcatggcagggcacggccgacgggggcatgatggacagggatcacaagaggtggcaaggtggcgagagaagcatgtccggtc

SEQ ID NO: 478064 - DNA, 120 bp, Artificial Sequence
  ENSG00000160633_22 (sequence is synthesized)
actccgggcctggccacatgatgaaccgaggaggaatgtcagggcgcggcagctttgccccaggcggggcctcccggggccaccccatcccacacggtggcatgcagggcgggtttggag

SEQ ID NO: 478065 - DNA, 120 bp, Artificial Sequence
  ENSG00000160633_23 (sequence is synthesized)
gccagagccgggggagcaggcccagcgatgcccgcttcactcgccgctactgagtacttggaatcctgtgtcctgtctcgtggcaacaaggctatgttctgttaggagttaccttaaact

SEQ ID NO: 478066 - DNA, 120 bp, Artificial Sequence
  ENSG00000160633_24 (sequence is synthesized)
gtgtaaaaatatttttttttaatctgctgccatattgtagctcaatacaatgtgaatttgtttttcgttttggggttttttttttttgtaataaatgtgtttccgttcacatacccttta

SEQ ID NO: 478067 - DNA, 120 bp, Artificial Sequence
  ENSG00000160633_25 (sequence is synthesized)
atgtgacctggctctgctgggaagtgtctagtgagccgcacagctgactcagacaggtgcatctggggaggctgtggttgctgtgtctgtcctcgagtgcctgccctcttttgaaagtaa

SEQ ID NO: 478068 - DNA, 120 bp, Artificial Sequence
  ENSG00000160633_26 (sequence is synthesized)
ggacatccttcatcaccccagggcccagcttagccttggaaaacaactagatctgtggtctgtgctcattctcttcgggggctagcacattagaacaataagctccattttctccttcca

SEQ ID NO: 478069 - DNA, 120 bp, Artificial Sequence
  ENSG00000160633_27 (sequence is synthesized)
tcttacattgagactgagacttcccaggagagccttggacctctagtggctttccctataaacttgggggcagcacattgctgtgtggaagatgcctcctctctgaggactccactcatg

SEQ ID NO: 478070 - DNA, 120 bp, Artificial Sequence
  ENSG00000160633_28 (sequence is synthesized)
agcccttcctcctcctgccagcattttctggactccaccataagcttcccgcttctgtcccccttggttccttaatgtggctgagcatagccaagtactcagctctgtctcgggatcctc

SEQ ID NO: 478071 - DNA, 120 bp, Artificial Sequence
  ENSG00000160633_29 (sequence is synthesized)
aggaattccatcagcctcgtggggttcctttttccctgctcctggaggcaaattatatgcagcaaaacgtagaactagtcttgtggattttctttggtggaggagcatacaccaatggtt

SEQ ID NO: 478072 - DNA, 120 bp, Artificial Sequence
  ENSG00000160633_30 (sequence is synthesized)
ccatgtaaaggctccagaatcagaactggcgtcacaccttggtgtcaccccttcctgctgagcctgtctccccaggagtgaaatgagggtaatattcctcctacaaagggtgcggtggtg

SEQ ID NO: 478073 - DNA, 120 bp, Artificial Sequence
  ENSG00000160633_31 (sequence is synthesized)
ggggtttacatgaggtgggcgcatctgtacaaacgtgtttatcattgccagctacttttttttttttttaatagagacgggatctcactatgttgcccaggccagttttgaactcctgag

SEQ ID NO: 478074 - DNA, 120 bp, Artificial Sequence
  ENSG00000160633_32 (sequence is synthesized)
caaagtgctaggattacagatgtgagccagcacacctggccaccagctgctttcatgaaggtgttagatatgctctcctaacagtggaacgcggtttgatcccttctcctcacatacaca

SEQ ID NO: 478075 - DNA, 120 bp, Artificial Sequence
  ENSG00000160633_33 (sequence is synthesized)
ggtttgatcccttctcctcacatacacagtcataaatgagtcgtcagagttaccccaaagggaaatggtaacatctccctacagagaaaactagcacagaacttatgggcctcattgaac

SEQ ID NO: 478076 - DNA, 120 bp, Artificial Sequence
  ENSG00000160633_34 (sequence is synthesized)
agttacgtgggttggttggacagaaaaatgttggttcaattttcaaatactaaggagagcttatttcaggagtcccttttcttactttgttgaggggaggcatcagagcacatgctggga

SEQ ID NO: 478077 - DNA, 120 bp, Artificial Sequence
  ENSG00000160633_35 (sequence is synthesized)
ggataggccaggaagcaggcagtggtaacgtgggacatcgtgcacgtggtggagcatgccgccatctctcccttcaccctggcagagctctccgttgaacggggaggtgaacttggacat

SEQ ID NO: 478078 - DNA, 120 bp, Artificial Sequence
  ENSG00000160633_36 (sequence is synthesized)
ggacaacaaccagcctgtgtcaagggggtttccttaccaggactcctttctagtttcctttcacctacaatgtggtcatggggcaaaaaccccagagaccacatatgtattggtggaaag

SEQ ID NO: 478079 - DNA, 120 bp, Artificial Sequence
  ENSG00000160633_37 (sequence is synthesized)
agaaaaaacaggactgtggagccaaagctacctcactagcttttgtgaaagtcaggctggaaagtgcttccagccacagaaataggctgtgggtgtaaatattaaccttggccatcaaat

SEQ ID NO: 478080 - DNA, 120 bp, Artificial Sequence
  ENSG00000160633_38 (sequence is synthesized)
aagtaggcatagagtgtgactcgccctctcttggtcttccctgaaacagcagggtcaagaactcctggtctgtgttagccacgtggcttacaaaaacaatgacacagaagagggaaaggt

SEQ ID NO: 478081 - DNA, 120 bp, Artificial Sequence
  ENSG00000160633_39 (sequence is synthesized)
gaaacttgactgtgaggaaggatgcttgcctagcaattggtcggatgaagggctccatttgatacttccttcactgtggaaggaagaaatttgtaaaaattatttccagaatatgcacac

SEQ ID NO: 478082 - DNA, 120 bp, Artificial Sequence
  ENSG00000160633_40 (sequence is synthesized)
attaaaggtttataaacctgacctttctttagtagaagacagtaagagaatactgttggctctgggaactaaccatttgagctgtgggacccagggaatctctcttgtaagcatcatctt

SEQ ID NO: 478083 - DNA, 120 bp, Artificial Sequence
  ENSG00000160633_41 (sequence is synthesized)
tagtgggtgactcctggtggccctcccagctctggtggtgctgtggggacctgccttggagatgccttggtactagtaccttttttgtaccaggccatgagcctagggcacagggcctct

SEQ ID NO: 478084 - DNA, 120 bp, Artificial Sequence
  ENSG00000160633_42 (sequence is synthesized)
ggcctgcagatttcaggaaggcagctgtgttgtgtgaaccgatacagcctgccagcacttctgtcccgagtgactgtcgttgtcatcgttagcatgttgcctgaaaagccttggggtctg

SEQ ID NO: 478085 - DNA, 120 bp, Artificial Sequence
  ENSG00000160633_43 (sequence is synthesized)
gggcacagggtgggaaacacagagggattcactctccagaagccgccacagttattagcacaagagccagagatgggggcaatccaaatcagagatgtctctctttcaaggggcagacgt

SEQ ID NO: 478086 - DNA, 120 bp, Artificial Sequence
  ENSG00000160633_44 (sequence is synthesized)
aggatgtgctggggagtgatggaaagatggaggccgcgccttctctccttgggggagcacaggaggtgctctgctctcagtgctggaatgaggaatgaagagcactccagacaccgcctg

SEQ ID NO: 478087 - DNA, 120 bp, Artificial Sequence
  ENSG00000160633_45 (sequence is synthesized)
ctctctggtggtctggcccaggagttggacagtgggcgttcccgagttctctctgctgggaggaagctggacgtctatggtccctgtgcccaggtgtcttcctgggacccgctagttgtg

SEQ ID NO: 478088 - DNA, 120 bp, Artificial Sequence
  ENSG00000160633_46 (sequence is synthesized)
ggtacctgggggcctcaccaaagggagtggagtgggctaaatgtgccgtgggttccacgccgtgtgcgcaagttccctgtgtgaaagcacgtctgtcttccaggtggcgagagaagcatg

SEQ ID NO: 478089 - DNA, 120 bp, Artificial Sequence
  ENSG00000160633_47 (sequence is synthesized)
tttacaatccaaaacctaccaggatcatagagattggaaacccagccatatcaccagatctgtgaaagtggctcacttctcattttacaaaatgtattggtgagatgaaagtatctcatg

SEQ ID NO: 478090 - DNA, 120 bp, Artificial Sequence
  ENSG00000160633_48 (sequence is synthesized)
cctttttgaatatcaacagcattgaatcatacatagagaaagagttccagatgcctctcttgagagctaatacctctgcacccacaaaacagatcttgtgatattgggcagtagcttaat

SEQ ID NO: 478091 - DNA, 120 bp, Artificial Sequence
  ENSG00000160633_49 (sequence is synthesized)
cgggttttccaatctctgtgtagctagcagttctcttcgtgttagtgtggcagccgtgccagttccacatttgtgattgctttatttccctggtaattaaaccttgtgccattctattcc

SEQ ID NO: 478092 - DNA, 120 bp, Artificial Sequence
  ENSG00000160633_50 (sequence is synthesized)
gcggccgctaccccgaccactcggtggacaggagagaaggttcaaggtcaatgatgggagaacgagaaggacaggtaagtctgaagctacagtggtagccacagaatttcccatagaatg

SEQ ID NO: 478093 - DNA, 120 bp, Artificial Sequence
  ENSG00000160633_51 (sequence is synthesized)
tctttgagcaagaggcaaaatgaggaaagagaaaagtaaagcactagaaaagtctaggtttgtggaatggaaatttgggattatttggggttagtcttggctgtcagtccaaacagttac

SEQ ID NO: 478094 - DNA, 120 bp, Artificial Sequence
  ENSG00000160633_52 (sequence is synthesized)
tctgaagctgtttttagccttgaccctggggttctgtgtgccacactcaccacacatgtgcaacagtgccagggaaccttgggatgtgacctggctctgctgggaagtgtctagtgagcc

SEQ ID NO: 478095 - DNA, 120 bp, Artificial Sequence
  ENSG00000160633_53 (sequence is synthesized)
tcaacctaccatggttgtgttcttaaattcttcctaattacctttagcccagcagaattaattaactcctgtgggtctgaaatcttatggttaggtcagattttcaatacaagtttgtcg

SEQ ID NO: 478096 - DNA, 120 bp, Artificial Sequence
  ENSG00000160633_54 (sequence is synthesized)
gggtatcattttttcagaactaaatttcgggtaggtatgcaacctcagcacgaattttatggttttgagtttgtttcctccatgctgcttccttgtggagtgacattgtcttttgtctct

SEQ ID NO: 478097 - DNA, 120 bp, Artificial Sequence
  ENSG00000160654_0 (sequence is synthesized)
agtctagctgctgcacaggctggctggctggctggctgctaagggctgctccacgcttttgccggaggacagagactgacatggaacaggggaagggcctggctgtcctcatcctggcta

SEQ ID NO: 478098 - DNA, 120 bp, Artificial Sequence
  ENSG00000160654_1 (sequence is synthesized)
tcattcttcttcaaggtactttggcccagtcaatcaaaggaaaccacttggttaaggtgtatgactatcaagaagatggttcggtacttctgacttgtgatgcagaagccaaaaatatca

SEQ ID NO: 478099 - DNA, 120 bp, Artificial Sequence
  ENSG00000160654_2 (sequence is synthesized)
catggtttaaagatgggaagatgatcggcttcctaactgaagataaaaaaaaatggaatctgggaagtaatgccaaggaccctcgagggatgtatcagtgtaaaggatcacagaacaagt

SEQ ID NO: 478100 - DNA, 120 bp, Artificial Sequence
  ENSG00000160654_3 (sequence is synthesized)
caaaaccactccaagtgtattacagaatgtgtcagaactgcattgaactaaatgcagccaccatatctggctttctctttgctgaaatcgtcagcattttcgtccttgctgttggggtct

SEQ ID NO: 478101 - DNA, 120 bp, Artificial Sequence
  ENSG00000160654_4 (sequence is synthesized)
acttcattgctggacaggatggagttcgccagtcgagagcttcagacaagcagactctgttgcccaatgaccagctctaccagcccctcaaggatcgagaagatgaccagtacagccacc

SEQ ID NO: 478102 - DNA, 120 bp, Artificial Sequence
  ENSG00000160654_5 (sequence is synthesized)
ttcaaggaaaccagttgaggaggaattgaactcaggactcagagtagtccaggtgttctcctcctattcagttcccagaatcaaagcaatgcattttggaaagctcctagcagagagact

SEQ ID NO: 478103 - DNA, 120 bp, Artificial Sequence
  ENSG00000160654_6 (sequence is synthesized)
ttcagccctaaatctagactcaaggttcccagagatgacaaatggagaagaaaggccatcagagcaaatttgggggtttctcaaataaaataaaaataaaaacaaatactgtgtttcaga

SEQ ID NO: 478104 - DNA, 120 bp, Artificial Sequence
  ENSG00000160654_7 (sequence is synthesized)
agcgccacctattggggaaaattgtaaaagaaaaatgaaaagatcaaataaccccctggatttgaatataattttttgtgttgtaatttttatttcgtttttgtataggttataattcac

SEQ ID NO: 478105 - DNA, 120 bp, Artificial Sequence
  ENSG00000160654_8 (sequence is synthesized)
gttataattcacatggctcaaatattcagtgaaagctctccctccaccgccatcccctgctacccagtgaccctgttgccctcttcagagacaaattagtttctcttttttttttttttt

SEQ ID NO: 478106 - DNA, 120 bp, Artificial Sequence
  ENSG00000160654_9 (sequence is synthesized)
ttcttatatatctctctggaggtattctaggcatatatgagcacattctcaagtacatattatcctcccttcccctatcttttagacaaatgatatcaaactatacatcttgtgagatta

SEQ ID NO: 478107 - DNA, 120 bp, Artificial Sequence
  ENSG00000160654_10 (sequence is synthesized)
ttgcataccattatatgaagataccattatatcctttttaatgcaaccatattgtacaaatagactatgatttatttaacctgttatctatcagtggatatttaagttggtagttggttc

SEQ ID NO: 478108 - DNA, 120 bp, Artificial Sequence
  ENSG00000160654_11 (sequence is synthesized)
caatcttttgctcttacaacaattctgcaatgactaacattgtataaatatcatttttaaaaataattgcattgaagcataatgtacatgccataaaatccacccatcttaagtgatttc

SEQ ID NO: 478109 - DNA, 120 bp, Artificial Sequence
  ENSG00000160654_12 (sequence is synthesized)
aatccacccatcttaagtgatttcacctgttctcagaaatttttagtaaatttaactaattgtacagccattaccataatccagctttaggacattttcttttttttcttttcttttctt

SEQ ID NO: 478110 - DNA, 72 bp, Artificial Sequence
  ENSG00000160654_13 (sequence is synthesized)
ttcattttttgtgtatttagtatttgtgtatctagtatttgtgtacttagtagagacagggtttcaccatgt

SEQ ID NO: 478111 - DNA, 87 bp, Artificial Sequence
  ENSG00000160654_14 (sequence is synthesized)
gtaactgtattttaatatagccattctatggatttaatatggtattttattatggccttaatttgcatttccctagatactaaccat

SEQ ID NO: 478112 - DNA, 120 bp, Artificial Sequence
  ENSG00000160654_15 (sequence is synthesized)
tattatggccttaatttgcatttccctagatactaaccatgctgagtgtcctgtcttgtgtttattaaccattcatatatttttagtgaaatgtgtatcaaatcttttgcccatttttaa

SEQ ID NO: 478113 - DNA, 120 bp, Artificial Sequence
  ENSG00000160654_16 (sequence is synthesized)
gttgacttatttgtttgtcttcttactattgggttgcatatgtttttgatataagtcctttatcagatatatgatttggaaatattttctaccaatctgtggtttgtttttcttaatggt

SEQ ID NO: 478114 - DNA, 120 bp, Artificial Sequence
  ENSG00000160654_17 (sequence is synthesized)
gtcttttgaagtgcaaaaggtttgaattttgaagtacattttattgattttttcttctatatattgtgcttttggtatcatgtctaataaatctttaccaaacccacagttacaaagatt

SEQ ID NO: 478115 - DNA, 120 bp, Artificial Sequence
  ENSG00000160654_18 (sequence is synthesized)
ttctcctgtcttctttttatactttttacagctttatggttttagctctaacaataaatgtgattttgaacatacataagactatttgtaacaaacacaaataaattgaattgttgggca

SEQ ID NO: 478116 - DNA, 120 bp, Artificial Sequence
  ENSG00000160654_19 (sequence is synthesized)
tcgccagtcgagaggtaaaagaatgctcttagatgagagatgggaccacctgagaccctcagctttcctcctaccattatgtacccaatggaagagactgagttggtgcttcttgctagt

SEQ ID NO: 478117 - DNA, 120 bp, Artificial Sequence
  ENSG00000160654_20 (sequence is synthesized)
gtgcatagttgggtgaggctgtatttctctgagacaggagaaaggatacttggtgttatcacagcatgttcacctgtctcaagatacagctccctctgtgaaaaaaaaaaaaaacaaaaa

SEQ ID NO: 478118 - DNA, 120 bp, Artificial Sequence
  ENSG00000160654_21 (sequence is synthesized)
ggaggacagagactgacatggaacaggggaagggcctggctgtcctcatcctggctatcattcttcttcaaggtactttggcccagtcaatcaaaggagaagcaggaccctagtagctag

SEQ ID NO: 478119 - DNA, 120 bp, Artificial Sequence
  ENSG00000160654_22 (sequence is synthesized)
tcattcttcttcaaggtactttggcccagtcaatcaaaggtaggagaaatggcttctttctatactcagactcagaatattgacggaaatttggcttcctacaacagtagtcctacagga

SEQ ID NO: 478120 - DNA, 120 bp, Artificial Sequence
  ENSG00000160654_23 (sequence is synthesized)
gcgaacagtttagaatgaatgaaatgacggggatagagaggtgatgtctctattgtcaaccaaatcagtgacctgacataacctgttccgggcagcttgcctgtagctaagcatttaact

SEQ ID NO: 478121 - DNA, 120 bp, Artificial Sequence
  ENSG00000160654_24 (sequence is synthesized)
ggtctcttacaggagaagcaggaccctagtagctagggacacatctcaaactgtgacccatgaaccagtaggtattggcgtcacctgggatcctgacgttagtctctgtcaatccttctc

SEQ ID NO: 478122 - DNA, 120 bp, Artificial Sequence
  ENSG00000160654_25 (sequence is synthesized)
tttagttcatctattctacccaaagtgatctcatcatctggtatgctgttagcagtttcttacctgtatagtatcttccaaataacatgccccaaaatcccaaagttttacccctactaa

SEQ ID NO: 478123 - DNA, 120 bp, Artificial Sequence
  ENSG00000160654_26 (sequence is synthesized)
cctgaaattttaacaagatccccatgtgattcatgtgcacatcaaagtttgagaaacactactctaatgatctcctggtatgcagaagcagggagaatttcagaggcaagatccttaata

SEQ ID NO: 478124 - DNA, 120 bp, Artificial Sequence
  ENSG00000160654_27 (sequence is synthesized)
tgtattacagaagtatgtaatcccctttggtctgtttgttgtgaaattaatcagtatttgctgttctggtgagctttttatctggggtgaaagtggaaatagatcctcaacagtaatatt

SEQ ID NO: 478125 - DNA, 120 bp, Artificial Sequence
  ENSG00000160654_28 (sequence is synthesized)
atcgcctgttctcttaatttcagcttgcctcttttaaaatactgtaagatacttccctcaccctattgaaaaactacagccagtcctgtaaaattttgtttacctttgggtgggctccat

SEQ ID NO: 478126 - DNA, 120 bp, Artificial Sequence
  ENSG00000160678_0 (sequence is synthesized)
ggactgttgaagacaggtctccacacacagctccagcagccacatttgcaaccttggccatctgtccagaacctgctcccacctcaggcccaggccaaccgtgcactgctgcaatgggct

SEQ ID NO: 478127 - DNA, 120 bp, Artificial Sequence
  ENSG00000160678_1 (sequence is synthesized)
ctgagctggagacggcgatggagaccctcatcaacgtgttccacgcccactcgggcaaagagggggacaagtacaagctgagcaagaaggagctgaaagagctgctgcagacggagctct

SEQ ID NO: 478128 - DNA, 120 bp, Artificial Sequence
  ENSG00000160678_2 (sequence is synthesized)
ctctcacagtggcctgtaacaatttcttctgggagaacagttgagcagacagccacattgggcagcgcccttcctctccaccctcccagacctgcctcttccccctgcttccacctcacc

SEQ ID NO: 478129 - DNA, 120 bp, Artificial Sequence
  ENSG00000160678_3 (sequence is synthesized)
ccacttatccctctccataaccccacccttgcccaccccacccccacccccaccaagggcgcaagagtagcggtccaagcctgcaactcatctttcattaaaggcttctctctcaccagc

SEQ ID NO: 478130 - DNA, 120 bp, Artificial Sequence
  ENSG00000160678_4 (sequence is synthesized)
gtcagcgggggagggactgttgaagacaggtctccacacacagctccagcagccacatttgcaaccttggccatctgtccagaacctgctcccacctcaggcccaggccaaccgtgagta

SEQ ID NO: 478131 - DNA, 120 bp, Artificial Sequence
  ENSG00000160678_5 (sequence is synthesized)
ccctgccccactgggctagtccctggcctgccagcttcagggagaggggtcttcagaagggctccaagaggctggggaccatagcactgtggagcactgaggatctgggaggagtcagtc

SEQ ID NO: 478132 - DNA, 120 bp, Artificial Sequence
  ENSG00000160678_6 (sequence is synthesized)
agggtgagggcagtttgggatttgggggagacagggtttggaaggtggtgatgagagacaaatgaactgaaggtcggagagagagctggcagctcagcaaaggaggaagccagtggggaa

SEQ ID NO: 478133 - DNA, 120 bp, Artificial Sequence
  ENSG00000160678_7 (sequence is synthesized)
cccaccatgagcttcctgaccgcctggccctcccacagggagccctcaagtccctgccaaggccccctctgtctcccaggtgttgggaagggtcccagccctcccctgcctcgcctcctg

SEQ ID NO: 478134 - DNA, 120 bp, Artificial Sequence
  ENSG00000160678_8 (sequence is synthesized)
tggggtaagaagagagcagatacaacagctgtttctgcccccacctctcctgccagccttagtctctgccacccccaccctgccttgccaagagctcaggtcccgggggagtctgggggt

SEQ ID NO: 478135 - DNA, 120 bp, Artificial Sequence
  ENSG00000160678_9 (sequence is synthesized)
ggcagggcaaagctcccatgatatggggaagcagagatgtagggtgctgtgccccttcccaactcgacctccacaggacctcccctttctcctcctcccatttttggcccagacctcttg

SEQ ID NO: 478136 - DNA, 120 bp, Artificial Sequence
  ENSG00000160678_10 (sequence is synthesized)
actcctctttccccccattcttacctctttgtttccccatctcccctgcccccaagtcctctcagaactgccaccacgtaaaatcccaggctgctttagggctccaggtgacctccagct

SEQ ID NO: 478137 - DNA, 120 bp, Artificial Sequence
  ENSG00000160678_11 (sequence is synthesized)
gcccctctggcatggagcaggtaatcaagctaccagcacccctccctcaagcaccccttatcccctcatcagccacagcttgggttccatctcccccatgtctctgtgacaactgcttct

SEQ ID NO: 478138 - DNA, 120 bp, Artificial Sequence
  ENSG00000160678_12 (sequence is synthesized)
caggtccggagttcagatgacactcacaagggccccattgaagaactgggatgtcattcgatcaggggccattgtccagccccctaggcctggggaaggatggggacatctgatccgaga

SEQ ID NO: 478139 - DNA, 120 bp, Artificial Sequence
  ENSG00000160678_13 (sequence is synthesized)
cacctgagctgccccctctggggttgtggaaggccagactgtcccagggccaagggaaagaggccccccggcttggcagtcttctctctcaacagaccactcctttctcctttcttctcc

SEQ ID NO: 478140 - DNA, 120 bp, Artificial Sequence
  ENSG00000160678_14 (sequence is synthesized)
aatcaaccaggagtgagcagttgcagggacaacgcctgcaggtctcctctcccactccctgggaactctggctccaaggaaaaggctcagacattcctctctccccttctgccacccacc

SEQ ID NO: 478141 - DNA, 120 bp, Artificial Sequence
  ENSG00000160678_15 (sequence is synthesized)
agatggaagggataattttgcagaggcaatgggagcatatcccaaagaagccaaaatgacatgttcaggagagaacagagttgaaggaccaaaaggggcccccagctgctgacaggaaac

SEQ ID NO: 478142 - DNA, 120 bp, Artificial Sequence
  ENSG00000160678_16 (sequence is synthesized)
tcagagtcagtgagacctccctcccccagaaggcgtacgccacccactggggctgccatcccctctaccaggctgaccgagggtaccagactgactccttgctaggggtgggcagcagaa

SEQ ID NO: 478143 - DNA, 120 bp, Artificial Sequence
  ENSG00000160678_17 (sequence is synthesized)
ggaaggctgtagtggacaccccagcccaccaccctcaacagcagagcttggctatgctagacaggcaaggtccagggtaaaaatagagccagaggaagcatggcccagtcctgtgaccac

SEQ ID NO: 478144 - DNA, 120 bp, Artificial Sequence
  ENSG00000160678_18 (sequence is synthesized)
ccctgcctgccccaccctcctcaatccctgcctgggcagccactgcagacatctaccacaggcctctggagccagcccagctccaactgctctctctccatgccccaaccctgattccct

SEQ ID NO: 478145 - DNA, 120 bp, Artificial Sequence
  ENSG00000160678_19 (sequence is synthesized)
ctggctggggtacagactgagggacacagagaacaggcctgcacttaggtctcttggggtttccctcacattgtaaaatctcagggaaagatcaattgcagtagggctctaatcccacag

SEQ ID NO: 478146 - DNA, 120 bp, Artificial Sequence
  ENSG00000160678_20 (sequence is synthesized)
ctatttgagctgtcagccagggccagtcctgagggttcccctcacctagaccccaggtactccgggcctggtcctcagctcacttccatgatgggggtgggtaggtgcactgctgcaatg

SEQ ID NO: 478147 - DNA, 120 bp, Artificial Sequence
  ENSG00000160678_21 (sequence is synthesized)
ggggtgcactgctgcaatgggctctgagctggagacggcgatggagaccctcatcaacgtgttccacgcccactcgggcaaagagggggacaagtacaagctgagcaagaaggagctgaa

SEQ ID NO: 478148 - DNA, 120 bp, Artificial Sequence
  ENSG00000160678_22 (sequence is synthesized)
ctagaagagtcccataattcaatgcagttcctctcgctcatctttgcctcctgctcctcaaccacccccttgcctctgactcagtgctgtacccttccctatacacctccctcttcctct

SEQ ID NO: 478149 - DNA, 120 bp, Artificial Sequence
  ENSG00000160678_23 (sequence is synthesized)
cctcccaccacaggcccagaaggatgtggatgctgtggacaaggtgatgaaggagctagacgagaatggagacggggaggtggacttccaggagtatgtggtgcttgtggctgctctcac

SEQ ID NO: 478150 - DNA, 120 bp, Artificial Sequence
  ENSG00000160678_24 (sequence is synthesized)
cctcagagaaccccaggctgaggccccacacacagagggggatccaggttgagacccccagagaagagtcctggattgaaatccctctgtgggttctcagactcccaagactaagtttct

SEQ ID NO: 478151 - DNA, 120 bp, Artificial Sequence
  ENSG00000160678_25 (sequence is synthesized)
cactgagggtcctctcagtgaggccccatggaggagccacagactaagaccccctcagcagaattccccccttaccgggctcaaccagcacagccagccacagctccagcagccacattt

SEQ ID NO: 478152 - DNA, 120 bp, Artificial Sequence
  ENSG00000160679_0 (sequence is synthesized)
gtggcggccattttgttttggacaccgagcaggagctggcggccgctgcagacgaaaggcaggaaagggcaggccgggtgagcagacggatcggccgactagacagccaaccagcaacaa

SEQ ID NO: 478153 - DNA, 120 bp, Artificial Sequence
  ENSG00000160679_1 (sequence is synthesized)
cgaactgagctcgcatactaccgcttacgcatctaaccaaccgcccatctagctaacccgagcccctccaccgtcaactcaggttcggccggtccccggcccgcctgccggagccgtggt

SEQ ID NO: 478154 - DNA, 120 bp, Artificial Sequence
  ENSG00000160679_2 (sequence is synthesized)
ggcagccccgggaggagcactggcgtctgtttccttcgattctcgggattcgaagatggctgcacagtcagcgccgaaagttgtgctaaaaagcaccaccaagatgtctctaaatgagcg

SEQ ID NO: 478155 - DNA, 120 bp, Artificial Sequence
  ENSG00000160679_3 (sequence is synthesized)
ctttactaatatgctgaagaacaaacagccgacgccagtgaatattcgggcttcgatgcagcaacaacagcagctagccagtgccagaaacagaagactggcccagcagatggagaatag

SEQ ID NO: 478156 - DNA, 120 bp, Artificial Sequence
  ENSG00000160679_4 (sequence is synthesized)
accctctgtccaggcagcattaaaacttaagcagagcttaaagcagcgcctgggtaagagtaacatccaggcacggttaggccgacccataggggccctggccaggggagcaatcggagg

SEQ ID NO: 478157 - DNA, 120 bp, Artificial Sequence
  ENSG00000160679_5 (sequence is synthesized)
acgaggcctacccataatccagagaggcttgcccagaggaggactacgtgggggacgtgccaccagaaccctacttaggggcgggatgtcactccgaggtcaaaacctgctccgaggtgg

SEQ ID NO: 478158 - DNA, 120 bp, Artificial Sequence
  ENSG00000160679_6 (sequence is synthesized)
acgagccgtagctccccgaatgggcttaagaagaggtggtgttcgaggtcgtggaggtcctgggagagggggcctagggcgtggagctatgggtcgtggcggaatcggtggtagaggtcg

SEQ ID NO: 478159 - DNA, 120 bp, Artificial Sequence
  ENSG00000160679_7 (sequence is synthesized)
gggtatgataggtcggggaagagggggctttggaggccgaggccgaggccgtggacgagggagaggtgcccttgctcgccctgtattgaccaaggagcagctggacaaccaattggatgc

SEQ ID NO: 478160 - DNA, 120 bp, Artificial Sequence
  ENSG00000160679_8 (sequence is synthesized)
ggatgcctacatggcgcagacagatcccgaaaccaatgattgaagcctgcccatcctcccatgagagactcttgttagtcaacacatctgtaaataaccttgagataacagatgagaaga

SEQ ID NO: 478161 - DNA, 120 bp, Artificial Sequence
  ENSG00000160679_9 (sequence is synthesized)
aatctgattgatgctggatggacctatcacaataggctgtggacttacttgccaccagcttgtgcatttagtgtgttccttttactttttgatactgtgttgtatgaaacccttttgtcc

SEQ ID NO: 478162 - DNA, 120 bp, Artificial Sequence
  ENSG00000160679_10 (sequence is synthesized)
tttgatttggttttttgtttttgtttttttaggggggagggggggtttcccctcctttgcccagacttctctttgaacacaaatgcattagccttgtggctagaacaccctcttcctacc

SEQ ID NO: 478163 - DNA, 120 bp, Artificial Sequence
  ENSG00000160679_11 (sequence is synthesized)
tctgtctcccctcacttgtcatatgctctgacatgctaacatttcttttgttcatccctgttgcccccacagaaacatcccagaaaaaccggtcagtgttccttcctccctgatccttag

SEQ ID NO: 478164 - DNA, 120 bp, Artificial Sequence
  ENSG00000160679_12 (sequence is synthesized)
gtttctgaaatagggttctgttacatcctcttcgatagcctgtttaaaatgtttagaaggtctggagctcaaaaatgcgttcttccacattgataatttagtaaactgagaacattgaca

SEQ ID NO: 478165 - DNA, 120 bp, Artificial Sequence
  ENSG00000160679_13 (sequence is synthesized)
tcactacagggcagcataagaggttgcttacatgtggtagcagctctggtttgattcaagttgctaccatgtacattgacagcacatataccataaccagcgtgttgggttgaattgcac

SEQ ID NO: 478166 - DNA, 120 bp, Artificial Sequence
  ENSG00000160679_14 (sequence is synthesized)
tttctacctttgtatgagatttacagactttccttctgggtttgtatcatgaccagaggggtactatagggttggtttatactgcaatatagaggatcagaagccatttgatttggtagg

SEQ ID NO: 478167 - DNA, 120 bp, Artificial Sequence
  ENSG00000160679_15 (sequence is synthesized)
tgtgtcagaagggagaatgatggcagacgaactgctggaagaggtcagaagatagccatgctaaaatgcaattatatcctcatgtttatcccaaactaatcttggacttttccactcatt

SEQ ID NO: 478168 - DNA, 120 bp, Artificial Sequence
  ENSG00000160679_16 (sequence is synthesized)
agctttgttttgcccttgtttcccttgaaggtttaagttcaaccatattctgtcaactgttcagtttcagtggaatcttgtatttctggttcattataacaaactgttcgcttaaatcca

SEQ ID NO: 478169 - DNA, 120 bp, Artificial Sequence
  ENSG00000160679_17 (sequence is synthesized)
ccaacagcaacttcaactccttcctaagaaaacattacttaacttggccctggggtccaatgcacaaagccaattttaagctaaataccaacagaaggctacagacctctgttcttagtt

SEQ ID NO: 478170 - DNA, 120 bp, Artificial Sequence
  ENSG00000160679_18 (sequence is synthesized)
gcatctcatgtggtacacaaaacaaattgggcggttgtttcaaaaccccttatcagtagacttttatgttaagctgtctgaagtatttatttggtgggatgtattttaaaagactcctaa

SEQ ID NO: 478171 - DNA, 120 bp, Artificial Sequence
  ENSG00000160679_19 (sequence is synthesized)
cactcttccttttcacatttttttacgttgatactggggtcgtgcagcacggtagcatggtaccctggctacagtaggcttgctgcccagtccaaggccagcagtgttgtgtctggcctg

SEQ ID NO: 478172 - DNA, 120 bp, Artificial Sequence
  ENSG00000160679_20 (sequence is synthesized)
taagaggcaggtagcaagccatgaatatgtccaaaggcccttgaatgtcattcttgggccttgtaagaggcactcgctttgctccatttcactttctttccattctgcttttagtttggt

SEQ ID NO: 478173 - DNA, 120 bp, Artificial Sequence
  ENSG00000160679_21 (sequence is synthesized)
tttgttttggattcttctacagttaagtgttcttctcttccattccattatacttccttgacagaaataatgagtctcttcacaggctcataaatgatcaaactgatgtaactttgaaaa

SEQ ID NO: 478174 - DNA, 120 bp, Artificial Sequence
  ENSG00000160679_22 (sequence is synthesized)
gtaactacttggagtcagaaaaagtgatgattggagactaagaaaagtaaagatattcaaaggcagtttctatctctgacaactttgttcattaagagtgcctttgtttaggcgcggtgg

SEQ ID NO: 478175 - DNA, 67 bp, Artificial Sequence
  ENSG00000160679_23 (sequence is synthesized)
aggcggacagagtgaggctccgtttcaaaaaaaagaatgcctttgatcagtgatttcattaagttga

SEQ ID NO: 478176 - DNA, 120 bp, Artificial Sequence
  ENSG00000160679_24 (sequence is synthesized)
aaaaaaagaatgcctttgatcagtgatttcattaagttgactttcgaccactgaaatttacttaatgtctatttttgcctcttctgaggcatatgtgcttctctccttatctctttggct

SEQ ID NO: 478177 - DNA, 120 bp, Artificial Sequence
  ENSG00000160679_25 (sequence is synthesized)
atgataagctaattatttatgtttgcataatatttatgtttgcatgttagtgacatatattttaaaatgtgatacactcctgtaatttatgagagtatgttcattgctgtgagctttgaa

SEQ ID NO: 478178 - DNA, 120 bp, Artificial Sequence
  ENSG00000160679_26 (sequence is synthesized)
ggtgctctaatccttcctcatatttggccttagaatgcacctcggatcccccaaggtttaggctttcttcatttgtctttgaaactatatcttctgtctcttgtcatatctgcttattgc

SEQ ID NO: 478179 - DNA, 120 bp, Artificial Sequence
  ENSG00000160679_27 (sequence is synthesized)
gtgtttttcataccttccacctctctaaaagccgttacctgagccctcgttatcacttttggttgaatgtgctgcacttagctgcatttctaagtttctgattcttgcaagtttgtggaa

SEQ ID NO: 478180 - DNA, 120 bp, Artificial Sequence
  ENSG00000160679_28 (sequence is synthesized)
acagaggagtctttaacccacatcagccttgatctaagtgtaccactttacttaaaagttcgtgggatctggagctcctggtctagcaagccatgaaaatgccaataaatgtttgtaata

SEQ ID NO: 478181 - DNA, 120 bp, Artificial Sequence
  ENSG00000160679_29 (sequence is synthesized)
ggacacgtttgtttaacatctttaagcctgaatttgtattaatataataacttctgaaatcacatatttttaatagtgctgcatgtcttttatcaataccattccttttctgataatgtg

SEQ ID NO: 478182 - DNA, 120 bp, Artificial Sequence
  ENSG00000160679_30 (sequence is synthesized)
caatggtgagaggctatgacctgcgtaacaacaggtaattcatgtcatctccattccattttaaaacaccctgctgttgcttgaatcaaagcacattcaagttctagaaacaagtcaaac

SEQ ID NO: 478183 - DNA, 120 bp, Artificial Sequence
  ENSG00000160679_31 (sequence is synthesized)
ataagaaatttataggtcttttggcctatatctctttgttcctggtgctagtaaaacactgatacagctggaaaaagaggacaagttgacccacagcacttacctatatatgttcatttg

SEQ ID NO: 478184 - DNA, 120 bp, Artificial Sequence
  ENSG00000160679_32 (sequence is synthesized)
gggcactattactctgttccctgtatagttcttgttccctagaagaatctgttgagatcaggaaccatagcatttatttttaaatttaccataatgctaggcatctatctgattattcag

SEQ ID NO: 478185 - DNA, 120 bp, Artificial Sequence
  ENSG00000160679_33 (sequence is synthesized)
tagatatttattaaatgtatgtacttactaattgaattaactcccaacttccaaaaatggatttgtggtcagacttgttgaattgattgaataaagagtagcttaatctgttcacagtat

SEQ ID NO: 478186 - DNA, 120 bp, Artificial Sequence
  ENSG00000160679_34 (sequence is synthesized)
gcagcttgccccagccaacctaaaaactaactgaattaccttcatttaaccctcaccgccttcctttggttagaatctactttgtgtctcttggatttacctgcatatacattgtatgcc

SEQ ID NO: 478187 - DNA, 120 bp, Artificial Sequence
  ENSG00000160679_35 (sequence is synthesized)
agccacctttctgcacagcttcaagtcataggcaggcttctttgtttgtcttgttttgttatttgaaactggcttatttttcaaattaccatgctggtagtgcaaaagtctcatgatttt

SEQ ID NO: 478188 - DNA, 120 bp, Artificial Sequence
  ENSG00000160679_36 (sequence is synthesized)
tccaagaatcaatcaagtgcatattatagagccagattatatgccatcttcctccaagctcttgcaaatttaaattgtatagttgaaaataccccccaaaatggtcagtttagggttttg

SEQ ID NO: 478189 - DNA, 120 bp, Artificial Sequence
  ENSG00000160679_37 (sequence is synthesized)
cctttctctgcccctgtcccaccaccatcaccaccacataccaccctgtagctccaaatcctggtttgagtcacatgagaatatagaagagagagagagatacaaagatgaagtagagtt

SEQ ID NO: 478190 - DNA, 120 bp, Artificial Sequence
  ENSG00000160679_38 (sequence is synthesized)
aagagggtggtgagacttggagctgggcattggctctgaaaccaaataaattcaatgtcacatttggtgcctgtggagaaccagagatgactttttttgcttaaggtagagagcaagatg

SEQ ID NO: 478191 - DNA, 120 bp, Artificial Sequence
  ENSG00000160679_39 (sequence is synthesized)
gaattattatcagttaactaactggctcttattgataatcttgcctttgaaatttattgatgtttgtcttgtgacctcatgacccagattgggaaagagtttaatgatgttgctgctgtt

SEQ ID NO: 478192 - DNA, 120 bp, Artificial Sequence
  ENSG00000160679_40 (sequence is synthesized)
aatactaaatctcatgggagccttctggtttagagcttagtggaaaactcccaacacctgtccagaaaaaaaacactattgaagcccctgtgtatatttgctttggttctcttaaaaggt

SEQ ID NO: 478193 - DNA, 120 bp, Artificial Sequence
  ENSG00000160679_41 (sequence is synthesized)
gtcttgggtcttccataacttatgaccttgaagttgccaaggaataataactgttaggaaagaaaagttgataaccaagggcttgttttcttctctcccattatatgatacttactgagt

SEQ ID NO: 478194 - DNA, 120 bp, Artificial Sequence
  ENSG00000160679_42 (sequence is synthesized)
gaagtgcaagctagtttgggtttcaggatgaaataacatgtttccaaattatcttgacttggatcctgagagacatcacgagggtgggagagactaaaatagcttttcaaaaagctgagt

SEQ ID NO: 478195 - DNA, 120 bp, Artificial Sequence
  ENSG00000160683_0 (sequence is synthesized)
ctctcaacataagacagtgaccagtctggtgactcacagccggcacagccatgaactacccgctaacgctggaaatggacctcgagaacctggaggacctgttctgggaactggacagat

SEQ ID NO: 478196 - DNA, 120 bp, Artificial Sequence
  ENSG00000160683_1 (sequence is synthesized)
tggacaactataacgacacctccctggtggaaaatcatctctgccctgccacagaggggcccctcatggcctccttcaaggccgtgttcgtgcccgtggcctacagcctcatcttcctcc

SEQ ID NO: 478197 - DNA, 120 bp, Artificial Sequence
  ENSG00000160683_2 (sequence is synthesized)
tgggcgtgatcggcaacgtcctggtgctggtgatcctggagcggcaccggcagacacgcagttccacggagaccttcctgttccacctggccgtggccgacctcctgctggtcttcatct

SEQ ID NO: 478198 - DNA, 120 bp, Artificial Sequence
  ENSG00000160683_3 (sequence is synthesized)
tgccctttgccgtggccgagggctctgtgggctgggtcctggggaccttcctctgcaaaactgtgattgccctgcacaaagtcaacttctactgcagcagcctgctcctggcctgcatcg

SEQ ID NO: 478199 - DNA, 120 bp, Artificial Sequence
  ENSG00000160683_4 (sequence is synthesized)
ccgtggaccgctacctggccattgtccacgccgtccatgcctaccgccaccgccgcctcctctccatccacatcacctgtgggaccatctggctggtgggcttcctccttgccttgccag

SEQ ID NO: 478200 - DNA, 120 bp, Artificial Sequence
  ENSG00000160683_5 (sequence is synthesized)
agattctcttcgccaaagtcagccaaggccatcacaacaactccctgccacgttgcaccttctcccaagagaaccaagcagaaacgcatgcctggttcacctcccgattcctctaccatg

SEQ ID NO: 478201 - DNA, 120 bp, Artificial Sequence
  ENSG00000160683_6 (sequence is synthesized)
tggcgggattcctgctgcccatgctggtgatgggctggtgctacgtgggggtagtgcacaggttgcgccaggcccagcggcgccctcagcggcagaaggcagtcagggtggccatcctgg

SEQ ID NO: 478202 - DNA, 120 bp, Artificial Sequence
  ENSG00000160683_7 (sequence is synthesized)
tgacaagcatcttcttcctctgctggtcaccctaccacatcgtcatcttcctggacaccctggcgaggctgaaggccgtggacaatacctgcaagctgaatggctctctccccgtggcca

SEQ ID NO: 478203 - DNA, 120 bp, Artificial Sequence
  ENSG00000160683_8 (sequence is synthesized)
tcaccatgtgtgagttcctgggcctggcccactgctgcctcaaccccatgctctacactttcgccggcgtgaagttccgcagtgacctgtcgcggctcctgacgaagctgggctgtaccg

SEQ ID NO: 478204 - DNA, 120 bp, Artificial Sequence
  ENSG00000160683_9 (sequence is synthesized)
gccctgcctccctgtgccagctcttccctagctggcgcaggagcagtctctctgagtcagagaatgccacctctctcaccacgttctaggtcccagtgtccccttttattgctgcttttc

SEQ ID NO: 478205 - DNA, 120 bp, Artificial Sequence
  ENSG00000160683_10 (sequence is synthesized)
cttggggcaggcagtgatgctggatgctccttccaacaggagctgggatcctaagggctcaccgtggctaagagtgtcctaggagtatcctcatttggggtagctagaggaaccaacccc

SEQ ID NO: 478206 - DNA, 120 bp, Artificial Sequence
  ENSG00000160683_11 (sequence is synthesized)
catttctagaacatccctgccagctcttctgccggccctggggctaggctggagcccagggagcggaaagcagctcaaaggcacagtgaaggctgtccttacccatctgcacccccctgg

SEQ ID NO: 478207 - DNA, 120 bp, Artificial Sequence
  ENSG00000160683_12 (sequence is synthesized)
gctgagagaacctcacgcacctcccatcctaatcatccaatgctcaagaaacaacttctacttctgcccttgccaacggagagcgcctgcccctcccagaacacactccatcagcttagg

SEQ ID NO: 478208 - DNA, 120 bp, Artificial Sequence
  ENSG00000160683_13 (sequence is synthesized)
ggctgctgacctccacagcttcccctctctcctcctgcccacctgtcaaacaaagccagaagctgagcaccaggggatgagtggaggttaaggctgaggaaaggccagctggcagcagag

SEQ ID NO: 478209 - DNA, 120 bp, Artificial Sequence
  ENSG00000160683_14 (sequence is synthesized)
tgtggccttcggacaactcagtccctaaaaacacagacattctgccaggcccccaagcctgcagtcatcttgaccaagcaggaagctcagactggttgagttcaggtagctgcccctggc

SEQ ID NO: 478210 - DNA, 120 bp, Artificial Sequence
  ENSG00000160683_15 (sequence is synthesized)
tctgaccgaaacagcgctgggtccaccccatgtcaccggatcctgggtggtctgcaggcagggctgactctaggtgcccttggaggccagccagtgacctgaggaagcgtgaaggccgag

SEQ ID NO: 478211 - DNA, 120 bp, Artificial Sequence
  ENSG00000160683_16 (sequence is synthesized)
aagcaagaaagaaacccgacagagggaagaaaagagctttcttcccgaaccccaaggagggagatggatcaatcaaacccggcggtcccctccgccaggcgagatggggtggggtggaga

SEQ ID NO: 478212 - DNA, 120 bp, Artificial Sequence
  ENSG00000160683_17 (sequence is synthesized)
ctatagacccgaggaaactcagagtcggaacggagaaaggtggactggaaggggcccgtgggagtcatctcaaccatcccctccgtggcatcaccttaggcagggaagtgtaagaaacac

SEQ ID NO: 478213 - DNA, 120 bp, Artificial Sequence
  ENSG00000160683_18 (sequence is synthesized)
actgaggcagggaagtccccaggccccaggaagccgtgccctgcccccgtgaggatgtcactcagatggaaccgcaggaagctgctccgtgcttgtttgctcacctggggtgtgggaggc

SEQ ID NO: 478214 - DNA, 120 bp, Artificial Sequence
  ENSG00000160683_19 (sequence is synthesized)
ccgtccggcagttctgggtgctccctaccacctccccagcctttgatcaggtggggagtcagggacccctgcccttgtcccactcaagccaagcagccaagctccttgggaggccccact

SEQ ID NO: 478215 - DNA, 120 bp, Artificial Sequence
  ENSG00000160683_20 (sequence is synthesized)
ggggaaataacagctgtggctcacgtgagagtgtcttcacggcaggacaacgaggaagccctaagacgtcccttttttctctgagtatctcctcgcaagctgggtaatcgatgggggagt

SEQ ID NO: 478216 - DNA, 120 bp, Artificial Sequence
  ENSG00000160683_21 (sequence is synthesized)
ctgaagcagatgcaaagaggcaagaggctggattttgaattttctttttaataaaaaggcacctataaaacaggtcaatacagtacaggcagcacagagacccccggaacaagcctaaaa

SEQ ID NO: 478217 - DNA, 120 bp, Artificial Sequence
  ENSG00000160683_22 (sequence is synthesized)
attgtttcaaaataaaaaccaagaagatgtcttcacatattgtatttatatatttatatttatatatatatttatataatggtacaaaatggctgggggtgtggccatggatggagggaa

SEQ ID NO: 478218 - DNA, 120 bp, Artificial Sequence
  ENSG00000160683_23 (sequence is synthesized)
gagtaggctggcctgtggcgtgggtgggaggagaggggacggagagggcactcggcccgctgcaatctgacccctctctcctcagggcaggaaacacagagtcagacagtttgggggggt

SEQ ID NO: 478219 - DNA, 120 bp, Artificial Sequence
  ENSG00000160683_24 (sequence is synthesized)
cttgggccaggggtggagggctcaagggcacagggcccaggctgaggcagggcgggcaaagcgcctggcaggatgaagggcaagtggccccccaaacacagaggccctggccatggaccc

SEQ ID NO: 478220 - DNA, 120 bp, Artificial Sequence
  ENSG00000160683_25 (sequence is synthesized)
tgggaggtgaccggggtgagtcaggggcctgttgtcagccccagaggaagcgctggacctggccgatggtgggccgagaggacagcaccaggctgggagaagtggggcgagttccctttg

SEQ ID NO: 478221 - DNA, 120 bp, Artificial Sequence
  ENSG00000160683_26 (sequence is synthesized)
tattacagctgccagtgcaagaccaggccctccaggccaggaaggctagggacgggtcctggtagaagacaccctgtctagaatggcccttggtcctggaggtggggcgcaaaaggcctc

SEQ ID NO: 478222 - DNA, 120 bp, Artificial Sequence
  ENSG00000160683_27 (sequence is synthesized)
agccagggaactgccctgccacctcccgaggcaggaaaggaagtgagaaaaggagaagtttttttactcctggggccaaagtagggggacaaacacccagtcgtatatggcttcagctct

SEQ ID NO: 478223 - DNA, 120 bp, Artificial Sequence
  ENSG00000160683_28 (sequence is synthesized)
gaccaaaggcggatagggagctctcctgggtaggagcagggagccaagggggaggcagtggctgtgcctgggtgggcacagacagatctggtacatggccctgagccctgggcagaggga

SEQ ID NO: 478224 - DNA, 120 bp, Artificial Sequence
  ENSG00000160683_29 (sequence is synthesized)
caaccttgccggtgagtgggcaggcagagaggaggcggcaggatgctgtttccccgattccatcctcagggagtggagactggaggggaggtgcactgactcagatgaactgttctcccc

SEQ ID NO: 478225 - DNA, 120 bp, Artificial Sequence
  ENSG00000160683_30 (sequence is synthesized)
cttctttgataagaagtaggtggcagcagcctctggaaaagtcagggccctggaggttacctggcccagggctactacagccacaggccccagtggcaccatgccaccccttccatggct

SEQ ID NO: 478226 - DNA, 120 bp, Artificial Sequence
  ENSG00000160683_31 (sequence is synthesized)
ccactcaagggggccacacagccaccgcctcttcctcctttccttcatcccaaactgggacaaaagacttcaagttctggctaagatgtagcagcagcggatgcccgggcatccaaagtg

SEQ ID NO: 478227 - DNA, 120 bp, Artificial Sequence
  ENSG00000160683_32 (sequence is synthesized)
gaaagccagggccccgtgtcaccggtgtgggcaaacacacatgcacgtgcacacatgttctccctgaatcactcagcagcagacaggctgccgccctgggggtctcagccctgctagggc

SEQ ID NO: 478228 - DNA, 120 bp, Artificial Sequence
  ENSG00000160683_33 (sequence is synthesized)
tcaccaggtggaagcctaggtggtctgacctcagtttaggagtgggtcatttacgtcatcttaccatttggggacgagacaggaatggtatcccttagggacccagagacactgcaaaca

SEQ ID NO: 478229 - DNA, 120 bp, Artificial Sequence
  ENSG00000160683_34 (sequence is synthesized)
gtgggtggccatgtagggctgcatgtccctgggtccaggggaatggagggagcaataacttgaagaaggggggaagggtttcttttatccttttttttttgtgtgacttctatcaaaaca

SEQ ID NO: 478230 - DNA, 120 bp, Artificial Sequence
  ENSG00000160685_0 (sequence is synthesized)
tcacctgtctgaacctcagtttccttgtctgtgaaacagatgatgatcatacttcagagggttctggaagatgaaatgagtgtaaagtactcagaagggtgactggcatgcagtcatccc

SEQ ID NO: 478231 - DNA, 120 bp, Artificial Sequence
  ENSG00000160685_1 (sequence is synthesized)
tcaataagtattggctaaagttggtcctctttccccagacccctgtgggctgagcgctcttaatctcccctctacttgactctgcaggagaagatggggagccccgaggatgacctgatt

SEQ ID NO: 478232 - DNA, 120 bp, Artificial Sequence
  ENSG00000160685_2 (sequence is synthesized)
gggattccattcccggaccacagcagtgagctcctgagctgcctcaatgagcagcgccagctgggccacctatgtgacctcaccatccggacgcagggccttgaataccgcacccacagg

SEQ ID NO: 478233 - DNA, 120 bp, Artificial Sequence
  ENSG00000160685_3 (sequence is synthesized)
gctgtgctagctgcctgtagccactacttcaagaagcttttcactgagggcggtggcggagctgtcatgggggccgggggtagcgggacggccactgggggagcaggggccggtgtgtgt

SEQ ID NO: 478234 - DNA, 120 bp, Artificial Sequence
  ENSG00000160685_4 (sequence is synthesized)
gagctggactttgtagggccagaggcactaggcgccctccttgaatttgcctatacagccacactgaccaccagcagcgccaacatgccagctgtgctccaggctgcccgcctgctggag

SEQ ID NO: 478235 - DNA, 120 bp, Artificial Sequence
  ENSG00000160685_5 (sequence is synthesized)
atcccgtgtgtcatcgctgcttgcatggagattctgcagggcagtgggctagaagctcccagcccggacgaggatgactgtgagcgagcccgccagtatctggaggcctttgccacagcc

SEQ ID NO: 478236 - DNA, 120 bp, Artificial Sequence
  ENSG00000160685_6 (sequence is synthesized)
acggcctctggagttcccaatggtgaagacagtcctccacaggtgcccctcccaccacctccgccaccgccacctcggcctgttgcccgccgcagccgcaagccccggaaagctttcctg

SEQ ID NO: 478237 - DNA, 120 bp, Artificial Sequence
  ENSG00000160685_7 (sequence is synthesized)
caaaccaagggggccagagcaaaccacctagtccctgaggtgcccacagtgcccgcccatcccttgacctatgaggaggaggaggtggcgggcagagtgggcagcagtgggggcagtggg

SEQ ID NO: 478238 - DNA, 120 bp, Artificial Sequence
  ENSG00000160685_8 (sequence is synthesized)
agaggagctggtatatcccccagcctatgggctggcgcagggtggcgggcccccgctgtccccagaggagctgggctcagatgaggatgccatcgatcctgacctgatggcctacctaag

SEQ ID NO: 478239 - DNA, 120 bp, Artificial Sequence
  ENSG00000160685_9 (sequence is synthesized)
ctccctgcaccaggacaacctggcaccaggcctggacagccaagacaagctggtgcgcaaacgccgctcccagatgcctcaggagtgccctgtctgccacaagatcatccatggggcagg

SEQ ID NO: 478240 - DNA, 120 bp, Artificial Sequence
  ENSG00000160685_10 (sequence is synthesized)
caaactgcctcgccacatgaggacccacacaggcgagaagccctttgcctgcgaggtctgcggtgttcgattcaccaggaacgacaagctgaagatccacatgcggaagcacacgggaga

SEQ ID NO: 478241 - DNA, 120 bp, Artificial Sequence
  ENSG00000160685_11 (sequence is synthesized)
gcgcccctactcatgcccgcactgcccagcccgcttcctgcacagctacgacctcaagaaccacatgcacctgcacacaggggaccggccctatgagtgccacctgtgccacaaggcttt

SEQ ID NO: 478242 - DNA, 120 bp, Artificial Sequence
  ENSG00000160685_12 (sequence is synthesized)
cgccaaggaggaccacctgcagcgccacctcaaaggccagaactgcctggaggtgcgcacccgacggcgccgcaaggacgatgcaccaccccactacccaccaccctctaccgctgctgc

SEQ ID NO: 478243 - DNA, 120 bp, Artificial Sequence
  ENSG00000160685_13 (sequence is synthesized)
atcccccgctggcctcgacctctccaatggccacctggacaccttccgcctctctctagctcgattctgggagcagtcagcccccactgggcccccggtctctaccccagggccccctga

SEQ ID NO: 478244 - DNA, 120 bp, Artificial Sequence
  ENSG00000160685_14 (sequence is synthesized)
tgacgatgaggaggaaggggcacccaccacaccccaggctgaaggtgccatggagtcctcttaaagagggacgagggccagactgaagcagcacaaggccggggacacccatgccaagca

SEQ ID NO: 478245 - DNA, 120 bp, Artificial Sequence
  ENSG00000160685_15 (sequence is synthesized)
gtgggagcacgcaggacagacacagcaggggtctggggcacggagccttgctggcatcagcatcagcccttcctcccagagccctcattccaattccaagctaagaaggtattggggcag

SEQ ID NO: 478246 - DNA, 120 bp, Artificial Sequence
  ENSG00000160685_16 (sequence is synthesized)
aggctccccaaattggggtgatcccccaaggagtgatacatatattgtgtatatatttacagctgtattgtaaaagtggggtccctgtccccagctgctcctggggagtagaagcaataa

SEQ ID NO: 478247 - DNA, 120 bp, Artificial Sequence
  ENSG00000160685_17 (sequence is synthesized)
agctggaggacaggtgagacagcaggacaggaccggagcagggccccaagcccccgggcctggtgggggacgcgcttcttcccacactgtgagcctcagcagctccagccagcggacccg

SEQ ID NO: 478248 - DNA, 120 bp, Artificial Sequence
  ENSG00000160685_18 (sequence is synthesized)
tggctgtgtaagggggtgaaggactgcccctccctttcgagacccctccttcctggtttctgttcctttttcctggcagtgaattatgcaaagggggccggcaaaggaagggtaggtggg

SEQ ID NO: 478249 - DNA, 120 bp, Artificial Sequence
  ENSG00000160685_19 (sequence is synthesized)
ggaaagccaggtggaagcttgaaagactgggggactgggcctgtaaggaaggagccatcccagtccccctccgccctgctcccggcgctgagtcatggggtcgtggagaagggggcgggg

SEQ ID NO: 478250 - DNA, 120 bp, Artificial Sequence
  ENSG00000160685_20 (sequence is synthesized)
tggcctgattggctcgcctgcccctgggggcagtagaggggccccgcccagctaggggagccgctccgttccactcccctccctagccctccctccccacggccctgggcagggaatgtc

SEQ ID NO: 478251 - DNA, 120 bp, Artificial Sequence
  ENSG00000160685_21 (sequence is synthesized)
ttgttcccgccgctccctccccggggccagagggcagggcgggccgggcggcgtcctaccctcttctcctcctccccatctcctccccgcccaggtgcgagccggagccgccgccaccgc

SEQ ID NO: 478252 - DNA, 120 bp, Artificial Sequence
  ENSG00000160685_22 (sequence is synthesized)
tgccgcccctgactcacgccgcccccgggctggcgcagcgaagggtgtgggacagggtaaggggttggaagagccttgtggagagcgggcgagccggcgccatctggcggccatgctctg

SEQ ID NO: 478253 - DNA, 120 bp, Artificial Sequence
  ENSG00000160685_23 (sequence is synthesized)
agtgggcgagcgccccccgcggccactggagcgagctgtcttcacgctcctcatccaccccagctggtgagcggcgcccccttgccaaggcagtgggcacagaacttctcgcttggccgc

SEQ ID NO: 478254 - DNA, 120 bp, Artificial Sequence
  ENSG00000160685_24 (sequence is synthesized)
aggggaaggggctgcggacctgtgggaaagtgatccccttcccagatccttgccagccgggcttcctgtcaggcaggggagaataatccccactctgctcttaggattgaatccaccccc

SEQ ID NO: 478255 - DNA, 120 bp, Artificial Sequence
  ENSG00000160685_25 (sequence is synthesized)
attctgtacatagcctcttctgttggtcttgttgaaatctagtttcagatttttaactacccaattctgctgggggtgggggacacccccccttcctcgctgggtgctggaccccttttg

SEQ ID NO: 478256 - DNA, 120 bp, Artificial Sequence
  ENSG00000160685_26 (sequence is synthesized)
cagcctgggctctgccttgcactatttccccttcctggcctgacggctcctccccctccttaaaaggggcaggttcaggggcccggtgctcttcctcccttccatgcacccccatgccca

SEQ ID NO: 478257 - DNA, 120 bp, Artificial Sequence
  ENSG00000160685_27 (sequence is synthesized)
tttgcacagctgcccaggtacccctaacagtggggaggggtcacagggagggggtagcgggaccagtccctgttatctatttaaaaagtgatgatgtaatatattggggtggcggggaga

SEQ ID NO: 478258 - DNA, 120 bp, Artificial Sequence
  ENSG00000160685_28 (sequence is synthesized)
tcgggttgtcctgggcctcatcttagcatttcaggtgatggggggagcccagggctggggagacctggggcccagccccagaaagtggggacaatgtggcctcccttctccctactttcg

SEQ ID NO: 478259 - DNA, 120 bp, Artificial Sequence
  ENSG00000160685_29 (sequence is synthesized)
gctttcccagtcagtgccttagggggagaggcactccccccctcctattcccttccccccaccccaactcccccacctcgggtgtaagcgacaggaagaaataataataatttaagattc

SEQ ID NO: 478260 - DNA, 120 bp, Artificial Sequence
  ENSG00000160685_30 (sequence is synthesized)
agggaggggagggatggggggaaagcaagctggaggacaggtgagacagcaggacaggtgaggcgggccctgaggggggggcgggtgggagccaggtgaatgtacggctcttggcggccg

SEQ ID NO: 478261 - DNA, 120 bp, Artificial Sequence
  ENSG00000160685_31 (sequence is synthesized)
aacccccacagcaccgggaagcagccaactcccctcgcctccttcccccttcgtggcttgcggtctctcttccccgcctcggcccccaggaagtgaagatgttacagcctggtcctcatc

SEQ ID NO: 478262 - DNA, 120 bp, Artificial Sequence
  ENSG00000160685_32 (sequence is synthesized)
ccggagcagggccccaagcccccgggcctggtgggggacgcgcttcttcccacactgtgagcctcagcagctccagccagcggacccgacggctgagagtgtcctaaccgctttggagag

SEQ ID NO: 478263 - DNA, 120 bp, Artificial Sequence
  ENSG00000160685_33 (sequence is synthesized)
taacttgagttaaagcacctgtctgtgcctggcctccagcagatcttggtccagtgagaagatggggagccccgaggatgacctgattgggattccattcccggaccacagcagtgagct

SEQ ID NO: 478264 - DNA, 120 bp, Artificial Sequence
  ENSG00000160688_0 (sequence is synthesized)
gaacaagggaaagagccggtgaaggggcagaacaggcaggttccctcgacccaggaccccctgttcccaggctatggcccccagtgccctgtagacctggcaggccccccgtgcttgcga

SEQ ID NO: 478265 - DNA, 120 bp, Artificial Sequence
  ENSG00000160688_1 (sequence is synthesized)
cccctatttgggggtctgggtggctactggagggccttgcagaggggcagagaaggcaggaccatgacatctagggcctctgaactttctccggggcgcagcgtgacggctggcatcatc

SEQ ID NO: 478266 - DNA, 120 bp, Artificial Sequence
  ENSG00000160688_2 (sequence is synthesized)
attgttggagatgagatccttaagggacacactcaggacaccaacaccttctttctgtgccggacactgcgctccctaggggtccaggtttgccgagtctcagttgtacctgatgaggta

SEQ ID NO: 478267 - DNA, 120 bp, Artificial Sequence
  ENSG00000160688_3 (sequence is synthesized)
gccaccattgcagctgaggtcacttctttctccaaccgcttcacccatgtcctcacagcagggggcatcggccccactcatgatgatgtgacctttgaggcagtggcacaggcctttgga

SEQ ID NO: 478268 - DNA, 120 bp, Artificial Sequence
  ENSG00000160688_4 (sequence is synthesized)
gatgagctgaagccacaccccaagttggaagcagccaccaaagccctaggaggggaaggctgggagaagctatcattggtgccctcctctgcccgcctgcattatggcacagatccttgc

SEQ ID NO: 478269 - DNA, 120 bp, Artificial Sequence
  ENSG00000160688_5 (sequence is synthesized)
actggtcaacctttcagattccctctggtctccgtccgaaacgtctacctcttcccaggcattccagagctgctgcggcgggtgctggaggggatgaagggactattccaaaacccagct

SEQ ID NO: 478270 - DNA, 120 bp, Artificial Sequence
  ENSG00000160688_6 (sequence is synthesized)
gttcagttccactcaaaggagctatatgtggctgctgatgaagcctccatcgcccccattctggctgaggcccaggcccactttggacgtaggcttggcctgggttcctaccctgactgg

SEQ ID NO: 478271 - DNA, 120 bp, Artificial Sequence
  ENSG00000160688_7 (sequence is synthesized)
acccctggaggaatgcttggcctacctgactgcccgtttgccccagggatcgctggtcccctacatgcccaacgctgtggagcaggccagtgaggctgtatacaaactcgctgaatcagg

SEQ ID NO: 478272 - DNA, 120 bp, Artificial Sequence
  ENSG00000160688_8 (sequence is synthesized)
gtcttctttggggaaaaaggtggcaggtgccctacagaccattgagacctccctggctcagtacagcctcacccagctctgtgtgggcttcaacgggggcaaagactgcactgccctcct

SEQ ID NO: 478273 - DNA, 120 bp, Artificial Sequence
  ENSG00000160688_9 (sequence is synthesized)
gcacctcttccatgcagctgtgcagaggaaattacctgatgttccaaaccccctccagatcctgtatatccgcagcatctcccctttccctgagctggaacagtttctacaggacactat

SEQ ID NO: 478274 - DNA, 120 bp, Artificial Sequence
  ENSG00000160688_10 (sequence is synthesized)
caagaggtataatctgcagatgttggaagctgagggcagcatgaagcaggccctgggtgaactgcaggcacggcacccccagctggaggctgtccttatgggcacccgccggactgaccc

SEQ ID NO: 478275 - DNA, 120 bp, Artificial Sequence
  ENSG00000160688_11 (sequence is synthesized)
ctactcctgtagcctctgccctttcagccccactgacccaggctggcccgcattcatgcgcatcaacccactgctggactggacctacagagacatctgggattttctgcgtcagctgtt

SEQ ID NO: 478276 - DNA, 120 bp, Artificial Sequence
  ENSG00000160688_12 (sequence is synthesized)
tgtcccatactgtatcctgtatgaccgaggatacacatcactggggagtcgggagaataccgtgcggaacccggccctgaagtgcctgagcccaggaggacaccccacataccgtccagc

SEQ ID NO: 478277 - DNA, 120 bp, Artificial Sequence
  ENSG00000160688_13 (sequence is synthesized)
ctatctactggagaacgaagaagaggagcggaactcccgcacatgacctcccaccctaggagggagggaaggacaccgtcctagggtataacctggcaataaaccgtgcctctcactgtg

SEQ ID NO: 478278 - DNA, 120 bp, Artificial Sequence
  ENSG00000160688_14 (sequence is synthesized)
ttccctgagctggaacagtttctacaggacactatcaagagagcaagctataccagagaatcagatagcaagccctccctcagaggccaagggagcagaagagccatggatgggcccctt

SEQ ID NO: 478279 - DNA, 120 bp, Artificial Sequence
  ENSG00000160688_15 (sequence is synthesized)
ccctccagatcctgtatatccgcagcatctcccctttccctgagctggaacagtttctacaggacactatcaagaggactggacctacagagacatctgggattttctgcgtcagctgtt

SEQ ID NO: 478280 - DNA, 120 bp, Artificial Sequence
  ENSG00000160688_16 (sequence is synthesized)
ttggtgggaagaagggattctgggctagaaagggtgcagaagcctgaagtagaaagagacgggattttggtccggggtggagagcgaatgcattgaaaagggccaaggcccaggataagg

SEQ ID NO: 478281 - DNA, 120 bp, Artificial Sequence
  ENSG00000160688_17 (sequence is synthesized)
tagacatttaaaggggtacggatgcccaaggtagagcagacacttgaggagaccagctcagcaaacggaagacacttaaagtggttccctcgacccaggaccccctgttcccaggctatg

SEQ ID NO: 478282 - DNA, 120 bp, Artificial Sequence
  ENSG00000160688_18 (sequence is synthesized)
agatgagatccttaagttggaaacaacaaatggcttttgagtccaagagtgatgcaatcacagtgacgcattaaaacggttactccggagacatcagagcactgtggctggaggctggga

SEQ ID NO: 478283 - DNA, 120 bp, Artificial Sequence
  ENSG00000160688_19 (sequence is synthesized)
ggctgggagcctggccaggaagctgtcgccattgtccaggtgaaaggtgctaaggacctgcttggtggcagtggggacagaaagaagaaagcaggccaggcgtggtggctcacacctata

SEQ ID NO: 478284 - DNA, 90 bp, Artificial Sequence
  ENSG00000160688_20 (sequence is synthesized)
gcaggaggatcacttgagaccaggaattcaacttctacaaaaaaaatttaaaatgagctgaatgtggtggcacgcgcctgtagtcccagc

SEQ ID NO: 478285 - DNA, 120 bp, Artificial Sequence
  ENSG00000160688_21 (sequence is synthesized)
tgtagtcccagctactcggaaggctggggtggcccttgaagccaggaggttgaggctgcagtgaactgtgactgagccactatactccagcctgggtgacagagacccagctttaaaacc

SEQ ID NO: 478286 - DNA, 120 bp, Artificial Sequence
  ENSG00000160688_22 (sequence is synthesized)
aaccaaacaaatggattttcccactcttgtgtccagtccaggcccctcagcagcctgaggtggtgtccttcaaagagcagagcactgcatcatcaggtggatgcagccatcatcttcaac

SEQ ID NO: 478287 - DNA, 120 bp, Artificial Sequence
  ENSG00000160688_23 (sequence is synthesized)
gtggcaccccagatctcagtaatgcaggggctgttgggtgcttcctgcaaatccctgagagggcagaagatagcttctgttaattcattattcttccaataaatgttgattgagtaccta

SEQ ID NO: 478288 - DNA, 120 bp, Artificial Sequence
  ENSG00000160688_24 (sequence is synthesized)
aacacgtttattccagaggcaggaacaaaggagtcgcttgtcaaggatctggttagagaagactagggtcttcctcgaaggaagcacgcgcacgcctgctctcccccattgtcttttctg

SEQ ID NO: 478289 - DNA, 120 bp, Artificial Sequence
  ENSG00000160688_25 (sequence is synthesized)
gacccaggctggcccgcattcatgcgcatcaacccactgctggtaatggggaagagggtttatcaccttcagtctcacgtgccccagcagtcactgcaccctagctcacctgcagtagtg

SEQ ID NO: 478290 - DNA, 120 bp, Artificial Sequence
  ENSG00000160688_26 (sequence is synthesized)
gggaggctagagcctggaacctggatgaaggggcctcatcatccaagggaggcagtgctatctgttcattcatccttttgaccaatatttattgagcccaaattcaatagcaggcattgc

SEQ ID NO: 478291 - DNA, 120 bp, Artificial Sequence
  ENSG00000160688_27 (sequence is synthesized)
acttcctactgtggatagaatagtgacttagacttgtgctgtccaatatagccattaattatttatttatacttaaattttaattaattagaatgaaatacatatgactaaaaaccactg

SEQ ID NO: 478292 - DNA, 120 bp, Artificial Sequence
  ENSG00000160688_28 (sequence is synthesized)
tgactaaaaaccactgaattatatactttaaaaggatgaatttgatggtatgtggatacctcaatttttaaaattaagtacaattaaaaattcagttctggctgggcgcagtggctcacg

SEQ ID NO: 478293 - DNA, 120 bp, Artificial Sequence
  ENSG00000160688_29 (sequence is synthesized)
tagcaagccctccctcagaggccaagggagcagaagagccatggatgggccccttcccaggacagcaggggtagaagtgggaaaggtgagcatttgtgactattctattactctgacctc

SEQ ID NO: 478294 - DNA, 120 bp, Artificial Sequence
  ENSG00000160691_0 (sequence is synthesized)
gagtgtaataaagtttctccagggaggcagggcccggggagaaagttggagcggtaacctaagctggcagtggcgtgatccggcaccaaatcggcccgcggtgcggtgcggagactccat

SEQ ID NO: 478295 - DNA, 120 bp, Artificial Sequence
  ENSG00000160691_1 (sequence is synthesized)
gaggccctggacatgaacaagctgagtggaggcggcgggcgcaggactcgggtggaagggggccagcttgggggcgaggagtggacccgccacgggagctttgtcaataagcccacgcgg

SEQ ID NO: 478296 - DNA, 120 bp, Artificial Sequence
  ENSG00000160691_2 (sequence is synthesized)
ggctggctgcatcccaacgacaaagtcatgggacccggggtttcctacttggttcggtacatgggttgtgtggaggtcctccagtcaatgcgtgccctggacttcaacacccggactcag

SEQ ID NO: 478297 - DNA, 120 bp, Artificial Sequence
  ENSG00000160691_3 (sequence is synthesized)
gtcaccagggaggccatcagtctggtgtgtgaggctgtgccgggtgctaagggggcgacaaggaggagaaagccctgtagccgcccgctcagctctatcctggggaggagtaacctgaaa

SEQ ID NO: 478298 - DNA, 120 bp, Artificial Sequence
  ENSG00000160691_4 (sequence is synthesized)
tttgctggaatgccaatcactctcaccgtctccaccagcagcctcaacctcatggccgcagactgcaaacagatcatcgccaaccaccacatgcaatctatctcatttgcatccggcggg

SEQ ID NO: 478299 - DNA, 120 bp, Artificial Sequence
  ENSG00000160691_5 (sequence is synthesized)
gatccggacacagccgagtatgtcgcctatgttgccaaagaccctgtgaatcagagagcctgccacattctggagtgtcccgaagggcttgcccaggatgtcatcagcaccattggccag

SEQ ID NO: 478300 - DNA, 120 bp, Artificial Sequence
  ENSG00000160691_6 (sequence is synthesized)
gccttcgagttgcgcttcaaacaatacctcaggaacccacccaaactggtcacccctcatgacaggatggctggctttgatggctcagcatgggatgaggaggaggaagagccacctgac

SEQ ID NO: 478301 - DNA, 120 bp, Artificial Sequence
  ENSG00000160691_7 (sequence is synthesized)
catcagtactataatgacttcccggggaaggaaccccccttggggggggtggtagacatgaggcttcgggaaggagccgctccaggggctgctcgacccactgcacccaatgcccagacc

SEQ ID NO: 478302 - DNA, 120 bp, Artificial Sequence
  ENSG00000160691_8 (sequence is synthesized)
cccagccacttgggagctacattgcctgtaggacagcctgttgggggagatccagaagtccgcaaacagatgccacctccaccaccctgtccagcaggcagagagctttttgatgatccc

SEQ ID NO: 478303 - DNA, 120 bp, Artificial Sequence
  ENSG00000160691_9 (sequence is synthesized)
tcctatgtcaacgtccagaacctagacaaggcccggcaagcagtgggtggtgctgggccccccaatcctgctatcaatggcagtgcaccccgggacctgtttgacatgaagcccttcgaa

SEQ ID NO: 478304 - DNA, 120 bp, Artificial Sequence
  ENSG00000160691_10 (sequence is synthesized)
gatgctcttcgcgtgcctccacctccccagtcggtgtccatggctgagcagctccgaggggagccctggttccatgggaagctgagccggcgggaggctgaggcactgctgcagctcaat

SEQ ID NO: 478305 - DNA, 120 bp, Artificial Sequence
  ENSG00000160691_11 (sequence is synthesized)
ggggacttcctggtacgggagagcacgaccacacctggccagtatgtgctcactggcttgcagagtgggcagcctaagcatttgctactggtggaccctgagggtgtggttcggactaag

SEQ ID NO: 478306 - DNA, 120 bp, Artificial Sequence
  ENSG00000160691_12 (sequence is synthesized)
catctctgcgggcagcgaactgtgtctacagcaacctgtggagcggaaactgtgatctgccctagcgctctcttccagaagatgccctccaatcctttccaccctattccctaactctcg

SEQ ID NO: 478307 - DNA, 120 bp, Artificial Sequence
  ENSG00000160691_13 (sequence is synthesized)
ggacctcgtttgggagtgttctgtgggcttggccttgtgtcagagctgggagtagcatggactctgggtttcatatccagctgagtgagagggtttgagtcaaaagcctgggtgagaatc

SEQ ID NO: 478308 - DNA, 120 bp, Artificial Sequence
  ENSG00000160691_14 (sequence is synthesized)
ctgcctctccccaaacattaatcaccaaagtattaatgtacagagtggcccctcacctgggcctttcctgtgccaacctgatgccccttccccaagaaggtgagtgcttgtcatggaaaa

SEQ ID NO: 478309 - DNA, 120 bp, Artificial Sequence
  ENSG00000160691_15 (sequence is synthesized)
tgtcctgtggtgacaggcccagtggaacagtcacccttctgggcaagggggaacaaatcacacctctgggcttcagggtatcccagacccctctcaacacccgccccccccatgtttaaa

SEQ ID NO: 478310 - DNA, 120 bp, Artificial Sequence
  ENSG00000160691_16 (sequence is synthesized)
ctttgtgcctttgaccatctcttaggtctaatgatattttatgcaaacagttcttggacccctgaattcaatgacagggatgccaacaccttcttggcttctgggacctgtgttcttgct

SEQ ID NO: 478311 - DNA, 120 bp, Artificial Sequence
  ENSG00000160691_17 (sequence is synthesized)
gagcaccctctccggtttgggttgggataacagaggcaggagtggcagctgtcccctctccctggggatatgcaacccttagagattgccccagagccccactcccggccaggcgggaga

SEQ ID NO: 478312 - DNA, 120 bp, Artificial Sequence
  ENSG00000160691_18 (sequence is synthesized)
tggacccctcccttgctcagtgcctcctggccggggcccctcaccccaaggggtctgtatatacatttcataaggcctgccctcccatgttgcatgcctatgtactctacgccaaagtgc

SEQ ID NO: 478313 - DNA, 120 bp, Artificial Sequence
  ENSG00000160691_19 (sequence is synthesized)
agcccttcctcctgaagcctctgccctgcctccctttctgggagggcggggtgggggtgactgaatttgggcctcttgtacagttaactctcccaggtggattttgtggaggtgagaaaa

SEQ ID NO: 478314 - DNA, 120 bp, Artificial Sequence
  ENSG00000160691_20 (sequence is synthesized)
ggggcattgagactataaagcagtagacaatccccacataccatctgtagagttggaactgcattcttttaaagttttatatgcatatattttagggctgtagacttactttcctatttt

SEQ ID NO: 478315 - DNA, 120 bp, Artificial Sequence
  ENSG00000160691_21 (sequence is synthesized)
cttttccattgcttattcttgagcacaaaatgataatcaattattacatttatacatcacctttttgacttttccaagcccttttacagctcttggcattttcctcgcctaggcctgtga

SEQ ID NO: 478316 - DNA, 120 bp, Artificial Sequence
  ENSG00000160691_22 (sequence is synthesized)
ggtaactgggatcgcaccttttataccagagacctgaggcagatgaaatttatttccatctaggactagaaaaacttgggtctcttaccgcgagactgagaggcagaagtcagcccgaat

SEQ ID NO: 478317 - DNA, 120 bp, Artificial Sequence
  ENSG00000160691_23 (sequence is synthesized)
gcctgtcagtttcatggaggggaaacgcaaaacctgcagttcctgagtaccttctacaggcccggcccagcctaggcccggggtggccacaccacagcaagccggccccccctcttttgg

SEQ ID NO: 478318 - DNA, 120 bp, Artificial Sequence
  ENSG00000160691_24 (sequence is synthesized)
ccttgtggataagggagagttgaccgttttcatcctggcctccttttgctgtttggatgtttccacgggtctcacttataccaaagggaaaactcttcattaaagtccgtatttcttcta

SEQ ID NO: 478319 - DNA, 120 bp, Artificial Sequence
  ENSG00000160691_25 (sequence is synthesized)
gaggctccacgttgggcggggatggggcctgaaactgtctgggtctgagctggggagcggaagccacttgtccctctccctccccaggacttctgtgactcctgggccacagaggtccaa

SEQ ID NO: 478320 - DNA, 120 bp, Artificial Sequence
  ENSG00000160691_26 (sequence is synthesized)
ccaggctaagggcctggggataccccctgcctggcccccttgcccaaactggcaggggggccaggctgggcagcagcccctctttcacctcaactatggatctcctgccccccaagccca

SEQ ID NO: 478321 - DNA, 120 bp, Artificial Sequence
  ENSG00000160691_27 (sequence is synthesized)
agtacaatccactccggaatgagtctctgtcatcgctggaggaaggggcttctgggtccacccccccggaggagctgccttccccatcagcttcatccctggggcccatcctgcctcctc

SEQ ID NO: 478322 - DNA, 120 bp, Artificial Sequence
  ENSG00000160691_28 (sequence is synthesized)
tgcctggggacgatagtcccactaccctgtgctccttcttcccccggatgagcaacctgaggctggccaacccggctggggggcgcccagggtctaagggggagccaggaagggcagctg

SEQ ID NO: 478323 - DNA, 120 bp, Artificial Sequence
  ENSG00000160691_29 (sequence is synthesized)
ggcacggaccaccatgcccagcctccacatctttttttgcactgtgtatactcttctgagacatgccaacttcctccaggtcaagaaaggggtatatagctctcagcttcactctttcag

SEQ ID NO: 478324 - DNA, 120 bp, Artificial Sequence
  ENSG00000160691_30 (sequence is synthesized)
ggctgatgtcgcctttgccttttctcacttcactgacctgtctattcctacaactgtctctttctagagaagcctcaatgatcaggattgacaggccacactctcccccaccattttttt

SEQ ID NO: 478325 - DNA, 120 bp, Artificial Sequence
  ENSG00000160691_31 (sequence is synthesized)
ctcctccttcaagcctcttgtctgtttcaccctcttccaccttggaggctgaggtcttatttgactcttcacctgaattgaccttcttccttcccaccctcccaggttcggactaaggat

SEQ ID NO: 478326 - DNA, 62 bp, Artificial Sequence
  ENSG00000160691_32 (sequence is synthesized)
ggctagcctcgaactcctgacctcaggacatgaacaagctgagtggaggcggcgggcgcagg

SEQ ID NO: 478327 - DNA, 120 bp, Artificial Sequence
  ENSG00000160695_0 (sequence is synthesized)
tcccagcagcgggacgctgtcaccccgactcaggagctcctgggcccgcgggctcccggaagctgccgaccacgtgattcgctggctcagctcacgtgacaaagctcccggaggtgggag

SEQ ID NO: 478328 - DNA, 120 bp, Artificial Sequence
  ENSG00000160695_1 (sequence is synthesized)
ccctgggccaaaatggcggcctacctgcagtggcggcgcttcgttttcttcgacaaggagctggtgaaggagccgctgagcaatgatggggccgctcccggggccacacctgcttctgga

SEQ ID NO: 478329 - DNA, 120 bp, Artificial Sequence
  ENSG00000160695_2 (sequence is synthesized)
tccgctgcttccaagttcctttgcctccctcctggcatcactgtctgcgactcaggccgagggagcctggtctttggagatatggaaggccagatctggttcttgccacgttccctacag

SEQ ID NO: 478330 - DNA, 120 bp, Artificial Sequence
  ENSG00000160695_3 (sequence is synthesized)
cttacaggcttccaagcctacaaactacgggtgacacacctgtaccaactgaagcagcacaatattctggcatctgttggagaagatgaagagggcatcaaccccttggttaagatctgg

SEQ ID NO: 478331 - DNA, 120 bp, Artificial Sequence
  ENSG00000160695_4 (sequence is synthesized)
aacctggagaagagagatggtggcaatccactctgcactcgaatcttccctgctattccaggaacagagccaactgttgtatcttgtttgactgtccatgaaaatctcaactttatggcc

SEQ ID NO: 478332 - DNA, 120 bp, Artificial Sequence
  ENSG00000160695_5 (sequence is synthesized)
attggtttcacagatggcagtgttacattgaacaaaggagacatcacccgggaccggcatagcaagacccagattttgcacaagggcaactatcctgtaactggattggcctttcgccaa

SEQ ID NO: 478333 - DNA, 120 bp, Artificial Sequence
  ENSG00000160695_6 (sequence is synthesized)
gcaggaaagaccactcacttgtttgttgtgacaacagagaacgtccagtcctatatagtttctggaaaagactaccctcgcgtggagttggacacccatggttgtggcctgcgctgctca

SEQ ID NO: 478334 - DNA, 120 bp, Artificial Sequence
  ENSG00000160695_7 (sequence is synthesized)
gccctaagtgacccttctcaggacctgcagttcattgtggccggggatgagtgtgtctacttgtaccagcctgatgaacgtgggccctgcttcgcctttgagggccataagctcattgcc

SEQ ID NO: 478335 - DNA, 120 bp, Artificial Sequence
  ENSG00000160695_8 (sequence is synthesized)
cactggtttagaggctaccttatcattgtctcccgtgaccggaaggtttctcccaagtcagagtttaccagcagggattcacagagctccgacaagcagattctaaacatctatgacctg

SEQ ID NO: 478336 - DNA, 120 bp, Artificial Sequence
  ENSG00000160695_9 (sequence is synthesized)
tgcaacaagttcatagcctatagcaccgtctttgaggatgtagtggatgtgcttgctgagtggggctccctgtacgtgctgacgcgggatgggcgggtccacgcactgcaggagaaggac

SEQ ID NO: 478337 - DNA, 120 bp, Artificial Sequence
  ENSG00000160695_10 (sequence is synthesized)
acacagaccaaactggagatgctgtttaagaagaacctatttgagatggcgattaaccttgccaagagccagcatctggacagtgatgggctggcccagattttcatgcagtatggagac

SEQ ID NO: 478338 - DNA, 120 bp, Artificial Sequence
  ENSG00000160695_11 (sequence is synthesized)
catctctacagcaagggcaaccacgatggggctgtccagcaatatatccgaaccattggaaagttggagccatcctacgtgatccgcaagtttctggatgcccagcgcattcacaacctg

SEQ ID NO: 478339 - DNA, 120 bp, Artificial Sequence
  ENSG00000160695_12 (sequence is synthesized)
actgcctacctgcagaccctgcaccgacaatccctggccaatgccgaccataccaccctgctcctcaactgctataccaagctcaaggacagctcgaagctggaggagttcatcaagaaa

SEQ ID NO: 478340 - DNA, 120 bp, Artificial Sequence
  ENSG00000160695_13 (sequence is synthesized)
atgccctgtatctggcggagaaccatgcacatcatgagtggtacctgaagatccagctagaagacattaagaattatcaggaagcccttcgatacatcggcaagctgccttttgagcagg

SEQ ID NO: 478341 - DNA, 120 bp, Artificial Sequence
  ENSG00000160695_14 (sequence is synthesized)
cagagagcaacatgaagcgctacggcaagatcctcatgcaccacataccagagcagacaactcagttgctgaagggactttgtactgattatcggcccagcctcgaaggccgcagcgata

SEQ ID NO: 478342 - DNA, 120 bp, Artificial Sequence
  ENSG00000160695_15 (sequence is synthesized)
gggaggccccaggctgcagggccaactctgaggagttcatccccatctttgccaataacccgcgagagctgaaagccttcctagagcacatgagtgaagtgcagccagactcaccccagg

SEQ ID NO: 478343 - DNA, 120 bp, Artificial Sequence
  ENSG00000160695_16 (sequence is synthesized)
ggatctacgacacactccttgagctgcgactgcagaactgggcccacgagaaggatccacaggtcaaagagaagcttcacgcagaggccatttccctgctgaagagtggtcgcttctgcg

SEQ ID NO: 478344 - DNA, 120 bp, Artificial Sequence
  ENSG00000160695_17 (sequence is synthesized)
acgtctttgacaaggccctggtcctgtgccagatgcacgacttccaggatggtgtcctttacctttatgagcaggggaagctgttccagcagatcatgcactaccacatgcagcacgagc

SEQ ID NO: 478345 - DNA, 120 bp, Artificial Sequence
  ENSG00000160695_18 (sequence is synthesized)
agtaccggcaggtcatcagcgtgtgtgagcgccatggggagcaggacccctccttgtgggagcaggccctcagctacttcgctcgcaaggaggaggactgcaaggagtatgtggcagctg

SEQ ID NO: 478346 - DNA, 120 bp, Artificial Sequence
  ENSG00000160695_19 (sequence is synthesized)
tcctcaagcatatcgagaacaagaacctcatgccacctcttctagtggtgcagaccctggcccacaactccacagccacactctccgtcatcagggactacctggtccaaaaactacaga

SEQ ID NO: 478347 - DNA, 120 bp, Artificial Sequence
  ENSG00000160695_20 (sequence is synthesized)
aacagagccagcagattgcacaggatgagctgcgggtgcggcggtaccgagaggagaccacccgtatccgccaggagatccaagagctcaaggccagtcctaagattttccaaaagacca

SEQ ID NO: 478348 - DNA, 120 bp, Artificial Sequence
  ENSG00000160695_21 (sequence is synthesized)
agtgcagcatctgtaacagtgccttggagttgccctcagtccacttcctgtgtggccactccttccaccaacactgctttgagagttactcggaaagtgatgctgactgccccacctgcc

SEQ ID NO: 478349 - DNA, 120 bp, Artificial Sequence
  ENSG00000160695_22 (sequence is synthesized)
tccctgaaaaccggaaggtcatggatatgatccgggcccaggaacagaaacgagatctccatgatcaattccagcatcagctcaagtgctccaatgacagcttttctgtgattgctgact

SEQ ID NO: 478350 - DNA, 120 bp, Artificial Sequence
  ENSG00000160695_23 (sequence is synthesized)
actttggcagaggtgttttcaacaaattgactctgctgaccgaccctcccacagccagactgacctccagcctggaggctgggctgcaacgcgacctactcatgcactccaggaggggca

SEQ ID NO: 478351 - DNA, 120 bp, Artificial Sequence
  ENSG00000160695_24 (sequence is synthesized)
cttaagcagcctggaggaagatgtgggcaacagtggaggaccaagagaacagacacaatgggacctgggcgggcgttacacagaaggctggctgacatgcccagggctccactctcatct

SEQ ID NO: 478352 - DNA, 120 bp, Artificial Sequence
  ENSG00000160695_25 (sequence is synthesized)
aatgtcacagccctcagaactaaagcggactttctttccctgccttcttatttagtcagcttgccatccctcctcttcactagcagtgtagatcattccagatcagtgggggagggcacc

SEQ ID NO: 478353 - DNA, 120 bp, Artificial Sequence
  ENSG00000160695_26 (sequence is synthesized)
tcagcaacctctgagtgtggacaatagctgctttcttctctatccaagagcaccaggctgtgcttgggtccttgctctcagagtctataaataaaagaatataatgatttgggagcttaa

SEQ ID NO: 478354 - DNA, 120 bp, Artificial Sequence
  ENSG00000160695_27 (sequence is synthesized)
gagttaggatgaaatctgtttgtcggaggggtccgtgccgcgcgcctctttggtttagctggtcatccagagttgttctgtggtctacgggaagaaagaaggaagtccatctcctaactt

SEQ ID NO: 478355 - DNA, 120 bp, Artificial Sequence
  ENSG00000160695_28 (sequence is synthesized)
ggcctggccagggcttcaggagaaaagacagttcgtgccgtctccattcttccgtcttggtggctgcctttcactgcattccttagaccagtaacaccttacctcggggctcaatggtcc

SEQ ID NO: 478356 - DNA, 120 bp, Artificial Sequence
  ENSG00000160695_29 (sequence is synthesized)
tctgtgaagagggaatggactgagggaaagagttgactggctttgtcccaagagaccttgtgattttccccttttgtccagcagctctgccctccttcctctccaggtcaaagagaagct

SEQ ID NO: 478357 - DNA, 120 bp, Artificial Sequence
  ENSG00000160695_30 (sequence is synthesized)
gaagctgtaagagtttggggaatttcagggaaaggggaagaatccaagtcattttccagagacagccactgaggtgtgcccttgccccggccgcaggttccagcagatcatgcactacca

SEQ ID NO: 478358 - DNA, 120 bp, Artificial Sequence
  ENSG00000160695_31 (sequence is synthesized)
acttatagctagagttggttacaatgctttttttaactgaaaaatggatgtttttactgcaggtatttgctacatagccctagcatactagaatgctccagggaatttggacctgctttt

SEQ ID NO: 478359 - DNA, 120 bp, Artificial Sequence
  ENSG00000160695_32 (sequence is synthesized)
gcgtgagccactgcgcccggccttgttttgttttttaactcttttgtcaaaataaattgggcagaggaacaagggattcagcagtggagaaattagaaagtgctgggaaacgtaggatgc

SEQ ID NO: 478360 - DNA, 120 bp, Artificial Sequence
  ENSG00000160695_33 (sequence is synthesized)
tggagaaattagaaagtgctgggaaacgtaggatgcaagttttctgttttgttttggttttatttttttaaggggtaagtggggtcttctgcatgatgaaagtactccctgttagatgct

SEQ ID NO: 478361 - DNA, 120 bp, Artificial Sequence
  ENSG00000160695_34 (sequence is synthesized)
ggtttgttttgctttcattcagttccaggcacagtgttttacatataccatgtattggattattattttctaaatgaatggatatgttagtgtacttaattttctaatctgttacttggg

SEQ ID NO: 478362 - DNA, 120 bp, Artificial Sequence
  ENSG00000160695_35 (sequence is synthesized)
tttatgtgttctctatgtacaactaccggcacagcgctgcatgttatgggatgagagggaccagagaggtgatttgtgctgggtgaaatgtgcaccaaagttatcatgggaaaggaaata

SEQ ID NO: 478363 - DNA, 120 bp, Artificial Sequence
  ENSG00000160695_36 (sequence is synthesized)
acagaccaaactggaggcaaggccaccaggctcgcagagctggccacaggcacctagaagcagctgcaggagcaggttccccaagtcatattggccagggtgtttccctccttgtgggtc

SEQ ID NO: 478364 - DNA, 120 bp, Artificial Sequence
  ENSG00000160695_37 (sequence is synthesized)
acagccttactcagcttccttagggtaggattataaggtaaatggcctgggatggggctttagagggaagtagtggctgggagcctgagcccactctaagggttcactttgtttccagag

SEQ ID NO: 478365 - DNA, 120 bp, Artificial Sequence
  ENSG00000160695_38 (sequence is synthesized)
aaccttatgaaataagatgatactgatcttggggatatctggtagctcttggtttgtctaggatctaggcagatcagaaatccaggactttctgttttgtgtgttgtgcgcacattttgg

SEQ ID NO: 478366 - DNA, 120 bp, Artificial Sequence
  ENSG00000160695_39 (sequence is synthesized)
tacctggtccaaaaactacagaaacagagccagcagattgcacaggatgagctgcgggtgcggcggtaccgagaggagaccacccgtatccgccaggagatccaagagctcaaggccagc

SEQ ID NO: 478367 - DNA, 120 bp, Artificial Sequence
  ENSG00000160695_40 (sequence is synthesized)
aatatatccgatctgcaagtgattcctgtgtacatgagctggagaagtacactgattcagatgctatcgggtgcacatgtctccctagaaccattggaaagttggagccatcctacgtga

SEQ ID NO: 478368 - DNA, 120 bp, Artificial Sequence
  ENSG00000160695_41 (sequence is synthesized)
tttttgcctaggaagctggaaagagttagactctgggcttgtagtaaaaagatgtgaattttctttcttttttttttttgagaccgagtctcactgtgttgctcaggctggagtgcagtg

SEQ ID NO: 478369 - DNA, 66 bp, Artificial Sequence
  ENSG00000160695_42 (sequence is synthesized)
agaccgagtctcactgtgttgctcaggctggagtgcagtggcgagatcttgactcactgtaacctc

SEQ ID NO: 478370 - DNA, 120 bp, Artificial Sequence
  ENSG00000160703_0 (sequence is synthesized)
cggggatggaggcagggaggggggacgatggcgggacgggtggcgccggggttccagccctgcgcctgctccggagcaccgggcccctctcgctgaccccctcgtcccaggaccccgcag

SEQ ID NO: 478371 - DNA, 120 bp, Artificial Sequence
  ENSG00000160703_1 (sequence is synthesized)
gcaggcccgagtgcctgggctcgtcctctttcgcgcccgctgccaggtgccagggccgcgcaggcgggcggaggacagaagtcggtcctaggccccccaggctctgaccttctttcccag

SEQ ID NO: 478372 - DNA, 120 bp, Artificial Sequence
  ENSG00000160703_2 (sequence is synthesized)
gatgaggtggggccaccatttgcccagggcctcttggggctctggttttagaagagcactccagcgaccagatgatcgtatccccttcctgatccactggagttggccccttcaagggga

SEQ ID NO: 478373 - DNA, 120 bp, Artificial Sequence
  ENSG00000160703_3 (sequence is synthesized)
gcgtccctttgggccccctagggcctttatacgccaccacggaagctcggtagatagcgctcccccacccgggaggcatggacggctgttccccagcgcctctgcaactgaagctataca

SEQ ID NO: 478374 - DNA, 120 bp, Artificial Sequence
  ENSG00000160703_4 (sequence is synthesized)
gcggcaccgccggaacctggctgagtggttcagccggctgcccagggaggagcgccagtttggcccaacctttgccctagacacggtccacgttgaccctgtgatccgcgagagtacccc

SEQ ID NO: 478375 - DNA, 120 bp, Artificial Sequence
  ENSG00000160703_5 (sequence is synthesized)
tgatgagctacttcgcccacccgcggagctggccctggagcatcagccaccccaggccgggctccccccactggccttgtctcagctctttaacccggatgcctgtgggcgccgggtgca

SEQ ID NO: 478376 - DNA, 120 bp, Artificial Sequence
  ENSG00000160703_6 (sequence is synthesized)
gacagtggtgctgtatgggacagtgggcacaggcaagagcacgctggtgcgcaagatggttctggactggtgttatgggcggctgccggccttcgagctgctcatccccttctcctgtga

SEQ ID NO: 478377 - DNA, 120 bp, Artificial Sequence
  ENSG00000160703_7 (sequence is synthesized)
ggacctgtcatccctgggccctgccccagcctccctgtgccaacttgtggcccagcgctacacgcccctgaaggaggttctgcccctgatggctgctgctgggtcccacctcctctttgt

SEQ ID NO: 478378 - DNA, 120 bp, Artificial Sequence
  ENSG00000160703_8 (sequence is synthesized)
gctccatggcttagagcatctcaacctcgacttccggctggcaggcacgggactttgtagtgacccggaggaaccgcaggaaccagctgctatcatcgtcaacctgctgcgcaaatacat

SEQ ID NO: 478379 - DNA, 120 bp, Artificial Sequence
  ENSG00000160703_9 (sequence is synthesized)
gctgcctcaggccagcattctggtgaccactcggccctctgccattggccgtatccccagcaagtacgtgggccgctatggtgagatctgcggtttctctgataccaacctgcagaagct

SEQ ID NO: 478380 - DNA, 120 bp, Artificial Sequence
  ENSG00000160703_10 (sequence is synthesized)
ctacttccagctccgcctcaaccagccgtactgcgggtatgccgttggcggttcaggtgtctctgccacaccagctcagcgtgaccacctggtgcagatgctctcccggaacctggaggg

SEQ ID NO: 478381 - DNA, 120 bp, Artificial Sequence
  ENSG00000160703_11 (sequence is synthesized)
gcaccaccagatagccgctgcctgcttcctgccgtcctattgctggctcgtttgtgccaccttgcacttcctgcatgcccccacgcctgctgggcagacccttacaagcatctataccag

SEQ ID NO: 478382 - DNA, 120 bp, Artificial Sequence
  ENSG00000160703_12 (sequence is synthesized)
cttcctgcgcctcaacttcagcggggaaaccctggacagcactgacccctccaatttgtccctgatggcctatgcagcccgaaccatgggcaagttggcctatgagggggtgtcctcccg

SEQ ID NO: 478383 - DNA, 120 bp, Artificial Sequence
  ENSG00000160703_13 (sequence is synthesized)
caagacctacttctctgaagaggatgtctgtggctgcctggaggctggcatcaggacggaggaggagtttcagctgctgcacatcttccgtcgggatgccctgaggtttttcctggcccc

SEQ ID NO: 478384 - DNA, 120 bp, Artificial Sequence
  ENSG00000160703_14 (sequence is synthesized)
atgtgtggagccagggcgtgcaggcaccttcgtgttcaccgtgcccgccatgcaggaatacctggctgccctctacattgtgctgggtttgcgcaagacgaccctgcaaaaggtgggcaa

SEQ ID NO: 478385 - DNA, 120 bp, Artificial Sequence
  ENSG00000160703_15 (sequence is synthesized)
tgttggggaggacgtcagcctggtactgggcatcatggccaagctgctgcctctgcgggctctgcctctgctcttcaacctgatcaaggtggttccacgagtgtttgggcgcatggtggg

SEQ ID NO: 478386 - DNA, 120 bp, Artificial Sequence
  ENSG00000160703_16 (sequence is synthesized)
taaaagccgggaggcggtggctcaggccatggtgctggagatgtttcgagaggaggactactacaacgatgatgttctggaccagatgggcgccagtatcctgggcgtggagggcccccg

SEQ ID NO: 478387 - DNA, 120 bp, Artificial Sequence
  ENSG00000160703_17 (sequence is synthesized)
gcgccacccagatgagccccctgaggatgaagtcttcgagctcttccccatgttcatgggggggcttctctctgcccacaaccgagctgtgctagctcagcttggctgccccatcaagaa

SEQ ID NO: 478388 - DNA, 120 bp, Artificial Sequence
  ENSG00000160703_18 (sequence is synthesized)
cctggatgccctggagaatgcccaggccatcaagaagaagctgggcaagctgggccggcaggtgctgcccccatcagagctccttgaccacctcttcttccactatgagttccagaacca

SEQ ID NO: 478389 - DNA, 120 bp, Artificial Sequence
  ENSG00000160703_19 (sequence is synthesized)
gcgcttctccgctgaggtgctcagctccctgcgtcagctcaacctggcaggtgtgcgcatgacaccagtcaagtgcacagtggtggcagctgtgctgggcagcggaaggcatgccctgga

SEQ ID NO: 478390 - DNA, 120 bp, Artificial Sequence
  ENSG00000160703_20 (sequence is synthesized)
tgaggtgaacttggcctcctgccagctagatcctgctgggctgcgcacactcctgcctgtcttcctgcgtgcccggaagctgggcttgcaactcaacagcctgggccctgaggcctgcaa

SEQ ID NO: 478391 - DNA, 120 bp, Artificial Sequence
  ENSG00000160703_21 (sequence is synthesized)
ggacctccgagacctgttgctgcatgaccagtgccaaattaccacactgcggctgtccaacaacccgctgacggcggcaggtgttgccgtgctaatggaggggctggcaggaaacacctc

SEQ ID NO: 478392 - DNA, 120 bp, Artificial Sequence
  ENSG00000160703_22 (sequence is synthesized)
agtgacgcacctgtccctgctgcacacgggccttggggacgaaggcctggagctgctggctgcccagctggaccgcaaccggcagctgcaggagctgaacgtggcgtacaacggtgctgg

SEQ ID NO: 478393 - DNA, 120 bp, Artificial Sequence
  ENSG00000160703_23 (sequence is synthesized)
tgacacagcggccctggccctggccagagctgcccgggagcacccttccctggaactgctacacctctacttcaatgagctgagctcagagggccgccaggtcttgcgagacttgggggg

SEQ ID NO: 478394 - DNA, 120 bp, Artificial Sequence
  ENSG00000160703_24 (sequence is synthesized)
tgctgctgaaggtggtgcccgggtggtggtgtcactgacagaggggacggcggtgtcagaatactggtcagtgatcctcagtgaagtccagcggaacctcaatagctgggatcgggcccg

SEQ ID NO: 478395 - DNA, 120 bp, Artificial Sequence
  ENSG00000160703_25 (sequence is synthesized)
ggttcagcgacaccttgagctcctactgcgggatctggaagatagccggggtgccacccttaatccttggcgcaaggcccagctgctgcgagtggagggcgaggtcagggccctcctgga

SEQ ID NO: 478396 - DNA, 120 bp, Artificial Sequence
  ENSG00000160703_26 (sequence is synthesized)
gcagctgggaagctctggaagctgagacactggcggcaggcacctagctatgtgaccactggccctaaaccttttccctctgtggcctcctggcttgcactgctccctctagaaagattc

SEQ ID NO: 478397 - DNA, 120 bp, Artificial Sequence
  ENSG00000160703_27 (sequence is synthesized)
cttcaggtctggaggcagaggaatgggcatagctgagccagttgccctcctagggcatgtttgaccaggactgagtctggaatctccaagttaaagatggtgaatcaatgcttcgggctt

SEQ ID NO: 478398 - DNA, 120 bp, Artificial Sequence
  ENSG00000160703_28 (sequence is synthesized)
ggagatggaacatgcctcctctccattcagctagaaggaccaaagcatgtggcatttggatggccagagtgccctgaagcaccactaccaaccttgcctccccctcctctcaaagagcct

SEQ ID NO: 478399 - DNA, 120 bp, Artificial Sequence
  ENSG00000160703_29 (sequence is synthesized)
ctgactgtgtcaccaaggggctcacatcttatgtctgccatgccaggggtgtcgccatccagatgtgttggaagcttcccctcctgccttatgctcacctgtggacaccgaggatgccct

SEQ ID NO: 478400 - DNA, 120 bp, Artificial Sequence
  ENSG00000160703_30 (sequence is synthesized)
cacattggtgctttctcctcatcctcatgccccctttgccacaatggtatgatggcttggtagcccctcgaggcagatgcacctgacttgctgctattaaaaagccgtgtgccttctacc

SEQ ID NO: 478401 - DNA, 120 bp, Artificial Sequence
  ENSG00000160703_31 (sequence is synthesized)
ctagcgggagacgccggcgtccgcccagccgacccctctgggccgcggccgacggctcccggaactgggcagccgcgggtaaaggcctagcgggcttgataacccctgcgccctggctgg

SEQ ID NO: 478402 - DNA, 120 bp, Artificial Sequence
  ENSG00000160703_32 (sequence is synthesized)
gaggccgcgctgagcggggggcagggcgggccgggggaggaggctgtgcaagggccgcggggagatcccggccgagaacgagagggacggagctgggcgctgaatggcgggcgttctggc

SEQ ID NO: 478403 - DNA, 120 bp, Artificial Sequence
  ENSG00000160703_33 (sequence is synthesized)
aagtctccccctgcgttcccgaggccacccgaaagtaggagagctgtttgggacccagtttggtggaggagctctggacctgtaggaacaccgcccctgacagaagtcggtcctaggccc

SEQ ID NO: 478404 - DNA, 120 bp, Artificial Sequence
  ENSG00000160703_34 (sequence is synthesized)
cttctttcttaaccaaggttaccagcagccacacacataggtctgggctctgaagaggaccggatacataaggcagaacccaaggaagccttaggctcaggtctctgcctgaaggacaga

SEQ ID NO: 478405 - DNA, 120 bp, Artificial Sequence
  ENSG00000160703_35 (sequence is synthesized)
gtgagcccagggtgtggaagtgtgtggaagtgtagggataagggtgggggctttgggaactgggaagccccagggctaggccatgaatgggtgtcagacccgaagagcaggttggggtgc

SEQ ID NO: 478406 - DNA, 120 bp, Artificial Sequence
  ENSG00000160703_36 (sequence is synthesized)
gaggctgcagtctcccgaggggattcagaaagcccccagttattgaaaacccagcagaattgtcagccctgcacccccaagccctcttggagggagggttgccctggcagagcactgagc

SEQ ID NO: 478407 - DNA, 120 bp, Artificial Sequence
  ENSG00000160703_37 (sequence is synthesized)
atggttgtcgtacccatggggaaggtgacaggggaggaaaacagattgctctgagctgtgtccaggaactgctgccaggtgactgtcttgcatggctaggacagaagtcggtcctaggcc

SEQ ID NO: 478408 - DNA, 120 bp, Artificial Sequence
  ENSG00000160703_38 (sequence is synthesized)
tgccaaattaccacactgcggtgagtgacctgggagtggggcatcctggtggccagctaaggtcaagggtgagctccctgcttcctgacatacttggcacagacccacccaagggatagt

SEQ ID NO: 478409 - DNA, 120 bp, Artificial Sequence
  ENSG00000160703_39 (sequence is synthesized)
agaacccaaggaagccttaggctcaggtctctgcctgaaggtaggctggggaggcggagagggacagagggaagaatcccctggacaccgcgcctcagggaggcccaggggtaaggacag

SEQ ID NO: 478410 - DNA, 120 bp, Artificial Sequence
  ENSG00000160703_40 (sequence is synthesized)
ctttcttaaccaaggttaccagcagccacacacataggtctgggctctgaagaggaccggatacataaggcagaacccaaggaagccttaggctcaggacagaagtcggtcctaggcccc

SEQ ID NO: 478411 - DNA, 120 bp, Artificial Sequence
  ENSG00000160703_41 (sequence is synthesized)
cagggggtgtggtgggcagacggggctggaaggagaagcagggtgagggaggcatagaggatccactgccatcttccatcggtggtccctcctcctctctctctctccctcccatccgtc

SEQ ID NO: 478412 - DNA, 120 bp, Artificial Sequence
  ENSG00000160703_42 (sequence is synthesized)
tatgtatcccttcctgcaatactcttgcaatgcacacttatatgtacaaagcgctaggagagccataccatccctatgctcaacaaagttgggtcaagcaggttaagacggcacataggt

SEQ ID NO: 478413 - DNA, 120 bp, Artificial Sequence
  ENSG00000160703_43 (sequence is synthesized)
cactgtgaaaccagtttgtccagtggcttcccactttctgacataggggttccagactttctggacagtctatattttctcagggagtcttgtgtgcccaccattgtgggccccagcatc

SEQ ID NO: 478414 - DNA, 120 bp, Artificial Sequence
  ENSG00000160710_0 (sequence is synthesized)
gaaccggagccatcttgggcccggcgcgcagacccgcggagtttcccgtgccgacgccccggggccacttccagtgcggagtagcggaggcgtgggggcctcgaggggctggcgcggccc

SEQ ID NO: 478415 - DNA, 120 bp, Artificial Sequence
  ENSG00000160710_1 (sequence is synthesized)
agcggtcgggccagggtcgtgccgccggcgggtcgggccgggcaatgcctcgcgggcgcaatgaatccgcggcaggggtattccctcagcggatactacacccatccatttcaaggctat

SEQ ID NO: 478416 - DNA, 120 bp, Artificial Sequence
  ENSG00000160710_2 (sequence is synthesized)
gagcacagacagctcaggtaccagcagcctgggccaggatcttcccccagtagtttcctgcttaagcaaatagaatttctcaaggggcagctcccagaagcaccggtgattggaaagcag

SEQ ID NO: 478417 - DNA, 120 bp, Artificial Sequence
  ENSG00000160710_3 (sequence is synthesized)
acaccgtcactgccaccttccctcccaggactccggccaaggtttccagtactacttgcctccagtaccagaggcaggcaagtggacatcaggggtgtccccaggggcgtgcatctcaga

SEQ ID NO: 478418 - DNA, 120 bp, Artificial Sequence
  ENSG00000160710_4 (sequence is synthesized)
agtcaggggctccagagagggttccagcatccttcaccacgtggcaggagtctgccacagagaggtgttgattgcctttcctcacatttccaggaactgagtatctaccaagatcaggaa

SEQ ID NO: 478419 - DNA, 120 bp, Artificial Sequence
  ENSG00000160710_5 (sequence is synthesized)
caaaggatcttaaagttcctggaagagcttggggaagggaaggccaccacagcacatgatctgtctgggaaacttgggactccgaagaaagaaatcaatcgagttttatactccctggca

SEQ ID NO: 478420 - DNA, 120 bp, Artificial Sequence
  ENSG00000160710_6 (sequence is synthesized)
aagaagggcaagctacagaaagaggcaggaacaccccctttgtggaaaatcgcggtctccactcaggcttggaaccagcacagcggagtggtaagaccagacggtcatagccaaggagcc

SEQ ID NO: 478421 - DNA, 120 bp, Artificial Sequence
  ENSG00000160710_7 (sequence is synthesized)
ccaaactcagacccgagtttggaaccggaagacagaaactccacatctgtctcagaagatcttcttgagccttttattgcagtctcagctcaggcttggaaccagcacagcggagtggta

SEQ ID NO: 478422 - DNA, 120 bp, Artificial Sequence
  ENSG00000160710_8 (sequence is synthesized)
agaccagacagtcatagccaaggatccccaaactcagacccaggtttggaacctgaagacagcaactccacatctgccttggaagatcctcttgagtttttagacatggccgagatcaag

SEQ ID NO: 478423 - DNA, 120 bp, Artificial Sequence
  ENSG00000160710_9 (sequence is synthesized)
gagaaaatctgcgactatctcttcaatgtgtctgactcctctgccctgaatttggctaaaaatattggccttaccaaggcccgagatataaatgctgtgctaattgacatggaaaggcag

SEQ ID NO: 478424 - DNA, 120 bp, Artificial Sequence
  ENSG00000160710_10 (sequence is synthesized)
ggggatgtctatagacaagggacaacccctcccatatggcatttgacagacaagaagcgagagaggatgcaaatcaagagaaatacgaacagtgttcctgaaaccgctccagctgcaatc

SEQ ID NO: 478425 - DNA, 120 bp, Artificial Sequence
  ENSG00000160710_11 (sequence is synthesized)
cctgagaccaaaagaaacgcagagttcctcacctgtaatatacccacatcaaatgcctcaaataacatggtaaccacagaaaaagtggagaatgggcaggaacctgtcataaagttagaa

SEQ ID NO: 478426 - DNA, 120 bp, Artificial Sequence
  ENSG00000160710_12 (sequence is synthesized)
aacaggcaagaggccagaccagaaccagcaagactgaaaccacctgttcattacaatggcccctcaaaagcagggtatgttgactttgaaaatggccagtgggccacagatgacatccca

SEQ ID NO: 478427 - DNA, 120 bp, Artificial Sequence
  ENSG00000160710_13 (sequence is synthesized)
gatgacttgaatagtatccgcgcagcaccaggtgagtttcgagccatcatggagatgccctccttctacagtcatggcttgccacggtgttcaccctacaagaaactgacagagtgccag

SEQ ID NO: 478428 - DNA, 120 bp, Artificial Sequence
  ENSG00000160710_14 (sequence is synthesized)
ctgaagaaccccatcagcgggctgttagaatatgcccagttcgctagtcaaacctgtgagttcaacatgatagagcagagtggaccaccccatgaacctcgatttaaattccaggttgtc

SEQ ID NO: 478429 - DNA, 120 bp, Artificial Sequence
  ENSG00000160710_15 (sequence is synthesized)
atcaatggccgagagtttcccccagctgaagctggaagcaagaaagtggccaagcaggatgcagctatgaaagccatgacaattctgctagaggaagccaaagccaaggacagtggaaaa

SEQ ID NO: 478430 - DNA, 120 bp, Artificial Sequence
  ENSG00000160710_16 (sequence is synthesized)
tcagaagaatcatcccactattccacagagaaagaatcagagaagactgcagagtcccagacccccaccccttcagccacatccttcttttctgggaagagccccgtcaccacactgctt

SEQ ID NO: 478431 - DNA, 120 bp, Artificial Sequence
  ENSG00000160710_17 (sequence is synthesized)
gagtgtatgcacaaattggggaactcctgcgaattccgtctcctgtccaaagaaggccctgcccatgaacccaagttccaatactgtgttgcagtgggagcccaaactttccccagtgtg

SEQ ID NO: 478432 - DNA, 120 bp, Artificial Sequence
  ENSG00000160710_18 (sequence is synthesized)
agtgctcccagcaagaaagtggcaaagcagatggccgcagaggaagccatgaaggccctgcatggggaggcgaccaactccatggcttctgataaccagcctgaaggtatgatctcagag

SEQ ID NO: 478433 - DNA, 120 bp, Artificial Sequence
  ENSG00000160710_19 (sequence is synthesized)
tcacttgataacttggaatccatgatgcccaacaaggtcaggaagattggcgagctcgtgagatacctgaacaccaaccctgtgggtggccttttggagtacgcccgctcccatggcttt

SEQ ID NO: 478434 - DNA, 120 bp, Artificial Sequence
  ENSG00000160710_20 (sequence is synthesized)
gctgctgaattcaagttggtcgaccagtccggacctcctcacgagcccaagttcgtttaccaagcaaaagttgggggtcgctggttcccagccgtctgcgcacacagcaagaagcaaggc

SEQ ID NO: 478435 - DNA, 120 bp, Artificial Sequence
  ENSG00000160710_21 (sequence is synthesized)
aagcaggaagcagcagatgcggctctccgtgtcttgattggggagaacgagaaggcagaacgcatgggtttcacagaggtaaccccagtgacaggggccagtctcagaagaactatgctc

SEQ ID NO: 478436 - DNA, 120 bp, Artificial Sequence
  ENSG00000160710_22 (sequence is synthesized)
ctcctctcaaggtccccagaagcacagccaaagacactccctctcactggcagcaccttccatgaccagatagccatgctgagccaccggtgcttcaacactctgactaacagcttccag

SEQ ID NO: 478437 - DNA, 120 bp, Artificial Sequence
  ENSG00000160710_23 (sequence is synthesized)
ccctccttgctcggccgcaagattctggccgccatcattatgaaaaaagactctgaggacatgggtgtcgtcgtcagcttgggaacagggaatcgctgtgtgaaaggagattctctcagc

SEQ ID NO: 478438 - DNA, 120 bp, Artificial Sequence
  ENSG00000160710_24 (sequence is synthesized)
ctaaaaggagaaactgtcaatgactgccatgcagaaataatctcccggagaggcttcatcaggtttctctacagtgagttaatgaaatacaactcccagactgcgaaggatagtatattt

SEQ ID NO: 478439 - DNA, 120 bp, Artificial Sequence
  ENSG00000160710_25 (sequence is synthesized)
gaacctgctaagggaggagaaaagctccaaataaaaaagactgtgtcattccatctgtatatcagcactgctccgtgtggagatggcgccctctttgacaagtcctgcagcgaccgtgct

SEQ ID NO: 478440 - DNA, 120 bp, Artificial Sequence
  ENSG00000160710_26 (sequence is synthesized)
atggaaagcacagaatcccgccactaccctgtcttcgagaatcccaaacaaggaaagctccgcaccaaggtggagaacggagaaggcacaatccctgtggaatccagtgacattgtgcct

SEQ ID NO: 478441 - DNA, 120 bp, Artificial Sequence
  ENSG00000160710_27 (sequence is synthesized)
gcattcggctcggggagagactccgtaccatgtcctgtagtgacaaaatcctacgctggaacgtgctgggcctgcaaggggcactgttgacccacttcctgcagcccatttatctcaaat

SEQ ID NO: 478442 - DNA, 120 bp, Artificial Sequence
  ENSG00000160710_28 (sequence is synthesized)
ctgtcacattgggttaccttttcagccaagggcatctgacccgtgctatttgctgtcgtgtgacaagagatgggagtgcatttgaggatggactacgacatccctttattgtcaaccacc

SEQ ID NO: 478443 - DNA, 120 bp, Artificial Sequence
  ENSG00000160710_29 (sequence is synthesized)
ccaaggttggcagagtcagcatatatgattccaaaaggcaatccgggaagactaaggagacaagcgtcaactggtgtctggctgatggctatgacctggagatcctggacggtaccagag

SEQ ID NO: 478444 - DNA, 120 bp, Artificial Sequence
  ENSG00000160710_30 (sequence is synthesized)
gcactgtggatgggccacggaatgaattgtcccgggtctccaaaaagaacatttttcttctatttaagaagctctgctccttccgttaccgcagggatctactgagactctcctatggtg

SEQ ID NO: 478445 - DNA, 120 bp, Artificial Sequence
  ENSG00000160710_31 (sequence is synthesized)
aggccaagaaagctgcccgtgactacgagacggccaagaactacttcaaaaaaggcctgaaggatatgggctatgggaactggattagcaaaccccaggaggaaaagaacttttatctct

SEQ ID NO: 478446 - DNA, 120 bp, Artificial Sequence
  ENSG00000160710_32 (sequence is synthesized)
gcccagtatagtatgctccagtgacagatggattagggtgtgtcatactagggtgtgagagaggtaggtcgtagcattcctcatcacatggtcaggggatttttttttctcctttttttt

SEQ ID NO: 478447 - DNA, 120 bp, Artificial Sequence
  ENSG00000160710_33 (sequence is synthesized)
tctttttaagccataattggtgatactgaaaactttgggttcccatttatcctgctttctttgggattgctaggcaaggtctggccaggccccccttttttcccccaagtgaagaggcag

SEQ ID NO: 478448 - DNA, 120 bp, Artificial Sequence
  ENSG00000160710_34 (sequence is synthesized)
aaacctaagaagttatcttttctttctacccaaagcatacatagtcactgagcacctgcggtccatttcctcttaaaagttttgttttgatttgtttccatttcctttccctttgtgttt

SEQ ID NO: 478449 - DNA, 120 bp, Artificial Sequence
  ENSG00000160710_35 (sequence is synthesized)
gctacactgacctcttgcggtcttgattaggtttcagtcaactctggatcatgtcagggactgataatttcatttgtggattacgcagacccctctacttcccctctttcccttctgaga

SEQ ID NO: 478450 - DNA, 120 bp, Artificial Sequence
  ENSG00000160710_36 (sequence is synthesized)
ttctttccttgtgatctgaatgtctccttttccccctcagagggcaaagaggtgaacataaaggatttggtgaaacatttgtaagggtaggagttgaaaactgcagttcccagtgccacg

SEQ ID NO: 478451 - DNA, 120 bp, Artificial Sequence
  ENSG00000160710_37 (sequence is synthesized)
gaagtgtgattggagcctgcagataatgcccagccatcctcccatcctgcactttagccagctgcagggcgggcaaggcaaggaaagctgcttccctggaagtgtatcactttctccggc

SEQ ID NO: 478452 - DNA, 120 bp, Artificial Sequence
  ENSG00000160710_38 (sequence is synthesized)
agctgggaagtctagaaccagccagactgggttaagggagctgctcaagcaatagcagaggtttcacccggcaggatgacacagaccacttcccagggagcacgggcatgccttggaata

SEQ ID NO: 478453 - DNA, 120 bp, Artificial Sequence
  ENSG00000160710_39 (sequence is synthesized)
ttgccaagcttccagctgcctcttctcctaaagcattcctaggaatattttccccgccaatgctgggcgtacaccctagccaacgggacaaatcctagagggtataaaatcatctctgct

SEQ ID NO: 478454 - DNA, 120 bp, Artificial Sequence
  ENSG00000160710_40 (sequence is synthesized)
cagataatcatgacttagcaagaataagggcaaaaaatcctgttggcttaacgtcactgttccacccggtgtaatatctctcatgacagtgacaccaagggaagttgactaagtcacatg

SEQ ID NO: 478455 - DNA, 120 bp, Artificial Sequence
  ENSG00000160710_41 (sequence is synthesized)
taaattaggagtgttttaaagaatgccatagatgttgattcttaactgctacagataacctgtaattgagcagatttaaaattcaggcatacttttccatttatccaagtgctttcattt

SEQ ID NO: 478456 - DNA, 120 bp, Artificial Sequence
  ENSG00000160710_42 (sequence is synthesized)
ttccagatggcttcagaagtaggctcgtgggcagggcgcagacctgatctttatagggttgacatagaaagcagtagttgtgggtgaaagggcaggttgtcttcaaactctgtgaggtag

SEQ ID NO: 478457 - DNA, 120 bp, Artificial Sequence
  ENSG00000160710_43 (sequence is synthesized)
aatcctttgtctatacctccatgaacattgactcgtgtgttcagagcctttggcctctctgtggagtctggctctctggctcctgtgcattctttgaatagtcactcgtaaaaactgtca

SEQ ID NO: 478458 - DNA, 120 bp, Artificial Sequence
  ENSG00000160710_44 (sequence is synthesized)
gtgcttgaaactgtttcctttactcatgttgaagggactttgttggcttttagagtgttggtcatgactccaagagcagagcagggaagagcccaagcatagacttggtgccgtggtgat

SEQ ID NO: 478459 - DNA, 120 bp, Artificial Sequence
  ENSG00000160710_45 (sequence is synthesized)
ggctgcagtccagttttgtgatgctgcttttacgtgtccctcgataacagtcagctagacacactcaggaggactactgaggctctgcgaccttcaggagctgagcctgcctctctcctt

SEQ ID NO: 478460 - DNA, 120 bp, Artificial Sequence
  ENSG00000160710_46 (sequence is synthesized)
tagatgacagaccttcatctgggaacgtgctgagccagcaccctcagatgatttccctccaaactgctgactaggtcatcctctgtctggtagagacattcacatctttgcttttattct

SEQ ID NO: 478461 - DNA, 120 bp, Artificial Sequence
  ENSG00000160710_47 (sequence is synthesized)
atgctctctgtacttttgaccaaaaattgaccaaagtaagaaaatgcaagttctaaaaatagactaaggatgcctttgcagaacaccaaagcatcccaaggaactggtagggaagtggcg

SEQ ID NO: 478462 - DNA, 120 bp, Artificial Sequence
  ENSG00000160710_48 (sequence is synthesized)
cctgtctcctggagtggaagaggcctgctccctggctctgggtctgctgggggcacagtaaatcagtcttggcacccacatccagggcagagaggtctgtggttctcagcatcagaaggc

SEQ ID NO: 478463 - DNA, 120 bp, Artificial Sequence
  ENSG00000160710_49 (sequence is synthesized)
agcgcagcccctctcctcttcaggctacagggttgtcacctgctgagtcctcaggttgtttggcctctctggtccatcttgggcattaggttctccagcagagctctggccagctgcctc

SEQ ID NO: 478464 - DNA, 120 bp, Artificial Sequence
  ENSG00000160710_50 (sequence is synthesized)
ttctttaactgggaacacaggctctcacaagatcagaacccccactcacccccaagatcttatctagcaagcctgtagtattcagtttctgttgtaggaagagagcgaggcatccctgaa

SEQ ID NO: 478465 - DNA, 120 bp, Artificial Sequence
  ENSG00000160710_51 (sequence is synthesized)
ttccacgcatctgctggaaacgagccgtgtcagatcgcacatccctgcgcccccatgcccctctgagtcacacaggacagaggaggcagagcttctgcccactgttatcttcactttctt

SEQ ID NO: 478466 - DNA, 120 bp, Artificial Sequence
  ENSG00000160710_52 (sequence is synthesized)
tgtccagtcttttgtttttaataagcagtgaccctccctactcttctttttaatgatttttgtagttgatttgtctgaactgtggctactgtgcattccttgaataatcacttgtaaaaa

SEQ ID NO: 478467 - DNA, 120 bp, Artificial Sequence
  ENSG00000160710_53 (sequence is synthesized)
ttgtcagtgcttgaagctgtttcctttactcacattgaagggacttcgttggttttttggagtcttggttgtgactccaagagcagagtgaggaagacccccaagcatagactcgggtac

SEQ ID NO: 478468 - DNA, 120 bp, Artificial Sequence
  ENSG00000160710_54 (sequence is synthesized)
tgtgatgatggctgcagtccagttttatgattctgcttttatgtgtcccttgataacagtgacttaacaatatacattcctcataaataaaaaaaaaacaagaatctgaattcttagaaa

SEQ ID NO: 478469 - DNA, 120 bp, Artificial Sequence
  ENSG00000160710_55 (sequence is synthesized)
acggatgctccggcgctcgtgccagccggagcccagcagctgggtaccaaaggcccaacagctgggtaccaaaggcccttgtttccctctcgccggctcccccgcctcggagagtgactg

SEQ ID NO: 478470 - DNA, 120 bp, Artificial Sequence
  ENSG00000160710_56 (sequence is synthesized)
aggtggagaacgtggtttcccactgcactgcatatacaagcaaaacctgctgtgatcacccggcctcctctcatgccactttccccatccctcgcatatgctctgtccacactggctctc

SEQ ID NO: 478471 - DNA, 120 bp, Artificial Sequence
  ENSG00000160710_57 (sequence is synthesized)
tgtcaggcgcctgaacagccaatccgctggctgccttggggcctttgcttttgtcctgtgtgcctgaaacacttactccagctgtcctcctccatgtctgggctcccctgctgctgctgt

SEQ ID NO: 478472 - DNA, 120 bp, Artificial Sequence
  ENSG00000160710_58 (sequence is synthesized)
cccaggaggtgtcccctgtggtcctccgtcatagctgcctcagagccttcagagcactgtcagcatctggaattcttccgagaaggcacaatccctgtggaatccagtgacattgtgcct

SEQ ID NO: 478473 - DNA, 120 bp, Artificial Sequence
  ENSG00000160710_59 (sequence is synthesized)
ctccaaataaaaaagactgtgtcattccatctgtatatcaggtctgtacagttcctgttgctgccagggtgggccctgccaggctgttagaattgggtatccaaatgctctcctggcctg

SEQ ID NO: 478474 - DNA, 120 bp, Artificial Sequence
  ENSG00000160710_60 (sequence is synthesized)
taaatcgaacctgatacaataagccacactccactgtgggtttgaggtccatattcaggtgtagatgactcacatgtactgctgtccacctccagtctcccatggtaggccttagaaaac

SEQ ID NO: 478475 - DNA, 120 bp, Artificial Sequence
  ENSG00000160710_61 (sequence is synthesized)
atcccttgcttctgtcacatctgactgttttggagccccacgaaattgcagatttcccacaggtgagttttaacagccacccctgtttttcagcactgctccgtgtggagatggcgccct

SEQ ID NO: 478476 - DNA, 120 bp, Artificial Sequence
  ENSG00000160710_62 (sequence is synthesized)
agcccacaagggaacattgcccacagtggcccaccaccaacattggttggtctcccaagaacttaaactttcttccttttggatgccaagggcttttcttctcttagtctggaattaatc

SEQ ID NO: 478477 - DNA, 120 bp, Artificial Sequence
  ENSG00000160710_63 (sequence is synthesized)
tgaatcgaggtggagttagtatgtctagagggtgctcagtcttagccaaacagaaccctaaatacaggggaaagatcatgaccccacacttcctctctcctatgagtcttgagtccctgc

SEQ ID NO: 478478 - DNA, 120 bp, Artificial Sequence
  ENSG00000160710_64 (sequence is synthesized)
cgagttattcctaggctttactcttagcctcgagagagcagtaactgggacactagatgtaagaaggaaaagatgactcacacgacaagtagagcttgatctccctgcccacggtgaata

SEQ ID NO: 478479 - DNA, 120 bp, Artificial Sequence
  ENSG00000160710_65 (sequence is synthesized)
tggtggacacagcctcagctttgtggtgctgacacagcctcttttccccacagctccctctcactggcagcaccttccatgaccagatagccatgctgagccaccggtgcttcaacactc

SEQ ID NO: 478480 - DNA, 120 bp, Artificial Sequence
  ENSG00000160710_66 (sequence is synthesized)
gattcccgactgaaggtagagaaggctacgtggtgggggagggtggggggagggtcgcggccgcactggcagtctccgggtgtccggccgtgtcccgaggaagtgcaagacccggggtat

SEQ ID NO: 478481 - DNA, 120 bp, Artificial Sequence
  ENSG00000160710_67 (sequence is synthesized)
ttattgccaggtgttttgtctcccttatcaaagtgagcatgattcactcctcagtaattgattgagtgtccagtctgctgtggtaggaagatcctggtagccccagtcagaaggtgcttc

SEQ ID NO: 478482 - DNA, 120 bp, Artificial Sequence
  ENSG00000160710_68 (sequence is synthesized)
cctagggttggggtcaggtgcttttgctcctgacgcagtcttggctgatttgtgagcagtgctgtttggtggcgcctatcttttcctccttcccttctgccttttagctaaattcccctt

SEQ ID NO: 478483 - DNA, 120 bp, Artificial Sequence
  ENSG00000160710_69 (sequence is synthesized)
gattggccctttctccagatattgagcagggaatatagaccttggaccagccagaatcttggctgaacaagggggaggttgactctgttggctgtaatgaagcttctttagaaatgattg

SEQ ID NO: 478484 - DNA, 83 bp, Artificial Sequence
  ENSG00000160710_70 (sequence is synthesized)
gactctgttggctgtaatgaagcttctttagaaatgattggttttggccgtaggccgaggcaggcatatcacgaggtcaggag

SEQ ID NO: 478485 - DNA, 68 bp, Artificial Sequence
  ENSG00000160710_71 (sequence is synthesized)
ctccatctcaaaaaaaaaaaagaaagaaatgattggtcttgggggccggggcggtggctgaggaattc

SEQ ID NO: 478486 - DNA, 120 bp, Artificial Sequence
  ENSG00000160712_0 (sequence is synthesized)
aaatgttttcctgcgttgccaggaccgtccgccgctctgagtcatgtgcgagtgggaagtcgcactgacactgagccgggccagagggagaggagccgagcgcggcgcggggccgaggga

SEQ ID NO: 478487 - DNA, 120 bp, Artificial Sequence
  ENSG00000160712_1 (sequence is synthesized)
ccagagggagaggagccgagcgcggcgcggggccgagggactcgcagtgtgtgtagagagccgggctcctgcggatgggggctgcccccggggcctgagcccgcctgcccgcccaccgcc

SEQ ID NO: 478488 - DNA, 120 bp, Artificial Sequence
  ENSG00000160712_2 (sequence is synthesized)
gcctgtccgcctctgcgggaccatggagtggtagccgaggaggaagcatgctggccgtcggctgcgcgctgctggctgccctgctggccgcgccgggagcggcgctggccccaaggcgct

SEQ ID NO: 478489 - DNA, 120 bp, Artificial Sequence
  ENSG00000160712_3 (sequence is synthesized)
gccctgcgcaggaggtggcgagaggcgtgctgaccagtctgccaggagacagcgtgactctgacctgcccgggggtagagccggaagacaatgccactgttcactgggtgctcaggaagc

SEQ ID NO: 478490 - DNA, 120 bp, Artificial Sequence
  ENSG00000160712_4 (sequence is synthesized)
cggctgcaggctcccaccccagcagatgggctggcatgggaaggaggctgctgctgaggtcggtgcagctccacgactctggaaactattcatgctaccgggccggccgcccagctggga

SEQ ID NO: 478491 - DNA, 120 bp, Artificial Sequence
  ENSG00000160712_5 (sequence is synthesized)
ctgtgcacttgctggtggatgttccccccgaggagccccagctctcctgcttccggaagagccccctcagcaatgttgtttgtgagtggggtcctcggagcaccccatccctgacgacaa

SEQ ID NO: 478492 - DNA, 120 bp, Artificial Sequence
  ENSG00000160712_6 (sequence is synthesized)
aggctgtgctcttggtgaggaagtttcagaacagtccggccgaagacttccaggagccgtgccagtattcccaggagtcccagaagttctcctgccagttagcagtcccggagggagaca

SEQ ID NO: 478493 - DNA, 120 bp, Artificial Sequence
  ENSG00000160712_7 (sequence is synthesized)
gctctttctacatagtgtccatgtgcgtcgccagtagtgtcgggagcaagttcagcaaaactcaaacctttcagggttgtggaatcttgcagcctgatccgcctgccaacatcacagtca

SEQ ID NO: 478494 - DNA, 120 bp, Artificial Sequence
  ENSG00000160712_8 (sequence is synthesized)
ctgccgtggccagaaacccccgctggctcagtgtcacctggcaagacccccactcctggaactcatctttctacagactacggtttgagctcagatatcgggctgaacggtcaaagacat

SEQ ID NO: 478495 - DNA, 120 bp, Artificial Sequence
  ENSG00000160712_9 (sequence is synthesized)
tcacaacatggatggtcaaggacctccagcatcactgtgtcatccacgacgcctggagcggcctgaggcacgtggtgcagcttcgtgcccaggaggagttcgggcaaggcgagtggagcg

SEQ ID NO: 478496 - DNA, 120 bp, Artificial Sequence
  ENSG00000160712_10 (sequence is synthesized)
agtggagcccggaggccatgggcacgccttggacagaatccaggagtcctccagctgagaacgaggtgtccacccccatgcaggcacttactactaataaagacgatgataatattctct

SEQ ID NO: 478497 - DNA, 120 bp, Artificial Sequence
  ENSG00000160712_11 (sequence is synthesized)
tcagagattctgcaaatgcgacaagcctcccagtgcaagattcttcttcagtaccactgcccacattcctggttgctggagggagcctggccttcggaacgctcctctgcattgccattg

SEQ ID NO: 478498 - DNA, 120 bp, Artificial Sequence
  ENSG00000160712_12 (sequence is synthesized)
ttctgaggttcaagaagacgtggaagctgcgggctctgaaggaaggcaagacaagcatgcatccgccgtactctttggggcagctggtcccggagaggcctcgacccaccccagtgcttg

SEQ ID NO: 478499 - DNA, 120 bp, Artificial Sequence
  ENSG00000160712_13 (sequence is synthesized)
ttcctctcatctccccaccggtgtcccccagcagcctggggtctgacaatacctcgagccacaaccgaccagatgccagggacccacggagcccttatgacatcagcaatacagactact

SEQ ID NO: 478500 - DNA, 120 bp, Artificial Sequence
  ENSG00000160712_14 (sequence is synthesized)
tcttccccagatagctggctgggtggcaccagcagcctggaccctgtggatgataaaacacaaacgggctcagcaaaagatgcttctcactgccatgccagcttatctcaggggtgtgcg

SEQ ID NO: 478501 - DNA, 120 bp, Artificial Sequence
  ENSG00000160712_15 (sequence is synthesized)
gcctttggcttcacggaagagccttgcggaaggttctacgccaggggaaaatcagcctgctccagctgttcagctggttgaggtttcaaacctccctttccaaatgcccagcttaaaggg

SEQ ID NO: 478502 - DNA, 120 bp, Artificial Sequence
  ENSG00000160712_16 (sequence is synthesized)
gctagagtgaacttgggccactgtgaagagaaccatatcaagactctttggacactcacacggacactcaaaagctgggcaggttggtgggggcctcggtgtggagaagcggctggcagc

SEQ ID NO: 478503 - DNA, 120 bp, Artificial Sequence
  ENSG00000160712_17 (sequence is synthesized)
ccacccctcaacacctctgcacaagctgcaccctcaggcaggtgggatggatttccagccaaagcctcctccagccgccatgctcctggcccactgcatcgtttcatcttccaactcaaa

SEQ ID NO: 478504 - DNA, 120 bp, Artificial Sequence
  ENSG00000160712_18 (sequence is synthesized)
ctcttaaaacccaagtgccttagcaaattctgtttttctaggcctggggacggcttttacttaaaccgccaaggctgggggaagaagctctctcctccctttcttccctacagttgaaaa

SEQ ID NO: 478505 - DNA, 120 bp, Artificial Sequence
  ENSG00000160712_19 (sequence is synthesized)
acagctgagggtgagtgggtgaataatacagtatctcagggcctggtcgttttcaacagaattataattagttcctcattagcattttgctaaatgtgaatgatgatcctaggcatttgc

SEQ ID NO: 478506 - DNA, 120 bp, Artificial Sequence
  ENSG00000160712_20 (sequence is synthesized)
tgaatacagaggcaactgcattggctttgggttgcaggacctcaggtgagaagcagaggaaggagaggagaggggcacagggtctctaccatcccctgtagagtgggagctgagtggggg

SEQ ID NO: 478507 - DNA, 120 bp, Artificial Sequence
  ENSG00000160712_21 (sequence is synthesized)
atcacagcctctgaaaaccaatgttctctcttctccacctcccacaaaggagagctagcagcagggagggcttctgccatttctgagatcaaaacggttttactgcagctttgtttgttg

SEQ ID NO: 478508 - DNA, 120 bp, Artificial Sequence
  ENSG00000160712_22 (sequence is synthesized)
tcagctgaacctgggtaactagggaagataatattaaggaagacaatgtgaaaagaaaaatgagcctggcaagaatgtgtttaaacttggtttttaaaaaactgctgactgttttctctt

SEQ ID NO: 478509 - DNA, 120 bp, Artificial Sequence
  ENSG00000160712_23 (sequence is synthesized)
gagagggtggaatatccaatattcgctgtgtcagcatagaagtaacttacttaggtgtgggggaagcaccataactttgtttagcccaaaaccaagtcaagtgaaaaaggaggaagagaa

SEQ ID NO: 478510 - DNA, 90 bp, Artificial Sequence
  ENSG00000160712_24 (sequence is synthesized)
cccaaaaccaagtcaagtgaaaaaggaggaagagaaaaaatattttcctgccaggcatggtggcccacgcacttcgggaggtcgaggcat

SEQ ID NO: 478511 - DNA, 120 bp, Artificial Sequence
  ENSG00000160712_25 (sequence is synthesized)
cagcctgggcaatgtgataaaaccccatctctacaaaaagcataaaaattagccaagtgtggtagagtgtgcctgaagtcccagatacttggggggctgaggtgggaggatctcttgagc

SEQ ID NO: 478512 - DNA, 120 bp, Artificial Sequence
  ENSG00000160712_26 (sequence is synthesized)
gcactccagcctgggtgacagagcaagtgagaccctgtctcaaaaaaagaaaaagaaaaagaaaaaatattttccctattagagaagagattgtggtttcattctgtattttgtttttgt

SEQ ID NO: 478513 - DNA, 120 bp, Artificial Sequence
  ENSG00000160712_27 (sequence is synthesized)
cttaaaaagtggaaaaatagcctgcctcttctctactctagggaaaaaccagcgtgtgactactcccccaggtggttatggagagggtgtccggtccctgtcccagtgccgagaaggaag

SEQ ID NO: 478514 - DNA, 120 bp, Artificial Sequence
  ENSG00000160712_28 (sequence is synthesized)
cctcccacgactgcccggcagggtcctagaaattccccaccctgaaagccctgagctttctgctatcaaagaggttttaaaaaaatcccatttaaaaaaaatcccttacctcggtgcctt

SEQ ID NO: 478515 - DNA, 120 bp, Artificial Sequence
  ENSG00000160712_29 (sequence is synthesized)
cctctttttatttagttccttgagttgattcagctctgcaagaattgaagcaggactaaatgtctagttgtaacaccatgattaaccacttcagctgacttttctgtccgagctttgaaa

SEQ ID NO: 478516 - DNA, 120 bp, Artificial Sequence
  ENSG00000160712_30 (sequence is synthesized)
attcagtggtgttagtggttacccagttagctctcaagttatcagggtattccagagtggggatatgatttaaatcagccgtgtaaccatggacccaatatttaccagaccacaaaactt

SEQ ID NO: 478517 - DNA, 120 bp, Artificial Sequence
  ENSG00000160712_31 (sequence is synthesized)
ttctaatactctaccctcttagaaaaaccaccaccatcaccagacaggtgcgaaaggatgaaagtgaccatgttttgtttacggttttccaggtttaagctgttactgtcttcagtaagc

SEQ ID NO: 478518 - DNA, 120 bp, Artificial Sequence
  ENSG00000160712_32 (sequence is synthesized)
cagtaagccgtgattttcattgctgggcttgtctgtagattttagaccctattgctgcttgaggcaactcatcttaggttggcaaaaaggcaggatggccgggcgcggtggctcacgcct

SEQ ID NO: 478519 - DNA, 120 bp, Artificial Sequence
  ENSG00000160712_33 (sequence is synthesized)
gctcaggagtttgagaccaacctgggtaacatagtgagacaccatctctattatgaacaataacagttaagaaaaaaaaaggcaggcaggcggttatggtggttccctcccatcccacca

SEQ ID NO: 478520 - DNA, 120 bp, Artificial Sequence
  ENSG00000160712_34 (sequence is synthesized)
ggcaggcggttatggtggttccctcccatcccaccacataaagtttctgagacttgagaacagcaaaatgctgttaaagggaaatattaagaatgagaatctgcagtaagggtgattctg

SEQ ID NO: 478521 - DNA, 120 bp, Artificial Sequence
  ENSG00000160712_35 (sequence is synthesized)
tgcccacagttcttcaattctttataccgttttacccacatgtggtgttaccaaagccgggcagaaccatgctagcggaagatgtgaaatccagatagctcattattgccaagagctagg

SEQ ID NO: 478522 - DNA, 120 bp, Artificial Sequence
  ENSG00000160712_36 (sequence is synthesized)
cagctttgatctccaaattgttattgctttcatttttattgtaatggaattgctttgttttgtttttttgtttttgtattgaagagggttgttttccctttatttttcataagctaatgt

SEQ ID NO: 478523 - DNA, 120 bp, Artificial Sequence
  ENSG00000160712_37 (sequence is synthesized)
aaatgaagaaaaaatgtcttctctgggctgtaggcctggctcagcgtacacaggtatacatcctaagctctctatgttctctaatctgtggtgactgaacatgtgtctcaatgcacgggg

SEQ ID NO: 478524 - DNA, 120 bp, Artificial Sequence
  ENSG00000160712_38 (sequence is synthesized)
catttctacctgtgtttctgcagcacccccactgccttgagtccccagcagtgctgttatttgcctaacacctgtagccatctgccacgcagccagacgtgaaacgctgagacagagacc

SEQ ID NO: 478525 - DNA, 120 bp, Artificial Sequence
  ENSG00000160712_39 (sequence is synthesized)
atttaggttaaatacgacagcttatcctgctgggtggggaaagtaaaaaatatgctggttcaaggcctaaagtaaaatgatcaataatgtttgtagcattaatgaaatattttcaagaaa

SEQ ID NO: 478526 - DNA, 120 bp, Artificial Sequence
  ENSG00000160712_40 (sequence is synthesized)
tgtgtccaggggtagcactggctatgttgacgaggcctttggtaactcagagagctcttggccctgatggggacttgcccttacgctttctttatcaggctctgagttcacacggagcct

SEQ ID NO: 478527 - DNA, 120 bp, Artificial Sequence
  ENSG00000160712_41 (sequence is synthesized)
ctggcacttccctgctgtcttgggagaaaggaaactggttgccgcggcaggttgtggaatctgttgctggaaccaggctggaagcccacctggtagtgaacagggcccagtggggcaggc

SEQ ID NO: 478528 - DNA, 120 bp, Artificial Sequence
  ENSG00000160712_42 (sequence is synthesized)
tgggcatgttgtggtctatgggtttgtttcctggagaatgttcaggaatgtcttcccagctgctttggtgctgagctctattatctcacagcacgtccagaaggctaacccaggtgggga

SEQ ID NO: 478529 - DNA, 120 bp, Artificial Sequence
  ENSG00000160712_43 (sequence is synthesized)
ggatgctgacaccagctccaggtggagttggtggtcttaatttggagatgcaggggcaacctgtgaccctttgaggcaagagccctgcacccagctgtcccgtgcagccgtgggcagggg

SEQ ID NO: 478530 - DNA, 120 bp, Artificial Sequence
  ENSG00000160712_44 (sequence is synthesized)
ctgcacacggaggggcaggcgggccagttcagggtccgtgccaggccctcctcagtgccctgtgaaggcctcctgtcctccgtgcggctgggcaccagcaccagggagtttctatggcaa

SEQ ID NO: 478531 - DNA, 120 bp, Artificial Sequence
  ENSG00000160712_45 (sequence is synthesized)
ccttagtgattattaaggaacactgtcagttttatgaacatatgctcaaatgaaattctactttaggaggaaaggattggaacagcatgtcacaaggctgttaattaacagagagacctt

SEQ ID NO: 478532 - DNA, 120 bp, Artificial Sequence
  ENSG00000160712_46 (sequence is synthesized)
attggatggagatcacatctgttaaatagaatacctcaactctacgttgttttcttggagataaataatagtttcaagtttttgtttgtttgttttacctaattacctgaaagcaaatac

SEQ ID NO: 478533 - DNA, 120 bp, Artificial Sequence
  ENSG00000160712_47 (sequence is synthesized)
caaaggctgatgtctgtatatggggcaaagggtcagtatatttttcagtgtttttttttctaccagctattttgcatttaaagtgaacattgtgtttggaataaatactcttaaaaaata

SEQ ID NO: 478534 - DNA, 120 bp, Artificial Sequence
  ENSG00000160712_48 (sequence is synthesized)
ggcgctgtggcaggaagccaccccctcggtcggccggtgcgcggggctgttgcgccatccgctccggctttcgtaaccgcaccctgggacggcccagagacgctccagcgcgagttcctc

SEQ ID NO: 478535 - DNA, 120 bp, Artificial Sequence
  ENSG00000160712_49 (sequence is synthesized)
ccttggacagacaggctttctcctcgttgcccaggatggagtacagcagtgcaatcacagctcacggcaacttctgcctcctgggttcaagcaatcctcccgcctcagcctcctaagtag

SEQ ID NO: 478536 - DNA, 120 bp, Artificial Sequence
  ENSG00000160712_50 (sequence is synthesized)
tgttgtaccctctttgtgccttgtgggagcaggtggaatgtcaccagaaaagccactctgaaagtgagtaggagtctgtggctagccacaggcgctcagaaaccctgagcttgaggtgtc

SEQ ID NO: 478537 - DNA, 120 bp, Artificial Sequence
  ENSG00000160712_51 (sequence is synthesized)
tctcttgccaagtggtggaatcctggaatctagagtgggctttgttaagaaacaaacaaacaaacaaacaaaaaacagttaagcttgtcaaatggcctgttggttggcagagctgtttca

SEQ ID NO: 478538 - DNA, 120 bp, Artificial Sequence
  ENSG00000160712_52 (sequence is synthesized)
ggagaatccaggagtcctccagctgagaacgaggtgtccacccccatgcaggcacttactactaataaagacgatgataatattctcttcagagattctgcaaatgcgacaagcctccca

SEQ ID NO: 478539 - DNA, 80 bp, Artificial Sequence
  ENSG00000160714_0 (sequence is synthesized)
cggaggctcccggcccgccggccccggagcggagcggagcggaggatgcagcagccgcagccgcaggggcagcagcagcc

SEQ ID NO: 478540 - DNA, 80 bp, Artificial Sequence
  ENSG00000160714_1 (sequence is synthesized)
ggggccgggggcggcccaggggggggcccggggccggggccctgcctgaggcgagagctgaagctgctcgagtccatctt

SEQ ID NO: 478541 - DNA, 120 bp, Artificial Sequence
  ENSG00000160714_2 (sequence is synthesized)
gctgaagctgctcgagtccatcttccaccgcggccacgagcgcttccgcattgccagcgcctgcctggacgagctgagctgcgagttcctgctggctggggccggaggggccggggcggg

SEQ ID NO: 478542 - DNA, 120 bp, Artificial Sequence
  ENSG00000160714_3 (sequence is synthesized)
ggccgcgcccggaccgcatctccccccacgggggtcggtgcctggggatcctgtccgcatccactgcaacatcacggagtcataccctgctgtgccccccatctggtcggtggagtctga

SEQ ID NO: 478543 - DNA, 120 bp, Artificial Sequence
  ENSG00000160714_4 (sequence is synthesized)
tgaccctaacttggctgctgtcttggagaggctggtggacataaagaaagggaatactctgctattgcagcatctgaagaggatcatctccgacctgtgtaaactctataacctccctca

SEQ ID NO: 478544 - DNA, 120 bp, Artificial Sequence
  ENSG00000160714_5 (sequence is synthesized)
gcatccagatgtggagatgctggatcaacccttgccagcagagcagtgcacacaggaagacgtgtcttcagaagatgaagatgaggagatgcctgaggacacagaagacttagatcacta

SEQ ID NO: 478545 - DNA, 120 bp, Artificial Sequence
  ENSG00000160714_6 (sequence is synthesized)
tgaaatgaaagaggaagagccagctgagggcaagaaatctgaagatgatggcattggaaaagaaaacttggccatcctagagaaaattaaaaagaaccagaggcaagattacttaaatgg

SEQ ID NO: 478546 - DNA, 120 bp, Artificial Sequence
  ENSG00000160714_7 (sequence is synthesized)
tgcagtgtctggctcggtgcaggccactgaccggctgatgaaggagctcagggatatataccgatcacagagtttcaaaggcggaaactatgcagtcgaactcgtgaatgacagtctgta

SEQ ID NO: 478547 - DNA, 120 bp, Artificial Sequence
  ENSG00000160714_8 (sequence is synthesized)
tgattggaatgtcaaactcctcaaagttgaccaggacagcgctttgcacaacgatctccagatcctcaaagagaaagaaggagccgacttcattctacttaacttttcctttaaagataa

SEQ ID NO: 478548 - DNA, 120 bp, Artificial Sequence
  ENSG00000160714_9 (sequence is synthesized)
ctttccctttgacccaccatttgtcagggttgtgtctccagtcctctctggagggtatgttctgggcggaggggccatctgcatggaacttctcaccaaacagggctggagcagtgccta

SEQ ID NO: 478549 - DNA, 120 bp, Artificial Sequence
  ENSG00000160714_10 (sequence is synthesized)
ctccatagagtcagtgatcatgcagatcagtgccacactggtgaaggggaaagcacgagtgcagtttggagccaacaaatctcaatacagtctgacaagagcacagcagtcctacaagtc

SEQ ID NO: 478550 - DNA, 120 bp, Artificial Sequence
  ENSG00000160714_11 (sequence is synthesized)
cttggtgcagatccacgaaaaaaacggctggtacacacccccaaaagaagacggctaaccctggagtatcacccttcctccctccccaggcaccactggaccaattacctttgaatgctg

SEQ ID NO: 478551 - DNA, 120 bp, Artificial Sequence
  ENSG00000160714_12 (sequence is synthesized)
tatttggatctcacgctgcctctgtggttccctccctcatttttcctggacgtgatagctctgcctattgcaggacaatgatggctattctaaacgctaaggaaaaaaaacaaacacaga

SEQ ID NO: 478552 - DNA, 120 bp, Artificial Sequence
  ENSG00000160714_13 (sequence is synthesized)
tgtgctccagactagagcctccttacctatgctatggatttttaatttattttctcttatttcatgtacactgctttttttggttacagtgtatgatggatgtgtatgaaaaaaatgtat

SEQ ID NO: 478553 - DNA, 120 bp, Artificial Sequence
  ENSG00000160714_14 (sequence is synthesized)
ctttgggaaaacaattacagtttgttaatttgaagatgctggtcttgactcatctttatttttattcgcacatcccaccccatcccctgaactacttgggaggtggggaggggtacgagt

SEQ ID NO: 478554 - DNA, 120 bp, Artificial Sequence
  ENSG00000160714_15 (sequence is synthesized)
ccactgttgctttggtagagatgagaggccgcattttgctgctaaagcaagagaaacttggagctgaagcacacacctggtctgcccctagatttctcctcaaggcctctggagcaacca

SEQ ID NO: 478555 - DNA, 120 bp, Artificial Sequence
  ENSG00000160714_16 (sequence is synthesized)
gcacttgcccccttggaatgcagagcctggcctgccaaactacaatgtggtaggctgaaacgatggtgttaattcttaggactacttttctagtcacagatgttttcaaatttctaagaa

SEQ ID NO: 478556 - DNA, 120 bp, Artificial Sequence
  ENSG00000160714_17 (sequence is synthesized)
aaagaaaatgaggctcaagaggctgcttcgtagaattccttttgaatgaattgagtggggatggggacacagtctccaagtgtgtatgtggtcttttctgatctcagctgtgtggctgca

SEQ ID NO: 478557 - DNA, 120 bp, Artificial Sequence
  ENSG00000160714_18 (sequence is synthesized)
actcttcgctgttcattggttcctctcctggaaagtggcttctaaccagcactggatggtgatcattggtaagctttgctcacctccctctctcttgcttcatttggctttatcaaaaag

SEQ ID NO: 478558 - DNA, 120 bp, Artificial Sequence
  ENSG00000160714_19 (sequence is synthesized)
aacagacctagctctgaatttgtttggcttgggaaattatggattctttcaagccactcccacaaggtgggtcctactagaaagggttagcattttaaggggggttgttctatacacctg

SEQ ID NO: 478559 - DNA, 120 bp, Artificial Sequence
  ENSG00000160714_20 (sequence is synthesized)
tgtccttaccccaggctcaggaactgccagggagggaagatgaggtggggagtctgtactgagatggaactgtcagtgctgtgttgtatgtacttgctgttgtaaaagtttgggcatgac

SEQ ID NO: 478560 - DNA, 120 bp, Artificial Sequence
  ENSG00000160714_21 (sequence is synthesized)
tttgcatctagcgggtgctgcctgcatctctttgtctgtaagcttgctctgggactcagcctcttaggacctacgatgccagcagctctcattaacagtgaaatgacagaggccaaagat

SEQ ID NO: 478561 - DNA, 120 bp, Artificial Sequence
  ENSG00000160714_22 (sequence is synthesized)
ggccaagtgaagacccaagtctcagaaaacccagacttgggacaactgcctgggaactaggatgctagagcagttctgtaatgctttgagacacagcaattttcacattggccattcttt

SEQ ID NO: 478562 - DNA, 120 bp, Artificial Sequence
  ENSG00000160714_23 (sequence is synthesized)
cccctcccctaccccttttcttttgagggacttttaatgtttgctgctttaggtggatggagagtccaccagtcccactcaatgctgctctaactctacccacacccacctaattagggg

SEQ ID NO: 478563 - DNA, 120 bp, Artificial Sequence
  ENSG00000160714_24 (sequence is synthesized)
tgctaataaaacatgctgaggttgagataaagacgggacataaggggaaaattcattccatagagctgaaatctggttttcaaggcctctgtggctttcttctgaacttaccaccagccc

SEQ ID NO: 478564 - DNA, 120 bp, Artificial Sequence
  ENSG00000160714_25 (sequence is synthesized)
tggctggaatgtagattgtgtttttagtaatgtgtactgtgagctgtcttctgtataatgtattttgtaatgtatttttctcatctaccaaaggatgaaacaaataaaattatttaaata

SEQ ID NO: 478565 - DNA, 120 bp, Artificial Sequence
  ENSG00000160714_26 (sequence is synthesized)
ctgcgcgggtagcccctgggagcacgcggcaccgagtcacgtgagaggggagcgcaggcgaaggggcgtcgcgcgcaagcacgcacgacatacgcaaactcgcactgaggcgcccacaga

SEQ ID NO: 478566 - DNA, 120 bp, Artificial Sequence
  ENSG00000160714_27 (sequence is synthesized)
ttcaaaggcggtgagtttgccccagagaggggcctgcacaagagtcacccataaagaagggtatggtggcaaggggcccaagaggttctggggtccaggagtgcttatgaacttttcagg

SEQ ID NO: 478567 - DNA, 120 bp, Artificial Sequence
  ENSG00000160714_28 (sequence is synthesized)
ggccactagcaggccaaggctgccttctttagaggaatgagcataaggcccccgggctggtggcattggatgagagggcctagggtgcccacaatggaacaactgtgccttggcccctag

SEQ ID NO: 478568 - DNA, 120 bp, Artificial Sequence
  ENSG00000160714_29 (sequence is synthesized)
aagttgaggaggagtgtgagtggggctactgtggtgggatctccagggcagccccatccagcattttcattcagggtcccggagcgggtgtgggcagtggtttcgtggtctgctgccagc

SEQ ID NO: 478569 - DNA, 120 bp, Artificial Sequence
  ENSG00000160714_30 (sequence is synthesized)
cagggcaggggagcccttatgaagctcctgaggtggaaccaggcatctgagcccaggcttgttgcttcttagagttgaccaggacagcgctttgcacaacgatctccagatcctcaaaga

SEQ ID NO: 478570 - DNA, 120 bp, Artificial Sequence
  ENSG00000160714_31 (sequence is synthesized)
taagacttttcttttccagtctctccctctggcctaggctgcccagtctgcctgacagtcctgtggaggatgctggcctccctcccctgattgtcgtctctctctctctcaggataactt

SEQ ID NO: 478571 - DNA, 120 bp, Artificial Sequence
  ENSG00000160714_32 (sequence is synthesized)
tccctttgacccaccatttgtcagggttgtgtctccagtcctctctggagggtatgttctgggcggaggggccatctgcatggaacttctcaccaaacaggtgagcctgtctctcctcct

SEQ ID NO: 478572 - DNA, 120 bp, Artificial Sequence
  ENSG00000160716_0 (sequence is synthesized)
agactcctccccctcaccgtcccaattgtattccctggaagagcagccggaaaagcctccgcctgctcataccaggataggcaagaagctggtttctcctcgcagccggctccctgaggc

SEQ ID NO: 478573 - DNA, 120 bp, Artificial Sequence
  ENSG00000160716_1 (sequence is synthesized)
cggcaccacctggacccagctccaggcgggcgcggcttcagcaccacggacagcgccccacccgcggccctccccccggcggcgcgctccagccggtgtaggcgaggcagcgagctatgc

SEQ ID NO: 478574 - DNA, 120 bp, Artificial Sequence
  ENSG00000160716_2 (sequence is synthesized)
ggcgaggcagcgagctatgcccgcggcatggcccggcgctgcggccccgtggcgctgctccttggcttcggcctcctccggctgtgctcaggggtgtggggtacggatacagaggagcgg

SEQ ID NO: 478575 - DNA, 120 bp, Artificial Sequence
  ENSG00000160716_3 (sequence is synthesized)
ctggtggagcatctcctggatccttcccgctacaacaagcttatccgcccagccaccaatggctctgagctggtgacagtacagcttatggtgtcactggcccagctcatcagtgtgcat

SEQ ID NO: 478576 - DNA, 120 bp, Artificial Sequence
  ENSG00000160716_4 (sequence is synthesized)
gagcgggagcagatcatgaccaccaatgtctggctgacccaggagtgggaagattatcgcctcacctggaagcctgaagagtttgacaacatgaagaaagttcggctcccttccaaacac

SEQ ID NO: 478577 - DNA, 120 bp, Artificial Sequence
  ENSG00000160716_5 (sequence is synthesized)
atctggctcccagatgtggtcctgtacaacaatgctgacggcatgtacgaggtgtccttctattccaatgccgtggtctcctatgatggcagcatcttctggctgccgcctgccatctac

SEQ ID NO: 478578 - DNA, 120 bp, Artificial Sequence
  ENSG00000160716_6 (sequence is synthesized)
aagagcgcatgcaagattgaagtaaagcacttcccatttgaccagcagaactgcaccatgaagttccgttcgtggacctacgaccgcacagagatcgacttggtgctgaagagtgaggtg

SEQ ID NO: 478579 - DNA, 120 bp, Artificial Sequence
  ENSG00000160716_7 (sequence is synthesized)
gccagcctggacgacttcacacctagtggtgagtgggacatcgtggcgctgccgggccggcgcaacgagaaccccgacgactctacgtacgtggacatcacgtatgacttcatcattcgc

SEQ ID NO: 478580 - DNA, 120 bp, Artificial Sequence
  ENSG00000160716_8 (sequence is synthesized)
cgcaagccgctcttctacaccatcaacctcatcatcccctgtgtgctcatcacctcgctagccatccttgtcttctacctgccatccgactgtggcgagaagatgacgttgtgcatctca

SEQ ID NO: 478581 - DNA, 120 bp, Artificial Sequence
  ENSG00000160716_9 (sequence is synthesized)
gtgctgctggcgctcacggtcttcctgctgctcatctccaagatcgtgcctcccacctccctcgacgtgccgctcgtcggcaagtacctcatgttcaccatggtgcttgtcaccttctcc

SEQ ID NO: 478582 - DNA, 120 bp, Artificial Sequence
  ENSG00000160716_10 (sequence is synthesized)
atcgtcaccagcgtgtgcgtgctcaacgtgcaccaccgctcgcccaccacgcacaccatggcgccctgggtgaaggtcgtcttcctggagaagctgcccgcgctgctcttcatgcagcag

SEQ ID NO: 478583 - DNA, 120 bp, Artificial Sequence
  ENSG00000160716_11 (sequence is synthesized)
ccacgccatcattgcgcccgtcagcgcctgcgcctgcggcgacgccagcgtgagcgcgagggcgctggagccctcttcttccgcgaagccccaggggccgactcctgcacgtgcttcgtc

SEQ ID NO: 478584 - DNA, 120 bp, Artificial Sequence
  ENSG00000160716_12 (sequence is synthesized)
cgtcaaccgcgcgtcggtgcaggggttggccggggccttcggggctgagcctgcaccagtggcgggccccgggcgctcaggggagccgtgtggctgtggcctccgggaggcggtggacgg

SEQ ID NO: 478585 - DNA, 120 bp, Artificial Sequence
  ENSG00000160716_13 (sequence is synthesized)
cgcttcatcgcagaccacatgcggagcgaggacgatgaccagagcgtgagtgaggactggaagtacgtcgccatggtgatcgaccgcctcttcctctggatctttgtctttgtctgtgtc

SEQ ID NO: 478586 - DNA, 120 bp, Artificial Sequence
  ENSG00000160716_14 (sequence is synthesized)
tttggcaccatcggcatgttcctgcagcctctcttccagaactacaccaccaccaccttcctccactcagaccactcagcccccagctccaagtgaggcccttcctcatctccatgctct

SEQ ID NO: 478587 - DNA, 120 bp, Artificial Sequence
  ENSG00000160716_15 (sequence is synthesized)
ttcaccctgccaccctctgctgcacagtagtgttgggtggaggatggacgagtgagctaccaggaagaggggcgctgcccccacagatccatccttttgcttcatctggagtccctcctc

SEQ ID NO: 478588 - DNA, 120 bp, Artificial Sequence
  ENSG00000160716_16 (sequence is synthesized)
ccccacgcctccatccacacacagcagctccaacctggaggctggaccaactgctttgttttggctgctctccatctcttgtaccagcccaggcaatagtgttgaggaggggagcaaggc

SEQ ID NO: 478589 - DNA, 120 bp, Artificial Sequence
  ENSG00000160716_17 (sequence is synthesized)
tgctaagtggaagacagagatggcagagccatccaccctgaggagtgatgggcaaggggccaggaaggggacaggattgtctgctgcctccaagtcatgggagaagaggggtataggaca

SEQ ID NO: 478590 - DNA, 120 bp, Artificial Sequence
  ENSG00000160716_18 (sequence is synthesized)
aggggtggaagggcaggagctcacaccgcaccgggctggcctgacacaatggtagctctgaagggaggggaagagagaggcctgggtgtgacctgacacctgccgctgcttgagtggaca

SEQ ID NO: 478591 - DNA, 120 bp, Artificial Sequence
  ENSG00000160716_19 (sequence is synthesized)
gcagctggactgggtgggccccacagtggtcagcgattcctgccaagtagggtttagccgggccccatggtcacagacccctgggggaggcttccagctcagtcccacagccccttgctt

SEQ ID NO: 478592 - DNA, 120 bp, Artificial Sequence
  ENSG00000160716_20 (sequence is synthesized)
ctaagggatccagagacctgctccagatcctctttccccactgaagaattctgcaccctctggacttccctcttcttccttcctttctcaggctcaaggtgtggggggcaaggctgagta

SEQ ID NO: 478593 - DNA, 120 bp, Artificial Sequence
  ENSG00000160716_21 (sequence is synthesized)
ttaggggagcttctgagttctgaatctttgggtgacctgcttggagtctcaggtccaaatacttgaaatctgtgagaagtccaagttcatgggcttttggaactggaagaactttgtaca

SEQ ID NO: 478594 - DNA, 120 bp, Artificial Sequence
  ENSG00000160716_22 (sequence is synthesized)
gccatggattccaacataagccatgttgcagatgaagaaactgacccacacggtgagacaagcacaggtgggtctgactcttcctccctgccctgagatccatctgtcgagtgccctgtt

SEQ ID NO: 478595 - DNA, 120 bp, Artificial Sequence
  ENSG00000160716_23 (sequence is synthesized)
ttttccccactttgaactgactggttactctaaggaagtgaactgaggatgttagctttaagccaacccagcctctttgtccacagcagagctgaggtgaacagctggaaccctgctaca

SEQ ID NO: 478596 - DNA, 120 bp, Artificial Sequence
  ENSG00000160716_24 (sequence is synthesized)
gaacttgggaaggacagggctgctgctgccagcgacacctcagaaagcatagcctcggcttcctgccccatgtgtccctggaagctgtaccctgactctgcttccagaggccagcagatg

SEQ ID NO: 478597 - DNA, 120 bp, Artificial Sequence
  ENSG00000160716_25 (sequence is synthesized)
gtgggttacagacgggtcagcctgccaagtgcacctgagggacctgacctgacacaagccattttgtccctagagcccagctgggactcctgcttctctaggcagggcagagggaggaga

SEQ ID NO: 478598 - DNA, 120 bp, Artificial Sequence
  ENSG00000160716_26 (sequence is synthesized)
cacagcacaggcacagagcatgggacagggacccccgagtctggattcaagtcctggccctgctagtaactcatgtgagccagcttgagcaagtcccttcatcttgctagagctcagctt

SEQ ID NO: 478599 - DNA, 120 bp, Artificial Sequence
  ENSG00000160716_27 (sequence is synthesized)
ccttgcctataaaacgtaggtggcaatgccctcttcctgaggttgctgggaggataaggcagtgcttgtgaaaaagtctagcgctgtacctggcacagagtagatgcttcatgaatgttg

SEQ ID NO: 478600 - DNA, 120 bp, Artificial Sequence
  ENSG00000160716_28 (sequence is synthesized)
agtctgacaggcaactggagctggtgagaatggggtcccctgactgtcatgccagcctccctcccaggcccactcttcccccctcttccctgaggaaaccaagtctcccttatcaggaag

SEQ ID NO: 478601 - DNA, 120 bp, Artificial Sequence
  ENSG00000160716_29 (sequence is synthesized)
agctgggggagctgggaggaacattacaggaacaccagagggagtctagcgggtgggcaggcttctctctgcagccccctcagcagtttcattccattcctgggctgaacccttgccctg

SEQ ID NO: 478602 - DNA, 120 bp, Artificial Sequence
  ENSG00000160716_30 (sequence is synthesized)
gccctgcctcccttctgggtcagcacctcctgacacaggtgtgtgctcagggaccccaggctctagtcctgtactggctgtggaagcctatcactgggacaggaagccagtggctgcagg

SEQ ID NO: 478603 - DNA, 120 bp, Artificial Sequence
  ENSG00000160716_31 (sequence is synthesized)
agacaggcctcagcgcatctcgtctgtcaggatgggctcacggacaccttttcttggtagcagggagtgtctctgcactatggaaactttccctcttctagagcggattgggagttgcct

SEQ ID NO: 478604 - DNA, 120 bp, Artificial Sequence
  ENSG00000160716_32 (sequence is synthesized)
gtattatgcctgaaccctccttgaactcatggtcctggggaaggcgtcttggaaccagaaacagcaacaggaaaggagcctccctctgaagggtaggatgccggcctgaggccctccctc

SEQ ID NO: 478605 - DNA, 120 bp, Artificial Sequence
  ENSG00000160716_33 (sequence is synthesized)
ttggctctcccagggcctgggctaccccgaggccccagcagctgctgctgtggctgtacttgcttttaatatttcccatacatggctgttgtccaagttaagtcaccaaatggtgctaga

SEQ ID NO: 478606 - DNA, 120 bp, Artificial Sequence
  ENSG00000160716_34 (sequence is synthesized)
ggggatggcagagagcagcttgtccagctcctctccatgacccggttaacacacgagtaaacaggcctagagcttgtctgctgtttgacctcttttaagacccggctgtgctgcatctac

SEQ ID NO: 478607 - DNA, 120 bp, Artificial Sequence
  ENSG00000160716_35 (sequence is synthesized)
aaaatgaagatgacagagctagccgaggtcttcagcaaggaagaaaggggtcagtgtatatgaaagggttacctgggcagtgtcattccctccatctctgtacgcagccctttgggaacc

SEQ ID NO: 478608 - DNA, 120 bp, Artificial Sequence
  ENSG00000160716_36 (sequence is synthesized)
atcacaataaggaagaggtgagggcagaggtgaaggatccactgcccaggcaaggtgctaccatgtggtgggagagtgtgaaccctcaagtgcactgggaagctttggggaaccacagtc

SEQ ID NO: 478609 - DNA, 120 bp, Artificial Sequence
  ENSG00000160716_37 (sequence is synthesized)
tcttccacccttgggtcgtgtgtcgtcctcttctcttgatgtcagggaagcccctatgcctccttcccgtggtggggctatctctgcagagaatcgggtgcccagcttaatgctgggcaa

SEQ ID NO: 478610 - DNA, 120 bp, Artificial Sequence
  ENSG00000160716_38 (sequence is synthesized)
ggactggaggaagctccagatctggaggtggcagagatactggatggaaacctggagcaagggtttgggaggggaagtgaggaaacaggttgagactatctccatcagagatggcaaggc

SEQ ID NO: 478611 - DNA, 120 bp, Artificial Sequence
  ENSG00000160716_39 (sequence is synthesized)
cacaggtgatctgagaactatttttgtctgaaaagaaggcatgcacaggctctctgcttttgacaggtggcgttgcagtgggaggaaggcagcttcctggcggggagatagaaatactag

SEQ ID NO: 478612 - DNA, 120 bp, Artificial Sequence
  ENSG00000160716_40 (sequence is synthesized)
aacagctggtaccaagttattgaaaatttaaaagcaaacaagacacagcagcccccaggtggtgtgttctactgaggaaggctacggcagaggaagggcaagaccgtttcccccaatggt

SEQ ID NO: 478613 - DNA, 120 bp, Artificial Sequence
  ENSG00000160716_41 (sequence is synthesized)
cttgaaacggaagaggaaacagggagggctctttggatggtttggggacctggggctgtttgtatcccagtattagctcctgttactaagggtctgctctgcgccaggtcctcagcatgc

SEQ ID NO: 478614 - DNA, 120 bp, Artificial Sequence
  ENSG00000160716_42 (sequence is synthesized)
gttgtctttattccgcgtgacaatcctatgggaaggggcctccacctacgtaacagaaatgcggctcagaaagaccaagtgacagctagtgagtagtgctgggcctgaaccccaaagtcc

SEQ ID NO: 478615 - DNA, 120 bp, Artificial Sequence
  ENSG00000160716_43 (sequence is synthesized)
acactcttgctatagccgctgaggcaggcagaagagctccttgggaggaaagtaaggggcattcaaagccttctctgaatcactccccaagccagagtagacctggttccagttgtcccc

SEQ ID NO: 478616 - DNA, 120 bp, Artificial Sequence
  ENSG00000160716_44 (sequence is synthesized)
cccttgtttccgggcagagtcaggcaggtgtcataccatccctccccgcccaaccagtgctggccagactcccattcaccgaccttgactagacagcgaacagccaccttttagtattca

SEQ ID NO: 478617 - DNA, 120 bp, Artificial Sequence
  ENSG00000160716_45 (sequence is synthesized)
tcccaacaggtccaggcggtcagtgtgatagccacgcagttcctaagggactgtaggtctaggaatcattaggacactcactcagccaccctcgatgcccccatcttccccacactgccc

SEQ ID NO: 478618 - DNA, 120 bp, Artificial Sequence
  ENSG00000160716_46 (sequence is synthesized)
ttggcctccccgctctgcacgcctggagtatttgcactggtctagcctactccaggtcagactcattaggaactcaagattctcgtaaagaaagttgtttccaaagttgtcttgtcactc

SEQ ID NO: 478619 - DNA, 120 bp, Artificial Sequence
  ENSG00000160716_47 (sequence is synthesized)
tatttgggggttgggagagagcccgtgggggccagcgttggcgaatacaggaaaaagggagaatgctggagaaactggactcgtgagagcttaaagacatcacaagaatccaaagaaaaa

SEQ ID NO: 478620 - DNA, 120 bp, Artificial Sequence
  ENSG00000160716_48 (sequence is synthesized)
tacagcttatggtgtcactggcccagctcatcagtgtgcctctcttcctccctgcagcatgagcgggagcagatcatgaccaccaatgtctggctgacccaggagtgggaagattatcgc

SEQ ID NO: 478621 - DNA, 120 bp, Artificial Sequence
  ENSG00000160716_49 (sequence is synthesized)
atgttgcagatgaagaaactgacccacacggtgagacaagcacagagctgaggtgaacagctggaaccctgctacatccgtgctgctccagtctgttctgctcatggctccatccttctg

SEQ ID NO: 478622 - DNA, 120 bp, Artificial Sequence
  ENSG00000160741_0 (sequence is synthesized)
gggttcgcggtgctcgctgaggcggcggtggctacggctggaggagccgggccgaggccgcggcggaggccgcggctggtactgggagggtggcagggagggacggggaaggaagatggc

SEQ ID NO: 478623 - DNA, 120 bp, Artificial Sequence
  ENSG00000160741_1 (sequence is synthesized)
gacgtcgggggcgaacgggcctggttcggccacggcctcggcttccaatccgcgcaaatttagtgagaagattgcgctgcagaagcagcgtcaggccgaggagacggcggccttcgagga

SEQ ID NO: 478624 - DNA, 120 bp, Artificial Sequence
  ENSG00000160741_2 (sequence is synthesized)
ggtgatgatggacatcggctccacccggttacaggcccaaaaactgcgactggcatacacaaggagctctcattatggtgggtctctgcccaatgttaaccagattggctctggcctggc

SEQ ID NO: 478625 - DNA, 120 bp, Artificial Sequence
  ENSG00000160741_3 (sequence is synthesized)
cgagttccagagccccctccactcacctttggattcatctcggagcactcggcaccatgggctggtggaacgggtgcagcgagatcctcgaagaatggtgtccccacttcgccgatacac

SEQ ID NO: 478626 - DNA, 120 bp, Artificial Sequence
  ENSG00000160741_4 (sequence is synthesized)
ccgccacattgacagctctccctatagtcctgcctacttatctcctcccccagagtctagctggcgaaggacgatggcctggggcaatttccctgcagagaaggggcagttgtttcgact

SEQ ID NO: 478627 - DNA, 120 bp, Artificial Sequence
  ENSG00000160741_5 (sequence is synthesized)
accatctgcacttaacaggacaagctctgactctgcccttcatacaagtgtgatgaaccccagtccccaggatacctacccaggccccacacctcccagcatcctgcccagccgacgtgg

SEQ ID NO: 478628 - DNA, 120 bp, Artificial Sequence
  ENSG00000160741_6 (sequence is synthesized)
gggtattctggatggtgaaatggaccccaaagtacctgctattgaggagaacttgctagatgacaagcatttgctgaagccatgggatgctaagaagctatcctcatcctcttcccgacc

SEQ ID NO: 478629 - DNA, 120 bp, Artificial Sequence
  ENSG00000160741_7 (sequence is synthesized)
tcggtcctgtgaagtccctggaattaacatctttccatctcctgaccagcctgccaatgtgcctgtcctcccacctgccatgaacacggggggctccctacctgacctcaccaacctgca

SEQ ID NO: 478630 - DNA, 120 bp, Artificial Sequence
  ENSG00000160741_8 (sequence is synthesized)
ctttcccccaccactgcccacccccctggaccctgaagagacagcctaccctagcctgagtgggggcaacagtacctccaatttgacccacaccatgactcacctgggcatcagcagggg

SEQ ID NO: 478631 - DNA, 120 bp, Artificial Sequence
  ENSG00000160741_9 (sequence is synthesized)
catgggcctgggcccaggctatgatgcaccaggacttcattcacctctcagccacccatccctgcagtcctccctaagcaatcccaacctccaggcttccctgagcagtcctcagcccca

SEQ ID NO: 478632 - DNA, 120 bp, Artificial Sequence
  ENSG00000160741_10 (sequence is synthesized)
ctcctcttcctcctcctccacttcatctcctgttttgggcgccccctcttaccctgcttctacccctggggcctccccccaccaccgccgtgtgcccctcagccccctgagtttgctcgc

SEQ ID NO: 478633 - DNA, 120 bp, Artificial Sequence
  ENSG00000160741_11 (sequence is synthesized)
gggcccagccgacgccagaaggtcccaacagcagctgcccaaacagttttcgccaacaatgtcacccaccttgtcttccatcactcagggcgtccccctggataccagtaaactgtccac

SEQ ID NO: 478634 - DNA, 120 bp, Artificial Sequence
  ENSG00000160741_12 (sequence is synthesized)
tgaccagcggttacccccatacccatacagctccccaagtctggttctgcctacccagccccacaccccaaagtctctacagcagccagggctgccctctcagtcttgttcagtgcagtc

SEQ ID NO: 478635 - DNA, 120 bp, Artificial Sequence
  ENSG00000160741_13 (sequence is synthesized)
ctcaggtgggcagcccccaggcaggcagtctcattatgggacaccgtacccacctgggcccagtgggcatgggcaacagtcttaccaccggccaatgagtgacttcaacctggggaatct

SEQ ID NO: 478636 - DNA, 120 bp, Artificial Sequence
  ENSG00000160741_14 (sequence is synthesized)
ggagcagttcagcatggagagcccatcagccagcctggtgctggatccccctggcttttctgaagggcctggatttttagggggtgaggggccaatgggtggcccccaggatccccacac

SEQ ID NO: 478637 - DNA, 120 bp, Artificial Sequence
  ENSG00000160741_15 (sequence is synthesized)
cttcaaccaccagaacttgacccactgttcccgccatggctcagggcctaacatcatcctcacaggggactcctctccaggtttctctaaggagattgcagcagccctggccggagtgcc

SEQ ID NO: 478638 - DNA, 120 bp, Artificial Sequence
  ENSG00000160741_16 (sequence is synthesized)
tggctttgaggtgtcagcagctggattggagctagggcttgggctagaagatgagctgcgcatggagccactgggcctggaagggctaaacatgctgagtgacccctgtgccctgctgcc

SEQ ID NO: 478639 - DNA, 120 bp, Artificial Sequence
  ENSG00000160741_17 (sequence is synthesized)
tgatcctgctgtggaggagtcattccgcagtgaccggctccaatgagggcacctcatcaccatccctcttcttggccccatcccccaccaccattcctttcctcccttccccctggcagg

SEQ ID NO: 478640 - DNA, 120 bp, Artificial Sequence
  ENSG00000160741_18 (sequence is synthesized)
tagagactctactctctgtccccagatcctctttctagcatgaatgaaggatgccaagaatgagaaaaagcaaggggtttgtccaggtggcccctgaattctgcgcaagggatgggcctg

SEQ ID NO: 478641 - DNA, 120 bp, Artificial Sequence
  ENSG00000160741_19 (sequence is synthesized)
ggggaactcaagggagggcctaaagcacttgtaactttgaaccgtctgtctggaggtcagagcctgttggaaagcaggggtagaggggagccctggaagcagggcttttccggatgccta

SEQ ID NO: 478642 - DNA, 120 bp, Artificial Sequence
  ENSG00000160741_20 (sequence is synthesized)
ggggtgggcagtgccagcccctcctcaccactcttccccttgcagtggaggagagagccagagtggatactattttttattaaatatattattatatgttaataaaaaaatcatatcaaa

SEQ ID NO: 478643 - DNA, 120 bp, Artificial Sequence
  ENSG00000160741_21 (sequence is synthesized)
caggcatgagccaccatacccggcctccatggagctatttaaagcaggtaggcaagtgagcactgcagccaatgccactgtatcccttgcaggtattctggatggtgaaatggaccccaa

SEQ ID NO: 478644 - DNA, 120 bp, Artificial Sequence
  ENSG00000160741_22 (sequence is synthesized)
ccttgcaggtattctggatggtgaaatggaccccaaaggtatgtgttcctcactgctgtgggtactgaatgccaaagaatttctgggctggtgttgggattgtgtgcaggttcagggagc

SEQ ID NO: 478645 - DNA, 120 bp, Artificial Sequence
  ENSG00000160741_23 (sequence is synthesized)
acctccaatttgacccacaccatgactcacctgggcatcagcaggggcatgggcctgggcccaggctatgatgcaccaggtgagtgactgtcctggccatgtgcccactgggtgctgcct

SEQ ID NO: 478646 - DNA, 120 bp, Artificial Sequence
  ENSG00000160741_24 (sequence is synthesized)
gactggagggatgaaggggaggtaggtttgagcacctgagatcctgctgtgatcacccacaccgcctgtcacctctgcaccccaggattccctcacggcagttctcagccagtgataact

SEQ ID NO: 478647 - DNA, 120 bp, Artificial Sequence
  ENSG00000160741_25 (sequence is synthesized)
ggtaggtgtggtgtttcctagaaagaagaggaagggcagtccccagatgggcagtgctgtcagggatagagtagggaggacgttgtgttgccgctttcatagtctggtcactgccaccca

SEQ ID NO: 478648 - DNA, 120 bp, Artificial Sequence
  ENSG00000160746_0 (sequence is synthesized)
actggcctggcccgccccccgcaccgagcactctttcgcccggcctccggttctcgccggctctcggacccgcctccgaagacgtggagcgctgcggcggctgatttgtcaaagatgaaa

SEQ ID NO: 478649 - DNA, 120 bp, Artificial Sequence
  ENSG00000160746_1 (sequence is synthesized)
gtgaccttatcagctttggatacttctgagagttctttcacacctttggtggtcatagaacttgctcaggatgtcaaagaagaaaccaaagaatggctgaaaaacagaattatagctaaa

SEQ ID NO: 478650 - DNA, 120 bp, Artificial Sequence
  ENSG00000160746_2 (sequence is synthesized)
aaaaaagatggaggtgcccagttgttgtttagaccattgttaaataaatatgaacaagaaacactagaaaatcagaacttatatcttgttggtgcctccaagattagaatgttactaggg

SEQ ID NO: 478651 - DNA, 120 bp, Artificial Sequence
  ENSG00000160746_3 (sequence is synthesized)
gcagaagcagtgggattggtaaaagagtgcaatgataacaccatgagagccttcacatacagaaccagacagaacttcaaaggttttgatgataacaatgatgatttcctgacaatggca

SEQ ID NO: 478652 - DNA, 120 bp, Artificial Sequence
  ENSG00000160746_4 (sequence is synthesized)
gaatgtcaattcattatcaaacatgaacttgaaaatcttagagctaaagatgaaaaaatgatccctggttaccctcaggcaaagttgtatccaggaaaatcattgttgagaagattgctc

SEQ ID NO: 478653 - DNA, 120 bp, Artificial Sequence
  ENSG00000160746_5 (sequence is synthesized)
acgtctggcatcgtgattcaggtgtttccactgcatgacagtgaagccctgaagaagcttgaggacacctggtacactcggtttgctttgaagtatcagcccatagacagtattcgtggc

SEQ ID NO: 478654 - DNA, 120 bp, Artificial Sequence
  ENSG00000160746_6 (sequence is synthesized)
tactttggggaaacaattgctctgtactttggatttttggagtatttcacttttgcattaatccccatggctgtcattgggttaccttactacttgtttgtgtgggaagactatgacaag

SEQ ID NO: 478655 - DNA, 120 bp, Artificial Sequence
  ENSG00000160746_7 (sequence is synthesized)
tacgtgatctttgcctcgttcaacctcatctggtccacggtgattctggaactgtggaagcgtggctgtgccaacatgacctacaggtgggggacactgctcatgaagagaaagtttgag

SEQ ID NO: 478656 - DNA, 120 bp, Artificial Sequence
  ENSG00000160746_8 (sequence is synthesized)
gagccccggccaggatttcatggtgtcttgggtatcaattccatcactgggaaggaggagcctctgtaccccagctacaagagacagttgcgcatttacctggtctccctgccattcgtg

SEQ ID NO: 478657 - DNA, 120 bp, Artificial Sequence
  ENSG00000160746_9 (sequence is synthesized)
tgcctctgcctctatttctcactgtatgtcatgatgatttacttcgacatggaggtttgggccttgggtctacatgagaacagcgggtctgagtggaccagtgtcctgttgtatgtgccc

SEQ ID NO: 478658 - DNA, 120 bp, Artificial Sequence
  ENSG00000160746_10 (sequence is synthesized)
agcatcatctatgccattgtgattgagatcatgaatcgtctctatcgatatgctgccgagtttttaacttcatgggagaatcacagattggaatctgcctatcagaaccatctaattctg

SEQ ID NO: 478659 - DNA, 120 bp, Artificial Sequence
  ENSG00000160746_11 (sequence is synthesized)
aaagttttagtgttcaacttcctcaattgctttgcctcactcttctatattgcctttgtcttgaaagatatgaagcttttgcgccagagcttggccactctcctaattacctcccagatc

SEQ ID NO: 478660 - DNA, 120 bp, Artificial Sequence
  ENSG00000160746_12 (sequence is synthesized)
ctcaaccaaattatggaatcttttcttccttattggctccaaaggaagcatggtgtgcgggtgaagaggaaggtgcaggctttaaaggcagacattgatgctacattatatgaacaagtc

SEQ ID NO: 478661 - DNA, 120 bp, Artificial Sequence
  ENSG00000160746_13 (sequence is synthesized)
ctttgatgattacttggagttattcctgcagtttggttatgtgagccttttctcctgtgtttacccattagcagctgcctttgctgtgttaaataacttcactgaagtaaattcagatgc

SEQ ID NO: 478662 - DNA, 120 bp, Artificial Sequence
  ENSG00000160746_14 (sequence is synthesized)
cttaaaaatgtgcagggtcttcaaacgtccattctcagaaccttcagccaatattggtgtgtggcagttggcttttgaaacgatgagtgttatatctgtggtcactaactgtgcgctgat

SEQ ID NO: 478663 - DNA, 120 bp, Artificial Sequence
  ENSG00000160746_15 (sequence is synthesized)
tggaatgtcaccacaagtgaatgcagtctttccagaatcaaaagcagacctcattttgattgtagtagcagtggagcacgcactcctggctttaaagtttatacttgcatttgccatacc

SEQ ID NO: 478664 - DNA, 120 bp, Artificial Sequence
  ENSG00000160746_16 (sequence is synthesized)
tgataagccacggcatatccagatgaaactagccagactggaatttgagtctttggaggcactcaagcagcagcaaatgaagctcgtgaccgagaacctgaaggaggaaccaatggaaag

SEQ ID NO: 478665 - DNA, 120 bp, Artificial Sequence
  ENSG00000160746_17 (sequence is synthesized)
cgggaaggagaaggcaacctgagtgcccagcgtgcccagctgccctgttggcagaggcctgtgtctgtgccacacctgccacggtggcagggggggtacccggggcagcatcgtggctcc

SEQ ID NO: 478666 - DNA, 120 bp, Artificial Sequence
  ENSG00000160746_18 (sequence is synthesized)
tgaacccagacccaatgcttagccaaacgaagtggctcccatgtggcaagcacccttctcagtttcgcagtggcttggctcgggatccttggcagttcccccagccccaccctgtctgct

SEQ ID NO: 478667 - DNA, 120 bp, Artificial Sequence
  ENSG00000160746_19 (sequence is synthesized)
ccttcccagttccttcccgggccccacacgctgctccagctgccaactttgctgcagagccactgccgcccttgagcctctcaccatgagtgagccaccagctctccacgttcccctcat

SEQ ID NO: 478668 - DNA, 120 bp, Artificial Sequence
  ENSG00000160746_20 (sequence is synthesized)
agcagtgtcactcccaaccccaccatggcccagggacccgtggacaggttggggatggggtgtgtgcccactgtgctcatcacaggagcctcagttgagagtgagcggggtacagtaagg

SEQ ID NO: 478669 - DNA, 120 bp, Artificial Sequence
  ENSG00000160746_21 (sequence is synthesized)
cagtgcttcccacactggacctctttcctggttctcttttgcaatacattaacagaccctttatcaacataaacaatagtaactgagctattaaaggcaacctctctgactccttctgcc

SEQ ID NO: 478670 - DNA, 120 bp, Artificial Sequence
  ENSG00000160746_22 (sequence is synthesized)
tacataggtaccgcaatgggcttcccttttctgaagcacttggtgaggtcactgaaggtggagcggtgagatcaggagcccagggtgaggggcttggctggaggccaggcaccaaagctt

SEQ ID NO: 478671 - DNA, 120 bp, Artificial Sequence
  ENSG00000160746_23 (sequence is synthesized)
gtagctgaaggctgggccatttttgagaactgctgctggtggtgcccacctacagggacactagggctgctttcacatgcagggtgtacccatggtgccaagccaagggccagcagccac

SEQ ID NO: 478672 - DNA, 120 bp, Artificial Sequence
  ENSG00000160746_24 (sequence is synthesized)
tcctggtgccctggcctgggcttgggcttgcagagaaaagggccctccttgcccagtggtgctgcccacctccctagctgtgtccatggactgccctgcattcacaggcacaagaatgcc

SEQ ID NO: 478673 - DNA, 120 bp, Artificial Sequence
  ENSG00000160746_25 (sequence is synthesized)
atgtaggccagtgctgcccacgtatacagcccttcccaccagcgctggccgtcctgctgtagccaagacactacagacccgtgggcacctccactcggacagcagcagatgccctggccc

SEQ ID NO: 478674 - DNA, 120 bp, Artificial Sequence
  ENSG00000160746_26 (sequence is synthesized)
ttggtgtgtggcagatcatattttgtttggacacaggtgtaaagagagggctgaattgcaaggtcatgaggaatcttttgggggaaatggaaatgtcctgtgtcttgtttgtggtggtgg

SEQ ID NO: 478675 - DNA, 120 bp, Artificial Sequence
  ENSG00000160746_27 (sequence is synthesized)
cactcagctaagccactcccacattcctgtcagaaactgagtgacataatgactctgtggtttttaggctgctatatctgggagcaatatgttcaacaggagtggtacctaccttgagta

SEQ ID NO: 478676 - DNA, 120 bp, Artificial Sequence
  ENSG00000160746_28 (sequence is synthesized)
ttaataattgttgagagtcacctttctcaccccttcacttgatggcgctgtggtgcaactgcaaactcctgtggcaacgacttgtctcgctgtacagcagacaaaagataaaaagcaaga

SEQ ID NO: 478677 - DNA, 120 bp, Artificial Sequence
  ENSG00000160746_29 (sequence is synthesized)
atctgcttagttctacaaagtggagtttctgggcatcattcttcatttctgtacacaaagtgctgtgaagctcaagaagaaatagctctgcacaggaacgatgtgcactgccctactgct

SEQ ID NO: 478678 - DNA, 120 bp, Artificial Sequence
  ENSG00000160746_30 (sequence is synthesized)
tctttatctaagatggtgtttcaacttaaaacttgtgaatgtgaaatatgagccaaaagactctctcggccctgaaatgacctttgtagcagatgctgccagaggccccctgttatcctc

SEQ ID NO: 478679 - DNA, 120 bp, Artificial Sequence
  ENSG00000160746_31 (sequence is synthesized)
cctggactctccagctaacctgatgtcaactgccagtgtgtgcatctccttacctgagggctgttctggtggcaggagtccttgctactcacagaaatggccaccagaagtgccagaaaa

SEQ ID NO: 478680 - DNA, 120 bp, Artificial Sequence
  ENSG00000160746_32 (sequence is synthesized)
cacctcggaccccccagctgtccgcagcagagcccggccccttgcagccacagagccccggccgctgcaggctccaggagctccgcctggtcgccgccctgcgttcccgggccgcctccc

SEQ ID NO: 478681 - DNA, 63 bp, Artificial Sequence
  ENSG00000160746_33 (sequence is synthesized)
ttcctacggctacgggaaggatcgtccagtggctgaggctggacagagatgatccgcccacct

SEQ ID NO: 478682 - DNA, 120 bp, Artificial Sequence
  ENSG00000160746_34 (sequence is synthesized)
gctctcggacccgcctccgaagacgtggagcgctgcggcggctggcagctgccctaggtacaaggagggaggctcccacaattgctctcaccattaactgcctgcctgtagatttgtcaa

SEQ ID NO: 478683 - DNA, 120 bp, Artificial Sequence
  ENSG00000160746_35 (sequence is synthesized)
cccttcctacggctacgggaaggatcgtccagtggctgaggctggacagagcacaggaattcctggttgtttcatgaaagggccgtatattcaaagtgacctccaaatacagaaggagct

SEQ ID NO: 478684 - DNA, 120 bp, Artificial Sequence
  ENSG00000160746_36 (sequence is synthesized)
gagaaactaaagaatgaaggagacaaatccagcttgtcagcaaaaggtgatttattagggaacttacggacagaagcatggtcttggacagcagcaagacaggaagcccatgccatgtcc

SEQ ID NO: 478685 - DNA, 120 bp, Artificial Sequence
  ENSG00000160746_37 (sequence is synthesized)
ctatctggtggggaactgagactgcctgcagtcatgtgagggagccaccttagaggcagaccctccagcctgagtcaagccttcagatgactgcaggtgacatcttgaccacaacctcag

SEQ ID NO: 478686 - DNA, 120 bp, Artificial Sequence
  ENSG00000160746_38 (sequence is synthesized)
gcgtccgccatccccagccagcatgcactagttctcccgcccgacgctcccgggtgtaagcgcggggcgggacagtcagcccagagggactggcgagactcacccgaatgagttaggtgt

SEQ ID NO: 478687 - DNA, 120 bp, Artificial Sequence
  ENSG00000160746_39 (sequence is synthesized)
cgaatgagttaggtgttttagctaatttgaataatgactgtattcatgcatcaccccgtcggtgttggctgtcaggtggcaccttggggacggagtagagatggggtttcaccatgttgg

SEQ ID NO: 478688 - DNA, 120 bp, Artificial Sequence
  ENSG00000160746_40 (sequence is synthesized)
tcctgtggctcacacagggacctccagatgattggagccctgctcacactcttcagttctccactctctgcattcttcctccctgcttcgcccttcttcgaattccctgaccctgatagc

SEQ ID NO: 478689 - DNA, 120 bp, Artificial Sequence
  ENSG00000160752_0 (sequence is synthesized)
gagtacccgccaacaagcgggaccgagcaggaatccgtatctgggaacaggtgagagaggatgtgtgctgggccttggaggaagggggccgagaccgggccttacttctgtaacgatact

SEQ ID NO: 478690 - DNA, 120 bp, Artificial Sequence
  ENSG00000160752_1 (sequence is synthesized)
gtgaggcatcggaaggccagcctgttgtgtccgttttgaaggatgcccctgtcccgctggttgagatctgtgggggtcttcctgctgccagccccctactgggcaccccgggagaggtgg

SEQ ID NO: 478691 - DNA, 120 bp, Artificial Sequence
  ENSG00000160752_2 (sequence is synthesized)
ctgggttccctacggcggccctccctggtgcacgggtacccagtcctggcctggcacagtgcccgctgctggtgccaagcgtggacagaggaacctcgagccctttgctcctccctcaga

SEQ ID NO: 478692 - DNA, 120 bp, Artificial Sequence
  ENSG00000160752_3 (sequence is synthesized)
atgaacggagaccagaattcagatgtttatgcccaagaaaagcaggatttcgttcagcacttctcccagatcgttagggtgctgactgaggatgagatggggcacccagagataggagat

SEQ ID NO: 478693 - DNA, 120 bp, Artificial Sequence
  ENSG00000160752_4 (sequence is synthesized)
gctattgcccggctcaaggaggtcctggagtacaatgccattggaggcaagtataaccggggtttgacggtggtagtagcattccgggagctggtggagccaaggaaacaggatgctgat

SEQ ID NO: 478694 - DNA, 120 bp, Artificial Sequence
  ENSG00000160752_5 (sequence is synthesized)
agtctccagcgggcctggactgtgggctggtgtgtggaactgctgcaagctttcttcctggtggcagatgacatcatggattcatcccttacccgccggggacagatctgctggtatcag

SEQ ID NO: 478695 - DNA, 120 bp, Artificial Sequence
  ENSG00000160752_6 (sequence is synthesized)
cctcctggaagcatgtatctaccgcctgctgaagctctattgccgggagcagccctattacctgaacctgatcgagctcttcctgcagagttcctatcagactgagattgggcagaccct

SEQ ID NO: 478696 - DNA, 120 bp, Artificial Sequence
  ENSG00000160752_7 (sequence is synthesized)
ggacctcctcacagccccccagggcaatgtggatcttgtcagattcactgaaaagaggtacaaatctattgtcaagtacaagacagctttctactccttctaccttcctatagctgcagc

SEQ ID NO: 478697 - DNA, 120 bp, Artificial Sequence
  ENSG00000160752_8 (sequence is synthesized)
catgtacatggcaggaattgatggcgagaaggagcacgccaatgccaagaagatcctgctggagatgggggagttctttcagattcaggatgattaccttgacctctttggggaccccag

SEQ ID NO: 478698 - DNA, 120 bp, Artificial Sequence
  ENSG00000160752_9 (sequence is synthesized)
tgtgaccggcaaaattggcactgacatccaggacaacaaatgcagctggctggtggttcagtgtctgcaacgggccactccagaacagtaccagatcctgaaggaaaattacgggcagaa

SEQ ID NO: 478699 - DNA, 120 bp, Artificial Sequence
  ENSG00000160752_10 (sequence is synthesized)
ggaggctgagaaagtggcccgggtgaaggcgctatatgaggagctggatctgccagcagtgttcttgcaatatgaggaagacagttacagccacattatggctctcattgaacagtacgc

SEQ ID NO: 478700 - DNA, 120 bp, Artificial Sequence
  ENSG00000160752_11 (sequence is synthesized)
agcacccctgcccccagccgtctttctggggcttgcgcgcaaaatctacaagcggagaaagtgacctagagattgcaagggcggggagaggaggctctcaataaataatcgtgtaacctt

SEQ ID NO: 478701 - DNA, 120 bp, Artificial Sequence
  ENSG00000160752_12 (sequence is synthesized)
agtgtggggagagcgggaactactcgacccacagagccgatcgcggagcggattctgcttttaggagtacccgccaacaagcgggaccgagcaggaatccgtatctgggaacaggatgcc

SEQ ID NO: 478702 - DNA, 120 bp, Artificial Sequence
  ENSG00000160752_13 (sequence is synthesized)
atctgtccctcccgcgggcacattgggagttgtagtctaattatatatttccgcccttagtgtggggagagcgggaactactcgacccacagagccgatcgcggagcggattctgctttt

SEQ ID NO: 478703 - DNA, 120 bp, Artificial Sequence
  ENSG00000160752_14 (sequence is synthesized)
ggcaatgtggatcttgtcagattcactgaaaagaggtgaggggaggtgagggacagcgcgaaccatgtctggacagcgagggagggctcaggatgtgcattgccctcctgaggagtttct

SEQ ID NO: 478704 - DNA, 120 bp, Artificial Sequence
  ENSG00000160752_15 (sequence is synthesized)
cagggcccgatgcccagagggtgcccatggtagccttggcctctataggacatgctcatctagctggtttcagggtacaggattgcagcgtgcctggaagggaaagaaagcgaggaaggg

SEQ ID NO: 478705 - DNA, 120 bp, Artificial Sequence
  ENSG00000160752_16 (sequence is synthesized)
tgttgggaagtggggttgtggtagtggcaagaaagggcttctctgtcctgtgtaattggaagaaagggtgataaaggactgtgtgtatgaatatgggccttaagttttggggctttctcc

SEQ ID NO: 478706 - DNA, 120 bp, Artificial Sequence
  ENSG00000160752_17 (sequence is synthesized)
ccttctgttgcctttctgattctgcccagttgtcagctggtatgggatgttgggcttgggataccagggtttcgcatatctggagaaagcctggctcatggaccgtctttgtcttgctta

SEQ ID NO: 478707 - DNA, 120 bp, Artificial Sequence
  ENSG00000160752_18 (sequence is synthesized)
aggagtacccgccaacaagcgggaccgagcaggaatccgtatctgggaacagggagtgcttagtgccccctccctatgccactcccaggatgcccctgtcccgctggttgagatctgtgg

SEQ ID NO: 478708 - DNA, 120 bp, Artificial Sequence
  ENSG00000160752_19 (sequence is synthesized)
caatatgcccggaccccggtttactcctttgctgcgagcccttctctcccgtccagagttgctccgagcctatctgctcagtcctagcgattcctgtggggcttgggacgcgcggttcaa

SEQ ID NO: 478709 - DNA, 120 bp, Artificial Sequence
  ENSG00000160752_20 (sequence is synthesized)
gcaccccggaccatatggatgcagcacccatgggttctcgctccaatgcttctttcctccttggggcgtaactcagaccctgggcacccctctccactgcccaggggagacctgggttct

SEQ ID NO: 478710 - DNA, 120 bp, Artificial Sequence
  ENSG00000160752_21 (sequence is synthesized)
agatttggctctgcctctactatcttcctacctcctagagcctcagtttggcttgtgtaaaataggatgacttaagggtcctttcagcccctaatcctggggtactttactctgtaccgc

SEQ ID NO: 478711 - DNA, 120 bp, Artificial Sequence
  ENSG00000160752_22 (sequence is synthesized)
ctccttacccagccttgtgcacgccatcttgaaggcactgagttctagcctgtttattgtaagtggtgattagttgggtctcagtcacccagccatacttttttgttccctgcgtatcct

SEQ ID NO: 478712 - DNA, 120 bp, Artificial Sequence
  ENSG00000160752_23 (sequence is synthesized)
tcctgtaattgtccccaagcacattccacaagagggaggggcactctgggctaaggctggggtgggagttatctggggagctgccaccatgcctctgcctttggtgcttgcccctgcagg

SEQ ID NO: 478713 - DNA, 120 bp, Artificial Sequence
  ENSG00000160752_24 (sequence is synthesized)
ctggtgtgtggaactggtgagaggggtagggcaagggagaagaagtttcctgcaatggtggtgacttgggtgggaaggggagggatgggcctgaaacttatttctgggttgtgtttgtgt

SEQ ID NO: 478714 - DNA, 120 bp, Artificial Sequence
  ENSG00000160752_25 (sequence is synthesized)
ttctttgtctctagtgtgctacggccaaatttagagtgaatcactccaagggttaactaatgtggggagcctcttttggcattaggtatgaagatggctgtagatagttgtagacagtgt

SEQ ID NO: 478715 - DNA, 120 bp, Artificial Sequence
  ENSG00000160752_26 (sequence is synthesized)
ggactggggcctcgagactgggcagagaggtgtcagctctttcctctgagcagaggatggctataaaagtgacagaggaggccgggcatggtggctgacacctgcaatcccagcactttg

SEQ ID NO: 478716 - DNA, 69 bp, Artificial Sequence
  ENSG00000160752_27 (sequence is synthesized)
caatcccagcactttgggaggccaagggggaggatcatctgagcaaaatacaaagttagctggatgtgg

SEQ ID NO: 478717 - DNA, 120 bp, Artificial Sequence
  ENSG00000160752_28 (sequence is synthesized)
ggaacaggtgagagaggatgtgtgctgggccttggaggaagggggccgagaccgggccttacttctgtaacgatactgtgaggcatcggaaggccagcctgttgtgtccgttttgaaggg

SEQ ID NO: 478718 - DNA, 120 bp, Artificial Sequence
  ENSG00000160753_0 (sequence is synthesized)
ggatcctggaggtgggggctgtgccctgagggagggcacagggaaccgggatggggctgggggacagcgagtgctgggaagtgtgcgagatttcactccggggctcgggtcgagctaccc

SEQ ID NO: 478719 - DNA, 120 bp, Artificial Sequence
  ENSG00000160753_1 (sequence is synthesized)
cgtgcttcaggcggtcctgcgcctcctctccccaagacccttcggggacacagcactgcagacccgccggagacaacttgtgcgggagcccggagtcctcggaataacacttggtaagtg

SEQ ID NO: 478720 - DNA, 120 bp, Artificial Sequence
  ENSG00000160753_2 (sequence is synthesized)
ttaccgcgcccttcttcccttacgccagtccgtagttcgtggtccttcgccggtgtccccggagcccagcggctgtggatggcagaagcccagagtgggactggtcagctgcaggagcag

SEQ ID NO: 478721 - DNA, 120 bp, Artificial Sequence
  ENSG00000160753_3 (sequence is synthesized)
aagaaaggtcttctgatagccgtcagcgtctccgttgataaaatcatctcgcatttcggggccgcccggaacttggtgcagaaggcccagttgggtgatagccggctgagcccggatgtg

SEQ ID NO: 478722 - DNA, 120 bp, Artificial Sequence
  ENSG00000160753_4 (sequence is synthesized)
gggcacctggtgctgaccaccctctgcccggccctccacgccctggtggcggacgggctgaagcctttccggaaggacctcatcaccgggcagcgcaggagcagcccctggagcgtggtg

SEQ ID NO: 478723 - DNA, 120 bp, Artificial Sequence
  ENSG00000160753_5 (sequence is synthesized)
gaggcgtcggtgaagccaggctccagcacccgctcccttggaaccctgtatagccaggtcagccgtctagccccgctgagcagcagccgtagccgcttccatgcctttatcctgggcctc

SEQ ID NO: 478724 - DNA, 120 bp, Artificial Sequence
  ENSG00000160753_6 (sequence is synthesized)
ctcaacaccaagcagttggagctgtggttttccagtctccaggaagatgcaggcctgctctccctcctgtacctgccaacaggatttttctccctggcccgcggtggttgtccctccctg

SEQ ID NO: 478725 - DNA, 120 bp, Artificial Sequence
  ENSG00000160753_7 (sequence is synthesized)
tccacagagctgctgctcctgctgcagccattgtcggtgctcactttccacctggacctgctctttgagcaccaccaccacctgcccctgggcccacctcaggcccctgcccctccaggc

SEQ ID NO: 478726 - DNA, 120 bp, Artificial Sequence
  ENSG00000160753_8 (sequence is synthesized)
ccacctccagctctgcagcagactatgcaagccatgctgcactttgggggccggctggcccagagccttcgggggacttccaaggaagctgcttcagacccctctgactctccaaacctt

SEQ ID NO: 478727 - DNA, 120 bp, Artificial Sequence
  ENSG00000160753_9 (sequence is synthesized)
acaccagggagctggtgggagcagttgacccaggcctcccgggtctatgcctctgggggcactgagggctttcctctttcccgatgggcaccggggcgtcatgggactgcagctgaagaa

SEQ ID NO: 478728 - DNA, 120 bp, Artificial Sequence
  ENSG00000160753_10 (sequence is synthesized)
ggtgcacaggagagacccctgcccacagatgagatggcaccaggcaggggcctctggttgggaagactatttggagtgcctgggggccccgcagaaaatgagaatggagccctaaagtcc

SEQ ID NO: 478729 - DNA, 120 bp, Artificial Sequence
  ENSG00000160753_11 (sequence is synthesized)
aggagaccatctagctggctgcccccgacagtgagtgtgttggctcttgtgaagcggggggcacctcccgagatgccttctcctcaggagcttgaggcctcagcacccaggatggtgcaa

SEQ ID NO: 478730 - DNA, 120 bp, Artificial Sequence
  ENSG00000160753_12 (sequence is synthesized)
acccatagggcagtgcgggctctctgtgatcacactgctgcaagacctgaccagttgagcttccggcgtggggaagtgctgcgtgtcatcaccacagtggatgaggactggctccgctgt

SEQ ID NO: 478731 - DNA, 120 bp, Artificial Sequence
  ENSG00000160753_13 (sequence is synthesized)
gggcgggatggcatggagggtctggtgcctgtggggtatacctcccttgttctgtagccctgggaccctttcctgcgtatgtgtctccttcctgtcacctgggaatggaatggccagtga

SEQ ID NO: 478732 - DNA, 120 bp, Artificial Sequence
  ENSG00000160753_14 (sequence is synthesized)
acaccatcccagaagcattttccctctgcaaaatgacgtttcttcccacgtctgtttctgctaatatttaaaataaactttccttcttccctcctatacccacctgtaaggtgaaatctg

SEQ ID NO: 478733 - DNA, 120 bp, Artificial Sequence
  ENSG00000160753_15 (sequence is synthesized)
ctcttcttccaaatatataaaaaaggaattgccctccaggtaatccctttcctttttcccgtctatataagggaatgtcttccttcctatctatctgcaaaatggaaatctagacctcct

SEQ ID NO: 478734 - DNA, 120 bp, Artificial Sequence
  ENSG00000160753_16 (sequence is synthesized)
tcttcatccataagtggactgtgccagtacaatacatgcctcagcccccaagcctagaaggacctctagtctccttcctgtgtggaatcttccccactccatccctcccaagttgcctgt

SEQ ID NO: 478735 - DNA, 120 bp, Artificial Sequence
  ENSG00000160753_17 (sequence is synthesized)
attgataatgtactcactcatgctgtactaggtgctgaagcctggacacccttggtgggtgggcctgtggtgatggtttgcatccttcctcctttgtcccaataaagtatgggagttgaa

SEQ ID NO: 478736 - DNA, 120 bp, Artificial Sequence
  ENSG00000160753_18 (sequence is synthesized)
gccgactccaagcaagtttgtcggccttggggagtctggccccgttcctagtgctggagggggaagttgttgcctttcctgctccgtgggccggccccctctccctccagacccacctgg

SEQ ID NO: 478737 - DNA, 120 bp, Artificial Sequence
  ENSG00000160753_19 (sequence is synthesized)
gcatagtggacgcgggcttacccagcctccatgccaagtctagggggtcccagcgagtctgttgttaggggctttgggtcacaccctctgtggaattccttggcctgtgcagctcgggcc

SEQ ID NO: 478738 - DNA, 120 bp, Artificial Sequence
  ENSG00000160753_20 (sequence is synthesized)
tgccccccgaccttgctagggaggggtggagggtgaagctcccgggagctcattggcactagaggttctggccacgccctctccgcgagtccagtcccacgcgggatgaagagggcaccc

SEQ ID NO: 478739 - DNA, 120 bp, Artificial Sequence
  ENSG00000160753_21 (sequence is synthesized)
tccgccaagaggctgctgcgggacccgggtttcccctttccggcgccttccagcctcccaatcctcgggtctcgcctccctccgtctcctccctttcccctgtctgtctttccattggtc

SEQ ID NO: 478740 - DNA, 120 bp, Artificial Sequence
  ENSG00000160753_22 (sequence is synthesized)
ggtccatgccgcccacgtgctccccggggctccgcaggcaggactgggccccggggcggtgcgctgggctacacctccctccccgcgccccgtcctctcccgccctacaggccctagcag

SEQ ID NO: 478741 - DNA, 120 bp, Artificial Sequence
  ENSG00000160753_23 (sequence is synthesized)
gtgctagtgcccctcccctcccgctctgtgccccgccgggcggggaccgtgggagccgcggacaagcccaaggccggagcggttccaggaggaccctggtctgcacctgtggttgccagg

SEQ ID NO: 478742 - DNA, 120 bp, Artificial Sequence
  ENSG00000160753_24 (sequence is synthesized)
taggtggatgtgagagaccctacccttctggttctctagaagccatcccatcgccgctagcatcatgctgtcccctcagagagctttactctgcaacctcaaccacatccacctccagca

SEQ ID NO: 478743 - DNA, 120 bp, Artificial Sequence
  ENSG00000160753_25 (sequence is synthesized)
cgtctccctgggcctgcacttgtcccgccgtcctgagctacaggaggggcctttgagcacaccccctcctccaggagacactgggggcaaggagagcaggggcccctgcagtggcaccct

SEQ ID NO: 478744 - DNA, 120 bp, Artificial Sequence
  ENSG00000160753_26 (sequence is synthesized)
ggtggacgccaattccaacagcccagctgtgccctgccggtgctgccaggagcacggtccgggcctagaaaaccggcaggacccgtcacaggaggaagagggggctgcctctccctcaga

SEQ ID NO: 478745 - DNA, 120 bp, Artificial Sequence
  ENSG00000160753_27 (sequence is synthesized)
cccaggctgctcctcctcactcagctcctgctcagatcttagccccgatgagtcccctgtctcagtctacttgcgggacctccctggtgatgaggatgcccaccctcagcccagtatcat

SEQ ID NO: 478746 - DNA, 120 bp, Artificial Sequence
  ENSG00000160753_28 (sequence is synthesized)
ccccctggagcagggctccccactggcttcagcaggccctggcacctgctcaccggacagcttctgctgctctcctgattcctgctccggagcttcttcttcacccgatcctggcctgga

SEQ ID NO: 478747 - DNA, 120 bp, Artificial Sequence
  ENSG00000160753_29 (sequence is synthesized)
ctcgaactgcaacgccctgaccacctgccaggacgtcccttccccaggcttggaggaagaggacgagagggcggagcaggatctccctacctctgagctcttagaggcggatgatgggaa

SEQ ID NO: 478748 - DNA, 120 bp, Artificial Sequence
  ENSG00000160753_30 (sequence is synthesized)
aatcgacgctgggaaaacggagcccagttggaagattaacccaatttggaaaattgacacagagaaaactaaagctgaatggaaaaccactgaaaacaataacactggttggaaaaacaa

SEQ ID NO: 478749 - DNA, 120 bp, Artificial Sequence
  ENSG00000160753_31 (sequence is synthesized)
cgggaatgttaactctagctggaaaagtgaacctgaaaaattcgactctggttggaaaaccaacacaagaataactgattctggctcgaaaacagatgcagggaaaattgatggaggatg

SEQ ID NO: 478750 - DNA, 120 bp, Artificial Sequence
  ENSG00000160753_32 (sequence is synthesized)
gagaagtgacgtcagcgaggagccggtgccccaccggacaatcacgtccttccacgagctggcccagaagcgcaagcggggcccagggctgccccttgtcccgcaggcgaagaaagatcg

SEQ ID NO: 478751 - DNA, 120 bp, Artificial Sequence
  ENSG00000160753_33 (sequence is synthesized)
cagtgactggctcatagtcttctcgcccgacaccgagctccccccctcggggtcgccgggcggctcctcggcacctcctcgggaagtcaccaccttcaaggaactccggtcccgaagccg

SEQ ID NO: 478752 - DNA, 120 bp, Artificial Sequence
  ENSG00000160753_34 (sequence is synthesized)
ggccccagccccgccagtcccgcctcgagaccccccagttggctgggctttggtcccgccccggcccccacccccgcctgtccctccccgaaggaagaagaaccgacctggactgcagcc

SEQ ID NO: 478753 - DNA, 120 bp, Artificial Sequence
  ENSG00000160753_35 (sequence is synthesized)
catagcggaggggcagtccgaggagggccgggctgtcagcccagcggctggcgaggaggccccagccgcgaaggagccgggcgcgcaggccggcctggaggtccgtagttcgtggtcctt

SEQ ID NO: 478754 - DNA, 120 bp, Artificial Sequence
  ENSG00000160753_36 (sequence is synthesized)
tgcagaaggtgaaggtggctggggggaggctgttgggatgaggagagtaatggagctccgcggggggtgcgggaatggttggcgggaggtggctgggaggtgtctggagggatctctgga

SEQ ID NO: 478755 - DNA, 120 bp, Artificial Sequence
  ENSG00000160753_37 (sequence is synthesized)
ccggcgccgggctgcggctgctgggggcgccgagccccccagaggagcagctgctgcccgtccgcctgtccccggtgggagcctattcgcctccgactcggggagccttgccctgcctgg

SEQ ID NO: 478756 - DNA, 120 bp, Artificial Sequence
  ENSG00000160753_38 (sequence is synthesized)
ttttccagtctccaggaagatgcaggtcagaggttcagatggtagaggatggggctgatgggctgggaggatgggaaggaaagagttctctcctgctggttcccactgctgccagaatgc

SEQ ID NO: 478757 - DNA, 120 bp, Artificial Sequence
  ENSG00000160753_39 (sequence is synthesized)
cattaatccagatctccgatcttattactcttctaattaaaactttctaaggaggcccatcgcccataggatgaaagacccaaagccttggctgtctggcctctgccctcttcccctgcc

SEQ ID NO: 478758 - DNA, 120 bp, Artificial Sequence
  ENSG00000160753_40 (sequence is synthesized)
ttggagggtcttgccaacagtcttcccgcctggcccttcctgctccagggccctgcttatgctgttcctctaccttctgcccctcctgcttcctctgaactatcattcatcctttgagtc

SEQ ID NO: 478759 - DNA, 120 bp, Artificial Sequence
  ENSG00000160753_41 (sequence is synthesized)
cttccccagtgaggccctacctctaccctcggactaggccaacccccacgcctcattttgtatgtgcttctatggctctcctgtcctcctcctctgtagcctttgcactgtctctgttac

SEQ ID NO: 478760 - DNA, 120 bp, Artificial Sequence
  ENSG00000160753_42 (sequence is synthesized)
tgtcttcctatttgggctaggttccatgcaggcggggatgtcagtcctatagcccaccacatccttcctcctctctgccccagtgcccagcagagtgaggcctgggaagatgtgtgctga

SEQ ID NO: 478761 - DNA, 120 bp, Artificial Sequence
  ENSG00000160753_43 (sequence is synthesized)
ctggtgggctgctctggggggtcttctgggactaggtccagggcaggagctgatgttggcctgctcttttccaggcctgctctccctcctgtacctgccaacaggatttttctccctggc

SEQ ID NO: 478762 - DNA, 120 bp, Artificial Sequence
  ENSG00000160767_0 (sequence is synthesized)
attcccatcccccttctctagtccccgacctgcggcagccggagctcggggagcggagcgtggtggggaggggagcgggacaggcgacacaggagacagcggcgccgcggcctctcccca

SEQ ID NO: 478763 - DNA, 120 bp, Artificial Sequence
  ENSG00000160767_1 (sequence is synthesized)
ccaggcggccccggatcctactggacgccctgagggcacaccgaccgcgcctctagagtcaccccacgccgacccctcccctcttctctagacttatttccatccttcccgcttttaccc

SEQ ID NO: 478764 - DNA, 120 bp, Artificial Sequence
  ENSG00000160767_2 (sequence is synthesized)
tccccacccctccctgggctccaggccgccgccccctcctcactcctggaccggcccttctcggtgcccctcttccctagggagatgcgatgagccggtgcccccgcgtcctcatcgtcg

SEQ ID NO: 478765 - DNA, 120 bp, Artificial Sequence
  ENSG00000160767_3 (sequence is synthesized)
ccccgggcacggtgcccgtccagtgcccgtggtggggagggagcactccgcggtccctccgtgacgcccctcgcttggccccccccacagctggcgtccctcggccatgccccaggggac

SEQ ID NO: 478766 - DNA, 120 bp, Artificial Sequence
  ENSG00000160767_4 (sequence is synthesized)
ccagccagggggtgggctctagagcgagtggggtggagaggagaaaggacggggccttgggcgcctctgagatgctcccaagtgccagggagggccgagcgaggcgcaggcaaccgggca

SEQ ID NO: 478767 - DNA, 120 bp, Artificial Sequence
  ENSG00000160767_5 (sequence is synthesized)
gcaggcatgatgccctcgcctagtgactccagccgctcgctgaccagccggcccagcaccaggggccttacccacctccgcctccaccgaccctggctgcaggccctgcttacgctgggg

SEQ ID NO: 478768 - DNA, 120 bp, Artificial Sequence
  ENSG00000160767_6 (sequence is synthesized)
ctggtccaagtgctcctgggcatcctggtggtcaccttcagcatggtggcctcttccgtcaccaccaccgagagcatcaagaggtcctgcccgtcttgggctgggttctcgctggcgttc

SEQ ID NO: 478769 - DNA, 120 bp, Artificial Sequence
  ENSG00000160767_7 (sequence is synthesized)
tccggggtggttggcattgtgtcctggaagcggccattcactctagtgatctccttcttctccttgctttcggtgctctgtgtcatgcttagcatggctggctctgttctctcctgtaag

SEQ ID NO: 478770 - DNA, 120 bp, Artificial Sequence
  ENSG00000160767_8 (sequence is synthesized)
aatgctcaactggcccgagacttccaacagtgctctctggaaggaaaggtctgtgtgtgctgtccctctgttcccctcctccggccctgtccagagtcggggcaggaactgaaagttgcc

SEQ ID NO: 478771 - DNA, 120 bp, Artificial Sequence
  ENSG00000160767_9 (sequence is synthesized)
cctaactccacctgtgatgaagcccgaggggccctcaagaacctgctcttcagcgtctgtgggctcaccatttgtgccgctataatctgtacactctctgctattgtctgctgcatccaa

SEQ ID NO: 478772 - DNA, 120 bp, Artificial Sequence
  ENSG00000160767_10 (sequence is synthesized)
atcttctccctggacctcgtgcatacgctggcccctgagcggtcagtctcaggcccactgggacctctgggctgcacgtccccgcccccagcccctctcctacacaccatgctggacctg

SEQ ID NO: 478773 - DNA, 120 bp, Artificial Sequence
  ENSG00000160767_11 (sequence is synthesized)
gaggaatttgtcccgcctgtgcccccaccgccctactatcccccagagtatacctgcagctcagaaacagatgcacagagcatcacgtacaatggctccatggacagcccagtgcccttg

SEQ ID NO: 478774 - DNA, 120 bp, Artificial Sequence
  ENSG00000160767_12 (sequence is synthesized)
taccctaccgattgccccccttcttatgaggcagtcatgggactacgaggagacagccaggccactctctttgaccctcagcttcacgatggctcgtgcatctgtgaacgagtggcctcc

SEQ ID NO: 478775 - DNA, 120 bp, Artificial Sequence
  ENSG00000160767_13 (sequence is synthesized)
gcccgtcggaggactcgtgcctgctggagctgcagggctccgtgcgctccgtggactacgttctctttcgctccatccagcgcagccgtgccggctactgcctcagcctggactgtggcc

SEQ ID NO: 478776 - DNA, 120 bp, Artificial Sequence
  ENSG00000160767_14 (sequence is synthesized)
tgcggggccccttcgaggaaagccccctgccacggcgccccccacgggctgcccgctcctattcctgctctgcccctgaagctccacccccactgggtgcccccacagctgcccgcagct

SEQ ID NO: 478777 - DNA, 120 bp, Artificial Sequence
  ENSG00000160767_15 (sequence is synthesized)
cctgggtgggaccctgcttccccgagctgaggcggcgggtcccccggggagggggccgcccagccgcagccccgcccacccgagccccgactcgtcgcttcagcgatagctcaggttccc

SEQ ID NO: 478778 - DNA, 120 bp, Artificial Sequence
  ENSG00000160767_16 (sequence is synthesized)
gcttcagcgatagctcaggttccctcaccccaccggggcaccggcctcctcatccggcatccccaccaccgctgctgctgccacggtcccacagcgacccaggcatcacgacctccagtg

SEQ ID NO: 478779 - DNA, 120 bp, Artificial Sequence
  ENSG00000160767_17 (sequence is synthesized)
acactgctgacttcagggacctttataccaaagtgcttgaggaagaagctgcttctgtttcctctgcagatacagggctctgctctgaagcctgcctcttccgcctagcccgctgccctt

SEQ ID NO: 478780 - DNA, 120 bp, Artificial Sequence
  ENSG00000160767_18 (sequence is synthesized)
cccccaagttgctacgtgcccggtcagccgagaaacggcgccctgtgcccaccttccaaaaagttcccctgccctcgggccctgcacctgcccactccctgggggacctaaagggcagct

SEQ ID NO: 478781 - DNA, 120 bp, Artificial Sequence
  ENSG00000160767_19 (sequence is synthesized)
ggccaggtcggggcctggtcactcgtttcctccagatatccaggaaagccccagaccccagtgggactggagctcatggacataagcaggtgccccggagcctgtggggccggcctggcc

SEQ ID NO: 478782 - DNA, 120 bp, Artificial Sequence
  ENSG00000160767_20 (sequence is synthesized)
gagagagcctccaccttcgcagctgcggagatctgagctctagctcttccctgcggcgtctcctgtctggccgcaggctggagcgtggtacccgcccccacagcctcagcctcaacgggg

SEQ ID NO: 478783 - DNA, 120 bp, Artificial Sequence
  ENSG00000160767_21 (sequence is synthesized)
gcagccgggagactgggctctgacctaggcttcttgtcacactgaacacatccagccacaggcaccagctggttgggaccagcagcccccagcatcctcttgcactggctggcacaaaaa

SEQ ID NO: 478784 - DNA, 120 bp, Artificial Sequence
  ENSG00000160767_22 (sequence is synthesized)
gaaacctgctgtataccccccaaagtgtccctttccctcctacctctggggtctcttgctgcttgcctctgctgctctggactgggagagcttctgtcctgtgctgcatgggtatttaga

SEQ ID NO: 478785 - DNA, 120 bp, Artificial Sequence
  ENSG00000160767_23 (sequence is synthesized)
ctgtgggggagatgccccttcttatagcactggaggaggaaaacaaattcttgtccccctcagaatgagagtggctctttctgatttgcaagggcactatggtcagggcaaaggcatggc

SEQ ID NO: 478786 - DNA, 120 bp, Artificial Sequence
  ENSG00000160767_24 (sequence is synthesized)
ccaggtgtttaagtacagggtgacgtgtgcctatgcaatggggtggtaaggcaggcacgaagagtccaaaaaatctaggtggcctctcagctctgccacctctagctgcatgaccttggg

SEQ ID NO: 478787 - DNA, 120 bp, Artificial Sequence
  ENSG00000160767_25 (sequence is synthesized)
caagctatgtaaccccaattgcctgctccattaaagactgtgaaggtagaatgtttgtaaagctcttaacagtatgtaagccttcaataaatttcagttttccccttgttttcttgatca

SEQ ID NO: 478788 - DNA, 120 bp, Artificial Sequence
  ENSG00000160767_26 (sequence is synthesized)
gggttaaggagagctgattttgggtgagggaggggccagaacaagagcttctctcaggggatagggccagaaaaaataatgtagatgagagaggagtttgggggcccaggaggagctgta

SEQ ID NO: 478789 - DNA, 120 bp, Artificial Sequence
  ENSG00000160767_27 (sequence is synthesized)
tagacgctggaggcacagtggcccctagaggctgggcttgggagaagaggaactgcctgggcagggctaggccaggccaggctggtgctacacagcgccccctgccgcccacagtgtcca

SEQ ID NO: 478790 - DNA, 120 bp, Artificial Sequence
  ENSG00000160767_28 (sequence is synthesized)
gtgggggcaggggtgtgtgtgctgagacttgcctgagggaacaatggctacagatctggcttttgagcaccaggggctatgggttatctattatcctcatctattggaggaatggatgtt

SEQ ID NO: 478791 - DNA, 120 bp, Artificial Sequence
  ENSG00000160767_29 (sequence is synthesized)
tagtggggaggatgagaaggggagatggcagggagtgagttaagtatgtgatgctggtctgggaccaggagagggtgctttagagaatgggactggatggtggggtagagtcaagaaggt

SEQ ID NO: 478792 - DNA, 69 bp, Artificial Sequence
  ENSG00000160767_30 (sequence is synthesized)
tagagaatgggactggatggtggggtagagtcaagaaggtcctatcaggcggatcacctgaggccagga

SEQ ID NO: 478793 - DNA, 69 bp, Artificial Sequence
  ENSG00000160767_31 (sequence is synthesized)
caaaaattagccaaaaattgcttgaaccggggagacagaggctgcagtgagctgagatggtgccactgc

SEQ ID NO: 478794 - DNA, 120 bp, Artificial Sequence
  ENSG00000160781_0 (sequence is synthesized)
actcttcctccatcagcctggctggcagcagccttggactccgcccgtggagccctgggcctgttgacccaccagcttaggagcacccaccaagctctgggtcaacgtggaggtaccagg

SEQ ID NO: 478795 - DNA, 120 bp, Artificial Sequence
  ENSG00000160781_1 (sequence is synthesized)
ccaccatgctcagtctcaagctgccccaacttcttcaagtccaccaggtcccccgggtgttctgggaagatggcatcatgtctggctaccgccgccccaccagctcggctttggactgtg

SEQ ID NO: 478796 - DNA, 120 bp, Artificial Sequence
  ENSG00000160781_2 (sequence is synthesized)
tcctcagctccttccagatgaccaacgagacggtcaacatctggactcacttcctgcccacctggtacttcctgtggcggctcctggcgctggcgggcggccccggcttccgtgcggagc

SEQ ID NO: 478797 - DNA, 120 bp, Artificial Sequence
  ENSG00000160781_3 (sequence is synthesized)
cgtaccactggccgctgctggtcttcctgctgcccgcctgcctctaccccttcgcgtcgtgctgcgcgcacaccttcagctccatgtcgccccgcatgcgccacatctgctacttcctcg

SEQ ID NO: 478798 - DNA, 120 bp, Artificial Sequence
  ENSG00000160781_4 (sequence is synthesized)
actacggcgcgctcagcctctacagtctgggctgcgccttcccctatgccgcctactccatgccggcctcctggctgcacggccacctgcaccagttctttgtgcctgccgccgcactca

SEQ ID NO: 478799 - DNA, 120 bp, Artificial Sequence
  ENSG00000160781_5 (sequence is synthesized)
actccttcctgtgcaccggcctctcctgctactcccgtttcctggagctggaaagccctgggctcagtaaggtcctccgcacaggagccttcgcctatccattcctgttcgacaacctcc

SEQ ID NO: 478800 - DNA, 120 bp, Artificial Sequence
  ENSG00000160781_6 (sequence is synthesized)
cactcttttatcggctcgggctgtgctggggcaggggccacggctgtgggcaggaggccctgagcaccagccatggctaccatctcttctgcgcgctgctcactggcttcctcttcgcct

SEQ ID NO: 478801 - DNA, 120 bp, Artificial Sequence
  ENSG00000160781_7 (sequence is synthesized)
cccacctgcctgaaaggctggcaccaggacgctttgattacatcggccacagccaccagttattccacatctgtgcagtgctgggcacccacttccagctggaggcagtgctggctgata

SEQ ID NO: 478802 - DNA, 120 bp, Artificial Sequence
  ENSG00000160781_8 (sequence is synthesized)
ggcaggcacagtggccacactggtcttggctgcagctgggaacctactcattattgctgctttcacagccaccctgcttcgggcccccagtacatgccctctgctgcagggtggcccact

SEQ ID NO: 478803 - DNA, 120 bp, Artificial Sequence
  ENSG00000160781_9 (sequence is synthesized)
ggaggggggtacccaggccaaacaacagtgaggccccatccctgaccctgtcctggagggggcagaggccaggccccagtgctgacgaggagcccagatttgggcctaatcaggtgggga

SEQ ID NO: 478804 - DNA, 120 bp, Artificial Sequence
  ENSG00000160781_10 (sequence is synthesized)
cgcatctcagcctggaaccaacaggggctgaggagagagggcacaggagagagggcagagaagaggaggggtgtctagggggactggcagagtgtgagagggaccgtgagggggctcttg

SEQ ID NO: 478805 - DNA, 120 bp, Artificial Sequence
  ENSG00000160781_11 (sequence is synthesized)
atgggagtggaagaagtgctgagggtctgagaggggagatgcatgcgtgtccaggctgaagatgcccctatattctgtcaaaggttggcggggggaggtgttggggtcctttcatctggc

SEQ ID NO: 478806 - DNA, 120 bp, Artificial Sequence
  ENSG00000160781_12 (sequence is synthesized)
tccgtttctggtgcttctggaagtctctgctcagcacagggaagaactaacacgactaacctaggcctaccctgaatgcttcttgctaaccaggccgagaggccacacacttgccccccc

SEQ ID NO: 478807 - DNA, 120 bp, Artificial Sequence
  ENSG00000160781_13 (sequence is synthesized)
atccccacaaaccaggtaatgccagtttgccagcagctatttgcctatagagatgagtctgtcctggtcataactgtgtgctcaaggtgtccaggcttttgggggtgggcctatctgggt

SEQ ID NO: 478808 - DNA, 120 bp, Artificial Sequence
  ENSG00000160781_14 (sequence is synthesized)
gcattatggatggtttggtggattgaggtgtggggaggagggtcctaggctagagggggtatccctagttagactttgggaagccaccttcaacgttttctggaacaaggcaggtacaaa

SEQ ID NO: 478809 - DNA, 120 bp, Artificial Sequence
  ENSG00000160781_15 (sequence is synthesized)
taaaaaaataaaactttggaaagcactttctagaactgaagaaggtaaaacctcctcacccccatcctcctgacacctccctcccacactccataaactggacagactcacaggcccaca

SEQ ID NO: 478810 - DNA, 120 bp, Artificial Sequence
  ENSG00000160781_16 (sequence is synthesized)
actcttcctccatcagcctggctggcagcagccttggactccgcccgtggagccctgggcctgttgacccaccagcttaggagcacccaccaagctctggcagggtctccagcacccatc

SEQ ID NO: 478811 - DNA, 120 bp, Artificial Sequence
  ENSG00000160781_17 (sequence is synthesized)
tcgggcagaggctgggggagtgactgctggtgcaagccccaaagtgcatgcggcaaaaacatggatgcagagctggtggcaagaagaggggctaagttatagagtcaacgtggaggtacc

SEQ ID NO: 478812 - DNA, 120 bp, Artificial Sequence
  ENSG00000160781_18 (sequence is synthesized)
ctcagagggggtacccaggcgggcagggaccgtccaggcccacgggctgcagcggcagtcgcgggggtccgcggcggcctgagcacgcgcccgccgcaggtacttcctgtggcggctcct

SEQ ID NO: 478813 - DNA, 120 bp, Artificial Sequence
  ENSG00000160781_19 (sequence is synthesized)
cactcttttatcgggctggcaccaggacgctttgattacatcggtgagggcacgcctggcccggcccgggaagaggcaggggcagatgccttcccagagcacagaatgaactgggccaca

SEQ ID NO: 478814 - DNA, 120 bp, Artificial Sequence
  ENSG00000160783_0 (sequence is synthesized)
aacttcaacatggccgaagcaagtagcgccaatctaggcagcggctgtgaggaaaaaaggcatgaggggtcgtcttcggaatctgtgccacccggcactaccatttcgagggtgaagctc

SEQ ID NO: 478815 - DNA, 120 bp, Artificial Sequence
  ENSG00000160783_1 (sequence is synthesized)
ctcgacaccatggtggacacttttcttcagaagctggtcgccgccggcagctaccagagattcactgactgctataagtgcttctaccagttgcagcctgcgatgacacagcaaatctat

SEQ ID NO: 478816 - DNA, 120 bp, Artificial Sequence
  ENSG00000160783_2 (sequence is synthesized)
gacaagtttatagctcagttgcagacatctatccgggaggaaatctctgacatcaaagaggaggggaacctagaagctgtcttgaatgccttggataaaattgtggaagaaggcaaagtc

SEQ ID NO: 478817 - DNA, 120 bp, Artificial Sequence
  ENSG00000160783_3 (sequence is synthesized)
cgcaaagagccagcctggcgccccagcgggatcccagagaaggatctgcacagtgttatggcaccctacttcctgcagcaacgggacaccctgcggcgccatgtgcagaaacaggaggcc

SEQ ID NO: 478818 - DNA, 120 bp, Artificial Sequence
  ENSG00000160783_4 (sequence is synthesized)
cagagggagctggttgctgtgctgagggagcctgagtgaggagaccgccagccccagaagcagagggcagtcaaggtcaagagcctgtggtccagcatgcctggcctgggcgggctacct

SEQ ID NO: 478819 - DNA, 120 bp, Artificial Sequence
  ENSG00000160783_5 (sequence is synthesized)
ctgagaacggctgaaatggtgcccagtccatcagcagtgatggaatttgctggaggactaggccagagcaagcctcactgccactgtgcctttggggcacccttggggttggacatacac

SEQ ID NO: 478820 - DNA, 120 bp, Artificial Sequence
  ENSG00000160783_6 (sequence is synthesized)
cccctttagattcctctgtttcttctacctggataattcttggccatgttctctcttctctaggttcaggtcagctctgcccctccgcccccctcctgctggttccccagcccttttccc

SEQ ID NO: 478821 - DNA, 120 bp, Artificial Sequence
  ENSG00000160783_7 (sequence is synthesized)
tggccctggcttggagaatctgttttcaatctccactgattgcccccttgctggccagcccaggggcctttaccatgttctctccacatccgtaaataaacttccttcactacactgtaa

SEQ ID NO: 478822 - DNA, 120 bp, Artificial Sequence
  ENSG00000160783_8 (sequence is synthesized)
cctgcctcttcctcttccttctctaatgggccctctgagatccgcaaattggtggcttcctccattccaacacaggggacccccacagggggtaggagagcttgccccctggggaacagt

SEQ ID NO: 478823 - DNA, 120 bp, Artificial Sequence
  ENSG00000160783_9 (sequence is synthesized)
caggcacaggcatgtgttcccctgatggagcaggtgaggacccaggcccagagagggcaggtgagtcacccaaggtaacagcgcctccacatcagatttggagttaaaacctggtgctgg

SEQ ID NO: 478824 - DNA, 120 bp, Artificial Sequence
  ENSG00000160783_10 (sequence is synthesized)
ttctactgctccatgtgaccactgcccaacatagatatatatattctaaacccggtatatggtagggggatgggaagagaacaagaacagaggatgagacagtattttttaaaattgata

SEQ ID NO: 478825 - DNA, 120 bp, Artificial Sequence
  ENSG00000160783_11 (sequence is synthesized)
catcatattttacatatttaggaagtacatgtgatattttgctacatgcatagaacgtgcagtgatcaagtcagggtatttgaggtgttcatcactttgagtatttatcatttctatgtg

SEQ ID NO: 478826 - DNA, 120 bp, Artificial Sequence
  ENSG00000160783_12 (sequence is synthesized)
ttgggagcaattcaagacctctcttctaactactttggttttggttttgttctgagatgggggtctcgctatactgcccaggccagtctcgaactcctggcctcaagcagtcttcctgtc

SEQ ID NO: 478827 - DNA, 120 bp, Artificial Sequence
  ENSG00000160783_13 (sequence is synthesized)
tcagcctcctgaatagctgggattacatgtgctcatcactgcacaaggctcttcttagccactttgcaatatggagtacattgttgttaactatagttgccttacactactgttgaacag

SEQ ID NO: 478828 - DNA, 120 bp, Artificial Sequence
  ENSG00000160783_14 (sequence is synthesized)
caacatggccagatggcctggattgagtcccagctggctccatcacatgctggttgtgtgaccttgggcaagcttctctctgcctcagcttcctcatctgaaaaatgggggtgatgataa

SEQ ID NO: 478829 - DNA, 120 bp, Artificial Sequence
  ENSG00000160783_15 (sequence is synthesized)
tagaaccccgcctcacagaatcatggttgatctgcagtccctttgacggcaggaattgtactgtttcgtctttgggtttgtaccaccaagcttggcctggtacctggtcggtgctcactc

SEQ ID NO: 478830 - DNA, 120 bp, Artificial Sequence
  ENSG00000160783_16 (sequence is synthesized)
tccactccttcattgggacggaagtgctggtccccgcctgccctctggtggacagtctgtgaaacaggccttcagttgggcggcgtgcaggttaccacaggggaggaagctaccagagat

SEQ ID NO: 478831 - DNA, 120 bp, Artificial Sequence
  ENSG00000160785_0 (sequence is synthesized)
tttccggttccggcagtaccggtagcccagtcgagatggaggaagatgcgaccggcagacggcattcgctgggaacgacggatagactgggggctgcggcctagaggtccgggcttggag

SEQ ID NO: 478832 - DNA, 120 bp, Artificial Sequence
  ENSG00000160785_1 (sequence is synthesized)
ttcgcctcagacgcggtggagccgccggagtctgagaaggtcttcaggcaccatggaggacaaacgcaacatccagatcatcgagtgggaacacctggacaagaagaagttctacgtgtt

SEQ ID NO: 478833 - DNA, 120 bp, Artificial Sequence
  ENSG00000160785_2 (sequence is synthesized)
tggtgtggcaatgacaatgatgatccgtgtcagtgtctacccattcaccctcatccgcacccggttgcaagttcagaaggggaagagcctctaccatgggaccttcgatgccttcatcaa

SEQ ID NO: 478834 - DNA, 120 bp, Artificial Sequence
  ENSG00000160785_3 (sequence is synthesized)
gatcctgcgagcagatggtatcactggcctctaccgagggttcctggtcaataccttcaccctcatctctggccagtgttatgtcaccacttatgagctcacccggaagtttgtagctga

SEQ ID NO: 478835 - DNA, 120 bp, Artificial Sequence
  ENSG00000160785_4 (sequence is synthesized)
ctacagccagagtaacacagtcaaatcactggtggctggtggctcagcctcccttgtggcccagagcatcacagtgcccattgatgtagtctcccagcacctgatgatgcaacgcaaggg

SEQ ID NO: 478836 - DNA, 120 bp, Artificial Sequence
  ENSG00000160785_5 (sequence is synthesized)
tgagaaaatgggccgctttcaggtgcgggggaacccagagggacaaggggtagttgcctttggccaaaccaaggacatcatcaggcagatcctgcaggctgatggacttcgcggcttcta

SEQ ID NO: 478837 - DNA, 120 bp, Artificial Sequence
  ENSG00000160785_6 (sequence is synthesized)
tcgaggctatgtggcttcactgcttacctatatcccaaacagtgctgtctggtggcccttctatcacttctatgcagagcagctctcctacctgtgtcctaaggagtgccctcacattgt

SEQ ID NO: 478838 - DNA, 120 bp, Artificial Sequence
  ENSG00000160785_7 (sequence is synthesized)
ctttcaagctgtctcggggcccctggctgcagccactgcctccatcctcaccaatcccatggatgtcatacgaacccgtgtgcaggttgagggcaagaactccatcatcctgaccttcag

SEQ ID NO: 478839 - DNA, 120 bp, Artificial Sequence
  ENSG00000160785_8 (sequence is synthesized)
acagctgatggcagaagaagggccttggggcctcatgaagggcctctcggccagaatcatctcagccacaccttccaccattgtcattgtggtgggctatgagagcctcaagaaactcag

SEQ ID NO: 478840 - DNA, 120 bp, Artificial Sequence
  ENSG00000160785_9 (sequence is synthesized)
cctccgacctgagctggtggactcgagacactggtaaccagtggtggggagagaagcctgctgttttccacactaccgtgggtcaggggcagagtggagaggacagcaccctctccaggt

SEQ ID NO: 478841 - DNA, 120 bp, Artificial Sequence
  ENSG00000160785_10 (sequence is synthesized)
gctcccaccacacacccagccctgccctgggccaagtggcctatctgggatagggatagagactttgaactgctcttgctgaagaggctccacgcctggatcccttgcccccactattta

SEQ ID NO: 478842 - DNA, 120 bp, Artificial Sequence
  ENSG00000160785_11 (sequence is synthesized)
aaattctcttctgagctgggctccctcactcagtccctgtatttgatactggcctaaagaccccaccccccaccctgccagcccttcttctggcttccccttccatctgtgtccctgaga

SEQ ID NO: 478843 - DNA, 120 bp, Artificial Sequence
  ENSG00000160785_12 (sequence is synthesized)
ccctgagaagagctgtacatagagcttgcttactaccactggttcttcctcttgggctttcagcccagactccaagcagctgctatcaaccctctctcccttcatctcttagccttgctt

SEQ ID NO: 478844 - DNA, 120 bp, Artificial Sequence
  ENSG00000160785_13 (sequence is synthesized)
atttttattttgggaccgagctgcccactagatgactctgcttttccctgcatttggggctaaggtgccaggtacttatttgcacagggagcaggagcagcaaaaaatctctggttctcc

SEQ ID NO: 478845 - DNA, 120 bp, Artificial Sequence
  ENSG00000160785_14 (sequence is synthesized)
cacagggagcaggagcagcaaaaaatctctggttctccagagcactcgtcctctctttggaggggttattaggttgggagaaatgttgatacttttgttttgtgtgtgtgtgtgtgtgtg

SEQ ID NO: 478846 - DNA, 120 bp, Artificial Sequence
  ENSG00000160785_15 (sequence is synthesized)
ccaggctattagtcctgctaaagcgccaatcctgctgtcagagctcacccccttcctaagacaggtagaaaaatgtaatgtagctttttccacaagccacttccctgtcccttcagtctc

SEQ ID NO: 478847 - DNA, 120 bp, Artificial Sequence
  ENSG00000160785_16 (sequence is synthesized)
aggagccctaggagagtctaagctggggcatcccctggcccagaggactcccgtggtgggcacagttctaagtggatcaggctgtcttgggtgcactggacttggagcactaccttgaga

SEQ ID NO: 478848 - DNA, 120 bp, Artificial Sequence
  ENSG00000160785_17 (sequence is synthesized)
agtcaggttgagaaagtagttgatctagaaggcaacaagtgggcatgtgttccccagcacattacccaggccagcagagccaaacctaggagagggcagtgggtagattctctgccccag

SEQ ID NO: 478849 - DNA, 120 bp, Artificial Sequence
  ENSG00000160785_18 (sequence is synthesized)
gcagccatgacatacacataaataccccaatcactcagacttacggcaacaagtgttgtctcactatggtgatctctaagatccacatcactggatgcgtagtcatcccagtcatggtac

SEQ ID NO: 478850 - DNA, 120 bp, Artificial Sequence
  ENSG00000160785_19 (sequence is synthesized)
cctgtggaggaatgctggaagaacataaagagcagttcagaaagtcacccaataccaggaccactgcatttaccagcctgatactgccaagattatctgatgctctcctcaggagctagg

SEQ ID NO: 478851 - DNA, 120 bp, Artificial Sequence
  ENSG00000160785_20 (sequence is synthesized)
agaggagtgctccttcctccctaccgctactctccccaagcctgtgttgcaggtagagaggtgcagcaaatagagaaggcatgtcaaaccctgcatttctacctgagacgtgtgacctgg

SEQ ID NO: 478852 - DNA, 120 bp, Artificial Sequence
  ENSG00000160785_21 (sequence is synthesized)
atgatcctccaaaccctattggtcccaccccctgggaaaggccatggtgccagtttgaaaggtgctagctacctgaagccttgatatttcttcatggctgccgcacattcttccaccttg

SEQ ID NO: 478853 - DNA, 120 bp, Artificial Sequence
  ENSG00000160785_22 (sequence is synthesized)
gccagaacaggttctgaaaaccacttctctaccttcaccaccaccactgcccatcttgatctctttgagggttttcccatttcacttgatcttatttttgtttatcccttcctgcacttt

SEQ ID NO: 478854 - DNA, 120 bp, Artificial Sequence
  ENSG00000160785_23 (sequence is synthesized)
gtcaagagagtcctccagtttctatccaggaatgttcacatccaaagggttggacccacggatcattctgaatcttcctgcccctcctcactgcttaaccctgagaaccacaaatataat

SEQ ID NO: 478855 - DNA, 120 bp, Artificial Sequence
  ENSG00000160785_24 (sequence is synthesized)
ggaagcagttccccccaccctcaccccatctctttaagctcatcctagcaagacctctagagaccctagagactcgactttagtccttccccgccatggcacagtggggaaggtgtcaat

SEQ ID NO: 478856 - DNA, 120 bp, Artificial Sequence
  ENSG00000160785_25 (sequence is synthesized)
ggggagtgtcacggacaggaggtaggatcctgccgctcgcgtcttagtgtttctccctcaagactttccttctgttttgttgtcttgtgcagtattttacagcccctcttgtgtttttct

SEQ ID NO: 478857 - DNA, 120 bp, Artificial Sequence
  ENSG00000160785_26 (sequence is synthesized)
ttatttctcgtacacacacgcagttttaagggtgatgtgtgtataattaaaaggacccttggcccatactttcctaattctttagggactgggattgggtttgactgaaatatgttttgg

SEQ ID NO: 478858 - DNA, 120 bp, Artificial Sequence
  ENSG00000160785_27 (sequence is synthesized)
tggggatgggacggtggacttccattctccctaaactggagttttggtcggtaatcaaaactaaaagaaacctctgggagactggaaacctgattggagcactgaggaacaagggaatga

SEQ ID NO: 478859 - DNA, 120 bp, Artificial Sequence
  ENSG00000160785_28 (sequence is synthesized)
aaaggcagactctctgaacgtttgatgaaatggactcttgtgaaaattaacagtgaatattcactgttgcactgtacgaagtctctgaaatgtaattaaaagtttttattgagcccccga

SEQ ID NO: 478860 - DNA, 120 bp, Artificial Sequence
  ENSG00000160785_29 (sequence is synthesized)
actgcccaaatccaagatggctaccaggaggccgtcagttctcggaagtgcggcacatcctcactcctgggaggctcaaaggctcaaacgccattggcagaatccccgacagctcatcct

SEQ ID NO: 478861 - DNA, 120 bp, Artificial Sequence
  ENSG00000160785_30 (sequence is synthesized)
aggcctggccaaggaccaagaaggggacagtatcctgatctatgaaagaagactcaagtggggattgacagagccagattgggtggagtccaagctttgggcaggtcttcaggcaccatg

SEQ ID NO: 478862 - DNA, 120 bp, Artificial Sequence
  ENSG00000160785_31 (sequence is synthesized)
aaacaagaagaatgggattgatatttccgcaggaagtttggaagttatgtaacagagcaggttgagatcctaccttttaggagcagcctgccccttttgaaggggtaaagggagtgggtg

SEQ ID NO: 478863 - DNA, 120 bp, Artificial Sequence
  ENSG00000160785_32 (sequence is synthesized)
cagtgccctctcttctgttgtagtggcttatccctctaaggcatgacccttggataggggttacctgcctcggaaagtccccacttccttgtgggagtttaaaatagattggcatatgtg

SEQ ID NO: 478864 - DNA, 120 bp, Artificial Sequence
  ENSG00000160785_33 (sequence is synthesized)
agagatggagacaaggtgggaaatcggatcctgtcttaggatttctcatcaggagatgctgatacttggtgtttcagcttgataaattgagaaggtgccatgaaaccaggtcctggaaca

SEQ ID NO: 478865 - DNA, 120 bp, Artificial Sequence
  ENSG00000160785_34 (sequence is synthesized)
gaatccctggttgctctgtcttttagctgctctgaccctctgccctgcagagcatgcattttgcatgtgcctggcaggaggccctcctgcttgagccctgctgtatttgtctgtgttgac

SEQ ID NO: 478866 - DNA, 120 bp, Artificial Sequence
  ENSG00000160785_35 (sequence is synthesized)
aacgtgactgccagccattaagcttggtcagtccacagacacactaggaaagcagaggcagctcttggtttctctggaacagagctgcaagaagtctctgggcatctgcatggccaggag

SEQ ID NO: 478867 - DNA, 120 bp, Artificial Sequence
  ENSG00000160785_36 (sequence is synthesized)
cttatgcttaactgttgagtgacctgcagccataagggcattaattctgccttccagaggtgggaatgacttggctttaaacagtgatttgtgtgagaattcttcaaatcccataaggta

SEQ ID NO: 478868 - DNA, 120 bp, Artificial Sequence
  ENSG00000160785_37 (sequence is synthesized)
gaaggcatggtggagtagaggagaaatcttggctcatatctgcctcttccattgaccagctgtgtgaccttgggcctgttacttttaacctacctgaccctccatttcctcatttatcag

SEQ ID NO: 478869 - DNA, 120 bp, Artificial Sequence
  ENSG00000160785_38 (sequence is synthesized)
aagtgtctaactgtacacaagttaaactgtaaggattacatgaggtagtagtcaatcctggtgtttctctgtatcttctcacttctcactggtgttggaaatatgatcttgcgaccctag

SEQ ID NO: 478870 - DNA, 120 bp, Artificial Sequence
  ENSG00000160785_39 (sequence is synthesized)
atggcagccactctggggcagaagagacagtgaccaccttttgaagagctcaaaggagaatattgccccacagggcttagtgggtcccccaggctgaggctggggaggagggccaccttt

SEQ ID NO: 478871 - DNA, 120 bp, Artificial Sequence
  ENSG00000160785_40 (sequence is synthesized)
gcctacagcaagtggcatatcattgttctaggggttctcttgacggcagaactttgcctctagctcattttccacagcctagattttccaatcttgccaatccagttgacttctgtcttc

SEQ ID NO: 478872 - DNA, 120 bp, Artificial Sequence
  ENSG00000160785_41 (sequence is synthesized)
ccaatccagttgacttctgtcttctcatttccaagccattgttctctctctttcactatctacatggattatccttcattcaaactgctttgtcccggctgggtgcggtggctcatgcct

SEQ ID NO: 478873 - DNA, 120 bp, Artificial Sequence
  ENSG00000160785_42 (sequence is synthesized)
aacaaaaaaactgctttgtcctgtaggaatcctgtgcgggttatgtgcacctccctcaatccttaccttgaagctaaggtttcccctcagctctcaagtactcagtttgcactgcaggta

SEQ ID NO: 478874 - DNA, 120 bp, Artificial Sequence
  ENSG00000160785_43 (sequence is synthesized)
gtccctattttaacgaaagttatacggtccagctcagggaatcctgaaaagctgcccttgcttccatggtaatcaaaaggcagttctcatggaataaaagctacctgaagcctgagttgg

SEQ ID NO: 478875 - DNA, 120 bp, Artificial Sequence
  ENSG00000160785_44 (sequence is synthesized)
gacctttggctggggaaggtggttgaggacgttctctgattagatgcttggcatgaggtttgctactggaactgctagtgtagaatgtttcagccccctagagttgtccctgtgatgtgg

SEQ ID NO: 478876 - DNA, 120 bp, Artificial Sequence
  ENSG00000160785_45 (sequence is synthesized)
ctacctcctttctctgggatttctcttaaagtctggggagcccctgcttctcatttcctggaatttatcttcccagtctccctttctggctgaaaatttctagtatcttacagaacagcg

SEQ ID NO: 478877 - DNA, 120 bp, Artificial Sequence
  ENSG00000160785_46 (sequence is synthesized)
gtgggatacactggagcacatcatattaccactaagtatgtctaataaatgatgtcctctgatttgacatttcctaaatgtgaagctcctgattttatacaattttgaaattagtaagct

SEQ ID NO: 478878 - DNA, 120 bp, Artificial Sequence
  ENSG00000160785_47 (sequence is synthesized)
agcttgttagttttgtttgaaattctaggcattggatacacttaacatgagggctacatgtgcatcaacatactctggtttccttccctctgtatcttttttttttttgagatggagtct

SEQ ID NO: 478879 - DNA, 120 bp, Artificial Sequence
  ENSG00000160785_48 (sequence is synthesized)
caggtgcatgccaccatgcctggctaacttatttttatatattgtagagacggagtctccctatgttgcctaggctgaccttgagctcttgggctcaggtgatcctcccaccttggcctc

SEQ ID NO: 478880 - DNA, 120 bp, Artificial Sequence
  ENSG00000160785_49 (sequence is synthesized)
ataggcgtgagccactgtgtccagccttttcctctgtatcttgtatccattccccagagcgatactgtgtatccttgaacagacggtttcttgaagtcagagtctatctcctctgtcact

SEQ ID NO: 478881 - DNA, 120 bp, Artificial Sequence
  ENSG00000160785_50 (sequence is synthesized)
tctcccccttcattatctaagactgaggttgtggtttatatgcttagagttgaaagcatggggtccaacgtgttctgtactctgtagttccccagactcttcagggaaactacttagctc

SEQ ID NO: 478882 - DNA, 120 bp, Artificial Sequence
  ENSG00000160785_51 (sequence is synthesized)
tcaggtggttcttttctgtttttctcagagcaagttatctaataactgaagaggactctgccctttggcctgttcctgactttctaactccttttgctggaggaaggggaggttgagggg

SEQ ID NO: 478883 - DNA, 120 bp, Artificial Sequence
  ENSG00000160785_52 (sequence is synthesized)
ggtgccctgtggtgtgaaagccccacttgccctctcctctatactttcttccaatgcagacgggagaaagtatcataaatgtagtgactgtgggtcaggggagctctgagaggccagcac

SEQ ID NO: 478884 - DNA, 120 bp, Artificial Sequence
  ENSG00000160785_53 (sequence is synthesized)
aggaaaccagaaacaaaatgagtcagttcgtaggtggcgatcagaggcaccctgctgagggtgcaaggccacaggtgatgcctcctcagtaggcccaggagcatcaaaacgggaacagtc

SEQ ID NO: 478885 - DNA, 120 bp, Artificial Sequence
  ENSG00000160785_54 (sequence is synthesized)
cctttcagccttcaggagcctcccaaatgtcacttagtgatgtcccattcacctgcttaaaggccctgcatcctgccaggtagttggtttgtccatagcatcctgagctctgcttgggtg

SEQ ID NO: 478886 - DNA, 120 bp, Artificial Sequence
  ENSG00000160785_55 (sequence is synthesized)
agccagacaaaaagaatgattcctggccagagtagtgataccagggcccagacagaggcagagagtccggatagaagatcctgtaagctggggtagggagccgaggaggccatggagcca

SEQ ID NO: 478887 - DNA, 120 bp, Artificial Sequence
  ENSG00000160785_56 (sequence is synthesized)
ggggattgacagagccagattgggtggagtccaagctttgggcaggtgagtgtccaggagatgagggctgagaatgggccttcagagcccagccagaaggggaaagcacaaagctccacc

SEQ ID NO: 478888 - DNA, 120 bp, Artificial Sequence
  ENSG00000160789_0 (sequence is synthesized)
agtgttcgcgggagcgccgcacctacaccagccaacccagatcccgaggtccgacagcgcccggcccagatccccacgcctgccaggagcaagccgagagccagccggccggcgcactcc

SEQ ID NO: 478889 - DNA, 120 bp, Artificial Sequence
  ENSG00000160789_1 (sequence is synthesized)
gactccgagcagtctctgtccttcgacccgagccccgcgccctttccgggacccctgccccgcgggcagcgctgccaacctgccggccatggagaccccgtcccagcggcgcgccacccg

SEQ ID NO: 478890 - DNA, 120 bp, Artificial Sequence
  ENSG00000160789_2 (sequence is synthesized)
cagcggggcgcaggccagctccactccgctgtcgcccacccgcatcacccggctgcaggagaaggaggacctgcaggagctcaatgatcgcttggcggtctacatcgaccgtgtgcgctc

SEQ ID NO: 478891 - DNA, 120 bp, Artificial Sequence
  ENSG00000160789_3 (sequence is synthesized)
gctggaaacggagaacgcagggctgcgccttcgcatcaccgagtctgaagaggtggtcagccgcgaggtgtccggcatcaaggccgcctacgaggccgagctcggggatgcccgcaagac

SEQ ID NO: 478892 - DNA, 120 bp, Artificial Sequence
  ENSG00000160789_4 (sequence is synthesized)
ccttgactcagtagccaaggagcgcgcccgcctgcagctggagctgagcaaagtgcgtgaggagtttaaggagctgaaagcgcgcaataccaagaaggagggtgacctgatagctgctca

SEQ ID NO: 478893 - DNA, 120 bp, Artificial Sequence
  ENSG00000160789_5 (sequence is synthesized)
ggctcggctgaaggacctggaggctctgctgaactccaaggaggccgcactgagcactgctctcagtgagaagcgcacgctggagggcgagctgcatgatctgcggggccaggtggccaa

SEQ ID NO: 478894 - DNA, 120 bp, Artificial Sequence
  ENSG00000160789_6 (sequence is synthesized)
gcttgaggcagccctaggtgaggccaagaagcaacttcaggatgagatgctgcggcgggtggatgctgagaacaggctgcagaccatgaaggaggaactggacttccagaagaacatcta

SEQ ID NO: 478895 - DNA, 120 bp, Artificial Sequence
  ENSG00000160789_7 (sequence is synthesized)
cagtgaggagctgcgtgagaccaagcgccgtcatgagacccgactggtggagattgacaatgggaagcagcgtgagtttgagagccggctggcggatgcgctgcaggaactgcgggccca

SEQ ID NO: 478896 - DNA, 120 bp, Artificial Sequence
  ENSG00000160789_8 (sequence is synthesized)
gcatgaggaccaggtggagcagtataagaaggagctggagaagacttattctgccaagctggacaatgccaggcagtctgctgagaggaacagcaacctggtgggggctgcccacgagga

SEQ ID NO: 478897 - DNA, 120 bp, Artificial Sequence
  ENSG00000160789_9 (sequence is synthesized)
gctgcagcagtcgcgcatccgcatcgacagcctctctgcccagctcagccagctccagaagcagctggcagccaaggaggcgaagcttcgagacctggaggactcactggcccgtgagcg

SEQ ID NO: 478898 - DNA, 120 bp, Artificial Sequence
  ENSG00000160789_10 (sequence is synthesized)
ggacaccagccggcggctgctggcggaaaaggagcgggagatggccgagatgcgggcaaggatgcagcagcagctggacgagtaccaggagcttctggacatcaagctggccctggacat

SEQ ID NO: 478899 - DNA, 120 bp, Artificial Sequence
  ENSG00000160789_11 (sequence is synthesized)
ggagatccacgcctaccgcaagctcttggagggcgaggaggagaggctacgcctgtcccccagccctacctcgcagcgcagccgtggccgtgcttcctctcactcatcccagacacaggg

SEQ ID NO: 478900 - DNA, 120 bp, Artificial Sequence
  ENSG00000160789_12 (sequence is synthesized)
tgggggcagcgtcaccaaaaagcgcaaactggagtccactgagagccgcagcagcttctcacagcacgcacgcactagcgggcgcgtggccgtggaggaggtggatgaggagggcaagtt

SEQ ID NO: 478901 - DNA, 120 bp, Artificial Sequence
  ENSG00000160789_13 (sequence is synthesized)
cgccagaatggagatgatcccttgctgacttaccggttcccaccaaagttcaccctgaaggctgggcaggtggtgacgatctgggctgcaggagctggggccacccacagcccccctacc

SEQ ID NO: 478902 - DNA, 120 bp, Artificial Sequence
  ENSG00000160789_14 (sequence is synthesized)
gacctggtgtggaaggcacagaacacctggggctgcgggaacagcctgcgtacggctctcatcaactccactggggaagaagtggccatgcgcaagctggtgcgctcagtgactgtggtt

SEQ ID NO: 478903 - DNA, 120 bp, Artificial Sequence
  ENSG00000160789_15 (sequence is synthesized)
gaggacgacgaggatgaggatggagatgacctgctccatcaccaccacggctcccactgcagcagctcgggggaccccgctgagtacaacctgcgctcgcgcaccgtgctgtgcgggacc

SEQ ID NO: 478904 - DNA, 120 bp, Artificial Sequence
  ENSG00000160789_16 (sequence is synthesized)
tgcgggcagcctgccgacaaggcatctgccagcggctcaggagcccaggtgggcggacccatctcctctggctcttctgcctccagtgtcacggtcactcgcagctaccgcagtgtgggg

SEQ ID NO: 478905 - DNA, 120 bp, Artificial Sequence
  ENSG00000160789_17 (sequence is synthesized)
ggcagtgggggtggcagcttcggggacaatctggtcacccgctcctacctcctgggcaactccagcccccgaacccagagcccccagaactgcagcatcatgtaatctgggacctgccag

SEQ ID NO: 478906 - DNA, 120 bp, Artificial Sequence
  ENSG00000160789_18 (sequence is synthesized)
gcaggggtgggggtggaggcttcctgcgtcctcctcacctcatgcccaccccctgccctgcacgtcatgggagggggcttgaagccaaagaaaaataaccctttggtttttttcttctgt

SEQ ID NO: 478907 - DNA, 120 bp, Artificial Sequence
  ENSG00000160789_19 (sequence is synthesized)
atttttttttctaagagaagttattttctacagtggttttatactgaaggaaaaacacaagcaaaaaaaaaaaaaagcatctatctcatctatctcaatcctaatttctcctcccttcct

SEQ ID NO: 478908 - DNA, 120 bp, Artificial Sequence
  ENSG00000160789_20 (sequence is synthesized)
tttccctgcttccaggaaactccacatctgccttaaaaccaaagagggcttcctctagaagccaagggaaaggggtgcttttatagaggctagcttctgcttttctgccctggctgctgc

SEQ ID NO: 478909 - DNA, 120 bp, Artificial Sequence
  ENSG00000160789_21 (sequence is synthesized)
ccccaccccggggaccctgtgacatggtgcctgagaggcaggcatagaggcttctccgccagcctcctctggacggcaggctcactgccaggccagcctccgagagggagagagagagag

SEQ ID NO: 478910 - DNA, 120 bp, Artificial Sequence
  ENSG00000160789_22 (sequence is synthesized)
agaggacagcttgagccgggcccctgggcttggcctgctgtgattccactacacctggctgaggttcctctgcctgccccgcccccagtccccacccctgcccccagccccggggtgagt

SEQ ID NO: 478911 - DNA, 120 bp, Artificial Sequence
  ENSG00000160789_23 (sequence is synthesized)
ccattctcccaggtaccagctgcgcttgcttttctgtattttatttagacaagagatgggaatgaggtgggaggtggaagaagggagaagaaaggtgagtttgagctgccttccctagct

SEQ ID NO: 478912 - DNA, 120 bp, Artificial Sequence
  ENSG00000160789_24 (sequence is synthesized)
ttagaccctgggtgggctctgtgcagtcactggaggttgaagccaagtggggtgctgggaggagggagagggaggtcactggaaaggggagagcctgctggcacccaccgtggaggagga

SEQ ID NO: 478913 - DNA, 120 bp, Artificial Sequence
  ENSG00000160789_25 (sequence is synthesized)
aggcaagagggggtggaggggtgtggcagtggttttggcaaacgctaaagagcccttgcctccccatttcccatctgcaccccttctctcctccccaaatcaatacactagttgtttcta

SEQ ID NO: 478914 - DNA, 120 bp, Artificial Sequence
  ENSG00000160789_26 (sequence is synthesized)
atgtttagagcttgtgatgttcagagctggctctgatgagggctctggggaagctctgattgcagatcctggagagagtagccaggtgtctcctacaccgacccacgtccctccttcccc

SEQ ID NO: 478915 - DNA, 120 bp, Artificial Sequence
  ENSG00000160789_27 (sequence is synthesized)
gggcagcctctccccagcctccccgtgccaaaaatcttttcattaaagaatgttttggaactttactcgctggcctggcctttcttctctctcctccctataccttgaacagggaaccca

SEQ ID NO: 478916 - DNA, 120 bp, Artificial Sequence
  ENSG00000160789_28 (sequence is synthesized)
ggtgtctgggtgccctactctggtaaggaagggagtgggaactttctgatgccatggaatattcctgtgggagcagtggacaagggtctggatttgtcttctgggaaagggaggggagga

SEQ ID NO: 478917 - DNA, 120 bp, Artificial Sequence
  ENSG00000160789_29 (sequence is synthesized)
cagacgtggggcatgcccgccctgcctctctcccccattcttgttgcatgcatatcctctcatttccctcatttttcctgcaagaatgttctctctcattcctgaccgcccctccactcc

SEQ ID NO: 478918 - DNA, 120 bp, Artificial Sequence
  ENSG00000160789_30 (sequence is synthesized)
cagctcagccagctccagaagcaggtgataccccacctcacccctctctccaggggcctagagtctgggccggatgcaggctggaagcccagggttgggggtgggggtgggggtgggagg

SEQ ID NO: 478919 - DNA, 120 bp, Artificial Sequence
  ENSG00000160789_31 (sequence is synthesized)
tttcttccccaaacagccccaagggcccgggcctgctgcagctggggagccggacttccttgtcccaccaggcacagctcttcagacccctgccttgggtcacatttcaataccaagaag

SEQ ID NO: 478920 - DNA, 120 bp, Artificial Sequence
  ENSG00000160789_32 (sequence is synthesized)
gacaaattccttgacccgaggaggatagggatgtggccttcggtctttcctcgcagctccggggcaagctaggagtgggatggaagtcgagagtcgatcccggagcccggccgcggggag

SEQ ID NO: 478921 - DNA, 120 bp, Artificial Sequence
  ENSG00000160789_33 (sequence is synthesized)
aggttctcggcagagaagacaaagcccgcagcagcgatggggggagagctgggctctgcgtgttgtgggggccaggaaagggtgccaggctggggctggaaccccctggcaaaggatggg

SEQ ID NO: 478922 - DNA, 120 bp, Artificial Sequence
  ENSG00000160789_34 (sequence is synthesized)
cccccccaccgcccccggcagcgttccccccttaacaccttcccccaggtggtgaggggccaaagctcggggatggacaagagaaaggaaggagatgtcactgctgaatttctgctgaat

SEQ ID NO: 478923 - DNA, 120 bp, Artificial Sequence
  ENSG00000160789_35 (sequence is synthesized)
ttccttctgcctgctgcccgatttctatttgactggcaatagtctgcacctctgcacagacttcctccagccagagtggcagaagacagagaagcatgtccaggatttggaccagactgc

SEQ ID NO: 478924 - DNA, 120 bp, Artificial Sequence
  ENSG00000160789_36 (sequence is synthesized)
gaaggacagtggtctgaatttgacggggacaaatggaagggagataggacacatgagttcctttaggtctggctcaggggagctagacttcatttcaaggggtctaggttctgggcagtt

SEQ ID NO: 478925 - DNA, 120 bp, Artificial Sequence
  ENSG00000160789_37 (sequence is synthesized)
gagaaggaggctatttggggtcaccaaggctcccctttcttcccaaagctctaacactgccaccttctgctggctaggagagagctgtgtcttctgaggctagagctggaatgcagtgag

SEQ ID NO: 478926 - DNA, 120 bp, Artificial Sequence
  ENSG00000160789_38 (sequence is synthesized)
cggctgcgcaacaagtccaatgaggtaggctcctgctcagggtctaaggggatacagctgcatcagggagagagtggcaagacagaaggatggcatgtggagagaggaacatccttgccc

SEQ ID NO: 478927 - DNA, 120 bp, Artificial Sequence
  ENSG00000160789_39 (sequence is synthesized)
tcagagggtggaccagggtgagcctgtatatctcctccacactctggttccaggcctggctcctggactctttggctgtgagaccttgagcaggttatttaacctctcagagcatcagtt

SEQ ID NO: 478928 - DNA, 120 bp, Artificial Sequence
  ENSG00000160789_40 (sequence is synthesized)
gtgtgcctggtgctgcgtatgtgtccacagatcatggctattatccccgggggaagggcagtgacaggggtgtgtgtagatggaaggagaggcctcaattgcaggcaggcagagggctgg

SEQ ID NO: 478929 - DNA, 120 bp, Artificial Sequence
  ENSG00000160789_41 (sequence is synthesized)
ttctgctcccttcctgtgtgctgcctggcaatggggaactctgagggctgatttgccagtgatgggaagagttagaaacaggatgcccagcccttctcgcctcaagaggccactgggatg

SEQ ID NO: 478930 - DNA, 120 bp, Artificial Sequence
  ENSG00000160789_42 (sequence is synthesized)
cagccactcctgtgcttggggaacctggaggatgcaagggaaaggactggcactctgctggcacagcacccggcctggggcaggacacgggcgaagccagggtctcccctgtgagcacta

SEQ ID NO: 478931 - DNA, 120 bp, Artificial Sequence
  ENSG00000160789_43 (sequence is synthesized)
cccggagagcttgacagtgtccctctggggtggaaatgagttccttagctccatcaccacagaggacagagtaagcagcaggccggacaaagggcaggccacaagaaaagttgcaggtgg

SEQ ID NO: 478932 - DNA, 120 bp, Artificial Sequence
  ENSG00000160789_44 (sequence is synthesized)
aaacagccccaagggcccgggcctgctgcagctggggagccggacttccttgtcccaccaggcacagctcttcagacccctgccttgggtcacatttggaggcttaaagctggggcccag

SEQ ID NO: 478933 - DNA, 120 bp, Artificial Sequence
  ENSG00000160789_45 (sequence is synthesized)
ctcatccctaaacagcaagccatctcccctcgcccgccccccgcccccccagtctcggagatctcagaggcaccgactgggagacttgatgtaattgtcttcacaattctgtgaagatgg

SEQ ID NO: 478934 - DNA, 120 bp, Artificial Sequence
  ENSG00000160789_46 (sequence is synthesized)
tcgacagcctctctgcccagctcagccagctccagaagcagggcccttgggagctcaccaaaccctcccaccccccttcagctggcagccaaggaggcgaagcttcgagacctggaggac

SEQ ID NO: 478935 - DNA, 120 bp, Artificial Sequence
  ENSG00000160789_47 (sequence is synthesized)
aagttcaccctgaaggctgggcaggtggtgacggtgagtggcagggcgcttgggactctggggaggccttgggtggcgatgggagcgctggggtaagtgtccttttctcctctccagatc

SEQ ID NO: 478936 - DNA, 120 bp, Artificial Sequence
  ENSG00000160789_48 (sequence is synthesized)
tggttctctgtccccaagtcttcctgagccttctccccttttatgtcttccctctcctcctccgggcccctagcctcccaaacccccattgcccgctggctccttgggcacagaaccaca

SEQ ID NO: 478937 - DNA, 120 bp, Artificial Sequence
  ENSG00000160789_49 (sequence is synthesized)
ccttcctgcctggcggctgggagcctgcaggagcctggagcctggttgggcctgagtggtcagtcccagactcgccgtcccgcctgagccttgtctcccttcccagggctcccactgcag

SEQ ID NO: 478938 - DNA, 120 bp, Artificial Sequence
  ENSG00000160789_50 (sequence is synthesized)
tcgggacgaacacccagtacacgggaagctctttgagaacagggattggatctagtctactcctgtattctcagcacccagcacaaagtaggtgcttaataaatgtttgctgttcggaaa

SEQ ID NO: 478939 - DNA, 64 bp, Artificial Sequence
  ENSG00000160789_51 (sequence is synthesized)
aagccatctcccctcgcccgccccccgcccccccagtctcggagatctcagaggcaccgactgc

SEQ ID NO: 478940 - DNA, 120 bp, Artificial Sequence
  ENSG00000160789_52 (sequence is synthesized)
gtgatgcccaactcaggcctgtgcctccacccctcccagtcaccacagtcctaaccctttgtcctcccctccagctggacaatgccaggcagtctgctgagaggaacagcaacctggtgg

SEQ ID NO: 478941 - DNA, 120 bp, Artificial Sequence
  ENSG00000160791_0 (sequence is synthesized)
acttaatgatttaactccaccctccttcaaaagaaacagcatttcctacttttatactgtctatatgattgatttgcacagctcatctggccagaagagctgagacatccgttcccctac

SEQ ID NO: 478942 - DNA, 120 bp, Artificial Sequence
  ENSG00000160791_1 (sequence is synthesized)
aagaaactctccccgggtggaacaagatggattatcaagtgtcaagtccaatctatgacatcaattattatacatcggagccctgccaaaaaatcaatgtgaagcaaatcgcagcccgcc

SEQ ID NO: 478943 - DNA, 120 bp, Artificial Sequence
  ENSG00000160791_2 (sequence is synthesized)
tcctgcctccgctctactcactggtgttcatctttggttttgtgggcaacatgctggtcatcctcatcctgataaactgcaaaaggctgaagagcatgactgacatctacctgctcaacc

SEQ ID NO: 478944 - DNA, 120 bp, Artificial Sequence
  ENSG00000160791_3 (sequence is synthesized)
tggccatctctgacctgtttttccttcttactgtccccttctgggctcactatgctgccgcccagtgggactttggaaatacaatgtgtcaactcttgacagggctctattttataggct

SEQ ID NO: 478945 - DNA, 120 bp, Artificial Sequence
  ENSG00000160791_4 (sequence is synthesized)
tcttctctggaatcttcttcatcatcctcctgacaatcgataggtacctggctgtcgtccatgctgtgtttgctttaaaagccaggacggtcacctttggggtggtgacaagtgtgatca

SEQ ID NO: 478946 - DNA, 120 bp, Artificial Sequence
  ENSG00000160791_5 (sequence is synthesized)
cttgggtggtggctgtgtttgcgtctctcccaggaatcatctttaccagatctcaaaaagaaggtcttcattacacctgcagctctcattttccatacagtcagtatcaattctggaaga

SEQ ID NO: 478947 - DNA, 120 bp, Artificial Sequence
  ENSG00000160791_6 (sequence is synthesized)
atttccagacattaaagatagtcatcttggggctggtcctgccgctgcttgtcatggtcatctgctactcgggaatcctaaaaactctgcttcggtgtcgaaatgagaagaagaggcaca

SEQ ID NO: 478948 - DNA, 120 bp, Artificial Sequence
  ENSG00000160791_7 (sequence is synthesized)
gggctgtgaggcttatcttcaccatcatgattgtttattttctcttctgggctccctacaacattgtccttctcctgaacaccttccaggaattctttggcctgaataattgcagtagct

SEQ ID NO: 478949 - DNA, 120 bp, Artificial Sequence
  ENSG00000160791_8 (sequence is synthesized)
ctaacaggttggaccaagctatgcaggtgacagagactcttgggatgacgcactgctgcatcaaccccatcatctatgcctttgtcggggagaagttcagaaactacctcttagtcttct

SEQ ID NO: 478950 - DNA, 120 bp, Artificial Sequence
  ENSG00000160791_9 (sequence is synthesized)
tccaaaagcacattgccaaacgcttctgcaaatgctgttctattttccagcaagaggctcccgagcgagcaagctcagtttacacccgatccactggggagcaggaaatatctgtgggct

SEQ ID NO: 478951 - DNA, 120 bp, Artificial Sequence
  ENSG00000160791_10 (sequence is synthesized)
tgtgacacggactcaagtgggctggtgacccagtcagagttgtgcacatggcttagttttcatacacagcctgggctgggggtggggtgggagaggtcttttttaaaaggaagttactgt

SEQ ID NO: 478952 - DNA, 120 bp, Artificial Sequence
  ENSG00000160791_11 (sequence is synthesized)
tatagagggtctaagattcatccatttatttggcatctgtttaaagtagattagatcttttaagcccatcaattatagaaagccaaatcaaaatatgttgatgaaaaatagcaacctttt

SEQ ID NO: 478953 - DNA, 120 bp, Artificial Sequence
  ENSG00000160791_12 (sequence is synthesized)
tatctccccttcacatgcatcaagttattgacaaactctcccttcactccgaaagttccttatgtatatttaaaagaaagcctcagagaattgctgattcttgagtttagtgatctgaac

SEQ ID NO: 478954 - DNA, 120 bp, Artificial Sequence
  ENSG00000160791_13 (sequence is synthesized)
agaaataccaaaattatttcagaaatgtacaactttttacctagtacaaggcaacatataggttgtaaatgtgtttaaaacaggtctttgtcttgctatggggagaaaagacatgaatat

SEQ ID NO: 478955 - DNA, 120 bp, Artificial Sequence
  ENSG00000160791_14 (sequence is synthesized)
tgtggcctgggagagctggggaagcttcttaaatgagaaggaatttgagttggatcatctattgctggcaaagacagaagcctcactgcaagcactgcatgggcaagcttggctgtagaa

SEQ ID NO: 478956 - DNA, 120 bp, Artificial Sequence
  ENSG00000160791_15 (sequence is synthesized)
ggagacagagctggttgggaagacatggggaggaaggacaaggctagatcatgaagaaccttgacggcattgctccgtctaagtcatgagctgagcagggagatcctggttggtgttgca

SEQ ID NO: 478957 - DNA, 120 bp, Artificial Sequence
  ENSG00000160791_16 (sequence is synthesized)
gaaggtttactctgtggccaaaggagggtcaggaaggatgagcatttagggcaaggagaccaccaacagccctcaggtcagggtgaggatggcctctgctaagctcaaggcgtgaggatg

SEQ ID NO: 478958 - DNA, 120 bp, Artificial Sequence
  ENSG00000160791_17 (sequence is synthesized)
ggaaggagggaggtattcgtaaggatgggaaggagggaggtattcgtgcagcatatgaggatgcagagtcagcagaactggggtggatttgggttggaagtgagggtcagagaggagtca

SEQ ID NO: 478959 - DNA, 120 bp, Artificial Sequence
  ENSG00000160791_18 (sequence is synthesized)
gagagaatccctagtcttcaagcagattggagaaacccttgaaaagacatcaagcacagaaggaggaggaggaggtttaggtcaagaagaagatggattggtgtaaaaggatgggtctgg

SEQ ID NO: 478960 - DNA, 120 bp, Artificial Sequence
  ENSG00000160791_19 (sequence is synthesized)
tttgcagagcttgaacacagtctcacccagactccaggctgtctttcactgaatgcttctgacttcatagatttccttcccatcccagctgaaatactgaggggtctccaggaggagact

SEQ ID NO: 478961 - DNA, 120 bp, Artificial Sequence
  ENSG00000160791_20 (sequence is synthesized)
agatttatgaatacacgaggtatgaggtctaggaacatacttcagctcacacatgagatctaggtgaggattgattacctagtagtcatttcatgggttgttgggaggattctatgaggc

SEQ ID NO: 478962 - DNA, 120 bp, Artificial Sequence
  ENSG00000160791_21 (sequence is synthesized)
aaccacaggcagcatttagcacatactacacattcaataagcatcaaactcttagttactcattcagggatagcactgagcaaagcattgagcaaaggggtcccatagaggtgagggaag

SEQ ID NO: 478963 - DNA, 120 bp, Artificial Sequence
  ENSG00000160791_22 (sequence is synthesized)
cctgaaaaactaagatgctgcctgcccagtgcacacaagtgtaggtatcattttctgcatttaaccgtcaataggcaaaggggggaagggacatattcatttggaaataagctgccttga

SEQ ID NO: 478964 - DNA, 120 bp, Artificial Sequence
  ENSG00000160791_23 (sequence is synthesized)
gccttaaaacccacaaaagtacaatttaccagcctccgtatttcagactgaatgggggtggggggggcgccttaggtacttattccagatgccttctccagacaaaccagaagcaacaga

SEQ ID NO: 478965 - DNA, 120 bp, Artificial Sequence
  ENSG00000160791_24 (sequence is synthesized)
aaaaatcgtctctccctccctttgaaatgaatataccccttagtgtttgggtatattcatttcaaagggagagagagaggtttttttctgttctgtctcatatgattgtgcacatacttg

SEQ ID NO: 478966 - DNA, 120 bp, Artificial Sequence
  ENSG00000160791_25 (sequence is synthesized)
agactgttttgaatttgggggatggctaaaaccatcatagtacaggtaaggtgagggaatagtaagtggtgagaactactcagggaatgaaggtgtcagaataataagaggtgctactga

SEQ ID NO: 478967 - DNA, 120 bp, Artificial Sequence
  ENSG00000160791_26 (sequence is synthesized)
ctttctcagcctctgaatatgaacggtgagcattgtggctgtcagcaggaagcaacgaagggaaatgtctttccttttgctcttaagttgtggagagtgcaacagtagcataggacccta

SEQ ID NO: 478968 - DNA, 120 bp, Artificial Sequence
  ENSG00000160791_27 (sequence is synthesized)
ccctctgggccaagtcaaagacattctgacatcttagtatttgcatattcttatgtatgtgaaagttacaaattgcttgaaagaaaatatgcatctaataaaaaacaccttctaaaataa

SEQ ID NO: 478969 - DNA, 120 bp, Artificial Sequence
  ENSG00000160791_28 (sequence is synthesized)
ccccaacagagccaagctctccatctagtggacagggaagctagcagcaaaccttcccttcactacaaaacttcattgcttggccaaaaagagagttaattcaatgtagacatctatgta

SEQ ID NO: 478970 - DNA, 120 bp, Artificial Sequence
  ENSG00000160796_0 (sequence is synthesized)
agcagacttgggtggctctgcgccgcggaggccacagccgcagacttccccagtagtaccgcgccgctccgccccggagtgacgccctccgcccatgggcctggccgagggcaaccggcg

SEQ ID NO: 478971 - DNA, 120 bp, Artificial Sequence
  ENSG00000160796_1 (sequence is synthesized)
ggcggcgcggaggaggcggcgacaggtggcgcgcagcagggccggagccgggccgggccatggccgcctcggagcggctgtacgagttgtggctgctctactacgcgcagaaggacctgg

SEQ ID NO: 478972 - DNA, 120 bp, Artificial Sequence
  ENSG00000160796_2 (sequence is synthesized)
gttacctgcagcagtggctgaaggcctttgtaggtgccttcaagaagagcatctcactgtcctctctggagccacgaaggccagaggaggcaggtgcagaggtcccgctgctaccactgg

SEQ ID NO: 478973 - DNA, 120 bp, Artificial Sequence
  ENSG00000160796_3 (sequence is synthesized)
atgagctgcatgtgctggccgaacagctgcaccaggctgacctggagcaagccctcctgctgctcaagctcttcatcattctctgcaggaacctggagaacatagaggcaggccggggcc

SEQ ID NO: 478974 - DNA, 120 bp, Artificial Sequence
  ENSG00000160796_4 (sequence is synthesized)
aagtgctagtgccccgagtgctggcactgttgaccaagttggtggcggagctgaaaggatgcccaccaccccagggccgaggcacgcagttggagaatgtggccctacatgctctgcttc

SEQ ID NO: 478975 - DNA, 120 bp, Artificial Sequence
  ENSG00000160796_5 (sequence is synthesized)
tctgcgagggcctctttgacccttaccaaacctggcggcgccagcgcagtggggaagtcatcagctccaaggagaagagcaaatacaagttccctcctgctgctttgccccaggaattca

SEQ ID NO: 478976 - DNA, 120 bp, Artificial Sequence
  ENSG00000160796_6 (sequence is synthesized)
gcgccttcttccaagagagcctacagaatgcagaccacttgcctcccatactgctgttacgtctcatccacctcttctgcgccgtcctcgctggaggaaaggagaacgggcagatggctg

SEQ ID NO: 478977 - DNA, 120 bp, Artificial Sequence
  ENSG00000160796_7 (sequence is synthesized)
taagtgatggctctgtgaagggcctgctgagtgtggtgcggggctggagccgtgggccagccccggacccgtgcctagtgccactggctctagaggcactggtaggtgcagtccatgtct

SEQ ID NO: 478978 - DNA, 120 bp, Artificial Sequence
  ENSG00000160796_8 (sequence is synthesized)
tgcatgccagccgcgcacctcctcgtggcccagagcttcgtgccctgcttgagagctacttccatgtccttaatgctgactggccagctggtctgagctcaggccccgaagaggcccttg

SEQ ID NO: 478979 - DNA, 120 bp, Artificial Sequence
  ENSG00000160796_9 (sequence is synthesized)
tcaccctccgggtcagcatgctcgacgccatccccatgatgctggcatgtgaagaccggccagtgctgcaagccaccttcctcagcaacaattgctttgaacacctcactcggctcattc

SEQ ID NO: 478980 - DNA, 120 bp, Artificial Sequence
  ENSG00000160796_10 (sequence is synthesized)
agaacagcaagctgtacctgcagtcccgggcgccccccgagggggacagtgacctggctacccggttactgactgagcccgatgtccaaaaggtcctggaccaagacacagacgccattg

SEQ ID NO: 478981 - DNA, 120 bp, Artificial Sequence
  ENSG00000160796_11 (sequence is synthesized)
cagtccatgtagtcagagtgctgacctgcatcatgagtgactccccctcggccaaggaggtgtttaaggagcgcatcggctaccctcacctgcaggaggttctgcagagccatggtcccc

SEQ ID NO: 478982 - DNA, 120 bp, Artificial Sequence
  ENSG00000160796_12 (sequence is synthesized)
ccacccatcggctgttgcaagagctgctcaacatggctgtggagggtgaccacagcatgtgcccacctccaccaatccgcaacgagcagccggtactggtgctggcgcagtggctgccgt

SEQ ID NO: 478983 - DNA, 120 bp, Artificial Sequence
  ENSG00000160796_13 (sequence is synthesized)
cattgcccaccgctgagctgcggctcttcctagcgcaacgcctcaggtggctctgtgacagctgccctgccagccgtgccacctgtgtgcaggcaggcctggtgggctgcctgttggaga

SEQ ID NO: 478984 - DNA, 120 bp, Artificial Sequence
  ENSG00000160796_14 (sequence is synthesized)
cactcagcacagggctagccctggaggcccgctgccaagagcagctgctggcactgctacaagcactgggccgtgtatcaataaggcccatggagctgcgtcacctgctgcgcccccggc

SEQ ID NO: 478985 - DNA, 120 bp, Artificial Sequence
  ENSG00000160796_15 (sequence is synthesized)
caggattggactcggaaccaggcggagctgaggctggaaaggcccgacacgcaggtgctgtcatccgcacattatcaggcatggccaggcaccagggtcctgcacgtgctctgcgctact

SEQ ID NO: 478986 - DNA, 120 bp, Artificial Sequence
  ENSG00000160796_16 (sequence is synthesized)
ttgacctcacgcccagcatggcgggcatcatggtaccccctgtacagcgatggccagggcctggcttcacctttcatgcctggctctgtctgcaccctatggatacagcacctacccctg

SEQ ID NO: 478987 - DNA, 120 bp, Artificial Sequence
  ENSG00000160796_17 (sequence is synthesized)
cccccacccgaccactccagcgaaagcagctgtacagcttctttaccagcagcggctcagggtttgaggccttcttcacggcggccgggaccctggtggtggctgtgtgcacacggaagg

SEQ ID NO: 478988 - DNA, 120 bp, Artificial Sequence
  ENSG00000160796_18 (sequence is synthesized)
agtatttgaccatgagtttgcccgaagtgtcctttgccgactctgcctggcactgcgtggctatcgtccatgtgcctgggcgccggcccttcagccagaacctggtccatgtctacaaag

SEQ ID NO: 478989 - DNA, 120 bp, Artificial Sequence
  ENSG00000160796_19 (sequence is synthesized)
acggccatctggtcaagacagcaccccttcgctgcccctccctcagtgagcctttctcctcctgctgtatcggctccgctggataccgcacaacgaccaccaccacagggctgcccacac

SEQ ID NO: 478990 - DNA, 120 bp, Artificial Sequence
  ENSG00000160796_20 (sequence is synthesized)
caccagtccccgccaccctggcctacactcaccccgccctcacccgctcccagtcagtcccagcctccacagggcttggctgggggtccgggctggtggcccccctgcaggagggcagca

SEQ ID NO: 478991 - DNA, 120 bp, Artificial Sequence
  ENSG00000160796_21 (sequence is synthesized)
tcgactctaccctcgcaggcacccaggacactcggtggggcagccccacatccctggagggtgagctgggggctgtggccatctttcacgaagccctgcaggcgacggctctgaggaccc

SEQ ID NO: 478992 - DNA, 120 bp, Artificial Sequence
  ENSG00000160796_22 (sequence is synthesized)
tgtgcaccctggggcccaatgagacggcacccttcaagcctgagggggagctgcatgagctcagcaccaggctgctcctccattactcacctcaggcttgtaagaacaacatctgcctgg

SEQ ID NO: 478993 - DNA, 120 bp, Artificial Sequence
  ENSG00000160796_23 (sequence is synthesized)
acctgtcccccagtcatgggcttgatgggcgcctgacgggccacagagtggagacctgggatgtgaaggatgtggtgaactgcgttgggggtatgggtgccctgctgcccctgctggagc

SEQ ID NO: 478994 - DNA, 120 bp, Artificial Sequence
  ENSG00000160796_24 (sequence is synthesized)
gagtagctgcacagcccaaagaggctgaagcaggtccagctgaaacgcatgacctcgtgggtcctgaactgacctctggtcacaacacccagggcctggttctcccattgggtaaatctt

SEQ ID NO: 478995 - DNA, 120 bp, Artificial Sequence
  ENSG00000160796_25 (sequence is synthesized)
cagaggaacggatggagaggaacgcagtggctgcttttctgctgatgctgcggaacttccttcagggtcacatggtgaaccaagagagcctggtgcagtgccaggggcctgccatcatcg

SEQ ID NO: 478996 - DNA, 120 bp, Artificial Sequence
  ENSG00000160796_26 (sequence is synthesized)
gggccctcctgcgaaaggtcccaagctgggccatggacatgaacgtgctcatgtccgcccagctgctgatggagcaggtggcagctgagggcagcgggcccctcctgtacctactctacc

SEQ ID NO: 478997 - DNA, 120 bp, Artificial Sequence
  ENSG00000160796_27 (sequence is synthesized)
agcatttgctcttcaactttcacctctggaccctcagtgacttcgccgtgcgcctcggtcacatccagtacatgtccagcatagttcgggagcacagacagaagctgcggaagaagtacg

SEQ ID NO: 478998 - DNA, 120 bp, Artificial Sequence
  ENSG00000160796_28 (sequence is synthesized)
gcgtccagtttatcttggatgctctgcgcacccactacagcccgcagcgggagcgccccctggctgctgacgacctacgcaccgtgcagacctccctcctgggcctggcgagggagttcc

SEQ ID NO: 478999 - DNA, 120 bp, Artificial Sequence
  ENSG00000160796_29 (sequence is synthesized)
tggtgcggagtctctcagcagatgacgtgcaggtcacgcagaccatgctgagctttttggcggccacaggcgatgacggtcaggcggtgggtgcgctggacctgctgctggccctgctgc

SEQ ID NO: 479000 - DNA, 120 bp, Artificial Sequence
  ENSG00000160796_30 (sequence is synthesized)
acggttccctggtgcaggagtccttggctgtctttctgttggagccagggaacctcgaagtgctactggccctgctagtgcggccagggtcactgcccctgctgcccgatcgagtctgca

SEQ ID NO: 479001 - DNA, 120 bp, Artificial Sequence
  ENSG00000160796_31 (sequence is synthesized)
agatcctgcgcagactgcagcagaatgagcggctacctgagcggagccgccagcgcctccggctgcgggagtgtggtctccagggtctggttgcctgcttgcctgaggggactgtttccc

SEQ ID NO: 479002 - DNA, 120 bp, Artificial Sequence
  ENSG00000160796_32 (sequence is synthesized)
cccagctctgccagggcctctacaagctgttcctgggggcagattgcctgaacctctcagatctgctggctgtggtacagctgtccctccaggctgacctcagcgttcgcctagacatct

SEQ ID NO: 479003 - DNA, 120 bp, Artificial Sequence
  ENSG00000160796_33 (sequence is synthesized)
gtcgccagcttttccacctcatctacggacagccagatgtagtgcggcttctggcccgacaggctggctggcaagatgtgctgacccggctatatgtcctggaggctgccacagccggca

SEQ ID NO: 479004 - DNA, 120 bp, Artificial Sequence
  ENSG00000160796_34 (sequence is synthesized)
gcccccctccgtcttccccagagtcacctacctcccccaagccagccccacccaagccacccactgagtcacctgctgagccttcagatgtcttcctgccctcagaggccccctgccctg

SEQ ID NO: 479005 - DNA, 120 bp, Artificial Sequence
  ENSG00000160796_35 (sequence is synthesized)
accctgatggcttttaccatgctctctccccattctgcacgccctttgacctgggcctggaacggtctagtgtaggatcaggcaacactgctggtggtggcggcagcagtgggactctta

SEQ ID NO: 479006 - DNA, 120 bp, Artificial Sequence
  ENSG00000160796_36 (sequence is synthesized)
ccgccacagctccagtctctccaatgtgctggaggacggcagcctcccggagcccaccattagcggggatgatacctcgaacaccagcaacccacagcaaacctctgaggaagagttgtg

SEQ ID NO: 479007 - DNA, 120 bp, Artificial Sequence
  ENSG00000160796_37 (sequence is synthesized)
caatctgctcaccaacgtgctgttctcggtgacgtggcgtggcgtggaaggcagcgatgaggctgcctggcgggagcgtggccaggttttctcagtgctcacccagctgggggcctcagc

SEQ ID NO: 479008 - DNA, 120 bp, Artificial Sequence
  ENSG00000160796_38 (sequence is synthesized)
cacacttgtgcgcccaccagactgcatcaagcgcagcctcctggagatgatgctggagtcagccctgaccgacatcaaagaggcccccgtgggggtcctggccagcctcacccagcaagc

SEQ ID NO: 479009 - DNA, 120 bp, Artificial Sequence
  ENSG00000160796_39 (sequence is synthesized)
gctttggctgctgcgtctgctgcaggacttcctgtgtgctgaaggccatggtaaccaggaactgtggagtgagaagctctttgaaggtgtatgcagcctacttgatcgcctgggagcctg

SEQ ID NO: 479010 - DNA, 120 bp, Artificial Sequence
  ENSG00000160796_40 (sequence is synthesized)
gccccacctggccaacggcacagctgatctccgtgagatggcgcagattggcctacggcttgtacttggctacatcctgctggaagacccacagctgcatgcccaggcctacgtgagatt

SEQ ID NO: 479011 - DNA, 120 bp, Artificial Sequence
  ENSG00000160796_41 (sequence is synthesized)
gcacatgctgctacagactgcagtgccagcccgccgcgaggaggcctgctatgtgctctccaagctggaggctgcactggggcgggtgctgaacacctcttccttggagtcagccactga

SEQ ID NO: 479012 - DNA, 120 bp, Artificial Sequence
  ENSG00000160796_42 (sequence is synthesized)
tgaggcagggtccccacttgcagctgcagcagctgcagcagctgcagagcgctgctcctggctggtgccactggtgcgcacgctgctagaccgtgcctatgagccgctggggctgcagtg

SEQ ID NO: 479013 - DNA, 120 bp, Artificial Sequence
  ENSG00000160796_43 (sequence is synthesized)
gggactgccctccctgccacccaccaatggcagccccaccttctttgaagacttccaggctttttgtgccacacccgaatggcgccacttcatcgacaaacaggtacagccaaccatgtc

SEQ ID NO: 479014 - DNA, 120 bp, Artificial Sequence
  ENSG00000160796_44 (sequence is synthesized)
ccagttcgaaatggacacgtatgctaagagccacgaccttatgtcaggtttctggaatgcctgctatgacatgcttatgagcagtgggcagcggcgccagtgggagcgcgcccagagtcg

SEQ ID NO: 479015 - DNA, 120 bp, Artificial Sequence
  ENSG00000160796_45 (sequence is synthesized)
tcgggccttccaggagctggtgctggaacctgcgcagaggcgggcgcgcctggaggggctacgctacacggcagtgctgaagcagcaggcaacgcagcactccatggccctgctgcactg

SEQ ID NO: 479016 - DNA, 120 bp, Artificial Sequence
  ENSG00000160796_46 (sequence is synthesized)
gggggcgctgtggcgccagctcgccagcccatgtggggcctgggcgctgagggacactcccatcccccgctggaaactgtccagcgccgagacatattcacgcatgcgtctgaagctggt

SEQ ID NO: 479017 - DNA, 120 bp, Artificial Sequence
  ENSG00000160796_47 (sequence is synthesized)
gcccaaccatcacttcgaccctcacctggaagccagcgctctccgagacaatctgggtgaggttcccctgacacccaccgaggaggcctcactgcctctggcagtgaccaaagaggccaa

SEQ ID NO: 479018 - DNA, 120 bp, Artificial Sequence
  ENSG00000160796_48 (sequence is synthesized)
agtgagcaccccacccgagttgctgcaggaggaccagctcggcgaggacgagctggctgagctggagaccccgatggaggcagcagaactggatgagcagcgtgagaagctggtgctgtc

SEQ ID NO: 479019 - DNA, 120 bp, Artificial Sequence
  ENSG00000160796_49 (sequence is synthesized)
ggccgagtgccagctggtgacggtagtggccgtggtcccagggctgctggaggtcaccacacagaatgtatacttctacgatggcagcactgagcgcgtggaaaccgaggagggcatcgg

SEQ ID NO: 479020 - DNA, 120 bp, Artificial Sequence
  ENSG00000160796_50 (sequence is synthesized)
ctatgatttccggcgcccactggcccagctgcgtgaggtccacctgcggcgtttcaacctgcgccgttcagcacttgagctcttctttatcgatcaggccaactacttcctcaacttccc

SEQ ID NO: 479021 - DNA, 120 bp, Artificial Sequence
  ENSG00000160796_51 (sequence is synthesized)
atgcaaggtgggcacgaccccagtctcatctcctagccagactcccagaccccagcctggccccatcccaccccatacccaggtacggaaccaggtgtactcgtggctcctgcgcctacg

SEQ ID NO: 479022 - DNA, 120 bp, Artificial Sequence
  ENSG00000160796_52 (sequence is synthesized)
gcccccctctcaaggctacctaagcagccgctccccccaggagatgctgcgtgcctcaggccttacccagaaatgggtacagcgtgagatatccaacttcgagtacttgatgcaactcaa

SEQ ID NO: 479023 - DNA, 120 bp, Artificial Sequence
  ENSG00000160796_53 (sequence is synthesized)
caccattgcggggcggacctacaatgacctgtctcagtaccctgtgttcccctgggtcctgcaggactacgtgtccccaaccctggacctcagcaacccagccgtcttccgggacctgtc

SEQ ID NO: 479024 - DNA, 120 bp, Artificial Sequence
  ENSG00000160796_54 (sequence is synthesized)
taagcccatcggtgtggtgaaccccaagcatgcccagctcgtgagggagaagtatgaaagctttgaggacccagcagggaccattgacaagttccactatggcacccactactccaatgc

SEQ ID NO: 479025 - DNA, 120 bp, Artificial Sequence
  ENSG00000160796_55 (sequence is synthesized)
agcaggcgtgatgcactacctcatccgcgtggagcccttcacctccctgcacgtccagctgcaaagtggccgctttgactgctccgaccggcagttccactcggtggcggcagcctggca

SEQ ID NO: 479026 - DNA, 120 bp, Artificial Sequence
  ENSG00000160796_56 (sequence is synthesized)
ggcacgcctggagagccctgccgatgtgaaggagctcatcccggaattcttctactttcctgacttcctggagaaccagaacggttttgacctgggctgtctccagctgaccaacgagaa

SEQ ID NO: 479027 - DNA, 120 bp, Artificial Sequence
  ENSG00000160796_57 (sequence is synthesized)
ggtaggcgatgtggtgctacccccgtgggccagctctcctgaggacttcatccagcagcaccgccaggctctggagtcggagtatgtgtctgcacacctacacgagtggatcgacctcat

SEQ ID NO: 479028 - DNA, 120 bp, Artificial Sequence
  ENSG00000160796_58 (sequence is synthesized)
ctttggctacaagcagcgggggccagccgccgaggaggccctcaatgtcttctattactgcacctatgagggggctgtagacctggaccatgtgacagatgagcgggaacggaaggctct

SEQ ID NO: 479029 - DNA, 120 bp, Artificial Sequence
  ENSG00000160796_59 (sequence is synthesized)
ggagggcattatcagcaactttgggcagactccctgtcagctgctgaaggagccacatccaactcggctctcagctgaggaagcagcccatcgccttgcacgcctggacactaactcacc

SEQ ID NO: 479030 - DNA, 120 bp, Artificial Sequence
  ENSG00000160796_60 (sequence is synthesized)
tagcatcttccagcacctggacgaactcaaggcattcttcgcagaggttgtcagtgatggtgtacccctggtgctagccctggtcccccaccggcagccccactccttcatcacccaggg

SEQ ID NO: 479031 - DNA, 120 bp, Artificial Sequence
  ENSG00000160796_61 (sequence is synthesized)
ttccccagacctgttggtgactgtgagtgccagtgggctgctgggcacccacagctggttgccctatgaccgcaacataagcaactacttcagcttcagcaaagaccccaccatgggcag

SEQ ID NO: 479032 - DNA, 120 bp, Artificial Sequence
  ENSG00000160796_62 (sequence is synthesized)
ccacaagacgcagcgactgctgagtggcccgtgggtgccaggcagtggtgtgagtggacaagcactggcagtggccccggatggaaagctgctattcagcggtggccactgggatggcag

SEQ ID NO: 479033 - DNA, 120 bp, Artificial Sequence
  ENSG00000160796_63 (sequence is synthesized)
cctgcgggtgactgcactaccccgtggcaagctgttgagccagctcagctgccaccttgatgtagtaacctgccttgcactggacacctgtggcatctacctcatctcaggctcccggga

SEQ ID NO: 479034 - DNA, 120 bp, Artificial Sequence
  ENSG00000160796_64 (sequence is synthesized)
caccacgtgcatggtgtggcggctcctgcatcagggtggtctgtcagtaggcctggcaccaaagcctgtgcaggtcctgtatgggcatggggctgcagtgagctgtgtggccatcagcac

SEQ ID NO: 479035 - DNA, 120 bp, Artificial Sequence
  ENSG00000160796_65 (sequence is synthesized)
tgaacttgacatggctgtgtctggatctgaggatggaactgtgatcatacacactgtacgccgcggacagtttgtagcggcactacggcctctgggtgccacattccctggacctatttt

SEQ ID NO: 479036 - DNA, 120 bp, Artificial Sequence
  ENSG00000160796_66 (sequence is synthesized)
ccacctggcattggggtccgaaggccagattgtggtacagagctcagcgtgggaacgtcctggggcccaggtcacctactccttgcacctgtattcagtcaatgggaagttgcgggcttc

SEQ ID NO: 479037 - DNA, 120 bp, Artificial Sequence
  ENSG00000160796_67 (sequence is synthesized)
actgcccctggcagagcagcctacagccctgacggtgacagaggactttgtgttgctgggcaccgcccagtgcgccctgcacatcctccaactaaacacactgctcccggccgcgcctcc

SEQ ID NO: 479038 - DNA, 120 bp, Artificial Sequence
  ENSG00000160796_68 (sequence is synthesized)
cttgcccatgaaggtggccatccgcagcgtggccgtgaccaaggagcgcagccacgtgctggtgggcctggaggatggcaagctcatcgtggtggtcgcggggcagccctctgaggtgcg

SEQ ID NO: 479039 - DNA, 120 bp, Artificial Sequence
  ENSG00000160796_69 (sequence is synthesized)
cagcagccagttcgcgcggaagctgtggcggtcctcgcggcgcatctcccaggtgtcctcgggagagacggaatacaaccctactgaggcgcgctgaacctggccagtccggctgctcgg

SEQ ID NO: 479040 - DNA, 120 bp, Artificial Sequence
  ENSG00000160796_70 (sequence is synthesized)
gcctggcccgggaggccccgcccagaagtcggcgggaacaccccggggtgggcagcccaggggggtgagcggggcccaccctgcccagctcagggattggcgggcgatgttaccccctca

SEQ ID NO: 479041 - DNA, 120 bp, Artificial Sequence
  ENSG00000160796_71 (sequence is synthesized)
cgatgttaccccctcagggattggcgggcggaagtcccgcccctcgccggctgaggggccgccctgagggccagcactggcgtctgcggccgcagcagcactttttgcacagtctggggc

SEQ ID NO: 479042 - DNA, 120 bp, Artificial Sequence
  ENSG00000160796_72 (sequence is synthesized)
ggggttccccggcttccaagtcgctgtttcgtcaaagcacgagggccgcctgtggccttaattcctaacggcggccccggttctcccttctcggcaataaaccaggcctagttttgtagc

SEQ ID NO: 479043 - DNA, 120 bp, Artificial Sequence
  ENSG00000160796_73 (sequence is synthesized)
gtgcatggtgtggcggctcctgcatcaggtgtgcctcgtgggcagctctgtggggcccccgtagcccagacctgcagcccatccgtccctcagtggccttccagtcctgtcctcctctag

SEQ ID NO: 479044 - DNA, 120 bp, Artificial Sequence
  ENSG00000160796_74 (sequence is synthesized)
cttccagcacctggacgaactcaaggcattcttcgcagaggtgaaaggaagacaagacctcaactttatattctgtgaaatgggtttaaccccactgtccttaccaaccacgtggggcag

SEQ ID NO: 479045 - DNA, 120 bp, Artificial Sequence
  ENSG00000160796_75 (sequence is synthesized)
atgggaatcctaatcaaggtcactgatttcaaggcaccttagaaaatgagctaaacatgggaagagtatgggggcaggaggggtgccttcttcatcagggccaggataaagtgtcgactc

SEQ ID NO: 479046 - DNA, 120 bp, Artificial Sequence
  ENSG00000160796_76 (sequence is synthesized)
aacaagctctgaaagccttagggagatcaggagggagatctgtccttggaccccttccatcgccttcctagacaggaacattcctgaatgttgcccccaggcctgactttttttttaggt

SEQ ID NO: 479047 - DNA, 120 bp, Artificial Sequence
  ENSG00000160796_77 (sequence is synthesized)
ggggcagtgctggacagcccacctggctcacatcttgtctgcccctgtccccagaaatgggtacagcgtgagatatccaacttcgagtacttgatgcaactcaacaccattgcggggcgg

SEQ ID NO: 479048 - DNA, 120 bp, Artificial Sequence
  ENSG00000160796_78 (sequence is synthesized)
acctacaatgacctgtctcagtaccctgtggtgagggtcccactctgcacccctccacccctgcccctctgacctgtcagcccttggttcccccaagtgtaggtacctgccagtgggcca

SEQ ID NO: 479049 - DNA, 120 bp, Artificial Sequence
  ENSG00000160796_79 (sequence is synthesized)
agctctgagcttggtcaagggtagatgtgccaatgaagacctggcctctgttccctgccaacccccagaggtccccagcctcactcccttcccctccctgcctagcctctattcctcaaa

SEQ ID NO: 479050 - DNA, 120 bp, Artificial Sequence
  ENSG00000160796_80 (sequence is synthesized)
aggaatcctgttccaggacactctgtccttctcccctgtgacccctctaagtggtgctcccccaacctgtgggcaggctctgtgcccgccttcttgagggtgtgggcagggcagggtggg

SEQ ID NO: 479051 - DNA, 120 bp, Artificial Sequence
  ENSG00000160796_81 (sequence is synthesized)
cacatcctgggcccacccctggctcccttcttccctccagccacagcatctccctccctgtctccattctccccacctcaccttggccccgtgcccctcccccagctttgactgctccga

SEQ ID NO: 479052 - DNA, 120 bp, Artificial Sequence
  ENSG00000160796_82 (sequence is synthesized)
gtgtgaggtgctcacactggagcgggcaggtgtagggatggagagcagatggtggagtggccagggggcagtcgggatggacagggagacagctgacccagtcctctgtgccaggttttg

SEQ ID NO: 479053 - DNA, 120 bp, Artificial Sequence
  ENSG00000160796_83 (sequence is synthesized)
acctgggctgtctccagctgaccaacgagaaggtaggcgatgtggtgctacccccgtgggccagctctcctgaggacttcatccagcagcaccgccaggctctggtgaggaaggaaccac

SEQ ID NO: 479054 - DNA, 120 bp, Artificial Sequence
  ENSG00000160796_84 (sequence is synthesized)
aggcaaacggcaggcagccggggttctgaagatcatggggggtcagctgtccctgcactgattgctgcctccctactctcaggagtcggagtatgtgtctgcacacctacacgagtggat

SEQ ID NO: 479055 - DNA, 120 bp, Artificial Sequence
  ENSG00000160796_85 (sequence is synthesized)
tcaggtcgggtggatgcagagggcacgcagggagccctgactgctctgcctgccttcccaggggctgtagacctggaccatgtgacagatgagcgggaacggaaggctctggagggcatt

SEQ ID NO: 479056 - DNA, 120 bp, Artificial Sequence
  ENSG00000160796_86 (sequence is synthesized)
atcagcaactttgggcagactccctgtcagctgctgaaggtaaggccagcttagaggatagtggccagggatgcccatgccatggtgctgaccagccacttacccacaggagccacatcc

SEQ ID NO: 479057 - DNA, 120 bp, Artificial Sequence
  ENSG00000160796_87 (sequence is synthesized)
accaagttgaaactaagtgtgatactctggaagcatcttccatgtctgtcccagcttctcacccactttctgagatgccctcctaaagtctctgcctgtttcttggagggaacctctgca

SEQ ID NO: 479058 - DNA, 120 bp, Artificial Sequence
  ENSG00000160796_88 (sequence is synthesized)
tctgtgacacctactctatgacccctggggactgacagtaaaggaagggatgatgcttcagggagcagatagtgtaatctgatagtactcaggcatagctaggcctgcccttgcccctgc

SEQ ID NO: 479059 - DNA, 120 bp, Artificial Sequence
  ENSG00000160796_89 (sequence is synthesized)
aggttgtcagtgatggtgtacccctggtgctagccctggtcccccaccggcagccccactccttcatcacccagggttccccagacctgttggtaagtgcattgtgcagagccccagctc

SEQ ID NO: 479060 - DNA, 120 bp, Artificial Sequence
  ENSG00000160796_90 (sequence is synthesized)
acccggaattattcccctccctaatcagaatgtaggccagctgcaggggaaaggtctggccaggctccctgagggcctgggtctcttccatgtggcctggcctcacttgctatccccctc

SEQ ID NO: 479061 - DNA, 120 bp, Artificial Sequence
  ENSG00000160796_91 (sequence is synthesized)
ttggtgtaggataaaggccctaggaacccacacaccatacatgtttgtgggcacatatttcaaggtttgttacctgtcccttcatcttcccatggggaggtcttgccctgggcctccgct

SEQ ID NO: 479062 - DNA, 120 bp, Artificial Sequence
  ENSG00000160796_92 (sequence is synthesized)
tagccacagttgtgggagatttctttgtgtataagaatttcaatttaaccatccttaaaatgaggacagagagggtatatgggataagggatatctgctggtcgcaaagcccccttgcag

SEQ ID NO: 479063 - DNA, 120 bp, Artificial Sequence
  ENSG00000160796_93 (sequence is synthesized)
ctcaggtatttgggggccccaggggagtggttggctcgactgtgctacttccccggctcccacactctgcctgccaccccctcctccctctgaccctggctgcctgcccattcccctatc

SEQ ID NO: 479064 - DNA, 120 bp, Artificial Sequence
  ENSG00000160799_0 (sequence is synthesized)
ggcttccaaagctacaacctgccagcctatgctccatacctgccctgcgaggtctgaattccacttgctgctctttcactgatcagcgttggataaatcgagccttagcttttttttttt

SEQ ID NO: 479065 - DNA, 120 bp, Artificial Sequence
  ENSG00000160799_1 (sequence is synthesized)
tcttttttttttttgctggctccccacccactaggacctcccagtctctcattctcgtccttggattggccgcgagacatttatccactctccttaggcctgcgcgatgcaagacgggag

SEQ ID NO: 479066 - DNA, 120 bp, Artificial Sequence
  ENSG00000160799_2 (sequence is synthesized)
aaaaggaggggcgtacgcgggcaagatggaggcaactacggctggtgtgggccggctagaggaagaggcgttgcggcgaaaggaacggctgaaggccctacgggagaaaaccgggcgcaa

SEQ ID NO: 479067 - DNA, 120 bp, Artificial Sequence
  ENSG00000160799_3 (sequence is synthesized)
ggacaaggaagatggggagccaaagaccaagcatctcagagaagaggaggaagaaggcgagaagcacagggaacttaggctgcggaactatgtcccggaggatgaggacctgaagaagag

SEQ ID NO: 479068 - DNA, 120 bp, Artificial Sequence
  ENSG00000160799_4 (sequence is synthesized)
aaccggttgcagtggaggagaaggtgaaggagcagctggaggccgccaagcccgagcccgtcatcgaggaggtggacctggccaacctcgctcctcggaagcctgactgggacctcaaga

SEQ ID NO: 479069 - DNA, 120 bp, Artificial Sequence
  ENSG00000160799_5 (sequence is synthesized)
gagatgtggccaagaagctggagaaactaaaaaagcggactcagagggccattgccgagctgatccgtgaaaggctgaaaggccaggaagacagcctagcctctgcagtggatgctgcca

SEQ ID NO: 479070 - DNA, 120 bp, Artificial Sequence
  ENSG00000160799_6 (sequence is synthesized)
ccgaacaaaagacctgtgactccgactgaggcatgccctgccccaccactcgcccatcaggcctgtcctgcagaggatggtcttgggcagggatgggggctaggcttgccatcacctcca

SEQ ID NO: 479071 - DNA, 120 bp, Artificial Sequence
  ENSG00000160799_7 (sequence is synthesized)
gtttggcttctgagcagagactccctgcccatcaagtctgaaacccccatggatgaggtcagctccttgtctgctgggtggcccctgccattctgaatggaggcagaaccagcaacaact

SEQ ID NO: 479072 - DNA, 120 bp, Artificial Sequence
  ENSG00000160799_8 (sequence is synthesized)
ctgggcgtgcctgtgtctgcacatgtggatgtacatatgtctgtatatatgtatatattttgaactttctaaaaaaaaatctggaaatagaaacaagtaaacccctgtgtgtggcagaaa

SEQ ID NO: 479073 - DNA, 120 bp, Artificial Sequence
  ENSG00000160799_9 (sequence is synthesized)
ggccaaaccggttgcaggtaagcaagctgtccctctccacctctgcttcctggcactgtcagccaccctccacctcagcaggctttgctctctgagaataaccagcagtaccaggacagg

SEQ ID NO: 479074 - DNA, 120 bp, Artificial Sequence
  ENSG00000160799_10 (sequence is synthesized)
gaggctgtcggggcactgaagagtcctcttgtgccttctcagtcctgctcacaccctgagaccgaggcctcccagggatctgagtggggtttgaaaaaggccacatcctctcagaggact

SEQ ID NO: 479075 - DNA, 120 bp, Artificial Sequence
  ENSG00000160799_11 (sequence is synthesized)
cctggctgagaagtggatgtggtcatggggcccttgggcagcagggcagggtgatgggtcctgtgggccctgggtgggtcagagacaggggccagtcattcagccacacacagcagtgga

SEQ ID NO: 479076 - DNA, 120 bp, Artificial Sequence
  ENSG00000160799_12 (sequence is synthesized)
cgggcagtgtggagcactgaggcaggggagagggcctggcccagggcttgcctagactcttgccatggcgtgggaacagcacagccaccaggagcttctggccgtccacaccactcatgc

SEQ ID NO: 479077 - DNA, 120 bp, Artificial Sequence
  ENSG00000160799_13 (sequence is synthesized)
agggtcgcagttgaggcgtccagcgttcggggtccgggtcgcgcttgaggagagcaaagggctaataaggaaagacagctgccgagggcgcgcatgcgcgggcgctaacgcatgcgcgag

SEQ ID NO: 479078 - DNA, 120 bp, Artificial Sequence
  ENSG00000160799_14 (sequence is synthesized)
cccacgatgtctggggctgcttggcgtgggactcctctggcgctggtgcggtcgtcgcgcatgcgcgggggtgggcaaggcagtggtcagcgacccgcagtccatctgactcctgcttcc

SEQ ID NO: 479079 - DNA, 120 bp, Artificial Sequence
  ENSG00000160799_15 (sequence is synthesized)
cgggtgttgctcgtgtaggtatctagggctgcctgtaggttcagatgcttgttgggttaggcgtgatttgttccgttcctctatggcctagctggtctttaacccccgccttcgattctg

SEQ ID NO: 479080 - DNA, 120 bp, Artificial Sequence
  ENSG00000160799_16 (sequence is synthesized)
agtcagacagactccccagtccggcagcactccttggacagggcagcaagtgacagcagtgggtatacagccggagtcgtttcgtgcaaaaatcaaaaagaggccgggcacggtggctca

SEQ ID NO: 479081 - DNA, 120 bp, Artificial Sequence
  ENSG00000160799_17 (sequence is synthesized)
gtgttgctcgtgtcctgagggctgcactgcagctcctacaatatgaccactgcttctgggtcaggctggccgtttctctcatgattccctgctctctggacaggttgctttgcccacctg

SEQ ID NO: 479082 - DNA, 120 bp, Artificial Sequence
  ENSG00000160799_18 (sequence is synthesized)
gggcttggcccttcctgccgtcacagtgcagagactggcagtacagacatagagttacacgagatagctactgttggaaaccagtgctgaggaggacataagtggtgggatgagagggga

SEQ ID NO: 479083 - DNA, 120 bp, Artificial Sequence
  ENSG00000160799_19 (sequence is synthesized)
tccttctcgtcacttctttattcccttcccaccagcccctttgctctcgtccctctccttcctcctcctctttctcccatttccctccttctcgagcctgccctcccccttgtcctgggg

SEQ ID NO: 479084 - DNA, 120 bp, Artificial Sequence
  ENSG00000160799_20 (sequence is synthesized)
tggcccctccaccctgatgtgtgtctcctcccttcccaggacctggccaacctcgctcctcggaagcctgactggtgagtgttgcccgtgcgtggcgggtgcaggctgactcggggactc

SEQ ID NO: 479085 - DNA, 120 bp, Artificial Sequence
  ENSG00000160799_21 (sequence is synthesized)
agaggcccactatgctggcagtagcttggaggagctgggaggtgcctgtgccctggtcttgggagcatacacctgaggtgggatggaggaaaagccacctgtggctctggctaggccggg

SEQ ID NO: 479086 - DNA, 120 bp, Artificial Sequence
  ENSG00000160799_22 (sequence is synthesized)
acccagaggacatcctcagagcccaggagccctgggattatgtgagaagccagtcctcactttgtatgtatccaggcagctctctggtcttgtagttattgtcagcatccatgcttcctg

SEQ ID NO: 479087 - DNA, 120 bp, Artificial Sequence
  ENSG00000160799_23 (sequence is synthesized)
actgactgtggctggctgcctcctgctgtcccattcttggcctgtggggaatgcttcatcctgggaaacccaggcccctcctccagagctgcctttgcagggtcttcacctctggctggt

SEQ ID NO: 479088 - DNA, 120 bp, Artificial Sequence
  ENSG00000160799_24 (sequence is synthesized)
tgcgggccacacagaggtgggagcaaggaagcctggggtcccgtctctccctgggggccacggtaggcagtgtccctgcagagtggcagcgcgttttccacaggccttctctgtttaatt

SEQ ID NO: 479089 - DNA, 120 bp, Artificial Sequence
  ENSG00000160799_25 (sequence is synthesized)
tgagagcccatctgctccagagctcccatttgagcaaggccaaccgctgtctttgggggccaggagtggagggaagggcagacacagttttctgttcctgttctaccaccatagcttgtt

SEQ ID NO: 479090 - DNA, 120 bp, Artificial Sequence
  ENSG00000160799_26 (sequence is synthesized)
ggtttcctcctctgtgaaatggaggtcgtcatccttcttgctaggctgagagagagtgggagagagggtgctgtgggccgggaggcttgtgtctgtcttcaccttgagccggaggtagag

SEQ ID NO: 479091 - DNA, 120 bp, Artificial Sequence
  ENSG00000160799_27 (sequence is synthesized)
ctatatccctctcgcctgattcttggtcgagttaacaccagctgttttaatttgatgaaacaaaagcatggggcatatgtcctgggaaacccagagccagagagaatgggctgagtgctt

SEQ ID NO: 479092 - DNA, 120 bp, Artificial Sequence
  ENSG00000160799_28 (sequence is synthesized)
gtgcacttctgggtgcccacagtggaggggctgggccggtggctggaggaggagcagggcccacagtgggcaggagcaagtcactccctgatggtgaccagaggaccagagcaagagagg

SEQ ID NO: 479093 - DNA, 120 bp, Artificial Sequence
  ENSG00000160799_29 (sequence is synthesized)
gtctctgagaaaccatccacctttgccttagctcagtcccttgtgttgggtgggtttgtgatgctagtccccctgcctcagtgggacagggaatgatggtttatgctgggtttcggaggg

SEQ ID NO: 479094 - DNA, 120 bp, Artificial Sequence
  ENSG00000160799_30 (sequence is synthesized)
tacagaaggggaatgtcctggcctcttccccagggcagccccctccagcaaccgagcatgactcctaatgccagagggctgcaagaggggaggggacccaatgccacatcaggccagcct

SEQ ID NO: 479095 - DNA, 120 bp, Artificial Sequence
  ENSG00000160799_31 (sequence is synthesized)
tcaccttcctgcttctccctgcctccctgctccagggacctcaagagagatgtggccaagaagctggagaaactaaaaaagcggactcagagggccattgccgagctgatccgtaagtgc

SEQ ID NO: 479096 - DNA, 120 bp, Artificial Sequence
  ENSG00000160799_32 (sequence is synthesized)
agtgcctgggaaggtggggtcctgcccactgggtggtggcccaagcaccgggcccctccccaccccttctgtctgccatccatcccaggtgaaaggctgaaaggccaggaagacagccta

SEQ ID NO: 479097 - DNA, 120 bp, Artificial Sequence
  ENSG00000160799_33 (sequence is synthesized)
taaaatctcaacatctcagaaggcccttgtcgaggccttctctgcctcctttccctcattttccatttggctgttactcagcccccagcattttctttctagcccttacattatgccttt

SEQ ID NO: 479098 - DNA, 120 bp, Artificial Sequence
  ENSG00000160799_34 (sequence is synthesized)
ttacccttctcatacaccttttgtggcgtggttctccattgcctactgagtaagtgccccttctgcacttggcatgtgaagctctgcctggaccatctagcctcatccaacctcctctgg

SEQ ID NO: 479099 - DNA, 80 bp, Artificial Sequence
  ENSG00000160801_0 (sequence is synthesized)
gggccgccgggacgccggggtcccataggccggggcgtgggcggggcggccagcctgacgcagctctgcaccccctacca

SEQ ID NO: 479100 - DNA, 80 bp, Artificial Sequence
  ENSG00000160801_1 (sequence is synthesized)
gcctgacgcagctctgcaccccctaccaccaccagggccggcggcggcggctgccccgagggacgcggccctaggcggtg

SEQ ID NO: 479101 - DNA, 120 bp, Artificial Sequence
  ENSG00000160801_2 (sequence is synthesized)
tgctctgctgccccgtgctcagctccgcgtacgcgctggtggatgcagatgacgtcatgactaaagaggaacagatcttcctgctgcaccgtgctcaggcccagtgcgaaaaacggctca

SEQ ID NO: 479102 - DNA, 120 bp, Artificial Sequence
  ENSG00000160801_3 (sequence is synthesized)
aggaggtcctgcagaggccagccagcataatggaatcagacaagggatggacatctgcgtccacatcagggaagcccaggaaagataaggcatctgggaagctctaccctgagtctgagg

SEQ ID NO: 479103 - DNA, 120 bp, Artificial Sequence
  ENSG00000160801_4 (sequence is synthesized)
aggacaaggaggcacccactggcagcaggtaccgagggcgcccctgtctgccggaatgggaccacatcctgtgctggccgctgggggcaccaggtgaggtggtggctgtgccctgtccgg

SEQ ID NO: 479104 - DNA, 120 bp, Artificial Sequence
  ENSG00000160801_5 (sequence is synthesized)
actacatttatgacttcaatcacaaaggccatgcctaccgacgctgtgaccgcaatggcagctgggagctggtgcctgggcacaacaggacgtgggccaactacagcgagtgtgtcaaat

SEQ ID NO: 479105 - DNA, 120 bp, Artificial Sequence
  ENSG00000160801_6 (sequence is synthesized)
ttctcaccaatgagactcgtgaacgggaggtgtttgaccgcctgggcatgatttacaccgtgggctactccgtgtccctggcgtccctcaccgtagctgtgctcatcctggcctacttta

SEQ ID NO: 479106 - DNA, 120 bp, Artificial Sequence
  ENSG00000160801_7 (sequence is synthesized)
ggcggctgcactgcacgcgcaactacatccacatgcacctgttcctgtccttcatgctgcgcgccgtgagcatcttcgtcaaggacgctgtgctctactctggcgccacgcttgatgagg

SEQ ID NO: 479107 - DNA, 120 bp, Artificial Sequence
  ENSG00000160801_8 (sequence is synthesized)
tgcagggtggctgtgaccttcttcctttacttcctggccaccaactactactggattctggtggaggggctgtacctgcacagcctcatcttcatggccttcttctcagagaagaagtac

SEQ ID NO: 479108 - DNA, 120 bp, Artificial Sequence
  ENSG00000160801_9 (sequence is synthesized)
ctgtggggcttcacagtcttcggctggggtctgcccgctgtcttcgtggctgtgtgggtcagtgtcagagctaccctggccaacaccgggtgctgggacttgagctccgggaacaaaaag

SEQ ID NO: 479109 - DNA, 120 bp, Artificial Sequence
  ENSG00000160801_10 (sequence is synthesized)
tggatcatccaggtgcccatcctggcctccattgtgctcaacttcatcctcttcatcaatatcgtccgggtgctcgccaccaagctgcgggagaccaacgccggccggtgtgacacacgg

SEQ ID NO: 479110 - DNA, 120 bp, Artificial Sequence
  ENSG00000160801_11 (sequence is synthesized)
cagcagtaccggaagctgctcaaatccacgctggtgctcatgcccctctttggcgtccactacattgtcttcatggccacaccatacaccgaggtctcagggacgctctggcaagtccag

SEQ ID NO: 479111 - DNA, 120 bp, Artificial Sequence
  ENSG00000160801_12 (sequence is synthesized)
atgcactatgagatgctcttcaactccttccagggattttttgtcgcaatcatatactgtttctgcaatggcgaggtacaagctgagatcaagaaatcttggagccgctggacactggca

SEQ ID NO: 479112 - DNA, 120 bp, Artificial Sequence
  ENSG00000160801_13 (sequence is synthesized)
ctggacttcaagcgaaaggcacgcagcgggagcagcagctatagctacggccccatggtgtcccacacaagtgtgaccaatgtcggcccccgtgtgggactcggcctgcccctcagcccc

SEQ ID NO: 479113 - DNA, 120 bp, Artificial Sequence
  ENSG00000160801_14 (sequence is synthesized)
cgcctactgcccactgccaccaccaacggccaccctcagctgcctggccatgccaagccagggaccccagccctggagaccctcgagaccacaccacctgccatggctgctcccaaggac

SEQ ID NO: 479114 - DNA, 120 bp, Artificial Sequence
  ENSG00000160801_15 (sequence is synthesized)
gatgggttcctcaacggctcctgctcaggcctggacgaggaggcctctgggcctgagcggccacctgccctgctacaggaagagtgggagacagtcatgtgaccaggcgctgggggctgg

SEQ ID NO: 479115 - DNA, 120 bp, Artificial Sequence
  ENSG00000160801_16 (sequence is synthesized)
ctggacctgctgacatagtggatggacagatggaccaaaagatgggtggttgaatgatttcccactcagggctggggccaagaggaaaaacagggaaaaaaagaaaaaaaaaagaaaaag

SEQ ID NO: 479116 - DNA, 120 bp, Artificial Sequence
  ENSG00000160801_17 (sequence is synthesized)
ggcagaagagtatgatcctggcagaggaagcagcaaggacaaagatgaggaaactgaggtccagacagccgaagagtggtagtgtccaggacacacaactgggccggcggcggcggctgc

SEQ ID NO: 479117 - DNA, 120 bp, Artificial Sequence
  ENSG00000160801_18 (sequence is synthesized)
agcactatccttgcttaggcctgagccacagaagctgctcagggactatccatggcctccccgtggccaacttgagtctgctctgcagctttaggcccgacttggaaggcccatgggctg

SEQ ID NO: 479118 - DNA, 120 bp, Artificial Sequence
  ENSG00000160801_19 (sequence is synthesized)
cacagccatgctcggactgcagggccccggccccgccttggcgcgtctgaaggatgcagctctgccgcggagctgaggagacgtagccttctggggtggatgcagatgacgtcatgacta

SEQ ID NO: 479119 - DNA, 120 bp, Artificial Sequence
  ENSG00000160801_20 (sequence is synthesized)
tacaccgaggtctcagggacgctctggcaagtccagatgcactatgagatgctcttcaactccttccagggattttttgtcgcaatcatatactgtttctgcaatggcgagaacacccct

SEQ ID NO: 479120 - DNA, 80 bp, Artificial Sequence
  ENSG00000160801_21 (sequence is synthesized)
agggaagaggcgcccggccggggagaaggggagcggcagacgccgaggcgagggatgcgcgcggcgggcggtggctccga

SEQ ID NO: 479121 - DNA, 120 bp, Artificial Sequence
  ENSG00000160801_22 (sequence is synthesized)
gctggaggccaggccggccagcggggggtatcccgagagctccatgaagtccccccggggccgcggacggggcgctggcttggggaggctgtcgggggggccccgacatccatggcaagg

SEQ ID NO: 479122 - DNA, 80 bp, Artificial Sequence
  ENSG00000160803_0 (sequence is synthesized)
ctggcgggcggccgggtggcggcggcggcatggcggagccgagcggggccgagacgaggccccccattcgggtcaccgtc

SEQ ID NO: 479123 - DNA, 120 bp, Artificial Sequence
  ENSG00000160803_1 (sequence is synthesized)
gacgaggccccccattcgggtcaccgtcaagacccccaaggacaaggaggaaattgtgatctgcgatcgagcctcggtcaaggagttcaaagaggaaatctcccggaggtttaaggctca

SEQ ID NO: 479124 - DNA, 120 bp, Artificial Sequence
  ENSG00000160803_2 (sequence is synthesized)
gcaggatcagctggtcctgatcttcgcaggcaagatcctcaaggatggggacacactgaaccagcacggaatcaaggacgggctcactgtccatctggtcatcaagacccctcagaaggc

SEQ ID NO: 479125 - DNA, 120 bp, Artificial Sequence
  ENSG00000160803_3 (sequence is synthesized)
tcaagatccagctgctgccactgcttcttccccctccacacctgaccctgcctcagcaccctccaccacgcctgcttcacccgccacccctgcccagccctccacctctggcagtgcctc

SEQ ID NO: 479126 - DNA, 120 bp, Artificial Sequence
  ENSG00000160803_4 (sequence is synthesized)
ttcagatgctggcagtggaagccggaggagcagtggtggggggccctctccgggggctggggagggatcccccagtgctactgcgtccatactctctggctttgggggcatcctggggct

SEQ ID NO: 479127 - DNA, 120 bp, Artificial Sequence
  ENSG00000160803_5 (sequence is synthesized)
gggcagcctaggcctgggctctgccaacttcatggagctgcagcagcagatgcagcggcagctgatgtccaatcctgagatgctgtcacagatcatggagaaccccctggtccaggatat

SEQ ID NO: 479128 - DNA, 120 bp, Artificial Sequence
  ENSG00000160803_6 (sequence is synthesized)
gatgtctaaccctgatctgatgcgtcacatgattatggccaacccccagatgcagcagttgatggagcggaaccctgagatcagccacatgctcaataaccctgaactcatgaggcagac

SEQ ID NO: 479129 - DNA, 120 bp, Artificial Sequence
  ENSG00000160803_7 (sequence is synthesized)
aatggagcttgctcggaatccagccatgatgcaagagatgatgcggaaccaggaccgggccctgagcaaccttgagagcatccctggagggtataatgccctccgccgcatgtacacgga

SEQ ID NO: 479130 - DNA, 120 bp, Artificial Sequence
  ENSG00000160803_8 (sequence is synthesized)
catccaggagcccatgttcagtgctgcccgggaacagtttggcaacaatcccttctcttccctggccgggaactccgacagctcatcctcccagcctctgcggactgagaatcgagagcc

SEQ ID NO: 479131 - DNA, 120 bp, Artificial Sequence
  ENSG00000160803_9 (sequence is synthesized)
cctccctaacccctggagcccctcgccccccacctcccaggcccccgggtccggtggggagggcaccggaggatcggggaccagccaggtgcacccgacagtctcgaacccctttgggat

SEQ ID NO: 479132 - DNA, 120 bp, Artificial Sequence
  ENSG00000160803_10 (sequence is synthesized)
caatgcggctagcctggggtcagggatgttcaatagcccagaaatgcaagccctcctccagcagatctctgagaacccccagctgatgcagaatgtgatctcagcaccctacatgcgcag

SEQ ID NO: 479133 - DNA, 120 bp, Artificial Sequence
  ENSG00000160803_11 (sequence is synthesized)
catgatgcagacgcttgcccagaaccccgactttgctgctcagatgatggtgaatgtgccgctcttcgcggggaacccccaactgcaggagcagctccgcctgcagctcccagtcttcct

SEQ ID NO: 479134 - DNA, 120 bp, Artificial Sequence
  ENSG00000160803_12 (sequence is synthesized)
gcagcagatgcagaacccagagtcactctccatccttaccaatccccgagccatgcaggcattgctgcagatccagcagggactacagaccttgcagaccgaggcccctgggctggtacc

SEQ ID NO: 479135 - DNA, 120 bp, Artificial Sequence
  ENSG00000160803_13 (sequence is synthesized)
cagccttggctcctttgggatatcccggaccccagcaccctcagcaggcagcaacgcagggtctacgcccgaggcccccacttcctcaccagccacgccagccacatcttctccaacagg

SEQ ID NO: 479136 - DNA, 120 bp, Artificial Sequence
  ENSG00000160803_14 (sequence is synthesized)
gctggagcagctcaactccatgggcttcatcaatcgtgaggctaacctgcaggccctgattgccacaggaggggacatcaacgcagctatcgagagactgctgggctcccagctctccta

SEQ ID NO: 479137 - DNA, 120 bp, Artificial Sequence
  ENSG00000160803_15 (sequence is synthesized)
atccctcggcccatgcctcctgcctctcccctccctcgatgtcagcattcggttcttctgtcaatccttaccctctgcagcttgtcctcccttccgtcttctccctcatcctttccaaac

SEQ ID NO: 479138 - DNA, 120 bp, Artificial Sequence
  ENSG00000160803_16 (sequence is synthesized)
agcagggtgactttagaggcatgggctccaaccccttagctctgtctgagaattatggttttactgctacgtctctaacagactcttctctcctggtctccttgagcagtgctacttaaa

SEQ ID NO: 479139 - DNA, 120 bp, Artificial Sequence
  ENSG00000160803_17 (sequence is synthesized)
cagttttcacagtttcattgattgactctacctccttgccccacaccacttttgcaatctttaaactttcagtggctgtgcagagtcgagggaggaaccagctctctggtttactggaac

SEQ ID NO: 479140 - DNA, 120 bp, Artificial Sequence
  ENSG00000160803_18 (sequence is synthesized)
atagtcttccatctataccactagggttttgtcttatgtttacttttggtaactctcttccttctttttctccctaccccccaacccctagcccaaccaatgctagaatttcttgctctg

SEQ ID NO: 479141 - DNA, 120 bp, Artificial Sequence
  ENSG00000160803_19 (sequence is synthesized)
aaggaggagcaggtgaaacaggtggtaattttccttctcggcccctattctggttcattcagcactttttggtgggaactgttggaaattccagggtaaggaggaagatgcctgttctcc

SEQ ID NO: 479142 - DNA, 120 bp, Artificial Sequence
  ENSG00000160803_20 (sequence is synthesized)
ctgtctgaagagggagatgagacagctctctggacaggaattaacaaacgctggagcagcccagaggaaattcgtgtgaaagaggagggaatgagattattcggaggaagggaatggggg

SEQ ID NO: 479143 - DNA, 120 bp, Artificial Sequence
  ENSG00000160803_21 (sequence is synthesized)
agacagcctgagtaaaaggcttggaagttggaattaacagtggggagcagaagcactcatagctcttttaggcagaagaatccaggcccgagctggcagaagagacttagagatgctaat

SEQ ID NO: 479144 - DNA, 120 bp, Artificial Sequence
  ENSG00000160803_22 (sequence is synthesized)
ggaatttaaactgaaaaaaggagcccaatgaagctaagcgccacgccccacaaggggtcatattggctttagttcctcaagcatatgtgcttatatgcacacacacacacatttccatgg

SEQ ID NO: 479145 - DNA, 120 bp, Artificial Sequence
  ENSG00000160803_23 (sequence is synthesized)
acccaggtcttgcttgtgtccccaggcaccagtagtttgagcccccctcaaaagacatgaagggggttggggtctgtgtgagtagtggggaggtgcatgtgtatccacatgtgtgcatac

SEQ ID NO: 479146 - DNA, 120 bp, Artificial Sequence
  ENSG00000160803_24 (sequence is synthesized)
actcttaagttgggtgggaagtggattccttgttggtttctggttcagagtgctctcccaccaccagagacaagtgggtaaaaaggtcagtccattgcaggaatatatatccgggagagc

SEQ ID NO: 479147 - DNA, 120 bp, Artificial Sequence
  ENSG00000160803_25 (sequence is synthesized)
taggtcccttggggctctggatgctgggtaacccagaggtaatgtgggtaccctttctgaagctgtcagggctgtgactagcacccttatcacccctcactgccttgtgggaatagtaga

SEQ ID NO: 479148 - DNA, 120 bp, Artificial Sequence
  ENSG00000160803_26 (sequence is synthesized)
gggtttttttcctccagagcccctggcctttcagttcttaactatttccctccaggccagaaagttttctttgaggaaggagaggagagggtggcaatgatgcctttgatctggaattgg

SEQ ID NO: 479149 - DNA, 120 bp, Artificial Sequence
  ENSG00000160803_27 (sequence is synthesized)
acatttctctgtcagagcacagaggaggctcatatcacctcttccctctcctacttggcccagctgcttggaggaccgaccccatggctgagaatatgacggcaagaggaacagagtttg

SEQ ID NO: 479150 - DNA, 120 bp, Artificial Sequence
  ENSG00000160803_28 (sequence is synthesized)
ctccaagtgggaaagggtcccaagcagtccagagaagatgtctgtgtggctttccctccctgcctcccccagctcccacactggcctttgtaaataaatggcgtggtctttgttgtgaga

SEQ ID NO: 479151 - DNA, 120 bp, Artificial Sequence
  ENSG00000160803_29 (sequence is synthesized)
cacgttaagtgcttagaacatggcgtgtgacagagtaagttctgtatacctggaaatgttagctgtcctcatcatcatcagacccagggctgagcaggctgactcctcatactcttcatt

SEQ ID NO: 479152 - DNA, 120 bp, Artificial Sequence
  ENSG00000160803_30 (sequence is synthesized)
acccagagcatagttccatttcctctcactgtcccacttaggccttcaggatactttgagatccccggagaagctggccagatttcctgcagtggtagggggtgcccagggagtctgagg

SEQ ID NO: 479153 - DNA, 120 bp, Artificial Sequence
  ENSG00000160808_0 (sequence is synthesized)
atccgggcaggataaaggcctgggtgaggcggctcacctaccctgctttctgcattcttctctccacatccctctctgtacttacagcccccaatggcccccaaaaagccagagcccaag

SEQ ID NO: 479154 - DNA, 120 bp, Artificial Sequence
  ENSG00000160808_1 (sequence is synthesized)
aaggatgatgccaaggcagcccccaaggcagctccagctcccgcacctccccctgagcctgagcgccctaaggaggtcgagtttgatgcttccaagatcaagattgagttcacacctgag

SEQ ID NO: 479155 - DNA, 120 bp, Artificial Sequence
  ENSG00000160808_2 (sequence is synthesized)
cagattgaagagttcaaggaagccttcatgctgttcgaccgcacacccaagtgtgagatgaagatcacctacgggcagtgtggggatgtcctgcgggcgctgggccagaaccccacacag

SEQ ID NO: 479156 - DNA, 120 bp, Artificial Sequence
  ENSG00000160808_3 (sequence is synthesized)
gcacatttccaagaacaaggacacaggcacctatgaggacttcgtggaggggctgcgggtcttcgacaaggagggcaatggcactgtcatgggtgctgagcttcgccacgtgctggccac

SEQ ID NO: 479157 - DNA, 120 bp, Artificial Sequence
  ENSG00000160808_4 (sequence is synthesized)
gctgggtgagaggctgacagaagacgaagtggagaagttgatggctgggcaagaggactccaatggctgcatcaactatgaagcatttgtgaagcacatcatgtccagctaaacctcgtg

SEQ ID NO: 479158 - DNA, 120 bp, Artificial Sequence
  ENSG00000160808_5 (sequence is synthesized)
cccaggaagcccagggaaggctgtgcagggacgtctcatctcccatgtgtgatgctgacaccagcggcctggagtcgtgggaaggaggggagccttaccaagactcctgcaaaaaccctt

SEQ ID NO: 479159 - DNA, 120 bp, Artificial Sequence
  ENSG00000160808_6 (sequence is synthesized)
ggacctctccacgtggttgccgtctctggcccctctcaggctgtgcttacctgtgacagcagctctgtccccaccccatgggcctcatgaataaatggcttcttgccggccttcctttct

SEQ ID NO: 479160 - DNA, 120 bp, Artificial Sequence
  ENSG00000160808_7 (sequence is synthesized)
ggtaggcacccactccctcctgaacccgctgctgccacctgcccacactccaccagctgcagtgctcacttgacatcctgctgcctccgtctccctcctcctctgtaatctgcactgcct

SEQ ID NO: 479161 - DNA, 120 bp, Artificial Sequence
  ENSG00000160808_8 (sequence is synthesized)
gacgcgggagtgtggagaggccgagaggagccttccgccccccgccccgggacattgcgctagaggccgaggcccggagtcttacggcggcgggatgtcctgggaaaatgtagctgtgga

SEQ ID NO: 479162 - DNA, 120 bp, Artificial Sequence
  ENSG00000160808_9 (sequence is synthesized)
ccggcgtggccgggctttcctgccttagtccacaggctcctcagaagtcagggcccatatcttccccgcattctccttggctgggggaagggagagcccccaatggcccccaaaaagcca

SEQ ID NO: 479163 - DNA, 120 bp, Artificial Sequence
  ENSG00000160808_10 (sequence is synthesized)
tgccacttggttgttttaaacctgaactcagtggtggcccacacttgactaccaagtgtgatatgtcagaaattccttgtttgtgggcggcaagccacccaggtgcccaggcaagagact

SEQ ID NO: 479164 - DNA, 120 bp, Artificial Sequence
  ENSG00000160808_11 (sequence is synthesized)
aagagactgaaggcacaagctgttccagtataataaagaaaataattaaattaagaaaagttatactagaaataagatataggtatgattattattaatcattagtttgtagtattactt

SEQ ID NO: 479165 - DNA, 120 bp, Artificial Sequence
  ENSG00000160808_12 (sequence is synthesized)
tattataataatctctgttttataattataacctagaaaaaaccaggccatacagaattaggagctgaagggacactgtgagagatgactagaagacaagagcgtgagccctctgtcatg

SEQ ID NO: 479166 - DNA, 120 bp, Artificial Sequence
  ENSG00000160808_13 (sequence is synthesized)
cccagataagggcttcttgagagatccttggtctagtggtagcgccagtgcctgggaaggcacccgttgcttagcagaccttggtctagcagtagtgccagtgcctgggaaggcacctgt

SEQ ID NO: 479167 - DNA, 120 bp, Artificial Sequence
  ENSG00000160808_14 (sequence is synthesized)
tacttagcagactgggaaagggagtctccctttctctggaagagttagagaacactctgctccaccagctcttgtgggaggccaggcctgcctgcagtcatccggaggcttaaacatctc

SEQ ID NO: 479168 - DNA, 120 bp, Artificial Sequence
  ENSG00000160808_15 (sequence is synthesized)
cctgtggtgctgtgcttcagtggtcatgctccttgtccactttcatattctgcctgtacgcctggctcctccttttaagttcttagaagatagcagtagcaaaattagtgaaagtattaa

SEQ ID NO: 479169 - DNA, 120 bp, Artificial Sequence
  ENSG00000160808_16 (sequence is synthesized)
agtctttgatctttctgataagtgcatagaagaaatgctgatgtatgctgcctttcctctctccctcggctacctgtcgggtggacacgtgacttgcgtgaccttatcaatcatttgaga

SEQ ID NO: 479170 - DNA, 120 bp, Artificial Sequence
  ENSG00000160808_17 (sequence is synthesized)
cgtgaccttatcaatcatttgagatgactcatactccttaccctgcccccttgcctagaatacaataaatagcagcgtgtccaggcattcagggccactaccggtctccgcgtcttggtg

SEQ ID NO: 479171 - DNA, 120 bp, Artificial Sequence
  ENSG00000160808_18 (sequence is synthesized)
ggccctgtgctgtcctggggtgtgggagcttcccagggacctacggacagggtgtgtgagaaataggtatagtggggctggtgagtgactgcctggtctttagggcttagggggctctgt

SEQ ID NO: 479172 - DNA, 120 bp, Artificial Sequence
  ENSG00000160808_19 (sequence is synthesized)
gagggcagacgtatgtagacacatgctcacacacaaacatgcacacttgtgctcaccctcgatgcttccagccaccagccctcggcctgtaccattgcccttactccttctaccaccctg

SEQ ID NO: 479173 - DNA, 120 bp, Artificial Sequence
  ENSG00000160808_20 (sequence is synthesized)
ggccctcccatctcacttttgctgacagtcctgcccaccaggccccaagcaaagccagcctgactggggcttgtggcttaaggtacatctgtccagaaccgggagcatcagattgagttc

SEQ ID NO: 479174 - DNA, 120 bp, Artificial Sequence
  ENSG00000160813_0 (sequence is synthesized)
aacggtttccggtagcggcgtctaggaggggcgggggaaaggaggcggcagccaggctgtgtcccctgaccgttggagcgtctgcgacccccgcatccccgcaccctcaaggcacctcca

SEQ ID NO: 479175 - DNA, 120 bp, Artificial Sequence
  ENSG00000160813_1 (sequence is synthesized)
aagatgatgatgggttgtggggagtcagagctgaagtcggcggacggggaagaagccgcggcggtcccggggccacccccggagccccaagtcccgcaactccgagccccagtgcccgag

SEQ ID NO: 479176 - DNA, 80 bp, Artificial Sequence
  ENSG00000160813_2 (sequence is synthesized)
cccggcctggacttgagcctgagcccgcggcccgacagccctcagccgcggcacggcagccccgggcggcggaaggggcg

SEQ ID NO: 479177 - DNA, 120 bp, Artificial Sequence
  ENSG00000160813_3 (sequence is synthesized)
cgcttccgcctgacgccgccctccccggtgcggtccgagccgcagcctgcggtgccgcaggagctggagatgcccgtgctgaagagcagcctggccttgggcctggagctgcgggccgca

SEQ ID NO: 479178 - DNA, 120 bp, Artificial Sequence
  ENSG00000160813_4 (sequence is synthesized)
gggagccactttgatgctgcgaaggccgtggaggaacagctgagaaagtcgttccagatccgctgcggcctggaggagagcgtgtccgaggggctgaacgtgccgcgctccaagcggctc

SEQ ID NO: 479179 - DNA, 120 bp, Artificial Sequence
  ENSG00000160813_5 (sequence is synthesized)
ttccgggacctggtgagcctgcaggtgccggaggaacaggttctgaatgccgcgctcagggagaaattggctctcctgccgccacaggctcgagccccgcacccaaaggagccacctggg

SEQ ID NO: 479180 - DNA, 120 bp, Artificial Sequence
  ENSG00000160813_6 (sequence is synthesized)
cctgggccagacatgaccatcttgtgtgacccagaaacgctattttatgaatctccacacctgaccctggacggtctgccccctctccgacttcaactccggccccgcccttcagaggac

SEQ ID NO: 479181 - DNA, 120 bp, Artificial Sequence
  ENSG00000160813_7 (sequence is synthesized)
accttcctcatgcaccggacactgaggcgatgggaagcgtagaccccaaagatccctggagggctagttcgtatttttgtgttaaactatttgttagaataaagtaattttgctaataaa

SEQ ID NO: 479182 - DNA, 120 bp, Artificial Sequence
  ENSG00000160818_0 (sequence is synthesized)
cggcatttccgggaagatggcggcgcacaagtcaggtccggcacatgtttccgcggagcggacccagcaatgacggatgatatcacctcttcttctctggtgagagtctgaggatagaga

SEQ ID NO: 479183 - DNA, 120 bp, Artificial Sequence
  ENSG00000160818_1 (sequence is synthesized)
cttttttctcaccatgaatgtcaccccagaggtcaagagtcgtgggatgaagtttgctgaggagcagctgctaaagcatggatggactcaaggcaaaggcctcggccggaaggagaatgg

SEQ ID NO: 479184 - DNA, 120 bp, Artificial Sequence
  ENSG00000160818_2 (sequence is synthesized)
tatcactcaggctctcagggtgacactgaagcaagacactcatggggtaggacatgaccctgccaaggagttcacaaaccactggtggaatgagctcttcaacaagactgcggccaactt

SEQ ID NO: 479185 - DNA, 120 bp, Artificial Sequence
  ENSG00000160818_3 (sequence is synthesized)
ggtagtggaaactgggcaggatggagtacagataaggagcctttctaaggagaccacccgttataatcatcccaagcccaacttgctgtatcagaagtttgtgaagatggctacattgac

SEQ ID NO: 479186 - DNA, 120 bp, Artificial Sequence
  ENSG00000160818_4 (sequence is synthesized)
ttcaggtggagagaagccaaacaaagacttggagagctgcagtgatgacgacaaccaggggtccaagtccccaaagattctgactgatgagatgctgctccaagcctgtgaggggcgaac

SEQ ID NO: 479187 - DNA, 120 bp, Artificial Sequence
  ENSG00000160818_5 (sequence is synthesized)
agcacacaaggctgcccgtcttgggatcacaatgaaggccaagcttgctcgcctagaggcccaggagcaggccttcctggctcgtctcaaaggccaggaccctggggcccctcaactgca

SEQ ID NO: 479188 - DNA, 120 bp, Artificial Sequence
  ENSG00000160818_6 (sequence is synthesized)
gtcagagagcaagccccccaaaaaaaagaaaaagaaaaggaggcagaaagaggaggaagaagctacagcatctgaaaggaatgatgcagatgagaagcacccagaacatgctgagcagaa

SEQ ID NO: 479189 - DNA, 120 bp, Artificial Sequence
  ENSG00000160818_7 (sequence is synthesized)
catcagaaaaagcaagaagaagaaaaggcgacatcaagaaggaaaggtctcagatgaaagagagggtacaactaaagggaatgagaaggaggacgctgcaggaacaagtgggcttgggga

SEQ ID NO: 479190 - DNA, 120 bp, Artificial Sequence
  ENSG00000160818_8 (sequence is synthesized)
aagaggtggcaccatgaagaggagaagatgggggtcttggaggaaggaggaaaaggcaaggaggctgcaggcagtgtcaggacagaggaggtagagagcagggcatatgctgacccatgc

SEQ ID NO: 479191 - DNA, 120 bp, Artificial Sequence
  ENSG00000160818_9 (sequence is synthesized)
agccgaagaaagaagaggcagcaacaggaggaggaggacttgaacctagaagatagaggtgaggaaacttttaggtggtggaaccagggaagcagagagcagagcatgcagtgatggaag

SEQ ID NO: 479192 - DNA, 120 bp, Artificial Sequence
  ENSG00000160818_10 (sequence is synthesized)
aagcaggaaaagcaagaagaaaagacagcagcatcaagaggaggaggacatcttggatgtaagggatgagaaggatggcggggctagggaagcagagagcagagcacacactggctcaag

SEQ ID NO: 479193 - DNA, 120 bp, Artificial Sequence
  ENSG00000160818_11 (sequence is synthesized)
cagcagaggtaagaggaagaggcagcagcatcccaagaaggaaagagctggagtcagcactgtccagaaagccaaaaagaaacagaagaagagagactaaaggtctggtaaaggtagggc

SEQ ID NO: 479194 - DNA, 120 bp, Artificial Sequence
  ENSG00000160818_12 (sequence is synthesized)
tcaattgattgattttcaggagttgaagcctcaaagaccagggttgatgcaggtctgcaggtcttctgcacccccctcaatgaggagtccctcccagaaaggaaactgatctctgggacg

SEQ ID NO: 479195 - DNA, 120 bp, Artificial Sequence
  ENSG00000160818_13 (sequence is synthesized)
tcagctgctgagaggagcaagcggtagtaccaccccttagttgagggagtcagcacagtcctttctgcagcttctaacccaggaccatgaactcaggtgcctagagaagccaggcagcta

SEQ ID NO: 479196 - DNA, 120 bp, Artificial Sequence
  ENSG00000160818_14 (sequence is synthesized)
aaggacaaggaatgctgggggctgtgggaacaggaatgcagataccctttgaaggagcattcctgctaaaagaagctgaaaatgtagacctatgtgaagtgctctgatttctaaatattg

SEQ ID NO: 479197 - DNA, 120 bp, Artificial Sequence
  ENSG00000160818_15 (sequence is synthesized)
tgaaggttaagaaaaacataaatttaggtctatgggctagatttagcccacagttgccagtttctagcgctaccaaatgaatgaataaacatgagcttgcgctcctagcctagagataaa

SEQ ID NO: 479198 - DNA, 120 bp, Artificial Sequence
  ENSG00000160818_16 (sequence is synthesized)
caaccaggggtccaagtccccaaagatgtgagacttcattttagctcttggggaatgtgggaagagatgtcttcagatggcaagagaaagggctaaatctaatgcttgactgggggcttc

SEQ ID NO: 479199 - DNA, 120 bp, Artificial Sequence
  ENSG00000160818_17 (sequence is synthesized)
atttccgggaagatggcggcgcacaagtcaggtccggcacatgtttccgcggagcggacccagcaatgacgaggcagggtttcactacgttgcccacactggtctggaactcctgggctc

SEQ ID NO: 479200 - DNA, 120 bp, Artificial Sequence
  ENSG00000160818_18 (sequence is synthesized)
ttggccttccaaagtgctgggattacaaatgtgaaccactgtgcctggccgctttattctttttatgagagagggtcttgctatactgcccaggctggactcaagcaatcccgcctcagc

SEQ ID NO: 479201 - DNA, 120 bp, Artificial Sequence
  ENSG00000160818_19 (sequence is synthesized)
ctacaggtgtgtgccactgcacccaactagcagagaattcttaacaagcagtcaggatggaactgatggctgtttgggcactttctactttcttcttaaaaggatgatatcacctcttct

SEQ ID NO: 479202 - DNA, 120 bp, Artificial Sequence
  ENSG00000160818_20 (sequence is synthesized)
ttcctaacatagtgggatcctgtgaccagccttgctgttgcttacttagactgcccagaccctcagcaggaattgagatcttcaggttccgtggatcctgccatctgttaagggagcagc

SEQ ID NO: 479203 - DNA, 120 bp, Artificial Sequence
  ENSG00000160818_21 (sequence is synthesized)
aatagggcgtgggaggtagggtacagtctcttaagtcaggagctgccaaattttgggggggccaggggacatctaattcaaaggacttagaagccagaggagacctgagagattatctgg

SEQ ID NO: 479204 - DNA, 120 bp, Artificial Sequence
  ENSG00000160818_22 (sequence is synthesized)
accatccctgctttgcagatgtggctaaaagggtgaaaagtggtttgctgaagagcccacagctggctagtaatggcaaacaggactggaacccaggacttcaggcctccactttctact

SEQ ID NO: 479205 - DNA, 120 bp, Artificial Sequence
  ENSG00000160818_23 (sequence is synthesized)
gtaccaataggaggaagctaacatgtaatggtcattatgtgctaagggctatacatgttacctagcaaatctttcccatttctctacatctctgttaccatctactaccccacttcgggc

SEQ ID NO: 479206 - DNA, 120 bp, Artificial Sequence
  ENSG00000160818_24 (sequence is synthesized)
catcatcatctcttgcctaatttctttctccagcagcctcctaagaacacctgtagtctcactccccaccccaacctttgtggaggatggacttctccacaaagcatccagtgttctctc

SEQ ID NO: 479207 - DNA, 120 bp, Artificial Sequence
  ENSG00000160818_25 (sequence is synthesized)
taaaacataaatgtcatcatgtcactgggtcttgtttgacctaggatgacacaatccagatttatcggactggcttatatggctctgcatgcctgttcctgccatctccagcctcatctc

SEQ ID NO: 479208 - DNA, 120 bp, Artificial Sequence
  ENSG00000160818_26 (sequence is synthesized)
ttttctttgaaggtacgacagtcttccatcttcaggttattgcacatgttgctccctctgcttgggacattcttctccctttccccctttaccttctgagtttctcttatcctccagagc

SEQ ID NO: 479209 - DNA, 120 bp, Artificial Sequence
  ENSG00000160818_27 (sequence is synthesized)
tcagcttatacatcagttacttttagaagccattctctgaagtctgagttgagtacccttcctctatcacaggcaacacttccatcataattgcctatgtagattccatctgggctgggc

SEQ ID NO: 479210 - DNA, 120 bp, Artificial Sequence
  ENSG00000160818_28 (sequence is synthesized)
ccatctcattcttattccactctgaatccccaactccttggcccatagtagactctcaattaatctgattaaatgaaggtactgtgaacaggtactatggtcggggtggagcggggcatc

SEQ ID NO: 479211 - DNA, 120 bp, Artificial Sequence
  ENSG00000160818_29 (sequence is synthesized)
tttactgtcagtcactggcacttgtccactgtgaagacctgatgaaccagagcatttcctcttcttgttctgctcaccagccagctgtgggtgagagaggccaaagctgctgcacatccc

SEQ ID NO: 479212 - DNA, 120 bp, Artificial Sequence
  ENSG00000160818_30 (sequence is synthesized)
agcagcagcagcccatctcctatccaagttcgagtatgcaggatggcacacctccctgtggctcctcaaggagcaatggtgggggctggcaaaccactgcctggagctataaattcttag

SEQ ID NO: 479213 - DNA, 120 bp, Artificial Sequence
  ENSG00000160818_31 (sequence is synthesized)
ggggcttccacaagggaatagggatggtgatggtgttgagaaggccttatctacccccatgacccctcctagatggctacattgacttcaggtggagagaagccaaacaaagacttggag

SEQ ID NO: 479214 - DNA, 120 bp, Artificial Sequence
  ENSG00000160838_0 (sequence is synthesized)
gttgtcttggagagggacgcgtaggctacgccaccgcggacgggtcggatccggtccctggacgcggaacagagatcccctgattcagccacccccagactgagccccgtagagtgcgtt

SEQ ID NO: 479215 - DNA, 120 bp, Artificial Sequence
  ENSG00000160838_1 (sequence is synthesized)
cttaccttcctgccccgacgaaggtcccagagacgctgcggacaacaccagcatgtcgagcgagcagagcgcgccgggggcctcacccagggccccgcgtccggggacccagaagtcttc

SEQ ID NO: 479216 - DNA, 120 bp, Artificial Sequence
  ENSG00000160838_2 (sequence is synthesized)
tggcgcggtgaccaaaaagggagagcgcgcggccaaagagaagccagcgaccgttctgcctcccgtgggggaggaggagcccaaaagccctgaggagtaccagtgctccggggtcctcga

SEQ ID NO: 479217 - DNA, 120 bp, Artificial Sequence
  ENSG00000160838_3 (sequence is synthesized)
gaccgacttcgccgagctctgcacgcggtggggctacacggacttccccaaagttgtcaaccggccccgcccccacccgcccttcgtcccctccgcctctttgtcggaaaaggccacctt

SEQ ID NO: 479218 - DNA, 120 bp, Artificial Sequence
  ENSG00000160838_4 (sequence is synthesized)
agacgatccgcggctgtcggggtcctgcagcctcaatagcctggagagcaaatacgtgttcttccggcccaccatccaggtggagctggagcaggaggacagcaagtcagtgaaggaaat

SEQ ID NO: 479219 - DNA, 120 bp, Artificial Sequence
  ENSG00000160838_5 (sequence is synthesized)
ctacatccgcggttggaaggttgaggaacggattctgggtgtcttctctaaatgtctgcccccgcttacccagctacaggccatcaacttgtggaaggtggggctgaccgataagaccct

SEQ ID NO: 479220 - DNA, 120 bp, Artificial Sequence
  ENSG00000160838_6 (sequence is synthesized)
gaccaccttcatcgagctcctgcctctctgttcatccacgctcaggaaggtgtctctggaggggaacccactgccggagcagtcctatcacaagctcatggccttggacagcacgattgc

SEQ ID NO: 479221 - DNA, 120 bp, Artificial Sequence
  ENSG00000160838_7 (sequence is synthesized)
gcacttgtctctgcggaacaataacatcgacgaccgcggggcgcaactcctgggccaggcgctgtccacgctgcacagctgcaaccggaccctcgtctcgctcaacctgggtttcaacca

SEQ ID NO: 479222 - DNA, 120 bp, Artificial Sequence
  ENSG00000160838_8 (sequence is synthesized)
gctctggctgtccctggcccacaaccgcatccaggacaagggcgccctgaagctggctgaggtcctgcgcgccttcgagctgacacacaccgaagtggtggagcgccgacgcctcctgct

SEQ ID NO: 479223 - DNA, 120 bp, Artificial Sequence
  ENSG00000160838_9 (sequence is synthesized)
ggaaaaagggacacaggagcgctcgcgatcgccctcctcctctcgacacggggactccaaaacggaccgtgagaagagtcagatggtagggatcagcaatagtgcattggtggacaagac

SEQ ID NO: 479224 - DNA, 120 bp, Artificial Sequence
  ENSG00000160838_10 (sequence is synthesized)
agacaagacgcagacaatgaaaacccctaagggcctgggcaagaaaaaggagaaatcatgggaattggccaagaaagaggagaagttggggtctgggcagtcacccacacaaggaacccc

SEQ ID NO: 479225 - DNA, 120 bp, Artificial Sequence
  ENSG00000160838_11 (sequence is synthesized)
taagaaggaagatgccacaaaggcaggcaaggggaaggtaaccatccctgaacagaagccaagcagggcaaaagggatcaagatcgggagcagagagaagcgcagcatcctcctggagtc

SEQ ID NO: 479226 - DNA, 120 bp, Artificial Sequence
  ENSG00000160838_12 (sequence is synthesized)
cgagctggttgttgaggctactgaggtggtcaaccctctcctggagcctgtggagcaccgagatgggaaagttttcatgcctgggaacaaggtccttttgcacctcaacctcatccggaa

SEQ ID NO: 479227 - DNA, 120 bp, Artificial Sequence
  ENSG00000160838_13 (sequence is synthesized)
ccgcatcacagaggtggggctggagggcttcctcgccacggtgcagtatcagatgcagttctccaaggccaagagtgcatccaagggtccagtggggctgctgtggctgtccctggctaa

SEQ ID NO: 479228 - DNA, 120 bp, Artificial Sequence
  ENSG00000160838_14 (sequence is synthesized)
aaattgcttcgccccacaatgtcctgcgtacgccataatccaggagctgatgttgccaagggatcccatcaaggccaaactcagggaggatgaggccatggcattcttcccctagccccc

SEQ ID NO: 479229 - DNA, 120 bp, Artificial Sequence
  ENSG00000160838_15 (sequence is synthesized)
tcccacctgcttgcctctaagactcggggctacagaagcacctcctgtccctgtgtggggtgacctccctgggggagatctcagaccaataacaaagtctgttgctatacttttccttga

SEQ ID NO: 479230 - DNA, 120 bp, Artificial Sequence
  ENSG00000160838_16 (sequence is synthesized)
ctcggcaagggccctcgatttctgcccctacatcctcagaccagaccgccccctcaagcgctcaagtctcccatattccggcggacgccctgtaccttttccagcgacccacattctccc

SEQ ID NO: 479231 - DNA, 120 bp, Artificial Sequence
  ENSG00000160838_17 (sequence is synthesized)
aagccagcgaccgttctgcctcccgtgggggaggaggagcccaaaagccctgtgctggtggatggggagaaggaattataggagctggagaaacaacatcttctggaagggaagacaaga

SEQ ID NO: 479232 - DNA, 120 bp, Artificial Sequence
  ENSG00000160838_18 (sequence is synthesized)
accccgactctatggagcagagctggtcctcccatctttgggctacatgtcccccaaggctctctggcacagggctggaggggccagaggaagtgctgagtctgggaggaggctgaggac

SEQ ID NO: 479233 - DNA, 120 bp, Artificial Sequence
  ENSG00000160838_19 (sequence is synthesized)
aggcgattggagtaatgagaggagttagagagatggggagtgtgtgagtaagagctgagtgaagggctaggtcagggaaaggtgtgcctgggccagtgagtctggagtggggagctggag

SEQ ID NO: 479234 - DNA, 120 bp, Artificial Sequence
  ENSG00000160856_0 (sequence is synthesized)
acagtcttggagacattactcctgagagactgcagctgatggaagatgagccccaacttctaaaaatgtatcactaccgggattgagatacaaacagcatttaggaaggtctcatctgag

SEQ ID NO: 479235 - DNA, 120 bp, Artificial Sequence
  ENSG00000160856_1 (sequence is synthesized)
tagcagcttcctgccctccttcttggagataagtcgggcttttggtgagacagactttcccaaccctctgcccggccggtgcccatgcttctgtggctgctgctgctgatcctgactcct

SEQ ID NO: 479236 - DNA, 120 bp, Artificial Sequence
  ENSG00000160856_2 (sequence is synthesized)
ggaagagaacaatcaggggtggccccaaaagctgtacttctcctcaatcctccatggtccacagccttcaaaggagaaaaagtggctctcatatgcagcagcatatcacattccctagcc

SEQ ID NO: 479237 - DNA, 120 bp, Artificial Sequence
  ENSG00000160856_3 (sequence is synthesized)
cagggagacacatattggtatcacgatgagaagttgttgaaaataaaacatgacaagatccaaattacagagcctggaaattaccaatgtaagacccgaggatcctccctcagtgatgcc

SEQ ID NO: 479238 - DNA, 120 bp, Artificial Sequence
  ENSG00000160856_4 (sequence is synthesized)
gtgcatgtggaattttcacctgactggctgatcctgcaggctttacatcctgtctttgaaggagacaatgtcattctgagatgtcaggggaaagacaacaaaaacactcatcaaaaggtt

SEQ ID NO: 479239 - DNA, 120 bp, Artificial Sequence
  ENSG00000160856_5 (sequence is synthesized)
tactacaaggatggaaaacagcttcctaatagttataatttagagaagatcacagtgaattcagtctccagggataatagcaaatatcattgtactgcttataggaagttttacatactt

SEQ ID NO: 479240 - DNA, 120 bp, Artificial Sequence
  ENSG00000160856_6 (sequence is synthesized)
gacattgaagtaacttcaaaacccctaaatatccaagttcaagagctgtttctacatcctgtgctgagagccagctcttccacgcccatagaggggagtcccatgaccctgacctgtgag

SEQ ID NO: 479241 - DNA, 120 bp, Artificial Sequence
  ENSG00000160856_7 (sequence is synthesized)
acccagctctctccacagaggccagatgtccagctgcaattctccctcttcagagatagccagaccctcggattgggctggagcaggtcccccagactccagatccctgccatgtggact

SEQ ID NO: 479242 - DNA, 120 bp, Artificial Sequence
  ENSG00000160856_8 (sequence is synthesized)
gaagactcagggtcttactggtgtgaggtggagacagtgactcacagcatcaaaaaaaggagcctgagatctcagatacgtgtacagagagtccctgtgtctaatgtgaatctagagatc

SEQ ID NO: 479243 - DNA, 120 bp, Artificial Sequence
  ENSG00000160856_9 (sequence is synthesized)
cggcccaccggagggcagctgattgaaggagaaaatatggtccttatttgctcagtagcccagggttcagggactgtcacattctcctggcacaaagaaggaagagtaagaagcctgggt

SEQ ID NO: 479244 - DNA, 120 bp, Artificial Sequence
  ENSG00000160856_10 (sequence is synthesized)
agaaagacccagcgttccctgttggcagagctgcatgttctcaccgtgaaggagagtgatgcagggagatactactgtgcagctgataacgttcacagccccatcctcagcacgtggatt

SEQ ID NO: 479245 - DNA, 120 bp, Artificial Sequence
  ENSG00000160856_11 (sequence is synthesized)
cgagtcaccgtgagaattccggtatctcaccctgtcctcaccttcagggctcccagggcccacactgtggtgggggacctgctggagcttcactgtgagtccctgagaggctctcccccg

SEQ ID NO: 479246 - DNA, 120 bp, Artificial Sequence
  ENSG00000160856_12 (sequence is synthesized)
atcctgtaccgattttatcatgaggatgtcaccctggggaacagctcagccccctctggaggaggagcctccttcaacctctctctgactgcagaacattctggaaactactcctgtgat

SEQ ID NO: 479247 - DNA, 120 bp, Artificial Sequence
  ENSG00000160856_13 (sequence is synthesized)
gcagacaatggcctgggggcccagcacagtcatggagtgagtctcagggtcacagttccggtgtctcgccccgtcctcaccctcagggctcccggggcccaggctgtggtgggggacctg

SEQ ID NO: 479248 - DNA, 120 bp, Artificial Sequence
  ENSG00000160856_14 (sequence is synthesized)
ctggagcttcactgtgagtccctgagaggctccttcccgatcctgtactggttttatcacgaggatgacaccttggggaacatctcggcccactctggaggaggggcatccttcaacctc

SEQ ID NO: 479249 - DNA, 120 bp, Artificial Sequence
  ENSG00000160856_15 (sequence is synthesized)
tctctgactacagaacattctggaaactactcatgtgaggctgacaatggcctgggggcccagcacagtaaagtggtgacactcaatgttacaggaacttccaggaacagaacaggcctt

SEQ ID NO: 479250 - DNA, 120 bp, Artificial Sequence
  ENSG00000160856_16 (sequence is synthesized)
accgctgcgggaatcacggggctggtgctcagcatcctcgtccttgctgctgctgctgctctgctgcattacgccagggcccgaaggaaaccaggaggactttctgccactggaacatct

SEQ ID NO: 479251 - DNA, 120 bp, Artificial Sequence
  ENSG00000160856_17 (sequence is synthesized)
agtcacagtcctagtgagtgtcaggagccttcctcgtccaggccttccaggatagaccctcaagagcccactcactctaaaccactagccccaatggagctggagccaatgtacagcaat

SEQ ID NO: 479252 - DNA, 120 bp, Artificial Sequence
  ENSG00000160856_18 (sequence is synthesized)
gtaaatcctggagatagcaacccgatttattcccagatctggagcatccagcatacaaaagaaaactcagctaattgtccaatgatgcatcaagagcatgaggaacttacagtcctctat

SEQ ID NO: 479253 - DNA, 120 bp, Artificial Sequence
  ENSG00000160856_19 (sequence is synthesized)
gaagaaaactatgagaatgtaccacgtgtattactggcctcagaccactagccccttacccagagtggcccacaggaaacagcctgcaccatttttttttctgttctctccaaccacaca

SEQ ID NO: 479254 - DNA, 120 bp, Artificial Sequence
  ENSG00000160856_20 (sequence is synthesized)
tcatccatctctccagactctgcctcctacgaggctgggctgcagggtatgtgaggctgagcaaaaggtctgcaaatctcccctgtgcctgatctgtgtgttccccaggaagagagcagg

SEQ ID NO: 479255 - DNA, 120 bp, Artificial Sequence
  ENSG00000160856_21 (sequence is synthesized)
cagcctctgagcaagcactgtgttattttcacagtggagacacgtggcaaggcaggagggccctcagctcctagggctgtcgaatagaggaggagagagaaatggtctagccagggttac

SEQ ID NO: 479256 - DNA, 120 bp, Artificial Sequence
  ENSG00000160856_22 (sequence is synthesized)
aagggcacaatcatgaccatttgatccaagtgtgatcgaaagctgttaatgtgctctctgtataaacaatttgctccaaatattttgtttcccttttttgtgtggctggtagtggcattg

SEQ ID NO: 479257 - DNA, 120 bp, Artificial Sequence
  ENSG00000160856_23 (sequence is synthesized)
ctgatgttttggtgtatatgctgtatccttgctaccatattgggaacagccaaaagaagttatagaacaagaatttaaggtgactctatctgaagtgtatttttgtacttacagggtgac

SEQ ID NO: 479258 - DNA, 120 bp, Artificial Sequence
  ENSG00000160856_24 (sequence is synthesized)
attcccaaccaaattaccctagttatgatgaaaaataacttcagcatttcattaaagactctgctagtttaatatgtgacttgtatccccactgcaaagaccttatgtgtgaagaatcac

SEQ ID NO: 479259 - DNA, 120 bp, Artificial Sequence
  ENSG00000160856_25 (sequence is synthesized)
attaattgtaatttttgcttcatgacatagtctcatcatttgccatacatgatagatttctagtcagtcagttttattcttataagcacccattaaccccgagacaataacctactatat

SEQ ID NO: 479260 - DNA, 120 bp, Artificial Sequence
  ENSG00000160856_26 (sequence is synthesized)
ctatgtggcttctcccattctcttcctctacctcactccatctgataaaaaaccattctaaatctcatgttcattattcccatgctctcctatttctatcatattaatgtatctacatgt

SEQ ID NO: 479261 - DNA, 120 bp, Artificial Sequence
  ENSG00000160856_27 (sequence is synthesized)
tttccttaaatatgtttttatattagttttaactataagttaaagaccatattgttgtagataattttttttagtactttctcttcatgttgtatttctaagattcatccatattgttgc

SEQ ID NO: 479262 - DNA, 120 bp, Artificial Sequence
  ENSG00000160856_28 (sequence is synthesized)
gtgttgctatagttcatttgtttttattgctgtttagtatttacttgtgtaaaatatctggcttaatgttttcctagctatcaccatcaaaaactctttccacagtgtgttgaattttta

SEQ ID NO: 479263 - DNA, 120 bp, Artificial Sequence
  ENSG00000160856_29 (sequence is synthesized)
atatgacaaaaatgaaaatgtaccaacaattttcagtgacttcacctccattctgaaatcctgatgtttccaaatatctctgaacacctcaagtcctagggacaactgagattatattaa

SEQ ID NO: 479264 - DNA, 120 bp, Artificial Sequence
  ENSG00000160856_30 (sequence is synthesized)
cattaatctctgaatgttgccaattctaggccttcacttggttcatgtaggaacaccaagtccctttcaaagcaccacatcttcctctaatcaatatttcttggagtccctagggaatgt

SEQ ID NO: 479265 - DNA, 120 bp, Artificial Sequence
  ENSG00000160856_31 (sequence is synthesized)
cttacatgcattcaaacaatcaccatttctggagatacactacagggtcaccataaactctgctacccttaggttccatcactatggaagctgagtttcaccagaaggcacttttgtcct

SEQ ID NO: 479266 - DNA, 120 bp, Artificial Sequence
  ENSG00000160856_32 (sequence is synthesized)
ccattacgaccagcaaagccagctaagccacagctgctggcctcaaaaaatgtgatgatcaatccacactgctcccactggcctctgttacccttatcctggcctttgagtgcagggcat

SEQ ID NO: 479267 - DNA, 120 bp, Artificial Sequence
  ENSG00000160856_33 (sequence is synthesized)
gatgtcctgcccgtactgagatgctgatctctgccagttcatgttcatattggcattaaaattttaaggtcccttgaagagggaggaggcaaatgtctctgtcttctatgtgatacattc

SEQ ID NO: 479268 - DNA, 120 bp, Artificial Sequence
  ENSG00000160856_34 (sequence is synthesized)
tgctgtttttttctctatggtgaaaatatgtaaaccggttttgggtaccaaccaccaggctgtatatggaggctctcctcctttctaaccctgctgctgatttggaattaccttgccaag

SEQ ID NO: 479269 - DNA, 120 bp, Artificial Sequence
  ENSG00000160856_35 (sequence is synthesized)
cccctttgtgccttatagtgaactttctctaagggacctgtcatctcttatcattgtttatccattttctagattctgaacccaagaaagaacaaagttcaagattttccatgtctttgt

SEQ ID NO: 479270 - DNA, 120 bp, Artificial Sequence
  ENSG00000160856_36 (sequence is synthesized)
aacacttagccctgtgcaaatcagagtatgtgagtggaagaaggggtgagtcctaactgtacatctcggatataacaaatgtgcaaattctgattgattgccctgtaaaatgaattattc

SEQ ID NO: 479271 - DNA, 120 bp, Artificial Sequence
  ENSG00000160856_37 (sequence is synthesized)
tcatgcagtgctctacttgacttttatctttgaattcacaactaaaaacccatagcccagaaatctaaaaaaagtaattttagtggagcctttgaaaataaaagaccattggaaaaagta

SEQ ID NO: 479272 - DNA, 120 bp, Artificial Sequence
  ENSG00000160856_38 (sequence is synthesized)
gacgactctgcaggggaggctagcagcagaggcagggcccatgaagaagatgatgaagaaaactatgagaatattctgaacccaagaaagaacaaagttcaagattttccatgtctttgt

SEQ ID NO: 479273 - DNA, 120 bp, Artificial Sequence
  ENSG00000160856_39 (sequence is synthesized)
caaggtaatggctagattcctgtggattactgggtttgttagggaaactggggataaagggaagatgtttatcagtgggaatttcataaagagtctcctatggctcagccatgggaggga

SEQ ID NO: 479274 - DNA, 120 bp, Artificial Sequence
  ENSG00000160856_40 (sequence is synthesized)
gatggttccttctgcatgcttctctatctcctgatggctggtgctgagatgacaaatgcatctctctaggaactctgagcctcaccaccctggagactatgttgtttcttttcattagag

SEQ ID NO: 479275 - DNA, 86 bp, Artificial Sequence
  ENSG00000160856_41 (sequence is synthesized)
tgtgagtggaagaagggcgtcatggaagaagatgtaagaaaagcaaagaccttcacacggcagcaggaaacagcgagttagcaaga

SEQ ID NO: 479276 - DNA, 120 bp, Artificial Sequence
  ENSG00000160856_42 (sequence is synthesized)
ctcactatcacgagaacagcatgggagaaactgcccgcataatccaatcacctcccaacaggtccctcccttgacacatgggaattatggggattacaattcaagatgagacttgagttt

SEQ ID NO: 479277 - DNA, 120 bp, Artificial Sequence
  ENSG00000160856_43 (sequence is synthesized)
ggggattacaattcaagatgagacttgagtttgagagcaaaactatatcaatggctttgcatcacataatttattacaggtgtgttctggaatagtttctataaattgatccattcttgt

SEQ ID NO: 479278 - DNA, 120 bp, Artificial Sequence
  ENSG00000160856_44 (sequence is synthesized)
ataacagagaggagtgtccagctattctggtaatcttctctctttaagctcaacgttggtctaacagccctagaacattttcttccacttgagtcaggtaatagtaattattgatcagtt

SEQ ID NO: 479279 - DNA, 120 bp, Artificial Sequence
  ENSG00000160856_45 (sequence is synthesized)
actgattgcccaaccctatggggttacagagatgtacaagatcggttctctcatgaatcaagagacaactagaagcacaactgaacacatgcagttttaagaggcccctgtggtgcttcc

SEQ ID NO: 479280 - DNA, 120 bp, Artificial Sequence
  ENSG00000160856_46 (sequence is synthesized)
atttggtaacctgaactcacaacaaaatagtccgaaaaggggaagatgaatatgaactgtaatagtcagagaaagacatggagacatggatgtaaatctggagaagtcttgaagaatagg

SEQ ID NO: 479281 - DNA, 120 bp, Artificial Sequence
  ENSG00000160856_47 (sequence is synthesized)
agaagggtttggattctattttgatcttcaaaacagaggatctccagtgttctcttttattttgtggtttattgatgcatcaaagattccttagagataaatgcatataaaatgtgacca

SEQ ID NO: 479282 - DNA, 120 bp, Artificial Sequence
  ENSG00000160856_48 (sequence is synthesized)
gaaaacattggatttatggagattatggacttggtgcccacatttctcaaggatgggaatgttgtgggagtgagagggatgttgcttcctttataatcgtatacacaattaatttcttat

SEQ ID NO: 479283 - DNA, 120 bp, Artificial Sequence
  ENSG00000160856_49 (sequence is synthesized)
ttcctactttgggcttctgcctgctgcacctgctgctattggcctattcatggtagctccagccttccccttgaccttgatgtccctgccatcaggaccttcacatgccatcttgtgttc

SEQ ID NO: 479284 - DNA, 120 bp, Artificial Sequence
  ENSG00000160856_50 (sequence is synthesized)
atgcagtgtgcgtacgttgtaagttggaatatattgcccacagtttaatacttttctttgctactcctacccaacagctaattgtccaatgatgcatcaagagcatgaggtgagtcacat

SEQ ID NO: 479285 - DNA, 120 bp, Artificial Sequence
  ENSG00000160856_51 (sequence is synthesized)
ttcttggctttctttcctctctggccttcctctcctgtatttaggtacttaccttttgtgtttttttctaccaggaacttacagtcctctattcagaactgaagaagacacacccagacg

SEQ ID NO: 479286 - DNA, 120 bp, Artificial Sequence
  ENSG00000160862_0 (sequence is synthesized)
aagcagacacaatggtaagaatggtgcctgtcctgctgtctctgctgctgcttctgggtcctgctgtcccccaggagaaccaagatggtcgttactctctgacctatatctacactgggc

SEQ ID NO: 479287 - DNA, 120 bp, Artificial Sequence
  ENSG00000160862_1 (sequence is synthesized)
tgtccaagcatgttgaagacgtccccgcgtttcaggcccttggctcactcaatgacctccagttctttagatacaacagtaaagacaggaagtctcagcccatgggactctggagacagg

SEQ ID NO: 479288 - DNA, 120 bp, Artificial Sequence
  ENSG00000160862_2 (sequence is synthesized)
tggaaggaatggaggattggaagcaggacagccaacttcagaaggccagggaggacatctttatggagaccctgaaagacatcgtggagtattacaacgacagtaacgggtctcacgtat

SEQ ID NO: 479289 - DNA, 120 bp, Artificial Sequence
  ENSG00000160862_3 (sequence is synthesized)
tgcagggaaggtttggttgtgagatcgagaataacagaagcagcggagcattctggaaatattactatgatggaaaggactacattgaattcaacaaagaaatcccagcctgggtcccct

SEQ ID NO: 479290 - DNA, 120 bp, Artificial Sequence
  ENSG00000160862_4 (sequence is synthesized)
cggaaatacctgaaatacagcaaaaatatcctggaccggcaagatcctccctctgtggtggtcaccagccaccaggccccaggagaaaagaagaaactgaagtgcctggcctacgacttc

SEQ ID NO: 479291 - DNA, 120 bp, Artificial Sequence
  ENSG00000160862_5 (sequence is synthesized)
tacccagggaaaattgatgtgcactggactcgggccggcgaggtgcaggagcctgagttacggggagatgttcttcacaatggaaatggcacttaccagtcctgggtggtggtggcagtg

SEQ ID NO: 479292 - DNA, 120 bp, Artificial Sequence
  ENSG00000160862_6 (sequence is synthesized)
cccccgcaggacacagccccctactcctgccacgtgcagcacagcagcctggcccagcccctcgtggtgccctgggaggccagctaggaagcaagggttggaggcaatgtgggatctcag

SEQ ID NO: 479293 - DNA, 120 bp, Artificial Sequence
  ENSG00000160862_7 (sequence is synthesized)
acccagtagctgcccttcctgcctgatgtgggagctgaaccacagaaatcacagtcaatggatccacaaggcctgaggagcagtgtggggggacagacaggaggtggatttggagaccga

SEQ ID NO: 479294 - DNA, 120 bp, Artificial Sequence
  ENSG00000160862_8 (sequence is synthesized)
agactgggatgcctgtcttgagtagacttggacccaaaaaatcatctcaccttgagcccacccccaccccattgtctaatctgtagaagctaataaataatcatccctccttgcctagca

SEQ ID NO: 479295 - DNA, 120 bp, Artificial Sequence
  ENSG00000160862_9 (sequence is synthesized)
gagtggcaagggatcagcaggatggaaatagtcccaatcccaggggaagaacaggagacacagcagaaacacagacatgtccacatcccacccaccccacagcacaggtgctccccgctt

SEQ ID NO: 479296 - DNA, 120 bp, Artificial Sequence
  ENSG00000160862_10 (sequence is synthesized)
agcagctggactgagactgggggacagaactccaaagcccactgagatgtgggaaaacatggagaagcacacggagcattcacaacttattgccgtcagagtcaatacatggatcctccc

SEQ ID NO: 479297 - DNA, 79 bp, Artificial Sequence
  ENSG00000160862_11 (sequence is synthesized)
gctgtagctctcttaaggaggaacatatctcatctgagacaaacctgaaatgccaaaccaaactgagttagcccctctc

SEQ ID NO: 479298 - DNA, 120 bp, Artificial Sequence
  ENSG00000160862_12 (sequence is synthesized)
caaacctgaaatgccaaaccaaactgagttagcccctctctgtctgttgtatatattggagtaataacctatttgtcttgataaagggattgcatgcttgaattgcaaaaacctttattt

SEQ ID NO: 479299 - DNA, 120 bp, Artificial Sequence
  ENSG00000160862_13 (sequence is synthesized)
gaccggcaaggtactcactgcttcctgctccccagtactgagcccagaataaaagacgatctcaggctaggagctcaggcaacatcttagtccggtctcatctgttcctggatgtccctc

SEQ ID NO: 479300 - DNA, 120 bp, Artificial Sequence
  ENSG00000160862_14 (sequence is synthesized)
agacccccagctttcatcttttaggatttattccttccctgggataatataatttgtggtccaaaaagaacatcatcaaaatttcaggcagaatgggccaggaaggccattctttcttga

SEQ ID NO: 479301 - DNA, 120 bp, Artificial Sequence
  ENSG00000160862_15 (sequence is synthesized)
tgagtgtccccaaatcatctccaattaacagacaaggagcttgaggttagggaggtgagggtaacactgtctgtaagaggcagagctgggactcaaattccagatttcagattccaaatc

SEQ ID NO: 479302 - DNA, 120 bp, Artificial Sequence
  ENSG00000160862_16 (sequence is synthesized)
aattgatggctgcaagctgagacttggattggagacgtagtgagactcaggattgtgcagtgctgcagggaagtggttgctggatagaggcatgggctgaaccaagcagctggactgaga

SEQ ID NO: 479303 - DNA, 120 bp, Artificial Sequence
  ENSG00000160862_17 (sequence is synthesized)
ctgggggacagaactccaaagcccactgagatgtgggaaaacatggagaagcacacggagcattcacaacttattgccgtcagagtcaatacatgggtgaggtggggattgggcaagagg

SEQ ID NO: 479304 - DNA, 120 bp, Artificial Sequence
  ENSG00000160862_18 (sequence is synthesized)
gaaagcgtcagccttccctgatattctggaaagtctcccggggctgggggtgggcaggtacagagcttcgagctctgctgatcgctgacatccaggggtgggggtaggaagagacctggg

SEQ ID NO: 479305 - DNA, 120 bp, Artificial Sequence
  ENSG00000160867_0 (sequence is synthesized)
cattcctcgctcccggccgaggagcgctcgggctgtctgcggaccctgccgcgtgcaggggtcgcggccggctggagctgggagtgaggcggcggaggagccaggtgaggaggagccagg

SEQ ID NO: 479306 - DNA, 120 bp, Artificial Sequence
  ENSG00000160867_1 (sequence is synthesized)
tgagcaggaccctgtgctgggcgcggagtcacgcaggctcgaggaaggcagttggtgggaagtccagcttgggtccctgagagctgtgagaaggagatgcggctgctgctggccctgttg

SEQ ID NO: 479307 - DNA, 120 bp, Artificial Sequence
  ENSG00000160867_2 (sequence is synthesized)
ggggtcctgctgagtgtgcctgggcctccagtcttgtccctggaggcctctgaggaagtggagcttgagccctgcctggctcccagcctggagcagcaagagcaggagctgacagtagcc

SEQ ID NO: 479308 - DNA, 120 bp, Artificial Sequence
  ENSG00000160867_3 (sequence is synthesized)
cttgggcagcctgtgcgtctgtgctgtgggcgggctgagcgtggtggccactggtacaaggagggcagtcgcctggcacctgctggccgtgtacggggctggaggggccgcctagagatt

SEQ ID NO: 479309 - DNA, 120 bp, Artificial Sequence
  ENSG00000160867_4 (sequence is synthesized)
gccagcttcctacctgaggatgctggccgctacctctgcctggcacgaggctccatgatcgtcctgcagaatctcaccttgattacaggtgactccttgacctccagcaacgatgatgag

SEQ ID NO: 479310 - DNA, 120 bp, Artificial Sequence
  ENSG00000160867_5 (sequence is synthesized)
gaccccaagtcccatagggacccctcgaataggcacagttacccccagcaagcaccctactggacacacccccagcgcatggagaagaaactgcatgcagtacctgcggggaacaccgtc

SEQ ID NO: 479311 - DNA, 120 bp, Artificial Sequence
  ENSG00000160867_6 (sequence is synthesized)
aagttccgctgtccagctgcaggcaaccccacgcccaccatccgctggcttaaggatggacaggcctttcatggggagaaccgcattggaggcattcggctgcgccatcagcactggagt

SEQ ID NO: 479312 - DNA, 120 bp, Artificial Sequence
  ENSG00000160867_7 (sequence is synthesized)
ctcgtgatggagagcgtggtgccctcggaccgcggcacatacacctgcctggtagagaacgctgtgggcagcatccgctataactacctgctagatgtgctggagcggtccccgcaccgg

SEQ ID NO: 479313 - DNA, 120 bp, Artificial Sequence
  ENSG00000160867_8 (sequence is synthesized)
cccatcctgcaggccgggctcccggccaacaccacagccgtggtgggcagcgacgtggagctgctgtgcaaggtgtacagcgatgcccagccccacatccagtggctgaagcacatcgtc

SEQ ID NO: 479314 - DNA, 120 bp, Artificial Sequence
  ENSG00000160867_9 (sequence is synthesized)
atcaacggcagcagcttcggagccgacggtttcccctatgtgcaagtcctaaagactgcagacatcaatagctcagaggtggaggtcctgtacctgcggaacgtgtcagccgaggacgca

SEQ ID NO: 479315 - DNA, 120 bp, Artificial Sequence
  ENSG00000160867_10 (sequence is synthesized)
ggcgagtacacctgcctcgcaggcaattccatcggcctctcctaccagtctgcctggctcacggtgctgccagaggaggaccccacatggaccgcagcagcgcccgaggccaggtatacg

SEQ ID NO: 479316 - DNA, 120 bp, Artificial Sequence
  ENSG00000160867_11 (sequence is synthesized)
gacatcatcctgtacgcgtcgggctccctggccttggctgtgctcctgctgctggccgggctgtatcgagggcaggcgctccacggccggcacccccgcccgcccgccactgtgcagaag

SEQ ID NO: 479317 - DNA, 120 bp, Artificial Sequence
  ENSG00000160867_12 (sequence is synthesized)
tccagcggccccgccttgctcgccggcctcgtgagtctagatctacctctcgacccactatgggagttcccccgggacaggctggtgcttgggaagcccctaggcgagggctgctttggc

SEQ ID NO: 479318 - DNA, 120 bp, Artificial Sequence
  ENSG00000160867_13 (sequence is synthesized)
caggtagtacgtgcagaggcctttggcatggaccctgcccggcctgaccaagccagcactgtggccgtcaagatgctcaaagacaacgcctctgacaaggacctggccgacctggtctcg

SEQ ID NO: 479319 - DNA, 120 bp, Artificial Sequence
  ENSG00000160867_14 (sequence is synthesized)
gagatggaggtgatgaagctgatcggccgacacaagaacatcatcaacctgcttggtgtctgcacccaggaagggcccctgtacgtgatcgtggagtgcgccgccaagggaaacctgcgg

SEQ ID NO: 479320 - DNA, 120 bp, Artificial Sequence
  ENSG00000160867_15 (sequence is synthesized)
gagttcctgcgggcccggcgccccccaggccccgacctcagccccgacggtcctcggagcagtgaggggccgctctccttcccagtcctggtctcctgcgcctaccaggtggcccgaggc

SEQ ID NO: 479321 - DNA, 120 bp, Artificial Sequence
  ENSG00000160867_16 (sequence is synthesized)
atgcagtatctggagtcccggaagtgtatccaccgggacctggctgcccgcaatgtgctggtgactgaggacaatgtgatgaagattgctgactttgggctggcccgcggcgtccaccac

SEQ ID NO: 479322 - DNA, 120 bp, Artificial Sequence
  ENSG00000160867_17 (sequence is synthesized)
attgactactataagaaaaccagcaacggccgcctgcctgtgaagtggatggcgcccgaggccttgtttgaccgggtgtacacacaccagagtgacgtgtggtcttttgggatcctgcta

SEQ ID NO: 479323 - DNA, 120 bp, Artificial Sequence
  ENSG00000160867_18 (sequence is synthesized)
tgggagatcttcaccctcgggggctccccgtatcctggcatcccggtggaggagctgttctcgctgctgcgggagggacatcggatggaccgacccccacactgccccccagagctgtac

SEQ ID NO: 479324 - DNA, 120 bp, Artificial Sequence
  ENSG00000160867_19 (sequence is synthesized)
gggctgatgcgtgagtgctggcacgcagcgccctcccagaggcctaccttcaagcagctggtggaggcgctggacaaggtcctgctggccgtctctgaggagtacctcgacctccgcctg

SEQ ID NO: 479325 - DNA, 120 bp, Artificial Sequence
  ENSG00000160867_20 (sequence is synthesized)
accttcggaccctattccccctctggtggggacgccagcagcacctgctcctccagcgattctgtcttcagccacgaccccctgccattgggatccagctccttccccttcgggtctggg

SEQ ID NO: 479326 - DNA, 120 bp, Artificial Sequence
  ENSG00000160867_21 (sequence is synthesized)
gtgcagacatgagcaaggctcaaggctgtgcaggcacataggctggtggccttgggccttggggctcagccacagcctgacacagtgctcgaccttgatagcatggggcccctggcccag

SEQ ID NO: 479327 - DNA, 120 bp, Artificial Sequence
  ENSG00000160867_22 (sequence is synthesized)
agttgctgtgccgtgtccaagggccgtgcccttgcccttggagctgccgtgcctgtgtcctgatggcccaaatgtcagggttctgctcggcttcttggaccttggcgcttagtccccatc

SEQ ID NO: 479328 - DNA, 120 bp, Artificial Sequence
  ENSG00000160867_23 (sequence is synthesized)
ccgggtttggctgagcctggctggagagctgctatgctaaacctcctgcctcccaataccagcaggaggttctgggcctctgaaccccctttccccacacctccccctgctgctgctgcc

SEQ ID NO: 479329 - DNA, 120 bp, Artificial Sequence
  ENSG00000160867_24 (sequence is synthesized)
ccagcgtcttgacgggagcattggcccctgagcccagagaagctggaagcctgccgaaaacaggagcaaatggcgttttataaattatttttttgaaataaagctctgtgtgcctgggtc

SEQ ID NO: 479330 - DNA, 120 bp, Artificial Sequence
  ENSG00000160867_25 (sequence is synthesized)
acggtgctgccaggtactgggcgcatcccccacctcacatgtgacagcctgactccagcaggcagaaccaagtctcccactttgcagttctccctggagtcaggctcttccggcaagtca

SEQ ID NO: 479331 - DNA, 120 bp, Artificial Sequence
  ENSG00000160867_26 (sequence is synthesized)
attcctcgctcccggccgaggagcgctcgggctgtctgcggaccctgccgcgtgcaggggtcgcggccggctggagctgggagtgaggcggcggaggagccaggaaggcagttggtggga

SEQ ID NO: 479332 - DNA, 120 bp, Artificial Sequence
  ENSG00000160867_27 (sequence is synthesized)
ctgctgctcatctgatcactgagaagaggaggcctgtgtgggaacacacggtcattctaggggccttcccctgccctccagcaccctactggacacacccccagcgcatggagaagaaac

SEQ ID NO: 479333 - DNA, 120 bp, Artificial Sequence
  ENSG00000160867_28 (sequence is synthesized)
attcctcgctcccggccgaggagcgctcgggctgtctgcggaccctgccgcgtgcaggggtcgcggccggctggagctgggagtgaggcggcggaggagccaggtgaggaggagccagag

SEQ ID NO: 479334 - DNA, 120 bp, Artificial Sequence
  ENSG00000160867_29 (sequence is synthesized)
tgggtccctgagagctgtgagaaggagatgcggctgctgctggccctgttgggggtcctgctgagtgtgcctgggcctccagtcttgtccctggaggcctctgaggaagtggagcttgca

SEQ ID NO: 479335 - DNA, 120 bp, Artificial Sequence
  ENSG00000160867_30 (sequence is synthesized)
agcattcatctatcactgtgtctgcgagagaggactggccttgcagggcgcagggccctaagctgggctgcagagctggtgagccctgcctggctcccagcctggagcagcaagagcagg

SEQ ID NO: 479336 - DNA, 120 bp, Artificial Sequence
  ENSG00000160867_31 (sequence is synthesized)
ggccagcagtgggggctgtggcctgttgggtggtcagtctctgttggcctgtggggtctggcctggggggcagtgtgtggatttgtgggtttgagctgtatgacagcccctctgtgcctc

SEQ ID NO: 479337 - DNA, 120 bp, Artificial Sequence
  ENSG00000160867_32 (sequence is synthesized)
tccacacgtggccgtccatgtgaccgtctgctgaggtgtgggtgcctgggactgggcataactacagcttcctccgtgtgtgtccccacatatgttgggagctgggagggactgagttag

SEQ ID NO: 479338 - DNA, 120 bp, Artificial Sequence
  ENSG00000160867_33 (sequence is synthesized)
aaagcagccttcttcccaagctccccggctgcacccggcctgccgccagctccctgaattcccaggccagttggaagccaggccctggtcaaacagaccccagggcgccagcctgctttc

SEQ ID NO: 479339 - DNA, 120 bp, Artificial Sequence
  ENSG00000160867_34 (sequence is synthesized)
cgcacccagaagctctgaccccatgcggggactaccgctgacccctccagcggcagcttccttccttccttcctgctccgagctcttcccctctctcctgtgtcctgggcctgcccgctg

SEQ ID NO: 479340 - DNA, 120 bp, Artificial Sequence
  ENSG00000160867_35 (sequence is synthesized)
gtgacccactgctctgtttcccacaagacgaacctgaggttcagagacgctaggagactttttcaaggccacacagcctagcaaggattcagccctagacctacgtagccctggtccagt

SEQ ID NO: 479341 - DNA, 120 bp, Artificial Sequence
  ENSG00000160867_36 (sequence is synthesized)
gctgcttgtcctgcacctgcctctgcatgctccctcgtgcagttggagggcagcctcttcaccccgtctgctgcccttacagacaacgcctctgacaaggacctggccgacctggtctcg

SEQ ID NO: 479342 - DNA, 120 bp, Artificial Sequence
  ENSG00000160867_37 (sequence is synthesized)
tcttcgcgccggcggcagagatgagggacctgaggccccgaaaagttcagtcacttagtgcccgggggcctccagcgcgagtgcgggaggctgaaggagaacccaggactgtctgatgcc

SEQ ID NO: 479343 - DNA, 120 bp, Artificial Sequence
  ENSG00000160867_38 (sequence is synthesized)
taaggcaggccctccattcccacgtggggggtggtcggtcagcggtcagcagccatgggtgactcgactaaggactctgatatcagggcagcctggggaaggcagttggtgggaagtcca

SEQ ID NO: 479344 - DNA, 120 bp, Artificial Sequence
  ENSG00000160868_0 (sequence is synthesized)
actgctgtgcagggcaggaaagctccatgcacatagcccagcaaagagcaacacagagctgaaaggaagactcagaggagagagataagtaaggaaagtagtgatggctctcatcccaga

SEQ ID NO: 479345 - DNA, 120 bp, Artificial Sequence
  ENSG00000160868_1 (sequence is synthesized)
cttggccatggaaacctggcttctcctggctgtcagcctggtgctcctctatctatatggaacccattcacatggactttttaagaagcttggaattccagggcccacacctctgccttt

SEQ ID NO: 479346 - DNA, 120 bp, Artificial Sequence
  ENSG00000160868_2 (sequence is synthesized)
tttgggaaatattttgtcctaccataagggcttttgtatgtttgacatggaatgtcataaaaagtatggaaaagtgtggggcttttatgatggtcaacagcctgtgctggctatcacaga

SEQ ID NO: 479347 - DNA, 120 bp, Artificial Sequence
  ENSG00000160868_3 (sequence is synthesized)
tcctgacatgatcaaaacagtgctagtgaaagaatgttattctgtcttcacaaaccggaggccttttggtccagtgggatttatgaaaagtgccatctctatagctgaggatgaagaatg

SEQ ID NO: 479348 - DNA, 120 bp, Artificial Sequence
  ENSG00000160868_4 (sequence is synthesized)
gaagagattacgatcattgctgtctccaaccttcaccagtggaaaactcaaggagatggtccctatcattgcccagtatggagatgtgttggtgagaaatctgaggcgggaagcagagac

SEQ ID NO: 479349 - DNA, 120 bp, Artificial Sequence
  ENSG00000160868_5 (sequence is synthesized)
aggcaagcctgtcaccttgaaagacgtctttggggcctacagcatggatgtgatcactagcacatcatttggagtgaacatcgactctctcaacaatccacaagacccctttgtggaaaa

SEQ ID NO: 479350 - DNA, 120 bp, Artificial Sequence
  ENSG00000160868_6 (sequence is synthesized)
caccaagaagcttttaagatttgattttttggatccattctttctctcaataacagtctttccattcctcatcccaattcttgaagtattaaatatctgtgtgtttccaagagaagttac

SEQ ID NO: 479351 - DNA, 120 bp, Artificial Sequence
  ENSG00000160868_7 (sequence is synthesized)
aaattttttaagaaaatctgtaaaaaggatgaaagaaagtcgcctcgaagatacacaaaagcaccgagtggatttccttcagctgatgattgactctcagaattcaaaagaaactgagtc

SEQ ID NO: 479352 - DNA, 120 bp, Artificial Sequence
  ENSG00000160868_8 (sequence is synthesized)
ccacaaagctctgtccgatctggagctcgtggcccaatcaattatctttatttttgctggctatgaaaccacgagcagtgttctctccttcattatgtatgaactggccactcaccctga

SEQ ID NO: 479353 - DNA, 120 bp, Artificial Sequence
  ENSG00000160868_9 (sequence is synthesized)
tgtccagcagaaactgcaggaggaaattgatgcagttttacccaataaggcaccacccacctatgatactgtgctacagatggagtatcttgacatggtggtgaatgaaacgctcagatt

SEQ ID NO: 479354 - DNA, 120 bp, Artificial Sequence
  ENSG00000160868_10 (sequence is synthesized)
attcccaattgctatgagacttgagagggtctgcaaaaaagatgttgagatcaatgggatgttcattcccaaaggggtggtggtgatgattccaagctatgctcttcaccgtgacccaaa

SEQ ID NO: 479355 - DNA, 120 bp, Artificial Sequence
  ENSG00000160868_11 (sequence is synthesized)
gttcctccctgaaagattcagcaagaagaacaaggacaacatagatccttacatatacacaccctttggaagtggacccagaaactgcattggcatgaggtttgctctcatgaacatgaa

SEQ ID NO: 479356 - DNA, 120 bp, Artificial Sequence
  ENSG00000160868_12 (sequence is synthesized)
acttgctctaatcagagtccttcagaacttctccttcaaaccttgtaaagaaacacagatccccctgaaattaagcttaggaggacttcttcaaccagaaaaacccgttgttctaaaggt

SEQ ID NO: 479357 - DNA, 120 bp, Artificial Sequence
  ENSG00000160868_13 (sequence is synthesized)
tgagtcaagggatggcaccgtaagtggagcctgaattttcctaaggacttctgctttgctcttcaagaaatctgtgcctgagaacaccagagacctcaaattactttgtgaatagaactc

SEQ ID NO: 479358 - DNA, 120 bp, Artificial Sequence
  ENSG00000160868_14 (sequence is synthesized)
tgaaatgaagatgggcttcatccaatggactgcataaataaccggggattctgtacatgcattgagctctctcattgtctgtgtagagtgttatacttgggaatataaaggaggtgacca

SEQ ID NO: 479359 - DNA, 120 bp, Artificial Sequence
  ENSG00000160868_15 (sequence is synthesized)
aatcagtgtgaggaggtagatttggctcctctgcttctcacgggactatttccaccacccccagttagcaccattaactcctcctgagctctgataagagaatcaacatttctcaataat

SEQ ID NO: 479360 - DNA, 120 bp, Artificial Sequence
  ENSG00000160868_16 (sequence is synthesized)
ttcctccacaaattattaatgaaaataagaattattttgatggctctaacaatgacatttatatcacatgttttctctggagtattctataagttttatgttaaatcaataaagaccact

SEQ ID NO: 479361 - DNA, 120 bp, Artificial Sequence
  ENSG00000160868_17 (sequence is synthesized)
ttacaaaagtattatcagatgctttcctgcacattaaggagaaatctatagaactgaatgagaaccaacaagtaaatatttttggtcattgtaatcactgttggcgtggggcctttgtca

SEQ ID NO: 479362 - DNA, 120 bp, Artificial Sequence
  ENSG00000160868_18 (sequence is synthesized)
gaactagaatttgattattaacataggtgaaagttaatccactgtgactttgcccattgtttagaaagaatattcatagtttaattatgccttttttgatcaggcacagtggctcacgcc

SEQ ID NO: 479363 - DNA, 66 bp, Artificial Sequence
  ENSG00000160868_19 (sequence is synthesized)
catctctactaaaaatacacaaattagctaggcatggtggactcgcctgtaatctcaagtgagctg

SEQ ID NO: 479364 - DNA, 120 bp, Artificial Sequence
  ENSG00000160868_20 (sequence is synthesized)
agtgagactcagtcttaaaaaaatatgcctttttgaagcacgtacattttgtaacaaagaactgaagctcttattatattattagttttgatttaatgttttcagcccatctcctttcat

SEQ ID NO: 479365 - DNA, 120 bp, Artificial Sequence
  ENSG00000160868_21 (sequence is synthesized)
atttctgggagacagaaaacatgtttccctacacctcttgcattccatcctcaacacccaactgtctcgatgcaatgaacacttaataaaaaacagtcgattggtcaattgattgagcaa

SEQ ID NO: 479366 - DNA, 120 bp, Artificial Sequence
  ENSG00000160868_22 (sequence is synthesized)
tgaaagagtaagtagaagcgcagccatggggttctgagctgtcatgaacccctccagctgcctgccatggagctgatattcctgctgttgggttattccagtgaccagacaaaaggaggg

SEQ ID NO: 479367 - DNA, 120 bp, Artificial Sequence
  ENSG00000160868_23 (sequence is synthesized)
ctgtggtaatgcaacttcaatgggtctcccaagatggggcagctccgatgaggaggtggggcagctggaggaaaaggatcttctcccctgtgcacaggggccagggtttacatatccatt

SEQ ID NO: 479368 - DNA, 120 bp, Artificial Sequence
  ENSG00000160868_24 (sequence is synthesized)
ggacagagcctgagaagttcctccctgaaagactagaaaaaagaaaactacagtcatccacaattccaacaacttacgatgaaggtcatcagttatgtccttatgggtcatcagtgtcca

SEQ ID NO: 479369 - DNA, 120 bp, Artificial Sequence
  ENSG00000160868_25 (sequence is synthesized)
acatcttagtttttgttcacctcaaaacagtttctatttgcccttttggtttctactttgactcattggttacttaaatgtttattatttaacttccacatatgtcagtctttccattcc

SEQ ID NO: 479370 - DNA, 120 bp, Artificial Sequence
  ENSG00000160868_26 (sequence is synthesized)
cttggccatggaaacctggcttctcctggctgtcagcctggtgctcctctatcttcacaatcgctgtgacttgatttctgtttcactttgtagatatggaacccattcacatggactttt

SEQ ID NO: 479371 - DNA, 120 bp, Artificial Sequence
  ENSG00000160870_0 (sequence is synthesized)
actgctgtgcagggcaggaaagctccacacacacagcccagcaaacagcagcacgctgctgaaaaaaagactcagaggagagagataaggaaggaaagtagtgatggatctcatcccaaa

SEQ ID NO: 479372 - DNA, 120 bp, Artificial Sequence
  ENSG00000160870_1 (sequence is synthesized)
cttggccgtggaaacctggcttctcctggctgtcagcctgatactcctctatctatatggaacccgtacacatggactttttaagaagcttggaattccagggcccacacctctgccttt

SEQ ID NO: 479373 - DNA, 120 bp, Artificial Sequence
  ENSG00000160870_2 (sequence is synthesized)
tttgggaaatgctttgtccttccgtaagggctattggacgtttgacatggaatgttataaaaagtatagaaaagtctggggtatttatgactgtcaacagcctatgctggctatcacaga

SEQ ID NO: 479374 - DNA, 120 bp, Artificial Sequence
  ENSG00000160870_3 (sequence is synthesized)
tcccgacatgatcaaaacagtgctagtgaaagaatgttattctgtcttcacaaaccggaggcctttcgggccagtgggatttatgaaaaatgccatctctatagctgaggatgaagaatg

SEQ ID NO: 479375 - DNA, 120 bp, Artificial Sequence
  ENSG00000160870_4 (sequence is synthesized)
gaagagaatacgatcattgctgtctccaacattcaccagcggaaaactcaaggagatggtccctatcattgcccagtatggagatgtgttggtgagaaatctgaggcgggaagcagagac

SEQ ID NO: 479376 - DNA, 120 bp, Artificial Sequence
  ENSG00000160870_5 (sequence is synthesized)
aggcaagcctgtcaccttgaaacacgtctttggggcctacagcatggatgtgatcactagcacatcatttggagtgagcatcgactctctcaacaatccacaagacccctttgtggaaaa

SEQ ID NO: 479377 - DNA, 120 bp, Artificial Sequence
  ENSG00000160870_6 (sequence is synthesized)
caccaagaagcttttaagatttaatccattagatccattcgttctctcaataaaagtctttccattccttaccccaattcttgaagcattaaatatcactgtgtttccaagaaaagttat

SEQ ID NO: 479378 - DNA, 120 bp, Artificial Sequence
  ENSG00000160870_7 (sequence is synthesized)
aagttttctaacaaaatctgtaaaacagataaaagaaggtcgcctcaaagagacacaaaagcaccgagtggatttccttcagctgatgattgactctcagaattcaaaagactctgagac

SEQ ID NO: 479379 - DNA, 120 bp, Artificial Sequence
  ENSG00000160870_8 (sequence is synthesized)
aattatctttatttttgctggctatgaaaccacgagcagtgttctctccttcattatatatgaactggccactcaccctgatgtccagcagaaagtgcagaaggaaattgatacagtttt

SEQ ID NO: 479380 - DNA, 120 bp, Artificial Sequence
  ENSG00000160870_9 (sequence is synthesized)
acccaataaggcaccacccacctatgatactgtgctacagttggagtatcttgacatggtggtgaatgaaacactcagattattcccagttgctatgagacttgagagggtctgcaaaaa

SEQ ID NO: 479381 - DNA, 120 bp, Artificial Sequence
  ENSG00000160870_10 (sequence is synthesized)
agatgttgaaatcaatgggatgtttattcccaaaggggtggtggtgatgattccaagctatgttcttcatcatgacccaaagtactggacagagcctgagaagttcctccctgaaaggtt

SEQ ID NO: 479382 - DNA, 120 bp, Artificial Sequence
  ENSG00000160870_11 (sequence is synthesized)
cagtaaaaagaacaaggacaacatagatccttacatatacacaccctttggaagtggacccagaaactgcattggcatgaggtttgctctcgtgaacatgaaacttgctctagtcagagt

SEQ ID NO: 479383 - DNA, 120 bp, Artificial Sequence
  ENSG00000160870_12 (sequence is synthesized)
ccttcagaacttctccttcaaaccttgtaaagaaacacagatccccctgaaattacgctttggaggacttcttctaacagaaaaacccattgttctaaaggctgagtcaagggatgagac

SEQ ID NO: 479384 - DNA, 120 bp, Artificial Sequence
  ENSG00000160870_13 (sequence is synthesized)
cgtaagtggagcctgatttccctaaggacttctggtttgctctttaagaaagctgtgccccagaacaccagagacctcaaattactttacaaatagaaccctgaaatgaagacgggcttc

SEQ ID NO: 479385 - DNA, 120 bp, Artificial Sequence
  ENSG00000160870_14 (sequence is synthesized)
atccaatgtgctgcataaataatcagggattctgtacgtgcattgtgctctctcatggtctgtatagagtgttatacttggtaatatagaggagatgaccaaatcagtgctggggaagta

SEQ ID NO: 479386 - DNA, 120 bp, Artificial Sequence
  ENSG00000160870_15 (sequence is synthesized)
gatttggcttctctgcttctcataggactatctccaccacccccagttagcaccattaactcctcctgagctctgataacataattaacatttctcaataatttcaaccacaatcattaa

SEQ ID NO: 479387 - DNA, 120 bp, Artificial Sequence
  ENSG00000160870_16 (sequence is synthesized)
taaaaataggaattattttgatggctctaacagtgacatttatatcatgtgttatatctgtagtattctatagtaagctttatattaagcaaatcaataaaaacctctttacaaaagtat

SEQ ID NO: 479388 - DNA, 120 bp, Artificial Sequence
  ENSG00000160870_17 (sequence is synthesized)
gaaaaacccattgttctaaaggttgagtcaagggatgggaccgtaagtggaacctgaatttccctaaggacttctgctttgctcttcaaaaaagctgtgacctagaacaccagagacctc

SEQ ID NO: 479389 - DNA, 120 bp, Artificial Sequence
  ENSG00000160870_18 (sequence is synthesized)
aaattactttgtgaatagtaccctgaaatgaagatgggcttcatccactgtactgcataaataaccagggattctgtacatgcactgagctctctccctgtctgtgtagagtgttatact

SEQ ID NO: 479390 - DNA, 120 bp, Artificial Sequence
  ENSG00000160870_19 (sequence is synthesized)
ctttattgagatgtaaatcaccatgtaattcatccacttaaaatgtacagtttaatggtttgtagtacatttgaagatatgtacgaccatcaccattgtaaactttaaaacacttctgtc

SEQ ID NO: 479391 - DNA, 120 bp, Artificial Sequence
  ENSG00000160870_20 (sequence is synthesized)
attctagaaacctcatacatgtttagctatcaaccccctgccagaaatcctgttgtcgtatataaccactagtcaactttctgcatctatagatttgcctattctggacacttcatagaa

SEQ ID NO: 479392 - DNA, 120 bp, Artificial Sequence
  ENSG00000160870_21 (sequence is synthesized)
atgatattaatttttcagggtttttttaattctctagttcatgaatttgtactttagtctgtattattttctttcttctgctggcttcaggcttagtttgcccttctccgtttactgtgt

SEQ ID NO: 479393 - DNA, 120 bp, Artificial Sequence
  ENSG00000160870_22 (sequence is synthesized)
tttgggaaatgctttgtccttccgtaaggtgagtgtttttgagcttcctcttttgcttcttatgattgcaaagagcaacttagttccatcagtaaaaatgcttctcctcaagaggaaggt

SEQ ID NO: 479394 - DNA, 120 bp, Artificial Sequence
  ENSG00000160870_23 (sequence is synthesized)
catcacccagagcgtggcaaagtttaccctggggctctcttgctaactctcaggaacctcaagtttgcctcagttggacagcccaaatgtcaagtagatccagcaatctgatgttcacaa

SEQ ID NO: 479395 - DNA, 120 bp, Artificial Sequence
  ENSG00000160870_24 (sequence is synthesized)
cttgatgtgcagactttgtgagcaccataaagagcatttcctttttgctccaggcaggttcccaggaaggtacagccatacttagttagtattaaaagtaggaacaggagcccctgattg

SEQ ID NO: 479396 - DNA, 120 bp, Artificial Sequence
  ENSG00000160870_25 (sequence is synthesized)
tggcttgttatctgtggacatgagagtaaaactttcctctctgtagcaagagctcatgaataggcttttttcccttcctcctgcacagcttggaaactcagtttattagggagatcaagt

SEQ ID NO: 479397 - DNA, 120 bp, Artificial Sequence
  ENSG00000160870_26 (sequence is synthesized)
gaaaccacagtgctgtctgcagggtgctgtggatctggcatggcccatacaggcaacatgactgagtagaaaggacacacagctctggatgtccttgggccccacagcaactgcccttga

SEQ ID NO: 479398 - DNA, 120 bp, Artificial Sequence
  ENSG00000160870_27 (sequence is synthesized)
aacatttagtccttgtgagcatttgatgatttacttgccttcaattttccatggacctaatactctttataaagggaaatattttaaacctatgaaacattgtggagaatggcatgggaa

SEQ ID NO: 479399 - DNA, 120 bp, Artificial Sequence
  ENSG00000160870_28 (sequence is synthesized)
atacccatgtatgcaccacccagcttaacaaatgctctcctgtcatttctaaccacaatctctttgaagagctcttttgtctttcaatctctcttccctgtttggcccacattacccttc

SEQ ID NO: 479400 - DNA, 120 bp, Artificial Sequence
  ENSG00000160870_29 (sequence is synthesized)
atcgtatgaagacttggatggctcctgtgtcagactcttgctgtgagttatacctaatgaactagaacttaagattactgtgtattgtacatctagaggattatgtaatgtccggatcaa

SEQ ID NO: 479401 - DNA, 80 bp, Artificial Sequence
  ENSG00000160877_0 (sequence is synthesized)
gctcggctggggcggcctggcccacaatgaatggccgccgcggctgccgctgctgctgaggcggaggccgcggaggccgc

SEQ ID NO: 479402 - DNA, 120 bp, Artificial Sequence
  ENSG00000160877_1 (sequence is synthesized)
cccaggcccggccccagccgccgctgcggagcccgccgggaccccccggagcgcggccacggcgcagccgctgccatggcccagacactgcagatggagatcccgaacttcggcaacagc

SEQ ID NO: 479403 - DNA, 120 bp, Artificial Sequence
  ENSG00000160877_2 (sequence is synthesized)
cagcatcctggagtgcctcaatgaacagcggctgcagggcctgtactgtgacgtgtcagtggtggtcaagggccatgccttcaaggcccaccgggccgtgcttgctgccagcagctccta

SEQ ID NO: 479404 - DNA, 120 bp, Artificial Sequence
  ENSG00000160877_3 (sequence is synthesized)
cttccgggacctgttcaacaacagccgcagcgccgtggtggagctgccggcggctgtgcagccccagtctttccagcagatcctcagcttctgctacacgggccggctgagcatgaacgt

SEQ ID NO: 479405 - DNA, 120 bp, Artificial Sequence
  ENSG00000160877_4 (sequence is synthesized)
gggcgaccagttcctgctcatgtacacggctggcttcctgcagatccaggagatcatggagaagggcaccgagttcttcctcaaggtgagctccccgagctgcgactcccagggcctgca

SEQ ID NO: 479406 - DNA, 120 bp, Artificial Sequence
  ENSG00000160877_5 (sequence is synthesized)
tgcggaggaggccccatcgtcggagccccagagccccgtggcgcagacatcgggctggccagcctgtagcaccccgctgcccctcgtgtcgcgggtgaagacggagcagcaggagtcgga

SEQ ID NO: 479407 - DNA, 120 bp, Artificial Sequence
  ENSG00000160877_6 (sequence is synthesized)
ctccgtgcagtgcatgcccgtggccaagcggctgtgggacagtggccagaaggaggctgggggcggcggcaatggcagccgcaagatggccaagttctccacgccggacctggctgccaa

SEQ ID NO: 479408 - DNA, 120 bp, Artificial Sequence
  ENSG00000160877_7 (sequence is synthesized)
cctcaccagcccccgccaccccaacaggctccggtggtggcagcagcccagcccgccgtggctgcgggagcagggcagccagccggtggggtggcagcagcagggggtgtggtgagtggg

SEQ ID NO: 479409 - DNA, 120 bp, Artificial Sequence
  ENSG00000160877_8 (sequence is synthesized)
tgggcccagcacgtcggagcggaccagcccaggcacctcaagcgcctacaccagcgacagccctggctcctaccacaatgaggaggacgaggaggaggatggtggcgaggagggcatgga

SEQ ID NO: 479410 - DNA, 120 bp, Artificial Sequence
  ENSG00000160877_9 (sequence is synthesized)
tgagcagtaccggcagatctgcaacatgtacaccatgtacagcatgatgaacgtcggccagacagccgagaaggtggaggccctcccggagcaggtagcccccgagtcccgaaatcgcat

SEQ ID NO: 479411 - DNA, 120 bp, Artificial Sequence
  ENSG00000160877_10 (sequence is synthesized)
ccgggttcggcaagacctggcgtctctcccggctgaacttatcaaccagattgggaaccgctgccaccccaagctctacgacgagggcgacccctctgagaagctggagctggtgacagg

SEQ ID NO: 479412 - DNA, 120 bp, Artificial Sequence
  ENSG00000160877_11 (sequence is synthesized)
caccaacgtgtacatcacaagggcgcagctgatgaactgccacgtcagcgcaggcacgcggcacaaggtcctactgcggcggctcctggcctccttctttgaccggaacacgctggccaa

SEQ ID NO: 479413 - DNA, 120 bp, Artificial Sequence
  ENSG00000160877_12 (sequence is synthesized)
cagctgcggcaccggcatccgctcttctaccaacgatccccgtcggaagcccctggacagccgcgtgctccacgctgtcaagtactactgccagaacttcgcccccaacttcaaggagag

SEQ ID NO: 479414 - DNA, 120 bp, Artificial Sequence
  ENSG00000160877_13 (sequence is synthesized)
cgagatgaatgccatcgcggccgacatgtgcaccaacgcccgccgcgtcgtgcgcaagagctggatgcccaaggtcaaggtgctcaaggctgaggatgacgcctacaccaccttcatcag

SEQ ID NO: 479415 - DNA, 120 bp, Artificial Sequence
  ENSG00000160877_14 (sequence is synthesized)
tgaaacgggcaagatcgagccggacatgatgggtgtggagcatggcttcgagaccgccagccacgagggcgaggcgggtccctcggctgaagccctgcagtaacccgcccagcctcccgc

SEQ ID NO: 479416 - DNA, 120 bp, Artificial Sequence
  ENSG00000160877_15 (sequence is synthesized)
ggggccacacacttcccctcccaacacacacacacacctgccatcttggtcatgagctactgtctgtccctccccaggacccgcggtgggtgctgcatgttcccggccctctgcccctcc

SEQ ID NO: 479417 - DNA, 120 bp, Artificial Sequence
  ENSG00000160877_16 (sequence is synthesized)
tgtcctaccccctttccccaccgagagctgggccgggagaggaccgcagggcaggtggcgtgaggtccgtgttgccttctttaacacacactcgtgcagtgggggagttctggctcccca

SEQ ID NO: 479418 - DNA, 120 bp, Artificial Sequence
  ENSG00000160877_17 (sequence is synthesized)
acctaacccctagccgtcatctccacactcaccaggcccaccaggggagggggctggcctgggggtcttgggaaggcccctccccaggccctaggccacctcgcggaagccttcagcctc

SEQ ID NO: 479419 - DNA, 120 bp, Artificial Sequence
  ENSG00000160877_18 (sequence is synthesized)
tctccaaaagcgccttcctgtcaccctcgtctatccctgcgcctgggggctggggtaggcgaggccgtggggactacccattttatagctggggaaacaggctccgagaaattgcacaac

SEQ ID NO: 479420 - DNA, 120 bp, Artificial Sequence
  ENSG00000160877_19 (sequence is synthesized)
cgacctcaggtggccggcagtggcgtgcctggtgccctttctcctcttccgcctctgttgctccctttggtcctctggggcctcagagaggcaggtcctaaaggagggggggtctcctgg

SEQ ID NO: 479421 - DNA, 120 bp, Artificial Sequence
  ENSG00000160877_20 (sequence is synthesized)
gggcagaccgagggtctcggaggatagaatgagaggtttccagggctggcagagtgtgtgcgtgtgtgtgtgcagaagttttgctttcaaacaaatgaagatacaagaggcagtaggacc

SEQ ID NO: 479422 - DNA, 120 bp, Artificial Sequence
  ENSG00000160877_21 (sequence is synthesized)
tgggttggaacccaggggagcagactggggggctgttgcccctccctccatctccccacacccaccccaccccacagcagggctcctggcccccacccccctgtacataatttttaaaac

SEQ ID NO: 479423 - DNA, 120 bp, Artificial Sequence
  ENSG00000160877_22 (sequence is synthesized)
ctttttttagcgaatgaaatattgaagtataagattccttttatttttcaaaccaatggggctgtgtctattgtccccctcggtccccaggggtggggggccttggaaggcagggcggtg

SEQ ID NO: 479424 - DNA, 120 bp, Artificial Sequence
  ENSG00000160877_23 (sequence is synthesized)
ttggggggctggggggcaggctgaatgtgtgtgtgtgggtgtgtatgtgtggagtgtgtgtgtgtgtttccatggtaggactccagtcccagctgctgcctaggctcctgtgggtcctgt

SEQ ID NO: 479425 - DNA, 120 bp, Artificial Sequence
  ENSG00000160877_24 (sequence is synthesized)
gggtccccctcccctgttcaccttccccaacagggctatagtttaagggtgtcccaggccttggctggttggctgggcccagctcctgggggctgggcagggcagggcagggccgggtcc

SEQ ID NO: 479426 - DNA, 120 bp, Artificial Sequence
  ENSG00000160877_25 (sequence is synthesized)
acttccattgttagcagttgtttgcagaattttctcttttaccattcctctctttttgttctcgcccagagtgggtggttttttgttgttgttttagattttcatgtgaaggcagttttt

SEQ ID NO: 479427 - DNA, 120 bp, Artificial Sequence
  ENSG00000160877_26 (sequence is synthesized)
tttcttttttaactccccatccccctatgcagggtgtcatttcaccatccacatccacatccttgtttgtgtttctggccctcgtcctccctgcctctcatctgcctccccaacccccac

SEQ ID NO: 479428 - DNA, 120 bp, Artificial Sequence
  ENSG00000160877_27 (sequence is synthesized)
ctacccactgctcccaggggtctctccaggggcagggggattttaggagatggggtgggggccagcccctactggacccttgtaatctgatttggagaccatccccccgatgggaccagc

SEQ ID NO: 479429 - DNA, 120 bp, Artificial Sequence
  ENSG00000160877_28 (sequence is synthesized)
agccccgccggcccactgggggtccctcttaacatctgcttgttgcgggggtcagtcatgagtgccagggtctggctggggtcttggcactgtcttcctggccggggcctgaaaccttag

SEQ ID NO: 479430 - DNA, 120 bp, Artificial Sequence
  ENSG00000160877_29 (sequence is synthesized)
cccccagccggcctgagtgggggatattgacacccccagctaaagcacaagcaccttagtcacccctcctctccccccgcctcctggcctgccaccccaccccagcgtttaccccaaagc

SEQ ID NO: 479431 - DNA, 120 bp, Artificial Sequence
  ENSG00000160877_30 (sequence is synthesized)
acaatgccctggtcacttggcaagcggctgggcctgacggaggccgaggggcagaccggggctccagccagacccctgaaaggaaggtgctcccccacttccaggccttagttggggtgg

SEQ ID NO: 479432 - DNA, 120 bp, Artificial Sequence
  ENSG00000160877_31 (sequence is synthesized)
gggggccagctcctgggcctggggtcttctcacccccacccccttgtcctgggtaggcccctgcctgcccctctctgccttttcctcgggtgtccctcctcgagcccctgtggcattggc

SEQ ID NO: 479433 - DNA, 120 bp, Artificial Sequence
  ENSG00000160877_32 (sequence is synthesized)
ttgggtggcagagcccacttgtttcagggaccccaggaggtgccccctggctcccaggactgtgtgtgggtccggggggtgggggggtggggagaagggtcgggcagggggtgcagggga

SEQ ID NO: 479434 - DNA, 120 bp, Artificial Sequence
  ENSG00000160877_33 (sequence is synthesized)
ggaaactcctcaccaggagagccaaagacagggttgtgccttaccccaggagccacccctgtaccccccttgccctgccattcaccctccacccctacccctgggcggcctgctgctttt

SEQ ID NO: 479435 - DNA, 120 bp, Artificial Sequence
  ENSG00000160877_34 (sequence is synthesized)
tccttctcttcctcccctgccctgagctgcatggttcccccaccctgggcagccaggaaggaatctgaatggagaatcaccaaccaccagagaaaaaagactgtggggccctcccctgcc

SEQ ID NO: 479436 - DNA, 120 bp, Artificial Sequence
  ENSG00000160877_35 (sequence is synthesized)
aactccccttccctggccgcccactcaacccacacctctttcacgcaggacaggctgcccaccctgtccacgtgaagtgccaacgccctccccaccctgggccgagcccccacccctccc

SEQ ID NO: 479437 - DNA, 120 bp, Artificial Sequence
  ENSG00000160877_36 (sequence is synthesized)
tgggcccccaagtgagattgcacatttaactactgtaaggagaggagcggcgttggcaaatgtgaaccatgagaatatcagtgatactgatgagaataaactaaacgcctttgtaacagc

SEQ ID NO: 479438 - DNA, 120 bp, Artificial Sequence
  ENSG00000160877_37 (sequence is synthesized)
gtggatcccctgggagaggacacgtccctagtcccatttcacagatgaggaagttgtggctcagaaaaggggcggaaactaaagttcggaaaggtagagcgacttgcccaaggtcgcggg

SEQ ID NO: 479439 - DNA, 120 bp, Artificial Sequence
  ENSG00000160877_38 (sequence is synthesized)
actagaaggtggcggggccaggattcgaaccatcgagctgagccgacgtactggcgaggatcccccaggggcatagagaggagacggagccgccgctgccatggcccagacactgcagat

SEQ ID NO: 479440 - DNA, 120 bp, Artificial Sequence
  ENSG00000160882_0 (sequence is synthesized)
attgcagctgaacagggtggagggagcattggaatggcactcagggcaaaggcagaggtgtgcatggcagtgccctggctgtccctgcaaagggcacaggcactgggcacgagagccgcc

SEQ ID NO: 479441 - DNA, 120 bp, Artificial Sequence
  ENSG00000160882_1 (sequence is synthesized)
cgggtccccaggacagtgctgccctttgaagccatgccccggcgtccaggcaacaggtggctgaggctgctgcagatctggagggagcagggttatgaggacctgcacctggaagtacac

SEQ ID NO: 479442 - DNA, 120 bp, Artificial Sequence
  ENSG00000160882_2 (sequence is synthesized)
cagaccttccaggaactagggcccattttcaggtacgacttgggaggagcaggcatggtgtgtgtgatgctgccggaggacgtggagaagctgcaacaggtggacagcctgcatccccac

SEQ ID NO: 479443 - DNA, 120 bp, Artificial Sequence
  ENSG00000160882_3 (sequence is synthesized)
aggatgagcctggagccctgggtggcctacagacaacatcgtgggcacaaatgtggcgtgttcttgctgaatgggcctgaatggcgcttcaaccgattgcggctgaatccagaagtgctg

SEQ ID NO: 479444 - DNA, 120 bp, Artificial Sequence
  ENSG00000160882_4 (sequence is synthesized)
tcgcccaacgctgtgcagaggttcctcccgatggtggatgcagtggccagggacttctcccaggccctgaagaagaaggtgctgcagaacgcccgggggagcctgaccctggacgtccag

SEQ ID NO: 479445 - DNA, 120 bp, Artificial Sequence
  ENSG00000160882_5 (sequence is synthesized)
cccagcatcttccactacaccatagaagccagcaacttggctctttttggagagcggctgggcctggttggccacagccccagttctgccagcctgaacttcctccatgccctggaggtc

SEQ ID NO: 479446 - DNA, 120 bp, Artificial Sequence
  ENSG00000160882_6 (sequence is synthesized)
atgttcaaatccaccgtccagctcatgttcatgcccaggagcctgtctcgctggaccagccccaaggtgtggaaggagcactttgaggcctgggactgcatcttccagtacggcgacaac

SEQ ID NO: 479447 - DNA, 120 bp, Artificial Sequence
  ENSG00000160882_7 (sequence is synthesized)
tgtatccagaaaatctatcaggaactggccttcagccgccctcaacagtacaccagcatcgtggcggagctcctgttgaatgcggaactgtcgccagatgccatcaaggccaactctatg

SEQ ID NO: 479448 - DNA, 120 bp, Artificial Sequence
  ENSG00000160882_8 (sequence is synthesized)
gaactcactgcagggagcgtggacacgacggtgtttcccttgctgatgacgctctttgagctggctcggaaccccaacgtgcagcaggccctgcgccaggagagcctggccgccgcagcc

SEQ ID NO: 479449 - DNA, 120 bp, Artificial Sequence
  ENSG00000160882_9 (sequence is synthesized)
agcatcagtgaacatccccagaaggcaaccaccgagctgcccttgctgcgtgcggccctcaaggagaccttgcggctctaccctgtgggtctgtttctggagcgagtggcgagctcagac

SEQ ID NO: 479450 - DNA, 120 bp, Artificial Sequence
  ENSG00000160882_10 (sequence is synthesized)
ttggtgcttcagaactaccacatcccagctgggacattggtgcgcgtgttcctctactctctgggtcgcaaccccgccttgttcccgaggcctgagcgctataacccccagcgctggcta

SEQ ID NO: 479451 - DNA, 120 bp, Artificial Sequence
  ENSG00000160882_11 (sequence is synthesized)
ttctaccacgtgccctttggctttggcatgcgccagtgccttgggcggcgcctggcagaggcagagatgctgctgctgctgcaccatgtgctgaaacacctccaggtggagacactaacc

SEQ ID NO: 479452 - DNA, 120 bp, Artificial Sequence
  ENSG00000160882_12 (sequence is synthesized)
caagaggacataaagatggtctacagcttcatattgaggcccagcatgttccccctcctcaccttcagagccatcaactaatcacgtctctgcacccagggtcccagcctggccaccagc

SEQ ID NO: 479453 - DNA, 120 bp, Artificial Sequence
  ENSG00000160882_13 (sequence is synthesized)
ctccctttctgcctgaccccaggccacccctcttctctcccacatgcacagcttcctgagtcacccctctgtctaaccagccccagcacaaatggaactcccgagggcctctaggaccag

SEQ ID NO: 479454 - DNA, 120 bp, Artificial Sequence
  ENSG00000160882_14 (sequence is synthesized)
ggtttgccaggctaagcagcaatgccagggcacagctggggaagatcttgctgaccttgtccccagccccacctggccctttctccagcaagcactgtcctctgggcagtttgcccccat

SEQ ID NO: 479455 - DNA, 120 bp, Artificial Sequence
  ENSG00000160882_15 (sequence is synthesized)
ccctcccagtgctggctccaggctcctcgtgtggccatacaagggtgctgtggttttgtcccttgccttcctgcctagtctcacatgtccctgttcctcttcccctggccagggcccctg

SEQ ID NO: 479456 - DNA, 120 bp, Artificial Sequence
  ENSG00000160882_16 (sequence is synthesized)
cgcagactgtcagagtcattaagcgggatcccagcatctcagagtccagtcaagttccctcctgcagcctgacccctaggcagctcgagcatgccctgagctctctgaaagttgtcaccc

SEQ ID NO: 479457 - DNA, 120 bp, Artificial Sequence
  ENSG00000160882_17 (sequence is synthesized)
tggaatagggtcctgcagggtagaataaaaaggcccctgtggtcacttgtcctgacatccccattttcaagtgatacaactgagtctcgagggacgtgtgttccccagctgatcgtgtca

SEQ ID NO: 479458 - DNA, 120 bp, Artificial Sequence
  ENSG00000160882_18 (sequence is synthesized)
gcctcatgccccaggcctcatctttcatggaccaggccttgttccaggagtgggtgttgggtcctctgcttcctgtgctgtcccctggggaaggtcccgaggatgctgtcaggagatgga

SEQ ID NO: 479459 - DNA, 120 bp, Artificial Sequence
  ENSG00000160882_19 (sequence is synthesized)
agagtcatgtggggtgggaacctggggtgtggttccagaaatgtttttggcaacaggagagacaggattgggccaacaaggactcagacgagttttattgactcatttctctggttgata

SEQ ID NO: 479460 - DNA, 120 bp, Artificial Sequence
  ENSG00000160882_20 (sequence is synthesized)
cggagccatgtcatgtgccacgacctggggtgggcacagggaggctgcagtttcctgcgtgaacctgccttgggcctcatctgctcctagcccagcagagagagttgacccctcctgaac

SEQ ID NO: 479461 - DNA, 120 bp, Artificial Sequence
  ENSG00000160882_21 (sequence is synthesized)
tggccactccccagtgctcccgtgcagggagaggaagcacccagtttgagagtgtacccagccagactgtctttatctccatggattttcatcagggcaaagatcacagcagccagctcc

SEQ ID NO: 479462 - DNA, 120 bp, Artificial Sequence
  ENSG00000160882_22 (sequence is synthesized)
gaactcactgcagggagcgtggacacggtcaggccggcaaccagccccacccagagagggtgatgccaagcctgcctcccaggcactgcctgccaatgtcacacggcgcccacgtgtccc

SEQ ID NO: 479463 - DNA, 120 bp, Artificial Sequence
  ENSG00000160882_23 (sequence is synthesized)
atccccaggctatgggccccacatttcttacttgggattgtgatgtgataaacacgtttgcaggttgccatggttggaatggggggttcctttctgtggaggactcagggaaaggggttt

SEQ ID NO: 479464 - DNA, 120 bp, Artificial Sequence
  ENSG00000160882_24 (sequence is synthesized)
ggatgggcattaggatttgaagtcttgggctctgtcgttctcagggtatgcatgtctgcacccctcacagggaggttgtcctgggaggggtgtcccgggggctgagtcctcctgtgcaag

SEQ ID NO: 479465 - DNA, 120 bp, Artificial Sequence
  ENSG00000160882_25 (sequence is synthesized)
atcattccagtggtggtcagtagatccaggacgccctgcaggactcagcctgtacagggagatgaagtgccccaggttgggagcacacctagctagagttatttgtgttaatctattcag

SEQ ID NO: 479466 - DNA, 120 bp, Artificial Sequence
  ENSG00000160882_26 (sequence is synthesized)
gatgctctaagaaaacgccatagactgggttgctgacaaacatcagaattctatttctcatggttctgaaggcttagaaggctaagatcaaggtgtcagcaggttctgtgtctggtgagg

SEQ ID NO: 479467 - DNA, 120 bp, Artificial Sequence
  ENSG00000160882_27 (sequence is synthesized)
acccacctcttgtttcatagataaaaccttcttgctgtgtcctcacatggtggaaaagggcaagacagctcacagagacctcttttataaggacgccagttccattcaagagggcactgc

SEQ ID NO: 479468 - DNA, 120 bp, Artificial Sequence
  ENSG00000160882_28 (sequence is synthesized)
ctgcattcccttcccccctcaaaggcccggccctgctattatcgtcaccttggtgactagatttcagcctatgaattctggaggcggacacaaaaattcagattaaactactctgcttct

SEQ ID NO: 479469 - DNA, 120 bp, Artificial Sequence
  ENSG00000160882_29 (sequence is synthesized)
gtttctctaaaatctacatccttctcatatacaaaatacatgcatttctccccagtagccccaaatatcaactcattttagcatcaactttaaaattgtagtccaaagtgtgatttaaat

SEQ ID NO: 479470 - DNA, 120 bp, Artificial Sequence
  ENSG00000160882_30 (sequence is synthesized)
gttatctgagtcaaacatgggtaagactcaaggtacaatttatcctgagtccaactgttcttgctgcgaacctatgaaatcaaacatgttatgtgcttccaaaatacagtggttggagag

SEQ ID NO: 479471 - DNA, 120 bp, Artificial Sequence
  ENSG00000160882_31 (sequence is synthesized)
gcataggataaacattcccattccagaaaggagaaacaggaaagaagaaaggagtaacaagtttcaagcaactccaaaattgaatgtgacaaacagtattaaaccttaagcctcaagaat

SEQ ID NO: 479472 - DNA, 120 bp, Artificial Sequence
  ENSG00000160882_32 (sequence is synthesized)
tttcaggtcccggcactctgcatcctttggaagatggggaaggagtgcagcacgtgctggtctgtggcgctgccagggcaggggatggtgcagagcaaatcccagctcgctgcagagagg

SEQ ID NO: 479473 - DNA, 120 bp, Artificial Sequence
  ENSG00000160882_33 (sequence is synthesized)
gccgccgcagccagcatcagtgaacatccccagaaggcaaccaccgagctgcccttgctgcgtgcggccctcaaggagaccttgcggaagggtgcagagagcacaggaagccccatccag

SEQ ID NO: 479474 - DNA, 120 bp, Artificial Sequence
  ENSG00000160883_0 (sequence is synthesized)
gcttttggtcattggggtgcctcatattgccagacaagagctcagacctgaggagagtgactagcttctctgtgtcccaggtggccaccttccactgtggaagctcatggactccattgg

SEQ ID NO: 479475 - DNA, 120 bp, Artificial Sequence
  ENSG00000160883_1 (sequence is synthesized)
gtcttcagggttgcggcagggggaagaaaccctgagttgctctgaggagggcttgcccgggccctcagacagctcagagctggtgcaggagtgcctgcagcagttcaaggtgacaagggc

SEQ ID NO: 479476 - DNA, 120 bp, Artificial Sequence
  ENSG00000160883_2 (sequence is synthesized)
acagctacagcagatccaagccagcctcttgggttccatggagcaggcgctgaggggacaggccagccctgcccctgcggtccggatgctgcctacatacgtggggtccaccccacatgg

SEQ ID NO: 479477 - DNA, 120 bp, Artificial Sequence
  ENSG00000160883_3 (sequence is synthesized)
cactgagcaaggagacttcgtggtgctggagctgggggccacaggggcctcactgcgtgttttgtgggtgactctaactggcattgaggggcatagggtggagcccagaagccaggagtt

SEQ ID NO: 479478 - DNA, 120 bp, Artificial Sequence
  ENSG00000160883_4 (sequence is synthesized)
tgtgatcccccaagaggtgatgctgggtgctggccagcagctctttgactttgctgcccactgcctgtctgagttcctggatgcgcagcctgtgaacaaacagggtctgcagcttggctt

SEQ ID NO: 479479 - DNA, 120 bp, Artificial Sequence
  ENSG00000160883_5 (sequence is synthesized)
cagcttctctttcccttgtcaccagacgggcttggacaggagcaccctcatttcctggaccaaaggttttaggtgcagtggtgtggaaggccaggatgtggtccagctgctgagagatgc

SEQ ID NO: 479480 - DNA, 120 bp, Artificial Sequence
  ENSG00000160883_6 (sequence is synthesized)
cattcggaggcagggggcctacaacatcgacgtggttgctgtggtgaacgacacagtgggcaccatgatgggctgtgagccgggggtcaggccgtgtgaggttgggctagttgtagacac

SEQ ID NO: 479481 - DNA, 120 bp, Artificial Sequence
  ENSG00000160883_7 (sequence is synthesized)
gggcaccaacgcgtgttacatggaggaggcacggcatgtggcagtgctggacgaagaccggggccgcgtctgcgtcagcgtcgagtggggctccttcagcgatgatggggcgctgggacc

SEQ ID NO: 479482 - DNA, 120 bp, Artificial Sequence
  ENSG00000160883_8 (sequence is synthesized)
agtgctgaccaccttcgaccataccctggaccatgagtccctgaatcctggtgctcagaggtttgagaagatgatcggaggcctgtacctgggtgagctggtgcggctggtgctggctca

SEQ ID NO: 479483 - DNA, 120 bp, Artificial Sequence
  ENSG00000160883_9 (sequence is synthesized)
cttggcccggtgtggggtcctctttggtggctgcacctcccctgccctgctgagccaaggcagcatcctcctggaacacgtggctgagatggaggacccctctactggggcagcccgtgt

SEQ ID NO: 479484 - DNA, 120 bp, Artificial Sequence
  ENSG00000160883_10 (sequence is synthesized)
ccatgctatcctgcaggacttgggcctgagccctggggcttcggatgttgagcttgtgcagcacgtctgtgcggccgtgtgcacgcgggctgcccagctctgtgctgccgccctggccgc

SEQ ID NO: 479485 - DNA, 120 bp, Artificial Sequence
  ENSG00000160883_11 (sequence is synthesized)
tgttctctcctgcctccagcacagccgggagcaacaaacactccaggttgctgtggccaccggaggccgagtgtgtgagcggcaccccaggttctgcagcgtcctgcaggggacagtgat

SEQ ID NO: 479486 - DNA, 120 bp, Artificial Sequence
  ENSG00000160883_12 (sequence is synthesized)
gctgcccgtctggctgcccaccggcgcctgctggaggagaccctggccccattccggttgaaccatgatcaactggctgcggttcaggcacagatgcggaaggccatggccaaggggctc

SEQ ID NO: 479487 - DNA, 120 bp, Artificial Sequence
  ENSG00000160883_13 (sequence is synthesized)
cgaggggaggcctcctcccttcgcatgctgcccactttcgtccgggccacccctgacggcagcgagcgaggggatttcctggccctggacctcgggggcacgaacttccgtgtcctcctg

SEQ ID NO: 479488 - DNA, 120 bp, Artificial Sequence
  ENSG00000160883_14 (sequence is synthesized)
gtacgtgtgaccacaggcgtgcagatcaccagcgagatctactccattcccgagactgtggcccagggttctgggcagcagctctttgaccacatcgtggactgcatcgtggacttccag

SEQ ID NO: 479489 - DNA, 120 bp, Artificial Sequence
  ENSG00000160883_15 (sequence is synthesized)
cagaagcagggcctgagcgggcagagcctcccactgggttttaccttctccttcccatgtaggcagcttggcctagaccagggcatcctcctgaactggaccaagggtttcaaggcatca

SEQ ID NO: 479490 - DNA, 120 bp, Artificial Sequence
  ENSG00000160883_16 (sequence is synthesized)
gactgcgagggccaagatgtcgtgagtctgttgcgggaagccatcactcgcagacaggcagtggagctgaatgtggttgccattgtcaatgacacggtggggaccatgatgtcctgtggc

SEQ ID NO: 479491 - DNA, 120 bp, Artificial Sequence
  ENSG00000160883_17 (sequence is synthesized)
tatgaggacccccgttgcgagataggcctcattgtcggaaccggcaccaatgcctgctacatggaggagctccggaatgtggcgggcgtgcctggggactcaggccgcatgtgcatcaac

SEQ ID NO: 479492 - DNA, 120 bp, Artificial Sequence
  ENSG00000160883_18 (sequence is synthesized)
atggagtggggcgcctttggggacgatggctctctggccatgctcagcacccgctttgatgcaagtgtggaccaggcgtccatcaaccccggcaagcagaggtttgaaaagatgatcagc

SEQ ID NO: 479493 - DNA, 120 bp, Artificial Sequence
  ENSG00000160883_19 (sequence is synthesized)
ggcatgtacctgggggagatcgtccgccacatccttttacatttaaccagccttggcgttctcttccggggccagcagatccagcgccttcagaccagggacatcttcaagaccaagttc

SEQ ID NO: 479494 - DNA, 120 bp, Artificial Sequence
  ENSG00000160883_20 (sequence is synthesized)
ctctctgagatcgaaagtgacagcctggccctgcggcaggtccgagccatcctagaggatctggggctacccctgacctcagatgacgccctgatggtgctagaggtgtgccaggctgtg

SEQ ID NO: 479495 - DNA, 120 bp, Artificial Sequence
  ENSG00000160883_21 (sequence is synthesized)
tcccagagggctgcccagctctgtggggcgggtgtagctgccgtggtggagaagatccgggagaaccggggcctggaagagctggcagtgtctgtgggggtggatggaacgctctacaag

SEQ ID NO: 479496 - DNA, 120 bp, Artificial Sequence
  ENSG00000160883_22 (sequence is synthesized)
ctgcacccgcgcttctccagcctggtggcggccacagtgcgggagctggcccctcgctgtgtggtcacgttcctgcagtcagaggatgggtccggcaaaggtgcggccctggtcaccgct

SEQ ID NO: 479497 - DNA, 120 bp, Artificial Sequence
  ENSG00000160883_23 (sequence is synthesized)
gttgcctgccgccttgcgcagttgactcgtgtctgaggaaacctccaggctgaggaggtctccgccgcagccttgctggagccgggtcggggtctgcctgtttcccagccaggcccagcc

SEQ ID NO: 479498 - DNA, 120 bp, Artificial Sequence
  ENSG00000160883_24 (sequence is synthesized)
acccaggactcctgggacatcccatgtgtgacccctctgcggccatttggccttgctccctggctttccctgagagaagtagcactcaggttagcaatatatatatataatttatttaca

SEQ ID NO: 479499 - DNA, 120 bp, Artificial Sequence
  ENSG00000160886_0 (sequence is synthesized)
gagttatcagaggtgagcccgtgctcttcagcggagaagatcccctacctggccgccggccactttctgtgggccgtggggtcctcaaggagacggcccttgggctcaggggctgcgttt

SEQ ID NO: 479500 - DNA, 120 bp, Artificial Sequence
  ENSG00000160886_1 (sequence is synthesized)
ccacacgcgcctttcccagggctcccgcgcccgttcctgcctggccgccggccgctccaacagcagcacaaggcgggactcagaaccggcgttcagggccgccagcggccgcgaggccct

SEQ ID NO: 479501 - DNA, 80 bp, Artificial Sequence
  ENSG00000160886_2 (sequence is synthesized)
gagatgaggctccaaagaccccgacaggccccggcgggtgggaggcgcgcgccccggggcgggcggggctccccctaccg

SEQ ID NO: 479502 - DNA, 120 bp, Artificial Sequence
  ENSG00000160886_3 (sequence is synthesized)
cagaagggcggggagggggcgccgcgcgctgaccctccctgggcaccgctggggacgatggcgctgctcgccttgctgctggtcgtggccctaccgcgggtgtggacagacgccaacctg

SEQ ID NO: 479503 - DNA, 120 bp, Artificial Sequence
  ENSG00000160886_4 (sequence is synthesized)
actgcgagacaacgagatccagaggactcccagcgaacggacgagggtgacaatagagtgtggtgtcatgtttgtgagagagaaaacactttcgagtgccagaacccaaggaggtgcaaa

SEQ ID NO: 479504 - DNA, 120 bp, Artificial Sequence
  ENSG00000160886_5 (sequence is synthesized)
tggacagagccatactgcgttatagcggccgtgaaaatatttccacgttttttcatggttgcgaagcagtgctccgctggttgtgcagcgatggagagacccaagccagaggagaagcgg

SEQ ID NO: 479505 - DNA, 120 bp, Artificial Sequence
  ENSG00000160886_6 (sequence is synthesized)
tttctcctggaagagcccatgcccttcttttacctcaagtgttgtaaaattcgctactgcaatttagaggggccacctatcaactcatcagtgttcaaagaatatgctgggagcatgggt

SEQ ID NO: 479506 - DNA, 120 bp, Artificial Sequence
  ENSG00000160886_7 (sequence is synthesized)
gagagctgtggtgggctgtggctggccatcctcctgctgctggcctccattgcagccggcctcagcctgtcttgagccacgggactgccacagactgagccttccggagcatggactcgc

SEQ ID NO: 479507 - DNA, 120 bp, Artificial Sequence
  ENSG00000160886_8 (sequence is synthesized)
tccagaccgttgtcacctgttgcattaaacttgttttctgttgattacctcttggtttgacttcccagggtcttgggatgggagagtggggatcaggtgcagttggctcttaaccctcaa

SEQ ID NO: 479508 - DNA, 120 bp, Artificial Sequence
  ENSG00000160886_9 (sequence is synthesized)
gggttctttaactcacattcagaggaagtccagatctcctgagtagtgattttggtgacaagtttttctctttgaaatcaaaccttgtaactcatttattgctgatggccactcttttcc

SEQ ID NO: 479509 - DNA, 120 bp, Artificial Sequence
  ENSG00000160886_10 (sequence is synthesized)
ttgactcccctctgcctctgagggcttcagtattgatggggagggaggcctaagtaccactcatggagagtatgtgctgagatgcttccgacctttcaggtgacgcaggaacactggggg

SEQ ID NO: 479510 - DNA, 120 bp, Artificial Sequence
  ENSG00000160886_11 (sequence is synthesized)
gagtgaaggactcctcagcatggggggcagtggggcacacgttagggctgcccccattccagtggtggaggcgctgtggatggctgcttttcctcaacctttcctaccagattccaggag

SEQ ID NO: 479511 - DNA, 120 bp, Artificial Sequence
  ENSG00000160886_12 (sequence is synthesized)
gcagaagataactaattgtgttgaagaaacttagacttcacccaccagctggcacaggtgcacagattcataaattcccacacgtgtgtgttcaacatctgaaacttaggccaagtagag

SEQ ID NO: 479512 - DNA, 120 bp, Artificial Sequence
  ENSG00000160886_13 (sequence is synthesized)
agcatcagggtaaatggcgttcatttctctgttaagatgcagccatccatggggagctgagaaatcagactcaaagttccaccaaaaacaaatacaaggggacttcaaaagttcacgaaa

SEQ ID NO: 479513 - DNA, 120 bp, Artificial Sequence
  ENSG00000160886_14 (sequence is synthesized)
aaattgaattaaaagataaaaattaaaaaatgttttatttctcagcatgagctccatcaaggtcgagacgcttctgcaagtaatggtaccagccattcagttcatccctaaagaattggg

SEQ ID NO: 479514 - DNA, 120 bp, Artificial Sequence
  ENSG00000160886_15 (sequence is synthesized)
caccctgggaatttaaccatgccacttcagtctttgtgacgttattaactgaagaaaagtgggtgccctttaaagattttttaaaattataaaacagaagtaaccaaatcaggcctggaa

SEQ ID NO: 479515 - DNA, 120 bp, Artificial Sequence
  ENSG00000160886_16 (sequence is synthesized)
ggtgtatgcctagtgatttcccattgaaactctcacaaaactggccttgtttgatgagaggaatgagcaggagcattgtcatggtggagaagggctctctggtgaagctttccggggtga

SEQ ID NO: 479516 - DNA, 120 bp, Artificial Sequence
  ENSG00000160886_17 (sequence is synthesized)
cgatttcctgggtgttttcctgctaaatcgttggctgactttctctatacactctcataataagatgttactgttctttggccctccagaaagtcaataagcaagatgccttgagcattc

SEQ ID NO: 479517 - DNA, 120 bp, Artificial Sequence
  ENSG00000160886_18 (sequence is synthesized)
acaaaacggttgccacgacctttgcccttgacatgtctgcttttactctgatgggaccacgcccacctctaggtagtcattgctttgcttgtgctttgccttcaggagtgtactggttaa

SEQ ID NO: 479518 - DNA, 120 bp, Artificial Sequence
  ENSG00000160886_19 (sequence is synthesized)
gccacatttcatctccggctataattatatgaagaaatgcttcaggatcttgattccacttgtttaaaatggccatagaacgcttttctcttatctgcagctgagctgggagaaagtttt

SEQ ID NO: 479519 - DNA, 120 bp, Artificial Sequence
  ENSG00000160886_20 (sequence is synthesized)
ggcacccaccgagtggacagtttactcaactttaatttcagtcagaattgtgtaagctgaacaccttgggatacctacagcgttggctattgtttctgctgctattaatcagtcctctta

SEQ ID NO: 479520 - DNA, 120 bp, Artificial Sequence
  ENSG00000160886_21 (sequence is synthesized)
aattagggcacaaacaagatgaattgtttcctcacagactgatgtggctggcctgctgctgtggacttcctctccaacatcatctcttctcttcttccaatgagttatccacttacttaa

SEQ ID NO: 479521 - DNA, 120 bp, Artificial Sequence
  ENSG00000160886_22 (sequence is synthesized)
cgttatagcggccgtgaggagatcttcagggctcgtgaattctgattccgcccagcagtcactctccagcccttcggtatccacgaagttggtggggtgctgaggtgatgcttcagactc

SEQ ID NO: 479522 - DNA, 120 bp, Artificial Sequence
  ENSG00000160886_23 (sequence is synthesized)
agtgtggcccacatcgactttataacttaatatggcaaaatgatttgtacagtgatgtataagatgaagtgtggtcatgagacaagacccccagctcagagtcgagccaggcccaccaag

SEQ ID NO: 479523 - DNA, 120 bp, Artificial Sequence
  ENSG00000160886_24 (sequence is synthesized)
ggacagagccatactgcgttatagcggccgtgagtgagtatcttcgctcttgttggggacccaaaggcaggtgaacagagggctttcaggaatcagggctgtctagttttcctcaatggg

SEQ ID NO: 479524 - DNA, 90 bp, Artificial Sequence
  ENSG00000160886_25 (sequence is synthesized)
ggctttcaggaatcagggctgtctagttttcctcaatggggaataactaatagaaagtagcctttttttttttttattttctgagacgga

SEQ ID NO: 479525 - DNA, 64 bp, Artificial Sequence
  ENSG00000160886_26 (sequence is synthesized)
gctcactgcaacctggatgcgcgccaccacactggctaattttttatttttagtagaggtgggg

SEQ ID NO: 479526 - DNA, 120 bp, Artificial Sequence
  ENSG00000160886_27 (sequence is synthesized)
gggattacaagcgtaagccaccgcgccctgcctttttttccctttaaaatgtgaagagcaaagtcctcagaggccagagagaggtgtaggaactgtgctagtgtaaggcagtgcctgcta

SEQ ID NO: 479527 - DNA, 120 bp, Artificial Sequence
  ENSG00000160886_28 (sequence is synthesized)
tgtaggaactgtgctagtgtaaggcagtgcctgctacagtgggtccagatgaaatactgggaggtaggaagaaaatctggatttcatatcatccatttttaaatgaaaaattaagcttta

SEQ ID NO: 479528 - DNA, 120 bp, Artificial Sequence
  ENSG00000160886_29 (sequence is synthesized)
atagtgttaaatgcgccacagagaacagtgtctatgtcactcttacaagagatgcacaaaaccaaggtgtacagccttcaagtgtgttctcaaaggagggtgcatgccttaaaaattgtg

SEQ ID NO: 479529 - DNA, 120 bp, Artificial Sequence
  ENSG00000160886_30 (sequence is synthesized)
aacccctagacccgcattcccagtgcatatggacaggccataccacgcagaagccagcccttccctgaagcagcattcaacacacaggcctggccctcgtcctcccgactcccccttggt

SEQ ID NO: 479530 - DNA, 120 bp, Artificial Sequence
  ENSG00000160886_31 (sequence is synthesized)
gccccagttgactgtgcacctttgagcagggccgccaggggtgaggctttgacccagacagaagggcctcggtgtcaggcattggaattgcgtgattgccttctctcggtctttatttcc

SEQ ID NO: 479531 - DNA, 120 bp, Artificial Sequence
  ENSG00000160888_0 (sequence is synthesized)
agccctctcgtgccgcaccgtagggggcggtgtcggagttctgtctgggcctattcgggtccgagttcggaatttcggttcaaggcccagttcctcggattgttcctgcgcaacttcagt

SEQ ID NO: 479532 - DNA, 120 bp, Artificial Sequence
  ENSG00000160888_1 (sequence is synthesized)
ttcccttccaggcacgggcaatgagtgtttggccgcgacgagttggaaagcccggatgcgtccttcggttgggcggggtgtctcagtgacgtcactgggggtataaaagggcctgggtgg

SEQ ID NO: 479533 - DNA, 120 bp, Artificial Sequence
  ENSG00000160888_2 (sequence is synthesized)
cgggcgcctgggcagagcgtcctagcagtgtcactgcgtgggttggtttgtgtagagaggcgtgagcgagcccgttgtccggagtgcacctgctgcctgttctgtccctcccgggagccc

SEQ ID NO: 479534 - DNA, 120 bp, Artificial Sequence
  ENSG00000160888_3 (sequence is synthesized)
ccgccgctgtcgccgtcgagtcgccatggaagtgcagaaagaggcacagcgcatcatgaccctgtcggtgtggaagatgtatcactcccgcatgcagcgcggtggcctgcggctgcaccg

SEQ ID NO: 479535 - DNA, 120 bp, Artificial Sequence
  ENSG00000160888_4 (sequence is synthesized)
gagtctgcagctgtcgctggtcatgcgcagcgcccgggagctctacctctcggccaaggtggaggccctcgagcccgaggtgtcgttgccggccgccctcccctctgaccctcgcctgca

SEQ ID NO: 479536 - DNA, 120 bp, Artificial Sequence
  ENSG00000160888_5 (sequence is synthesized)
cccgccccgagaagccgagtccacggccgagacagcgacccccgacggtgagcacccgtttccggagccaatggacacgcaggaggcgccgacagccgaggagacctccgcctgctgtgc

SEQ ID NO: 479537 - DNA, 120 bp, Artificial Sequence
  ENSG00000160888_6 (sequence is synthesized)
cccgcgccccgccaaagtcagccgcaaacgacgcagcagcagcctgagcgacggcggggacgctggactggtcccgagcaagaaagcccgtctggaagaaaaggaagaagaggagggagc

SEQ ID NO: 479538 - DNA, 120 bp, Artificial Sequence
  ENSG00000160888_7 (sequence is synthesized)
gtcatccgaagtcgccgatcgcctgcagccccctccggcgcaagcggagggcgcctttcccaacctggcccgcgtcctgcagaggcgcttctccggcctcctgaactgcagccccgcggc

SEQ ID NO: 479539 - DNA, 120 bp, Artificial Sequence
  ENSG00000160888_8 (sequence is synthesized)
ctcgtgcgggccgtggtggccttctgaggaccccgagcggcgctgccggagcccagagcgcgcgtcgaaccgtcggcccgagggcgcagacctgaggcgaggccacccccctccatcctg

SEQ ID NO: 479540 - DNA, 120 bp, Artificial Sequence
  ENSG00000160888_9 (sequence is synthesized)
ggggaagcgcccgcgaaaaccgtggagagaagccgccgcccgggctgctgagaggcccggagagggactctgtccccggggagccatcgccttcagtgtgcagggacggcaccgaggagt

SEQ ID NO: 479541 - DNA, 120 bp, Artificial Sequence
  ENSG00000160888_10 (sequence is synthesized)
ctgagccgggggcgcgggcgccttccgcagagacctgcgcccacaggtgctgtcttagtggactgggacgtgaacctttcgctctccttctggactgggagaagggaggcttgggtgttg

SEQ ID NO: 479542 - DNA, 120 bp, Artificial Sequence
  ENSG00000160888_11 (sequence is synthesized)
tgttttttgttttgtttgtttgtttgtttttaaagatctcctcagggtcggacttcattttgtactgtgggctgtgctggccctttcaaggtttttcaagagttggttttgcgtttccaa

SEQ ID NO: 479543 - DNA, 120 bp, Artificial Sequence
  ENSG00000160888_12 (sequence is synthesized)
cctcggagaattccaggcactccccttccccctccgctgacatacttgtataagcggtcatcgttgcgtcatggggcaggcgtggggagcttcctgtcgccttgcgtgggtgtggggcct

SEQ ID NO: 479544 - DNA, 120 bp, Artificial Sequence
  ENSG00000160888_13 (sequence is synthesized)
gggaggaggtcctggggcgtgcacccgccctgggcagtggggaggagagtggcctgagttacttcacccccgcgtgctgctggttaatgtcccgcgtctctgcaccttcgggtgggagcg

SEQ ID NO: 479545 - DNA, 120 bp, Artificial Sequence
  ENSG00000160888_14 (sequence is synthesized)
gggactgatctactttcacattctcaagtttttctcatctgcattagaggtgcccagtaggttcccaggttccagcgtgcccctccctcagacacacggacacaatcagccgagaagttc

SEQ ID NO: 479546 - DNA, 120 bp, Artificial Sequence
  ENSG00000160888_15 (sequence is synthesized)
ctggtctgaatcacgagaatgtggaggggtggggggtgtcagtggaaaggcataaggctgagctgagaccagttgctggtgaaactgggccaatctggggaggggaacatccttgccagg

SEQ ID NO: 479547 - DNA, 120 bp, Artificial Sequence
  ENSG00000160888_16 (sequence is synthesized)
gagtttctgagggtctgctttgtttacctttcgtgcggtggattctttttaactccgtctacctggcgttttgttagaaatgtcagataggaaaataaaaaccatttgagtaaaaaagcc

SEQ ID NO: 479548 - DNA, 120 bp, Artificial Sequence
  ENSG00000160888_17 (sequence is synthesized)
gggggcggggggcgcaccaccccttaaagggcccgcaccaggaatgaatggagccattcgaacaattctgcatcctatttttggaggaagtggaattagtatttcttggagagacggcgc

SEQ ID NO: 479549 - DNA, 120 bp, Artificial Sequence
  ENSG00000160888_18 (sequence is synthesized)
gtagcggagggtagggcggagattttctatctgctctgtctctgcattgctgggtttccagctcccaacctaaccccgcctccccgaacgcggagacggaactcggcccccttgtttggg

SEQ ID NO: 479550 - DNA, 120 bp, Artificial Sequence
  ENSG00000160888_19 (sequence is synthesized)
gggcggcagccacgtgttcacggggactgtcgtgcgcgccgggttcgcagccgtgcgagctctgaacccacccgtggagctcctgtcgcgggaaactgcgggggaatggcttggtacgaa

SEQ ID NO: 479551 - DNA, 120 bp, Artificial Sequence
  ENSG00000160888_20 (sequence is synthesized)
tcacgggaacccgtagcccggggcgggtcaccgcctacaagcaagggctggcgtacgctagagaccgaagagctggaggccccagtggccccctttcacagcagtagcaaatattgtttg

SEQ ID NO: 479552 - DNA, 120 bp, Artificial Sequence
  ENSG00000160888_21 (sequence is synthesized)
tttagtaaatattggcctagtgactctgccttggtttccccacttgaaggaagcagatagaacagtatcctccgaggagtggaggctggggatcggtgaattattgataaaaggagagct

SEQ ID NO: 479553 - DNA, 120 bp, Artificial Sequence
  ENSG00000160888_22 (sequence is synthesized)
cttaacctagcctggcacgttgtaagcgctgttagcatgattattggtgcagaaaacactcattagacacacctggtaaatgctaagaacagtggccacaggggatgttcaggctggaac

SEQ ID NO: 479554 - DNA, 120 bp, Artificial Sequence
  ENSG00000160888_23 (sequence is synthesized)
cagggtcttcccctgtgtgaagggaaacttgctgcccacgacccactggggcctccagacgggagcatgtgggtaggccgtgagctccacccccggcccccctcccttgggccaaggcgc

SEQ ID NO: 479555 - DNA, 120 bp, Artificial Sequence
  ENSG00000160888_24 (sequence is synthesized)
tgatgcatcggcggggctcagagaaaggagcccacccagaaagctcagcgtggagtcgggggacgctcctcctcgccagggttcccgtcccctttccctgctgggtaaatcgcattctgt

SEQ ID NO: 479556 - DNA, 120 bp, Artificial Sequence
  ENSG00000160908_0 (sequence is synthesized)
gttttcggttgtttgaccgagagagttgtaggcgcaaagctgaggaaaggagagtgtggagaggggcctggtgtggtggggcccggtgtttgggaccggagggtgttgacggctgatgag

SEQ ID NO: 479557 - DNA, 120 bp, Artificial Sequence
  ENSG00000160908_1 (sequence is synthesized)
ttccttgggtttgctctttcttcacctgaaaagaagactccaggaagggcagcacatgccggagaaagatgaattccagcttgaccgcccagaggcgcggcagtgacgccgagttgggac

SEQ ID NO: 479558 - DNA, 120 bp, Artificial Sequence
  ENSG00000160908_2 (sequence is synthesized)
cctgggtgatggctgcgaggtccaaggacgcggcgccgtcccaacgcgacggacttttgcccgtgaaagtggaggaagactcacccggaagttgggagcccaactatcccgcggcttcgc

SEQ ID NO: 479559 - DNA, 120 bp, Artificial Sequence
  ENSG00000160908_3 (sequence is synthesized)
cggaccccgaaacttctcgactgcactttaggcagctgcgttaccaggaggtggctggaccggaagaggcgctgagccggctccgagaactctgtcgtcggtggctgagacccgagctgc

SEQ ID NO: 479560 - DNA, 120 bp, Artificial Sequence
  ENSG00000160908_4 (sequence is synthesized)
tctccaaggagcagatcctggagctgctggtgctggagcagttcctcaccatcctgcccgaggagcttcaagcctgggtgcgagagcactgcccagagagcggggaggaggcggtggccg

SEQ ID NO: 479561 - DNA, 120 bp, Artificial Sequence
  ENSG00000160908_5 (sequence is synthesized)
tggtgcgggctctgcagcgagcgctcgatggaacctcatcccaggggatggtgactttcgaggacacggctgtgtctctaacctgggaggagtgggagcgcctggacccagcacggaggg

SEQ ID NO: 479562 - DNA, 120 bp, Artificial Sequence
  ENSG00000160908_6 (sequence is synthesized)
acttctgcagagagagtgcgcagaaggattccgggagcacagttccgccgagtttggaaagcagagtggagaacaaagagttgattccaatgcaacaaattttagaagaagcggagccac

SEQ ID NO: 479563 - DNA, 120 bp, Artificial Sequence
  ENSG00000160908_7 (sequence is synthesized)
aggggcaactacaagaagcgttccaggggaagcgccccctgttttctaagtgtggcagtacccatgaggacagggtggaaaagcagtccggagaccccttgcccctgaaacttgaaaatt

SEQ ID NO: 479564 - DNA, 120 bp, Artificial Sequence
  ENSG00000160908_8 (sequence is synthesized)
ctcctgaagcagaaggactcaacagcatctcagatgtcaataagaatggttccatagaaggggaagactctaaaaataatgaattgcagaacagtgccaggtgttccaaccttgttctat

SEQ ID NO: 479565 - DNA, 120 bp, Artificial Sequence
  ENSG00000160908_9 (sequence is synthesized)
agcacatcccgaaagcagagaggcccactgacagtgaggaacacgggaacaagtgcaagcaaagtttccacatggtgacgtggcacgtgctgaaacctcacaagtctgacagtggagaca

SEQ ID NO: 479566 - DNA, 120 bp, Artificial Sequence
  ENSG00000160908_10 (sequence is synthesized)
gtttccatcattccagcctttttgagacccagaggcagctccatgaagaaagaccttataaatgtggtaactgtgggaagagtttcaaacaacgctctgacctctttagacaccagagaa

SEQ ID NO: 479567 - DNA, 120 bp, Artificial Sequence
  ENSG00000160908_11 (sequence is synthesized)
tccacacaggtgagaaaccctatggctgccaagaatgtgggaaaagcttcagccagagtgctgccctgaccaagcaccagaggacacacacaggcgagaagccgtacacctgtctgaaat

SEQ ID NO: 479568 - DNA, 120 bp, Artificial Sequence
  ENSG00000160908_12 (sequence is synthesized)
gtggggagcgcttcaggcagaattcacacctaaatcgtcatcaaagtacccacagtagagacaaacattttaaatgtgaggaatgcggggaaacctgtcatatttccaacctttttagac

SEQ ID NO: 479569 - DNA, 120 bp, Artificial Sequence
  ENSG00000160908_13 (sequence is synthesized)
atcagagactacataaaggggaaagaccctataagtgtgaagaatgcgagaagagcttcaaacagcgctctgacctctttaaacaccacagaatccacactggggagaagccctatggat

SEQ ID NO: 479570 - DNA, 120 bp, Artificial Sequence
  ENSG00000160908_14 (sequence is synthesized)
gttccgtctgtgggaaacgcttcaatcagagtgcaaccctcattaaacaccagagaattcacactggggaaaagccttacaaatgtcttgaatgtggggaaagatttagacaaagtacac

SEQ ID NO: 479571 - DNA, 82 bp, Artificial Sequence
  ENSG00000160908_15 (sequence is synthesized)
aaatgtcttgaatgtggggaaagatttagacaaagtacacaccttatccgacaccaaagaattcatcaaaataaagtgctgt

SEQ ID NO: 479572 - DNA, 120 bp, Artificial Sequence
  ENSG00000160908_16 (sequence is synthesized)
atttgaagtaggtctgtaccttgctgacagcccgcaaacctcgcttatgttgaatttggggcccttaggttttcttcacccgcatcctcgctactctcaccacccactttccaaacaaac

SEQ ID NO: 479573 - DNA, 120 bp, Artificial Sequence
  ENSG00000160908_17 (sequence is synthesized)
ccacctcttgaccaccgcagtcggctcagaaggccgacatcttcaacgtcacacccgcgagtcgcaggggccagctgttcccggaactacatctcccaggaggctggcctggaactcctg

SEQ ID NO: 479574 - DNA, 120 bp, Artificial Sequence
  ENSG00000160908_18 (sequence is synthesized)
caggaggctggcctggaactcctggtctcaagcgatcgtctcattttatgcaagttgcaaatcaccagcagcttgacatcaaccaagacactttgttttagagacagagtcttgctctgt

SEQ ID NO: 479575 - DNA, 120 bp, Artificial Sequence
  ENSG00000160908_19 (sequence is synthesized)
cgatcatatctcactgcagtctttacctcctgggctcaaaggatcctcccacctcagcctcccaagtaagtggtgtatcctgagttggttccttccagtgggttcatcctctcgctgact

SEQ ID NO: 479576 - DNA, 120 bp, Artificial Sequence
  ENSG00000160908_20 (sequence is synthesized)
aaaggtgccgcaaggcctcgatgacgcgcttccggcacgggatgttttcggttgtttgaccgagagagttgtaggcgcaaagctgaggaaaggagagtgtggagaggggcctggtgtggt

SEQ ID NO: 479577 - DNA, 120 bp, Artificial Sequence
  ENSG00000160908_21 (sequence is synthesized)
tccgccgagtgagtgctgttgctctgctggtttattgcggtgtgtggtttgtgaagggctggttcactaccatccctgagccactatgccattcccagacttgggctgagagccttcagg

SEQ ID NO: 479578 - DNA, 120 bp, Artificial Sequence
  ENSG00000160908_22 (sequence is synthesized)
tgccttctgtaacgcaagcaggagcctctgtactgctaggtgctagattcagctttttactttggttcatttttaatgttttatacatacagaaaactatataaaaaaaagataatgacc

SEQ ID NO: 479579 - DNA, 120 bp, Artificial Sequence
  ENSG00000160908_23 (sequence is synthesized)
ctgaaggcttgcccacagaccttacactcaaaaggattctctaaaaagtgaattctttgatgttgatcaaaccatgccttacgcctaatgacttttccacattcactgcattcataagac

SEQ ID NO: 479580 - DNA, 120 bp, Artificial Sequence
  ENSG00000160908_24 (sequence is synthesized)
ttgaagggtttgccatcctcatcatatctgccctgcttccaccttgtttgcgcattctgatcttgaataaggttaaggttttgaaggaagcccctgctgtattcatcaccactagtaggg

SEQ ID NO: 479581 - DNA, 120 bp, Artificial Sequence
  ENSG00000160908_25 (sequence is synthesized)
aaagtaagcctgcaactgtccacaaattctttacacttatgtaacttttctgaaagtttctcagctgattcctgcattaccactgatatcttatatgactctaaatcttcagaaaatttc

SEQ ID NO: 479582 - DNA, 120 bp, Artificial Sequence
  ENSG00000160908_26 (sequence is synthesized)
gtttatcagatcttaatacttggccatattgccaaggaaatagtatgttacagctgtaggtgaggcccccacatagcctccctgaaacccttcccctctatccttctccagaggtagcca

SEQ ID NO: 479583 - DNA, 120 bp, Artificial Sequence
  ENSG00000160908_27 (sequence is synthesized)
gtaagctgactgttgtgttcatgacttccatgcatgtcttatattgtctctacatagacacgtagctccacgctgtatatcattactgtatggctttttttactcaacattacatttttg

SEQ ID NO: 479584 - DNA, 120 bp, Artificial Sequence
  ENSG00000160908_28 (sequence is synthesized)
agatttactcatgttgatgcatggagctctacctatttcacggtccagatactccagaattctctccatttctgttgatggacatttaggtgtcttaagtttttaaccattacagcattg

SEQ ID NO: 479585 - DNA, 120 bp, Artificial Sequence
  ENSG00000160908_29 (sequence is synthesized)
caccgaacattcttgtatattcttgcatatctttgtatatttgtttctatgttggagtttttgaagagaatatgcctagagacaggcagtagtccccccttcctggttttgctttctgcg

SEQ ID NO: 479586 - DNA, 120 bp, Artificial Sequence
  ENSG00000160908_30 (sequence is synthesized)
gtttcacttacccacagtacaatcagatattttaagacagggagagaccacattcacatgacttttattaagtatagcatttgtttttcgttttttatctttggctttgggggttttttt

SEQ ID NO: 479587 - DNA, 120 bp, Artificial Sequence
  ENSG00000160908_31 (sequence is synthesized)
ggcttcagaacctagccaaataacaagaaaagatgtaaatgacctatccactgcagaagaaaaaaaggaagagaaggcaactgttaggggtctaggacaatcaaatgaagctaagaagtg

SEQ ID NO: 479588 - DNA, 82 bp, Artificial Sequence
  ENSG00000160908_32 (sequence is synthesized)
ctgttaggggtctaggacaatcaaatgaagctaagaagtgatctcgtttacatcatcagactcaagaggccaaaactctgaa

SEQ ID NO: 479589 - DNA, 65 bp, Artificial Sequence
  ENSG00000160908_33 (sequence is synthesized)
attctgaatttcattggactcttcactttcataacaaaaacagctctcggcaccaacaaactcac

SEQ ID NO: 479590 - DNA, 120 bp, Artificial Sequence
  ENSG00000160908_34 (sequence is synthesized)
ctttcataacaaaaacagctctcggcaccaacaaactcactataaatgtataggagtgtgtatgccagagaatgtgagagcagagcccatcatcgttattagaaaaacaacttactctag

SEQ ID NO: 479591 - DNA, 120 bp, Artificial Sequence
  ENSG00000160908_35 (sequence is synthesized)
aaacaacttactctaggtactcagtggtgccaaataaatatcaaagaggtagcatgttatgcttcaagatacatgctttttgtttgagacaagcccaggctggagtgcagtggcatgatc

SEQ ID NO: 479592 - DNA, 68 bp, Artificial Sequence
  ENSG00000160908_36 (sequence is synthesized)
gcccatagatacacgtttttaataactctaggtgaaacatctgcttaaaaatggacaaagtataggat

SEQ ID NO: 479593 - DNA, 120 bp, Artificial Sequence
  ENSG00000160908_37 (sequence is synthesized)
taggtgaaacatctgcttaaaaatggacaaagtataggatagcatagaaaaggaaccagagggaagtagggacaaaagccaactgaatagagcaatgggtctcaactaggggtgaacagg

SEQ ID NO: 479594 - DNA, 120 bp, Artificial Sequence
  ENSG00000160908_38 (sequence is synthesized)
gtttggacaatgtctggagacatttctggttgtcacacctggggaggttcaactggcatctagtggatgcaggccagggctgctactcaacatcctaaaatgcacaggacatgccccatc

SEQ ID NO: 479595 - DNA, 120 bp, Artificial Sequence
  ENSG00000160908_39 (sequence is synthesized)
ctgtccccaaagaattcgtcagcccaaaacgtcagtagtgccatggaggagaaaccttggatgtgaaaaacaggagcagctgcatcgggacacaataagggactaagggcttgcacagac

SEQ ID NO: 479596 - DNA, 120 bp, Artificial Sequence
  ENSG00000160908_40 (sequence is synthesized)
actcagaacacagacaaagcccaatcttcaagccgtgtcctacccagcaagaccatgttcctgtagttctccaacatcacatctcggtagaggtccttctgaccccagttgaggtggccc

SEQ ID NO: 479597 - DNA, 120 bp, Artificial Sequence
  ENSG00000160908_41 (sequence is synthesized)
cactcctctctggtgaagtacatcgccacatcctcaaacgagagcagctcctggaaaagtagctgataaaggtaagagttgatctcccagcacagaaaacagcacctggagtgtacagca

SEQ ID NO: 479598 - DNA, 120 bp, Artificial Sequence
  ENSG00000160908_42 (sequence is synthesized)
agatactgcacaaaggacttcacagggtgtttttcattgaatcttcacaactcgctgtgataggcactctcactgacccattttacagaaaagaaaactggagccagagtgtttatgtaa

SEQ ID NO: 479599 - DNA, 120 bp, Artificial Sequence
  ENSG00000160908_43 (sequence is synthesized)
ctgaaggaagcccatgtgactccagaggctaagctctctacattgcactgtctaagaaggaaaactccccacattgatcaagagggctcagtctgaggaaggagctgctggtggcagtga

SEQ ID NO: 479600 - DNA, 120 bp, Artificial Sequence
  ENSG00000160908_44 (sequence is synthesized)
ctatgctgatgaagcagagggggaggcacagctcaccttccccctggctggtgggaacatggcttccacggcctggtcttttgcaaggggtgggatcctggacgtctggctgagctggag

SEQ ID NO: 479601 - DNA, 120 bp, Artificial Sequence
  ENSG00000160908_45 (sequence is synthesized)
aagaaaaaaagtcagtaaggccagccctaatttgaagctctcttggttggcagatctgggacccggaattccaacggggcacacagacaaagcttaatacaaagtccctgtgtttggtgt

SEQ ID NO: 479602 - DNA, 120 bp, Artificial Sequence
  ENSG00000160908_46 (sequence is synthesized)
tggaacatgtgatgaaatgcatgagccgctacaataagtctagtaatttcaatttcccaagctccatccaagagaacctgcagccctgccctccccttctccctagaacatgtcatactc

SEQ ID NO: 479603 - DNA, 120 bp, Artificial Sequence
  ENSG00000160908_47 (sequence is synthesized)
cagccctgccctccccttctccctagaacatgtcatactctgcacctcatatacaaagggacagcagatagaccacatataaacatagcactctggccaggcacggtggctcacgcctat

SEQ ID NO: 479604 - DNA, 68 bp, Artificial Sequence
  ENSG00000160908_48 (sequence is synthesized)
ggcgggtttctctactaaaatacaaaaaattacctgggcgaggtggcaggcacctgtactcccagcta

SEQ ID NO: 479605 - DNA, 120 bp, Artificial Sequence
  ENSG00000160908_49 (sequence is synthesized)
atagcactctgatccacaccctgcagcaaccagctctggaagccaaaccatagcctctgaggcatgggccccaaatcaggacttgatcaataacagctttatccaaaattttgctcccca

SEQ ID NO: 479606 - DNA, 120 bp, Artificial Sequence
  ENSG00000160908_50 (sequence is synthesized)
ctccctttaatttaggaccaacaggagaaagccaaatgctcccctcccctatcacacaggatgtccgagtctagttatcctagggattccagttcaccagcttttctttctctaaatcta

SEQ ID NO: 479607 - DNA, 120 bp, Artificial Sequence
  ENSG00000160908_51 (sequence is synthesized)
cttacgtatttccaaccctgctcctacagccagctccacctgctgacaagccccctctgaaagtgttctaaaggggtcactcaaccctcacctctagcctggtgatttgctagcaggatt

SEQ ID NO: 479608 - DNA, 120 bp, Artificial Sequence
  ENSG00000160908_52 (sequence is synthesized)
atttgctagcaggattcagcaacagtaacaattacagacttgatttttttttttttttaaacagagtttcactcttgttgtgcaggctggagtacaatggtgtgatctctgctcactgca

SEQ ID NO: 479609 - DNA, 70 bp, Artificial Sequence
  ENSG00000160908_53 (sequence is synthesized)
gacttgctttctaactcaggatgaattttaatgaaattcactttcattttaatggatgcccctcaaacac

SEQ ID NO: 479610 - DNA, 120 bp, Artificial Sequence
  ENSG00000160908_54 (sequence is synthesized)
atgaaattcactttcattttaatggatgcccctcaaacacagttcaccttccctgaaaacagtttagaagaccctttgcctttctttttttttttgaggagtctccctctatcacccagg

SEQ ID NO: 479611 - DNA, 120 bp, Artificial Sequence
  ENSG00000160908_55 (sequence is synthesized)
agtgcagtggtgtaatcatggctcactgtagcttccaactcctgggcttaagcaatgctcctgcctcagtctcctaagcagatgggactgcaagagtgcaccaccacgcccagttgtttg

SEQ ID NO: 479612 - DNA, 120 bp, Artificial Sequence
  ENSG00000160908_56 (sequence is synthesized)
tttgtagttcttttgtaggtggggccttgctatgttgcccagggtggaccctctgccttttaagcaaagaggtacactctaaaaactatcctgatcaatggctccaaggctggagcaaag

SEQ ID NO: 479613 - DNA, 120 bp, Artificial Sequence
  ENSG00000160908_57 (sequence is synthesized)
gcctcatccctttcattctctacaccaaacttgtccaaacctcagcctgtggaccgcatatggcccaggacgactttgaatccaacccaacacaaattcgtaaactttcttttttttttt

SEQ ID NO: 479614 - DNA, 120 bp, Artificial Sequence
  ENSG00000160908_58 (sequence is synthesized)
ttacaggcgtgagccaccgcgcccggctcgtaaactttcttaaaaccttatgaaattgttttgcgatttttttttagctcatgagctatttttagtgtttgtgtattttatgtgtagtcc

SEQ ID NO: 479615 - DNA, 120 bp, Artificial Sequence
  ENSG00000160908_59 (sequence is synthesized)
cttccaatgtggcccagggaagccaagagattggacacccctgcactatatttactgaatgtgtttgtgaaggctgtgcatctgaatgtcagacttgctaatgaaaaattaaatggagtc

SEQ ID NO: 479616 - DNA, 120 bp, Artificial Sequence
  ENSG00000160908_60 (sequence is synthesized)
acttgctaatgaaaaattaaatggagtccatgttttgggtacggccctaggccaaccacccacagccatgtaaggcatttaaaatacattgatttctcccttgagttcaggagttggaga

SEQ ID NO: 479617 - DNA, 120 bp, Artificial Sequence
  ENSG00000160908_61 (sequence is synthesized)
gttcaggagttggagactgcaatgagctatgatggcaccactacactccaccctgggtgacagagcaagaccctgtctctcttaaaaacaacaggccgggcgtggtggctcacacctgta

SEQ ID NO: 479618 - DNA, 120 bp, Artificial Sequence
  ENSG00000160917_0 (sequence is synthesized)
ggcatccctcgggcggcggcggcggcggcggcgaggcgaagcgaaggaggagtgtgtgcggcggggccggcggcgggtaaaggcgagaaggctgcaggagaccgagggggagccgggccg

SEQ ID NO: 479619 - DNA, 120 bp, Artificial Sequence
  ENSG00000160917_1 (sequence is synthesized)
gtggggccgccgccgccgccatgcaggaaatcatcgccagcgtggaccacatcaagtttgacttggagatcgcggtggagcagcagctgggggcgcagccgctgcccttccccggcatgg

SEQ ID NO: 479620 - DNA, 120 bp, Artificial Sequence
  ENSG00000160917_2 (sequence is synthesized)
acaagtcgggcgctgctgtctgtgaattctttttgaaagctgcctgcggcaaagggggcatgtgtccgtttcgccacatcagtggtgagaagacagttgtgtgcaaacactggctgcgtg

SEQ ID NO: 479621 - DNA, 120 bp, Artificial Sequence
  ENSG00000160917_3 (sequence is synthesized)
gcctatgcaagaaaggggaccagtgtgagttcctgcatgagtatgacatgaccaagatgcccgagtgctacttctactccaagttcggggagtgcagcaacaaggaatgtcccttcctgc

SEQ ID NO: 479622 - DNA, 120 bp, Artificial Sequence
  ENSG00000160917_4 (sequence is synthesized)
acatcgaccccgagtccaagatcaaggactgtccttggtatgaccgtggcttctgcaagcacggtcccctctgcaggcaccggcacacacggagagtcatctgtgtgaattacctcgtgg

SEQ ID NO: 479623 - DNA, 120 bp, Artificial Sequence
  ENSG00000160917_5 (sequence is synthesized)
gattctgcccggaggggccctcgtgtaaattcatgcaccctcgatttgaactgcccatgggaaccaccgagcagcccccactgccgcagcagacacagcctccagcaaagcaaagtaaca

SEQ ID NO: 479624 - DNA, 120 bp, Artificial Sequence
  ENSG00000160917_6 (sequence is synthesized)
atccgccattacaaaggtcgtcctccttgatccagttaacgagtcagaactcttctcccaatcagcagagaaccccgcaggtcatcggggtcatgcagagtcaaaacagcagcgcgggca

SEQ ID NO: 479625 - DNA, 120 bp, Artificial Sequence
  ENSG00000160917_7 (sequence is synthesized)
caggtcacctgttacaagtgtggcgagaaaggacactacgccaacagatgcaccaaagggcacttggcctttctcagtggacagtgacagcagctggagccagctccgagcagcccgggg

SEQ ID NO: 479626 - DNA, 120 bp, Artificial Sequence
  ENSG00000160917_8 (sequence is synthesized)
gccccgctgttgggagtgtgcatttaactgtttcatgcgcttgttggcgcgactgtggctcgagctggcccgcagacacgtgggtttcatcactctgaggggccacgtctgttagtttcc

SEQ ID NO: 479627 - DNA, 120 bp, Artificial Sequence
  ENSG00000160917_9 (sequence is synthesized)
tatcattttgccttagtattttttgaaaaagggacatgtgtcctgtgggtccctgcagtcgacatcatgtttggctgggcatcgatgcctcctttctgggactcccggcacaactcccct

SEQ ID NO: 479628 - DNA, 120 bp, Artificial Sequence
  ENSG00000160917_10 (sequence is synthesized)
catccagggagggaggcagctgctggggaggggcttggctaggtagttctgtgtggcggtggtcattcccctcattaaacaccagttcttggtgacgccaggggctggtaggtcattcaa

SEQ ID NO: 479629 - DNA, 120 bp, Artificial Sequence
  ENSG00000160917_11 (sequence is synthesized)
agctgtggccagctcacgcctgcttcctccctccctgccctgctgaatcctaaagctgtgcctatatctgtgatttgaatgagggagccctttggggcaaattcaggtgcccccattgcc

SEQ ID NO: 479630 - DNA, 120 bp, Artificial Sequence
  ENSG00000160917_12 (sequence is synthesized)
tcaggctggccctggtcccaggtggcagcggttgaggaggggtacagggctctcaagcctgaggttttcttctctgggcttaattttctcttggggtacgtgcctgacagtgtttaaggt

SEQ ID NO: 479631 - DNA, 120 bp, Artificial Sequence
  ENSG00000160917_13 (sequence is synthesized)
gtccgttgaactggagttgcagacttttaaatagatgaccccttcagatcatctgtgcctacctcctgcccatcaggcgtctacactgtcactcagacacctgtggcatgtggaggagac

SEQ ID NO: 479632 - DNA, 120 bp, Artificial Sequence
  ENSG00000160917_14 (sequence is synthesized)
tgccctgtcctgagcctggaaaatgtgaaactgtctcctgcaacctgctgggcatgtgggcctggctgtgttcaattgcaagaacaatttttatgaaatggattaaagcttgttttttaa

SEQ ID NO: 479633 - DNA, 87 bp, Artificial Sequence
  ENSG00000160917_15 (sequence is synthesized)
cgctgctgtctgtgaattctttttgaaagctgcctgcggcaaagaagagacaggatttcaccgtgacagccaggatggtctccgtgc

SEQ ID NO: 479634 - DNA, 120 bp, Artificial Sequence
  ENSG00000160917_16 (sequence is synthesized)
cgtgatccactgcgcccggccatgagtaactattaaaatgtaaaatgtctgtcagtgtagtacctcaaatcatgttgccttctgtgagggggacctctgcccctttccaggacgtgatgc

SEQ ID NO: 479635 - DNA, 120 bp, Artificial Sequence
  ENSG00000160917_17 (sequence is synthesized)
cctcttctggatcccgggacgctccccttggtttcaggactcctgactcccaggcccccatttccaccgtctggggactccttttaccctcactcggactcaggagttcactgcctcgga

SEQ ID NO: 479636 - DNA, 120 bp, Artificial Sequence
  ENSG00000160917_18 (sequence is synthesized)
ggccctgctgccctccgtatcttccctgggccaactgggccttggtcactgggtgatgtcagtaccagggccaagggtgggggcaggagatggggaagtaatccctgcttatggccacca

SEQ ID NO: 479637 - DNA, 120 bp, Artificial Sequence
  ENSG00000160917_19 (sequence is synthesized)
atgcttcctgagcccgcaggtggctctgcctagaccaggagctgatctttcttgggtcatgggccatctggtaatgtaatggaagctgtgggatacagacaaacatgtagccttgcatat

SEQ ID NO: 479638 - DNA, 120 bp, Artificial Sequence
  ENSG00000160917_20 (sequence is synthesized)
cagcaaaacctgacattctgcagctagcggctttctcacactcctcatctcccttgcctctcccaagaatgctgggtgggtggtggtccacccgcttttttgataaggaggccagtgttg

SEQ ID NO: 479639 - DNA, 120 bp, Artificial Sequence
  ENSG00000160917_21 (sequence is synthesized)
ggaggtgaggtccctgccccgtctcccatgaatgggggacagccagcatttgaaaccatgctccagctctctaactggtagaggggacatctaagtgaccggacacttggctctgcaggt

SEQ ID NO: 479640 - DNA, 120 bp, Artificial Sequence
  ENSG00000160917_22 (sequence is synthesized)
gagaacctcagtgtcccccaggggtgtggtctgccttagaccccgctggacaacttgggagaggaggggagtctcccaagttcccgaagaaaagtcaggagcaaagccgtgtatatctcc

SEQ ID NO: 479641 - DNA, 120 bp, Artificial Sequence
  ENSG00000160917_23 (sequence is synthesized)
ttgctcctgggtcagaccctttattttgcaaatagggaaaccgagactaccagagggagggacctgcctgaggtgacaccactgggcaggagcaggtgtggcagcagaactgaccactct

SEQ ID NO: 479642 - DNA, 120 bp, Artificial Sequence
  ENSG00000160917_24 (sequence is synthesized)
ggccagcaccgcccctgctcctgtggagtggaggttgggaggaggcgcgagaacaggcccggctggctccagttttctagatgaggggccccacagccaagcagctggtccgtcccctca

SEQ ID NO: 479643 - DNA, 120 bp, Artificial Sequence
  ENSG00000160917_25 (sequence is synthesized)
agcacaaggagagggggaaatgctgtagacacatggggatctgcagcagcctctcaatgccaagggcaccctgagtttggttatgggagtcgggagttgagccaagaggaagggctggcg

SEQ ID NO: 479644 - DNA, 120 bp, Artificial Sequence
  ENSG00000160917_26 (sequence is synthesized)
tcaaggcagggcgggcatcaggcagggttcccaacaggcccatcaagcccaaccacctcctgagcccaatgcctcacctcctaccctgctgggctctggactggctgccaaagccccacc

SEQ ID NO: 479645 - DNA, 120 bp, Artificial Sequence
  ENSG00000160917_27 (sequence is synthesized)
gctaaacatctggctgaaccaagcgttcatcctgacctgaagccagaacctcagaaaccaaacaaagtaacaatccgccattacaaaggtcgtcctccttgatccagttaacgagtcaga

SEQ ID NO: 479646 - DNA, 120 bp, Artificial Sequence
  ENSG00000160917_28 (sequence is synthesized)
ctcgccccactgccccagagacctcctcttgtctctttgatgttttgttttctattttatttttcgtttttgtgtgtctgcatggtgtttttcgggcagtggcttctgccatcatcacca

SEQ ID NO: 479647 - DNA, 120 bp, Artificial Sequence
  ENSG00000160917_29 (sequence is synthesized)
catgtttctctgctgcccactgtcctgaggtgggccgtcgtggaagccctgcttcctgccgtttgcgggacgagtcccgccctcttttttcctgtccccatcggtagtctgcgtgcacgt

SEQ ID NO: 479648 - DNA, 120 bp, Artificial Sequence
  ENSG00000160932_0 (sequence is synthesized)
agagcgcgcgaggttcggggagctcggccaggctgctggtacctgcgtccgcccggcgagcaggacaggctgctttggtttgtgacctccaggcaggacggccatcctctccagaatgaa

SEQ ID NO: 479649 - DNA, 120 bp, Artificial Sequence
  ENSG00000160932_1 (sequence is synthesized)
gatcttcttgccagtgctgctggctgcccttctgggtgtggagcgagccagctcgctgatgtgcttctcctgcttgaaccagaagagcaatctgtactgcctgaagccgaccatctgctc

SEQ ID NO: 479650 - DNA, 120 bp, Artificial Sequence
  ENSG00000160932_2 (sequence is synthesized)
cgaccaggacaactactgcgtgactgtgtctgctagtgccggcattgggaatctcgtgacatttggccacagcctgagcaagacctgttccccggcctgccccatcccagaaggcgtcaa

SEQ ID NO: 479651 - DNA, 120 bp, Artificial Sequence
  ENSG00000160932_3 (sequence is synthesized)
tgttggtgtggcttccatgggcatcagctgctgccagagctttctgtgcaatttcagtgcggccgatggcgggctgcgggcaagcgtcaccctgctgggtgccgggctgctgctgagcct

SEQ ID NO: 479652 - DNA, 120 bp, Artificial Sequence
  ENSG00000160932_4 (sequence is synthesized)
gatcccccagctcaggaaggaaagcccagccctttctggatcccacagtgtatgggagcccctgactcctcacgtgcctgatctgtgcccttggtcccaggtcaggcccaccccctgcac

SEQ ID NO: 479653 - DNA, 120 bp, Artificial Sequence
  ENSG00000160932_5 (sequence is synthesized)
ctccacctgccccagcccctgcctctgccccaagtggggccagctgccctcacttctggggtggatgatgtgaccttccttgggggaccgcggaagggacgagggttccctggagtctta

SEQ ID NO: 479654 - DNA, 120 bp, Artificial Sequence
  ENSG00000160932_6 (sequence is synthesized)
cggtccaacatcaggaccaagtcccatggacatgctgacagggtccccagggagaccgtgtcagtagggatgtgtgcctggctgtgtacgtgggtgtgcagtgcacgtgagagcacgtgg

SEQ ID NO: 479655 - DNA, 120 bp, Artificial Sequence
  ENSG00000160932_7 (sequence is synthesized)
cggcttctgggggccatgtttggggagggaggtgtgccagcagcctggagagcctcagtccctgtagccccctgccctggcacagctgcatgcacttcaagggcagcctttgggggttgg

SEQ ID NO: 479656 - DNA, 120 bp, Artificial Sequence
  ENSG00000160932_8 (sequence is synthesized)
ggtttctgccacttccgggtctaggccctgccccaaatccagccagtcctgccccagcccacccccacattggagccctcctgctgctttggtgcctcaaataaatacagatgtccccca

SEQ ID NO: 479657 - DNA, 120 bp, Artificial Sequence
  ENSG00000160932_9 (sequence is synthesized)
ggccgcgcggctgcctgggaggctccgggccagccgcggtccagagcgcgcgaggttcggggagctcggccaggctgctggtacctgcgtccgcccggcggacaggctgctttggtttgt

SEQ ID NO: 479658 - DNA, 120 bp, Artificial Sequence
  ENSG00000160932_10 (sequence is synthesized)
cagagcgcgcgaggttcggggagctcggccaggctgctggtacctgcgtccgcccggcggcctccccgaatgtttccaaagatctggggcgggagcgggcggagactgccgccaggagcc

SEQ ID NO: 479659 - DNA, 120 bp, Artificial Sequence
  ENSG00000160932_11 (sequence is synthesized)
tcccggccgccccagggctgcgcagccactggagcccatcacccaactccagacgctcctggctcctctacgtgggccgggagggacagccttgaggactaggggagggggcacgggacc

SEQ ID NO: 479660 - DNA, 120 bp, Artificial Sequence
  ENSG00000160932_12 (sequence is synthesized)
ttgcagagctcctggccggaaagggaggattgaccgcccccggcatatcaccccggagcactggaacccgcccccgcttcttgttttggcactggtggtgcttgcgagcaggacaggctg

SEQ ID NO: 479661 - DNA, 77 bp, Artificial Sequence
  ENSG00000160932_13 (sequence is synthesized)
agagcgcgcgaggttcggggagctcggccaggctgctggtacctgcgtccgcccggcatagttcacttcagtcttga

SEQ ID NO: 479662 - DNA, 120 bp, Artificial Sequence
  ENSG00000160932_14 (sequence is synthesized)
gaacagcccagcctggagcgggaagcagggacaagatgacctcaggaatcccaggctgcgggggtgcctgcgtcctcccctcccgagctccactccgcaggcgagacccccaacactgct

SEQ ID NO: 479663 - DNA, 120 bp, Artificial Sequence
  ENSG00000160932_15 (sequence is synthesized)
ccccgacactctccgaggcacccctcctccgtgctcacacccaaacacgtctgctcacccgtgggcttcccaccccgaacacaacgaggactgtccaggtgtcagtgacggtcaccccga

SEQ ID NO: 479664 - DNA, 120 bp, Artificial Sequence
  ENSG00000160932_16 (sequence is synthesized)
actgcgtgactgtgtctgctagtgccggcattggtgagtgccaggcctcagaccgtgccttcctcccctggccatctccctagcccgggccggggctcagcagaggccattgctgtctgt

SEQ ID NO: 479665 - DNA, 120 bp, Artificial Sequence
  ENSG00000160932_17 (sequence is synthesized)
ctgcagccgtctgtctctcccctgacagcctcatttcccatgcagggaatctcgtgacatttggccacagcctgagcaagacctgttccccggcctgccccatcccagaaggcgtcaatg

SEQ ID NO: 479666 - DNA, 120 bp, Artificial Sequence
  ENSG00000160932_18 (sequence is synthesized)
tgagaggaagctgcacccaaaagccatggccgggaacctggatctgactgcagggaaacagaagcgtggtgggcgctgggcgatgatggaatttctaacaaatgctttgtttctgctaaa

SEQ ID NO: 479667 - DNA, 120 bp, Artificial Sequence
  ENSG00000160932_19 (sequence is synthesized)
ttgcctgacctcagagggagcccctccccagtgctctgccctttcttctgccccaggttcagcaggtcaagtgagttcctcctcccacagcggaaggaggtgttggggggcatggaggaa

SEQ ID NO: 479668 - DNA, 120 bp, Artificial Sequence
  ENSG00000160932_20 (sequence is synthesized)
agaaagcgggtgcaagaaggagcacgctcaggctggggcagcacccagggccgtaggacttgggaatggagggtgtctgtctggacccgctggtgcagagggtacaaaagctgggctggg

SEQ ID NO: 479669 - DNA, 120 bp, Artificial Sequence
  ENSG00000160932_21 (sequence is synthesized)
cacgcagaagctctgggcagcagccctgacccatccgtgcctggactgcagtgctgcccgcttccccctggcaaacaggtggcagcctcctgacagaggaagccggcccaggccgccgtg

SEQ ID NO: 479670 - DNA, 120 bp, Artificial Sequence
  ENSG00000160932_22 (sequence is synthesized)
tctgcagttgggtgctgtgcgctgcccagagggctctttgggctggagagagaaaacaagaacagacacccagtggaggtggctttgctggagggacagacagttgatcatagtggagct

SEQ ID NO: 479671 - DNA, 120 bp, Artificial Sequence
  ENSG00000160948_0 (sequence is synthesized)
gagtcgctgaccgagcgcaccccgcccccggcgccatcttcccgaccgcgagccgtccaggtctcagtgctgtgccccccccagagcctagaggatgtttcatgggatcccagccacgcc

SEQ ID NO: 479672 - DNA, 120 bp, Artificial Sequence
  ENSG00000160948_1 (sequence is synthesized)
gggcataggagcccctgggaacaagccggagctgtatgaggaagtgaagttgtacaagaacgcccgggagagggagaagtacgacaacatggcagagctgtttgcggtggtgaagacaat

SEQ ID NO: 479673 - DNA, 120 bp, Artificial Sequence
  ENSG00000160948_2 (sequence is synthesized)
gcaagccctggagaaggcctacatcaaggactgtgtctcccccagcgagtacactgcagcctgctcccggctcctggtccaatacaaagctgccttcaggcaggtccagggctcagaaat

SEQ ID NO: 479674 - DNA, 120 bp, Artificial Sequence
  ENSG00000160948_3 (sequence is synthesized)
caaccgctgcatcgcagacgtggtctcgctcttcatcacggtcatggacaagctgcgtctggagatccgcgccatggatgagatccagcccgacctgcgagagctgatggagaccatgca

SEQ ID NO: 479675 - DNA, 120 bp, Artificial Sequence
  ENSG00000160948_4 (sequence is synthesized)
ccgcatgagccacctcccacccgactttgagggccgccagacggtcagccagtggctgcagaccctgagcggcatgtcggcgtcagatgagctggacgactcacaggtgcgtcagatgct

SEQ ID NO: 479676 - DNA, 120 bp, Artificial Sequence
  ENSG00000160948_5 (sequence is synthesized)
gttcgacctggagtcagcctacaacgccttcaaccgcttcctgcatgcctgagcccggggcactagcccttgcacagaagggcagagtctgaggcgatggctcctggtcccctgtccgcc

SEQ ID NO: 479677 - DNA, 120 bp, Artificial Sequence
  ENSG00000160948_6 (sequence is synthesized)
acacaggccgtggtcatccacacaactcactgtctgcagctgcctgtctggtgtctgtctttggtgtcagaactttgggggccgggcccctccccacaataaagatgctctccgaccttc

SEQ ID NO: 479678 - DNA, 120 bp, Artificial Sequence
  ENSG00000160948_7 (sequence is synthesized)
ggcaggtccagggctcagaaatcagctctattgacgaattctgccgcaagttccgcctggactgcccgctggccatggagcggatcaaggaggaccggcccatcaccatcaaggacgaca

SEQ ID NO: 479679 - DNA, 120 bp, Artificial Sequence
  ENSG00000160948_8 (sequence is synthesized)
cacccggccggcattggccaacagcaaatgcctgtgtggcctcaccagggtcctgcagcccctgttggcactggcccacagagcccgctctctccggcaggaagtgaagttgtacaagaa

SEQ ID NO: 479680 - DNA, 120 bp, Artificial Sequence
  ENSG00000160948_9 (sequence is synthesized)
cgcccgggagagggagaagtaagtccaggcgcccaggctgtcccaacacacccatgcgcatctggctgccctggggcagcccctccagacccaccccaaactgaggggtgggaggacgca

SEQ ID NO: 479681 - DNA, 120 bp, Artificial Sequence
  ENSG00000160948_10 (sequence is synthesized)
gggtcagtctggggaactgttcctgaggcactccaggatggagcaagaggtgggcagagcgcccgcagtggcacctccgggcagggggtagcactctgggctctaggcttggcaccccgg

SEQ ID NO: 479682 - DNA, 120 bp, Artificial Sequence
  ENSG00000160948_11 (sequence is synthesized)
agtaagagcccacgtcctgggaggtctgttcctgccctggggggcttgggtgctccataggcagcaagagcaggcgtctgtcaggctgggaggcacccacttgtgtggggcccacccagc

SEQ ID NO: 479683 - DNA, 120 bp, Artificial Sequence
  ENSG00000160948_12 (sequence is synthesized)
gtgaggagggtgcccctgggtctcagccagggaagtcctgggggctggtgagggaggcgggcagaggcgcagctcctggggtgtcatccggcccactcccccaccctcatcccccagcac

SEQ ID NO: 479684 - DNA, 120 bp, Artificial Sequence
  ENSG00000160948_13 (sequence is synthesized)
aggcaaccttaaaaaacggtcgagaggcttggggatgtcccaggatcttttgggggggctttgttcaatgaagtgacaagaccgtcacaggccaccgcacaggaccatgagctgtggatg

SEQ ID NO: 479685 - DNA, 120 bp, Artificial Sequence
  ENSG00000160948_14 (sequence is synthesized)
cggccatcacaacagagggctggtcgctgtggttcagagggtgggcaggggttgggggccggggtctccacctggagccgagctacaagccccactacgtgctcagggcctcacccccaa

SEQ ID NO: 479686 - DNA, 120 bp, Artificial Sequence
  ENSG00000160948_15 (sequence is synthesized)
ctctggaagctgctttgcctctggaccagccgagggggtaggatgagctgggtggggctggtcccatgcttgggcagcagctgacctctccctaggtacactgcagcctgctcccggctc

SEQ ID NO: 479687 - DNA, 120 bp, Artificial Sequence
  ENSG00000160948_16 (sequence is synthesized)
cggcccatcaccatcaaggacgacaagggcaacctcaaccgctgcatcgcagacgtggtctcggtgcgccccagcccccagggcacgtggttaggagagccgaggctgcctgctgcagct

SEQ ID NO: 479688 - DNA, 120 bp, Artificial Sequence
  ENSG00000160948_17 (sequence is synthesized)
gggcacgagcgtagggtcctgggcctccagagctgagcagcactctgacttgctgggcagaagggaacccctttaactaggaatgaggggtgggcagcatgcggggacgcccccaggcca

SEQ ID NO: 479689 - DNA, 120 bp, Artificial Sequence
  ENSG00000160948_18 (sequence is synthesized)
cctggactcctgtcggggggatgagcacagggtgcgttctggcggggtcctggcctcgggagagagtgtgggtgtgggcccacccttcagttcccacacagctgtctgggcagccaggac

SEQ ID NO: 479690 - DNA, 120 bp, Artificial Sequence
  ENSG00000160948_19 (sequence is synthesized)
ctcgttcacccaggaggcctgcagggtttgggaacagagtacagtgaggaggcccaagtgacagctgtggctgaggaggggttggggcccgtgagccgtggggcctcccgcacccgtgga

SEQ ID NO: 479691 - DNA, 120 bp, Artificial Sequence
  ENSG00000160948_20 (sequence is synthesized)
ccttccacccccatggggcgagactgtcgggcatgggtatggggtgccagagggctctggccacctggggcttgctgtcctgagagccccagcacccatgtcacccccaacagctggact

SEQ ID NO: 479692 - DNA, 120 bp, Artificial Sequence
  ENSG00000160948_21 (sequence is synthesized)
aggtgcgggtattgggctggcagggggcctaggcaggaggggatggagccggcgtcggggtcccagccgctgtgtgtgtctcagatccagcccgacctgcgagagctgatggagaccatg

SEQ ID NO: 479693 - DNA, 120 bp, Artificial Sequence
  ENSG00000160948_22 (sequence is synthesized)
tcccacccgactttgagggccgccagacggtcagccagtggtgggtgtccctcccagccaggcagagccccgcagtgcccgagaccctcccagccaggcggagccccgcagtgcccctga

SEQ ID NO: 479694 - DNA, 120 bp, Artificial Sequence
  ENSG00000160948_23 (sequence is synthesized)
ggctgacgggcagtattgggtattggggatcgggggtggggaggtatctgaccctgctctcgtacagccttgggggtggccaggggctaaatagttcattgcaggagcactgagggctca

SEQ ID NO: 479695 - DNA, 120 bp, Artificial Sequence
  ENSG00000160948_24 (sequence is synthesized)
gaaacctccagacagaactggcttggtcctgctgggcagagatgatgagcttcggtgtggccagaacggtgggggtcctgggcaccctgtgtcaccaatcccaggggagaggctgtgtgt

SEQ ID NO: 479696 - DNA, 120 bp, Artificial Sequence
  ENSG00000160948_25 (sequence is synthesized)
ggtgagccttgttggcactgcatcatgagccacgagcagggcgtggccactgttgtgcaggtgactccgccagggagccatggtggagctggggagctgggcctgtcatgcggtcccccg

SEQ ID NO: 479697 - DNA, 120 bp, Artificial Sequence
  ENSG00000160948_26 (sequence is synthesized)
gggagccgcagtggagctggggagctgggcctgtcatgcggtcccccggggagccgcagtggagctggggagctgggcctgtcatgcggcccccggcttctcagaggtgttatcatcagg

SEQ ID NO: 479698 - DNA, 120 bp, Artificial Sequence
  ENSG00000160948_27 (sequence is synthesized)
tccccccacacactgataggggtgaggttggaacctctgtgctccagctccctctgggctctttgggacccagcctgggaggcctcagggaggaactgaaatggagactgggactggagt

SEQ ID NO: 479699 - DNA, 80 bp, Artificial Sequence
  ENSG00000160948_28 (sequence is synthesized)
cgctgaccgagcgcaccccgcccccggcgccatcttcccgaccgcgagccgttcggtcttggctcattgaaaccttcacc

SEQ ID NO: 479700 - DNA, 120 bp, Artificial Sequence
  ENSG00000160949_0 (sequence is synthesized)
agtccggatcccgcggcgatccgagcatgagcctggagcgcgagcttcgccagctgagcaaggcgaaagccaaggcgcagagggccgggcagcggcgcgaagaggccgcgctgtgccacc

SEQ ID NO: 479701 - DNA, 120 bp, Artificial Sequence
  ENSG00000160949_1 (sequence is synthesized)
agctgggggagctcctggccggccatggccgctacgccgaggctctggagcagcactggcaggagctgcagcttcgggagcgcgctgacgaccctctgggctgtgccgtggcccaccgca

SEQ ID NO: 479702 - DNA, 120 bp, Artificial Sequence
  ENSG00000160949_2 (sequence is synthesized)
agatcggagagcgcctggccgagatggaggactacccggctgccttgcagcaccagcaccagtacctggagctggcacattccctgcgcaaccacacggagctgcagagggcctgggcca

SEQ ID NO: 479703 - DNA, 120 bp, Artificial Sequence
  ENSG00000160949_3 (sequence is synthesized)
ccatcggccgcacccacctggacatctatgaccactgccagtcgagggatgctttgctgcaggcacaggctgcctttgagaagagcttggctattgtggatgaggagctggaggggacac

SEQ ID NO: 479704 - DNA, 120 bp, Artificial Sequence
  ENSG00000160949_4 (sequence is synthesized)
tggcccagggagagctgaatgagatgaggacccgcctctatctcaacctgggcctcacctttgagagcctgcagcagacagccctgtgcaacgattacttcaggaagagcatcttccttg

SEQ ID NO: 479705 - DNA, 120 bp, Artificial Sequence
  ENSG00000160949_5 (sequence is synthesized)
cggagcagaaccacctttacgaggacctattccgcgcccgctacaacctgggcaccatccactggcgcgcgggccagcactcccaggctatgcgctgcttggagggtgcccgggagtgtg

SEQ ID NO: 479706 - DNA, 120 bp, Artificial Sequence
  ENSG00000160949_6 (sequence is synthesized)
cgcacaccatgaggaagcggttcatggagagcgagtgctgcgtggttattgcacaggtcctccaagacctgggagactttttggctgccaagcgagccctgaagaaggcctacaggctgg

SEQ ID NO: 479707 - DNA, 120 bp, Artificial Sequence
  ENSG00000160949_7 (sequence is synthesized)
gctcccagaagcctgtgcagagggcagccatctgtcagaacctccagcatgtgctggcagtggtccggctgcagcaacagctggaagaggctgagggcagagaccctcagggtgccatgg

SEQ ID NO: 479708 - DNA, 120 bp, Artificial Sequence
  ENSG00000160949_8 (sequence is synthesized)
tcatctgtgagcagctaggggacctcttctccaaggcaggagactttcccagggcagctgaggcttaccagaagcagctgcgttttgctgagctgctggacagaccgggtgctgagcggg

SEQ ID NO: 479709 - DNA, 120 bp, Artificial Sequence
  ENSG00000160949_9 (sequence is synthesized)
ccatcatccacgtgtccctggccaccacactgggagacatgaaggaccaccatggggccgtgcgccactatgaggaggaactgaggctgcgcagcggcaacgtgctggaggaggccaaga

SEQ ID NO: 479710 - DNA, 120 bp, Artificial Sequence
  ENSG00000160949_10 (sequence is synthesized)
cctggctgaacattgcactgtcccgcgaggaggccggcgatgcctacgagctgctggccccgtgcttccagaaagcgctcagctgtgcccagcaggcccagcgtccccagctgcagaggc

SEQ ID NO: 479711 - DNA, 120 bp, Artificial Sequence
  ENSG00000160949_11 (sequence is synthesized)
aggtcttgcagcatctccataccgtgcagctgaggctgcagccccaggaggcccctgagaccgaaaccagactacgggagctcagtgtagctgaagatgaagatgaggaggaggaggcgg

SEQ ID NO: 479712 - DNA, 120 bp, Artificial Sequence
  ENSG00000160949_12 (sequence is synthesized)
aggaggcggcagccacagcggagagcgaagccctggaggccggcgaggtggagctctcagagggcgaggacgacaccgatggcctgaccccgcagctggaggaggacgaggagcttcagg

SEQ ID NO: 479713 - DNA, 120 bp, Artificial Sequence
  ENSG00000160949_13 (sequence is synthesized)
gccacctgggccggcggaaggggagcaagtggaaccggcgaaacgacatgggggagaccctgctgcaccgagcctgcatcgagggccagctgcgccgcgtccaggaccttgtgaggcagg

SEQ ID NO: 479714 - DNA, 120 bp, Artificial Sequence
  ENSG00000160949_14 (sequence is synthesized)
gccacccccttaaccctcgggactactgtggctggacacctctgcacgaggcctgcaactacgggcatctagaaattgtccgcttcctgctggaccacggggccgcagtggacgacccag

SEQ ID NO: 479715 - DNA, 120 bp, Artificial Sequence
  ENSG00000160949_15 (sequence is synthesized)
gtggccagggctgcgaaggcatcacccccctccacgatgccctcaactgtggccacttcgaggtggctgagctgctgcttgaacggggggcgtccgtcaccctccgcactcgaaagggcc

SEQ ID NO: 479716 - DNA, 120 bp, Artificial Sequence
  ENSG00000160949_16 (sequence is synthesized)
tcagcccgctggagacgctgcagcagtgggtgaagctgtaccgcagggacctggacctggagacgcggcagaaggccagggccatggagatgctgctccaggcggctgcctcgggccaag

SEQ ID NO: 479717 - DNA, 120 bp, Artificial Sequence
  ENSG00000160949_17 (sequence is synthesized)
atccccacagctcccaggccttccacaccccaagcagccttctgtttgaccccgagacctctcctcctttgagcccctgcccagaacccccctctaatagcactagactcccagaggcct

SEQ ID NO: 479718 - DNA, 120 bp, Artificial Sequence
  ENSG00000160949_18 (sequence is synthesized)
cagctcagaaggcgaggacagcgcaggccccgcacggccgtcccagaagaggcctcggtgctcggccacagcacaacgggtggcagcctggacgcctggccccgccagcaacagggaagc

SEQ ID NO: 479719 - DNA, 120 bp, Artificial Sequence
  ENSG00000160949_19 (sequence is synthesized)
agccacagccagcaccagccgggcagcctaccaggcagccatccggggtgtgggcagtgctcagagccggctggggcctggcccaccgcggggccacagcaaagcccttgccccccaggc

SEQ ID NO: 479720 - DNA, 120 bp, Artificial Sequence
  ENSG00000160949_20 (sequence is synthesized)
agcgctcatcccggaggaggagtgcctggccggggactggctggagctggacatgcccctgacccgcagccgccggccccgcccccggggcactggagacaaccgcaggcccagtagtac

SEQ ID NO: 479721 - DNA, 120 bp, Artificial Sequence
  ENSG00000160949_21 (sequence is synthesized)
ctctgggtcggacagtgaggagagcaggccccgtgcccgagccaagcaggtccgcctgacctgcatgcagagttgcagtgcgccagttaacgcagggcccagcagcctggcttcagaacc

SEQ ID NO: 479722 - DNA, 120 bp, Artificial Sequence
  ENSG00000160949_22 (sequence is synthesized)
tccagggagccccagcacccccagggtctcagagcccagtggggacagctctgcggcaggccagcccttgggtccggccccgccccctcccatccgggttcgagttcaagttcaggatca

SEQ ID NO: 479723 - DNA, 120 bp, Artificial Sequence
  ENSG00000160949_23 (sequence is synthesized)
tctcttcctcatccctgtcccacacagcagtgacacccactctgtggcctggctggccgagcaggcggcccagcgctactaccagacctgcgggctgctgcccaggctcaccctacggaa

SEQ ID NO: 479724 - DNA, 120 bp, Artificial Sequence
  ENSG00000160949_24 (sequence is synthesized)
agagggggccctgctggccccacaggacctcatccctgatgtgctgcagagcaatgacgaggtgttggctgaggtgacttcgtgggacctgcccccgttgactgaccgctaccgcagggc

SEQ ID NO: 479725 - DNA, 120 bp, Artificial Sequence
  ENSG00000160949_25 (sequence is synthesized)
ctgccagagcctggggcaaggggagcaccaacaggtgctgcaggccgtggagctccagggcttgggcctctcgttcagcgcctgctccctggccctggaccaggcccagcttacacccct

SEQ ID NO: 479726 - DNA, 120 bp, Artificial Sequence
  ENSG00000160949_26 (sequence is synthesized)
gctgcgggccctcaagctgcacacagcactccgggagctgcgcctggcagggaaccggctgggggacaagtgtgtggctgagctggtggctgccctgggcaccatgcccagcctggccct

SEQ ID NO: 479727 - DNA, 120 bp, Artificial Sequence
  ENSG00000160949_27 (sequence is synthesized)
ccttgacctctcctccaatcacctgggtcccgaaggcctgcgccagcttgccatggggctcccaggccaagccaccttgcagagtttggaggagctggacttaagcatgaaccccctggg

SEQ ID NO: 479728 - DNA, 120 bp, Artificial Sequence
  ENSG00000160949_28 (sequence is synthesized)
ggacggctgtggccagtccctggcctccctcctgcacgcctgccccttactcagcaccctgcgcctgcaggcgtgtggcttcggccccagcttctttctgagccaccagacagcactggg

SEQ ID NO: 479729 - DNA, 120 bp, Artificial Sequence
  ENSG00000160949_29 (sequence is synthesized)
tagtgctttccaagatgctgagcacctgaagaccctgtccctgtcctacaacgccctgggagcccctgccctggccaggaccctgcagagcctgcccgccggcaccctcctgcacttaga

SEQ ID NO: 479730 - DNA, 120 bp, Artificial Sequence
  ENSG00000160949_30 (sequence is synthesized)
gctcagctccgtggcagccggcaagggtgattcggacctcatggagcctgtattccgatacctggccaaggaaggctgtgctctagcccacctgaccctgtctgcaaaccacctggggga

SEQ ID NO: 479731 - DNA, 120 bp, Artificial Sequence
  ENSG00000160949_31 (sequence is synthesized)
caaggctgttagagacctgtgcagatgtctctctctgtgcccctcactcatctcactggatctgtctgccaaccctgagatcagctgtgccagcttggaagagctcctgtccaccctcca

SEQ ID NO: 479732 - DNA, 120 bp, Artificial Sequence
  ENSG00000160949_32 (sequence is synthesized)
aaagcggccccaaggccttagcttccttggcctgtcaggctgcgccgtccagggtcccctgggcctgggcctgtgggacaagatagccgcgcagctccgggaactgcagctgtgcagcag

SEQ ID NO: 479733 - DNA, 120 bp, Artificial Sequence
  ENSG00000160949_33 (sequence is synthesized)
acgcctctgcgctgaggacagggacgccctgcgccagctgcagcccagtcggccgggccccggcgagtgcacgctggaccacggctccaagctcttctttcggcgcctctgaccctggcg

SEQ ID NO: 479734 - DNA, 82 bp, Artificial Sequence
  ENSG00000160949_34 (sequence is synthesized)
acggctccaagctcttctttcggcgcctctgaccctggcgctgcctttccccaccctcaccgaagcccctaataaatgaagc

SEQ ID NO: 479735 - DNA, 120 bp, Artificial Sequence
  ENSG00000160949_35 (sequence is synthesized)
ggggagtatttttcccagagtcctcctgagagagcagtctggctgggcctcatccccccacctctcacacctgtgccacacactgggagaaggccaggcatggttagggccctgagacca

SEQ ID NO: 479736 - DNA, 120 bp, Artificial Sequence
  ENSG00000160949_36 (sequence is synthesized)
cgtggttattgcacaggtacccgctgtgcgtggctccgagctcaggctctcgtagattcgggccttggggattctgcaaaacctttgctgtcctttgctctccaggtcctccaagacctg

SEQ ID NO: 479737 - DNA, 120 bp, Artificial Sequence
  ENSG00000160949_37 (sequence is synthesized)
ggggccctgggaggtgtgtgcaggggtgagcctgggggcggggtggagtcccgccaggtgtgtacagggctctctccctcacagaggaggcctgagcacctgtccttggaggcagcagct

SEQ ID NO: 479738 - DNA, 120 bp, Artificial Sequence
  ENSG00000160949_38 (sequence is synthesized)
tcagcaagaggggcaggtacccctacttcctgacaggagaagacccccttttttctctgagctcaacacagtgtgtcaggggcaatgaaagggcggccaggagaccagctgggcttttat

SEQ ID NO: 479739 - DNA, 120 bp, Artificial Sequence
  ENSG00000160949_39 (sequence is synthesized)
ttcgcagccaccatcttcattggcaaactggagacagtagttgtacccctagcctcccagggtgggagaggagatggcacgcgtggtccaggagtgctgatggcagagaccaccattgga

SEQ ID NO: 479740 - DNA, 120 bp, Artificial Sequence
  ENSG00000160949_40 (sequence is synthesized)
gcgtggtccaggagtgctgatggcagagaccaccattggaggttggcagccgtcagcccttactttgagccaggcaccatccatgttgtgttgtttttttttcttgagacggagtctcgc

SEQ ID NO: 479741 - DNA, 86 bp, Artificial Sequence
  ENSG00000160949_41 (sequence is synthesized)
aggattacaggcgtgagccactgtacctggccccgagtttttaagtgtgttagttcttgtgacccttgagaccagtccccaagata

SEQ ID NO: 479742 - DNA, 120 bp, Artificial Sequence
  ENSG00000160949_42 (sequence is synthesized)
gtgttagttcttgtgacccttgagaccagtccccaagatagaccctgctattaacccccacaccaacaggcaggcagaggtgtggagagagtgggggggccaccacagggctcacagctt

SEQ ID NO: 479743 - DNA, 120 bp, Artificial Sequence
  ENSG00000160949_43 (sequence is synthesized)
ccaggcactccctgtccactccctagccctggggcattgagggtttccaggactttcagagggggcccaggctgggcacacaggggcaacacctgtggtcccagctacttgagaggctga

SEQ ID NO: 479744 - DNA, 120 bp, Artificial Sequence
  ENSG00000160949_44 (sequence is synthesized)
ctacttgagaggctgaggcgggagtatcgcttgagccaagagttccaggaaagcctggcccacatagtgagaccccatcccttaagaaaaaagcgtctaggccgggcgcagtggctcacg

SEQ ID NO: 479745 - DNA, 120 bp, Artificial Sequence
  ENSG00000160949_45 (sequence is synthesized)
aggggcctgggatgccagacctggctctccgggagggcctggcacctgggagcaatagatggatgtgtgggtacagggtctgcctccgaggggcgtctggtgcccacccagccaggctga

SEQ ID NO: 479746 - DNA, 120 bp, Artificial Sequence
  ENSG00000160949_46 (sequence is synthesized)
cccccgcaggacacaccgagagcagagtccgggcagctagtgtcctgtggtccccatcccgtgctcgccagctgagtgctgttcgcctgaggcagttccactgtgagcccactcaggctg

SEQ ID NO: 479747 - DNA, 120 bp, Artificial Sequence
  ENSG00000160949_47 (sequence is synthesized)
cagagactggggtcccagtgccaagaggctgggaattgggtgtcatccagggggagtgtaaggggggcagcaatggtcagtgcactcccctggcacccccactgtgcagaggcatgtggc

SEQ ID NO: 479748 - DNA, 120 bp, Artificial Sequence
  ENSG00000160949_48 (sequence is synthesized)
ccaggaccgtgtggttgtggggtgggagagggcaagttgtccagaactgggggcagccgagcttggaagtctggccccgccctcccagctgggagaatctgggcgagagcctttgcctct

SEQ ID NO: 479749 - DNA, 120 bp, Artificial Sequence
  ENSG00000160949_49 (sequence is synthesized)
gcacttgccaccccaccctgcgagcactgcggtagtggtttccccaaaggggtcctgagggttctgggcccagaacttggggtgggtacagggctgtggccacgtggggctgacggattc

SEQ ID NO: 479750 - DNA, 120 bp, Artificial Sequence
  ENSG00000160949_50 (sequence is synthesized)
tgcttccagaaagcgctcagctgtgcccagcaggcccagcgtccccagctgcagaggcaggtcttgcagcatctccataccgtgcagctgagagccccagggcccctgagaccgaaacca

SEQ ID NO: 479751 - DNA, 120 bp, Artificial Sequence
  ENSG00000160951_0 (sequence is synthesized)
gagggaggaagcggcttgccggagagccagggcgcagtgggcggcagggctgagcggccggtgatggggaccccacatcccaggcagtgccggcacccctggcgcctgacatgagccctt

SEQ ID NO: 479752 - DNA, 120 bp, Artificial Sequence
  ENSG00000160951_1 (sequence is synthesized)
gcgggcccctcaacctgagcctggcgggcgaggcgaccacatgcgcggcgccctgggtccccaacacgtcggccgtgccgccgtcgggcgcttcgcccgcgctgcccatcttctccatga

SEQ ID NO: 479753 - DNA, 120 bp, Artificial Sequence
  ENSG00000160951_2 (sequence is synthesized)
ctccatgacgctgggcgccgtgtccaacctgctggcgctggcgctgctggcgcaggccgcgggccgcctgcgacgccgccgctcggccgccaccttcctgctgttcgtggccagcctgct

SEQ ID NO: 479754 - DNA, 120 bp, Artificial Sequence
  ENSG00000160951_3 (sequence is synthesized)
acctggcgggccacgtgatcccgggcgcgctggtgctgcgtctgtacactgcggggcgcgctccggccggcggggcctgccacttcctgggcggctgcatggtcttcttcggcctgtgcc

SEQ ID NO: 479755 - DNA, 120 bp, Artificial Sequence
  ENSG00000160951_4 (sequence is synthesized)
ggtcttcttcggcctgtgcccgctgctgctgggctgtggcatggccgtggagcgctgcgtgggcgtcacgcggccgctgctccacgccgcgcgggtctcggtcgcccgcgcgcgcctggc

SEQ ID NO: 479756 - DNA, 120 bp, Artificial Sequence
  ENSG00000160951_5 (sequence is synthesized)
cgggcggctggcgccaggcactgcttgctggcctcttcgccagcctcggcctggtcgcgctcctcgccgcgctggtgtgcaacacgctcagcggcctggccctgctacgcgcccgctggc

SEQ ID NO: 479757 - DNA, 120 bp, Artificial Sequence
  ENSG00000160951_6 (sequence is synthesized)
ccgctcccgacggcctcccccggcctcaggccccgacagccggcgtcgctggggggcgcacggaccccgctcggcctccgcctcgtccgcctcgtccatcgcttcggcctccaccttctt

SEQ ID NO: 479758 - DNA, 120 bp, Artificial Sequence
  ENSG00000160951_7 (sequence is synthesized)
tctttggcggctctcggagcagcggctcggcacgcagagctcgcgcccacgacgtggagatggtgggccagcttgtcggtatcatggtggtgtcgtgcatctgctggagcccaatgctgg

SEQ ID NO: 479759 - DNA, 120 bp, Artificial Sequence
  ENSG00000160951_8 (sequence is synthesized)
tgttggtggcgctggccgtcggcggctggagctctacctccctgcagcggccactgttcctggccgtgcgccttgcctcctggaaccagatcctggacccttgggtgtacatcctactgc

SEQ ID NO: 479760 - DNA, 120 bp, Artificial Sequence
  ENSG00000160951_9 (sequence is synthesized)
gccaggccgtgctgcgccaactgcttcgcctcttgcccccgagggccggagccaagggcggccccgcggggctgggcctaacaccgagcgcctgggaggccagctcgctgcgcagctccc

SEQ ID NO: 479761 - DNA, 120 bp, Artificial Sequence
  ENSG00000160951_10 (sequence is synthesized)
ggcacagcggcctcagccacttctaagcacaaccagaggcccaacgactaagccagcccaccctgggctgggcccaggtgcgcggcgcagagcctttgggaataaaaagccattctgcga

SEQ ID NO: 479762 - DNA, 120 bp, Artificial Sequence
  ENSG00000160953_0 (sequence is synthesized)
ggacacattggcgtgagacctgggagtacgttgtgccaaatcattgccacttgccacatgagtgtaaatgatggcggatgccaagtatgtcctctgccgatgggaaaagcgattatggcc

SEQ ID NO: 479763 - DNA, 120 bp, Artificial Sequence
  ENSG00000160953_1 (sequence is synthesized)
tgcgaaggttttggcccgaaccgcgacttcaacaaaaaataagagaagaaaggaatattttctagctgtgcaaatcctctctctagaggaaaaaattaaggtgaaaagcactgaagttga

SEQ ID NO: 479764 - DNA, 120 bp, Artificial Sequence
  ENSG00000160953_2 (sequence is synthesized)
gatcctagagaagtctcaaattgaagccattgcttcctcgttagcctcacagaatgaggttcctgcggcacccctggaagaactggcctacagacggtcgcttcgcgtggctctggacgt

SEQ ID NO: 479765 - DNA, 120 bp, Artificial Sequence
  ENSG00000160953_3 (sequence is synthesized)
tctgagcgagggctcgatttggagtcaagaaagctctgcagggacaggtagagctgaccggtctctgcgagggaagcccatggagcatgtctcctcgccctgtgattcgaactcctcatc

SEQ ID NO: 479766 - DNA, 120 bp, Artificial Sequence
  ENSG00000160953_4 (sequence is synthesized)
tcttccccgcggagacgtgttgggcagttccagacctcacaggaggaggccatgtgtgcaacaaagcctgtcaagttcgttcacttgtgaaaaggaccccgagtgcaaagtggaccacaa

SEQ ID NO: 479767 - DNA, 120 bp, Artificial Sequence
  ENSG00000160953_5 (sequence is synthesized)
gaaggggctcaggaaaagtgaaaacccaagaggcccgttggtcctcccagctggaggtggtgcccaagatgagagtgggtccagaatccaccacaaaaattggactcttgcaagtaagag

SEQ ID NO: 479768 - DNA, 120 bp, Artificial Sequence
  ENSG00000160953_6 (sequence is synthesized)
gggaggaaactcagcgcagaaggctagcttgtgcctgaatggatcttccctttcagaggacgacacggagagagacatggggagcaaaggaggcagctgggcagccccgtccttgccctc

SEQ ID NO: 479769 - DNA, 120 bp, Artificial Sequence
  ENSG00000160953_7 (sequence is synthesized)
cggggtcagggaggacgatccctgtgccaacgctgagggacacgaccccggtctgccgttgggcagcctcactgcgcccccagcccctgagccctcggcctgctcagagcctggagaatg

SEQ ID NO: 479770 - DNA, 120 bp, Artificial Sequence
  ENSG00000160953_8 (sequence is synthesized)
ccctgcgaaaaagaggccgcgcctggatggcagccaaaggccgcctgccgtgcagctggagcccatggcagcaggggccgcaccatcccccgggccggggccagggcccagagagtctgt

SEQ ID NO: 479771 - DNA, 120 bp, Artificial Sequence
  ENSG00000160953_9 (sequence is synthesized)
gaccccgcgcagcaccgccaggctgggcccgcctccctcccacgcctctgcggatgcaaccagatgtcttccttgcccggattcccagaagctggagaaagagtgccagtcttccgaaga

SEQ ID NO: 479772 - DNA, 120 bp, Artificial Sequence
  ENSG00000160953_10 (sequence is synthesized)
gtccatggggtctaattccatgcgttctatcctggaggaagacgaggaagacgaggagccaccaagagtccttttataccacgaaccacgttcgtttgaagtaggaatgctagtctggca

SEQ ID NO: 479773 - DNA, 120 bp, Artificial Sequence
  ENSG00000160953_11 (sequence is synthesized)
taaacataaaaaataccccttctggccagcagtggtcaaaagcgtcaggcagagagataagaaagcaagtgtgctatacatcgaaggacacatgaacccgaaaatgaaaggtttcacagt

SEQ ID NO: 479774 - DNA, 120 bp, Artificial Sequence
  ENSG00000160953_12 (sequence is synthesized)
gtctcttaaaagtttaaagcactttgattgtaaagagaaacagacgcttctgaatcaagccagggaggacttcaaccaggacatcggctggtgtgtctccctcatcaccgactacagggt

SEQ ID NO: 479775 - DNA, 120 bp, Artificial Sequence
  ENSG00000160953_13 (sequence is synthesized)
ccggttaggctgcgggtcttttgctggctctttcctggaatattacgcggctgatataagctatcctgtccgaaaatccatccagcaggacgtcttggggaccaagcttcctcaactgag

SEQ ID NO: 479776 - DNA, 120 bp, Artificial Sequence
  ENSG00000160953_14 (sequence is synthesized)
caaggggagccccgaggagcccgtggtggggtgccccctggggcagaggcagccctgccggaaaatgctccccgaccgctcgcgggccgcccgggaccgggccaaccagaagctggtgga

SEQ ID NO: 479777 - DNA, 120 bp, Artificial Sequence
  ENSG00000160953_15 (sequence is synthesized)
gtacattgtgaaggccaagggcgcggagagccacctgcgggccatcctaaagagcaggaagccatctcgctggctgcagaccttcctgagctccagccagtacgtgacctgtgtggagac

SEQ ID NO: 479778 - DNA, 120 bp, Artificial Sequence
  ENSG00000160953_16 (sequence is synthesized)
accggatccggttcattctggacgtgcttctgcccgaggccatcatctgtgcgatctctgcggtggacgaggtggactacaagacggctgaggagaagtacatcaaggggccttcgctga

SEQ ID NO: 479779 - DNA, 120 bp, Artificial Sequence
  ENSG00000160953_17 (sequence is synthesized)
gctaccgggaaaaagaaatatttgacaaccagctccttgaagagcggaaccggcgccgtcggtgagggagcagccggctgtgctgtcagcggggcctggcggtggaagcgcctccagtgt

SEQ ID NO: 479780 - DNA, 120 bp, Artificial Sequence
  ENSG00000160953_18 (sequence is synthesized)
gcatgagcgtgtctgaagatggggggctcagggggcacgtttgcgtttggacctgtctgtgcgttctcctgcgtggcagtcctgatttccatgcttctggagaatccatttcgttaacac

SEQ ID NO: 479781 - DNA, 120 bp, Artificial Sequence
  ENSG00000160953_19 (sequence is synthesized)
tgaaagccagttctcttttcctggcagtttttttcattttatttttggcattttttacaagataccgttcgggaaaggcttttgaaaggacggaagcgtattcactgtgcgccagtactc

SEQ ID NO: 479782 - DNA, 120 bp, Artificial Sequence
  ENSG00000160953_20 (sequence is synthesized)
ctggctgtgctgtggtttctcccgacgtgcacatcgatctcgtatgtgtggcatctgatattaaacgggaggttttaagaagcgtctgccgtgatcatggagcttcggaagcgggaatgg

SEQ ID NO: 479783 - DNA, 120 bp, Artificial Sequence
  ENSG00000160953_21 (sequence is synthesized)
ttcttccgggtttgctgttttgtctgtttcccccttgtgtggtttccgcctgcgacagttccagaatttgctctcccactcagtgtgctctgcagctgtgaggaaacagccttcgttaga

SEQ ID NO: 479784 - DNA, 120 bp, Artificial Sequence
  ENSG00000160953_22 (sequence is synthesized)
ggcgggagcagagacgagccgctgctctgtgtcgtgtttgctgtggccgcagggagaggagcaggacacgcacctttccaggggcctctgtgtcccgcactgtgtgtgagtggaccgcag

SEQ ID NO: 479785 - DNA, 120 bp, Artificial Sequence
  ENSG00000160953_23 (sequence is synthesized)
cgcgcagccacatgccctggctgccatgggccagaccgcctccacctcccccgcccgcctggcctgtcctgagtgcatttccctgcactgtgtcgtcactgcacagccagtcaccgcggt

SEQ ID NO: 479786 - DNA, 120 bp, Artificial Sequence
  ENSG00000160953_24 (sequence is synthesized)
ctcagtcatcggcgcggatggctatgctggggtcccagggtggccgcagcagtcagggtcactgtgggagccctggggtggagtgacaaaccgcattgtcctgtgcccgccatggcagaa

SEQ ID NO: 479787 - DNA, 120 bp, Artificial Sequence
  ENSG00000160953_25 (sequence is synthesized)
gcgcagcctttgtatggaggcccaaccgcgctcccgtctggagaagcggcttccggggtgtggctgccgggtcggctctggtccacagcacggtgccggggctgcaggttgttgagggct

SEQ ID NO: 479788 - DNA, 120 bp, Artificial Sequence
  ENSG00000160953_26 (sequence is synthesized)
gtgactccgtggggctcagccaggctccagcagggtcagacgtgctgttaagagcaaagccacagacgatgacttgtccattctcagtggatgctccaggctgtgcctacacagcagtgc

SEQ ID NO: 479789 - DNA, 120 bp, Artificial Sequence
  ENSG00000160953_27 (sequence is synthesized)
tggtgacatgtccagggttccagggcccggtggcctgggagctgctttctccccactggctgggctgcatctggccctggctggaggccttgctttgaggggctgtgaccctcttccccc

SEQ ID NO: 479790 - DNA, 120 bp, Artificial Sequence
  ENSG00000160953_28 (sequence is synthesized)
aggccctccccagccgacgacagccaccggagaggagatcggaacacgattgtctcagatgcagggcgctgtgcgggacgaagccgcaaggactctcgtatcgggcccttgggactcggg

SEQ ID NO: 479791 - DNA, 120 bp, Artificial Sequence
  ENSG00000160953_29 (sequence is synthesized)
aggtgccagaggcggcggctgctctggacctcggtgttcactgacctttgtttcacttgcctctgctcgactccgagagcaggaaacccggccgtggcctggcagctccgcctcccatgc

SEQ ID NO: 479792 - DNA, 120 bp, Artificial Sequence
  ENSG00000160953_30 (sequence is synthesized)
ccgcacgctggggtctgtcttgtctggagcagtggggcacaccccggaggaggcgggggtcagggctgtcggccttggccccctgctggtcgctgtttcggggactcggggcggccagta

SEQ ID NO: 479793 - DNA, 120 bp, Artificial Sequence
  ENSG00000160953_31 (sequence is synthesized)
ccaccgcctgaggcggggctcagcagcgttgcatgtacgggcctcgtactgcctcatggaaaatcctccggagccgccctccattgtgggttcctgagagtaggacacattgccatggtt

SEQ ID NO: 479794 - DNA, 120 bp, Artificial Sequence
  ENSG00000160953_32 (sequence is synthesized)
ttgtgggaatcacgcgcccctgatggaacttttctgctgttgtgaagtacttttatccatttgcttctctgctgaccttgccaagttgttcgaggtggaattaaacacctcccagacctc

SEQ ID NO: 479795 - DNA, 120 bp, Artificial Sequence
  ENSG00000160953_33 (sequence is synthesized)
gacgtgcttctgcccgagtgctgggaaatgcgagtgcgtgcgcttgaccctgtgcggagacggagccgcttacttgacccctgtgcagagatggagctgcttagaagctgtcagcaccag

SEQ ID NO: 479796 - DNA, 120 bp, Artificial Sequence
  ENSG00000160953_34 (sequence is synthesized)
cggccacagtttttttttaagcccataaatacttcagtgtgtgtctctaaaaggagggtgattctgccccctgggggacactggcagtgtctggggacatctgtgcttgtcacagctaag

SEQ ID NO: 479797 - DNA, 120 bp, Artificial Sequence
  ENSG00000160953_35 (sequence is synthesized)
ggtgcttctggcatggagtgggttggggcagggacgctgctcagcaccctgcagcgcctaggacagccccacctcagagaacagtctggccccgacgtccacagggccgagtgggagaga

SEQ ID NO: 479798 - DNA, 120 bp, Artificial Sequence
  ENSG00000160953_36 (sequence is synthesized)
ctctgctctgaaccgaatggactctgttaaaaatgtgtttaccataatcacaaaagtaaaaaatagggatgatttcttaatgtcaggtatgtattgtgtattcaggatactctttttttt

SEQ ID NO: 479799 - DNA, 81 bp, Artificial Sequence
  ENSG00000160953_37 (sequence is synthesized)
tgtcaggtatgtattgtgtattcaggatactcttttttttttataacaataaacttaaggccgggtgtggtggctcgcatc

SEQ ID NO: 479800 - DNA, 120 bp, Artificial Sequence
  ENSG00000160953_38 (sequence is synthesized)
agcctgggcgacagggcgagactctgtaccagaaaaaaccgccaccaaaaaaaaaacttaaaatttttgagaaatgctcttgtgggtttgggtcttgccttttcttctctgcttttagtg

SEQ ID NO: 479801 - DNA, 120 bp, Artificial Sequence
  ENSG00000160953_39 (sequence is synthesized)
tttagtgatctgagctattgtgtctagtccgaaagatagtactgatttaattaagaaacatcattacaagcagggattcatggactaggtttgcaccttctgaaccatgagctagaccat

SEQ ID NO: 479802 - DNA, 120 bp, Artificial Sequence
  ENSG00000160953_40 (sequence is synthesized)
gtctggaggctggaacctggtgacccaggctccctgcggccttcttaaccgcaggccacttggggccagttgggcagtgcctgctgctattgagccccgtgccctctcacaggccatcat

SEQ ID NO: 479803 - DNA, 120 bp, Artificial Sequence
  ENSG00000160953_41 (sequence is synthesized)
ccaggaggtgggggccaaggtgctccagcgcaccaacggcgaccggatccggttcattctggacgtgcttctgcccgaggtgagccgcggaccggcgtgtcacgtgggcagggaggggcc

SEQ ID NO: 479804 - DNA, 120 bp, Artificial Sequence
  ENSG00000160953_42 (sequence is synthesized)
tgcgctgggattttgcaactccgcacgaggaggctgccacggtcctcgcccctgctccctggccgttcggcggccaacggagcgtggaggcctcctgtgtttacatcctgtcagtgctgg

SEQ ID NO: 479805 - DNA, 120 bp, Artificial Sequence
  ENSG00000160953_43 (sequence is synthesized)
cgggcgcacagatgcttcccagcctcggtgggtcagtcctgggaaacccactgcgagttggaaattcccaagtcagaatcgcatttagtacccagataaacccactgtaagttgaaaaac

SEQ ID NO: 479806 - DNA, 120 bp, Artificial Sequence
  ENSG00000160953_44 (sequence is synthesized)
acagcaagattaagcagcagcacggcccggtgctttccagcagccagaagaatgctgtgatcaagatgtttctctcacatccgtgtgcttagctgcccttggatgtttggcccccagagc

SEQ ID NO: 479807 - DNA, 120 bp, Artificial Sequence
  ENSG00000160953_45 (sequence is synthesized)
gcctaatcctgtctctgggcatgcggccaggccttgctgggagccaggcggggcccacggggcagtgacaggctgaagactcaactagagtcaaggacagggtctccggccagggtggct

SEQ ID NO: 479808 - DNA, 120 bp, Artificial Sequence
  ENSG00000160953_46 (sequence is synthesized)
tgcgcagccaccgacgtctcccgggcccacagtcacaggagactcctggtgaagacactgaactccctcaccagccccatgtcctccctgggcagggcaggaggggcccctggagaggcc

SEQ ID NO: 479809 - DNA, 120 bp, Artificial Sequence
  ENSG00000160953_47 (sequence is synthesized)
agggaggaggtgtggggcctcggtggcattggcaggccacccccgcagagctgcacaaaggtggaatttggccttgtttagggagtgttggcccagctggcttaccaaaacaggaaaggc

SEQ ID NO: 479810 - DNA, 120 bp, Artificial Sequence
  ENSG00000160953_48 (sequence is synthesized)
aaatggatccgctttcttaaacctttccagaatttgcccctagaaccactcctattcttgacgcccagaatggtcagtggtgagcatcaaggtcatctcgtacccccgtggcctccagta

SEQ ID NO: 479811 - DNA, 120 bp, Artificial Sequence
  ENSG00000160953_49 (sequence is synthesized)
cacaagacgaggaaggactttgctgccataaggggggaggtcctcctttttcctttcctcttcctatagtaagatttgctgtggtactgtcgctgcctggccagtctggtctcagcccaa

SEQ ID NO: 479812 - DNA, 120 bp, Artificial Sequence
  ENSG00000160953_50 (sequence is synthesized)
ggtttgagaagcagttggttgtgtgtttaaaattccagagcagagcccaagggagagaacgggtggcctggcactggggttggtggcacccattgtttgaggcactgtcatggggggcac

SEQ ID NO: 479813 - DNA, 120 bp, Artificial Sequence
  ENSG00000160953_51 (sequence is synthesized)
gaggcaggtcggaagtggagctctcggcttcccatccatccgggtgcgctttctcccaggccttcagtttagcacccacctcctttgcacactgtgggtgagaaaagctttgcctgagtc

SEQ ID NO: 479814 - DNA, 120 bp, Artificial Sequence
  ENSG00000160953_52 (sequence is synthesized)
gtgcaaacccaaacctgccagccttccttctcaaagtggaactgtttatcccatttgcaaataattgtttctcttgtgaaaagatggaccggaattccttccaatgatgtttataaaatc

SEQ ID NO: 479815 - DNA, 120 bp, Artificial Sequence
  ENSG00000160953_53 (sequence is synthesized)
aggtctattttcctgtgtcttccgaaaaacagctcttgtttaaagcaggatccatctctgcataacttaggccgggctgaccatcatcttggatggcgtcgtccttgttggcgcagattg

SEQ ID NO: 479816 - DNA, 120 bp, Artificial Sequence
  ENSG00000160953_54 (sequence is synthesized)
tgttggggggctggttgtttgtgggcgcctttaatattcaaaggggagaatactgttctgattgaggcattatgcccgctgagttgtgatattacatccatcatcttgttcaaataaata

SEQ ID NO: 479817 - DNA, 120 bp, Artificial Sequence
  ENSG00000160953_55 (sequence is synthesized)
gcgccgtatctatatgtcggaatgaataaataaaagtgctgcagcagggaggttgggctggaaaccagaggcccacgatgctctttgctggctttgaaatgcccttgcaaagaagtattg

SEQ ID NO: 479818 - DNA, 120 bp, Artificial Sequence
  ENSG00000160953_56 (sequence is synthesized)
aaaatttaccagcccacaatgagtcttttaaatctccttttccttgctaccaccaacccctgcaccaaccaagaatacgttgccagcagagttctttatttagttggcattggtttttat

SEQ ID NO: 479819 - DNA, 120 bp, Artificial Sequence
  ENSG00000160953_57 (sequence is synthesized)
tgaccctgattgaatttgaaattgtaaggctgagagaggatttgcaaaacatttgaatacattttgctcacggtattgttttgtaacttggaggaatttatctttttagccaatcaggtt

SEQ ID NO: 479820 - DNA, 120 bp, Artificial Sequence
  ENSG00000160953_58 (sequence is synthesized)
atacttcaatcccctactcccccaaaacagttgaagcccagcccactcttaatgggcttattcaccatttgtgtaattcattaatgctcataataacctcatgagaaagcaactagtttg

SEQ ID NO: 479821 - DNA, 120 bp, Artificial Sequence
  ENSG00000160953_59 (sequence is synthesized)
attttatgtcagtttggaagctgaagatccaaacgaggcattctgtgagatctatggagagattggtacaaacactgaatacatgtaaattatactcagggtagaccctatttgtggtta

SEQ ID NO: 479822 - DNA, 120 bp, Artificial Sequence
  ENSG00000160953_60 (sequence is synthesized)
aaatagggatatttccttttttttttttttttttgactgtttcttaatcagtgccatgccaggaaaatagggatgtttccttcccagagatctgtgtgtcttttttcagaaacgtctgtg

SEQ ID NO: 479823 - DNA, 120 bp, Artificial Sequence
  ENSG00000160953_61 (sequence is synthesized)
acaggcccatcaattttgaaatatttggtttttgagcctgtcactctaaaccagcgtttaacgttcaaaaggcaaataactgatgaccaggcggcacattgttctgctccgtgagtgtct

SEQ ID NO: 479824 - DNA, 120 bp, Artificial Sequence
  ENSG00000160953_62 (sequence is synthesized)
ggcactgggaaaggtgtagattgtctagaatgacagcaattccgacgccccagtcagtcctgcgtgattgtggcgagggcgcgtctggcaccgggaaggtgtagatcatctagaatgacg

SEQ ID NO: 479825 - DNA, 120 bp, Artificial Sequence
  ENSG00000160953_63 (sequence is synthesized)
gcgattccgacgccccggtcagtcctgcgtgattggcgagggtgcatctgtcgtgagaattcccagttctgaagagagcaaggagactgatcccgcgtagtccaaggcattggctcccct

SEQ ID NO: 479826 - DNA, 120 bp, Artificial Sequence
  ENSG00000160953_64 (sequence is synthesized)
cttgtggagctccccctgccccactccctcctgcctgcatcttcagagctgcctctgaagctcgcttggtccctagctcacactttccctgcggctgggaaggtaattgaatactcgagt

SEQ ID NO: 479827 - DNA, 120 bp, Artificial Sequence
  ENSG00000160953_65 (sequence is synthesized)
ttaaaaggaaagcacatccttttaaaccaaaacacacctgctgggctgtaaacagcttttagtgacattaccatctactctgaaaatctaacaaaggagtgatttgtgcagttgaaagta

SEQ ID NO: 479828 - DNA, 120 bp, Artificial Sequence
  ENSG00000160953_66 (sequence is synthesized)
ggatttgcttcataaaagtcacaatttgaattcatttttgcttttaaatccagccaaccttttctgtcttaaaaggaaaaaaaaaaaaaaaccattcaccagggttcttgctgcctgtaa

SEQ ID NO: 479829 - DNA, 120 bp, Artificial Sequence
  ENSG00000160953_67 (sequence is synthesized)
cctcaggcagatgaattcctagttggctgtgacttttggtttaagtggaaggttgaggaggaaaatgaaaataattcttttgttatctaaaggaaaacatgtttgaaaatgtcttggcgg

SEQ ID NO: 479830 - DNA, 120 bp, Artificial Sequence
  ENSG00000160953_68 (sequence is synthesized)
cgttggctggtggtgtgtaacgtcgattttgtctctgcagaattaaggtgaaaagcactgaagttgagatcctagagaagtctcaaattgaagccattgcttcctcgttagggaacgcga

SEQ ID NO: 479831 - DNA, 120 bp, Artificial Sequence
  ENSG00000160953_69 (sequence is synthesized)
tatccactgattgcttcagatgtgaagggacagccaggccgggacaaaagggattcccacccagggtgcgcgcagcttctgtggccgaggtggctgctgcttacggcccgccttcccttc

SEQ ID NO: 479832 - DNA, 120 bp, Artificial Sequence
  ENSG00000160953_70 (sequence is synthesized)
accgcaggcctctctccctccctccttccctccttccctccttccctcttgcgtttttctttaaaatgtagtttattagaagcgcactctgtttgaatttggcagtgtggagttgtgtat

SEQ ID NO: 479833 - DNA, 80 bp, Artificial Sequence
  ENSG00000160953_71 (sequence is synthesized)
ggcggtgagcgcgggcggcgcggacggcagcggttggcgggcgggtcctccgctgttgcggccgctgcggcctccttgcc

SEQ ID NO: 479834 - DNA, 120 bp, Artificial Sequence
  ENSG00000160953_72 (sequence is synthesized)
aggcgtctgccagagccccctttgtcagggagggtcagaggtgcgggctggagcgtgagcagcctggacacctggctggtccctgggctctgcgtggcttctgaacccagggtgcttggc

SEQ ID NO: 479835 - DNA, 120 bp, Artificial Sequence
  ENSG00000160953_73 (sequence is synthesized)
cggggtctgactgcaggacaaagggccgggagcgcgggagggcggcgcccgggagcggccacacatgccccgccaaccggtctcctcaggcagcactcccgggaaaaaggggtagacgcg

SEQ ID NO: 479836 - DNA, 120 bp, Artificial Sequence
  ENSG00000160953_74 (sequence is synthesized)
ctcaggcagcactcccgggaaaaaggggtagacgcgcggcggaaggggcggggccggcgcgcggccgtggacgccggagagggcgaggccggcgctccttgggagcgcgcgcgtcccatt

SEQ ID NO: 479837 - DNA, 120 bp, Artificial Sequence
  ENSG00000160953_75 (sequence is synthesized)
ctttggatacagaaactgggtgttttcctgctggatcttcatggttcccccgtcatgcttgccgtaagaataagtgaggtccggggagggggtaaggtcggagccaggacacctggaccc

SEQ ID NO: 479838 - DNA, 120 bp, Artificial Sequence
  ENSG00000160953_76 (sequence is synthesized)
gaaatctttcatcctgatttttttttttgagtctgggttgccgacatcaaaacccgttaggagttcatcacagcttccagttgccatgaaagcctcccgtgacctgtgagaatggtgctg

SEQ ID NO: 479839 - DNA, 80 bp, Artificial Sequence
  ENSG00000160957_0 (sequence is synthesized)
agattcgctggacgatcgcaagcgcggaggccgggcgggcgcgcgcgccatggagcggctgcgggacgtgcgggagcggc

SEQ ID NO: 479840 - DNA, 120 bp, Artificial Sequence
  ENSG00000160957_1 (sequence is synthesized)
gcgaccgagccaggacgacgtggaggcggcgccggaggagacccgcgcgctctaccgggaataccgcactctgaagcgtaccacgggccaggccggcggcgggctccgcagctccgagtc

SEQ ID NO: 479841 - DNA, 120 bp, Artificial Sequence
  ENSG00000160957_2 (sequence is synthesized)
gctccccgcggcggccgaagaggcgccagagccccgctgctgggggccccatctgaatcgggctgcgaccaagagtccacagtctacgccagggcggagccgccagggctcggtgccgga

SEQ ID NO: 479842 - DNA, 120 bp, Artificial Sequence
  ENSG00000160957_3 (sequence is synthesized)
ctacgggcagcggctcaaggccaatctgaaaggcaccctgcaggccggaccagccctgggccgcagaccgtggcctctaggaagagcctcatctaaggcatccaccccaaagcccccagg

SEQ ID NO: 479843 - DNA, 120 bp, Artificial Sequence
  ENSG00000160957_4 (sequence is synthesized)
tacagggcctgtcccctcctttgcagaaaaagtcagtgatgagcctccacagctccctgagccccagccaaggccaggccggctccagcatctgcaggcatccctgagccagcggctggg

SEQ ID NO: 479844 - DNA, 120 bp, Artificial Sequence
  ENSG00000160957_5 (sequence is synthesized)
ctccctagatcctggctggttacagcgatgtcacagtgaggtcccagattttctgggggcccccaaagcctgcaggcctgatctaggctcagaggaatcacaacttctgatccctggtga

SEQ ID NO: 479845 - DNA, 120 bp, Artificial Sequence
  ENSG00000160957_6 (sequence is synthesized)
gtcggctgtccttggtcctggtgctggctcccagggcccagaggcttcagccttccaagaagtcagcatccgtgtggggagcccccagcccagcagcagtggaggcgagaagcggagatg

SEQ ID NO: 479846 - DNA, 120 bp, Artificial Sequence
  ENSG00000160957_7 (sequence is synthesized)
gaacgaggagccctgggagagccccgcacaggtccagcaggagagcagccaagctggacccccatcggagggggctggggctgtagcagttgaggaagaccctccaggggaacctgtaca

SEQ ID NO: 479847 - DNA, 120 bp, Artificial Sequence
  ENSG00000160957_8 (sequence is synthesized)
ggcacagccacctcagccctgcagcagcccatcgaaccccaggtaccacggactcagcccctccagtcaagctagggctgggaaggctgagggcacagcccccctgcacatcttccctcg

SEQ ID NO: 479848 - DNA, 120 bp, Artificial Sequence
  ENSG00000160957_9 (sequence is synthesized)
gctggcccgccatgacaggggcaattacgtacggctcaacatgaagcagaaacactacgtgcggggccgggcactccgtagcaggctcctccgcaagcaggcatggaagcagaagtggcg

SEQ ID NO: 479849 - DNA, 120 bp, Artificial Sequence
  ENSG00000160957_10 (sequence is synthesized)
gaagaaaggggagtgttttgggggtggtggtgccacagtcacaaccaaggagtcttgtttcctgaacgagcagttcgatcactgggcagcccagtgtccccggccagcaagtgaggaaga

SEQ ID NO: 479850 - DNA, 120 bp, Artificial Sequence
  ENSG00000160957_11 (sequence is synthesized)
cacagatgctgttgggcctgagccactggttccttcaccacaacctgtacctgaggtgcccagcctggaccccaccgtgctgccactctactccctggggccctcagggcagttggcaga

SEQ ID NO: 479851 - DNA, 120 bp, Artificial Sequence
  ENSG00000160957_12 (sequence is synthesized)
gacgccggctgaggtgttccaggccctggagcagctggggcaccaagcctttcgccctgggcaggagcgtgcagtcatgcggatcctgtctggcatctccacgctgctggtgctgcctac

SEQ ID NO: 479852 - DNA, 120 bp, Artificial Sequence
  ENSG00000160957_13 (sequence is synthesized)
aggtgccggcaagtccctgtgctaccagctcccagcgctgctctacagccggcgcagcccctgcctcacgttggtcgtctctcccctgctgtcactcatggatgaccaggtgtctggcct

SEQ ID NO: 479853 - DNA, 120 bp, Artificial Sequence
  ENSG00000160957_14 (sequence is synthesized)
gccaccgtgtctcaaggcggcctgcatacactcgggcatgaccaggaagcaacgggaatctgtcctgcagaagattcgggcagcccaggtacacgtgctgatgctgacacctgaggcact

SEQ ID NO: 479854 - DNA, 120 bp, Artificial Sequence
  ENSG00000160957_15 (sequence is synthesized)
ccggccctgctacctgcgcgtctgcaaggtgcttcgggagcgcatgggcgtgcactgcttcctgggcctcacagccacagccacacgccgcactgccagtgacgtggcacagcacctggc

SEQ ID NO: 479855 - DNA, 120 bp, Artificial Sequence
  ENSG00000160957_16 (sequence is synthesized)
tgtggctgaagagcctgacctccacgggccagccccagttcccaccaacctgcacctttccgtgtccatggacagggacacagaccaggcactgttgacgctgctgcaaggcaaacgttt

SEQ ID NO: 479856 - DNA, 120 bp, Artificial Sequence
  ENSG00000160957_17 (sequence is synthesized)
tcaaaacctcgattccattatcatttactgcaaccggcgcgaggacacagagcggatcgctgcgctcctccgaacctgcctgcacgcagcctgggtcccagggtctggaggtcgtgcccc

SEQ ID NO: 479857 - DNA, 120 bp, Artificial Sequence
  ENSG00000160957_18 (sequence is synthesized)
caaaaccacagccgaggcctaccacgcgggcatgtgcagccgggaacggcggcgggtacagcgagccttcatgcagggccagttgcgggtggtggtggccacggtggcctttgggatggg

SEQ ID NO: 479858 - DNA, 120 bp, Artificial Sequence
  ENSG00000160957_19 (sequence is synthesized)
gctggaccggccagatgtgcgggctgtgctgcatctggggctgcccccaagcttcgagagctacgtgcaggccgtgggccgggccgggcgtgacgggcagcctgcccactgccacctctt

SEQ ID NO: 479859 - DNA, 120 bp, Artificial Sequence
  ENSG00000160957_20 (sequence is synthesized)
cctgcagccccagggcgaagacctgcgagagctgcgcagacatgtgcacgccgacagcacggacttcctggctgtgaagaggctggtacagcgcgtgttcccagcctgcacctgcacctg

SEQ ID NO: 479860 - DNA, 120 bp, Artificial Sequence
  ENSG00000160957_21 (sequence is synthesized)
caccaggccgccctcggagcaggaaggggccgtgggtggggagaggcctgtgcccaagtacccccctcaagaggctgagcagcttagccaccaagcagccccaggacccagaagggtctg

SEQ ID NO: 479861 - DNA, 120 bp, Artificial Sequence
  ENSG00000160957_22 (sequence is synthesized)
catgggccatgagcgggcactcccaatacagcttaccgtacaggctttggacatgccggaggaggccatcgagactttgctgtgctacctggagctgcacccacaccactggctggagct

SEQ ID NO: 479862 - DNA, 120 bp, Artificial Sequence
  ENSG00000160957_23 (sequence is synthesized)
gctggcgaccacctatacccattgccgtctgaactgccctgggggccctgcccagctccaggccctggcccacaggtgtccccctttggctgtgtgcttggcccagcagctgcctgagga

SEQ ID NO: 479863 - DNA, 120 bp, Artificial Sequence
  ENSG00000160957_24 (sequence is synthesized)
cccagggcaaggcagcagctccgtggagtttgacatggtcaagctggtggactccatgggctgggagctggcctctgtgcggcgggctctctgccagctgcagtgggaccacgagcccag

SEQ ID NO: 479864 - DNA, 120 bp, Artificial Sequence
  ENSG00000160957_25 (sequence is synthesized)
gacaggtgtgcggcgtgggacaggggtgcttgtggagttcagtgagctggccttccaccttcgcagcccgggggacttgaccgctgaggagaaggaccagatatgtgacttcctctatgg

SEQ ID NO: 479865 - DNA, 120 bp, Artificial Sequence
  ENSG00000160957_26 (sequence is synthesized)
ccgtgtgcaggcccgggagcgccaggccctggcccgtctgcgcagaaccttccaggcctttcacagcgtagccttccccagctgcgggccctgcctggagcagcaggatgaggagcgcag

SEQ ID NO: 479866 - DNA, 120 bp, Artificial Sequence
  ENSG00000160957_27 (sequence is synthesized)
caccaggctcaaggacctgctcggccgctactttgaggaagaggaagggcaggagccgggaggcatggaggacgcacagggccccgagccagggcaggccagactccaggattgggagga

SEQ ID NO: 479867 - DNA, 120 bp, Artificial Sequence
  ENSG00000160957_28 (sequence is synthesized)
ccaggtccgctgcgacatccgccagttcctgtccctgaggccagaggagaagttctccagcagggctgtggcccgcatcttccacggcatcggaagcccctgctacccggcccaggtgta

SEQ ID NO: 479868 - DNA, 120 bp, Artificial Sequence
  ENSG00000160957_29 (sequence is synthesized)
cgggcaggaccgacgcttctggagaaaatacctgcacctgagcttccatgccctggtgggcctggccacggaagagctcctgcaggtggcccgctgactgcactgcattgggggatgtcg

SEQ ID NO: 479869 - DNA, 120 bp, Artificial Sequence
  ENSG00000160957_30 (sequence is synthesized)
ggtagagctggggttgtcagaggctagggcagtgactgaggacctgggcaaaacctgccacagggtgtgggaacgaggaggctccaaaatgcagaataaaaaatgctcactttgttttta

SEQ ID NO: 479870 - DNA, 120 bp, Artificial Sequence
  ENSG00000160957_31 (sequence is synthesized)
ccaatctgaaaggcaccctgcaggtgaggagtgggcaggcagtgagtccacgctaggtccacagctgcttccggtccgggtcgccctcttgtcattttttccacacagacaggcacgggc

SEQ ID NO: 479871 - DNA, 120 bp, Artificial Sequence
  ENSG00000160957_32 (sequence is synthesized)
ccctgtgccaaccagggcacgagtcttcagggagcttctcggggccttcgcccttgactccctttctagtccagccttgtgctaattagcctgctctacaattgagcgtggggactcagg

SEQ ID NO: 479872 - DNA, 120 bp, Artificial Sequence
  ENSG00000160959_0 (sequence is synthesized)
ggcggacggtctaggcggggctggaggcggtggctgcggttgcgggaccggcactatgctgggccttcctaccacttgtgtgtggcttggtagtggcctagggtctctcctccctgctga

SEQ ID NO: 479873 - DNA, 120 bp, Artificial Sequence
  ENSG00000160959_1 (sequence is synthesized)
agtccctctcctgcaggtggccgtctgcccggcccagcaccatgcacacgcttgtgttcttgagcacacggcaggtgctgcagtgccagccagctgcctgccaggccctgcccttgctgc

SEQ ID NO: 479874 - DNA, 120 bp, Artificial Sequence
  ENSG00000160959_2 (sequence is synthesized)
cacgcgaactcttccccctgctgttcaaggtggccttcatggacaagaagacagtggtactgcgcgagttggtacacacgtggcccttcccgctgctcagtttccagcagctgctacagg

SEQ ID NO: 479875 - DNA, 120 bp, Artificial Sequence
  ENSG00000160959_3 (sequence is synthesized)
agtgtgcccactgcagccgtgccctcctgcaggagcggcctagcactgagagcatgcaggctgttatcctggggctgactgcccggctccacacctcagagcctggggccagcacacagc

SEQ ID NO: 479876 - DNA, 120 bp, Artificial Sequence
  ENSG00000160959_4 (sequence is synthesized)
ccctctgcaggaagcatgcgctgcgggtgctggacatgacgggcctcttggatgatggtgtggaacaggatcctggcaccatgagcatgtgggactgtactgctgccgtagctcgcacat

SEQ ID NO: 479877 - DNA, 120 bp, Artificial Sequence
  ENSG00000160959_5 (sequence is synthesized)
gcattgcccagcagcagggtggggccgcagagcctgggccagcccccatccccgtggaggtgcgcgtggacctgcgggtgaaccgggcctcctatgcgttcctgcgggaggcactccgaa

SEQ ID NO: 479878 - DNA, 120 bp, Artificial Sequence
  ENSG00000160959_6 (sequence is synthesized)
gcagcgtgggcagcccgctgcggctctgctgccgggacctgcgagctgaggacctgcccatgcgcaacactgtggccctgctgcagcttctggatgcaggctgcctgcgccgcgtggacc

SEQ ID NO: 479879 - DNA, 120 bp, Artificial Sequence
  ENSG00000160959_7 (sequence is synthesized)
tgcgcttcaacaatctgggcctgcgcggcctgtctgtgatcatcccacacgtggcccgcttccagcacctggccagcctgcggctccactatgtgcatggggattcaaggcagccctccg

SEQ ID NO: 479880 - DNA, 120 bp, Artificial Sequence
  ENSG00000160959_8 (sequence is synthesized)
tggatggcgaggacaacttccgctacttccttgcccagatgggccgcttcacctgtctgcgtgagctcagcatgggctcctctctcctttcagggaggctggaccagctgctcagcaccc

SEQ ID NO: 479881 - DNA, 120 bp, Artificial Sequence
  ENSG00000160959_9 (sequence is synthesized)
tgcagagccccctggagagcctggagttggccttctgtgctctgctgcctgaggacctacgcttcctggcacggagcccacatgctgcccacctcaagaagttggacctgagtggtaacg

SEQ ID NO: 479882 - DNA, 120 bp, Artificial Sequence
  ENSG00000160959_10 (sequence is synthesized)
acctgtctggcagccagctggcacccttccagggtctgttgcaggcatcagcagccacactgttgcatctggagctgactgagtgtcagctcgcagacacccagctgttggccacactac

SEQ ID NO: 479883 - DNA, 120 bp, Artificial Sequence
  ENSG00000160959_11 (sequence is synthesized)
ccatcctgactcagtgcgccagtctccggtaccttggcctctatggcaacccactgtccatggcgggcctcaaggagctgctgcgggactcagtggcacaggctgagctgcgtactgtgg

SEQ ID NO: 479884 - DNA, 120 bp, Artificial Sequence
  ENSG00000160959_12 (sequence is synthesized)
tgcaccccttccctgtggactgctatgagggcttgccctggccgccgcctgcctctgtcctgctggaggcctccatcaatgaggagaagtttgcccgcgtagaagctgagttgcaccagc

SEQ ID NO: 479885 - DNA, 120 bp, Artificial Sequence
  ENSG00000160959_13 (sequence is synthesized)
tgcttctagcctcaggccgtgcccatgtgctctggaccacggacatctacgggcgactggctgcggactacttcagcctatgatgaagtagctctgggtgagacacaggccgccctgcag

SEQ ID NO: 479886 - DNA, 120 bp, Artificial Sequence
  ENSG00000160959_14 (sequence is synthesized)
tctctttaggtaggcagggcctttgctgggacccctggtggaggccttcacaaaagcactggttactggtttcctgctgggtctaccttgcttctgggcacacctcaagcctcccctgct

SEQ ID NO: 479887 - DNA, 120 bp, Artificial Sequence
  ENSG00000160959_15 (sequence is synthesized)
ttctgcagtgccccacgcggttttccctgcacttgctccataattggctgatcatctgtgggccccggggctggatgtcaggcctccattgccctgctcagtttggctgcatttggctgc

SEQ ID NO: 479888 - DNA, 120 bp, Artificial Sequence
  ENSG00000160959_16 (sequence is synthesized)
cgtctggggtcctggtcctttgtgcaaatgctttgggattccagttgtgagctgagagagatgatggcctctctgggcctttcctctccctttactgagagctcagtgcttctggggttg

SEQ ID NO: 479889 - DNA, 120 bp, Artificial Sequence
  ENSG00000160959_17 (sequence is synthesized)
aagttggacagaggcctgcttcagggaagctgggagtccccaggcactcacgcctcttacgtgttccctaccctgccacccagccaccccactgggctgggctcgggctggagggggtca

SEQ ID NO: 479890 - DNA, 120 bp, Artificial Sequence
  ENSG00000160959_18 (sequence is synthesized)
tcaaggtacacatgtgcctggaagttgaatttgtggctgtttttttttctgtccacgttggtcacccttatccttatctctgctgtcacccccaacatggccacccggcaacaactgcca

SEQ ID NO: 479891 - DNA, 120 bp, Artificial Sequence
  ENSG00000160959_19 (sequence is synthesized)
tccagcctgtcgccccgcccttcgcggggcagccccgtcggcactgccggccagtccttgctcttcccacctttcggaggcccaagatcctactgtggccggccagggccagcgagggac

SEQ ID NO: 479892 - DNA, 120 bp, Artificial Sequence
  ENSG00000160959_20 (sequence is synthesized)
cccccccatgcagagctggaggttggggtgatgtcttttcggaagagcttcaagggaggtgttggggcctccccggccaccttccattgctaccccaggattcccgagtgcaacgttccc

SEQ ID NO: 479893 - DNA, 120 bp, Artificial Sequence
  ENSG00000160959_21 (sequence is synthesized)
ggctcgcgccccacacacggctcagcgcacactgcgcggcttccacctttactgacggagcatgcgcgaggccgcaccggccaatctccggcgcccacgtcatccgcgcgcccgcggccc

SEQ ID NO: 479894 - DNA, 120 bp, Artificial Sequence
  ENSG00000160959_22 (sequence is synthesized)
tgttccgggccgcagtcagcgggcgcctccgccggaccctcggcgaagagcggcttggagcggttgatgacgaacatctcgtggccgcgctcgtcgcggagctcctctagctgtgcgaac

SEQ ID NO: 479895 - DNA, 120 bp, Artificial Sequence
  ENSG00000160959_23 (sequence is synthesized)
gtacaggggccgtccaagtagtcgttgacgaacagcgctccctcccccggaggcccccgcgccttttttcgcctgcggcgccggcgacagatcatggcgaccaggagcagcgccgtgagc

SEQ ID NO: 479896 - DNA, 120 bp, Artificial Sequence
  ENSG00000160959_24 (sequence is synthesized)
catggcgaccaggagcagcgccgtgagcgccagcagcgcgatggccgccgcaatggccgtctgtgtggccacgcccagggcgcggaaggccatgctgcccgcctcgggccggggctcgct

SEQ ID NO: 479897 - DNA, 120 bp, Artificial Sequence
  ENSG00000160959_25 (sequence is synthesized)
ggttgcgcgggctgctgcggctgctgccgggacgcgttgaccaggagccggaagggcacgcgggcagcgccgccggcgttggaggcctcgcactcgtacttaccggcgtgcgccagcgtg

SEQ ID NO: 479898 - DNA, 120 bp, Artificial Sequence
  ENSG00000160959_26 (sequence is synthesized)
atgttgctgaggaagagcatgccgctgcccgtgtcggatgccgagtgtccgcccaggcccagcaacccgccttctagctgggcctgggctcgcggccggccctcgcgaggctggggcacc

SEQ ID NO: 479899 - DNA, 120 bp, Artificial Sequence
  ENSG00000160959_27 (sequence is synthesized)
tttctccaggtcaccaatggctgcgggtagccggaggcttggcaggcaacccgcaggtcctcacccaggttggctgtgagctccagcggctgcacgtggacagagggcggaatgcagatg

SEQ ID NO: 479900 - DNA, 120 bp, Artificial Sequence
  ENSG00000160959_28 (sequence is synthesized)
aggctgctgtgggatacgtccaggagactctggagcgccaggcgcgggggctctgcacacatgatcttcctgtccctggaggtgagcagccgctggccgccctccttgatccaggcaccc

SEQ ID NO: 479901 - DNA, 120 bp, Artificial Sequence
  ENSG00000160959_29 (sequence is synthesized)
agccagtgcagggcgcagtcacagcgccatgggttctctgtgggagagcagcgttaggcaggtggcttgagggtgctgctaaaacagcctgtgcagttggggttttgcaggccaggacag

SEQ ID NO: 479902 - DNA, 120 bp, Artificial Sequence
  ENSG00000160959_30 (sequence is synthesized)
aggcctctttcccacctcccacagcgttttcacacggagtccaaggccctgccaccccttccttgaccccaagctccttggggcggcaggcccttcaccctcgcccccctcccctttagc

SEQ ID NO: 479903 - DNA, 120 bp, Artificial Sequence
  ENSG00000160959_31 (sequence is synthesized)
tctgtgatgcctgcctgttacagatcacttctccgtcggtctctgagaaagcacctgctccttaagtcttcctgcaacaagtgccactgtttttaggaacctgggcgtccacatagacat

SEQ ID NO: 479904 - DNA, 120 bp, Artificial Sequence
  ENSG00000160959_32 (sequence is synthesized)
ctcaccagcactgaaacctcacaagtcctctcagccttgcctttggatgccctctcttgggaatgtccccagtcctggtcagctgtctctctcctttgcaattttgtctgcctcccctca

SEQ ID NO: 479905 - DNA, 120 bp, Artificial Sequence
  ENSG00000160959_33 (sequence is synthesized)
gcctaaaagtgtgcagaaccctcaattctgttaagtcaccctgtggagttcctgtcttctgttttccccaggcagggtgcctgagctgtattccccagcacacccactcccgcagccctc

SEQ ID NO: 479906 - DNA, 120 bp, Artificial Sequence
  ENSG00000160959_34 (sequence is synthesized)
cagtgtggctgcaggcggtggtgcagccttccagactgctgcccagttgcctgatgtcagagcccctccacacatgagcctgctccctactgccaacaccgtggcccagacagagacgct

SEQ ID NO: 479907 - DNA, 120 bp, Artificial Sequence
  ENSG00000160959_35 (sequence is synthesized)
ttccgaggaagaggtacctgtgaggcgcaggacttgcagactggccaggggctgcagggcctctcggctgatggtgcccagctggttcctgctgaggtccagcagtgctagggaggacag

SEQ ID NO: 479908 - DNA, 120 bp, Artificial Sequence
  ENSG00000160959_36 (sequence is synthesized)
ccccgctagagcctggtcctccagcagctcaatgctgttttcttgcaggtgaagctcctgcagtcgctgaagtaaggacagcagatcgtgaggaaaaagggcgccgaggttgggggcatg

SEQ ID NO: 479909 - DNA, 120 bp, Artificial Sequence
  ENSG00000160959_37 (sequence is synthesized)
tctctcttcttaccaagctagactgggttgccttttctaactattccagccctacagggcgaggggccataatggagtatcccgcccctttagaccccaggcgctcaccggcaggtgcaa

SEQ ID NO: 479910 - DNA, 120 bp, Artificial Sequence
  ENSG00000160959_38 (sequence is synthesized)
gaaggtgaaatccagcagccgcgccagctggttgcccgccaggtagagcacgcgcagctgggccaggcctacgaaggcgccgctgcgcaagccgcgcagccggttgctagtgagcgccag

SEQ ID NO: 479911 - DNA, 120 bp, Artificial Sequence
  ENSG00000160959_39 (sequence is synthesized)
ctccagcaggcgcggctgcgcgcggaaggcgccggcctccagggcgcgcaggctgttgttgtgcaggtagagccggcgcagagcggcgagtggcgccagggctcccggctctaggcgggc

SEQ ID NO: 479912 - DNA, 120 bp, Artificial Sequence
  ENSG00000160959_40 (sequence is synthesized)
gatgttgttgtcctgcaggaacagtgtctgcaggccggggaaagaggaggcgcttaccccgttgcgggggtcttcctctccctgggggcaccccgtcctcccgcagctccacacggtgcc

SEQ ID NO: 479913 - DNA, 120 bp, Artificial Sequence
  ENSG00000160959_41 (sequence is synthesized)
cacctgcgtccctggcgggattcccagcgggacgacgcgcaaccgcagggcgccacactccaccgtggcgctgtagcagcggcaggctgctgggcagccggcggcgcggagcggcagtag

SEQ ID NO: 479914 - DNA, 120 bp, Artificial Sequence
  ENSG00000160959_42 (sequence is synthesized)
tagcagcagcagcggcagcagtgcgggggccctcagggccatctcccgaggcccggttcctcaccggcccttccgcggttcagccgcagacgcgtgccctcctgaaacacaggttggcag

SEQ ID NO: 479915 - DNA, 120 bp, Artificial Sequence
  ENSG00000160959_43 (sequence is synthesized)
gccagtctcggcagtcgagagccagccaatagatggaatggaggcctgcacctgcgtctaacttttgacgctataaataggttcaagaaactaataaaacgttctggttttctcctttga

SEQ ID NO: 479916 - DNA, 120 bp, Artificial Sequence
  ENSG00000160959_44 (sequence is synthesized)
ggcggggctggaggcggtggctgcggttgcgggaccgggagatggctgcgatttagttttgaggatgctacaggcagcagcagggctggcaccctgtgtcacaggcactatgctgggcct

SEQ ID NO: 479917 - DNA, 120 bp, Artificial Sequence
  ENSG00000160959_45 (sequence is synthesized)
cttcgcgaaacgcaggcgaccgaggaccgtcgcgttccctgcggccggcgggaggggagggggcgtcgcacggaggtgcctgcctcccttggtgggcaggccgtctgctttggtgttctc

SEQ ID NO: 479918 - DNA, 120 bp, Artificial Sequence
  ENSG00000160959_46 (sequence is synthesized)
ccgtgacaagtgctcggttggtctgtcctgtcagagcgagtatgatcgttgagatctgtccaccggcagaactaggccgagggttggtgtctgggacttttcaggaaccggtgccttaag

SEQ ID NO: 479919 - DNA, 120 bp, Artificial Sequence
  ENSG00000160959_47 (sequence is synthesized)
gacttacttgtatgtggaaaagtcgacaaaaagaagggccttggggccagagtgtcttccccggcccccttccctggcttgtcactcaggctgtgaccttgggccaggccgaggccttca

SEQ ID NO: 479920 - DNA, 120 bp, Artificial Sequence
  ENSG00000160959_48 (sequence is synthesized)
gtgtcccgtcaatactaatgctgatgaaggttggtggggagagtcctgggctttattcaggtttcgaagaaggttttgtgaagcagctttgtaatttgagaggcctgaagtacccatggg

SEQ ID NO: 479921 - DNA, 120 bp, Artificial Sequence
  ENSG00000160959_49 (sequence is synthesized)
gggccctgcaaggcaacaggcatctgtcaaaagcatacccaagcaagcgagttgttgacgatgccacactgcttgacgcttagtttctctaaagagatcctgtgcatctggagggctggg

SEQ ID NO: 479922 - DNA, 120 bp, Artificial Sequence
  ENSG00000160959_50 (sequence is synthesized)
gctgagttgtgagtttgtctgccagttcactgcacccagcccagcgctaggcatctaataggtgcttctctgtgccatggccactgctaactgctgactttgtttcaggcactatgctgg

SEQ ID NO: 479923 - DNA, 120 bp, Artificial Sequence
  ENSG00000160961_0 (sequence is synthesized)
aagcggaagtgcgcgcggcggcggccgacggcggctgagctgtgctgcgcggcgcggcgcggtgcggcacggcacggtgggagtgtctccggctggcttgcagggagaacaccgactgag

SEQ ID NO: 479924 - DNA, 120 bp, Artificial Sequence
  ENSG00000160961_1 (sequence is synthesized)
acctcaaaccctggctccagtgtcatggaatccgtcacctttgaggatgtggccgtggagttcatccaggagtgggcattgctggacagcgcacggaggagcctgtgcaaatacaggatg

SEQ ID NO: 479925 - DNA, 120 bp, Artificial Sequence
  ENSG00000160961_2 (sequence is synthesized)
cttgaccagtgcaggaccctggcctccaggggaactccaccatgcaaacccagttgtgtctcccagctggggcaaagagcagagccaaaggcaacagaacgagggattctccgtgccaca

SEQ ID NO: 479926 - DNA, 120 bp, Artificial Sequence
  ENSG00000160961_3 (sequence is synthesized)
ggtgttgcctgggaatctcaacttaaacccgaagagttgccttctatgcaggatcttttggaagaagcatcctccagggacatgcaaatggggccggggctgttcctgaggatgcagctg

SEQ ID NO: 479927 - DNA, 120 bp, Artificial Sequence
  ENSG00000160961_4 (sequence is synthesized)
gtgccctccatagaagagagggagacaccattgactcgagaggaccggccagctctccaggagccgccttggtctctgggatgcacgggactgaaggccgctatgcagattcagagggtg

SEQ ID NO: 479928 - DNA, 120 bp, Artificial Sequence
  ENSG00000160961_5 (sequence is synthesized)
gtgataccagtgcctactctgggccaccgcaacccatgggtggccagggattctgctgtgcctgcacgtgaccctgcctggcttcaggaggacaaagtggaggaagaagctatggctcct

SEQ ID NO: 479929 - DNA, 120 bp, Artificial Sequence
  ENSG00000160961_6 (sequence is synthesized)
gggctgccaaccgcctgttcacaggaaccagtcacctttgcagatgtggctgtggtgttcaccccagaagaatgggtgtttctggactctactcagaggagcctgtatagagatgtgatg

SEQ ID NO: 479930 - DNA, 120 bp, Artificial Sequence
  ENSG00000160961_7 (sequence is synthesized)
ctggagaactacaggaacctggcctctgtggctgatcaactgtgcaaacccaatgcgttgtcttatttggaagaaagaggagagcagtggaccactgacaggggcgtcctctcagacacc

SEQ ID NO: 479931 - DNA, 120 bp, Artificial Sequence
  ENSG00000160961_8 (sequence is synthesized)
tgtgcagaacctcagtgtcaaccccaagaggcaattcctagccaagatacttttacagagatcctgtccattgatgtgaaaggggagcaacctcagcctggagaaaaactctataaatat

SEQ ID NO: 479932 - DNA, 120 bp, Artificial Sequence
  ENSG00000160961_9 (sequence is synthesized)
aatgaacttgagaaaccttttaacagcattgaaccacttttccagtaccagagaattcatgctggagaggcatcctgtgaatgtcaagagattagaaattccttcttccagagtgcccac

SEQ ID NO: 479933 - DNA, 120 bp, Artificial Sequence
  ENSG00000160961_10 (sequence is synthesized)
ctaattgtgcccgagaaaatccgtagtggggataaatcctatgcatgtaacaaatgtgaaaaatccttcagatacagctctgaccttatcaggcatgagaagactcatactgcagagaag

SEQ ID NO: 479934 - DNA, 120 bp, Artificial Sequence
  ENSG00000160961_11 (sequence is synthesized)
tgctttgactgtcaagaatgtgggcaagccttcaaatattcctcgaatctccggcgacacatgagaacccataccggagagaagccatttgaatgtagtcagtgtgggaaaaccttcacg

SEQ ID NO: 479935 - DNA, 120 bp, Artificial Sequence
  ENSG00000160961_12 (sequence is synthesized)
aggaactttaacctgattttgcaccagagaaaccacacaggagagaagccctacgagtgtaaagattgtgggaaagccttcaatcagccatcatccctcaggagccacgtgagaactcac

SEQ ID NO: 479936 - DNA, 120 bp, Artificial Sequence
  ENSG00000160961_13 (sequence is synthesized)
actggagagaagccctttgaatgcagccagtgtgggaaagccttcagggaacactcttcactgaagacacatctgcgaacccataccagagagaaaccatatgaatgcaaccagtgtggc

SEQ ID NO: 479937 - DNA, 120 bp, Artificial Sequence
  ENSG00000160961_14 (sequence is synthesized)
aagcccttccggacgagcactcatctgaacgtgcacaagaggatacacacaggggagaaactgtatgagtgcgcgacttgcggtcaggtcttgagtcgtctttcaaccctgaagagtcac

SEQ ID NO: 479938 - DNA, 120 bp, Artificial Sequence
  ENSG00000160961_15 (sequence is synthesized)
atgcgaactcacactggagagaagccctatgtgtgccaggaatgtgggcgagccttcagtgagccctcatccctcaggaaacatgcaaggactcacagtggcaagaagccctatgcatgc

SEQ ID NO: 479939 - DNA, 120 bp, Artificial Sequence
  ENSG00000160961_16 (sequence is synthesized)
caggaatgcgggcgagcctttggtcagtcttcacatcttattgtacatgtgagaacacacagtgccgggagaccctatcaatgtaatcagtgtgagaaagccttcaggcacagctcctca

SEQ ID NO: 479940 - DNA, 120 bp, Artificial Sequence
  ENSG00000160961_17 (sequence is synthesized)
ctcactgtacacaaaagaacccatgtgggaagagagaccattaggaatggcagcctgcctttatccatgtctcatccatactgtgggccccttgctaattaacttccattttgtaaaaat

SEQ ID NO: 479941 - DNA, 120 bp, Artificial Sequence
  ENSG00000160961_18 (sequence is synthesized)
ataaacacatggggctatgactttccctcgtaatactcctttagctgcatcctgtgtttcaatgtataatattttcattttggtttaattgtaagtattgtcttaacctccattatcgtt

SEQ ID NO: 479942 - DNA, 120 bp, Artificial Sequence
  ENSG00000160961_19 (sequence is synthesized)
ttcaaaactaatatgtggatatattttcatagaggtataatgacttatagtgaaatgcatacatctgaagtgtacagttggatgagtttgacagatgcatacatgcatgtaaccaccacc

SEQ ID NO: 479943 - DNA, 120 bp, Artificial Sequence
  ENSG00000160961_20 (sequence is synthesized)
ccattccagatatagaatgtttctatctctctggaaggttcctgcatgttatatggctatttcttagttgcctttttgttgttggtttctaatttaattacatggtgagaagagtatgtg

SEQ ID NO: 479944 - DNA, 120 bp, Artificial Sequence
  ENSG00000160961_21 (sequence is synthesized)
gcctctttgttactgagtcataggtatttgctgagatttgctattaggtctggtgtggcttattcttctagctgccaacccaaattaccccttcctccttagaaaagaacctgggttttc

SEQ ID NO: 479945 - DNA, 84 bp, Artificial Sequence
  ENSG00000160961_22 (sequence is synthesized)
caaattaccccttcctccttagaaaagaacctgggttttctgttcagattggcagtgtgcactattaaaaagcttccatctccc

SEQ ID NO: 479946 - DNA, 61 bp, Artificial Sequence
  ENSG00000160961_23 (sequence is synthesized)
ataaaaaaaagcttccatctcccagcccttcttgcaagcaagggcaggccatttcctccgg

SEQ ID NO: 479947 - DNA, 120 bp, Artificial Sequence
  ENSG00000160961_24 (sequence is synthesized)
ccagcccttcttgcaagcaagggcaggccatttcctccggtcctggctagtatgaatatgagaagtcactggatgtgactctggggaagatattgtgttcagggatggtttcatgtagcc

SEQ ID NO: 479948 - DNA, 120 bp, Artificial Sequence
  ENSG00000160961_25 (sequence is synthesized)
acatctctccacttcttgccttttggacaagtagacatgatttctagacctagaggagccctcctgtgaccataagggtaaaagccgcaagctaagaagagggtggccggaagtcataac

SEQ ID NO: 479949 - DNA, 120 bp, Artificial Sequence
  ENSG00000160961_26 (sequence is synthesized)
catcttgcttctgtaatctaaaaaatatttaggatagatttaatagaattggcatatttatgtgattgcagcagccctggactatttatttctggatgtcccatacatgaaaaatatgca

SEQ ID NO: 479950 - DNA, 120 bp, Artificial Sequence
  ENSG00000160961_27 (sequence is synthesized)
cttcttactggtacagttttcttttgtttgtttttgtttttggtgggaggtttatttcacctgaatataattcctaactgatgcacttagtatatgtcagtttttataaatgcttcatgg

SEQ ID NO: 479951 - DNA, 120 bp, Artificial Sequence
  ENSG00000160961_28 (sequence is synthesized)
atggttgaaatcaatgtattgtattctacaaatgtctgctagatcaagcaaatgtgtttaaaaaccatctacacatttataaatgttgatctgtgatctagcatttattgagagaggtat

SEQ ID NO: 479952 - DNA, 120 bp, Artificial Sequence
  ENSG00000160961_29 (sequence is synthesized)
gttaaactctcccaccatgattatgtattgctgaaaaatctttgtcattctgtcagtttttaaatttatgtatatacatacatatatatgttttgaagcaatgaaattaaatatagatac

SEQ ID NO: 479953 - DNA, 120 bp, Artificial Sequence
  ENSG00000160961_30 (sequence is synthesized)
tgacattttttacatttccaacaaattgttacttttattcttataaagtgatcatccttttccctattactgaacattcaaccattcattgtaatgatagtaaatacttatttagagttt

SEQ ID NO: 479954 - DNA, 120 bp, Artificial Sequence
  ENSG00000160961_31 (sequence is synthesized)
actattaatagatagtagccactgcctgaagctttgcatcttttaatttagtcctcacactgacactttgaggtatgtactgttatccccaattcccagatgaggaagctgaggcccagc

SEQ ID NO: 479955 - DNA, 120 bp, Artificial Sequence
  ENSG00000160961_32 (sequence is synthesized)
cagcaagttaaggtgggctatcaaagtcatctgggtggcatgtgacaggcctgactctctctacagtggcagacccaggggactagtctccatttttacttgttcttttttttttttttt

SEQ ID NO: 479956 - DNA, 120 bp, Artificial Sequence
  ENSG00000160961_33 (sequence is synthesized)
ttttttggttttaaagttctcttaggtataacttacataaacgttaataaatcttagggtacaccttggtgaattttgtatatgtctatacccaccacggtctccatcaaaatattttat

SEQ ID NO: 479957 - DNA, 120 bp, Artificial Sequence
  ENSG00000160961_34 (sequence is synthesized)
cgtcccagaaatttcccttgggccccacctcatcctcaaaggttatcactattctgatgtctatcaccatagatttgtttttcctgttcatgtaaatggaaccataaacagccctcttgt

SEQ ID NO: 479958 - DNA, 120 bp, Artificial Sequence
  ENSG00000160961_35 (sequence is synthesized)
gtctgttttcttcacttaatatagtgtcattgagatttatctatgttgtattatcagtagtttatgctttttaattgctgtgtaatagtccatagtctgaatataccacaatttaaaaat

SEQ ID NO: 479959 - DNA, 120 bp, Artificial Sequence
  ENSG00000160961_36 (sequence is synthesized)
tctattctgtttacaaacatttgagttctgtcctccaggttcatccatgttatcacaaatgacagaatttccttcctcatcaaggctgaatagtattccattgtgtagatataccacatt

SEQ ID NO: 479960 - DNA, 85 bp, Artificial Sequence
  ENSG00000160961_37 (sequence is synthesized)
ttctttatccattcatccaccgatggacagtcctgcaggttttattgttatgaataaagctgctgtgaatgttcttgttaagtca

SEQ ID NO: 479961 - DNA, 120 bp, Artificial Sequence
  ENSG00000160961_38 (sequence is synthesized)
acttttgccccgggacctaagccccacccctatccctgtctctcggacataggctccgcccccagcaccaccctccatgctctgtgggaccccactccagagcctaacctcatcccccgg

SEQ ID NO: 479962 - DNA, 120 bp, Artificial Sequence
  ENSG00000160961_39 (sequence is synthesized)
tgctgctgccatcctgcccagagccaccgttagttctcctggactccagttctgctcctgacaggcacctgggctccaccctggacacagaggccagagggatcccttagaagtgcaagt

SEQ ID NO: 479963 - DNA, 120 bp, Artificial Sequence
  ENSG00000160961_40 (sequence is synthesized)
caggtcagacgtgtttcctgagcgagcagctgccagcagagaagagaccacatcctactccaaggagaggtcttcctcccagaaaaactcactgactgcctgctccgcattcacgcaggt

SEQ ID NO: 479964 - DNA, 120 bp, Artificial Sequence
  ENSG00000160961_41 (sequence is synthesized)
ctgacttctggagcctccttggagggtgccaccttccccagcccctgcctgggtgccctctctccaggccattttggatcacagtgattagctttgtatttaaggattgggtaaatcctg

SEQ ID NO: 479965 - DNA, 120 bp, Artificial Sequence
  ENSG00000160961_42 (sequence is synthesized)
acaaggtaaatgggtctctctcttcttttattaatatgttccccaaagcaggatcaaatatgcacgttcatttggggtgagcaggtgtgagtggccccctcagcttcttgactctaatct

SEQ ID NO: 479966 - DNA, 120 bp, Artificial Sequence
  ENSG00000160961_43 (sequence is synthesized)
gtgacccctgtcactctgtccagggactgaaggccgctatgcagattcagagggtggtgataccagtgcctactctgggccaccgcaacccatgggtggccagggattctggtgagtgag

SEQ ID NO: 479967 - DNA, 120 bp, Artificial Sequence
  ENSG00000160961_44 (sequence is synthesized)
tgctgcgtggaacacgtggccagagggccctgctgtccttgtgttctgtccaggaacttgtatcctatcctgcctgcatttcctctgactgcaggcactgccgtggcaccatagagagga

SEQ ID NO: 479968 - DNA, 120 bp, Artificial Sequence
  ENSG00000160961_45 (sequence is synthesized)
tacagaaggcctctctcattatttgtgtgtttaagtgggagggcacttccagtgacagatctttaagaaagagagggctcactcaaccacagcaaaggccagacctctctttgggcaaca

SEQ ID NO: 479969 - DNA, 120 bp, Artificial Sequence
  ENSG00000160961_46 (sequence is synthesized)
tgaaattcttgactacacgataatgttgattttgaaaaattatgattgaatttactagaaatggcctgtgttttaactgtgtttttataaatgaggttcaggccggttgcagtggctcat

SEQ ID NO: 479970 - DNA, 74 bp, Artificial Sequence
  ENSG00000160961_47 (sequence is synthesized)
gtttttataaatgaggttcaggccggttgcagtggctcatgcctttaatcccagtgctttgcaaggcctaacat

SEQ ID NO: 479971 - DNA, 120 bp, Artificial Sequence
  ENSG00000160961_48 (sequence is synthesized)
tcggcctcccaaagtgctgggaccacaggtgtgagccaccgtgcctgacctattttgttacttcttgaagcgggtaacaccactactgtcatccgatggtgagatggggaccaggaaaca

SEQ ID NO: 479972 - DNA, 120 bp, Artificial Sequence
  ENSG00000160961_49 (sequence is synthesized)
tggtgagatggggaccaggaaacagtcacaaagaaaacaccgacccctcctccgtggagctcacggtcagctgggtggtcagagttcgaaatgaataacagagtccagtggaagtgtgtt

SEQ ID NO: 479973 - DNA, 120 bp, Artificial Sequence
  ENSG00000160961_50 (sequence is synthesized)
atacaaggacttcatctcaggggacgggagagttctgggaaaggatggatatttaagcttaggccagggtttctcaactgcagcactgctgataatgggctactgcagcactgctgataa

SEQ ID NO: 479974 - DNA, 120 bp, Artificial Sequence
  ENSG00000160961_51 (sequence is synthesized)
atccctggcctcaactcactagatgctacgagcacttttcctctatgagtttgctagggctgccatatcaaagttccaccagctgggtggattaaacagcaaaaatatattgtctcaccg

SEQ ID NO: 479975 - DNA, 120 bp, Artificial Sequence
  ENSG00000160961_52 (sequence is synthesized)
ttctggaggccagaagctcgagagcaaggtgttggcagtgttggttccttttgaagcctctccttggtgtgtagatggccatcttctctctatatcttcacatcatcttccctctgtcca

SEQ ID NO: 479976 - DNA, 120 bp, Artificial Sequence
  ENSG00000160961_53 (sequence is synthesized)
tgtctgtgtccaaatgtcgtcttcttgtgatagggtttggatttgtgtccccacctaaatctcatgtcaaattgtaatctccagtgttggaggaagggcttggtgggaggtgactggatc

SEQ ID NO: 479977 - DNA, 80 bp, Artificial Sequence
  ENSG00000160961_54 (sequence is synthesized)
gcacgttcgagtcctccccagccatgcgtcctgtacaacctgtggaaccaggagccaattaaacctcttttctttataaa

SEQ ID NO: 479978 - DNA, 72 bp, Artificial Sequence
  ENSG00000160961_55 (sequence is synthesized)
catgcaaatgagatggggtcttgctatgttgcccaggatgatctcgaactcctggcctcatgtgtgtgggcc

SEQ ID NO: 479979 - DNA, 120 bp, Artificial Sequence
  ENSG00000160961_56 (sequence is synthesized)
aggcaggtgggaaggaagtttctttttaaggcagacttgcaggttggttgtggtttatctgcccttgatttgtggtaagtcctggagcaccactagccctgcagtgtagaggggcagaga

SEQ ID NO: 479980 - DNA, 120 bp, Artificial Sequence
  ENSG00000160961_57 (sequence is synthesized)
aaggggccaggcagccggggaggaaaagctgtcccaaagctgagtcgggacagtggtgggggctgcaggagctttggagtctcctggtgaattatggagtctatggctcttgggatatgg

SEQ ID NO: 479981 - DNA, 120 bp, Artificial Sequence
  ENSG00000160961_58 (sequence is synthesized)
aatgaaggcgtgcgtgtgtgtgtgtgtgtgtgtgtgcacgtctatatgtctctttgtgtgctggtctgtgtgtatatgttatatatatgaacaggtgcatgtggtatgtaactgtgtata

SEQ ID NO: 479982 - DNA, 120 bp, Artificial Sequence
  ENSG00000160961_59 (sequence is synthesized)
tgtgtgcgtgtttgtgtgtatatgtgtgcatgtctgtgtacgtgtgtgcatgtgattgcatgcatgcgtgtgcaagagcttgcagatatgtgtctgcatgtgtgtgtccctgtgagtgtg

SEQ ID NO: 479983 - DNA, 120 bp, Artificial Sequence
  ENSG00000160961_60 (sequence is synthesized)
tgcatgtgtgtgtgtacacatgtgatcactcacagccagggtgggcagacttggggcctgtgagtgtgcccagtaggccaggcaccaaccctcatgcctcttcccttctcccctagctgt

SEQ ID NO: 479984 - DNA, 120 bp, Artificial Sequence
  ENSG00000160961_61 (sequence is synthesized)
gaaactgtcttatcagggcaacctattcatacctttgactgagaagcctgtttggttgagctcccttattaaatgccaccttctttcctttttccctttcctttttaatctctaaaactt

SEQ ID NO: 479985 - DNA, 120 bp, Artificial Sequence
  ENSG00000160961_62 (sequence is synthesized)
tgcattcatctcctagaaagatctgtcctactttctcttcatatttaatatttccatgtgtatattttatccatttcctccccactgtacattcttgctaatatttttcctcaacattag

SEQ ID NO: 479986 - DNA, 120 bp, Artificial Sequence
  ENSG00000160961_63 (sequence is synthesized)
tcacaatctttgtagaatccttttttggtaaattacctactatttccttcccatgttcctctgattacataacttctcatctagccacacaccttaaaattttccttaacttttagatgc

SEQ ID NO: 479987 - DNA, 120 bp, Artificial Sequence
  ENSG00000160961_64 (sequence is synthesized)
attccttctcattgcaatttcttcccgtacataggaccagtatttgggaaaaaaagtccacatgtgccttgcctacttttgaggtgaccttgatcccacagtttctttctctgtgtgctt

SEQ ID NO: 479988 - DNA, 120 bp, Artificial Sequence
  ENSG00000160961_65 (sequence is synthesized)
aactttttcttccctaattcatttcagaacctcagtgtcaaccccaagaggcaattcctagccaagatacttttacagagatcctgtccattgatgtgaaaggggagcaacctcagcctg

SEQ ID NO: 479989 - DNA, 120 bp, Artificial Sequence
  ENSG00000160961_66 (sequence is synthesized)
cggggttttccccggctcccagcatgggagaagttgaggaacacgtgaggtggaaatacaggaccagagccagggagatgttagcagcatgggtgtctcttggaagggaaacagtgtctg

SEQ ID NO: 479990 - DNA, 120 bp, Artificial Sequence
  ENSG00000160961_67 (sequence is synthesized)
tctcctttcagtacagggctccagtgccctccacagaactccacacccagcccagcaagcccctccataatgggtgctgagagtggcaggcatggggctcttgttacatcagagccccag

SEQ ID NO: 479991 - DNA, 120 bp, Artificial Sequence
  ENSG00000160961_68 (sequence is synthesized)
gaaacaggcggtcacagactattctgagtgggcagaggaggtccacctatggacacacgtttagagaagctgaggagttcatccctgaagacatccagcccgtgagtagtagaggggccg

SEQ ID NO: 479992 - DNA, 120 bp, Artificial Sequence
  ENSG00000160961_69 (sequence is synthesized)
gctagaatccaacctctggatatcaaaggatcactactggggcttgaagactccaaatctgcagattctgaagcttgcaggtcagtggccttggactttcaaacttccagttccgtgaca

SEQ ID NO: 479993 - DNA, 120 bp, Artificial Sequence
  ENSG00000160961_70 (sequence is synthesized)
tccgggctccttaacttccggcttccgggagcttagtcacatacttctggcttccggattgtaggttccccgcaaggagactaaggcctgtgtgggtctttgtttccccagccgtgcaat

SEQ ID NO: 479994 - DNA, 120 bp, Artificial Sequence
  ENSG00000160961_71 (sequence is synthesized)
gactgttagatgcagaaagggggaaaacagccagggaaactgctcacagtggacccccacggtggagagctggagggagagggttcttcaaacgtgtaccctagctcctttgtctgctgt

SEQ ID NO: 479995 - DNA, 120 bp, Artificial Sequence
  ENSG00000160961_72 (sequence is synthesized)
ctttggtgggcgtggtcttgtacttaaaatccagctgagaagccaaactctaccttaaagccgtatttcatgtttcaaactggatgatataattctggagaaatgagatgggaaactctg

SEQ ID NO: 479996 - DNA, 120 bp, Artificial Sequence
  ENSG00000160961_73 (sequence is synthesized)
ctgcctacttgccccttaactcttgtttatctttgggtttcttactacataccagagcttaatctttattttcttacttaatattcaaacacaacccatgagcaaattaacattatttcc

SEQ ID NO: 479997 - DNA, 120 bp, Artificial Sequence
  ENSG00000160961_74 (sequence is synthesized)
ctgtgtttcacttctgccatgtccttaaaggggctgtgtgtcccccagaccacagagtccattgcactgcacctttccttcctcctcattttccatcttacaaatcatcaatattcctgg

SEQ ID NO: 479998 - DNA, 120 bp, Artificial Sequence
  ENSG00000160961_75 (sequence is synthesized)
atgtaggatcatgtctgtcttatatgttttagtttctctcaatttagcattatgccttgcacgagagtataggaatacctcatttcattgcccttcacagatattgcattttttacaaat

SEQ ID NO: 479999 - DNA, 120 bp, Artificial Sequence
  ENSG00000160961_76 (sequence is synthesized)
tgaacgtttatggcagccctgtgtcgagcaagtctgtaggtgccattttcccaacagcatgtgctcactttgtgtccctgcttgagcattttttaggaataaactatttttaaattaaag

SEQ ID NO: 480000 - DNA, 120 bp, Artificial Sequence
  ENSG00000160961_77 (sequence is synthesized)
tatgtacattaaaaaaaagacataatgctattgcacacattacagtatagggtaagcatacttttatgcacactgggaaaccaaaaaatgtgtatgacttgctttattgcaatattcaca

SEQ ID NO: 480001 - DNA, 120 bp, Artificial Sequence
  ENSG00000160961_78 (sequence is synthesized)
ttattgtggtgatctggagtggagcctgcaatatctctgaggtgtgtctgtatgtgctcatcacatatgtgatgaatggatgaataaattagtgtagagtgaagtgcttccatgaacctg

SEQ ID NO: 480002 - DNA, 120 bp, Artificial Sequence
  ENSG00000160961_79 (sequence is synthesized)
aacatcatggtctggaaactatgggcagtgagtcaaatctgacccaccatctgtttctgtacagctaagaatagtttttacatttttcaaatgggtgaaaacaaataaaaagaagaatga

SEQ ID NO: 480003 - DNA, 120 bp, Artificial Sequence
  ENSG00000160961_80 (sequence is synthesized)
tattttgtgtcacatgactgatatatgaagttcaagctcagtgtccataaagttttattaaaacatagccatgatcattcatttatgattgtctatagctgttttcatatcacaatggaa

SEQ ID NO: 480004 - DNA, 120 bp, Artificial Sequence
  ENSG00000160961_81 (sequence is synthesized)
gttcaagttcagtgtctgtaaagttttattaaaacatagccatgatcattcatttatgattgtctatagctgttttcataccacagtggtagaattgagttgctgtaaatacctggctca

SEQ ID NO: 480005 - DNA, 120 bp, Artificial Sequence
  ENSG00000160961_82 (sequence is synthesized)
caaagcctaacatatacactatcaggctctttaagaaaacatttggcgacccctgctctaggtagactctatggggatatgggctctacactcatagggacccacatgttccaagcctcc

SEQ ID NO: 480006 - DNA, 120 bp, Artificial Sequence
  ENSG00000160961_83 (sequence is synthesized)
agctgtgtgttctgcttcctcaagcagcagctgactctgatattccccatctcaccttagcagtctatatcaagcaaagggcacgcagaatcccatgcacccatcatgtatgtaataaaa

SEQ ID NO: 480007 - DNA, 120 bp, Artificial Sequence
  ENSG00000160961_84 (sequence is synthesized)
ggcagatattatgtggtctcttgaaccagccttaggcatggaggttgaggatcaggagtgacttgagggtactgactggcagagcaggagccccgttattttggacaaacaccgccactt

SEQ ID NO: 480008 - DNA, 120 bp, Artificial Sequence
  ENSG00000160961_85 (sequence is synthesized)
taagtttcagcttcatttttagccttctggatttaaggaaattacttttttaaaaactataagcagccaaaaaaagcagacagtaaaatgcagataaaacagctcgggcacagaggaagg

SEQ ID NO: 480009 - DNA, 65 bp, Artificial Sequence
  ENSG00000160961_86 (sequence is synthesized)
caggtgcactaaaatagggaagctaaaagcagacttggggggtatgcctacagctgcagaaaaat

SEQ ID NO: 480010 - DNA, 120 bp, Artificial Sequence
  ENSG00000160961_87 (sequence is synthesized)
aaagcagacttggggggtatgcctacagctgcagaaaaatgtataaaagcaaacacaccactctccctcccatataagcacaacaaaaaaaacacagaagcagtccaagcctctaagaaa

SEQ ID NO: 480011 - DNA, 120 bp, Artificial Sequence
  ENSG00000160961_88 (sequence is synthesized)
ctctcccaccctaaatccttaaacactcttagtctgtagaaaagactctaacctaattcagccagcagcccctctcaggtgtgttttctctaaaataaacctgtcttaaccatcaagcca

SEQ ID NO: 480012 - DNA, 120 bp, Artificial Sequence
  ENSG00000160963_0 (sequence is synthesized)
gccccccacacatttccagctcgcacccgggctccgaccgctcgccccgctcctctcgctgtgctcccggccggtgccgcgggttcggtccgggcgccggtgcgctcctgccggtcctcg

SEQ ID NO: 480013 - DNA, 120 bp, Artificial Sequence
  ENSG00000160963_1 (sequence is synthesized)
tgcccgggactccgggtccccgcgggctgctgcgcacgatgaagctggccctgctcctgccctgggcgtgttgctgcctctgcgggtcggcgctggccaccggcttcctctatcccttct

SEQ ID NO: 480014 - DNA, 120 bp, Artificial Sequence
  ENSG00000160963_2 (sequence is synthesized)
cggccgcagctctgcagcagcacggctaccccgagcccggcgccggctcccctggcagcggctacgcgagccgccggcactggtgccatcacacagtgacacggacggtgtcctgccagg

SEQ ID NO: 480015 - DNA, 120 bp, Artificial Sequence
  ENSG00000160963_3 (sequence is synthesized)
tgcagaatggctcggagacggtggtccagcgcgtgtaccagagctgccggtggccggggccctgcgccaacctcgtaagttacaggactctgatcagacccacctacagagtgtcctacc

SEQ ID NO: 480016 - DNA, 120 bp, Artificial Sequence
  ENSG00000160963_4 (sequence is synthesized)
gcacggtgacggtgctggagtggagatgctgccctggcttcaccgggagcaactgtgatgaggaatgcatgaactgcacccggctcagtgacatgagtgagcgactgaccacactggagg

SEQ ID NO: 480017 - DNA, 120 bp, Artificial Sequence
  ENSG00000160963_5 (sequence is synthesized)
ccaaggtcctcctgctagaagcagcagaacggccctccagcccggacaacgacctgccagcccccgagagcactccgccgacctggaatgaggacttcctccccgacgccatccctcttg

SEQ ID NO: 480018 - DNA, 120 bp, Artificial Sequence
  ENSG00000160963_6 (sequence is synthesized)
ctcaccctgtgccacgacagagaaggcccacgggcccagccgggcccccggggcagacaggaccaccagggcctgcaggcccccccgggtctaaaggtgaccgaggccagacaggagaga

SEQ ID NO: 480019 - DNA, 120 bp, Artificial Sequence
  ENSG00000160963_7 (sequence is synthesized)
agacaggagagaagggtccagcggggccgcctgggctcctggggcctccagggccccgtgggcttcctggagagatggggcgccccggccccccaggaccacccggcccagcaggcaacc

SEQ ID NO: 480020 - DNA, 120 bp, Artificial Sequence
  ENSG00000160963_8 (sequence is synthesized)
caaacagcccccagggcgccctctactccctgcagccgcctacagacaaagacaatggagactcaaggctggcctctgccatcgtggacacagtgctggcaggtgtcccaggaccccggg

SEQ ID NO: 480021 - DNA, 120 bp, Artificial Sequence
  ENSG00000160963_9 (sequence is synthesized)
gtccccctggtccaccaggtccccctgggcctcgaggtcccccaggacccccaggaacacctggatcccagggcctggctggagagcgaggcacagtggggccgtccggtgaacctggcg

SEQ ID NO: 480022 - DNA, 120 bp, Artificial Sequence
  ENSG00000160963_10 (sequence is synthesized)
tgaagggggaagaaggagagaaagccgccactgcagagggcgagggggtgcagcagctgagagaggccctgaagatcctggcagagcgagtcctcatcctggagcacatgattgggatcc

SEQ ID NO: 480023 - DNA, 120 bp, Artificial Sequence
  ENSG00000160963_11 (sequence is synthesized)
acgatcccctggcctccccagagggaggttctggccaggatgctgccctgagagccaacctcaagatgaagaggggtggcgcccaacccgatggggtccttgctgccctgcttgggcccg

SEQ ID NO: 480024 - DNA, 120 bp, Artificial Sequence
  ENSG00000160963_12 (sequence is synthesized)
tgagccgccgctgtttcctaaagatgcccccaggggaactgggctccaggcatggatgattgtgaggacatggggggctttggggacagataatgtctccaggggcagggtctggagggg

SEQ ID NO: 480025 - DNA, 120 bp, Artificial Sequence
  ENSG00000160963_13 (sequence is synthesized)
ccaacaccctcatcagagccctcctctggcctgtcccctcccctacccccactcccggctggagacggggtctgggtgggctgggtgctgggaatgagaataatcctaatacccatcatt

SEQ ID NO: 480026 - DNA, 120 bp, Artificial Sequence
  ENSG00000160963_14 (sequence is synthesized)
tattgagtccctgctgtaactggccctgtccagggaactttcgttacgttgtctcattatttaacccttaggaggtaagcttattatccccacttcacaaggggaccgaggctcagacgg

SEQ ID NO: 480027 - DNA, 120 bp, Artificial Sequence
  ENSG00000160963_15 (sequence is synthesized)
tagaaataaccctctcttggccaccagatcacgggtggcaggggcaggatttgaacccaggaccctcagttcctgaagccatgttctctcgaccctgccagcttcccctcttcgagagaa

SEQ ID NO: 480028 - DNA, 120 bp, Artificial Sequence
  ENSG00000160963_16 (sequence is synthesized)
aactcagacagggagggcgcagggccagaacggctccttaaggcaggcagggctgcggggaggctgggccagccagcctgagggggtaggcagggtcctgcagggcctggggcttccctt

SEQ ID NO: 480029 - DNA, 120 bp, Artificial Sequence
  ENSG00000160963_17 (sequence is synthesized)
cctcatcccccttccccactggctgggggagcagcctggactgcagctctcagaggccagggagaccctgaataaatcactgccagccatacggacttgaggaccttgagagagaagcat

SEQ ID NO: 480030 - DNA, 120 bp, Artificial Sequence
  ENSG00000160963_18 (sequence is synthesized)
tgggggtgcaagtgtccaccaaaccagataggcatccctggccactgcctcccagtcttgctgagcccacccgctctctctgggtccatcccatccctgagccaggggaggcagcatttc

SEQ ID NO: 480031 - DNA, 120 bp, Artificial Sequence
  ENSG00000160963_19 (sequence is synthesized)
atgggcatgtctatcagaggtgggacttgcagcctctgccccacgagtttgtctctcagtggactctataggtttgctacttttgcatgacacagcaagcccagtgtcccctttgcaagc

SEQ ID NO: 480032 - DNA, 120 bp, Artificial Sequence
  ENSG00000160963_20 (sequence is synthesized)
tgcagagagggaaacagagtcccaggcctgctgggaagagatgctcctgcctcccaccttccagagttgggggcctggcaggctccatggcaggcaccaggtccctagcagcccagaaca

SEQ ID NO: 480033 - DNA, 120 bp, Artificial Sequence
  ENSG00000160963_21 (sequence is synthesized)
gctctgactggagccctcaaggcctctggggccagggtctccgtgatcagctcagccctggtgttcctctcttgctgggctgggacctgggacacagccacggcagcaaactcagagaat

SEQ ID NO: 480034 - DNA, 120 bp, Artificial Sequence
  ENSG00000160963_22 (sequence is synthesized)
tgaaggtgctggcgccaccctggggcactctgtcttcacagcaggagtgactgtctccagtgctcttggtactcctgtttggctgtggcctggtccctctgggccctgggatcttcttct

SEQ ID NO: 480035 - DNA, 120 bp, Artificial Sequence
  ENSG00000160963_23 (sequence is synthesized)
ggcccttgaggcaggtctggagaggcagtctctgtcttcatggaggggtggtcagaggcgggcgggaccaccagcctgtagcgttattattatatgtgacaataaaggtgctctccccac

SEQ ID NO: 480036 - DNA, 120 bp, Artificial Sequence
  ENSG00000160963_24 (sequence is synthesized)
cgtttcccaggccctgcctgcccagcctgcccctgactccctgcaggcccccagggaactggagagggtggagaggtgcccccacctcccgttccagtgttgactgtgtgacttgcttct

SEQ ID NO: 480037 - DNA, 120 bp, Artificial Sequence
  ENSG00000160972_0 (sequence is synthesized)
ccaggtactggcacacggatgaggagtcgtagaagaggggcctgcagattgtgctctcagcaagcctgtcgtctagtggaagacactggccgggacacagagcccacgtgtggacaccgc

SEQ ID NO: 480038 - DNA, 120 bp, Artificial Sequence
  ENSG00000160972_1 (sequence is synthesized)
tgtgggttggtggcaggggtcgagcaggtgccatcaggcacatgaacggtggagtcttcaaaggtgtgagcagctgctggaagaggaggtgctcctgaagacactgcggccggcccgcct

SEQ ID NO: 480039 - DNA, 120 bp, Artificial Sequence
  ENSG00000160972_2 (sequence is synthesized)
gtgcccttggtgccctggctgcctagagagcctcacccctgggccctggggccaggactccaggactctgactacctgccctcccccagcctcagcggctgcacctcctcgttagtactg

SEQ ID NO: 480040 - DNA, 120 bp, Artificial Sequence
  ENSG00000160972_3 (sequence is synthesized)
atgcactgacctcggcacacagctgggaggggttgggggctgggtcatggctgctcccaggccccacccaggctcctgagcctagaaggtgaaaagaggactctcaggggctcacagggg

SEQ ID NO: 480041 - DNA, 120 bp, Artificial Sequence
  ENSG00000160972_4 (sequence is synthesized)
ctctcactgctggttggccctgccctcccttccccctcagcagggtgcccggaagctggaaccttgttatctgggtaattagtttcagaccctgcactgaggccggccaggtctcggggc

SEQ ID NO: 480042 - DNA, 120 bp, Artificial Sequence
  ENSG00000160972_5 (sequence is synthesized)
tgcctcccataggttgtgcaccctgaccccgagagggaggcgaggcgctgcttgtcgacagctagaggctggcctggggagcaggtttggggtgccctcccacactgccctccctgcccc

SEQ ID NO: 480043 - DNA, 120 bp, Artificial Sequence
  ENSG00000160972_6 (sequence is synthesized)
ggcccatgccccccagggctgcctgggcctggttattgtgtggggcctcctgacccagccaagggcacgaagctctgggaaggggatgcccccgagggtgccagtccagctagctgcccc

SEQ ID NO: 480044 - DNA, 120 bp, Artificial Sequence
  ENSG00000160972_7 (sequence is synthesized)
acccctcaggcccagcctggcccccaagctccccactctggtgccccgagcagccctgtgggcaagcagccgccgccatggccgagcacctggagctgctggcagagatgcccatggtgg

SEQ ID NO: 480045 - DNA, 120 bp, Artificial Sequence
  ENSG00000160972_8 (sequence is synthesized)
gcaggatgagcacacaggagcggctgaagcatgcccagaagcggcgcgcccagcaggtgaagatgtgggcccaggctgagaaggaggcccagggcaagaagggtcctggggagcgtcccc

SEQ ID NO: 480046 - DNA, 120 bp, Artificial Sequence
  ENSG00000160972_9 (sequence is synthesized)
ggaaggaggcagccagccaagggctcctgaagcaggtcctcttccctcccagtgttgtccttctggaggccgctgcccgaaatgacctggaagaagtccgccagttccttgggagtgggg

SEQ ID NO: 480047 - DNA, 120 bp, Artificial Sequence
  ENSG00000160972_10 (sequence is synthesized)
tcagccctgacttggccaacgaggacggcctgacggccctgcaccagtgctgcattgatgatttccgagagatggtgcagcagctcctggaggctggggccaacatcaatgcctgtgaca

SEQ ID NO: 480048 - DNA, 120 bp, Artificial Sequence
  ENSG00000160972_11 (sequence is synthesized)
tctcctggcggtcaacaccgacgggaacatgccctatgacctgtgtgatgatgagcagacgctggactgcctggagactgccatggccgaccgtggcatcacccaggacagcatcgaggc

SEQ ID NO: 480049 - DNA, 120 bp, Artificial Sequence
  ENSG00000160972_12 (sequence is synthesized)
cgcccgggccgtgccagaactgcgcatgctggacgacatccggagccggctgcaggccggggcagacctccatgcccccctggaccacggggccacgctgctgcacgtcgcagccgccaa

SEQ ID NO: 480050 - DNA, 120 bp, Artificial Sequence
  ENSG00000160972_13 (sequence is synthesized)
cgggttcagcgaggcggctgccctgctgctggaacaccgagccagcctgagcgctaaggaccaagacggctgggagccgctgcacgccgcggcctactggggccaggtgcccctggtgga

SEQ ID NO: 480051 - DNA, 120 bp, Artificial Sequence
  ENSG00000160972_14 (sequence is synthesized)
gctgctcgtggcgcacggggccgacctgaacgcaaagtccctgatggacgagacgccccttgatgtgtgcggggacgaggaggtgcgggccaagctgctggagctgaagcacaagcacga

SEQ ID NO: 480052 - DNA, 120 bp, Artificial Sequence
  ENSG00000160972_15 (sequence is synthesized)
cgccctcctgcgcgcccagagccgccagcgctccttgctgcgccgccgcacctccagcgccggcagccgcgggaaggtggtgaggcgggtgagcctaacccagcgcaccgacctgtaccg

SEQ ID NO: 480053 - DNA, 120 bp, Artificial Sequence
  ENSG00000160972_16 (sequence is synthesized)
caagcagcacgcccaggaggccatcgtgtggcaacagccgccgcccaccagcccggagccgcccgaggacaacgatgaccgccagacaggcgcagagctcaggccgccgcccccggagga

SEQ ID NO: 480054 - DNA, 120 bp, Artificial Sequence
  ENSG00000160972_17 (sequence is synthesized)
ggacaaccccgaagtggtcaggccgcacaatggccgagtagggggctccccagtgcggcatctatactccaagcgactagaccggagtgtctcctaccagctgagccccctggacagcac

SEQ ID NO: 480055 - DNA, 120 bp, Artificial Sequence
  ENSG00000160972_18 (sequence is synthesized)
caccccccacaccctggtccacgacaaggcccaccacaccctggctgacctgaagcgccagcgagctgctgccaagctgcagcgacccccacctgaggggcccgagagccctgagacagc

SEQ ID NO: 480056 - DNA, 120 bp, Artificial Sequence
  ENSG00000160972_19 (sequence is synthesized)
tgagcctggcctgcctggtgacacggtgaccccccagcctgactgtggcttcagggcaggcggggacccacccctgctcaagctcacagccccggcggtggaggctcccgtggagaggag

SEQ ID NO: 480057 - DNA, 120 bp, Artificial Sequence
  ENSG00000160972_20 (sequence is synthesized)
gccgtgctgcctgctcatgtgaggctgttgctcagcatgcaggggccctgtcgcgggcacagcccaaggctgcctccccacggtgcgtgccctggtgctgcgggtgcagcacggaaaccc

SEQ ID NO: 480058 - DNA, 120 bp, Artificial Sequence
  ENSG00000160972_21 (sequence is synthesized)
cggcttctactgtacaggacactggcccctctcaggtcagaagacatgcctggagggatgtctggctgcaaagactatttttatcctgcaactcttgataaagggctgttttgccatgga

SEQ ID NO: 480059 - DNA, 120 bp, Artificial Sequence
  ENSG00000160972_22 (sequence is synthesized)
acttgtgcggcggtcggcgcggggcgcgagatgaggaaatcgaggccgcagagaagggacttacccaaacttaagctttgtgtgggccttggagctaggctgaaggagaaagtggagtct

SEQ ID NO: 480060 - DNA, 120 bp, Artificial Sequence
  ENSG00000160972_23 (sequence is synthesized)
cactggggcaagttccttcaactttcagggattcaaatgacctcacttgtagtgcggggcgtccggaccacccctcaggaattgggatcagggcaagaattactaactaagcaagcaccc

SEQ ID NO: 480061 - DNA, 120 bp, Artificial Sequence
  ENSG00000160972_24 (sequence is synthesized)
gcacggtgggattaatttccatgggtgcagagaggggagccgtgtacggagtcattctaggcttaggggagacagagcaaagttagccttccccaaacctctgtgccttccttttcttcc

SEQ ID NO: 480062 - DNA, 120 bp, Artificial Sequence
  ENSG00000160972_25 (sequence is synthesized)
tggattcctacctgggggtggaggtggaggcgggggtaccgctgcctttctcaaagtgtgtctagtccagcagtgagccctcctgggcgtcttggcgccccagttgcttcctggacgtat

SEQ ID NO: 480063 - DNA, 120 bp, Artificial Sequence
  ENSG00000160972_26 (sequence is synthesized)
tggggtttctctgggagaagggtcttgcctgcagtaccctgggcctcctgaagaggcctctggttgcgctgcctgattcagggacccagagccacgactcgccgagaggagctccggcgg

SEQ ID NO: 480064 - DNA, 120 bp, Artificial Sequence
  ENSG00000160972_27 (sequence is synthesized)
gaggggccctcgggagacgcggctgccggcacgcgggcgcccagggcacaggtcccgccgggccgccttgggcgttgctggctgaggcccagggcagcaggtgccaacggtcaggaaagg

SEQ ID NO: 480065 - DNA, 120 bp, Artificial Sequence
  ENSG00000160972_28 (sequence is synthesized)
cctgtcgtctagtggaagacactggccgggacacagagcccacgtgtggacaccgctgtgggttggtggcaggggtcgagcaggtgccatcaggcacatgaacggtggagtcttcaaagc

SEQ ID NO: 480066 - DNA, 120 bp, Artificial Sequence
  ENSG00000160972_29 (sequence is synthesized)
gcggcttccggctatgggtaccgcgggccggaagtgtagcgttgccatggcgagggccgggtgcggggcccgcccccgcagcgcctcagggagcgcggggcccactgacccgcggaagcc

SEQ ID NO: 480067 - DNA, 120 bp, Artificial Sequence
  ENSG00000160972_30 (sequence is synthesized)
atgacctggaagaaggtgagtgtggctgagcccagagcagctcccagcagacggcccactccctgctacctgggtgccgtctcatgccaaggctgggggctgggcctgtccacagctcct

SEQ ID NO: 480068 - DNA, 120 bp, Artificial Sequence
  ENSG00000160972_31 (sequence is synthesized)
gggctccagcccccagatcttgcctggtctcttcaggctgggtggcccagggtgcccccatcaggcaagccccaagcagtgggcagccctgaggtgagcctgtgcgggacagccgtcctt

SEQ ID NO: 480069 - DNA, 120 bp, Artificial Sequence
  ENSG00000160972_32 (sequence is synthesized)
caggcgggggctgcatgcagagggctcctgctgtgaggtgagctgaggccatgagtggacccccaggagcctgcagaaaaacctagtgcggggccccacgggagcaggggtggccggtag

SEQ ID NO: 480070 - DNA, 120 bp, Artificial Sequence
  ENSG00000160972_33 (sequence is synthesized)
tcattgctgcttcttgttaggctgctcaggagagccctggtctccacctccgtgaaatagggtgggaccagccacctctgtgggtgagagagccaggccctgggcaggcacagagctatg

SEQ ID NO: 480071 - DNA, 120 bp, Artificial Sequence
  ENSG00000160972_34 (sequence is synthesized)
caggtggccccctctcagtgcctgccctaggctctgcttgtgactctcttctcctcacctgtgccccacgcttgcagccccagctgtgtgggttccacttctggtgctctggagtcttgg

SEQ ID NO: 480072 - DNA, 120 bp, Artificial Sequence
  ENSG00000160972_35 (sequence is synthesized)
gggaagaggcactgtggtggcccttgagactccttcctgcctccctccggagcagagagtaaagaggagccggcagtgtctggcctgcatctttccatgtggacaggagccctcccggga

SEQ ID NO: 480073 - DNA, 120 bp, Artificial Sequence
  ENSG00000160972_36 (sequence is synthesized)
ggcctggaggcagagggaagaggcggagggtgccatggtccacagggagctgtgggaaggtgggagccctcctgctgcaccccaggcaccgtcagggagaaccctggtgacctgggcgag

SEQ ID NO: 480074 - DNA, 120 bp, Artificial Sequence
  ENSG00000160972_37 (sequence is synthesized)
acagggctggcaggttgtcagggaagagccgaaggagctgtggtagcctccaggcagggagctcttcctgggctggagggaggtgtgggattgttggagtgctgctctcacacaggagca

SEQ ID NO: 480075 - DNA, 120 bp, Artificial Sequence
  ENSG00000160972_38 (sequence is synthesized)
cggcctgttctgggggtcggagggctggagcaccaccatgaagggcctgcaggtgggtggaggcagagggcttctgggagtgtgaccggcctgggccagacagatgcctggtgcttctgc

SEQ ID NO: 480076 - DNA, 120 bp, Artificial Sequence
  ENSG00000160972_39 (sequence is synthesized)
ccccacccctgggctctggtgtgcctcctgccatcggcaccactgtcttccttgtccttccctgggtcctgggccgaagcacagttgacaggacctgaccaggggcaggaccctgtcctc

SEQ ID NO: 480077 - DNA, 120 bp, Artificial Sequence
  ENSG00000160973_0 (sequence is synthesized)
cggcctcaggtcccggccctgccttctacactgccccaccgccctgcaccctccacccggccaggcccctgcccacgctgtctaccgtcccgcatggggccctgcagcggctcccgcctg

SEQ ID NO: 480078 - DNA, 120 bp, Artificial Sequence
  ENSG00000160973_1 (sequence is synthesized)
gggcccccagaggcagagtcgccctcccagccccctaagaggaggaagaagaggtacctgcgacatgacaagcccccctacacctacttggccatgatcgccttggtgattcaggccgct

SEQ ID NO: 480079 - DNA, 120 bp, Artificial Sequence
  ENSG00000160973_2 (sequence is synthesized)
ccctcccgcagactgaagctggcccagatcatccgtcaggtccaggccgtgttccccttcttcagggaagactacgagggctggaaagactccattcgccacaacctttcctccaaccga

SEQ ID NO: 480080 - DNA, 120 bp, Artificial Sequence
  ENSG00000160973_3 (sequence is synthesized)
tgcttccgcaaggtgcccaaggaccctgcaaagccccaggccaagggcaacttctgggcggtcgacgtgagcctgatcccagctgaggcgctccggctgcagaacaccgccctgtgccgg

SEQ ID NO: 480081 - DNA, 120 bp, Artificial Sequence
  ENSG00000160973_4 (sequence is synthesized)
cgctggcagaacggaggtgcgcgtggagccttcgccaaggacctgggcccctacgtgctgcacggccggccataccggccgcccagtcccccgccaccacccagtgagggcttcagcatc

SEQ ID NO: 480082 - DNA, 120 bp, Artificial Sequence
  ENSG00000160973_5 (sequence is synthesized)
aagtccctgctaggagggtccggggagggggcaccctggccggggctagctccacagagcagcccagttcctgcaggcacagggaacagtggggaggaggcggtgcccaccccacccctt

SEQ ID NO: 480083 - DNA, 120 bp, Artificial Sequence
  ENSG00000160973_6 (sequence is synthesized)
ccctcttctgagaggcctctgtggcccctctgcccccttcctggccccacgagagtggagggggagactgtgcaggggggagccatcgggccctcaaccctctccccagagcctagggcc

SEQ ID NO: 480084 - DNA, 120 bp, Artificial Sequence
  ENSG00000160973_7 (sequence is synthesized)
tggcctctccacttactgcagggcaccgcagttcctgggggacggtccagcgggggacacagggcctccctctgggggcagctgcccacctcctacttgcctatctacactcccaatgtg

SEQ ID NO: 480085 - DNA, 120 bp, Artificial Sequence
  ENSG00000160973_8 (sequence is synthesized)
ggctgctctgcgatctagacgccctcttccaaggggtgccacccaacaaaagcatctacgacgtttgggtcagccaccctcgggacctggcggcccctggcccaggctggctgctctcct

SEQ ID NO: 480086 - DNA, 120 bp, Artificial Sequence
  ENSG00000160973_9 (sequence is synthesized)
ggtgcagcctgtgaggctcttaagacaggggccactcctccctcccgctcccacccccaccttgttgacagggagccaaggcgaggcggctgtctgcgaccacagcagcctcgaaacacc

SEQ ID NO: 480087 - DNA, 120 bp, Artificial Sequence
  ENSG00000160973_10 (sequence is synthesized)
aggcagcagccttgctgggagtccacggtgtttattgggccaccccacgcatggccgtggcccagctgggcacaaccctcaccctggtctgtcatgcctgtttttcctacactcagcggc

SEQ ID NO: 480088 - DNA, 120 bp, Artificial Sequence
  ENSG00000160973_11 (sequence is synthesized)
aaagctgcaggagcagggctgagcctggaatagcccttcctagtcccctcttctcagcccactacccatccatcagtcaccagccgtcacctcccctcccgtgctccaggctgggggagg

SEQ ID NO: 480089 - DNA, 120 bp, Artificial Sequence
  ENSG00000160973_12 (sequence is synthesized)
gagagcccagtggtggatccagcctgaagtcctgccctctctcatctgtctggaaaggaggtagcacctttttcgggaaacgggttagggagtaaagactgcaccctacatggtcctggt

SEQ ID NO: 480090 - DNA, 120 bp, Artificial Sequence
  ENSG00000160973_13 (sequence is synthesized)
ggtgggggggataacagtaaaggaatttgcaacgttttaatgccatgcctgatttttgggtcaggagtggtgacttgggtaaccacttggcgggggggcctgggattccctgctgtgtgc

SEQ ID NO: 480091 - DNA, 120 bp, Artificial Sequence
  ENSG00000160973_14 (sequence is synthesized)
cgtgataacagcaaatggtgataaggagaaagccaagacctgtggcctgatgcagggctgggggcggggggtgatcacttcagcaggcacaacacacttcactggctgcggaggtggagg

SEQ ID NO: 480092 - DNA, 120 bp, Artificial Sequence
  ENSG00000160973_15 (sequence is synthesized)
ggtgactctgggagctcaggggcaatggatccaaagaggctagggagcttgtgccctgggagacggggtacagggactttactaccgcctctgccagcagagacctggcctgagacccca

SEQ ID NO: 480093 - DNA, 120 bp, Artificial Sequence
  ENSG00000160991_0 (sequence is synthesized)
gccgcgctcggcgccccggccgggccactgggccacaggccacgcggccacgcagtccgagcgggagccgagccgggcggggcgagggcagctccgcgtttctctgaattctccccaagg

SEQ ID NO: 480094 - DNA, 120 bp, Artificial Sequence
  ENSG00000160991_1 (sequence is synthesized)
agggcagctccgcgtttctctgaattctccccaagggaaggaacgtcccagggatggaagtgcttggatgcggtgctgctggctgcggatgtgcgcaaggagatgggatggagagcctga

SEQ ID NO: 480095 - DNA, 120 bp, Artificial Sequence
  ENSG00000160991_2 (sequence is synthesized)
gttggcattcgtataaatgacctgcctggctcccaccatgagtgctgagcttaacgtgcctatcgacccctctgctcctgcctgccctgagcccggccataagggcatggattaccggga

SEQ ID NO: 480096 - DNA, 120 bp, Artificial Sequence
  ENSG00000160991_3 (sequence is synthesized)
ctgggtccgccgcagctacctggaactggtcacctctaaccaccactcggtacaggccctgtcgtggcggaagctctacctgagcagggccaagctgaaggcctccagcaggacctccgc

SEQ ID NO: 480097 - DNA, 120 bp, Artificial Sequence
  ENSG00000160991_4 (sequence is synthesized)
cctcctctccggctttgccatggtggccatggtggaggtgcagctggagacgcagtaccagtacccgcggccgctgctgattgccttcagcgcctgcaccacggtgctggtggccgtgca

SEQ ID NO: 480098 - DNA, 120 bp, Artificial Sequence
  ENSG00000160991_5 (sequence is synthesized)
cctgttcgccctcctcatcagcacctgcatcctgcccaatgtggaggccgtgagcaacatccacaacctgaactccatcagcgagtccccgcatgagcgcatgcacccctacatcgagct

SEQ ID NO: 480099 - DNA, 120 bp, Artificial Sequence
  ENSG00000160991_6 (sequence is synthesized)
ggcctggggcttctccaccgtgcttggcatcctactcttcctggccgaggtggtgctgctctgctggatcaagttcctccccgtggatgcccggcgccagcctggccccccacctggccc

SEQ ID NO: 480100 - DNA, 120 bp, Artificial Sequence
  ENSG00000160991_7 (sequence is synthesized)
tgggagtcacacgggctggcaggccgccctggtgtccaccatcatcatggtgcccgtgggcctcatcttcgtggtcttcaccatccacttctaccgctccctggtgcgccacaaaacgga

SEQ ID NO: 480101 - DNA, 120 bp, Artificial Sequence
  ENSG00000160991_8 (sequence is synthesized)
gcgccacaaccgcgagatcgaggagctccacaagctcaaggtccagctggacgggcatgagcgcagcctgcaggtcttgtgaggggccgagggccggggctgggagcggccctgtgcccg

SEQ ID NO: 480102 - DNA, 120 bp, Artificial Sequence
  ENSG00000160991_9 (sequence is synthesized)
ggagtccgcagaggcggggatttgtcagatgcagacattttgcaaggctgccgggtagttcaagaccaaagttttcctcttgtcttaataccataaggactggatgacttctcctgagat

SEQ ID NO: 480103 - DNA, 120 bp, Artificial Sequence
  ENSG00000160991_10 (sequence is synthesized)
agaaccgtttggttcaatgagggactgtgttgctaagagcgttgggggcaaagccaggctggttccttggcctcggggtttcctgggtcggggacacggtgaagaggctccagcgggacc

SEQ ID NO: 480104 - DNA, 120 bp, Artificial Sequence
  ENSG00000160991_11 (sequence is synthesized)
tgcccatcagtcctgggccaggaggggctccaagcagcacccagcggtccgggggagtctcagacccggcatgcgtggctggcagacctgggagagccagggcagggttttgcgttcaga

SEQ ID NO: 480105 - DNA, 120 bp, Artificial Sequence
  ENSG00000160991_12 (sequence is synthesized)
gaaggattgccccagagacccgtggtggacttcatgggtgctgagtggcccgtgtgacagtgatgacacgaaggcttcggcgtttgagtgggtgcaggtgcacgccagggcttggtgctt

SEQ ID NO: 480106 - DNA, 120 bp, Artificial Sequence
  ENSG00000160991_13 (sequence is synthesized)
ccctgcctggccctggagggagctgggtggcctggcttcaggggaagacaggagccaggacacacgtcagcccagcaggtgtggggggtgctgcagccctcggcagtggggtcaggccct

SEQ ID NO: 480107 - DNA, 120 bp, Artificial Sequence
  ENSG00000160991_14 (sequence is synthesized)
gggggatgtttccaatggtgggcagcctggccaggccggagaagacatgttcacgggcatctatcagatgcccccttgaggaggctgagttatttgagggctgctgcaaagtacgctagg

SEQ ID NO: 480108 - DNA, 120 bp, Artificial Sequence
  ENSG00000160991_15 (sequence is synthesized)
ctcaaattctcttttcccagccagagccctggccacacggactcagaggggccaccggggtggggaaaggacccctcccccaccccccgcagccactggcctccagctctcggccacaga

SEQ ID NO: 480109 - DNA, 120 bp, Artificial Sequence
  ENSG00000160991_16 (sequence is synthesized)
atggcctctaaggctgactcagccactcccttgggctgtggcagcaggaggcgggggctctggctcaggccccggagcctgtgcagcttgcccatggccctaggcagcgaggggacagcc

SEQ ID NO: 480110 - DNA, 120 bp, Artificial Sequence
  ENSG00000160991_17 (sequence is synthesized)
tgggggacttcctgcctaggcaaggtcattggccgggcctggcctgtggatagtggggccaggggccggcccaggccaaatgagtgccctccttgttatgacaccaagtgactacaaggg

SEQ ID NO: 480111 - DNA, 120 bp, Artificial Sequence
  ENSG00000160991_18 (sequence is synthesized)
aggcaagacccctccaggcctctcagccgacactgggtcccaccacacacagtgactgtgccgtgcagtgcaggttctggccttttccttgaaggcatctggtagacccgaagccacgct

SEQ ID NO: 480112 - DNA, 120 bp, Artificial Sequence
  ENSG00000160991_19 (sequence is synthesized)
ctcgggccgcacatgcacgccgcagcaccagctgccctgagctgcttgtacaaccaaacacctttcccctcttctccagctgtaacctggagagtcagccatgccttgtcttttgttctc

SEQ ID NO: 480113 - DNA, 120 bp, Artificial Sequence
  ENSG00000160991_20 (sequence is synthesized)
aaaaaatcactgggcttcttcatgctctgatcacatctctcgtaaaagcttaagctctctccggggtccgggttggccgtgccgtggaattctgggtggcctggctggggtctctggaaa

SEQ ID NO: 480114 - DNA, 120 bp, Artificial Sequence
  ENSG00000160991_21 (sequence is synthesized)
tgtggctgcagcagagaacagagaccctgacatgcagttttccgtgctgaggggccctaggggagtcacaccaagggtccccacgagaaagttgtggcatccccgggggccggagaagag

SEQ ID NO: 480115 - DNA, 120 bp, Artificial Sequence
  ENSG00000160991_22 (sequence is synthesized)
ccccgtgtcttctgaggggttcgtcctttgtgtcccctgcagacatttgtctgcgacctttgccctccagcatgtatgtactttcctgcagcctgtagaaacgcctcttacggtttaata

SEQ ID NO: 480116 - DNA, 87 bp, Artificial Sequence
  ENSG00000160991_23 (sequence is synthesized)
ctttcctgcagcctgtagaaacgcctcttacggtttaatatgtgttcgctttgctaaagaatatcaacatcggccaggcgaggtggg

SEQ ID NO: 480117 - DNA, 88 bp, Artificial Sequence
  ENSG00000160991_24 (sequence is synthesized)
gtctaaaaaaattattttaaattagccaggccgggtgcaatggctcgcgcccgtaatcttagcactctgggaggccgaggcaggcaga

SEQ ID NO: 480118 - DNA, 85 bp, Artificial Sequence
  ENSG00000160991_25 (sequence is synthesized)
gaggcaggcagatcacttgagatcaggactttaagaccagcctcggcaacaacatggtgaaaccatctctagctacctgtaatcc

SEQ ID NO: 480119 - DNA, 71 bp, Artificial Sequence
  ENSG00000160991_26 (sequence is synthesized)
gaaggcagaggtatgactcctcaaaaaaaagaaaaatagctaaaatatgattgtaccactgcactccagcc

SEQ ID NO: 480120 - DNA, 120 bp, Artificial Sequence
  ENSG00000160991_27 (sequence is synthesized)
agaaaataaagaaaaaagaatgtcagcatgtcagcgttcctccaaggagtggctttgggtcaagaagacaggctggctctcctaaacaaacggctccccacggctgggagaggcagcagg

SEQ ID NO: 480121 - DNA, 120 bp, Artificial Sequence
  ENSG00000160991_28 (sequence is synthesized)
cccttactctggcctgagtcttttgggaggggccctgctgggccttctcctgccacctaccttcctggaccatctgtgcccctgcccacgcagtaccacactccccagactgtggaacgc

SEQ ID NO: 480122 - DNA, 120 bp, Artificial Sequence
  ENSG00000160991_29 (sequence is synthesized)
atctccagtgccatctgggggccagttactgtacctggtccccaggcagagctcttggcctggcagcatccaggcaggtattaagtgcccagtgatggtggcacatgggtggggacggag

SEQ ID NO: 480123 - DNA, 120 bp, Artificial Sequence
  ENSG00000160991_30 (sequence is synthesized)
ccacatccaagtctagccctctgattaggaggatgacagtcttggaatttcttgttctctttctcctagggttctcgttctcccagctccagcctttctagtttcgaggcatgaggcaaa

SEQ ID NO: 480124 - DNA, 120 bp, Artificial Sequence
  ENSG00000160991_31 (sequence is synthesized)
ccattgctgtgggaatagcagtgaccattggtagggccatggtggccgggagaggaaacctcagggtcaccccagagcctgtggggagacggagggtgagctgttgttggagctgcagaa

SEQ ID NO: 480125 - DNA, 120 bp, Artificial Sequence
  ENSG00000160991_32 (sequence is synthesized)
acgccttgaagggcagcatgggcgatgaggaatgccattgcagcctagaaattcggtttctggaggtttagcctgattttgaagagtatttaagaacagagggctccagaccaggtgtgg

SEQ ID NO: 480126 - DNA, 120 bp, Artificial Sequence
  ENSG00000160991_33 (sequence is synthesized)
tgtctcaaaaaaaaaaaaaaaagaacaggggcctctgcctcagtttgcccgggagccagccagggcccatcctaatttggagcacagtcttcctggtgcctagacatgccaaggcccctc

SEQ ID NO: 480127 - DNA, 120 bp, Artificial Sequence
  ENSG00000160991_34 (sequence is synthesized)
tgcctagacatgccaaggcccctcccacgtggtacaccctctccgtttagtacctgaccacctgtttcaaaacgcaggtgtttctggtttagaaacttggaaggcggaatgtgttttcgt

SEQ ID NO: 480128 - DNA, 120 bp, Artificial Sequence
  ENSG00000160991_35 (sequence is synthesized)
agggtctgctgaggaccagaccacgtaagcctgagtggatcctgactcagctgcagcccttacctgcctcgtgctgatgatctatgcatggcgttatgtagatcacgtgcggcagagaca

SEQ ID NO: 480129 - DNA, 120 bp, Artificial Sequence
  ENSG00000160991_36 (sequence is synthesized)
gccactgtcctgtgtgcgggtttttaaaacagctgccctggatgaaacggaataaaccagtgatgctattcaaagtctttctgttcttgggggatgctgtgggcagaggggataaattgc

SEQ ID NO: 480130 - DNA, 120 bp, Artificial Sequence
  ENSG00000160991_37 (sequence is synthesized)
agcccctggccctcccgtggcatctgctgactgggggacccacatcgtggcctgaaaaactcctggagcgccctctggcctcctgtcgctggtcactggccagtgtcctcccaggctgcc

SEQ ID NO: 480131 - DNA, 120 bp, Artificial Sequence
  ENSG00000160991_38 (sequence is synthesized)
ccggcaagggggcgtggacatctctagaatggaggcagggtactcatgtccagacacgccgccatggggctccgccccgagagcgcagggtgcctctgcctggcgcttcccctcccagac

SEQ ID NO: 480132 - DNA, 120 bp, Artificial Sequence
  ENSG00000160991_39 (sequence is synthesized)
agggccctctctttccagaaacaaaagaaggggcagccccagagggtggctgagcgacaacagagcccacctggacagggtcagcttggcgttccccccagtcccttgaggagaggagct

SEQ ID NO: 480133 - DNA, 120 bp, Artificial Sequence
  ENSG00000160991_40 (sequence is synthesized)
accagagcactggtcacctcaggacattctccagccccaagtccctgtggggcagcaggaacaggtgggtccctcctgcgggctggtggcactgctaaggaagcaccagacagccttttt

SEQ ID NO: 480134 - DNA, 81 bp, Artificial Sequence
  ENSG00000160991_41 (sequence is synthesized)
ggctggtggcactgctaaggaagcaccagacagccttttttttttttttgagacagagtcgctctgtcacccaagctggaa

SEQ ID NO: 480135 - DNA, 120 bp, Artificial Sequence
  ENSG00000160991_42 (sequence is synthesized)
aagtgctgggattacaggtgtgagccagcttgcccagcttatgtttatagatttattttagagacagggttgggctctattgcccaggccagagctggagtgcagtggtgcaatcatagc

SEQ ID NO: 480136 - DNA, 120 bp, Artificial Sequence
  ENSG00000160991_43 (sequence is synthesized)
atcatagctctctgcaggctccagcttctgggcgcaagcaatcctcccacctcagtctcccaagtagctacacttgggagactacgggcgcacactaccatgcccagctaatgttttttt

SEQ ID NO: 480137 - DNA, 83 bp, Artificial Sequence
  ENSG00000160991_44 (sequence is synthesized)
cgggcgcacactaccatgcccagctaatgttctggtcttgaacttctggcctcaagcgaccctcctgccttggcctcccaaag

SEQ ID NO: 480138 - DNA, 84 bp, Artificial Sequence
  ENSG00000160991_45 (sequence is synthesized)
cattctgttttttgtcggccactgaggtagaggccctcttctaggaaagaatttctgtttgttttgttttgttttgttttgttt

SEQ ID NO: 480139 - DNA, 120 bp, Artificial Sequence
  ENSG00000160991_46 (sequence is synthesized)
acctccacttcccaggttcaagcaattcttctgccaagctgggactacaggcatgcaccaccaccatgccctgctaatttttgttgttgtcgttggtttttgagatagagtttcgctctt

SEQ ID NO: 480140 - DNA, 78 bp, Artificial Sequence
  ENSG00000160991_47 (sequence is synthesized)
aggtgtgagccaccacacccagcctttctttttgcatttttaatagagactgagtttcatcacatggcctcagcctcc

SEQ ID NO: 480141 - DNA, 120 bp, Artificial Sequence
  ENSG00000160991_48 (sequence is synthesized)
ttacaggcatgagccaccgtgccaggccttgttaatatttttaactctggcacttcaccctagaggctgctaggaatcaggtgtgccaagcaactggcaccactccatggaaagcgtcta

SEQ ID NO: 480142 - DNA, 120 bp, Artificial Sequence
  ENSG00000160991_49 (sequence is synthesized)
gtgtgccaagcaactggcaccactccatggaaagcgtctagggcagtgccttggttctgccaatcctgagaagccaggctgccccttgggctgggcagtggcctcagtaccgagccccag

SEQ ID NO: 480143 - DNA, 120 bp, Artificial Sequence
  ENSG00000160991_50 (sequence is synthesized)
gccagcaagcccacaagcctcgagaaagactgcacttccggtggaggctgcagtttccttaaagggaaaatctgccccacccctgtcaagggcaggacacaagtcactggcattgaagga

SEQ ID NO: 480144 - DNA, 120 bp, Artificial Sequence
  ENSG00000160991_51 (sequence is synthesized)
ggcattgaaggacccactccacacccagcagatcatcgacgcagactttttttttcccagatagagtctcactctgtcgtccaggctggactgcaatggtgtgatcttggctcactgtaa

SEQ ID NO: 480145 - DNA, 80 bp, Artificial Sequence
  ENSG00000160991_52 (sequence is synthesized)
tccggcccaagactttttgcctcagatgctgcagagccctggtggggcccaggagggcaaggcccacacaggagccgaaa

SEQ ID NO: 480146 - DNA, 120 bp, Artificial Sequence
  ENSG00000160991_53 (sequence is synthesized)
aagactttttgcctcagatgctgcagagccctggtggggcccaggagggcaaggcccacacaggagccgaaacccatgtagaacctgccaacctgtagctcacacctataatcccagcac

SEQ ID NO: 480147 - DNA, 120 bp, Artificial Sequence
  ENSG00000160991_54 (sequence is synthesized)
tgagccaaggagttcgagaccagcctgggcaacattacgagaccctgtctctacaaaaatacaaaaattacccgggcttggtggctcgtgcctatagtcccagctactggggaggctgag

SEQ ID NO: 480148 - DNA, 86 bp, Artificial Sequence
  ENSG00000160991_55 (sequence is synthesized)
aatgagtgagaccacgtctcaacccctttcacagcccgtctgcggcccacccacccatgggtactgtgggatgggggacaggctgg

SEQ ID NO: 480149 - DNA, 120 bp, Artificial Sequence
  ENSG00000160991_56 (sequence is synthesized)
ccacccacccatgggtactgtgggatgggggacaggctggcttaacacaaatcgaggcaggaataaccccagagaatgggctttgcatggagcttggctcctgtccctgcctgtgaggga

SEQ ID NO: 480150 - DNA, 120 bp, Artificial Sequence
  ENSG00000160991_57 (sequence is synthesized)
ggaccagactcggcctcaccacctgccactctgagcaaacaggcaacggtgtttcctgaacatctttctgaagcggctgagggatgtcagctgagcccccgctgggcctgctctggagcg

SEQ ID NO: 480151 - DNA, 120 bp, Artificial Sequence
  ENSG00000160991_58 (sequence is synthesized)
ggatgtctccagaagccgcccttggagcgggcacttccctatttgggcgtgtcccagtcccatgcctcaccatccccttgcttgaagctccaagagcatgagagtgggcagcctggtctg

SEQ ID NO: 480152 - DNA, 120 bp, Artificial Sequence
  ENSG00000160991_59 (sequence is synthesized)
ctgaggaaagtgtctgatggatgcggaaatggccaccccaaacaccggtaagcagatgttaccctgcaggcggtggctcctggggcccagccctgcagaaacacatggggcaggctgggc

SEQ ID NO: 480153 - DNA, 68 bp, Artificial Sequence
  ENSG00000160991_60 (sequence is synthesized)
tggggcccagccctgcagaaacacatggggcaggctgggcagaggggctcacacccgttattcccagc

SEQ ID NO: 480154 - DNA, 64 bp, Artificial Sequence
  ENSG00000160991_61 (sequence is synthesized)
gcctgggcaacatagcaagactctatctccactaaaaatcaaaacaaaacgggaggatcacttg

SEQ ID NO: 480155 - DNA, 120 bp, Artificial Sequence
  ENSG00000160991_62 (sequence is synthesized)
cctgggcaacagagcaagaccctgccccgccgcctgaaagaaagaaaaaagaaagagaaaggaagagaaagaaaggaaaagaaaaaggaaacatacgaggctatggggccgtgtacgggg

SEQ ID NO: 480156 - DNA, 120 bp, Artificial Sequence
  ENSG00000160991_63 (sequence is synthesized)
ccgtgtacgggggccaggctgtggcagaagcatcctggcgtggccttctccagccccatcctggttgggtaaggtgtcgccgtgggtcttcgtgtcacagcttcaaggacagacccaact

SEQ ID NO: 480157 - DNA, 120 bp, Artificial Sequence
  ENSG00000160991_64 (sequence is synthesized)
ctggtatcacaaacttaacaggtaatggagtttcctaaagtgtgctctgcaggagtgctggaagggccagcatggaaggaccccagggagggagatttctttgctccacagcatccccaa

SEQ ID NO: 480158 - DNA, 120 bp, Artificial Sequence
  ENSG00000160991_65 (sequence is synthesized)
gcctcacgaggcctctcccctccaagtctctatgtgcatcgttctccagatgttggagcatcctgcaggggccagcccagcctgtcaggggcagagaccctgcactggccccctcgagag

SEQ ID NO: 480159 - DNA, 120 bp, Artificial Sequence
  ENSG00000160991_66 (sequence is synthesized)
tggacccctgggctggcttatctgctccagtgcagtgaggatcagctggagctccgacctgactcacatctggatgcgcagtgaggggcccgttggggccgtgatactgggaggaagccg

SEQ ID NO: 480160 - DNA, 120 bp, Artificial Sequence
  ENSG00000160991_67 (sequence is synthesized)
ggctctgtgctcttgctccaagtgagttgaccagggagccgaagttaaggtggcctgggagccacgtcctcccacctagcggctgggctctcacagccactagaaacccatcagcctttc

SEQ ID NO: 480161 - DNA, 120 bp, Artificial Sequence
  ENSG00000160991_68 (sequence is synthesized)
ccctgggtctatgcggggctcttcagccctcctgggagctcagtggctgggatgctgctttacagacagtgcacggctctgccatctgacagctcccagagggttctgggggtgactgta

SEQ ID NO: 480162 - DNA, 120 bp, Artificial Sequence
  ENSG00000160991_69 (sequence is synthesized)
aagagtggtgctggccccgaacctttcctgttcccctggatttagttcccagcaggtggtgaggaactgaacattttgtcccatagtggtgggagagagggctggccacatgggtccagg

SEQ ID NO: 480163 - DNA, 120 bp, Artificial Sequence
  ENSG00000160991_70 (sequence is synthesized)
ccaccccctcagcctccacagcctgccccgcacccagccacaggaacagcagagcagctcccccatccaggtaagcgcccccaccacagccccatcacaaaggaatagcctcctggtgta

SEQ ID NO: 480164 - DNA, 120 bp, Artificial Sequence
  ENSG00000160991_71 (sequence is synthesized)
gtgggaggtgaggagctttttttgttttccttttatttattttagggacagggtcttgctctgttgccaagttaagtgcagtggtatgatcatgagctcactgcagccttgacatggtgg

SEQ ID NO: 480165 - DNA, 79 bp, Artificial Sequence
  ENSG00000160991_72 (sequence is synthesized)
gtggtatgatcatgagctcactgcagccttgacatggtggtaaagccatcctcccgcctcagccttcgcccagctaatg

SEQ ID NO: 480166 - DNA, 89 bp, Artificial Sequence
  ENSG00000160991_73 (sequence is synthesized)
agtactcgggagctttaatttttcctacttgttaacagcgttatggggctggaaggaggctctcagatttccctgccctcctcacatcc

SEQ ID NO: 480167 - DNA, 120 bp, Artificial Sequence
  ENSG00000160991_74 (sequence is synthesized)
tggaaggaggctctcagatttccctgccctcctcacatcccccaaccctccctgggcgtgggggtgtcaagcatgagtcaggctgagcctgactctgaagctgttcccagctctttagtc

SEQ ID NO: 480168 - DNA, 120 bp, Artificial Sequence
  ENSG00000160991_75 (sequence is synthesized)
taaacttcaaatcttcaaccctgttccctaatccaacacattccccaaatgaagggactggacagtgagatatcgggaaaccccatgaaaatagatgcataataaaggtgaaaatcattt

SEQ ID NO: 480169 - DNA, 120 bp, Artificial Sequence
  ENSG00000160991_76 (sequence is synthesized)
cggcgccccggccgggccactgggccacaggccacgcggccacgcagtccgagcgggagccgagccgggcggggcgagggcagctccggaacgtcccagggatggaagtgcttggatgcg

SEQ ID NO: 480170 - DNA, 120 bp, Artificial Sequence
  ENSG00000160991_77 (sequence is synthesized)
aatgctgggcaccccccgaggctcaccctgccaagcctggggctccccttttgcgcccggacccaggggcagggaaagcccagctcgtggtctgtgggtagccggacccccgatggggcg

SEQ ID NO: 480171 - DNA, 120 bp, Artificial Sequence
  ENSG00000160991_78 (sequence is synthesized)
ggcgccccggccgggccactgggccacaggccacgcggccacgcagtccgagcgggagccgagccgggcggggcgagggcagctccgggaaggaacgtcccagggatggaagtgcttgga

SEQ ID NO: 480172 - DNA, 60 bp, Artificial Sequence
  ENSG00000160991_79 (sequence is synthesized)
actgcactccagcctggacaacagagcaaaactctgtctcaaaaaataataaataaaaat

SEQ ID NO: 480173 - DNA, 120 bp, Artificial Sequence
  ENSG00000160993_0 (sequence is synthesized)
ctgcgcactggccacgcggacggcgcgatggcggcggctgccgccgagacccccgaagtccttcgggaatgcggttgcaagggcatccggacctgtctgatctgcgagcggcagcgcggc

SEQ ID NO: 480174 - DNA, 120 bp, Artificial Sequence
  ENSG00000160993_1 (sequence is synthesized)
agtgacccgccctgggagctgcccccagcgaaaacataccgtttcatttactgctccgacaccggctgggccgtgggcacagaggagtctgactttgagggctgggccttccccttccca

SEQ ID NO: 480175 - DNA, 120 bp, Artificial Sequence
  ENSG00000160993_2 (sequence is synthesized)
ggagtgatgctgatcgaggactttgtgacccgggaggaagaagccgagttggtgcggctcatggaccgtgacccctggaagctctcccagtctggacggaggaagcaggactatggcccc

SEQ ID NO: 480176 - DNA, 120 bp, Artificial Sequence
  ENSG00000160993_3 (sequence is synthesized)
aaagtcaactttcggaaacagaagctaaagaccgagggcttctgcggcctccccagcttcagccgggaggtggtgcggaggatgggcctctacccggggctggagggcttccggcccgtc

SEQ ID NO: 480177 - DNA, 120 bp, Artificial Sequence
  ENSG00000160993_4 (sequence is synthesized)
gagcagtgcaacctggactactgccccgagcggggctctgccattgacccccacctggacgacgcctggctgtggggggagcggctggtcagcctcaacctcctgtcccccaccgtgctg

SEQ ID NO: 480178 - DNA, 120 bp, Artificial Sequence
  ENSG00000160993_5 (sequence is synthesized)
tccatgtgtcgggaggcgcccgggagcctgctcctctgctcggccccgtcggctgccccggaggccttggtggacagcgtgatagcacccagccggtcggtgctatgccaggaggtggag

SEQ ID NO: 480179 - DNA, 120 bp, Artificial Sequence
  ENSG00000160993_6 (sequence is synthesized)
gtggccatccccttacccgcccgctccctgctggtcctcaccggggcggcacggcaccagtggaagcatgccatccaccgcagacacatcgaggcccgccgcgtctgcgtcactttccgg

SEQ ID NO: 480180 - DNA, 120 bp, Artificial Sequence
  ENSG00000160993_7 (sequence is synthesized)
gagctgtcggctgagtttggccctggagggaggcagcaagagctgggccaggaactgctgcggatcgccctctccttccagggaagacccgtgtgaaccgcctccttggctccagacttg

SEQ ID NO: 480181 - DNA, 120 bp, Artificial Sequence
  ENSG00000160993_8 (sequence is synthesized)
cggggtttcaagagaagatggctgacccctgatgctgtgagcagtgtgagccctgcccaggagcaggttttgatgggaacgtacctccaggcagcccccttccacctggaccgtggccac

SEQ ID NO: 480182 - DNA, 120 bp, Artificial Sequence
  ENSG00000160993_9 (sequence is synthesized)
cccttccacctggaccgtggccacacttttttggttatttagtttgtcacagtcttggggacatgggatcatttgagcttaaaaaatactgggggccgggcacagtggctcacacctgta

SEQ ID NO: 480183 - DNA, 78 bp, Artificial Sequence
  ENSG00000160993_10 (sequence is synthesized)
ggccaacacggtgaaaacccgtctctacaaaaactacaaaaattagccgggtgtggtgactcacagccgaacctggga

SEQ ID NO: 480184 - DNA, 120 bp, Artificial Sequence
  ENSG00000160993_11 (sequence is synthesized)
aaaatgggaacattttaaatgattttcacctttattatgcatctattttcatggggtttcccgatatctcactgtccagtcccttcatttggggaatgtgttggattagggaacagggtt

SEQ ID NO: 480185 - DNA, 120 bp, Artificial Sequence
  ENSG00000160993_12 (sequence is synthesized)
gaagatttgaagtttagactaaagagctgggaacagcttcagagtcaggctcagcctgactcatgcttgacacccccacgcccagggagggttgggggatgtgaggagggcagggaaatc

SEQ ID NO: 480186 - DNA, 120 bp, Artificial Sequence
  ENSG00000160993_13 (sequence is synthesized)
gggagggttgggggatgtgaggagggcagggaaatctgagagcctccttccagccccataacgctgttaacaagtaggaaaaattaaagctcccggccaggcgcggtgactcacacctgt

SEQ ID NO: 480187 - DNA, 79 bp, Artificial Sequence
  ENSG00000160993_14 (sequence is synthesized)
ctacaaaaaatacaaacattagctgggcgaaggctgaggcgggaggatggctttaccaccatgtcaaggctgcagtgag

SEQ ID NO: 480188 - DNA, 120 bp, Artificial Sequence
  ENSG00000160993_15 (sequence is synthesized)
cgggaggatggctttaccaccatgtcaaggctgcagtgagctcatgatcataccactgcacttaacttggcaacagagcaagaccctgtccctaaaataaataaaaggaaaacaaaaaaa

SEQ ID NO: 480189 - DNA, 120 bp, Artificial Sequence
  ENSG00000160993_16 (sequence is synthesized)
cacccctcaaacctccagggttggtagtgggcgagttccccagaccttggggctgtgggcagccagactcgctgcaggacgtgtgtccgatgggcagaggtgcacctgggcaccccatct

SEQ ID NO: 480190 - DNA, 120 bp, Artificial Sequence
  ENSG00000160994_0 (sequence is synthesized)
agtacactgtctctacaggccaggaaagagttgtgtgtctttggggtcccttccgctccgcctagggttcccggccaggccgagagaccaagcagggaccatgcgcgtgttggtaccccc

SEQ ID NO: 480191 - DNA, 120 bp, Artificial Sequence
  ENSG00000160994_1 (sequence is synthesized)
ggctgagcgcagccaggacacacgcgttggggccccagcatggcgcgaggcagctcaggccatggcgaggaccgcgcacattctgaccgatcgctgcgggcaggaggcggtgaccatgtg

SEQ ID NO: 480192 - DNA, 120 bp, Artificial Sequence
  ENSG00000160994_2 (sequence is synthesized)
gcagcccaaggacagcgtgctggacccgaacgtggcccaccacctcggccgcgccgcctacatccagccctggcgcttccgcgtggagatgatcaaaggcggcggcaccttggagaagcc

SEQ ID NO: 480193 - DNA, 120 bp, Artificial Sequence
  ENSG00000160994_3 (sequence is synthesized)
gccgccaggcgagggcgtcacgctgtggaagggcaagatgaagccgcccgcctggtacgcccgcctgccgctacccttgcaccgcaaagcgcgcgccctgcagaccaccgaggtggtgca

SEQ ID NO: 480194 - DNA, 120 bp, Artificial Sequence
  ENSG00000160994_4 (sequence is synthesized)
cgcgcacgcgcgtggagcgcgcctcaccgccgcccgcctcggccgcgcgcagcaccagattaacgggcgggtgcgacagctgctgcgccagcgcgaggtcaccgaccacaggctcagcga

SEQ ID NO: 480195 - DNA, 120 bp, Artificial Sequence
  ENSG00000160994_5 (sequence is synthesized)
agtgcgcaagggtctgcttattaaccagcagagcgtcaagctgcggggctacaggcccaagtctgagaaggtccctgacaaagctgacagtatgcttacatgggagaaagaggagctgaa

SEQ ID NO: 480196 - DNA, 120 bp, Artificial Sequence
  ENSG00000160994_6 (sequence is synthesized)
aagcatgaagaggaaaatggagagagatatggaaaaatcagaggtcctactcaagaccctggcctcctgccgagacactctgaacttctgcttcaaggagcggctccaagccgtggacct

SEQ ID NO: 480197 - DNA, 120 bp, Artificial Sequence
  ENSG00000160994_7 (sequence is synthesized)
cacgcacacagggtcagaaaacgcctcctccagaccctgtgggcacctataacccagcgtgcgccttggcgctaaacgaagccaagcggttgttggtcgagtccaaggacaccttggtag

SEQ ID NO: 480198 - DNA, 120 bp, Artificial Sequence
  ENSG00000160994_8 (sequence is synthesized)
aaatggcaaagaacgaggtggacgtccgggagcaacagctgcagataagcgaccgtgtgtgtgcctcgctggcgcagaaggcgagcgagaccttggagctgaaggaaagattaaatatga

SEQ ID NO: 480199 - DNA, 120 bp, Artificial Sequence
  ENSG00000160994_9 (sequence is synthesized)
cgttaggactgatgaggggaactatcctccggtgtacgaaatataaccaagagttgtacaccacccacggtctcatcaagggtcctctgtcgaaagttcacctggagaccgcagaaaagc

SEQ ID NO: 480200 - DNA, 120 bp, Artificial Sequence
  ENSG00000160994_10 (sequence is synthesized)
tggacagacccctggttcgcatgtaccagagacacgtgggcacccaactcccggaggctgcgcgcctcgcacagggcaccgacaagctgcagtgccacatcacgtacctggaaaagaacc

SEQ ID NO: 480201 - DNA, 120 bp, Artificial Sequence
  ENSG00000160994_11 (sequence is synthesized)
tggacgagctgctcgccacgcacaagaacctcagctggggcctcaactgcaagaacatcgggcatgaggtggacggcaacgtggtgcgcctgcgcctgcgccagcggcaaccgcacgtgt

SEQ ID NO: 480202 - DNA, 120 bp, Artificial Sequence
  ENSG00000160994_12 (sequence is synthesized)
gctacgagcaggcgcagcgcctggttaaggactgggacccgcgcacgccgccgccgcgcagcaagagcagcgcggacccctagtgaccccagcgtcccccgccccagccagctgattgga

SEQ ID NO: 480203 - DNA, 120 bp, Artificial Sequence
  ENSG00000160994_13 (sequence is synthesized)
tgctggctgggacctcggagagcagacacagccccatggccctccctctcccctgacgcaccctccctccaagcaccctctaggagaattataattaaaaataacaataattatcatgta

SEQ ID NO: 480204 - DNA, 120 bp, Artificial Sequence
  ENSG00000160999_0 (sequence is synthesized)
ggggatggatccaagctattgtcctgcccatggcttcccatctcaggaccctctctggccgctatcatcccagcagtggagttcagcccactactctgaaccagccgcaggtggctgcga

SEQ ID NO: 480205 - DNA, 120 bp, Artificial Sequence
  ENSG00000160999_1 (sequence is synthesized)
tgggacggaagccatgaatggtgccggccctggccccgccgcagccgccccggtcccagtcccggtcccggtcccggactggcggcagttctgcgagctgcatgcgcaggcggccgccgt

SEQ ID NO: 480206 - DNA, 120 bp, Artificial Sequence
  ENSG00000160999_2 (sequence is synthesized)
ggactttgcgcacaagttctgccgtttcctgcgggacaacccagcttacgacacgcccgacgccggcgcctccttctcccgccacttcgccgccaacttcctggacgtcttcggcgagga

SEQ ID NO: 480207 - DNA, 120 bp, Artificial Sequence
  ENSG00000160999_3 (sequence is synthesized)
ggtgcgccgcgtgctggtggctgggccgacgactcggggcgcggccgtgagcgcagaggccatggagccggagctcgcggacacctctgcactcaaggcggcgccctacggccactcgcg

SEQ ID NO: 480208 - DNA, 120 bp, Artificial Sequence
  ENSG00000160999_4 (sequence is synthesized)
gagctcggaggacgtgtccacgcacgcggccaccaaggcccgcgttcgcaagggcttctcgctgcgcaacatgagcctgtgcgtggtggacggcgtgcgcgacatgtggcaccggcgcgc

SEQ ID NO: 480209 - DNA, 120 bp, Artificial Sequence
  ENSG00000160999_5 (sequence is synthesized)
ctcgcccgagcccgacgcggcagctgccccgcgcaccgccgagccccgcgacaagtggacgcggcgcctgaggctgtcgcggacgctggctgccaaggtggagctggtggacattcaacg

SEQ ID NO: 480210 - DNA, 120 bp, Artificial Sequence
  ENSG00000160999_6 (sequence is synthesized)
cgagggggcgctgcgcttcatggtggccgacgacgcggccgcgggctccgggggctcggctcagtggcagaagtgccgcctgctcctgcgcagggctgtggccgaggaacgcttccgcct

SEQ ID NO: 480211 - DNA, 120 bp, Artificial Sequence
  ENSG00000160999_7 (sequence is synthesized)
ggagttcttcgtgccgcccaaagcctccaggcccaaggtcagcatcccactgtcagccatcattgaggtccgcaccaccatgcccctggaaatgccagagaaggataacacattcgtcct

SEQ ID NO: 480212 - DNA, 120 bp, Artificial Sequence
  ENSG00000160999_8 (sequence is synthesized)
atccagggctgcgtggaccccggtgacagtgaggaagacaccgagctctcctgtacccgaggaggctgtctggccagccgcgtggcctcctgcagctgtgagctcctgactgatgcagtc

SEQ ID NO: 480213 - DNA, 120 bp, Artificial Sequence
  ENSG00000160999_9 (sequence is synthesized)
gacctgccccgccccccagagacgacagccgtgggtgcagtggtgacagccccccacagccgaggtcgagatgccgtcagagaatccctgatccacgtcccgctagagacctttctgcag

SEQ ID NO: 480214 - DNA, 120 bp, Artificial Sequence
  ENSG00000160999_10 (sequence is synthesized)
accctggaatccccgggcggcagcggcagtgacagcaataacacaggggaacagggtgcagagacggatcccgaggctgaacccgagctggagctatccgactacccatggttccacggg

SEQ ID NO: 480215 - DNA, 120 bp, Artificial Sequence
  ENSG00000160999_11 (sequence is synthesized)
acactgtcccgggtcaaggctgctcaactggttctggcaggggggccccggaaccacggcctcttcgtgatccgccaaagtgagactcggcctggggagtacgtgctgaccttcaacttc

SEQ ID NO: 480216 - DNA, 120 bp, Artificial Sequence
  ENSG00000160999_12 (sequence is synthesized)
cagggcaaggccaagcacctgcgcctgtccctgaacggccacggccagtgtcacgtacagcatctgtggttccagtctgtgcttgacatgctccgccacttccacacacaccccatccca

SEQ ID NO: 480217 - DNA, 120 bp, Artificial Sequence
  ENSG00000160999_13 (sequence is synthesized)
ctggagtcagggggctcggccgacatcacccttcgcagctatgtgcgggcccaggaccccccaccagagccgggccccacgccccctgccgcgcccgcgtccccggcctgctggagcgac

SEQ ID NO: 480218 - DNA, 120 bp, Artificial Sequence
  ENSG00000160999_14 (sequence is synthesized)
tcgcccggccagcactacttctccagcctcgccgcggccgcctgcccgcctgcctcgccctccgacgccgccggcgcctcctcgtcttccgcctcgtcgtcctctgccgcgtcggggccc

SEQ ID NO: 480219 - DNA, 120 bp, Artificial Sequence
  ENSG00000160999_15 (sequence is synthesized)
cggagccgcagcaacagcgccgagcgcctgctggaggccgtggccgccaccgccgccgaggagcccccggaggccgcgcccggccgcgcgcgcgccgtggagaaccagtactccttctac

SEQ ID NO: 480220 - DNA, 120 bp, Artificial Sequence
  ENSG00000160999_16 (sequence is synthesized)
cgcgcgcgcgccgtggagaaccagtactccttctactagcccgcggcgccgcccgggtgggacacgccaagctcttcagtgaagacacgatgttattaaaagcctgttttagggactgca

SEQ ID NO: 480221 - DNA, 120 bp, Artificial Sequence
  ENSG00000160999_17 (sequence is synthesized)
ttggagcgcgcggagctcggctgccagagagccgcgcgggggacgcgccgggaccgcgaggagcgcaggagccttcgaggcggtgaacgagggagggagcccagtccgccgcgggccatg

SEQ ID NO: 480222 - DNA, 120 bp, Artificial Sequence
  ENSG00000160999_18 (sequence is synthesized)
catcagttcctccttgtgggtccgaggcgctctgccgccggcccctcctcacttcttcctccctggggatggatccaagctattgtcctgcccatggcttcccatctcaggaccctctct

SEQ ID NO: 480223 - DNA, 120 bp, Artificial Sequence
  ENSG00000161010_0 (sequence is synthesized)
ctggcgactgcacaagcagggatggcgtcgcttcagcgttctcgggtgctacgctgctgcagctgccgcctcttccaggcgcaccaggtaaaaaagagtgtcaagtggacatgcaaagct

SEQ ID NO: 480224 - DNA, 120 bp, Artificial Sequence
  ENSG00000161010_1 (sequence is synthesized)
tgtggagagaagcagtcctttttgcaggcttatggtgaaggctctggtgctgattgtagacgccatgtccaaaagttaaatctactacagggacaagtttcagagctgccactcaggtct

SEQ ID NO: 480225 - DNA, 120 bp, Artificial Sequence
  ENSG00000161010_2 (sequence is synthesized)
ctagaagaaactgtcagtgccagtgaagaagaaaacgtgggacaccagcaggctgggaatgtgaagcagcaggaaaaatcgcagccctcagagagtcgctggctgaagtatctagaaaag

SEQ ID NO: 480226 - DNA, 120 bp, Artificial Sequence
  ENSG00000161010_3 (sequence is synthesized)
gactcccaagaactggagctggaaggaacaggagtgtgtttcagcaaacagccttcatccaaaatggaggagccaggcccccgcttcagtcaagacctgcctagaaaaaggaagtggagc

SEQ ID NO: 480227 - DNA, 120 bp, Artificial Sequence
  ENSG00000161010_4 (sequence is synthesized)
gcctgacatggaaggtgaaacaaggcagcagcccctgcctccaggagaactctgcagactgcagtgccggggagctgaggggtcctgggaaggagctatggagtcccatccagcaggtta

SEQ ID NO: 480228 - DNA, 120 bp, Artificial Sequence
  ENSG00000161010_5 (sequence is synthesized)
cagccacatcctctaaatgggcgcaatttgtcctgccacctagaaaaagttcacatgtggacagtgagcagccaaggtctcttcagagggaccccaggccagctggtccagcacaggcta

SEQ ID NO: 480229 - DNA, 120 bp, Artificial Sequence
  ENSG00000161010_6 (sequence is synthesized)
agcaagggacccccagagcacaggcctcaagagaaggcctcagcaggcccactgccgctgtccagcttcctcgggccacacaccccgtcacatctgggtctgagaggccttgcgggaaga

SEQ ID NO: 480230 - DNA, 120 bp, Artificial Sequence
  ENSG00000161010_7 (sequence is synthesized)
cctcatgggacgcaaggactccctgggcagagggtgggcccctggtcctggaggcacagaatcctcgacccacacgactatgtgacctctttataactggggaagacttcgatgatgatg

SEQ ID NO: 480231 - DNA, 120 bp, Artificial Sequence
  ENSG00000161010_8 (sequence is synthesized)
tgtgatctgggactggcaggttattaatcgagatacacttgttaggagggacagggttcccctaaggcacttttaaagatactctgtaagaaccattaacaataaacttactgtcaatca

SEQ ID NO: 480232 - DNA, 120 bp, Artificial Sequence
  ENSG00000161010_9 (sequence is synthesized)
gtccagcctccgtgcagccgtggcgtgcaggactcgggtggctctgaggtcgcctggggaccccagaaggtcagtgacaaacagtttctctctggtcccagtgaccactgagcgtgtgtg

SEQ ID NO: 480233 - DNA, 120 bp, Artificial Sequence
  ENSG00000161010_10 (sequence is synthesized)
tgataattctgtcttttgtcacagttgacgaagtgtgcgattcctacccgcagaaagcccatcttcccacccgggtttcttgtcttttctgtctgaagccaactccttcctcgggtctgt

SEQ ID NO: 480234 - DNA, 120 bp, Artificial Sequence
  ENSG00000161010_11 (sequence is synthesized)
acccccttttccctcccatgcctctcgtctcccatgagggtaactcaggaccaaagagcattgtgacccttggagaaactgaggttggccagcaggtcaacctgacgatgggtcagggcc

SEQ ID NO: 480235 - DNA, 120 bp, Artificial Sequence
  ENSG00000161010_12 (sequence is synthesized)
atcgtctcattctgcgtggagcacggggacctttgtccgggcaggagtcgtcagcgggccgccctgaatcctgggagatgcttccctccacactcgcatttgccctgctgtggactcttg

SEQ ID NO: 480236 - DNA, 120 bp, Artificial Sequence
  ENSG00000161010_13 (sequence is synthesized)
tgccctgctgtggactcttgtatgtgaggcactcttcacttagggtgttgtcttgttcttttttgttttctgagacagggtctcactctgtctacccaggctggagtgcagtggcacagt

SEQ ID NO: 480237 - DNA, 120 bp, Artificial Sequence
  ENSG00000161010_14 (sequence is synthesized)
ggctcaagtgatcctcctgcctcagccgccaagtagctgggaccacagatgcacaccaccacactggctaatctttaaaaaatattttgtagaggccaggcgcagtggctcacacctgta

SEQ ID NO: 480238 - DNA, 65 bp, Artificial Sequence
  ENSG00000161010_15 (sequence is synthesized)
gaaaccccatctctactaaaaataattagctgggcgtggttgtgcacgcctataggttgcagtga

SEQ ID NO: 480239 - DNA, 79 bp, Artificial Sequence
  ENSG00000161010_16 (sequence is synthesized)
cacttcccaaagtgctgggactataggtgtgggccactgcgcctggcccatttgtcttgttcttgaagcttccagtcca

SEQ ID NO: 480240 - DNA, 120 bp, Artificial Sequence
  ENSG00000161010_17 (sequence is synthesized)
cgcctggcccatttgtcttgttcttgaagcttccagtccagcaggccccaccgcatatccagtgctgcagagtgcagggtttgctctgcctgtcagaggagccagggcacagcaagggca

SEQ ID NO: 480241 - DNA, 120 bp, Artificial Sequence
  ENSG00000161010_18 (sequence is synthesized)
ctgcagttgggagtccactgggcgtcagtcactgcccccacccccacatcagccaaggtcggtctccgctggccttgcaccacgcacagagcactggctcatgccaagaagcagaattca

SEQ ID NO: 480242 - DNA, 120 bp, Artificial Sequence
  ENSG00000161010_19 (sequence is synthesized)
aactttgatgttgccgccaactagttttgtgatcctgggtaagtaagtggctttgaatctccaaatcctagaagaatgaccagagagtctgccacgggccagtccctgggctgcatgttg

SEQ ID NO: 480243 - DNA, 120 bp, Artificial Sequence
  ENSG00000161010_20 (sequence is synthesized)
taatggtatcattgtgtttcatgctccctcaagcctgttgctttgttttaaaggtgaggaactgaggcttgcagtttttgtgcagtcatggcaagttcagtggcaaagccaacgtcaagt

SEQ ID NO: 480244 - DNA, 120 bp, Artificial Sequence
  ENSG00000161010_21 (sequence is synthesized)
tgctttcacattgcttttccctttgtaagcagcacaacccaactgttgttttttttttttttttgagtaggagtttcactcttgttcccctggctggagtgtaatggcacgatcttggct

SEQ ID NO: 480245 - DNA, 120 bp, Artificial Sequence
  ENSG00000161010_22 (sequence is synthesized)
tctgtcacctaggctggagtgcaatggtacaatcacacctcatagcagcctccatctcccgggcttaagtgatcctcccgagcagctgggatcacaggcactcaccaccacagttggcta

SEQ ID NO: 480246 - DNA, 120 bp, Artificial Sequence
  ENSG00000161010_23 (sequence is synthesized)
tcctcccgagcagctgggatcacaggcactcaccaccacagttggctaattttttgtagaagagggggtttcaccatgttgcccaaactggtgtcaaactcctgggctcaagcaatctgc

SEQ ID NO: 480247 - DNA, 120 bp, Artificial Sequence
  ENSG00000161010_24 (sequence is synthesized)
ggattcaggcatgagccactgctcccagcctacaacccaactttcttttttttgagacagagttcgctctgttgcctaggctggagtggaatggcgtgatttcggctcactgcaacctct

SEQ ID NO: 480248 - DNA, 120 bp, Artificial Sequence
  ENSG00000161010_25 (sequence is synthesized)
cccgagtagctgagattacaggcgcgtgccaccacgccaggttaatttttgtatttttagtagtgatagggtttcgccatgttggccaggttgatctcgaactcctggcctcaggtgatc

SEQ ID NO: 480249 - DNA, 74 bp, Artificial Sequence
  ENSG00000161010_26 (sequence is synthesized)
cccaactttcagagcatctttggttcctggggtgagagaagccagaccccagcaccagtcctatcccacaggga

SEQ ID NO: 480250 - DNA, 120 bp, Artificial Sequence
  ENSG00000161010_27 (sequence is synthesized)
agagaagccagaccccagcaccagtcctatcccacagggagctcggtgctgccacctctgcagctgcagaacccggcaggctctggagagctgccccccggtgggaggtagcagaatgga

SEQ ID NO: 480251 - DNA, 120 bp, Artificial Sequence
  ENSG00000161010_28 (sequence is synthesized)
gccagcgcacccctttcccgatgtctcgaggcccttctgctcaaaattcttttgtaggcaccggtaacctgattctaaggtccccaggagatggatcacctgatgacatgagaatgtctt

SEQ ID NO: 480252 - DNA, 120 bp, Artificial Sequence
  ENSG00000161010_29 (sequence is synthesized)
gtttttggaaagcctggtcatgcaatttagcagaaggtttgcggtgaggtggaaggcatttatttgctttgtcttgctaaccctcaaaatcaaagcctgtcccagcctgacagcttccag

SEQ ID NO: 480253 - DNA, 120 bp, Artificial Sequence
  ENSG00000161010_30 (sequence is synthesized)
cagaaagtgtcagaaccagaggcccagccaaggcccaggcagggcaggcggtcctcctgggccctggcattgttcttacacatggagggcatggccatcttctctttcagggacaggctg

SEQ ID NO: 480254 - DNA, 120 bp, Artificial Sequence
  ENSG00000161010_31 (sequence is synthesized)
tgaaaccaacattgcggatgcccttcgtgagccttctcagtcccagcaggaagcccacaacactggcctccccagcctgcctgctgacaacacctaggcttactttatctaaaatcagag

SEQ ID NO: 480255 - DNA, 120 bp, Artificial Sequence
  ENSG00000161010_32 (sequence is synthesized)
tgtaccaggtctgtagcagaaaataatcaactaaatgtcagggacctatgagtcatttaaaacaaaagagaaagtgaaagccattaggcaagctatgtgctgggctgctaacgtagcccc

SEQ ID NO: 480256 - DNA, 120 bp, Artificial Sequence
  ENSG00000161010_33 (sequence is synthesized)
tgcagggaggggtcaggagcgcgctgcagtgagccttgggtctcgcaggcccagccctgctgcaaggagccagggcacccaggaaacatcagcacacacacacacagggaccctcccttc

SEQ ID NO: 480257 - DNA, 120 bp, Artificial Sequence
  ENSG00000161010_34 (sequence is synthesized)
atgtcacttgttttgctgccctaaatggcttcttgcaccctaacccctgatcctggaagaaggcagagaaactggcccgtacagagacctgcaattctacgcaagcttaacacaactatg

SEQ ID NO: 480258 - DNA, 120 bp, Artificial Sequence
  ENSG00000161010_35 (sequence is synthesized)
aagcagtcctttttgcaggtgagtcctacaaaacagaaagcaagtggggcgcaggcctgcagcgagcccttccagggagtcccagcatgccacagctgggatcatcctctctcaaacaga

SEQ ID NO: 480259 - DNA, 120 bp, Artificial Sequence
  ENSG00000161010_36 (sequence is synthesized)
tgttttttcctatgcatacatacctgtgattaagtttatgaattaggcaccttaagagattgacaacaataactaataataaaatgtaacggttatactgtaatgaaagttgtaaatgtg

SEQ ID NO: 480260 - DNA, 120 bp, Artificial Sequence
  ENSG00000161010_37 (sequence is synthesized)
gtctgtctcacaatatcttcttgtactgtactcatctcttttccaggtggctgttgactctgggtaactaaagctgcagaaggtgaaactcagatgctttctgttctcagccacagtagc

SEQ ID NO: 480261 - DNA, 120 bp, Artificial Sequence
  ENSG00000161010_38 (sequence is synthesized)
cggtgtgggtaggcgcaaggacgcagggggtggaaaacggggaaggctccaggtggttctgaccgcaggctgttggaaactggaggtaaaaaagagtgtcaagtggacatgcaaagcttg

SEQ ID NO: 480262 - DNA, 120 bp, Artificial Sequence
  ENSG00000161010_39 (sequence is synthesized)
gaagcagtcctttttgcaggagaagcaacctggttggcccaggctgactcggatgcccacctctggtccagtcaactgggattgggtctcagaagagaggggctggcttaccaggcttat

SEQ ID NO: 480263 - DNA, 120 bp, Artificial Sequence
  ENSG00000161010_40 (sequence is synthesized)
tgaatactggatggtgtccagagccgctccgatgtcatagttcttggtctgcaggagcctggtgagccagccgccttcatcagagaagcccatggacagcatctgggagagggactcaat

SEQ ID NO: 480264 - DNA, 120 bp, Artificial Sequence
  ENSG00000161010_41 (sequence is synthesized)
cagccgcgggtcagcctctgccgaaacagtaaggaagccatgaggagtggtgctgagccctgtgagtgacccgaaacacataccctgctgccttggccagccaggaccagggtctgccag

SEQ ID NO: 480265 - DNA, 120 bp, Artificial Sequence
  ENSG00000161010_42 (sequence is synthesized)
tgtccgagcctgcccagagctctcgtcctcacaggccacagtggacctgctttccctgtaaagggccaagcagtctttttcacactgctcaactctgccactgcgacaccaggcagccag

SEQ ID NO: 480266 - DNA, 120 bp, Artificial Sequence
  ENSG00000161010_43 (sequence is synthesized)
gtggtgtgtaagcagaaccatcaatggacactgaaataggcatttcacctgtcacatcttttgattttaaaatgtaagaacaggccagttagccaattattacactcctccatgcaagag

SEQ ID NO: 480267 - DNA, 120 bp, Artificial Sequence
  ENSG00000161010_44 (sequence is synthesized)
atgatggggcattgaaatagattgaagatggagagagatgaatggatacaagatacattttggaggtagaatgaacaggacttggaaatgtatgtggagaaggcaaaggagttaaagatg

SEQ ID NO: 480268 - DNA, 120 bp, Artificial Sequence
  ENSG00000161010_45 (sequence is synthesized)
tgtatgtggagaaggcaaaggagttaaagatgatatctggagcagcacaactcacaattgcaaagatgtggaaccaacctaactgcccatcaagcaatgagtggataaagaaaatgtggt

SEQ ID NO: 480269 - DNA, 120 bp, Artificial Sequence
  ENSG00000161010_46 (sequence is synthesized)
aaaaggaacgaaataataccttttgcagcaacttggacggagctggaggccattatcctaagtaaagtaattcaggaatggataccaaatatcatatgttctcacttatgagtagatgct

SEQ ID NO: 480270 - DNA, 120 bp, Artificial Sequence
  ENSG00000161010_47 (sequence is synthesized)
gataccaaatatcatatgttctcacttatgagtagatgctaagctatgatgatgcaaagacataagaatgatatagctttccctctccctctttctccacggtctccctctgatgccgag

SEQ ID NO: 480271 - DNA, 120 bp, Artificial Sequence
  ENSG00000161010_48 (sequence is synthesized)
ctccgttccagccctggcccagggcctctgctgcctccagcagtggggcaccagtgagccactgtgagcgtcagccaagcgcgggaagcctaggtggcaagtgccagcaggtgggaaatc

SEQ ID NO: 480272 - DNA, 120 bp, Artificial Sequence
  ENSG00000161010_49 (sequence is synthesized)
cagaggcgaaggctgggcaggacacccgtgtgcacaccctttatgatgcccacttaattctgaacatctcagactgtactgaccccaggggagaggtcggagtagctggcaggcctaaga

SEQ ID NO: 480273 - DNA, 120 bp, Artificial Sequence
  ENSG00000161010_50 (sequence is synthesized)
gcttttagctcagagaagcagaggcctcagacttgaaggaagttttcttctgcttcaggcatttcagtgagatttttggagagactgctttaggttaaggatctagggaggctcttagag

SEQ ID NO: 480274 - DNA, 120 bp, Artificial Sequence
  ENSG00000161010_51 (sequence is synthesized)
ggcaggtgctttcaggaggatcatttgatcctccagtccgggcaacatagggagaccctatctgtacaacagattttttaaaacaaattcatggggcatggtggtgcatgcctgtggtcc

SEQ ID NO: 480275 - DNA, 120 bp, Artificial Sequence
  ENSG00000161010_52 (sequence is synthesized)
gcagtcctttttgcagagttccccagacacggagctcctgcttccgagcttcctgttccttcaggaagtgaaatggatggagcagaatctggaaagactgttcagtcagattctctgctc

SEQ ID NO: 480276 - DNA, 120 bp, Artificial Sequence
  ENSG00000161010_53 (sequence is synthesized)
cttgtttgagatgtatatatttctacattctccttgaggaagccttcttactcccctcaatgcctctgtgctgtgtgtggtatgtggtgtatggctgactaggccacagtaacaaacaca

SEQ ID NO: 480277 - DNA, 120 bp, Artificial Sequence
  ENSG00000161010_54 (sequence is synthesized)
agaagagcgtggttgtcttgccctgttttcgtcttgactggataatagaagtacacagtggaaatcctgagctgggcactctgctgtggctggacctgccccaggtccctgctgtcactt

SEQ ID NO: 480278 - DNA, 120 bp, Artificial Sequence
  ENSG00000161010_55 (sequence is synthesized)
gaggtcagcagctgccctcagaaccgaccccggggatgtttagaatactggggctgagcttcacccgaggagattctcacctgattacctgtgatgaggtccagacctgtggtttttaaa

SEQ ID NO: 480279 - DNA, 120 bp, Artificial Sequence
  ENSG00000161010_56 (sequence is synthesized)
gctggcaggccattgctctgtgcctccagagctgaaggctcttgacacagctgttcttgtttgtggctggctcaccagagaggccctggtaggacagaccccactgggcctgggtcagtg

SEQ ID NO: 480280 - DNA, 120 bp, Artificial Sequence
  ENSG00000161010_57 (sequence is synthesized)
gagaagtcccttagacttccacgtcttacaatatggcagtcaaacaccctgagcaattctcccactgaaaataactaaaaatgctagctattttaaatgcactgatgagctgacaagaaa

SEQ ID NO: 480281 - DNA, 76 bp, Artificial Sequence
  ENSG00000161010_58 (sequence is synthesized)
atgctagctattttaaatgcactgatgagctgacaagaaagtaactctcggccaggcgcagtggctcatgcttgta

SEQ ID NO: 480282 - DNA, 120 bp, Artificial Sequence
  ENSG00000161011_0 (sequence is synthesized)
acggcccgttttccgccagctcgccgctcgctatggcgtcgctcaccgtgaaggcctaccttctgggcaaggaggacgcggcgcgcgagattcgccgcttcagcttctgctgcagccccg

SEQ ID NO: 480283 - DNA, 120 bp, Artificial Sequence
  ENSG00000161011_1 (sequence is synthesized)
agcctgaggcggaagccgaggctgcggcgggtccgggaccctgcgagcggctgctgagccgggtggccgccctgttccccgcgctgcggcctggcggcttccaggcgcactaccgcgatg

SEQ ID NO: 480284 - DNA, 120 bp, Artificial Sequence
  ENSG00000161011_2 (sequence is synthesized)
aggacggggacttggttgccttttccagtgacgaggaattgacaatggccatgtcctacgtgaaggatgacatcttccgaatctacattaaagagaaaaaagagtgccggcgggaccacc

SEQ ID NO: 480285 - DNA, 120 bp, Artificial Sequence
  ENSG00000161011_3 (sequence is synthesized)
gcccaccgtgtgctcaggaggcgccccgcaacatggtgcaccccaatgtgatctgcgatggctgcaatgggcctgtggtaggaacccgctacaagtgcagcgtctgcccagactacgact

SEQ ID NO: 480286 - DNA, 120 bp, Artificial Sequence
  ENSG00000161011_4 (sequence is synthesized)
tgtgtagcgtctgcgagggaaagggcttgcaccgggggcacaccaagctcgcattccccagccccttcgggcacctgtctgagggcttctcgcacagccgctggctccggaaggtgaaac

SEQ ID NO: 480287 - DNA, 120 bp, Artificial Sequence
  ENSG00000161011_5 (sequence is synthesized)
acggacacttcgggtggccaggatgggaaatgggtccaccaggaaactggagcccacgtcctcctcgtgcaggggaggcccgccctggccccacggcagaatcagcttctggtccatcgg

SEQ ID NO: 480288 - DNA, 120 bp, Artificial Sequence
  ENSG00000161011_6 (sequence is synthesized)
aggatccgagtgtgaatttcctgaagaacgttggggagagtgtggcagctgcccttagccctctgggcattgaagttgatatcgatgtggagcacggagggaaaagaagccgcctgaccc

SEQ ID NO: 480289 - DNA, 120 bp, Artificial Sequence
  ENSG00000161011_7 (sequence is synthesized)
ccgtctctccagagagttccagcacagaggagaagagcagctcacagccaagcagctgctgctctgaccccagcaagccgggtgggaatgttgagggcgccacgcagtctctggcggagc

SEQ ID NO: 480290 - DNA, 120 bp, Artificial Sequence
  ENSG00000161011_8 (sequence is synthesized)
agatgaggaagatcgccttggagtccgaggggcgccctgaggaacagatggagtcggataactgttcaggaggagatgatgactggacccatctgtcttcaaaagaagtggacccgtcta

SEQ ID NO: 480291 - DNA, 120 bp, Artificial Sequence
  ENSG00000161011_9 (sequence is synthesized)
caggtgaactccagtccctacagatgccagaatccgaagggccaagctctctggacccctcccaggagggacccacagggctgaaggaagctgccttgtacccacatctcccgccagagg

SEQ ID NO: 480292 - DNA, 120 bp, Artificial Sequence
  ENSG00000161011_10 (sequence is synthesized)
ctgacccgcggctgattgagtccctctcccagatgctgtccatgggcttctctgatgaaggcggctggctcaccaggctcctgcagaccaagaactatgacatcggagcggctctggaca

SEQ ID NO: 480293 - DNA, 120 bp, Artificial Sequence
  ENSG00000161011_11 (sequence is synthesized)
ttgtgttaagcttgcgtagaattgcaggtctctgtacgggccagtttctctgccttcttccaggatcaggggttagggtgcaagaagccatttagggcagcaaaacaagtgacatgaagg

SEQ ID NO: 480294 - DNA, 120 bp, Artificial Sequence
  ENSG00000161011_12 (sequence is synthesized)
gagggtccctgtgtgtgtgtgtgctgatgtttcctgggtgccctggctccttgcagcagggctgggcctgcgagacccaaggctcactgcagcgcgctcctgacccctccctgcaggggc

SEQ ID NO: 480295 - DNA, 120 bp, Artificial Sequence
  ENSG00000161011_13 (sequence is synthesized)
tacgttagcagcccagcacatagcttgcctaatggctttcactttctcttttgttttaaatgactcataggtccctgacatttagttgattattttctgctacagacctggtacactctg

SEQ ID NO: 480296 - DNA, 120 bp, Artificial Sequence
  ENSG00000161011_14 (sequence is synthesized)
attttagataaagtaagcctaggtgttgtcagcaggcaggctggggaggccagtgttgtgggcttcctgctgggactgagaaggctcacgaagggcatccgcaatgttggtttcactgag

SEQ ID NO: 480297 - DNA, 120 bp, Artificial Sequence
  ENSG00000161011_15 (sequence is synthesized)
agctgcctcctggtctcttcaccactgtagttctctcatttccaaaccatcagctgcttttaaaataagatctctttgtagccatcctgttaaatttgtaaacaatctaattaaatggca

SEQ ID NO: 480298 - DNA, 120 bp, Artificial Sequence
  ENSG00000161011_16 (sequence is synthesized)
tcagcactttaaccaatgacgtttgcatagagagaaatgattgacagtaagtttattgttaatggttcttacagagtatctttaaaagtgccttaggggaaccctgtccctcctaacaag

SEQ ID NO: 480299 - DNA, 120 bp, Artificial Sequence
  ENSG00000161011_17 (sequence is synthesized)
tgtatctcgattaataacctgccagtcccagatcacacatcatcatcgaagtcttccccagttataaagaggtcacatagtcgtgtgggtcgaggattctgtgcctccaggaccaggggc

SEQ ID NO: 480300 - DNA, 120 bp, Artificial Sequence
  ENSG00000161011_18 (sequence is synthesized)
ccaccctctgcccagggagtccttgcgtcccatgaggtcttcccgcaaggcctctcagacccagatgtgacggggtgtgtggcccgaggaagctggacagcggcagtgggcctgctgagg

SEQ ID NO: 480301 - DNA, 120 bp, Artificial Sequence
  ENSG00000161011_19 (sequence is synthesized)
ccttctcttgaggcctgtgctctgggggtcccttgcttagcctgtgctggaccagctggcctggggtccctctgaagagaccttggctgctcactgtccacatgtgaactttttctaggt

SEQ ID NO: 480302 - DNA, 120 bp, Artificial Sequence
  ENSG00000161011_20 (sequence is synthesized)
ggcaggacaaattgcgcccatttagaggatgtggctgtaacctgctggatgggactccatagctccttcccaggacccctcagctccccggcactgcagtctgcagagttctcctggagg

SEQ ID NO: 480303 - DNA, 120 bp, Artificial Sequence
  ENSG00000161011_21 (sequence is synthesized)
caggggctgctgccttgtttcaccttccatgtcaggccagcctgtccctgaaagagaagatggccatgccctccatgtgtaagaacaatgccagggcccaggaggaccgcctgccctgcc

SEQ ID NO: 480304 - DNA, 120 bp, Artificial Sequence
  ENSG00000161011_22 (sequence is synthesized)
tgggccttggctgggcctctggttctgacactttctgctggaagctgtcaggctgggacaggctttgattttgagggttagcaagacaaagcaaataaatgccttccacctcaccgcaaa

SEQ ID NO: 480305 - DNA, 66 bp, Artificial Sequence
  ENSG00000161011_23 (sequence is synthesized)
tggcttttagctgaactaaggagaaagtcctacaacagtttggcgtgcaacatggggcttgagaaa

SEQ ID NO: 480306 - DNA, 120 bp, Artificial Sequence
  ENSG00000161011_24 (sequence is synthesized)
ttacaggcgtgagccaccgcgcccacccctccatgaagaaagtttttctaaatgaaaaatgtttaggacgctcaggagagaaagaacagattaaggaatgatctccaccgcacagacctc

SEQ ID NO: 480307 - DNA, 120 bp, Artificial Sequence
  ENSG00000161011_25 (sequence is synthesized)
aacagattaaggaatgatctccaccgcacagacctcaaggctgttatgcatgcagggcacagttccagtgcaaatgtccgcaggcacggcatgagggcccccactgggtgcctcgggctc

SEQ ID NO: 480308 - DNA, 120 bp, Artificial Sequence
  ENSG00000161011_26 (sequence is synthesized)
cttccagggcagcagttgaagcgggtcgtactgcaggcctgcagaaaggctggggttcctctccttttcgggttccttcctgatggaatcctaggttttcagcggttccttcctgatgga

SEQ ID NO: 480309 - DNA, 120 bp, Artificial Sequence
  ENSG00000161011_27 (sequence is synthesized)
atcctaggttttcagcagcttccggaggccgcctggactgcagaaggcgccctgggcgtgtgtacttccacctccgcaggcgctggcatctccaggctgcttcaggccgctttggacctc

SEQ ID NO: 480310 - DNA, 120 bp, Artificial Sequence
  ENSG00000161011_28 (sequence is synthesized)
accatcggtagcatctgcgtcttcttgaggtgactggagcccgtctatggtttcagccattgacttctggacatggaagtgtcgaggccatttttggcccctctcatatccgggaagggc

SEQ ID NO: 480311 - DNA, 120 bp, Artificial Sequence
  ENSG00000161011_29 (sequence is synthesized)
tccgtgcccagtagaggtgcagtgcagcagccagctcgcagcagtgctcccgtagagctgatggcattggcaggagtggcggctcagcacagggaagttctccagtgcccaggcccaggc

SEQ ID NO: 480312 - DNA, 120 bp, Artificial Sequence
  ENSG00000161011_30 (sequence is synthesized)
tgcctgcctccaagacagctcttccaaggttgagggttggaactccacagcctcagcctcccaaagcttgaccaggcccagccatagctagtctaggaaaagagcaaatggccgtgtttt

SEQ ID NO: 480313 - DNA, 120 bp, Artificial Sequence
  ENSG00000161011_31 (sequence is synthesized)
agagcaaatggccgtgtttttatattttgacttttgcatttcaatattaatttttttggtaatgtaatgcattcaaaacatggtccccccccccccaaaaaaaaaagaaaagaaaaagaa

SEQ ID NO: 480314 - DNA, 120 bp, Artificial Sequence
  ENSG00000161011_32 (sequence is synthesized)
gggtccttcatcttctgcagatgccaagggtgtccctggcacagtaaaagtttggaagccctgccctaaagcctcacctcacctggcagctgggtgtttcattcatagcaaatgttctgt

SEQ ID NO: 480315 - DNA, 120 bp, Artificial Sequence
  ENSG00000161011_33 (sequence is synthesized)
atattcaccatgtaccaaacacacatgtcactaatgatacaaacacatgtgcactgacattgacctcctcactgtcttactatagtcccatccacagccaccttatcagagtccatggga

SEQ ID NO: 480316 - DNA, 120 bp, Artificial Sequence
  ENSG00000161011_34 (sequence is synthesized)
ctctgacaacttgtaatgggaaaattaaccgtgcctgtaggggccgcctgggtagcgggaggtggttcatgagtaccaggaaagctggccctggggcagacctgggcagggcagagcaca

SEQ ID NO: 480317 - DNA, 120 bp, Artificial Sequence
  ENSG00000161011_35 (sequence is synthesized)
gcttgcaggacctagtacacagtgttgggaattgaatttgggttttgacctttgaagctgtgcataaagtctaaaacaagaagaggagtggaggctgaggttgtatttgtattttaaaat

SEQ ID NO: 480318 - DNA, 120 bp, Artificial Sequence
  ENSG00000161011_36 (sequence is synthesized)
gagcatttgccacacaaagccaggagcttcagaccagcgtggttaacacagcgagaccctcctctctgtgagaaattaaaaaaaaaacaataataaaagccaggcatgttggcatgtacc

SEQ ID NO: 480319 - DNA, 120 bp, Artificial Sequence
  ENSG00000161011_37 (sequence is synthesized)
agcgaccgctgccttcgctgccgcccagggcgcttccccgctcaggagcttcctctgggcctctggacggaggcgcgcaggggcccgggaggcgggaacgatgggcctttctaggcggta

SEQ ID NO: 480320 - DNA, 120 bp, Artificial Sequence
  ENSG00000161011_38 (sequence is synthesized)
tcagggccgatgctcgtggatgcagagcagtgaccagcccagaaccgtaccggcttcccggggcaggggcggcccgagagcgccgctaacgggagcaacgggccctgcccccggtggtgt

SEQ ID NO: 480321 - DNA, 120 bp, Artificial Sequence
  ENSG00000161011_39 (sequence is synthesized)
ctgcccccggtggtgtaggggccacctcgccccgcccagcccagcccgatattgatgggggcccacgccttcattgtttttttgttgttgttgttttttgttgttttttgtttgtttgtt

SEQ ID NO: 480322 - DNA, 120 bp, Artificial Sequence
  ENSG00000161011_40 (sequence is synthesized)
tacaggcgtgagccaccacgcacggcccatttgcgttctaatttcaggcgttcctcaatcctctgtggaaccaggaagggcgcaaattataaagggactggcccagcgccgcctctgggc

SEQ ID NO: 480323 - DNA, 120 bp, Artificial Sequence
  ENSG00000161011_41 (sequence is synthesized)
aggctttgggcagcgcctggcccgctgccggcttggacctcccagacctaggggcccggttcctggtggaggctgcagggacctctgccccacccgcccgggggaggcccgaggggctgg

SEQ ID NO: 480324 - DNA, 120 bp, Artificial Sequence
  ENSG00000161011_42 (sequence is synthesized)
actcagactgagattgaatgcggctttgtcttcctagttcagccccggcccacacctggggctgagtggaatcgggagcttcgaggggtctggacagagagattgatgccaagaaggggg

SEQ ID NO: 480325 - DNA, 120 bp, Artificial Sequence
  ENSG00000161011_43 (sequence is synthesized)
tggccgagccagaggttgaagtgggctggatcctgaggccccctgttaaaggagagggctccccactcagtgctcctggaactttccgaactagagactgggacttataggagccttcta

SEQ ID NO: 480326 - DNA, 120 bp, Artificial Sequence
  ENSG00000161011_44 (sequence is synthesized)
gaggaaactgtcgtgttttcacagtgtctgcgagattaatctctcatggccgctgcacaagaacctggcttttagctgaactaaggagaaagtcctacaacagtttggcgtgcaacatgg

SEQ ID NO: 480327 - DNA, 120 bp, Artificial Sequence
  ENSG00000161011_45 (sequence is synthesized)
agccgctgcacgctcttcctgctcaggggactcacggtgaccccggagccactccccagcccagcctccagctgaggaggctgttggctgacccccttggctgcccacaaggccaacggg

SEQ ID NO: 480328 - DNA, 120 bp, Artificial Sequence
  ENSG00000161011_46 (sequence is synthesized)
cctgagcccccacagggccatgggcattacctgctgaattgaggagcccataaggagtcacttggaccacagtgaacacttggcgaccactgacactcaggagaccttagctggtcctcc

SEQ ID NO: 480329 - DNA, 120 bp, Artificial Sequence
  ENSG00000161011_47 (sequence is synthesized)
caccgccgggcccgctcccgccgccgacgcccaggtgcgccaggtgcgggccgggcgggggtcgcgctcacctttctggccgctgagtgccgcgtaccaggacagcgagaggaaggcgca

SEQ ID NO: 480330 - DNA, 120 bp, Artificial Sequence
  ENSG00000161011_48 (sequence is synthesized)
agtggacgcggggagcctgcggggtgggactgcatcgggaaaggggaaggagtcagaggcgagaagggggagagtgtctgtctggctccagccgctgcacgctcttcctgctcaggggac

SEQ ID NO: 480331 - DNA, 120 bp, Artificial Sequence
  ENSG00000161011_49 (sequence is synthesized)
ccacctgggaccacggccagcctagtgatctgtggcctgcacctccgcctcatcctcagcacctctgcagccccacttacaaacccgagggagctgctgctgctgcagtgatgtctgtgc

SEQ ID NO: 480332 - DNA, 120 bp, Artificial Sequence
  ENSG00000161011_50 (sequence is synthesized)
gttagggaaggaagcaggcagatgcccttgtcttctcctttactcccaagccactagaagtctaaggcctttgtggggctgggcccctcaggagcaggtcacaggcagggatctcccaca

SEQ ID NO: 480333 - DNA, 120 bp, Artificial Sequence
  ENSG00000161011_51 (sequence is synthesized)
gttgaagacggacatgggcctggtcggatggggaatgaggtggcacgtttctgaaaaggcagctggcccaaggctaaataagtgcagcagccaaagctgctgcccctgtgcacaggccct

SEQ ID NO: 480334 - DNA, 120 bp, Artificial Sequence
  ENSG00000161011_52 (sequence is synthesized)
ccgccccctgcatgtggctgtggtccagggcccaggtcggagcactcaccttccaggaggtgccagagcaagggggtagtcttgcctctcactcctgccctctgtggctcaagtaggtgt

SEQ ID NO: 480335 - DNA, 120 bp, Artificial Sequence
  ENSG00000161011_53 (sequence is synthesized)
tagggatggggtctggtgccgtggcgcttgggtgaagggcaaggccaaagctgtgcagacagggctccttgctgctgctctgctgcctgggccaaacagacacagggactgggaacctcc

SEQ ID NO: 480336 - DNA, 120 bp, Artificial Sequence
  ENSG00000161011_54 (sequence is synthesized)
tagcaggttcttggtggctctgctgccctcacctaagtggctgaattttgtgtggattccatgctggagagcagggccgggggccttgctggcagtgacagccccacagtgacgacagag

SEQ ID NO: 480337 - DNA, 120 bp, Artificial Sequence
  ENSG00000161013_0 (sequence is synthesized)
agtgtcccgcgcccctgatatctgcagtgagcctgatacctgcctctgcccttctgagcctgttcctcttccctgagtacagggcacaaagcttgcgccctgaggggcggccggcgcgct

SEQ ID NO: 480338 - DNA, 120 bp, Artificial Sequence
  ENSG00000161013_1 (sequence is synthesized)
atgcagcctcggccccgcgggcgcccgccgcgcacccgaggagatgaggctccgcaatggcaccttcctgacgctgctgctcttctgcctgtgcgccttcctctcgctgtcctggtacgc

SEQ ID NO: 480339 - DNA, 120 bp, Artificial Sequence
  ENSG00000161013_2 (sequence is synthesized)
ggcactcagcggccagaaaggcgacgttgtggacgtttaccagcgggagttcctggcgctgcgcgatcggttgcacgcagctgagcaggagagcctcaagcgctccaaggagctcaacct

SEQ ID NO: 480340 - DNA, 120 bp, Artificial Sequence
  ENSG00000161013_3 (sequence is synthesized)
ggtgctggacgagatcaagagggccgtgtcagaaaggcaggcgctgcgagacggagacggcaatcgcacctggggccgcctaacagaggacccccgattgaagccgtggaacggctcaca

SEQ ID NO: 480341 - DNA, 120 bp, Artificial Sequence
  ENSG00000161013_4 (sequence is synthesized)
ccggcacgtgctgcacctgcccaccgtcttccatcacctgccacacctgctggccaaggagagcagtctgcagcccgcggtgcgcgtgggccagggccgcaccggagtgtcggtggtgat

SEQ ID NO: 480342 - DNA, 120 bp, Artificial Sequence
  ENSG00000161013_5 (sequence is synthesized)
gggcatcccgagcgtgcggcgcgaggtgcactcgtacctgactgacactctgcactcgctcatctccgagctgagcccgcaggagaaggaggactcggtcatcgtggtgctgatcgccga

SEQ ID NO: 480343 - DNA, 120 bp, Artificial Sequence
  ENSG00000161013_6 (sequence is synthesized)
gactgactcacagtacacttcggcagtgacagagaacatcaaggccttgttccccacggagatccattctgggctcctggaggtcatctcaccctccccccacttctaccctgacttctc

SEQ ID NO: 480344 - DNA, 120 bp, Artificial Sequence
  ENSG00000161013_7 (sequence is synthesized)
ccgcctccgagagtcctttggggaccccaaggagagagtcaggtggaggaccaaacagaacctcgattactgcttcctcatgatgtacgcgcagtccaaaggcatctactacgtgcagct

SEQ ID NO: 480345 - DNA, 120 bp, Artificial Sequence
  ENSG00000161013_8 (sequence is synthesized)
ctggagttctcccagctgggcttcattggtaagatgttcaagtcgctggacctgagcctgattgtagagttcattctcatgttctaccgggacaagcccatcgactggctcctggaccat

SEQ ID NO: 480346 - DNA, 120 bp, Artificial Sequence
  ENSG00000161013_9 (sequence is synthesized)
attctgtgggtgaaagtctgcaaccccgagaaggatgcgaagcactgtgaccggcagaaagccaacctgcggatccgcttcaaaccgtccctcttccagcacgtgggcactcactcctcg

SEQ ID NO: 480347 - DNA, 120 bp, Artificial Sequence
  ENSG00000161013_10 (sequence is synthesized)
ctggctggcaagatccagaaactgaaggacaaagactttggaaagcaggcgctgcggaaggagcatgtgaacccgccagcagaggtgagcacgagcctgaagacataccagcacttcacc

SEQ ID NO: 480348 - DNA, 120 bp, Artificial Sequence
  ENSG00000161013_11 (sequence is synthesized)
ctggagaaagcctacctgcgcgaggacttcttctgggccttcacccctgccgcgggggacttcatccgcttccgcttcttccaacctctaagactggagcggttcttcttccgcagtggg

SEQ ID NO: 480349 - DNA, 120 bp, Artificial Sequence
  ENSG00000161013_12 (sequence is synthesized)
aacatcgagcacccggaggacaagctcttcaacacgtctgtggaggtgctgcccttcgacaaccctcagtcagacaaggaggccctgcaggagggccgcaccgccaccctccggtaccct

SEQ ID NO: 480350 - DNA, 120 bp, Artificial Sequence
  ENSG00000161013_13 (sequence is synthesized)
cggagccccgacggctacctccagatcggctccttctacaagggagtggcagagggagaggtggacccagccttcggccctctggaagcactgcgcctctcgatccagacggactcccct

SEQ ID NO: 480351 - DNA, 120 bp, Artificial Sequence
  ENSG00000161013_14 (sequence is synthesized)
gtgtgggtgattctgagcgagatcttcctgaaaaaggccgactaagctgcgggcttctgagggtaccctgtggccagccctgaagcccacatttctgggggtgtcgtcactgccgtcccc

SEQ ID NO: 480352 - DNA, 120 bp, Artificial Sequence
  ENSG00000161013_15 (sequence is synthesized)
cgtcactgccgtccccggagggccagatacggccccgcccaaagggttctgcctggcgtcgggcttgggccggcctggggtccgccgctggcccggaggccctaggagctggtgctgccc

SEQ ID NO: 480353 - DNA, 120 bp, Artificial Sequence
  ENSG00000161013_16 (sequence is synthesized)
ggaggaggcaggcggcccccacactgtgcctgaggcccggaaccgttcgcacccggcctgccccagtcaggccgttttagaagagcttttacttgggcgcccgccgtctctggcgcgaac

SEQ ID NO: 480354 - DNA, 120 bp, Artificial Sequence
  ENSG00000161013_17 (sequence is synthesized)
actggaatgcatatactactttatgtgctgtgttttttattcttggatacatttgattttttcacgtaagtccacatatacttctataagagcgtgacttgtaataaagggttaatgaag

SEQ ID NO: 480355 - DNA, 120 bp, Artificial Sequence
  ENSG00000161013_18 (sequence is synthesized)
agctatgtcacgtgtggcaggcacaagaacagatgtcaatgagctattgcagaggtggacacccagatgtgtgcgctggcacactggaggggcccgtagggtggctctagaccgccccct

SEQ ID NO: 480356 - DNA, 120 bp, Artificial Sequence
  ENSG00000161013_19 (sequence is synthesized)
ccatctactggtgtttgagtccagggtgtttccctgcagtgccctgaattctccatgggaggacccgtgcatgggggtggggggacagaagctgcccacccagcggcttctctgcggagc

SEQ ID NO: 480357 - DNA, 120 bp, Artificial Sequence
  ENSG00000161013_20 (sequence is synthesized)
ggcttcattggtgtgcccctccccttacctgacggtgcctttcagtcccacctgcctctgccatcctctctcccagtcccactgtgtccactgtgagcctttgcccaggtgggccctgcc

SEQ ID NO: 480358 - DNA, 120 bp, Artificial Sequence
  ENSG00000161013_21 (sequence is synthesized)
tggtgtgcgtgctacagccccacctggcctgttctcattgcctgtgcatcagacatgtctgccctcatcacctgtctgcctccctgccccgttatgcccacacctgcctgaagcctgccc

SEQ ID NO: 480359 - DNA, 120 bp, Artificial Sequence
  ENSG00000161013_22 (sequence is synthesized)
tgctggagccgcggcgttctcctcgggcccgggccgcgcccgtgggtgctccggaccggactccgcgggcgcagctgtcccgacgctgagctggggacccgtggggttctcggagagggg

SEQ ID NO: 480360 - DNA, 120 bp, Artificial Sequence
  ENSG00000161013_23 (sequence is synthesized)
cagagacccaagggctgctggtggggtgaggccatcccacgcaactctggggtctgtgaagccaccaaggatcaaggaatggaagagctgcctgagtgtagagggagttcggtcaggctt

SEQ ID NO: 480361 - DNA, 120 bp, Artificial Sequence
  ENSG00000161013_24 (sequence is synthesized)
gtttccgcatctgaagtgggcctcgtaatggtagctaccttgtgaggactaagtcaggcagcccctaggagctcagggatgtttcctgtcaccatcctcccagaggaaggccctggtctc

SEQ ID NO: 480362 - DNA, 120 bp, Artificial Sequence
  ENSG00000161013_25 (sequence is synthesized)
tttgcacagcctgacagctgcctggggggccctcctggcgcaggcctggcctttctctgctgggccctgggtgctgtgctggaacgctgcccctgcagcagctcacaggcctgcctggct

SEQ ID NO: 480363 - DNA, 120 bp, Artificial Sequence
  ENSG00000161013_26 (sequence is synthesized)
aggttttcagagactcgcctggcagaggcctggagcgtcctgctgcgtggactgtgggcaccgagccaccaggaggttgttgatctcattcttgctcactggtccctgccagactggtgg

SEQ ID NO: 480364 - DNA, 120 bp, Artificial Sequence
  ENSG00000161013_27 (sequence is synthesized)
tgcctctctactgtcgggcagccccacctctgtgctgccccatccacctacagccctcatgcctgggcccagctggaggttctgacaggggccccctggggtggcatgcggacccttcag

SEQ ID NO: 480365 - DNA, 120 bp, Artificial Sequence
  ENSG00000161013_28 (sequence is synthesized)
ggtgccccaggcgcagcacaggtctccagagacacaggcaccagggcgttcagagctagtcccctcgctgctgttgactgtccttgagcagccccagggccggtttctcaacctcatttg

SEQ ID NO: 480366 - DNA, 120 bp, Artificial Sequence
  ENSG00000161013_29 (sequence is synthesized)
ctcacctgagcaatgaagtgaggtgggctcctggaactgcagcagccaccccccggggccatcgtgaggctaagaatccagtgcagggtgagcaaccagcgaccgctacaaggacagtga

SEQ ID NO: 480367 - DNA, 120 bp, Artificial Sequence
  ENSG00000161013_30 (sequence is synthesized)
agagctagcaccaggaccttgggtagcccacccgctggagggagcgtgtgctgcaaaaagcaagagtgggctttggaggccaacggatggagcggattcagtctgaggctgttccagccc

SEQ ID NO: 480368 - DNA, 120 bp, Artificial Sequence
  ENSG00000161013_31 (sequence is synthesized)
ttgcttaggatccacctacctaggtctggaaatcgtatttccacttcagatgccttctcagaggataaaataacccccggtgggggagagtactggaagagggctaattcccctggtttt

SEQ ID NO: 480369 - DNA, 120 bp, Artificial Sequence
  ENSG00000161013_32 (sequence is synthesized)
ggcatggctggggcagaattctctgtaggtagggtgtgtcacctggggaaggacattctgggtccttggcagggtgactataaaagcacactggcatgaaggcctaggtggggccatatc

SEQ ID NO: 480370 - DNA, 120 bp, Artificial Sequence
  ENSG00000161013_33 (sequence is synthesized)
tgaagggctggggcatgctctttgagtcgtgggtagagccgtgagcccttgccctttgtcctgagccagtgtgtgcctcccgcagcagccacatgcccgcggattgatgtcaggagccac

SEQ ID NO: 480371 - DNA, 120 bp, Artificial Sequence
  ENSG00000161013_34 (sequence is synthesized)
cagagtgagggagaggcactggctccatggcacccactgtgtctggggggcatccaggaggctggctctctgagggcctggggaacaggagagcaaagaaggggagcacttagattcacg

SEQ ID NO: 480372 - DNA, 120 bp, Artificial Sequence
  ENSG00000161013_35 (sequence is synthesized)
agcccagcccctaggggatagaagcctaaggatcctgtgagggctgctggtggggtgaggccatcccacgcaactctggggtctgtgaagccaccaaggatcaaggaatggaagagctgc

SEQ ID NO: 480373 - DNA, 120 bp, Artificial Sequence
  ENSG00000161013_36 (sequence is synthesized)
cccgtggggccctttatctcctggtaaacaggacccgggggagaggggaggcccctaggaaggaagcgagggtaaggcgcaggctgttgccagggtgattcaggcagcatcacccaccac

SEQ ID NO: 480374 - DNA, 120 bp, Artificial Sequence
  ENSG00000161013_37 (sequence is synthesized)
tgcccacccagcctgtccatctgaggcagtcgtgtgggacagagaaagccagggtggggctcgggggtgggggtgggcagtggctgtaagtaggcaagcggggactggcatctaggcagg

SEQ ID NO: 480375 - DNA, 120 bp, Artificial Sequence
  ENSG00000161013_38 (sequence is synthesized)
agggaggcgcacctgcaggtgcaggtggctctgaacccattcctgatggctctctaggcctctgcacctccagtcccatccctgtgggcgagtgctgcctacacctggtgtcacccagca

SEQ ID NO: 480376 - DNA, 120 bp, Artificial Sequence
  ENSG00000161016_0 (sequence is synthesized)
accaggacaccttcagccgcgtctcctggtgcgcctgcgcgggggccctggaggaggagaagtaggcggggccggcggccgctggtgactacaagccccggcgtgcaccgcgctaggctg

SEQ ID NO: 480377 - DNA, 120 bp, Artificial Sequence
  ENSG00000161016_1 (sequence is synthesized)
gccgtggcgcgcccggaaggtgtcgcggccctgggccccgccccggaagataaggccgctcgctgacgccgtgtttcctctttcggccgcgctggtgaacaggacccgtcgccatgggcc

SEQ ID NO: 480378 - DNA, 120 bp, Artificial Sequence
  ENSG00000161016_2 (sequence is synthesized)
gtgtgatccgtggacagaggaagggcgccgggtctgtgttccgcgcgcacgtgaagcaccgtaaaggcgctgcgcgcctgcgcgccgtggatttcgctgagcggcacggctacatcaagg

SEQ ID NO: 480379 - DNA, 120 bp, Artificial Sequence
  ENSG00000161016_3 (sequence is synthesized)
gcatcgtcaaggacatcatccacgacccgggccgcggcgcgcccctcgccaaggtggtcttccgggatccgtatcggtttaagaagcggacggagctgttcattgccgccgagggcattc

SEQ ID NO: 480380 - DNA, 120 bp, Artificial Sequence
  ENSG00000161016_4 (sequence is synthesized)
gtacaatcgtgtgctgcctggaggagaagcctggagaccgtggcaagctggcccgggcatcagggaactatgccaccgttatctcccacaaccctgagaccaagaagacccgtgtgaagc

SEQ ID NO: 480381 - DNA, 120 bp, Artificial Sequence
  ENSG00000161016_5 (sequence is synthesized)
tgccctccggctccaagaaggttatctcctcagccaacagagctgtggttggtgtggtggctggaggtggccgaattgacaaacccatcttgaaggctggccgggcgtaccacaaatata

SEQ ID NO: 480382 - DNA, 120 bp, Artificial Sequence
  ENSG00000161016_6 (sequence is synthesized)
aggcaaagaggaactgctggccacgagtacggggtgtggccatgaatcctgtggagcatccttttggaggtggcaaccaccagcacatcggcaagccctccaccatccgcagagatgccc

SEQ ID NO: 480383 - DNA, 120 bp, Artificial Sequence
  ENSG00000161016_7 (sequence is synthesized)
ctgctggccgcaaagtgggtctcattgctgcccgccggactggacgtctccggggaaccaagactgtgcaggagaaagagaactagtgctgagggcctcaataaagtttgtgtttatgcc

SEQ ID NO: 480384 - DNA, 120 bp, Artificial Sequence
  ENSG00000161016_8 (sequence is synthesized)
tctttcggccgcgctggtgaacaggtaggtcatccttgcggccttgcggcatgggcagtatccgccgccatcctcttccgtgaggcgcgctgagacccggaccggccctcctgagaggat

SEQ ID NO: 480385 - DNA, 120 bp, Artificial Sequence
  ENSG00000161016_9 (sequence is synthesized)
cggccttgcggcatgggcagtatccgccgccatcctcttccgtgaggcgcgctgagacccggaccggccctcctgagaggatgccggtgcgggcgcccgcggagagggtagggagtggtg

SEQ ID NO: 480386 - DNA, 120 bp, Artificial Sequence
  ENSG00000161016_10 (sequence is synthesized)
ttggaatccttgtgatgaactcagcctcgcacaggggaggctctgaggttgtgttcctggaataagtaaagctgagatggggcaggctgaatcaagtgtcttacgtcaggttgagtggcc

SEQ ID NO: 480387 - DNA, 120 bp, Artificial Sequence
  ENSG00000161016_11 (sequence is synthesized)
ggcctgacgtctcacacatggtgaggggggtgcttccctgcgcttggagctcagccagcattctaggtgatggaggtgagggccttggcttgcctgcccattgtggattgaagaaactgg

SEQ ID NO: 480388 - DNA, 120 bp, Artificial Sequence
  ENSG00000161016_12 (sequence is synthesized)
tcggggtggggaggggtctgggtgttgcctgaggagttaacgtcctaagccgatatgggaacctcgcaggcagaagcttcaggtggggacatccgcgtggccagaccagtggccaccggt

SEQ ID NO: 480389 - DNA, 120 bp, Artificial Sequence
  ENSG00000161016_13 (sequence is synthesized)
gggtgccgagagagttgtaccgggaggctggatgttgaatgctgtgctcgcaacttcgcgggttgcctagagcgagggggttcgcattgtttcttactgtgctgacggcctgatgctgct

SEQ ID NO: 480390 - DNA, 120 bp, Artificial Sequence
  ENSG00000161016_14 (sequence is synthesized)
gagtggccggcctgacgtctcacacatggtgaggggggtgcttccctgcgcttggagctcagccagcattctaggtgatggaggtgtggtggctggaggtggccgaattgacaaacccat

SEQ ID NO: 480391 - DNA, 120 bp, Artificial Sequence
  ENSG00000161016_15 (sequence is synthesized)
atgctgtgagtgccggtggacagccagtggctagacttggtccctggaattcgattacctgttgttctaaaacttgggttctgtaagtttgagctcatcctgtagtctcagttgtcatca

SEQ ID NO: 480392 - DNA, 120 bp, Artificial Sequence
  ENSG00000161021_0 (sequence is synthesized)
gagaggcccgaaaacaattttaagatggcggccgcggcggtagcgcggaaaacaatggggccggggcggtggggagaggccgaggcttgaggtaggcagcaagcgccggctgggggtcgg

SEQ ID NO: 480393 - DNA, 80 bp, Artificial Sequence
  ENSG00000161021_1 (sequence is synthesized)
gccgagcggggcaggaggaaaacccgccgccgcgcgcgagcccgctccgctgccctcgggggcatggcgcggccgtgagg

SEQ ID NO: 480394 - DNA, 120 bp, Artificial Sequence
  ENSG00000161021_2 (sequence is synthesized)
cccgtgcagcccgcggcccatggtgctgcccacctgccccatggcggagttcgcgctgccgcggcacagcgcggtcatggagcgccttcgccggcgcatcgagctgtgccggcgccacca

SEQ ID NO: 480395 - DNA, 120 bp, Artificial Sequence
  ENSG00000161021_3 (sequence is synthesized)
cgccggcgcatcgagctgtgccggcgccaccacagcacctgcgaggcccgctacgaggccgtgtcgcccgagcgcctggagctggagcgccaacacaccttcgccctgcaccagcgctgc

SEQ ID NO: 480396 - DNA, 120 bp, Artificial Sequence
  ENSG00000161021_4 (sequence is synthesized)
cagccgcccgccgccacggccccggcgcccgccgccccggccccgcgcctggacgccgctgacggccccgagcacggccgcccggccacgcatcttcatgatacagttaagaggaatctt

SEQ ID NO: 480397 - DNA, 120 bp, Artificial Sequence
  ENSG00000161021_5 (sequence is synthesized)
gccacgcatcttcatgatacagttaagaggaatcttgacagcgccacttcccctcagaatggcgatcaacagaatggctacggggacctctttcctgggcataagaagactcgccgggag

SEQ ID NO: 480398 - DNA, 120 bp, Artificial Sequence
  ENSG00000161021_6 (sequence is synthesized)
gcccctctgggagttgccatctcttccaatggactgcctccagcctcccccctcggtcagtctgacaagccttctggagccgacgccctgcagtccagtgggaagcactctctggggcta

SEQ ID NO: 480399 - DNA, 120 bp, Artificial Sequence
  ENSG00000161021_7 (sequence is synthesized)
gactctctcaacaaaaagcgtctggctgactccagccttcacttgaatggaggcagtaaccccagtgagtcatttcctctgagcctgaataaagaactgaagcaggagcctgtcgaagac

SEQ ID NO: 480400 - DNA, 120 bp, Artificial Sequence
  ENSG00000161021_8 (sequence is synthesized)
ctgccttgcatgatcactgggactgtcggctccatatcgcaaagcaacctcatgccagacctcaaccttaacgagcaggagtggaaggagctcatcgaggagctgaacaggtcggtgccc

SEQ ID NO: 480401 - DNA, 120 bp, Artificial Sequence
  ENSG00000161021_9 (sequence is synthesized)
gatgaagacatgaaggacctgtttaatgaggacttcgaggagaagaaggacccagagtcttctggctctgccacacaaacccccttggcacaggacattaatattaagacggaattctct

SEQ ID NO: 480402 - DNA, 120 bp, Artificial Sequence
  ENSG00000161021_10 (sequence is synthesized)
ccagcagcctttgagcaagaacagttaggctctccacaagtgagggccgggtctgcagggcagacctttctggggccttcctctgcccctgtgagtacagattcccccagcctagggggc

SEQ ID NO: 480403 - DNA, 120 bp, Artificial Sequence
  ENSG00000161021_11 (sequence is synthesized)
tcccaaaccttattccacacctctggtcagccccgggcggacaatcccagtccaaacctgatgccggcatcagcccaggcccagaacgcacaaagagcccttgcaggtgtggtattgccc

SEQ ID NO: 480404 - DNA, 120 bp, Artificial Sequence
  ENSG00000161021_12 (sequence is synthesized)
agtcagggcccaggaggggcctcagagctgtcctctgcccaccagctccagcagatcgctgccaagcagaagcgcgagcagatgctccagaacccacagcaggccaccccggcaccagcc

SEQ ID NO: 480405 - DNA, 120 bp, Artificial Sequence
  ENSG00000161021_13 (sequence is synthesized)
ccgggccagatgtccacatggcagcagacggggccctcccacagttccttagatgtcccttaccccatggagaagcctgccagcccttccagctacaagcaagacttcactaactccaaa

SEQ ID NO: 480406 - DNA, 120 bp, Artificial Sequence
  ENSG00000161021_14 (sequence is synthesized)
ctgctcatgatgcctagtgtgaataagagttcccctcggcccggaggcccctacctccagcccagccatgtgaacctgctgagtcaccagccaccgagtaacttgaatcagaactccgcg

SEQ ID NO: 480407 - DNA, 120 bp, Artificial Sequence
  ENSG00000161021_15 (sequence is synthesized)
aataaccaggggtctgtgctggactacggcaatacaaaacccctttctcattacaaagcggactgtgggcaaggcagcccggggtctggccagagcaagccagccctgatggcttatctt

SEQ ID NO: 480408 - DNA, 120 bp, Artificial Sequence
  ENSG00000161021_16 (sequence is synthesized)
ccccagcagctgtcccatataagtcacgagcagaactccctgtttctgatgaagccaaagccaggaaatatgcctttccgatcactggttccacctggccaggagcagaacccttccagt

SEQ ID NO: 480409 - DNA, 120 bp, Artificial Sequence
  ENSG00000161021_17 (sequence is synthesized)
gtccctgtgcaagcccaggctaccagtgttgggacccagccgcctgccgtgtccgtggccagctcccacaacagctccccctatctcagcagccagcaacaggccgctgtaatgaagcag

SEQ ID NO: 480410 - DNA, 120 bp, Artificial Sequence
  ENSG00000161021_18 (sequence is synthesized)
catcagttgcttttggaccaacagaaacaaagggagcagcagcaaaagcatttacagcaacagcagttccttcagaggcaacagcaccttctcgcggaacaggagaagcaacagtttcag

SEQ ID NO: 480411 - DNA, 120 bp, Artificial Sequence
  ENSG00000161021_19 (sequence is synthesized)
cgccatctgacccgcccaccaccccagtaccaagacccgacacaaggcagcttcccacagcaggttggacagttcacagggtcctctgctgccgtgcccggcatgaacaccttgggtcca

SEQ ID NO: 480412 - DNA, 120 bp, Artificial Sequence
  ENSG00000161021_20 (sequence is synthesized)
tccaactccagctgtcctcgagtgttccctcaggctgggaatctgatgccaatgggccctggacatgcttcagtttcctctctccccacaaactcaggccaacaggaccggggtgtggct

SEQ ID NO: 480413 - DNA, 120 bp, Artificial Sequence
  ENSG00000161021_21 (sequence is synthesized)
cagttccctggctcccaaaacatgcctcagagcagcctctatggcatggcttctggcataacccagatagttgcccagcccccgccacaggccaccaatggacatgcccacattccacgg

SEQ ID NO: 480414 - DNA, 120 bp, Artificial Sequence
  ENSG00000161021_22 (sequence is synthesized)
cagaccaacgtgggccagaacacctccgtctcagctgcctatgggcagaactctctgggaagctctggcctctcccagcagcacaataaggggaccctgaaccctggtttaacaaagcca

SEQ ID NO: 480415 - DNA, 120 bp, Artificial Sequence
  ENSG00000161021_23 (sequence is synthesized)
ttcactgcagcctccagtttccacatgcagcagcaggcccacctgaaaatgtctagcccgcaattctcccaggcagtgcccaacaggcccatggctcccatgagctcagcagctgccgtg

SEQ ID NO: 480416 - DNA, 120 bp, Artificial Sequence
  ENSG00000161021_24 (sequence is synthesized)
gggtccttgctacccccagtgagtgcacagcagaggaccagcgcccctgccccagcaccacccccaacagcccctcagcagggcttgcctggcctgagcccagcagggcctgagctgggg

SEQ ID NO: 480417 - DNA, 120 bp, Artificial Sequence
  ENSG00000161021_25 (sequence is synthesized)
gccttcagccagagccctgcctcacagatgggcggtcgggcggggctgcactgcacccaggcctaccctgtgcggaccgcgggccaggagctgccttttgcctatagcgggcagccaggt

SEQ ID NO: 480418 - DNA, 120 bp, Artificial Sequence
  ENSG00000161021_26 (sequence is synthesized)
ggcagtgggctctctagtgtggctggacacaccgatctgatcgactccctgctgaagaacaggacttcagaggagtggatgagtgatttggacgacctgttagggtctcagtaatggaag

SEQ ID NO: 480419 - DNA, 120 bp, Artificial Sequence
  ENSG00000161021_27 (sequence is synthesized)
gatttgtagtgtttttagtgttcattcatcctatatttttattctcagattcaaagaaagagcaactactttggaccaaaagcccatggcctggggagctgggcaggtagagcccaagct

SEQ ID NO: 480420 - DNA, 120 bp, Artificial Sequence
  ENSG00000161021_28 (sequence is synthesized)
ccaggtgaggcctggccctgggcagggtctgtggctgcgcccctcaggccagcagttgaggtccatcgggctggccccagcccatctgctggcatcagtacctggtgttgggacagcagg

SEQ ID NO: 480421 - DNA, 120 bp, Artificial Sequence
  ENSG00000161021_29 (sequence is synthesized)
atagggttctaaaggtggttttctatccaaacgaccaaaaaaccaacagtaacaccagtgaaaccccacactgtcgggcttataaaaatctgtgccatcatggtgattttatccaagact

SEQ ID NO: 480422 - DNA, 120 bp, Artificial Sequence
  ENSG00000161021_30 (sequence is synthesized)
gctccacttaccccagtgctggggacaagtttctgttgaaactttagatagcagaattatttgcaatttgtagcatagaaaagatttttaaatttttttacaaaaggtttttaaacagat

SEQ ID NO: 480423 - DNA, 120 bp, Artificial Sequence
  ENSG00000161021_31 (sequence is synthesized)
tagggtaggtgatggtttaaatcaattaagtggcattggaaacctagggtttccttttgattaagagccttttttgtttctgctctttgtcagctttcaggggagaaggaggccactgga

SEQ ID NO: 480424 - DNA, 120 bp, Artificial Sequence
  ENSG00000161021_32 (sequence is synthesized)
aaattatttccctaagtgcaggctgttgactgcgtatgccaaaaagggacaggaggcatgggatagcaggtctggtgacacagctagggtcttcctagcagctcctcctcctccctccca

SEQ ID NO: 480425 - DNA, 120 bp, Artificial Sequence
  ENSG00000161021_33 (sequence is synthesized)
aggcccccaggaatcccttcctcccatgtcctggcagcaggaccccaggctacatatggaaggtagagatgtgggggtcctgtatcctggagtattatgtctccccaccttctgcagttt

SEQ ID NO: 480426 - DNA, 120 bp, Artificial Sequence
  ENSG00000161021_34 (sequence is synthesized)
tctctgaacatgtatgttgcccatggtgggagcgtggtcactgtgcagttgtgcacagatgtctttcctttaccgttggcctttctgtctgcctctccttcctctctgcagcccaaatgg

SEQ ID NO: 480427 - DNA, 120 bp, Artificial Sequence
  ENSG00000161021_35 (sequence is synthesized)
aaaacaattatttactccattggagggaaaggaagagtcttagaattcctaagggaaccttagcataaaggttttggggaaggaggccgtaggccggcccggaggaagcaattccacttg

SEQ ID NO: 480428 - DNA, 120 bp, Artificial Sequence
  ENSG00000161021_36 (sequence is synthesized)
gtttgacaacttctgccactcccatgtcagatgacttgcacttcttaaagagattgctttataacactaagacatcctttctaaagattcaagtggacttgactaagctgagggtccacg

SEQ ID NO: 480429 - DNA, 120 bp, Artificial Sequence
  ENSG00000161021_37 (sequence is synthesized)
aaatagaatatgacatgtgagctgtttttggaaaacgaagatggagagagcacttccccgtaacgaaagcaaagtggtaagcacagggtgagacccttttacacagaatggtggagagaa

SEQ ID NO: 480430 - DNA, 120 bp, Artificial Sequence
  ENSG00000161021_38 (sequence is synthesized)
aagagaatgctgaaaagtggctcagatgcagagtgttctgtggagaaactgcagccccacttctgtttccctggagtctcccaatggatcattcaggagtgtcctatgtgagaattgagc

SEQ ID NO: 480431 - DNA, 120 bp, Artificial Sequence
  ENSG00000161021_39 (sequence is synthesized)
caaggaaaatactcatgcaaccagcctgagtcgcggtgaggggacgagaggttgtacacacattggtagttattttgcaccagcagtgcctttctcactgggggtacttggaccctcaga

SEQ ID NO: 480432 - DNA, 120 bp, Artificial Sequence
  ENSG00000161021_40 (sequence is synthesized)
tcttcttttctaatagccatttgccaccccaagtggtatgtcggccatttctccttaaaacaccttccctacctttcccatgtactcagtttagctctcaaagaaggggtgaatcataaa

SEQ ID NO: 480433 - DNA, 120 bp, Artificial Sequence
  ENSG00000161021_41 (sequence is synthesized)
gccagtgaaaatttcaccctctgagggagttccccaatctgaaggggaagagggtgacctcagcggcttttctcccaaaaatcggctgaaggctggttgtggatccttgttcctctcctg

SEQ ID NO: 480434 - DNA, 120 bp, Artificial Sequence
  ENSG00000161021_42 (sequence is synthesized)
accccatctggctgctgccccgtctcccacccctgtccccggggctcgctggccctgcactccgccttagtcctggggccggcgacacagtgggggctcctcacttgctgcagtgtcata

SEQ ID NO: 480435 - DNA, 120 bp, Artificial Sequence
  ENSG00000161021_43 (sequence is synthesized)
gcaataaaatgtgattcttggggtccccccagggagctgcccatggctttatttatgaacctggttttcgggagtcaggggaggagatgactttgcttctgtgcacagccccgtcttcca

SEQ ID NO: 480436 - DNA, 120 bp, Artificial Sequence
  ENSG00000161021_44 (sequence is synthesized)
ggagccacaactcagaagaaaagggtgctcagacttttgttatacacatttgctttgtgtaaataaatgtttacaattttatatgaaagatggaataagcgctagagcttccaactgtat

SEQ ID NO: 480437 - DNA, 120 bp, Artificial Sequence
  ENSG00000161021_45 (sequence is synthesized)
attttttacttttatagattttaaaactatgatcctttatatgtgtgttttgggggagctatgataagttttatggcaaacggttggtattgttaactttttattgtcatcaaaagttca

SEQ ID NO: 480438 - DNA, 120 bp, Artificial Sequence
  ENSG00000161021_46 (sequence is synthesized)
taaaagtcctattaatccccatattcttctactgcccttaactctggtatacaccaaaaagaaatctttactttccttgttttatcattataaaaataaagtattttgctagtatggaaa

SEQ ID NO: 480439 - DNA, 120 bp, Artificial Sequence
  ENSG00000161021_47 (sequence is synthesized)
ttttaaaaacaggtatacctaccttttaaaaaagtcattgctccctagatctgtttcatactatttaaaaaccccaaaatgaaatcagcactatttccacaggagcccatttgtgagtaa

SEQ ID NO: 480440 - DNA, 120 bp, Artificial Sequence
  ENSG00000161031_0 (sequence is synthesized)
attcgccgctggactttgacagtggtcaaaggctctgctcagttctctgtgcctgtctccctccagcactgccgaggttctctgccgaggccaaccagaaataccccttggaagctggaa

SEQ ID NO: 480441 - DNA, 120 bp, Artificial Sequence
  ENSG00000161031_1 (sequence is synthesized)
tcctgcaacaatggcccagggtgtcctctggatcctactcggattgctactgtggtcagacccagggacagcctccctgcccctgctcatggactctgtcatccaggccctggctgagct

SEQ ID NO: 480442 - DNA, 120 bp, Artificial Sequence
  ENSG00000161031_2 (sequence is synthesized)
ggagcagaaagtgccagctgccaagaccagacacacagcttctgcgtggctgatgtcagctccaaactctggcccccacaatcgcctctaccacttcctgctgggggcatggagcctcaa

SEQ ID NO: 480443 - DNA, 120 bp, Artificial Sequence
  ENSG00000161031_3 (sequence is synthesized)
tgctacagagttggatccctgcccactaagcccagagctgttaggcctgaccaaggaggtggcccgacatgacgtacgagaagggaaggaatatggggtggtgctggcacctgatggctc

SEQ ID NO: 480444 - DNA, 120 bp, Artificial Sequence
  ENSG00000161031_4 (sequence is synthesized)
gaccgtggctgtggagcctctgctggcggggctggaggcagggctgcaagggcgcagggtcataaatttgcccttggacagcatggctgccccttgggagactggagatacctttccaga

SEQ ID NO: 480445 - DNA, 120 bp, Artificial Sequence
  ENSG00000161031_5 (sequence is synthesized)
tgttgtggccattgctccagatgtaagagccacctcctccccaggactcagggatggctctccagatgtcaccactgcagatattggagccaacactccagatgctacaaaaggctgtcc

SEQ ID NO: 480446 - DNA, 120 bp, Artificial Sequence
  ENSG00000161031_6 (sequence is synthesized)
agatgtccaagcttccttgccagatgccaaagccaagtccccaccgaccatggtggacagcctcctggcagtcaccctggctggaaacctgggcctgaccttcctccgaggttcccagac

SEQ ID NO: 480447 - DNA, 120 bp, Artificial Sequence
  ENSG00000161031_7 (sequence is synthesized)
aaggcatctctgttaaccatggccttcctcaatggcgccctggatggggtcatccttggagactacctgagccggactcctgagccccggccatccctcagccacttgctgagccagtac

SEQ ID NO: 480448 - DNA, 120 bp, Artificial Sequence
  ENSG00000161031_8 (sequence is synthesized)
tatggggctggggtggccagagacccagggttccgcagcaacttccgacggcagaacggtgctgctctgacttcagcctccatcctggcccagcaggtgtggggaacccttgtccttcta

SEQ ID NO: 480449 - DNA, 120 bp, Artificial Sequence
  ENSG00000161031_9 (sequence is synthesized)
cagaggctggagccagtacacctccagcttcagtgcatgagccaagaacagctggcccaggtggctgccaatgctaccaaggaattcactgaggccttcctgggatgcccggccatccac

SEQ ID NO: 480450 - DNA, 120 bp, Artificial Sequence
  ENSG00000161031_10 (sequence is synthesized)
ccccgctgccgctggggagcggcgccttatcggggccgcccgaagctgctgcagctgccgctgggattcttgtacgtgcatcacacctacgtgcctgcaccaccctgcacggacttcacg

SEQ ID NO: 480451 - DNA, 120 bp, Artificial Sequence
  ENSG00000161031_11 (sequence is synthesized)
cgctgcgcagccaacatgcgctccatgcagcgctaccaccaggacacgcaaggctggggagacatcggctacagtttcgtggtgggctcggacggctacgtgtacgagggacgcggctgg

SEQ ID NO: 480452 - DNA, 120 bp, Artificial Sequence
  ENSG00000161031_12 (sequence is synthesized)
cactgggtgggcgcccacacgctcggccacaactcccggggcttcggcgtggccatagtgggcaactacaccgcggcgctgcccaccgaggccgctctgcgcacggtgcgcgacacgctc

SEQ ID NO: 480453 - DNA, 120 bp, Artificial Sequence
  ENSG00000161031_13 (sequence is synthesized)
ccgagttgtgcggtgcgcgccggcctcctgcggccagactacgcgctgctgggccaccgccagctggtgcgcaccgactgccccggcgacgcgctcttcgacctgctgcgcacctggccg

SEQ ID NO: 480454 - DNA, 120 bp, Artificial Sequence
  ENSG00000161031_14 (sequence is synthesized)
cacttcaccgcgactgttaagccaagacctgccaggagtgtctctaagagatccaggagggagccacccccaaggaccctgccagccacagacctccaataaagacagcatggaaacaaa

SEQ ID NO: 480455 - DNA, 120 bp, Artificial Sequence
  ENSG00000161031_15 (sequence is synthesized)
gcccgccgcccctccgtctacacaagctccacgaggcccctgccccctgcctgtaacagctgtgcccgcacagcctcagccaggcccccaacttcccggcggcacgtctattcaggaaac

SEQ ID NO: 480456 - DNA, 120 bp, Artificial Sequence
  ENSG00000161031_16 (sequence is synthesized)
ctaggcccagcctttgcgggtcactctgcgggcaacatccctgatcctgtgacttctgcctatgcagcctcagctcagccccagacccagccagcctgtcctttccccagctcctaatac

SEQ ID NO: 480457 - DNA, 120 bp, Artificial Sequence
  ENSG00000161031_17 (sequence is synthesized)
ctctacctttccagccaaggcatggaccctgacacctgccaacagcccctctgccctcacaacctcagcctggccttcatgacttctctacccaagtcacaacctgtcaggctgcaccac

SEQ ID NO: 480458 - DNA, 120 bp, Artificial Sequence
  ENSG00000161031_18 (sequence is synthesized)
ctcatcctggcccgccgaaccttgacctcacccctgcccctacccgaaggccctctgtccacacaacatgaacctaggctgtgaccttttgccttcacaacctctgtccagtccttaatc

SEQ ID NO: 480459 - DNA, 120 bp, Artificial Sequence
  ENSG00000161031_19 (sequence is synthesized)
ctgtgttgcaattctctgtccagacaatctcaactctgaggttgcttgtttcgtccctgactccttaacccctgatgacaactcttatgccagcacaactttgacctgatgacctcatcc

SEQ ID NO: 480460 - DNA, 120 bp, Artificial Sequence
  ENSG00000161031_20 (sequence is synthesized)
cagcccttgatcgccatcactaaaacaattttagaatcacacctggacaatctcgtgctacctacatactgccactccatttcattaagctattgactagcacatccatctcggcctata

SEQ ID NO: 480461 - DNA, 120 bp, Artificial Sequence
  ENSG00000161031_21 (sequence is synthesized)
gttggctttgtcctcactctctcactttgggccactgtcccctccctgatccagggttccaccaccaggagggcagacccagccacataccacaaccacccccaagcctcacactccctt

SEQ ID NO: 480462 - DNA, 120 bp, Artificial Sequence
  ENSG00000161031_22 (sequence is synthesized)
gtctttttccagactgttaagccaagacctgccaggagtgtctctaagagatccaggagggagccacccccaaggaccctgccagccacagacctccaataaagacagcatggaaacaaa

SEQ ID NO: 480463 - DNA, 120 bp, Artificial Sequence
  ENSG00000161031_23 (sequence is synthesized)
acagccggtcttaccagtacagcaggcggcagctgagagtcccctctggtggccagcagcggctacagagccgtcactatggggagggacaggacttgaggggttgcctcggtccacctc

SEQ ID NO: 480464 - DNA, 120 bp, Artificial Sequence
  ENSG00000161031_24 (sequence is synthesized)
actggagaatgggcagagtttatggagtctgaaccacctggtctccaggcccctctggggatgggcctggcttactgaccactgacctcagcctaggagggacagaagagactgggggag

SEQ ID NO: 480465 - DNA, 120 bp, Artificial Sequence
  ENSG00000161031_25 (sequence is synthesized)
aattccccttcaggaaaagcaggcaggtctcagtcatgggcacccggagaagaggaaggacatttcactgtcagcccagcactgccgaggttctctgccgaggccaaccagaaatacccc

SEQ ID NO: 480466 - DNA, 120 bp, Artificial Sequence
  ENSG00000161036_0 (sequence is synthesized)
agttaccgcggacgccagtgccgggctccaggagacgcagggcgacgccacacgccggggtggccgactgggtcagcgcgggctgcgcctcctcgccatgggccccctctcggcgcggct

SEQ ID NO: 480467 - DNA, 120 bp, Artificial Sequence
  ENSG00000161036_1 (sequence is synthesized)
gctaatgcagcgcgggcgccccaagagcgaccggctggggaagatccggagtctggacctgtcaggattggagctgctttccgagcacctggaccccaaactcctgtgccgcctgacgca

SEQ ID NO: 480468 - DNA, 120 bp, Artificial Sequence
  ENSG00000161036_2 (sequence is synthesized)
gctgcaggagcttgacctgtctaacaaccacctggagacgctgccggacaacctgggcctgtcccacctgcgtgtcctccgctgcgccaacaaccagctgggggatgttactgccttgtg

SEQ ID NO: 480469 - DNA, 120 bp, Artificial Sequence
  ENSG00000161036_3 (sequence is synthesized)
ccagttccccaagctcgaggaactcagcctggagggcaaccccttcctgacggtcaatgacaacctgaaagtctcctttctcctgcccacgctccgtaaggtcaatggcaaggatgcgtc

SEQ ID NO: 480470 - DNA, 120 bp, Artificial Sequence
  ENSG00000161036_4 (sequence is synthesized)
ctcaacttactctcaggtggagaacctgaatcgggagctgaccagcagggtcacagctcactgggagaagttcatggccacactgggtcctgaagaggaggctgagaaggcccaggcgga

SEQ ID NO: 480471 - DNA, 120 bp, Artificial Sequence
  ENSG00000161036_5 (sequence is synthesized)
ctttgtgaagtcggctgtcagggatgtccgctacgggcccgagtccctcagcgagttcacccagtggcgggtgcggatgatctctgaggagctggtggccgccagtaggacccaggtgca

SEQ ID NO: 480472 - DNA, 120 bp, Artificial Sequence
  ENSG00000161036_6 (sequence is synthesized)
aaaggctaacagcccagagaagcccccagaagctggagctgcccacaagcccagggccagactggcggccttgaaacggccagacgacgtcccactcagcctctctcccagcaagcgggc

SEQ ID NO: 480473 - DNA, 120 bp, Artificial Sequence
  ENSG00000161036_7 (sequence is synthesized)
gtgtgcctccccgtcggcccaggtggagggcagccctgtggcaggctccgatggcagccagcctgctgtgaagctggagcccctgcacttcctgcagtgccacagcaagaacaacagccc

SEQ ID NO: 480474 - DNA, 120 bp, Artificial Sequence
  ENSG00000161036_8 (sequence is synthesized)
ccaggacctcgagacccagctgtgggcctgtgccttcgagccggcctgggaggagggggccacatcccagaccgtggccacgtgcggcggggaggctgtgtgcgtaattgattgccagac

SEQ ID NO: 480475 - DNA, 120 bp, Artificial Sequence
  ENSG00000161036_9 (sequence is synthesized)
gggcatcgtgctccacaagtacaaggcacccggcgaggagttcttttctgtggcctggaccgctctgatggtggtcacacaggctggccacaagaagcgctggagtgtgctggcggctgc

SEQ ID NO: 480476 - DNA, 120 bp, Artificial Sequence
  ENSG00000161036_10 (sequence is synthesized)
aggcctacggggcctggtccggctgctgcacgtgcgtgccggcttctgctgcggggtcatccgagcccacaagaaggccatcgccaccctgtgcttcagccccgcccacgagacccatct

SEQ ID NO: 480477 - DNA, 120 bp, Artificial Sequence
  ENSG00000161036_11 (sequence is synthesized)
cttcacggcctcctatgacaagcggatcatcctctgggacatcggggtgcccaaccaggactacgaattccaggccagccagctgctcacactggacaccacctctatccccctgcgcct

SEQ ID NO: 480478 - DNA, 120 bp, Artificial Sequence
  ENSG00000161036_12 (sequence is synthesized)
ctgccctgtcgcctcctgcccggacgcccgcctgctggccggctgcgagggcggctgctgctgctgggacgtgcggctggaccagccccaaaagaggagggtgtgtgaagtggaattcgt

SEQ ID NO: 480479 - DNA, 120 bp, Artificial Sequence
  ENSG00000161036_13 (sequence is synthesized)
cttctctgagggctccgaggcatctggacggagagtggatgggctggcatttgtgaatgaggacatcgtggcctccaaggggagcggcctgggcaccatctgcctgtggagctggaggca

SEQ ID NO: 480480 - DNA, 120 bp, Artificial Sequence
  ENSG00000161036_14 (sequence is synthesized)
gacgtgggggggccggggcagccagtccacggtggcagtggtggtcctggcgcggctgcaatggtcgtccaccgagttggcctacttctcgctcagcgcctgccctgataaggggattgt

SEQ ID NO: 480481 - DNA, 120 bp, Artificial Sequence
  ENSG00000161036_15 (sequence is synthesized)
gctctgtggggatgaggagggcaacgtgtggctctacgacgtcagcaacatcctgaagcagccacccctgctgccggcagccctgcaggcccccacacagatcctgaagtggccccagcc

SEQ ID NO: 480482 - DNA, 120 bp, Artificial Sequence
  ENSG00000161036_16 (sequence is synthesized)
ctgggcccttggccaggtggtgaccaagaccatggtgaacacagtggtggccaatgcctccttcacctacctcaccgccctgacggactccaacatcgtagccatctgggggaggatgta

SEQ ID NO: 480483 - DNA, 120 bp, Artificial Sequence
  ENSG00000161036_17 (sequence is synthesized)
gcctcacaccatcgcaaaggaccagggacacagctaactaacttattcagctttgggccgatgggggtgggggggggtctttcagtgaatatttttattaaactctactgtggacaagaa

SEQ ID NO: 480484 - DNA, 120 bp, Artificial Sequence
  ENSG00000161036_18 (sequence is synthesized)
gccccaagagcgaccggctggggaagatccggagtctggatggtgtggagtcgggagtagtggcgcgcgcttctagtcccagctactcgagaggctgaggcgggaggatccctcagccca

SEQ ID NO: 480485 - DNA, 120 bp, Artificial Sequence
  ENSG00000161036_19 (sequence is synthesized)
gcccccagaagctggagctgcccacaagcccagggtgagtgcagctcccagggctctgaggccagcccagtccctcctccctggagaagcttcaggagaccaaggcgtcctgggcatgtg

SEQ ID NO: 480486 - DNA, 120 bp, Artificial Sequence
  ENSG00000161036_20 (sequence is synthesized)
cccaggaagcaccccaggtcctggctcactccctaggtgaccccgggccagcctgggcctcctgcatccgcagtgaggtggggtccagcctgtgatggggaggaaggaagccccaggcag

SEQ ID NO: 480487 - DNA, 120 bp, Artificial Sequence
  ENSG00000161036_21 (sequence is synthesized)
tggagggcagccctgtggcaggctccgatggcagccaggtgagctgaggtggcaaggagcaggtggcagatgagtcggggctgggcagctgtgacccttctctccccccacagcctgctg

SEQ ID NO: 480488 - DNA, 120 bp, Artificial Sequence
  ENSG00000161036_22 (sequence is synthesized)
gggcaggcggggcaagggccgctggaaatagggccgcctggatgggtgggggatcaggagacagagcttaaaaggcgccatcaaggctgggaggaggaggctgcagggaggacctagatg

SEQ ID NO: 480489 - DNA, 120 bp, Artificial Sequence
  ENSG00000161036_23 (sequence is synthesized)
ggaaatgtctctgctcatccgacctctcaaaaccgggcactcaggggccacatcccagaccgtggccacgtgcggcggggaggctgtgtgcgtaattgattgccagacgggcatcgtgct

SEQ ID NO: 480490 - DNA, 120 bp, Artificial Sequence
  ENSG00000161036_24 (sequence is synthesized)
ccacaagtacaaggcacccggcgaggtgagtgcaaggccctgtccctgctgggcaagggtgcccgactgactcctgaacagcagcatggggatggatgcaggctcggccccctgccccat

SEQ ID NO: 480491 - DNA, 120 bp, Artificial Sequence
  ENSG00000161036_25 (sequence is synthesized)
ggcctttttctttcatgctggggctccctcccccaggcccgggctacccgcgtgttcacaccaatagctctgccccagtgactgtttactctaacccccgcccaggagttcttttctgtg

SEQ ID NO: 480492 - DNA, 120 bp, Artificial Sequence
  ENSG00000161036_26 (sequence is synthesized)
gcagcctgggcacacccgggtaaccataagggttgtttttagaggcctcttcgcagagctggcttgtcccacctttctgccaggctctggaggaaaggactctgaccctgctctcaccct

SEQ ID NO: 480493 - DNA, 120 bp, Artificial Sequence
  ENSG00000161036_27 (sequence is synthesized)
gggttcagctgtgggactgggccatgatgacctccccttcacctggggcttcagcaccatgctgtgcccacgtgatccagcccactcctgccactcatcagcagtgtgatggtcctctgt

SEQ ID NO: 480494 - DNA, 120 bp, Artificial Sequence
  ENSG00000161036_28 (sequence is synthesized)
gctggcataatgtcctcatctgtaaagaggggccgatggctagcggagggcaggtgaggtggtgtctgggcaggcaggctttggaagtgccacgttgaggctttctggctcatctgtccc

SEQ ID NO: 480495 - DNA, 120 bp, Artificial Sequence
  ENSG00000161036_29 (sequence is synthesized)
tggccaatcaaaatcccacagtgtgatgccagctacgaaggagacggaaaaagagtaacgggcagagggacactagcgtgggggcctcaggggactctgctgaggtgaccagcggcagat

SEQ ID NO: 480496 - DNA, 120 bp, Artificial Sequence
  ENSG00000161036_30 (sequence is synthesized)
ggatattctggggctcacgctttcctccctgggagcctggtgagggagtcagcgggcggagggtggggaggtgcttgcatggaggaaatggtacgtgcaaaggtcagtggcaggggagcc

SEQ ID NO: 480497 - DNA, 120 bp, Artificial Sequence
  ENSG00000161036_31 (sequence is synthesized)
agctggcctgctccaccatgtggccacagctgggtggacccagcccagaacaaggtggcaagggtgcctgggcggggcacgccgggcttcgtcagccacggtaagctttgcatttctatt

SEQ ID NO: 480498 - DNA, 77 bp, Artificial Sequence
  ENSG00000161036_32 (sequence is synthesized)
gccgggcttcgtcagccacggtaagctttgcatttctatttatttactttttatttgagatagagtctccctcttgt

SEQ ID NO: 480499 - DNA, 120 bp, Artificial Sequence
  ENSG00000161036_33 (sequence is synthesized)
aagatttggatttttagcttacctacaacaaacagcccaggaggagcttcgacacagcagctgctgtgttgaaaggagcagcaggggccttggcggcagaggtggtggcggcggtagtta

SEQ ID NO: 480500 - DNA, 120 bp, Artificial Sequence
  ENSG00000161036_34 (sequence is synthesized)
tgggcttctctttctcaccagcagcccctgggccgccgcctccctccctgcccgtatgtctggtccctgtgtctaagatgcttcttctcttaccctctgcccaactggctcaggcctggc

SEQ ID NO: 480501 - DNA, 120 bp, Artificial Sequence
  ENSG00000161036_35 (sequence is synthesized)
ccatggttagctgctgggccactctcctggctccaggctagcctccgagagtcaggtagctgccgggacacttctccaagcagacactcccacacactctcagctctgaaccatgcagca

SEQ ID NO: 480502 - DNA, 120 bp, Artificial Sequence
  ENSG00000161036_36 (sequence is synthesized)
gccattccctcattcccccattcccccgtcttttgagtcagagcagatgcccccaacagccccctgggccatggccccccattcccccgtcttttgagtcagagcagatgcccccaacag

SEQ ID NO: 480503 - DNA, 120 bp, Artificial Sequence
  ENSG00000161036_37 (sequence is synthesized)
ccccctgggccatggcctggaaacacctgctctacttggctgccaggaggcccctgttcatctcacactcggtcccagaggcactggctcgcttcagagccttatccaaccccctggcct

SEQ ID NO: 480504 - DNA, 120 bp, Artificial Sequence
  ENSG00000161036_38 (sequence is synthesized)
agccccgtcctggaagagccacccctcgtgcctctgggtcactactgtgactcgggacactcaggtgctggctcccccttccagggcaaactgaaccttcctggggccaagaatgtatct

SEQ ID NO: 480505 - DNA, 120 bp, Artificial Sequence
  ENSG00000161036_39 (sequence is synthesized)
ctttggtggcatcttctgtgcagccttcacacagggcagggtccccagcaggtgcgctgcagatgcctgggtgagtgggcagctctctatctgcaaggaatggccaactagcatctcgtg

SEQ ID NO: 480506 - DNA, 120 bp, Artificial Sequence
  ENSG00000161036_40 (sequence is synthesized)
ctgccccacagggtgtgtgaagtggaattcgtcttctctgagggctccgaggcatctggacggagagtggatgggctggcatttgtgaatgaggacatcgtgggtgagtgagctcagctt

SEQ ID NO: 480507 - DNA, 120 bp, Artificial Sequence
  ENSG00000161036_41 (sequence is synthesized)
gtgggacagcctggcctccgggcacacagatggaccgcttgtccctgggctaggcttctgaggatctctagtgggagaaggtgtctgggaggggccaccctgcacagctctcccttctcc

SEQ ID NO: 480508 - DNA, 120 bp, Artificial Sequence
  ENSG00000161036_42 (sequence is synthesized)
ggcagataaggggattgtgctctgtggggatgaggagggcaacgtgtggctctacgacgtcagcaacatcctgaagcagccacccctgctgccggcagccctgcaggcccccacacaggt

SEQ ID NO: 480509 - DNA, 120 bp, Artificial Sequence
  ENSG00000161036_43 (sequence is synthesized)
actgcccggctcaccctgcccaggcttgggctggcaaggcatcaggggccctgcctttggtcagcaggagcccagcccagccctcccctctctccccaccagatcctgaagtggccccag

SEQ ID NO: 480510 - DNA, 120 bp, Artificial Sequence
  ENSG00000161040_0 (sequence is synthesized)
agaatgcgagaaagtgaagtcaaattcggacttgtaggcgatcagggctgaagacgctgattagagagaaaacagagggtgatggtggctgcacgtggggaatgggtgacatctcccagg

SEQ ID NO: 480511 - DNA, 120 bp, Artificial Sequence
  ENSG00000161040_1 (sequence is synthesized)
gggaatgagcacaaggcccagatcggaaaccccaaactcagattttaaggtttggacaagaagtacctgaggagtggaggagtgagaaagaagtgccagagagcctgaggaggaaaatca

SEQ ID NO: 480512 - DNA, 120 bp, Artificial Sequence
  ENSG00000161040_2 (sequence is synthesized)
gcagactggcattatgaagaatgttgtcagaagtagggagtaggcactagtcacctaagataaggagctggattctgcccaaggcactgttatgtggtatacttgttacatgtcctgagg

SEQ ID NO: 480513 - DNA, 120 bp, Artificial Sequence
  ENSG00000161040_3 (sequence is synthesized)
atccgctgaggtatttagagggaatgatcatggttataatcaaaagtggtcttcagaatcttctttgatgactccggaattgatgataaaagcctgtagcttttatactggacatttagt

SEQ ID NO: 480514 - DNA, 120 bp, Artificial Sequence
  ENSG00000161040_4 (sequence is synthesized)
aaagactcatttttgcacttggagagacatagctcgtacaaatgaaaatgtcgtcctggctgaaaaaatgaacagagcagtgacatgctacaatttcagacttcaaaaatctgtatttca

SEQ ID NO: 480515 - DNA, 120 bp, Artificial Sequence
  ENSG00000161040_5 (sequence is synthesized)
tcactggcactcttatatggaagaccagaaagaaaaacttaaaaatattctattgcggatacaacagatcatctattgtcacaagctaaccattatcctaacaaaatggcggaatacagc

SEQ ID NO: 480516 - DNA, 120 bp, Artificial Sequence
  ENSG00000161040_6 (sequence is synthesized)
aagacataagagtaaaaagaaagaagatgagctgatattaaaacatgaacttcaattgaaaaaatggaaaaataggttaatactcaaaagagctgctgcagaagaatccaattttcctga

SEQ ID NO: 480517 - DNA, 120 bp, Artificial Sequence
  ENSG00000161040_7 (sequence is synthesized)
acgaagttcttctgaagtctttcttgtagatgagactctaaaatgtgacatttcactgttacctgaaagagcaatattacagattttcttctacctcagtttaaaagatgtgataatatg

SEQ ID NO: 480518 - DNA, 120 bp, Artificial Sequence
  ENSG00000161040_8 (sequence is synthesized)
tggtcaagttaatcatgcctggatgttgatgacacaactaaactcactgtggaatgctattgatttttcctcagtgaaaaatgtgattccagataaatatatagtgtctactttgcaaag

SEQ ID NO: 480519 - DNA, 120 bp, Artificial Sequence
  ENSG00000161040_9 (sequence is synthesized)
gtggcgtttaaatgtgctgcgtttgaattttcgtggttgtcttctccgacccaaaactttcagatctgtcagccactgtaggaacttgcaagagttgaatgtctctgactgcccaacatt

SEQ ID NO: 480520 - DNA, 120 bp, Artificial Sequence
  ENSG00000161040_10 (sequence is synthesized)
cacagatgaatcaatgagacacatttctgagggctgcccgggggtcctgtgtctcaatctgtctaacacaactatcaccaacaggacgatgcgactcctgccgaggcacttccacaactt

SEQ ID NO: 480521 - DNA, 120 bp, Artificial Sequence
  ENSG00000161040_11 (sequence is synthesized)
gctgcacccagatttcagtccaaggcttcaggtacattgcaaacagctgcactggaattatgcatcttaccattaatgacatgccaactctgacggacaactgtgtaaaagctttagttg

SEQ ID NO: 480522 - DNA, 120 bp, Artificial Sequence
  ENSG00000161040_12 (sequence is synthesized)
aaaaatgctctcgtattacatcgctggttttcactggtgcaccgcatatctccgattgtactttcagagctctttctgcttgtaaactcagaaagatccgatttgaaggaaataaaaggg

SEQ ID NO: 480523 - DNA, 120 bp, Artificial Sequence
  ENSG00000161040_13 (sequence is synthesized)
ttactgatgcatccttcaaatttatagacaagaattatccaaatctcagtcacatttatatggctgactgcaagggaataacagacagcagcctcagatccctttcacctttgaagcaac

SEQ ID NO: 480524 - DNA, 120 bp, Artificial Sequence
  ENSG00000161040_14 (sequence is synthesized)
tgactgtgttgaatttggcaaattgtgtaagaattggtgatatgggactaaagcaatttcttgatggtcctgcaagcatgaggataagagagctaaatttaagcaactgtgtgcggctaa

SEQ ID NO: 480525 - DNA, 120 bp, Artificial Sequence
  ENSG00000161040_15 (sequence is synthesized)
gtgatgcctctgttatgaaactatctgagcgctgccctaatttaaactacttgagtttacgaaattgtgaacatttgactgcccaaggaattggatatattgtaaacatcttttccttgg

SEQ ID NO: 480526 - DNA, 120 bp, Artificial Sequence
  ENSG00000161040_16 (sequence is synthesized)
tatcaatagatctctctggaacagacatctctaatgagggtttgaatgtgctttccagacataaaaaattgaaggaactttctgtatctgaatgttatagaatcactgatgatggaattc

SEQ ID NO: 480527 - DNA, 120 bp, Artificial Sequence
  ENSG00000161040_17 (sequence is synthesized)
aggcattctgcaaaagctcactgatcttggaacatttggatgtctcttattgctcccagctgtcagatatgattatcaaagcactggccatttactgcattaacctcacatctctcagca

SEQ ID NO: 480528 - DNA, 120 bp, Artificial Sequence
  ENSG00000161040_18 (sequence is synthesized)
ttgctggctgtccaaagattactgactcagcaatggagatgttatcggcaaaatgccattacctgcacattttggatatctctggttgtgtcttgcttactgaccaaatccttgaggacc

SEQ ID NO: 480529 - DNA, 120 bp, Artificial Sequence
  ENSG00000161040_19 (sequence is synthesized)
ttcagataggctgcaaacaactccggatccttaagatgcaatactgcacaaatatttccaagaaggcagctcaaagaatgtcatctaaagttcagcagcaggaatacaacactaatgacc

SEQ ID NO: 480530 - DNA, 120 bp, Artificial Sequence
  ENSG00000161040_20 (sequence is synthesized)
ctccacgttggtttggctatgatagggaaggaaaccctgttacagagcttgacaacataacatcatctaaaggagccttagaattaacagtgaaaaagtcaacatacagcagtgaagacc

SEQ ID NO: 480531 - DNA, 120 bp, Artificial Sequence
  ENSG00000161040_21 (sequence is synthesized)
aagcagcgtgaccttcagcctcaagcaggaagaacaaaaaatcaagaacttggcaagttttctccatttgttgcaagtatgtttactagctgaatctcaataacaatgtaaacaagcaac

SEQ ID NO: 480532 - DNA, 120 bp, Artificial Sequence
  ENSG00000161040_22 (sequence is synthesized)
ataagcctgttgttcaagacgacccagcaaactgtatattttcaccaggtaaagaaagtttttatggttcaccgaggataatcaactgcttcacagtctagaacctaaagactggatctt

SEQ ID NO: 480533 - DNA, 120 bp, Artificial Sequence
  ENSG00000161040_23 (sequence is synthesized)
ttgagaacatcagagaaagactgtgcttgccatccacactgcaacaaaactttggaaccttgaactttaagttcataatctcacaactgagaagggtccctccacactattggaactgta

SEQ ID NO: 480534 - DNA, 120 bp, Artificial Sequence
  ENSG00000161040_24 (sequence is synthesized)
gcagcttctccgtcaggccttgggccatggcctcgctacgcaatgccaacccgaggctgaagaactacttcaaggagaactacattcctcaggtctgcgaggcactgttatgtggtatac

SEQ ID NO: 480535 - DNA, 120 bp, Artificial Sequence
  ENSG00000161040_25 (sequence is synthesized)
gtggaggaagccttaacctcccagaacttgagtctggaaggagagtgggtctgagatctgatcctttgctcccctccagtcacacaaacttaactcgaagtgtatggtaatgccagctcc

SEQ ID NO: 480536 - DNA, 120 bp, Artificial Sequence
  ENSG00000161040_26 (sequence is synthesized)
cttctttgggatatgtgcattactccatcaatgaaaccaaacattcgaagattgtctgaaacttacctggaacaactttttgaattggatgatcagctgatgactccggaattgatgata

SEQ ID NO: 480537 - DNA, 120 bp, Artificial Sequence
  ENSG00000161040_27 (sequence is synthesized)
attgcaagcactgtattactgacagataagaacagactttttaaggcaaaggccttctagttccacagaacagtgacgtagaaagctccttcccctcttagttgcctgggttagaggcca

SEQ ID NO: 480538 - DNA, 120 bp, Artificial Sequence
  ENSG00000161040_28 (sequence is synthesized)
aatgtttgtgccctgagtttgaatcaaggctctcttacctgcttaactgtatcaacctgggtcatcttcagcatctgtaaaacggaccgaggatacctcctaatattgttgggaggataa

SEQ ID NO: 480539 - DNA, 120 bp, Artificial Sequence
  ENSG00000161040_29 (sequence is synthesized)
aaccgaagcctgcagttcaccatcacatcggatttaagaaattcaaagaattctccttctttaaaagaacacagccttgagatgcacacacaagggccactgtaggaacttgcaagagtt

SEQ ID NO: 480540 - DNA, 120 bp, Artificial Sequence
  ENSG00000161048_0 (sequence is synthesized)
cccgcggcccgggatcccgagtgtccggagctccgtggtttctgttggacctcgcgggaggcggttttctcccgcctgctgtgctctgtgacctctctgctgcctcctccacggtctctg

SEQ ID NO: 480541 - DNA, 120 bp, Artificial Sequence
  ENSG00000161048_1 (sequence is synthesized)
ggcggagcaatccacactgctgagcctggggtggtttggaattcttcggcgaagtggagcgggctgagagtgggtttcccgtccccgagccctccctcatctcggagatgccgcacttgt

SEQ ID NO: 480542 - DNA, 120 bp, Artificial Sequence
  ENSG00000161048_2 (sequence is synthesized)
gagcgacagggcttcatttgaattttcgcacctcgcgagttgcggagcctgcatctctgaagctgcctcggtgaagagccacagcattattttttttctctttgggagagtagctgtctg

SEQ ID NO: 480543 - DNA, 120 bp, Artificial Sequence
  ENSG00000161048_3 (sequence is synthesized)
ggatttgagatcctatcttccctgcaaattaccaggttgcatcttcactgataggaatacatttcttcaccaaaggacatggatgaaaatgaaagcaaccagtctctgatgacaagcagc

SEQ ID NO: 480544 - DNA, 120 bp, Artificial Sequence
  ENSG00000161048_4 (sequence is synthesized)
caatatcctaaagaagcagtaagaaaacgtcaaaattcagcacggaattccggagcaagtgattcttctaggttttctaggaaaagcttcaaactggattatagactagaagaagatgta

SEQ ID NO: 480545 - DNA, 120 bp, Artificial Sequence
  ENSG00000161048_5 (sequence is synthesized)
actaaatccaagaaaggaaaagatgggagatttgtgaatccgtggccaacatggaaaaacccctctattccaaatgttctcagatggctgataatggagaaagatcacagcagtgttcca

SEQ ID NO: 480546 - DNA, 120 bp, Artificial Sequence
  ENSG00000161048_6 (sequence is synthesized)
agttctaaagaggaactagacaaagaactcccagtgcttaagccatattttatcactaaccctgaagaagctggagtgagggaagctggcttaagagtcacatggctgggacatgccacg

SEQ ID NO: 480547 - DNA, 120 bp, Artificial Sequence
  ENSG00000161048_7 (sequence is synthesized)
gtaatggtggaaatggatgagctcatatttctcacggatcccatctttagctctcgtgcttcaccatcgcagtacatgggtccaaagcgatttcgtcgttccccgtgcacaataagtgaa

SEQ ID NO: 480548 - DNA, 120 bp, Artificial Sequence
  ENSG00000161048_8 (sequence is synthesized)
ctccctccaatagatgcggtccttatcagtcacaaccactatgaccatctggactacaattctgtcattgctttgaatgagcgatttggtaatgagttgagatggtttgtgcctttgggt

SEQ ID NO: 480549 - DNA, 120 bp, Artificial Sequence
  ENSG00000161048_9 (sequence is synthesized)
ctccttgactggatgcaaaaatgtggctgtgagaatgtgattgagttggactggtgggaggagaattgtgtccccggacatgataaggtcacttttgtctttacaccttcccagcactgg

SEQ ID NO: 480550 - DNA, 120 bp, Artificial Sequence
  ENSG00000161048_10 (sequence is synthesized)
tgtaaaaggactctaatggatgacaacaaggtgctatggggcagctggtctgtcttggggccttggaatcgattttttttcgcaggagatactggttattgccctgcttttgaagagata

SEQ ID NO: 480551 - DNA, 120 bp, Artificial Sequence
  ENSG00000161048_11 (sequence is synthesized)
ggaaaaagatttggaccttttgaccttgcagctattcccatcggagcttatgaaccgaggtggtttatgaaataccagcatgtagacccagaagaagctgtaaggattcacactgatgtc

SEQ ID NO: 480552 - DNA, 120 bp, Artificial Sequence
  ENSG00000161048_12 (sequence is synthesized)
caaacaaagaaatctatggcaattcactggggaacttttgccttagcaaatgagcattacttagagcctccagtgaagctgaatgaagctctagagagatacggacttaacgctgaagat

SEQ ID NO: 480553 - DNA, 120 bp, Artificial Sequence
  ENSG00000161048_13 (sequence is synthesized)
ttttttgtcttgaagcatggagaatcaagatacctaaataatgatgatgaaaacttttaataaataatttcctgaggtgaaaaaccgatattgaagattcatttttcttttttccattct

SEQ ID NO: 480554 - DNA, 120 bp, Artificial Sequence
  ENSG00000161048_14 (sequence is synthesized)
tcaggaccttcggcaaggtgagtcaaggctctctacctacctagatgtttttcagaggcctacaaatacaagtatctttcttatatgcacattctaataaatgatgaaattcagtccaac

SEQ ID NO: 480555 - DNA, 120 bp, Artificial Sequence
  ENSG00000161048_15 (sequence is synthesized)
atgcttattataaacatagcaattcttgctctatcaaattagcttatatgccaaatattaaatatggtttatttaggtaagcataaaaacataggggctatcatttttaaagacttgatt

SEQ ID NO: 480556 - DNA, 120 bp, Artificial Sequence
  ENSG00000161048_16 (sequence is synthesized)
ttctctattgtggtaaaatatataaatacatatttgccattttaaacatttaccattttaaccatttttaagtgtacagttctttcgcattaatgcacccatgaccaccattcacttaaa

SEQ ID NO: 480557 - DNA, 120 bp, Artificial Sequence
  ENSG00000161048_17 (sequence is synthesized)
tttttaaaagaacagtatattctttttttcctagagccttcagatgagagggaacagtatattctattgcacgtctacaattcccaaaagacctcttactttgggaggccaaggtgggtg

SEQ ID NO: 480558 - DNA, 120 bp, Artificial Sequence
  ENSG00000161048_18 (sequence is synthesized)
ggtcacttgaacccaggagtttgacatcaacctgggcaacatggtgacctcccgtctctctcggaaaaaaaaaaagaaaaaagaaaaagccgggtgaggtggtgtgtacctgtagtcaca

SEQ ID NO: 480559 - DNA, 70 bp, Artificial Sequence
  ENSG00000161048_19 (sequence is synthesized)
ggagataaaatgagaccctgtctcaaaagaaagccctctccttagctgagcagaggaagggaaggagtgt

SEQ ID NO: 480560 - DNA, 120 bp, Artificial Sequence
  ENSG00000161048_20 (sequence is synthesized)
atgatttatgccattttctgtttttaaatctagaagatcttctaagcacaaatacagctacaatgaaatattttacagacaaaatgttaatagaccatattctttgaattaaatttgttt

SEQ ID NO: 480561 - DNA, 120 bp, Artificial Sequence
  ENSG00000161048_21 (sequence is synthesized)
ttaattttctctacacattttttttttcctggagtctcttagctctaaatatatcaatcagatttataattttttttacctgattcagatgtcttacatttttatattaaatgaacctta

SEQ ID NO: 480562 - DNA, 120 bp, Artificial Sequence
  ENSG00000161048_22 (sequence is synthesized)
agcatgattcttttggtaagccagtatgaatgccagtggttggggggcggggggggagtcagttgacataagatttagtcctaataaggactctgtattcacttgattattctgaccctt

SEQ ID NO: 480563 - DNA, 120 bp, Artificial Sequence
  ENSG00000161048_23 (sequence is synthesized)
cctaagggagggaggtggattagataccactggaggcccattctgtattcctaatccagtctcagcactttattcatacaaaataatcaaaataggttttctacaccaaatgctacccag

SEQ ID NO: 480564 - DNA, 120 bp, Artificial Sequence
  ENSG00000161048_24 (sequence is synthesized)
gcagtgctctataatttatttgcacacctgtatgtgtggtgccacgttagccactaaatctgaacttttaccctgctttcatcatggatttttttgtgtaacctgaaacaagtcaccagt

SEQ ID NO: 480565 - DNA, 120 bp, Artificial Sequence
  ENSG00000161048_25 (sequence is synthesized)
gctcactgtgcctgtttcctcatttgcaacaagaggataattccgacctacctctgaaaaatgtgtagattaaatgagtttttaaagcactttagaaaatataagggagaaaatgatttc

SEQ ID NO: 480566 - DNA, 120 bp, Artificial Sequence
  ENSG00000161048_26 (sequence is synthesized)
ttaagatatcactgcctaatatagacaggtatatttgaaagctaaatacaggttaatgcttttgataatgtattgttcctgttgcaaatttaagcattatatattaggagactaaacatt

SEQ ID NO: 480567 - DNA, 120 bp, Artificial Sequence
  ENSG00000161048_27 (sequence is synthesized)
gaaaactttcactgatttttaaattggagtaatagcctaaataagtgtaaataatctttatcaaaatttagtgtttatctacaaagatgcgaatcagtcaaggggaaatgtgtatgcaat

SEQ ID NO: 480568 - DNA, 120 bp, Artificial Sequence
  ENSG00000161048_28 (sequence is synthesized)
gtgtgtgtatatgatgtatgcgaacatatgtgattttggggtactaaagcacaaaaaaatcccccataaaataaaccttcctgaaaagactgatcataaactttttcactccaagcagat

SEQ ID NO: 480569 - DNA, 120 bp, Artificial Sequence
  ENSG00000161048_29 (sequence is synthesized)
gtgaatcaagatgttaggtttatggtgagttagctttgaggtgtgttgccctaatactagccagcgttgttgtagccatattccctgctgctgcacgccgaattgaaaatccatctctta

SEQ ID NO: 480570 - DNA, 120 bp, Artificial Sequence
  ENSG00000161048_30 (sequence is synthesized)
cctcttctctatgaagcaagccaggtatgtcttgcttaagtatttcttctccatgaatggccttaacattattttgtattcacgtgtactgtttaactgagggtctcaaagcactttaaa

SEQ ID NO: 480571 - DNA, 120 bp, Artificial Sequence
  ENSG00000161048_31 (sequence is synthesized)
ctgttgtgttctatttccactcgtctggcctgcctcatttttctaggcccttttgtaagctgtaattttttattaccactcatgttctttctacactgacactattcattaagaacatca

SEQ ID NO: 480572 - DNA, 120 bp, Artificial Sequence
  ENSG00000161048_32 (sequence is synthesized)
agcttcatctctgcttacagaatctcaccttattgagtgggttccactttatttttcatttgttatctacattttgaagggtttatgtgcaaagtgaaaacaaattttgaaaaataagac

SEQ ID NO: 480573 - DNA, 120 bp, Artificial Sequence
  ENSG00000161048_33 (sequence is synthesized)
aaatccattctcttcttcaattcagtctaatatgcattgtagtgtcttttaatcagtcttatcctctaagtcaacttcattttcctcttcgtgaatacccatagcaatatgtaagatttt

SEQ ID NO: 480574 - DNA, 120 bp, Artificial Sequence
  ENSG00000161048_34 (sequence is synthesized)
attgaagtttcctgtgataactgaggaatactttgctatgcctcactgcccaatagggtgggtcatcaattaggagaaatcccaaattataaaagccaacatatgccgtgacctacgtag

SEQ ID NO: 480575 - DNA, 120 bp, Artificial Sequence
  ENSG00000161048_35 (sequence is synthesized)
gaaaagatgtatttgtgcatcttctttctgggtagttaaaaattactccctcttttctctagcattttgacatttcagactcaatgctctgatctctagggagtgtgattattcaaacta

SEQ ID NO: 480576 - DNA, 120 bp, Artificial Sequence
  ENSG00000161048_36 (sequence is synthesized)
atgagaggacaagaagacacagttttagaatctactgctgctaaagcacattaaaaacaaatcctggtttttaatgtatgcatagtttcatatttaatgaatatgctttcattaaatagg

SEQ ID NO: 480577 - DNA, 120 bp, Artificial Sequence
  ENSG00000161048_37 (sequence is synthesized)
gaggtagatttgaaaaaaccgttataaagaaatgtgccttttggggaatgaatacttttgttcatgtctagcccactgggaattttgttttcaccttatactgagtcctttttctaatgt

SEQ ID NO: 480578 - DNA, 120 bp, Artificial Sequence
  ENSG00000161048_38 (sequence is synthesized)
aaaaatatttcttccaagtttgatttctgtatcagggtaacattgagaacacacatatttctgtttgaggatttgtgacttcctatggaaacagtcttgcatctatgtatttacaaatga

SEQ ID NO: 480579 - DNA, 120 bp, Artificial Sequence
  ENSG00000161048_39 (sequence is synthesized)
aatttaaagtattcttaaagctttgccttaaatactgcttgcatactgatttacttaatgctaagcatggcaggggttataaatttaaatactataagacctggctgaatcccagatgta

SEQ ID NO: 480580 - DNA, 120 bp, Artificial Sequence
  ENSG00000161048_40 (sequence is synthesized)
tcaataaattgttatagtagcttatggaaaatgctattaaagataaattttcatacattgtatttttagtcaagtaaaatatggatgaaaattaataaagtactgtcaagggaaaaaata

SEQ ID NO: 480581 - DNA, 120 bp, Artificial Sequence
  ENSG00000161048_41 (sequence is synthesized)
atgatgaaaacttttaataaatgtgagcacaggcacttttaatgaaaaaggcatcatctaagtttaaaaacaaatgaaaagacttagaaattcatgaatattgtgattattttacatttg

SEQ ID NO: 480582 - DNA, 120 bp, Artificial Sequence
  ENSG00000161048_42 (sequence is synthesized)
gaaacaacttctgcaagtttatgttttatgttttgtgtaataacttgcttcctagtatgatcagctcatgtacactatgagagggttcaggggtgggtcatttaaataatgaattggcta

SEQ ID NO: 480583 - DNA, 120 bp, Artificial Sequence
  ENSG00000161048_43 (sequence is synthesized)
atgtggattttaaatttcatatcatgatataagcactgcaatggaaatgtttttactaaaacattatatttttgtggtactagaatttcctgaggtgaaaaaccgatattgaagattcat

SEQ ID NO: 480584 - DNA, 120 bp, Artificial Sequence
  ENSG00000161048_44 (sequence is synthesized)
gaaggaggccaccgctggccctgctgtcagattcgaaggtcataataagggagtgacccggcgacgactcgccccaacgatggcgaggcggcgagagctgaagcgctgcctgcagctgct

SEQ ID NO: 480585 - DNA, 120 bp, Artificial Sequence
  ENSG00000161048_45 (sequence is synthesized)
ggcgtcctcggcggagccagcgcggcgggctcgggttaggaagaacccgagcgcctgccgcggtcgcccctcccgctacgcggcggcgctttgcgcggggactctgtggccggaagccgc

SEQ ID NO: 480586 - DNA, 120 bp, Artificial Sequence
  ENSG00000161048_46 (sequence is synthesized)
gtttctagctcatcctccccaaaactgcatgttttatcccagtggttcttaattctcaacatccatagtcctgcgcagaatcttaaagtttggttaagtgaaacagattttagaatttag

SEQ ID NO: 480587 - DNA, 120 bp, Artificial Sequence
  ENSG00000161048_47 (sequence is synthesized)
cgcttggcttttttgagtgctttatatttgctcttcatatatgacactctagttatttgagcccttgtatatcataaggcatagaattaggtctgaggagataaagtggataggtgtaac

SEQ ID NO: 480588 - DNA, 120 bp, Artificial Sequence
  ENSG00000161048_48 (sequence is synthesized)
ctaggccctaaagttcatcgttcagtagcagagtacatataggaataaccaaccctgatctggtggcaactagaggtaggaacagagtgctttagaggtacaggaaagaacgtgatgctg

SEQ ID NO: 480589 - DNA, 120 bp, Artificial Sequence
  ENSG00000161048_49 (sequence is synthesized)
acaggaagagctggagatggcttcacagaggaggtgaatatttcagctgggcctagtcaactaaaaagtattttgacagtgattttccaggtagatgatggcatgaacaaggtcatgaag

SEQ ID NO: 480590 - DNA, 120 bp, Artificial Sequence
  ENSG00000161048_50 (sequence is synthesized)
gtgagacagtgtattacctgctctggaaggtagtagcctggtacgtgtgtagaatatggatcatgagggtgaaggcatggcctggagtgcttggcttttaacccttggataaggctacca

SEQ ID NO: 480591 - DNA, 120 bp, Artificial Sequence
  ENSG00000161048_51 (sequence is synthesized)
aagctgtgaaagggagcttcagatgacctttccagaccttgaaaagttgactttaggttcctagcctttaaatgtactagttttacttaagatgattctacttggccttcttctattctg

SEQ ID NO: 480592 - DNA, 120 bp, Artificial Sequence
  ENSG00000161048_52 (sequence is synthesized)
acagatcacagttttgggttaagttgatttcatggtttacattgagtatatcaatatttttcattggtgaatgaagtaagtactatgactgtgtctcctttccttatatacctctccctc

SEQ ID NO: 480593 - DNA, 120 bp, Artificial Sequence
  ENSG00000161048_53 (sequence is synthesized)
tgctgtgttaacaacatctctttcatctgcttgactttctgtgtatttatgacaattatttccctgcctcctatggcctctcaatgccattttcctgagggaaagactctcaggtggtcg

SEQ ID NO: 480594 - DNA, 120 bp, Artificial Sequence
  ENSG00000161048_54 (sequence is synthesized)
ttcagcagtgggctgtagtctgagctgatgccttcccagggtctctgccgacttacattctagggcacccttcaccagcctcctgggctcccttgtgtcttctatggtcacccttgtttt

SEQ ID NO: 480595 - DNA, 120 bp, Artificial Sequence
  ENSG00000161048_55 (sequence is synthesized)
ctgcatcccacttgttcctctttctgtgtcattttctcattttggtggagcatattttcagtgaacttcctgagaaagggtacatggaaagtaagttttttgaattcttgcttgtctgaa

SEQ ID NO: 480596 - DNA, 120 bp, Artificial Sequence
  ENSG00000161048_56 (sequence is synthesized)
atgtctttattctcattcataattgataatttgggtatagaatttttgtttagaaacagttttctctcagaatttgagagtattgcctccataactttatttctagtgtggctgtgggga

SEQ ID NO: 480597 - DNA, 120 bp, Artificial Sequence
  ENSG00000161048_57 (sequence is synthesized)
agttcagtgccgtccttactcttgatcctttgaacaggccctttgttttctctctagagactttgagaatcctctctttggcaccagtgttctgaaaattgccacgatgtgtagttcttt

SEQ ID NO: 480598 - DNA, 120 bp, Artificial Sequence
  ENSG00000161048_58 (sequence is synthesized)
atttattcattgtgctctgtgtgtggtgggccctttcagtctgaaaatccatttccttcagttctaggaaatttcatctgtatctttgaaaatgtccttccctatatgtttttattctaa

SEQ ID NO: 480599 - DNA, 120 bp, Artificial Sequence
  ENSG00000161048_59 (sequence is synthesized)
aatgactattagttatagtagttctattttggacctcctggatcaattctctgtaatttaagaaaatttcttctatgttttatctttttaaaaatattacatggctaggtgcagtagctc

SEQ ID NO: 480600 - DNA, 83 bp, Artificial Sequence
  ENSG00000161048_60 (sequence is synthesized)
atgcctataataccctgaggagttcgagaccagccggggcaacatagcaaaatgccatctctaccaaaaaaaaaaaaaaaaaa

SEQ ID NO: 480601 - DNA, 120 bp, Artificial Sequence
  ENSG00000161048_61 (sequence is synthesized)
atctttaaaaagaagattacctatatcccacaatagtgtgatttttgttgcaagaaaatactgggtctgttaaagaagaaatttaggttcttcaccaaaggacatggatgaaaatgaaag

SEQ ID NO: 480602 - DNA, 120 bp, Artificial Sequence
  ENSG00000161055_0 (sequence is synthesized)
agccgcaggttccccgcgcgccccgagcccccgcgccatgaagctcgccgccctcctggggctctgcgtggccctgtcctgcagctccgctgctgctttcttagtgggctcggccaagcc

SEQ ID NO: 480603 - DNA, 120 bp, Artificial Sequence
  ENSG00000161055_1 (sequence is synthesized)
gtgaaccacctcatagagggctcccagaagtgtgtggctgagctgggtccccaggccgtgggggccgtgaaggccctgaaggccctgctgggggccctgacagtgtttggctgagccgag

SEQ ID NO: 480604 - DNA, 120 bp, Artificial Sequence
  ENSG00000161055_2 (sequence is synthesized)
actggagcatctacacctgaggacaagacgctgcccacccgcgagggctgaaaaccccgccgcggggaggaccgtccatccccttcccccggcccctctcaataaacgtggttaagagca

SEQ ID NO: 480605 - DNA, 120 bp, Artificial Sequence
  ENSG00000161055_3 (sequence is synthesized)
agaccggctcctcatcctgcaaggcgcagcgcgagtgtcccctcccttgggggcctgtcccggaccctgcacagagttcaccggtccttccgccaccctcaggccactccggtgaccctg

SEQ ID NO: 480606 - DNA, 120 bp, Artificial Sequence
  ENSG00000161055_4 (sequence is synthesized)
cctcaggccactccggtgaccctgcagcgtctcctggcggggccgcctccccagacccgcctgtgtcccgggggctcgcacctggcaggcctcggcgcaggagggaggggcggtcgggga

SEQ ID NO: 480607 - DNA, 120 bp, Artificial Sequence
  ENSG00000161057_0 (sequence is synthesized)
aagacaccaccggaagcaaggaaggtgctgtgtaatcattaaggagcggaggcttttggagctgctaaaatgccggattacctcggtgccgatcagcggaagaccaaagaggatgagaag

SEQ ID NO: 480608 - DNA, 120 bp, Artificial Sequence
  ENSG00000161057_1 (sequence is synthesized)
gacgacaagcccatccgagctctggatgagggggatattgccttgttgaaaacttatggtcagagcacttactctaggcagatcaagcaagttgaagatgacattcagcaacttctcaag

SEQ ID NO: 480609 - DNA, 120 bp, Artificial Sequence
  ENSG00000161057_2 (sequence is synthesized)
aaaattaatgagctcactggtattaaagaatctgacactggcctggccccaccagcactctgggatttggctgcagataagcagacactccagagtgaacagcctttacaggttgccagg

SEQ ID NO: 480610 - DNA, 120 bp, Artificial Sequence
  ENSG00000161057_3 (sequence is synthesized)
tgtacaaagataatcaatgctgattcggaggacccaaaatacattatcaacgtaaagcagtttgccaagtttgtggtggaccttagtgatcaggtggcacctactgacattgaagaaggg

SEQ ID NO: 480611 - DNA, 120 bp, Artificial Sequence
  ENSG00000161057_4 (sequence is synthesized)
atgagagtgggcgtggatagaaataaatatcaaattcacattccattgcctcctaagattgacccaacagttaccatgatgcaggtggaagagaaacctgatgtcacatacagtgatgtt

SEQ ID NO: 480612 - DNA, 120 bp, Artificial Sequence
  ENSG00000161057_5 (sequence is synthesized)
ggtggctgtaaggaacagattgagaaactgcgagaagtagttgaaaccccattacttcatccagagaggtttgtgaaccttggcattgagcctcccaagggcgtgctgctctttggtcca

SEQ ID NO: 480613 - DNA, 120 bp, Artificial Sequence
  ENSG00000161057_6 (sequence is synthesized)
cccggtacaggcaagacactctgtgcgcgggcagttgctaatcggactgatgcgtgcttcattcgagttattggatctgagcttgtacagaaatacgtcggtgagggggctcgaatggtt

SEQ ID NO: 480614 - DNA, 120 bp, Artificial Sequence
  ENSG00000161057_7 (sequence is synthesized)
cgtgaactctttgaaatggccagaacaaaaaaagcctgccttatcttctttgatgaaattgatgctattggaggggctcgttttgatgatggtgctggaggtgacaatgaagtgcagaga

SEQ ID NO: 480615 - DNA, 120 bp, Artificial Sequence
  ENSG00000161057_8 (sequence is synthesized)
acaatgttggaactgatcaatcagcttgatggttttgatcctagaggcaatattaaagtgctgatggccactaacagacctgatactttggatccagcactgatgaggccagggagattg

SEQ ID NO: 480616 - DNA, 120 bp, Artificial Sequence
  ENSG00000161057_9 (sequence is synthesized)
gatagaaaaattgaatttagcttgcccgatctagagggtcggacccacatatttaagattcacgctcgttcaatgagtgttgaaagagatatcagatttgaactgttagcacgactgtgt

SEQ ID NO: 480617 - DNA, 120 bp, Artificial Sequence
  ENSG00000161057_10 (sequence is synthesized)
ccaaatagcactggtgctgagattagaagcgtctgcacagaggctggtatgtttgccatcagagcacggcgaaaaattgctaccgagaaggatttcttggaagctgtaaataaggtcatt

SEQ ID NO: 480618 - DNA, 120 bp, Artificial Sequence
  ENSG00000161057_11 (sequence is synthesized)
aaactttaaattggaatcctaaccttatatagacttgttaataaccaattcataaacaaataaatggcttcaaaattgtatgcttttttccatatctcttcttgtaatataataaaaggt

SEQ ID NO: 480619 - DNA, 120 bp, Artificial Sequence
  ENSG00000161057_12 (sequence is synthesized)
gatttctaatgttattaggcagaaaagcttgttagaatatattttgactatttttttgacccacacccgtttaaggatttcacatcatacaaagcgcttgcttagatggcttctatccta

SEQ ID NO: 480620 - DNA, 120 bp, Artificial Sequence
  ENSG00000161057_13 (sequence is synthesized)
ggcatatgctggccgggtgctctacatataaattctcattgtatcctcccatctgtccactgaggaagattatcaaatggatcttcatccaatggatgcataaactttcctacttacttg

SEQ ID NO: 480621 - DNA, 120 bp, Artificial Sequence
  ENSG00000161057_14 (sequence is synthesized)
tagtggcaaagctggctttcaagtacaagtttgttggctccattacctatgctcctattatccgcttctgtcccgcaacaaagtagctcacttaggcgtatgaccacatgcattatgata

SEQ ID NO: 480622 - DNA, 120 bp, Artificial Sequence
  ENSG00000161057_15 (sequence is synthesized)
gtttcccaccaccatattgaataataaaagctttggccaaagcttttttaaagtaggagaaacattggatgtatatgttttgcattgccatttgatttcaaattaatcaggaagaattag

SEQ ID NO: 480623 - DNA, 120 bp, Artificial Sequence
  ENSG00000161057_16 (sequence is synthesized)
tgattttaatgagcagtaaagtggtgcaataaagcagaaagaaaaatgttcagccagaagtgaaagactagtaaaaaaagaaaaaaaaatatttgtacatatgatctaatttagaaagtc

SEQ ID NO: 480624 - DNA, 120 bp, Artificial Sequence
  ENSG00000161057_17 (sequence is synthesized)
cagaattggcttcatacagaaaagtgattactttcattttacaaattactttaaaattttggtaaagtttctgttaggcttctggtctacagtgaggtattttaaaaataaaggttatat

SEQ ID NO: 480625 - DNA, 120 bp, Artificial Sequence
  ENSG00000161057_18 (sequence is synthesized)
tagaatcctcaacatctctttaaaattacctcctgtgtaaccaccaccaaatcctatcttctaccacaattaccccttcccccaatgccaagaccaaagcacaataatgaatatttttat

SEQ ID NO: 480626 - DNA, 120 bp, Artificial Sequence
  ENSG00000161057_19 (sequence is synthesized)
tgaagttcgatattcataaataagttgcaaaataagagttggatatatttttaattcacaatagaaaaagttgacaacatagaaaatgctgctttgcactgaaatacttaaaattatgaa

SEQ ID NO: 480627 - DNA, 120 bp, Artificial Sequence
  ENSG00000161057_20 (sequence is synthesized)
agttttcaagtaaagaaattaaagccttttataaaatccaaccaacattcttgatttttcatttttatgaacttgatcagaaaaattcatcttttttaaccctgccctaatttttcttga

SEQ ID NO: 480628 - DNA, 120 bp, Artificial Sequence
  ENSG00000161057_21 (sequence is synthesized)
ggaattaaatagagcaaactattttcaggttatgcttacaataaaatatacttaagaaaatgactgaagatgtatgtttttgaatgttttgattaaataaatgtacacatttagaacaca

SEQ ID NO: 480629 - DNA, 120 bp, Artificial Sequence
  ENSG00000161057_22 (sequence is synthesized)
agttttcctgtaaaaaggattatattccacgtcccagtgcaatacatagaacataacctttaaaagcagttctttttatattatctttaagttcttactgctttatgtattaatctgaac

SEQ ID NO: 480630 - DNA, 120 bp, Artificial Sequence
  ENSG00000161057_23 (sequence is synthesized)
ctaatcagtgattttcccaggagcgctatacttttaagtaaaaaatgaaaatacctgtatgaaccagtatcgacgactagtatatacatttgcggagaattacgtaatcagtccaaaaac

SEQ ID NO: 480631 - DNA, 120 bp, Artificial Sequence
  ENSG00000161057_24 (sequence is synthesized)
ctggggtgctggggggttccgtcccgaaatgctcagcccaatccatgagtcagcagcggcgagaggaggaagcaacggtaatcagtccaaaaaccagcgtgccaaagcgtttccccaggg

SEQ ID NO: 480632 - DNA, 120 bp, Artificial Sequence
  ENSG00000161057_25 (sequence is synthesized)
atgagaacctttctggggtgctggggggttccgtcccgaaatgctcagcccaatccatgagtcagcagcggcgagaggaggaagcaacgtttccttctcacaggtaatcagtccaaaaac

SEQ ID NO: 480633 - DNA, 120 bp, Artificial Sequence
  ENSG00000161057_26 (sequence is synthesized)
taaatacttttctttcactaaggatactgtctcacattcatatccttggctttgtagtgaataaatggactgagttccttggaataccaaaggatgatctagtaatgtactatagttgaa

SEQ ID NO: 480634 - DNA, 120 bp, Artificial Sequence
  ENSG00000161057_27 (sequence is synthesized)
aattctgtcttctgcatctgcttcctaacttcccatcggcttcgctgactcccctactcccactgttgtttattatgaatggcttcaaatttcagagttgaggttaccagtccatttaag

SEQ ID NO: 480635 - DNA, 120 bp, Artificial Sequence
  ENSG00000161057_28 (sequence is synthesized)
gtaacatggtataggttgggggagtacttgctttaggatagttgtgatgctaagtgtgttaatgtctatagaatacataacaactcacttagtaaattaaaaaaaaatctcccctccctc

SEQ ID NO: 480636 - DNA, 80 bp, Artificial Sequence
  ENSG00000161082_0 (sequence is synthesized)
cgccgccggctcggtcccgcgcccgccatggcccgcctgacggagagcgaggcgcgccggcagcagcagcagctcctgca

SEQ ID NO: 480637 - DNA, 120 bp, Artificial Sequence
  ENSG00000161082_1 (sequence is synthesized)
gcagctcctgcagccgcggccctcgcccgtgggcagcagcgggcccgagccccccggggggcagcccgacggcatgaaggacctggacgccatcaaactcttcgtgggccagatcccgcg

SEQ ID NO: 480638 - DNA, 120 bp, Artificial Sequence
  ENSG00000161082_2 (sequence is synthesized)
gcacctggacgagaaggacctcaagccgctcttcgagcagttcggccgcatctacgagctcacggtgctcaaagacccctacacggggatgcacaaaggctgtgccttcctcacctactg

SEQ ID NO: 480639 - DNA, 120 bp, Artificial Sequence
  ENSG00000161082_3 (sequence is synthesized)
tgccagggattccgccatcaaagctcagactgccctgcacgagcagaagaccttgcccggaatggcgcggccaatccaggtgaagcctgcggacagtgaaagccgcggaggtagggaccg

SEQ ID NO: 480640 - DNA, 120 bp, Artificial Sequence
  ENSG00000161082_4 (sequence is synthesized)
gaagctgttcgtggggatgctgaacaagcagcagtcggaggaggacgtgctgcggctgttccagcccttcggggtcattgacgagtgcaccgtgctccgggggcctgacggcagcagcaa

SEQ ID NO: 480641 - DNA, 120 bp, Artificial Sequence
  ENSG00000161082_5 (sequence is synthesized)
aggctgtgctttcgtgaagttctcctcccacacggaggcgcaggcggccatccacgccttgcatgggagccagaccatgccgggagcctcctccagcctggtggtcaagttcgccgacac

SEQ ID NO: 480642 - DNA, 120 bp, Artificial Sequence
  ENSG00000161082_6 (sequence is synthesized)
ggacaaggagcggacgctccggcgcatgcagcagatggtgggccagctgggcatcctgacgccgtccctcacattgcccttcagcccctacagtgcctacgcccaggctctcatgcaaca

SEQ ID NO: 480643 - DNA, 120 bp, Artificial Sequence
  ENSG00000161082_7 (sequence is synthesized)
cgggctgcctgccacacccatcgctcctgcctctgggctgcactcacccccgctgctgggcaccaccgctgtgcctggcctcgtggctcccatcaccaatggctttgcaggtgtcgtgcc

SEQ ID NO: 480644 - DNA, 120 bp, Artificial Sequence
  ENSG00000161082_8 (sequence is synthesized)
ctttccaggtgggcaccctgccctggaaaccgtctatgccaatggccttgtgccctacccagctcagagcccgactgtggccgagacactgcatcctgccttctccggagtccagcagta

SEQ ID NO: 480645 - DNA, 120 bp, Artificial Sequence
  ENSG00000161082_9 (sequence is synthesized)
cacagccatgtaccccaccgcggccatcacgcccatcgcgcacagcgtcccccagccgccgcccctcctgcagcagcagcagcgagaaggtcccgagggctgtaacctgtttatctacca

SEQ ID NO: 480646 - DNA, 120 bp, Artificial Sequence
  ENSG00000161082_10 (sequence is synthesized)
cctcccccaggagtttggagacacggagctgacgcagatgttcctacccttcggcaatatcatttcctccaaggtgtttatggatcgagctaccaaccagagcaagtgtttcggcttcgt

SEQ ID NO: 480647 - DNA, 120 bp, Artificial Sequence
  ENSG00000161082_11 (sequence is synthesized)
gagctttgataacccggccagcgcccaggcagccatccaggccatgaacggcttccagatcggcatgaagaggctcaaagtccagctgaagcggcccaaagacccgggacacccctactg

SEQ ID NO: 480648 - DNA, 120 bp, Artificial Sequence
  ENSG00000161082_12 (sequence is synthesized)
accgcgcccacagccgccctgaggctgtaggcatggcccagacctgcgtgatttgtacaatgtactttatttctgctacgagtaatttcatgaagtttcaacttgcaaactgacttttgg

SEQ ID NO: 480649 - DNA, 120 bp, Artificial Sequence
  ENSG00000161082_13 (sequence is synthesized)
gacaaaccaacacacacacagaagagaaagcaaagaacttggaactttgggttgactcggtttgagttttgtgtcaaagaagatttcccgcggctgaagaggttggtgttcctgttacgt

SEQ ID NO: 480650 - DNA, 120 bp, Artificial Sequence
  ENSG00000161082_14 (sequence is synthesized)
ttcccgcggctgaagaggttggtgttcctgttacgtgtttcaggtgagaagcagcaaagcgtcttaatgttcaaaacgcctctctttggtctggagaaaaaaaaaaaaaaaaaaaaacaa

SEQ ID NO: 480651 - DNA, 120 bp, Artificial Sequence
  ENSG00000161082_15 (sequence is synthesized)
gggcgggcgggcggcggcacgtggatgccagcctggcgcgcgtctccaggccggtggatggcgcggccaatccaggtgaagcctgcggacatgcctacgcccaggctctcatgcaacagc

SEQ ID NO: 480652 - DNA, 120 bp, Artificial Sequence
  ENSG00000161082_16 (sequence is synthesized)
gaaaggaaaccctttttgaggctggggcatggcacgatgaggtatcaggtaatgaggcctccccagtaaagccaaggctgtcgaaggagggagggattcgattctggagtctgacagtca

SEQ ID NO: 480653 - DNA, 120 bp, Artificial Sequence
  ENSG00000161082_17 (sequence is synthesized)
ttcgattctggagtctgacagtcagggttcaaatccatacagttcttgccatgtgcggtagatcccgcctgtaattacatagcgttttgggggccgaggtgggaggatcacttgagccca

SEQ ID NO: 480654 - DNA, 82 bp, Artificial Sequence
  ENSG00000161082_18 (sequence is synthesized)
ggatcacttgagcccaggagtccaagaccagcctggcttagcaagaccccatgtctacaaaaaaattaaaaattggccaggt

SEQ ID NO: 480655 - DNA, 64 bp, Artificial Sequence
  ENSG00000161082_19 (sequence is synthesized)
ctggagcaggaggatcactgagcccaggaggtcaaggcttcagtgagctactatctccccactg

SEQ ID NO: 480656 - DNA, 120 bp, Artificial Sequence
  ENSG00000161082_20 (sequence is synthesized)
ttcctggtcctacagagggtttagcacagaggagaagctgggcggggtgtttgttgctgtccttgcggctcttaaggatcgggggtggatggaagacttctgctgctcccgccccactca

SEQ ID NO: 480657 - DNA, 120 bp, Artificial Sequence
  ENSG00000161082_21 (sequence is synthesized)
attcagcctccccaggccccgtcggggaagtttgcacctgcggactccattgctttggttattttcacaaagccaggccggcggggcaggtccggccgcgggggacacggatgcccagga

SEQ ID NO: 480658 - DNA, 120 bp, Artificial Sequence
  ENSG00000161082_22 (sequence is synthesized)
aggtgaggggccttcccatcccaggagggttttctgcttccaaccgatccaggacttacccataaattccaaccgttctttggacaccagccctttcctcccctcttctccccttgccct

SEQ ID NO: 480659 - DNA, 120 bp, Artificial Sequence
  ENSG00000161082_23 (sequence is synthesized)
gcccctctactggaggccacctggagtggcgaggggcctttggggtctgtcctggggcaggggcgggggtgggggaggctcctgaatcgtgggcagaagtgttcacacgccccccctgct

SEQ ID NO: 480660 - DNA, 120 bp, Artificial Sequence
  ENSG00000161082_24 (sequence is synthesized)
ttgggaaacgctctcgcttcttccccacaaaacttggtgacttccccaaactaaatcacaccttttcctatatatatatatatgcatatatatatagatctatagacagtatatatatat

SEQ ID NO: 480661 - DNA, 120 bp, Artificial Sequence
  ENSG00000161082_25 (sequence is synthesized)
cgcaacacataccaggtgccccacccccacccccaccacctcctggctggcacatcccaccaggaacccgccaacacaacatacctccaggacttttggcaccccccaccaccaattctc

SEQ ID NO: 480662 - DNA, 120 bp, Artificial Sequence
  ENSG00000161082_26 (sequence is synthesized)
cagggccgttgggctctgccagcttcagtgtccctggtcccagctgcagcctccagaccccacctcgccccttcgtcccagagccctgccctccgggatggatataggtacaacagagac

SEQ ID NO: 480663 - DNA, 120 bp, Artificial Sequence
  ENSG00000161082_27 (sequence is synthesized)
gctctggcctgcctcagcccttctctgctcccctgcccgagtcatagccttactcatgtgaccaatagcccttagctttccgtcggagggggggggcggacagggttggggggagccccc

SEQ ID NO: 480664 - DNA, 120 bp, Artificial Sequence
  ENSG00000161082_28 (sequence is synthesized)
ctgcccctcaccaccccctcccaaggccaggcagccattgtccctgccttcgaatcaccagcctcgaatttaaggtcttgtaaccaggattgccaagcgtagcggaagaccctacccgga

SEQ ID NO: 480665 - DNA, 120 bp, Artificial Sequence
  ENSG00000161082_29 (sequence is synthesized)
ccggccaagcacccctttaactggagacgaacttgataatgaccttcatacctctacagagatttttttttttttccggtctttctgagcaggtacaaagaagaaaagagaagaaaaaga

SEQ ID NO: 480666 - DNA, 120 bp, Artificial Sequence
  ENSG00000161082_30 (sequence is synthesized)
tggggggaaaaaatcaaaccacaatggatttttgtttcctagttgggagtggggtggggtggggtgtctttgtgagggtgcctctgtacagctgcccaatccgcgacacccacgtcaaag

SEQ ID NO: 480667 - DNA, 120 bp, Artificial Sequence
  ENSG00000161082_31 (sequence is synthesized)
cgtcaaagcacagcatcaagttcgtttggacatccggcaaggcctcttaccaaatgaggcgccagataacttaataagctcaaaagaaaaaaacatttaaaaagaaagaaaaaaaaaaaa

SEQ ID NO: 480668 - DNA, 90 bp, Artificial Sequence
  ENSG00000161082_32 (sequence is synthesized)
tttccttttctttctaccaaaatgtgttgactgacccggagggggggcggtagggtgggggaaaccacacagaaaaaaaaaaaaaaaaaa

SEQ ID NO: 480669 - DNA, 120 bp, Artificial Sequence
  ENSG00000161082_33 (sequence is synthesized)
aatagaaaagaaaaaaaaaaatcttctgaaccaacttgtttcgatattccagagtttgataattgtttcgagactctcctctagcgtgcctgtgttccgtgtgtccccgtgtgcaagcgt

SEQ ID NO: 480670 - DNA, 120 bp, Artificial Sequence
  ENSG00000161082_34 (sequence is synthesized)
gtgccatgccaatctgcctcgagggggcctcacccgtgtccgcggcgcccgccgaggcccccgagggcctgcttgggagtgtgtgccggtgtgcagttgtacgtgtctttctggtccatg

SEQ ID NO: 480671 - DNA, 120 bp, Artificial Sequence
  ENSG00000161082_35 (sequence is synthesized)
ccccgcccaagccccccgtcttgtctgaaaccccctcccgcggcccacttcatgctccaaaccctccccaggtggggtgatgcttcaagaggctacaagaaacctccgggttgggttggc

SEQ ID NO: 480672 - DNA, 120 bp, Artificial Sequence
  ENSG00000161082_36 (sequence is synthesized)
ggggacagagctggatgtagacacccccgatccccctgtggttggggctggagcagagggtgggaatggggtagggactgaggtgagccagggcccagtgaggtcggttagggaatcctt

SEQ ID NO: 480673 - DNA, 120 bp, Artificial Sequence
  ENSG00000161082_37 (sequence is synthesized)
cccggagaaggctttgagggctgaatagaagttcacctgagaggccaggtttgctctgggggtgggggtgcggtggggagggggttctgtcctgtcctatgagtctgttttccctgctga

SEQ ID NO: 480674 - DNA, 120 bp, Artificial Sequence
  ENSG00000161082_38 (sequence is synthesized)
aaacccaacaccagacggaaatgccaagtgcccaccccagaccccaaaccctaaggttggaccccaactcggaaccaggagtggagcgtggaaggtggggacagtgctcagggcccagtc

SEQ ID NO: 480675 - DNA, 120 bp, Artificial Sequence
  ENSG00000161082_39 (sequence is synthesized)
cagttggcactgacagcttccagtgtccccgctccatttccactagttcccctgggacaagcggcccctcactgggtgtcattcctacccaatgagttgatggaaaagtgggattcgtgc

SEQ ID NO: 480676 - DNA, 120 bp, Artificial Sequence
  ENSG00000161082_40 (sequence is synthesized)
ccactttctcaacatttttttgtggggggatgaacagtaaaccttgtggggccactgtggaaacttaaccgtgggtctcaaaccttgatgagcctcatctgtaaaatgggttcaagaaag

SEQ ID NO: 480677 - DNA, 120 bp, Artificial Sequence
  ENSG00000161082_41 (sequence is synthesized)
tcatctccccagagacggcggaaacggtccacctagggaacagagtggggcatcttttcgcagccgagcccagaacccatcacctaaagagttctggatgattcgttttgattttttttt

SEQ ID NO: 480678 - DNA, 120 bp, Artificial Sequence
  ENSG00000161082_42 (sequence is synthesized)
tttttaaatcaccatcgctgtcgtcatcagagtctcgcctagggcctggcacagagtagacgctcagttagaagctgtctggccttttcaccttctcccgggtcagcacacacagatttg

SEQ ID NO: 480679 - DNA, 120 bp, Artificial Sequence
  ENSG00000161082_43 (sequence is synthesized)
ggagtatttacctgcacagaacgcaccttcaggaactgccaaccagaagcaaaatccaaagctgctctctgcgatcccttcacttttaactctcagtctgcactttttttttttaactga

SEQ ID NO: 480680 - DNA, 120 bp, Artificial Sequence
  ENSG00000161082_44 (sequence is synthesized)
gcatctattatgtgctaggcactgttccagtgctcggggacgcagctgtgaatgaacagaaacgggggatggaggacaggggagaaacccccttcacgggccttagatggcagggggtag

SEQ ID NO: 480681 - DNA, 120 bp, Artificial Sequence
  ENSG00000161082_45 (sequence is synthesized)
ggaaggagagacagaaaataaacagaaatatctgtccccagctgccagaggaggaggaaatgggcttggtgatggtgacattaagttctttgaaagctgggtttgttggcctctgaactc

SEQ ID NO: 480682 - DNA, 120 bp, Artificial Sequence
  ENSG00000161082_46 (sequence is synthesized)
tggcctttgtgggatctgttcttttggaaaagatgggagcccctgtgttcctagatcccagcctggccgggtggagtagggtggggaggtggtgtccacctgtgtggccccgttctcact

SEQ ID NO: 480683 - DNA, 80 bp, Artificial Sequence
  ENSG00000161091_0 (sequence is synthesized)
gcagagtcgagcgtggggcggacgcggcggacgtgggtgagggcgcggccgtaagagagcgggacgcggggtgcccggcg

SEQ ID NO: 480684 - DNA, 80 bp, Artificial Sequence
  ENSG00000161091_1 (sequence is synthesized)
ggacccccagcggccggagcggcgccgtccccgcggccgctgtccctggtggcgcggctgagctacgccgtgggccactt

SEQ ID NO: 480685 - DNA, 120 bp, Artificial Sequence
  ENSG00000161091_2 (sequence is synthesized)
gtggcgcggctgagctacgccgtgggccacttcctcaacgacctgtgcgcgtccatgtggttcacctacctgctgctctacctgcactcggtgcgcgcctacagctcccgcggcgcgggg

SEQ ID NO: 480686 - DNA, 120 bp, Artificial Sequence
  ENSG00000161091_3 (sequence is synthesized)
ctgctgctgctgctgggccaggtggccgacgggctgtgcacaccgctcgtgggctacgaggccgaccgcgccgccagctgctgcgcccgctacggcccgcgcaaggcctggcacctggtc

SEQ ID NO: 480687 - DNA, 120 bp, Artificial Sequence
  ENSG00000161091_4 (sequence is synthesized)
ggcaccgtctgcgtcctgctgtccttccccttcatcttcagcccctgcctgggctgtggggcggccacgcccgagtgggctgccctcctctactacggcccgttcatcgtgatcttccag

SEQ ID NO: 480688 - DNA, 120 bp, Artificial Sequence
  ENSG00000161091_5 (sequence is synthesized)
tttggctgggcctccacacagatctcccacctcagcctcatcccggagctcgtcaccaacgaccatgagaaggtggagctcacggcactcaggtatgcgttcaccgtggtggccaacatc

SEQ ID NO: 480689 - DNA, 120 bp, Artificial Sequence
  ENSG00000161091_6 (sequence is synthesized)
accgtctacggcgccgcctggctcctgctgcacctgcagggctcgtcgcgggtggagcccacccaagacatcagcatcagcgaccagctggggggccaggacgtgcccgtgttccggaac

SEQ ID NO: 480690 - DNA, 120 bp, Artificial Sequence
  ENSG00000161091_7 (sequence is synthesized)
ctgtccctgctggtggtgggtgtcggcgccgtgttctcactgctattccacctgggcacccgggagaggcgccggccgcatgcggaggagccaggcgagcacacccccctgttggcccct

SEQ ID NO: 480691 - DNA, 120 bp, Artificial Sequence
  ENSG00000161091_8 (sequence is synthesized)
acctgtcccagacctacatggccatgtacctcacctactcgctccacctgcccaagaagttcatcgcgaccattcccctggtgatgtacctcagcggcttcttgtcctccttcctcatga

SEQ ID NO: 480692 - DNA, 120 bp, Artificial Sequence
  ENSG00000161091_9 (sequence is synthesized)
agcccatcaacaagtgcattgggaggaacatgacctacttctcaggcctcctggtgatcctggcctttgccgcctgggtggcgctggcggagggactgggtgtggccgtgtacgcagcgg

SEQ ID NO: 480693 - DNA, 120 bp, Artificial Sequence
  ENSG00000161091_10 (sequence is synthesized)
ctgtgctgctgggtgctggctgtgccaccatcctcgtcacctcgctggccatgacggccgacctcatcggtccccacacgaacagcggagcgttcgtgtacggctccatgagcttcttgg

SEQ ID NO: 480694 - DNA, 120 bp, Artificial Sequence
  ENSG00000161091_11 (sequence is synthesized)
ataaggtggccaatgggctggcagtcatggccatccagagcctgcacccttgcccctcagagctctgctgcagggcctgcgtgagcttttaccactgggcgatggtggctgtgacgggcg

SEQ ID NO: 480695 - DNA, 120 bp, Artificial Sequence
  ENSG00000161091_12 (sequence is synthesized)
gcgtgggcgtggccgctgccctgtgtctctgtagcctcctgctgtggccgacccgcctgcgacgctgggaccgtgatgcccggccctgactcctgacagcctcctgcacctgtgcaaggg

SEQ ID NO: 480696 - DNA, 120 bp, Artificial Sequence
  ENSG00000161091_13 (sequence is synthesized)
aactgtggggacgcacgaggatgccccccagggccttggggaaaagcccccactgcccctcactcttctctggacccccaccctccatcctcacccagctcccgggggtggggtcgggtg

SEQ ID NO: 480697 - DNA, 120 bp, Artificial Sequence
  ENSG00000161091_14 (sequence is synthesized)
agggcagcagggatgcccgccagggacttgcaaggaccccctgggttttgagggtgtcccattctcaactctaatccatcccagccctctggaggatttggggtgcccctctcggcaggg

SEQ ID NO: 480698 - DNA, 120 bp, Artificial Sequence
  ENSG00000161091_15 (sequence is synthesized)
aacaggaagtaggaatcccagaagggtctgggggaaccctaaccctgagctcagtccagttcacccctcacctccagcctgggggtctccagacactgccagggccccctcaggacggct

SEQ ID NO: 480699 - DNA, 120 bp, Artificial Sequence
  ENSG00000161091_16 (sequence is synthesized)
ggagcctggaggagacagccacggggtggtgggctgggcctggaccccaccgtggtgggcagcagggctgcccggcaggcttggtggactctgctggcagcaaataaagagatgacggca

SEQ ID NO: 480700 - DNA, 120 bp, Artificial Sequence
  ENSG00000161091_17 (sequence is synthesized)
tccagcctggaggagacagccacggggtggtgggctgggcctggaccccaccgtggtgggcagcagggctgcccggcaggcttggtggactctgctggcagcaaataaagagatgacggc

SEQ ID NO: 480701 - DNA, 120 bp, Artificial Sequence
  ENSG00000161091_18 (sequence is synthesized)
cccagggcgttttgacccccgacggcggggctgcagcgagagtgcatgagcccgaggaggcagggtctgatggggctggagtgtagtcatcggatctcagctcactgcaacctcgaactc

SEQ ID NO: 480702 - DNA, 120 bp, Artificial Sequence
  ENSG00000161091_19 (sequence is synthesized)
cccccgacggcggggctgcagcgagagtgcatgagcccgaggaggcagggtctgatgggggcccggagttccgcggctgttttcacctccaaagaaactttcccggacctcccgactgcg

SEQ ID NO: 480703 - DNA, 120 bp, Artificial Sequence
  ENSG00000161091_20 (sequence is synthesized)
cgacgctccaaccaaccgcccgcagcccgcccccgtcggccgccccgcccctccccgcccccggcatgctaatgaaggcctcggcgaacggtcccattgggctggagtgtagtcatcgga

SEQ ID NO: 480704 - DNA, 86 bp, Artificial Sequence
  ENSG00000161091_21 (sequence is synthesized)
accatcttggtttaatttctttccttggaaatggagcaaagggctttcactcttctttttcatggctgcatagtattccataattg

SEQ ID NO: 480705 - DNA, 120 bp, Artificial Sequence
  ENSG00000161091_22 (sequence is synthesized)
tcactcttctttttcatggctgcatagtattccataattgtttaaacaattgataatagacactgtatcggggtgactggtatacccccaaaatcacatctgcccagagcctcaggacat

SEQ ID NO: 480706 - DNA, 120 bp, Artificial Sequence
  ENSG00000161091_23 (sequence is synthesized)
ggccttgtttggaaatggttttagcagatgcagctaagatgaggtcaccccgtgttaggatggccccgaatccagtgcctggcacccttataaggagagggaaacttggacgcagacagg

SEQ ID NO: 480707 - DNA, 120 bp, Artificial Sequence
  ENSG00000161091_24 (sequence is synthesized)
aaggccgggtgaagacagaagcagagaccgggggccaaggagtgcctggggttgcccagagccaccacgggctgcaagaggtgtgggacagactctctcagccacagaagggcccagccc

SEQ ID NO: 480708 - DNA, 120 bp, Artificial Sequence
  ENSG00000161091_25 (sequence is synthesized)
cgcacaggcctggatttcagagggcgaacatttctgtggccgaagctcccagtgcgtttgcagtccttggagacggccgcagacacatttgttcttggcctgtctccaggtctgtagccc

SEQ ID NO: 480709 - DNA, 120 bp, Artificial Sequence
  ENSG00000161091_26 (sequence is synthesized)
ccacagtgagcggccactggccggaggggaacaggaagagctggaggggacgtcacacacatgagccttttaggaataacgagtgacacgtgcaagaccccaaaccaaacaccatgtaac

SEQ ID NO: 480710 - DNA, 120 bp, Artificial Sequence
  ENSG00000161091_27 (sequence is synthesized)
ctgacacccagggagggagggagggaggggctgggaggggctcacctgtagggaggggctcacctgtacagcggtgctgggaagctggcctcgagggtccccgaggggatacagggccgt

SEQ ID NO: 480711 - DNA, 120 bp, Artificial Sequence
  ENSG00000161091_28 (sequence is synthesized)
gccacccagtgtctcggcaaccacgctgaccactccctcctcccagctgcggggtgaggtggcctcgagggaagggctggagagtcgttctgagtatttaacaactgggggtgacacagt

SEQ ID NO: 480712 - DNA, 120 bp, Artificial Sequence
  ENSG00000161091_29 (sequence is synthesized)
gtgggtgggcaaggccagggccactgccaggtggggtccgtggccctgagcccccagctctatgcaccccccacctggggtctggcttctccatctccacacccccttgaggggcttctg

SEQ ID NO: 480713 - DNA, 120 bp, Artificial Sequence
  ENSG00000161091_30 (sequence is synthesized)
tctccccctgccccttcgatcgcaggaggcagtgcctggccggggtcgcaggcacctgtcaccccagctcctcactcctcacccactcacatccagtccgtttgtaaaatacacccagga

SEQ ID NO: 480714 - DNA, 120 bp, Artificial Sequence
  ENSG00000161091_31 (sequence is synthesized)
tgagacctgcacgcagtggctcacagcagcacgatttgtgacagcccgaggcggagaacaccgaacacccagtgaaggtgaggggatcagcacggcgccgccaccgtgctggaacgagac

SEQ ID NO: 480715 - DNA, 120 bp, Artificial Sequence
  ENSG00000161091_32 (sequence is synthesized)
tcagccacaaggaggtgcgaagctctgacccaggccacagtgcggatgcaccttgaggatgtcacgctcagtgagagacaccagacacagaagggtacgctgtgatcccacttctatgaa

SEQ ID NO: 480716 - DNA, 120 bp, Artificial Sequence
  ENSG00000161091_33 (sequence is synthesized)
atgtccaggacagaccaatccacagaatcagggagaggattcgtgggtgccgggactggggagggggacctgggggtgactaggtgacataatggggacagggctgccttctgggtgatg

SEQ ID NO: 480717 - DNA, 120 bp, Artificial Sequence
  ENSG00000161091_34 (sequence is synthesized)
agaatgttctggaatcagatgggatggctgcacggcgtggtgaaggtactgaacgccacctcactgtaagacggtagattttgtattttaccacaataaacaaaacaaaacaaaaccaaa

SEQ ID NO: 480718 - DNA, 120 bp, Artificial Sequence
  ENSG00000161091_35 (sequence is synthesized)
ccagcctgggggagacagccacggggtggtgggctgggcctggaccccaccgtggtgggcagcagggctgcccggcaggcttggtggactctgctggcagcaaataaagagatgacggca

SEQ ID NO: 480719 - DNA, 120 bp, Artificial Sequence
  ENSG00000161091_36 (sequence is synthesized)
gtaccaggcttcccaggcgtccgagttggtcaggcctgtgtaccacagctggccggctgcgtcccgtcccatgggcgtgtacttccagcgtgtggcctgcctgatggctggtggccagcg

SEQ ID NO: 480720 - DNA, 120 bp, Artificial Sequence
  ENSG00000161091_37 (sequence is synthesized)
ggaaccctccagggacaggtagtcatcgctgagggtgggcagggggcagagactgagcccatgtctacagcgagtgctttgacccctttgcgatgtctgccagggtggatgatgtagagg

SEQ ID NO: 480721 - DNA, 120 bp, Artificial Sequence
  ENSG00000161091_38 (sequence is synthesized)
acacatcgcaccccaagcacccaagtcagcactaaacctttctgttctcagcttttcttgcctggagaagagggaggggagaggacaagggccctggctactcctggattcctacagtcc

SEQ ID NO: 480722 - DNA, 120 bp, Artificial Sequence
  ENSG00000161091_39 (sequence is synthesized)
ttgtccagcctccaagacccacaagtcccttcctctgggaagcccccctggcctggaggtgcaccaggaagaagtggtctggggctggcactaagccatggcccagggaagactggggga

SEQ ID NO: 480723 - DNA, 120 bp, Artificial Sequence
  ENSG00000161091_40 (sequence is synthesized)
cacccctccctccccagacactgacccacactctctaatgccatttccacccctcccttgcaggggaccgtgatgcccggccctgactcctgacagcctcctgcacctgtgcaagggaac

SEQ ID NO: 480724 - DNA, 120 bp, Artificial Sequence
  ENSG00000161091_41 (sequence is synthesized)
ggatgggggcggggcctagctgggaggaagaacccggaaaagatggagtcaccacgaagcccccatgctggcccggagccttgccgcccgccggcctggagccaaggataccgcggtcag

SEQ ID NO: 480725 - DNA, 120 bp, Artificial Sequence
  ENSG00000161091_42 (sequence is synthesized)
ggctggggcgggagcccggggcctcccccagctcagcgcagggactctcacctcctcctcgtgggaccccttctcgcccgcgcgtggaccctcgccgcgctcttgcttgacagtcaccac

SEQ ID NO: 480726 - DNA, 120 bp, Artificial Sequence
  ENSG00000161091_43 (sequence is synthesized)
gcactcagaacctgtccctgctggtggtgggtgtcggcgccgtgttctcactgctattccacctgggcacccgggagaggcgccggccgcatgcggaggagccaggcgagcacacccccc

SEQ ID NO: 480727 - DNA, 120 bp, Artificial Sequence
  ENSG00000161133_0 (sequence is synthesized)
atggacggcgtcttgttcagggctcatcagtgtcagtacgtgcatccttgtgtacatgtgtatgtcactgtgggcctcatggatcccctgtgtcgccgaaagagtaaatcacgtaaacaa

SEQ ID NO: 480728 - DNA, 120 bp, Artificial Sequence
  ENSG00000161133_1 (sequence is synthesized)
aacaaactgcaacctaacctgagaatatgcccttggagcctggttggtttacacaacattggacagacctgctgccttaactccttgattcaggtgtttgtaatgaatgtggacttcgcc

SEQ ID NO: 480729 - DNA, 120 bp, Artificial Sequence
  ENSG00000161133_2 (sequence is synthesized)
aggatattgaagaggatcacggtgcccaggggagctgacgagcagaggagaagcgtccctttccagatgcttctgctgctggagaagatgcaggacagccggcagaaagcagtgtggccc

SEQ ID NO: 480730 - DNA, 120 bp, Artificial Sequence
  ENSG00000161133_3 (sequence is synthesized)
ctggagctggcctactgcctgcagaagtacaacgtgcccctgtttgtccaacatgatgctgcccaactgtacctcaaactctggaacctgattaaggaccagatcgctgatgtgcacttg

SEQ ID NO: 480731 - DNA, 120 bp, Artificial Sequence
  ENSG00000161133_4 (sequence is synthesized)
gatgtggactcaaagcccctgaagacactggaggacgccctgcactgcttcttccagcccagggagttatcaagcaaaagcaaatgcttctgtgagaactgtgggaagaagacccgtggg

SEQ ID NO: 480732 - DNA, 120 bp, Artificial Sequence
  ENSG00000161133_5 (sequence is synthesized)
aaacaggtcttgaagctgacccatttgccccagaccctgacaatccacctcatgcgattctccatcaggaattcacagacgagaaagatctgccactccctgtacttcccccagagcttg

SEQ ID NO: 480733 - DNA, 120 bp, Artificial Sequence
  ENSG00000161133_6 (sequence is synthesized)
gatttcagccagatccttccaatgaagcgagagtcttgtgatgctgaggagcagtctggagggcagtatgagctttttgctgtgattgcgcacgtgggaatggcagactccggtcattac

SEQ ID NO: 480734 - DNA, 120 bp, Artificial Sequence
  ENSG00000161133_7 (sequence is synthesized)
tgtgtctacatccggaatgctgtggatggaaaatggttctgcttcaatgactccaatatttgcttggtgtcctgggaagacatccagtgtacctacggaaatcctaactaccactggtaa

SEQ ID NO: 480735 - DNA, 120 bp, Artificial Sequence
  ENSG00000161133_8 (sequence is synthesized)
gaggattcataactgctaacccatgtctgctcccagagctaggtgacccagcagccaagcccttgagtgggaactgcaaaagctggggctgcctatgtgtggtccaaaccctcccctctc

SEQ ID NO: 480736 - DNA, 120 bp, Artificial Sequence
  ENSG00000161133_9 (sequence is synthesized)
tacgacagtttacttcaagagaggagacatgggttgaatgctggtgtgttttaactctgcagcgcaaacagttgcaacaagtgtggtgaactaaacaccagatggccctttgctgcctta

SEQ ID NO: 480737 - DNA, 70 bp, Artificial Sequence
  ENSG00000161133_10 (sequence is synthesized)
ttcagtcttatctgtttggggtcaactgccgaggatttcatacaaattaatgaagtttgtgaatctaaag

SEQ ID NO: 480738 - DNA, 120 bp, Artificial Sequence
  ENSG00000161179_0 (sequence is synthesized)
ggctgtccggcccactcccctgggagcgcgagcggtggacccaggcggccatgtcccgccctcgcatgcgcctggtggtcaccgcggacgactttggttactgcccgcgacgcgatgagg

SEQ ID NO: 480739 - DNA, 120 bp, Artificial Sequence
  ENSG00000161179_1 (sequence is synthesized)
gtatcgtggaggcctttctggccggggctgtgaccagcgtgtccctgctggtcaacggtgcggccacggagagcgcggcggagctggcccgcaggcacagcatccccacgggcctccacg

SEQ ID NO: 480740 - DNA, 120 bp, Artificial Sequence
  ENSG00000161179_2 (sequence is synthesized)
ccaacctgtccgagggccgccccgtgggtccggcccgccgtggcgcctcatcgctgctcggcccggaaggcttcttccttggcaagatgggattccgggaggcggtggcggccggagacg

SEQ ID NO: 480741 - DNA, 120 bp, Artificial Sequence
  ENSG00000161179_3 (sequence is synthesized)
tggatttgcctcaggtgcgggaggagctcgaggcccaactaagctgcttccgggagctgctgggcagggcccccacgcacgcggacgggcaccagcacgtgcacgtgctcccaggcgtgt

SEQ ID NO: 480742 - DNA, 120 bp, Artificial Sequence
  ENSG00000161179_4 (sequence is synthesized)
gccaggtgttcgccgaggcgctgcaggcctatggggtgcgctttacgcgactgccgctggagcgcggtgtgggtggctgcacttggctggaggcccccgcgcgtgccttcgcctgcgccg

SEQ ID NO: 480743 - DNA, 120 bp, Artificial Sequence
  ENSG00000161179_5 (sequence is synthesized)
cttctcccgccacggcctgcggtggacagacgccttcgtgggcctgagcacttgcggccggcacatgtccgctcaccgcgtgtccggggccctggcgcgggtcctggaaggtaccctagc

SEQ ID NO: 480744 - DNA, 120 bp, Artificial Sequence
  ENSG00000161179_6 (sequence is synthesized)
gggccacaccctgacagccgagctgatggcgcaccccggctaccccagtgtgcctcccaccggcggctgcggtgaaggccccgacgctttctcttgctcttgggagcggctgcatgagct

SEQ ID NO: 480745 - DNA, 120 bp, Artificial Sequence
  ENSG00000161179_7 (sequence is synthesized)
gcgcgtcctcaccgcgcccacgctgcgggcccagcttgcccaggatggcgtgcagctttgcgccctcgacgacctggactccaagaggccaggggaggaggtcccctgtgagcccactct

SEQ ID NO: 480746 - DNA, 120 bp, Artificial Sequence
  ENSG00000161179_8 (sequence is synthesized)
ggaacccttcctggaaccctccctactctgaccccctacagacaaccaagcactaatccccttagtaccaagaaaggggagccaggatttagtcctggcccagcccagagctgggacctg

SEQ ID NO: 480747 - DNA, 120 bp, Artificial Sequence
  ENSG00000161179_9 (sequence is synthesized)
gagcacgatctgttgacttccctgggtaggacactgccacctctgggctcaggtcctcatgcctccaaatggcatctagagtttgagcagccttcttggctgcaggcaggcctagcctgt

SEQ ID NO: 480748 - DNA, 120 bp, Artificial Sequence
  ENSG00000161179_10 (sequence is synthesized)
ggcagcgggctagggcccgcagagcatttggtgcccctccatgttgcaatgcaaacaccttcaccactggggcagtggggagagatggctatattaataaaataacgtgtgtctttcaaa

SEQ ID NO: 480749 - DNA, 120 bp, Artificial Sequence
  ENSG00000161179_11 (sequence is synthesized)
agctacaggaggatgctcgcgaggacccccagagctccgcccggagggtactgtgaggccgttaggagctggcggtggatgacttccgcattcaaacactggagccatcacacggaagca

SEQ ID NO: 480750 - DNA, 120 bp, Artificial Sequence
  ENSG00000161180_0 (sequence is synthesized)
gcactgtgcagctgctccagtgagggcgcagactgtactggcctgtgcggagcaaggcggtgtttctgagaggaatgcgcagctgaagagagaggtgggcagcaggcccggtcacctgcc

SEQ ID NO: 480751 - DNA, 120 bp, Artificial Sequence
  ENSG00000161180_1 (sequence is synthesized)
aggtgaccacatggccaggtgccgccaccactcgggttacctggccgatgacgaggccagccactccatgtgcagtgcacgggtgcagctgcccaagaagccactggtcccagaaatgcg

SEQ ID NO: 480752 - DNA, 120 bp, Artificial Sequence
  ENSG00000161180_2 (sequence is synthesized)
gccagcctgcaagccgggccgtgtgccacacccaccatccacatgtggcagctcagcactccagggccaacgccgaaacaagaggcaccctcagccctttggccactttctggatttcct

SEQ ID NO: 480753 - DNA, 120 bp, Artificial Sequence
  ENSG00000161180_3 (sequence is synthesized)
aactgagagccaggtcctggacagcctggagacagtggtggagaaggcgactgagcgcatggctgccatgaagacggaggctggggtgccgcttgtggaggtgcaggacccagtggaggt

SEQ ID NO: 480754 - DNA, 120 bp, Artificial Sequence
  ENSG00000161180_4 (sequence is synthesized)
gccaagtggtggacggcgggcacatgcccggcccagcctcagcaccgtacaccggcaccgtgtacggccgaccctctgcactggacaccccaacaactacccatccagctccagctccat

SEQ ID NO: 480755 - DNA, 120 bp, Artificial Sequence
  ENSG00000161180_5 (sequence is synthesized)
gtccaactgccatagcagcctcatggccggctgtctgggctcccacagccgggacagtgacctaggtgcccaaggctcattgccacctgtgagggacaaactcctgctggagaagaacct

SEQ ID NO: 480756 - DNA, 120 bp, Artificial Sequence
  ENSG00000161180_6 (sequence is synthesized)
caagcggctgctacagctggagagggaagggaaaggcctcagtcagtcctgctcccagagggactccctgctgtgggattcgctgggtagccagaccagctttcagtggacacaggagca

SEQ ID NO: 480757 - DNA, 120 bp, Artificial Sequence
  ENSG00000161180_7 (sequence is synthesized)
gcccttgtcctggttctcagggctgctgggctcaagctctggcgtgcctgaagcatcagagccgaggcctggagaacaggagccaatcttccgcaagcgagagttcaataaggagatcaa

SEQ ID NO: 480758 - DNA, 120 bp, Artificial Sequence
  ENSG00000161180_8 (sequence is synthesized)
gtcattactgagccagctggagtccctcgacctgcctggctactgtccgctccgtgagccccatcgcacgctgaacttcctggctgaccaccgcctcttccctgccctgcaaagcgtggt

SEQ ID NO: 480759 - DNA, 120 bp, Artificial Sequence
  ENSG00000161180_9 (sequence is synthesized)
agcccacctcagatctgccgcctctgggctctgagccagctaaacccaccaatggcgggcagccctatgcttccccccgccccacagtctccagccccaagatgcttcagagaaaacgca

SEQ ID NO: 480760 - DNA, 120 bp, Artificial Sequence
  ENSG00000161180_10 (sequence is synthesized)
aggacagaggaggctccccctccatgtctagtgcccaggtggccaccagattcaaactcaagagcccctgcagcagcagcaggttcacgaagaagaagccgctgccctccatctcgtcga

SEQ ID NO: 480761 - DNA, 120 bp, Artificial Sequence
  ENSG00000161180_11 (sequence is synthesized)
agtccagcatgtctcacttctccaaccgcctttatgaggagctcgccgacttcctgacccagcaggcagcctccttggtcatccgcaagtacgagttcgaaaaggacctcagtaagcagc

SEQ ID NO: 480762 - DNA, 120 bp, Artificial Sequence
  ENSG00000161180_12 (sequence is synthesized)
tgggcttcttctccttccccatcacccacgtgctcagggacctttccctgggcttaaagaaggtaaaaggctcccgcatccacctgtcctcggagacccaccggagctgcctgctgcgta

SEQ ID NO: 480763 - DNA, 120 bp, Artificial Sequence
  ENSG00000161180_13 (sequence is synthesized)
aactggaggagtccaaaagggcccggcaggcctcccggctcagcacctcccactgcagcacagagacaccctctgtgcagcaggaaccagccacccacactgcccaggaccaggccacag

SEQ ID NO: 480764 - DNA, 120 bp, Artificial Sequence
  ENSG00000161180_14 (sequence is synthesized)
agccctgccgctccctctacaccaacttgccagccagccggcagctcagccctttggagcccaagctctacatgtctgcctgcaccggcatgggttccagtccccccaagtccaaggaca

SEQ ID NO: 480765 - DNA, 120 bp, Artificial Sequence
  ENSG00000161180_15 (sequence is synthesized)
tggacaatgagggccgtgataaagccgagattgaagatgaagatgaggatgagttcaaggatgaagaccaggatgaggacaaggatgaggatggagtctagagcctcccagagcctggag

SEQ ID NO: 480766 - DNA, 120 bp, Artificial Sequence
  ENSG00000161180_16 (sequence is synthesized)
aggaggcctcggtcagccactccgtggacgtgggccacggtgacccaccatgaagtccccactagccactcgattccctgctctgtcagagttgctgcacatcacaccagcccctgccaa

SEQ ID NO: 480767 - DNA, 120 bp, Artificial Sequence
  ENSG00000161180_17 (sequence is synthesized)
gagcaggagtcaccacaggctgaatgcccacgaggagctctgctgagactctcaagggagccagtgaaagaaatagaaataaagcctgtgttgctgggacacaggtttgctgtcctgaga

SEQ ID NO: 480768 - DNA, 120 bp, Artificial Sequence
  ENSG00000161180_18 (sequence is synthesized)
ggcacctgactcagatcccaaattacaaaacccacctgtttccctgagctccagccagagggcccagccctggcagggcctgcacctcaccctgcccacgccagggattgtggtggaggt

SEQ ID NO: 480769 - DNA, 120 bp, Artificial Sequence
  ENSG00000161180_19 (sequence is synthesized)
ggcctgcagccagggccacctcaggggccctgtcacacctccactttcctccccctacccccgctcttcctgctaccttctccctgagctctctccagttgcctcttcatctcccgcctc

SEQ ID NO: 480770 - DNA, 120 bp, Artificial Sequence
  ENSG00000161180_20 (sequence is synthesized)
actgtgtccagaggtgacctcctcaaaagtaggaccgggcatgagtttgcaggagaagggctccttgacccaccactcctagcagccactgtcactaacaggtgctcaaggtcaaggtct

SEQ ID NO: 480771 - DNA, 120 bp, Artificial Sequence
  ENSG00000161180_21 (sequence is synthesized)
cttgccctgcactgtggaaacctcctgggcaggggtcaagctgatgggggcccatgaatcctggcctagctattaccaggtgttgtcacagataaataaaggctattttttatgctgggt

SEQ ID NO: 480772 - DNA, 120 bp, Artificial Sequence
  ENSG00000161180_22 (sequence is synthesized)
ggtatgcaaataagcaagtggaggccgccagccgacttcctcgcactgtgcagctgctccagtgagggcgcagactgtactggcctgtgcggagcaaggcggtgtttctgacgcatgggg

SEQ ID NO: 480773 - DNA, 120 bp, Artificial Sequence
  ENSG00000161180_23 (sequence is synthesized)
gccatggagcagaggaagggctggatgcatgaaggaggcggggtgcggggagcgagggacccgcagactccagggccacagatgcgtggacctattggagaccctcaggttgtctcccca

SEQ ID NO: 480774 - DNA, 120 bp, Artificial Sequence
  ENSG00000161202_0 (sequence is synthesized)
ccgcggccaccggaagagtcgcggtcgccagtccagtcgggagagtggggagcggaagcggcggccgcggcggcggcgggcggcgctgggacccggtagcggccggagaacaagggagct

SEQ ID NO: 480775 - DNA, 80 bp, Artificial Sequence
  ENSG00000161202_1 (sequence is synthesized)
aacaagggagctggcgccgccagcagccgccgagctgggttgagccgctgggccgcgccgcgcgccgccgccgtctggga

SEQ ID NO: 480776 - DNA, 120 bp, Artificial Sequence
  ENSG00000161202_2 (sequence is synthesized)
cgggcccgaggccagagccatgggcgagaccaagatcatctaccacttggatgggcaggagacgccgtaccttgtgaagctgcccctgcccgccgagcgcgtcaccttggcggactttaa

SEQ ID NO: 480777 - DNA, 120 bp, Artificial Sequence
  ENSG00000161202_3 (sequence is synthesized)
gggcgttttgcagcgacccagctataagttcttcttcaagtctatggacgacgatttcggagtggtgaaggaggagatctcggatgacaatgccaagctaccatgcttcaatggccgggt

SEQ ID NO: 480778 - DNA, 120 bp, Artificial Sequence
  ENSG00000161202_4 (sequence is synthesized)
ggtgtcctggctggtgtcagctgagggctcacacccagacccagcccccttctgtgctgataacccatcggagctgccaccacctatggagcgcacgggaggcatcggggactcccgacc

SEQ ID NO: 480779 - DNA, 120 bp, Artificial Sequence
  ENSG00000161202_5 (sequence is synthesized)
cccatccttccaccctcatgctggtgggggcagccaggagaacctggacaatgacacagagacggactctttggtgtctgcccagcgagagcggccacgccggagggatggcccagagca

SEQ ID NO: 480780 - DNA, 120 bp, Artificial Sequence
  ENSG00000161202_6 (sequence is synthesized)
tgcaacccggctaaatggaactgcgaagggggaacggcggcgagaaccagggggttatgatagctcatccacccttatgagcagtgagctggagaccaccagcttctttgactcagatga

SEQ ID NO: 480781 - DNA, 120 bp, Artificial Sequence
  ENSG00000161202_7 (sequence is synthesized)
ggatgactccaccagcaggttcagcagctccacagaacagagcagtgcctcacgcctgatgagaagacacaagcggcggcggcggaagcagaaggtttctcggattgagcggtcctcgtc

SEQ ID NO: 480782 - DNA, 120 bp, Artificial Sequence
  ENSG00000161202_8 (sequence is synthesized)
cttcagcagcatcacggactccaccatgtcactcaacatcatcacggtcactctcaacatggaaaaatataacttcttgggcatctccattgtgggccaaagcaacgagcgtggtgacgg

SEQ ID NO: 480783 - DNA, 120 bp, Artificial Sequence
  ENSG00000161202_9 (sequence is synthesized)
cggcatctacattggctctatcatgaagggtggggccgtggctgctgatggacgcatcgagccaggagatatgttgttacaggtaaacgagatcaactttgagaacatgagtaatgacga

SEQ ID NO: 480784 - DNA, 120 bp, Artificial Sequence
  ENSG00000161202_10 (sequence is synthesized)
tgcagtccgggtactgcgggagattgtgcacaaaccggggcccatcaccctgactgtagccaagtgctgggacccaagtccacgtggttgcttcacattgcccaggagcgagcccatccg

SEQ ID NO: 480785 - DNA, 120 bp, Artificial Sequence
  ENSG00000161202_11 (sequence is synthesized)
gcccattgaccctgcggcctgggtctcccacactgcagccatgaccggcaccttccctgcatacggcatgagcccctccctgagcaccatcacctccaccagctcctccatcaccagttc

SEQ ID NO: 480786 - DNA, 120 bp, Artificial Sequence
  ENSG00000161202_12 (sequence is synthesized)
catccctgacacagagcgcctagacgacttccacttgtccatccacagtgacatggctgccatcgtaaaagccatggcctcccctgaatcagggttggaggtccgtgaccgcatgtggct

SEQ ID NO: 480787 - DNA, 120 bp, Artificial Sequence
  ENSG00000161202_13 (sequence is synthesized)
caagattaccatccctaatgctttcatcggctcagatgtggtggactggctgtaccacaatgtggaaggcttcacggaccggagggaggcccgcaagtatgccagcaacctgctgaaagc

SEQ ID NO: 480788 - DNA, 120 bp, Artificial Sequence
  ENSG00000161202_14 (sequence is synthesized)
tggcttcatccgccataccgtcaacaagatcaccttctccgagcagtgctactacatcttcggtgacctctgcggcaacatggccaacctgtctctccacgatcacgatggctccagtgg

SEQ ID NO: 480789 - DNA, 120 bp, Artificial Sequence
  ENSG00000161202_15 (sequence is synthesized)
cgcctctgaccaggacacactggcccctttgccgcacccgggggccgccccttggcccatggctttcccgtaccagtacccgccacccccgcacccatacaacccgcacccgggcttccc

SEQ ID NO: 480790 - DNA, 120 bp, Artificial Sequence
  ENSG00000161202_16 (sequence is synthesized)
ggagctgggctacagctacggcgggggcagcgccagcagtcagcacagcgaaggcagtcggagcagtggctccaaccgtagcggcagcgatcggaggaaggagaaggacccgaaggccgg

SEQ ID NO: 480791 - DNA, 120 bp, Artificial Sequence
  ENSG00000161202_17 (sequence is synthesized)
ggactccaagtccgggggcagcggcagcgaatcggaccacaccacacgcagcagcctgcgggggccgcgggagcgggcgcccagcgagcgctcagggccggcggccagcgagcacagcca

SEQ ID NO: 480792 - DNA, 120 bp, Artificial Sequence
  ENSG00000161202_18 (sequence is synthesized)
ccgcagccaccattccctggccagcagccttcgcagccaccacacacacccgagctacggtcctcccggagtgccccctctctacggcccccccatgctgatgatgcccccgccgcccgc

SEQ ID NO: 480793 - DNA, 120 bp, Artificial Sequence
  ENSG00000161202_19 (sequence is synthesized)
ggccatggggcccccaggagcccctccgggccgcgacctggcctcagtgcccccggaactgaccgccagcagacagtccttccgcatggccatgggaaaccccagtgagttctttgtgga

SEQ ID NO: 480794 - DNA, 120 bp, Artificial Sequence
  ENSG00000161202_20 (sequence is synthesized)
tgtgatgtgagcagggcccctcccccagctccattccgctcccaccccagccggctgcgttcctctctccatccgtccgtcttttttactttgtctggtacctgaaagggaaataaaagg

SEQ ID NO: 480795 - DNA, 120 bp, Artificial Sequence
  ENSG00000161202_21 (sequence is synthesized)
tgcccactaatccctgcgcaggacttcccaggaccccttttgtctctgggaccagacttgttggtgctaccccttactcccctctgcaacccccattttgggagttgaccccagcaatga

SEQ ID NO: 480796 - DNA, 120 bp, Artificial Sequence
  ENSG00000161202_22 (sequence is synthesized)
ccttggtggcacgctcactccctcattctctcgtttcccctttagctccctttcaccatttattcagctacatcatccctctattaaccccaccccatcaggcacgtgtgcaaacctctt

SEQ ID NO: 480797 - DNA, 120 bp, Artificial Sequence
  ENSG00000161202_23 (sequence is synthesized)
gactttaccccacattactgaaaccaaaatatatttgcttcatctgcccctactaaccatccccctgcctgctgcctcagtcctgcaacctaaagctgtagtcgcctccaatagccatcc

SEQ ID NO: 480798 - DNA, 120 bp, Artificial Sequence
  ENSG00000161202_24 (sequence is synthesized)
atgccatccctgcctgtgcctagatcagaggcccagagggccccctcagttgcctgagcagctggtggcttccagggagcatctctgctctacccctgccccatgcctgccctgcgtgct

SEQ ID NO: 480799 - DNA, 120 bp, Artificial Sequence
  ENSG00000161202_25 (sequence is synthesized)
ggttccttcagacccctaaccctactaaccagcaggctcatctcacctccaggcctgaaacatttcttttctttcttttttcctcccccaatttaccctgggcctggagcagccaagaat

SEQ ID NO: 480800 - DNA, 120 bp, Artificial Sequence
  ENSG00000161202_26 (sequence is synthesized)
ttcgggctgtttgactttctgtgagcccccagcgaggggaggcccagcctccgaggagaccaggaaccctgcttcagcagcccctcagggcttcccaaggatgtccagcccccacaccca

SEQ ID NO: 480801 - DNA, 120 bp, Artificial Sequence
  ENSG00000161202_27 (sequence is synthesized)
cacgttaacataatgagtcactaggcttctggggagggcccaacttcacccatgcatgagagactctcctcctttccagagagaatcggatcgcaccacgtgtggcagcctgcggcgggg

SEQ ID NO: 480802 - DNA, 120 bp, Artificial Sequence
  ENSG00000161202_28 (sequence is synthesized)
ggaggggggcctctttagctctctttatctttctctctcactcatgtatgcatacatgcacagagatgcatacacaggtgcctatgcaagttcatttaagcctcagggctggtccctgcc

SEQ ID NO: 480803 - DNA, 120 bp, Artificial Sequence
  ENSG00000161202_29 (sequence is synthesized)
caaagggctggaccctcctaatcctctcctaggttgtggggctggtcccctgacacccttctccccttcctggtagaccttaaacctcgcacacatgtccccagcattttctcacctgga

SEQ ID NO: 480804 - DNA, 120 bp, Artificial Sequence
  ENSG00000161202_30 (sequence is synthesized)
taaagcccataagctgggtctcaggctgggctcagcaaaggactcgccttgcaaccgacaggccattcccacccccacacacaacctcccctgttttcacattcaccatggcatcccaga

SEQ ID NO: 480805 - DNA, 120 bp, Artificial Sequence
  ENSG00000161202_31 (sequence is synthesized)
gcaaggacacaggagcccacaggccagttgaggttgggcaaggagacttccaggacttccagacagagtaccaggttttatttttcaccttattctctactttaaacaaatcataacttt

SEQ ID NO: 480806 - DNA, 120 bp, Artificial Sequence
  ENSG00000161202_32 (sequence is synthesized)
ctctttaagcctctgctataaattctcctggctctcctgggcttccatattttgggggctggggtgtcaaaagtgagatgaagttcttagctccaggttttggggtaaaccaaggtagga

SEQ ID NO: 480807 - DNA, 79 bp, Artificial Sequence
  ENSG00000161202_33 (sequence is synthesized)
aagttcttagctccaggttttggggtaaaccaaggtaggaacattttggcatttatttcaattaacaatacttccttgg

SEQ ID NO: 480808 - DNA, 67 bp, Artificial Sequence
  ENSG00000161202_34 (sequence is synthesized)
aatacaaaaattagatgggtgttttggcaccaggaagcaagcggaggttgcagtgagttgagatcgc

SEQ ID NO: 480809 - DNA, 81 bp, Artificial Sequence
  ENSG00000161202_35 (sequence is synthesized)
gcaaactaacaaagaaaaacaatacttcctggggttttggtgtgcagagggctttgttggaagtgtgactcaatcttgcct

SEQ ID NO: 480810 - DNA, 120 bp, Artificial Sequence
  ENSG00000161202_36 (sequence is synthesized)
gtgcagagggctttgttggaagtgtgactcaatcttgcctgccttctgggagctctagaattgttcccaacccagtccatggcttctagccaccactacagggctgtttcatgtacttct

SEQ ID NO: 480811 - DNA, 120 bp, Artificial Sequence
  ENSG00000161202_37 (sequence is synthesized)
ctctctgactctgtcttgtccgactctcttgagaatttctcaacgattgctcatgcctgtcagtatcagtgcttccatcgttccatctttgattcacttctctttcctttctatttactc

SEQ ID NO: 480812 - DNA, 120 bp, Artificial Sequence
  ENSG00000161202_38 (sequence is synthesized)
ccaaaatggagtcattcatcctgatgtcctcaattgctgctgatatgctggtgattcccaaatacatagctccaacccccaacttcccccagactttagatctgtattggtattacctac

SEQ ID NO: 480813 - DNA, 120 bp, Artificial Sequence
  ENSG00000161202_39 (sequence is synthesized)
tggacatctctatggacagttccgtatagactcaactcatctgcccaaccaagtatgttcctcctgaattcctctcctggttacttcatcacaatctacataggctcaccagctagaaac

SEQ ID NO: 480814 - DNA, 120 bp, Artificial Sequence
  ENSG00000161202_40 (sequence is synthesized)
atttatgagcttacattccttcttcccatatcttatcagcatatcatatccatttcactccaacactctgtcttgaatttggccctccctctcccctctctactttaattcattggagca

SEQ ID NO: 480815 - DNA, 120 bp, Artificial Sequence
  ENSG00000161202_41 (sequence is synthesized)
tgggatttggagttaggtggttttgggtttgaattccagctctactatttttggttgtgtgatagagttatttaacctctctgagcctcagttccctcgtatgtaaaatgatgataataa

SEQ ID NO: 480816 - DNA, 120 bp, Artificial Sequence
  ENSG00000161202_42 (sequence is synthesized)
tacctacctcacagggttgttgtgaggatttaaattagatattgtacgaaaagtgcctagcacagtgcctggcacacagtagagtaggtgctcaataaatggtagctattattattatta

SEQ ID NO: 480817 - DNA, 120 bp, Artificial Sequence
  ENSG00000161202_43 (sequence is synthesized)
ggatgcggggcccctgggaggcttatgggctttgtgttggggacccaggccctgcagtgcctcccctcatgggggcagggctgggccagcctggtggggaacgactgtgggccccacagg

SEQ ID NO: 480818 - DNA, 120 bp, Artificial Sequence
  ENSG00000161202_44 (sequence is synthesized)
acttgcctgccgcctcactaactgggcgctgggcctggaggcggtggggaaggcccctccaggcctgaaggctgcctctccagccctagcctgaggcctgcactgctctttggagctgag

SEQ ID NO: 480819 - DNA, 120 bp, Artificial Sequence
  ENSG00000161202_45 (sequence is synthesized)
gccccacagccaagaggagacattcttctccccagtgttcatctgtctggcttctctcccaagcccctggcccacctagcactaggaagcaagcaccttctgtctaatgcctggcatgtt

SEQ ID NO: 480820 - DNA, 120 bp, Artificial Sequence
  ENSG00000161202_46 (sequence is synthesized)
cctcactttccacccagctacccaccttcttgccctacttcccgagctcaggatatgcctggccccagtgcagcccctggcttgcctctctccctccttcacccctgcactgggcactgt

SEQ ID NO: 480821 - DNA, 120 bp, Artificial Sequence
  ENSG00000161202_47 (sequence is synthesized)
cacaggactggtagatgtcagagctggaatttcaccccaggcttgactccaaaatccatactctttccactgtatttcacattctttcctatataataacagagagtggtgaaggaggag

SEQ ID NO: 480822 - DNA, 120 bp, Artificial Sequence
  ENSG00000161203_0 (sequence is synthesized)
actgcggtgaaagccgaggcagcgggcagacgagcagggggcgggcggacatcttgggatccggagagtggccgggccggcagagcagggggccgaggacaccaggtctgttctcagagc

SEQ ID NO: 480823 - DNA, 120 bp, Artificial Sequence
  ENSG00000161203_1 (sequence is synthesized)
gatgggccgcggagactgatctgccgccatgattggaggcttattcatctataatcacaagggggaggtgctcatctcccgagtctaccgagatgacatcgggaggaacgcagtggatgc

SEQ ID NO: 480824 - DNA, 120 bp, Artificial Sequence
  ENSG00000161203_2 (sequence is synthesized)
ctttcgggtcaatgttatccatgcccggcagcaggtgcgcagccccgtcaccaacattgctcgcaccagcttcttccacgttaagcggtccaacatttggctggcagcagtcaccaagca

SEQ ID NO: 480825 - DNA, 120 bp, Artificial Sequence
  ENSG00000161203_3 (sequence is synthesized)
gaatgtcaacgctgccatggtcttcgaattcctctataagatgtgtgacgtgatggctgcctactttggcaagatcagcgaggaaaacatcaagaacaattttgtgctcatatatgagct

SEQ ID NO: 480826 - DNA, 120 bp, Artificial Sequence
  ENSG00000161203_4 (sequence is synthesized)
gctggatgagattctagactttggctacccacagaattccgagacaggcgcgctgaaaaccttcatcacgcagcagggcatcaagagtcagcatcagacaaaagaagagcagtcacagat

SEQ ID NO: 480827 - DNA, 120 bp, Artificial Sequence
  ENSG00000161203_5 (sequence is synthesized)
caccagccaggtaactgggcagattggctggcggcgagagggtatcaagtatcgtcggaatgagctcttcctggatgtgctggagagtgtgaacctgctcatgtccccacaagggcaggt

SEQ ID NO: 480828 - DNA, 120 bp, Artificial Sequence
  ENSG00000161203_6 (sequence is synthesized)
gctgagtgcccatgtgtcgggccgggtggtgatgaagagctacctgagtggcatgcctgaatgcaagtttgggatgaatgacaagattgttattgaaaagcagggcaaaggcacagctga

SEQ ID NO: 480829 - DNA, 120 bp, Artificial Sequence
  ENSG00000161203_7 (sequence is synthesized)
tgaaacaagcaagagcgggaagcaatcaattgccattgatgactgcaccttccaccagtgtgtgcgactcagcaagtttgactctgaacgcagcatcagctttatcccgccagatggaga

SEQ ID NO: 480830 - DNA, 120 bp, Artificial Sequence
  ENSG00000161203_8 (sequence is synthesized)
tgaggtatcgcacaaccaaggacatcatccttcccttccgggtgatcccgctagtgcgagaagtgggacgcaccaaactggaggtcaaggtggtcatcaagtccaactttaaaccctcac

SEQ ID NO: 480831 - DNA, 120 bp, Artificial Sequence
  ENSG00000161203_9 (sequence is synthesized)
tgctggctcagaagatcgaggtgaggatcccaaccccactgaacacaagcggggtgcaggtgatctgcatgaaggggaaggccaagtacaaggccagcgagaatgccatcgtgtggaaga

SEQ ID NO: 480832 - DNA, 120 bp, Artificial Sequence
  ENSG00000161203_10 (sequence is synthesized)
tcaagcgcatggcaggcatgaaggaatcgcagatcagcgcagagattgagcttctgcctaccaacgacaagaagaaatgggctcgaccccccatttccatgaactttgaggtgccattcg

SEQ ID NO: 480833 - DNA, 120 bp, Artificial Sequence
  ENSG00000161203_11 (sequence is synthesized)
cgccctctggcctcaaggtgcgctacttgaaggtgtttgaaccgaagctgaactacagcgaccatgatgtcatcaaatgggtgcgctacattggccgcagtggcatttatgaaactcgct

SEQ ID NO: 480834 - DNA, 120 bp, Artificial Sequence
  ENSG00000161203_12 (sequence is synthesized)
gctagctgccactaggcagctagcccacctccccagccaccctcctccacaggtccaggtgccgctccctcccccaccacacatcagtgtctcctccctcctgctttgctgccttccctt

SEQ ID NO: 480835 - DNA, 120 bp, Artificial Sequence
  ENSG00000161203_13 (sequence is synthesized)
tgcaccagcccgagtctaggtctgggccaagcacattacaagtgggaccggtggagcagcccctgggctccctgggcaggggagttctgaggctcctgctctcccatccacctgtctgtc

SEQ ID NO: 480836 - DNA, 120 bp, Artificial Sequence
  ENSG00000161203_14 (sequence is synthesized)
ctggcctaatgccaggctctgagttctgtgaccaaagccaggtgggttccctttccttcccacccctgtggccacagctctggagtgggagggttggttgcccctcacctcagagctccc

SEQ ID NO: 480837 - DNA, 120 bp, Artificial Sequence
  ENSG00000161203_15 (sequence is synthesized)
ccaaaggccagtaatggatccccggcctcagtccctactctgctttgggatagtgtgagcttcattttgtacacgtgtgacttcgtccagttacaaacccaataaactctgtagagtgga

SEQ ID NO: 480838 - DNA, 120 bp, Artificial Sequence
  ENSG00000161203_16 (sequence is synthesized)
cttcctgaggcgggggcggtttctcgaaggcagtcggtagttgtagttttgctaaacctagagcgcttcaaattgcaagcaaggaggccgcgaggcctgacgggatttgtagtcggcgct

SEQ ID NO: 480839 - DNA, 120 bp, Artificial Sequence
  ENSG00000161203_17 (sequence is synthesized)
ggaataaacaggaactggagcctggctgaggggaggggcatgtctgggagggctgcagggtcacttactaaagggttgagtcaggaaagaagctccagtgacctgcacagctccacaggg

SEQ ID NO: 480840 - DNA, 120 bp, Artificial Sequence
  ENSG00000161203_18 (sequence is synthesized)
ctggatggtgaggctggcgggctggcacggcagcgggcgtagggtgggaaaaaaccaggctgggcctggcctgaagagattctagactttggctacccacagaattccgagacaggcgcg

SEQ ID NO: 480841 - DNA, 120 bp, Artificial Sequence
  ENSG00000161203_19 (sequence is synthesized)
cactgtgggagggcagggaagccatgctaccctctcagtagacccagagcagctccatatcctgggccttcacacagagccacagcctgccttctcattctgcgcccccttgcacgccct

SEQ ID NO: 480842 - DNA, 120 bp, Artificial Sequence
  ENSG00000161203_20 (sequence is synthesized)
tgttctttgcgactgaagggacctatcctagcctccgaggcgctaaagagtaggctcctctggttcctgctgcctgtttttcttcctcagagagcttgagataaagtcacagaatgggcc

SEQ ID NO: 480843 - DNA, 120 bp, Artificial Sequence
  ENSG00000161203_21 (sequence is synthesized)
gtcttgaggcctggtattcctcaggaggagcgagcttgggccctctcctctaggatccaagcctcatagctttctcctccttttctgcctcccttgctgcttcatgtgggcacctcgttg

SEQ ID NO: 480844 - DNA, 120 bp, Artificial Sequence
  ENSG00000161203_22 (sequence is synthesized)
ggcatcaagagtcaggtacttgaattgtgcagactatagtcagggtggagtccaatctcccttcatctcagctggcccctgagccttgtctgagctgactcatgagccctcccatgacag

SEQ ID NO: 480845 - DNA, 120 bp, Artificial Sequence
  ENSG00000161203_23 (sequence is synthesized)
gaagtgctggcctgagcctcctgccatgattgcaggccgattttgctctgtgtggtcctcccactgcaggagcagccaattcagcatctctattaccaggaatacagctcaagcagtttc

SEQ ID NO: 480846 - DNA, 120 bp, Artificial Sequence
  ENSG00000161203_24 (sequence is synthesized)
tctttcctgagtatttggtctcttgggctaggatctctatgcccctcagaaggccagttcacatccagacctgaaggctggtctgaagtagaacacagaaataggccagcaggtgatctt

SEQ ID NO: 480847 - DNA, 120 bp, Artificial Sequence
  ENSG00000161203_25 (sequence is synthesized)
actgctgcaccttagaggtgaggaaactgaggcctagaaagaagaactggctttaattcatagatccattcttcccctttcaagcctcttagtagaaattactatttgtgatgaggcaaa

SEQ ID NO: 480848 - DNA, 120 bp, Artificial Sequence
  ENSG00000161203_26 (sequence is synthesized)
tcttttacttctctcggcttgtcctaacacagttctttcaaaaaacttagattgtttaaatgccaggtaagacacaaagtttacttacagacaggataatgggctgactttgctttgcgc

SEQ ID NO: 480849 - DNA, 120 bp, Artificial Sequence
  ENSG00000161203_27 (sequence is synthesized)
atgttagacataattttctccaccttatttttaagttcataatattgagcaggataagtatgttctaaagcagttctttggttgctgtctcctgctgattaaaggaactgattcaaggtg

SEQ ID NO: 480850 - DNA, 120 bp, Artificial Sequence
  ENSG00000161203_28 (sequence is synthesized)
tttgtttctccaggccctgccctttggggcttataggggaaaatggattacagacaaaagaagagcagtcacagatcaccagccaggtaactgggcagattggctggcggcgagagggta

SEQ ID NO: 480851 - DNA, 120 bp, Artificial Sequence
  ENSG00000161203_29 (sequence is synthesized)
ctcagagagcaagcccctttgtttggtccctaggaccaaggccttttctgtacatactgacagcctctgcccagtgtgcctgaaacacccaggtccctagcagaaggagccccaagagat

SEQ ID NO: 480852 - DNA, 120 bp, Artificial Sequence
  ENSG00000161203_30 (sequence is synthesized)
gagcttgcaaggcttccctctcatcccaagctctggggcagacctccgagtcacaaagctgcattctagcagcttttcatagtctctggtgccagcctggggtggagtggtctcccagca

SEQ ID NO: 480853 - DNA, 120 bp, Artificial Sequence
  ENSG00000161203_31 (sequence is synthesized)
gaggacaccaggtgagccggggatctggccttatggcgtggaggaggacgctgcgggtcgtctgcctcgccgcgcagctttgtcctgccctgcactgagctggcggaaagctgcccacac

SEQ ID NO: 480854 - DNA, 120 bp, Artificial Sequence
  ENSG00000161204_0 (sequence is synthesized)
agactcggcgcctctcctcaaggccccgctcgccccgcccaccgggctctgcgcactccgctcctttcctgcgtcaccgctacacatgcgccttgcaaggaagggcgagatttcgggggc

SEQ ID NO: 480855 - DNA, 120 bp, Artificial Sequence
  ENSG00000161204_1 (sequence is synthesized)
agggcggggggcgggcctaggccggggtctcacagcgactgcgcggacgggttcctgagtggaacatggcgacttgcgccgaaatcctgcggagcgagttccccgaaattgacggacaag

SEQ ID NO: 480856 - DNA, 120 bp, Artificial Sequence
  ENSG00000161204_2 (sequence is synthesized)
tcttcgactacgtgaccggcgtcttgcacagcggcagcgcggacttcgagtctgtggatgacctggtggaagctgtaggggaactattgcaagaggtgtccggggacagcaaggatgacg

SEQ ID NO: 480857 - DNA, 120 bp, Artificial Sequence
  ENSG00000161204_3 (sequence is synthesized)
cgggcatcagggccgtgtgccagcgcatgtacaacactctgcgtctggctgagccacaaagccagggaaatagccaggtgctactggacgcccctatccagttgtcaaagataacggaga

SEQ ID NO: 480858 - DNA, 120 bp, Artificial Sequence
  ENSG00000161204_4 (sequence is synthesized)
actacgactgtggaaccaaacttccaggactgctaaagagggaacagtcctcgacagtgaatgcaaagaagttagagaaggccgaggctcgacttaaggcaaagcaggagaagcgctcag

SEQ ID NO: 480859 - DNA, 120 bp, Artificial Sequence
  ENSG00000161204_5 (sequence is synthesized)
agaaggacacgctcaagaccagcaaccctctagtcttagaagaggcatcagccagccaggcaggcagcagaaaggagagtcggttggaatcatctggcaagaacaaatcctatgatgtgc

SEQ ID NO: 480860 - DNA, 120 bp, Artificial Sequence
  ENSG00000161204_6 (sequence is synthesized)
gaattgagaactttgatgtgtcttttggcgatagagtactgctggctggagcggatgtgaacctggcatggggccgccgttacgggctggtggggcggaatgggttggggaagacaacgt

SEQ ID NO: 480861 - DNA, 120 bp, Artificial Sequence
  ENSG00000161204_7 (sequence is synthesized)
tactgaagatgctggccacccggagtctgcgggttccagcccacatttccctgctgcacgttgagcaagaggttgctggagatgacactcctgccctgcagagtgtgctggagagtgaca

SEQ ID NO: 480862 - DNA, 120 bp, Artificial Sequence
  ENSG00000161204_8 (sequence is synthesized)
gtgtgcgagaggatttgctacggagggagcgggagctcactgcccagattgctgctggcagggcggagggctctgaagctgcagagctggcagaaatctatgccaaactggaggagattg

SEQ ID NO: 480863 - DNA, 120 bp, Artificial Sequence
  ENSG00000161204_9 (sequence is synthesized)
aggctgacaaggcacctgccagggcatcagtcattctcgctgggcttggctttacccctaaaatgcagcagcagcccacccgggagttctcaggtggctggaggatgaggctggccctgg

SEQ ID NO: 480864 - DNA, 120 bp, Artificial Sequence
  ENSG00000161204_10 (sequence is synthesized)
ccctccaccatcctagtcgtctcccacgaccgcaacttcttgaatgccatcgccacagacatcatccacctgcacagccagcggctagatggttaccggggagactttgagaccttcatc

SEQ ID NO: 480865 - DNA, 120 bp, Artificial Sequence
  ENSG00000161204_11 (sequence is synthesized)
aagagtaagcaggagcggctgctcaaccagcagcgtgaatatgaggcgcagcagcagtatcgccagcacatccaggttttcattgaccggtttcgctacaatgccaacagggcctctcaa

SEQ ID NO: 480866 - DNA, 120 bp, Artificial Sequence
  ENSG00000161204_12 (sequence is synthesized)
gtgcagagtaaactcaagatgctggagaagctgcctgagctgaagcctgtggacaaggaatcagaggtcgtaatgaagttccctgatgggtttgagaagttctcgccgccaattctgcag

SEQ ID NO: 480867 - DNA, 120 bp, Artificial Sequence
  ENSG00000161204_13 (sequence is synthesized)
ctagatgaggtggatttctactacgatccgaagcacgtcatcttcagtcgcctctctgtgtctgctgatctcgagtctcgcatctgtgtggttggagagaatggggctgggaagtctacc

SEQ ID NO: 480868 - DNA, 120 bp, Artificial Sequence
  ENSG00000161204_14 (sequence is synthesized)
atgctgaagctgcttttgggggacctggcacctgttcggggcatcagacacgctcacaggaatctgaagattggctatttcagccagcaccatgtggagcagctggacctaaacgtcagt

SEQ ID NO: 480869 - DNA, 120 bp, Artificial Sequence
  ENSG00000161204_15 (sequence is synthesized)
gctgtggaactgctggcacgcaagtttcctgggcggcctgaggaggagtaccgtcaccagctgggtcggtatggcatctccggagaactggccatgcgtcctcttgccagcctgtctggg

SEQ ID NO: 480870 - DNA, 120 bp, Artificial Sequence
  ENSG00000161204_16 (sequence is synthesized)
ggccagaagagccgagtggcctttgctcagatgactatgccctgccccaacttctacattctggatgaacccacaaaccacctggacatggagaccattgaggctctgggccgtgccctc

SEQ ID NO: 480871 - DNA, 120 bp, Artificial Sequence
  ENSG00000161204_17 (sequence is synthesized)
aacaatttcaggggtggtgtgattctggtgtcccacgatgagcgctttatcaggctggtgtgccgggagttgtgggtatgcgaaggaggcggcgtcacccgtgtggaaggaggatttgac

SEQ ID NO: 480872 - DNA, 120 bp, Artificial Sequence
  ENSG00000161204_18 (sequence is synthesized)
cagtaccgcgccctcctccaggaacagttccgccgcgaaggcttcctctagggccaccaggctgaggactcgcccaggacatggactggtctctcagacccctgggccaccatgtaggcc

SEQ ID NO: 480873 - DNA, 120 bp, Artificial Sequence
  ENSG00000161204_19 (sequence is synthesized)
accactccaggccgtggacttcccccaacttggggacagccttattcccaaatgtctctatccttttgactggagcatcttctgcacaaccttgggagcccatccaagggttggtgagga

SEQ ID NO: 480874 - DNA, 120 bp, Artificial Sequence
  ENSG00000161204_20 (sequence is synthesized)
ctggtctcccgggggtgggggtctggggggtaccctctggggttatagattcccccactgccccagctctgactggaccccaagtggctgctatgtaaattaaatctctccccgcgtctc

SEQ ID NO: 480875 - DNA, 120 bp, Artificial Sequence
  ENSG00000161204_21 (sequence is synthesized)
actgcttttcttatcgcttacagactgtggaaccaaacttccaggactgctaaagagggaacagtcctcggtgaggaggaggaagcaagggaggggactgtctgtgatggggttgggagt

SEQ ID NO: 480876 - DNA, 120 bp, Artificial Sequence
  ENSG00000161204_22 (sequence is synthesized)
tgactgtctaattggagtatcttttggggggatttctgactatgtcttttcctgagcctttgagtctgttcatcatgggtaagttaagagggtttactcgagatgttctctcttggggtt

SEQ ID NO: 480877 - DNA, 120 bp, Artificial Sequence
  ENSG00000161204_23 (sequence is synthesized)
ccgcacccctgcccccatgagcacatttgcaggcacccatgctgcctgcgctccttcgtggccattgcctttgtctgtttttccacctcggcttctgcctgcaggaatctgaagattggc

SEQ ID NO: 480878 - DNA, 120 bp, Artificial Sequence
  ENSG00000161204_24 (sequence is synthesized)
aggtgagtctcctgggccagtgtatgaagccctatggaagattggtcttagctcttgggaggtggcatgagttgctgacctaaaacctcaggccatgtattgtttttcataggccagatc

SEQ ID NO: 480879 - DNA, 120 bp, Artificial Sequence
  ENSG00000161204_25 (sequence is synthesized)
acactctgcgtctgtatgtgccagggagtaggggttgatgggggcgaagggacggcgaacggtccggagacaagaggtgggggaggaagatctgatggccatagagcttttccctcaact

SEQ ID NO: 480880 - DNA, 120 bp, Artificial Sequence
  ENSG00000161204_26 (sequence is synthesized)
gcccccaaccatctgctgcctgcagcttagggctcctacgtcttttccacaggacaaggttgtaggagctagttgatgtctttaccgagggcagaagagcccatgatgggggtggggagg

SEQ ID NO: 480881 - DNA, 120 bp, Artificial Sequence
  ENSG00000161204_27 (sequence is synthesized)
aggttggagggttctccctccaagctcttgggtaggataggaagcataagagcctggagctggacagacttgctttcacccccagttttgcaacttgctaaccagctgcatgatcttgta

SEQ ID NO: 480882 - DNA, 120 bp, Artificial Sequence
  ENSG00000161204_28 (sequence is synthesized)
cccagttttgcaacttgctaaccagctgcatgatcttgtaagagttggttatctgtccccagccttgtctatgcctctgtatccttctacgtgagttttgttttgttttgttttgttttg

SEQ ID NO: 480883 - DNA, 120 bp, Artificial Sequence
  ENSG00000161204_29 (sequence is synthesized)
ccggagaactggccatgcgtcctcttgccagcctgtctgggggccagaagagccgagtggcctttgctcagatgactatgccctggtgaggcctcattttccagagctcttcccctccca

SEQ ID NO: 480884 - DNA, 120 bp, Artificial Sequence
  ENSG00000161204_30 (sequence is synthesized)
tttccccttcttgcccagtagaaaactgtatcagaaggctttattttctctcaccgcaccccttcactgcccaccttcctggttctgccttccagccccaacttctacattctggatgaa

SEQ ID NO: 480885 - DNA, 120 bp, Artificial Sequence
  ENSG00000161204_31 (sequence is synthesized)
gaatggactctaaagtaatgatacctgagtggtaggagtacaagccctttctaagttttctctgaacatatattactcgtgtaggaagttatttttttaagtaataaatctagtctacct

SEQ ID NO: 480886 - DNA, 120 bp, Artificial Sequence
  ENSG00000161204_32 (sequence is synthesized)
aatgcctacactcctccacctgcaggttttcattgaccggtttcgctacaatgccaacagggcctctcaagtgcagagtaaactcaagatgctggagaagctgtgagtacagcatccttg

SEQ ID NO: 480887 - DNA, 120 bp, Artificial Sequence
  ENSG00000161204_33 (sequence is synthesized)
gccagggcctgactcctgttctcttcgtctccttccgcatttgcacgccacccttgccctaccattctaggtctccccttcgctagaagccaactgtgacttcctcctctgctgggaagc

SEQ ID NO: 480888 - DNA, 120 bp, Artificial Sequence
  ENSG00000161204_34 (sequence is synthesized)
agagtattccacactgttcttggagggctaatcttgactagcacatggcaaccactaatttactttctgtttctgcttctacgtatctgcttattctgggcatttcatataaatggaatc

SEQ ID NO: 480889 - DNA, 120 bp, Artificial Sequence
  ENSG00000161204_35 (sequence is synthesized)
atacaatatgacctttgtgcctggtgtcttttacctggcgtcatgtgtgaggctcatccatattgtagcgtgcgtcagagcttcatttcttttcgtggctggataatattctgttgtgtg

SEQ ID NO: 480890 - DNA, 120 bp, Artificial Sequence
  ENSG00000161204_36 (sequence is synthesized)
gatatacagcattttgtttattgagtcatgaggggccatttgggttgtttccattttggttattatgaataatgttgctgtgaacattggtgtacaaatttttgtgtggacatatgtttt

SEQ ID NO: 480891 - DNA, 120 bp, Artificial Sequence
  ENSG00000161204_37 (sequence is synthesized)
cagcttgcttgggtgtatacctaggcgcagaattgctgggttacctggtaattccaaattaatgttttgaggaactgtcaaactgttttctaaagcaacaacatcattttacattcctac

SEQ ID NO: 480892 - DNA, 120 bp, Artificial Sequence
  ENSG00000161204_38 (sequence is synthesized)
caacaagggatgagagttccaatttctccatgtctttggcagcactgttattgacttttttttttttagttttagccatcctagtggctgtgaagtgatagctcattgtggttttgattt

SEQ ID NO: 480893 - DNA, 120 bp, Artificial Sequence
  ENSG00000161204_39 (sequence is synthesized)
gcattgccttaataactaatgataatgtgcattgggagtttaattttgaagtgccctttctataagtgctggcaggaagcttaaaatcataaagcttagatgtttgcgacgtggaaacat

SEQ ID NO: 480894 - DNA, 120 bp, Artificial Sequence
  ENSG00000161217_0 (sequence is synthesized)
cccgggcgtctccccgcaacctcctcaacttccctagtcagtgacgcggcgccggccagaaatccgaccggaccgggctcgggggagcgtgagttgcagcatgtgccgaagcgccacctc

SEQ ID NO: 480895 - DNA, 120 bp, Artificial Sequence
  ENSG00000161217_1 (sequence is synthesized)
agaagataaaaagaaatgagtctcatatttggcattcttttagttaaaagaagatggatgcacagtgttcagccaaggtcaatgcaaggaagaggagaaaagaggcgcccggacccaacg

SEQ ID NO: 480896 - DNA, 120 bp, Artificial Sequence
  ENSG00000161217_2 (sequence is synthesized)
gggcaacagaagaagatggggttccttccaaagtgcagcgctgtgcagtgggcttacggcaaccagctcctttttctgatgaaattgaagttgactttagtaagccctatgtcagggtaa

SEQ ID NO: 480897 - DNA, 120 bp, Artificial Sequence
  ENSG00000161217_3 (sequence is synthesized)
ctatggaagaagccagcagaggaactccttgtgagcgacctgtgagagtttatgccgatggaatatttgacttatttcactctggtcacgcccgagctctgatgcaagcgaagaaccttt

SEQ ID NO: 480898 - DNA, 120 bp, Artificial Sequence
  ENSG00000161217_4 (sequence is synthesized)
tccctaatacgtacctcattgtgggagtttgcagtgatgagctcacacacaacttcaaaggcttcacggtgatgaacgagaatgagcgctatgacgcagtccagcactgccgctacgtgg

SEQ ID NO: 480899 - DNA, 120 bp, Artificial Sequence
  ENSG00000161217_5 (sequence is synthesized)
atgaggtggtgaggaatgcgccctggacgctgacacccgagttcctggccgaacaccggattgattttgtagcccatgatgatattccttattcatctgctggcagtgatgatgtttata

SEQ ID NO: 480900 - DNA, 120 bp, Artificial Sequence
  ENSG00000161217_6 (sequence is synthesized)
agcacatcaaggaggcaggcatgtttgctccaacacagaggacagaaggtatctccacatcagacatcatcacccgaattgtgcgggattatgatgtgtatgcgaggcggaacctgcaga

SEQ ID NO: 480901 - DNA, 120 bp, Artificial Sequence
  ENSG00000161217_7 (sequence is synthesized)
ggggctacacagcaaaggagctcaatgtcagctttatcaacgagaagaaataccacttgcaggagagggttgacaaagtaaagaagaaagtgaaagatgtggaggaaaagtcaaaagaat

SEQ ID NO: 480902 - DNA, 120 bp, Artificial Sequence
  ENSG00000161217_8 (sequence is synthesized)
ttgttcagaaggtggaggaaaaaagcattgacctcattcagaagtgggaggagaagtcccgagaattcattggaagttttctggaaatgtttggtccggaaggagcactgaaacatatgc

SEQ ID NO: 480903 - DNA, 120 bp, Artificial Sequence
  ENSG00000161217_9 (sequence is synthesized)
tgaaagaggggaagggccggatgctgcaggccatcagcccgaagcagagccccagcagcagccctactcgcgagcgctccccctccccctctttccgatggcccttctccggcaagactt

SEQ ID NO: 480904 - DNA, 120 bp, Artificial Sequence
  ENSG00000161217_10 (sequence is synthesized)
ccccaccttgctccccagcaaatctctccaggcacaaggctgcagcctatgatatcagtgaggatgaagaagactaatgtttcctccctcctttcctgtcctccctttctgtcccattac

SEQ ID NO: 480905 - DNA, 120 bp, Artificial Sequence
  ENSG00000161217_11 (sequence is synthesized)
cttcagaagctctctgttgaattccaaattgtgaccccaacactaaacctaaggacagctacaaaggaaagacaactggggaaagaagacctaggactgggggaacccaaacagcctgtc

SEQ ID NO: 480906 - DNA, 120 bp, Artificial Sequence
  ENSG00000161217_12 (sequence is synthesized)
ctgcaagtgacatcactcacccacacgaaggagggggactgcaccttagaagcctgctctgcatccatttacccccccccaagggctttgtttcactgtttatgttcacgtgatctcaac

SEQ ID NO: 480907 - DNA, 120 bp, Artificial Sequence
  ENSG00000161217_13 (sequence is synthesized)
agggaaattgtcattttcattaattttttaaaaaattcgtctttcaaatgtagaactaattttttgcccctgaggagtgggcagaagaaggaggtagtgtaatacgcagaggccttttct

SEQ ID NO: 480908 - DNA, 120 bp, Artificial Sequence
  ENSG00000161217_14 (sequence is synthesized)
tcccggtatactatagcatttgccttccgttctgaagctatgtggcttgccaagtccttcacgaaatgagccacgctgatgggtaatttgtggagaaatatcttaattttgatttcctta

SEQ ID NO: 480909 - DNA, 120 bp, Artificial Sequence
  ENSG00000161217_15 (sequence is synthesized)
aggaaaagcgaaaagcagagttacagtcacaaatcccctgaacgtactgctgtcaccagtgtcattgtggctgcgggaaggagatctgaacctaacttttcttactccctgaggagtttc

SEQ ID NO: 480910 - DNA, 120 bp, Artificial Sequence
  ENSG00000161217_16 (sequence is synthesized)
ttgttggacccaatggggtccatgaagacactgatggggatggaagcagacccatggcatcaactgcagtgtttctgctgtgttcatcttctcagaaaactctgtgacccagttctttgg

SEQ ID NO: 480911 - DNA, 120 bp, Artificial Sequence
  ENSG00000161217_17 (sequence is synthesized)
gagcttttgtcagtctctttcgtgccatctaccttcgaaggaaggaacacttttagagttacaatgatgaggagaggagcgggacaatactcaatcctataccaagtcgattgagattag

SEQ ID NO: 480912 - DNA, 120 bp, Artificial Sequence
  ENSG00000161217_18 (sequence is synthesized)
tttcctactgggagtaagtgcctggccctgctactcctatttgaatgctattaatattacctagccttttacaaaggatactttgtaaatgtctgctgttggaacttgatgttaatccat

SEQ ID NO: 480913 - DNA, 120 bp, Artificial Sequence
  ENSG00000161217_19 (sequence is synthesized)
tttggtcatagccatattagagagatttgcacagaatgtaaaggcaaaagcataggaaacaccttcctttctaaagcaacagccttatcaccttgacctctgtccctcttcagaacattc

SEQ ID NO: 480914 - DNA, 120 bp, Artificial Sequence
  ENSG00000161217_20 (sequence is synthesized)
ttccctggaaccagtgctccacatctttcttttcctctgagagctgcagctggcagggacctccctctgctgctcctccagcaagccacagagcataccctcacgtgacaagagtgtggt

SEQ ID NO: 480915 - DNA, 120 bp, Artificial Sequence
  ENSG00000161217_21 (sequence is synthesized)
aggttttctccccacttttcacacacgcctggtggttgtggttccatctgccttgttggcttgcccggggggattcaacacttgactttcaaatcaaagaatgctaatgcttagcacttg

SEQ ID NO: 480916 - DNA, 120 bp, Artificial Sequence
  ENSG00000161217_22 (sequence is synthesized)
ctgttgagcatgctctaacttttaaagccctggcctcctgtctccttagctgcttagctacgcggcctagcagatcatcacccatcagtaatcctgtggctagatccaggggaaaattgc

SEQ ID NO: 480917 - DNA, 120 bp, Artificial Sequence
  ENSG00000161217_23 (sequence is synthesized)
ccacattttctctttccttgcctctgctaggactgtgagcatctcatagtccactccctaaacactttctggtaacacctagttttccgcctgagggtcagaggctagaatcattgcctg

SEQ ID NO: 480918 - DNA, 120 bp, Artificial Sequence
  ENSG00000161217_24 (sequence is synthesized)
agttttccgcctgagggtcagaggctagaatcattgcctgcacagcaggactaccttggttcttaaaacttggatcacccaggcaaggcgtggtggctcacgcctgtcatctcagcactt

SEQ ID NO: 480919 - DNA, 76 bp, Artificial Sequence
  ENSG00000161217_25 (sequence is synthesized)
gccgcaaaacaaaaaccacacacacatacagaaataaagagaaataatcaactagaaaaaaaacaaaacttggatc

SEQ ID NO: 480920 - DNA, 120 bp, Artificial Sequence
  ENSG00000161217_26 (sequence is synthesized)
aagagaaataatcaactagaaaaaaaacaaaacttggatcacccagaaagagcgtcacagaggcgagggagaatgaagcctcttgttatcctgatcgcctatgacaacgacatttctaac

SEQ ID NO: 480921 - DNA, 120 bp, Artificial Sequence
  ENSG00000161217_27 (sequence is synthesized)
tcttctttgaagcgcagttcttactcttaaatctggtcatacaagctttggcttggaatcctgtctgtctttgaaacagctgaagttagtgttttcctgtgttacccagtgttacatagt

SEQ ID NO: 480922 - DNA, 120 bp, Artificial Sequence
  ENSG00000161217_28 (sequence is synthesized)
ctcatctttgaacttttctgcgtcagccttctctctttgggaatgctgcctgtttctgtctaacttattctccctggtgtggtgtggcagtgaagtctgtgctgaagcccatctgcttgg

SEQ ID NO: 480923 - DNA, 120 bp, Artificial Sequence
  ENSG00000161217_29 (sequence is synthesized)
ttcctccaagtgcacattatgcaagtgtatttggatagacagggagatgcccggaacgtggttttcctcctccctccctattggagccatacctcctaaatatattgtctgggtcccaaa

SEQ ID NO: 480924 - DNA, 120 bp, Artificial Sequence
  ENSG00000161217_30 (sequence is synthesized)
tgtttgagccctcttcctctgctctcagtgggctgctcttggcatgccctgtgcttggaacgggacctgcaggctgacaggcctctgagactgctagggccagcaaacgtacatgttatt

SEQ ID NO: 480925 - DNA, 120 bp, Artificial Sequence
  ENSG00000161217_31 (sequence is synthesized)
gggaaactccctttccccttttggtgagcttctaccacctcagtctaatcgttttgactgaaagctatttgtctgactgaaagctaaaatcttttatagtgtggcctgttagatactttg

SEQ ID NO: 480926 - DNA, 120 bp, Artificial Sequence
  ENSG00000161217_32 (sequence is synthesized)
gggtaaatgtggtctgaggtgctggactagcacgggtagatggagaaagctgttgggaagttgcataatgtggtcatctgtgcctaattaaatgaggttagaggtgtgcacaccaccaca

SEQ ID NO: 480927 - DNA, 120 bp, Artificial Sequence
  ENSG00000161217_33 (sequence is synthesized)
atgcctgggatctaaatcttcagatattaacgtttgaggctatggagctgtttccctgaatcacacacgagaaagcagtcaacatgggtgggccaaatgtggccaagatgagagagccag

SEQ ID NO: 480928 - DNA, 120 bp, Artificial Sequence
  ENSG00000161217_34 (sequence is synthesized)
aagtgttggccttagagcagagcctctgtgtgtgagacattagaaggccagagccggggaggtgccggcgcagccactgccttccggtgggccggacggaaagcttggtcttatgctaga

SEQ ID NO: 480929 - DNA, 120 bp, Artificial Sequence
  ENSG00000161217_35 (sequence is synthesized)
ttcagaagcactgaagaatggaggttgacactttagaggactaggaagggatcatttgtgctcttgcagctattgctgatagctagagccaaagaccattatattgctgaggcttgggta

SEQ ID NO: 480930 - DNA, 120 bp, Artificial Sequence
  ENSG00000161217_36 (sequence is synthesized)
agaaagttagggatgtgaggaggttgaaaatcctgaagaagagaaaaaatatgagggaggctaaggaaacttagccactttctgatcactgatgactccttaggctgcacctgagtgatg

SEQ ID NO: 480931 - DNA, 120 bp, Artificial Sequence
  ENSG00000161217_37 (sequence is synthesized)
gtggtgtttttggaggctgtacctgagtgatggtggtttttggggggctgcacctgagcgatagtgatttttttttggaggctgcacagctggtcagaccatctctagatgttctttcca

SEQ ID NO: 480932 - DNA, 120 bp, Artificial Sequence
  ENSG00000161217_38 (sequence is synthesized)
cagtggttcatagggcgtcattcccccttcctggattattttgactatgggtagcttattttcaagagctctttgcctttttaatcctgttccagatcacttatccaaaatctttccaaa

SEQ ID NO: 480933 - DNA, 120 bp, Artificial Sequence
  ENSG00000161217_39 (sequence is synthesized)
tcaattatattttgctgcttttctttaattccctaaaagccatagcttctagattttctatcagcacacattctcaccagaagttgaaccaatacaggtagaaaaagaaagcccccttaa

SEQ ID NO: 480934 - DNA, 120 bp, Artificial Sequence
  ENSG00000161217_40 (sequence is synthesized)
tgtttttaactgatgatatttttttaagcttaccaatataagtatttttaaaggttctatttttcaaagtcataacaatgattgttcttgttttctctcatagaatagactgccatcgga

SEQ ID NO: 480935 - DNA, 120 bp, Artificial Sequence
  ENSG00000161217_41 (sequence is synthesized)
taaagagtggtccctagcttctatttttccaagtaaataagtagaacatgttcttgggattataccattaaatgttaattttcttgaagaagaaagattgttgtctgccaagattttatg

SEQ ID NO: 480936 - DNA, 120 bp, Artificial Sequence
  ENSG00000161217_42 (sequence is synthesized)
ttagcgctcggattgaggcagaaaacggaagcaccaggtttaacactgggatgacttgggttgtgttcctggaggtttgaagtgggccttcccgccttttgagggggaaaactgactgtt

SEQ ID NO: 480937 - DNA, 120 bp, Artificial Sequence
  ENSG00000161217_43 (sequence is synthesized)
ttgaacacatatcctggattagttgggttgttttgtattgaggatccctaaaagacaaaagagtcttggaaaggactgctggcttcgtcttgaacgttcgccccatcaccagtgtgagtc

SEQ ID NO: 480938 - DNA, 120 bp, Artificial Sequence
  ENSG00000161217_44 (sequence is synthesized)
cgtggggaagtcttcctcaagtggggttcagtctgtaattttcctgtctgttcttagtttgttctgagttattttggattttgttctttagccaaataaaggcagtgtggttttacctga

SEQ ID NO: 480939 - DNA, 120 bp, Artificial Sequence
  ENSG00000161217_45 (sequence is synthesized)
atcagctgccttccccgggcgtctccccgcaacctcctcaacttccctagtcagtgacgcggcgccggccagaaatccgaccggaccgggctcgggggagcgtgagttgcagttaaaaga

SEQ ID NO: 480940 - DNA, 120 bp, Artificial Sequence
  ENSG00000161217_46 (sequence is synthesized)
atgatatcaggtatagttacctggaacagagcaaatttggctcccatgttctgctcacccaggtgtagcctggcttgacgggaaatgatgcccagggtccagagagccagcagtgtggac

SEQ ID NO: 480941 - DNA, 120 bp, Artificial Sequence
  ENSG00000161217_47 (sequence is synthesized)
acgccaaggaaagtgttgatccatagagctgtgctcccctcagaaatctggtggcaacagaaagtagtcagtgaggcaggcaagctctctctctctctctctctctttcaagagatggtg

SEQ ID NO: 480942 - DNA, 120 bp, Artificial Sequence
  ENSG00000161217_48 (sequence is synthesized)
gcggccgcgaggggactccgacccagagcagtgacttcgaggggctgacttggagaagaggatggcatccgtgatgggcgatggcgctttaaaagaagatggatgcacagtgttcagcca

SEQ ID NO: 480943 - DNA, 120 bp, Artificial Sequence
  ENSG00000161217_49 (sequence is synthesized)
tacacagcaaaggagctcaatgtcagctttatcaacgctatgagccctcctcgtgtggatagtgacacccgacacaccacttcccacacagacctgagttttaaatttggattgacgaaa

SEQ ID NO: 480944 - DNA, 120 bp, Artificial Sequence
  ENSG00000161217_50 (sequence is synthesized)
gatgttcagccatgttgctgctttacagaggaaaatgtgtacattagaaattcaacatcctctttcaggccacattttggataaaaggtaaagatgagcatagcacccatcaattctttg

SEQ ID NO: 480945 - DNA, 120 bp, Artificial Sequence
  ENSG00000161217_51 (sequence is synthesized)
attgcctttgtgtgcaggaagccggaagcacgaccactctttaccctcggcctcattacaagaccaagacctctgcctcggcgcggcagctctcacctggaatcccagcactttgggagg

SEQ ID NO: 480946 - DNA, 120 bp, Artificial Sequence
  ENSG00000161217_52 (sequence is synthesized)
tcacctcccactccatctcagctgaactggctttgcagttggctttgatgatcactcccaaaagttcagtgaatgaattaccactatgttaactgttcacaaaaagaatgaaacagacag

SEQ ID NO: 480947 - DNA, 120 bp, Artificial Sequence
  ENSG00000161217_53 (sequence is synthesized)
tttctgccgttacggtctggtaccaacacattcgtataaagccatacagccaactaaataaatgagtaatttatatagtgcagtatttctgtcaataaatggaaaacggtgtctcttaaa

SEQ ID NO: 480948 - DNA, 120 bp, Artificial Sequence
  ENSG00000161217_54 (sequence is synthesized)
agtgacgcggcgccggccagaaatccgaccggaccgggctcgggggagcgtgagttgcaggtgtgtgcctatctttgcgtctctgtttgagaggacaaactgtggggctgggaccgcgag

SEQ ID NO: 480949 - DNA, 120 bp, Artificial Sequence
  ENSG00000161217_55 (sequence is synthesized)
gtgggaggtaagaaaacatttggtgacttcaggtgctgtgcagaaaaagatgatagtacagtctgtctttctcagctgagtacactggctcttgtttccatttttaaatgaaggatgtag

SEQ ID NO: 480950 - DNA, 120 bp, Artificial Sequence
  ENSG00000161217_56 (sequence is synthesized)
ctgagtttctgtggtcacaggagcagccgtgacttccgttgtccactttaaaacatttgctttagatttcagtttatcattttgaattaactggagtacaaaagtctgccaaggaaatgt

SEQ ID NO: 480951 - DNA, 120 bp, Artificial Sequence
  ENSG00000161217_57 (sequence is synthesized)
taggtggtccagtccagtgtgaataaaacaggaaaacatgtttaaggacttaattgatgcagacacgcacagcaggtttatttcagagtcaaagatcttggtcacctgttgtactgtccc

SEQ ID NO: 480952 - DNA, 120 bp, Artificial Sequence
  ENSG00000161217_58 (sequence is synthesized)
ttctccaaagtatgaacatactgtttagtgagtgttgctcctgaaggtatacgctgcattaggaaaagcgttatcacccaggttcaaccacctttagaagacttttttccagttggggaa

SEQ ID NO: 480953 - DNA, 120 bp, Artificial Sequence
  ENSG00000161217_59 (sequence is synthesized)
gatggttgcagtcctaagcagtgggagaagatgggagaggtcggtggctgaggaggtgctaagcaaagaggactccaacacacaatttatgatgtggtgaaccagtttgcagtgatgagc

SEQ ID NO: 480954 - DNA, 120 bp, Artificial Sequence
  ENSG00000161217_60 (sequence is synthesized)
acatccgtatcccacttcaaggagacgtcttcgctgcatcctccggttccgggtggaggctgaccctgggccattccgtctccggtctctggtatttctgctgggtcacttcatcccggg

SEQ ID NO: 480955 - DNA, 120 bp, Artificial Sequence
  ENSG00000161217_61 (sequence is synthesized)
tttatttggctacgtgcctgttactgggtatagcctatatttttagtttattcccaaatgcccacaatattagaattaccacttcttgtgtgtgcatccacagcatatcttatctgttat

SEQ ID NO: 480956 - DNA, 120 bp, Artificial Sequence
  ENSG00000161217_62 (sequence is synthesized)
tatgctgagagtggggtagattaaagcaaagcaaaattctagactgaaaacagtgtcaattgagtgcttgagccatgttttttcgttctcttatggtagagaagtttaggatgagcatta

SEQ ID NO: 480957 - DNA, 80 bp, Artificial Sequence
  ENSG00000161243_0 (sequence is synthesized)
cacagctagggcatcccggcgaggagcgccgccaggccccgggccacagccgggcctggcggggggaccatgggcgcctc

SEQ ID NO: 480958 - DNA, 120 bp, Artificial Sequence
  ENSG00000161243_1 (sequence is synthesized)
ggagccggaacccgaagaggcgctggacctgagccaactacccccagagctgcttctggtggtgctgagccacgtccccccgcgcacgctgctcgggcgctgccgccaagtgtgccgggg

SEQ ID NO: 480959 - DNA, 120 bp, Artificial Sequence
  ENSG00000161243_2 (sequence is synthesized)
ctggcgagccctggtggacggccaggccctgtggctgctgatcctggcccgcgaccacggcgccaccggccgcgcgctgctgcacctcgcccgcagctgccagtctcccgcccgtaacgc

SEQ ID NO: 480960 - DNA, 120 bp, Artificial Sequence
  ENSG00000161243_3 (sequence is synthesized)
caggccttgccccctgggccgcttctgcgcgcgcagacccatcggacgcaaccttattcgcaacccctgcggccaagaaggcctccgaaagtggatggtgcaacacggtggggacggctg

SEQ ID NO: 480961 - DNA, 120 bp, Artificial Sequence
  ENSG00000161243_4 (sequence is synthesized)
ggtggtggaggaaaacaggacaaccgtgcctggggccccttctcagacgtgcttcgtgacttcattcagctggtgttgcaagaagcaggtcttggacctagaggaggagggtctgtggcc

SEQ ID NO: 480962 - DNA, 120 bp, Artificial Sequence
  ENSG00000161243_5 (sequence is synthesized)
agaactgctggatagtggcaggattgagatttgtgtctctgactggtggggagcccgacacgacagcggctgtatgtacagactcctcgtccaacttctagacgccaaccagactgttct

SEQ ID NO: 480963 - DNA, 120 bp, Artificial Sequence
  ENSG00000161243_6 (sequence is synthesized)
agataaattctctgctgtgcctgatcccatcccgcagtggaacaacaatgcctgccttcacgtcacccacgtgttctccaacatcaagatgggcgtccgctttgtgtctttcgaacaccg

SEQ ID NO: 480964 - DNA, 120 bp, Artificial Sequence
  ENSG00000161243_7 (sequence is synthesized)
gggccaggacacacagttctgggctggccactatggagcccgtgtgaccaactccagtgtgatcgtgcgagtccgtctgtcctagtccagcactacccttcttgcaagacagcctgactg

SEQ ID NO: 480965 - DNA, 120 bp, Artificial Sequence
  ENSG00000161243_8 (sequence is synthesized)
tgccttccagggcctgggaccattggctgggacccctcattaaccaaccaagcacttgtacctccctggcatactgagaattcctgggtccaatcaaaggccctgacgggccctgtcttc

SEQ ID NO: 480966 - DNA, 120 bp, Artificial Sequence
  ENSG00000161243_9 (sequence is synthesized)
cttatctacctactgcagctgctgctttgcgggggggccctactgtactgaggggaaacccacaagtgagcatgggggaatgcccatcctggagaagaattcttgccctcccctctcttc

SEQ ID NO: 480967 - DNA, 120 bp, Artificial Sequence
  ENSG00000161243_10 (sequence is synthesized)
tcctcccaaccaaaaccctccgatccagccccaggcccctctgtaccatcccctcccctccgcaccactgacctcttgtctcctgttgtttctgccacagggacttccttggtcccttca

SEQ ID NO: 480968 - DNA, 120 bp, Artificial Sequence
  ENSG00000161243_11 (sequence is synthesized)
gggaagccctcaactcatctctgaacttagaatctcatccttagggctcagagagtcccagccctaagggtgtgaacctcacctcctggggcttccgagctacagggctgggaccaggtc

SEQ ID NO: 480969 - DNA, 72 bp, Artificial Sequence
  ENSG00000161243_12 (sequence is synthesized)
acctcctggggcttccgagctacagggctgggaccaggtcatgcagctgaaagtctacgttaaaaaaaaaaa

SEQ ID NO: 480970 - DNA, 120 bp, Artificial Sequence
  ENSG00000161243_13 (sequence is synthesized)
ctttgggaggccaaggtgggaggatcagttgagccccagagttcaagaccagcctgggcaatgtagtaagacccccatcgctacaaaaaatacaaaagttagccaggtacagtagtacac

SEQ ID NO: 480971 - DNA, 89 bp, Artificial Sequence
  ENSG00000161243_14 (sequence is synthesized)
agacccccatcgctacaaaaaatacaaaagttagccaggtacagtagtacacacctgtagtccatttgtgcccaggttgaggctatagt

SEQ ID NO: 480972 - DNA, 120 bp, Artificial Sequence
  ENSG00000161243_15 (sequence is synthesized)
agcgagaccctgtctcaaaaaaaaaaaagaatttggagatggttctgcccactctggtttctctgaaaaaacgaggtaattccctgagcccaaccctgatcctcaaggacctgtaattgt

SEQ ID NO: 480973 - DNA, 120 bp, Artificial Sequence
  ENSG00000161243_16 (sequence is synthesized)
gtggtatttaaaattaaaataacattatttttattttgactttttttcaaacagtaagaataatatatcagcagcatgtatctgccaatcatatgtaataaatttcttattttgccaaaa

SEQ ID NO: 480974 - DNA, 120 bp, Artificial Sequence
  ENSG00000161243_17 (sequence is synthesized)
actaacgaattagggacacttcaaggggccggctggaggggacggctgtgagcagcaggccttggctcctggctgcacctggccccgtcgcgggaagcagccacagccgggcctggcggg

SEQ ID NO: 480975 - DNA, 120 bp, Artificial Sequence
  ENSG00000161243_18 (sequence is synthesized)
ccaacttctagacgccaaccagactgttctagataaattctctgctgtgcctgatcccatcccgcagtggaacaacaatgcctgccttcacagacacagtttcactatgttgcctgggct

SEQ ID NO: 480976 - DNA, 120 bp, Artificial Sequence
  ENSG00000161243_19 (sequence is synthesized)
gattacaggcacaagccactgcatccagcccgtgcgtgtttttgagtgcaccaattccagctctaagattgacgagatggaatcttactctctcacccaggctggagtgcaatggcacaa

SEQ ID NO: 480977 - DNA, 120 bp, Artificial Sequence
  ENSG00000161243_20 (sequence is synthesized)
gggaggggctaggggcggggtctcactaggaaccaacaggcgggcgactggaacttgggcacaagccttttttatttcacagaaggcctccgaaagtggatggtgcaacacggtggggac

SEQ ID NO: 480978 - DNA, 120 bp, Artificial Sequence
  ENSG00000161249_0 (sequence is synthesized)
ccgaataccctcggccacacctggccttctccatgctcggaataacttcctgcagcgaccaacaggctaaagagggggaaggtctggagggatccagcaccggctcctcctccggcaacc

SEQ ID NO: 480979 - DNA, 120 bp, Artificial Sequence
  ENSG00000161249_1 (sequence is synthesized)
acggtgggagcggcggaggaaatggacataaacccgggtgtgaaaagccagggaatgaagcccgcgggagcggggaatctgggattcagaactctgagacgtctcctgggatgtttaact

SEQ ID NO: 480980 - DNA, 120 bp, Artificial Sequence
  ENSG00000161249_2 (sequence is synthesized)
ttgacactttctggaagaattttaaatccaagctgggtttcatcaactgggatgccataaacaaggatttcaaacagaacactcctttcctcaactggaaagcaattattgagggtgcgg

SEQ ID NO: 480981 - DNA, 120 bp, Artificial Sequence
  ENSG00000161249_3 (sequence is synthesized)
gcatgcgtatcccactgcctatggtgggaagtactcagtcaagacccctgcaaaggggggagtctcaccttcttcctcggcttcccgggtgcaacctggcctgctgcagtgggtgaagtt

SEQ ID NO: 480982 - DNA, 120 bp, Artificial Sequence
  ENSG00000161249_4 (sequence is synthesized)
ttggtaggcaatttcttgcaaccaccaccgaggccccgaaaagcactggtcgtcagggagctcctccccttggcccccagcctgtgccagccctggcccggctgccacacctctgtttcc

SEQ ID NO: 480983 - DNA, 120 bp, Artificial Sequence
  ENSG00000161249_5 (sequence is synthesized)
taggctggggacccagcttgtctctccttgtttcttcccactgcactgtggtgcttcagtggccaccagcctcgtcacatacaccagcatctttctgtacctcctccctttggtgacctg

SEQ ID NO: 480984 - DNA, 120 bp, Artificial Sequence
  ENSG00000161249_6 (sequence is synthesized)
atgaagttccaggggcccctggcctgcctcctgctggccctctgcctgggcagtggggaggctggccccctgcagagcggagaggaaagcactgggacaaatattggggaggcccttgga

SEQ ID NO: 480985 - DNA, 120 bp, Artificial Sequence
  ENSG00000161249_7 (sequence is synthesized)
catggcctgggagacgccctgagcgaaggggtgggaaaggccattggcaaagaggccggaggggcagctggctctaaagtcagtgaggcccttggccaagggaccagagaagcagttggc

SEQ ID NO: 480986 - DNA, 120 bp, Artificial Sequence
  ENSG00000161249_8 (sequence is synthesized)
actggagtcaggcaggttccaggctttggcgtagcagatgctttgggcaacagggtcggggaagcagcccatgctctgggaaacactgggcacgagattggcagacaggcagaagatgtc

SEQ ID NO: 480987 - DNA, 120 bp, Artificial Sequence
  ENSG00000161249_9 (sequence is synthesized)
attcgacacggagcagatgctgtccgcggctcctggcagggggtgcctggccacaatggtgcttgggaaacttctggaggccatggcatctttggctctcaaggtggccttggaggccag

SEQ ID NO: 480988 - DNA, 120 bp, Artificial Sequence
  ENSG00000161249_10 (sequence is synthesized)
cgtgggtccacggataccccggaaactcagcaggcagctttggaatgaatcctcagggagctccctggggtcaaggaggcaatggagggccaccaaactttgggaccaacactcagggag

SEQ ID NO: 480989 - DNA, 120 bp, Artificial Sequence
  ENSG00000161249_11 (sequence is synthesized)
ctgtggcccagcctggctatggttcagtgagagccagcaaccagaatgaagggtgcacgaatcccccaccatctggctcaggtggaggctccagcaactctgggggaggcagcggctcac

SEQ ID NO: 480990 - DNA, 120 bp, Artificial Sequence
  ENSG00000161249_12 (sequence is synthesized)
agtcgggcagcagtggcagtggcagcaatggtgacaacaacaatggcagcagcagtggtggcagcagcagtggcagcagcagtggcggcagcagtggcggcagcagtggtggcagcagtg

SEQ ID NO: 480991 - DNA, 120 bp, Artificial Sequence
  ENSG00000161249_13 (sequence is synthesized)
ctgagacgtctcctgggatgtttaactttgacactttctggaagaattttaaatccaagctgggtttcatcaactgggatgccataaacaaggaccagagaagctctcgcatcccgtgac

SEQ ID NO: 480992 - DNA, 120 bp, Artificial Sequence
  ENSG00000161249_14 (sequence is synthesized)
agagggggaaggtctggaggttggaaagaggactggaatctgattggggttccaacaaatctgtaacaccgctgggaacgactgggtcccctttaggtcctttaggacagcgtttgaaat

SEQ ID NO: 480993 - DNA, 120 bp, Artificial Sequence
  ENSG00000161249_15 (sequence is synthesized)
attgcgtagttccgaataccctcggccacacctggccttctccatgctcggaataacttcctgcagcgaccaacaggctaaagagggggaagggatccagcaccggctcctcctccggca

SEQ ID NO: 480994 - DNA, 120 bp, Artificial Sequence
  ENSG00000161249_16 (sequence is synthesized)
aatggacataaacccgggaactctgagacgtctcctgggatgtttaactttgacactttctggaagaattttaaatccaagctgggtttcatcaactgggatgccataaacaagaaccag

SEQ ID NO: 480995 - DNA, 120 bp, Artificial Sequence
  ENSG00000161249_17 (sequence is synthesized)
cactgcagaaacgtgcaggcagagacgatcaggtgagtctctgtcctcaagttaccctgcagggcccttggtcccccttggccttgctcccgggtctgggcaatctgaaattctctttca

SEQ ID NO: 480996 - DNA, 120 bp, Artificial Sequence
  ENSG00000161249_18 (sequence is synthesized)
ctcctccattcaatggctttctcagccgggtgcaggatggcaggaggtggcagctgtaacttccaaggtgagacatctaccatggacccgctgggttacgtcctggcacttcttttcttg

SEQ ID NO: 480997 - DNA, 120 bp, Artificial Sequence
  ENSG00000161249_19 (sequence is synthesized)
gtctcctaccctcacctcccaagtaacacttgaagagttggcagaggtcttgagggcaggaggaggagtaggaggaggaggcggcggccatttgggctaggacagtaaaggcaggtgagg

SEQ ID NO: 480998 - DNA, 120 bp, Artificial Sequence
  ENSG00000161249_20 (sequence is synthesized)
gtgggggccctggctggctggaggagattgtataaaagaaaacacgtgacacaaggaggggagcaggcaggtgttttaggaaaggtctggtccaggcaggaaggtgggatgtttattcca

SEQ ID NO: 480999 - DNA, 120 bp, Artificial Sequence
  ENSG00000161249_21 (sequence is synthesized)
gctggtgagaggagggacatgcagcttctactgcctgtggcttccactctgctgagttatctgtggcttccactctgccgggttatctgtggtcagtgtctccctacctggcaggccaaa

SEQ ID NO: 481000 - DNA, 120 bp, Artificial Sequence
  ENSG00000161249_22 (sequence is synthesized)
gcgaggcctatgctcttttgacccccttggtcagtacgtgcccaggaaccatgttcaatatcatcttggatcaagtgcactcaggatgataaacgtgctgtgaaaccaactccacagcct

SEQ ID NO: 481001 - DNA, 120 bp, Artificial Sequence
  ENSG00000161249_23 (sequence is synthesized)
gaatgtccacagtcagactggaaaaccttggtgatagccctggtgtgagcctgcccttgctgctgggcccttcatgagcgtggaggccatggcagagtacagggaggccatgaccccaca

SEQ ID NO: 481002 - DNA, 120 bp, Artificial Sequence
  ENSG00000161249_24 (sequence is synthesized)
ggtgagtatgggggcctgatcttcatctggctggagagagaaggggcctgaggccagagggtatggaagggaccctgtggtggccactcagactttctctttttctggcaggcttcccgg

SEQ ID NO: 481003 - DNA, 120 bp, Artificial Sequence
  ENSG00000161249_25 (sequence is synthesized)
gcgggagcggggaatctgggattcaggcaagtcagctaacctctccgagcctgagcttcctccagtaaaatgaggacagtgaaacctgactcacgcagccttcagttactgtacagcttt

SEQ ID NO: 481004 - DNA, 120 bp, Artificial Sequence
  ENSG00000161249_26 (sequence is synthesized)
caaccagcatgcgtatcccactgcctatggtgggaagtactcagtcaagacccctgcaaaggtgagaccggcaaccaccctgtcttcccgctgggggctctgcatgagggatggggagag

SEQ ID NO: 481005 - DNA, 120 bp, Artificial Sequence
  ENSG00000161249_27 (sequence is synthesized)
gccggccactgcctctgctctgctcctgctcctgctgggcctggcctggacccaggggagccacggctgggtgggtaccgcagggtgcacagggtgcggacgcgtcatcactgcagaaac

SEQ ID NO: 481006 - DNA, 120 bp, Artificial Sequence
  ENSG00000161249_28 (sequence is synthesized)
acatgagggaaataagcaaagagggcaatcgcctccttggaggctctggagacaattatagggggcaagggtcgagctggggcagtggaggaggtgacgctgttggtggagtcaatactg

SEQ ID NO: 481007 - DNA, 120 bp, Artificial Sequence
  ENSG00000161249_29 (sequence is synthesized)
cgcgggaaggaaaaggagagcagctggtttcactcgcaggatcggggagccaaggctccgcggagatggggctggatggccgcggaggtggagcggaagcggctcgccccagggttaaaa

SEQ ID NO: 481008 - DNA, 120 bp, Artificial Sequence
  ENSG00000161249_30 (sequence is synthesized)
tgctgccattttggggctgggactggtctgggaggggactgagggaaagtctcccctttctctccccggcagtgtgaaaagccagggaatgaagcccgcgggagcggggaatctgggatt

SEQ ID NO: 481009 - DNA, 120 bp, Artificial Sequence
  ENSG00000161249_31 (sequence is synthesized)
gtactcagtcaagacccctgcaaaggcttcccgggtgcaacctggcctgctgcagtgggtgaagttttggtaggcaatttcttgcaaccaccaccgaggccccgaaaagcactggtcgtc

SEQ ID NO: 481010 - DNA, 120 bp, Artificial Sequence
  ENSG00000161249_32 (sequence is synthesized)
gagaagcccaggcagttgaggacaggagagagaaggctgcagacccagagggagggaggacagggagtcggaaggaggaggacagaggagggcacagagacgcagagcaagggcggcaag

SEQ ID NO: 481011 - DNA, 120 bp, Artificial Sequence
  ENSG00000161249_33 (sequence is synthesized)
ttaaaatgcctcttgtaaataccttagtattttggggagtttctgggaattctgtcggacaggactgctttatttatggtagctttagagtatgttactatctacctcttatcttcactt

SEQ ID NO: 481012 - DNA, 120 bp, Artificial Sequence
  ENSG00000161249_34 (sequence is synthesized)
accatttatcttttccagtgttttcttacctattcttaaactttcattctcctaaaaaaatgtcagtgtttggaccagttccaaaagagagtgccattaggattcttagaggaatcatat

SEQ ID NO: 481013 - DNA, 120 bp, Artificial Sequence
  ENSG00000161249_35 (sequence is synthesized)
taaatcaatacattaattttcgggggtggcctcaggatcttcagcaggggtctgtgtttctttgtctcaccctgcagggcttcagaggacagggagtttccagcaacatgagggtaagag

SEQ ID NO: 481014 - DNA, 120 bp, Artificial Sequence
  ENSG00000161249_36 (sequence is synthesized)
gatggtagatgtggggtcagagactgtgccggtagtaagtggggtagaggtctgttctccaggagcaatactggcagacaggtggtcccacatccctgccaggtctacctgagagctctg

SEQ ID NO: 481015 - DNA, 120 bp, Artificial Sequence
  ENSG00000161249_37 (sequence is synthesized)
ggaacgaggaagtactgatgggtctggccatgtttcacagcagataaagcaggactccagaggagcccacctctcccttaagaggggaccagccagtctactctatgccgcctcagcccc

SEQ ID NO: 481016 - DNA, 120 bp, Artificial Sequence
  ENSG00000161249_38 (sequence is synthesized)
cactggctctccagctagcatctcctttttttactaatgccaatcagcccagacagggtccttcagtttgaatcaatttagtgtaacagcctggcccactccagctccaaagccagggga

SEQ ID NO: 481017 - DNA, 120 bp, Artificial Sequence
  ENSG00000161249_39 (sequence is synthesized)
gaattcggatgctttgctggcaaagccctccctgatggattttgggcggcttgcagaaatgaacataaacagagatggcgatgttatctatggacatcgtaagtgagcagccacccgacc

SEQ ID NO: 481018 - DNA, 120 bp, Artificial Sequence
  ENSG00000161249_40 (sequence is synthesized)
cacaggagcttgaaacgagatctcagggcagatggaacttccccgagagaaggacctctttctcaggcctctgggaagtcctctgtcatgctcatgtctcagtcccccgattcaggaatc

SEQ ID NO: 481019 - DNA, 120 bp, Artificial Sequence
  ENSG00000161249_41 (sequence is synthesized)
cctcgccgacaccctgcttccttgccctctcgtccccctgcccgcctgcctccccatcaactcctctccgttttctgtctccctaggaaataagcaaagagggcaatcgcctccttggag

SEQ ID NO: 481020 - DNA, 120 bp, Artificial Sequence
  ENSG00000161249_42 (sequence is synthesized)
gctctggagacaattatagggtgagcctaggggcaggcagggttggctttaggagaagggatggtgaagcatgctaagatcctgggaaaagaaacaaaaatatcagtttcttcttgcaag

SEQ ID NO: 481021 - DNA, 120 bp, Artificial Sequence
  ENSG00000161249_43 (sequence is synthesized)
ctgctctgaatctgcgtccagtgaccatcaagagaccaaaacagggttctgggatccccatctccatctttggttcattcattccttccttccttttgatttggatcggagccatgttac

SEQ ID NO: 481022 - DNA, 120 bp, Artificial Sequence
  ENSG00000161249_44 (sequence is synthesized)
tttccatacttagggaggcagtgttgagaaggagaaagtcactgagctttgaggtagaagatgaggtttcgaaagccagctctggccaggcaccagcataactgtaatcccagcactttg

SEQ ID NO: 481023 - DNA, 120 bp, Artificial Sequence
  ENSG00000161249_45 (sequence is synthesized)
ggaggctgaggtgtggggatcatttgagcccagaagtttgagaccagcctgagcaacgtaggaagaccctgtctctactttttaaaaagaaaataataggccatgtgcagtggctcacac

SEQ ID NO: 481024 - DNA, 76 bp, Artificial Sequence
  ENSG00000161249_46 (sequence is synthesized)
gatgcccagcctcaaaaaaatttaagatatatattaaaatcaccaccagctctatcatgtcatctgtatatcttca

SEQ ID NO: 481025 - DNA, 120 bp, Artificial Sequence
  ENSG00000161249_47 (sequence is synthesized)
catttgcttgaggtgttttggggacagaccaggatggaggcaagagtctgaatattgagattcaggggactgggtggggttccatgggagcaatccattctaagaaagctttcccaagtg

SEQ ID NO: 481026 - DNA, 120 bp, Artificial Sequence
  ENSG00000161249_48 (sequence is synthesized)
aactttttggtgctgtgtaaggaagagaaggcagctttatagagaggaggacaggaagcctggaccgaggtggggatgaagcaatccggggcaggttgacaggtggcaggcatgatagga

SEQ ID NO: 481027 - DNA, 120 bp, Artificial Sequence
  ENSG00000161249_49 (sequence is synthesized)
agcataagccttggacatcggtcccccttttccccacccaggggcaagggtcgagctggggcagtggaggaggtgacgctgttggtggagtcaatactgtggtgagtggaggcaacactc

SEQ ID NO: 481028 - DNA, 120 bp, Artificial Sequence
  ENSG00000161249_50 (sequence is synthesized)
caccttgggctgggaccatggtgtcacacaatcctcgcctcccctcctgccactcagatctcccgactctggctcacaaagtgggttcttctctcatcccatatctccttggttccatag

SEQ ID NO: 481029 - DNA, 120 bp, Artificial Sequence
  ENSG00000161249_51 (sequence is synthesized)
atgctaacgatttccaaagtactaattaattgcaaatcttgctgtgatatacctcaccttataccacagatggggctgggagaaattccatgtaaaccggtccttttagaagcacaattg

SEQ ID NO: 481030 - DNA, 120 bp, Artificial Sequence
  ENSG00000161249_52 (sequence is synthesized)
tcttaaatgtcctctatccagccggggaacagactgtggtgaactctgggggattcagagtgctttggaaaaacattccccccagttatgctggaaatgtgggctttatgtcagcacctg

SEQ ID NO: 481031 - DNA, 120 bp, Artificial Sequence
  ENSG00000161249_53 (sequence is synthesized)
aggtgagtgtcagagtgagccgacccaggccacatcctggcagtggaggcacagtcacccggggcagggccaggatcttggtatatcctcagatctcagtgggcagcgacatgaagtcag

SEQ ID NO: 481032 - DNA, 120 bp, Artificial Sequence
  ENSG00000161249_54 (sequence is synthesized)
cccggcctgcggtgggcagcagctcagggatccagcaccggctcctcctccggcaaccacggtgggagcggcggaggaaatggacataaacccgggatctcccgactctggctcacaaag

SEQ ID NO: 481033 - DNA, 120 bp, Artificial Sequence
  ENSG00000161249_55 (sequence is synthesized)
acaagcacatgaacatgaagccggccactgcctctgctctgctcctgctcctgctgggcctggcctggacccaggggagccacggctggggtgcggacgcgtcatcactgcagaaacgtg

SEQ ID NO: 481034 - DNA, 120 bp, Artificial Sequence
  ENSG00000161249_56 (sequence is synthesized)
acactcctttcctcaactggaaagcaattattgagggtgcggacgcgtcatcactgcagaaacgtgcaggcagagacgatcagccgggtgcaggatggcaggaggtggcagctgtaactt

SEQ ID NO: 481035 - DNA, 120 bp, Artificial Sequence
  ENSG00000161249_57 (sequence is synthesized)
gaaagcaagcaagagagaaagaagaaagaaaatgacctaggaccctcggaaagcaccttagggtgggaccacataggcacagctctgagaagatggtgttctagatggagcacagggacc

SEQ ID NO: 481036 - DNA, 120 bp, Artificial Sequence
  ENSG00000161249_58 (sequence is synthesized)
gggatagagatgttacaggggaactgtggagaaaagagcctcctggtggaagggttcagaggtgggacgcagcgaggctgcatgggcgagaggtgatagcttggctcggcagaaccacaa

SEQ ID NO: 481037 - DNA, 120 bp, Artificial Sequence
  ENSG00000161249_59 (sequence is synthesized)
acataaacccgggaattttaaatccaagctgggtttcatcaactgggatgccataaacaagggtgcggacgcgtcatcactgcagaaacgtgcaggcagagacgatcagaactacaatta

SEQ ID NO: 481038 - DNA, 88 bp, Artificial Sequence
  ENSG00000161249_60 (sequence is synthesized)
acttgagtctgggagtttgagaccagagaacaaaacaaaacaaaccaaaacaaaacaaaccattccagcctgggaaacatggcaaaac

SEQ ID NO: 481039 - DNA, 83 bp, Artificial Sequence
  ENSG00000161249_61 (sequence is synthesized)
caagaccccatctctaaaagaacaaaacaaaacaaaccaaaacaaaacaaaccattccagcctgggaaacatggcaaaacccc

SEQ ID NO: 481040 - DNA, 120 bp, Artificial Sequence
  ENSG00000161265_0 (sequence is synthesized)
aagcaacggaagtgacgtaagagcagccagacctggagggcttgggtaaaaatggctgaatatttagcttcgatattcgggactgagaaggacaaggttaactgctctttttactttaag

SEQ ID NO: 481041 - DNA, 120 bp, Artificial Sequence
  ENSG00000161265_1 (sequence is synthesized)
atcggggtctgccggcacggggaccggtgctcccggcttcacaacaagccgacattcagccagaccatagtgctgctcaacctgtaccggaatccacagaacacagcccaaactgcagac

SEQ ID NO: 481042 - DNA, 120 bp, Artificial Sequence
  ENSG00000161265_2 (sequence is synthesized)
ggatcacactgtcatgtgagtgacgtggaggtgcaggagcactatgatagcttcttcgaggaggtgttcacagaactgcaggagaagtatggggagattgaagagatgaatgtgtgcgac

SEQ ID NO: 481043 - DNA, 120 bp, Artificial Sequence
  ENSG00000161265_3 (sequence is synthesized)
gggccgtggctgaactcagtaaccgctggttcaacgggcaggctgtgcacggtgagctgtctcctgtcactgacttccgggagtcatgctgtcgccagtatgagatgggggaatgtaccc

SEQ ID NO: 481044 - DNA, 120 bp, Artificial Sequence
  ENSG00000161265_4 (sequence is synthesized)
gaggtggcttctgcaacttcatgcatctgcggcccatttcccagaacctccagaggcagctctatgggcggggacccaggcgcaggtcacccccgaggttccatactggccaccatcccc

SEQ ID NO: 481045 - DNA, 120 bp, Artificial Sequence
  ENSG00000161265_5 (sequence is synthesized)
gagagaggaaccatcggtgttcccctgatcactggcatggccgcttctgaggccctggcccccttacccttcacccccaacagggacagatgttcctggcaggacctctcctcaaagccc

SEQ ID NO: 481046 - DNA, 120 bp, Artificial Sequence
  ENSG00000161265_6 (sequence is synthesized)
ccttcactctcctgccccatccttcccaggctcccgggctccataatgtaatctgttcagcatggagaccttcttctaccgcccctgtcttaataaagctgcgtgtttcacttcggcatc

SEQ ID NO: 481047 - DNA, 120 bp, Artificial Sequence
  ENSG00000161265_7 (sequence is synthesized)
aagccgacattcagccaggctcctcccaccggtcttcgtgccgttttcccgggaacttggtcgcgcccccatgcgtacaggctacacacggcggctgttcatctttgccagtcccttcca

SEQ ID NO: 481048 - DNA, 120 bp, Artificial Sequence
  ENSG00000161265_8 (sequence is synthesized)
tcccgctgttcatccttgccagtcccctccatcccttttctggtttcttaggggcaaaggatcgccgatgcactcatgatgcttaggctggggtgtaaggttccacccccaaccttcatg

SEQ ID NO: 481049 - DNA, 120 bp, Artificial Sequence
  ENSG00000161265_9 (sequence is synthesized)
cctcactctctgttcatgcagccctgccctctgagctcaggccccgccccttttaaattctgtgcagaccatagtgctgctcaacctgtaccggaatccacagaacacagcccaaactgc

SEQ ID NO: 481050 - DNA, 120 bp, Artificial Sequence
  ENSG00000161265_10 (sequence is synthesized)
agacggatcacactgtgagtaagggaccaggcctgggggcaaggtgaacagcccccagtaggctacactctgattccaccctgcccgcccccaccccaggtcatgtgagtgacgtggagg

SEQ ID NO: 481051 - DNA, 120 bp, Artificial Sequence
  ENSG00000161265_11 (sequence is synthesized)
ggcagatggggtttcttgtgggagctcagctgagttcctccccgtcttccacaggaggtgttcacagaactgcaggagaagtatggggagattgaagagatgaatgtgtgcgacaacctt

SEQ ID NO: 481052 - DNA, 120 bp, Artificial Sequence
  ENSG00000161265_12 (sequence is synthesized)
acgtctatgtcaaggtgcttgctgccccccacttagggcccagaagtggaggcgtttcaatgcctgatggtggccactgtaggctctcagcttgaatttcatcactaaatccagtccagc

SEQ ID NO: 481053 - DNA, 120 bp, Artificial Sequence
  ENSG00000161265_13 (sequence is synthesized)
cccagagcgggtagtgagtcccctgaagatctctgagttctcctgctgaccctgactgacatttcctgcagttccggagggaggaggatggagagcgggccgtggctgaactcagtaacc

SEQ ID NO: 481054 - DNA, 120 bp, Artificial Sequence
  ENSG00000161265_14 (sequence is synthesized)
caggtacctcaggaccagcctgctatgtctcctcatgtcctaaggcccctatatcctcagatgagcctaaccctaagccccagtaaccacgttcccaagaatcttttttttttttttttt

SEQ ID NO: 481055 - DNA, 66 bp, Artificial Sequence
  ENSG00000161265_15 (sequence is synthesized)
ctggtctcgaactccggacctcaggtaatccacccatctcggcctcccaaagtgtggggattacag

SEQ ID NO: 481056 - DNA, 120 bp, Artificial Sequence
  ENSG00000161265_16 (sequence is synthesized)
gattacaggcgtgaaccactgcgcccggtcattcccaagactcttataccctaagagtagttctgagctccatctggagaccagtacctaagtcccaatccccaaaccagcctgaacccc

SEQ ID NO: 481057 - DNA, 120 bp, Artificial Sequence
  ENSG00000161265_17 (sequence is synthesized)
tgaacccctaatccacgaccagcctggattgccacccctgatactggccactgagttcccctgatactggccactgaggtcgtgtcttagaactctagttatttcagcaccctcctgcct

SEQ ID NO: 481058 - DNA, 120 bp, Artificial Sequence
  ENSG00000161265_18 (sequence is synthesized)
catcccagagcagagaggcaggcctgcaggatctctgcaccactcctcagggttctaacagaactctcaacgctcctattcccaggtcacccccgaggttccatactggccaccatcccc

SEQ ID NO: 481059 - DNA, 120 bp, Artificial Sequence
  ENSG00000161265_19 (sequence is synthesized)
acaacaagccgacattcagccaggtgagacccggcacggagcctcgggggttaacggctccctggcccttccccttctggggccgtcgtcaccatgtcccgcctattccgggttcctgag

SEQ ID NO: 481060 - DNA, 120 bp, Artificial Sequence
  ENSG00000161265_20 (sequence is synthesized)
ggcagctctatgggcggggacccaggcgcaggctcccgggctccataatgtaatctgttcagcatggagaccttcttctaccgcccctgtcttaataaagctgcgtgtttcacttcggca

SEQ ID NO: 481061 - DNA, 120 bp, Artificial Sequence
  ENSG00000161265_21 (sequence is synthesized)
ggacaagtgagaacgggcgctgggagtggactctcggggggtcggggccggggtactggggtcctgggtggtggggcggtgtttctggggtgcccagcttccccggccctcggttcacct

SEQ ID NO: 481062 - DNA, 120 bp, Artificial Sequence
  ENSG00000161265_22 (sequence is synthesized)
agcaacggaagtgacgtaagagcagccagacctggagggcttgggtaaaaatggctgaatatttagcttcgatattcgggactgagaaggacaaatcggggtctgccggcacggggaccg

SEQ ID NO: 481063 - DNA, 120 bp, Artificial Sequence
  ENSG00000161265_23 (sequence is synthesized)
tggccagcctggtctcgaactccggacctcaggctcccgggctccataatgtaatctgttcagcatggagaccttcttctaccgcccctgtcttaataaagctgcgtgtttcacttcggc

SEQ ID NO: 481064 - DNA, 120 bp, Artificial Sequence
  ENSG00000161267_0 (sequence is synthesized)
attgaaagaatacacagaaagcctggaaaaggtttccaggggtgtcaatacgccctgtcaactgagaattaagaggatccggctggtcacttgcctggagaggatcctgcatgctgatag

SEQ ID NO: 481065 - DNA, 120 bp, Artificial Sequence
  ENSG00000161267_1 (sequence is synthesized)
tgctgaggcacctgccagctaagaaccaccgggaggaactgggccattctaacacccgttgctaccatgctggccacccgcctctccagacccctgtcacggctcccaggaaaaacccta

SEQ ID NO: 481066 - DNA, 120 bp, Artificial Sequence
  ENSG00000161267_2 (sequence is synthesized)
agtgcctgtgatagagaaaatggagcaagacgcccactattgcttggttctacttcctttatcccgattggccgtcggacttatgccagtgcggcggagccggttggcagcaaagctgtc

SEQ ID NO: 481067 - DNA, 120 bp, Artificial Sequence
  ENSG00000161267_3 (sequence is synthesized)
ctggtcacaggctgtgactctggatttgggttctcattggccaagcatctgcattcaaaaggcttccttgtgtttgctggctgcttgatgaaggacaaaggccatgatggggtcaaggag

SEQ ID NO: 481068 - DNA, 120 bp, Artificial Sequence
  ENSG00000161267_4 (sequence is synthesized)
ctggacagcctaaacagtgaccgattgagaaccgtccagctcaatgtctgcagcagcgaagaggtggagaaagtggtggagattgtccgctcgagcctgaaggaccctgagaaaggcatg

SEQ ID NO: 481069 - DNA, 120 bp, Artificial Sequence
  ENSG00000161267_5 (sequence is synthesized)
tggggcctcgttaacaatgccggcatctcaacgttcggggaggtggagttcaccagcctggagacctacaagcaggtggcagaagtgaacctttggggcacagtgcggatgacgaaatcc

SEQ ID NO: 481070 - DNA, 120 bp, Artificial Sequence
  ENSG00000161267_6 (sequence is synthesized)
tttctccccctcatccgaagggccaaaggccgcgtcgtcaatatcagcagcatgctgggccgcatggccaacccggcccgctccccgtactgcatcaccaagttcggggtagaggctttc

SEQ ID NO: 481071 - DNA, 120 bp, Artificial Sequence
  ENSG00000161267_7 (sequence is synthesized)
tcggactgcctgcgctatgagatgtaccccctgggcgtgaaggtcagcgtggtggagcccggcaacttcatcgctgccaccagcctttacagccctgagagcattcaggccatcgccaag

SEQ ID NO: 481072 - DNA, 120 bp, Artificial Sequence
  ENSG00000161267_8 (sequence is synthesized)
aagatgtgggaggagctgcctgaggtcgtgcgcaaggactacggcaagaagtactttgatgaaaagatcgccaagatggagacctactgcagcagtggctccacagacacgtcccctgtc

SEQ ID NO: 481073 - DNA, 120 bp, Artificial Sequence
  ENSG00000161267_9 (sequence is synthesized)
atcgatgctgtcacacacgccctgaccgccaccaccccctacacccgctaccaccccatggactactactggtggctgcgaatgcagatcatgacccacttgcctggagccatctccgac

SEQ ID NO: 481074 - DNA, 120 bp, Artificial Sequence
  ENSG00000161267_10 (sequence is synthesized)
atgatctacatccgctgaagagtctcgctgtggcctctgtcagggatccctggtggaaggggaggggagggaggaacccatatagtcaactcttgattatccacgtgtggattatccacc

SEQ ID NO: 481075 - DNA, 120 bp, Artificial Sequence
  ENSG00000161267_11 (sequence is synthesized)
atgccaggaagacccataactggttttaacactaactagagggaatgacttctttgcatagtgagtgacttgggccttcacaaacagggtgtggagtggcaggcagaggcctctaaatct

SEQ ID NO: 481076 - DNA, 120 bp, Artificial Sequence
  ENSG00000161267_12 (sequence is synthesized)
cagggcaaacatggtgaatctatctctccggagataatttcatacagagattttaagaaaacatctttatattaaaaacagatctcatttgatccttaagccagtctcatgaatgaaaag

SEQ ID NO: 481077 - DNA, 120 bp, Artificial Sequence
  ENSG00000161267_13 (sequence is synthesized)
atgtgttcctgccacggctgtggaaatacttcacatttgcattccaggactgttttggatccatttgcccgagaatcttctgactaactctgtgtcctcatctgggcagcacacaccaag

SEQ ID NO: 481078 - DNA, 120 bp, Artificial Sequence
  ENSG00000161267_14 (sequence is synthesized)
tgcccactggtacctctgcatgtccatggtgctgtgtgactggccagccagcagccagtgactcagagctggctgtatggagggggtgggaatgtttctggagatttttgtttttccaga

SEQ ID NO: 481079 - DNA, 88 bp, Artificial Sequence
  ENSG00000161267_15 (sequence is synthesized)
agggggtgggaatgtttctggagatttttgtttttccagacacagtcttgctcagtcccctaggctggagtgcaatggcaccatctcc

SEQ ID NO: 481080 - DNA, 120 bp, Artificial Sequence
  ENSG00000161267_16 (sequence is synthesized)
agtgctgggattacaggcatgagatttttacttgagatttttccatcctcttttaggactcaggatagacttgtgtggaggtgctctctggctaaggggataagttgttactggtttggg

SEQ ID NO: 481081 - DNA, 120 bp, Artificial Sequence
  ENSG00000161267_17 (sequence is synthesized)
tctgcttggttttgccttgggtggggccggtgtcgatggggcaggcttggcacgagcagtggtgccatggcagggcactgtggcatctcccctagcagtggatttggggtccctgcttgc

SEQ ID NO: 481082 - DNA, 72 bp, Artificial Sequence
  ENSG00000161267_18 (sequence is synthesized)
tggcatctcccctagcagtggatttggggtccctgcttgcctcacgtggtgctacacacatgtacacacaca

SEQ ID NO: 481083 - DNA, 120 bp, Artificial Sequence
  ENSG00000161267_19 (sequence is synthesized)
cacacacacacacacacacacacccctgttctgcagggcttcagcgtggccttcattcccgcctcgcctcggcctcttttcaattaagaagtgatgccacttgaggcagggtctgcatga

SEQ ID NO: 481084 - DNA, 120 bp, Artificial Sequence
  ENSG00000161267_20 (sequence is synthesized)
tcacttcttgggtttcagtttgaaagctgccatccctgcgactgcccagggcctgtatgttgggaccgaagccaaacaccactgtcctccagggggctttcggcccggggcagggtcccc

SEQ ID NO: 481085 - DNA, 120 bp, Artificial Sequence
  ENSG00000161267_21 (sequence is synthesized)
agtgcccgccttcgaatcagactccgcgtttccgcctctccctgggcggacctgccgctagagggcgctcctcctccgcagccggcgccggcctccagcgccccagactcccgcgctgcc

SEQ ID NO: 481086 - DNA, 120 bp, Artificial Sequence
  ENSG00000161267_22 (sequence is synthesized)
gcccgagcctgaggtttctcacggcgttcgggattcgcgcttcggaaaccgggaacaaagaagcaagcagcacccttcagaaacagtgttctcgctctcctagcagctggcccgggcccg

SEQ ID NO: 481087 - DNA, 120 bp, Artificial Sequence
  ENSG00000161267_23 (sequence is synthesized)
gaggctggtgccaggagaaggcagaagagcccgggcagccggagtgggctacggggttcaggcagtgccaaggaagaagggcctcacaatgggcaattcagctgcctcccgggccgttgt

SEQ ID NO: 481088 - DNA, 120 bp, Artificial Sequence
  ENSG00000161267_24 (sequence is synthesized)
ccccgctgtcttcaaacaggggtcccctgtcccagctgccccaggaggagggggggaggcaggcagggccgaaaccctccagagcccagagggggacgcttggtggccgctgcagttaca

SEQ ID NO: 481089 - DNA, 120 bp, Artificial Sequence
  ENSG00000161267_25 (sequence is synthesized)
taaccataggatgcttttgtaccgtggaccttgttctagcaggatcctttcggaattgcacttttacatgttgggcgaatttgtgtccgtgctgaagtttattaaaggaaaatagatgga

SEQ ID NO: 481090 - DNA, 120 bp, Artificial Sequence
  ENSG00000161267_26 (sequence is synthesized)
cggctcggcggccccccgacagccacgccgccgtgagccccgcccagcgtagccccagcgcgcgcttcgcgtgtagaagcgtccgggtggcggaggccgcaggccgcaggagtgctggtg

SEQ ID NO: 481091 - DNA, 120 bp, Artificial Sequence
  ENSG00000161267_27 (sequence is synthesized)
tgctggtggaggggcttccagaaagaccctgcggcagcgccccccctcggctctccccgcaggagagcgggcacctgcgcggcgccgggtgaaggcgagagcctcggcgagccctctgca

SEQ ID NO: 481092 - DNA, 120 bp, Artificial Sequence
  ENSG00000161267_28 (sequence is synthesized)
gttcctactttgaggggttgcagaagcacatatttcactatggagggccgcctgcaggcctcgcgctgacaggatcttttgtgacgctgcaaatgtcctgaaccaccgggaggaactggg

SEQ ID NO: 481093 - DNA, 120 bp, Artificial Sequence
  ENSG00000161267_29 (sequence is synthesized)
ggatagagttcttggaagcctggcgtggagggagggagagcaggtagcacagttacagaaggatcttcgggatatggaaatgcggtatttgtggacactcattcatctaacacacatttg

SEQ ID NO: 481094 - DNA, 120 bp, Artificial Sequence
  ENSG00000161267_30 (sequence is synthesized)
aattgtgtaaaagagagagaaggatcagtggctatggtctcgaagatgacgtggaagtgtcagccatgacgggtggggagtggcctgctgctcctcctgggaagagaagaaggtgaagac

SEQ ID NO: 481095 - DNA, 120 bp, Artificial Sequence
  ENSG00000161267_31 (sequence is synthesized)
gaatacagactgatgctctttggatggagtcattcacaagctttgggtgtaccgaccacactatcctgatcacttgagaccatccgtgcacaaggacttaaaatccagactcctctgtgg

SEQ ID NO: 481096 - DNA, 120 bp, Artificial Sequence
  ENSG00000161267_32 (sequence is synthesized)
cagtacaaaaggacagggggttaccttggcaggttttcctagtgaaccctcatttctgtctagtgaatttaatgttctttaagaacatattttaataattttttaaaagcttaatatgtt

SEQ ID NO: 481097 - DNA, 120 bp, Artificial Sequence
  ENSG00000161267_33 (sequence is synthesized)
aattttttaaaagcttaatatgttgaataggtaatatatttacatggtacaaaatttgaatggcaggccgggcgccgtggctcatgcctgtgatcccagtactttgggaggccgaggcag

SEQ ID NO: 481098 - DNA, 120 bp, Artificial Sequence
  ENSG00000161267_34 (sequence is synthesized)
ataatttacttcatcaaaatctcctgacatgacccagaagcttcctctgcagatatcacctgtgctctcattctcttggccagaacttagtcacatggccttacctggctgcaaggaagg

SEQ ID NO: 481099 - DNA, 120 bp, Artificial Sequence
  ENSG00000161267_35 (sequence is synthesized)
ctggaaaatgtagtgagtattctgagacaatatgtacccggcctaaaatgtcaggcgttctactgctatagaagaaggatgaagggaagagtgggcattcaggacaacttgctttctctg

SEQ ID NO: 481100 - DNA, 120 bp, Artificial Sequence
  ENSG00000161267_36 (sequence is synthesized)
ctcgggtggtaaaagcagtagagaaaaataaaacaggaaaagaagataaagcatggtggacggggtgtcagattttcaagagggaggaaagatcacaccaagaagggttcttccccatct

SEQ ID NO: 481101 - DNA, 120 bp, Artificial Sequence
  ENSG00000161267_37 (sequence is synthesized)
tgcttgctagctcctcctcctgcccatcctgtgaacatcacagtgcccaggctcgctcctctctgaagtgtttctaacacatgtgataagatgctgacgtataacatgtgtcgagtgtcc

SEQ ID NO: 481102 - DNA, 120 bp, Artificial Sequence
  ENSG00000161267_38 (sequence is synthesized)
tcatgttcttccctgaggtgctaaaccacctgaacatatatgctagagacaaaaacctttctgccagaatcagctcattggctgcctcagtattataagaaatggaaatagaagaggttg

SEQ ID NO: 481103 - DNA, 120 bp, Artificial Sequence
  ENSG00000161267_39 (sequence is synthesized)
agcgactggaaagagttgttagtgtgctgatattttccctctgatggcaagtaaaatgaggtgggcttcatatgaatgccttggagagcttctggacttctccaagttcttgaactcccc

SEQ ID NO: 481104 - DNA, 120 bp, Artificial Sequence
  ENSG00000161267_40 (sequence is synthesized)
ggagagcttcttggcttaccatgtgtgccctggagtctggaggccacagagtgtgatgctaatgtccaccagaagaagtctaaaggcccgagattgagacaggagtggctcgtctgggag

SEQ ID NO: 481105 - DNA, 120 bp, Artificial Sequence
  ENSG00000161267_41 (sequence is synthesized)
cggagcacggagagctggtcgggagagggctatccttctacctgggcaggaaacagttgcctggccctgtgtggacagtggagagagctgcttggagtcaccttaagggtaaccatccag

SEQ ID NO: 481106 - DNA, 120 bp, Artificial Sequence
  ENSG00000161267_42 (sequence is synthesized)
tgagctggctgggaggatccatgtggccccagccagaagcgggtacatcactgaggccaggggctgagggagcagatgcccggctgggggaggcacgctgccctgcgtctggagtggcag

SEQ ID NO: 481107 - DNA, 120 bp, Artificial Sequence
  ENSG00000161267_43 (sequence is synthesized)
tcggaggtctccgtggcagaatctttgtagactccacagaagcaccccaagaaggaagagctggcttttgtgcacctgctctctcaggggcagcaacagcagacattagccagcctcaga

SEQ ID NO: 481108 - DNA, 120 bp, Artificial Sequence
  ENSG00000161267_44 (sequence is synthesized)
cgactacagtcttgcccctaatttgctgccccggatccaaccttggaagggtcagaagttaagaataggaggggagaggagctagaaaacagtgagaaagacaacctccaccagcaccta

SEQ ID NO: 481109 - DNA, 120 bp, Artificial Sequence
  ENSG00000161267_45 (sequence is synthesized)
gactcttcatgccaaaacaaagaggctctctgtccactgtctgagaatgagtggaaaagctatacaacttgcctgaagtttcatccagggctggaaaaaatagcttacaggtgaggttga

SEQ ID NO: 481110 - DNA, 120 bp, Artificial Sequence
  ENSG00000161267_46 (sequence is synthesized)
aagggacagtaagataaagaagtgggtttatcaataagccagttgcacacgcaccaacacagcggaactaaaagcttgtccctgagcagccagacagaggtggacagagactccagagac

SEQ ID NO: 481111 - DNA, 120 bp, Artificial Sequence
  ENSG00000161267_47 (sequence is synthesized)
ctgcagagggagcacggagaccagcagagggagcacacagacctgcagagggagcacggagacctgcagagggagcacagaaaccctgggtccagggaggtggtgtggcctgcggggcag

SEQ ID NO: 481112 - DNA, 120 bp, Artificial Sequence
  ENSG00000161267_48 (sequence is synthesized)
tcttggcctgaggacaggtagaccctgagggggacaggccaccagagtctgcagccagcaggctgagggtggttggaaagatttctctgaataactgggggcaaattggtagtttctgtc

SEQ ID NO: 481113 - DNA, 120 bp, Artificial Sequence
  ENSG00000161267_49 (sequence is synthesized)
cctattggcgtggttgtcaggagcagggtgtggaggctgcccaaaggcaggtgagggttcctggggtgggtctgtcagtgaagataggagggtagcgttgctctcctcgggagcctgaag

SEQ ID NO: 481114 - DNA, 120 bp, Artificial Sequence
  ENSG00000161267_50 (sequence is synthesized)
ccgtgggcagtgagattaatcccctagtttcctctgaaagaagactcttcactgtcaaactgccaaattaagagtttactgacttggagtcgggggtttcccctgaggactgcagggacc

SEQ ID NO: 481115 - DNA, 120 bp, Artificial Sequence
  ENSG00000161267_51 (sequence is synthesized)
ttgtcgtgatgctgtgtaggggcaccagagaggtcttgtataggggtctgagaagagctgaatgatagcaacagggttaaccaagtcccaagaggaaggacatttagatacctcttgtgc

SEQ ID NO: 481116 - DNA, 120 bp, Artificial Sequence
  ENSG00000161267_52 (sequence is synthesized)
atgtcagctagaatccacctttctgaggttcagatcatgtgagctccacgccaaggggcatttgaagggccaccaggtggaagactgcattaaagcaagacacgtgttttcctggtacct

SEQ ID NO: 481117 - DNA, 120 bp, Artificial Sequence
  ENSG00000161267_53 (sequence is synthesized)
gtgtgccgcctgtggaagagaggggtctgcaggcaccacgtcatcacaccctagacctgaagatgcattagttctttcttggtggagtcctctgtgggaatgacagcctgagctccaggc

SEQ ID NO: 481118 - DNA, 120 bp, Artificial Sequence
  ENSG00000161267_54 (sequence is synthesized)
ccatctgtcccgtgcatctcatgcctgcgtcttgtttgggaaggtcggcgcacctaggggatttcagagccaaactttagaccatcgagcctccggcctggctgctgtgtccgaaggcat

SEQ ID NO: 481119 - DNA, 120 bp, Artificial Sequence
  ENSG00000161267_55 (sequence is synthesized)
ccctggtgcctctgcagagacttagcgggccacgccacagtgccttttcaaagggccactggggaggcttcctttccatggaaaaccaggcggtgaagacgacagtccaggaacggaagc

SEQ ID NO: 481120 - DNA, 120 bp, Artificial Sequence
  ENSG00000161267_56 (sequence is synthesized)
aagcaaccagaggtggtggtggccttgaggggacactttctgagcaggcagaggttttcacacatggacagtgtaggcggtgatgaggcctgattctcagagatgtctctcaataccttt

SEQ ID NO: 481121 - DNA, 120 bp, Artificial Sequence
  ENSG00000161267_57 (sequence is synthesized)
gtctcccagcagaggaaactcagaggtgtcctgggaagacattttcccagggcacacagggcagaaaggaatatctttcataaccacttatttttttttctttttgatggagtctcactc

SEQ ID NO: 481122 - DNA, 120 bp, Artificial Sequence
  ENSG00000161267_58 (sequence is synthesized)
gtgctttggccttcacagtgtttttttgtttttttttttaaatgtgtgtaagttgccaacacttaaaagaatgaagagatttcccaattactagcttaaaaatgtaagcatctggcaacc

SEQ ID NO: 481123 - DNA, 120 bp, Artificial Sequence
  ENSG00000161267_59 (sequence is synthesized)
ctgggtttccatccccacgtggtaattcctgacatgtcctgtactccccagggcccccgcctgccccacataagtttgcaacccctgcttggagaaggaatcctgtcttgaggccttggg

SEQ ID NO: 481124 - DNA, 120 bp, Artificial Sequence
  ENSG00000161267_60 (sequence is synthesized)
ggccggctcttcatcctattcatggttgtgtctgtggcacatagcttgatgcttgataggtcatcagtgctcaggattaaaaagaaccgcatgctggtgggccaggcccatgggcagttg

SEQ ID NO: 481125 - DNA, 120 bp, Artificial Sequence
  ENSG00000161267_61 (sequence is synthesized)
ccagtatgcctgaggctttggctgggacttgaggccagctcctgccttgacaggagtcctcagggtctgcctcagggtgggaaggaaggaggtagaagcagctcttctctcctccccagg

SEQ ID NO: 481126 - DNA, 120 bp, Artificial Sequence
  ENSG00000161267_62 (sequence is synthesized)
acgggtggggaaggggggctcgcgccctacaggccgagccctgcggccgcagcggggtaagggtaggatggccgatcgcgcccagaccccagggagtctccctctcggcttttctgccgg

SEQ ID NO: 481127 - DNA, 120 bp, Artificial Sequence
  ENSG00000161267_63 (sequence is synthesized)
cgtctccagcagcatgatctggcatttattattcggaataatgtgccaggcaggaggaggccctgggttaaacacgcggccctgcagctcccaggtgaaacgactcatcgtttcctgccg

SEQ ID NO: 481128 - DNA, 120 bp, Artificial Sequence
  ENSG00000161267_64 (sequence is synthesized)
ggaagctgacccttgaaatttgtgaagctttcatattcactcaatacacatttacagagcctctacttcctgtcaggcgtcacacaataaatattcggaggagcaagaagagagtgattc

SEQ ID NO: 481129 - DNA, 120 bp, Artificial Sequence
  ENSG00000161267_65 (sequence is synthesized)
gagctccctcctgcccctgaacctgccccacgtgttcatctttgctcagaatggaaatacctgtcccagcagctccaatgtccacaactcagcagaggccgcgtcgtcaatatcagcagc

SEQ ID NO: 481130 - DNA, 120 bp, Artificial Sequence
  ENSG00000161267_66 (sequence is synthesized)
cagtatcctggttgtgatatggtaatacagttttgcaagatactacccttaggggaaatgaggtaagacctggcatctctctgtattatttcttaattgcatgtgaatctacaattattt

SEQ ID NO: 481131 - DNA, 120 bp, Artificial Sequence
  ENSG00000161267_67 (sequence is synthesized)
caaaataaaaagtatgattgaagtaactctcaggaagcttagcctactgtggattaagacatcaaaattgcagcaggctttaacaaagctatactactacaaggatagttcacacttgaa

SEQ ID NO: 481132 - DNA, 120 bp, Artificial Sequence
  ENSG00000161267_68 (sequence is synthesized)
ttagcttgaaacattacctatccatgtcatcttggaaagcagaaaatggaactttattggagtgggacactggatggccagggtttagcagagcctgcccaacaaaagtagcttcagaat

SEQ ID NO: 481133 - DNA, 120 bp, Artificial Sequence
  ENSG00000161267_69 (sequence is synthesized)
tggctttattctcaggaaggctcttcctggacagtggcaaacatagccatagcaaatactggctcactttctatcagccagcaaccctggtggaaagagggcctcttactcagttgtacc
